United States Patent Application Publication US 2014/0004565 A1 - sequence listing, part 96

SEQ ID NO: 2381499 - RNA, 19 nt, Artificial Sequence
  Description of Artificial Sequence: Synthetic oligonucleotide
acuuuugcucuagacuguc

SEQ ID NO: 2381500 - RNA, 19 nt, Artificial Sequence
  Description of Artificial Sequence: Synthetic oligonucleotide
gccuccuugugucacaagg

SEQ ID NO: 2381501 - RNA, 19 nt, Artificial Sequence
  Description of Artificial Sequence: Synthetic oligonucleotide
uggccuaaugaaccuuuca

SEQ ID NO: 2381502 - RNA, 19 nt, Artificial Sequence
  Description of Artificial Sequence: Synthetic oligonucleotide
auauaaccuugccuccuug

SEQ ID NO: 2381503 - RNA, 19 nt, Artificial Sequence
  Description of Artificial Sequence: Synthetic oligonucleotide
uggguagagggacuuccca

SEQ ID NO: 2381504 - RNA, 19 nt, Artificial Sequence
  Description of Artificial Sequence: Synthetic oligonucleotide
uggcaugaugacagccgcg

SEQ ID NO: 2381505 - RNA, 19 nt, Artificial Sequence
  Description of Artificial Sequence: Synthetic oligonucleotide
ugauuacacccagaguugu

SEQ ID NO: 2381506 - RNA, 19 nt, Artificial Sequence
  Description of Artificial Sequence: Synthetic oligonucleotide
aucaaaccagcaagacugc

SEQ ID NO: 2381507 - RNA, 19 nt, Artificial Sequence
  Description of Artificial Sequence: Synthetic oligonucleotide
uugaagcguaggcccauug

SEQ ID NO: 2381508 - RNA, 19 nt, Artificial Sequence
  Description of Artificial Sequence: Synthetic oligonucleotide
ggugcuaaaacccucuucu

SEQ ID NO: 2381509 - RNA, 19 nt, Artificial Sequence
  Description of Artificial Sequence: Synthetic oligonucleotide
uacaauggggaggaugggu

SEQ ID NO: 2381510 - RNA, 19 nt, Artificial Sequence
  Description of Artificial Sequence: Synthetic oligonucleotide
gcccaacucacucacauug

SEQ ID NO: 2381511 - RNA, 19 nt, Artificial Sequence
  Description of Artificial Sequence: Synthetic oligonucleotide
uuuguggcaugaugacagc

SEQ ID NO: 2381512 - RNA, 19 nt, Artificial Sequence
  Description of Artificial Sequence: Synthetic oligonucleotide
auuacacccagaguuguau

SEQ ID NO: 2381513 - RNA, 19 nt, Artificial Sequence
  Description of Artificial Sequence: Synthetic oligonucleotide
ucauguuggaaaguacuuu

SEQ ID NO: 2381514 - RNA, 19 nt, Artificial Sequence
  Description of Artificial Sequence: Synthetic oligonucleotide
uccgcgaccucccgggugc

SEQ ID NO: 2381515 - RNA, 19 nt, Artificial Sequence
  Description of Artificial Sequence: Synthetic oligonucleotide
aacguucaugggccucccg

SEQ ID NO: 2381516 - RNA, 19 nt, Artificial Sequence
  Description of Artificial Sequence: Synthetic oligonucleotide
cccagaguuguauacaaug

SEQ ID NO: 2381517 - RNA, 19 nt, Artificial Sequence
  Description of Artificial Sequence: Synthetic oligonucleotide
ugggcacgaacuuugggua

SEQ ID NO: 2381518 - RNA, 19 nt, Artificial Sequence
  Description of Artificial Sequence: Synthetic oligonucleotide
guggcaugaugacagccgc

SEQ ID NO: 2381519 - RNA, 19 nt, Artificial Sequence
  Description of Artificial Sequence: Synthetic oligonucleotide
agcagauaggcagggacug

SEQ ID NO: 2381520 - RNA, 19 nt, Artificial Sequence
  Description of Artificial Sequence: Synthetic oligonucleotide
auagcguuuacgguguaau

SEQ ID NO: 2381521 - RNA, 19 nt, Artificial Sequence
  Description of Artificial Sequence: Synthetic oligonucleotide
uuugaacguucaugggccu

SEQ ID NO: 2381522 - RNA, 19 nt, Artificial Sequence
  Description of Artificial Sequence: Synthetic oligonucleotide
uacccauagcguuuacggu

SEQ ID NO: 2381523 - RNA, 19 nt, Artificial Sequence
  Description of Artificial Sequence: Synthetic oligonucleotide
caaacgauacccauagcgu

SEQ ID NO: 2381524 - RNA, 19 nt, Artificial Sequence
  Description of Artificial Sequence: Synthetic oligonucleotide
cacaaggcccaacucacuc

SEQ ID NO: 2381525 - RNA, 19 nt, Artificial Sequence
  Description of Artificial Sequence: Synthetic oligonucleotide
cacuaucaaaccagcaaga

SEQ ID NO: 2381526 - RNA, 19 nt, Artificial Sequence
  Description of Artificial Sequence: Synthetic oligonucleotide
ugguaacuugggcauacuu

SEQ ID NO: 2381527 - RNA, 19 nt, Artificial Sequence
  Description of Artificial Sequence: Synthetic oligonucleotide
auaauccaaacgauaccca

SEQ ID NO: 2381528 - RNA, 19 nt, Artificial Sequence
  Description of Artificial Sequence: Synthetic oligonucleotide
guuuaugguagagcuuagc

SEQ ID NO: 2381529 - RNA, 19 nt, Artificial Sequence
  Description of Artificial Sequence: Synthetic oligonucleotide
agacuuuaguaaccauccu

SEQ ID NO: 2381530 - RNA, 19 nt, Artificial Sequence
  Description of Artificial Sequence: Synthetic oligonucleotide
gugccuuuggugauuacac

SEQ ID NO: 2381531 - RNA, 19 nt, Artificial Sequence
  Description of Artificial Sequence: Synthetic oligonucleotide
uucaggguuguugguaacu

SEQ ID NO: 2381532 - RNA, 19 nt, Artificial Sequence
  Description of Artificial Sequence: Synthetic oligonucleotide
guagcuuucagcucaggau

SEQ ID NO: 2381533 - RNA, 19 nt, Artificial Sequence
  Description of Artificial Sequence: Synthetic oligonucleotide
ggcaugaugacagccgcgg

SEQ ID NO: 2381534 - RNA, 19 nt, Artificial Sequence
  Description of Artificial Sequence: Synthetic oligonucleotide
gcauacuuuccccauauaa

SEQ ID NO: 2381535 - RNA, 19 nt, Artificial Sequence
  Description of Artificial Sequence: Synthetic oligonucleotide
aacgauacccauagcguuu

SEQ ID NO: 2381536 - RNA, 19 nt, Artificial Sequence
  Description of Artificial Sequence: Synthetic oligonucleotide
cuuguaaaaccaucaccaa

SEQ ID NO: 2381537 - RNA, 19 nt, Artificial Sequence
  Description of Artificial Sequence: Synthetic oligonucleotide
ucaaaccagcaagacugca

SEQ ID NO: 2381538 - RNA, 19 nt, Artificial Sequence
  Description of Artificial Sequence: Synthetic oligonucleotide
acgguguaauucaauauau

SEQ ID NO: 2381539 - RNA, 19 nt, Artificial Sequence
  Description of Artificial Sequence: Synthetic oligonucleotide
uucaugggccucccgacuu

SEQ ID NO: 2381540 - RNA, 19 nt, Artificial Sequence
  Description of Artificial Sequence: Synthetic oligonucleotide
uccaaacgauacccauagc

SEQ ID NO: 2381541 - RNA, 19 nt, Artificial Sequence
  Description of Artificial Sequence: Synthetic oligonucleotide
ugcucuagacugucccucu

SEQ ID NO: 2381542 - RNA, 19 nt, Artificial Sequence
  Description of Artificial Sequence: Synthetic oligonucleotide
auggcgcuguuuaugguag

SEQ ID NO: 2381543 - RNA, 19 nt, Artificial Sequence
  Description of Artificial Sequence: Synthetic oligonucleotide
auguuggaaaguacuuuug

SEQ ID NO: 2381544 - RNA, 19 nt, Artificial Sequence
  Description of Artificial Sequence: Synthetic oligonucleotide
gugcuaaaacccucuucug

SEQ ID NO: 2381545 - RNA, 19 nt, Artificial Sequence
  Description of Artificial Sequence: Synthetic oligonucleotide
uccccgccuucucuuuucg

SEQ ID NO: 2381546 - RNA, 19 nt, Artificial Sequence
  Description of Artificial Sequence: Synthetic oligonucleotide
uuuaugcacccaucauuuu

SEQ ID NO: 2381547 - RNA, 19 nt, Artificial Sequence
  Description of Artificial Sequence: Synthetic oligonucleotide
uuacacccagaguuguaua

SEQ ID NO: 2381548 - RNA, 19 nt, Artificial Sequence
  Description of Artificial Sequence: Synthetic oligonucleotide
cuaucaaaccagcaagacu

SEQ ID NO: 2381549 - RNA, 19 nt, Artificial Sequence
  Description of Artificial Sequence: Synthetic oligonucleotide
uugggcauacuuuccccau

SEQ ID NO: 2381550 - RNA, 19 nt, Artificial Sequence
  Description of Artificial Sequence: Synthetic oligonucleotide
uuguggggucuugucauca

SEQ ID NO: 2381551 - RNA, 19 nt, Artificial Sequence
  Description of Artificial Sequence: Synthetic oligonucleotide
uuggccuaaugaaccuuuc

SEQ ID NO: 2381552 - RNA, 19 nt, Artificial Sequence
  Description of Artificial Sequence: Synthetic oligonucleotide
ugccuucuuugaacguuca

SEQ ID NO: 2381553 - RNA, 19 nt, Artificial Sequence
  Description of Artificial Sequence: Synthetic oligonucleotide
caggguuguugguaacuug

SEQ ID NO: 2381554 - RNA, 19 nt, Artificial Sequence
  Description of Artificial Sequence: Synthetic oligonucleotide
gcguuuacgguguaauuca

SEQ ID NO: 2381555 - RNA, 19 nt, Artificial Sequence
  Description of Artificial Sequence: Synthetic oligonucleotide
cucuuuucguuucugcuua

SEQ ID NO: 2381556 - RNA, 19 nt, Artificial Sequence
  Description of Artificial Sequence: Synthetic oligonucleotide
uagagggacuucccauuuc

SEQ ID NO: 2381557 - RNA, 19 nt, Artificial Sequence
  Description of Artificial Sequence: Synthetic oligonucleotide
cucagcauggcgcuguuua

SEQ ID NO: 2381558 - RNA, 19 nt, Artificial Sequence
  Description of Artificial Sequence: Synthetic oligonucleotide
gacuucaauaaccgugccu

SEQ ID NO: 2381559 - RNA, 19 nt, Artificial Sequence
  Description of Artificial Sequence: Synthetic oligonucleotide
ucccgggugcuaaaacccu

SEQ ID NO: 2381560 - RNA, 19 nt, Artificial Sequence
  Description of Artificial Sequence: Synthetic oligonucleotide
gcagacuuuaguaaccauc

SEQ ID NO: 2381561 - RNA, 19 nt, Artificial Sequence
  Description of Artificial Sequence: Synthetic oligonucleotide
cugcauuuaugcacccauc

SEQ ID NO: 2381562 - RNA, 19 nt, Artificial Sequence
  Description of Artificial Sequence: Synthetic oligonucleotide
ccaacaaagcagacuuuag

SEQ ID NO: 2381563 - RNA, 19 nt, Artificial Sequence
  Description of Artificial Sequence: Synthetic oligonucleotide
aagguagcuuucagcucag

SEQ ID NO: 2381564 - RNA, 19 nt, Artificial Sequence
  Description of Artificial Sequence: Synthetic oligonucleotide
ugggucucacugguccacg

SEQ ID NO: 2381565 - RNA, 19 nt, Artificial Sequence
  Description of Artificial Sequence: Synthetic oligonucleotide
uuuugaagcguaggcccau

SEQ ID NO: 2381566 - RNA, 19 nt, Artificial Sequence
  Description of Artificial Sequence: Synthetic oligonucleotide
caaguauuggcaggcaaaa

SEQ ID NO: 2381567 - RNA, 19 nt, Artificial Sequence
  Description of Artificial Sequence: Synthetic oligonucleotide
cauggcgcuguuuauggua

SEQ ID NO: 2381568 - RNA, 19 nt, Artificial Sequence
  Description of Artificial Sequence: Synthetic oligonucleotide
acaauggggaggauggguu

SEQ ID NO: 2381569 - RNA, 19 nt, Artificial Sequence
  Description of Artificial Sequence: Synthetic oligonucleotide
uaaccgugccuuuggugau

SEQ ID NO: 2381570 - RNA, 19 nt, Artificial Sequence
  Description of Artificial Sequence: Synthetic oligonucleotide
agcagacuuuaguaaccau

SEQ ID NO: 2381571 - RNA, 19 nt, Artificial Sequence
  Description of Artificial Sequence: Synthetic oligonucleotide
uuccgcgaccucccgggug

SEQ ID NO: 2381572 - RNA, 19 nt, Artificial Sequence
  Description of Artificial Sequence: Synthetic oligonucleotide
ucuuuucguuucugcuuaa

SEQ ID NO: 2381573 - RNA, 19 nt, Artificial Sequence
  Description of Artificial Sequence: Synthetic oligonucleotide
cccauauaaccuugccucc

SEQ ID NO: 2381574 - RNA, 19 nt, Artificial Sequence
  Description of Artificial Sequence: Synthetic oligonucleotide
gagggacuucccauuuccc

SEQ ID NO: 2381575 - RNA, 19 nt, Artificial Sequence
  Description of Artificial Sequence: Synthetic oligonucleotide
ugggcauacuuuccccaua

SEQ ID NO: 2381576 - RNA, 19 nt, Artificial Sequence
  Description of Artificial Sequence: Synthetic oligonucleotide
auuggccuaaugaaccuuu

SEQ ID NO: 2381577 - RNA, 19 nt, Artificial Sequence
  Description of Artificial Sequence: Synthetic oligonucleotide
uagcguuuacgguguaauu

SEQ ID NO: 2381578 - RNA, 19 nt, Artificial Sequence
  Description of Artificial Sequence: Synthetic oligonucleotide
ccucccgggugcuaaaacc

SEQ ID NO: 2381579 - RNA, 19 nt, Artificial Sequence
  Description of Artificial Sequence: Synthetic oligonucleotide
acagccgcggagcagccuu

SEQ ID NO: 2381580 - RNA, 19 nt, Artificial Sequence
  Description of Artificial Sequence: Synthetic oligonucleotide
ugguagagcuuagccuuca

SEQ ID NO: 2381581 - RNA, 19 nt, Artificial Sequence
  Description of Artificial Sequence: Synthetic oligonucleotide
accagcaagacugcauuua

SEQ ID NO: 2381582 - RNA, 19 nt, Artificial Sequence
  Description of Artificial Sequence: Synthetic oligonucleotide
ggacuucccauuuccccgc

SEQ ID NO: 2381583 - RNA, 19 nt, Artificial Sequence
  Description of Artificial Sequence: Synthetic oligonucleotide
ccuuccgcgaccucccggg

SEQ ID NO: 2381584 - RNA, 19 nt, Artificial Sequence
  Description of Artificial Sequence: Synthetic oligonucleotide
gacugcuccuugugggguc

SEQ ID NO: 2381585 - RNA, 19 nt, Artificial Sequence
  Description of Artificial Sequence: Synthetic oligonucleotide
uugaacguucaugggccuc

SEQ ID NO: 2381586 - RNA, 19 nt, Artificial Sequence
  Description of Artificial Sequence: Synthetic oligonucleotide
ccuugugucacaaggccca

SEQ ID NO: 2381587 - RNA, 19 nt, Artificial Sequence
  Description of Artificial Sequence: Synthetic oligonucleotide
gccuaaugaaccuuucaua

SEQ ID NO: 2381588 - RNA, 19 nt, Artificial Sequence
  Description of Artificial Sequence: Synthetic oligonucleotide
ggucucacugguccacgag

SEQ ID NO: 2381589 - RNA, 19 nt, Artificial Sequence
  Description of Artificial Sequence: Synthetic oligonucleotide
cagcauggcgcuguuuaug

SEQ ID NO: 2381590 - RNA, 19 nt, Artificial Sequence
  Description of Artificial Sequence: Synthetic oligonucleotide
cacgaacuuuggguagagg

SEQ ID NO: 2381591 - RNA, 19 nt, Artificial Sequence
  Description of Artificial Sequence: Synthetic oligonucleotide
acugguccacgagccuccc

SEQ ID NO: 2381592 - RNA, 19 nt, Artificial Sequence
  Description of Artificial Sequence: Synthetic oligonucleotide
acuuuggguagagggacuu

SEQ ID NO: 2381593 - RNA, 19 nt, Artificial Sequence
  Description of Artificial Sequence: Synthetic oligonucleotide
uguugguaacuugggcaua

SEQ ID NO: 2381594 - RNA, 19 nt, Artificial Sequence
  Description of Artificial Sequence: Synthetic oligonucleotide
gggcacgaacuuuggguag

SEQ ID NO: 2381595 - RNA, 19 nt, Artificial Sequence
  Description of Artificial Sequence: Synthetic oligonucleotide
uuuccccgccuucucuuuu

SEQ ID NO: 2381596 - RNA, 19 nt, Artificial Sequence
  Description of Artificial Sequence: Synthetic oligonucleotide
cuaaugaaccuuucauauu

SEQ ID NO: 2381597 - RNA, 19 nt, Artificial Sequence
  Description of Artificial Sequence: Synthetic oligonucleotide
caaaccagcaagacugcau

SEQ ID NO: 2381598 - RNA, 19 nt, Artificial Sequence
  Description of Artificial Sequence: Synthetic oligonucleotide
uuccccgccuucucuuuuc

SEQ ID NO: 2381599 - RNA, 19 nt, Artificial Sequence
  Description of Artificial Sequence: Synthetic oligonucleotide
caacucacucacauugacu

SEQ ID NO: 2381600 - RNA, 19 nt, Artificial Sequence
  Description of Artificial Sequence: Synthetic oligonucleotide
gaacguucaugggccuccc

SEQ ID NO: 2381601 - RNA, 19 nt, Artificial Sequence
  Description of Artificial Sequence: Synthetic oligonucleotide
ggcgcuguuuaugguagag

SEQ ID NO: 2381602 - RNA, 19 nt, Artificial Sequence
  Description of Artificial Sequence: Synthetic oligonucleotide
auuuccccgccuucucuuu

SEQ ID NO: 2381603 - RNA, 19 nt, Artificial Sequence
  Description of Artificial Sequence: Synthetic oligonucleotide
ucaugggccucccgacuuu

SEQ ID NO: 2381604 - RNA, 19 nt, Artificial Sequence
  Description of Artificial Sequence: Synthetic oligonucleotide
cauugacuucaauaaccgu

SEQ ID NO: 2381605 - RNA, 19 nt, Artificial Sequence
  Description of Artificial Sequence: Synthetic oligonucleotide
ugggccucccgacuuucuu

SEQ ID NO: 2381606 - RNA, 19 nt, Artificial Sequence
  Description of Artificial Sequence: Synthetic oligonucleotide
ggagcagccuuccgcgacc

SEQ ID NO: 2381607 - RNA, 19 nt, Artificial Sequence
  Description of Artificial Sequence: Synthetic oligonucleotide
ugccuccuugugucacaag

SEQ ID NO: 2381608 - RNA, 19 nt, Artificial Sequence
  Description of Artificial Sequence: Synthetic oligonucleotide
cuugccuccuugugucaca

SEQ ID NO: 2381609 - RNA, 19 nt, Artificial Sequence
  Description of Artificial Sequence: Synthetic oligonucleotide
ccaaguauuggcaggcaaa

SEQ ID NO: 2381610 - RNA, 19 nt, Artificial Sequence
  Description of Artificial Sequence: Synthetic oligonucleotide
gauuacacccagaguugua

SEQ ID NO: 2381611 - RNA, 19 nt, Artificial Sequence
  Description of Artificial Sequence: Synthetic oligonucleotide
uugugucacaaggcccaac

SEQ ID NO: 2381612 - RNA, 19 nt, Artificial Sequence
  Description of Artificial Sequence: Synthetic oligonucleotide
gcaggcaaaagguagcuuu

SEQ ID NO: 2381613 - RNA, 19 nt, Artificial Sequence
  Description of Artificial Sequence: Synthetic oligonucleotide
gggugcuaaaacccucuuc

SEQ ID NO: 2381614 - RNA, 19 nt, Artificial Sequence
  Description of Artificial Sequence: Synthetic oligonucleotide
ggccuaaugaaccuuucau

SEQ ID NO: 2381615 - RNA, 19 nt, Artificial Sequence
  Description of Artificial Sequence: Synthetic oligonucleotide
cuuuggguagagggacuuc

SEQ ID NO: 2381616 - RNA, 19 nt, Artificial Sequence
  Description of Artificial Sequence: Synthetic oligonucleotide
acgauacccauagcguuua

SEQ ID NO: 2381617 - RNA, 19 nt, Artificial Sequence
  Description of Artificial Sequence: Synthetic oligonucleotide
cuguucgaauaacuuucaa

SEQ ID NO: 2381618 - RNA, 19 nt, Artificial Sequence
  Description of Artificial Sequence: Synthetic oligonucleotide
ggaaaguacuuuugcucua

SEQ ID NO: 2381619 - RNA, 19 nt, Artificial Sequence
  Description of Artificial Sequence: Synthetic oligonucleotide
uggcgcuguuuaugguaga

SEQ ID NO: 2381620 - RNA, 19 nt, Artificial Sequence
  Description of Artificial Sequence: Synthetic oligonucleotide
cugcuuaaucauguuggaa

SEQ ID NO: 2381621 - RNA, 19 nt, Artificial Sequence
  Description of Artificial Sequence: Synthetic oligonucleotide
uuugaagcguaggcccauu

SEQ ID NO: 2381622 - RNA, 19 nt, Artificial Sequence
  Description of Artificial Sequence: Synthetic oligonucleotide
cagcagauaggcagggacu

SEQ ID NO: 2381623 - RNA, 19 nt, Artificial Sequence
  Description of Artificial Sequence: Synthetic oligonucleotide
agccuuccgcgaccucccg

SEQ ID NO: 2381624 - RNA, 19 nt, Artificial Sequence
  Description of Artificial Sequence: Synthetic oligonucleotide
ccuugggcacgaacuuugg

SEQ ID NO: 2381625 - RNA, 19 nt, Artificial Sequence
  Description of Artificial Sequence: Synthetic oligonucleotide
accuugccuccuuguguca

SEQ ID NO: 2381626 - RNA, 19 nt, Artificial Sequence
  Description of Artificial Sequence: Synthetic oligonucleotide
guaauucaauauauucauu

SEQ ID NO: 2381627 - RNA, 19 nt, Artificial Sequence
  Description of Artificial Sequence: Synthetic oligonucleotide
cgaacuuuggguagaggga

SEQ ID NO: 2381628 - RNA, 19 nt, Artificial Sequence
  Description of Artificial Sequence: Synthetic oligonucleotide
cuuagccuucaggccaauc

SEQ ID NO: 2381629 - RNA, 19 nt, Artificial Sequence
  Description of Artificial Sequence: Synthetic oligonucleotide
uucucagcauggcgcuguu

SEQ ID NO: 2381630 - RNA, 19 nt, Artificial Sequence
  Description of Artificial Sequence: Synthetic oligonucleotide
ggccucccgacuuucuuuc

SEQ ID NO: 2381631 - RNA, 19 nt, Artificial Sequence
  Description of Artificial Sequence: Synthetic oligonucleotide
augcaucuuaauagucuuu

SEQ ID NO: 2381632 - RNA, 19 nt, Artificial Sequence
  Description of Artificial Sequence: Synthetic oligonucleotide
ccuguucgaauaacuuuca

SEQ ID NO: 2381633 - RNA, 19 nt, Artificial Sequence
  Description of Artificial Sequence: Synthetic oligonucleotide
cuuuaguaaccauccucuu

SEQ ID NO: 2381634 - RNA, 19 nt, Artificial Sequence
  Description of Artificial Sequence: Synthetic oligonucleotide
aaccgugccuuuggugauu

SEQ ID NO: 2381635 - RNA, 19 nt, Artificial Sequence
  Description of Artificial Sequence: Synthetic oligonucleotide
cuuucagcucaggaugugu

SEQ ID NO: 2381636 - RNA, 19 nt, Artificial Sequence
  Description of Artificial Sequence: Synthetic oligonucleotide
cauagcguuuacgguguaa

SEQ ID NO: 2381637 - RNA, 19 nt, Artificial Sequence
  Description of Artificial Sequence: Synthetic oligonucleotide
gcgcuguuuaugguagagc

SEQ ID NO: 2381638 - RNA, 19 nt, Artificial Sequence
  Description of Artificial Sequence: Synthetic oligonucleotide
agcuuagccuucaggccaa

SEQ ID NO: 2381639 - RNA, 19 nt, Artificial Sequence
  Description of Artificial Sequence: Synthetic oligonucleotide
caauaaccgugccuuuggu

SEQ ID NO: 2381640 - RNA, 19 nt, Artificial Sequence
  Description of Artificial Sequence: Synthetic oligonucleotide
caugggccucccgacuuuc

SEQ ID NO: 2381641 - RNA, 19 nt, Artificial Sequence
  Description of Artificial Sequence: Synthetic oligonucleotide
cgcuguuuaugguagagcu

SEQ ID NO: 2381642 - RNA, 19 nt, Artificial Sequence
  Description of Artificial Sequence: Synthetic oligonucleotide
aacccucuucugggucuca

SEQ ID NO: 2381643 - RNA, 19 nt, Artificial Sequence
  Description of Artificial Sequence: Synthetic oligonucleotide
acccagaguuguauacaau

SEQ ID NO: 2381644 - RNA, 19 nt, Artificial Sequence
  Description of Artificial Sequence: Synthetic oligonucleotide
gcacgaacuuuggguagag

SEQ ID NO: 2381645 - RNA, 19 nt, Artificial Sequence
  Description of Artificial Sequence: Synthetic oligonucleotide
ggcacgaacuuuggguaga

SEQ ID NO: 2381646 - RNA, 19 nt, Artificial Sequence
  Description of Artificial Sequence: Synthetic oligonucleotide
gcagauaggcagggacugc

SEQ ID NO: 2381647 - RNA, 19 nt, Artificial Sequence
  Description of Artificial Sequence: Synthetic oligonucleotide
cacccaucauuuucagggu

SEQ ID NO: 2381648 - RNA, 19 nt, Artificial Sequence
  Description of Artificial Sequence: Synthetic oligonucleotide
gccuuccgcgaccucccgg

SEQ ID NO: 2381649 - RNA, 19 nt, Artificial Sequence
  Description of Artificial Sequence: Synthetic oligonucleotide
accgugccuuuggugauua

SEQ ID NO: 2381650 - RNA, 19 nt, Artificial Sequence
  Description of Artificial Sequence: Synthetic oligonucleotide
cauuuccccgccuucucuu

SEQ ID NO: 2381651 - RNA, 19 nt, Artificial Sequence
  Description of Artificial Sequence: Synthetic oligonucleotide
ggguagagggacuucccau

SEQ ID NO: 2381652 - RNA, 19 nt, Artificial Sequence
  Description of Artificial Sequence: Synthetic oligonucleotide
cccaacucacucacauuga

SEQ ID NO: 2381653 - RNA, 19 nt, Artificial Sequence
  Description of Artificial Sequence: Synthetic oligonucleotide
cuucaauaaccgugccuuu

SEQ ID NO: 2381654 - RNA, 19 nt, Artificial Sequence
  Description of Artificial Sequence: Synthetic oligonucleotide
gcucuagacugucccucuc

SEQ ID NO: 2381655 - RNA, 19 nt, Artificial Sequence
  Description of Artificial Sequence: Synthetic oligonucleotide
cccaaguauuggcaggcaa

SEQ ID NO: 2381656 - RNA, 19 nt, Artificial Sequence
  Description of Artificial Sequence: Synthetic oligonucleotide
cccgggugcuaaaacccuc

SEQ ID NO: 2381657 - RNA, 19 nt, Artificial Sequence
  Description of Artificial Sequence: Synthetic oligonucleotide
cgugccuuuggugauuaca

SEQ ID NO: 2381658 - RNA, 19 nt, Artificial Sequence
  Description of Artificial Sequence: Synthetic oligonucleotide
cuuuucguuucugcuuaau

SEQ ID NO: 2381659 - RNA, 19 nt, Artificial Sequence
  Description of Artificial Sequence: Synthetic oligonucleotide
cucacugguccacgagccu

SEQ ID NO: 2381660 - RNA, 19 nt, Artificial Sequence
  Description of Artificial Sequence: Synthetic oligonucleotide
cagccgcggagcagccuuc

SEQ ID NO: 2381661 - RNA, 19 nt, Artificial Sequence
  Description of Artificial Sequence: Synthetic oligonucleotide
guggggucuugucaucauu

SEQ ID NO: 2381662 - RNA, 19 nt, Artificial Sequence
  Description of Artificial Sequence: Synthetic oligonucleotide
ccauuggccuaaugaaccu

SEQ ID NO: 2381663 - RNA, 19 nt, Artificial Sequence
  Description of Artificial Sequence: Synthetic oligonucleotide
cauuggccuaaugaaccuu

SEQ ID NO: 2381664 - RNA, 19 nt, Artificial Sequence
  Description of Artificial Sequence: Synthetic oligonucleotide
cggagcagccuuccgcgac

SEQ ID NO: 2381665 - RNA, 19 nt, Artificial Sequence
  Description of Artificial Sequence: Synthetic oligonucleotide
cguuuacgguguaauucaa

SEQ ID NO: 2381666 - RNA, 19 nt, Artificial Sequence
  Description of Artificial Sequence: Synthetic oligonucleotide
ggacugcuccuuguggggu

SEQ ID NO: 2381667 - RNA, 19 nt, Artificial Sequence
  Description of Artificial Sequence: Synthetic oligonucleotide
cacucacauugacuucaau

SEQ ID NO: 2381668 - RNA, 19 nt, Artificial Sequence
  Description of Artificial Sequence: Synthetic oligonucleotide
gcguaggcccauuggccua

SEQ ID NO: 2381669 - RNA, 19 nt, Artificial Sequence
  Description of Artificial Sequence: Synthetic oligonucleotide
ccaucauuuucaggguugu

SEQ ID NO: 2381670 - RNA, 19 nt, Artificial Sequence
  Description of Artificial Sequence: Synthetic oligonucleotide
ccgggugcuaaaacccucu

SEQ ID NO: 2381671 - RNA, 19 nt, Artificial Sequence
  Description of Artificial Sequence: Synthetic oligonucleotide
gcgaccucccgggugcuaa

SEQ ID NO: 2381672 - RNA, 19 nt, Artificial Sequence
  Description of Artificial Sequence: Synthetic oligonucleotide
gacagccgcggagcagccu

SEQ ID NO: 2381673 - RNA, 19 nt, Artificial Sequence
  Description of Artificial Sequence: Synthetic oligonucleotide
gccuucuuugaacguucau

SEQ ID NO: 2381674 - RNA, 19 nt, Artificial Sequence
  Description of Artificial Sequence: Synthetic oligonucleotide
caucauuuucaggguuguu

SEQ ID NO: 2381675 - RNA, 19 nt, Artificial Sequence
  Description of Artificial Sequence: Synthetic oligonucleotide
cccgccuucucuuuucguu

SEQ ID NO: 2381676 - RNA, 19 nt, Artificial Sequence
  Description of Artificial Sequence: Synthetic oligonucleotide
cgauacccauagcguuuac

SEQ ID NO: 2381677 - RNA, 19 nt, Artificial Sequence
  Description of Artificial Sequence: Synthetic oligonucleotide
cuuccgcgaccucccgggu

SEQ ID NO: 2381678 - RNA, 19 nt, Artificial Sequence
  Description of Artificial Sequence: Synthetic oligonucleotide
cugguccacgagccucccu

SEQ ID NO: 2381679 - RNA, 19 nt, Artificial Sequence
  Description of Artificial Sequence: Synthetic oligonucleotide
cgguguaauucaauauauu

SEQ ID NO: 2381680 - RNA, 19 nt, Artificial Sequence
  Description of Artificial Sequence: Synthetic oligonucleotide
ccgugccuuuggugauuac

SEQ ID NO: 2381681 - RNA, 19 nt, Artificial Sequence
  Description of Artificial Sequence: Synthetic oligonucleotide
ccgccuucucuuuucguuu

SEQ ID NO: 2381682 - RNA, 19 nt, Artificial Sequence
  Description of Artificial Sequence: Synthetic oligonucleotide
ccccaaguauuggcaggca

SEQ ID NO: 2381683 - RNA, 19 nt, Artificial Sequence
  Description of Artificial Sequence: Synthetic oligonucleotide
gccucccgacuuucuuucu

SEQ ID NO: 2381684 - RNA, 19 nt, Artificial Sequence
  Description of Artificial Sequence: Synthetic oligonucleotide
ccucccgacuuucuuucuu

SEQ ID NO: 2381685 - RNA, 19 nt, Artificial Sequence
  Description of Artificial Sequence: Synthetic oligonucleotide
ccauagcguuuacggugua

SEQ ID NO: 2381686 - RNA, 19 nt, Artificial Sequence
  Description of Artificial Sequence: Synthetic oligonucleotide
ccccgccuucucuuuucgu

SEQ ID NO: 2381687 - RNA, 19 nt, Artificial Sequence
  Description of Artificial Sequence: Synthetic oligonucleotide
cgaccucccgggugcuaaa

SEQ ID NO: 2381688 - RNA, 19 nt, Artificial Sequence
  Description of Artificial Sequence: Synthetic oligonucleotide
gcuuagccuucaggccaau

SEQ ID NO: 2381689 - RNA, 19 nt, Artificial Sequence
  Description of Artificial Sequence: Synthetic oligonucleotide
cgggugcuaaaacccucuu

SEQ ID NO: 2381690 - RNA, 19 nt, Artificial Sequence
  Description of Artificial Sequence: Synthetic oligonucleotide
cgcgaccucccgggugcua

SEQ ID NO: 2381691 - RNA, 19 nt, Artificial Sequence
  Description of Artificial Sequence: Synthetic oligonucleotide
ccgcgaccucccgggugcu

SEQ ID NO: 2381692 - RNA, 19 nt, Artificial Sequence
  Description of Artificial Sequence: Synthetic oligonucleotide
aauaugaucuugcucaugg

SEQ ID NO: 2381693 - RNA, 19 nt, Artificial Sequence
  Description of Artificial Sequence: Synthetic oligonucleotide
uguauugugacuuuccuag

SEQ ID NO: 2381694 - RNA, 19 nt, Artificial Sequence
  Description of Artificial Sequence: Synthetic oligonucleotide
aauugucagugguugaagc

SEQ ID NO: 2381695 - RNA, 19 nt, Artificial Sequence
  Description of Artificial Sequence: Synthetic oligonucleotide
agauuuuccauucugguag

SEQ ID NO: 2381696 - RNA, 19 nt, Artificial Sequence
  Description of Artificial Sequence: Synthetic oligonucleotide
gacacuuucggacugacag

SEQ ID NO: 2381697 - RNA, 19 nt, Artificial Sequence
  Description of Artificial Sequence: Synthetic oligonucleotide
ugugcaguaauauucacca

SEQ ID NO: 2381698 - RNA, 19 nt, Artificial Sequence
  Description of Artificial Sequence: Synthetic oligonucleotide
aauguugauauuuuacaga

SEQ ID NO: 2381699 - RNA, 19 nt, Artificial Sequence
  Description of Artificial Sequence: Synthetic oligonucleotide
agaaugcccauucugaaac

SEQ ID NO: 2381700 - RNA, 19 nt, Artificial Sequence
  Description of Artificial Sequence: Synthetic oligonucleotide
ucugcaagagcaaacagca

SEQ ID NO: 2381701 - RNA, 19 nt, Artificial Sequence
  Description of Artificial Sequence: Synthetic oligonucleotide
uucugguagaauaugaucu

SEQ ID NO: 2381702 - RNA, 19 nt, Artificial Sequence
  Description of Artificial Sequence: Synthetic oligonucleotide
cuguacauagaaauaaagg

SEQ ID NO: 2381703 - RNA, 19 nt, Artificial Sequence
  Description of Artificial Sequence: Synthetic oligonucleotide
gaauguugauauuuuacag

SEQ ID NO: 2381704 - RNA, 19 nt, Artificial Sequence
  Description of Artificial Sequence: Synthetic oligonucleotide
gaaccuuggacagugaugg

SEQ ID NO: 2381705 - RNA, 19 nt, Artificial Sequence
  Description of Artificial Sequence: Synthetic oligonucleotide
aagguuucucuguacauag

SEQ ID NO: 2381706 - RNA, 19 nt, Artificial Sequence
  Description of Artificial Sequence: Synthetic oligonucleotide
aaaguagagagaugacggg

SEQ ID NO: 2381707 - RNA, 19 nt, Artificial Sequence
  Description of Artificial Sequence: Synthetic oligonucleotide
ugcaagagcaaacagcagc

SEQ ID NO: 2381708 - RNA, 19 nt, Artificial Sequence
  Description of Artificial Sequence: Synthetic oligonucleotide
guaauauucaccacugugg

SEQ ID NO: 2381709 - RNA, 19 nt, Artificial Sequence
  Description of Artificial Sequence: Synthetic oligonucleotide
agaaauaaaggcccguguc

SEQ ID NO: 2381710 - RNA, 19 nt, Artificial Sequence
  Description of Artificial Sequence: Synthetic oligonucleotide
aaugucauuuguccugagg

SEQ ID NO: 2381711 - RNA, 19 nt, Artificial Sequence
  Description of Artificial Sequence: Synthetic oligonucleotide
agaauguugauauuuuaca

SEQ ID NO: 2381712 - RNA, 19 nt, Artificial Sequence
  Description of Artificial Sequence: Synthetic oligonucleotide
ucaaguuucaccacagccu

SEQ ID NO: 2381713 - RNA, 19 nt, Artificial Sequence
  Description of Artificial Sequence: Synthetic oligonucleotide
uuggagauggagaagcugc

SEQ ID NO: 2381714 - RNA, 19 nt, Artificial Sequence
  Description of Artificial Sequence: Synthetic oligonucleotide
gaaauaaaggcccgugucc

SEQ ID NO: 2381715 - RNA, 19 nt, Artificial Sequence
  Description of Artificial Sequence: Synthetic oligonucleotide
aacuugauggucucccuuc

SEQ ID NO: 2381716 - RNA, 19 nt, Artificial Sequence
  Description of Artificial Sequence: Synthetic oligonucleotide
gacgcaaugucauuugucc

SEQ ID NO: 2381717 - RNA, 19 nt, Artificial Sequence
  Description of Artificial Sequence: Synthetic oligonucleotide
auucugguagaauaugauc

SEQ ID NO: 2381718 - RNA, 19 nt, Artificial Sequence
  Description of Artificial Sequence: Synthetic oligonucleotide
ucauucaagagcucgguca

SEQ ID NO: 2381719 - RNA, 19 nt, Artificial Sequence
  Description of Artificial Sequence: Synthetic oligonucleotide
acagcagcaaaauugucag

SEQ ID NO: 2381720 - RNA, 19 nt, Artificial Sequence
  Description of Artificial Sequence: Synthetic oligonucleotide
ugauuugcuuuggagaugg

SEQ ID NO: 2381721 - RNA, 19 nt, Artificial Sequence
  Description of Artificial Sequence: Synthetic oligonucleotide
ucuccaaagucauucaaga

SEQ ID NO: 2381722 - RNA, 19 nt, Artificial Sequence
  Description of Artificial Sequence: Synthetic oligonucleotide
gaaccugacacuuucggac

SEQ ID NO: 2381723 - RNA, 19 nt, Artificial Sequence
  Description of Artificial Sequence: Synthetic oligonucleotide
ucggaaaucacucccagau

SEQ ID NO: 2381724 - RNA, 19 nt, Artificial Sequence
  Description of Artificial Sequence: Synthetic oligonucleotide
uuggcuuccagaaugccca

SEQ ID NO: 2381725 - RNA, 19 nt, Artificial Sequence
  Description of Artificial Sequence: Synthetic oligonucleotide
auguugauauuuuacagau

SEQ ID NO: 2381726 - RNA, 19 nt, Artificial Sequence
  Description of Artificial Sequence: Synthetic oligonucleotide
ucauuuguccugaggaacc

SEQ ID NO: 2381727 - RNA, 19 nt, Artificial Sequence
  Description of Artificial Sequence: Synthetic oligonucleotide
cucaaguuucaccacagcc

SEQ ID NO: 2381728 - RNA, 19 nt, Artificial Sequence
  Description of Artificial Sequence: Synthetic oligonucleotide
uuacagauuuuccauucug

SEQ ID NO: 2381729 - RNA, 19 nt, Artificial Sequence
  Description of Artificial Sequence: Synthetic oligonucleotide
aauaaaggcccguguccac

SEQ ID NO: 2381730 - RNA, 19 nt, Artificial Sequence
  Description of Artificial Sequence: Synthetic oligonucleotide
uuuccauucugguagaaua

SEQ ID NO: 2381731 - RNA, 19 nt, Artificial Sequence
  Description of Artificial Sequence: Synthetic oligonucleotide
uguaguugcugaaccuugg

SEQ ID NO: 2381732 - RNA, 19 nt, Artificial Sequence
  Description of Artificial Sequence: Synthetic oligonucleotide
cagaauguugauauuuuac

SEQ ID NO: 2381733 - RNA, 19 nt, Artificial Sequence
  Description of Artificial Sequence: Synthetic oligonucleotide
agaugacggguguaguugc

SEQ ID NO: 2381734 - RNA, 19 nt, Artificial Sequence
  Description of Artificial Sequence: Synthetic oligonucleotide
uucugaaacaucugugucu

SEQ ID NO: 2381735 - RNA, 19 nt, Artificial Sequence
  Description of Artificial Sequence: Synthetic oligonucleotide
guugcugaaccuuggacag

SEQ ID NO: 2381736 - RNA, 19 nt, Artificial Sequence
  Description of Artificial Sequence: Synthetic oligonucleotide
uugugacuuuccuagaugu

SEQ ID NO: 2381737 - RNA, 19 nt, Artificial Sequence
  Description of Artificial Sequence: Synthetic oligonucleotide
uuuucuccacuccuccacg

SEQ ID NO: 2381738 - RNA, 19 nt, Artificial Sequence
  Description of Artificial Sequence: Synthetic oligonucleotide
aaauaaaggcccgugucca

SEQ ID NO: 2381739 - RNA, 19 nt, Artificial Sequence
  Description of Artificial Sequence: Synthetic oligonucleotide
uuugauguguauugugacu

SEQ ID NO: 2381740 - RNA, 19 nt, Artificial Sequence
  Description of Artificial Sequence: Synthetic oligonucleotide
aaacaggaggcacaucacu

SEQ ID NO: 2381741 - RNA, 19 nt, Artificial Sequence
  Description of Artificial Sequence: Synthetic oligonucleotide
auaugaucuugcucauggc

SEQ ID NO: 2381742 - RNA, 19 nt, Artificial Sequence
  Description of Artificial Sequence: Synthetic oligonucleotide
caucacuaggcagaaagcg

SEQ ID NO: 2381743 - RNA, 19 nt, Artificial Sequence
  Description of Artificial Sequence: Synthetic oligonucleotide
uguguauugugacuuuccu

SEQ ID NO: 2381744 - RNA, 19 nt, Artificial Sequence
  Description of Artificial Sequence: Synthetic oligonucleotide
ugaaccuuggacagugaug

SEQ ID NO: 2381745 - RNA, 19 nt, Artificial Sequence
  Description of Artificial Sequence: Synthetic oligonucleotide
aauauucaccacuguggcu

SEQ ID NO: 2381746 - RNA, 19 nt, Artificial Sequence
  Description of Artificial Sequence: Synthetic oligonucleotide
uuuguccugaggaaccuga

SEQ ID NO: 2381747 - RNA, 19 nt, Artificial Sequence
  Description of Artificial Sequence: Synthetic oligonucleotide
uagaaauaaaggcccgugu

SEQ ID NO: 2381748 - RNA, 19 nt, Artificial Sequence
  Description of Artificial Sequence: Synthetic oligonucleotide
cuuugauguguauugugac

SEQ ID NO: 2381749 - RNA, 19 nt, Artificial Sequence
  Description of Artificial Sequence: Synthetic oligonucleotide
guugauauuuuacagauuu

SEQ ID NO: 2381750 - RNA, 19 nt, Artificial Sequence
  Description of Artificial Sequence: Synthetic oligonucleotide
ugaucuugcucauggcuag

SEQ ID NO: 2381751 - RNA, 19 nt, Artificial Sequence
  Description of Artificial Sequence: Synthetic oligonucleotide
aaauugucagugguugaag

SEQ ID NO: 2381752 - RNA, 19 nt, Artificial Sequence
  Description of Artificial Sequence: Synthetic oligonucleotide
aaaauugucagugguugaa

SEQ ID NO: 2381753 - RNA, 19 nt, Artificial Sequence
  Description of Artificial Sequence: Synthetic oligonucleotide
ucuguggcaccucaacuug

SEQ ID NO: 2381754 - RNA, 19 nt, Artificial Sequence
  Description of Artificial Sequence: Synthetic oligonucleotide
auugugacuuuccuagaug

SEQ ID NO: 2381755 - RNA, 19 nt, Artificial Sequence
  Description of Artificial Sequence: Synthetic oligonucleotide
uaugacgcaaugucauuug

SEQ ID NO: 2381756 - RNA, 19 nt, Artificial Sequence
  Description of Artificial Sequence: Synthetic oligonucleotide
aguuucaccacagccuucg

SEQ ID NO: 2381757 - RNA, 19 nt, Artificial Sequence
  Description of Artificial Sequence: Synthetic oligonucleotide
gcugaaaagaugcugcugc

SEQ ID NO: 2381758 - RNA, 19 nt, Artificial Sequence
  Description of Artificial Sequence: Synthetic oligonucleotide
caggcuuugauguguauug

SEQ ID NO: 2381759 - RNA, 19 nt, Artificial Sequence
  Description of Artificial Sequence: Synthetic oligonucleotide
uuccagaaugcccauucug

SEQ ID NO: 2381760 - RNA, 19 nt, Artificial Sequence
  Description of Artificial Sequence: Synthetic oligonucleotide
uauugugacuuuccuagau

SEQ ID NO: 2381761 - RNA, 19 nt, Artificial Sequence
  Description of Artificial Sequence: Synthetic oligonucleotide
aagagcaaacagcagcaaa

SEQ ID NO: 2381762 - RNA, 19 nt, Artificial Sequence
  Description of Artificial Sequence: Synthetic oligonucleotide
aagucauucaagagcucgg

SEQ ID NO: 2381763 - RNA, 19 nt, Artificial Sequence
  Description of Artificial Sequence: Synthetic oligonucleotide
uucaagagcucggucagag

SEQ ID NO: 2381764 - RNA, 19 nt, Artificial Sequence
  Description of Artificial Sequence: Synthetic oligonucleotide
auggucacaggcuuugaug

SEQ ID NO: 2381765 - RNA, 19 nt, Artificial Sequence
  Description of Artificial Sequence: Synthetic oligonucleotide
aaguagagagaugacgggu

SEQ ID NO: 2381766 - RNA, 19 nt, Artificial Sequence
  Description of Artificial Sequence: Synthetic oligonucleotide
caagagcucggucagaguc

SEQ ID NO: 2381767 - RNA, 19 nt, Artificial Sequence
  Description of Artificial Sequence: Synthetic oligonucleotide
ugacuuuccuagaugugcu

SEQ ID NO: 2381768 - RNA, 19 nt, Artificial Sequence
  Description of Artificial Sequence: Synthetic oligonucleotide
ugccguaugacgcaauguc

SEQ ID NO: 2381769 - RNA, 19 nt, Artificial Sequence
  Description of Artificial Sequence: Synthetic oligonucleotide
ucugaaacaucugugucuc

SEQ ID NO: 2381770 - RNA, 19 nt, Artificial Sequence
  Description of Artificial Sequence: Synthetic oligonucleotide
gguugaagcagccauuggc

SEQ ID NO: 2381771 - RNA, 19 nt, Artificial Sequence
  Description of Artificial Sequence: Synthetic oligonucleotide
aaccugacacuuucggacu

SEQ ID NO: 2381772 - RNA, 19 nt, Artificial Sequence
  Description of Artificial Sequence: Synthetic oligonucleotide
guccugaggaaccugacac

SEQ ID NO: 2381773 - RNA, 19 nt, Artificial Sequence
  Description of Artificial Sequence: Synthetic oligonucleotide
auagaaauaaaggcccgug

SEQ ID NO: 2381774 - RNA, 19 nt, Artificial Sequence
  Description of Artificial Sequence: Synthetic oligonucleotide
gugacuuuccuagaugugc

SEQ ID NO: 2381775 - RNA, 19 nt, Artificial Sequence
  Description of Artificial Sequence: Synthetic oligonucleotide
uugcuuuggagauggagaa

SEQ ID NO: 2381776 - RNA, 19 nt, Artificial Sequence
  Description of Artificial Sequence: Synthetic oligonucleotide
cacuuucggacugacaggg

SEQ ID NO: 2381777 - RNA, 19 nt, Artificial Sequence
  Description of Artificial Sequence: Synthetic oligonucleotide
cuagguuccuccaucugug

SEQ ID NO: 2381778 - RNA, 19 nt, Artificial Sequence
  Description of Artificial Sequence: Synthetic oligonucleotide
auggcuagguuccuccauc

SEQ ID NO: 2381779 - RNA, 19 nt, Artificial Sequence
  Description of Artificial Sequence: Synthetic oligonucleotide
aucacuaggcagaaagcgg

SEQ ID NO: 2381780 - RNA, 19 nt, Artificial Sequence
  Description of Artificial Sequence: Synthetic oligonucleotide
ugugacuuuccuagaugug

SEQ ID NO: 2381781 - RNA, 19 nt, Artificial Sequence
  Description of Artificial Sequence: Synthetic oligonucleotide
uaguugcugaaccuuggac

SEQ ID NO: 2381782 - RNA, 19 nt, Artificial Sequence
  Description of Artificial Sequence: Synthetic oligonucleotide
uuucuccacuccuccacgg

SEQ ID NO: 2381783 - RNA, 19 nt, Artificial Sequence
  Description of Artificial Sequence: Synthetic oligonucleotide
aaaggcccguguccacugc

SEQ ID NO: 2381784 - RNA, 19 nt, Artificial Sequence
  Description of Artificial Sequence: Synthetic oligonucleotide
acacuuucggacugacagg

SEQ ID NO: 2381785 - RNA, 19 nt, Artificial Sequence
  Description of Artificial Sequence: Synthetic oligonucleotide
uugauguguauugugacuu

SEQ ID NO: 2381786 - RNA, 19 nt, Artificial Sequence
  Description of Artificial Sequence: Synthetic oligonucleotide
cucauggcuagguuccucc

SEQ ID NO: 2381787 - RNA, 19 nt, Artificial Sequence
  Description of Artificial Sequence: Synthetic oligonucleotide
cagaaagcggcaugguacc

SEQ ID NO: 2381788 - RNA, 19 nt, Artificial Sequence
  Description of Artificial Sequence: Synthetic oligonucleotide
gagaugacggguguaguug

SEQ ID NO: 2381789 - RNA, 19 nt, Artificial Sequence
  Description of Artificial Sequence: Synthetic oligonucleotide
acaucacuaggcagaaagc

SEQ ID NO: 2381790 - RNA, 19 nt, Artificial Sequence
  Description of Artificial Sequence: Synthetic oligonucleotide
ucugccguaugacgcaaug

SEQ ID NO: 2381791 - RNA, 19 nt, Artificial Sequence
  Description of Artificial Sequence: Synthetic oligonucleotide
uccgcagucugccugucug

SEQ ID NO: 2381792 - RNA, 19 nt, Artificial Sequence
  Description of Artificial Sequence: Synthetic oligonucleotide
uccuagaugugcugugcag

SEQ ID NO: 2381793 - RNA, 19 nt, Artificial Sequence
  Description of Artificial Sequence: Synthetic oligonucleotide
agagagaugacggguguag

SEQ ID NO: 2381794 - RNA, 19 nt, Artificial Sequence
  Description of Artificial Sequence: Synthetic oligonucleotide
cucaacuugauggucuccc

SEQ ID NO: 2381795 - RNA, 19 nt, Artificial Sequence
  Description of Artificial Sequence: Synthetic oligonucleotide
ugucauuuguccugaggaa

SEQ ID NO: 2381796 - RNA, 19 nt, Artificial Sequence
  Description of Artificial Sequence: Synthetic oligonucleotide
uuccauucugguagaauau

SEQ ID NO: 2381797 - RNA, 19 nt, Artificial Sequence
  Description of Artificial Sequence: Synthetic oligonucleotide
ugaaaagaugcugcugcca

SEQ ID NO: 2381798 - RNA, 19 nt, Artificial Sequence
  Description of Artificial Sequence: Synthetic oligonucleotide
cugccugucugcaagagca

SEQ ID NO: 2381799 - RNA, 19 nt, Artificial Sequence
  Description of Artificial Sequence: Synthetic oligonucleotide
ugauggucucccuuccuca

SEQ ID NO: 2381800 - RNA, 19 nt, Artificial Sequence
  Description of Artificial Sequence: Synthetic oligonucleotide
uguccugaggaaccugaca

SEQ ID NO: 2381801 - RNA, 19 nt, Artificial Sequence
  Description of Artificial Sequence: Synthetic oligonucleotide
accuuggacagugaugguc

SEQ ID NO: 2381802 - RNA, 19 nt, Artificial Sequence
  Description of Artificial Sequence: Synthetic oligonucleotide
ugguugaagcagccauugg

SEQ ID NO: 2381803 - RNA, 19 nt, Artificial Sequence
  Description of Artificial Sequence: Synthetic oligonucleotide
ucugguagaauaugaucuu

SEQ ID NO: 2381804 - RNA, 19 nt, Artificial Sequence
  Description of Artificial Sequence: Synthetic oligonucleotide
aacagaauguugauauuuu

SEQ ID NO: 2381805 - RNA, 19 nt, Artificial Sequence
  Description of Artificial Sequence: Synthetic oligonucleotide
uccauucugguagaauaug

SEQ ID NO: 2381806 - RNA, 19 nt, Artificial Sequence
  Description of Artificial Sequence: Synthetic oligonucleotide
aguagagagaugacgggug

SEQ ID NO: 2381807 - RNA, 19 nt, Artificial Sequence
  Description of Artificial Sequence: Synthetic oligonucleotide
uuccuagaugugcugugca

SEQ ID NO: 2381808 - RNA, 19 nt, Artificial Sequence
  Description of Artificial Sequence: Synthetic oligonucleotide
ugacgcaaugucauuuguc

SEQ ID NO: 2381809 - RNA, 19 nt, Artificial Sequence
  Description of Artificial Sequence: Synthetic oligonucleotide
ccaaaguagagagaugacg

SEQ ID NO: 2381810 - RNA, 19 nt, Artificial Sequence
  Description of Artificial Sequence: Synthetic oligonucleotide
caugguaccaaaguagaga

SEQ ID NO: 2381811 - RNA, 19 nt, Artificial Sequence
  Description of Artificial Sequence: Synthetic oligonucleotide
ucugccugucugcaagagc

SEQ ID NO: 2381812 - RNA, 19 nt, Artificial Sequence
  Description of Artificial Sequence: Synthetic oligonucleotide
uuuccuagaugugcugugc

SEQ ID NO: 2381813 - RNA, 19 nt, Artificial Sequence
  Description of Artificial Sequence: Synthetic oligonucleotide
ugugcugugcaguaauauu

SEQ ID NO: 2381814 - RNA, 19 nt, Artificial Sequence
  Description of Artificial Sequence: Synthetic oligonucleotide
aggaggcacaucacuaggc

SEQ ID NO: 2381815 - RNA, 19 nt, Artificial Sequence
  Description of Artificial Sequence: Synthetic oligonucleotide
gagauccgcagucugccug

SEQ ID NO: 2381816 - RNA, 19 nt, Artificial Sequence
  Description of Artificial Sequence: Synthetic oligonucleotide
gucuccaaagucauucaag

SEQ ID NO: 2381817 - RNA, 19 nt, Artificial Sequence
  Description of Artificial Sequence: Synthetic oligonucleotide
uguggcugugauuugcuuu

SEQ ID NO: 2381818 - RNA, 19 nt, Artificial Sequence
  Description of Artificial Sequence: Synthetic oligonucleotide
aaucacucccagauguaca

SEQ ID NO: 2381819 - RNA, 19 nt, Artificial Sequence
  Description of Artificial Sequence: Synthetic oligonucleotide
cuuuccuagaugugcugug

SEQ ID NO: 2381820 - RNA, 19 nt, Artificial Sequence
  Description of Artificial Sequence: Synthetic oligonucleotide
agcggcaugguaccaaagu

SEQ ID NO: 2381821 - RNA, 19 nt, Artificial Sequence
  Description of Artificial Sequence: Synthetic oligonucleotide
uggucucccuuccucaaac

SEQ ID NO: 2381822 - RNA, 19 nt, Artificial Sequence
  Description of Artificial Sequence: Synthetic oligonucleotide
ugacggguguaguugcuga

SEQ ID NO: 2381823 - RNA, 19 nt, Artificial Sequence
  Description of Artificial Sequence: Synthetic oligonucleotide
gucauuuguccugaggaac

SEQ ID NO: 2381824 - RNA, 19 nt, Artificial Sequence
  Description of Artificial Sequence: Synthetic oligonucleotide
uaaaggcccguguccacug

SEQ ID NO: 2381825 - RNA, 19 nt, Artificial Sequence
  Description of Artificial Sequence: Synthetic oligonucleotide
cuuccucaaacaccaguug

SEQ ID NO: 2381826 - RNA, 19 nt, Artificial Sequence
  Description of Artificial Sequence: Synthetic oligonucleotide
agaauaugaucuugcucau

SEQ ID NO: 2381827 - RNA, 19 nt, Artificial Sequence
  Description of Artificial Sequence: Synthetic oligonucleotide
gaagcugccaacagaaugu

SEQ ID NO: 2381828 - RNA, 19 nt, Artificial Sequence
  Description of Artificial Sequence: Synthetic oligonucleotide
caggaggcacaucacuagg

SEQ ID NO: 2381829 - RNA, 19 nt, Artificial Sequence
  Description of Artificial Sequence: Synthetic oligonucleotide
uguugauauuuuacagauu

SEQ ID NO: 2381830 - RNA, 19 nt, Artificial Sequence
  Description of Artificial Sequence: Synthetic oligonucleotide
gugcugugcaguaauauuc

SEQ ID NO: 2381831 - RNA, 19 nt, Artificial Sequence
  Description of Artificial Sequence: Synthetic oligonucleotide
uugagggucuggagcagca

SEQ ID NO: 2381832 - RNA, 19 nt, Artificial Sequence
  Description of Artificial Sequence: Synthetic oligonucleotide
ucaacuugauggucucccu

SEQ ID NO: 2381833 - RNA, 19 nt, Artificial Sequence
  Description of Artificial Sequence: Synthetic oligonucleotide
gauuuuccauucugguaga

SEQ ID NO: 2381834 - RNA, 19 nt, Artificial Sequence
  Description of Artificial Sequence: Synthetic oligonucleotide
gauguguauugugacuuuc

SEQ ID NO: 2381835 - RNA, 19 nt, Artificial Sequence
  Description of Artificial Sequence: Synthetic oligonucleotide
cauucugaaacaucugugu

SEQ ID NO: 2381836 - RNA, 19 nt, Artificial Sequence
  Description of Artificial Sequence: Synthetic oligonucleotide
uuucggacugacaggguuu

SEQ ID NO: 2381837 - RNA, 19 nt, Artificial Sequence
  Description of Artificial Sequence: Synthetic oligonucleotide
agagaugacggguguaguu

SEQ ID NO: 2381838 - RNA, 19 nt, Artificial Sequence
  Description of Artificial Sequence: Synthetic oligonucleotide
gacuuuccuagaugugcug

SEQ ID NO: 2381839 - RNA, 19 nt, Artificial Sequence
  Description of Artificial Sequence: Synthetic oligonucleotide
acuuuccuagaugugcugu

SEQ ID NO: 2381840 - RNA, 19 nt, Artificial Sequence
  Description of Artificial Sequence: Synthetic oligonucleotide
gaauaugaucuugcucaug

SEQ ID NO: 2381841 - RNA, 19 nt, Artificial Sequence
  Description of Artificial Sequence: Synthetic oligonucleotide
ucgggagauccgcagucug

SEQ ID NO: 2381842 - RNA, 19 nt, Artificial Sequence
  Description of Artificial Sequence: Synthetic oligonucleotide
augacgcaaugucauuugu

SEQ ID NO: 2381843 - RNA, 19 nt, Artificial Sequence
  Description of Artificial Sequence: Synthetic oligonucleotide
cuaggcagaaagcggcaug

SEQ ID NO: 2381844 - RNA, 19 nt, Artificial Sequence
  Description of Artificial Sequence: Synthetic oligonucleotide
uggcugaaaagaugcugcu

SEQ ID NO: 2381845 - RNA, 19 nt, Artificial Sequence
  Description of Artificial Sequence: Synthetic oligonucleotide
uguggcaccucaacuugau

SEQ ID NO: 2381846 - RNA, 19 nt, Artificial Sequence
  Description of Artificial Sequence: Synthetic oligonucleotide
gaaacaucugugucuccaa

SEQ ID NO: 2381847 - RNA, 19 nt, Artificial Sequence
  Description of Artificial Sequence: Synthetic oligonucleotide
acugcaaacaggaggcaca

SEQ ID NO: 2381848 - RNA, 19 nt, Artificial Sequence
  Description of Artificial Sequence: Synthetic oligonucleotide
cugguagaauaugaucuug

SEQ ID NO: 2381849 - RNA, 19 nt, Artificial Sequence
  Description of Artificial Sequence: Synthetic oligonucleotide
gcagaaagcggcaugguac

SEQ ID NO: 2381850 - RNA, 19 nt, Artificial Sequence
  Description of Artificial Sequence: Synthetic oligonucleotide
acgcaaugucauuuguccu

SEQ ID NO: 2381851 - RNA, 19 nt, Artificial Sequence
  Description of Artificial Sequence: Synthetic oligonucleotide
gugguugaagcagccauug

SEQ ID NO: 2381852 - RNA, 19 nt, Artificial Sequence
  Description of Artificial Sequence: Synthetic oligonucleotide
acggguguaguugcugaac

SEQ ID NO: 2381853 - RNA, 19 nt, Artificial Sequence
  Description of Artificial Sequence: Synthetic oligonucleotide
aagagcucggucagagucu

SEQ ID NO: 2381854 - RNA, 19 nt, Artificial Sequence
  Description of Artificial Sequence: Synthetic oligonucleotide
caaaauugucagugguuga

SEQ ID NO: 2381855 - RNA, 19 nt, Artificial Sequence
  Description of Artificial Sequence: Synthetic oligonucleotide
uccuccacggggauuugaa

SEQ ID NO: 2381856 - RNA, 19 nt, Artificial Sequence
  Description of Artificial Sequence: Synthetic oligonucleotide
gaggaaccugacacuuucg

SEQ ID NO: 2381857 - RNA, 19 nt, Artificial Sequence
  Description of Artificial Sequence: Synthetic oligonucleotide
gucucccuuccucaaacac

SEQ ID NO: 2381858 - RNA, 19 nt, Artificial Sequence
  Description of Artificial Sequence: Synthetic oligonucleotide
ugacacuuucggacugaca

SEQ ID NO: 2381859 - RNA, 19 nt, Artificial Sequence
  Description of Artificial Sequence: Synthetic oligonucleotide
uugaagcagccauuggcuu

SEQ ID NO: 2381860 - RNA, 19 nt, Artificial Sequence
  Description of Artificial Sequence: Synthetic oligonucleotide
gaagguuucucuguacaua

SEQ ID NO: 2381861 - RNA, 19 nt, Artificial Sequence
  Description of Artificial Sequence: Synthetic oligonucleotide
ugcuuuggagauggagaag

SEQ ID NO: 2381862 - RNA, 19 nt, Artificial Sequence
  Description of Artificial Sequence: Synthetic oligonucleotide
ccauucugaaacaucugug

SEQ ID NO: 2381863 - RNA, 19 nt, Artificial Sequence
  Description of Artificial Sequence: Synthetic oligonucleotide
agucauucaagagcucggu

SEQ ID NO: 2381864 - RNA, 19 nt, Artificial Sequence
  Description of Artificial Sequence: Synthetic oligonucleotide
guguaguugcugaaccuug

SEQ ID NO: 2381865 - RNA, 19 nt, Artificial Sequence
  Description of Artificial Sequence: Synthetic oligonucleotide
ucauggcuagguuccucca

SEQ ID NO: 2381866 - RNA, 19 nt, Artificial Sequence
  Description of Artificial Sequence: Synthetic oligonucleotide
auaaaggcccguguccacu

SEQ ID NO: 2381867 - RNA, 19 nt, Artificial Sequence
  Description of Artificial Sequence: Synthetic oligonucleotide
cuucgggagauccgcaguc

SEQ ID NO: 2381868 - RNA, 19 nt, Artificial Sequence
  Description of Artificial Sequence: Synthetic oligonucleotide
uauucaccacuguggcugu

SEQ ID NO: 2381869 - RNA, 19 nt, Artificial Sequence
  Description of Artificial Sequence: Synthetic oligonucleotide
aaggcccguguccacugca

SEQ ID NO: 2381870 - RNA, 19 nt, Artificial Sequence
  Description of Artificial Sequence: Synthetic oligonucleotide
gaucuugcucauggcuagg

SEQ ID NO: 2381871 - RNA, 19 nt, Artificial Sequence
  Description of Artificial Sequence: Synthetic oligonucleotide
accugacacuuucggacug

SEQ ID NO: 2381872 - RNA, 19 nt, Artificial Sequence
  Description of Artificial Sequence: Synthetic oligonucleotide
aacaccaguugagggucug

SEQ ID NO: 2381873 - RNA, 19 nt, Artificial Sequence
  Description of Artificial Sequence: Synthetic oligonucleotide
ugauguguauugugacuuu

SEQ ID NO: 2381874 - RNA, 19 nt, Artificial Sequence
  Description of Artificial Sequence: Synthetic oligonucleotide
guugaagcagccauuggcu

SEQ ID NO: 2381875 - RNA, 19 nt, Artificial Sequence
  Description of Artificial Sequence: Synthetic oligonucleotide
cacagccuucgggagaucc

SEQ ID NO: 2381876 - RNA, 19 nt, Artificial Sequence
  Description of Artificial Sequence: Synthetic oligonucleotide
cagauuuuccauucuggua

SEQ ID NO: 2381877 - RNA, 19 nt, Artificial Sequence
  Description of Artificial Sequence: Synthetic oligonucleotide
ucuugcucauggcuagguu

SEQ ID NO: 2381878 - RNA, 19 nt, Artificial Sequence
  Description of Artificial Sequence: Synthetic oligonucleotide
uucaccacuguggcuguga

SEQ ID NO: 2381879 - RNA, 19 nt, Artificial Sequence
  Description of Artificial Sequence: Synthetic oligonucleotide
ucagugguugaagcagcca

SEQ ID NO: 2381880 - RNA, 19 nt, Artificial Sequence
  Description of Artificial Sequence: Synthetic oligonucleotide
gucauucaagagcucgguc

SEQ ID NO: 2381881 - RNA, 19 nt, Artificial Sequence
  Description of Artificial Sequence: Synthetic oligonucleotide
ucaagagcucggucagagu

SEQ ID NO: 2381882 - RNA, 19 nt, Artificial Sequence
  Description of Artificial Sequence: Synthetic oligonucleotide
guaguugcugaaccuugga

SEQ ID NO: 2381883 - RNA, 19 nt, Artificial Sequence
  Description of Artificial Sequence: Synthetic oligonucleotide
cugcaagagcaaacagcag

SEQ ID NO: 2381884 - RNA, 19 nt, Artificial Sequence
  Description of Artificial Sequence: Synthetic oligonucleotide
gguuccuccaucuguggca

SEQ ID NO: 2381885 - RNA, 19 nt, Artificial Sequence
  Description of Artificial Sequence: Synthetic oligonucleotide
guauugugacuuuccuaga

SEQ ID NO: 2381886 - RNA, 19 nt, Artificial Sequence
  Description of Artificial Sequence: Synthetic oligonucleotide
cagccauuggcuuccagaa

SEQ ID NO: 2381887 - RNA, 19 nt, Artificial Sequence
  Description of Artificial Sequence: Synthetic oligonucleotide
ucacaggcuuugaugugua

SEQ ID NO: 2381888 - RNA, 19 nt, Artificial Sequence
  Description of Artificial Sequence: Synthetic oligonucleotide
guguauugugacuuuccua

SEQ ID NO: 2381889 - RNA, 19 nt, Artificial Sequence
  Description of Artificial Sequence: Synthetic oligonucleotide
cuagaugugcugugcagua

SEQ ID NO: 2381890 - RNA, 19 nt, Artificial Sequence
  Description of Artificial Sequence: Synthetic oligonucleotide
gauggucucccuuccucaa

SEQ ID NO: 2381891 - RNA, 19 nt, Artificial Sequence
  Description of Artificial Sequence: Synthetic oligonucleotide
acaggcuuugauguguauu

SEQ ID NO: 2381892 - RNA, 19 nt, Artificial Sequence
  Description of Artificial Sequence: Synthetic oligonucleotide
caaagucauucaagagcuc

SEQ ID NO: 2381893 - RNA, 19 nt, Artificial Sequence
  Description of Artificial Sequence: Synthetic oligonucleotide
acagccuucgggagauccg

SEQ ID NO: 2381894 - RNA, 19 nt, Artificial Sequence
  Description of Artificial Sequence: Synthetic oligonucleotide
gcgguucugccguaugacg

SEQ ID NO: 2381895 - RNA, 19 nt, Artificial Sequence
  Description of Artificial Sequence: Synthetic oligonucleotide
gguagaauaugaucuugcu

SEQ ID NO: 2381896 - RNA, 19 nt, Artificial Sequence
  Description of Artificial Sequence: Synthetic oligonucleotide
ggaggcacaucacuaggca

SEQ ID NO: 2381897 - RNA, 19 nt, Artificial Sequence
  Description of Artificial Sequence: Synthetic oligonucleotide
ggaaccugacacuuucgga

SEQ ID NO: 2381898 - RNA, 19 nt, Artificial Sequence
  Description of Artificial Sequence: Synthetic oligonucleotide
gcaagagcaaacagcagca

SEQ ID NO: 2381899 - RNA, 19 nt, Artificial Sequence
  Description of Artificial Sequence: Synthetic oligonucleotide
cagaaugcccauucugaaa

SEQ ID NO: 2381900 - RNA, 19 nt, Artificial Sequence
  Description of Artificial Sequence: Synthetic oligonucleotide
gugauuugcuuuggagaug

SEQ ID NO: 2381901 - RNA, 19 nt, Artificial Sequence
  Description of Artificial Sequence: Synthetic oligonucleotide
gucagugguugaagcagcc

SEQ ID NO: 2381902 - RNA, 19 nt, Artificial Sequence
  Description of Artificial Sequence: Synthetic oligonucleotide
caaugucauuuguccugag

SEQ ID NO: 2381903 - RNA, 19 nt, Artificial Sequence
  Description of Artificial Sequence: Synthetic oligonucleotide
uuggacagugauggucaca

SEQ ID NO: 2381904 - RNA, 19 nt, Artificial Sequence
  Description of Artificial Sequence: Synthetic oligonucleotide
agucugccugucugcaaga

SEQ ID NO: 2381905 - RNA, 19 nt, Artificial Sequence
  Description of Artificial Sequence: Synthetic oligonucleotide
cauucugguagaauaugau

SEQ ID NO: 2381906 - RNA, 19 nt, Artificial Sequence
  Description of Artificial Sequence: Synthetic oligonucleotide
cagccuucgggagauccgc

SEQ ID NO: 2381907 - RNA, 19 nt, Artificial Sequence
  Description of Artificial Sequence: Synthetic oligonucleotide
uggcugugauuugcuuugg

SEQ ID NO: 2381908 - RNA, 19 nt, Artificial Sequence
  Description of Artificial Sequence: Synthetic oligonucleotide
augacggguguaguugcug

SEQ ID NO: 2381909 - RNA, 19 nt, Artificial Sequence
  Description of Artificial Sequence: Synthetic oligonucleotide
aucuugcucauggcuaggu

SEQ ID NO: 2381910 - RNA, 19 nt, Artificial Sequence
  Description of Artificial Sequence: Synthetic oligonucleotide
ugccaacagaauguugaua

SEQ ID NO: 2381911 - RNA, 19 nt, Artificial Sequence
  Description of Artificial Sequence: Synthetic oligonucleotide
cgcaaugucauuuguccug

SEQ ID NO: 2381912 - RNA, 19 nt, Artificial Sequence
  Description of Artificial Sequence: Synthetic oligonucleotide
ggcaugguaccaaaguaga

SEQ ID NO: 2381913 - RNA, 19 nt, Artificial Sequence
  Description of Artificial Sequence: Synthetic oligonucleotide
ccauuggcuuccagaaugc

SEQ ID NO: 2381914 - RNA, 19 nt, Artificial Sequence
  Description of Artificial Sequence: Synthetic oligonucleotide
aaacaccaguugagggucu

SEQ ID NO: 2381915 - RNA, 19 nt, Artificial Sequence
  Description of Artificial Sequence: Synthetic oligonucleotide
uagaugugcugugcaguaa

SEQ ID NO: 2381916 - RNA, 19 nt, Artificial Sequence
  Description of Artificial Sequence: Synthetic oligonucleotide
cggcaugguaccaaaguag

SEQ ID NO: 2381917 - RNA, 19 nt, Artificial Sequence
  Description of Artificial Sequence: Synthetic oligonucleotide
gauggucacaggcuuugau

SEQ ID NO: 2381918 - RNA, 19 nt, Artificial Sequence
  Description of Artificial Sequence: Synthetic oligonucleotide
aagcggcaugguaccaaag

SEQ ID NO: 2381919 - RNA, 19 nt, Artificial Sequence
  Description of Artificial Sequence: Synthetic oligonucleotide
ggcucaaguuucaccacag

SEQ ID NO: 2381920 - RNA, 19 nt, Artificial Sequence
  Description of Artificial Sequence: Synthetic oligonucleotide
ccauucugguagaauauga

SEQ ID NO: 2381921 - RNA, 19 nt, Artificial Sequence
  Description of Artificial Sequence: Synthetic oligonucleotide
gaaaucacucccagaugua

SEQ ID NO: 2381922 - RNA, 19 nt, Artificial Sequence
  Description of Artificial Sequence: Synthetic oligonucleotide
ggggauuugaagguuucuc

SEQ ID NO: 2381923 - RNA, 19 nt, Artificial Sequence
  Description of Artificial Sequence: Synthetic oligonucleotide
gguucugccguaugacgca

SEQ ID NO: 2381924 - RNA, 19 nt, Artificial Sequence
  Description of Artificial Sequence: Synthetic oligonucleotide
aggcuuugauguguauugu

SEQ ID NO: 2381925 - RNA, 19 nt, Artificial Sequence
  Description of Artificial Sequence: Synthetic oligonucleotide
acuaggcagaaagcggcau

SEQ ID NO: 2381926 - RNA, 19 nt, Artificial Sequence
  Description of Artificial Sequence: Synthetic oligonucleotide
uucggacugacaggguuuu

SEQ ID NO: 2381927 - RNA, 19 nt, Artificial Sequence
  Description of Artificial Sequence: Synthetic oligonucleotide
ugccugucugcaagagcaa

SEQ ID NO: 2381928 - RNA, 19 nt, Artificial Sequence
  Description of Artificial Sequence: Synthetic oligonucleotide
uccacuccuccacggggau

SEQ ID NO: 2381929 - RNA, 19 nt, Artificial Sequence
  Description of Artificial Sequence: Synthetic oligonucleotide
ugauggucacaggcuuuga

SEQ ID NO: 2381930 - RNA, 19 nt, Artificial Sequence
  Description of Artificial Sequence: Synthetic oligonucleotide
gcaugguaccaaaguagag

SEQ ID NO: 2381931 - RNA, 19 nt, Artificial Sequence
  Description of Artificial Sequence: Synthetic oligonucleotide
cugacacuuucggacugac

SEQ ID NO: 2381932 - RNA, 19 nt, Artificial Sequence
  Description of Artificial Sequence: Synthetic oligonucleotide
gacggguguaguugcugaa

SEQ ID NO: 2381933 - RNA, 19 nt, Artificial Sequence
  Description of Artificial Sequence: Synthetic oligonucleotide
auggucucccuuccucaaa

SEQ ID NO: 2381934 - RNA, 19 nt, Artificial Sequence
  Description of Artificial Sequence: Synthetic oligonucleotide
cacuaggcagaaagcggca

SEQ ID NO: 2381935 - RNA, 19 nt, Artificial Sequence
  Description of Artificial Sequence: Synthetic oligonucleotide
gcugugcaguaauauucac

SEQ ID NO: 2381936 - RNA, 19 nt, Artificial Sequence
  Description of Artificial Sequence: Synthetic oligonucleotide
agaaagcggcaugguacca

SEQ ID NO: 2381937 - RNA, 19 nt, Artificial Sequence
  Description of Artificial Sequence: Synthetic oligonucleotide
cuccacuccuccacgggga

SEQ ID NO: 2381938 - RNA, 19 nt, Artificial Sequence
  Description of Artificial Sequence: Synthetic oligonucleotide
gcuagguuccuccaucugu

SEQ ID NO: 2381939 - RNA, 19 nt, Artificial Sequence
  Description of Artificial Sequence: Synthetic oligonucleotide
agugguugaagcagccauu

SEQ ID NO: 2381940 - RNA, 19 nt, Artificial Sequence
  Description of Artificial Sequence: Synthetic oligonucleotide
ccaucuguggcaccucaac

SEQ ID NO: 2381941 - RNA, 19 nt, Artificial Sequence
  Description of Artificial Sequence: Synthetic oligonucleotide
gucacaggcuuugaugugu

SEQ ID NO: 2381942 - RNA, 19 nt, Artificial Sequence
  Description of Artificial Sequence: Synthetic oligonucleotide
uucugccguaugacgcaau

SEQ ID NO: 2381943 - RNA, 19 nt, Artificial Sequence
  Description of Artificial Sequence: Synthetic oligonucleotide
guaugacgcaaugucauuu

SEQ ID NO: 2381944 - RNA, 19 nt, Artificial Sequence
  Description of Artificial Sequence: Synthetic oligonucleotide
gggcucaaguuucaccaca

SEQ ID NO: 2381945 - RNA, 19 nt, Artificial Sequence
  Description of Artificial Sequence: Synthetic oligonucleotide
gcaaugucauuuguccuga

SEQ ID NO: 2381946 - RNA, 19 nt, Artificial Sequence
  Description of Artificial Sequence: Synthetic oligonucleotide
cuguggcaccucaacuuga

SEQ ID NO: 2381947 - RNA, 19 nt, Artificial Sequence
  Description of Artificial Sequence: Synthetic oligonucleotide
cggguguaguugcugaacc

SEQ ID NO: 2381948 - RNA, 19 nt, Artificial Sequence
  Description of Artificial Sequence: Synthetic oligonucleotide
cuuucggacugacaggguu

SEQ ID NO: 2381949 - RNA, 19 nt, Artificial Sequence
  Description of Artificial Sequence: Synthetic oligonucleotide
gccuucgggagauccgcag

SEQ ID NO: 2381950 - RNA, 19 nt, Artificial Sequence
  Description of Artificial Sequence: Synthetic oligonucleotide
agcugccaacagaauguug

SEQ ID NO: 2381951 - RNA, 19 nt, Artificial Sequence
  Description of Artificial Sequence: Synthetic oligonucleotide
ggcagaaagcggcauggua

SEQ ID NO: 2381952 - RNA, 19 nt, Artificial Sequence
  Description of Artificial Sequence: Synthetic oligonucleotide
agguuucucuguacauaga

SEQ ID NO: 2381953 - RNA, 19 nt, Artificial Sequence
  Description of Artificial Sequence: Synthetic oligonucleotide
auccgcagucugccugucu

SEQ ID NO: 2381954 - RNA, 19 nt, Artificial Sequence
  Description of Artificial Sequence: Synthetic oligonucleotide
ggcuagguuccuccaucug

SEQ ID NO: 2381955 - RNA, 19 nt, Artificial Sequence
  Description of Artificial Sequence: Synthetic oligonucleotide
gcggcaugguaccaaagua

SEQ ID NO: 2381956 - RNA, 19 nt, Artificial Sequence
  Description of Artificial Sequence: Synthetic oligonucleotide
gccguaugacgcaauguca

SEQ ID NO: 2381957 - RNA, 19 nt, Artificial Sequence
  Description of Artificial Sequence: Synthetic oligonucleotide
gagagaugacggguguagu

SEQ ID NO: 2381958 - RNA, 19 nt, Artificial Sequence
  Description of Artificial Sequence: Synthetic oligonucleotide
ggggcucaaguuucaccac

SEQ ID NO: 2381959 - RNA, 19 nt, Artificial Sequence
  Description of Artificial Sequence: Synthetic oligonucleotide
uggcuuccagaaugcccau

SEQ ID NO: 2381960 - RNA, 19 nt, Artificial Sequence
  Description of Artificial Sequence: Synthetic oligonucleotide
ccagaaugcccauucugaa

SEQ ID NO: 2381961 - RNA, 19 nt, Artificial Sequence
  Description of Artificial Sequence: Synthetic oligonucleotide
acuuucggacugacagggu

SEQ ID NO: 2381962 - RNA, 19 nt, Artificial Sequence
  Description of Artificial Sequence: Synthetic oligonucleotide
aggcagaaagcggcauggu

SEQ ID NO: 2381963 - RNA, 19 nt, Artificial Sequence
  Description of Artificial Sequence: Synthetic oligonucleotide
caguaauauucaccacugu

SEQ ID NO: 2381964 - RNA, 19 nt, Artificial Sequence
  Description of Artificial Sequence: Synthetic oligonucleotide
caagagcaaacagcagcaa

SEQ ID NO: 2381965 - RNA, 19 nt, Artificial Sequence
  Description of Artificial Sequence: Synthetic oligonucleotide
gccacugcgguucugccgu

SEQ ID NO: 2381966 - RNA, 19 nt, Artificial Sequence
  Description of Artificial Sequence: Synthetic oligonucleotide
gauuugcuuuggagaugga

SEQ ID NO: 2381967 - RNA, 19 nt, Artificial Sequence
  Description of Artificial Sequence: Synthetic oligonucleotide
ggucucccuuccucaaaca

SEQ ID NO: 2381968 - RNA, 19 nt, Artificial Sequence
  Description of Artificial Sequence: Synthetic oligonucleotide
cauuuguccugaggaaccu

SEQ ID NO: 2381969 - RNA, 19 nt, Artificial Sequence
  Description of Artificial Sequence: Synthetic oligonucleotide
cggaaaucacucccagaug

SEQ ID NO: 2381970 - RNA, 19 nt, Artificial Sequence
  Description of Artificial Sequence: Synthetic oligonucleotide
ggguguaguugcugaaccu

SEQ ID NO: 2381971 - RNA, 19 nt, Artificial Sequence
  Description of Artificial Sequence: Synthetic oligonucleotide
cgggagauccgcagucugc

SEQ ID NO: 2381972 - RNA, 19 nt, Artificial Sequence
  Description of Artificial Sequence: Synthetic oligonucleotide
guucugccguaugacgcaa

SEQ ID NO: 2381973 - RNA, 19 nt, Artificial Sequence
  Description of Artificial Sequence: Synthetic oligonucleotide
gguguaguugcugaaccuu

SEQ ID NO: 2381974 - RNA, 19 nt, Artificial Sequence
  Description of Artificial Sequence: Synthetic oligonucleotide
gcccauucugaaacaucug

SEQ ID NO: 2381975 - RNA, 19 nt, Artificial Sequence
  Description of Artificial Sequence: Synthetic oligonucleotide
caacuugauggucucccuu

SEQ ID NO: 2381976 - RNA, 19 nt, Artificial Sequence
  Description of Artificial Sequence: Synthetic oligonucleotide
cauggcuagguuccuccau

SEQ ID NO: 2381977 - RNA, 19 nt, Artificial Sequence
  Description of Artificial Sequence: Synthetic oligonucleotide
gauccgcagucugccuguc

SEQ ID NO: 2381978 - RNA, 19 nt, Artificial Sequence
  Description of Artificial Sequence: Synthetic oligonucleotide
cccguguccacugcaaaca

SEQ ID NO: 2381979 - RNA, 19 nt, Artificial Sequence
  Description of Artificial Sequence: Synthetic oligonucleotide
cacggggauuugaagguuu

SEQ ID NO: 2381980 - RNA, 19 nt, Artificial Sequence
  Description of Artificial Sequence: Synthetic oligonucleotide
agccuucgggagauccgca

SEQ ID NO: 2381981 - RNA, 19 nt, Artificial Sequence
  Description of Artificial Sequence: Synthetic oligonucleotide
ccguaugacgcaaugucau

SEQ ID NO: 2381982 - RNA, 19 nt, Artificial Sequence
  Description of Artificial Sequence: Synthetic oligonucleotide
cagcagcaaaauugucagu

SEQ ID NO: 2381983 - RNA, 19 nt, Artificial Sequence
  Description of Artificial Sequence: Synthetic oligonucleotide
cugcaaacaggaggcacau

SEQ ID NO: 2381984 - RNA, 19 nt, Artificial Sequence
  Description of Artificial Sequence: Synthetic oligonucleotide
ccuagaugugcugugcagu

SEQ ID NO: 2381985 - RNA, 19 nt, Artificial Sequence
  Description of Artificial Sequence: Synthetic oligonucleotide
aggcccguguccacugcaa

SEQ ID NO: 2381986 - RNA, 19 nt, Artificial Sequence
  Description of Artificial Sequence: Synthetic oligonucleotide
cugccguaugacgcaaugu

SEQ ID NO: 2381987 - RNA, 19 nt, Artificial Sequence
  Description of Artificial Sequence: Synthetic oligonucleotide
cuccuccacggggauuuga

SEQ ID NO: 2381988 - RNA, 19 nt, Artificial Sequence
  Description of Artificial Sequence: Synthetic oligonucleotide
ccacuguggcugugauuug

SEQ ID NO: 2381989 - RNA, 19 nt, Artificial Sequence
  Description of Artificial Sequence: Synthetic oligonucleotide
gccugucugcaagagcaaa

SEQ ID NO: 2381990 - RNA, 19 nt, Artificial Sequence
  Description of Artificial Sequence: Synthetic oligonucleotide
ggagauccgcagucugccu

SEQ ID NO: 2381991 - RNA, 19 nt, Artificial Sequence
  Description of Artificial Sequence: Synthetic oligonucleotide
cuguggcugugauuugcuu

SEQ ID NO: 2381992 - RNA, 19 nt, Artificial Sequence
  Description of Artificial Sequence: Synthetic oligonucleotide
cacaggcuuugauguguau

SEQ ID NO: 2381993 - RNA, 19 nt, Artificial Sequence
  Description of Artificial Sequence: Synthetic oligonucleotide
ccugacacuuucggacuga

SEQ ID NO: 2381994 - RNA, 19 nt, Artificial Sequence
  Description of Artificial Sequence: Synthetic oligonucleotide
ccuucgggagauccgcagu

SEQ ID NO: 2381995 - RNA, 19 nt, Artificial Sequence
  Description of Artificial Sequence: Synthetic oligonucleotide
caccacuguggcugugauu

SEQ ID NO: 2381996 - RNA, 19 nt, Artificial Sequence
  Description of Artificial Sequence: Synthetic oligonucleotide
cgcagucugccugucugca

SEQ ID NO: 2381997 - RNA, 19 nt, Artificial Sequence
  Description of Artificial Sequence: Synthetic oligonucleotide
cggggauuugaagguuucu

SEQ ID NO: 2381998 - RNA, 19 nt, Artificial Sequence
  Description of Artificial Sequence: Synthetic oligonucleotide
ccacggggauuugaagguu

SEQ ID NO: 2381999 - RNA, 19 nt, Artificial Sequence
  Description of Artificial Sequence: Synthetic oligonucleotide
ccacuccuccacggggauu

SEQ ID NO: 2382000 - RNA, 19 nt, Artificial Sequence
  Description of Artificial Sequence: Synthetic oligonucleotide
aacaaaauucauugguucc

SEQ ID NO: 2382001 - RNA, 19 nt, Artificial Sequence
  Description of Artificial Sequence: Synthetic oligonucleotide
aaaugugggaaucauagag

SEQ ID NO: 2382002 - RNA, 19 nt, Artificial Sequence
  Description of Artificial Sequence: Synthetic oligonucleotide
aaaguuggagucucagacc

SEQ ID NO: 2382003 - RNA, 19 nt, Artificial Sequence
  Description of Artificial Sequence: Synthetic oligonucleotide
gaugguuccagcuucaggc

SEQ ID NO: 2382004 - RNA, 19 nt, Artificial Sequence
  Description of Artificial Sequence: Synthetic oligonucleotide
ugcagaaccagucccaugg

SEQ ID NO: 2382005 - RNA, 19 nt, Artificial Sequence
  Description of Artificial Sequence: Synthetic oligonucleotide
cuuggguucacucagcugg

SEQ ID NO: 2382006 - RNA, 19 nt, Artificial Sequence
  Description of Artificial Sequence: Synthetic oligonucleotide
aagacugcagaaccagucc

SEQ ID NO: 2382007 - RNA, 19 nt, Artificial Sequence
  Description of Artificial Sequence: Synthetic oligonucleotide
gaaaguuggagucucagac

SEQ ID NO: 2382008 - RNA, 19 nt, Artificial Sequence
  Description of Artificial Sequence: Synthetic oligonucleotide
uucucuaccacgcagcagc

SEQ ID NO: 2382009 - RNA, 19 nt, Artificial Sequence
  Description of Artificial Sequence: Synthetic oligonucleotide
uguagaagggaccugguga

SEQ ID NO: 2382010 - RNA, 19 nt, Artificial Sequence
  Description of Artificial Sequence: Synthetic oligonucleotide
uugcuaaucacccaguccu

SEQ ID NO: 2382011 - RNA, 19 nt, Artificial Sequence
  Description of Artificial Sequence: Synthetic oligonucleotide
caaaauucacucauauucc

SEQ ID NO: 2382012 - RNA, 19 nt, Artificial Sequence
  Description of Artificial Sequence: Synthetic oligonucleotide
acuacaaagcccuagaauu

SEQ ID NO: 2382013 - RNA, 19 nt, Artificial Sequence
  Description of Artificial Sequence: Synthetic oligonucleotide
ucaugguucggucaauccg

SEQ ID NO: 2382014 - RNA, 19 nt, Artificial Sequence
  Description of Artificial Sequence: Synthetic oligonucleotide
ugaggcacuuguuaggacg

SEQ ID NO: 2382015 - RNA, 19 nt, Artificial Sequence
  Description of Artificial Sequence: Synthetic oligonucleotide
uucucagguauaauaagcc

SEQ ID NO: 2382016 - RNA, 19 nt, Artificial Sequence
  Description of Artificial Sequence: Synthetic oligonucleotide
augugggaaucauagagac

SEQ ID NO: 2382017 - RNA, 19 nt, Artificial Sequence
  Description of Artificial Sequence: Synthetic oligonucleotide
  modified_base (5)..(5): a, c, u, g, unknown or other
agccncuaaaaucaucagc

SEQ ID NO: 2382018 - RNA, 19 nt, Artificial Sequence
  Description of Artificial Sequence: Synthetic oligonucleotide
ucagguauaauaagccuug

SEQ ID NO: 2382019 - RNA, 19 nt, Artificial Sequence
  Description of Artificial Sequence: Synthetic oligonucleotide
uagaauugcuccauggucu

SEQ ID NO: 2382020 - RNA, 19 nt, Artificial Sequence
  Description of Artificial Sequence: Synthetic oligonucleotide
gugggaaucauagagaccc

SEQ ID NO: 2382021 - RNA, 19 nt, Artificial Sequence
  Description of Artificial Sequence: Synthetic oligonucleotide
gauggcucuagaaaugugg

SEQ ID NO: 2382022 - RNA, 19 nt, Artificial Sequence
  Description of Artificial Sequence: Synthetic oligonucleotide
aaaauucauugguuccccg

SEQ ID NO: 2382023 - RNA, 19 nt, Artificial Sequence
  Description of Artificial Sequence: Synthetic oligonucleotide
agugaacaaaauucauugg

SEQ ID NO: 2382024 - RNA, 19 nt, Artificial Sequence
  Description of Artificial Sequence: Synthetic oligonucleotide
cacucauauucccugaugg

SEQ ID NO: 2382025 - RNA, 19 nt, Artificial Sequence
  Description of Artificial Sequence: Synthetic oligonucleotide
  modified_base (7)..(7): a, c, u, g, unknown or other
gaagccncuaaaaucauca

SEQ ID NO: 2382026 - RNA, 19 nt, Artificial Sequence
  Description of Artificial Sequence: Synthetic oligonucleotide
gaaucauagagacccuuag

SEQ ID NO: 2382027 - RNA, 19 nt, Artificial Sequence
  Description of Artificial Sequence: Synthetic oligonucleotide
acuuguuaggacgaggagg

SEQ ID NO: 2382028 - RNA, 19 nt, Artificial Sequence
  Description of Artificial Sequence: Synthetic oligonucleotide
aaccagaacuucaagacug

SEQ ID NO: 2382029 - RNA, 19 nt, Artificial Sequence
  Description of Artificial Sequence: Synthetic oligonucleotide
agacugcagaaccaguccc

SEQ ID NO: 2382030 - RNA, 19 nt, Artificial Sequence
  Description of Artificial Sequence: Synthetic oligonucleotide
aacuacaaagcccuagaau

SEQ ID NO: 2382031 - RNA, 19 nt, Artificial Sequence
  Description of Artificial Sequence: Synthetic oligonucleotide
aaauucauugguuccccga

SEQ ID NO: 2382032 - RNA, 19 nt, Artificial Sequence
  Description of Artificial Sequence: Synthetic oligonucleotide
uguucucagguauaauaag

SEQ ID NO: 2382033 - RNA, 19 nt, Artificial Sequence
  Description of Artificial Sequence: Synthetic oligonucleotide
uuguucucagguauaauaa

SEQ ID NO: 2382034 - RNA, 19 nt, Artificial Sequence
  Description of Artificial Sequence: Synthetic oligonucleotide
aucaugguucggucaaucc

SEQ ID NO: 2382035 - RNA, 19 nt, Artificial Sequence
  Description of Artificial Sequence: Synthetic oligonucleotide
caugggaacuacaaagccc

SEQ ID NO: 2382036 - RNA, 19 nt, Artificial Sequence
  Description of Artificial Sequence: Synthetic oligonucleotide
ucauauucccugaugguuc

SEQ ID NO: 2382037 - RNA, 19 nt, Artificial Sequence
  Description of Artificial Sequence: Synthetic oligonucleotide
ucuuuuagauguagacucc

SEQ ID NO: 2382038 - RNA, 19 nt, Artificial Sequence
  Description of Artificial Sequence: Synthetic oligonucleotide
ugcagugaaaguuggaguc

SEQ ID NO: 2382039 - RNA, 19 nt, Artificial Sequence
  Description of Artificial Sequence: Synthetic oligonucleotide
  modified_base (2)..(2): a, c, u, g, unknown or other
cncuaaaaucaucagcaag

SEQ ID NO: 2382040 - RNA, 19 nt, Artificial Sequence
  Description of Artificial Sequence: Synthetic oligonucleotide
aauucauugguuccccgau

SEQ ID NO: 2382041 - RNA, 19 nt, Artificial Sequence
  Description of Artificial Sequence: Synthetic oligonucleotide
uuugugccaaaauucacuc

SEQ ID NO: 2382042 - RNA, 19 nt, Artificial Sequence
  Description of Artificial Sequence: Synthetic oligonucleotide
gguucacucagcuggaugg

SEQ ID NO: 2382043 - RNA, 19 nt, Artificial Sequence
  Description of Artificial Sequence: Synthetic oligonucleotide
aauugcuccauggucuguc

SEQ ID NO: 2382044 - RNA, 19 nt, Artificial Sequence
  Description of Artificial Sequence: Synthetic oligonucleotide
agguauaauaagccuuggg

SEQ ID NO: 2382045 - RNA, 19 nt, Artificial Sequence
  Description of Artificial Sequence: Synthetic oligonucleotide
uccagguucccagagaacc

SEQ ID NO: 2382046 - RNA, 19 nt, Artificial Sequence
  Description of Artificial Sequence: Synthetic oligonucleotide
auugguuccccgaucaugg

SEQ ID NO: 2382047 - RNA, 19 nt, Artificial Sequence
  Description of Artificial Sequence: Synthetic oligonucleotide
  modified_base (11)..(11): a, c, u, g, unknown or other
acccgaagccncuaaaauc

SEQ ID NO: 2382048 - RNA, 19 nt, Artificial Sequence
  Description of Artificial Sequence: Synthetic oligonucleotide
ucuaccacgcagcagccca

SEQ ID NO: 2382049 - RNA, 19 nt, Artificial Sequence
  Description of Artificial Sequence: Synthetic oligonucleotide
cuagaauugcuccaugguc

SEQ ID NO: 2382050 - RNA, 19 nt, Artificial Sequence
  Description of Artificial Sequence: Synthetic oligonucleotide
cuuguuaggacgaggagga

SEQ ID NO: 2382051 - RNA, 19 nt, Artificial Sequence
  Description of Artificial Sequence: Synthetic oligonucleotide
guagaagggaccuggugag

SEQ ID NO: 2382052 - RNA, 19 nt, Artificial Sequence
  Description of Artificial Sequence: Synthetic oligonucleotide
accaguagucacuugguca

SEQ ID NO: 2382053 - RNA, 19 nt, Artificial Sequence
  Description of Artificial Sequence: Synthetic oligonucleotide
  modified_base (6)..(6): a, c, u, g, unknown or other
aagccncuaaaaucaucag

SEQ ID NO: 2382054 - RNA, 19 nt, Artificial Sequence
  Description of Artificial Sequence: Synthetic oligonucleotide
ugccuuuugaggcacuugu

SEQ ID NO: 2382055 - RNA, 19 nt, Artificial Sequence
  Description of Artificial Sequence: Synthetic oligonucleotide
augguuccagcuucaggcc

SEQ ID NO: 2382056 - RNA, 19 nt, Artificial Sequence
  Description of Artificial Sequence: Synthetic oligonucleotide
cuacaaagcccuagaauug

SEQ ID NO: 2382057 - RNA, 19 nt, Artificial Sequence
  Description of Artificial Sequence: Synthetic oligonucleotide
guucucagguauaauaagc

SEQ ID NO: 2382058 - RNA, 19 nt, Artificial Sequence
  Description of Artificial Sequence: Synthetic oligonucleotide
ugccaaaauucacucauau

SEQ ID NO: 2382059 - RNA, 19 nt, Artificial Sequence
  Description of Artificial Sequence: Synthetic oligonucleotide
uucauucaggagcagggaa

SEQ ID NO: 2382060 - RNA, 19 nt, Artificial Sequence
  Description of Artificial Sequence: Synthetic oligonucleotide
ucugcuccugaacugcacc

SEQ ID NO: 2382061 - RNA, 19 nt, Artificial Sequence
  Description of Artificial Sequence: Synthetic oligonucleotide
uuuuacagguggcacccga

SEQ ID NO: 2382062 - RNA, 19 nt, Artificial Sequence
  Description of Artificial Sequence: Synthetic oligonucleotide
cagaacuucaagacugcag

SEQ ID NO: 2382063 - RNA, 19 nt, Artificial Sequence
  Description of Artificial Sequence: Synthetic oligonucleotide
uuugaggcacuuguuagga

SEQ ID NO: 2382064 - RNA, 19 nt, Artificial Sequence
  Description of Artificial Sequence: Synthetic oligonucleotide
guugcuaaucacccagucc

SEQ ID NO: 2382065 - RNA, 19 nt, Artificial Sequence
  Description of Artificial Sequence: Synthetic oligonucleotide
ucuagaaaugugggaauca

SEQ ID NO: 2382066 - RNA, 19 nt, Artificial Sequence
  Description of Artificial Sequence: Synthetic oligonucleotide
ggucacugguuguagaagg

SEQ ID NO: 2382067 - RNA, 19 nt, Artificial Sequence
  Description of Artificial Sequence: Synthetic oligonucleotide
uacaaagcccuagaauugc

SEQ ID NO: 2382068 - RNA, 19 nt, Artificial Sequence
  Description of Artificial Sequence: Synthetic oligonucleotide
ucacucauauucccugaug

SEQ ID NO: 2382069 - RNA, 19 nt, Artificial Sequence
  Description of Artificial Sequence: Synthetic oligonucleotide
guagagggaguccagcccc

SEQ ID NO: 2382070 - RNA, 19 nt, Artificial Sequence
  Description of Artificial Sequence: Synthetic oligonucleotide
ugcagcugagcuccucugg

SEQ ID NO: 2382071 - RNA, 19 nt, Artificial Sequence
  Description of Artificial Sequence: Synthetic oligonucleotide
ugugagucaagugaacaaa

SEQ ID NO: 2382072 - RNA, 19 nt, Artificial Sequence
  Description of Artificial Sequence: Synthetic oligonucleotide
uuuuguugcuaaucaccca

SEQ ID NO: 2382073 - RNA, 19 nt, Artificial Sequence
  Description of Artificial Sequence: Synthetic oligonucleotide
caagacugcagaaccaguc

SEQ ID NO: 2382074 - RNA, 19 nt, Artificial Sequence
  Description of Artificial Sequence: Synthetic oligonucleotide
uuguuuuguugcuaaucac

SEQ ID NO: 2382075 - RNA, 19 nt, Artificial Sequence
  Description of Artificial Sequence: Synthetic oligonucleotide
cuuguucucagguauaaua

SEQ ID NO: 2382076 - RNA, 19 nt, Artificial Sequence
  Description of Artificial Sequence: Synthetic oligonucleotide
cauauucccugaugguucc

SEQ ID NO: 2382077 - RNA, 19 nt, Artificial Sequence
  Description of Artificial Sequence: Synthetic oligonucleotide
gguauaauaagccuugggu

SEQ ID NO: 2382078 - RNA, 19 nt, Artificial Sequence
  Description of Artificial Sequence: Synthetic oligonucleotide
ugugggaaucauagagacc

SEQ ID NO: 2382079 - RNA, 19 nt, Artificial Sequence
  Description of Artificial Sequence: Synthetic oligonucleotide
aguccuuguucucagguau

SEQ ID NO: 2382080 - RNA, 19 nt, Artificial Sequence
  Description of Artificial Sequence: Synthetic oligonucleotide
ucuucuucggcugaggcuu

SEQ ID NO: 2382081 - RNA, 19 nt, Artificial Sequence
  Description of Artificial Sequence: Synthetic oligonucleotide
ucuagggugcccagggcug

SEQ ID NO: 2382082 - RNA, 19 nt, Artificial Sequence
  Description of Artificial Sequence: Synthetic oligonucleotide
aguuugugccaaaauucac

SEQ ID NO: 2382083 - RNA, 19 nt, Artificial Sequence
  Description of Artificial Sequence: Synthetic oligonucleotide
  modified_base (4)..(4): a, c, u, g, unknown or other
gccncuaaaaucaucagca

SEQ ID NO: 2382084 - RNA, 19 nt, Artificial Sequence
  Description of Artificial Sequence: Synthetic oligonucleotide
uguugcuaaucacccaguc

SEQ ID NO: 2382085 - RNA, 19 nt, Artificial Sequence
  Description of Artificial Sequence: Synthetic oligonucleotide
ccgaccuucauucaggagc

SEQ ID NO: 2382086 - RNA, 19 nt, Artificial Sequence
  Description of Artificial Sequence: Synthetic oligonucleotide
ugaccccaucuccaggagg

SEQ ID NO: 2382087 - RNA, 19 nt, Artificial Sequence
  Description of Artificial Sequence: Synthetic oligonucleotide
uggcauuucuucugggcug

SEQ ID NO: 2382088 - RNA, 19 nt, Artificial Sequence
  Description of Artificial Sequence: Synthetic oligonucleotide
auggcucuagaaauguggg

SEQ ID NO: 2382089 - RNA, 19 nt, Artificial Sequence
  Description of Artificial Sequence: Synthetic oligonucleotide
gccaaugugagucaaguga

SEQ ID NO: 2382090 - RNA, 19 nt, Artificial Sequence
  Description of Artificial Sequence: Synthetic oligonucleotide
aagcccuagaauugcucca

SEQ ID NO: 2382091 - RNA, 19 nt, Artificial Sequence
  Description of Artificial Sequence: Synthetic oligonucleotide
cacgcagcagcccaguuug

SEQ ID NO: 2382092 - RNA, 19 nt, Artificial Sequence
  Description of Artificial Sequence: Synthetic oligonucleotide
gguuguagaagggaccugg

SEQ ID NO: 2382093 - RNA, 19 nt, Artificial Sequence
  Description of Artificial Sequence: Synthetic oligonucleotide
uuuacagguggcacccgac

SEQ ID NO: 2382094 - RNA, 19 nt, Artificial Sequence
  Description of Artificial Sequence: Synthetic oligonucleotide
uucccuuggaucucaucug

SEQ ID NO: 2382095 - RNA, 19 nt, Artificial Sequence
  Description of Artificial Sequence: Synthetic oligonucleotide
auaauaagccuuggguuca

SEQ ID NO: 2382096 - RNA, 19 nt, Artificial Sequence
  Description of Artificial Sequence: Synthetic oligonucleotide
gaaccagucccaugggaac

SEQ ID NO: 2382097 - RNA, 19 nt, Artificial Sequence
  Description of Artificial Sequence: Synthetic oligonucleotide
guauaauaagccuuggguu

SEQ ID NO: 2382098 - RNA, 19 nt, Artificial Sequence
  Description of Artificial Sequence: Synthetic oligonucleotide
acucauauucccugauggu

SEQ ID NO: 2382099 - RNA, 19 nt, Artificial Sequence
  Description of Artificial Sequence: Synthetic oligonucleotide
aguagucacuuggucaguc

SEQ ID NO: 2382100 - RNA, 19 nt, Artificial Sequence
  Description of Artificial Sequence: Synthetic oligonucleotide
uuggaucucaucugcuccu

SEQ ID NO: 2382101 - RNA, 19 nt, Artificial Sequence
  Description of Artificial Sequence: Synthetic oligonucleotide
caguuugugccaaaauuca

SEQ ID NO: 2382102 - RNA, 19 nt, Artificial Sequence
  Description of Artificial Sequence: Synthetic oligonucleotide
uauucccugaugguuccag

SEQ ID NO: 2382103 - RNA, 19 nt, Artificial Sequence
  Description of Artificial Sequence: Synthetic oligonucleotide
cucguugggucacugguug

SEQ ID NO: 2382104 - RNA, 19 nt, Artificial Sequence
  Description of Artificial Sequence: Synthetic oligonucleotide
cugaacugcaccugucaug

SEQ ID NO: 2382105 - RNA, 19 nt, Artificial Sequence
  Description of Artificial Sequence: Synthetic oligonucleotide
guuaggacgaggaggagga

SEQ ID NO: 2382106 - RNA, 19 nt, Artificial Sequence
  Description of Artificial Sequence: Synthetic oligonucleotide
  modified_base (10)..(10): a, c, u, g, unknown or other
cccgaagccncuaaaauca

SEQ ID NO: 2382107 - RNA, 19 nt, Artificial Sequence
  Description of Artificial Sequence: Synthetic oligonucleotide
uucgccucuucuucggcug

SEQ ID NO: 2382108 - RNA, 19 nt, Artificial Sequence
  Description of Artificial Sequence: Synthetic oligonucleotide
cuggauggcucuagaaaug

SEQ ID NO: 2382109 - RNA, 19 nt, Artificial Sequence
  Description of Artificial Sequence: Synthetic oligonucleotide
uucggucaauccgucuucg

SEQ ID NO: 2382110 - RNA, 19 nt, Artificial Sequence
  Description of Artificial Sequence: Synthetic oligonucleotide
ccaguagucacuuggucag

SEQ ID NO: 2382111 - RNA, 19 nt, Artificial Sequence
  Description of Artificial Sequence: Synthetic oligonucleotide
cuuagccgugcagugaaag

SEQ ID NO: 2382112 - RNA, 19 nt, Artificial Sequence
  Description of Artificial Sequence: Synthetic oligonucleotide
accagaacuucaagacugc

SEQ ID NO: 2382113 - RNA, 19 nt, Artificial Sequence
  Description of Artificial Sequence: Synthetic oligonucleotide
uggcacccgaccuucauuc

SEQ ID NO: 2382114 - RNA, 19 nt, Artificial Sequence
  Description of Artificial Sequence: Synthetic oligonucleotide
aacucauuccagguuccca

SEQ ID NO: 2382115 - RNA, 19 nt, Artificial Sequence
  Description of Artificial Sequence: Synthetic oligonucleotide
agguucugucuucuuuuag

SEQ ID NO: 2382116 - RNA, 19 nt, Artificial Sequence
  Description of Artificial Sequence: Synthetic oligonucleotide
ggcaaguccgucuccagcc

SEQ ID NO: 2382117 - RNA, 19 nt, Artificial Sequence
  Description of Artificial Sequence: Synthetic oligonucleotide
cacccgaccuucauucagg

SEQ ID NO: 2382118 - RNA, 19 nt, Artificial Sequence
  Description of Artificial Sequence: Synthetic oligonucleotide
uggauggcucuagaaaugu

SEQ ID NO: 2382119 - RNA, 19 nt, Artificial Sequence
  Description of Artificial Sequence: Synthetic oligonucleotide
uuguugcuaaucacccagu

SEQ ID NO: 2382120 - RNA, 19 nt, Artificial Sequence
  Description of Artificial Sequence: Synthetic oligonucleotide
ugccuugaccccaucucca

SEQ ID NO: 2382121 - RNA, 19 nt, Artificial Sequence
  Description of Artificial Sequence: Synthetic oligonucleotide
cagcagcccaguuugugcc

SEQ ID NO: 2382122 - RNA, 19 nt, Artificial Sequence
  Description of Artificial Sequence: Synthetic oligonucleotide
gugaaaguuggagucucag

SEQ ID NO: 2382123 - RNA, 19 nt, Artificial Sequence
  Description of Artificial Sequence: Synthetic oligonucleotide
caaugugagucaagugaac

SEQ ID NO: 2382124 - RNA, 19 nt, Artificial Sequence
  Description of Artificial Sequence: Synthetic oligonucleotide
ucggcugaggcuucucuac

SEQ ID NO: 2382125 - RNA, 19 nt, Artificial Sequence
  Description of Artificial Sequence: Synthetic oligonucleotide
ccagcucagaucuagggug

SEQ ID NO: 2382126 - RNA, 19 nt, Artificial Sequence
  Description of Artificial Sequence: Synthetic oligonucleotide
ugggucacugguuguagaa

SEQ ID NO: 2382127 - RNA, 19 nt, Artificial Sequence
  Description of Artificial Sequence: Synthetic oligonucleotide
aggcuucucuaccacgcag

SEQ ID NO: 2382128 - RNA, 19 nt, Artificial Sequence
  Description of Artificial Sequence: Synthetic oligonucleotide
ggagcagggaacucauucc

SEQ ID NO: 2382129 - RNA, 19 nt, Artificial Sequence
  Description of Artificial Sequence: Synthetic oligonucleotide
gucacugguuguagaaggg

SEQ ID NO: 2382130 - RNA, 19 nt, Artificial Sequence
  Description of Artificial Sequence: Synthetic oligonucleotide
aaucaucagcaagaggcuu

SEQ ID NO: 2382131 - RNA, 19 nt, Artificial Sequence
  Description of Artificial Sequence: Synthetic oligonucleotide
cagcaagaggcuugggcag

SEQ ID NO: 2382132 - RNA, 19 nt, Artificial Sequence
  Description of Artificial Sequence: Synthetic oligonucleotide
agagagggcucuuguuuug

SEQ ID NO: 2382133 - RNA, 19 nt, Artificial Sequence
  Description of Artificial Sequence: Synthetic oligonucleotide
agccaaugugagucaagug

SEQ ID NO: 2382134 - RNA, 19 nt, Artificial Sequence
  Description of Artificial Sequence: Synthetic oligonucleotide
gacccuuagccgugcagug

SEQ ID NO: 2382135 - RNA, 19 nt, Artificial Sequence
  Description of Artificial Sequence: Synthetic oligonucleotide
cauggaaccagaacuucaa

SEQ ID NO: 2382136 - RNA, 19 nt, Artificial Sequence
  Description of Artificial Sequence: Synthetic oligonucleotide
gagacccuuagccgugcag

SEQ ID NO: 2382137 - RNA, 19 nt, Artificial Sequence
  Description of Artificial Sequence: Synthetic oligonucleotide
gaucucaucugcuccugaa

SEQ ID NO: 2382138 - RNA, 19 nt, Artificial Sequence
  Description of Artificial Sequence: Synthetic oligonucleotide
cucuagaaaugugggaauc

SEQ ID NO: 2382139 - RNA, 19 nt, Artificial Sequence
  Description of Artificial Sequence: Synthetic oligonucleotide
cuucaagacugcagaacca

SEQ ID NO: 2382140 - RNA, 19 nt, Artificial Sequence
  Description of Artificial Sequence: Synthetic oligonucleotide
accugucauggcaaguccg

SEQ ID NO: 2382141 - RNA, 19 nt, Artificial Sequence
  Description of Artificial Sequence: Synthetic oligonucleotide
agacccuuagccgugcagu

SEQ ID NO: 2382142 - RNA, 19 nt, Artificial Sequence
  Description of Artificial Sequence: Synthetic oligonucleotide
  modified_base (17)..(17): a, c, u, g, unknown or other
ucucagacccgaagccncu

SEQ ID NO: 2382143 - RNA, 19 nt, Artificial Sequence
  Description of Artificial Sequence: Synthetic oligonucleotide
cucgguuucccuuggaucu

SEQ ID NO: 2382144 - RNA, 19 nt, Artificial Sequence
  Description of Artificial Sequence: Synthetic oligonucleotide
aggcacaagguucugucuu

SEQ ID NO: 2382145 - RNA, 19 nt, Artificial Sequence
  Description of Artificial Sequence: Synthetic oligonucleotide
uagaagggaccuggugagg

SEQ ID NO: 2382146 - RNA, 19 nt, Artificial Sequence
  Description of Artificial Sequence: Synthetic oligonucleotide
guuugugccaaaauucacu

SEQ ID NO: 2382147 - RNA, 19 nt, Artificial Sequence
  Description of Artificial Sequence: Synthetic oligonucleotide
auugcuccauggucugucu

SEQ ID NO: 2382148 - RNA, 19 nt, Artificial Sequence
  Description of Artificial Sequence: Synthetic oligonucleotide
agcaagaggcuugggcagg

SEQ ID NO: 2382149 - RNA, 19 nt, Artificial Sequence
  Description of Artificial Sequence: Synthetic oligonucleotide
  modified_base (19)..(19): a, c, u, g, unknown or other
agucucagacccgaagccn

SEQ ID NO: 2382150 - RNA, 19 nt, Artificial Sequence
  Description of Artificial Sequence: Synthetic oligonucleotide
caccugucauggcaagucc

SEQ ID NO: 2382151 - RNA, 19 nt, Artificial Sequence
  Description of Artificial Sequence: Synthetic oligonucleotide
cagguauaauaagccuugg

SEQ ID NO: 2382152 - RNA, 19 nt, Artificial Sequence
  Description of Artificial Sequence: Synthetic oligonucleotide
cccuagaauugcuccaugg

SEQ ID NO: 2382153 - RNA, 19 nt, Artificial Sequence
  Description of Artificial Sequence: Synthetic oligonucleotide
uccuuguucucagguauaa

SEQ ID NO: 2382154 - RNA, 19 nt, Artificial Sequence
  Description of Artificial Sequence: Synthetic oligonucleotide
gagaggggcucguuggguc

SEQ ID NO: 2382155 - RNA, 19 nt, Artificial Sequence
  Description of Artificial Sequence: Synthetic oligonucleotide
gaucaugguucggucaauc

SEQ ID NO: 2382156 - RNA, 19 nt, Artificial Sequence
  Description of Artificial Sequence: Synthetic oligonucleotide
caugguucggucaauccgu

SEQ ID NO: 2382157 - RNA, 19 nt, Artificial Sequence
  Description of Artificial Sequence: Synthetic oligonucleotide
agcucagaucuagggugcc

SEQ ID NO: 2382158 - RNA, 19 nt, Artificial Sequence
  Description of Artificial Sequence: Synthetic oligonucleotide
uugaggcacuuguuaggac

SEQ ID NO: 2382159 - RNA, 19 nt, Artificial Sequence
  Description of Artificial Sequence: Synthetic oligonucleotide
caagugaacaaaauucauu

SEQ ID NO: 2382160 - RNA, 19 nt, Artificial Sequence
  Description of Artificial Sequence: Synthetic oligonucleotide
  modified_base (15)..(15): a, c, u, g, unknown or other
ucagacccgaagccncuaa

SEQ ID NO: 2382161 - RNA, 19 nt, Artificial Sequence
  Description of Artificial Sequence: Synthetic oligonucleotide
aauaagccuuggguucacu

SEQ ID NO: 2382162 - RNA, 19 nt, Artificial Sequence
  Description of Artificial Sequence: Synthetic oligonucleotide
guuccccgaucaugguucg

SEQ ID NO: 2382163 - RNA, 19 nt, Artificial Sequence
  Description of Artificial Sequence: Synthetic oligonucleotide
cauggucugucucgguuuc

SEQ ID NO: 2382164 - RNA, 19 nt, Artificial Sequence
  Description of Artificial Sequence: Synthetic oligonucleotide
uccccgaucaugguucggu

SEQ ID NO: 2382165 - RNA, 19 nt, Artificial Sequence
  Description of Artificial Sequence: Synthetic oligonucleotide
ugggaaucauagagacccu

SEQ ID NO: 2382166 - RNA, 19 nt, Artificial Sequence
  Description of Artificial Sequence: Synthetic oligonucleotide
cuucaggccucugccagag

SEQ ID NO: 2382167 - RNA, 19 nt, Artificial Sequence
  Description of Artificial Sequence: Synthetic oligonucleotide
gaacucauuccagguuccc

SEQ ID NO: 2382168 - RNA, 19 nt, Artificial Sequence
  Description of Artificial Sequence: Synthetic oligonucleotide
caaguccgucuccagcccc

SEQ ID NO: 2382169 - RNA, 19 nt, Artificial Sequence
  Description of Artificial Sequence: Synthetic oligonucleotide
agucccaugggaacuacaa

SEQ ID NO: 2382170 - RNA, 19 nt, Artificial Sequence
  Description of Artificial Sequence: Synthetic oligonucleotide
guuggagucucagacccga

SEQ ID NO: 2382171 - RNA, 19 nt, Artificial Sequence
  Description of Artificial Sequence: Synthetic oligonucleotide
ucggucaauccgucuucgc

SEQ ID NO: 2382172 - RNA, 19 nt, Artificial Sequence
  Description of Artificial Sequence: Synthetic oligonucleotide
cucagguauaauaagccuu

SEQ ID NO: 2382173 - RNA, 19 nt, Artificial Sequence
  Description of Artificial Sequence: Synthetic oligonucleotide
ucccugaugguuccagcuu

SEQ ID NO: 2382174 - RNA, 19 nt, Artificial Sequence
  Description of Artificial Sequence: Synthetic oligonucleotide
uucggcugaggcuucucua

SEQ ID NO: 2382175 - RNA, 19 nt, Artificial Sequence
  Description of Artificial Sequence: Synthetic oligonucleotide
ggcucuagaaaugugggaa

SEQ ID NO: 2382176 - RNA, 19 nt, Artificial Sequence
  Description of Artificial Sequence: Synthetic oligonucleotide
guucggucaauccgucuuc

SEQ ID NO: 2382177 - RNA, 19 nt, Artificial Sequence
  Description of Artificial Sequence: Synthetic oligonucleotide
uccgucuucgccucuucuu

SEQ ID NO: 2382178 - RNA, 19 nt, Artificial Sequence
  Description of Artificial Sequence: Synthetic oligonucleotide
ugguuccccgaucaugguu

SEQ ID NO: 2382179 - RNA, 19 nt, Artificial Sequence
  Description of Artificial Sequence: Synthetic oligonucleotide
cagugaaaguuggagucuc

SEQ ID NO: 2382180 - RNA, 19 nt, Artificial Sequence
  Description of Artificial Sequence: Synthetic oligonucleotide
ucauugguuccccgaucau

SEQ ID NO: 2382181 - RNA, 19 nt, Artificial Sequence
  Description of Artificial Sequence: Synthetic oligonucleotide
caccaguagucacuugguc

SEQ ID NO: 2382182 - RNA, 19 nt, Artificial Sequence
  Description of Artificial Sequence: Synthetic oligonucleotide
ugcuaaucacccaguccuu

SEQ ID NO: 2382183 - RNA, 19 nt, Artificial Sequence
  Description of Artificial Sequence: Synthetic oligonucleotide
ggaggagaggggcucguug

SEQ ID NO: 2382184 - RNA, 19 nt, Artificial Sequence
  Description of Artificial Sequence: Synthetic oligonucleotide
auggucugucucgguuucc

SEQ ID NO: 2382185 - RNA, 19 nt, Artificial Sequence
  Description of Artificial Sequence: Synthetic oligonucleotide
acccgaccuucauucagga

SEQ ID NO: 2382186 - RNA, 19 nt, Artificial Sequence
  Description of Artificial Sequence: Synthetic oligonucleotide
ugucucgguuucccuugga

SEQ ID NO: 2382187 - RNA, 19 nt, Artificial Sequence
  Description of Artificial Sequence: Synthetic oligonucleotide
uuaggacgaggaggaggag

SEQ ID NO: 2382188 - RNA, 19 nt, Artificial Sequence
  Description of Artificial Sequence: Synthetic oligonucleotide
cuggcccaccaguagucac

SEQ ID NO: 2382189 - RNA, 19 nt, Artificial Sequence
  Description of Artificial Sequence: Synthetic oligonucleotide
ugguucggucaauccgucu

SEQ ID NO: 2382190 - RNA, 19 nt, Artificial Sequence
  Description of Artificial Sequence: Synthetic oligonucleotide
augguucggucaauccguc

SEQ ID NO: 2382191 - RNA, 19 nt, Artificial Sequence
  Description of Artificial Sequence: Synthetic oligonucleotide
cauuccagguucccagaga

SEQ ID NO: 2382192 - RNA, 19 nt, Artificial Sequence
  Description of Artificial Sequence: Synthetic oligonucleotide
ugguuguagaagggaccug

SEQ ID NO: 2382193 - RNA, 19 nt, Artificial Sequence
  Description of Artificial Sequence: Synthetic oligonucleotide
ggucaauccgucuucgccu

SEQ ID NO: 2382194 - RNA, 19 nt, Artificial Sequence
  Description of Artificial Sequence: Synthetic oligonucleotide
cucagcuggauggcucuag

SEQ ID NO: 2382195 - RNA, 19 nt, Artificial Sequence
  Description of Artificial Sequence: Synthetic oligonucleotide
uugguuccccgaucauggu

SEQ ID NO: 2382196 - RNA, 19 nt, Artificial Sequence
  Description of Artificial Sequence: Synthetic oligonucleotide
  modified_base (13)..(13): a, c, u, g, unknown or other
agacccgaagccncuaaaa

SEQ ID NO: 2382197 - RNA, 19 nt, Artificial Sequence
  Description of Artificial Sequence: Synthetic oligonucleotide
ucguugggucacugguugu

SEQ ID NO: 2382198 - RNA, 19 nt, Artificial Sequence
  Description of Artificial Sequence: Synthetic oligonucleotide
cagaaccagucccauggga

SEQ ID NO: 2382199 - RNA, 19 nt, Artificial Sequence
  Description of Artificial Sequence: Synthetic oligonucleotide
acugcaccugucauggcaa

SEQ ID NO: 2382200 - RNA, 19 nt, Artificial Sequence
  Description of Artificial Sequence: Synthetic oligonucleotide
cuaaucacccaguccuugu

SEQ ID NO: 2382201 - RNA, 19 nt, Artificial Sequence
  Description of Artificial Sequence: Synthetic oligonucleotide
ugcaccugucauggcaagu

SEQ ID NO: 2382202 - RNA, 19 nt, Artificial Sequence
  Description of Artificial Sequence: Synthetic oligonucleotide
cuccugaacugcaccuguc

SEQ ID NO: 2382203 - RNA, 19 nt, Artificial Sequence
  Description of Artificial Sequence: Synthetic oligonucleotide
acugcagaaccagucccau

SEQ ID NO: 2382204 - RNA, 19 nt, Artificial Sequence
  Description of Artificial Sequence: Synthetic oligonucleotide
ccuuggaucucaucugcuc

SEQ ID NO: 2382205 - RNA, 19 nt, Artificial Sequence
  Description of Artificial Sequence: Synthetic oligonucleotide
gcacccgaccuucauucag

SEQ ID NO: 2382206 - RNA, 19 nt, Artificial Sequence
  Description of Artificial Sequence: Synthetic oligonucleotide
gcacuuguuaggacgagga

SEQ ID NO: 2382207 - RNA, 19 nt, Artificial Sequence
  Description of Artificial Sequence: Synthetic oligonucleotide
gcuaaucacccaguccuug

SEQ ID NO: 2382208 - RNA, 19 nt, Artificial Sequence
  Description of Artificial Sequence: Synthetic oligonucleotide
cagggcugcagcugagcuc

SEQ ID NO: 2382209 - RNA, 19 nt, Artificial Sequence
  Description of Artificial Sequence: Synthetic oligonucleotide
augccuuuugaggcacuug

SEQ ID NO: 2382210 - RNA, 19 nt, Artificial Sequence
  Description of Artificial Sequence: Synthetic oligonucleotide
agagggcucuuguuuuguu

SEQ ID NO: 2382211 - RNA, 19 nt, Artificial Sequence
  Description of Artificial Sequence: Synthetic oligonucleotide
gggucacugguuguagaag

SEQ ID NO: 2382212 - RNA, 19 nt, Artificial Sequence
  Description of Artificial Sequence: Synthetic oligonucleotide
agcccuagaauugcuccau

SEQ ID NO: 2382213 - RNA, 19 nt, Artificial Sequence
  Description of Artificial Sequence: Synthetic oligonucleotide
cggucaauccgucuucgcc

SEQ ID NO: 2382214 - RNA, 19 nt, Artificial Sequence
  Description of Artificial Sequence: Synthetic oligonucleotide
agagacccuuagccgugca

SEQ ID NO: 2382215 - RNA, 19 nt, Artificial Sequence
  Description of Artificial Sequence: Synthetic oligonucleotide
cucauauucccugaugguu

SEQ ID NO: 2382216 - RNA, 19 nt, Artificial Sequence
  Description of Artificial Sequence: Synthetic oligonucleotide
ugggaacuacaaagcccua

SEQ ID NO: 2382217 - RNA, 19 nt, Artificial Sequence
  Description of Artificial Sequence: Synthetic oligonucleotide
cuagaaaugugggaaucau

SEQ ID NO: 2382218 - RNA, 19 nt, Artificial Sequence
  Description of Artificial Sequence: Synthetic oligonucleotide
gcaaguccgucuccagccc

SEQ ID NO: 2382219 - RNA, 19 nt, Artificial Sequence
  Description of Artificial Sequence: Synthetic oligonucleotide
uuccccgaucaugguucgg

SEQ ID NO: 2382220 - RNA, 19 nt, Artificial Sequence
  Description of Artificial Sequence: Synthetic oligonucleotide
cucuaccacgcagcagccc

SEQ ID NO: 2382221 - RNA, 19 nt, Artificial Sequence
  Description of Artificial Sequence: Synthetic oligonucleotide
  modified_base (14)..(14): a, c, u, g, unknown or other
cagacccgaagccncuaaa

SEQ ID NO: 2382222 - RNA, 19 nt, Artificial Sequence
  Description of Artificial Sequence: Synthetic oligonucleotide
ggguggcauuucuucuggg

SEQ ID NO: 2382223 - RNA, 19 nt, Artificial Sequence
  Description of Artificial Sequence: Synthetic oligonucleotide
gccgugcagugaaaguugg

SEQ ID NO: 2382224 - RNA, 19 nt, Artificial Sequence
  Description of Artificial Sequence: Synthetic oligonucleotide
ggaaucauagagacccuua

SEQ ID NO: 2382225 - RNA, 19 nt, Artificial Sequence
  Description of Artificial Sequence: Synthetic oligonucleotide
cuucuucggcugaggcuuc

SEQ ID NO: 2382226 - RNA, 19 nt, Artificial Sequence
  Description of Artificial Sequence: Synthetic oligonucleotide
ucgguuucccuuggaucuc

SEQ ID NO: 2382227 - RNA, 19 nt, Artificial Sequence
  Description of Artificial Sequence: Synthetic oligonucleotide
acccuuagccgugcaguga

SEQ ID NO: 2382228 - RNA, 19 nt, Artificial Sequence
  Description of Artificial Sequence: Synthetic oligonucleotide
gcaccugucauggcaaguc

SEQ ID NO: 2382229 - RNA, 19 nt, Artificial Sequence
  Description of Artificial Sequence: Synthetic oligonucleotide
ggauggcucuagaaaugug

SEQ ID NO: 2382230 - RNA, 19 nt, Artificial Sequence
  Description of Artificial Sequence: Synthetic oligonucleotide
auauucccugaugguucca

SEQ ID NO: 2382231 - RNA, 19 nt, Artificial Sequence
  Description of Artificial Sequence: Synthetic oligonucleotide
gggcucguugggucacugg

SEQ ID NO: 2382232 - RNA, 19 nt, Artificial Sequence
  Description of Artificial Sequence: Synthetic oligonucleotide
uucuucggcugaggcuucu

SEQ ID NO: 2382233 - RNA, 19 nt, Artificial Sequence
  Description of Artificial Sequence: Synthetic oligonucleotide
ccgucuucgccucuucuuc

SEQ ID NO: 2382234 - RNA, 19 nt, Artificial Sequence
  Description of Artificial Sequence: Synthetic oligonucleotide
gguucggucaauccgucuu

SEQ ID NO: 2382235 - RNA, 19 nt, Artificial Sequence
  Description of Artificial Sequence: Synthetic oligonucleotide
cagcuucaggccucugcca

SEQ ID NO: 2382236 - RNA, 19 nt, Artificial Sequence
  Description of Artificial Sequence: Synthetic oligonucleotide
gggcuggacauggaaccag

SEQ ID NO: 2382237 - RNA, 19 nt, Artificial Sequence
  Description of Artificial Sequence: Synthetic oligonucleotide
agcccaguuugugccaaaa

SEQ ID NO: 2382238 - RNA, 19 nt, Artificial Sequence
  Description of Artificial Sequence: Synthetic oligonucleotide
ucuucggcugaggcuucuc

SEQ ID NO: 2382239 - RNA, 19 nt, Artificial Sequence
  Description of Artificial Sequence: Synthetic oligonucleotide
cuucgccucuucuucggcu

SEQ ID NO: 2382240 - RNA, 19 nt, Artificial Sequence
  Description of Artificial Sequence: Synthetic oligonucleotide
gucucgguuucccuuggau

SEQ ID NO: 2382241 - RNA, 19 nt, Artificial Sequence
  Description of Artificial Sequence: Synthetic oligonucleotide
  modified_base (3)..(3): a, c, u, g, unknown or other
ccncuaaaaucaucagcaa

SEQ ID NO: 2382242 - RNA, 19 nt, Artificial Sequence
  Description of Artificial Sequence: Synthetic oligonucleotide
gaggggcucguugggucac

SEQ ID NO: 2382243 - RNA, 19 nt, Artificial Sequence
  Description of Artificial Sequence: Synthetic oligonucleotide
cgaccuucauucaggagca

SEQ ID NO: 2382244 - RNA, 19 nt, Artificial Sequence
  Description of Artificial Sequence: Synthetic oligonucleotide
uggguucacucagcuggau

SEQ ID NO: 2382245 - RNA, 19 nt, Artificial Sequence
  Description of Artificial Sequence: Synthetic oligonucleotide
cacucagcuggauggcucu

SEQ ID NO: 2382246 - RNA, 19 nt, Artificial Sequence
  Description of Artificial Sequence: Synthetic oligonucleotide
gagagggcucuuguuuugu

SEQ ID NO: 2382247 - RNA, 19 nt, Artificial Sequence
  Description of Artificial Sequence: Synthetic oligonucleotide
guuguagaagggaccuggu

SEQ ID NO: 2382248 - RNA, 19 nt, Artificial Sequence
  Description of Artificial Sequence: Synthetic oligonucleotide
gaccuggugaggguggcau

SEQ ID NO: 2382249 - RNA, 19 nt, Artificial Sequence
  Description of Artificial Sequence: Synthetic oligonucleotide
  modified_base (8)..(8): a, c, u, g, unknown or other
cgaagccncuaaaaucauc

SEQ ID NO: 2382250 - RNA, 19 nt, Artificial Sequence
  Description of Artificial Sequence: Synthetic oligonucleotide
gcucagaucuagggugccc

SEQ ID NO: 2382251 - RNA, 19 nt, Artificial Sequence
  Description of Artificial Sequence: Synthetic oligonucleotide
gcccuagaauugcuccaug

SEQ ID NO: 2382252 - RNA, 19 nt, Artificial Sequence
  Description of Artificial Sequence: Synthetic oligonucleotide
caggcacaagguucugucu

SEQ ID NO: 2382253 - RNA, 19 nt, Artificial Sequence
  Description of Artificial Sequence: Synthetic oligonucleotide
gcaagaggcuugggcaggc

SEQ ID NO: 2382254 - RNA, 19 nt, Artificial Sequence
  Description of Artificial Sequence: Synthetic oligonucleotide
ccgaucaugguucggucaa

SEQ ID NO: 2382255 - RNA, 19 nt, Artificial Sequence
  Description of Artificial Sequence: Synthetic oligonucleotide
agggugcccagggcugcag

SEQ ID NO: 2382256 - RNA, 19 nt, Artificial Sequence
  Description of Artificial Sequence: Synthetic oligonucleotide
cccaguuugugccaaaauu

SEQ ID NO: 2382257 - RNA, 19 nt, Artificial Sequence
  Description of Artificial Sequence: Synthetic oligonucleotide
cccgaucaugguucgguca

SEQ ID NO: 2382258 - RNA, 19 nt, Artificial Sequence
  Description of Artificial Sequence: Synthetic oligonucleotide
cccgaccuucauucaggag

SEQ ID NO: 2382259 - RNA, 19 nt, Artificial Sequence
  Description of Artificial Sequence: Synthetic oligonucleotide
guccuuguucucagguaua

SEQ ID NO: 2382260 - RNA, 19 nt, Artificial Sequence
  Description of Artificial Sequence: Synthetic oligonucleotide
  modified_base (16)..(16): a, c, u, g, unknown or other
cucagacccgaagccncua

SEQ ID NO: 2382261 - RNA, 19 nt, Artificial Sequence
  Description of Artificial Sequence: Synthetic oligonucleotide
ggacauggaaccagaacuu

SEQ ID NO: 2382262 - RNA, 19 nt, Artificial Sequence
  Description of Artificial Sequence: Synthetic oligonucleotide
cccuuagccgugcagugaa

SEQ ID NO: 2382263 - RNA, 19 nt, Artificial Sequence
  Description of Artificial Sequence: Synthetic oligonucleotide
gcuccugaacugcaccugu

SEQ ID NO: 2382264 - RNA, 19 nt, Artificial Sequence
  Description of Artificial Sequence: Synthetic oligonucleotide
ggcacccgaccuucauuca

SEQ ID NO: 2382265 - RNA, 19 nt, Artificial Sequence
  Description of Artificial Sequence: Synthetic oligonucleotide
cccaugccuuuugaggcac

SEQ ID NO: 2382266 - RNA, 19 nt, Artificial Sequence
  Description of Artificial Sequence: Synthetic oligonucleotide
ccugucauggcaaguccgu

SEQ ID NO: 2382267 - RNA, 19 nt, Artificial Sequence
  Description of Artificial Sequence: Synthetic oligonucleotide
ccccgaucaugguucgguc

SEQ ID NO: 2382268 - RNA, 19 nt, Artificial Sequence
  Description of Artificial Sequence: Synthetic oligonucleotide
ggcucuuguuuuguugcua

SEQ ID NO: 2382269 - RNA, 19 nt, Artificial Sequence
  Description of Artificial Sequence: Synthetic oligonucleotide
ccagaacuucaagacugca

SEQ ID NO: 2382270 - RNA, 19 nt, Artificial Sequence
  Description of Artificial Sequence: Synthetic oligonucleotide
acucagcuggauggcucua

SEQ ID NO: 2382271 - RNA, 19 nt, Artificial Sequence
  Description of Artificial Sequence: Synthetic oligonucleotide
guggcacccgaccuucauu

SEQ ID NO: 2382272 - RNA, 19 nt, Artificial Sequence
  Description of Artificial Sequence: Synthetic oligonucleotide
cacaagguucugucuucuu

SEQ ID NO: 2382273 - RNA, 19 nt, Artificial Sequence
  Description of Artificial Sequence: Synthetic oligonucleotide
caugccuuuugaggcacuu

SEQ ID NO: 2382274 - RNA, 19 nt, Artificial Sequence
  Description of Artificial Sequence: Synthetic oligonucleotide
ccaccaguagucacuuggu

SEQ ID NO: 2382275 - RNA, 19 nt, Artificial Sequence
  Description of Artificial Sequence: Synthetic oligonucleotide
ccugaacugcaccugucau

SEQ ID NO: 2382276 - RNA, 19 nt, Artificial Sequence
  Description of Artificial Sequence: Synthetic oligonucleotide
ccagucccaugggaacuac

SEQ ID NO: 2382277 - RNA, 19 nt, Artificial Sequence
  Description of Artificial Sequence: Synthetic oligonucleotide
ggagaggggcucguugggu

SEQ ID NO: 2382278 - RNA, 19 nt, Artificial Sequence
  Description of Artificial Sequence: Synthetic oligonucleotide
acgcagcagcccaguuugu

SEQ ID NO: 2382279 - RNA, 19 nt, Artificial Sequence
  Description of Artificial Sequence: Synthetic oligonucleotide
cuccauggucugucucggu

SEQ ID NO: 2382280 - RNA, 19 nt, Artificial Sequence
  Description of Artificial Sequence: Synthetic oligonucleotide
cagcccaguuugugccaaa

SEQ ID NO: 2382281 - RNA, 19 nt, Artificial Sequence
  Description of Artificial Sequence: Synthetic oligonucleotide
gcccaguuugugccaaaau

SEQ ID NO: 2382282 - RNA, 19 nt, Artificial Sequence
  Description of Artificial Sequence: Synthetic oligonucleotide
caguagucacuuggucagu

SEQ ID NO: 2382283 - RNA, 19 nt, Artificial Sequence
  Description of Artificial Sequence: Synthetic oligonucleotide
ggugaggguggcauuucuu

SEQ ID NO: 2382284 - RNA, 19 nt, Artificial Sequence
  Description of Artificial Sequence: Synthetic oligonucleotide
ggaccuggugaggguggca

SEQ ID NO: 2382285 - RNA, 19 nt, Artificial Sequence
  Description of Artificial Sequence: Synthetic oligonucleotide
caauccgucuucgccucuu

SEQ ID NO: 2382286 - RNA, 19 nt, Artificial Sequence
  Description of Artificial Sequence: Synthetic oligonucleotide
ccuuagccgugcagugaaa

SEQ ID NO: 2382287 - RNA, 19 nt, Artificial Sequence
  Description of Artificial Sequence: Synthetic oligonucleotide
  modified_base (9)..(9): a, c, u, g, unknown or other
ccgaagccncuaaaaucau

SEQ ID NO: 2382288 - RNA, 19 nt, Artificial Sequence
  Description of Artificial Sequence: Synthetic oligonucleotide
gcucguugggucacugguu

SEQ ID NO: 2382289 - RNA, 19 nt, Artificial Sequence
  Description of Artificial Sequence: Synthetic oligonucleotide
ccuggugaggguggcauuu

SEQ ID NO: 2382290 - RNA, 19 nt, Artificial Sequence
  Description of Artificial Sequence: Synthetic oligonucleotide
ccccagagagggcucuugu

SEQ ID NO: 2382291 - RNA, 19 nt, Artificial Sequence
  Description of Artificial Sequence: Synthetic oligonucleotide
ccacgcagcagcccaguuu

SEQ ID NO: 2382292 - RNA, 19 nt, Artificial Sequence
  Description of Artificial Sequence: Synthetic oligonucleotide
cgguuucccuuggaucuca

SEQ ID NO: 2382293 - RNA, 19 nt, Artificial Sequence
  Description of Artificial Sequence: Synthetic oligonucleotide
ccuuguucucagguauaau

SEQ ID NO: 2382294 - RNA, 19 nt, Artificial Sequence
  Description of Artificial Sequence: Synthetic oligonucleotide
gguuucccuuggaucucau

SEQ ID NO: 2382295 - RNA, 19 nt, Artificial Sequence
  Description of Artificial Sequence: Synthetic oligonucleotide
ccaugccuuuugaggcacu

SEQ ID NO: 2382296 - RNA, 19 nt, Artificial Sequence
  Description of Artificial Sequence: Synthetic oligonucleotide
cgaucaugguucggucaau

SEQ ID NO: 2382297 - RNA, 19 nt, Artificial Sequence
  Description of Artificial Sequence: Synthetic oligonucleotide
uaauacaugaaucauagag

SEQ ID NO: 2382298 - RNA, 19 nt, Artificial Sequence
  Description of Artificial Sequence: Synthetic oligonucleotide
aauuuuaugaccuuaauua

SEQ ID NO: 2382299 - RNA, 19 nt, Artificial Sequence
  Description of Artificial Sequence: Synthetic oligonucleotide
aacacuaacuuccuuaagc

SEQ ID NO: 2382300 - RNA, 19 nt, Artificial Sequence
  Description of Artificial Sequence: Synthetic oligonucleotide
uccuuaagcauuuagaugg

SEQ ID NO: 2382301 - RNA, 19 nt, Artificial Sequence
  Description of Artificial Sequence: Synthetic oligonucleotide
uuaaagaacacuaacuucc

SEQ ID NO: 2382302 - RNA, 19 nt, Artificial Sequence
  Description of Artificial Sequence: Synthetic oligonucleotide
uuuaacuugacacuauggg

SEQ ID NO: 2382303 - RNA, 19 nt, Artificial Sequence
  Description of Artificial Sequence: Synthetic oligonucleotide
ucuauuuguagacugagag

SEQ ID NO: 2382304 - RNA, 19 nt, Artificial Sequence
  Description of Artificial Sequence: Synthetic oligonucleotide
uucuaaguaacuuuaaagc

SEQ ID NO: 2382305 - RNA, 19 nt, Artificial Sequence
  Description of Artificial Sequence: Synthetic oligonucleotide
uuauaguugauuaaacacc

SEQ ID NO: 2382306 - RNA, 19 nt, Artificial Sequence
  Description of Artificial Sequence: Synthetic oligonucleotide
uuuaugaccuuaauuaaag

SEQ ID NO: 2382307 - RNA, 19 nt, Artificial Sequence
  Description of Artificial Sequence: Synthetic oligonucleotide
acaaaaguuggcuauuugc

SEQ ID NO: 2382308 - RNA, 19 nt, Artificial Sequence
  Description of Artificial Sequence: Synthetic oligonucleotide
uuucuaaguaacuuuaaag

SEQ ID NO: 2382309 - RNA, 19 nt, Artificial Sequence
  Description of Artificial Sequence: Synthetic oligonucleotide
aauacugacaguucaugag

SEQ ID NO: 2382310 - RNA, 19 nt, Artificial Sequence
  Description of Artificial Sequence: Synthetic oligonucleotide
uuaaguucaauuuuaagau

SEQ ID NO: 2382311 - RNA, 19 nt, Artificial Sequence
  Description of Artificial Sequence: Synthetic oligonucleotide
uuaacuugacacuaugggg

SEQ ID NO: 2382312 - RNA, 19 nt, Artificial Sequence
  Description of Artificial Sequence: Synthetic oligonucleotide
ugauuaaacaccuccaagc

SEQ ID NO: 2382313 - RNA, 19 nt, Artificial Sequence
  Description of Artificial Sequence: Synthetic oligonucleotide
uuuauaucauuuauaguug

SEQ ID NO: 2382314 - RNA, 19 nt, Artificial Sequence
  Description of Artificial Sequence: Synthetic oligonucleotide
cugcauaucacuuaauucc

SEQ ID NO: 2382315 - RNA, 19 nt, Artificial Sequence
  Description of Artificial Sequence: Synthetic oligonucleotide
uuuguaucaauuuuccacc

SEQ ID NO: 2382316 - RNA, 19 nt, Artificial Sequence
  Description of Artificial Sequence: Synthetic oligonucleotide
ucuaaguaacuuuaaagca

SEQ ID NO: 2382317 - RNA, 19 nt, Artificial Sequence
  Description of Artificial Sequence: Synthetic oligonucleotide
cuuuguaucaauuuuccac

SEQ ID NO: 2382318 - RNA, 19 nt, Artificial Sequence
  Description of Artificial Sequence: Synthetic oligonucleotide
uuuuaaagaacacuaacuu

SEQ ID NO: 2382319 - RNA, 19 nt, Artificial Sequence
  Description of Artificial Sequence: Synthetic oligonucleotide
uauaguugauuaaacaccu

SEQ ID NO: 2382320 - RNA, 19 nt, Artificial Sequence
  Description of Artificial Sequence: Synthetic oligonucleotide
auacugacaguucaugagc

SEQ ID NO: 2382321 - RNA, 19 nt, Artificial Sequence
  Description of Artificial Sequence: Synthetic oligonucleotide
auaaauuuaacuugacacu

SEQ ID NO: 2382322 - RNA, 19 nt, Artificial Sequence
  Description of Artificial Sequence: Synthetic oligonucleotide
aagcauaaauuuuaaagaa

SEQ ID NO: 2382323 - RNA, 19 nt, Artificial Sequence
  Description of Artificial Sequence: Synthetic oligonucleotide
aaucucuacaaauuuuaug

SEQ ID NO: 2382324 - RNA, 19 nt, Artificial Sequence
  Description of Artificial Sequence: Synthetic oligonucleotide
uaguugauuaaacaccucc

SEQ ID NO: 2382325 - RNA, 19 nt, Artificial Sequence
  Description of Artificial Sequence: Synthetic oligonucleotide
ucuauuguggggaaaugag

SEQ ID NO: 2382326 - RNA, 19 nt, Artificial Sequence
  Description of Artificial Sequence: Synthetic oligonucleotide
acugaaaugaaucucuaca

SEQ ID NO: 2382327 - RNA, 19 nt, Artificial Sequence
  Description of Artificial Sequence: Synthetic oligonucleotide
acaugaaucauagagaaga

SEQ ID NO: 2382328 - RNA, 19 nt, Artificial Sequence
  Description of Artificial Sequence: Synthetic oligonucleotide
augaccuuaauuaaagugg

SEQ ID NO: 2382329 - RNA, 19 nt, Artificial Sequence
  Description of Artificial Sequence: Synthetic oligonucleotide
aagcuugggcuuuaacugc

SEQ ID NO: 2382330 - RNA, 19 nt, Artificial Sequence
  Description of Artificial Sequence: Synthetic oligonucleotide
aauacaugaaucauagaga

SEQ ID NO: 2382331 - RNA, 19 nt, Artificial Sequence
  Description of Artificial Sequence: Synthetic oligonucleotide
acuuaauuccucugaggcc

SEQ ID NO: 2382332 - RNA, 19 nt, Artificial Sequence
  Description of Artificial Sequence: Synthetic oligonucleotide
acuuuuaaguacuuuauau

SEQ ID NO: 2382333 - RNA, 19 nt, Artificial Sequence
  Description of Artificial Sequence: Synthetic oligonucleotide
uuaaacaccuccaagcaau

SEQ ID NO: 2382334 - RNA, 19 nt, Artificial Sequence
  Description of Artificial Sequence: Synthetic oligonucleotide
uucugugucauauugacua

SEQ ID NO: 2382335 - RNA, 19 nt, Artificial Sequence
  Description of Artificial Sequence: Synthetic oligonucleotide
aaccuugcugguuuuagag

SEQ ID NO: 2382336 - RNA, 19 nt, Artificial Sequence
  Description of Artificial Sequence: Synthetic oligonucleotide
uaucauuuauaguugauua

SEQ ID NO: 2382337 - RNA, 19 nt, Artificial Sequence
  Description of Artificial Sequence: Synthetic oligonucleotide
uuuaaagaacacuaacuuc

SEQ ID NO: 2382338 - RNA, 19 nt, Artificial Sequence
  Description of Artificial Sequence: Synthetic oligonucleotide
cuuaauuccucugaggccc

SEQ ID NO: 2382339 - RNA, 19 nt, Artificial Sequence
  Description of Artificial Sequence: Synthetic oligonucleotide
aauuuuaagaucacuucug

SEQ ID NO: 2382340 - RNA, 19 nt, Artificial Sequence
  Description of Artificial Sequence: Synthetic oligonucleotide
uauuaaguucaauuuuaag

SEQ ID NO: 2382341 - RNA, 19 nt, Artificial Sequence
  Description of Artificial Sequence: Synthetic oligonucleotide
auaaauuuuaaagaacacu

SEQ ID NO: 2382342 - RNA, 19 nt, Artificial Sequence
  Description of Artificial Sequence: Synthetic oligonucleotide
aauuccugccacuuugaag

SEQ ID NO: 2382343 - RNA, 19 nt, Artificial Sequence
  Description of Artificial Sequence: Synthetic oligonucleotide
uuuagauggguaaagucaa

SEQ ID NO: 2382344 - RNA, 19 nt, Artificial Sequence
  Description of Artificial Sequence: Synthetic oligonucleotide
uccauaaaugccuagcuaa

SEQ ID NO: 2382345 - RNA, 19 nt, Artificial Sequence
  Description of Artificial Sequence: Synthetic oligonucleotide
cuauuugcuucuauugugg

SEQ ID NO: 2382346 - RNA, 19 nt, Artificial Sequence
  Description of Artificial Sequence: Synthetic oligonucleotide
cucuacaaauuuuaugacc

SEQ ID NO: 2382347 - RNA, 19 nt, Artificial Sequence
  Description of Artificial Sequence: Synthetic oligonucleotide
ucuaggaaaagguauuuuc

SEQ ID NO: 2382348 - RNA, 19 nt, Artificial Sequence
  Description of Artificial Sequence: Synthetic oligonucleotide
aagaacacuaacuuccuua

SEQ ID NO: 2382349 - RNA, 19 nt, Artificial Sequence
  Description of Artificial Sequence: Synthetic oligonucleotide
uuugaagccugcgaggagg

SEQ ID NO: 2382350 - RNA, 19 nt, Artificial Sequence
  Description of Artificial Sequence: Synthetic oligonucleotide
uuauaucauuuauaguuga

SEQ ID NO: 2382351 - RNA, 19 nt, Artificial Sequence
  Description of Artificial Sequence: Synthetic oligonucleotide
aaucuauuuguagacugag

SEQ ID NO: 2382352 - RNA, 19 nt, Artificial Sequence
  Description of Artificial Sequence: Synthetic oligonucleotide
auuuuaaagaacacuaacu

SEQ ID NO: 2382353 - RNA, 19 nt, Artificial Sequence
  Description of Artificial Sequence: Synthetic oligonucleotide
uaaaugccuagcuaauugc

SEQ ID NO: 2382354 - RNA, 19 nt, Artificial Sequence
  Description of Artificial Sequence: Synthetic oligonucleotide
agauaaauuuaacuugaca

SEQ ID NO: 2382355 - RNA, 19 nt, Artificial Sequence
  Description of Artificial Sequence: Synthetic oligonucleotide
uuacccucuccauaaaugc

SEQ ID NO: 2382356 - RNA, 19 nt, Artificial Sequence
  Description of Artificial Sequence: Synthetic oligonucleotide
uuaagaucacuucuguguc

SEQ ID NO: 2382357 - RNA, 19 nt, Artificial Sequence
  Description of Artificial Sequence: Synthetic oligonucleotide
aaugagguacccuuucuaa

SEQ ID NO: 2382358 - RNA, 19 nt, Artificial Sequence
  Description of Artificial Sequence: Synthetic oligonucleotide
auuuagauggguaaaguca

SEQ ID NO: 2382359 - RNA, 19 nt, Artificial Sequence
  Description of Artificial Sequence: Synthetic oligonucleotide
ugcaauuccugccacuuug

SEQ ID NO: 2382360 - RNA, 19 nt, Artificial Sequence
  Description of Artificial Sequence: Synthetic oligonucleotide
ugagcaugucaacaguucc

SEQ ID NO: 2382361 - RNA, 19 nt, Artificial Sequence
  Description of Artificial Sequence: Synthetic oligonucleotide
uuuuaacugguugaaauaa

SEQ ID NO: 2382362 - RNA, 19 nt, Artificial Sequence
  Description of Artificial Sequence: Synthetic oligonucleotide
uuuuagagcaccaguugga

SEQ ID NO: 2382363 - RNA, 19 nt, Artificial Sequence
  Description of Artificial Sequence: Synthetic oligonucleotide
ucauuuauaguugauuaaa

SEQ ID NO: 2382364 - RNA, 19 nt, Artificial Sequence
  Description of Artificial Sequence: Synthetic oligonucleotide
aacuuccuuaagcauuuag

SEQ ID NO: 2382365 - RNA, 19 nt, Artificial Sequence
  Description of Artificial Sequence: Synthetic oligonucleotide
agcauaaauuuuaaagaac

SEQ ID NO: 2382366 - RNA, 19 nt, Artificial Sequence
  Description of Artificial Sequence: Synthetic oligonucleotide
ugaaaugaaucucuacaaa

SEQ ID NO: 2382367 - RNA, 19 nt, Artificial Sequence
  Description of Artificial Sequence: Synthetic oligonucleotide
cuauuguggggaaaugagg

SEQ ID NO: 2382368 - RNA, 19 nt, Artificial Sequence
  Description of Artificial Sequence: Synthetic oligonucleotide
uauuugcuucuauuguggg

SEQ ID NO: 2382369 - RNA, 19 nt, Artificial Sequence
  Description of Artificial Sequence: Synthetic oligonucleotide
uuuuaagaucacuucugug

SEQ ID NO: 2382370 - RNA, 19 nt, Artificial Sequence
  Description of Artificial Sequence: Synthetic oligonucleotide
ugaccuuaauuaaaguggu

SEQ ID NO: 2382371 - RNA, 19 nt, Artificial Sequence
  Description of Artificial Sequence: Synthetic oligonucleotide
auuuauacuuuuaaguacu

SEQ ID NO: 2382372 - RNA, 19 nt, Artificial Sequence
  Description of Artificial Sequence: Synthetic oligonucleotide
ucacuuaauuccucugagg

SEQ ID NO: 2382373 - RNA, 19 nt, Artificial Sequence
  Description of Artificial Sequence: Synthetic oligonucleotide
uucagagauaguuccagga

SEQ ID NO: 2382374 - RNA, 19 nt, Artificial Sequence
  Description of Artificial Sequence: Synthetic oligonucleotide
auuugcuucuauugugggg

SEQ ID NO: 2382375 - RNA, 19 nt, Artificial Sequence
  Description of Artificial Sequence: Synthetic oligonucleotide
auuuuaagaucacuucugu

SEQ ID NO: 2382376 - RNA, 19 nt, Artificial Sequence
  Description of Artificial Sequence: Synthetic oligonucleotide
gacacuauggggcauauua

SEQ ID NO: 2382377 - RNA, 19 nt, Artificial Sequence
  Description of Artificial Sequence: Synthetic oligonucleotide
uuccuuaagcauuuagaug

SEQ ID NO: 2382378 - RNA, 19 nt, Artificial Sequence
  Description of Artificial Sequence: Synthetic oligonucleotide
auuuuaugaccuuaauuaa

SEQ ID NO: 2382379 - RNA, 19 nt, Artificial Sequence
  Description of Artificial Sequence: Synthetic oligonucleotide
ugcauaucacuuaauuccu

SEQ ID NO: 2382380 - RNA, 19 nt, Artificial Sequence
  Description of Artificial Sequence: Synthetic oligonucleotide
uagcuaauugcuugggaag

SEQ ID NO: 2382381 - RNA, 19 nt, Artificial Sequence
  Description of Artificial Sequence: Synthetic oligonucleotide
uuaagcauuuagaugggua

SEQ ID NO: 2382382 - RNA, 19 nt, Artificial Sequence
  Description of Artificial Sequence: Synthetic oligonucleotide
acacuaacuuccuuaagca

SEQ ID NO: 2382383 - RNA, 19 nt, Artificial Sequence
  Description of Artificial Sequence: Synthetic oligonucleotide
aaacccaauacugacaguu

SEQ ID NO: 2382384 - RNA, 19 nt, Artificial Sequence
  Description of Artificial Sequence: Synthetic oligonucleotide
cuuuaaagcauaaauuuua

SEQ ID NO: 2382385 - RNA, 19 nt, Artificial Sequence
  Description of Artificial Sequence: Synthetic oligonucleotide
aauuuccacaaaaguuggc

SEQ ID NO: 2382386 - RNA, 19 nt, Artificial Sequence
  Description of Artificial Sequence: Synthetic oligonucleotide
aaauaauacaugaaucaua

SEQ ID NO: 2382387 - RNA, 19 nt, Artificial Sequence
  Description of Artificial Sequence: Synthetic oligonucleotide
uccucugaggcccaguuac

SEQ ID NO: 2382388 - RNA, 19 nt, Artificial Sequence
  Description of Artificial Sequence: Synthetic oligonucleotide
agcuaauugcuugggaagc

SEQ ID NO: 2382389 - RNA, 19 nt, Artificial Sequence
  Description of Artificial Sequence: Synthetic oligonucleotide
ugagguacccuuucuaagu

SEQ ID NO: 2382390 - RNA, 19 nt, Artificial Sequence
  Description of Artificial Sequence: Synthetic oligonucleotide
auuuaacuugacacuaugg

SEQ ID NO: 2382391 - RNA, 19 nt, Artificial Sequence
  Description of Artificial Sequence: Synthetic oligonucleotide
accuugcugguuuuagagc

SEQ ID NO: 2382392 - RNA, 19 nt, Artificial Sequence
  Description of Artificial Sequence: Synthetic oligonucleotide
uagagaagauaaauuuaac

SEQ ID NO: 2382393 - RNA, 19 nt, Artificial Sequence
  Description of Artificial Sequence: Synthetic oligonucleotide
aaaugaaucucuacaaauu

SEQ ID NO: 2382394 - RNA, 19 nt, Artificial Sequence
  Description of Artificial Sequence: Synthetic oligonucleotide
uuuuccaccugugaagccc

SEQ ID NO: 2382395 - RNA, 19 nt, Artificial Sequence
  Description of Artificial Sequence: Synthetic oligonucleotide
uuuaacugguugaaauaaa

SEQ ID NO: 2382396 - RNA, 19 nt, Artificial Sequence
  Description of Artificial Sequence: Synthetic oligonucleotide
auagagaagauaaauuuaa

SEQ ID NO: 2382397 - RNA, 19 nt, Artificial Sequence
  Description of Artificial Sequence: Synthetic oligonucleotide
ugugucauauugacuaaaa

SEQ ID NO: 2382398 - RNA, 19 nt, Artificial Sequence
  Description of Artificial Sequence: Synthetic oligonucleotide
uaaguucaauuuuaagauc

SEQ ID NO: 2382399 - RNA, 19 nt, Artificial Sequence
  Description of Artificial Sequence: Synthetic oligonucleotide
uaauugcuugggaagcacc

SEQ ID NO: 2382400 - RNA, 19 nt, Artificial Sequence
  Description of Artificial Sequence: Synthetic oligonucleotide
uguaucaauuuuccaccug

SEQ ID NO: 2382401 - RNA, 19 nt, Artificial Sequence
  Description of Artificial Sequence: Synthetic oligonucleotide
auuuccacaaaaguuggcu

SEQ ID NO: 2382402 - RNA, 19 nt, Artificial Sequence
  Description of Artificial Sequence: Synthetic oligonucleotide
uauaucauuuauaguugau

SEQ ID NO: 2382403 - RNA, 19 nt, Artificial Sequence
  Description of Artificial Sequence: Synthetic oligonucleotide
gaaaugaaucucuacaaau

SEQ ID NO: 2382404 - RNA, 19 nt, Artificial Sequence
  Description of Artificial Sequence: Synthetic oligonucleotide
ucucuacaaauuuuaugac

SEQ ID NO: 2382405 - RNA, 19 nt, Artificial Sequence
  Description of Artificial Sequence: Synthetic oligonucleotide
acuuuauaucauuuauagu

SEQ ID NO: 2382406 - RNA, 19 nt, Artificial Sequence
  Description of Artificial Sequence: Synthetic oligonucleotide
uauggggcauauuaaguuc

SEQ ID NO: 2382407 - RNA, 19 nt, Artificial Sequence
  Description of Artificial Sequence: Synthetic oligonucleotide
cacuauggggcauauuaag

SEQ ID NO: 2382408 - RNA, 19 nt, Artificial Sequence
  Description of Artificial Sequence: Synthetic oligonucleotide
uuugucaccuuggcuaggg

SEQ ID NO: 2382409 - RNA, 19 nt, Artificial Sequence
  Description of Artificial Sequence: Synthetic oligonucleotide
augccuagcuaauugcuug

SEQ ID NO: 2382410 - RNA, 19 nt, Artificial Sequence
  Description of Artificial Sequence: Synthetic oligonucleotide
ucuuuguaucaauuuucca

SEQ ID NO: 2382411 - RNA, 19 nt, Artificial Sequence
  Description of Artificial Sequence: Synthetic oligonucleotide
aucauuuauaguugauuaa

SEQ ID NO: 2382412 - RNA, 19 nt, Artificial Sequence
  Description of Artificial Sequence: Synthetic oligonucleotide
guggcaaucuauuuguaga

SEQ ID NO: 2382413 - RNA, 19 nt, Artificial Sequence
  Description of Artificial Sequence: Synthetic oligonucleotide
uuaugaccuuaauuaaagu

SEQ ID NO: 2382414 - RNA, 19 nt, Artificial Sequence
  Description of Artificial Sequence: Synthetic oligonucleotide
aucaauuuuccaccuguga

SEQ ID NO: 2382415 - RNA, 19 nt, Artificial Sequence
  Description of Artificial Sequence: Synthetic oligonucleotide
agaacacuaacuuccuuaa

SEQ ID NO: 2382416 - RNA, 19 nt, Artificial Sequence
  Description of Artificial Sequence: Synthetic oligonucleotide
uucuauuguggggaaauga

SEQ ID NO: 2382417 - RNA, 19 nt, Artificial Sequence
  Description of Artificial Sequence: Synthetic oligonucleotide
uuaauuaaagugguccuuu

SEQ ID NO: 2382418 - RNA, 19 nt, Artificial Sequence
  Description of Artificial Sequence: Synthetic oligonucleotide
ugguuuuagagcaccaguu

SEQ ID NO: 2382419 - RNA, 19 nt, Artificial Sequence
  Description of Artificial Sequence: Synthetic oligonucleotide
aggguggcaaucuauuugu

SEQ ID NO: 2382420 - RNA, 19 nt, Artificial Sequence
  Description of Artificial Sequence: Synthetic oligonucleotide
uuuguagacugagaguggu

SEQ ID NO: 2382421 - RNA, 19 nt, Artificial Sequence
  Description of Artificial Sequence: Synthetic oligonucleotide
aaaugccuagcuaauugcu

SEQ ID NO: 2382422 - RNA, 19 nt, Artificial Sequence
  Description of Artificial Sequence: Synthetic oligonucleotide
cuucagagauaguuccagg

SEQ ID NO: 2382423 - RNA, 19 nt, Artificial Sequence
  Description of Artificial Sequence: Synthetic oligonucleotide
auuaaacaccuccaagcaa

SEQ ID NO: 2382424 - RNA, 19 nt, Artificial Sequence
  Description of Artificial Sequence: Synthetic oligonucleotide
ugccuagcuaauugcuugg

SEQ ID NO: 2382425 - RNA, 19 nt, Artificial Sequence
  Description of Artificial Sequence: Synthetic oligonucleotide
agcauuuagauggguaaag

SEQ ID NO: 2382426 - RNA, 19 nt, Artificial Sequence
  Description of Artificial Sequence: Synthetic oligonucleotide
gcaaucuauuuguagacug

SEQ ID NO: 2382427 - RNA, 19 nt, Artificial Sequence
  Description of Artificial Sequence: Synthetic oligonucleotide
uacugaaaugaaucucuac

SEQ ID NO: 2382428 - RNA, 19 nt, Artificial Sequence
  Description of Artificial Sequence: Synthetic oligonucleotide
uacccucuccauaaaugcc

SEQ ID NO: 2382429 - RNA, 19 nt, Artificial Sequence
  Description of Artificial Sequence: Synthetic oligonucleotide
uuguggggaaaugagguac

SEQ ID NO: 2382430 - RNA, 19 nt, Artificial Sequence
  Description of Artificial Sequence: Synthetic oligonucleotide
cacuuugaagccugcgagg

SEQ ID NO: 2382431 - RNA, 19 nt, Artificial Sequence
  Description of Artificial Sequence: Synthetic oligonucleotide
cugaaaugaaucucuacaa

SEQ ID NO: 2382432 - RNA, 19 nt, Artificial Sequence
  Description of Artificial Sequence: Synthetic oligonucleotide
uaagaucacuucuguguca

SEQ ID NO: 2382433 - RNA, 19 nt, Artificial Sequence
  Description of Artificial Sequence: Synthetic oligonucleotide
aguucaauuuuaagaucac

SEQ ID NO: 2382434 - RNA, 19 nt, Artificial Sequence
  Description of Artificial Sequence: Synthetic oligonucleotide
gcuauuugcuucuauugug

SEQ ID NO: 2382435 - RNA, 19 nt, Artificial Sequence
  Description of Artificial Sequence: Synthetic oligonucleotide
cuagcuaauugcuugggaa

SEQ ID NO: 2382436 - RNA, 19 nt, Artificial Sequence
  Description of Artificial Sequence: Synthetic oligonucleotide
gcuagggagaucuggacag

SEQ ID NO: 2382437 - RNA, 19 nt, Artificial Sequence
  Description of Artificial Sequence: Synthetic oligonucleotide
ugaaaacugaggguggcaa

SEQ ID NO: 2382438 - RNA, 19 nt, Artificial Sequence
  Description of Artificial Sequence: Synthetic oligonucleotide
uuuauacuuuuaaguacuu

SEQ ID NO: 2382439 - RNA, 19 nt, Artificial Sequence
  Description of Artificial Sequence: Synthetic oligonucleotide
acccaauacugacaguuca

SEQ ID NO: 2382440 - RNA, 19 nt, Artificial Sequence
  Description of Artificial Sequence: Synthetic oligonucleotide
acuuccuuaagcauuuaga

SEQ ID NO: 2382441 - RNA, 19 nt, Artificial Sequence
  Description of Artificial Sequence: Synthetic oligonucleotide
auaucauuuauaguugauu

SEQ ID NO: 2382442 - RNA, 19 nt, Artificial Sequence
  Description of Artificial Sequence: Synthetic oligonucleotide
ugccauuacugaaaugaau

SEQ ID NO: 2382443 - RNA, 19 nt, Artificial Sequence
  Description of Artificial Sequence: Synthetic oligonucleotide
guugauuaaacaccuccaa

SEQ ID NO: 2382444 - RNA, 19 nt, Artificial Sequence
  Description of Artificial Sequence: Synthetic oligonucleotide
aaauuuaacuugacacuau

SEQ ID NO: 2382445 - RNA, 19 nt, Artificial Sequence
  Description of Artificial Sequence: Synthetic oligonucleotide
gaacacuaacuuccuuaag

SEQ ID NO: 2382446 - RNA, 19 nt, Artificial Sequence
  Description of Artificial Sequence: Synthetic oligonucleotide
uugggcuuuaacugcauuu

SEQ ID NO: 2382447 - RNA, 19 nt, Artificial Sequence
  Description of Artificial Sequence: Synthetic oligonucleotide
aguugauuaaacaccucca

SEQ ID NO: 2382448 - RNA, 19 nt, Artificial Sequence
  Description of Artificial Sequence: Synthetic oligonucleotide
caugucaacaguucccaca

SEQ ID NO: 2382449 - RNA, 19 nt, Artificial Sequence
  Description of Artificial Sequence: Synthetic oligonucleotide
cuaaguaacuuuaaagcau

SEQ ID NO: 2382450 - RNA, 19 nt, Artificial Sequence
  Description of Artificial Sequence: Synthetic oligonucleotide
acuaacuuccuuaagcauu

SEQ ID NO: 2382451 - RNA, 19 nt, Artificial Sequence
  Description of Artificial Sequence: Synthetic oligonucleotide
cuggaagugagcuucucca

SEQ ID NO: 2382452 - RNA, 19 nt, Artificial Sequence
  Description of Artificial Sequence: Synthetic oligonucleotide
caaaaguuggcuauuugcu

SEQ ID NO: 2382453 - RNA, 19 nt, Artificial Sequence
  Description of Artificial Sequence: Synthetic oligonucleotide
gguggcaaucuauuuguag

SEQ ID NO: 2382454 - RNA, 19 nt, Artificial Sequence
  Description of Artificial Sequence: Synthetic oligonucleotide
aacaccccaccaccaagug

SEQ ID NO: 2382455 - RNA, 19 nt, Artificial Sequence
  Description of Artificial Sequence: Synthetic oligonucleotide
uuggcuauuugcuucuauu

SEQ ID NO: 2382456 - RNA, 19 nt, Artificial Sequence
  Description of Artificial Sequence: Synthetic oligonucleotide
acaguucaugagcauguca

SEQ ID NO: 2382457 - RNA, 19 nt, Artificial Sequence
  Description of Artificial Sequence: Synthetic oligonucleotide
caauacugacaguucauga

SEQ ID NO: 2382458 - RNA, 19 nt, Artificial Sequence
  Description of Artificial Sequence: Synthetic oligonucleotide
uuuagagcaccaguuggaa

SEQ ID NO: 2382459 - RNA, 19 nt, Artificial Sequence
  Description of Artificial Sequence: Synthetic oligonucleotide
ugaagcccaacaccccacc

SEQ ID NO: 2382460 - RNA, 19 nt, Artificial Sequence
  Description of Artificial Sequence: Synthetic oligonucleotide
aucauagagaagauaaauu

SEQ ID NO: 2382461 - RNA, 19 nt, Artificial Sequence
  Description of Artificial Sequence: Synthetic oligonucleotide
gguauuuucugaaaacuga

SEQ ID NO: 2382462 - RNA, 19 nt, Artificial Sequence
  Description of Artificial Sequence: Synthetic oligonucleotide
agcaccaguucuucucuag

SEQ ID NO: 2382463 - RNA, 19 nt, Artificial Sequence
  Description of Artificial Sequence: Synthetic oligonucleotide
cuaggaaaagguauuuucu

SEQ ID NO: 2382464 - RNA, 19 nt, Artificial Sequence
  Description of Artificial Sequence: Synthetic oligonucleotide
agagugguucugccauuac

SEQ ID NO: 2382465 - RNA, 19 nt, Artificial Sequence
  Description of Artificial Sequence: Synthetic oligonucleotide
uuagauggguaaagucaaa

SEQ ID NO: 2382466 - RNA, 19 nt, Artificial Sequence
  Description of Artificial Sequence: Synthetic oligonucleotide
acuauggggcauauuaagu

SEQ ID NO: 2382467 - RNA, 19 nt, Artificial Sequence
  Description of Artificial Sequence: Synthetic oligonucleotide
uucccacacagguggaucu

SEQ ID NO: 2382468 - RNA, 19 nt, Artificial Sequence
  Description of Artificial Sequence: Synthetic oligonucleotide
caaucuauuuguagacuga

SEQ ID NO: 2382469 - RNA, 19 nt, Artificial Sequence
  Description of Artificial Sequence: Synthetic oligonucleotide
gccauuacugaaaugaauc

SEQ ID NO: 2382470 - RNA, 19 nt, Artificial Sequence
  Description of Artificial Sequence: Synthetic oligonucleotide
aagcauuuagauggguaaa

SEQ ID NO: 2382471 - RNA, 19 nt, Artificial Sequence
  Description of Artificial Sequence: Synthetic oligonucleotide
uccgaugagugcaccugcc

SEQ ID NO: 2382472 - RNA, 19 nt, Artificial Sequence
  Description of Artificial Sequence: Synthetic oligonucleotide
cacaaaaguuggcuauuug

SEQ ID NO: 2382473 - RNA, 19 nt, Artificial Sequence
  Description of Artificial Sequence: Synthetic oligonucleotide
aguaacuuuaaagcauaaa

SEQ ID NO: 2382474 - RNA, 19 nt, Artificial Sequence
  Description of Artificial Sequence: Synthetic oligonucleotide
uggacagcuggaagugagc

SEQ ID NO: 2382475 - RNA, 19 nt, Artificial Sequence
  Description of Artificial Sequence: Synthetic oligonucleotide
aguuacccucuccauaaau

SEQ ID NO: 2382476 - RNA, 19 nt, Artificial Sequence
  Description of Artificial Sequence: Synthetic oligonucleotide
uuaauuccucugaggccca

SEQ ID NO: 2382477 - RNA, 19 nt, Artificial Sequence
  Description of Artificial Sequence: Synthetic oligonucleotide
agcaugucaacaguuccca

SEQ ID NO: 2382478 - RNA, 19 nt, Artificial Sequence
  Description of Artificial Sequence: Synthetic oligonucleotide
ugguucugccauuacugaa

SEQ ID NO: 2382479 - RNA, 19 nt, Artificial Sequence
  Description of Artificial Sequence: Synthetic oligonucleotide
aaugccuagcuaauugcuu

SEQ ID NO: 2382480 - RNA, 19 nt, Artificial Sequence
  Description of Artificial Sequence: Synthetic oligonucleotide
uguuuggucuucagagaua

SEQ ID NO: 2382481 - RNA, 19 nt, Artificial Sequence
  Description of Artificial Sequence: Synthetic oligonucleotide
acccuuucuaaguaacuuu

SEQ ID NO: 2382482 - RNA, 19 nt, Artificial Sequence
  Description of Artificial Sequence: Synthetic oligonucleotide
auaguugauuaaacaccuc

SEQ ID NO: 2382483 - RNA, 19 nt, Artificial Sequence
  Description of Artificial Sequence: Synthetic oligonucleotide
ucugaggcccaguuacccu

SEQ ID NO: 2382484 - RNA, 19 nt, Artificial Sequence
  Description of Artificial Sequence: Synthetic oligonucleotide
cuaauugcuugggaagcac

SEQ ID NO: 2382485 - RNA, 19 nt, Artificial Sequence
  Description of Artificial Sequence: Synthetic oligonucleotide
ggaagcuugggcuuuaacu

SEQ ID NO: 2382486 - RNA, 19 nt, Artificial Sequence
  Description of Artificial Sequence: Synthetic oligonucleotide
cauaucacuuaauuccucu

SEQ ID NO: 2382487 - RNA, 19 nt, Artificial Sequence
  Description of Artificial Sequence: Synthetic oligonucleotide
ugggcuuuaacugcauuuu

SEQ ID NO: 2382488 - RNA, 19 nt, Artificial Sequence
  Description of Artificial Sequence: Synthetic oligonucleotide
auuguggggaaaugaggua

SEQ ID NO: 2382489 - RNA, 19 nt, Artificial Sequence
  Description of Artificial Sequence: Synthetic oligonucleotide
cuccaagcaauuuccacaa

SEQ ID NO: 2382490 - RNA, 19 nt, Artificial Sequence
  Description of Artificial Sequence: Synthetic oligonucleotide
ggaagcaccaguucuucuc

SEQ ID NO: 2382491 - RNA, 19 nt, Artificial Sequence
  Description of Artificial Sequence: Synthetic oligonucleotide
uaaacaccuccaagcaauu

SEQ ID NO: 2382492 - RNA, 19 nt, Artificial Sequence
  Description of Artificial Sequence: Synthetic oligonucleotide
gaaaugagguacccuuucu

SEQ ID NO: 2382493 - RNA, 19 nt, Artificial Sequence
  Description of Artificial Sequence: Synthetic oligonucleotide
ccacuuugaagccugcgag

SEQ ID NO: 2382494 - RNA, 19 nt, Artificial Sequence
  Description of Artificial Sequence: Synthetic oligonucleotide
ugaggguggcaaucuauuu

SEQ ID NO: 2382495 - RNA, 19 nt, Artificial Sequence
  Description of Artificial Sequence: Synthetic oligonucleotide
cuccgaugagugcaccugc

SEQ ID NO: 2382496 - RNA, 19 nt, Artificial Sequence
  Description of Artificial Sequence: Synthetic oligonucleotide
cugaggcccaguuacccuc

SEQ ID NO: 2382497 - RNA, 19 nt, Artificial Sequence
  Description of Artificial Sequence: Synthetic oligonucleotide
cugcgaggaggccaauggg

SEQ ID NO: 2382498 - RNA, 19 nt, Artificial Sequence
  Description of Artificial Sequence: Synthetic oligonucleotide
cucugaggcccaguuaccc

SEQ ID NO: 2382499 - RNA, 19 nt, Artificial Sequence
  Description of Artificial Sequence: Synthetic oligonucleotide
auggggcauauuaaguuca

SEQ ID NO: 2382500 - RNA, 19 nt, Artificial Sequence
  Description of Artificial Sequence: Synthetic oligonucleotide
augaaucucuacaaauuuu

SEQ ID NO: 2382501 - RNA, 19 nt, Artificial Sequence
  Description of Artificial Sequence: Synthetic oligonucleotide
uggaagcuugggcuuuaac

SEQ ID NO: 2382502 - RNA, 19 nt, Artificial Sequence
  Description of Artificial Sequence: Synthetic oligonucleotide
ugccacuuugaagccugcg

SEQ ID NO: 2382503 - RNA, 19 nt, Artificial Sequence
  Description of Artificial Sequence: Synthetic oligonucleotide
gaagcaccaguucuucucu

SEQ ID NO: 2382504 - RNA, 19 nt, Artificial Sequence
  Description of Artificial Sequence: Synthetic oligonucleotide
uggcuagggagaucuggac

SEQ ID NO: 2382505 - RNA, 19 nt, Artificial Sequence
  Description of Artificial Sequence: Synthetic oligonucleotide
uagggagaucuggacagcu

SEQ ID NO: 2382506 - RNA, 19 nt, Artificial Sequence
  Description of Artificial Sequence: Synthetic oligonucleotide
aagugagcuucuccaucau

SEQ ID NO: 2382507 - RNA, 19 nt, Artificial Sequence
  Description of Artificial Sequence: Synthetic oligonucleotide
ccugcgaggaggccaaugg

SEQ ID NO: 2382508 - RNA, 19 nt, Artificial Sequence
  Description of Artificial Sequence: Synthetic oligonucleotide
uggggcauauuaaguucaa

SEQ ID NO: 2382509 - RNA, 19 nt, Artificial Sequence
  Description of Artificial Sequence: Synthetic oligonucleotide
aucuauuuguagacugaga

SEQ ID NO: 2382510 - RNA, 19 nt, Artificial Sequence
  Description of Artificial Sequence: Synthetic oligonucleotide
ccuuaagcauuuagauggg

SEQ ID NO: 2382511 - RNA, 19 nt, Artificial Sequence
  Description of Artificial Sequence: Synthetic oligonucleotide
ugaggcccaguuacccucu

SEQ ID NO: 2382512 - RNA, 19 nt, Artificial Sequence
  Description of Artificial Sequence: Synthetic oligonucleotide
gcuggaagugagcuucucc

SEQ ID NO: 2382513 - RNA, 19 nt, Artificial Sequence
  Description of Artificial Sequence: Synthetic oligonucleotide
gcaccaguucuucucuagg

SEQ ID NO: 2382514 - RNA, 19 nt, Artificial Sequence
  Description of Artificial Sequence: Synthetic oligonucleotide
gagguacccuuucuaagua

SEQ ID NO: 2382515 - RNA, 19 nt, Artificial Sequence
  Description of Artificial Sequence: Synthetic oligonucleotide
aacugaggguggcaaucua

SEQ ID NO: 2382516 - RNA, 19 nt, Artificial Sequence
  Description of Artificial Sequence: Synthetic oligonucleotide
aauuccucugaggcccagu

SEQ ID NO: 2382517 - RNA, 19 nt, Artificial Sequence
  Description of Artificial Sequence: Synthetic oligonucleotide
gguacccuuucuaaguaac

SEQ ID NO: 2382518 - RNA, 19 nt, Artificial Sequence
  Description of Artificial Sequence: Synthetic oligonucleotide
ggaagugagcuucuccauc

SEQ ID NO: 2382519 - RNA, 19 nt, Artificial Sequence
  Description of Artificial Sequence: Synthetic oligonucleotide
uccuccgaugagugcaccu

SEQ ID NO: 2382520 - RNA, 19 nt, Artificial Sequence
  Description of Artificial Sequence: Synthetic oligonucleotide
agguacccuuucuaaguaa

SEQ ID NO: 2382521 - RNA, 19 nt, Artificial Sequence
  Description of Artificial Sequence: Synthetic oligonucleotide
aaacaccuccaagcaauuu

SEQ ID NO: 2382522 - RNA, 19 nt, Artificial Sequence
  Description of Artificial Sequence: Synthetic oligonucleotide
uccaagcaauuuccacaaa

SEQ ID NO: 2382523 - RNA, 19 nt, Artificial Sequence
  Description of Artificial Sequence: Synthetic oligonucleotide
agagcaccaguuggaagcu

SEQ ID NO: 2382524 - RNA, 19 nt, Artificial Sequence
  Description of Artificial Sequence: Synthetic oligonucleotide
ggcuagggagaucuggaca

SEQ ID NO: 2382525 - RNA, 19 nt, Artificial Sequence
  Description of Artificial Sequence: Synthetic oligonucleotide
cugguuuuagagcaccagu

SEQ ID NO: 2382526 - RNA, 19 nt, Artificial Sequence
  Description of Artificial Sequence: Synthetic oligonucleotide
cuagggagaucuggacagc

SEQ ID NO: 2382527 - RNA, 19 nt, Artificial Sequence
  Description of Artificial Sequence: Synthetic oligonucleotide
acugaggguggcaaucuau

SEQ ID NO: 2382528 - RNA, 19 nt, Artificial Sequence
  Description of Artificial Sequence: Synthetic oligonucleotide
ccaauacugacaguucaug

SEQ ID NO: 2382529 - RNA, 19 nt, Artificial Sequence
  Description of Artificial Sequence: Synthetic oligonucleotide
cuguuuggucuucagagau

SEQ ID NO: 2382530 - RNA, 19 nt, Artificial Sequence
  Description of Artificial Sequence: Synthetic oligonucleotide
gcugguuuuagagcaccag

SEQ ID NO: 2382531 - RNA, 19 nt, Artificial Sequence
  Description of Artificial Sequence: Synthetic oligonucleotide
guagacugagagugguucu

SEQ ID NO: 2382532 - RNA, 19 nt, Artificial Sequence
  Description of Artificial Sequence: Synthetic oligonucleotide
cugccauuacugaaaugaa

SEQ ID NO: 2382533 - RNA, 19 nt, Artificial Sequence
  Description of Artificial Sequence: Synthetic oligonucleotide
guggggaaaugagguaccc

SEQ ID NO: 2382534 - RNA, 19 nt, Artificial Sequence
  Description of Artificial Sequence: Synthetic oligonucleotide
ggcuauuugcuucuauugu

SEQ ID NO: 2382535 - RNA, 19 nt, Artificial Sequence
  Description of Artificial Sequence: Synthetic oligonucleotide
gccacuuugaagccugcga

SEQ ID NO: 2382536 - RNA, 19 nt, Artificial Sequence
  Description of Artificial Sequence: Synthetic oligonucleotide
ccaagcaauuuccacaaaa

SEQ ID NO: 2382537 - RNA, 19 nt, Artificial Sequence
  Description of Artificial Sequence: Synthetic oligonucleotide
ugagagugguucugccauu

SEQ ID NO: 2382538 - RNA, 19 nt, Artificial Sequence
  Description of Artificial Sequence: Synthetic oligonucleotide
agcuugggcuuuaacugca

SEQ ID NO: 2382539 - RNA, 19 nt, Artificial Sequence
  Description of Artificial Sequence: Synthetic oligonucleotide
guucccacacagguggauc

SEQ ID NO: 2382540 - RNA, 19 nt, Artificial Sequence
  Description of Artificial Sequence: Synthetic oligonucleotide
ccaguuacccucuccauaa

SEQ ID NO: 2382541 - RNA, 19 nt, Artificial Sequence
  Description of Artificial Sequence: Synthetic oligonucleotide
caugaaucauagagaagau

SEQ ID NO: 2382542 - RNA, 19 nt, Artificial Sequence
  Description of Artificial Sequence: Synthetic oligonucleotide
uugacacuauggggcauau

SEQ ID NO: 2382543 - RNA, 19 nt, Artificial Sequence
  Description of Artificial Sequence: Synthetic oligonucleotide
agcuggaagugagcuucuc

SEQ ID NO: 2382544 - RNA, 19 nt, Artificial Sequence
  Description of Artificial Sequence: Synthetic oligonucleotide
ggcccaguuacccucucca

SEQ ID NO: 2382545 - RNA, 19 nt, Artificial Sequence
  Description of Artificial Sequence: Synthetic oligonucleotide
agggagaucuggacagcug

SEQ ID NO: 2382546 - RNA, 19 nt, Artificial Sequence
  Description of Artificial Sequence: Synthetic oligonucleotide
cuuaauuaaagugguccuu

SEQ ID NO: 2382547 - RNA, 19 nt, Artificial Sequence
  Description of Artificial Sequence: Synthetic oligonucleotide
aguuggaagcuugggcuuu

SEQ ID NO: 2382548 - RNA, 19 nt, Artificial Sequence
  Description of Artificial Sequence: Synthetic oligonucleotide
ccaguuggaagcuugggcu

SEQ ID NO: 2382549 - RNA, 19 nt, Artificial Sequence
  Description of Artificial Sequence: Synthetic oligonucleotide
aggaggccaaugggacccc

SEQ ID NO: 2382550 - RNA, 19 nt, Artificial Sequence
  Description of Artificial Sequence: Synthetic oligonucleotide
ccaacaccccaccaccaag

SEQ ID NO: 2382551 - RNA, 19 nt, Artificial Sequence
  Description of Artificial Sequence: Synthetic oligonucleotide
aagccugcgaggaggccaa

SEQ ID NO: 2382552 - RNA, 19 nt, Artificial Sequence
  Description of Artificial Sequence: Synthetic oligonucleotide
ggggaaaugagguacccuu

SEQ ID NO: 2382553 - RNA, 19 nt, Artificial Sequence
  Description of Artificial Sequence: Synthetic oligonucleotide
agugcaccugccacaggca

SEQ ID NO: 2382554 - RNA, 19 nt, Artificial Sequence
  Description of Artificial Sequence: Synthetic oligonucleotide
uccaccugugaagcccaac

SEQ ID NO: 2382555 - RNA, 19 nt, Artificial Sequence
  Description of Artificial Sequence: Synthetic oligonucleotide
cagcugcaauuccugccac

SEQ ID NO: 2382556 - RNA, 19 nt, Artificial Sequence
  Description of Artificial Sequence: Synthetic oligonucleotide
cugccacuuugaagccugc

SEQ ID NO: 2382557 - RNA, 19 nt, Artificial Sequence
  Description of Artificial Sequence: Synthetic oligonucleotide
caacaccccaccaccaagu

SEQ ID NO: 2382558 - RNA, 19 nt, Artificial Sequence
  Description of Artificial Sequence: Synthetic oligonucleotide
ccaguucuucucuaggaaa

SEQ ID NO: 2382559 - RNA, 19 nt, Artificial Sequence
  Description of Artificial Sequence: Synthetic oligonucleotide
cacuaacuuccuuaagcau

SEQ ID NO: 2382560 - RNA, 19 nt, Artificial Sequence
  Description of Artificial Sequence: Synthetic oligonucleotide
gccuagcuaauugcuuggg

SEQ ID NO: 2382561 - RNA, 19 nt, Artificial Sequence
  Description of Artificial Sequence: Synthetic oligonucleotide
cugugucauauugacuaaa

SEQ ID NO: 2382562 - RNA, 19 nt, Artificial Sequence
  Description of Artificial Sequence: Synthetic oligonucleotide
aguucccacacagguggau

SEQ ID NO: 2382563 - RNA, 19 nt, Artificial Sequence
  Description of Artificial Sequence: Synthetic oligonucleotide
cuugacacuauggggcaua

SEQ ID NO: 2382564 - RNA, 19 nt, Artificial Sequence
  Description of Artificial Sequence: Synthetic oligonucleotide
accccuccuccgaugagug

SEQ ID NO: 2382565 - RNA, 19 nt, Artificial Sequence
  Description of Artificial Sequence: Synthetic oligonucleotide
ccaccugugaagcccaaca

SEQ ID NO: 2382566 - RNA, 19 nt, Artificial Sequence
  Description of Artificial Sequence: Synthetic oligonucleotide
cuuaagcauuuagaugggu

SEQ ID NO: 2382567 - RNA, 19 nt, Artificial Sequence
  Description of Artificial Sequence: Synthetic oligonucleotide
uuggaagcuugggcuuuaa

SEQ ID NO: 2382568 - RNA, 19 nt, Artificial Sequence
  Description of Artificial Sequence: Synthetic oligonucleotide
guuggcuauuugcuucuau

SEQ ID NO: 2382569 - RNA, 19 nt, Artificial Sequence
  Description of Artificial Sequence: Synthetic oligonucleotide
gcauaucacuuaauuccuc

SEQ ID NO: 2382570 - RNA, 19 nt, Artificial Sequence
  Description of Artificial Sequence: Synthetic oligonucleotide
guacccuuucuaaguaacu

SEQ ID NO: 2382571 - RNA, 19 nt, Artificial Sequence
  Description of Artificial Sequence: Synthetic oligonucleotide
ccuagcuaauugcuuggga

SEQ ID NO: 2382572 - RNA, 19 nt, Artificial Sequence
  Description of Artificial Sequence: Synthetic oligonucleotide
ccucugaggcccaguuacc

SEQ ID NO: 2382573 - RNA, 19 nt, Artificial Sequence
  Description of Artificial Sequence: Synthetic oligonucleotide
ccucuccauaaaugccuag

SEQ ID NO: 2382574 - RNA, 19 nt, Artificial Sequence
  Description of Artificial Sequence: Synthetic oligonucleotide
cuccuccgaugagugcacc

SEQ ID NO: 2382575 - RNA, 19 nt, Artificial Sequence
  Description of Artificial Sequence: Synthetic oligonucleotide
gcuucuauuguggggaaau

SEQ ID NO: 2382576 - RNA, 19 nt, Artificial Sequence
  Description of Artificial Sequence: Synthetic oligonucleotide
ccuccgaugagugcaccug

SEQ ID NO: 2382577 - RNA, 19 nt, Artificial Sequence
  Description of Artificial Sequence: Synthetic oligonucleotide
gcaauuccugccacuuuga

SEQ ID NO: 2382578 - RNA, 19 nt, Artificial Sequence
  Description of Artificial Sequence: Synthetic oligonucleotide
ugacacuauggggcauauu

SEQ ID NO: 2382579 - RNA, 19 nt, Artificial Sequence
  Description of Artificial Sequence: Synthetic oligonucleotide
caguucccacacaggugga

SEQ ID NO: 2382580 - RNA, 19 nt, Artificial Sequence
  Description of Artificial Sequence: Synthetic oligonucleotide
caguuggaagcuugggcuu

SEQ ID NO: 2382581 - RNA, 19 nt, Artificial Sequence
  Description of Artificial Sequence: Synthetic oligonucleotide
ccuccuccgaugagugcac

SEQ ID NO: 2382582 - RNA, 19 nt, Artificial Sequence
  Description of Artificial Sequence: Synthetic oligonucleotide
ccauaaaugccuagcuaau

SEQ ID NO: 2382583 - RNA, 19 nt, Artificial Sequence
  Description of Artificial Sequence: Synthetic oligonucleotide
cccaguuacccucuccaua

SEQ ID NO: 2382584 - RNA, 19 nt, Artificial Sequence
  Description of Artificial Sequence: Synthetic oligonucleotide
ccgaugagugcaccugcca

SEQ ID NO: 2382585 - RNA, 19 nt, Artificial Sequence
  Description of Artificial Sequence: Synthetic oligonucleotide
ggacagccucaaaccuugc

SEQ ID NO: 2382586 - RNA, 19 nt, Artificial Sequence
  Description of Artificial Sequence: Synthetic oligonucleotide
gccugcgaggaggccaaug

SEQ ID NO: 2382587 - RNA, 19 nt, Artificial Sequence
  Description of Artificial Sequence: Synthetic oligonucleotide
caccccuccuccgaugagu

SEQ ID NO: 2382588 - RNA, 19 nt, Artificial Sequence
  Description of Artificial Sequence: Synthetic oligonucleotide
gggaaaugagguacccuuu

SEQ ID NO: 2382589 - RNA, 19 nt, Artificial Sequence
  Description of Artificial Sequence: Synthetic oligonucleotide
ccccuccuccgaugagugc

SEQ ID NO: 2382590 - RNA, 19 nt, Artificial Sequence
  Description of Artificial Sequence: Synthetic oligonucleotide
cugcaauuccugccacuuu

SEQ ID NO: 2382591 - RNA, 19 nt, Artificial Sequence
  Description of Artificial Sequence: Synthetic oligonucleotide
cccaacaccccaccaccaa

SEQ ID NO: 2382592 - RNA, 19 nt, Artificial Sequence
  Description of Artificial Sequence: Synthetic oligonucleotide
gcccaacaccccaccacca

SEQ ID NO: 2382593 - RNA, 19 nt, Artificial Sequence
  Description of Artificial Sequence: Synthetic oligonucleotide
ggggcauauuaaguucaau

SEQ ID NO: 2382594 - RNA, 19 nt, Artificial Sequence
  Description of Artificial Sequence: Synthetic oligonucleotide
gagcaccaguuggaagcuu

SEQ ID NO: 2382595 - RNA, 19 nt, Artificial Sequence
  Description of Artificial Sequence: Synthetic oligonucleotide
agccugcgaggaggccaau

SEQ ID NO: 2382596 - RNA, 19 nt, Artificial Sequence
  Description of Artificial Sequence: Synthetic oligonucleotide
acuaagaugaaccaaaucc

SEQ ID NO: 2382597 - RNA, 19 nt, Artificial Sequence
  Description of Artificial Sequence: Synthetic oligonucleotide
aauagauucaauuuuaaga

SEQ ID NO: 2382598 - RNA, 19 nt, Artificial Sequence
  Description of Artificial Sequence: Synthetic oligonucleotide
aaucaaauaauaaugcugc

SEQ ID NO: 2382599 - RNA, 19 nt, Artificial Sequence
  Description of Artificial Sequence: Synthetic oligonucleotide
auagauucaauuuuaagac

SEQ ID NO: 2382600 - RNA, 19 nt, Artificial Sequence
  Description of Artificial Sequence: Synthetic oligonucleotide
aacuaugaaauauuauacc

SEQ ID NO: 2382601 - RNA, 19 nt, Artificial Sequence
  Description of Artificial Sequence: Synthetic oligonucleotide
aaaacuauaguuucaaacu

SEQ ID NO: 2382602 - RNA, 19 nt, Artificial Sequence
  Description of Artificial Sequence: Synthetic oligonucleotide
aaaauuaccauauagcuua

SEQ ID NO: 2382603 - RNA, 19 nt, Artificial Sequence
  Description of Artificial Sequence: Synthetic oligonucleotide
auaauaaugcugcuugucc

SEQ ID NO: 2382604 - RNA, 19 nt, Artificial Sequence
  Description of Artificial Sequence: Synthetic oligonucleotide
uauaguuucaaacuaagau

SEQ ID NO: 2382605 - RNA, 19 nt, Artificial Sequence
  Description of Artificial Sequence: Synthetic oligonucleotide
uauagcuuaaauguuaugc

SEQ ID NO: 2382606 - RNA, 19 nt, Artificial Sequence
  Description of Artificial Sequence: Synthetic oligonucleotide
uaccauauagcuuaaaugu

SEQ ID NO: 2382607 - RNA, 19 nt, Artificial Sequence
  Description of Artificial Sequence: Synthetic oligonucleotide
aaauggauuaccuuguuaa

SEQ ID NO: 2382608 - RNA, 19 nt, Artificial Sequence
  Description of Artificial Sequence: Synthetic oligonucleotide
uaguuucaaacuaagauga

SEQ ID NO: 2382609 - RNA, 19 nt, Artificial Sequence
  Description of Artificial Sequence: Synthetic oligonucleotide
auagauuuaaguuaauaga

SEQ ID NO: 2382610 - RNA, 19 nt, Artificial Sequence
  Description of Artificial Sequence: Synthetic oligonucleotide
uuaaauuacauagugacuc

SEQ ID NO: 2382611 - RNA, 19 nt, Artificial Sequence
  Description of Artificial Sequence: Synthetic oligonucleotide
ucuuuaguuaugcugacug

SEQ ID NO: 2382612 - RNA, 19 nt, Artificial Sequence
  Description of Artificial Sequence: Synthetic oligonucleotide
uuaagugugaacaguacug

SEQ ID NO: 2382613 - RNA, 19 nt, Artificial Sequence
  Description of Artificial Sequence: Synthetic oligonucleotide
uaugcuaagaaucuuugcu

SEQ ID NO: 2382614 - RNA, 19 nt, Artificial Sequence
  Description of Artificial Sequence: Synthetic oligonucleotide
aaaacaacacugcagcucu

SEQ ID NO: 2382615 - RNA, 19 nt, Artificial Sequence
  Description of Artificial Sequence: Synthetic oligonucleotide
acaaaaucucccuuguuac

SEQ ID NO: 2382616 - RNA, 19 nt, Artificial Sequence
  Description of Artificial Sequence: Synthetic oligonucleotide
aaccuuaaaauggauuacc

SEQ ID NO: 2382617 - RNA, 19 nt, Artificial Sequence
  Description of Artificial Sequence: Synthetic oligonucleotide
uuaguuaauggacaaauua

SEQ ID NO: 2382618 - RNA, 19 nt, Artificial Sequence
  Description of Artificial Sequence: Synthetic oligonucleotide
augaaugagacauuuuauc

SEQ ID NO: 2382619 - RNA, 19 nt, Artificial Sequence
  Description of Artificial Sequence: Synthetic oligonucleotide
aguauuaugacuugggaaa

SEQ ID NO: 2382620 - RNA, 19 nt, Artificial Sequence
  Description of Artificial Sequence: Synthetic oligonucleotide
ugaaugagacauuuuauca

SEQ ID NO: 2382621 - RNA, 19 nt, Artificial Sequence
  Description of Artificial Sequence: Synthetic oligonucleotide
aauggauuaccuuguuaac

SEQ ID NO: 2382622 - RNA, 19 nt, Artificial Sequence
  Description of Artificial Sequence: Synthetic oligonucleotide
cuaaacaucagaauauuuc

SEQ ID NO: 2382623 - RNA, 19 nt, Artificial Sequence
  Description of Artificial Sequence: Synthetic oligonucleotide
uaugaaauauuauaccuaa

SEQ ID NO: 2382624 - RNA, 19 nt, Artificial Sequence
  Description of Artificial Sequence: Synthetic oligonucleotide
agaacuaugaaauauuaua

SEQ ID NO: 2382625 - RNA, 19 nt, Artificial Sequence
  Description of Artificial Sequence: Synthetic oligonucleotide
uuaccauauagcuuaaaug

SEQ ID NO: 2382626 - RNA, 19 nt, Artificial Sequence
  Description of Artificial Sequence: Synthetic oligonucleotide
uguuacugaaaauagguuc

SEQ ID NO: 2382627 - RNA, 19 nt, Artificial Sequence
  Description of Artificial Sequence: Synthetic oligonucleotide
uuaauaacaaaaucucccu

SEQ ID NO: 2382628 - RNA, 19 nt, Artificial Sequence
  Description of Artificial Sequence: Synthetic oligonucleotide
uaagacuuuucuaccauag

SEQ ID NO: 2382629 - RNA, 19 nt, Artificial Sequence
  Description of Artificial Sequence: Synthetic oligonucleotide
ucagguguuuaguuaaugg

SEQ ID NO: 2382630 - RNA, 19 nt, Artificial Sequence
  Description of Artificial Sequence: Synthetic oligonucleotide
uacaguauuaugacuuggg

SEQ ID NO: 2382631 - RNA, 19 nt, Artificial Sequence
  Description of Artificial Sequence: Synthetic oligonucleotide
cuucauauuaauaacaaaa

SEQ ID NO: 2382632 - RNA, 19 nt, Artificial Sequence
  Description of Artificial Sequence: Synthetic oligonucleotide
uucauauuaauaacaaaau

SEQ ID NO: 2382633 - RNA, 19 nt, Artificial Sequence
  Description of Artificial Sequence: Synthetic oligonucleotide
uacauagugacuccaaacu

SEQ ID NO: 2382634 - RNA, 19 nt, Artificial Sequence
  Description of Artificial Sequence: Synthetic oligonucleotide
aguuauguuggucaggugu

SEQ ID NO: 2382635 - RNA, 19 nt, Artificial Sequence
  Description of Artificial Sequence: Synthetic oligonucleotide
aaugguuuccaagaacuuc

SEQ ID NO: 2382636 - RNA, 19 nt, Artificial Sequence
  Description of Artificial Sequence: Synthetic oligonucleotide
uuauaccuaaacaucagaa

SEQ ID NO: 2382637 - RNA, 19 nt, Artificial Sequence
  Description of Artificial Sequence: Synthetic oligonucleotide
uaauagauucaauuuuaag

SEQ ID NO: 2382638 - RNA, 19 nt, Artificial Sequence
  Description of Artificial Sequence: Synthetic oligonucleotide
uuuaagugugaacaguacu

SEQ ID NO: 2382639 - RNA, 19 nt, Artificial Sequence
  Description of Artificial Sequence: Synthetic oligonucleotide
uuaauggacaaauuaaauu

SEQ ID NO: 2382640 - RNA, 19 nt, Artificial Sequence
  Description of Artificial Sequence: Synthetic oligonucleotide
aacuaagaugaaccaaauc

SEQ ID NO: 2382641 - RNA, 19 nt, Artificial Sequence
  Description of Artificial Sequence: Synthetic oligonucleotide
uauuauaccuaaacaucag

SEQ ID NO: 2382642 - RNA, 19 nt, Artificial Sequence
  Description of Artificial Sequence: Synthetic oligonucleotide
cagagaacacauuuuauag

SEQ ID NO: 2382643 - RNA, 19 nt, Artificial Sequence
  Description of Artificial Sequence: Synthetic oligonucleotide
uaguuaauggacaaauuaa

SEQ ID NO: 2382644 - RNA, 19 nt, Artificial Sequence
  Description of Artificial Sequence: Synthetic oligonucleotide
uguucacuacccuaagacg

SEQ ID NO: 2382645 - RNA, 19 nt, Artificial Sequence
  Description of Artificial Sequence: Synthetic oligonucleotide
aaaaguuuggcaauaagua

SEQ ID NO: 2382646 - RNA, 19 nt, Artificial Sequence
  Description of Artificial Sequence: Synthetic oligonucleotide
uauguauuacaguauuaug

SEQ ID NO: 2382647 - RNA, 19 nt, Artificial Sequence
  Description of Artificial Sequence: Synthetic oligonucleotide
agcucuuagcacuaacagc

SEQ ID NO: 2382648 - RNA, 19 nt, Artificial Sequence
  Description of Artificial Sequence: Synthetic oligonucleotide
agaaucuuugcuucuaugu

SEQ ID NO: 2382649 - RNA, 19 nt, Artificial Sequence
  Description of Artificial Sequence: Synthetic oligonucleotide
ucuaauaggcucuuuaguu

SEQ ID NO: 2382650 - RNA, 19 nt, Artificial Sequence
  Description of Artificial Sequence: Synthetic oligonucleotide
aaaaucucccuuguuacug

SEQ ID NO: 2382651 - RNA, 19 nt, Artificial Sequence
  Description of Artificial Sequence: Synthetic oligonucleotide
auagcuuaaauguuaugcu

SEQ ID NO: 2382652 - RNA, 19 nt, Artificial Sequence
  Description of Artificial Sequence: Synthetic oligonucleotide
aaucccaccaacaucaaga

SEQ ID NO: 2382653 - RNA, 19 nt, Artificial Sequence
  Description of Artificial Sequence: Synthetic oligonucleotide
uuuucuaccauagauuaaa

SEQ ID NO: 2382654 - RNA, 19 nt, Artificial Sequence
  Description of Artificial Sequence: Synthetic oligonucleotide
uaaauuacauagugacucc

SEQ ID NO: 2382655 - RNA, 19 nt, Artificial Sequence
  Description of Artificial Sequence: Synthetic oligonucleotide
ugagacauuuuaucaaaug

SEQ ID NO: 2382656 - RNA, 19 nt, Artificial Sequence
  Description of Artificial Sequence: Synthetic oligonucleotide
uaaauguuaugcuaagaau

SEQ ID NO: 2382657 - RNA, 19 nt, Artificial Sequence
  Description of Artificial Sequence: Synthetic oligonucleotide
uccaauucagagaacacau

SEQ ID NO: 2382658 - RNA, 19 nt, Artificial Sequence
  Description of Artificial Sequence: Synthetic oligonucleotide
uaauaaugcugcuugucca

SEQ ID NO: 2382659 - RNA, 19 nt, Artificial Sequence
  Description of Artificial Sequence: Synthetic oligonucleotide
auuaccauauagcuuaaau

SEQ ID NO: 2382660 - RNA, 19 nt, Artificial Sequence
  Description of Artificial Sequence: Synthetic oligonucleotide
aauagguucagaccuguuu

SEQ ID NO: 2382661 - RNA, 19 nt, Artificial Sequence
  Description of Artificial Sequence: Synthetic oligonucleotide
ugaaccaaaucccaccaac

SEQ ID NO: 2382662 - RNA, 19 nt, Artificial Sequence
  Description of Artificial Sequence: Synthetic oligonucleotide
aaauaauaaugcugcuugu

SEQ ID NO: 2382663 - RNA, 19 nt, Artificial Sequence
  Description of Artificial Sequence: Synthetic oligonucleotide
uucaaacuaagaugaacca

SEQ ID NO: 2382664 - RNA, 19 nt, Artificial Sequence
  Description of Artificial Sequence: Synthetic oligonucleotide
uuccacaugaaugagacau

SEQ ID NO: 2382665 - RNA, 19 nt, Artificial Sequence
  Description of Artificial Sequence: Synthetic oligonucleotide
uuaauagauucaauuuuaa

SEQ ID NO: 2382666 - RNA, 19 nt, Artificial Sequence
  Description of Artificial Sequence: Synthetic oligonucleotide
ucacucaucagaaugccaa

SEQ ID NO: 2382667 - RNA, 19 nt, Artificial Sequence
  Description of Artificial Sequence: Synthetic oligonucleotide
uggguaguuauguugguca

SEQ ID NO: 2382668 - RNA, 19 nt, Artificial Sequence
  Description of Artificial Sequence: Synthetic oligonucleotide
aacaguacugauggaaaag

SEQ ID NO: 2382669 - RNA, 19 nt, Artificial Sequence
  Description of Artificial Sequence: Synthetic oligonucleotide
ucuuuguugcccaucacuc

SEQ ID NO: 2382670 - RNA, 19 nt, Artificial Sequence
  Description of Artificial Sequence: Synthetic oligonucleotide
uuacauagugacuccaaac

SEQ ID NO: 2382671 - RNA, 19 nt, Artificial Sequence
  Description of Artificial Sequence: Synthetic oligonucleotide
uuuuaagugugaacaguac

SEQ ID NO: 2382672 - RNA, 19 nt, Artificial Sequence
  Description of Artificial Sequence: Synthetic oligonucleotide
agcuaagucccaauguucc

SEQ ID NO: 2382673 - RNA, 19 nt, Artificial Sequence
  Description of Artificial Sequence: Synthetic oligonucleotide
acaugaaugagacauuuua

SEQ ID NO: 2382674 - RNA, 19 nt, Artificial Sequence
  Description of Artificial Sequence: Synthetic oligonucleotide
cucaauagaaacaaucuaa

SEQ ID NO: 2382675 - RNA, 19 nt, Artificial Sequence
  Description of Artificial Sequence: Synthetic oligonucleotide
uugcaaucuauuuguaggc

SEQ ID NO: 2382676 - RNA, 19 nt, Artificial Sequence
  Description of Artificial Sequence: Synthetic oligonucleotide
agguguuuaguuaauggac

SEQ ID NO: 2382677 - RNA, 19 nt, Artificial Sequence
  Description of Artificial Sequence: Synthetic oligonucleotide
augcauucaaauuccagcu

SEQ ID NO: 2382678 - RNA, 19 nt, Artificial Sequence
  Description of Artificial Sequence: Synthetic oligonucleotide
uucaaauuccagcucaaua

SEQ ID NO: 2382679 - RNA, 19 nt, Artificial Sequence
  Description of Artificial Sequence: Synthetic oligonucleotide
uuuaguuaugcugacuggu

SEQ ID NO: 2382680 - RNA, 19 nt, Artificial Sequence
  Description of Artificial Sequence: Synthetic oligonucleotide
auuauaccuaaacaucaga

SEQ ID NO: 2382681 - RNA, 19 nt, Artificial Sequence
  Description of Artificial Sequence: Synthetic oligonucleotide
cacuggguaguuauguugg

SEQ ID NO: 2382682 - RNA, 19 nt, Artificial Sequence
  Description of Artificial Sequence: Synthetic oligonucleotide
uauuuguaggcaguuagcu

SEQ ID NO: 2382683 - RNA, 19 nt, Artificial Sequence
  Description of Artificial Sequence: Synthetic oligonucleotide
uguuaugcuaagaaucuuu

SEQ ID NO: 2382684 - RNA, 19 nt, Artificial Sequence
  Description of Artificial Sequence: Synthetic oligonucleotide
acauagugacuccaaacug

SEQ ID NO: 2382685 - RNA, 19 nt, Artificial Sequence
  Description of Artificial Sequence: Synthetic oligonucleotide
uuaugcuaagaaucuuugc

SEQ ID NO: 2382686 - RNA, 19 nt, Artificial Sequence
  Description of Artificial Sequence: Synthetic oligonucleotide
uucagaccuguuuuaagug

SEQ ID NO: 2382687 - RNA, 19 nt, Artificial Sequence
  Description of Artificial Sequence: Synthetic oligonucleotide
aagaaaugguuuccaagaa

SEQ ID NO: 2382688 - RNA, 19 nt, Artificial Sequence
  Description of Artificial Sequence: Synthetic oligonucleotide
cuuuaguuaugcugacugg

SEQ ID NO: 2382689 - RNA, 19 nt, Artificial Sequence
  Description of Artificial Sequence: Synthetic oligonucleotide
uucuauguauuacaguauu

SEQ ID NO: 2382690 - RNA, 19 nt, Artificial Sequence
  Description of Artificial Sequence: Synthetic oligonucleotide
guacugauggaaaaguuug

SEQ ID NO: 2382691 - RNA, 19 nt, Artificial Sequence
  Description of Artificial Sequence: Synthetic oligonucleotide
agagaacacauuuuauaga

SEQ ID NO: 2382692 - RNA, 19 nt, Artificial Sequence
  Description of Artificial Sequence: Synthetic oligonucleotide
gucacuugaccucacuggg

SEQ ID NO: 2382693 - RNA, 19 nt, Artificial Sequence
  Description of Artificial Sequence: Synthetic oligonucleotide
uuacaguauuaugacuugg

SEQ ID NO: 2382694 - RNA, 19 nt, Artificial Sequence
  Description of Artificial Sequence: Synthetic oligonucleotide
gaaugagacauuuuaucaa

SEQ ID NO: 2382695 - RNA, 19 nt, Artificial Sequence
  Description of Artificial Sequence: Synthetic oligonucleotide
uuaaguuaauagauucaau

SEQ ID NO: 2382696 - RNA, 19 nt, Artificial Sequence
  Description of Artificial Sequence: Synthetic oligonucleotide
aaaauggauuaccuuguua

SEQ ID NO: 2382697 - RNA, 19 nt, Artificial Sequence
  Description of Artificial Sequence: Synthetic oligonucleotide
guguucacuacccuaagac

SEQ ID NO: 2382698 - RNA, 19 nt, Artificial Sequence
  Description of Artificial Sequence: Synthetic oligonucleotide
aaccaaaucccaccaacau

SEQ ID NO: 2382699 - RNA, 19 nt, Artificial Sequence
  Description of Artificial Sequence: Synthetic oligonucleotide
ugcugcuuguccaauucag

SEQ ID NO: 2382700 - RNA, 19 nt, Artificial Sequence
  Description of Artificial Sequence: Synthetic oligonucleotide
cuuguuacugaaaauaggu

SEQ ID NO: 2382701 - RNA, 19 nt, Artificial Sequence
  Description of Artificial Sequence: Synthetic oligonucleotide
uaauaggcucuuuaguuau

SEQ ID NO: 2382702 - RNA, 19 nt, Artificial Sequence
  Description of Artificial Sequence: Synthetic oligonucleotide
gcucuuagcacuaacagcc

SEQ ID NO: 2382703 - RNA, 19 nt, Artificial Sequence
  Description of Artificial Sequence: Synthetic oligonucleotide
uguuuuaagugugaacagu

SEQ ID NO: 2382704 - RNA, 19 nt, Artificial Sequence
  Description of Artificial Sequence: Synthetic oligonucleotide
uuauagauuuaaguuaaua

SEQ ID NO: 2382705 - RNA, 19 nt, Artificial Sequence
  Description of Artificial Sequence: Synthetic oligonucleotide
gaugaaccaaaucccacca

SEQ ID NO: 2382706 - RNA, 19 nt, Artificial Sequence
  Description of Artificial Sequence: Synthetic oligonucleotide
acuauaguuucaaacuaag

SEQ ID NO: 2382707 - RNA, 19 nt, Artificial Sequence
  Description of Artificial Sequence: Synthetic oligonucleotide
acaguauuaugacuuggga

SEQ ID NO: 2382708 - RNA, 19 nt, Artificial Sequence
  Description of Artificial Sequence: Synthetic oligonucleotide
aaauuacauagugacucca

SEQ ID NO: 2382709 - RNA, 19 nt, Artificial Sequence
  Description of Artificial Sequence: Synthetic oligonucleotide
cucaucagaaugccaaaag

SEQ ID NO: 2382710 - RNA, 19 nt, Artificial Sequence
  Description of Artificial Sequence: Synthetic oligonucleotide
aaaauagguucagaccugu

SEQ ID NO: 2382711 - RNA, 19 nt, Artificial Sequence
  Description of Artificial Sequence: Synthetic oligonucleotide
auagguucagaccuguuuu

SEQ ID NO: 2382712 - RNA, 19 nt, Artificial Sequence
  Description of Artificial Sequence: Synthetic oligonucleotide
aagacuuuucuaccauaga

SEQ ID NO: 2382713 - RNA, 19 nt, Artificial Sequence
  Description of Artificial Sequence: Synthetic oligonucleotide
aaaucucccuuguuacuga

SEQ ID NO: 2382714 - RNA, 19 nt, Artificial Sequence
  Description of Artificial Sequence: Synthetic oligonucleotide
ugguuuaguauccaauguu

SEQ ID NO: 2382715 - RNA, 19 nt, Artificial Sequence
  Description of Artificial Sequence: Synthetic oligonucleotide
cagcucaauagaaacaauc

SEQ ID NO: 2382716 - RNA, 19 nt, Artificial Sequence
  Description of Artificial Sequence: Synthetic oligonucleotide
uaugcugacugguuuagua

SEQ ID NO: 2382717 - RNA, 19 nt, Artificial Sequence
  Description of Artificial Sequence: Synthetic oligonucleotide
ucuauguauuacaguauua

SEQ ID NO: 2382718 - RNA, 19 nt, Artificial Sequence
  Description of Artificial Sequence: Synthetic oligonucleotide
uaagugugaacaguacuga

SEQ ID NO: 2382719 - RNA, 19 nt, Artificial Sequence
  Description of Artificial Sequence: Synthetic oligonucleotide
uucacuacccuaagacgug

SEQ ID NO: 2382720 - RNA, 19 nt, Artificial Sequence
  Description of Artificial Sequence: Synthetic oligonucleotide
cucuauaaucaaauaauaa

SEQ ID NO: 2382721 - RNA, 19 nt, Artificial Sequence
  Description of Artificial Sequence: Synthetic oligonucleotide
ucaaauaauaaugcugcuu

SEQ ID NO: 2382722 - RNA, 19 nt, Artificial Sequence
  Description of Artificial Sequence: Synthetic oligonucleotide
guuaugcuaagaaucuuug

SEQ ID NO: 2382723 - RNA, 19 nt, Artificial Sequence
  Description of Artificial Sequence: Synthetic oligonucleotide
caucagaaugccaaaagaa

SEQ ID NO: 2382724 - RNA, 19 nt, Artificial Sequence
  Description of Artificial Sequence: Synthetic oligonucleotide
auuacauagugacuccaaa

SEQ ID NO: 2382725 - RNA, 19 nt, Artificial Sequence
  Description of Artificial Sequence: Synthetic oligonucleotide
accaacaucaagaaauggu

SEQ ID NO: 2382726 - RNA, 19 nt, Artificial Sequence
  Description of Artificial Sequence: Synthetic oligonucleotide
ugcuuguccaauucagaga

SEQ ID NO: 2382727 - RNA, 19 nt, Artificial Sequence
  Description of Artificial Sequence: Synthetic oligonucleotide
uguguucacuacccuaaga

SEQ ID NO: 2382728 - RNA, 19 nt, Artificial Sequence
  Description of Artificial Sequence: Synthetic oligonucleotide
uggucacuugaccucacug

SEQ ID NO: 2382729 - RNA, 19 nt, Artificial Sequence
  Description of Artificial Sequence: Synthetic oligonucleotide
uucagagaacacauuuuau

SEQ ID NO: 2382730 - RNA, 19 nt, Artificial Sequence
  Description of Artificial Sequence: Synthetic oligonucleotide
uagcuuaaauguuaugcua

SEQ ID NO: 2382731 - RNA, 19 nt, Artificial Sequence
  Description of Artificial Sequence: Synthetic oligonucleotide
aguuaauggacaaauuaaa

SEQ ID NO: 2382732 - RNA, 19 nt, Artificial Sequence
  Description of Artificial Sequence: Synthetic oligonucleotide
cagcucuuagcacuaacag

SEQ ID NO: 2382733 - RNA, 19 nt, Artificial Sequence
  Description of Artificial Sequence: Synthetic oligonucleotide
cacagaacaccugugcucc

SEQ ID NO: 2382734 - RNA, 19 nt, Artificial Sequence
  Description of Artificial Sequence: Synthetic oligonucleotide
agacgugcuuuccacauga

SEQ ID NO: 2382735 - RNA, 19 nt, Artificial Sequence
  Description of Artificial Sequence: Synthetic oligonucleotide
auggccuuguguucacuac

SEQ ID NO: 2382736 - RNA, 19 nt, Artificial Sequence
  Description of Artificial Sequence: Synthetic oligonucleotide
gaaaauagguucagaccug

SEQ ID NO: 2382737 - RNA, 19 nt, Artificial Sequence
  Description of Artificial Sequence: Synthetic oligonucleotide
uaagacgugcuuuccacau

SEQ ID NO: 2382738 - RNA, 19 nt, Artificial Sequence
  Description of Artificial Sequence: Synthetic oligonucleotide
uggucagguguuuaguuaa

SEQ ID NO: 2382739 - RNA, 19 nt, Artificial Sequence
  Description of Artificial Sequence: Synthetic oligonucleotide
agauucaauuuuaagacuu

SEQ ID NO: 2382740 - RNA, 19 nt, Artificial Sequence
  Description of Artificial Sequence: Synthetic oligonucleotide
aggcuugagaacuaugaaa

SEQ ID NO: 2382741 - RNA, 19 nt, Artificial Sequence
  Description of Artificial Sequence: Synthetic oligonucleotide
uguccaauucagagaacac

SEQ ID NO: 2382742 - RNA, 19 nt, Artificial Sequence
  Description of Artificial Sequence: Synthetic oligonucleotide
auggauuaccuuguuaaca

SEQ ID NO: 2382743 - RNA, 19 nt, Artificial Sequence
  Description of Artificial Sequence: Synthetic oligonucleotide
uaagaaucuuugcuucuau

SEQ ID NO: 2382744 - RNA, 19 nt, Artificial Sequence
  Description of Artificial Sequence: Synthetic oligonucleotide
aauuccagcucaauagaaa

SEQ ID NO: 2382745 - RNA, 19 nt, Artificial Sequence
  Description of Artificial Sequence: Synthetic oligonucleotide
aagugugaacaguacugau

SEQ ID NO: 2382746 - RNA, 19 nt, Artificial Sequence
  Description of Artificial Sequence: Synthetic oligonucleotide
gaaucuuugcuucuaugua

SEQ ID NO: 2382747 - RNA, 19 nt, Artificial Sequence
  Description of Artificial Sequence: Synthetic oligonucleotide
auauagcuuaaauguuaug

SEQ ID NO: 2382748 - RNA, 19 nt, Artificial Sequence
  Description of Artificial Sequence: Synthetic oligonucleotide
cuaugaaauauuauaccua

SEQ ID NO: 2382749 - RNA, 19 nt, Artificial Sequence
  Description of Artificial Sequence: Synthetic oligonucleotide
aauucagagaacacauuuu

SEQ ID NO: 2382750 - RNA, 19 nt, Artificial Sequence
  Description of Artificial Sequence: Synthetic oligonucleotide
uggccuuguguucacuacc

SEQ ID NO: 2382751 - RNA, 19 nt, Artificial Sequence
  Description of Artificial Sequence: Synthetic oligonucleotide
uagcuaagucccaauguuc

SEQ ID NO: 2382752 - RNA, 19 nt, Artificial Sequence
  Description of Artificial Sequence: Synthetic oligonucleotide
agugugaacaguacugaug

SEQ ID NO: 2382753 - RNA, 19 nt, Artificial Sequence
  Description of Artificial Sequence: Synthetic oligonucleotide
uuaagacuuuucuaccaua

SEQ ID NO: 2382754 - RNA, 19 nt, Artificial Sequence
  Description of Artificial Sequence: Synthetic oligonucleotide
uguucccucuauaaucaaa

SEQ ID NO: 2382755 - RNA, 19 nt, Artificial Sequence
  Description of Artificial Sequence: Synthetic oligonucleotide
augcuaagaaucuuugcuu

SEQ ID NO: 2382756 - RNA, 19 nt, Artificial Sequence
  Description of Artificial Sequence: Synthetic oligonucleotide
uuuauagauuuaaguuaau

SEQ ID NO: 2382757 - RNA, 19 nt, Artificial Sequence
  Description of Artificial Sequence: Synthetic oligonucleotide
acaguacugauggaaaagu

SEQ ID NO: 2382758 - RNA, 19 nt, Artificial Sequence
  Description of Artificial Sequence: Synthetic oligonucleotide
ugcauucaaauuccagcuc

SEQ ID NO: 2382759 - RNA, 19 nt, Artificial Sequence
  Description of Artificial Sequence: Synthetic oligonucleotide
acaacacugcagcucuuag

SEQ ID NO: 2382760 - RNA, 19 nt, Artificial Sequence
  Description of Artificial Sequence: Synthetic oligonucleotide
aauuacauagugacuccaa

SEQ ID NO: 2382761 - RNA, 19 nt, Artificial Sequence
  Description of Artificial Sequence: Synthetic oligonucleotide
aaauuccagcucaauagaa

SEQ ID NO: 2382762 - RNA, 19 nt, Artificial Sequence
  Description of Artificial Sequence: Synthetic oligonucleotide
auguuggucagguguuuag

SEQ ID NO: 2382763 - RNA, 19 nt, Artificial Sequence
  Description of Artificial Sequence: Synthetic oligonucleotide
ggaaaaguuuggcaauaag

SEQ ID NO: 2382764 - RNA, 19 nt, Artificial Sequence
  Description of Artificial Sequence: Synthetic oligonucleotide
gcaaucuauuuguaggcag

SEQ ID NO: 2382765 - RNA, 19 nt, Artificial Sequence
  Description of Artificial Sequence: Synthetic oligonucleotide
aagacgugcuuuccacaug

SEQ ID NO: 2382766 - RNA, 19 nt, Artificial Sequence
  Description of Artificial Sequence: Synthetic oligonucleotide
agacauuuuaucaaauguu

SEQ ID NO: 2382767 - RNA, 19 nt, Artificial Sequence
  Description of Artificial Sequence: Synthetic oligonucleotide
cuuguguucacuacccuaa

SEQ ID NO: 2382768 - RNA, 19 nt, Artificial Sequence
  Description of Artificial Sequence: Synthetic oligonucleotide
cuauaguuucaaacuaaga

SEQ ID NO: 2382769 - RNA, 19 nt, Artificial Sequence
  Description of Artificial Sequence: Synthetic oligonucleotide
uaguuaugcugacugguuu

SEQ ID NO: 2382770 - RNA, 19 nt, Artificial Sequence
  Description of Artificial Sequence: Synthetic oligonucleotide
ugugcuccauagcuaaguc

SEQ ID NO: 2382771 - RNA, 19 nt, Artificial Sequence
  Description of Artificial Sequence: Synthetic oligonucleotide
cagguguuuaguuaaugga

SEQ ID NO: 2382772 - RNA, 19 nt, Artificial Sequence
  Description of Artificial Sequence: Synthetic oligonucleotide
ugcuucuauguauuacagu

SEQ ID NO: 2382773 - RNA, 19 nt, Artificial Sequence
  Description of Artificial Sequence: Synthetic oligonucleotide
caguauuaugacuugggaa

SEQ ID NO: 2382774 - RNA, 19 nt, Artificial Sequence
  Description of Artificial Sequence: Synthetic oligonucleotide
ccuuguuacugaaaauagg

SEQ ID NO: 2382775 - RNA, 19 nt, Artificial Sequence
  Description of Artificial Sequence: Synthetic oligonucleotide
uaaaauggauuaccuuguu

SEQ ID NO: 2382776 - RNA, 19 nt, Artificial Sequence
  Description of Artificial Sequence: Synthetic oligonucleotide
aguuaugcugacugguuua

SEQ ID NO: 2382777 - RNA, 19 nt, Artificial Sequence
  Description of Artificial Sequence: Synthetic oligonucleotide
caaauuccagcucaauaga

SEQ ID NO: 2382778 - RNA, 19 nt, Artificial Sequence
  Description of Artificial Sequence: Synthetic oligonucleotide
gcuuaaauguuaugcuaag

SEQ ID NO: 2382779 - RNA, 19 nt, Artificial Sequence
  Description of Artificial Sequence: Synthetic oligonucleotide
cgugcuuuccacaugaaug

SEQ ID NO: 2382780 - RNA, 19 nt, Artificial Sequence
  Description of Artificial Sequence: Synthetic oligonucleotide
ccuguuuuaagugugaaca

SEQ ID NO: 2382781 - RNA, 19 nt, Artificial Sequence
  Description of Artificial Sequence: Synthetic oligonucleotide
cuaauaggcucuuuaguua

SEQ ID NO: 2382782 - RNA, 19 nt, Artificial Sequence
  Description of Artificial Sequence: Synthetic oligonucleotide
aaucuauuuguaggcaguu

SEQ ID NO: 2382783 - RNA, 19 nt, Artificial Sequence
  Description of Artificial Sequence: Synthetic oligonucleotide
agcuuaaauguuaugcuaa

SEQ ID NO: 2382784 - RNA, 19 nt, Artificial Sequence
  Description of Artificial Sequence: Synthetic oligonucleotide
auagugacuccaaacugug

SEQ ID NO: 2382785 - RNA, 19 nt, Artificial Sequence
  Description of Artificial Sequence: Synthetic oligonucleotide
uuagcacuaacagcccuga

SEQ ID NO: 2382786 - RNA, 19 nt, Artificial Sequence
  Description of Artificial Sequence: Synthetic oligonucleotide
uuuagcaagugauggccuu

SEQ ID NO: 2382787 - RNA, 19 nt, Artificial Sequence
  Description of Artificial Sequence: Synthetic oligonucleotide
uuggucagguguuuaguua

SEQ ID NO: 2382788 - RNA, 19 nt, Artificial Sequence
  Description of Artificial Sequence: Synthetic oligonucleotide
aguacugauggaaaaguuu

SEQ ID NO: 2382789 - RNA, 19 nt, Artificial Sequence
  Description of Artificial Sequence: Synthetic oligonucleotide
guuaugcugacugguuuag

SEQ ID NO: 2382790 - RNA, 19 nt, Artificial Sequence
  Description of Artificial Sequence: Synthetic oligonucleotide
uacccuaagacgugcuuuc

SEQ ID NO: 2382791 - RNA, 19 nt, Artificial Sequence
  Description of Artificial Sequence: Synthetic oligonucleotide
uuagcaagugauggccuug

SEQ ID NO: 2382792 - RNA, 19 nt, Artificial Sequence
  Description of Artificial Sequence: Synthetic oligonucleotide
guuuuaagugugaacagua

SEQ ID NO: 2382793 - RNA, 19 nt, Artificial Sequence
  Description of Artificial Sequence: Synthetic oligonucleotide
agauuuaaguuaauagauu

SEQ ID NO: 2382794 - RNA, 19 nt, Artificial Sequence
  Description of Artificial Sequence: Synthetic oligonucleotide
caucacucaucagaaugcc

SEQ ID NO: 2382795 - RNA, 19 nt, Artificial Sequence
  Description of Artificial Sequence: Synthetic oligonucleotide
gauggaaaaguuuggcaau

SEQ ID NO: 2382796 - RNA, 19 nt, Artificial Sequence
  Description of Artificial Sequence: Synthetic oligonucleotide
ccaucacucaucagaaugc

SEQ ID NO: 2382797 - RNA, 19 nt, Artificial Sequence
  Description of Artificial Sequence: Synthetic oligonucleotide
gaaccaaaucccaccaaca

SEQ ID NO: 2382798 - RNA, 19 nt, Artificial Sequence
  Description of Artificial Sequence: Synthetic oligonucleotide
ggacaaauuaaauuacaua

SEQ ID NO: 2382799 - RNA, 19 nt, Artificial Sequence
  Description of Artificial Sequence: Synthetic oligonucleotide
cauagugacuccaaacugu

SEQ ID NO: 2382800 - RNA, 19 nt, Artificial Sequence
  Description of Artificial Sequence: Synthetic oligonucleotide
augcugacugguuuaguau

SEQ ID NO: 2382801 - RNA, 19 nt, Artificial Sequence
  Description of Artificial Sequence: Synthetic oligonucleotide
uaagucccaauguucccuc

SEQ ID NO: 2382802 - RNA, 19 nt, Artificial Sequence
  Description of Artificial Sequence: Synthetic oligonucleotide
cccuuguuacugaaaauag

SEQ ID NO: 2382803 - RNA, 19 nt, Artificial Sequence
  Description of Artificial Sequence: Synthetic oligonucleotide
gugaacaguacugauggaa

SEQ ID NO: 2382804 - RNA, 19 nt, Artificial Sequence
  Description of Artificial Sequence: Synthetic oligonucleotide
gguucagaccuguuuuaag

SEQ ID NO: 2382805 - RNA, 19 nt, Artificial Sequence
  Description of Artificial Sequence: Synthetic oligonucleotide
ugacuccaaacuguguuuc

SEQ ID NO: 2382806 - RNA, 19 nt, Artificial Sequence
  Description of Artificial Sequence: Synthetic oligonucleotide
uacugaaaauagguucaga

SEQ ID NO: 2382807 - RNA, 19 nt, Artificial Sequence
  Description of Artificial Sequence: Synthetic oligonucleotide
guucacuacccuaagacgu

SEQ ID NO: 2382808 - RNA, 19 nt, Artificial Sequence
  Description of Artificial Sequence: Synthetic oligonucleotide
ugcagcucuuagcacuaac

SEQ ID NO: 2382809 - RNA, 19 nt, Artificial Sequence
  Description of Artificial Sequence: Synthetic oligonucleotide
aacacauuuuauagauuua

SEQ ID NO: 2382810 - RNA, 19 nt, Artificial Sequence
  Description of Artificial Sequence: Synthetic oligonucleotide
cuugagaacuaugaaauau

SEQ ID NO: 2382811 - RNA, 19 nt, Artificial Sequence
  Description of Artificial Sequence: Synthetic oligonucleotide
guaguuauguuggucaggu

SEQ ID NO: 2382812 - RNA, 19 nt, Artificial Sequence
  Description of Artificial Sequence: Synthetic oligonucleotide
aaaugguuuccaagaacuu

SEQ ID NO: 2382813 - RNA, 19 nt, Artificial Sequence
  Description of Artificial Sequence: Synthetic oligonucleotide
ucacuacccuaagacgugc

SEQ ID NO: 2382814 - RNA, 19 nt, Artificial Sequence
  Description of Artificial Sequence: Synthetic oligonucleotide
aacaacacugcagcucuua

SEQ ID NO: 2382815 - RNA, 19 nt, Artificial Sequence
  Description of Artificial Sequence: Synthetic oligonucleotide
uagugacuccaaacugugu

SEQ ID NO: 2382816 - RNA, 19 nt, Artificial Sequence
  Description of Artificial Sequence: Synthetic oligonucleotide
uagguucagaccuguuuua

SEQ ID NO: 2382817 - RNA, 19 nt, Artificial Sequence
  Description of Artificial Sequence: Synthetic oligonucleotide
caauucagagaacacauuu

SEQ ID NO: 2382818 - RNA, 19 nt, Artificial Sequence
  Description of Artificial Sequence: Synthetic oligonucleotide
aauuaccauauagcuuaaa

SEQ ID NO: 2382819 - RNA, 19 nt, Artificial Sequence
  Description of Artificial Sequence: Synthetic oligonucleotide
uaguuauguuggucaggug

SEQ ID NO: 2382820 - RNA, 19 nt, Artificial Sequence
  Description of Artificial Sequence: Synthetic oligonucleotide
cuauguauuacaguauuau

SEQ ID NO: 2382821 - RNA, 19 nt, Artificial Sequence
  Description of Artificial Sequence: Synthetic oligonucleotide
gguaguuauguuggucagg

SEQ ID NO: 2382822 - RNA, 19 nt, Artificial Sequence
  Description of Artificial Sequence: Synthetic oligonucleotide
ccuaagacgugcuuuccac

SEQ ID NO: 2382823 - RNA, 19 nt, Artificial Sequence
  Description of Artificial Sequence: Synthetic oligonucleotide
cauauagcuuaaauguuau

SEQ ID NO: 2382824 - RNA, 19 nt, Artificial Sequence
  Description of Artificial Sequence: Synthetic oligonucleotide
cuaagacgugcuuuccaca

SEQ ID NO: 2382825 - RNA, 19 nt, Artificial Sequence
  Description of Artificial Sequence: Synthetic oligonucleotide
cauagcuaagucccaaugu

SEQ ID NO: 2382826 - RNA, 19 nt, Artificial Sequence
  Description of Artificial Sequence: Synthetic oligonucleotide
caugaaugagacauuuuau

SEQ ID NO: 2382827 - RNA, 19 nt, Artificial Sequence
  Description of Artificial Sequence: Synthetic oligonucleotide
uccacaugaaugagacauu

SEQ ID NO: 2382828 - RNA, 19 nt, Artificial Sequence
  Description of Artificial Sequence: Synthetic oligonucleotide
uucccucuauaaucaaaua

SEQ ID NO: 2382829 - RNA, 19 nt, Artificial Sequence
  Description of Artificial Sequence: Synthetic oligonucleotide
ggguaguuauguuggucag

SEQ ID NO: 2382830 - RNA, 19 nt, Artificial Sequence
  Description of Artificial Sequence: Synthetic oligonucleotide
acgugcuuuccacaugaau

SEQ ID NO: 2382831 - RNA, 19 nt, Artificial Sequence
  Description of Artificial Sequence: Synthetic oligonucleotide
uauguuggucagguguuua

SEQ ID NO: 2382832 - RNA, 19 nt, Artificial Sequence
  Description of Artificial Sequence: Synthetic oligonucleotide
uagcacuaacagcccugag

SEQ ID NO: 2382833 - RNA, 19 nt, Artificial Sequence
  Description of Artificial Sequence: Synthetic oligonucleotide
accauauagcuuaaauguu

SEQ ID NO: 2382834 - RNA, 19 nt, Artificial Sequence
  Description of Artificial Sequence: Synthetic oligonucleotide
aaauuaccauauagcuuaa

SEQ ID NO: 2382835 - RNA, 19 nt, Artificial Sequence
  Description of Artificial Sequence: Synthetic oligonucleotide
acuacccuaagacgugcuu

SEQ ID NO: 2382836 - RNA, 19 nt, Artificial Sequence
  Description of Artificial Sequence: Synthetic oligonucleotide
gcuaagucccaauguuccc

SEQ ID NO: 2382837 - RNA, 19 nt, Artificial Sequence
  Description of Artificial Sequence: Synthetic oligonucleotide
cuaacagcccugagaacaa

SEQ ID NO: 2382838 - RNA, 19 nt, Artificial Sequence
  Description of Artificial Sequence: Synthetic oligonucleotide
uuaugcugacugguuuagu

SEQ ID NO: 2382839 - RNA, 19 nt, Artificial Sequence
  Description of Artificial Sequence: Synthetic oligonucleotide
ccauauagcuuaaauguua

SEQ ID NO: 2382840 - RNA, 19 nt, Artificial Sequence
  Description of Artificial Sequence: Synthetic oligonucleotide
ccauagcuaagucccaaug

SEQ ID NO: 2382841 - RNA, 19 nt, Artificial Sequence
  Description of Artificial Sequence: Synthetic oligonucleotide
cugguuuaguauccaaugu

SEQ ID NO: 2382842 - RNA, 19 nt, Artificial Sequence
  Description of Artificial Sequence: Synthetic oligonucleotide
agcaagugauggccuugug

SEQ ID NO: 2382843 - RNA, 19 nt, Artificial Sequence
  Description of Artificial Sequence: Synthetic oligonucleotide
cacuugaccucacugggua

SEQ ID NO: 2382844 - RNA, 19 nt, Artificial Sequence
  Description of Artificial Sequence: Synthetic oligonucleotide
cacugcagcucuuagcacu

SEQ ID NO: 2382845 - RNA, 19 nt, Artificial Sequence
  Description of Artificial Sequence: Synthetic oligonucleotide
guugcccaucacucaucag

SEQ ID NO: 2382846 - RNA, 19 nt, Artificial Sequence
  Description of Artificial Sequence: Synthetic oligonucleotide
gaccucacuggguaguuau

SEQ ID NO: 2382847 - RNA, 19 nt, Artificial Sequence
  Description of Artificial Sequence: Synthetic oligonucleotide
cuucuauguauuacaguau

SEQ ID NO: 2382848 - RNA, 19 nt, Artificial Sequence
  Description of Artificial Sequence: Synthetic oligonucleotide
cacuaacagcccugagaac

SEQ ID NO: 2382849 - RNA, 19 nt, Artificial Sequence
  Description of Artificial Sequence: Synthetic oligonucleotide
cuaagaaucuuugcuucua

SEQ ID NO: 2382850 - RNA, 19 nt, Artificial Sequence
  Description of Artificial Sequence: Synthetic oligonucleotide
ccucuauaaucaaauaaua

SEQ ID NO: 2382851 - RNA, 19 nt, Artificial Sequence
  Description of Artificial Sequence: Synthetic oligonucleotide
agucccaauguucccucua

SEQ ID NO: 2382852 - RNA, 19 nt, Artificial Sequence
  Description of Artificial Sequence: Synthetic oligonucleotide
aguuucaaacuaagaugaa

SEQ ID NO: 2382853 - RNA, 19 nt, Artificial Sequence
  Description of Artificial Sequence: Synthetic oligonucleotide
caaaaucucccuuguuacu

SEQ ID NO: 2382854 - RNA, 19 nt, Artificial Sequence
  Description of Artificial Sequence: Synthetic oligonucleotide
agaccuguuuuaaguguga

SEQ ID NO: 2382855 - RNA, 19 nt, Artificial Sequence
  Description of Artificial Sequence: Synthetic oligonucleotide
aaauagguucagaccuguu

SEQ ID NO: 2382856 - RNA, 19 nt, Artificial Sequence
  Description of Artificial Sequence: Synthetic oligonucleotide
ccacagaacaccugugcuc

SEQ ID NO: 2382857 - RNA, 19 nt, Artificial Sequence
  Description of Artificial Sequence: Synthetic oligonucleotide
aucuauuuguaggcaguua

SEQ ID NO: 2382858 - RNA, 19 nt, Artificial Sequence
  Description of Artificial Sequence: Synthetic oligonucleotide
agguucagaccuguuuuaa

SEQ ID NO: 2382859 - RNA, 19 nt, Artificial Sequence
  Description of Artificial Sequence: Synthetic oligonucleotide
auguuaugcuaagaaucuu

SEQ ID NO: 2382860 - RNA, 19 nt, Artificial Sequence
  Description of Artificial Sequence: Synthetic oligonucleotide
caacaucaagaaaugguuu

SEQ ID NO: 2382861 - RNA, 19 nt, Artificial Sequence
  Description of Artificial Sequence: Synthetic oligonucleotide
gauucaauuuuaagacuuu

SEQ ID NO: 2382862 - RNA, 19 nt, Artificial Sequence
  Description of Artificial Sequence: Synthetic oligonucleotide
gaccuguuuuaagugugaa

SEQ ID NO: 2382863 - RNA, 19 nt, Artificial Sequence
  Description of Artificial Sequence: Synthetic oligonucleotide
acagaacaccugugcucca

SEQ ID NO: 2382864 - RNA, 19 nt, Artificial Sequence
  Description of Artificial Sequence: Synthetic oligonucleotide
cuaagucccaauguucccu

SEQ ID NO: 2382865 - RNA, 19 nt, Artificial Sequence
  Description of Artificial Sequence: Synthetic oligonucleotide
guaggcaguuagcuuuaaa

SEQ ID NO: 2382866 - RNA, 19 nt, Artificial Sequence
  Description of Artificial Sequence: Synthetic oligonucleotide
cacucaucagaaugccaaa

SEQ ID NO: 2382867 - RNA, 19 nt, Artificial Sequence
  Description of Artificial Sequence: Synthetic oligonucleotide
guuauguuggucagguguu

SEQ ID NO: 2382868 - RNA, 19 nt, Artificial Sequence
  Description of Artificial Sequence: Synthetic oligonucleotide
gguuuaguauccaauguuu

SEQ ID NO: 2382869 - RNA, 19 nt, Artificial Sequence
  Description of Artificial Sequence: Synthetic oligonucleotide
ccaacaucaagaaaugguu

SEQ ID NO: 2382870 - RNA, 19 nt, Artificial Sequence
  Description of Artificial Sequence: Synthetic oligonucleotide
gcaagugauggccuugugu

SEQ ID NO: 2382871 - RNA, 19 nt, Artificial Sequence
  Description of Artificial Sequence: Synthetic oligonucleotide
uguaggcaguuagcuuuaa

SEQ ID NO: 2382872 - RNA, 19 nt, Artificial Sequence
  Description of Artificial Sequence: Synthetic oligonucleotide
ccugagaacaaugcauuca

SEQ ID NO: 2382873 - RNA, 19 nt, Artificial Sequence
  Description of Artificial Sequence: Synthetic oligonucleotide
gcuaagaaucuuugcuucu

SEQ ID NO: 2382874 - RNA, 19 nt, Artificial Sequence
  Description of Artificial Sequence: Synthetic oligonucleotide
cccugagaacaaugcauuc

SEQ ID NO: 2382875 - RNA, 19 nt, Artificial Sequence
  Description of Artificial Sequence: Synthetic oligonucleotide
accucacuggguaguuaug

SEQ ID NO: 2382876 - RNA, 19 nt, Artificial Sequence
  Description of Artificial Sequence: Synthetic oligonucleotide
aaacaacacugcagcucuu

SEQ ID NO: 2382877 - RNA, 19 nt, Artificial Sequence
  Description of Artificial Sequence: Synthetic oligonucleotide
caguacugauggaaaaguu

SEQ ID NO: 2382878 - RNA, 19 nt, Artificial Sequence
  Description of Artificial Sequence: Synthetic oligonucleotide
cuugaccucacuggguagu

SEQ ID NO: 2382879 - RNA, 19 nt, Artificial Sequence
  Description of Artificial Sequence: Synthetic oligonucleotide
cugugcuccauagcuaagu

SEQ ID NO: 2382880 - RNA, 19 nt, Artificial Sequence
  Description of Artificial Sequence: Synthetic oligonucleotide
cacaugaaugagacauuuu

SEQ ID NO: 2382881 - RNA, 19 nt, Artificial Sequence
  Description of Artificial Sequence: Synthetic oligonucleotide
cucuuuaguuaugcugacu

SEQ ID NO: 2382882 - RNA, 19 nt, Artificial Sequence
  Description of Artificial Sequence: Synthetic oligonucleotide
cucacuggguaguuauguu

SEQ ID NO: 2382883 - RNA, 19 nt, Artificial Sequence
  Description of Artificial Sequence: Synthetic oligonucleotide
cuacccuaagacgugcuuu

SEQ ID NO: 2382884 - RNA, 19 nt, Artificial Sequence
  Description of Artificial Sequence: Synthetic oligonucleotide
ccuaaacaucagaauauuu

SEQ ID NO: 2382885 - RNA, 19 nt, Artificial Sequence
  Description of Artificial Sequence: Synthetic oligonucleotide
gacgugcuuuccacaugaa

SEQ ID NO: 2382886 - RNA, 19 nt, Artificial Sequence
  Description of Artificial Sequence: Synthetic oligonucleotide
cccuaagacgugcuuucca

SEQ ID NO: 2382887 - RNA, 19 nt, Artificial Sequence
  Description of Artificial Sequence: Synthetic oligonucleotide
cacuacccuaagacgugcu

SEQ ID NO: 2382888 - RNA, 19 nt, Artificial Sequence
  Description of Artificial Sequence: Synthetic oligonucleotide
ccucacuggguaguuaugu

SEQ ID NO: 2382889 - RNA, 19 nt, Artificial Sequence
  Description of Artificial Sequence: Synthetic oligonucleotide
gcccugagaacaaugcauu

SEQ ID NO: 2382890 - RNA, 19 nt, Artificial Sequence
  Description of Artificial Sequence: Synthetic oligonucleotide
ccacaugaaugagacauuu

SEQ ID NO: 2382891 - RNA, 19 nt, Artificial Sequence
  Description of Artificial Sequence: Synthetic oligonucleotide
ccaauucagagaacacauu

SEQ ID NO: 2382892 - RNA, 19 nt, Artificial Sequence
  Description of Artificial Sequence: Synthetic oligonucleotide
ggucagguguuuaguuaau

SEQ ID NO: 2382893 - RNA, 19 nt, Artificial Sequence
  Description of Artificial Sequence: Synthetic oligonucleotide
gcccaucacucaucagaau

SEQ ID NO: 2382894 - RNA, 19 nt, Artificial Sequence
  Description of Artificial Sequence: Synthetic oligonucleotide
ucuaggaaaaccaagcucc

SEQ ID NO: 2382895 - RNA, 19 nt, Artificial Sequence
  Description of Artificial Sequence: Synthetic oligonucleotide
uuagcuuuuggacauggcg

SEQ ID NO: 2382896 - RNA, 19 nt, Artificial Sequence
  Description of Artificial Sequence: Synthetic oligonucleotide
agaaccuucaccguaagcc

SEQ ID NO: 2382897 - RNA, 19 nt, Artificial Sequence
  Description of Artificial Sequence: Synthetic oligonucleotide
agaagauugggccuugacc

SEQ ID NO: 2382898 - RNA, 19 nt, Artificial Sequence
  Description of Artificial Sequence: Synthetic oligonucleotide
uauacuucagccaacggga

SEQ ID NO: 2382899 - RNA, 19 nt, Artificial Sequence
  Description of Artificial Sequence: Synthetic oligonucleotide
agcaccagaaccuucaccg

SEQ ID NO: 2382900 - RNA, 19 nt, Artificial Sequence
  Description of Artificial Sequence: Synthetic oligonucleotide
uuuucuguagacacagggg

SEQ ID NO: 2382901 - RNA, 19 nt, Artificial Sequence
  Description of Artificial Sequence: Synthetic oligonucleotide
aaaccaagcucccugaugu

SEQ ID NO: 2382902 - RNA, 19 nt, Artificial Sequence
  Description of Artificial Sequence: Synthetic oligonucleotide
aaaguuguccucaacacug

SEQ ID NO: 2382903 - RNA, 19 nt, Artificial Sequence
  Description of Artificial Sequence: Synthetic oligonucleotide
aaguccuggauaugcagac

SEQ ID NO: 2382904 - RNA, 19 nt, Artificial Sequence
  Description of Artificial Sequence: Synthetic oligonucleotide
aacccgagacugcugagcc

SEQ ID NO: 2382905 - RNA, 19 nt, Artificial Sequence
  Description of Artificial Sequence: Synthetic oligonucleotide
ucuacagucagcaccagaa

SEQ ID NO: 2382906 - RNA, 19 nt, Artificial Sequence
  Description of Artificial Sequence: Synthetic oligonucleotide
uguugggucagcuagccug

SEQ ID NO: 2382907 - RNA, 19 nt, Artificial Sequence
  Description of Artificial Sequence: Synthetic oligonucleotide
ccugcagaaaucuugaugg

SEQ ID NO: 2382908 - RNA, 19 nt, Artificial Sequence
  Description of Artificial Sequence: Synthetic oligonucleotide
aucuaggaaaaccaagcuc

SEQ ID NO: 2382909 - RNA, 19 nt, Artificial Sequence
  Description of Artificial Sequence: Synthetic oligonucleotide
uugcauguccauuugagac

SEQ ID NO: 2382910 - RNA, 19 nt, Artificial Sequence
  Description of Artificial Sequence: Synthetic oligonucleotide
uacagucagcaccagaacc

SEQ ID NO: 2382911 - RNA, 19 nt, Artificial Sequence
  Description of Artificial Sequence: Synthetic oligonucleotide
guaguuuccaucuaggaaa

SEQ ID NO: 2382912 - RNA, 19 nt, Artificial Sequence
  Description of Artificial Sequence: Synthetic oligonucleotide
ugaugcgccugaaagaggc

SEQ ID NO: 2382913 - RNA, 19 nt, Artificial Sequence
  Description of Artificial Sequence: Synthetic oligonucleotide
uccaucuaggaaaaccaag

SEQ ID NO: 2382914 - RNA, 19 nt, Artificial Sequence
  Description of Artificial Sequence: Synthetic oligonucleotide
cucaacacuguccaagucc

SEQ ID NO: 2382915 - RNA, 19 nt, Artificial Sequence
  Description of Artificial Sequence: Synthetic oligonucleotide
uggguugcagccccgaggg

SEQ ID NO: 2382916 - RNA, 19 nt, Artificial Sequence
  Description of Artificial Sequence: Synthetic oligonucleotide
uugguaguuuccaucuagg

SEQ ID NO: 2382917 - RNA, 19 nt, Artificial Sequence
  Description of Artificial Sequence: Synthetic oligonucleotide
gauaugcagacuucguggc

SEQ ID NO: 2382918 - RNA, 19 nt, Artificial Sequence
  Description of Artificial Sequence: Synthetic oligonucleotide
gaagauugggccuugaccu

SEQ ID NO: 2382919 - RNA, 19 nt, Artificial Sequence
  Description of Artificial Sequence: Synthetic oligonucleotide
ggauaugcagacuucgugg

SEQ ID NO: 2382920 - RNA, 19 nt, Artificial Sequence
  Description of Artificial Sequence: Synthetic oligonucleotide
uggauaugcagacuucgug

SEQ ID NO: 2382921 - RNA, 19 nt, Artificial Sequence
  Description of Artificial Sequence: Synthetic oligonucleotide
uaugcagacuucguggcgg

SEQ ID NO: 2382922 - RNA, 19 nt, Artificial Sequence
  Description of Artificial Sequence: Synthetic oligonucleotide
ugacacuugucccuguagc

SEQ ID NO: 2382923 - RNA, 19 nt, Artificial Sequence
  Description of Artificial Sequence: Synthetic oligonucleotide
caacuugucgcucuguccc

SEQ ID NO: 2382924 - RNA, 19 nt, Artificial Sequence
  Description of Artificial Sequence: Synthetic oligonucleotide
uaagcccgcacaaaggacu

SEQ ID NO: 2382925 - RNA, 19 nt, Artificial Sequence
  Description of Artificial Sequence: Synthetic oligonucleotide
agauuuagcuuuuggacau

SEQ ID NO: 2382926 - RNA, 19 nt, Artificial Sequence
  Description of Artificial Sequence: Synthetic oligonucleotide
aaccgugcccauuuagaag

SEQ ID NO: 2382927 - RNA, 19 nt, Artificial Sequence
  Description of Artificial Sequence: Synthetic oligonucleotide
gaaccuucaccguaagccc

SEQ ID NO: 2382928 - RNA, 19 nt, Artificial Sequence
  Description of Artificial Sequence: Synthetic oligonucleotide
cuugguaguuuccaucuag

SEQ ID NO: 2382929 - RNA, 19 nt, Artificial Sequence
  Description of Artificial Sequence: Synthetic oligonucleotide
uucaccguaagcccgcaca

SEQ ID NO: 2382930 - RNA, 19 nt, Artificial Sequence
  Description of Artificial Sequence: Synthetic oligonucleotide
ugcccauuuagaagauugg

SEQ ID NO: 2382931 - RNA, 19 nt, Artificial Sequence
  Description of Artificial Sequence: Synthetic oligonucleotide
caaaggacugcuucucucc

SEQ ID NO: 2382932 - RNA, 19 nt, Artificial Sequence
  Description of Artificial Sequence: Synthetic oligonucleotide
aaaccgugcccauuuagaa

SEQ ID NO: 2382933 - RNA, 19 nt, Artificial Sequence
  Description of Artificial Sequence: Synthetic oligonucleotide
accgugcccauuuagaaga

SEQ ID NO: 2382934 - RNA, 19 nt, Artificial Sequence
  Description of Artificial Sequence: Synthetic oligonucleotide
ugagccggcgccauacagg

SEQ ID NO: 2382935 - RNA, 19 nt, Artificial Sequence
  Description of Artificial Sequence: Synthetic oligonucleotide
ggagucuuggcaucaaggg

SEQ ID NO: 2382936 - RNA, 19 nt, Artificial Sequence
  Description of Artificial Sequence: Synthetic oligonucleotide
uucuguagacacaggggcc

SEQ ID NO: 2382937 - RNA, 19 nt, Artificial Sequence
  Description of Artificial Sequence: Synthetic oligonucleotide
caggugacagcagaaaccg

SEQ ID NO: 2382938 - RNA, 19 nt, Artificial Sequence
  Description of Artificial Sequence: Synthetic oligonucleotide
aaggacugcuucucuccac

SEQ ID NO: 2382939 - RNA, 19 nt, Artificial Sequence
  Description of Artificial Sequence: Synthetic oligonucleotide
acuucagccaacgggacuc

SEQ ID NO: 2382940 - RNA, 19 nt, Artificial Sequence
  Description of Artificial Sequence: Synthetic oligonucleotide
accguaagcccgcacaaag

SEQ ID NO: 2382941 - RNA, 19 nt, Artificial Sequence
  Description of Artificial Sequence: Synthetic oligonucleotide
ucugauuccauuuccucuu

SEQ ID NO: 2382942 - RNA, 19 nt, Artificial Sequence
  Description of Artificial Sequence: Synthetic oligonucleotide
ugauguggguugcagcccc

SEQ ID NO: 2382943 - RNA, 19 nt, Artificial Sequence
  Description of Artificial Sequence: Synthetic oligonucleotide
cagauuuagcuuuuggaca

SEQ ID NO: 2382944 - RNA, 19 nt, Artificial Sequence
  Description of Artificial Sequence: Synthetic oligonucleotide
ugcagcaccgcagaacccg

SEQ ID NO: 2382945 - RNA, 19 nt, Artificial Sequence
  Description of Artificial Sequence: Synthetic oligonucleotide
cugacuccgguucucagcc

SEQ ID NO: 2382946 - RNA, 19 nt, Artificial Sequence
  Description of Artificial Sequence: Synthetic oligonucleotide
ugcauguccauuugagacu

SEQ ID NO: 2382947 - RNA, 19 nt, Artificial Sequence
  Description of Artificial Sequence: Synthetic oligonucleotide
ucuuaggagcugcucuucc

SEQ ID NO: 2382948 - RNA, 19 nt, Artificial Sequence
  Description of Artificial Sequence: Synthetic oligonucleotide
uuuagcuuuuggacauggc

SEQ ID NO: 2382949 - RNA, 19 nt, Artificial Sequence
  Description of Artificial Sequence: Synthetic oligonucleotide
caccugaugcgccugaaag

SEQ ID NO: 2382950 - RNA, 19 nt, Artificial Sequence
  Description of Artificial Sequence: Synthetic oligonucleotide
ucuccacaagccuugcaug

SEQ ID NO: 2382951 - RNA, 19 nt, Artificial Sequence
  Description of Artificial Sequence: Synthetic oligonucleotide
aaucuugauggguucucau

SEQ ID NO: 2382952 - RNA, 19 nt, Artificial Sequence
  Description of Artificial Sequence: Synthetic oligonucleotide
aagauugggccuugaccug

SEQ ID NO: 2382953 - RNA, 19 nt, Artificial Sequence
  Description of Artificial Sequence: Synthetic oligonucleotide
cugagggccggcauguucc

SEQ ID NO: 2382954 - RNA, 19 nt, Artificial Sequence
  Description of Artificial Sequence: Synthetic oligonucleotide
aagccuugcauguccauuu

SEQ ID NO: 2382955 - RNA, 19 nt, Artificial Sequence
  Description of Artificial Sequence: Synthetic oligonucleotide
uacucugauuccauuuccu

SEQ ID NO: 2382956 - RNA, 19 nt, Artificial Sequence
  Description of Artificial Sequence: Synthetic oligonucleotide
aaccuucaccguaagcccg

SEQ ID NO: 2382957 - RNA, 19 nt, Artificial Sequence
  Description of Artificial Sequence: Synthetic oligonucleotide
ugagggcugugucuuagga

SEQ ID NO: 2382958 - RNA, 19 nt, Artificial Sequence
  Description of Artificial Sequence: Synthetic oligonucleotide
gacaggacuugguaguuuc

SEQ ID NO: 2382959 - RNA, 19 nt, Artificial Sequence
  Description of Artificial Sequence: Synthetic oligonucleotide
ugcugaaguggccuucccc

SEQ ID NO: 2382960 - RNA, 19 nt, Artificial Sequence
  Description of Artificial Sequence: Synthetic oligonucleotide
guacucugauuccauuucc

SEQ ID NO: 2382961 - RNA, 19 nt, Artificial Sequence
  Description of Artificial Sequence: Synthetic oligonucleotide
gucgcucugucccuaacag

SEQ ID NO: 2382962 - RNA, 19 nt, Artificial Sequence
  Description of Artificial Sequence: Synthetic oligonucleotide
acucagcacuggcugaggg

SEQ ID NO: 2382963 - RNA, 19 nt, Artificial Sequence
  Description of Artificial Sequence: Synthetic oligonucleotide
ugcagaaaucuugaugggu

SEQ ID NO: 2382964 - RNA, 19 nt, Artificial Sequence
  Description of Artificial Sequence: Synthetic oligonucleotide
ggcgucuacagucagcacc

SEQ ID NO: 2382965 - RNA, 19 nt, Artificial Sequence
  Description of Artificial Sequence: Synthetic oligonucleotide
ucagccaacgggacuccag

SEQ ID NO: 2382966 - RNA, 19 nt, Artificial Sequence
  Description of Artificial Sequence: Synthetic oligonucleotide
ucugucccuaacaggccag

SEQ ID NO: 2382967 - RNA, 19 nt, Artificial Sequence
  Description of Artificial Sequence: Synthetic oligonucleotide
uucgggcuggacugcaggg

SEQ ID NO: 2382968 - RNA, 19 nt, Artificial Sequence
  Description of Artificial Sequence: Synthetic oligonucleotide
cccauuuagaagauugggc

SEQ ID NO: 2382969 - RNA, 19 nt, Artificial Sequence
  Description of Artificial Sequence: Synthetic oligonucleotide
guccauauacuucagccaa

SEQ ID NO: 2382970 - RNA, 19 nt, Artificial Sequence
  Description of Artificial Sequence: Synthetic oligonucleotide
cauacaggccucagucucc

SEQ ID NO: 2382971 - RNA, 19 nt, Artificial Sequence
  Description of Artificial Sequence: Synthetic oligonucleotide
uguguugggucagcuagcc

SEQ ID NO: 2382972 - RNA, 19 nt, Artificial Sequence
  Description of Artificial Sequence: Synthetic oligonucleotide
aaagaggcggcagcugcag

SEQ ID NO: 2382973 - RNA, 19 nt, Artificial Sequence
  Description of Artificial Sequence: Synthetic oligonucleotide
gacacuugucccuguagca

SEQ ID NO: 2382974 - RNA, 19 nt, Artificial Sequence
  Description of Artificial Sequence: Synthetic oligonucleotide
ugucgcucugucccuaaca

SEQ ID NO: 2382975 - RNA, 19 nt, Artificial Sequence
  Description of Artificial Sequence: Synthetic oligonucleotide
cuaacaggccaguggaguc

SEQ ID NO: 2382976 - RNA, 19 nt, Artificial Sequence
  Description of Artificial Sequence: Synthetic oligonucleotide
uccauauacuucagccaac

SEQ ID NO: 2382977 - RNA, 19 nt, Artificial Sequence
  Description of Artificial Sequence: Synthetic oligonucleotide
gacuugguaguuuccaucu

SEQ ID NO: 2382978 - RNA, 19 nt, Artificial Sequence
  Description of Artificial Sequence: Synthetic oligonucleotide
accaagcucccugaugugg

SEQ ID NO: 2382979 - RNA, 19 nt, Artificial Sequence
  Description of Artificial Sequence: Synthetic oligonucleotide
cugcagaaaucuugauggg

SEQ ID NO: 2382980 - RNA, 19 nt, Artificial Sequence
  Description of Artificial Sequence: Synthetic oligonucleotide
uuuccaggugacagcagaa

SEQ ID NO: 2382981 - RNA, 19 nt, Artificial Sequence
  Description of Artificial Sequence: Synthetic oligonucleotide
gacugcuucucuccacaag

SEQ ID NO: 2382982 - RNA, 19 nt, Artificial Sequence
  Description of Artificial Sequence: Synthetic oligonucleotide
augcagacuucguggcggc

SEQ ID NO: 2382983 - RNA, 19 nt, Artificial Sequence
  Description of Artificial Sequence: Synthetic oligonucleotide
gaaaccgugcccauuuaga

SEQ ID NO: 2382984 - RNA, 19 nt, Artificial Sequence
  Description of Artificial Sequence: Synthetic oligonucleotide
gucccuguagcagauuuag

SEQ ID NO: 2382985 - RNA, 19 nt, Artificial Sequence
  Description of Artificial Sequence: Synthetic oligonucleotide
ggacauggcgucuacaguc

SEQ ID NO: 2382986 - RNA, 19 nt, Artificial Sequence
  Description of Artificial Sequence: Synthetic oligonucleotide
accgcagaacccgagacug

SEQ ID NO: 2382987 - RNA, 19 nt, Artificial Sequence
  Description of Artificial Sequence: Synthetic oligonucleotide
guggguugcagccccgagg

SEQ ID NO: 2382988 - RNA, 19 nt, Artificial Sequence
  Description of Artificial Sequence: Synthetic oligonucleotide
ucgcucugucccuaacagg

SEQ ID NO: 2382989 - RNA, 19 nt, Artificial Sequence
  Description of Artificial Sequence: Synthetic oligonucleotide
cuugccuuguguuggguca

SEQ ID NO: 2382990 - RNA, 19 nt, Artificial Sequence
  Description of Artificial Sequence: Synthetic oligonucleotide
gagacugcugagccggcgc

SEQ ID NO: 2382991 - RNA, 19 nt, Artificial Sequence
  Description of Artificial Sequence: Synthetic oligonucleotide
uuuagaagauugggccuug

SEQ ID NO: 2382992 - RNA, 19 nt, Artificial Sequence
  Description of Artificial Sequence: Synthetic oligonucleotide
gacuccgguucucagccug

SEQ ID NO: 2382993 - RNA, 19 nt, Artificial Sequence
  Description of Artificial Sequence: Synthetic oligonucleotide
gguaguuuccaucuaggaa

SEQ ID NO: 2382994 - RNA, 19 nt, Artificial Sequence
  Description of Artificial Sequence: Synthetic oligonucleotide
auuuagaagauugggccuu

SEQ ID NO: 2382995 - RNA, 19 nt, Artificial Sequence
  Description of Artificial Sequence: Synthetic oligonucleotide
uuuuggacauggcgucuac

SEQ ID NO: 2382996 - RNA, 19 nt, Artificial Sequence
  Description of Artificial Sequence: Synthetic oligonucleotide
aacuugucgcucugucccu

SEQ ID NO: 2382997 - RNA, 19 nt, Artificial Sequence
  Description of Artificial Sequence: Synthetic oligonucleotide
aggacugcuucucuccaca

SEQ ID NO: 2382998 - RNA, 19 nt, Artificial Sequence
  Description of Artificial Sequence: Synthetic oligonucleotide
guucgggcuggacugcagg

SEQ ID NO: 2382999 - RNA, 19 nt, Artificial Sequence
  Description of Artificial Sequence: Synthetic oligonucleotide
cuugcauguccauuugaga

SEQ ID NO: 2383000 - RNA, 19 nt, Artificial Sequence
  Description of Artificial Sequence: Synthetic oligonucleotide
accugaugcgccugaaaga

SEQ ID NO: 2383001 - RNA, 19 nt, Artificial Sequence
  Description of Artificial Sequence: Synthetic oligonucleotide
ucaccguaagcccgcacaa

SEQ ID NO: 2383002 - RNA, 19 nt, Artificial Sequence
  Description of Artificial Sequence: Synthetic oligonucleotide
guugggucagcuagccugg

SEQ ID NO: 2383003 - RNA, 19 nt, Artificial Sequence
  Description of Artificial Sequence: Synthetic oligonucleotide
augcgccugaaagaggcgg

SEQ ID NO: 2383004 - RNA, 19 nt, Artificial Sequence
  Description of Artificial Sequence: Synthetic oligonucleotide
ugucuuaggagcugcucuu

SEQ ID NO: 2383005 - RNA, 19 nt, Artificial Sequence
  Description of Artificial Sequence: Synthetic oligonucleotide
agccaacgggacuccaggg

SEQ ID NO: 2383006 - RNA, 19 nt, Artificial Sequence
  Description of Artificial Sequence: Synthetic oligonucleotide
uuucaccugaugcgccuga

SEQ ID NO: 2383007 - RNA, 19 nt, Artificial Sequence
  Description of Artificial Sequence: Synthetic oligonucleotide
agacagcgccugcugacuc

SEQ ID NO: 2383008 - RNA, 19 nt, Artificial Sequence
  Description of Artificial Sequence: Synthetic oligonucleotide
gucccuugccuuguguugg

SEQ ID NO: 2383009 - RNA, 19 nt, Artificial Sequence
  Description of Artificial Sequence: Synthetic oligonucleotide
ccuugcauguccauuugag

SEQ ID NO: 2383010 - RNA, 19 nt, Artificial Sequence
  Description of Artificial Sequence: Synthetic oligonucleotide
ucagcuagccuggugcccu

SEQ ID NO: 2383011 - RNA, 19 nt, Artificial Sequence
  Description of Artificial Sequence: Synthetic oligonucleotide
cuacagucagcaccagaac

SEQ ID NO: 2383012 - RNA, 19 nt, Artificial Sequence
  Description of Artificial Sequence: Synthetic oligonucleotide
gaacccgagacugcugagc

SEQ ID NO: 2383013 - RNA, 19 nt, Artificial Sequence
  Description of Artificial Sequence: Synthetic oligonucleotide
ucucauccacaugugggcu

SEQ ID NO: 2383014 - RNA, 19 nt, Artificial Sequence
  Description of Artificial Sequence: Synthetic oligonucleotide
augugggcuguuuccaggu

SEQ ID NO: 2383015 - RNA, 19 nt, Artificial Sequence
  Description of Artificial Sequence: Synthetic oligonucleotide
auacuucagccaacgggac

SEQ ID NO: 2383016 - RNA, 19 nt, Artificial Sequence
  Description of Artificial Sequence: Synthetic oligonucleotide
cugaugcgccugaaagagg

SEQ ID NO: 2383017 - RNA, 19 nt, Artificial Sequence
  Description of Artificial Sequence: Synthetic oligonucleotide
gugacagcagaaaccgugc

SEQ ID NO: 2383018 - RNA, 19 nt, Artificial Sequence
  Description of Artificial Sequence: Synthetic oligonucleotide
ucccuguagcagauuuagc

SEQ ID NO: 2383019 - RNA, 19 nt, Artificial Sequence
  Description of Artificial Sequence: Synthetic oligonucleotide
uccacagaccugagugaca

SEQ ID NO: 2383020 - RNA, 19 nt, Artificial Sequence
  Description of Artificial Sequence: Synthetic oligonucleotide
aacgggacuccaggggcuc

SEQ ID NO: 2383021 - RNA, 19 nt, Artificial Sequence
  Description of Artificial Sequence: Synthetic oligonucleotide
uccuggauaugcagacuuc

SEQ ID NO: 2383022 - RNA, 19 nt, Artificial Sequence
  Description of Artificial Sequence: Synthetic oligonucleotide
gauggguucucauccacau

SEQ ID NO: 2383023 - RNA, 19 nt, Artificial Sequence
  Description of Artificial Sequence: Synthetic oligonucleotide
cauuuagaagauugggccu

SEQ ID NO: 2383024 - RNA, 19 nt, Artificial Sequence
  Description of Artificial Sequence: Synthetic oligonucleotide
gaccuggccacucagcacu

SEQ ID NO: 2383025 - RNA, 19 nt, Artificial Sequence
  Description of Artificial Sequence: Synthetic oligonucleotide
ccauauacuucagccaacg

SEQ ID NO: 2383026 - RNA, 19 nt, Artificial Sequence
  Description of Artificial Sequence: Synthetic oligonucleotide
accuucaccguaagcccgc

SEQ ID NO: 2383027 - RNA, 19 nt, Artificial Sequence
  Description of Artificial Sequence: Synthetic oligonucleotide
ccugaugcgccugaaagag

SEQ ID NO: 2383028 - RNA, 19 nt, Artificial Sequence
  Description of Artificial Sequence: Synthetic oligonucleotide
aaguuguccucaacacugu

SEQ ID NO: 2383029 - RNA, 19 nt, Artificial Sequence
  Description of Artificial Sequence: Synthetic oligonucleotide
gauuuagcuuuuggacaug

SEQ ID NO: 2383030 - RNA, 19 nt, Artificial Sequence
  Description of Artificial Sequence: Synthetic oligonucleotide
ucccuugccuuguguuggg

SEQ ID NO: 2383031 - RNA, 19 nt, Artificial Sequence
  Description of Artificial Sequence: Synthetic oligonucleotide
cagaaccuucaccguaagc

SEQ ID NO: 2383032 - RNA, 19 nt, Artificial Sequence
  Description of Artificial Sequence: Synthetic oligonucleotide
gaugcgccugaaagaggcg

SEQ ID NO: 2383033 - RNA, 19 nt, Artificial Sequence
  Description of Artificial Sequence: Synthetic oligonucleotide
cagacuucguggcggcugc

SEQ ID NO: 2383034 - RNA, 19 nt, Artificial Sequence
  Description of Artificial Sequence: Synthetic oligonucleotide
ccuggauaugcagacuucg

SEQ ID NO: 2383035 - RNA, 19 nt, Artificial Sequence
  Description of Artificial Sequence: Synthetic oligonucleotide
uuuccucuuccugguucgg

SEQ ID NO: 2383036 - RNA, 19 nt, Artificial Sequence
  Description of Artificial Sequence: Synthetic oligonucleotide
aguuuccaucuaggaaaac

SEQ ID NO: 2383037 - RNA, 19 nt, Artificial Sequence
  Description of Artificial Sequence: Synthetic oligonucleotide
cucugauuccauuuccucu

SEQ ID NO: 2383038 - RNA, 19 nt, Artificial Sequence
  Description of Artificial Sequence: Synthetic oligonucleotide
ugucccuguagcagauuua

SEQ ID NO: 2383039 - RNA, 19 nt, Artificial Sequence
  Description of Artificial Sequence: Synthetic oligonucleotide
gccaacgggacuccagggg

SEQ ID NO: 2383040 - RNA, 19 nt, Artificial Sequence
  Description of Artificial Sequence: Synthetic oligonucleotide
ccugguucgggcuggacug

SEQ ID NO: 2383041 - RNA, 19 nt, Artificial Sequence
  Description of Artificial Sequence: Synthetic oligonucleotide
gugucuuaggagcugcucu

SEQ ID NO: 2383042 - RNA, 19 nt, Artificial Sequence
  Description of Artificial Sequence: Synthetic oligonucleotide
aagcccgcacaaaggacug

SEQ ID NO: 2383043 - RNA, 19 nt, Artificial Sequence
  Description of Artificial Sequence: Synthetic oligonucleotide
gacauggcgucuacaguca

SEQ ID NO: 2383044 - RNA, 19 nt, Artificial Sequence
  Description of Artificial Sequence: Synthetic oligonucleotide
acuucguggcggcugcccu

SEQ ID NO: 2383045 - RNA, 19 nt, Artificial Sequence
  Description of Artificial Sequence: Synthetic oligonucleotide
ggacuugguaguuuccauc

SEQ ID NO: 2383046 - RNA, 19 nt, Artificial Sequence
  Description of Artificial Sequence: Synthetic oligonucleotide
cugagccggcgccauacag

SEQ ID NO: 2383047 - RNA, 19 nt, Artificial Sequence
  Description of Artificial Sequence: Synthetic oligonucleotide
uuagaagauugggccuuga

SEQ ID NO: 2383048 - RNA, 19 nt, Artificial Sequence
  Description of Artificial Sequence: Synthetic oligonucleotide
uggugcccugcagaaaucu

SEQ ID NO: 2383049 - RNA, 19 nt, Artificial Sequence
  Description of Artificial Sequence: Synthetic oligonucleotide
gugggcuguuuccagguga

SEQ ID NO: 2383050 - RNA, 19 nt, Artificial Sequence
  Description of Artificial Sequence: Synthetic oligonucleotide
uugccuuguguugggucag

SEQ ID NO: 2383051 - RNA, 19 nt, Artificial Sequence
  Description of Artificial Sequence: Synthetic oligonucleotide
agcaccgcagaacccgaga

SEQ ID NO: 2383052 - RNA, 19 nt, Artificial Sequence
  Description of Artificial Sequence: Synthetic oligonucleotide
ccaacuugucgcucugucc

SEQ ID NO: 2383053 - RNA, 19 nt, Artificial Sequence
  Description of Artificial Sequence: Synthetic oligonucleotide
cugauguggguugcagccc

SEQ ID NO: 2383054 - RNA, 19 nt, Artificial Sequence
  Description of Artificial Sequence: Synthetic oligonucleotide
ugcugagccggcgccauac

SEQ ID NO: 2383055 - RNA, 19 nt, Artificial Sequence
  Description of Artificial Sequence: Synthetic oligonucleotide
ugucccuaacaggccagug

SEQ ID NO: 2383056 - RNA, 19 nt, Artificial Sequence
  Description of Artificial Sequence: Synthetic oligonucleotide
ccaacgggacuccaggggc

SEQ ID NO: 2383057 - RNA, 19 nt, Artificial Sequence
  Description of Artificial Sequence: Synthetic oligonucleotide
caucuaggaaaaccaagcu

SEQ ID NO: 2383058 - RNA, 19 nt, Artificial Sequence
  Description of Artificial Sequence: Synthetic oligonucleotide
cauucaaaguuguccucaa

SEQ ID NO: 2383059 - RNA, 19 nt, Artificial Sequence
  Description of Artificial Sequence: Synthetic oligonucleotide
gauguggguugcagccccg

SEQ ID NO: 2383060 - RNA, 19 nt, Artificial Sequence
  Description of Artificial Sequence: Synthetic oligonucleotide
guagacacaggggcccugc

SEQ ID NO: 2383061 - RNA, 19 nt, Artificial Sequence
  Description of Artificial Sequence: Synthetic oligonucleotide
ggucccuugccuuguguug

SEQ ID NO: 2383062 - RNA, 19 nt, Artificial Sequence
  Description of Artificial Sequence: Synthetic oligonucleotide
ccauacaggccucagucuc

SEQ ID NO: 2383063 - RNA, 19 nt, Artificial Sequence
  Description of Artificial Sequence: Synthetic oligonucleotide
acuccgguucucagccugc

SEQ ID NO: 2383064 - RNA, 19 nt, Artificial Sequence
  Description of Artificial Sequence: Synthetic oligonucleotide
ccacaagccuugcaugucc

SEQ ID NO: 2383065 - RNA, 19 nt, Artificial Sequence
  Description of Artificial Sequence: Synthetic oligonucleotide
uccacaagccuugcauguc

SEQ ID NO: 2383066 - RNA, 19 nt, Artificial Sequence
  Description of Artificial Sequence: Synthetic oligonucleotide
uguagacacaggggcccug

SEQ ID NO: 2383067 - RNA, 19 nt, Artificial Sequence
  Description of Artificial Sequence: Synthetic oligonucleotide
gacuucguggcggcugccc

SEQ ID NO: 2383068 - RNA, 19 nt, Artificial Sequence
  Description of Artificial Sequence: Synthetic oligonucleotide
uugucgcucugucccuaac

SEQ ID NO: 2383069 - RNA, 19 nt, Artificial Sequence
  Description of Artificial Sequence: Synthetic oligonucleotide
gucuacagucagcaccaga

SEQ ID NO: 2383070 - RNA, 19 nt, Artificial Sequence
  Description of Artificial Sequence: Synthetic oligonucleotide
acuugguaguuuccaucua

SEQ ID NO: 2383071 - RNA, 19 nt, Artificial Sequence
  Description of Artificial Sequence: Synthetic oligonucleotide
gacagcucugacacuuguc

SEQ ID NO: 2383072 - RNA, 19 nt, Artificial Sequence
  Description of Artificial Sequence: Synthetic oligonucleotide
cuugaccugcaggacagga

SEQ ID NO: 2383073 - RNA, 19 nt, Artificial Sequence
  Description of Artificial Sequence: Synthetic oligonucleotide
auugggccuugaccugcag

SEQ ID NO: 2383074 - RNA, 19 nt, Artificial Sequence
  Description of Artificial Sequence: Synthetic oligonucleotide
cuguccaaguccuggauau

SEQ ID NO: 2383075 - RNA, 19 nt, Artificial Sequence
  Description of Artificial Sequence: Synthetic oligonucleotide
uggcaucaagggucccuug

SEQ ID NO: 2383076 - RNA, 19 nt, Artificial Sequence
  Description of Artificial Sequence: Synthetic oligonucleotide
cuguagcagauuuagcuuu

SEQ ID NO: 2383077 - RNA, 19 nt, Artificial Sequence
  Description of Artificial Sequence: Synthetic oligonucleotide
cuucguggcggcugcccug

SEQ ID NO: 2383078 - RNA, 19 nt, Artificial Sequence
  Description of Artificial Sequence: Synthetic oligonucleotide
uucucuccacaagccuugc

SEQ ID NO: 2383079 - RNA, 19 nt, Artificial Sequence
  Description of Artificial Sequence: Synthetic oligonucleotide
cccgagacugcugagccgg

SEQ ID NO: 2383080 - RNA, 19 nt, Artificial Sequence
  Description of Artificial Sequence: Synthetic oligonucleotide
acaagccuugcauguccau

SEQ ID NO: 2383081 - RNA, 19 nt, Artificial Sequence
  Description of Artificial Sequence: Synthetic oligonucleotide
cacaagccuugcaugucca

SEQ ID NO: 2383082 - RNA, 19 nt, Artificial Sequence
  Description of Artificial Sequence: Synthetic oligonucleotide
gccugaaagaggcggcagc

SEQ ID NO: 2383083 - RNA, 19 nt, Artificial Sequence
  Description of Artificial Sequence: Synthetic oligonucleotide
agcccgcacaaaggacugc

SEQ ID NO: 2383084 - RNA, 19 nt, Artificial Sequence
  Description of Artificial Sequence: Synthetic oligonucleotide
aguccuggauaugcagacu

SEQ ID NO: 2383085 - RNA, 19 nt, Artificial Sequence
  Description of Artificial Sequence: Synthetic oligonucleotide
ugagggccggcauguuccu

SEQ ID NO: 2383086 - RNA, 19 nt, Artificial Sequence
  Description of Artificial Sequence: Synthetic oligonucleotide
cucuccacaagccuugcau

SEQ ID NO: 2383087 - RNA, 19 nt, Artificial Sequence
  Description of Artificial Sequence: Synthetic oligonucleotide
cacaugugggcuguuucca

SEQ ID NO: 2383088 - RNA, 19 nt, Artificial Sequence
  Description of Artificial Sequence: Synthetic oligonucleotide
caacacuguccaaguccug

SEQ ID NO: 2383089 - RNA, 19 nt, Artificial Sequence
  Description of Artificial Sequence: Synthetic oligonucleotide
agcuagccuggugcccugc

SEQ ID NO: 2383090 - RNA, 19 nt, Artificial Sequence
  Description of Artificial Sequence: Synthetic oligonucleotide
uucguggcggcugcccugu

SEQ ID NO: 2383091 - RNA, 19 nt, Artificial Sequence
  Description of Artificial Sequence: Synthetic oligonucleotide
cuccacaagccuugcaugu

SEQ ID NO: 2383092 - RNA, 19 nt, Artificial Sequence
  Description of Artificial Sequence: Synthetic oligonucleotide
gcugcucuuccucugucca

SEQ ID NO: 2383093 - RNA, 19 nt, Artificial Sequence
  Description of Artificial Sequence: Synthetic oligonucleotide
cuuaggagcugcucuuccu

SEQ ID NO: 2383094 - RNA, 19 nt, Artificial Sequence
  Description of Artificial Sequence: Synthetic oligonucleotide
agacuucguggcggcugcc

SEQ ID NO: 2383095 - RNA, 19 nt, Artificial Sequence
  Description of Artificial Sequence: Synthetic oligonucleotide
gucagcuagccuggugccc

SEQ ID NO: 2383096 - RNA, 19 nt, Artificial Sequence
  Description of Artificial Sequence: Synthetic oligonucleotide
cuucagccaacgggacucc

SEQ ID NO: 2383097 - RNA, 19 nt, Artificial Sequence
  Description of Artificial Sequence: Synthetic oligonucleotide
agcugccaacuugucgcuc

SEQ ID NO: 2383098 - RNA, 19 nt, Artificial Sequence
  Description of Artificial Sequence: Synthetic oligonucleotide
gcaccgcagaacccgagac

SEQ ID NO: 2383099 - RNA, 19 nt, Artificial Sequence
  Description of Artificial Sequence: Synthetic oligonucleotide
gcucuguccacagaccuga

SEQ ID NO: 2383100 - RNA, 19 nt, Artificial Sequence
  Description of Artificial Sequence: Synthetic oligonucleotide
ggcauguuccucuucacuu

SEQ ID NO: 2383101 - RNA, 19 nt, Artificial Sequence
  Description of Artificial Sequence: Synthetic oligonucleotide
ugacuccgguucucagccu

SEQ ID NO: 2383102 - RNA, 19 nt, Artificial Sequence
  Description of Artificial Sequence: Synthetic oligonucleotide
ggccuugaccugcaggaca

SEQ ID NO: 2383103 - RNA, 19 nt, Artificial Sequence
  Description of Artificial Sequence: Synthetic oligonucleotide
cuggauaugcagacuucgu

SEQ ID NO: 2383104 - RNA, 19 nt, Artificial Sequence
  Description of Artificial Sequence: Synthetic oligonucleotide
gucuuaggagcugcucuuc

SEQ ID NO: 2383105 - RNA, 19 nt, Artificial Sequence
  Description of Artificial Sequence: Synthetic oligonucleotide
gccggcauguuccucuuca

SEQ ID NO: 2383106 - RNA, 19 nt, Artificial Sequence
  Description of Artificial Sequence: Synthetic oligonucleotide
aagcucccugauguggguu

SEQ ID NO: 2383107 - RNA, 19 nt, Artificial Sequence
  Description of Artificial Sequence: Synthetic oligonucleotide
cgccauacaggccucaguc

SEQ ID NO: 2383108 - RNA, 19 nt, Artificial Sequence
  Description of Artificial Sequence: Synthetic oligonucleotide
uucaccugaugcgccugaa

SEQ ID NO: 2383109 - RNA, 19 nt, Artificial Sequence
  Description of Artificial Sequence: Synthetic oligonucleotide
caccagaaccuucaccgua

SEQ ID NO: 2383110 - RNA, 19 nt, Artificial Sequence
  Description of Artificial Sequence: Synthetic oligonucleotide
cuucaccguaagcccgcac

SEQ ID NO: 2383111 - RNA, 19 nt, Artificial Sequence
  Description of Artificial Sequence: Synthetic oligonucleotide
gauugggccuugaccugca

SEQ ID NO: 2383112 - RNA, 19 nt, Artificial Sequence
  Description of Artificial Sequence: Synthetic oligonucleotide
gcgucuacagucagcacca

SEQ ID NO: 2383113 - RNA, 19 nt, Artificial Sequence
  Description of Artificial Sequence: Synthetic oligonucleotide
ugguucgggcuggacugca

SEQ ID NO: 2383114 - RNA, 19 nt, Artificial Sequence
  Description of Artificial Sequence: Synthetic oligonucleotide
ccgcacaaaggacugcuuc

SEQ ID NO: 2383115 - RNA, 19 nt, Artificial Sequence
  Description of Artificial Sequence: Synthetic oligonucleotide
caucaagggucccuugccu

SEQ ID NO: 2383116 - RNA, 19 nt, Artificial Sequence
  Description of Artificial Sequence: Synthetic oligonucleotide
gcagacuucguggcggcug

SEQ ID NO: 2383117 - RNA, 19 nt, Artificial Sequence
  Description of Artificial Sequence: Synthetic oligonucleotide
uggcgucuacagucagcac

SEQ ID NO: 2383118 - RNA, 19 nt, Artificial Sequence
  Description of Artificial Sequence: Synthetic oligonucleotide
cguaagcccgcacaaagga

SEQ ID NO: 2383119 - RNA, 19 nt, Artificial Sequence
  Description of Artificial Sequence: Synthetic oligonucleotide
ccuugccuuguguuggguc

SEQ ID NO: 2383120 - RNA, 19 nt, Artificial Sequence
  Description of Artificial Sequence: Synthetic oligonucleotide
cagcucuguccacagaccu

SEQ ID NO: 2383121 - RNA, 19 nt, Artificial Sequence
  Description of Artificial Sequence: Synthetic oligonucleotide
aggacaggacuugguaguu

SEQ ID NO: 2383122 - RNA, 19 nt, Artificial Sequence
  Description of Artificial Sequence: Synthetic oligonucleotide
cugguucgggcuggacugc

SEQ ID NO: 2383123 - RNA, 19 nt, Artificial Sequence
  Description of Artificial Sequence: Synthetic oligonucleotide
agcagaaaccgugcccauu

SEQ ID NO: 2383124 - RNA, 19 nt, Artificial Sequence
  Description of Artificial Sequence: Synthetic oligonucleotide
guggcggcugcccuguacu

SEQ ID NO: 2383125 - RNA, 19 nt, Artificial Sequence
  Description of Artificial Sequence: Synthetic oligonucleotide
cagcccuuguccauauacu

SEQ ID NO: 2383126 - RNA, 19 nt, Artificial Sequence
  Description of Artificial Sequence: Synthetic oligonucleotide
uggcggcugcccuguacuc

SEQ ID NO: 2383127 - RNA, 19 nt, Artificial Sequence
  Description of Artificial Sequence: Synthetic oligonucleotide
cuugucgcucugucccuaa

SEQ ID NO: 2383128 - RNA, 19 nt, Artificial Sequence
  Description of Artificial Sequence: Synthetic oligonucleotide
gcagaaaccgugcccauuu

SEQ ID NO: 2383129 - RNA, 19 nt, Artificial Sequence
  Description of Artificial Sequence: Synthetic oligonucleotide
gcccuuguccauauacuuc

SEQ ID NO: 2383130 - RNA, 19 nt, Artificial Sequence
  Description of Artificial Sequence: Synthetic oligonucleotide
cccuaacaggccaguggag

SEQ ID NO: 2383131 - RNA, 19 nt, Artificial Sequence
  Description of Artificial Sequence: Synthetic oligonucleotide
gacugcugagccggcgcca

SEQ ID NO: 2383132 - RNA, 19 nt, Artificial Sequence
  Description of Artificial Sequence: Synthetic oligonucleotide
gcugccaacuugucgcucu

SEQ ID NO: 2383133 - RNA, 19 nt, Artificial Sequence
  Description of Artificial Sequence: Synthetic oligonucleotide
acuugucgcucugucccua

SEQ ID NO: 2383134 - RNA, 19 nt, Artificial Sequence
  Description of Artificial Sequence: Synthetic oligonucleotide
gccggcgccauacaggccu

SEQ ID NO: 2383135 - RNA, 19 nt, Artificial Sequence
  Description of Artificial Sequence: Synthetic oligonucleotide
gccuugcauguccauuuga

SEQ ID NO: 2383136 - RNA, 19 nt, Artificial Sequence
  Description of Artificial Sequence: Synthetic oligonucleotide
ccucaacacuguccaaguc

SEQ ID NO: 2383137 - RNA, 19 nt, Artificial Sequence
  Description of Artificial Sequence: Synthetic oligonucleotide
ggcugugucuuaggagcug

SEQ ID NO: 2383138 - RNA, 19 nt, Artificial Sequence
  Description of Artificial Sequence: Synthetic oligonucleotide
gccaguggaguccuggcau

SEQ ID NO: 2383139 - RNA, 19 nt, Artificial Sequence
  Description of Artificial Sequence: Synthetic oligonucleotide
cagcgccugcugacuccgg

SEQ ID NO: 2383140 - RNA, 19 nt, Artificial Sequence
  Description of Artificial Sequence: Synthetic oligonucleotide
ccuuccccuggagucuugg

SEQ ID NO: 2383141 - RNA, 19 nt, Artificial Sequence
  Description of Artificial Sequence: Synthetic oligonucleotide
ccuguagcagauuuagcuu

SEQ ID NO: 2383142 - RNA, 19 nt, Artificial Sequence
  Description of Artificial Sequence: Synthetic oligonucleotide
gguucgggcuggacugcag

SEQ ID NO: 2383143 - RNA, 19 nt, Artificial Sequence
  Description of Artificial Sequence: Synthetic oligonucleotide
ggcgccauacaggccucag

SEQ ID NO: 2383144 - RNA, 19 nt, Artificial Sequence
  Description of Artificial Sequence: Synthetic oligonucleotide
ggacugcuucucuccacaa

SEQ ID NO: 2383145 - RNA, 19 nt, Artificial Sequence
  Description of Artificial Sequence: Synthetic oligonucleotide
gcagaacccgagacugcug

SEQ ID NO: 2383146 - RNA, 19 nt, Artificial Sequence
  Description of Artificial Sequence: Synthetic oligonucleotide
cgguucucagccugcugag

SEQ ID NO: 2383147 - RNA, 19 nt, Artificial Sequence
  Description of Artificial Sequence: Synthetic oligonucleotide
caagcucccugaugugggu

SEQ ID NO: 2383148 - RNA, 19 nt, Artificial Sequence
  Description of Artificial Sequence: Synthetic oligonucleotide
cagaaaccgugcccauuua

SEQ ID NO: 2383149 - RNA, 19 nt, Artificial Sequence
  Description of Artificial Sequence: Synthetic oligonucleotide
ccgcagaacccgagacugc

SEQ ID NO: 2383150 - RNA, 19 nt, Artificial Sequence
  Description of Artificial Sequence: Synthetic oligonucleotide
ccggcauguuccucuucac

SEQ ID NO: 2383151 - RNA, 19 nt, Artificial Sequence
  Description of Artificial Sequence: Synthetic oligonucleotide
ccuaacaggccaguggagu

SEQ ID NO: 2383152 - RNA, 19 nt, Artificial Sequence
  Description of Artificial Sequence: Synthetic oligonucleotide
gcccuguacucugauucca

SEQ ID NO: 2383153 - RNA, 19 nt, Artificial Sequence
  Description of Artificial Sequence: Synthetic oligonucleotide
caagccuugcauguccauu

SEQ ID NO: 2383154 - RNA, 19 nt, Artificial Sequence
  Description of Artificial Sequence: Synthetic oligonucleotide
gcuagccuggugcccugca

SEQ ID NO: 2383155 - RNA, 19 nt, Artificial Sequence
  Description of Artificial Sequence: Synthetic oligonucleotide
gagggccggcauguuccuc

SEQ ID NO: 2383156 - RNA, 19 nt, Artificial Sequence
  Description of Artificial Sequence: Synthetic oligonucleotide
caccguaagcccgcacaaa

SEQ ID NO: 2383157 - RNA, 19 nt, Artificial Sequence
  Description of Artificial Sequence: Synthetic oligonucleotide
cagccccgagggcagagcu

SEQ ID NO: 2383158 - RNA, 19 nt, Artificial Sequence
  Description of Artificial Sequence: Synthetic oligonucleotide
gggcagaccuggccacuca

SEQ ID NO: 2383159 - RNA, 19 nt, Artificial Sequence
  Description of Artificial Sequence: Synthetic oligonucleotide
cagacagcgccugcugacu

SEQ ID NO: 2383160 - RNA, 19 nt, Artificial Sequence
  Description of Artificial Sequence: Synthetic oligonucleotide
ccugaaagaggcggcagcu

SEQ ID NO: 2383161 - RNA, 19 nt, Artificial Sequence
  Description of Artificial Sequence: Synthetic oligonucleotide
gcaccagaaccuucaccgu

SEQ ID NO: 2383162 - RNA, 19 nt, Artificial Sequence
  Description of Artificial Sequence: Synthetic oligonucleotide
cgccugcugacuccgguuc

SEQ ID NO: 2383163 - RNA, 19 nt, Artificial Sequence
  Description of Artificial Sequence: Synthetic oligonucleotide
gcugagccggcgccauaca

SEQ ID NO: 2383164 - RNA, 19 nt, Artificial Sequence
  Description of Artificial Sequence: Synthetic oligonucleotide
ccgagacugcugagccggc

SEQ ID NO: 2383165 - RNA, 19 nt, Artificial Sequence
  Description of Artificial Sequence: Synthetic oligonucleotide
cuguagacacaggggcccu

SEQ ID NO: 2383166 - RNA, 19 nt, Artificial Sequence
  Description of Artificial Sequence: Synthetic oligonucleotide
gcgccugaaagaggcggca

SEQ ID NO: 2383167 - RNA, 19 nt, Artificial Sequence
  Description of Artificial Sequence: Synthetic oligonucleotide
cugucccuaacaggccagu

SEQ ID NO: 2383168 - RNA, 19 nt, Artificial Sequence
  Description of Artificial Sequence: Synthetic oligonucleotide
ucguggcggcugcccugua

SEQ ID NO: 2383169 - RNA, 19 nt, Artificial Sequence
  Description of Artificial Sequence: Synthetic oligonucleotide
gggcuguuuccaggugaca

SEQ ID NO: 2383170 - RNA, 19 nt, Artificial Sequence
  Description of Artificial Sequence: Synthetic oligonucleotide
gcgccauacaggccucagu

SEQ ID NO: 2383171 - RNA, 19 nt, Artificial Sequence
  Description of Artificial Sequence: Synthetic oligonucleotide
ggccggcauguuccucuuc

SEQ ID NO: 2383172 - RNA, 19 nt, Artificial Sequence
  Description of Artificial Sequence: Synthetic oligonucleotide
cuccgguucucagccugcu

SEQ ID NO: 2383173 - RNA, 19 nt, Artificial Sequence
  Description of Artificial Sequence: Synthetic oligonucleotide
ggcggcugcccuguacucu

SEQ ID NO: 2383174 - RNA, 19 nt, Artificial Sequence
  Description of Artificial Sequence: Synthetic oligonucleotide
ggacaggacuugguaguuu

SEQ ID NO: 2383175 - RNA, 19 nt, Artificial Sequence
  Description of Artificial Sequence: Synthetic oligonucleotide
gccuuguguugggucagcu

SEQ ID NO: 2383176 - RNA, 19 nt, Artificial Sequence
  Description of Artificial Sequence: Synthetic oligonucleotide
ggugcccugcagaaaucuu

SEQ ID NO: 2383177 - RNA, 19 nt, Artificial Sequence
  Description of Artificial Sequence: Synthetic oligonucleotide
ccggcgccauacaggccuc

SEQ ID NO: 2383178 - RNA, 19 nt, Artificial Sequence
  Description of Artificial Sequence: Synthetic oligonucleotide
cugcugagccggcgccaua

SEQ ID NO: 2383179 - RNA, 19 nt, Artificial Sequence
  Description of Artificial Sequence: Synthetic oligonucleotide
ggcugcccuguacucugau

SEQ ID NO: 2383180 - RNA, 19 nt, Artificial Sequence
  Description of Artificial Sequence: Synthetic oligonucleotide
cggcauguuccucuucacu

SEQ ID NO: 2383181 - RNA, 19 nt, Artificial Sequence
  Description of Artificial Sequence: Synthetic oligonucleotide
cgcagaacccgagacugcu

SEQ ID NO: 2383182 - RNA, 19 nt, Artificial Sequence
  Description of Artificial Sequence: Synthetic oligonucleotide
ccuucaccguaagcccgca

SEQ ID NO: 2383183 - RNA, 19 nt, Artificial Sequence
  Description of Artificial Sequence: Synthetic oligonucleotide
gccuggugcccugcagaaa

SEQ ID NO: 2383184 - RNA, 19 nt, Artificial Sequence
  Description of Artificial Sequence: Synthetic oligonucleotide
gcgccugcugacuccgguu

SEQ ID NO: 2383185 - RNA, 19 nt, Artificial Sequence
  Description of Artificial Sequence: Synthetic oligonucleotide
gggccggcauguuccucuu

SEQ ID NO: 2383186 - RNA, 19 nt, Artificial Sequence
  Description of Artificial Sequence: Synthetic oligonucleotide
cccgcacaaaggacugcuu

SEQ ID NO: 2383187 - RNA, 19 nt, Artificial Sequence
  Description of Artificial Sequence: Synthetic oligonucleotide
cccuugccuuguguugggu

SEQ ID NO: 2383188 - RNA, 19 nt, Artificial Sequence
  Description of Artificial Sequence: Synthetic oligonucleotide
cggcgccauacaggccuca

SEQ ID NO: 2383189 - RNA, 19 nt, Artificial Sequence
  Description of Artificial Sequence: Synthetic oligonucleotide
uuaaagaauaaauauaggg

SEQ ID NO: 2383190 - RNA, 19 nt, Artificial Sequence
  Description of Artificial Sequence: Synthetic oligonucleotide
aagggaauaauuuacauuc

SEQ ID NO: 2383191 - RNA, 19 nt, Artificial Sequence
  Description of Artificial Sequence: Synthetic oligonucleotide
aaagaauaaauauagggca

SEQ ID NO: 2383192 - RNA, 19 nt, Artificial Sequence
  Description of Artificial Sequence: Synthetic oligonucleotide
uaaagaauaaauauagggc

SEQ ID NO: 2383193 - RNA, 19 nt, Artificial Sequence
  Description of Artificial Sequence: Synthetic oligonucleotide
aaugcuuacaaauauauau

SEQ ID NO: 2383194 - RNA, 19 nt, Artificial Sequence
  Description of Artificial Sequence: Synthetic oligonucleotide
aaucuuacuucccaggacc

SEQ ID NO: 2383195 - RNA, 19 nt, Artificial Sequence
  Description of Artificial Sequence: Synthetic oligonucleotide
aaagguacccuacagcagc

SEQ ID NO: 2383196 - RNA, 19 nt, Artificial Sequence
  Description of Artificial Sequence: Synthetic oligonucleotide
aauuuugugcuuuagaaau

SEQ ID NO: 2383197 - RNA, 19 nt, Artificial Sequence
  Description of Artificial Sequence: Synthetic oligonucleotide
uggaauaaauaaauggccg

SEQ ID NO: 2383198 - RNA, 19 nt, Artificial Sequence
  Description of Artificial Sequence: Synthetic oligonucleotide
aauaaauggccgcuguuac

SEQ ID NO: 2383199 - RNA, 19 nt, Artificial Sequence
  Description of Artificial Sequence: Synthetic oligonucleotide
auauuaaacauuuugugca

SEQ ID NO: 2383200 - RNA, 19 nt, Artificial Sequence
  Description of Artificial Sequence: Synthetic oligonucleotide
aaauauagggcauggagca

SEQ ID NO: 2383201 - RNA, 19 nt, Artificial Sequence
  Description of Artificial Sequence: Synthetic oligonucleotide
uucuaaauggaauaaauaa

SEQ ID NO: 2383202 - RNA, 19 nt, Artificial Sequence
  Description of Artificial Sequence: Synthetic oligonucleotide
uaaauauagggcauggagc

SEQ ID NO: 2383203 - RNA, 19 nt, Artificial Sequence
  Description of Artificial Sequence: Synthetic oligonucleotide
agaaauuauauuucacugg

SEQ ID NO: 2383204 - RNA, 19 nt, Artificial Sequence
  Description of Artificial Sequence: Synthetic oligonucleotide
uuuugugcagaaaugagca

SEQ ID NO: 2383205 - RNA, 19 nt, Artificial Sequence
  Description of Artificial Sequence: Synthetic oligonucleotide
  modified_base (4)..(4): a, c, u, g, unknown or other
uuunucuuacuuauuauaa

SEQ ID NO: 2383206 - RNA, 19 nt, Artificial Sequence
  Description of Artificial Sequence: Synthetic oligonucleotide
auauauuaaacauuuugug

SEQ ID NO: 2383207 - RNA, 19 nt, Artificial Sequence
  Description of Artificial Sequence: Synthetic oligonucleotide
  modified_base (2)..(2): a, c, u, g, unknown or other
  modified_base (7)..(7): a, c, u, g, unknown or other
unuuuunucuuacuuauua

SEQ ID NO: 2383208 - RNA, 19 nt, Artificial Sequence
  Description of Artificial Sequence: Synthetic oligonucleotide
  modified_base (4)..(4): a, c, u, g, unknown or other
  modified_base (9)..(9): a, c, u, g, unknown or other
uuunuuuunucuuacuuau

SEQ ID NO: 2383209 - RNA, 19 nt, Artificial Sequence
  Description of Artificial Sequence: Synthetic oligonucleotide
uuagaaauuauauuucacu

SEQ ID NO: 2383210 - RNA, 19 nt, Artificial Sequence
  Description of Artificial Sequence: Synthetic oligonucleotide
aaaugagcagagcucagac

SEQ ID NO: 2383211 - RNA, 19 nt, Artificial Sequence
  Description of Artificial Sequence: Synthetic oligonucleotide
uagaaauuauauuucacug

SEQ ID NO: 2383212 - RNA, 19 nt, Artificial Sequence
  Description of Artificial Sequence: Synthetic oligonucleotide
  modified_base (2)..(2): a, c, u, g, unknown or other
unucuuacuuauuauaaca

SEQ ID NO: 2383213 - RNA, 19 nt, Artificial Sequence
  Description of Artificial Sequence: Synthetic oligonucleotide
aaacauuuugugcagaaau

SEQ ID NO: 2383214 - RNA, 19 nt, Artificial Sequence
  Description of Artificial Sequence: Synthetic oligonucleotide
  modified_base (5)..(5): a, c, u, g, unknown or other
  modified_base (10)..(10): a, c, u, g, unknown or other
uuuunuuuunucuuacuua

SEQ ID NO: 2383215 - RNA, 19 nt, Artificial Sequence
  Description of Artificial Sequence: Synthetic oligonucleotide
uaugaagggaauaauuuac

SEQ ID NO: 2383216 - RNA, 19 nt, Artificial Sequence
  Description of Artificial Sequence: Synthetic oligonucleotide
auggaauaaauaaauggcc

SEQ ID NO: 2383217 - RNA, 19 nt, Artificial Sequence
  Description of Artificial Sequence: Synthetic oligonucleotide
cuuucuuagaaguuuauuc

SEQ ID NO: 2383218 - RNA, 19 nt, Artificial Sequence
  Description of Artificial Sequence: Synthetic oligonucleotide
gaaauuauauuucacugga

SEQ ID NO: 2383219 - RNA, 19 nt, Artificial Sequence
  Description of Artificial Sequence: Synthetic oligonucleotide
aagccaggcacucauuggc

SEQ ID NO: 2383220 - RNA, 19 nt, Artificial Sequence
  Description of Artificial Sequence: Synthetic oligonucleotide
cuuggcaccaauuuugugc

SEQ ID NO: 2383221 - RNA, 19 nt, Artificial Sequence
  Description of Artificial Sequence: Synthetic oligonucleotide
uuucuuagaaguuuauucu

SEQ ID NO: 2383222 - RNA, 19 nt, Artificial Sequence
  Description of Artificial Sequence: Synthetic oligonucleotide
auguaaauauauuaaacau

SEQ ID NO: 2383223 - RNA, 19 nt, Artificial Sequence
  Description of Artificial Sequence: Synthetic oligonucleotide
acuuauuauaacaaacaac

SEQ ID NO: 2383224 - RNA, 19 nt, Artificial Sequence
  Description of Artificial Sequence: Synthetic oligonucleotide
uuauauuucacuggaagac

SEQ ID NO: 2383225 - RNA, 19 nt, Artificial Sequence
  Description of Artificial Sequence: Synthetic oligonucleotide
ucuuuaucuagucuuggca

SEQ ID NO: 2383226 - RNA, 19 nt, Artificial Sequence
  Description of Artificial Sequence: Synthetic oligonucleotide
caauucauaugccacaggc

SEQ ID NO: 2383227 - RNA, 19 nt, Artificial Sequence
  Description of Artificial Sequence: Synthetic oligonucleotide
ugcagaaaugagcagagcu

SEQ ID NO: 2383228 - RNA, 19 nt, Artificial Sequence
  Description of Artificial Sequence: Synthetic oligonucleotide
aaacaaugcuuacaaauau

SEQ ID NO: 2383229 - RNA, 19 nt, Artificial Sequence
  Description of Artificial Sequence: Synthetic oligonucleotide
auuauauuucacuggaaga

SEQ ID NO: 2383230 - RNA, 19 nt, Artificial Sequence
  Description of Artificial Sequence: Synthetic oligonucleotide
caacagaacacaccgaggg

SEQ ID NO: 2383231 - RNA, 19 nt, Artificial Sequence
  Description of Artificial Sequence: Synthetic oligonucleotide
uacuuauuauaacaaacaa

SEQ ID NO: 2383232 - RNA, 19 nt, Artificial Sequence
  Description of Artificial Sequence: Synthetic oligonucleotide
acuaaucuuacuucccagg

SEQ ID NO: 2383233 - RNA, 19 nt, Artificial Sequence
  Description of Artificial Sequence: Synthetic oligonucleotide
acguguggcacacauauuc

SEQ ID NO: 2383234 - RNA, 19 nt, Artificial Sequence
  Description of Artificial Sequence: Synthetic oligonucleotide
ugugagagcggacaggggc

SEQ ID NO: 2383235 - RNA, 19 nt, Artificial Sequence
  Description of Artificial Sequence: Synthetic oligonucleotide
  modified_base (5)..(5): a, c, u, g, unknown or other
uuuunucuuacuuauuaua

SEQ ID NO: 2383236 - RNA, 19 nt, Artificial Sequence
  Description of Artificial Sequence: Synthetic oligonucleotide
ugcuuacaaauauauaugu

SEQ ID NO: 2383237 - RNA, 19 nt, Artificial Sequence
  Description of Artificial Sequence: Synthetic oligonucleotide
gaauaaauauagggcaugg

SEQ ID NO: 2383238 - RNA, 19 nt, Artificial Sequence
  Description of Artificial Sequence: Synthetic oligonucleotide
uggaaacugggucaagggg

SEQ ID NO: 2383239 - RNA, 19 nt, Artificial Sequence
  Description of Artificial Sequence: Synthetic oligonucleotide
ucuuagaaguuuauucucu

SEQ ID NO: 2383240 - RNA, 19 nt, Artificial Sequence
  Description of Artificial Sequence: Synthetic oligonucleotide
aggggaucuacacaauggc

SEQ ID NO: 2383241 - RNA, 19 nt, Artificial Sequence
  Description of Artificial Sequence: Synthetic oligonucleotide
agcaacagaacacaccgag

SEQ ID NO: 2383242 - RNA, 19 nt, Artificial Sequence
  Description of Artificial Sequence: Synthetic oligonucleotide
cuuuaucuagucuuggcac

SEQ ID NO: 2383243 - RNA, 19 nt, Artificial Sequence
  Description of Artificial Sequence: Synthetic oligonucleotide
ucgaaaucugcccuggagc

SEQ ID NO: 2383244 - RNA, 19 nt, Artificial Sequence
  Description of Artificial Sequence: Synthetic oligonucleotide
ugugcagaaaugagcagag

SEQ ID NO: 2383245 - RNA, 19 nt, Artificial Sequence
  Description of Artificial Sequence: Synthetic oligonucleotide
aauaaauaaauggccgcug

SEQ ID NO: 2383246 - RNA, 19 nt, Artificial Sequence
  Description of Artificial Sequence: Synthetic oligonucleotide
aaagccaggcacucauugg

SEQ ID NO: 2383247 - RNA, 19 nt, Artificial Sequence
  Description of Artificial Sequence: Synthetic oligonucleotide
  modified_base (3)..(3): a, c, u, g, unknown or other
uunucuuacuuauuauaac

SEQ ID NO: 2383248 - RNA, 19 nt, Artificial Sequence
  Description of Artificial Sequence: Synthetic oligonucleotide
auaugccacaggcaugucc

SEQ ID NO: 2383249 - RNA, 19 nt, Artificial Sequence
  Description of Artificial Sequence: Synthetic oligonucleotide
uuucuaaauggaauaaaua

SEQ ID NO: 2383250 - RNA, 19 nt, Artificial Sequence
  Description of Artificial Sequence: Synthetic oligonucleotide
auucauaugccacaggcau

SEQ ID NO: 2383251 - RNA, 19 nt, Artificial Sequence
  Description of Artificial Sequence: Synthetic oligonucleotide
uuuaucuagucuuggcacc

SEQ ID NO: 2383252 - RNA, 19 nt, Artificial Sequence
  Description of Artificial Sequence: Synthetic oligonucleotide
cuuaaaacaaugcuuacaa

SEQ ID NO: 2383253 - RNA, 19 nt, Artificial Sequence
  Description of Artificial Sequence: Synthetic oligonucleotide
uuuggaaacugggucaagg

SEQ ID NO: 2383254 - RNA, 19 nt, Artificial Sequence
  Description of Artificial Sequence: Synthetic oligonucleotide
uuuccuuucuaaauggaau

SEQ ID NO: 2383255 - RNA, 19 nt, Artificial Sequence
  Description of Artificial Sequence: Synthetic oligonucleotide
uauaacaaacaacuucaaa

SEQ ID NO: 2383256 - RNA, 19 nt, Artificial Sequence
  Description of Artificial Sequence: Synthetic oligonucleotide
acagcagcugcuuaaaaca

SEQ ID NO: 2383257 - RNA, 19 nt, Artificial Sequence
  Description of Artificial Sequence: Synthetic oligonucleotide
caaacaacuucaaaauaug

SEQ ID NO: 2383258 - RNA, 19 nt, Artificial Sequence
  Description of Artificial Sequence: Synthetic oligonucleotide
uuggaaacugggucaaggg

SEQ ID NO: 2383259 - RNA, 19 nt, Artificial Sequence
  Description of Artificial Sequence: Synthetic oligonucleotide
aggaaaagggacguguggc

SEQ ID NO: 2383260 - RNA, 19 nt, Artificial Sequence
  Description of Artificial Sequence: Synthetic oligonucleotide
uguuacuguuuaaagaaua

SEQ ID NO: 2383261 - RNA, 19 nt, Artificial Sequence
  Description of Artificial Sequence: Synthetic oligonucleotide
guuuauucucugcaucugg

SEQ ID NO: 2383262 - RNA, 19 nt, Artificial Sequence
  Description of Artificial Sequence: Synthetic oligonucleotide
uuagaaguuuauucucugc

SEQ ID NO: 2383263 - RNA, 19 nt, Artificial Sequence
  Description of Artificial Sequence: Synthetic oligonucleotide
cagagcucagacucgaugg

SEQ ID NO: 2383264 - RNA, 19 nt, Artificial Sequence
  Description of Artificial Sequence: Synthetic oligonucleotide
aaggggaucuacacaaugg

SEQ ID NO: 2383265 - RNA, 19 nt, Artificial Sequence
  Description of Artificial Sequence: Synthetic oligonucleotide
acaauggcacccuuguguc

SEQ ID NO: 2383266 - RNA, 19 nt, Artificial Sequence
  Description of Artificial Sequence: Synthetic oligonucleotide
uucgaaaucugcccuggag

SEQ ID NO: 2383267 - RNA, 19 nt, Artificial Sequence
  Description of Artificial Sequence: Synthetic oligonucleotide
uaaauggccgcuguuacug

SEQ ID NO: 2383268 - RNA, 19 nt, Artificial Sequence
  Description of Artificial Sequence: Synthetic oligonucleotide
aacaacuucaaaauaugaa

SEQ ID NO: 2383269 - RNA, 19 nt, Artificial Sequence
  Description of Artificial Sequence: Synthetic oligonucleotide
auaaauaaauggccgcugu

SEQ ID NO: 2383270 - RNA, 19 nt, Artificial Sequence
  Description of Artificial Sequence: Synthetic oligonucleotide
aaaacaaugcuuacaaaua

SEQ ID NO: 2383271 - RNA, 19 nt, Artificial Sequence
  Description of Artificial Sequence: Synthetic oligonucleotide
acauucuuuaucuagucuu

SEQ ID NO: 2383272 - RNA, 19 nt, Artificial Sequence
  Description of Artificial Sequence: Synthetic oligonucleotide
uguggcacacauauuccag

SEQ ID NO: 2383273 - RNA, 19 nt, Artificial Sequence
  Description of Artificial Sequence: Synthetic oligonucleotide
cauuuugugcagaaaugag

SEQ ID NO: 2383274 - RNA, 19 nt, Artificial Sequence
  Description of Artificial Sequence: Synthetic oligonucleotide
agcaccaacagcuggcauc

SEQ ID NO: 2383275 - RNA, 19 nt, Artificial Sequence
  Description of Artificial Sequence: Synthetic oligonucleotide
ggaauaaauaaauggccgc

SEQ ID NO: 2383276 - RNA, 19 nt, Artificial Sequence
  Description of Artificial Sequence: Synthetic oligonucleotide
guuugugacauccugagcu

SEQ ID NO: 2383277 - RNA, 19 nt, Artificial Sequence
  Description of Artificial Sequence: Synthetic oligonucleotide
ugugcaugccaauucauau

SEQ ID NO: 2383278 - RNA, 19 nt, Artificial Sequence
  Description of Artificial Sequence: Synthetic oligonucleotide
uucuuagaaguuuauucuc

SEQ ID NO: 2383279 - RNA, 19 nt, Artificial Sequence
  Description of Artificial Sequence: Synthetic oligonucleotide
cuucaaaauaugaagggaa

SEQ ID NO: 2383280 - RNA, 19 nt, Artificial Sequence
  Description of Artificial Sequence: Synthetic oligonucleotide
uucuuuaucuagucuuggc

SEQ ID NO: 2383281 - RNA, 19 nt, Artificial Sequence
  Description of Artificial Sequence: Synthetic oligonucleotide
uacauucuuuaucuagucu

SEQ ID NO: 2383282 - RNA, 19 nt, Artificial Sequence
  Description of Artificial Sequence: Synthetic oligonucleotide
auaugaagggaauaauuua

SEQ ID NO: 2383283 - RNA, 19 nt, Artificial Sequence
  Description of Artificial Sequence: Synthetic oligonucleotide
ucucccacuaaucuuacuu

SEQ ID NO: 2383284 - RNA, 19 nt, Artificial Sequence
  Description of Artificial Sequence: Synthetic oligonucleotide
aaugagcagagcucagacu

SEQ ID NO: 2383285 - RNA, 19 nt, Artificial Sequence
  Description of Artificial Sequence: Synthetic oligonucleotide
aguguccaugguuugugac

SEQ ID NO: 2383286 - RNA, 19 nt, Artificial Sequence
  Description of Artificial Sequence: Synthetic oligonucleotide
aaauaaauggccgcuguua

SEQ ID NO: 2383287 - RNA, 19 nt, Artificial Sequence
  Description of Artificial Sequence: Synthetic oligonucleotide
uuauuauaacaaacaacuu

SEQ ID NO: 2383288 - RNA, 19 nt, Artificial Sequence
  Description of Artificial Sequence: Synthetic oligonucleotide
agcugcuuaaaacaaugcu

SEQ ID NO: 2383289 - RNA, 19 nt, Artificial Sequence
  Description of Artificial Sequence: Synthetic oligonucleotide
aauauagggcauggagcac

SEQ ID NO: 2383290 - RNA, 19 nt, Artificial Sequence
  Description of Artificial Sequence: Synthetic oligonucleotide
ugaagggaauaauuuacau

SEQ ID NO: 2383291 - RNA, 19 nt, Artificial Sequence
  Description of Artificial Sequence: Synthetic oligonucleotide
uaaucuuacuucccaggac

SEQ ID NO: 2383292 - RNA, 19 nt, Artificial Sequence
  Description of Artificial Sequence: Synthetic oligonucleotide
acagaacacaccgagggag

SEQ ID NO: 2383293 - RNA, 19 nt, Artificial Sequence
  Description of Artificial Sequence: Synthetic oligonucleotide
ucccacuaaucuuacuucc

SEQ ID NO: 2383294 - RNA, 19 nt, Artificial Sequence
  Description of Artificial Sequence: Synthetic oligonucleotide
uccaugguuugugacaucc

SEQ ID NO: 2383295 - RNA, 19 nt, Artificial Sequence
  Description of Artificial Sequence: Synthetic oligonucleotide
acauuuugugcagaaauga

SEQ ID NO: 2383296 - RNA, 19 nt, Artificial Sequence
  Description of Artificial Sequence: Synthetic oligonucleotide
cuggugcugaugcagagcc

SEQ ID NO: 2383297 - RNA, 19 nt, Artificial Sequence
  Description of Artificial Sequence: Synthetic oligonucleotide
ucauaugccacaggcaugu

SEQ ID NO: 2383298 - RNA, 19 nt, Artificial Sequence
  Description of Artificial Sequence: Synthetic oligonucleotide
aagaauaaauauagggcau

SEQ ID NO: 2383299 - RNA, 19 nt, Artificial Sequence
  Description of Artificial Sequence: Synthetic oligonucleotide
uuacauucuuuaucuaguc

SEQ ID NO: 2383300 - RNA, 19 nt, Artificial Sequence
  Description of Artificial Sequence: Synthetic oligonucleotide
ugagcagagcucagacucg

SEQ ID NO: 2383301 - RNA, 19 nt, Artificial Sequence
  Description of Artificial Sequence: Synthetic oligonucleotide
cucacuccaugugagagcg

SEQ ID NO: 2383302 - RNA, 19 nt, Artificial Sequence
  Description of Artificial Sequence: Synthetic oligonucleotide
aaaagggacguguggcaca

SEQ ID NO: 2383303 - RNA, 19 nt, Artificial Sequence
  Description of Artificial Sequence: Synthetic oligonucleotide
aauucauaugccacaggca

SEQ ID NO: 2383304 - RNA, 19 nt, Artificial Sequence
  Description of Artificial Sequence: Synthetic oligonucleotide
aaaagguacccuacagcag

SEQ ID NO: 2383305 - RNA, 19 nt, Artificial Sequence
  Description of Artificial Sequence: Synthetic oligonucleotide
uuugugcagaaaugagcag

SEQ ID NO: 2383306 - RNA, 19 nt, Artificial Sequence
  Description of Artificial Sequence: Synthetic oligonucleotide
aacagaacacaccgaggga

SEQ ID NO: 2383307 - RNA, 19 nt, Artificial Sequence
  Description of Artificial Sequence: Synthetic oligonucleotide
uauuucacuggaagacuga

SEQ ID NO: 2383308 - RNA, 19 nt, Artificial Sequence
  Description of Artificial Sequence: Synthetic oligonucleotide
ugcuuucgaaaucugcccu

SEQ ID NO: 2383309 - RNA, 19 nt, Artificial Sequence
  Description of Artificial Sequence: Synthetic oligonucleotide
auuggcccgagggaggucc

SEQ ID NO: 2383310 - RNA, 19 nt, Artificial Sequence
  Description of Artificial Sequence: Synthetic oligonucleotide
agaaguuuauucucugcau

SEQ ID NO: 2383311 - RNA, 19 nt, Artificial Sequence
  Description of Artificial Sequence: Synthetic oligonucleotide
uggcaucaaagccaggcac

SEQ ID NO: 2383312 - RNA, 19 nt, Artificial Sequence
  Description of Artificial Sequence: Synthetic oligonucleotide
augcuuacaaauauauaug

SEQ ID NO: 2383313 - RNA, 19 nt, Artificial Sequence
  Description of Artificial Sequence: Synthetic oligonucleotide
uggagcaccaacagcuggc

SEQ ID NO: 2383314 - RNA, 19 nt, Artificial Sequence
  Description of Artificial Sequence: Synthetic oligonucleotide
caaaauaugaagggaauaa

SEQ ID NO: 2383315 - RNA, 19 nt, Artificial Sequence
  Description of Artificial Sequence: Synthetic oligonucleotide
auucuuuaucuagucuugg

SEQ ID NO: 2383316 - RNA, 19 nt, Artificial Sequence
  Description of Artificial Sequence: Synthetic oligonucleotide
cugcuuucgaaaucugccc

SEQ ID NO: 2383317 - RNA, 19 nt, Artificial Sequence
  Description of Artificial Sequence: Synthetic oligonucleotide
ucaaaauaugaagggaaua

SEQ ID NO: 2383318 - RNA, 19 nt, Artificial Sequence
  Description of Artificial Sequence: Synthetic oligonucleotide
uccugcuuucgaaaucugc

SEQ ID NO: 2383319 - RNA, 19 nt, Artificial Sequence
  Description of Artificial Sequence: Synthetic oligonucleotide
ugugacauccugagcuuca

SEQ ID NO: 2383320 - RNA, 19 nt, Artificial Sequence
  Description of Artificial Sequence: Synthetic oligonucleotide
gacauccugagcuucaucu

SEQ ID NO: 2383321 - RNA, 19 nt, Artificial Sequence
  Description of Artificial Sequence: Synthetic oligonucleotide
ugccaauucauaugccaca

SEQ ID NO: 2383322 - RNA, 19 nt, Artificial Sequence
  Description of Artificial Sequence: Synthetic oligonucleotide
augccaauucauaugccac

SEQ ID NO: 2383323 - RNA, 19 nt, Artificial Sequence
  Description of Artificial Sequence: Synthetic oligonucleotide
auggagcaccaacagcugg

SEQ ID NO: 2383324 - RNA, 19 nt, Artificial Sequence
  Description of Artificial Sequence: Synthetic oligonucleotide
aacugggucaaggggaucu

SEQ ID NO: 2383325 - RNA, 19 nt, Artificial Sequence
  Description of Artificial Sequence: Synthetic oligonucleotide
ugcagagcccuuuggaaac

SEQ ID NO: 2383326 - RNA, 19 nt, Artificial Sequence
  Description of Artificial Sequence: Synthetic oligonucleotide
aaaucugcccuggagcccu

SEQ ID NO: 2383327 - RNA, 19 nt, Artificial Sequence
  Description of Artificial Sequence: Synthetic oligonucleotide
ggcauguccaaggaaaagg

SEQ ID NO: 2383328 - RNA, 19 nt, Artificial Sequence
  Description of Artificial Sequence: Synthetic oligonucleotide
caaagccaggcacucauug

SEQ ID NO: 2383329 - RNA, 19 nt, Artificial Sequence
  Description of Artificial Sequence: Synthetic oligonucleotide
uaaauaaauggccgcuguu

SEQ ID NO: 2383330 - RNA, 19 nt, Artificial Sequence
  Description of Artificial Sequence: Synthetic oligonucleotide
cugcuuaaaacaaugcuua

SEQ ID NO: 2383331 - RNA, 19 nt, Artificial Sequence
  Description of Artificial Sequence: Synthetic oligonucleotide
  modified_base (3)..(3): a, c, u, g, unknown or other
  modified_base (8)..(8): a, c, u, g, unknown or other
uunuuuunucuuacuuauu

SEQ ID NO: 2383332 - RNA, 19 nt, Artificial Sequence
  Description of Artificial Sequence: Synthetic oligonucleotide
auuccagggagguggcagg

SEQ ID NO: 2383333 - RNA, 19 nt, Artificial Sequence
  Description of Artificial Sequence: Synthetic oligonucleotide
cacuaaucuuacuucccag

SEQ ID NO: 2383334 - RNA, 19 nt, Artificial Sequence
  Description of Artificial Sequence: Synthetic oligonucleotide
cuaaucuuacuucccagga

SEQ ID NO: 2383335 - RNA, 19 nt, Artificial Sequence
  Description of Artificial Sequence: Synthetic oligonucleotide
uuaucuagucuuggcacca

SEQ ID NO: 2383336 - RNA, 19 nt, Artificial Sequence
  Description of Artificial Sequence: Synthetic oligonucleotide
ccugcuuucgaaaucugcc

SEQ ID NO: 2383337 - RNA, 19 nt, Artificial Sequence
  Description of Artificial Sequence: Synthetic oligonucleotide
ugcuuaaaacaaugcuuac

SEQ ID NO: 2383338 - RNA, 19 nt, Artificial Sequence
  Description of Artificial Sequence: Synthetic oligonucleotide
aucuuacuucccaggaccc

SEQ ID NO: 2383339 - RNA, 19 nt, Artificial Sequence
  Description of Artificial Sequence: Synthetic oligonucleotide
gaugcagagcccuuuggaa

SEQ ID NO: 2383340 - RNA, 19 nt, Artificial Sequence
  Description of Artificial Sequence: Synthetic oligonucleotide
cagaacacaccgagggagg

SEQ ID NO: 2383341 - RNA, 19 nt, Artificial Sequence
  Description of Artificial Sequence: Synthetic oligonucleotide
acucauuggcccgagggag

SEQ ID NO: 2383342 - RNA, 19 nt, Artificial Sequence
  Description of Artificial Sequence: Synthetic oligonucleotide
acagcuggcaucaaagcca

SEQ ID NO: 2383343 - RNA, 19 nt, Artificial Sequence
  Description of Artificial Sequence: Synthetic oligonucleotide
cagacucuccacagggugg

SEQ ID NO: 2383344 - RNA, 19 nt, Artificial Sequence
  Description of Artificial Sequence: Synthetic oligonucleotide
caacagcuggcaucaaagc

SEQ ID NO: 2383345 - RNA, 19 nt, Artificial Sequence
  Description of Artificial Sequence: Synthetic oligonucleotide
auaaauggccgcuguuacu

SEQ ID NO: 2383346 - RNA, 19 nt, Artificial Sequence
  Description of Artificial Sequence: Synthetic oligonucleotide
gaucuacacaauggcaccc

SEQ ID NO: 2383347 - RNA, 19 nt, Artificial Sequence
  Description of Artificial Sequence: Synthetic oligonucleotide
ucaguguccaugguuugug

SEQ ID NO: 2383348 - RNA, 19 nt, Artificial Sequence
  Description of Artificial Sequence: Synthetic oligonucleotide
cucgaugggaguugguuuc

SEQ ID NO: 2383349 - RNA, 19 nt, Artificial Sequence
  Description of Artificial Sequence: Synthetic oligonucleotide
ucuagucuuggcaccaauu

SEQ ID NO: 2383350 - RNA, 19 nt, Artificial Sequence
  Description of Artificial Sequence: Synthetic oligonucleotide
cuuucuaaauggaauaaau

SEQ ID NO: 2383351 - RNA, 19 nt, Artificial Sequence
  Description of Artificial Sequence: Synthetic oligonucleotide
aaauuauauuucacuggaa

SEQ ID NO: 2383352 - RNA, 19 nt, Artificial Sequence
  Description of Artificial Sequence: Synthetic oligonucleotide
gagcccuuuggaaacuggg

SEQ ID NO: 2383353 - RNA, 19 nt, Artificial Sequence
  Description of Artificial Sequence: Synthetic oligonucleotide
ugucucaguguccaugguu

SEQ ID NO: 2383354 - RNA, 19 nt, Artificial Sequence
  Description of Artificial Sequence: Synthetic oligonucleotide
uuugugcuuuagaaauuau

SEQ ID NO: 2383355 - RNA, 19 nt, Artificial Sequence
  Description of Artificial Sequence: Synthetic oligonucleotide
ugcucuggugcugaugcag

SEQ ID NO: 2383356 - RNA, 19 nt, Artificial Sequence
  Description of Artificial Sequence: Synthetic oligonucleotide
cuuguccuggccauuccug

SEQ ID NO: 2383357 - RNA, 19 nt, Artificial Sequence
  Description of Artificial Sequence: Synthetic oligonucleotide
cauauuccagggagguggc

SEQ ID NO: 2383358 - RNA, 19 nt, Artificial Sequence
  Description of Artificial Sequence: Synthetic oligonucleotide
ggaucuacacaauggcacc

SEQ ID NO: 2383359 - RNA, 19 nt, Artificial Sequence
  Description of Artificial Sequence: Synthetic oligonucleotide
ugggaguugguuucuuuuc

SEQ ID NO: 2383360 - RNA, 19 nt, Artificial Sequence
  Description of Artificial Sequence: Synthetic oligonucleotide
gcacucauuggcccgaggg

SEQ ID NO: 2383361 - RNA, 19 nt, Artificial Sequence
  Description of Artificial Sequence: Synthetic oligonucleotide
uguccaugguuugugacau

SEQ ID NO: 2383362 - RNA, 19 nt, Artificial Sequence
  Description of Artificial Sequence: Synthetic oligonucleotide
acaggcauguccaaggaaa

SEQ ID NO: 2383363 - RNA, 19 nt, Artificial Sequence
  Description of Artificial Sequence: Synthetic oligonucleotide
cagcugcuuaaaacaaugc

SEQ ID NO: 2383364 - RNA, 19 nt, Artificial Sequence
  Description of Artificial Sequence: Synthetic oligonucleotide
cucccacuaaucuuacuuc

SEQ ID NO: 2383365 - RNA, 19 nt, Artificial Sequence
  Description of Artificial Sequence: Synthetic oligonucleotide
cucauuggcccgagggagg

SEQ ID NO: 2383366 - RNA, 19 nt, Artificial Sequence
  Description of Artificial Sequence: Synthetic oligonucleotide
augaagggaauaauuuaca

SEQ ID NO: 2383367 - RNA, 19 nt, Artificial Sequence
  Description of Artificial Sequence: Synthetic oligonucleotide
gaagggaauaauuuacauu

SEQ ID NO: 2383368 - RNA, 19 nt, Artificial Sequence
  Description of Artificial Sequence: Synthetic oligonucleotide
aacacaccgagggagguuu

SEQ ID NO: 2383369 - RNA, 19 nt, Artificial Sequence
  Description of Artificial Sequence: Synthetic oligonucleotide
augcagagcccuuuggaaa

SEQ ID NO: 2383370 - RNA, 19 nt, Artificial Sequence
  Description of Artificial Sequence: Synthetic oligonucleotide
aaauggccgcuguuacugu

SEQ ID NO: 2383371 - RNA, 19 nt, Artificial Sequence
  Description of Artificial Sequence: Synthetic oligonucleotide
gauggccuuguccuggcca

SEQ ID NO: 2383372 - RNA, 19 nt, Artificial Sequence
  Description of Artificial Sequence: Synthetic oligonucleotide
ucuuggcaccaauuuugug

SEQ ID NO: 2383373 - RNA, 19 nt, Artificial Sequence
  Description of Artificial Sequence: Synthetic oligonucleotide
agacucuccacaggguggg

SEQ ID NO: 2383374 - RNA, 19 nt, Artificial Sequence
  Description of Artificial Sequence: Synthetic oligonucleotide
ugggguucugucucagugu

SEQ ID NO: 2383375 - RNA, 19 nt, Artificial Sequence
  Description of Artificial Sequence: Synthetic oligonucleotide
agggagguccaaccugggg

SEQ ID NO: 2383376 - RNA, 19 nt, Artificial Sequence
  Description of Artificial Sequence: Synthetic oligonucleotide
ucagacucgaugggaguug

SEQ ID NO: 2383377 - RNA, 19 nt, Artificial Sequence
  Description of Artificial Sequence: Synthetic oligonucleotide
ccaauuuugugcuuuagaa

SEQ ID NO: 2383378 - RNA, 19 nt, Artificial Sequence
  Description of Artificial Sequence: Synthetic oligonucleotide
guggggagcagcucacucc

SEQ ID NO: 2383379 - RNA, 19 nt, Artificial Sequence
  Description of Artificial Sequence: Synthetic oligonucleotide
ugagcuucaucuggauggc

SEQ ID NO: 2383380 - RNA, 19 nt, Artificial Sequence
  Description of Artificial Sequence: Synthetic oligonucleotide
augggaguugguuucuuuu

SEQ ID NO: 2383381 - RNA, 19 nt, Artificial Sequence
  Description of Artificial Sequence: Synthetic oligonucleotide
acucgaugggaguugguuu

SEQ ID NO: 2383382 - RNA, 19 nt, Artificial Sequence
  Description of Artificial Sequence: Synthetic oligonucleotide
ucuggugcugaugcagagc

SEQ ID NO: 2383383 - RNA, 19 nt, Artificial Sequence
  Description of Artificial Sequence: Synthetic oligonucleotide
ggaaacugggucaagggga

SEQ ID NO: 2383384 - RNA, 19 nt, Artificial Sequence
  Description of Artificial Sequence: Synthetic oligonucleotide
aauggccgcuguuacuguu

SEQ ID NO: 2383385 - RNA, 19 nt, Artificial Sequence
  Description of Artificial Sequence: Synthetic oligonucleotide
cacaauggcacccuugugu

SEQ ID NO: 2383386 - RNA, 19 nt, Artificial Sequence
  Description of Artificial Sequence: Synthetic oligonucleotide
agggagguuuccuuucuaa

SEQ ID NO: 2383387 - RNA, 19 nt, Artificial Sequence
  Description of Artificial Sequence: Synthetic oligonucleotide
gguacccuacagcagcugc

SEQ ID NO: 2383388 - RNA, 19 nt, Artificial Sequence
  Description of Artificial Sequence: Synthetic oligonucleotide
agccaggcacucauuggcc

SEQ ID NO: 2383389 - RNA, 19 nt, Artificial Sequence
  Description of Artificial Sequence: Synthetic oligonucleotide
auuucacuggaagacugaa

SEQ ID NO: 2383390 - RNA, 19 nt, Artificial Sequence
  Description of Artificial Sequence: Synthetic oligonucleotide
cauguccaaggaaaaggga

SEQ ID NO: 2383391 - RNA, 19 nt, Artificial Sequence
  Description of Artificial Sequence: Synthetic oligonucleotide
guuuccuuucuaaauggaa

SEQ ID NO: 2383392 - RNA, 19 nt, Artificial Sequence
  Description of Artificial Sequence: Synthetic oligonucleotide
ccgacagaggcuuucuuag

SEQ ID NO: 2383393 - RNA, 19 nt, Artificial Sequence
  Description of Artificial Sequence: Synthetic oligonucleotide
agcuucaucuggauggccu

SEQ ID NO: 2383394 - RNA, 19 nt, Artificial Sequence
  Description of Artificial Sequence: Synthetic oligonucleotide
agggacguguggcacacau

SEQ ID NO: 2383395 - RNA, 19 nt, Artificial Sequence
  Description of Artificial Sequence: Synthetic oligonucleotide
gagguggcaggugugugug

SEQ ID NO: 2383396 - RNA, 19 nt, Artificial Sequence
  Description of Artificial Sequence: Synthetic oligonucleotide
augguuugugacauccuga

SEQ ID NO: 2383397 - RNA, 19 nt, Artificial Sequence
  Description of Artificial Sequence: Synthetic oligonucleotide
guguggcacacauauucca

SEQ ID NO: 2383398 - RNA, 19 nt, Artificial Sequence
  Description of Artificial Sequence: Synthetic oligonucleotide
ucuacacaauggcacccuu

SEQ ID NO: 2383399 - RNA, 19 nt, Artificial Sequence
  Description of Artificial Sequence: Synthetic oligonucleotide
ucaaggggaucuacacaau

SEQ ID NO: 2383400 - RNA, 19 nt, Artificial Sequence
  Description of Artificial Sequence: Synthetic oligonucleotide
aaacugggucaaggggauc

SEQ ID NO: 2383401 - RNA, 19 nt, Artificial Sequence
  Description of Artificial Sequence: Synthetic oligonucleotide
uuccugcuuucgaaaucug

SEQ ID NO: 2383402 - RNA, 19 nt, Artificial Sequence
  Description of Artificial Sequence: Synthetic oligonucleotide
acccuugugucugugcaug

SEQ ID NO: 2383403 - RNA, 19 nt, Artificial Sequence
  Description of Artificial Sequence: Synthetic oligonucleotide
ggaaaagggacguguggca

SEQ ID NO: 2383404 - RNA, 19 nt, Artificial Sequence
  Description of Artificial Sequence: Synthetic oligonucleotide
gugagagcggacaggggcc

SEQ ID NO: 2383405 - RNA, 19 nt, Artificial Sequence
  Description of Artificial Sequence: Synthetic oligonucleotide
uccaaggaaaagggacgug

SEQ ID NO: 2383406 - RNA, 19 nt, Artificial Sequence
  Description of Artificial Sequence: Synthetic oligonucleotide
cagacucgaugggaguugg

SEQ ID NO: 2383407 - RNA, 19 nt, Artificial Sequence
  Description of Artificial Sequence: Synthetic oligonucleotide
gccaauucauaugccacag

SEQ ID NO: 2383408 - RNA, 19 nt, Artificial Sequence
  Description of Artificial Sequence: Synthetic oligonucleotide
gggucaaggggaucuacac

SEQ ID NO: 2383409 - RNA, 19 nt, Artificial Sequence
  Description of Artificial Sequence: Synthetic oligonucleotide
ucacuccaugugagagcgg

SEQ ID NO: 2383410 - RNA, 19 nt, Artificial Sequence
  Description of Artificial Sequence: Synthetic oligonucleotide
caucucccacuaaucuuac

SEQ ID NO: 2383411 - RNA, 19 nt, Artificial Sequence
  Description of Artificial Sequence: Synthetic oligonucleotide
gcagagcucagacucgaug

SEQ ID NO: 2383412 - RNA, 19 nt, Artificial Sequence
  Description of Artificial Sequence: Synthetic oligonucleotide
agagcccuuuggaaacugg

SEQ ID NO: 2383413 - RNA, 19 nt, Artificial Sequence
  Description of Artificial Sequence: Synthetic oligonucleotide
ugagagcggacaggggccc

SEQ ID NO: 2383414 - RNA, 19 nt, Artificial Sequence
  Description of Artificial Sequence: Synthetic oligonucleotide
agcccuggcaucucccacu

SEQ ID NO: 2383415 - RNA, 19 nt, Artificial Sequence
  Description of Artificial Sequence: Synthetic oligonucleotide
cuuggggccugcucuggug

SEQ ID NO: 2383416 - RNA, 19 nt, Artificial Sequence
  Description of Artificial Sequence: Synthetic oligonucleotide
aagguacccuacagcagcu

SEQ ID NO: 2383417 - RNA, 19 nt, Artificial Sequence
  Description of Artificial Sequence: Synthetic oligonucleotide
ugugucugugcaugccaau

SEQ ID NO: 2383418 - RNA, 19 nt, Artificial Sequence
  Description of Artificial Sequence: Synthetic oligonucleotide
ucauuggcccgagggaggu

SEQ ID NO: 2383419 - RNA, 19 nt, Artificial Sequence
  Description of Artificial Sequence: Synthetic oligonucleotide
uggauggccuuguccuggc

SEQ ID NO: 2383420 - RNA, 19 nt, Artificial Sequence
  Description of Artificial Sequence: Synthetic oligonucleotide
aucuacacaauggcacccu

SEQ ID NO: 2383421 - RNA, 19 nt, Artificial Sequence
  Description of Artificial Sequence: Synthetic oligonucleotide
gcugcagacucuccacagg

SEQ ID NO: 2383422 - RNA, 19 nt, Artificial Sequence
  Description of Artificial Sequence: Synthetic oligonucleotide
gcagaaaugagcagagcuc

SEQ ID NO: 2383423 - RNA, 19 nt, Artificial Sequence
  Description of Artificial Sequence: Synthetic oligonucleotide
ggcauggagcaccaacagc

SEQ ID NO: 2383424 - RNA, 19 nt, Artificial Sequence
  Description of Artificial Sequence: Synthetic oligonucleotide
gguucugucucagugucca

SEQ ID NO: 2383425 - RNA, 19 nt, Artificial Sequence
  Description of Artificial Sequence: Synthetic oligonucleotide
auggccuuguccuggccau

SEQ ID NO: 2383426 - RNA, 19 nt, Artificial Sequence
  Description of Artificial Sequence: Synthetic oligonucleotide
cccacuaaucuuacuuccc

SEQ ID NO: 2383427 - RNA, 19 nt, Artificial Sequence
  Description of Artificial Sequence: Synthetic oligonucleotide
uugugacauccugagcuuc

SEQ ID NO: 2383428 - RNA, 19 nt, Artificial Sequence
  Description of Artificial Sequence: Synthetic oligonucleotide
gguuugugacauccugagc

SEQ ID NO: 2383429 - RNA, 19 nt, Artificial Sequence
  Description of Artificial Sequence: Synthetic oligonucleotide
agaacacaccgagggaggu

SEQ ID NO: 2383430 - RNA, 19 nt, Artificial Sequence
  Description of Artificial Sequence: Synthetic oligonucleotide
aucuagucuuggcaccaau

SEQ ID NO: 2383431 - RNA, 19 nt, Artificial Sequence
  Description of Artificial Sequence: Synthetic oligonucleotide
ggcugcagacucuccacag

SEQ ID NO: 2383432 - RNA, 19 nt, Artificial Sequence
  Description of Artificial Sequence: Synthetic oligonucleotide
gggcauggagcaccaacag

SEQ ID NO: 2383433 - RNA, 19 nt, Artificial Sequence
  Description of Artificial Sequence: Synthetic oligonucleotide
gggagcaacagaacacacc

SEQ ID NO: 2383434 - RNA, 19 nt, Artificial Sequence
  Description of Artificial Sequence: Synthetic oligonucleotide
accgagggagguuuccuuu

SEQ ID NO: 2383435 - RNA, 19 nt, Artificial Sequence
  Description of Artificial Sequence: Synthetic oligonucleotide
gcauggagcaccaacagcu

SEQ ID NO: 2383436 - RNA, 19 nt, Artificial Sequence
  Description of Artificial Sequence: Synthetic oligonucleotide
ggacguguggcacacauau

SEQ ID NO: 2383437 - RNA, 19 nt, Artificial Sequence
  Description of Artificial Sequence: Synthetic oligonucleotide
cacuccaugugagagcgga

SEQ ID NO: 2383438 - RNA, 19 nt, Artificial Sequence
  Description of Artificial Sequence: Synthetic oligonucleotide
caccaauuuugugcuuuag

SEQ ID NO: 2383439 - RNA, 19 nt, Artificial Sequence
  Description of Artificial Sequence: Synthetic oligonucleotide
cuccaugugagagcggaca

SEQ ID NO: 2383440 - RNA, 19 nt, Artificial Sequence
  Description of Artificial Sequence: Synthetic oligonucleotide
gcggacaggggcccgacag

SEQ ID NO: 2383441 - RNA, 19 nt, Artificial Sequence
  Description of Artificial Sequence: Synthetic oligonucleotide
ggucaaggggaucuacaca

SEQ ID NO: 2383442 - RNA, 19 nt, Artificial Sequence
  Description of Artificial Sequence: Synthetic oligonucleotide
gggguucugucucaguguc

SEQ ID NO: 2383443 - RNA, 19 nt, Artificial Sequence
  Description of Artificial Sequence: Synthetic oligonucleotide
uccugagcuucaucuggau

SEQ ID NO: 2383444 - RNA, 19 nt, Artificial Sequence
  Description of Artificial Sequence: Synthetic oligonucleotide
agcccuuuggaaacugggu

SEQ ID NO: 2383445 - RNA, 19 nt, Artificial Sequence
  Description of Artificial Sequence: Synthetic oligonucleotide
ccaauucauaugccacagg

SEQ ID NO: 2383446 - RNA, 19 nt, Artificial Sequence
  Description of Artificial Sequence: Synthetic oligonucleotide
uccuuggggccugcucugg

SEQ ID NO: 2383447 - RNA, 19 nt, Artificial Sequence
  Description of Artificial Sequence: Synthetic oligonucleotide
cugugcaugccaauucaua

SEQ ID NO: 2383448 - RNA, 19 nt, Artificial Sequence
  Description of Artificial Sequence: Synthetic oligonucleotide
gaggcuuucuuagaaguuu

SEQ ID NO: 2383449 - RNA, 19 nt, Artificial Sequence
  Description of Artificial Sequence: Synthetic oligonucleotide
caggguggggagcagcuca

SEQ ID NO: 2383450 - RNA, 19 nt, Artificial Sequence
  Description of Artificial Sequence: Synthetic oligonucleotide
gcagcucacuccaugugag

SEQ ID NO: 2383451 - RNA, 19 nt, Artificial Sequence
  Description of Artificial Sequence: Synthetic oligonucleotide
cuuuggaaacugggucaag

SEQ ID NO: 2383452 - RNA, 19 nt, Artificial Sequence
  Description of Artificial Sequence: Synthetic oligonucleotide
cuggagcccuggcaucucc

SEQ ID NO: 2383453 - RNA, 19 nt, Artificial Sequence
  Description of Artificial Sequence: Synthetic oligonucleotide
gacaggggcccgacagagg

SEQ ID NO: 2383454 - RNA, 19 nt, Artificial Sequence
  Description of Artificial Sequence: Synthetic oligonucleotide
ccgcuguuacuguuuaaag

SEQ ID NO: 2383455 - RNA, 19 nt, Artificial Sequence
  Description of Artificial Sequence: Synthetic oligonucleotide
gagcucagacucgauggga

SEQ ID NO: 2383456 - RNA, 19 nt, Artificial Sequence
  Description of Artificial Sequence: Synthetic oligonucleotide
aucucccacuaaucuuacu

SEQ ID NO: 2383457 - RNA, 19 nt, Artificial Sequence
  Description of Artificial Sequence: Synthetic oligonucleotide
cuucagccaguguugggaa

SEQ ID NO: 2383458 - RNA, 19 nt, Artificial Sequence
  Description of Artificial Sequence: Synthetic oligonucleotide
ucgaugggaguugguuucu

SEQ ID NO: 2383459 - RNA, 19 nt, Artificial Sequence
  Description of Artificial Sequence: Synthetic oligonucleotide
gagggagguccaaccuggg

SEQ ID NO: 2383460 - RNA, 19 nt, Artificial Sequence
  Description of Artificial Sequence: Synthetic oligonucleotide
uggccgcuguuacuguuua

SEQ ID NO: 2383461 - RNA, 19 nt, Artificial Sequence
  Description of Artificial Sequence: Synthetic oligonucleotide
cguguggcacacauauucc

SEQ ID NO: 2383462 - RNA, 19 nt, Artificial Sequence
  Description of Artificial Sequence: Synthetic oligonucleotide
gagcagagcucagacucga

SEQ ID NO: 2383463 - RNA, 19 nt, Artificial Sequence
  Description of Artificial Sequence: Synthetic oligonucleotide
ccaggcacucauuggcccg

SEQ ID NO: 2383464 - RNA, 19 nt, Artificial Sequence
  Description of Artificial Sequence: Synthetic oligonucleotide
uaucuagucuuggcaccaa

SEQ ID NO: 2383465 - RNA, 19 nt, Artificial Sequence
  Description of Artificial Sequence: Synthetic oligonucleotide
cacaccgagggagguuucc

SEQ ID NO: 2383466 - RNA, 19 nt, Artificial Sequence
  Description of Artificial Sequence: Synthetic oligonucleotide
gggagguccaaccuggggu

SEQ ID NO: 2383467 - RNA, 19 nt, Artificial Sequence
  Description of Artificial Sequence: Synthetic oligonucleotide
auccugagcuucaucugga

SEQ ID NO: 2383468 - RNA, 19 nt, Artificial Sequence
  Description of Artificial Sequence: Synthetic oligonucleotide
uacccuacagcagcugcuu

SEQ ID NO: 2383469 - RNA, 19 nt, Artificial Sequence
  Description of Artificial Sequence: Synthetic oligonucleotide
caggcauguccaaggaaaa

SEQ ID NO: 2383470 - RNA, 19 nt, Artificial Sequence
  Description of Artificial Sequence: Synthetic oligonucleotide
gaaacugggucaaggggau

SEQ ID NO: 2383471 - RNA, 19 nt, Artificial Sequence
  Description of Artificial Sequence: Synthetic oligonucleotide
gccaggcacucauuggccc

SEQ ID NO: 2383472 - RNA, 19 nt, Artificial Sequence
  Description of Artificial Sequence: Synthetic oligonucleotide
acaggguggggagcagcuc

SEQ ID NO: 2383473 - RNA, 19 nt, Artificial Sequence
  Description of Artificial Sequence: Synthetic oligonucleotide
augugagagcggacagggg

SEQ ID NO: 2383474 - RNA, 19 nt, Artificial Sequence
  Description of Artificial Sequence: Synthetic oligonucleotide
gagcuucaucuggauggcc

SEQ ID NO: 2383475 - RNA, 19 nt, Artificial Sequence
  Description of Artificial Sequence: Synthetic oligonucleotide
gcacccuugugucugugca

SEQ ID NO: 2383476 - RNA, 19 nt, Artificial Sequence
  Description of Artificial Sequence: Synthetic oligonucleotide
gcugcuuaaaacaaugcuu

SEQ ID NO: 2383477 - RNA, 19 nt, Artificial Sequence
  Description of Artificial Sequence: Synthetic oligonucleotide
cuguuacuguuuaaagaau

SEQ ID NO: 2383478 - RNA, 19 nt, Artificial Sequence
  Description of Artificial Sequence: Synthetic oligonucleotide
gugcagaaaugagcagagc

SEQ ID NO: 2383479 - RNA, 19 nt, Artificial Sequence
  Description of Artificial Sequence: Synthetic oligonucleotide
ccacuaaucuuacuuccca

SEQ ID NO: 2383480 - RNA, 19 nt, Artificial Sequence
  Description of Artificial Sequence: Synthetic oligonucleotide
uuuucuccuuggggccugc

SEQ ID NO: 2383481 - RNA, 19 nt, Artificial Sequence
  Description of Artificial Sequence: Synthetic oligonucleotide
gagcaacagaacacaccga

SEQ ID NO: 2383482 - RNA, 19 nt, Artificial Sequence
  Description of Artificial Sequence: Synthetic oligonucleotide
gguuuccuuucuaaaugga

SEQ ID NO: 2383483 - RNA, 19 nt, Artificial Sequence
  Description of Artificial Sequence: Synthetic oligonucleotide
cugggucaaggggaucuac

SEQ ID NO: 2383484 - RNA, 19 nt, Artificial Sequence
  Description of Artificial Sequence: Synthetic oligonucleotide
acaccgagggagguuuccu

SEQ ID NO: 2383485 - RNA, 19 nt, Artificial Sequence
  Description of Artificial Sequence: Synthetic oligonucleotide
gcaccaacagcuggcauca

SEQ ID NO: 2383486 - RNA, 19 nt, Artificial Sequence
  Description of Artificial Sequence: Synthetic oligonucleotide
gcaucucccacuaaucuua

SEQ ID NO: 2383487 - RNA, 19 nt, Artificial Sequence
  Description of Artificial Sequence: Synthetic oligonucleotide
gaugggaguugguuucuuu

SEQ ID NO: 2383488 - RNA, 19 nt, Artificial Sequence
  Description of Artificial Sequence: Synthetic oligonucleotide
gguggggagcagcucacuc

SEQ ID NO: 2383489 - RNA, 19 nt, Artificial Sequence
  Description of Artificial Sequence: Synthetic oligonucleotide
gacucuccacagggugggg

SEQ ID NO: 2383490 - RNA, 19 nt, Artificial Sequence
  Description of Artificial Sequence: Synthetic oligonucleotide
caguguccaugguuuguga

SEQ ID NO: 2383491 - RNA, 19 nt, Artificial Sequence
  Description of Artificial Sequence: Synthetic oligonucleotide
gagagcggacaggggcccg

SEQ ID NO: 2383492 - RNA, 19 nt, Artificial Sequence
  Description of Artificial Sequence: Synthetic oligonucleotide
cgcuguuacuguuuaaaga

SEQ ID NO: 2383493 - RNA, 19 nt, Artificial Sequence
  Description of Artificial Sequence: Synthetic oligonucleotide
uggggccugcucuggugcu

SEQ ID NO: 2383494 - RNA, 19 nt, Artificial Sequence
  Description of Artificial Sequence: Synthetic oligonucleotide
auauuccagggagguggca

SEQ ID NO: 2383495 - RNA, 19 nt, Artificial Sequence
  Description of Artificial Sequence: Synthetic oligonucleotide
gacucgaugggaguugguu

SEQ ID NO: 2383496 - RNA, 19 nt, Artificial Sequence
  Description of Artificial Sequence: Synthetic oligonucleotide
ggcacccuugugucugugc

SEQ ID NO: 2383497 - RNA, 19 nt, Artificial Sequence
  Description of Artificial Sequence: Synthetic oligonucleotide
uuggcccgagggaggucca

SEQ ID NO: 2383498 - RNA, 19 nt, Artificial Sequence
  Description of Artificial Sequence: Synthetic oligonucleotide
cagagcccuuuggaaacug

SEQ ID NO: 2383499 - RNA, 19 nt, Artificial Sequence
  Description of Artificial Sequence: Synthetic oligonucleotide
gccauuccugcuuucgaaa

SEQ ID NO: 2383500 - RNA, 19 nt, Artificial Sequence
  Description of Artificial Sequence: Synthetic oligonucleotide
cuacagcagcugcuuaaaa

SEQ ID NO: 2383501 - RNA, 19 nt, Artificial Sequence
  Description of Artificial Sequence: Synthetic oligonucleotide
agguccaaccugggguucu

SEQ ID NO: 2383502 - RNA, 19 nt, Artificial Sequence
  Description of Artificial Sequence: Synthetic oligonucleotide
ggccauuccugcuuucgaa

SEQ ID NO: 2383503 - RNA, 19 nt, Artificial Sequence
  Description of Artificial Sequence: Synthetic oligonucleotide
guccaaggaaaagggacgu

SEQ ID NO: 2383504 - RNA, 19 nt, Artificial Sequence
  Description of Artificial Sequence: Synthetic oligonucleotide
agguacccuacagcagcug

SEQ ID NO: 2383505 - RNA, 19 nt, Artificial Sequence
  Description of Artificial Sequence: Synthetic oligonucleotide
ggagcagcucacuccaugu

SEQ ID NO: 2383506 - RNA, 19 nt, Artificial Sequence
  Description of Artificial Sequence: Synthetic oligonucleotide
ggugcugaugcagagcccu

SEQ ID NO: 2383507 - RNA, 19 nt, Artificial Sequence
  Description of Artificial Sequence: Synthetic oligonucleotide
ccuugugucugugcaugcc

SEQ ID NO: 2383508 - RNA, 19 nt, Artificial Sequence
  Description of Artificial Sequence: Synthetic oligonucleotide
cccagguggcugcagacuc

SEQ ID NO: 2383509 - RNA, 19 nt, Artificial Sequence
  Description of Artificial Sequence: Synthetic oligonucleotide
gcccgagggagguccaacc

SEQ ID NO: 2383510 - RNA, 19 nt, Artificial Sequence
  Description of Artificial Sequence: Synthetic oligonucleotide
gccgcuguuacuguuuaaa

SEQ ID NO: 2383511 - RNA, 19 nt, Artificial Sequence
  Description of Artificial Sequence: Synthetic oligonucleotide
aggggcccgacagaggcuu

SEQ ID NO: 2383512 - RNA, 19 nt, Artificial Sequence
  Description of Artificial Sequence: Synthetic oligonucleotide
ccgagggagguccaaccug

SEQ ID NO: 2383513 - RNA, 19 nt, Artificial Sequence
  Description of Artificial Sequence: Synthetic oligonucleotide
acacaccgagggagguuuc

SEQ ID NO: 2383514 - RNA, 19 nt, Artificial Sequence
  Description of Artificial Sequence: Synthetic oligonucleotide
gagguccaaccugggguuc

SEQ ID NO: 2383515 - RNA, 19 nt, Artificial Sequence
  Description of Artificial Sequence: Synthetic oligonucleotide
cugcccuggagcccuggca

SEQ ID NO: 2383516 - RNA, 19 nt, Artificial Sequence
  Description of Artificial Sequence: Synthetic oligonucleotide
agagcggacaggggcccga

SEQ ID NO: 2383517 - RNA, 19 nt, Artificial Sequence
  Description of Artificial Sequence: Synthetic oligonucleotide
cccuugugucugugcaugc

SEQ ID NO: 2383518 - RNA, 19 nt, Artificial Sequence
  Description of Artificial Sequence: Synthetic oligonucleotide
ggggagcaacagaacacac

SEQ ID NO: 2383519 - RNA, 19 nt, Artificial Sequence
  Description of Artificial Sequence: Synthetic oligonucleotide
ggagcccuggcaucuccca

SEQ ID NO: 2383520 - RNA, 19 nt, Artificial Sequence
  Description of Artificial Sequence: Synthetic oligonucleotide
agcggacaggggcccgaca

SEQ ID NO: 2383521 - RNA, 19 nt, Artificial Sequence
  Description of Artificial Sequence: Synthetic oligonucleotide
guacccuacagcagcugcu

SEQ ID NO: 2383522 - RNA, 19 nt, Artificial Sequence
  Description of Artificial Sequence: Synthetic oligonucleotide
auggccgcuguuacuguuu

SEQ ID NO: 2383523 - RNA, 19 nt, Artificial Sequence
  Description of Artificial Sequence: Synthetic oligonucleotide
guccaugguuugugacauc

SEQ ID NO: 2383524 - RNA, 19 nt, Artificial Sequence
  Description of Artificial Sequence: Synthetic oligonucleotide
ccgagggagguuuccuuuc

SEQ ID NO: 2383525 - RNA, 19 nt, Artificial Sequence
  Description of Artificial Sequence: Synthetic oligonucleotide
uggcacccuugugucugug

SEQ ID NO: 2383526 - RNA, 19 nt, Artificial Sequence
  Description of Artificial Sequence: Synthetic oligonucleotide
gggaagggccuggaugcug

SEQ ID NO: 2383527 - RNA, 19 nt, Artificial Sequence
  Description of Artificial Sequence: Synthetic oligonucleotide
ggcaucucccacuaaucuu

SEQ ID NO: 2383528 - RNA, 19 nt, Artificial Sequence
  Description of Artificial Sequence: Synthetic oligonucleotide
cugguucagggaagggccu

SEQ ID NO: 2383529 - RNA, 19 nt, Artificial Sequence
  Description of Artificial Sequence: Synthetic oligonucleotide
acugggucaaggggaucua

SEQ ID NO: 2383530 - RNA, 19 nt, Artificial Sequence
  Description of Artificial Sequence: Synthetic oligonucleotide
cauaugccacaggcauguc

SEQ ID NO: 2383531 - RNA, 19 nt, Artificial Sequence
  Description of Artificial Sequence: Synthetic oligonucleotide
gccuuguccuggccauucc

SEQ ID NO: 2383532 - RNA, 19 nt, Artificial Sequence
  Description of Artificial Sequence: Synthetic oligonucleotide
aggcacucauuggcccgag

SEQ ID NO: 2383533 - RNA, 19 nt, Artificial Sequence
  Description of Artificial Sequence: Synthetic oligonucleotide
ggguucugucucagugucc

SEQ ID NO: 2383534 - RNA, 19 nt, Artificial Sequence
  Description of Artificial Sequence: Synthetic oligonucleotide
caauggcacccuugugucu

SEQ ID NO: 2383535 - RNA, 19 nt, Artificial Sequence
  Description of Artificial Sequence: Synthetic oligonucleotide
ggaguugguuucuuuucuu

SEQ ID NO: 2383536 - RNA, 19 nt, Artificial Sequence
  Description of Artificial Sequence: Synthetic oligonucleotide
gggagguggcaggugugug

SEQ ID NO: 2383537 - RNA, 19 nt, Artificial Sequence
  Description of Artificial Sequence: Synthetic oligonucleotide
caggcacucauuggcccga

SEQ ID NO: 2383538 - RNA, 19 nt, Artificial Sequence
  Description of Artificial Sequence: Synthetic oligonucleotide
ggagguccaaccugggguu

SEQ ID NO: 2383539 - RNA, 19 nt, Artificial Sequence
  Description of Artificial Sequence: Synthetic oligonucleotide
cccuacagcagcugcuuaa

SEQ ID NO: 2383540 - RNA, 19 nt, Artificial Sequence
  Description of Artificial Sequence: Synthetic oligonucleotide
agacucgaugggaguuggu

SEQ ID NO: 2383541 - RNA, 19 nt, Artificial Sequence
  Description of Artificial Sequence: Synthetic oligonucleotide
cccgacagaggcuuucuua

SEQ ID NO: 2383542 - RNA, 19 nt, Artificial Sequence
  Description of Artificial Sequence: Synthetic oligonucleotide
gcucuggugcugaugcaga

SEQ ID NO: 2383543 - RNA, 19 nt, Artificial Sequence
  Description of Artificial Sequence: Synthetic oligonucleotide
gcaccaauuuugugcuuua

SEQ ID NO: 2383544 - RNA, 19 nt, Artificial Sequence
  Description of Artificial Sequence: Synthetic oligonucleotide
cucagacucgaugggaguu

SEQ ID NO: 2383545 - RNA, 19 nt, Artificial Sequence
  Description of Artificial Sequence: Synthetic oligonucleotide
gagcggacaggggcccgac

SEQ ID NO: 2383546 - RNA, 19 nt, Artificial Sequence
  Description of Artificial Sequence: Synthetic oligonucleotide
gcuuucuuagaaguuuauu

SEQ ID NO: 2383547 - RNA, 19 nt, Artificial Sequence
  Description of Artificial Sequence: Synthetic oligonucleotide
gguccaaccugggguucug

SEQ ID NO: 2383548 - RNA, 19 nt, Artificial Sequence
  Description of Artificial Sequence: Synthetic oligonucleotide
agcagagcucagacucgau

SEQ ID NO: 2383549 - RNA, 19 nt, Artificial Sequence
  Description of Artificial Sequence: Synthetic oligonucleotide
ccuuuggaaacugggucaa

SEQ ID NO: 2383550 - RNA, 19 nt, Artificial Sequence
  Description of Artificial Sequence: Synthetic oligonucleotide
ccacaggcauguccaagga

SEQ ID NO: 2383551 - RNA, 19 nt, Artificial Sequence
  Description of Artificial Sequence: Synthetic oligonucleotide
gaacacaccgagggagguu

SEQ ID NO: 2383552 - RNA, 19 nt, Artificial Sequence
  Description of Artificial Sequence: Synthetic oligonucleotide
guccuggccauuccugcuu

SEQ ID NO: 2383553 - RNA, 19 nt, Artificial Sequence
  Description of Artificial Sequence: Synthetic oligonucleotide
gcucagacucgaugggagu

SEQ ID NO: 2383554 - RNA, 19 nt, Artificial Sequence
  Description of Artificial Sequence: Synthetic oligonucleotide
cauuggcccgagggagguc

SEQ ID NO: 2383555 - RNA, 19 nt, Artificial Sequence
  Description of Artificial Sequence: Synthetic oligonucleotide
ccuacagcagcugcuuaaa

SEQ ID NO: 2383556 - RNA, 19 nt, Artificial Sequence
  Description of Artificial Sequence: Synthetic oligonucleotide
ccauuccugcuuucgaaau

SEQ ID NO: 2383557 - RNA, 19 nt, Artificial Sequence
  Description of Artificial Sequence: Synthetic oligonucleotide
cacccuugugucugugcau

SEQ ID NO: 2383558 - RNA, 19 nt, Artificial Sequence
  Description of Artificial Sequence: Synthetic oligonucleotide
cugucucaguguccauggu

SEQ ID NO: 2383559 - RNA, 19 nt, Artificial Sequence
  Description of Artificial Sequence: Synthetic oligonucleotide
uggcccgagggagguccaa

SEQ ID NO: 2383560 - RNA, 19 nt, Artificial Sequence
  Description of Artificial Sequence: Synthetic oligonucleotide
guucugucucaguguccau

SEQ ID NO: 2383561 - RNA, 19 nt, Artificial Sequence
  Description of Artificial Sequence: Synthetic oligonucleotide
ggcccgagggagguccaac

SEQ ID NO: 2383562 - RNA, 19 nt, Artificial Sequence
  Description of Artificial Sequence: Synthetic oligonucleotide
gacguguggcacacauauu

SEQ ID NO: 2383563 - RNA, 19 nt, Artificial Sequence
  Description of Artificial Sequence: Synthetic oligonucleotide
ggggccugcucuggugcug

SEQ ID NO: 2383564 - RNA, 19 nt, Artificial Sequence
  Description of Artificial Sequence: Synthetic oligonucleotide
caccgagggagguuuccuu

SEQ ID NO: 2383565 - RNA, 19 nt, Artificial Sequence
  Description of Artificial Sequence: Synthetic oligonucleotide
gcccuggcaucucccacua

SEQ ID NO: 2383566 - RNA, 19 nt, Artificial Sequence
  Description of Artificial Sequence: Synthetic oligonucleotide
ggccgcuguuacuguuuaa

SEQ ID NO: 2383567 - RNA, 19 nt, Artificial Sequence
  Description of Artificial Sequence: Synthetic oligonucleotide
gggcccgacagaggcuuuc

SEQ ID NO: 2383568 - RNA, 19 nt, Artificial Sequence
  Description of Artificial Sequence: Synthetic oligonucleotide
caggggcccgacagaggcu

SEQ ID NO: 2383569 - RNA, 19 nt, Artificial Sequence
  Description of Artificial Sequence: Synthetic oligonucleotide
gggacguguggcacacaua

SEQ ID NO: 2383570 - RNA, 19 nt, Artificial Sequence
  Description of Artificial Sequence: Synthetic oligonucleotide
gcagagcccuuuggaaacu

SEQ ID NO: 2383571 - RNA, 19 nt, Artificial Sequence
  Description of Artificial Sequence: Synthetic oligonucleotide
cccgagggagguccaaccu

SEQ ID NO: 2383572 - RNA, 19 nt, Artificial Sequence
  Description of Artificial Sequence: Synthetic oligonucleotide
ccagguggcugcagacucu

SEQ ID NO: 2383573 - RNA, 19 nt, Artificial Sequence
  Description of Artificial Sequence: Synthetic oligonucleotide
ggcccgacagaggcuuucu

SEQ ID NO: 2383574 - RNA, 19 nt, Artificial Sequence
  Description of Artificial Sequence: Synthetic oligonucleotide
cgagggagguuuccuuucu

SEQ ID NO: 2383575 - RNA, 19 nt, Artificial Sequence
  Description of Artificial Sequence: Synthetic oligonucleotide
caccaacagcuggcaucaa

SEQ ID NO: 2383576 - RNA, 19 nt, Artificial Sequence
  Description of Artificial Sequence: Synthetic oligonucleotide
ccuuggggccugcucuggu

SEQ ID NO: 2383577 - RNA, 19 nt, Artificial Sequence
  Description of Artificial Sequence: Synthetic oligonucleotide
ggguggggagcagcucacu

SEQ ID NO: 2383578 - RNA, 19 nt, Artificial Sequence
  Description of Artificial Sequence: Synthetic oligonucleotide
gcccgacagaggcuuucuu

SEQ ID NO: 2383579 - RNA, 19 nt, Artificial Sequence
  Description of Artificial Sequence: Synthetic oligonucleotide
cccuggcaucucccacuaa

SEQ ID NO: 2383580 - RNA, 19 nt, Artificial Sequence
  Description of Artificial Sequence: Synthetic oligonucleotide
ggggagcagcucacuccau

SEQ ID NO: 2383581 - RNA, 19 nt, Artificial Sequence
  Description of Artificial Sequence: Synthetic oligonucleotide
  modified_base (1)..(1): a, c, u, g, unknown or other
  modified_base (6)..(6): a, c, u, g, unknown or other
nuuuunucuuacuuauuau

SEQ ID NO: 2383582 - RNA, 19 nt, Artificial Sequence
  Description of Artificial Sequence: Synthetic oligonucleotide
aaaugguuuauuuugucac

SEQ ID NO: 2383583 - RNA, 19 nt, Artificial Sequence
  Description of Artificial Sequence: Synthetic oligonucleotide
auucauaccauccauuccc

SEQ ID NO: 2383584 - RNA, 19 nt, Artificial Sequence
  Description of Artificial Sequence: Synthetic oligonucleotide
aaauucauaccauccauuc

SEQ ID NO: 2383585 - RNA, 19 nt, Artificial Sequence
  Description of Artificial Sequence: Synthetic oligonucleotide
aagcacacgacuucgaggg

SEQ ID NO: 2383586 - RNA, 19 nt, Artificial Sequence
  Description of Artificial Sequence: Synthetic oligonucleotide
aauucauaccauccauucc

SEQ ID NO: 2383587 - RNA, 19 nt, Artificial Sequence
  Description of Artificial Sequence: Synthetic oligonucleotide
agagauucgacgcaaagag

SEQ ID NO: 2383588 - RNA, 19 nt, Artificial Sequence
  Description of Artificial Sequence: Synthetic oligonucleotide
agucccaucaauuucuugg

SEQ ID NO: 2383589 - RNA, 19 nt, Artificial Sequence
  Description of Artificial Sequence: Synthetic oligonucleotide
auuucuuggacaucauagc

SEQ ID NO: 2383590 - RNA, 19 nt, Artificial Sequence
  Description of Artificial Sequence: Synthetic oligonucleotide
ucuaaauucauaccaucca

SEQ ID NO: 2383591 - RNA, 19 nt, Artificial Sequence
  Description of Artificial Sequence: Synthetic oligonucleotide
gucacuguggcuuuggccg

SEQ ID NO: 2383592 - RNA, 19 nt, Artificial Sequence
  Description of Artificial Sequence: Synthetic oligonucleotide
uuauagaccccucagcucu

SEQ ID NO: 2383593 - RNA, 19 nt, Artificial Sequence
  Description of Artificial Sequence: Synthetic oligonucleotide
uccaugaugguuauagacc

SEQ ID NO: 2383594 - RNA, 19 nt, Artificial Sequence
  Description of Artificial Sequence: Synthetic oligonucleotide
aucauagccagucacuuuc

SEQ ID NO: 2383595 - RNA, 19 nt, Artificial Sequence
  Description of Artificial Sequence: Synthetic oligonucleotide
uuucuuggacaucauagcc

SEQ ID NO: 2383596 - RNA, 19 nt, Artificial Sequence
  Description of Artificial Sequence: Synthetic oligonucleotide
cauuggaucuccuaggggc

SEQ ID NO: 2383597 - RNA, 19 nt, Artificial Sequence
  Description of Artificial Sequence: Synthetic oligonucleotide
ucuaccuuuggaaugccag

SEQ ID NO: 2383598 - RNA, 19 nt, Artificial Sequence
  Description of Artificial Sequence: Synthetic oligonucleotide
gaugagcaaagccaaaccc

SEQ ID NO: 2383599 - RNA, 19 nt, Artificial Sequence
  Description of Artificial Sequence: Synthetic oligonucleotide
gacagagacguccaggcgg

SEQ ID NO: 2383600 - RNA, 19 nt, Artificial Sequence
  Description of Artificial Sequence: Synthetic oligonucleotide
caauuuucugcccacauug

SEQ ID NO: 2383601 - RNA, 19 nt, Artificial Sequence
  Description of Artificial Sequence: Synthetic oligonucleotide
agauucgacgcaaagaggg

SEQ ID NO: 2383602 - RNA, 19 nt, Artificial Sequence
  Description of Artificial Sequence: Synthetic oligonucleotide
aacuucgugagagaagcac

SEQ ID NO: 2383603 - RNA, 19 nt, Artificial Sequence
  Description of Artificial Sequence: Synthetic oligonucleotide
aaagagggccuugagcgcc

SEQ ID NO: 2383604 - RNA, 19 nt, Artificial Sequence
  Description of Artificial Sequence: Synthetic oligonucleotide
aaugguuuauuuugucacu

SEQ ID NO: 2383605 - RNA, 19 nt, Artificial Sequence
  Description of Artificial Sequence: Synthetic oligonucleotide
agucuaaauucauaccauc

SEQ ID NO: 2383606 - RNA, 19 nt, Artificial Sequence
  Description of Artificial Sequence: Synthetic oligonucleotide
ucuggaaccauucuggcuu

SEQ ID NO: 2383607 - RNA, 19 nt, Artificial Sequence
  Description of Artificial Sequence: Synthetic oligonucleotide
uugagcgccgcuuugagga

SEQ ID NO: 2383608 - RNA, 19 nt, Artificial Sequence
  Description of Artificial Sequence: Synthetic oligonucleotide
agaaaugguuuauuuuguc

SEQ ID NO: 2383609 - RNA, 19 nt, Artificial Sequence
  Description of Artificial Sequence: Synthetic oligonucleotide
acucagucgggcuugcagc

SEQ ID NO: 2383610 - RNA, 19 nt, Artificial Sequence
  Description of Artificial Sequence: Synthetic oligonucleotide
guuuauuuugucacugugg

SEQ ID NO: 2383611 - RNA, 19 nt, Artificial Sequence
  Description of Artificial Sequence: Synthetic oligonucleotide
ugggagucuaaauucauac

SEQ ID NO: 2383612 - RNA, 19 nt, Artificial Sequence
  Description of Artificial Sequence: Synthetic oligonucleotide
gaaaugguuuauuuuguca

SEQ ID NO: 2383613 - RNA, 19 nt, Artificial Sequence
  Description of Artificial Sequence: Synthetic oligonucleotide
cucucuggaaccauucugg

SEQ ID NO: 2383614 - RNA, 19 nt, Artificial Sequence
  Description of Artificial Sequence: Synthetic oligonucleotide
uugaggaacuucgugagag

SEQ ID NO: 2383615 - RNA, 19 nt, Artificial Sequence
  Description of Artificial Sequence: Synthetic oligonucleotide
aauuuucugcccacauugc

SEQ ID NO: 2383616 - RNA, 19 nt, Artificial Sequence
  Description of Artificial Sequence: Synthetic oligonucleotide
gaagcacacgacuucgagg

SEQ ID NO: 2383617 - RNA, 19 nt, Artificial Sequence
  Description of Artificial Sequence: Synthetic oligonucleotide
acuggagucccuucaggcc

SEQ ID NO: 2383618 - RNA, 19 nt, Artificial Sequence
  Description of Artificial Sequence: Synthetic oligonucleotide
aaugccaggcucucccaac

SEQ ID NO: 2383619 - RNA, 19 nt, Artificial Sequence
  Description of Artificial Sequence: Synthetic oligonucleotide
uucuuggacaucauagcca

SEQ ID NO: 2383620 - RNA, 19 nt, Artificial Sequence
  Description of Artificial Sequence: Synthetic oligonucleotide
aaacccacugucccaggac

SEQ ID NO: 2383621 - RNA, 19 nt, Artificial Sequence
  Description of Artificial Sequence: Synthetic oligonucleotide
agaugucuucaucuccucc

SEQ ID NO: 2383622 - RNA, 19 nt, Artificial Sequence
  Description of Artificial Sequence: Synthetic oligonucleotide
ugaaguuuccucuggcuga

SEQ ID NO: 2383623 - RNA, 19 nt, Artificial Sequence
  Description of Artificial Sequence: Synthetic oligonucleotide
auugcuucucugcagccuc

SEQ ID NO: 2383624 - RNA, 19 nt, Artificial Sequence
  Description of Artificial Sequence: Synthetic oligonucleotide
uacagaugucuucaucucc

SEQ ID NO: 2383625 - RNA, 19 nt, Artificial Sequence
  Description of Artificial Sequence: Synthetic oligonucleotide
ucugccuuuacagaugucu

SEQ ID NO: 2383626 - RNA, 19 nt, Artificial Sequence
  Description of Artificial Sequence: Synthetic oligonucleotide
uccucuggcugaaaaggcg

SEQ ID NO: 2383627 - RNA, 19 nt, Artificial Sequence
  Description of Artificial Sequence: Synthetic oligonucleotide
agcauuggaucuccuaggg

SEQ ID NO: 2383628 - RNA, 19 nt, Artificial Sequence
  Description of Artificial Sequence: Synthetic oligonucleotide
ucgugagagaagcacacga

SEQ ID NO: 2383629 - RNA, 19 nt, Artificial Sequence
  Description of Artificial Sequence: Synthetic oligonucleotide
gacuucgagggacagagac

SEQ ID NO: 2383630 - RNA, 19 nt, Artificial Sequence
  Description of Artificial Sequence: Synthetic oligonucleotide
ucagucuccaugaugguua

SEQ ID NO: 2383631 - RNA, 19 nt, Artificial Sequence
  Description of Artificial Sequence: Synthetic oligonucleotide
uccagucccaucaauuucu

SEQ ID NO: 2383632 - RNA, 19 nt, Artificial Sequence
  Description of Artificial Sequence: Synthetic oligonucleotide
aaaaggcggcugcucaggg

SEQ ID NO: 2383633 - RNA, 19 nt, Artificial Sequence
  Description of Artificial Sequence: Synthetic oligonucleotide
agggccucacuccagcugc

SEQ ID NO: 2383634 - RNA, 19 nt, Artificial Sequence
  Description of Artificial Sequence: Synthetic oligonucleotide
auucgacgcaaagagggcc

SEQ ID NO: 2383635 - RNA, 19 nt, Artificial Sequence
  Description of Artificial Sequence: Synthetic oligonucleotide
augguuauagaccccucag

SEQ ID NO: 2383636 - RNA, 19 nt, Artificial Sequence
  Description of Artificial Sequence: Synthetic oligonucleotide
cuuuggccgacucagucgg

SEQ ID NO: 2383637 - RNA, 19 nt, Artificial Sequence
  Description of Artificial Sequence: Synthetic oligonucleotide
aggacuuuucuccuggcug

SEQ ID NO: 2383638 - RNA, 19 nt, Artificial Sequence
  Description of Artificial Sequence: Synthetic oligonucleotide
ugucugggagucuaaauuc

SEQ ID NO: 2383639 - RNA, 19 nt, Artificial Sequence
  Description of Artificial Sequence: Synthetic oligonucleotide
uggcuucccauucaggccc

SEQ ID NO: 2383640 - RNA, 19 nt, Artificial Sequence
  Description of Artificial Sequence: Synthetic oligonucleotide
ggagucuaaauucauacca

SEQ ID NO: 2383641 - RNA, 19 nt, Artificial Sequence
  Description of Artificial Sequence: Synthetic oligonucleotide
uaguguggggauuuggugu

SEQ ID NO: 2383642 - RNA, 19 nt, Artificial Sequence
  Description of Artificial Sequence: Synthetic oligonucleotide
gucuaaauucauaccaucc

SEQ ID NO: 2383643 - RNA, 19 nt, Artificial Sequence
  Description of Artificial Sequence: Synthetic oligonucleotide
uucucuucugcugagcccc

SEQ ID NO: 2383644 - RNA, 19 nt, Artificial Sequence
  Description of Artificial Sequence: Synthetic oligonucleotide
ugguuauagaccccucagc

SEQ ID NO: 2383645 - RNA, 19 nt, Artificial Sequence
  Description of Artificial Sequence: Synthetic oligonucleotide
aagaaaugguuuauuuugu

SEQ ID NO: 2383646 - RNA, 19 nt, Artificial Sequence
  Description of Artificial Sequence: Synthetic oligonucleotide
acgacuucgagggacagag

SEQ ID NO: 2383647 - RNA, 19 nt, Artificial Sequence
  Description of Artificial Sequence: Synthetic oligonucleotide
uguacaccuccccuggggc

SEQ ID NO: 2383648 - RNA, 19 nt, Artificial Sequence
  Description of Artificial Sequence: Synthetic oligonucleotide
agaagcacacgacuucgag

SEQ ID NO: 2383649 - RNA, 19 nt, Artificial Sequence
  Description of Artificial Sequence: Synthetic oligonucleotide
acauugcuucucugcagcc

SEQ ID NO: 2383650 - RNA, 19 nt, Artificial Sequence
  Description of Artificial Sequence: Synthetic oligonucleotide
cuaccuuuggaaugccagg

SEQ ID NO: 2383651 - RNA, 19 nt, Artificial Sequence
  Description of Artificial Sequence: Synthetic oligonucleotide
uucauaccauccauucccc

SEQ ID NO: 2383652 - RNA, 19 nt, Artificial Sequence
  Description of Artificial Sequence: Synthetic oligonucleotide
caugccaggaugagcaaag

SEQ ID NO: 2383653 - RNA, 19 nt, Artificial Sequence
  Description of Artificial Sequence: Synthetic oligonucleotide
ugagagaagcacacgacuu

SEQ ID NO: 2383654 - RNA, 19 nt, Artificial Sequence
  Description of Artificial Sequence: Synthetic oligonucleotide
auuggaucuccuaggggcc

SEQ ID NO: 2383655 - RNA, 19 nt, Artificial Sequence
  Description of Artificial Sequence: Synthetic oligonucleotide
ggaacuucgugagagaagc

SEQ ID NO: 2383656 - RNA, 19 nt, Artificial Sequence
  Description of Artificial Sequence: Synthetic oligonucleotide
cacauugcuucucugcagc

SEQ ID NO: 2383657 - RNA, 19 nt, Artificial Sequence
  Description of Artificial Sequence: Synthetic oligonucleotide
uguaucugcugcuucuccu

SEQ ID NO: 2383658 - RNA, 19 nt, Artificial Sequence
  Description of Artificial Sequence: Synthetic oligonucleotide
gcugcuguggcucaggagc

SEQ ID NO: 2383659 - RNA, 19 nt, Artificial Sequence
  Description of Artificial Sequence: Synthetic oligonucleotide
uuucugcccacauugcuuc

SEQ ID NO: 2383660 - RNA, 19 nt, Artificial Sequence
  Description of Artificial Sequence: Synthetic oligonucleotide
uuggacaucauagccaguc

SEQ ID NO: 2383661 - RNA, 19 nt, Artificial Sequence
  Description of Artificial Sequence: Synthetic oligonucleotide
auaccauccauuccccuca

SEQ ID NO: 2383662 - RNA, 19 nt, Artificial Sequence
  Description of Artificial Sequence: Synthetic oligonucleotide
gaugguuauagaccccuca

SEQ ID NO: 2383663 - RNA, 19 nt, Artificial Sequence
  Description of Artificial Sequence: Synthetic oligonucleotide
ccaugaugguuauagaccc

SEQ ID NO: 2383664 - RNA, 19 nt, Artificial Sequence
  Description of Artificial Sequence: Synthetic oligonucleotide
cuucgugagagaagcacac

SEQ ID NO: 2383665 - RNA, 19 nt, Artificial Sequence
  Description of Artificial Sequence: Synthetic oligonucleotide
gacucagucgggcuugcag

SEQ ID NO: 2383666 - RNA, 19 nt, Artificial Sequence
  Description of Artificial Sequence: Synthetic oligonucleotide
auagccagucacuuucucu

SEQ ID NO: 2383667 - RNA, 19 nt, Artificial Sequence
  Description of Artificial Sequence: Synthetic oligonucleotide
cuaguguggggauuuggug

SEQ ID NO: 2383668 - RNA, 19 nt, Artificial Sequence
  Description of Artificial Sequence: Synthetic oligonucleotide
agcucucucugucugggag

SEQ ID NO: 2383669 - RNA, 19 nt, Artificial Sequence
  Description of Artificial Sequence: Synthetic oligonucleotide
ucgagggacagagacgucc

SEQ ID NO: 2383670 - RNA, 19 nt, Artificial Sequence
  Description of Artificial Sequence: Synthetic oligonucleotide
uccuucugccuuuacagau

SEQ ID NO: 2383671 - RNA, 19 nt, Artificial Sequence
  Description of Artificial Sequence: Synthetic oligonucleotide
ggacuuuucuccuggcugg

SEQ ID NO: 2383672 - RNA, 19 nt, Artificial Sequence
  Description of Artificial Sequence: Synthetic oligonucleotide
uaccuuuggaaugccaggc

SEQ ID NO: 2383673 - RNA, 19 nt, Artificial Sequence
  Description of Artificial Sequence: Synthetic oligonucleotide
ucagcucucucugucuggg

SEQ ID NO: 2383674 - RNA, 19 nt, Artificial Sequence
  Description of Artificial Sequence: Synthetic oligonucleotide
agcagggccucacuccagc

SEQ ID NO: 2383675 - RNA, 19 nt, Artificial Sequence
  Description of Artificial Sequence: Synthetic oligonucleotide
cauaccauccauuccccuc

SEQ ID NO: 2383676 - RNA, 19 nt, Artificial Sequence
  Description of Artificial Sequence: Synthetic oligonucleotide
cagcauuggaucuccuagg

SEQ ID NO: 2383677 - RNA, 19 nt, Artificial Sequence
  Description of Artificial Sequence: Synthetic oligonucleotide
cacuggagucccuucaggc

SEQ ID NO: 2383678 - RNA, 19 nt, Artificial Sequence
  Description of Artificial Sequence: Synthetic oligonucleotide
gagauucgacgcaaagagg

SEQ ID NO: 2383679 - RNA, 19 nt, Artificial Sequence
  Description of Artificial Sequence: Synthetic oligonucleotide
gucaguucagggaagccag

SEQ ID NO: 2383680 - RNA, 19 nt, Artificial Sequence
  Description of Artificial Sequence: Synthetic oligonucleotide
gagagaagcacacgacuuc

SEQ ID NO: 2383681 - RNA, 19 nt, Artificial Sequence
  Description of Artificial Sequence: Synthetic oligonucleotide
ucucuggaaccauucuggc

SEQ ID NO: 2383682 - RNA, 19 nt, Artificial Sequence
  Description of Artificial Sequence: Synthetic oligonucleotide
cucucuaccuuuggaaugc

SEQ ID NO: 2383683 - RNA, 19 nt, Artificial Sequence
  Description of Artificial Sequence: Synthetic oligonucleotide
agcugcuguacaccucccc

SEQ ID NO: 2383684 - RNA, 19 nt, Artificial Sequence
  Description of Artificial Sequence: Synthetic oligonucleotide
aacagcauuggaucuccua

SEQ ID NO: 2383685 - RNA, 19 nt, Artificial Sequence
  Description of Artificial Sequence: Synthetic oligonucleotide
uucgacgcaaagagggccu

SEQ ID NO: 2383686 - RNA, 19 nt, Artificial Sequence
  Description of Artificial Sequence: Synthetic oligonucleotide
uuccccucauuccuucugc

SEQ ID NO: 2383687 - RNA, 19 nt, Artificial Sequence
  Description of Artificial Sequence: Synthetic oligonucleotide
uagccagucacuuucucuu

SEQ ID NO: 2383688 - RNA, 19 nt, Artificial Sequence
  Description of Artificial Sequence: Synthetic oligonucleotide
gagacguccaggcgggacc

SEQ ID NO: 2383689 - RNA, 19 nt, Artificial Sequence
  Description of Artificial Sequence: Synthetic oligonucleotide
ugguguaucugcugcuucu

SEQ ID NO: 2383690 - RNA, 19 nt, Artificial Sequence
  Description of Artificial Sequence: Synthetic oligonucleotide
uggacaucauagccaguca

SEQ ID NO: 2383691 - RNA, 19 nt, Artificial Sequence
  Description of Artificial Sequence: Synthetic oligonucleotide
guuauagaccccucagcuc

SEQ ID NO: 2383692 - RNA, 19 nt, Artificial Sequence
  Description of Artificial Sequence: Synthetic oligonucleotide
auuugguguaucugcugcu

SEQ ID NO: 2383693 - RNA, 19 nt, Artificial Sequence
  Description of Artificial Sequence: Synthetic oligonucleotide
caugaugguuauagacccc

SEQ ID NO: 2383694 - RNA, 19 nt, Artificial Sequence
  Description of Artificial Sequence: Synthetic oligonucleotide
uggcugaaaaggcggcugc

SEQ ID NO: 2383695 - RNA, 19 nt, Artificial Sequence
  Description of Artificial Sequence: Synthetic oligonucleotide
ucugggagucuaaauucau

SEQ ID NO: 2383696 - RNA, 19 nt, Artificial Sequence
  Description of Artificial Sequence: Synthetic oligonucleotide
agggucauugcugcugugg

SEQ ID NO: 2383697 - RNA, 19 nt, Artificial Sequence
  Description of Artificial Sequence: Synthetic oligonucleotide
uucgugagagaagcacacg

SEQ ID NO: 2383698 - RNA, 19 nt, Artificial Sequence
  Description of Artificial Sequence: Synthetic oligonucleotide
aguuuccucuggcugaaaa

SEQ ID NO: 2383699 - RNA, 19 nt, Artificial Sequence
  Description of Artificial Sequence: Synthetic oligonucleotide
caaagagggccuugagcgc

SEQ ID NO: 2383700 - RNA, 19 nt, Artificial Sequence
  Description of Artificial Sequence: Synthetic oligonucleotide
gccgcuuugaggaacuucg

SEQ ID NO: 2383701 - RNA, 19 nt, Artificial Sequence
  Description of Artificial Sequence: Synthetic oligonucleotide
uuccuucugccuuuacaga

SEQ ID NO: 2383702 - RNA, 19 nt, Artificial Sequence
  Description of Artificial Sequence: Synthetic oligonucleotide
ucugucugggagucuaaau

SEQ ID NO: 2383703 - RNA, 19 nt, Artificial Sequence
  Description of Artificial Sequence: Synthetic oligonucleotide
ugccuuuacagaugucuuc

SEQ ID NO: 2383704 - RNA, 19 nt, Artificial Sequence
  Description of Artificial Sequence: Synthetic oligonucleotide
gauucgacgcaaagagggc

SEQ ID NO: 2383705 - RNA, 19 nt, Artificial Sequence
  Description of Artificial Sequence: Synthetic oligonucleotide
ucauagccagucacuuucu

SEQ ID NO: 2383706 - RNA, 19 nt, Artificial Sequence
  Description of Artificial Sequence: Synthetic oligonucleotide
ucuccaugaugguuauaga

SEQ ID NO: 2383707 - RNA, 19 nt, Artificial Sequence
  Description of Artificial Sequence: Synthetic oligonucleotide
aaaggcggcugcucaggga

SEQ ID NO: 2383708 - RNA, 19 nt, Artificial Sequence
  Description of Artificial Sequence: Synthetic oligonucleotide
ugaggaacuucgugagaga

SEQ ID NO: 2383709 - RNA, 19 nt, Artificial Sequence
  Description of Artificial Sequence: Synthetic oligonucleotide
acuucgagggacagagacg

SEQ ID NO: 2383710 - RNA, 19 nt, Artificial Sequence
  Description of Artificial Sequence: Synthetic oligonucleotide
uccccuggggcacuuggug

SEQ ID NO: 2383711 - RNA, 19 nt, Artificial Sequence
  Description of Artificial Sequence: Synthetic oligonucleotide
auuccccucauuccuucug

SEQ ID NO: 2383712 - RNA, 19 nt, Artificial Sequence
  Description of Artificial Sequence: Synthetic oligonucleotide
ucccaucaauuucuuggac

SEQ ID NO: 2383713 - RNA, 19 nt, Artificial Sequence
  Description of Artificial Sequence: Synthetic oligonucleotide
cucccaacucccucucugg

SEQ ID NO: 2383714 - RNA, 19 nt, Artificial Sequence
  Description of Artificial Sequence: Synthetic oligonucleotide
cacuuagcucugaaguuuc

SEQ ID NO: 2383715 - RNA, 19 nt, Artificial Sequence
  Description of Artificial Sequence: Synthetic oligonucleotide
acagagacguccaggcggg

SEQ ID NO: 2383716 - RNA, 19 nt, Artificial Sequence
  Description of Artificial Sequence: Synthetic oligonucleotide
gggagucuaaauucauacc

SEQ ID NO: 2383717 - RNA, 19 nt, Artificial Sequence
  Description of Artificial Sequence: Synthetic oligonucleotide
uugguguaucugcugcuuc

SEQ ID NO: 2383718 - RNA, 19 nt, Artificial Sequence
  Description of Artificial Sequence: Synthetic oligonucleotide
agggacagagacguccagg

SEQ ID NO: 2383719 - RNA, 19 nt, Artificial Sequence
  Description of Artificial Sequence: Synthetic oligonucleotide
gcuuuggccgacucagucg

SEQ ID NO: 2383720 - RNA, 19 nt, Artificial Sequence
  Description of Artificial Sequence: Synthetic oligonucleotide
gaccccucagcucucucug

SEQ ID NO: 2383721 - RNA, 19 nt, Artificial Sequence
  Description of Artificial Sequence: Synthetic oligonucleotide
uugucacuguggcuuuggc

SEQ ID NO: 2383722 - RNA, 19 nt, Artificial Sequence
  Description of Artificial Sequence: Synthetic oligonucleotide
guggcacuuagcucugaag

SEQ ID NO: 2383723 - RNA, 19 nt, Artificial Sequence
  Description of Artificial Sequence: Synthetic oligonucleotide
gguuauagaccccucagcu

SEQ ID NO: 2383724 - RNA, 19 nt, Artificial Sequence
  Description of Artificial Sequence: Synthetic oligonucleotide
uguggcacuuagcucugaa

SEQ ID NO: 2383725 - RNA, 19 nt, Artificial Sequence
  Description of Artificial Sequence: Synthetic oligonucleotide
uccuaggggccccucaguc

SEQ ID NO: 2383726 - RNA, 19 nt, Artificial Sequence
  Description of Artificial Sequence: Synthetic oligonucleotide
cucagucaguucagggaag

SEQ ID NO: 2383727 - RNA, 19 nt, Artificial Sequence
  Description of Artificial Sequence: Synthetic oligonucleotide
cagucacuuucucuucugc

SEQ ID NO: 2383728 - RNA, 19 nt, Artificial Sequence
  Description of Artificial Sequence: Synthetic oligonucleotide
cucagcucucucugucugg

SEQ ID NO: 2383729 - RNA, 19 nt, Artificial Sequence
  Description of Artificial Sequence: Synthetic oligonucleotide
agacguccaggcgggaccc

SEQ ID NO: 2383730 - RNA, 19 nt, Artificial Sequence
  Description of Artificial Sequence: Synthetic oligonucleotide
aguguggggauuuggugua

SEQ ID NO: 2383731 - RNA, 19 nt, Artificial Sequence
  Description of Artificial Sequence: Synthetic oligonucleotide
acuucgugagagaagcaca

SEQ ID NO: 2383732 - RNA, 19 nt, Artificial Sequence
  Description of Artificial Sequence: Synthetic oligonucleotide
ucgggcuugcagcuccugc

SEQ ID NO: 2383733 - RNA, 19 nt, Artificial Sequence
  Description of Artificial Sequence: Synthetic oligonucleotide
cuaggggccccucagucuc

SEQ ID NO: 2383734 - RNA, 19 nt, Artificial Sequence
  Description of Artificial Sequence: Synthetic oligonucleotide
cccugagccaauuuucugc

SEQ ID NO: 2383735 - RNA, 19 nt, Artificial Sequence
  Description of Artificial Sequence: Synthetic oligonucleotide
agagacguccaggcgggac

SEQ ID NO: 2383736 - RNA, 19 nt, Artificial Sequence
  Description of Artificial Sequence: Synthetic oligonucleotide
agcagcgccuccuggguug

SEQ ID NO: 2383737 - RNA, 19 nt, Artificial Sequence
  Description of Artificial Sequence: Synthetic oligonucleotide
acugucccaggacuuuucu

SEQ ID NO: 2383738 - RNA, 19 nt, Artificial Sequence
  Description of Artificial Sequence: Synthetic oligonucleotide
guguaucugcugcuucucc

SEQ ID NO: 2383739 - RNA, 19 nt, Artificial Sequence
  Description of Artificial Sequence: Synthetic oligonucleotide
cugaaaaggcggcugcuca

SEQ ID NO: 2383740 - RNA, 19 nt, Artificial Sequence
  Description of Artificial Sequence: Synthetic oligonucleotide
ggacaucauagccagucac

SEQ ID NO: 2383741 - RNA, 19 nt, Artificial Sequence
  Description of Artificial Sequence: Synthetic oligonucleotide
ucccauucaggcccuuccu

SEQ ID NO: 2383742 - RNA, 19 nt, Artificial Sequence
  Description of Artificial Sequence: Synthetic oligonucleotide
gucccaucaauuucuugga

SEQ ID NO: 2383743 - RNA, 19 nt, Artificial Sequence
  Description of Artificial Sequence: Synthetic oligonucleotide
ucccaacucccucucugga

SEQ ID NO: 2383744 - RNA, 19 nt, Artificial Sequence
  Description of Artificial Sequence: Synthetic oligonucleotide
ccugagccaauuuucugcc

SEQ ID NO: 2383745 - RNA, 19 nt, Artificial Sequence
  Description of Artificial Sequence: Synthetic oligonucleotide
uuuggccgacucagucggg

SEQ ID NO: 2383746 - RNA, 19 nt, Artificial Sequence
  Description of Artificial Sequence: Synthetic oligonucleotide
ugaugguuauagaccccuc

SEQ ID NO: 2383747 - RNA, 19 nt, Artificial Sequence
  Description of Artificial Sequence: Synthetic oligonucleotide
gaggaacuucgugagagaa

SEQ ID NO: 2383748 - RNA, 19 nt, Artificial Sequence
  Description of Artificial Sequence: Synthetic oligonucleotide
ucccucucuggaaccauuc

SEQ ID NO: 2383749 - RNA, 19 nt, Artificial Sequence
  Description of Artificial Sequence: Synthetic oligonucleotide
gcagagauucgacgcaaag

SEQ ID NO: 2383750 - RNA, 19 nt, Artificial Sequence
  Description of Artificial Sequence: Synthetic oligonucleotide
cugcuguacaccuccccug

SEQ ID NO: 2383751 - RNA, 19 nt, Artificial Sequence
  Description of Artificial Sequence: Synthetic oligonucleotide
agaccccucagcucucucu

SEQ ID NO: 2383752 - RNA, 19 nt, Artificial Sequence
  Description of Artificial Sequence: Synthetic oligonucleotide
aggaacuucgugagagaag

SEQ ID NO: 2383753 - RNA, 19 nt, Artificial Sequence
  Description of Artificial Sequence: Synthetic oligonucleotide
gugagagaagcacacgacu

SEQ ID NO: 2383754 - RNA, 19 nt, Artificial Sequence
  Description of Artificial Sequence: Synthetic oligonucleotide
uuugguguaucugcugcuu

SEQ ID NO: 2383755 - RNA, 19 nt, Artificial Sequence
  Description of Artificial Sequence: Synthetic oligonucleotide
caacucccucucuggaacc

SEQ ID NO: 2383756 - RNA, 19 nt, Artificial Sequence
  Description of Artificial Sequence: Synthetic oligonucleotide
ucauugcugcuguggcuca

SEQ ID NO: 2383757 - RNA, 19 nt, Artificial Sequence
  Description of Artificial Sequence: Synthetic oligonucleotide
gcauuggaucuccuagggg

SEQ ID NO: 2383758 - RNA, 19 nt, Artificial Sequence
  Description of Artificial Sequence: Synthetic oligonucleotide
cuuguggcacuuagcucug

SEQ ID NO: 2383759 - RNA, 19 nt, Artificial Sequence
  Description of Artificial Sequence: Synthetic oligonucleotide
cagagauucgacgcaaaga

SEQ ID NO: 2383760 - RNA, 19 nt, Artificial Sequence
  Description of Artificial Sequence: Synthetic oligonucleotide
uauagaccccucagcucuc

SEQ ID NO: 2383761 - RNA, 19 nt, Artificial Sequence
  Description of Artificial Sequence: Synthetic oligonucleotide
ccagcugcuguacaccucc

SEQ ID NO: 2383762 - RNA, 19 nt, Artificial Sequence
  Description of Artificial Sequence: Synthetic oligonucleotide
uuggccgacucagucgggc

SEQ ID NO: 2383763 - RNA, 19 nt, Artificial Sequence
  Description of Artificial Sequence: Synthetic oligonucleotide
aacucccucucuggaacca

SEQ ID NO: 2383764 - RNA, 19 nt, Artificial Sequence
  Description of Artificial Sequence: Synthetic oligonucleotide
gggucauugcugcuguggc

SEQ ID NO: 2383765 - RNA, 19 nt, Artificial Sequence
  Description of Artificial Sequence: Synthetic oligonucleotide
ggccucagucaguucaggg

SEQ ID NO: 2383766 - RNA, 19 nt, Artificial Sequence
  Description of Artificial Sequence: Synthetic oligonucleotide
cuccucucuaccuuuggaa

SEQ ID NO: 2383767 - RNA, 19 nt, Artificial Sequence
  Description of Artificial Sequence: Synthetic oligonucleotide
ucacuccagcugcuguaca

SEQ ID NO: 2383768 - RNA, 19 nt, Artificial Sequence
  Description of Artificial Sequence: Synthetic oligonucleotide
aagagggccuugagcgccg

SEQ ID NO: 2383769 - RNA, 19 nt, Artificial Sequence
  Description of Artificial Sequence: Synthetic oligonucleotide
agccaaacccacuguccca

SEQ ID NO: 2383770 - RNA, 19 nt, Artificial Sequence
  Description of Artificial Sequence: Synthetic oligonucleotide
gagggacagagacguccag

SEQ ID NO: 2383771 - RNA, 19 nt, Artificial Sequence
  Description of Artificial Sequence: Synthetic oligonucleotide
gccaggcacagcuagugug

SEQ ID NO: 2383772 - RNA, 19 nt, Artificial Sequence
  Description of Artificial Sequence: Synthetic oligonucleotide
gggacugggagggucauug

SEQ ID NO: 2383773 - RNA, 19 nt, Artificial Sequence
  Description of Artificial Sequence: Synthetic oligonucleotide
acgcaaagagggccuugag

SEQ ID NO: 2383774 - RNA, 19 nt, Artificial Sequence
  Description of Artificial Sequence: Synthetic oligonucleotide
ggacagagacguccaggcg

SEQ ID NO: 2383775 - RNA, 19 nt, Artificial Sequence
  Description of Artificial Sequence: Synthetic oligonucleotide
gacaucauagccagucacu

SEQ ID NO: 2383776 - RNA, 19 nt, Artificial Sequence
  Description of Artificial Sequence: Synthetic oligonucleotide
ccaggcgggacccagggag

SEQ ID NO: 2383777 - RNA, 19 nt, Artificial Sequence
  Description of Artificial Sequence: Synthetic oligonucleotide
cauagccagucacuuucuc

SEQ ID NO: 2383778 - RNA, 19 nt, Artificial Sequence
  Description of Artificial Sequence: Synthetic oligonucleotide
gacgcaaagagggccuuga

SEQ ID NO: 2383779 - RNA, 19 nt, Artificial Sequence
  Description of Artificial Sequence: Synthetic oligonucleotide
gacuuuucuccuggcuggc

SEQ ID NO: 2383780 - RNA, 19 nt, Artificial Sequence
  Description of Artificial Sequence: Synthetic oligonucleotide
ucagggagcagcgccuccu

SEQ ID NO: 2383781 - RNA, 19 nt, Artificial Sequence
  Description of Artificial Sequence: Synthetic oligonucleotide
gucugggagucuaaauuca

SEQ ID NO: 2383782 - RNA, 19 nt, Artificial Sequence
  Description of Artificial Sequence: Synthetic oligonucleotide
ccuuguggcacuuagcucu

SEQ ID NO: 2383783 - RNA, 19 nt, Artificial Sequence
  Description of Artificial Sequence: Synthetic oligonucleotide
uuggaaugccaggcucucc

SEQ ID NO: 2383784 - RNA, 19 nt, Artificial Sequence
  Description of Artificial Sequence: Synthetic oligonucleotide
ccaacucccucucuggaac

SEQ ID NO: 2383785 - RNA, 19 nt, Artificial Sequence
  Description of Artificial Sequence: Synthetic oligonucleotide
cagaugucuucaucuccuc

SEQ ID NO: 2383786 - RNA, 19 nt, Artificial Sequence
  Description of Artificial Sequence: Synthetic oligonucleotide
cucacuccagcugcuguac

SEQ ID NO: 2383787 - RNA, 19 nt, Artificial Sequence
  Description of Artificial Sequence: Synthetic oligonucleotide
ccucucuaccuuuggaaug

SEQ ID NO: 2383788 - RNA, 19 nt, Artificial Sequence
  Description of Artificial Sequence: Synthetic oligonucleotide
gagucuaaauucauaccau

SEQ ID NO: 2383789 - RNA, 19 nt, Artificial Sequence
  Description of Artificial Sequence: Synthetic oligonucleotide
ucucuaccuuuggaaugcc

SEQ ID NO: 2383790 - RNA, 19 nt, Artificial Sequence
  Description of Artificial Sequence: Synthetic oligonucleotide
gacugggagggucauugcu

SEQ ID NO: 2383791 - RNA, 19 nt, Artificial Sequence
  Description of Artificial Sequence: Synthetic oligonucleotide
gcccacauugcuucucugc

SEQ ID NO: 2383792 - RNA, 19 nt, Artificial Sequence
  Description of Artificial Sequence: Synthetic oligonucleotide
gaaguuuccucuggcugaa

SEQ ID NO: 2383793 - RNA, 19 nt, Artificial Sequence
  Description of Artificial Sequence: Synthetic oligonucleotide
cccaucaauuucuuggaca

SEQ ID NO: 2383794 - RNA, 19 nt, Artificial Sequence
  Description of Artificial Sequence: Synthetic oligonucleotide
ucucugucugggagucuaa

SEQ ID NO: 2383795 - RNA, 19 nt, Artificial Sequence
  Description of Artificial Sequence: Synthetic oligonucleotide
ggcacuggagucccuucag

SEQ ID NO: 2383796 - RNA, 19 nt, Artificial Sequence
  Description of Artificial Sequence: Synthetic oligonucleotide
ccucucuggaaccauucug

SEQ ID NO: 2383797 - RNA, 19 nt, Artificial Sequence
  Description of Artificial Sequence: Synthetic oligonucleotide
cagucccaucaauuucuug

SEQ ID NO: 2383798 - RNA, 19 nt, Artificial Sequence
  Description of Artificial Sequence: Synthetic oligonucleotide
ugcccacauugcuucucug

SEQ ID NO: 2383799 - RNA, 19 nt, Artificial Sequence
  Description of Artificial Sequence: Synthetic oligonucleotide
gccuuuacagaugucuuca

SEQ ID NO: 2383800 - RNA, 19 nt, Artificial Sequence
  Description of Artificial Sequence: Synthetic oligonucleotide
uggggcacuugguguggcc

SEQ ID NO: 2383801 - RNA, 19 nt, Artificial Sequence
  Description of Artificial Sequence: Synthetic oligonucleotide
ggcacagcuagugugggga

SEQ ID NO: 2383802 - RNA, 19 nt, Artificial Sequence
  Description of Artificial Sequence: Synthetic oligonucleotide
agccaggcacagcuagugu

SEQ ID NO: 2383803 - RNA, 19 nt, Artificial Sequence
  Description of Artificial Sequence: Synthetic oligonucleotide
cagucaguucagggaagcc

SEQ ID NO: 2383804 - RNA, 19 nt, Artificial Sequence
  Description of Artificial Sequence: Synthetic oligonucleotide
ccuucugccuuuacagaug

SEQ ID NO: 2383805 - RNA, 19 nt, Artificial Sequence
  Description of Artificial Sequence: Synthetic oligonucleotide
uguggggauuugguguauc

SEQ ID NO: 2383806 - RNA, 19 nt, Artificial Sequence
  Description of Artificial Sequence: Synthetic oligonucleotide
cacacgacuucgagggaca

SEQ ID NO: 2383807 - RNA, 19 nt, Artificial Sequence
  Description of Artificial Sequence: Synthetic oligonucleotide
caaacccacugucccagga

SEQ ID NO: 2383808 - RNA, 19 nt, Artificial Sequence
  Description of Artificial Sequence: Synthetic oligonucleotide
agcgccuccuggguugggg

SEQ ID NO: 2383809 - RNA, 19 nt, Artificial Sequence
  Description of Artificial Sequence: Synthetic oligonucleotide
cagggccucacuccagcug

SEQ ID NO: 2383810 - RNA, 19 nt, Artificial Sequence
  Description of Artificial Sequence: Synthetic oligonucleotide
ccugagcccucccucagcc

SEQ ID NO: 2383811 - RNA, 19 nt, Artificial Sequence
  Description of Artificial Sequence: Synthetic oligonucleotide
cugucugggagucuaaauu

SEQ ID NO: 2383812 - RNA, 19 nt, Artificial Sequence
  Description of Artificial Sequence: Synthetic oligonucleotide
ggcuuuggccgacucaguc

SEQ ID NO: 2383813 - RNA, 19 nt, Artificial Sequence
  Description of Artificial Sequence: Synthetic oligonucleotide
cuucugccuuuacagaugu

SEQ ID NO: 2383814 - RNA, 19 nt, Artificial Sequence
  Description of Artificial Sequence: Synthetic oligonucleotide
cuggagucccuucaggccu

SEQ ID NO: 2383815 - RNA, 19 nt, Artificial Sequence
  Description of Artificial Sequence: Synthetic oligonucleotide
uucugcccacauugcuucu

SEQ ID NO: 2383816 - RNA, 19 nt, Artificial Sequence
  Description of Artificial Sequence: Synthetic oligonucleotide
ugccaggcucucccaacuc

SEQ ID NO: 2383817 - RNA, 19 nt, Artificial Sequence
  Description of Artificial Sequence: Synthetic oligonucleotide
ggccuuguggcacuuagcu

SEQ ID NO: 2383818 - RNA, 19 nt, Artificial Sequence
  Description of Artificial Sequence: Synthetic oligonucleotide
uggccgacucagucgggcu

SEQ ID NO: 2383819 - RNA, 19 nt, Artificial Sequence
  Description of Artificial Sequence: Synthetic oligonucleotide
ccacauugcuucucugcag

SEQ ID NO: 2383820 - RNA, 19 nt, Artificial Sequence
  Description of Artificial Sequence: Synthetic oligonucleotide
gccaaacccacugucccag

SEQ ID NO: 2383821 - RNA, 19 nt, Artificial Sequence
  Description of Artificial Sequence: Synthetic oligonucleotide
cgcaaagagggccuugagc

SEQ ID NO: 2383822 - RNA, 19 nt, Artificial Sequence
  Description of Artificial Sequence: Synthetic oligonucleotide
cucuaccuuuggaaugcca

SEQ ID NO: 2383823 - RNA, 19 nt, Artificial Sequence
  Description of Artificial Sequence: Synthetic oligonucleotide
gccaggcucucccaacucc

SEQ ID NO: 2383824 - RNA, 19 nt, Artificial Sequence
  Description of Artificial Sequence: Synthetic oligonucleotide
uccaggcgggacccaggga

SEQ ID NO: 2383825 - RNA, 19 nt, Artificial Sequence
  Description of Artificial Sequence: Synthetic oligonucleotide
gagggucauugcugcugug

SEQ ID NO: 2383826 - RNA, 19 nt, Artificial Sequence
  Description of Artificial Sequence: Synthetic oligonucleotide
gaacuucgugagagaagca

SEQ ID NO: 2383827 - RNA, 19 nt, Artificial Sequence
  Description of Artificial Sequence: Synthetic oligonucleotide
acacgacuucgagggacag

SEQ ID NO: 2383828 - RNA, 19 nt, Artificial Sequence
  Description of Artificial Sequence: Synthetic oligonucleotide
cuggcacuggagucccuuc

SEQ ID NO: 2383829 - RNA, 19 nt, Artificial Sequence
  Description of Artificial Sequence: Synthetic oligonucleotide
ugagcgccgcuuugaggaa

SEQ ID NO: 2383830 - RNA, 19 nt, Artificial Sequence
  Description of Artificial Sequence: Synthetic oligonucleotide
agcacacgacuucgaggga

SEQ ID NO: 2383831 - RNA, 19 nt, Artificial Sequence
  Description of Artificial Sequence: Synthetic oligonucleotide
agccaauuuucugcccaca

SEQ ID NO: 2383832 - RNA, 19 nt, Artificial Sequence
  Description of Artificial Sequence: Synthetic oligonucleotide
uggagucccuucaggccuu

SEQ ID NO: 2383833 - RNA, 19 nt, Artificial Sequence
  Description of Artificial Sequence: Synthetic oligonucleotide
guggggauuugguguaucu

SEQ ID NO: 2383834 - RNA, 19 nt, Artificial Sequence
  Description of Artificial Sequence: Synthetic oligonucleotide
gcuguacaccuccccuggg

SEQ ID NO: 2383835 - RNA, 19 nt, Artificial Sequence
  Description of Artificial Sequence: Synthetic oligonucleotide
ggaaccauucuggcuuccc

SEQ ID NO: 2383836 - RNA, 19 nt, Artificial Sequence
  Description of Artificial Sequence: Synthetic oligonucleotide
agagggccuugagcgccgc

SEQ ID NO: 2383837 - RNA, 19 nt, Artificial Sequence
  Description of Artificial Sequence: Synthetic oligonucleotide
cucuggaaccauucuggcu

SEQ ID NO: 2383838 - RNA, 19 nt, Artificial Sequence
  Description of Artificial Sequence: Synthetic oligonucleotide
auagaccccucagcucucu

SEQ ID NO: 2383839 - RNA, 19 nt, Artificial Sequence
  Description of Artificial Sequence: Synthetic oligonucleotide
cagcugcuguacaccuccc

SEQ ID NO: 2383840 - RNA, 19 nt, Artificial Sequence
  Description of Artificial Sequence: Synthetic oligonucleotide
ccaucaauuucuuggacau

SEQ ID NO: 2383841 - RNA, 19 nt, Artificial Sequence
  Description of Artificial Sequence: Synthetic oligonucleotide
gcacacgacuucgagggac

SEQ ID NO: 2383842 - RNA, 19 nt, Artificial Sequence
  Description of Artificial Sequence: Synthetic oligonucleotide
cucagucgggcuugcagcu

SEQ ID NO: 2383843 - RNA, 19 nt, Artificial Sequence
  Description of Artificial Sequence: Synthetic oligonucleotide
acguccaggcgggacccag

SEQ ID NO: 2383844 - RNA, 19 nt, Artificial Sequence
  Description of Artificial Sequence: Synthetic oligonucleotide
ccuugagcgccgcuuugag

SEQ ID NO: 2383845 - RNA, 19 nt, Artificial Sequence
  Description of Artificial Sequence: Synthetic oligonucleotide
cuucccauucaggcccuuc

SEQ ID NO: 2383846 - RNA, 19 nt, Artificial Sequence
  Description of Artificial Sequence: Synthetic oligonucleotide
ucagucgggcuugcagcuc

SEQ ID NO: 2383847 - RNA, 19 nt, Artificial Sequence
  Description of Artificial Sequence: Synthetic oligonucleotide
gagcagggccucacuccag

SEQ ID NO: 2383848 - RNA, 19 nt, Artificial Sequence
  Description of Artificial Sequence: Synthetic oligonucleotide
cagggagcagcgccuccug

SEQ ID NO: 2383849 - RNA, 19 nt, Artificial Sequence
  Description of Artificial Sequence: Synthetic oligonucleotide
ggacugggagggucauugc

SEQ ID NO: 2383850 - RNA, 19 nt, Artificial Sequence
  Description of Artificial Sequence: Synthetic oligonucleotide
gagcgccgcuuugaggaac

SEQ ID NO: 2383851 - RNA, 19 nt, Artificial Sequence
  Description of Artificial Sequence: Synthetic oligonucleotide
cagcuccugcaucaugcca

SEQ ID NO: 2383852 - RNA, 19 nt, Artificial Sequence
  Description of Artificial Sequence: Synthetic oligonucleotide
aggcggcugcucagggagc

SEQ ID NO: 2383853 - RNA, 19 nt, Artificial Sequence
  Description of Artificial Sequence: Synthetic oligonucleotide
caggaugagcaaagccaaa

SEQ ID NO: 2383854 - RNA, 19 nt, Artificial Sequence
  Description of Artificial Sequence: Synthetic oligonucleotide
gcugcuguacaccuccccu

SEQ ID NO: 2383855 - RNA, 19 nt, Artificial Sequence
  Description of Artificial Sequence: Synthetic oligonucleotide
cgcuuugaggaacuucgug

SEQ ID NO: 2383856 - RNA, 19 nt, Artificial Sequence
  Description of Artificial Sequence: Synthetic oligonucleotide
gccuuguggcacuuagcuc

SEQ ID NO: 2383857 - RNA, 19 nt, Artificial Sequence
  Description of Artificial Sequence: Synthetic oligonucleotide
agcgccgcuuugaggaacu

SEQ ID NO: 2383858 - RNA, 19 nt, Artificial Sequence
  Description of Artificial Sequence: Synthetic oligonucleotide
ccaggacuuuucuccuggc

SEQ ID NO: 2383859 - RNA, 19 nt, Artificial Sequence
  Description of Artificial Sequence: Synthetic oligonucleotide
ccauuccccucauuccuuc

SEQ ID NO: 2383860 - RNA, 19 nt, Artificial Sequence
  Description of Artificial Sequence: Synthetic oligonucleotide
ccuccccuggggcacuugg

SEQ ID NO: 2383861 - RNA, 19 nt, Artificial Sequence
  Description of Artificial Sequence: Synthetic oligonucleotide
agggccuugagcgccgcuu

SEQ ID NO: 2383862 - RNA, 19 nt, Artificial Sequence
  Description of Artificial Sequence: Synthetic oligonucleotide
agcagagauucgacgcaaa

SEQ ID NO: 2383863 - RNA, 19 nt, Artificial Sequence
  Description of Artificial Sequence: Synthetic oligonucleotide
aaguuuccucuggcugaaa

SEQ ID NO: 2383864 - RNA, 19 nt, Artificial Sequence
  Description of Artificial Sequence: Synthetic oligonucleotide
ccaaacccacugucccagg

SEQ ID NO: 2383865 - RNA, 19 nt, Artificial Sequence
  Description of Artificial Sequence: Synthetic oligonucleotide
cugccuuuacagaugucuu

SEQ ID NO: 2383866 - RNA, 19 nt, Artificial Sequence
  Description of Artificial Sequence: Synthetic oligonucleotide
caggacuuuucuccuggcu

SEQ ID NO: 2383867 - RNA, 19 nt, Artificial Sequence
  Description of Artificial Sequence: Synthetic oligonucleotide
ggcacuuagcucugaaguu

SEQ ID NO: 2383868 - RNA, 19 nt, Artificial Sequence
  Description of Artificial Sequence: Synthetic oligonucleotide
gaagccaggcacagcuagu

SEQ ID NO: 2383869 - RNA, 19 nt, Artificial Sequence
  Description of Artificial Sequence: Synthetic oligonucleotide
cccauucaggcccuuccuc

SEQ ID NO: 2383870 - RNA, 19 nt, Artificial Sequence
  Description of Artificial Sequence: Synthetic oligonucleotide
cauugcuucucugcagccu

SEQ ID NO: 2383871 - RNA, 19 nt, Artificial Sequence
  Description of Artificial Sequence: Synthetic oligonucleotide
acuguggcuuuggccgacu

SEQ ID NO: 2383872 - RNA, 19 nt, Artificial Sequence
  Description of Artificial Sequence: Synthetic oligonucleotide
ucgacgcaaagagggccuu

SEQ ID NO: 2383873 - RNA, 19 nt, Artificial Sequence
  Description of Artificial Sequence: Synthetic oligonucleotide
ugcuucucugcagccucuu

SEQ ID NO: 2383874 - RNA, 19 nt, Artificial Sequence
  Description of Artificial Sequence: Synthetic oligonucleotide
gcucaggagcagagauucg

SEQ ID NO: 2383875 - RNA, 19 nt, Artificial Sequence
  Description of Artificial Sequence: Synthetic oligonucleotide
caucauagccagucacuuu

SEQ ID NO: 2383876 - RNA, 19 nt, Artificial Sequence
  Description of Artificial Sequence: Synthetic oligonucleotide
cucugucugggagucuaaa

SEQ ID NO: 2383877 - RNA, 19 nt, Artificial Sequence
  Description of Artificial Sequence: Synthetic oligonucleotide
gggcacuugguguggccuc

SEQ ID NO: 2383878 - RNA, 19 nt, Artificial Sequence
  Description of Artificial Sequence: Synthetic oligonucleotide
accauccauuccccucauu

SEQ ID NO: 2383879 - RNA, 19 nt, Artificial Sequence
  Description of Artificial Sequence: Synthetic oligonucleotide
gccgacucagucgggcuug

SEQ ID NO: 2383880 - RNA, 19 nt, Artificial Sequence
  Description of Artificial Sequence: Synthetic oligonucleotide
cugcccacauugcuucucu

SEQ ID NO: 2383881 - RNA, 19 nt, Artificial Sequence
  Description of Artificial Sequence: Synthetic oligonucleotide
cacgacuucgagggacaga

SEQ ID NO: 2383882 - RNA, 19 nt, Artificial Sequence
  Description of Artificial Sequence: Synthetic oligonucleotide
cagcuaguguggggauuug

SEQ ID NO: 2383883 - RNA, 19 nt, Artificial Sequence
  Description of Artificial Sequence: Synthetic oligonucleotide
cauuccccucauuccuucu

SEQ ID NO: 2383884 - RNA, 19 nt, Artificial Sequence
  Description of Artificial Sequence: Synthetic oligonucleotide
uucaggccuuguggcacuu

SEQ ID NO: 2383885 - RNA, 19 nt, Artificial Sequence
  Description of Artificial Sequence: Synthetic oligonucleotide
gccugagcccucccucagc

SEQ ID NO: 2383886 - RNA, 19 nt, Artificial Sequence
  Description of Artificial Sequence: Synthetic oligonucleotide
ucaggccuuguggcacuua

SEQ ID NO: 2383887 - RNA, 19 nt, Artificial Sequence
  Description of Artificial Sequence: Synthetic oligonucleotide
cagcucucucugucuggga

SEQ ID NO: 2383888 - RNA, 19 nt, Artificial Sequence
  Description of Artificial Sequence: Synthetic oligonucleotide
cuuggacaucauagccagu

SEQ ID NO: 2383889 - RNA, 19 nt, Artificial Sequence
  Description of Artificial Sequence: Synthetic oligonucleotide
ccuggguuggggacuggga

SEQ ID NO: 2383890 - RNA, 19 nt, Artificial Sequence
  Description of Artificial Sequence: Synthetic oligonucleotide
ccccucagcucucucuguc

SEQ ID NO: 2383891 - RNA, 19 nt, Artificial Sequence
  Description of Artificial Sequence: Synthetic oligonucleotide
guguggccucagucaguuc

SEQ ID NO: 2383892 - RNA, 19 nt, Artificial Sequence
  Description of Artificial Sequence: Synthetic oligonucleotide
gucgggcuugcagcuccug

SEQ ID NO: 2383893 - RNA, 19 nt, Artificial Sequence
  Description of Artificial Sequence: Synthetic oligonucleotide
cagucuccucucuaccuuu

SEQ ID NO: 2383894 - RNA, 19 nt, Artificial Sequence
  Description of Artificial Sequence: Synthetic oligonucleotide
gcugcuucuccuggccuga

SEQ ID NO: 2383895 - RNA, 19 nt, Artificial Sequence
  Description of Artificial Sequence: Synthetic oligonucleotide
cccaacucccucucuggaa

SEQ ID NO: 2383896 - RNA, 19 nt, Artificial Sequence
  Description of Artificial Sequence: Synthetic oligonucleotide
cugcagccucuuccagcuc

SEQ ID NO: 2383897 - RNA, 19 nt, Artificial Sequence
  Description of Artificial Sequence: Synthetic oligonucleotide
gcagcgccuccuggguugg

SEQ ID NO: 2383898 - RNA, 19 nt, Artificial Sequence
  Description of Artificial Sequence: Synthetic oligonucleotide
cgagggacagagacgucca

SEQ ID NO: 2383899 - RNA, 19 nt, Artificial Sequence
  Description of Artificial Sequence: Synthetic oligonucleotide
caggcucucccaacucccu

SEQ ID NO: 2383900 - RNA, 19 nt, Artificial Sequence
  Description of Artificial Sequence: Synthetic oligonucleotide
cucauuccuucugccuuua

SEQ ID NO: 2383901 - RNA, 19 nt, Artificial Sequence
  Description of Artificial Sequence: Synthetic oligonucleotide
ggcggcugcucagggagca

SEQ ID NO: 2383902 - RNA, 19 nt, Artificial Sequence
  Description of Artificial Sequence: Synthetic oligonucleotide
agucgggcuugcagcuccu

SEQ ID NO: 2383903 - RNA, 19 nt, Artificial Sequence
  Description of Artificial Sequence: Synthetic oligonucleotide
cagucuccaugaugguuau

SEQ ID NO: 2383904 - RNA, 19 nt, Artificial Sequence
  Description of Artificial Sequence: Synthetic oligonucleotide
gccuugagcgccgcuuuga

SEQ ID NO: 2383905 - RNA, 19 nt, Artificial Sequence
  Description of Artificial Sequence: Synthetic oligonucleotide
agucuccaugaugguuaua

SEQ ID NO: 2383906 - RNA, 19 nt, Artificial Sequence
  Description of Artificial Sequence: Synthetic oligonucleotide
cguccaggcgggacccagg

SEQ ID NO: 2383907 - RNA, 19 nt, Artificial Sequence
  Description of Artificial Sequence: Synthetic oligonucleotide
caacagcauuggaucuccu

SEQ ID NO: 2383908 - RNA, 19 nt, Artificial Sequence
  Description of Artificial Sequence: Synthetic oligonucleotide
gagcagcgccuccuggguu

SEQ ID NO: 2383909 - RNA, 19 nt, Artificial Sequence
  Description of Artificial Sequence: Synthetic oligonucleotide
gcgccuccuggguugggga

SEQ ID NO: 2383910 - RNA, 19 nt, Artificial Sequence
  Description of Artificial Sequence: Synthetic oligonucleotide
ccaauuuucugcccacauu

SEQ ID NO: 2383911 - RNA, 19 nt, Artificial Sequence
  Description of Artificial Sequence: Synthetic oligonucleotide
gacguccaggcgggaccca

SEQ ID NO: 2383912 - RNA, 19 nt, Artificial Sequence
  Description of Artificial Sequence: Synthetic oligonucleotide
cuccugcaucaugccagga

SEQ ID NO: 2383913 - RNA, 19 nt, Artificial Sequence
  Description of Artificial Sequence: Synthetic oligonucleotide
cuccccuggggcacuuggu

SEQ ID NO: 2383914 - RNA, 19 nt, Artificial Sequence
  Description of Artificial Sequence: Synthetic oligonucleotide
ggggcacuugguguggccu

SEQ ID NO: 2383915 - RNA, 19 nt, Artificial Sequence
  Description of Artificial Sequence: Synthetic oligonucleotide
cucccucucuggaaccauu

SEQ ID NO: 2383916 - RNA, 19 nt, Artificial Sequence
  Description of Artificial Sequence: Synthetic oligonucleotide
ggagucccuucaggccuug

SEQ ID NO: 2383917 - RNA, 19 nt, Artificial Sequence
  Description of Artificial Sequence: Synthetic oligonucleotide
cugagcccucccucagccu

SEQ ID NO: 2383918 - RNA, 19 nt, Artificial Sequence
  Description of Artificial Sequence: Synthetic oligonucleotide
cccucauuccuucugccuu

SEQ ID NO: 2383919 - RNA, 19 nt, Artificial Sequence
  Description of Artificial Sequence: Synthetic oligonucleotide
ccuaggggccccucagucu

SEQ ID NO: 2383920 - RNA, 19 nt, Artificial Sequence
  Description of Artificial Sequence: Synthetic oligonucleotide
cagggagcagggccucacu

SEQ ID NO: 2383921 - RNA, 19 nt, Artificial Sequence
  Description of Artificial Sequence: Synthetic oligonucleotide
cagcgccuccuggguuggg

SEQ ID NO: 2383922 - RNA, 19 nt, Artificial Sequence
  Description of Artificial Sequence: Synthetic oligonucleotide
ccuuuacagaugucuucau

SEQ ID NO: 2383923 - RNA, 19 nt, Artificial Sequence
  Description of Artificial Sequence: Synthetic oligonucleotide
cgccuccuggguuggggac

SEQ ID NO: 2383924 - RNA, 19 nt, Artificial Sequence
  Description of Artificial Sequence: Synthetic oligonucleotide
gcagggccucacuccagcu

SEQ ID NO: 2383925 - RNA, 19 nt, Artificial Sequence
  Description of Artificial Sequence: Synthetic oligonucleotide
ccgacucagucgggcuugc

SEQ ID NO: 2383926 - RNA, 19 nt, Artificial Sequence
  Description of Artificial Sequence: Synthetic oligonucleotide
cagagacguccaggcggga

SEQ ID NO: 2383927 - RNA, 19 nt, Artificial Sequence
  Description of Artificial Sequence: Synthetic oligonucleotide
cccucagcucucucugucu

SEQ ID NO: 2383928 - RNA, 19 nt, Artificial Sequence
  Description of Artificial Sequence: Synthetic oligonucleotide
agcccucccucagccucuu

SEQ ID NO: 2383929 - RNA, 19 nt, Artificial Sequence
  Description of Artificial Sequence: Synthetic oligonucleotide
guguggggauuugguguau

SEQ ID NO: 2383930 - RNA, 19 nt, Artificial Sequence
  Description of Artificial Sequence: Synthetic oligonucleotide
ggccgacucagucgggcuu

SEQ ID NO: 2383931 - RNA, 19 nt, Artificial Sequence
  Description of Artificial Sequence: Synthetic oligonucleotide
cgccgcuuugaggaacuuc

SEQ ID NO: 2383932 - RNA, 19 nt, Artificial Sequence
  Description of Artificial Sequence: Synthetic oligonucleotide
cgacgcaaagagggccuug

SEQ ID NO: 2383933 - RNA, 19 nt, Artificial Sequence
  Description of Artificial Sequence: Synthetic oligonucleotide
gccuccuggguuggggacu

SEQ ID NO: 2383934 - RNA, 19 nt, Artificial Sequence
  Description of Artificial Sequence: Synthetic oligonucleotide
ccgcuuugaggaacuucgu

SEQ ID NO: 2383935 - RNA, 19 nt, Artificial Sequence
  Description of Artificial Sequence: Synthetic oligonucleotide
cgacuucgagggacagaga

SEQ ID NO: 2383936 - RNA, 19 nt, Artificial Sequence
  Description of Artificial Sequence: Synthetic oligonucleotide
ggcuucccauucaggcccu

SEQ ID NO: 2383937 - RNA, 19 nt, Artificial Sequence
  Description of Artificial Sequence: Synthetic oligonucleotide
gguuggggacugggagggu

SEQ ID NO: 2383938 - RNA, 19 nt, Artificial Sequence
  Description of Artificial Sequence: Synthetic oligonucleotide
cgacucagucgggcuugca

SEQ ID NO: 2383939 - RNA, 19 nt, Artificial Sequence
  Description of Artificial Sequence: Synthetic oligonucleotide
ggcuggcacuggagucccu

SEQ ID NO: 2383940 - RNA, 19 nt, Artificial Sequence
  Description of Artificial Sequence: Synthetic oligonucleotide
gcuucccauucaggcccuu

SEQ ID NO: 2383941 - RNA, 19 nt, Artificial Sequence
  Description of Artificial Sequence: Synthetic oligonucleotide
gcgccgcuuugaggaacuu

SEQ ID NO: 2383942 - RNA, 19 nt, Artificial Sequence
  Description of Artificial Sequence: Synthetic oligonucleotide
aaaauagucauucuaccac

SEQ ID NO: 2383943 - RNA, 19 nt, Artificial Sequence
  Description of Artificial Sequence: Synthetic oligonucleotide
agugaagaaacucaaaugg

SEQ ID NO: 2383944 - RNA, 19 nt, Artificial Sequence
  Description of Artificial Sequence: Synthetic oligonucleotide
aaaaugucauuucaucugc

SEQ ID NO: 2383945 - RNA, 19 nt, Artificial Sequence
  Description of Artificial Sequence: Synthetic oligonucleotide
guaauuaugggacagaaug

SEQ ID NO: 2383946 - RNA, 19 nt, Artificial Sequence
  Description of Artificial Sequence: Synthetic oligonucleotide
auaaaauagucauucuacc

SEQ ID NO: 2383947 - RNA, 19 nt, Artificial Sequence
  Description of Artificial Sequence: Synthetic oligonucleotide
uucuauaaaauuauggcac

SEQ ID NO: 2383948 - RNA, 19 nt, Artificial Sequence
  Description of Artificial Sequence: Synthetic oligonucleotide
cauucuauaaaauuauggc

SEQ ID NO: 2383949 - RNA, 19 nt, Artificial Sequence
  Description of Artificial Sequence: Synthetic oligonucleotide
auaaaauuauggcacaguc

SEQ ID NO: 2383950 - RNA, 19 nt, Artificial Sequence
  Description of Artificial Sequence: Synthetic oligonucleotide
aaugugauucucuguaagg

SEQ ID NO: 2383951 - RNA, 19 nt, Artificial Sequence
  Description of Artificial Sequence: Synthetic oligonucleotide
gauaaaguagucgaugagg

SEQ ID NO: 2383952 - RNA, 19 nt, Artificial Sequence
  Description of Artificial Sequence: Synthetic oligonucleotide
ucaaauggaaauccagccg

SEQ ID NO: 2383953 - RNA, 19 nt, Artificial Sequence
  Description of Artificial Sequence: Synthetic oligonucleotide
uaauuaugggacagaaugg

SEQ ID NO: 2383954 - RNA, 19 nt, Artificial Sequence
  Description of Artificial Sequence: Synthetic oligonucleotide
auuacugccacucaaggca

SEQ ID NO: 2383955 - RNA, 19 nt, Artificial Sequence
  Description of Artificial Sequence: Synthetic oligonucleotide
aaaugugauucucuguaag

SEQ ID NO: 2383956 - RNA, 19 nt, Artificial Sequence
  Description of Artificial Sequence: Synthetic oligonucleotide
ucaucugccacccugguga

SEQ ID NO: 2383957 - RNA, 19 nt, Artificial Sequence
  Description of Artificial Sequence: Synthetic oligonucleotide
aaggggauaaaguagucga

SEQ ID NO: 2383958 - RNA, 19 nt, Artificial Sequence
  Description of Artificial Sequence: Synthetic oligonucleotide
guugaagacacccacagac

SEQ ID NO: 2383959 - RNA, 19 nt, Artificial Sequence
  Description of Artificial Sequence: Synthetic oligonucleotide
uaaaauagucauucuacca

SEQ ID NO: 2383960 - RNA, 19 nt, Artificial Sequence
  Description of Artificial Sequence: Synthetic oligonucleotide
ucuccauguuauaaaauag

SEQ ID NO: 2383961 - RNA, 19 nt, Artificial Sequence
  Description of Artificial Sequence: Synthetic oligonucleotide
ucuaccacauucuauaaaa

SEQ ID NO: 2383962 - RNA, 19 nt, Artificial Sequence
  Description of Artificial Sequence: Synthetic oligonucleotide
aaauagucauucuaccaca

SEQ ID NO: 2383963 - RNA, 19 nt, Artificial Sequence
  Description of Artificial Sequence: Synthetic oligonucleotide
aagaaacucaaauggaaau

SEQ ID NO: 2383964 - RNA, 19 nt, Artificial Sequence
  Description of Artificial Sequence: Synthetic oligonucleotide
acauucuauaaaauuaugg

SEQ ID NO: 2383965 - RNA, 19 nt, Artificial Sequence
  Description of Artificial Sequence: Synthetic oligonucleotide
uucucuguaaggcaucucc

SEQ ID NO: 2383966 - RNA, 19 nt, Artificial Sequence
  Description of Artificial Sequence: Synthetic oligonucleotide
ugaguagaucuucucaucc

SEQ ID NO: 2383967 - RNA, 19 nt, Artificial Sequence
  Description of Artificial Sequence: Synthetic oligonucleotide
cucaaauggaaauccagcc

SEQ ID NO: 2383968 - RNA, 19 nt, Artificial Sequence
  Description of Artificial Sequence: Synthetic oligonucleotide
aaucccauccaccugcuca

SEQ ID NO: 2383969 - RNA, 19 nt, Artificial Sequence
  Description of Artificial Sequence: Synthetic oligonucleotide
uacuccaagggcaggaagg

SEQ ID NO: 2383970 - RNA, 19 nt, Artificial Sequence
  Description of Artificial Sequence: Synthetic oligonucleotide
uagucauucuaccacauuc

SEQ ID NO: 2383971 - RNA, 19 nt, Artificial Sequence
  Description of Artificial Sequence: Synthetic oligonucleotide
aacacguguccacacauug

SEQ ID NO: 2383972 - RNA, 19 nt, Artificial Sequence
  Description of Artificial Sequence: Synthetic oligonucleotide
uccauguuauaaaauaguc

SEQ ID NO: 2383973 - RNA, 19 nt, Artificial Sequence
  Description of Artificial Sequence: Synthetic oligonucleotide
aauuaugggacagaauggu

SEQ ID NO: 2383974 - RNA, 19 nt, Artificial Sequence
  Description of Artificial Sequence: Synthetic oligonucleotide
aacagaaaaugugauucuc

SEQ ID NO: 2383975 - RNA, 19 nt, Artificial Sequence
  Description of Artificial Sequence: Synthetic oligonucleotide
uguaaacagaaaaugugau

SEQ ID NO: 2383976 - RNA, 19 nt, Artificial Sequence
  Description of Artificial Sequence: Synthetic oligonucleotide
augugauucucuguaaggc

SEQ ID NO: 2383977 - RNA, 19 nt, Artificial Sequence
  Description of Artificial Sequence: Synthetic oligonucleotide
uuaugggacagaaugguuc

SEQ ID NO: 2383978 - RNA, 19 nt, Artificial Sequence
  Description of Artificial Sequence: Synthetic oligonucleotide
acaucugugcugucgaaac

SEQ ID NO: 2383979 - RNA, 19 nt, Artificial Sequence
  Description of Artificial Sequence: Synthetic oligonucleotide
ucuaucagcccacugcgcc

SEQ ID NO: 2383980 - RNA, 19 nt, Artificial Sequence
  Description of Artificial Sequence: Synthetic oligonucleotide
ugagguuucugucuaucag

SEQ ID NO: 2383981 - RNA, 19 nt, Artificial Sequence
  Description of Artificial Sequence: Synthetic oligonucleotide
uuacauccagugaagaaac

SEQ ID NO: 2383982 - RNA, 19 nt, Artificial Sequence
  Description of Artificial Sequence: Synthetic oligonucleotide
acucaaauggaaauccagc

SEQ ID NO: 2383983 - RNA, 19 nt, Artificial Sequence
  Description of Artificial Sequence: Synthetic oligonucleotide
ugucauuucaucugccacc

SEQ ID NO: 2383984 - RNA, 19 nt, Artificial Sequence
  Description of Artificial Sequence: Synthetic oligonucleotide
gaaugguucacaaggcugg

SEQ ID NO: 2383985 - RNA, 19 nt, Artificial Sequence
  Description of Artificial Sequence: Synthetic oligonucleotide
aaaguagucgaugagguuu

SEQ ID NO: 2383986 - RNA, 19 nt, Artificial Sequence
  Description of Artificial Sequence: Synthetic oligonucleotide
gguaacagcaguccaaagg

SEQ ID NO: 2383987 - RNA, 19 nt, Artificial Sequence
  Description of Artificial Sequence: Synthetic oligonucleotide
ucacuguaaacagaaaaug

SEQ ID NO: 2383988 - RNA, 19 nt, Artificial Sequence
  Description of Artificial Sequence: Synthetic oligonucleotide
ucacccggagauuacaucc

SEQ ID NO: 2383989 - RNA, 19 nt, Artificial Sequence
  Description of Artificial Sequence: Synthetic oligonucleotide
uaaggcaucuccauguuau

SEQ ID NO: 2383990 - RNA, 19 nt, Artificial Sequence
  Description of Artificial Sequence: Synthetic oligonucleotide
uuugcgguaggaaauccca

SEQ ID NO: 2383991 - RNA, 19 nt, Artificial Sequence
  Description of Artificial Sequence: Synthetic oligonucleotide
ugucuguacuccaagggca

SEQ ID NO: 2383992 - RNA, 19 nt, Artificial Sequence
  Description of Artificial Sequence: Synthetic oligonucleotide
acuguaaacagaaaaugug

SEQ ID NO: 2383993 - RNA, 19 nt, Artificial Sequence
  Description of Artificial Sequence: Synthetic oligonucleotide
aaagguggccaacacgugu

SEQ ID NO: 2383994 - RNA, 19 nt, Artificial Sequence
  Description of Artificial Sequence: Synthetic oligonucleotide
acagucuucucaugucugc

SEQ ID NO: 2383995 - RNA, 19 nt, Artificial Sequence
  Description of Artificial Sequence: Synthetic oligonucleotide
ggugacgaugucuucaucg

SEQ ID NO: 2383996 - RNA, 19 nt, Artificial Sequence
  Description of Artificial Sequence: Synthetic oligonucleotide
gagguuucugucuaucagc

SEQ ID NO: 2383997 - RNA, 19 nt, Artificial Sequence
  Description of Artificial Sequence: Synthetic oligonucleotide
aacucaaauggaaauccag

SEQ ID NO: 2383998 - RNA, 19 nt, Artificial Sequence
  Description of Artificial Sequence: Synthetic oligonucleotide
uaggaaaucccauccaccu

SEQ ID NO: 2383999 - RNA, 19 nt, Artificial Sequence
  Description of Artificial Sequence: Synthetic oligonucleotide
ugugauucucuguaaggca

SEQ ID NO: 2384000 - RNA, 19 nt, Artificial Sequence
  Description of Artificial Sequence: Synthetic oligonucleotide
cauguuauaaaauagucau

SEQ ID NO: 2384001 - RNA, 19 nt, Artificial Sequence
  Description of Artificial Sequence: Synthetic oligonucleotide
aaaugucauuucaucugcc

SEQ ID NO: 2384002 - RNA, 19 nt, Artificial Sequence
  Description of Artificial Sequence: Synthetic oligonucleotide
ucuucaucgacagcaaccc

SEQ ID NO: 2384003 - RNA, 19 nt, Artificial Sequence
  Description of Artificial Sequence: Synthetic oligonucleotide
agcugcauuguaauuaugg

SEQ ID NO: 2384004 - RNA, 19 nt, Artificial Sequence
  Description of Artificial Sequence: Synthetic oligonucleotide
aaucacagacuugcucucc

SEQ ID NO: 2384005 - RNA, 19 nt, Artificial Sequence
  Description of Artificial Sequence: Synthetic oligonucleotide
ucuguaaggcaucuccaug

SEQ ID NO: 2384006 - RNA, 19 nt, Artificial Sequence
  Description of Artificial Sequence: Synthetic oligonucleotide
gaaggggauaaaguagucg

SEQ ID NO: 2384007 - RNA, 19 nt, Artificial Sequence
  Description of Artificial Sequence: Synthetic oligonucleotide
uaugggacagaaugguuca

SEQ ID NO: 2384008 - RNA, 19 nt, Artificial Sequence
  Description of Artificial Sequence: Synthetic oligonucleotide
uauaaaauuauggcacagu

SEQ ID NO: 2384009 - RNA, 19 nt, Artificial Sequence
  Description of Artificial Sequence: Synthetic oligonucleotide
ucugaguagaucuucucau

SEQ ID NO: 2384010 - RNA, 19 nt, Artificial Sequence
  Description of Artificial Sequence: Synthetic oligonucleotide
accugcauuacugaggaag

SEQ ID NO: 2384011 - RNA, 19 nt, Artificial Sequence
  Description of Artificial Sequence: Synthetic oligonucleotide
guuucugucuaucagccca

SEQ ID NO: 2384012 - RNA, 19 nt, Artificial Sequence
  Description of Artificial Sequence: Synthetic oligonucleotide
agguuucugucuaucagcc

SEQ ID NO: 2384013 - RNA, 19 nt, Artificial Sequence
  Description of Artificial Sequence: Synthetic oligonucleotide
cauugcaucacuguaaaca

SEQ ID NO: 2384014 - RNA, 19 nt, Artificial Sequence
  Description of Artificial Sequence: Synthetic oligonucleotide
auaaaguagucgaugaggu

SEQ ID NO: 2384015 - RNA, 19 nt, Artificial Sequence
  Description of Artificial Sequence: Synthetic oligonucleotide
caggaaggggauaaaguag

SEQ ID NO: 2384016 - RNA, 19 nt, Artificial Sequence
  Description of Artificial Sequence: Synthetic oligonucleotide
aaguccagggucgucuucg

SEQ ID NO: 2384017 - RNA, 19 nt, Artificial Sequence
  Description of Artificial Sequence: Synthetic oligonucleotide
uucguuaucagguccccac

SEQ ID NO: 2384018 - RNA, 19 nt, Artificial Sequence
  Description of Artificial Sequence: Synthetic oligonucleotide
cauuacugccacucaaggc

SEQ ID NO: 2384019 - RNA, 19 nt, Artificial Sequence
  Description of Artificial Sequence: Synthetic oligonucleotide
agucgaugagguuucuguc

SEQ ID NO: 2384020 - RNA, 19 nt, Artificial Sequence
  Description of Artificial Sequence: Synthetic oligonucleotide
uugaagacacccacagaca

SEQ ID NO: 2384021 - RNA, 19 nt, Artificial Sequence
  Description of Artificial Sequence: Synthetic oligonucleotide
agcccagcccauuacugcc

SEQ ID NO: 2384022 - RNA, 19 nt, Artificial Sequence
  Description of Artificial Sequence: Synthetic oligonucleotide
uucucaugucugcagcugc

SEQ ID NO: 2384023 - RNA, 19 nt, Artificial Sequence
  Description of Artificial Sequence: Synthetic oligonucleotide
acgaugucuucaucgacag

SEQ ID NO: 2384024 - RNA, 19 nt, Artificial Sequence
  Description of Artificial Sequence: Synthetic oligonucleotide
ugcgccacagaccacugug

SEQ ID NO: 2384025 - RNA, 19 nt, Artificial Sequence
  Description of Artificial Sequence: Synthetic oligonucleotide
ggaaaucccauccaccugc

SEQ ID NO: 2384026 - RNA, 19 nt, Artificial Sequence
  Description of Artificial Sequence: Synthetic oligonucleotide
cuugcucuccuacagucag

SEQ ID NO: 2384027 - RNA, 19 nt, Artificial Sequence
  Description of Artificial Sequence: Synthetic oligonucleotide
cacaaggcuggaaucacag

SEQ ID NO: 2384028 - RNA, 19 nt, Artificial Sequence
  Description of Artificial Sequence: Synthetic oligonucleotide
aaguagucgaugagguuuc

SEQ ID NO: 2384029 - RNA, 19 nt, Artificial Sequence
  Description of Artificial Sequence: Synthetic oligonucleotide
cauuguaauuaugggacag

SEQ ID NO: 2384030 - RNA, 19 nt, Artificial Sequence
  Description of Artificial Sequence: Synthetic oligonucleotide
uggaucucuucccucuucc

SEQ ID NO: 2384031 - RNA, 19 nt, Artificial Sequence
  Description of Artificial Sequence: Synthetic oligonucleotide
uguaauuaugggacagaau

SEQ ID NO: 2384032 - RNA, 19 nt, Artificial Sequence
  Description of Artificial Sequence: Synthetic oligonucleotide
gagauuacauccagugaag

SEQ ID NO: 2384033 - RNA, 19 nt, Artificial Sequence
  Description of Artificial Sequence: Synthetic oligonucleotide
ugacugcacagucuugcag

SEQ ID NO: 2384034 - RNA, 19 nt, Artificial Sequence
  Description of Artificial Sequence: Synthetic oligonucleotide
aguuggaucucuucccucu

SEQ ID NO: 2384035 - RNA, 19 nt, Artificial Sequence
  Description of Artificial Sequence: Synthetic oligonucleotide
ggagauuacauccagugaa

SEQ ID NO: 2384036 - RNA, 19 nt, Artificial Sequence
  Description of Artificial Sequence: Synthetic oligonucleotide
aaauuauggcacagucuuc

SEQ ID NO: 2384037 - RNA, 19 nt, Artificial Sequence
  Description of Artificial Sequence: Synthetic oligonucleotide
ucaguuggaucucuucccu

SEQ ID NO: 2384038 - RNA, 19 nt, Artificial Sequence
  Description of Artificial Sequence: Synthetic oligonucleotide
gcugcauuguaauuauggg

SEQ ID NO: 2384039 - RNA, 19 nt, Artificial Sequence
  Description of Artificial Sequence: Synthetic oligonucleotide
gauuacauccagugaagaa

SEQ ID NO: 2384040 - RNA, 19 nt, Artificial Sequence
  Description of Artificial Sequence: Synthetic oligonucleotide
ucucuguaaggcaucucca

SEQ ID NO: 2384041 - RNA, 19 nt, Artificial Sequence
  Description of Artificial Sequence: Synthetic oligonucleotide
cacauucuauaaaauuaug

SEQ ID NO: 2384042 - RNA, 19 nt, Artificial Sequence
  Description of Artificial Sequence: Synthetic oligonucleotide
ugguucacaaggcuggaau

SEQ ID NO: 2384043 - RNA, 19 nt, Artificial Sequence
  Description of Artificial Sequence: Synthetic oligonucleotide
guaacagcaguccaaaggu

SEQ ID NO: 2384044 - RNA, 19 nt, Artificial Sequence
  Description of Artificial Sequence: Synthetic oligonucleotide
ucugcagcugcauuguaau

SEQ ID NO: 2384045 - RNA, 19 nt, Artificial Sequence
  Description of Artificial Sequence: Synthetic oligonucleotide
uuguaauuaugggacagaa

SEQ ID NO: 2384046 - RNA, 19 nt, Artificial Sequence
  Description of Artificial Sequence: Synthetic oligonucleotide
gaagauggcuuugcgguag

SEQ ID NO: 2384047 - RNA, 19 nt, Artificial Sequence
  Description of Artificial Sequence: Synthetic oligonucleotide
agaaugguucacaaggcug

SEQ ID NO: 2384048 - RNA, 19 nt, Artificial Sequence
  Description of Artificial Sequence: Synthetic oligonucleotide
acagaugguaacagcaguc

SEQ ID NO: 2384049 - RNA, 19 nt, Artificial Sequence
  Description of Artificial Sequence: Synthetic oligonucleotide
accacauucuauaaaauua

SEQ ID NO: 2384050 - RNA, 19 nt, Artificial Sequence
  Description of Artificial Sequence: Synthetic oligonucleotide
gaagaaacucaaauggaaa

SEQ ID NO: 2384051 - RNA, 19 nt, Artificial Sequence
  Description of Artificial Sequence: Synthetic oligonucleotide
cuuugcgguaggaaauccc

SEQ ID NO: 2384052 - RNA, 19 nt, Artificial Sequence
  Description of Artificial Sequence: Synthetic oligonucleotide
aucuucacgugucuguacu

SEQ ID NO: 2384053 - RNA, 19 nt, Artificial Sequence
  Description of Artificial Sequence: Synthetic oligonucleotide
aacagcccagcccauuacu

SEQ ID NO: 2384054 - RNA, 19 nt, Artificial Sequence
  Description of Artificial Sequence: Synthetic oligonucleotide
ugccacucaaggcaucacc

SEQ ID NO: 2384055 - RNA, 19 nt, Artificial Sequence
  Description of Artificial Sequence: Synthetic oligonucleotide
caucacuguaaacagaaaa

SEQ ID NO: 2384056 - RNA, 19 nt, Artificial Sequence
  Description of Artificial Sequence: Synthetic oligonucleotide
gacuugcucuccuacaguc

SEQ ID NO: 2384057 - RNA, 19 nt, Artificial Sequence
  Description of Artificial Sequence: Synthetic oligonucleotide
gcuggaaucacagacuugc

SEQ ID NO: 2384058 - RNA, 19 nt, Artificial Sequence
  Description of Artificial Sequence: Synthetic oligonucleotide
uugucugaguagaucuucu

SEQ ID NO: 2384059 - RNA, 19 nt, Artificial Sequence
  Description of Artificial Sequence: Synthetic oligonucleotide
aagauggcuuugcgguagg

SEQ ID NO: 2384060 - RNA, 19 nt, Artificial Sequence
  Description of Artificial Sequence: Synthetic oligonucleotide
auuauggcacagucuucuc

SEQ ID NO: 2384061 - RNA, 19 nt, Artificial Sequence
  Description of Artificial Sequence: Synthetic oligonucleotide
cacucaaggcaucacccgg

SEQ ID NO: 2384062 - RNA, 19 nt, Artificial Sequence
  Description of Artificial Sequence: Synthetic oligonucleotide
uucuaccacauucuauaaa

SEQ ID NO: 2384063 - RNA, 19 nt, Artificial Sequence
  Description of Artificial Sequence: Synthetic oligonucleotide
cugcauuguaauuauggga

SEQ ID NO: 2384064 - RNA, 19 nt, Artificial Sequence
  Description of Artificial Sequence: Synthetic oligonucleotide
aucacuguaaacagaaaau

SEQ ID NO: 2384065 - RNA, 19 nt, Artificial Sequence
  Description of Artificial Sequence: Synthetic oligonucleotide
auggcuuugcgguaggaaa

SEQ ID NO: 2384066 - RNA, 19 nt, Artificial Sequence
  Description of Artificial Sequence: Synthetic oligonucleotide
cagacuugcucuccuacag

SEQ ID NO: 2384067 - RNA, 19 nt, Artificial Sequence
  Description of Artificial Sequence: Synthetic oligonucleotide
aucacccggagauuacauc

SEQ ID NO: 2384068 - RNA, 19 nt, Artificial Sequence
  Description of Artificial Sequence: Synthetic oligonucleotide
gucuucaucgacagcaacc

SEQ ID NO: 2384069 - RNA, 19 nt, Artificial Sequence
  Description of Artificial Sequence: Synthetic oligonucleotide
aauggaaauccagccguga

SEQ ID NO: 2384070 - RNA, 19 nt, Artificial Sequence
  Description of Artificial Sequence: Synthetic oligonucleotide
ucugugcugucgaaacagc

SEQ ID NO: 2384071 - RNA, 19 nt, Artificial Sequence
  Description of Artificial Sequence: Synthetic oligonucleotide
uguugaagacacccacaga

SEQ ID NO: 2384072 - RNA, 19 nt, Artificial Sequence
  Description of Artificial Sequence: Synthetic oligonucleotide
acgugucuguacuccaagg

SEQ ID NO: 2384073 - RNA, 19 nt, Artificial Sequence
  Description of Artificial Sequence: Synthetic oligonucleotide
uuccaagucacagauggua

SEQ ID NO: 2384074 - RNA, 19 nt, Artificial Sequence
  Description of Artificial Sequence: Synthetic oligonucleotide
ucugccacccuggugacga

SEQ ID NO: 2384075 - RNA, 19 nt, Artificial Sequence
  Description of Artificial Sequence: Synthetic oligonucleotide
gucacagaugguaacagca

SEQ ID NO: 2384076 - RNA, 19 nt, Artificial Sequence
  Description of Artificial Sequence: Synthetic oligonucleotide
acauugcaucacuguaaac

SEQ ID NO: 2384077 - RNA, 19 nt, Artificial Sequence
  Description of Artificial Sequence: Synthetic oligonucleotide
acagcaguccaaagguggc

SEQ ID NO: 2384078 - RNA, 19 nt, Artificial Sequence
  Description of Artificial Sequence: Synthetic oligonucleotide
ucguuaucagguccccacc

SEQ ID NO: 2384079 - RNA, 19 nt, Artificial Sequence
  Description of Artificial Sequence: Synthetic oligonucleotide
agcccacugcgccacagac

SEQ ID NO: 2384080 - RNA, 19 nt, Artificial Sequence
  Description of Artificial Sequence: Synthetic oligonucleotide
aaaucccauccaccugcuc

SEQ ID NO: 2384081 - RNA, 19 nt, Artificial Sequence
  Description of Artificial Sequence: Synthetic oligonucleotide
ucugucuaucagcccacug

SEQ ID NO: 2384082 - RNA, 19 nt, Artificial Sequence
  Description of Artificial Sequence: Synthetic oligonucleotide
augagguuucugucuauca

SEQ ID NO: 2384083 - RNA, 19 nt, Artificial Sequence
  Description of Artificial Sequence: Synthetic oligonucleotide
cagaugguaacagcagucc

SEQ ID NO: 2384084 - RNA, 19 nt, Artificial Sequence
  Description of Artificial Sequence: Synthetic oligonucleotide
uuucugucuaucagcccac

SEQ ID NO: 2384085 - RNA, 19 nt, Artificial Sequence
  Description of Artificial Sequence: Synthetic oligonucleotide
acagaaaaugugauucucu

SEQ ID NO: 2384086 - RNA, 19 nt, Artificial Sequence
  Description of Artificial Sequence: Synthetic oligonucleotide
ucgaugagguuucugucua

SEQ ID NO: 2384087 - RNA, 19 nt, Artificial Sequence
  Description of Artificial Sequence: Synthetic oligonucleotide
uccagggucgucuucguua

SEQ ID NO: 2384088 - RNA, 19 nt, Artificial Sequence
  Description of Artificial Sequence: Synthetic oligonucleotide
ccuacagucagaacagccc

SEQ ID NO: 2384089 - RNA, 19 nt, Artificial Sequence
  Description of Artificial Sequence: Synthetic oligonucleotide
ggauaaaguagucgaugag

SEQ ID NO: 2384090 - RNA, 19 nt, Artificial Sequence
  Description of Artificial Sequence: Synthetic oligonucleotide
gacgaugucuucaucgaca

SEQ ID NO: 2384091 - RNA, 19 nt, Artificial Sequence
  Description of Artificial Sequence: Synthetic oligonucleotide
aaauggaaauccagccgug

SEQ ID NO: 2384092 - RNA, 19 nt, Artificial Sequence
  Description of Artificial Sequence: Synthetic oligonucleotide
uugcaucacuguaaacaga

SEQ ID NO: 2384093 - RNA, 19 nt, Artificial Sequence
  Description of Artificial Sequence: Synthetic oligonucleotide
aauagucauucuaccacau

SEQ ID NO: 2384094 - RNA, 19 nt, Artificial Sequence
  Description of Artificial Sequence: Synthetic oligonucleotide
ggaaauccagccgugacug

SEQ ID NO: 2384095 - RNA, 19 nt, Artificial Sequence
  Description of Artificial Sequence: Synthetic oligonucleotide
cugcucauaguagucgagg

SEQ ID NO: 2384096 - RNA, 19 nt, Artificial Sequence
  Description of Artificial Sequence: Synthetic oligonucleotide
ugacgaugucuucaucgac

SEQ ID NO: 2384097 - RNA, 19 nt, Artificial Sequence
  Description of Artificial Sequence: Synthetic oligonucleotide
gaaucacagacuugcucuc

SEQ ID NO: 2384098 - RNA, 19 nt, Artificial Sequence
  Description of Artificial Sequence: Synthetic oligonucleotide
ugucuucaucgacagcaac

SEQ ID NO: 2384099 - RNA, 19 nt, Artificial Sequence
  Description of Artificial Sequence: Synthetic oligonucleotide
gguaggaaaucccauccac

SEQ ID NO: 2384100 - RNA, 19 nt, Artificial Sequence
  Description of Artificial Sequence: Synthetic oligonucleotide
cuucacgugucuguacucc

SEQ ID NO: 2384101 - RNA, 19 nt, Artificial Sequence
  Description of Artificial Sequence: Synthetic oligonucleotide
agguggccaacacgugucc

SEQ ID NO: 2384102 - RNA, 19 nt, Artificial Sequence
  Description of Artificial Sequence: Synthetic oligonucleotide
ugauucucuguaaggcauc

SEQ ID NO: 2384103 - RNA, 19 nt, Artificial Sequence
  Description of Artificial Sequence: Synthetic oligonucleotide
acacacaucuucacguguc

SEQ ID NO: 2384104 - RNA, 19 nt, Artificial Sequence
  Description of Artificial Sequence: Synthetic oligonucleotide
gugcugucgaaacagcuuc

SEQ ID NO: 2384105 - RNA, 19 nt, Artificial Sequence
  Description of Artificial Sequence: Synthetic oligonucleotide
auuguaauuaugggacaga

SEQ ID NO: 2384106 - RNA, 19 nt, Artificial Sequence
  Description of Artificial Sequence: Synthetic oligonucleotide
caaauggaaauccagccgu

SEQ ID NO: 2384107 - RNA, 19 nt, Artificial Sequence
  Description of Artificial Sequence: Synthetic oligonucleotide
agaccacugugcuuguugu

SEQ ID NO: 2384108 - RNA, 19 nt, Artificial Sequence
  Description of Artificial Sequence: Synthetic oligonucleotide
guuauaaaauagucauucu

SEQ ID NO: 2384109 - RNA, 19 nt, Artificial Sequence
  Description of Artificial Sequence: Synthetic oligonucleotide
ggaaucacagacuugcucu

SEQ ID NO: 2384110 - RNA, 19 nt, Artificial Sequence
  Description of Artificial Sequence: Synthetic oligonucleotide
agucauucuaccacauucu

SEQ ID NO: 2384111 - RNA, 19 nt, Artificial Sequence
  Description of Artificial Sequence: Synthetic oligonucleotide
ugcgguaggaaaucccauc

SEQ ID NO: 2384112 - RNA, 19 nt, Artificial Sequence
  Description of Artificial Sequence: Synthetic oligonucleotide
acagacuugcucuccuaca

SEQ ID NO: 2384113 - RNA, 19 nt, Artificial Sequence
  Description of Artificial Sequence: Synthetic oligonucleotide
gggauaaaguagucgauga

SEQ ID NO: 2384114 - RNA, 19 nt, Artificial Sequence
  Description of Artificial Sequence: Synthetic oligonucleotide
guuaucagguccccaccug

SEQ ID NO: 2384115 - RNA, 19 nt, Artificial Sequence
  Description of Artificial Sequence: Synthetic oligonucleotide
aacccacaccuuuccaagu

SEQ ID NO: 2384116 - RNA, 19 nt, Artificial Sequence
  Description of Artificial Sequence: Synthetic oligonucleotide
uggcuuugcgguaggaaau

SEQ ID NO: 2384117 - RNA, 19 nt, Artificial Sequence
  Description of Artificial Sequence: Synthetic oligonucleotide
uucacgugucuguacucca

SEQ ID NO: 2384118 - RNA, 19 nt, Artificial Sequence
  Description of Artificial Sequence: Synthetic oligonucleotide
acacguguccacacauugc

SEQ ID NO: 2384119 - RNA, 19 nt, Artificial Sequence
  Description of Artificial Sequence: Synthetic oligonucleotide
aggaaaucccauccaccug

SEQ ID NO: 2384120 - RNA, 19 nt, Artificial Sequence
  Description of Artificial Sequence: Synthetic oligonucleotide
ucucugcccgcacacacau

SEQ ID NO: 2384121 - RNA, 19 nt, Artificial Sequence
  Description of Artificial Sequence: Synthetic oligonucleotide
auucuaccacauucuauaa

SEQ ID NO: 2384122 - RNA, 19 nt, Artificial Sequence
  Description of Artificial Sequence: Synthetic oligonucleotide
cacagucuucucaugucug

SEQ ID NO: 2384123 - RNA, 19 nt, Artificial Sequence
  Description of Artificial Sequence: Synthetic oligonucleotide
gugaagaaacucaaaugga

SEQ ID NO: 2384124 - RNA, 19 nt, Artificial Sequence
  Description of Artificial Sequence: Synthetic oligonucleotide
uuuccaagucacagauggu

SEQ ID NO: 2384125 - RNA, 19 nt, Artificial Sequence
  Description of Artificial Sequence: Synthetic oligonucleotide
uuacugccacucaaggcau

SEQ ID NO: 2384126 - RNA, 19 nt, Artificial Sequence
  Description of Artificial Sequence: Synthetic oligonucleotide
ugguaacagcaguccaaag

SEQ ID NO: 2384127 - RNA, 19 nt, Artificial Sequence
  Description of Artificial Sequence: Synthetic oligonucleotide
agauuacauccagugaaga

SEQ ID NO: 2384128 - RNA, 19 nt, Artificial Sequence
  Description of Artificial Sequence: Synthetic oligonucleotide
aagggcaggaaggggauaa

SEQ ID NO: 2384129 - RNA, 19 nt, Artificial Sequence
  Description of Artificial Sequence: Synthetic oligonucleotide
uaaaguagucgaugagguu

SEQ ID NO: 2384130 - RNA, 19 nt, Artificial Sequence
  Description of Artificial Sequence: Synthetic oligonucleotide
uguaaggcaucuccauguu

SEQ ID NO: 2384131 - RNA, 19 nt, Artificial Sequence
  Description of Artificial Sequence: Synthetic oligonucleotide
ugucugaguagaucuucuc

SEQ ID NO: 2384132 - RNA, 19 nt, Artificial Sequence
  Description of Artificial Sequence: Synthetic oligonucleotide
uucacaaggcuggaaucac

SEQ ID NO: 2384133 - RNA, 19 nt, Artificial Sequence
  Description of Artificial Sequence: Synthetic oligonucleotide
cacguguccacacauugca

SEQ ID NO: 2384134 - RNA, 19 nt, Artificial Sequence
  Description of Artificial Sequence: Synthetic oligonucleotide
guagaucuucucauccuug

SEQ ID NO: 2384135 - RNA, 19 nt, Artificial Sequence
  Description of Artificial Sequence: Synthetic oligonucleotide
ugggacagaaugguucaca

SEQ ID NO: 2384136 - RNA, 19 nt, Artificial Sequence
  Description of Artificial Sequence: Synthetic oligonucleotide
guucacaaggcuggaauca

SEQ ID NO: 2384137 - RNA, 19 nt, Artificial Sequence
  Description of Artificial Sequence: Synthetic oligonucleotide
ccauguuauaaaauaguca

SEQ ID NO: 2384138 - RNA, 19 nt, Artificial Sequence
  Description of Artificial Sequence: Synthetic oligonucleotide
gaugagguuucugucuauc

SEQ ID NO: 2384139 - RNA, 19 nt, Artificial Sequence
  Description of Artificial Sequence: Synthetic oligonucleotide
aaugguucacaaggcugga

SEQ ID NO: 2384140 - RNA, 19 nt, Artificial Sequence
  Description of Artificial Sequence: Synthetic oligonucleotide
caucucugcccgcacacac

SEQ ID NO: 2384141 - RNA, 19 nt, Artificial Sequence
  Description of Artificial Sequence: Synthetic oligonucleotide
gugacgaugucuucaucga

SEQ ID NO: 2384142 - RNA, 19 nt, Artificial Sequence
  Description of Artificial Sequence: Synthetic oligonucleotide
agggucgucuucguuauca

SEQ ID NO: 2384143 - RNA, 19 nt, Artificial Sequence
  Description of Artificial Sequence: Synthetic oligonucleotide
gucuucguuaucagguccc

SEQ ID NO: 2384144 - RNA, 19 nt, Artificial Sequence
  Description of Artificial Sequence: Synthetic oligonucleotide
ccggagauuacauccagug

SEQ ID NO: 2384145 - RNA, 19 nt, Artificial Sequence
  Description of Artificial Sequence: Synthetic oligonucleotide
ucuucguuaucaggucccc

SEQ ID NO: 2384146 - RNA, 19 nt, Artificial Sequence
  Description of Artificial Sequence: Synthetic oligonucleotide
gcgguaggaaaucccaucc

SEQ ID NO: 2384147 - RNA, 19 nt, Artificial Sequence
  Description of Artificial Sequence: Synthetic oligonucleotide
cuccauguuauaaaauagu

SEQ ID NO: 2384148 - RNA, 19 nt, Artificial Sequence
  Description of Artificial Sequence: Synthetic oligonucleotide
agaacagcccagcccauua

SEQ ID NO: 2384149 - RNA, 19 nt, Artificial Sequence
  Description of Artificial Sequence: Synthetic oligonucleotide
ucgucuucguuaucagguc

SEQ ID NO: 2384150 - RNA, 19 nt, Artificial Sequence
  Description of Artificial Sequence: Synthetic oligonucleotide
agacuugcucuccuacagu

SEQ ID NO: 2384151 - RNA, 19 nt, Artificial Sequence
  Description of Artificial Sequence: Synthetic oligonucleotide
ucuucacgugucuguacuc

SEQ ID NO: 2384152 - RNA, 19 nt, Artificial Sequence
  Description of Artificial Sequence: Synthetic oligonucleotide
cacgugucuguacuccaag

SEQ ID NO: 2384153 - RNA, 19 nt, Artificial Sequence
  Description of Artificial Sequence: Synthetic oligonucleotide
ucacgugucuguacuccaa

SEQ ID NO: 2384154 - RNA, 19 nt, Artificial Sequence
  Description of Artificial Sequence: Synthetic oligonucleotide
cucaaggcaucacccggag

SEQ ID NO: 2384155 - RNA, 19 nt, Artificial Sequence
  Description of Artificial Sequence: Synthetic oligonucleotide
acccggagauuacauccag

SEQ ID NO: 2384156 - RNA, 19 nt, Artificial Sequence
  Description of Artificial Sequence: Synthetic oligonucleotide
guaaacagaaaaugugauu

SEQ ID NO: 2384157 - RNA, 19 nt, Artificial Sequence
  Description of Artificial Sequence: Synthetic oligonucleotide
ucaaggcaucacccggaga

SEQ ID NO: 2384158 - RNA, 19 nt, Artificial Sequence
  Description of Artificial Sequence: Synthetic oligonucleotide
cacauugcaucacuguaaa

SEQ ID NO: 2384159 - RNA, 19 nt, Artificial Sequence
  Description of Artificial Sequence: Synthetic oligonucleotide
ggggauaaaguagucgaug

SEQ ID NO: 2384160 - RNA, 19 nt, Artificial Sequence
  Description of Artificial Sequence: Synthetic oligonucleotide
cuucaucgacagcaacccc

SEQ ID NO: 2384161 - RNA, 19 nt, Artificial Sequence
  Description of Artificial Sequence: Synthetic oligonucleotide
acacauugcaucacuguaa

SEQ ID NO: 2384162 - RNA, 19 nt, Artificial Sequence
  Description of Artificial Sequence: Synthetic oligonucleotide
ugcccgcacacacaucuuc

SEQ ID NO: 2384163 - RNA, 19 nt, Artificial Sequence
  Description of Artificial Sequence: Synthetic oligonucleotide
cuguaaggcaucuccaugu

SEQ ID NO: 2384164 - RNA, 19 nt, Artificial Sequence
  Description of Artificial Sequence: Synthetic oligonucleotide
ugcagcccuugucugagua

SEQ ID NO: 2384165 - RNA, 19 nt, Artificial Sequence
  Description of Artificial Sequence: Synthetic oligonucleotide
ggacagaaugguucacaag

SEQ ID NO: 2384166 - RNA, 19 nt, Artificial Sequence
  Description of Artificial Sequence: Synthetic oligonucleotide
augguaacagcaguccaaa

SEQ ID NO: 2384167 - RNA, 19 nt, Artificial Sequence
  Description of Artificial Sequence: Synthetic oligonucleotide
gucuguacuccaagggcag

SEQ ID NO: 2384168 - RNA, 19 nt, Artificial Sequence
  Description of Artificial Sequence: Synthetic oligonucleotide
gaacagcccagcccauuac

SEQ ID NO: 2384169 - RNA, 19 nt, Artificial Sequence
  Description of Artificial Sequence: Synthetic oligonucleotide
ucaugucugcagcugcauu

SEQ ID NO: 2384170 - RNA, 19 nt, Artificial Sequence
  Description of Artificial Sequence: Synthetic oligonucleotide
cuucucaugucugcagcug

SEQ ID NO: 2384171 - RNA, 19 nt, Artificial Sequence
  Description of Artificial Sequence: Synthetic oligonucleotide
cacacauugcaucacugua

SEQ ID NO: 2384172 - RNA, 19 nt, Artificial Sequence
  Description of Artificial Sequence: Synthetic oligonucleotide
guccccaccugcauuacug

SEQ ID NO: 2384173 - RNA, 19 nt, Artificial Sequence
  Description of Artificial Sequence: Synthetic oligonucleotide
uugcgguaggaaaucccau

SEQ ID NO: 2384174 - RNA, 19 nt, Artificial Sequence
  Description of Artificial Sequence: Synthetic oligonucleotide
gucgucuucguuaucaggu

SEQ ID NO: 2384175 - RNA, 19 nt, Artificial Sequence
  Description of Artificial Sequence: Synthetic oligonucleotide
aaggcaucuccauguuaua

SEQ ID NO: 2384176 - RNA, 19 nt, Artificial Sequence
  Description of Artificial Sequence: Synthetic oligonucleotide
agcaguccaaagguggcca

SEQ ID NO: 2384177 - RNA, 19 nt, Artificial Sequence
  Description of Artificial Sequence: Synthetic oligonucleotide
uccagccgugacugcacag

SEQ ID NO: 2384178 - RNA, 19 nt, Artificial Sequence
  Description of Artificial Sequence: Synthetic oligonucleotide
guggccaacacguguccac

SEQ ID NO: 2384179 - RNA, 19 nt, Artificial Sequence
  Description of Artificial Sequence: Synthetic oligonucleotide
gguucacaaggcuggaauc

SEQ ID NO: 2384180 - RNA, 19 nt, Artificial Sequence
  Description of Artificial Sequence: Synthetic oligonucleotide
cuuccugcccgccagaagu

SEQ ID NO: 2384181 - RNA, 19 nt, Artificial Sequence
  Description of Artificial Sequence: Synthetic oligonucleotide
cgugucuguacuccaaggg

SEQ ID NO: 2384182 - RNA, 19 nt, Artificial Sequence
  Description of Artificial Sequence: Synthetic oligonucleotide
gugcuuguuguugaagaca

SEQ ID NO: 2384183 - RNA, 19 nt, Artificial Sequence
  Description of Artificial Sequence: Synthetic oligonucleotide
cccauuacugccacucaag

SEQ ID NO: 2384184 - RNA, 19 nt, Artificial Sequence
  Description of Artificial Sequence: Synthetic oligonucleotide
acugccacucaaggcauca

SEQ ID NO: 2384185 - RNA, 19 nt, Artificial Sequence
  Description of Artificial Sequence: Synthetic oligonucleotide
cagcccauuacugccacuc

SEQ ID NO: 2384186 - RNA, 19 nt, Artificial Sequence
  Description of Artificial Sequence: Synthetic oligonucleotide
gucauucuaccacauucua

SEQ ID NO: 2384187 - RNA, 19 nt, Artificial Sequence
  Description of Artificial Sequence: Synthetic oligonucleotide
uaucagcccacugcgccac

SEQ ID NO: 2384188 - RNA, 19 nt, Artificial Sequence
  Description of Artificial Sequence: Synthetic oligonucleotide
auguuauaaaauagucauu

SEQ ID NO: 2384189 - RNA, 19 nt, Artificial Sequence
  Description of Artificial Sequence: Synthetic oligonucleotide
augggacagaaugguucac

SEQ ID NO: 2384190 - RNA, 19 nt, Artificial Sequence
  Description of Artificial Sequence: Synthetic oligonucleotide
gauggcuuugcgguaggaa

SEQ ID NO: 2384191 - RNA, 19 nt, Artificial Sequence
  Description of Artificial Sequence: Synthetic oligonucleotide
auuaugggacagaaugguu

SEQ ID NO: 2384192 - RNA, 19 nt, Artificial Sequence
  Description of Artificial Sequence: Synthetic oligonucleotide
uguccacacauugcaucac

SEQ ID NO: 2384193 - RNA, 19 nt, Artificial Sequence
  Description of Artificial Sequence: Synthetic oligonucleotide
uggccaacacguguccaca

SEQ ID NO: 2384194 - RNA, 19 nt, Artificial Sequence
  Description of Artificial Sequence: Synthetic oligonucleotide
cuaucagcccacugcgcca

SEQ ID NO: 2384195 - RNA, 19 nt, Artificial Sequence
  Description of Artificial Sequence: Synthetic oligonucleotide
cacccacagacagccacgg

SEQ ID NO: 2384196 - RNA, 19 nt, Artificial Sequence
  Description of Artificial Sequence: Synthetic oligonucleotide
ccaagucacagaugguaac

SEQ ID NO: 2384197 - RNA, 19 nt, Artificial Sequence
  Description of Artificial Sequence: Synthetic oligonucleotide
gccacucaaggcaucaccc

SEQ ID NO: 2384198 - RNA, 19 nt, Artificial Sequence
  Description of Artificial Sequence: Synthetic oligonucleotide
guagucgaugagguuucug

SEQ ID NO: 2384199 - RNA, 19 nt, Artificial Sequence
  Description of Artificial Sequence: Synthetic oligonucleotide
gauucucuguaaggcaucu

SEQ ID NO: 2384200 - RNA, 19 nt, Artificial Sequence
  Description of Artificial Sequence: Synthetic oligonucleotide
cauccaccugcucauagua

SEQ ID NO: 2384201 - RNA, 19 nt, Artificial Sequence
  Description of Artificial Sequence: Synthetic oligonucleotide
caguuggaucucuucccuc

SEQ ID NO: 2384202 - RNA, 19 nt, Artificial Sequence
  Description of Artificial Sequence: Synthetic oligonucleotide
acucaaggcaucacccgga

SEQ ID NO: 2384203 - RNA, 19 nt, Artificial Sequence
  Description of Artificial Sequence: Synthetic oligonucleotide
uuccugcccgccagaaguc

SEQ ID NO: 2384204 - RNA, 19 nt, Artificial Sequence
  Description of Artificial Sequence: Synthetic oligonucleotide
acaucuucacgugucugua

SEQ ID NO: 2384205 - RNA, 19 nt, Artificial Sequence
  Description of Artificial Sequence: Synthetic oligonucleotide
agcccauuacugccacuca

SEQ ID NO: 2384206 - RNA, 19 nt, Artificial Sequence
  Description of Artificial Sequence: Synthetic oligonucleotide
aggccaacccacaccuuuc

SEQ ID NO: 2384207 - RNA, 19 nt, Artificial Sequence
  Description of Artificial Sequence: Synthetic oligonucleotide
cagcaguccaaagguggcc

SEQ ID NO: 2384208 - RNA, 19 nt, Artificial Sequence
  Description of Artificial Sequence: Synthetic oligonucleotide
cacaucuucacgugucugu

SEQ ID NO: 2384209 - RNA, 19 nt, Artificial Sequence
  Description of Artificial Sequence: Synthetic oligonucleotide
gugacugcacagucuugca

SEQ ID NO: 2384210 - RNA, 19 nt, Artificial Sequence
  Description of Artificial Sequence: Synthetic oligonucleotide
acuugcucuccuacaguca

SEQ ID NO: 2384211 - RNA, 19 nt, Artificial Sequence
  Description of Artificial Sequence: Synthetic oligonucleotide
guaaggcaucuccauguua

SEQ ID NO: 2384212 - RNA, 19 nt, Artificial Sequence
  Description of Artificial Sequence: Synthetic oligonucleotide
cagaaugguucacaaggcu

SEQ ID NO: 2384213 - RNA, 19 nt, Artificial Sequence
  Description of Artificial Sequence: Synthetic oligonucleotide
uccuucaguuggaucucuu

SEQ ID NO: 2384214 - RNA, 19 nt, Artificial Sequence
  Description of Artificial Sequence: Synthetic oligonucleotide
uccugcccgccagaagucc

SEQ ID NO: 2384215 - RNA, 19 nt, Artificial Sequence
  Description of Artificial Sequence: Synthetic oligonucleotide
caucugugcugucgaaaca

SEQ ID NO: 2384216 - RNA, 19 nt, Artificial Sequence
  Description of Artificial Sequence: Synthetic oligonucleotide
cugcccgccagaaguccag

SEQ ID NO: 2384217 - RNA, 19 nt, Artificial Sequence
  Description of Artificial Sequence: Synthetic oligonucleotide
ccugcauuacugaggaaga

SEQ ID NO: 2384218 - RNA, 19 nt, Artificial Sequence
  Description of Artificial Sequence: Synthetic oligonucleotide
gugauucucuguaaggcau

SEQ ID NO: 2384219 - RNA, 19 nt, Artificial Sequence
  Description of Artificial Sequence: Synthetic oligonucleotide
cagccgugacugcacaguc

SEQ ID NO: 2384220 - RNA, 19 nt, Artificial Sequence
  Description of Artificial Sequence: Synthetic oligonucleotide
auccagccgugacugcaca

SEQ ID NO: 2384221 - RNA, 19 nt, Artificial Sequence
  Description of Artificial Sequence: Synthetic oligonucleotide
aguccagggucgucuucgu

SEQ ID NO: 2384222 - RNA, 19 nt, Artificial Sequence
  Description of Artificial Sequence: Synthetic oligonucleotide
uucugucuaucagcccacu

SEQ ID NO: 2384223 - RNA, 19 nt, Artificial Sequence
  Description of Artificial Sequence: Synthetic oligonucleotide
cagcugcauuguaauuaug

SEQ ID NO: 2384224 - RNA, 19 nt, Artificial Sequence
  Description of Artificial Sequence: Synthetic oligonucleotide
uacugccacucaaggcauc

SEQ ID NO: 2384225 - RNA, 19 nt, Artificial Sequence
  Description of Artificial Sequence: Synthetic oligonucleotide
gggucgucuucguuaucag

SEQ ID NO: 2384226 - RNA, 19 nt, Artificial Sequence
  Description of Artificial Sequence: Synthetic oligonucleotide
caucugccacccuggugac

SEQ ID NO: 2384227 - RNA, 19 nt, Artificial Sequence
  Description of Artificial Sequence: Synthetic oligonucleotide
aaggcaucacccggagauu

SEQ ID NO: 2384228 - RNA, 19 nt, Artificial Sequence
  Description of Artificial Sequence: Synthetic oligonucleotide
cgugacugcacagucuugc

SEQ ID NO: 2384229 - RNA, 19 nt, Artificial Sequence
  Description of Artificial Sequence: Synthetic oligonucleotide
ccgcacacacaucuucacg

SEQ ID NO: 2384230 - RNA, 19 nt, Artificial Sequence
  Description of Artificial Sequence: Synthetic oligonucleotide
ugcccgccagaaguccagg

SEQ ID NO: 2384231 - RNA, 19 nt, Artificial Sequence
  Description of Artificial Sequence: Synthetic oligonucleotide
cacccggagauuacaucca

SEQ ID NO: 2384232 - RNA, 19 nt, Artificial Sequence
  Description of Artificial Sequence: Synthetic oligonucleotide
gggcaggaaggggauaaag

SEQ ID NO: 2384233 - RNA, 19 nt, Artificial Sequence
  Description of Artificial Sequence: Synthetic oligonucleotide
cguguccacacauugcauc

SEQ ID NO: 2384234 - RNA, 19 nt, Artificial Sequence
  Description of Artificial Sequence: Synthetic oligonucleotide
ggccaacccacaccuuucc

SEQ ID NO: 2384235 - RNA, 19 nt, Artificial Sequence
  Description of Artificial Sequence: Synthetic oligonucleotide
aggcaucacccggagauua

SEQ ID NO: 2384236 - RNA, 19 nt, Artificial Sequence
  Description of Artificial Sequence: Synthetic oligonucleotide
cagcccuugucugaguaga

SEQ ID NO: 2384237 - RNA, 19 nt, Artificial Sequence
  Description of Artificial Sequence: Synthetic oligonucleotide
gucugcagcugcauuguaa

SEQ ID NO: 2384238 - RNA, 19 nt, Artificial Sequence
  Description of Artificial Sequence: Synthetic oligonucleotide
gcucauaguagucgaggaa

SEQ ID NO: 2384239 - RNA, 19 nt, Artificial Sequence
  Description of Artificial Sequence: Synthetic oligonucleotide
gcagcccuugucugaguag

SEQ ID NO: 2384240 - RNA, 19 nt, Artificial Sequence
  Description of Artificial Sequence: Synthetic oligonucleotide
cuaccacauucuauaaaau

SEQ ID NO: 2384241 - RNA, 19 nt, Artificial Sequence
  Description of Artificial Sequence: Synthetic oligonucleotide
cgucuucguuaucaggucc

SEQ ID NO: 2384242 - RNA, 19 nt, Artificial Sequence
  Description of Artificial Sequence: Synthetic oligonucleotide
ccacaccuuuccaagucac

SEQ ID NO: 2384243 - RNA, 19 nt, Artificial Sequence
  Description of Artificial Sequence: Synthetic oligonucleotide
ugccacccuggugacgaug

SEQ ID NO: 2384244 - RNA, 19 nt, Artificial Sequence
  Description of Artificial Sequence: Synthetic oligonucleotide
caguccaaagguggccaac

SEQ ID NO: 2384245 - RNA, 19 nt, Artificial Sequence
  Description of Artificial Sequence: Synthetic oligonucleotide
cucuguaaggcaucuccau

SEQ ID NO: 2384246 - RNA, 19 nt, Artificial Sequence
  Description of Artificial Sequence: Synthetic oligonucleotide
gcuuugcgguaggaaaucc

SEQ ID NO: 2384247 - RNA, 19 nt, Artificial Sequence
  Description of Artificial Sequence: Synthetic oligonucleotide
aguagucgaugagguuucu

SEQ ID NO: 2384248 - RNA, 19 nt, Artificial Sequence
  Description of Artificial Sequence: Synthetic oligonucleotide
acccuggugacgaugucuu

SEQ ID NO: 2384249 - RNA, 19 nt, Artificial Sequence
  Description of Artificial Sequence: Synthetic oligonucleotide
cagguccccaccugcauua

SEQ ID NO: 2384250 - RNA, 19 nt, Artificial Sequence
  Description of Artificial Sequence: Synthetic oligonucleotide
aucucugcccgcacacaca

SEQ ID NO: 2384251 - RNA, 19 nt, Artificial Sequence
  Description of Artificial Sequence: Synthetic oligonucleotide
aucugccacccuggugacg

SEQ ID NO: 2384252 - RNA, 19 nt, Artificial Sequence
  Description of Artificial Sequence: Synthetic oligonucleotide
agguccccaccugcauuac

SEQ ID NO: 2384253 - RNA, 19 nt, Artificial Sequence
  Description of Artificial Sequence: Synthetic oligonucleotide
cacacacaucuucacgugu

SEQ ID NO: 2384254 - RNA, 19 nt, Artificial Sequence
  Description of Artificial Sequence: Synthetic oligonucleotide
augguucacaaggcuggaa

SEQ ID NO: 2384255 - RNA, 19 nt, Artificial Sequence
  Description of Artificial Sequence: Synthetic oligonucleotide
cccuugucugaguagaucu

SEQ ID NO: 2384256 - RNA, 19 nt, Artificial Sequence
  Description of Artificial Sequence: Synthetic oligonucleotide
cccauccaccugcucauag

SEQ ID NO: 2384257 - RNA, 19 nt, Artificial Sequence
  Description of Artificial Sequence: Synthetic oligonucleotide
ccgccagaaguccaggguc

SEQ ID NO: 2384258 - RNA, 19 nt, Artificial Sequence
  Description of Artificial Sequence: Synthetic oligonucleotide
ggaaggggauaaaguaguc

SEQ ID NO: 2384259 - RNA, 19 nt, Artificial Sequence
  Description of Artificial Sequence: Synthetic oligonucleotide
ccuuuccaagucacagaug

SEQ ID NO: 2384260 - RNA, 19 nt, Artificial Sequence
  Description of Artificial Sequence: Synthetic oligonucleotide
agccgugacugcacagucu

SEQ ID NO: 2384261 - RNA, 19 nt, Artificial Sequence
  Description of Artificial Sequence: Synthetic oligonucleotide
gcccgccagaaguccaggg

SEQ ID NO: 2384262 - RNA, 19 nt, Artificial Sequence
  Description of Artificial Sequence: Synthetic oligonucleotide
gccaacacguguccacaca

SEQ ID NO: 2384263 - RNA, 19 nt, Artificial Sequence
  Description of Artificial Sequence: Synthetic oligonucleotide
ggcuuugcgguaggaaauc

SEQ ID NO: 2384264 - RNA, 19 nt, Artificial Sequence
  Description of Artificial Sequence: Synthetic oligonucleotide
cugcaucucugcccgcaca

SEQ ID NO: 2384265 - RNA, 19 nt, Artificial Sequence
  Description of Artificial Sequence: Synthetic oligonucleotide
ggccaacacguguccacac

SEQ ID NO: 2384266 - RNA, 19 nt, Artificial Sequence
  Description of Artificial Sequence: Synthetic oligonucleotide
gcccauuacugccacucaa

SEQ ID NO: 2384267 - RNA, 19 nt, Artificial Sequence
  Description of Artificial Sequence: Synthetic oligonucleotide
cccgcacacacaucuucac

SEQ ID NO: 2384268 - RNA, 19 nt, Artificial Sequence
  Description of Artificial Sequence: Synthetic oligonucleotide
cuggaaucacagacuugcu

SEQ ID NO: 2384269 - RNA, 19 nt, Artificial Sequence
  Description of Artificial Sequence: Synthetic oligonucleotide
caucacccggagauuacau

SEQ ID NO: 2384270 - RNA, 19 nt, Artificial Sequence
  Description of Artificial Sequence: Synthetic oligonucleotide
cugccacucaaggcaucac

SEQ ID NO: 2384271 - RNA, 19 nt, Artificial Sequence
  Description of Artificial Sequence: Synthetic oligonucleotide
cgggccugcaucucugccc

SEQ ID NO: 2384272 - RNA, 19 nt, Artificial Sequence
  Description of Artificial Sequence: Synthetic oligonucleotide
acguguccacacauugcau

SEQ ID NO: 2384273 - RNA, 19 nt, Artificial Sequence
  Description of Artificial Sequence: Synthetic oligonucleotide
ggcuggaaucacagacuug

SEQ ID NO: 2384274 - RNA, 19 nt, Artificial Sequence
  Description of Artificial Sequence: Synthetic oligonucleotide
gcaucacccggagauuaca

SEQ ID NO: 2384275 - RNA, 19 nt, Artificial Sequence
  Description of Artificial Sequence: Synthetic oligonucleotide
aucagcccacugcgccaca

SEQ ID NO: 2384276 - RNA, 19 nt, Artificial Sequence
  Description of Artificial Sequence: Synthetic oligonucleotide
ggcaucacccggagauuac

SEQ ID NO: 2384277 - RNA, 19 nt, Artificial Sequence
  Description of Artificial Sequence: Synthetic oligonucleotide
guuggaucucuucccucuu

SEQ ID NO: 2384278 - RNA, 19 nt, Artificial Sequence
  Description of Artificial Sequence: Synthetic oligonucleotide
cccacaccuuuccaaguca

SEQ ID NO: 2384279 - RNA, 19 nt, Artificial Sequence
  Description of Artificial Sequence: Synthetic oligonucleotide
gccaacccacaccuuucca

SEQ ID NO: 2384280 - RNA, 19 nt, Artificial Sequence
  Description of Artificial Sequence: Synthetic oligonucleotide
gcgccacagaccacugugc

SEQ ID NO: 2384281 - RNA, 19 nt, Artificial Sequence
  Description of Artificial Sequence: Synthetic oligonucleotide
ggaucucuucccucuuccu

SEQ ID NO: 2384282 - RNA, 19 nt, Artificial Sequence
  Description of Artificial Sequence: Synthetic oligonucleotide
gaccacugugcuuguuguu

SEQ ID NO: 2384283 - RNA, 19 nt, Artificial Sequence
  Description of Artificial Sequence: Synthetic oligonucleotide
cacccuggugacgaugucu

SEQ ID NO: 2384284 - RNA, 19 nt, Artificial Sequence
  Description of Artificial Sequence: Synthetic oligonucleotide
agcccuugucugaguagau

SEQ ID NO: 2384285 - RNA, 19 nt, Artificial Sequence
  Description of Artificial Sequence: Synthetic oligonucleotide
cggagauuacauccaguga

SEQ ID NO: 2384286 - RNA, 19 nt, Artificial Sequence
  Description of Artificial Sequence: Synthetic oligonucleotide
gcucuccuacagucagaac

SEQ ID NO: 2384287 - RNA, 19 nt, Artificial Sequence
  Description of Artificial Sequence: Synthetic oligonucleotide
gguggccaacacgugucca

SEQ ID NO: 2384288 - RNA, 19 nt, Artificial Sequence
  Description of Artificial Sequence: Synthetic oligonucleotide
gccgugacugcacagucuu

SEQ ID NO: 2384289 - RNA, 19 nt, Artificial Sequence
  Description of Artificial Sequence: Synthetic oligonucleotide
caacacguguccacacauu

SEQ ID NO: 2384290 - RNA, 19 nt, Artificial Sequence
  Description of Artificial Sequence: Synthetic oligonucleotide
ccucuuccuuccugcccgc

SEQ ID NO: 2384291 - RNA, 19 nt, Artificial Sequence
  Description of Artificial Sequence: Synthetic oligonucleotide
agacacccacagacagcca

SEQ ID NO: 2384292 - RNA, 19 nt, Artificial Sequence
  Description of Artificial Sequence: Synthetic oligonucleotide
gcccgcacacacaucuuca

SEQ ID NO: 2384293 - RNA, 19 nt, Artificial Sequence
  Description of Artificial Sequence: Synthetic oligonucleotide
cagggucgucuucguuauc

SEQ ID NO: 2384294 - RNA, 19 nt, Artificial Sequence
  Description of Artificial Sequence: Synthetic oligonucleotide
cagcccacugcgccacaga

SEQ ID NO: 2384295 - RNA, 19 nt, Artificial Sequence
  Description of Artificial Sequence: Synthetic oligonucleotide
gcaucacuguaaacagaaa

SEQ ID NO: 2384296 - RNA, 19 nt, Artificial Sequence
  Description of Artificial Sequence: Synthetic oligonucleotide
cugcauuacugaggaagau

SEQ ID NO: 2384297 - RNA, 19 nt, Artificial Sequence
  Description of Artificial Sequence: Synthetic oligonucleotide
cacgggcuccagguccuuc

SEQ ID NO: 2384298 - RNA, 19 nt, Artificial Sequence
  Description of Artificial Sequence: Synthetic oligonucleotide
ccaacacguguccacacau

SEQ ID NO: 2384299 - RNA, 19 nt, Artificial Sequence
  Description of Artificial Sequence: Synthetic oligonucleotide
ccgugacugcacagucuug

SEQ ID NO: 2384300 - RNA, 19 nt, Artificial Sequence
  Description of Artificial Sequence: Synthetic oligonucleotide
ccugcccgccagaagucca

SEQ ID NO: 2384301 - RNA, 19 nt, Artificial Sequence
  Description of Artificial Sequence: Synthetic oligonucleotide
gcaucucugcccgcacaca

SEQ ID NO: 2384302 - RNA, 19 nt, Artificial Sequence
  Description of Artificial Sequence: Synthetic oligonucleotide
cgguaggaaaucccaucca

SEQ ID NO: 2384303 - RNA, 19 nt, Artificial Sequence
  Description of Artificial Sequence: Synthetic oligonucleotide
gccacccuggugacgaugu

SEQ ID NO: 2384304 - RNA, 19 nt, Artificial Sequence
  Description of Artificial Sequence: Synthetic oligonucleotide
caccugcauuacugaggaa

SEQ ID NO: 2384305 - RNA, 19 nt, Artificial Sequence
  Description of Artificial Sequence: Synthetic oligonucleotide
cacagaccacugugcuugu

SEQ ID NO: 2384306 - RNA, 19 nt, Artificial Sequence
  Description of Artificial Sequence: Synthetic oligonucleotide
cguuaucagguccccaccu

SEQ ID NO: 2384307 - RNA, 19 nt, Artificial Sequence
  Description of Artificial Sequence: Synthetic oligonucleotide
cccuggugacgaugucuuc

SEQ ID NO: 2384308 - RNA, 19 nt, Artificial Sequence
  Description of Artificial Sequence: Synthetic oligonucleotide
gguccccaccugcauuacu

SEQ ID NO: 2384309 - RNA, 19 nt, Artificial Sequence
  Description of Artificial Sequence: Synthetic oligonucleotide
gcccagcccauuacugcca

SEQ ID NO: 2384310 - RNA, 19 nt, Artificial Sequence
  Description of Artificial Sequence: Synthetic oligonucleotide
ggccugcaucucugcccgc

SEQ ID NO: 2384311 - RNA, 19 nt, Artificial Sequence
  Description of Artificial Sequence: Synthetic oligonucleotide
gccacagaccacugugcuu

SEQ ID NO: 2384312 - RNA, 19 nt, Artificial Sequence
  Description of Artificial Sequence: Synthetic oligonucleotide
cugcgccacagaccacugu

SEQ ID NO: 2384313 - RNA, 19 nt, Artificial Sequence
  Description of Artificial Sequence: Synthetic oligonucleotide
cccgccagaaguccagggu

SEQ ID NO: 2384314 - RNA, 19 nt, Artificial Sequence
  Description of Artificial Sequence: Synthetic oligonucleotide
guccagggucgucuucguu

SEQ ID NO: 2384315 - RNA, 19 nt, Artificial Sequence
  Description of Artificial Sequence: Synthetic oligonucleotide
cccggagauuacauccagu

SEQ ID NO: 2384316 - RNA, 19 nt, Artificial Sequence
  Description of Artificial Sequence: Synthetic oligonucleotide
ccacccuggugacgauguc

SEQ ID NO: 2384317 - RNA, 19 nt, Artificial Sequence
  Description of Artificial Sequence: Synthetic oligonucleotide
ccagccgugacugcacagu

SEQ ID NO: 2384318 - RNA, 19 nt, Artificial Sequence
  Description of Artificial Sequence: Synthetic oligonucleotide
cagaacagcccagcccauu

SEQ ID NO: 2384319 - RNA, 19 nt, Artificial Sequence
  Description of Artificial Sequence: Synthetic oligonucleotide
ccacugcgccacagaccac

SEQ ID NO: 2384320 - RNA, 19 nt, Artificial Sequence
  Description of Artificial Sequence: Synthetic oligonucleotide
gccagaaguccagggucgu

SEQ ID NO: 2384321 - RNA, 19 nt, Artificial Sequence
  Description of Artificial Sequence: Synthetic oligonucleotide
cugcccgcacacacaucuu

SEQ ID NO: 2384322 - RNA, 19 nt, Artificial Sequence
  Description of Artificial Sequence: Synthetic oligonucleotide
cgccacagaccacugugcu

SEQ ID NO: 2384323 - RNA, 19 nt, Artificial Sequence
  Description of Artificial Sequence: Synthetic oligonucleotide
cugccacccuggugacgau

SEQ ID NO: 2384324 - RNA, 19 nt, Artificial Sequence
  Description of Artificial Sequence: Synthetic oligonucleotide
ccagcccauuacugccacu

SEQ ID NO: 2384325 - RNA, 19 nt, Artificial Sequence
  Description of Artificial Sequence: Synthetic oligonucleotide
uucaauauuguauugaugg

SEQ ID NO: 2384326 - RNA, 19 nt, Artificial Sequence
  Description of Artificial Sequence: Synthetic oligonucleotide
gagauuauaguacugaugc

SEQ ID NO: 2384327 - RNA, 19 nt, Artificial Sequence
  Description of Artificial Sequence: Synthetic oligonucleotide
auauuuaggaaccuugacc

SEQ ID NO: 2384328 - RNA, 19 nt, Artificial Sequence
  Description of Artificial Sequence: Synthetic oligonucleotide
augaauauuugcaagaucc

SEQ ID NO: 2384329 - RNA, 19 nt, Artificial Sequence
  Description of Artificial Sequence: Synthetic oligonucleotide
aauauuuaggaaccuugac

SEQ ID NO: 2384330 - RNA, 19 nt, Artificial Sequence
  Description of Artificial Sequence: Synthetic oligonucleotide
aauauuugcaagauccucg

SEQ ID NO: 2384331 - RNA, 19 nt, Artificial Sequence
  Description of Artificial Sequence: Synthetic oligonucleotide
uuucccaccaauaucauga

SEQ ID NO: 2384332 - RNA, 19 nt, Artificial Sequence
  Description of Artificial Sequence: Synthetic oligonucleotide
acagcgacagaccacagcc

SEQ ID NO: 2384333 - RNA, 19 nt, Artificial Sequence
  Description of Artificial Sequence: Synthetic oligonucleotide
accuugaccagccacacgc

SEQ ID NO: 2384334 - RNA, 19 nt, Artificial Sequence
  Description of Artificial Sequence: Synthetic oligonucleotide
ugaugcuucucaaaggcgg

SEQ ID NO: 2384335 - RNA, 19 nt, Artificial Sequence
  Description of Artificial Sequence: Synthetic oligonucleotide
uaaacgauaccucaguccu

SEQ ID NO: 2384336 - RNA, 19 nt, Artificial Sequence
  Description of Artificial Sequence: Synthetic oligonucleotide
uuuacauucugaaugccga

SEQ ID NO: 2384337 - RNA, 19 nt, Artificial Sequence
  Description of Artificial Sequence: Synthetic oligonucleotide
uaaaguaaacgauaccuca

SEQ ID NO: 2384338 - RNA, 19 nt, Artificial Sequence
  Description of Artificial Sequence: Synthetic oligonucleotide
ucgguaaauacuguuaacg

SEQ ID NO: 2384339 - RNA, 19 nt, Artificial Sequence
  Description of Artificial Sequence: Synthetic oligonucleotide
guuguuacaacuuugucca

SEQ ID NO: 2384340 - RNA, 19 nt, Artificial Sequence
  Description of Artificial Sequence: Synthetic oligonucleotide
uucaagauuucuuucaggu

SEQ ID NO: 2384341 - RNA, 19 nt, Artificial Sequence
  Description of Artificial Sequence: Synthetic oligonucleotide
uuugcaagacaaauggaug

SEQ ID NO: 2384342 - RNA, 19 nt, Artificial Sequence
  Description of Artificial Sequence: Synthetic oligonucleotide
uguauugaugguuagcaac

SEQ ID NO: 2384343 - RNA, 19 nt, Artificial Sequence
  Description of Artificial Sequence: Synthetic oligonucleotide
aaaacagcauguccaggac

SEQ ID NO: 2384344 - RNA, 19 nt, Artificial Sequence
  Description of Artificial Sequence: Synthetic oligonucleotide
auuucuuucagguaaccca

SEQ ID NO: 2384345 - RNA, 19 nt, Artificial Sequence
  Description of Artificial Sequence: Synthetic oligonucleotide
ucuucuauuugcaaucucu

SEQ ID NO: 2384346 - RNA, 19 nt, Artificial Sequence
  Description of Artificial Sequence: Synthetic oligonucleotide
uaucaugaauauuugcaag

SEQ ID NO: 2384347 - RNA, 19 nt, Artificial Sequence
  Description of Artificial Sequence: Synthetic oligonucleotide
ugguuucccaccaauauca

SEQ ID NO: 2384348 - RNA, 19 nt, Artificial Sequence
  Description of Artificial Sequence: Synthetic oligonucleotide
ucuauuugcaaucucuuua

SEQ ID NO: 2384349 - RNA, 19 nt, Artificial Sequence
  Description of Artificial Sequence: Synthetic oligonucleotide
aaauggaugcucucuagga

SEQ ID NO: 2384350 - RNA, 19 nt, Artificial Sequence
  Description of Artificial Sequence: Synthetic oligonucleotide
ugagauuauaguacugaug

SEQ ID NO: 2384351 - RNA, 19 nt, Artificial Sequence
  Description of Artificial Sequence: Synthetic oligonucleotide
acagaccacagccagacuc

SEQ ID NO: 2384352 - RNA, 19 nt, Artificial Sequence
  Description of Artificial Sequence: Synthetic oligonucleotide
uuaaaguaaacgauaccuc

SEQ ID NO: 2384353 - RNA, 19 nt, Artificial Sequence
  Description of Artificial Sequence: Synthetic oligonucleotide
uugcaagacaaauggaugc

SEQ ID NO: 2384354 - RNA, 19 nt, Artificial Sequence
  Description of Artificial Sequence: Synthetic oligonucleotide
uuaucugaggagcucucgg

SEQ ID NO: 2384355 - RNA, 19 nt, Artificial Sequence
  Description of Artificial Sequence: Synthetic oligonucleotide
uccucguuuaaaguaaacg

SEQ ID NO: 2384356 - RNA, 19 nt, Artificial Sequence
  Description of Artificial Sequence: Synthetic oligonucleotide
uccgccaugagucuguggc

SEQ ID NO: 2384357 - RNA, 19 nt, Artificial Sequence
  Description of Artificial Sequence: Synthetic oligonucleotide
ugauucuuggcaauccuca

SEQ ID NO: 2384358 - RNA, 19 nt, Artificial Sequence
  Description of Artificial Sequence: Synthetic oligonucleotide
gguuguuacaacuuugucc

SEQ ID NO: 2384359 - RNA, 19 nt, Artificial Sequence
  Description of Artificial Sequence: Synthetic oligonucleotide
accgagaccgccaaaagcc

SEQ ID NO: 2384360 - RNA, 19 nt, Artificial Sequence
  Description of Artificial Sequence: Synthetic oligonucleotide
gacaguuuaucugaggagc

SEQ ID NO: 2384361 - RNA, 19 nt, Artificial Sequence
  Description of Artificial Sequence: Synthetic oligonucleotide
aagacaaauggaugcucuc

SEQ ID NO: 2384362 - RNA, 19 nt, Artificial Sequence
  Description of Artificial Sequence: Synthetic oligonucleotide
ucuuucagguaacccacgg

SEQ ID NO: 2384363 - RNA, 19 nt, Artificial Sequence
  Description of Artificial Sequence: Synthetic oligonucleotide
aguaaacgauaccucaguc

SEQ ID NO: 2384364 - RNA, 19 nt, Artificial Sequence
  Description of Artificial Sequence: Synthetic oligonucleotide
auuguauugaugguuagca

SEQ ID NO: 2384365 - RNA, 19 nt, Artificial Sequence
  Description of Artificial Sequence: Synthetic oligonucleotide
aaugccgauuucuuucaag

SEQ ID NO: 2384366 - RNA, 19 nt, Artificial Sequence
  Description of Artificial Sequence: Synthetic oligonucleotide
uauucaauauuguauugau

SEQ ID NO: 2384367 - RNA, 19 nt, Artificial Sequence
  Description of Artificial Sequence: Synthetic oligonucleotide
aucaugaauauuugcaaga

SEQ ID NO: 2384368 - RNA, 19 nt, Artificial Sequence
  Description of Artificial Sequence: Synthetic oligonucleotide
agccuuacagguuuggaag

SEQ ID NO: 2384369 - RNA, 19 nt, Artificial Sequence
  Description of Artificial Sequence: Synthetic oligonucleotide
aaaguaaacgauaccucag

SEQ ID NO: 2384370 - RNA, 19 nt, Artificial Sequence
  Description of Artificial Sequence: Synthetic oligonucleotide
uugugaaucccuuuuacau

SEQ ID NO: 2384371 - RNA, 19 nt, Artificial Sequence
  Description of Artificial Sequence: Synthetic oligonucleotide
guaaacgauaccucagucc

SEQ ID NO: 2384372 - RNA, 19 nt, Artificial Sequence
  Description of Artificial Sequence: Synthetic oligonucleotide
uugugauagccuuacaggu

SEQ ID NO: 2384373 - RNA, 19 nt, Artificial Sequence
  Description of Artificial Sequence: Synthetic oligonucleotide
ugcugggacaaauauuuag

SEQ ID NO: 2384374 - RNA, 19 nt, Artificial Sequence
  Description of Artificial Sequence: Synthetic oligonucleotide
uccaccaaauccuugagau

SEQ ID NO: 2384375 - RNA, 19 nt, Artificial Sequence
  Description of Artificial Sequence: Synthetic oligonucleotide
aggacagacggacagcgac

SEQ ID NO: 2384376 - RNA, 19 nt, Artificial Sequence
  Description of Artificial Sequence: Synthetic oligonucleotide
accaauaucaugaauauuu

SEQ ID NO: 2384377 - RNA, 19 nt, Artificial Sequence
  Description of Artificial Sequence: Synthetic oligonucleotide
uuaggaaccuugaccagcc

SEQ ID NO: 2384378 - RNA, 19 nt, Artificial Sequence
  Description of Artificial Sequence: Synthetic oligonucleotide
uguaccacuauuccuucca

SEQ ID NO: 2384379 - RNA, 19 nt, Artificial Sequence
  Description of Artificial Sequence: Synthetic oligonucleotide
auaucaugaauauuugcaa

SEQ ID NO: 2384380 - RNA, 19 nt, Artificial Sequence
  Description of Artificial Sequence: Synthetic oligonucleotide
accacuauuccuuccaaug

SEQ ID NO: 2384381 - RNA, 19 nt, Artificial Sequence
  Description of Artificial Sequence: Synthetic oligonucleotide
acuguuaacgucuguccuc

SEQ ID NO: 2384382 - RNA, 19 nt, Artificial Sequence
  Description of Artificial Sequence: Synthetic oligonucleotide
uguaguuuucacuggcagc

SEQ ID NO: 2384383 - RNA, 19 nt, Artificial Sequence
  Description of Artificial Sequence: Synthetic oligonucleotide
cuugguaaugccuguauuc

SEQ ID NO: 2384384 - RNA, 19 nt, Artificial Sequence
  Description of Artificial Sequence: Synthetic oligonucleotide
acaggcuuguaauugguug

SEQ ID NO: 2384385 - RNA, 19 nt, Artificial Sequence
  Description of Artificial Sequence: Synthetic oligonucleotide
ucguuuaaaguaaacgaua

SEQ ID NO: 2384386 - RNA, 19 nt, Artificial Sequence
  Description of Artificial Sequence: Synthetic oligonucleotide
aauugguuguuacaacuuu

SEQ ID NO: 2384387 - RNA, 19 nt, Artificial Sequence
  Description of Artificial Sequence: Synthetic oligonucleotide
gaaggacagacggacagcg

SEQ ID NO: 2384388 - RNA, 19 nt, Artificial Sequence
  Description of Artificial Sequence: Synthetic oligonucleotide
ucuuuaaucucauguaguu

SEQ ID NO: 2384389 - RNA, 19 nt, Artificial Sequence
  Description of Artificial Sequence: Synthetic oligonucleotide
aacgucuguccuccaacac

SEQ ID NO: 2384390 - RNA, 19 nt, Artificial Sequence
  Description of Artificial Sequence: Synthetic oligonucleotide
auugaugguuagcaacagg

SEQ ID NO: 2384391 - RNA, 19 nt, Artificial Sequence
  Description of Artificial Sequence: Synthetic oligonucleotide
ucuugugaaucccuuuuac

SEQ ID NO: 2384392 - RNA, 19 nt, Artificial Sequence
  Description of Artificial Sequence: Synthetic oligonucleotide
ugacaguuuaucugaggag

SEQ ID NO: 2384393 - RNA, 19 nt, Artificial Sequence
  Description of Artificial Sequence: Synthetic oligonucleotide
uuuaggaaccuugaccagc

SEQ ID NO: 2384394 - RNA, 19 nt, Artificial Sequence
  Description of Artificial Sequence: Synthetic oligonucleotide
ucucgguaaauacuguuaa

SEQ ID NO: 2384395 - RNA, 19 nt, Artificial Sequence
  Description of Artificial Sequence: Synthetic oligonucleotide
aggagcucucgguaaauac

SEQ ID NO: 2384396 - RNA, 19 nt, Artificial Sequence
  Description of Artificial Sequence: Synthetic oligonucleotide
uguaauugguuguuacaac

SEQ ID NO: 2384397 - RNA, 19 nt, Artificial Sequence
  Description of Artificial Sequence: Synthetic oligonucleotide
auuugcaagauccucguuu

SEQ ID NO: 2384398 - RNA, 19 nt, Artificial Sequence
  Description of Artificial Sequence: Synthetic oligonucleotide
uuguaauugguuguuacaa

SEQ ID NO: 2384399 - RNA, 19 nt, Artificial Sequence
  Description of Artificial Sequence: Synthetic oligonucleotide
uaaauacuguuaacgucug

SEQ ID NO: 2384400 - RNA, 19 nt, Artificial Sequence
  Description of Artificial Sequence: Synthetic oligonucleotide
cuauuccuuccaaugacag

SEQ ID NO: 2384401 - RNA, 19 nt, Artificial Sequence
  Description of Artificial Sequence: Synthetic oligonucleotide
ccuuucauauucaauauug

SEQ ID NO: 2384402 - RNA, 19 nt, Artificial Sequence
  Description of Artificial Sequence: Synthetic oligonucleotide
uuaacgucuguccuccaac

SEQ ID NO: 2384403 - RNA, 19 nt, Artificial Sequence
  Description of Artificial Sequence: Synthetic oligonucleotide
uggaagacucuucuauuug

SEQ ID NO: 2384404 - RNA, 19 nt, Artificial Sequence
  Description of Artificial Sequence: Synthetic oligonucleotide
ugguaaugccuguauuccg

SEQ ID NO: 2384405 - RNA, 19 nt, Artificial Sequence
  Description of Artificial Sequence: Synthetic oligonucleotide
gacucuucuauuugcaauc

SEQ ID NO: 2384406 - RNA, 19 nt, Artificial Sequence
  Description of Artificial Sequence: Synthetic oligonucleotide
cucaaaggcggaaaacagc

SEQ ID NO: 2384407 - RNA, 19 nt, Artificial Sequence
  Description of Artificial Sequence: Synthetic oligonucleotide
agcugaaggacagacggac

SEQ ID NO: 2384408 - RNA, 19 nt, Artificial Sequence
  Description of Artificial Sequence: Synthetic oligonucleotide
aggaaccuugaccagccac

SEQ ID NO: 2384409 - RNA, 19 nt, Artificial Sequence
  Description of Artificial Sequence: Synthetic oligonucleotide
uuuaucugaggagcucucg

SEQ ID NO: 2384410 - RNA, 19 nt, Artificial Sequence
  Description of Artificial Sequence: Synthetic oligonucleotide
uacuguuaacgucuguccu

SEQ ID NO: 2384411 - RNA, 19 nt, Artificial Sequence
  Description of Artificial Sequence: Synthetic oligonucleotide
auauuugcaagauccucgu

SEQ ID NO: 2384412 - RNA, 19 nt, Artificial Sequence
  Description of Artificial Sequence: Synthetic oligonucleotide
gugaaucccuuuuacauuc

SEQ ID NO: 2384413 - RNA, 19 nt, Artificial Sequence
  Description of Artificial Sequence: Synthetic oligonucleotide
uauuguauugaugguuagc

SEQ ID NO: 2384414 - RNA, 19 nt, Artificial Sequence
  Description of Artificial Sequence: Synthetic oligonucleotide
acaaauggaugcucucuag

SEQ ID NO: 2384415 - RNA, 19 nt, Artificial Sequence
  Description of Artificial Sequence: Synthetic oligonucleotide
ucagguaacccacgggcug

SEQ ID NO: 2384416 - RNA, 19 nt, Artificial Sequence
  Description of Artificial Sequence: Synthetic oligonucleotide
uguuacaacuuuguccagc

SEQ ID NO: 2384417 - RNA, 19 nt, Artificial Sequence
  Description of Artificial Sequence: Synthetic oligonucleotide
ucuaggagcacugacugaa

SEQ ID NO: 2384418 - RNA, 19 nt, Artificial Sequence
  Description of Artificial Sequence: Synthetic oligonucleotide
cacguauucuugugaaucc

SEQ ID NO: 2384419 - RNA, 19 nt, Artificial Sequence
  Description of Artificial Sequence: Synthetic oligonucleotide
guaaauacuguuaacgucu

SEQ ID NO: 2384420 - RNA, 19 nt, Artificial Sequence
  Description of Artificial Sequence: Synthetic oligonucleotide
aacagcauguccaggacgu

SEQ ID NO: 2384421 - RNA, 19 nt, Artificial Sequence
  Description of Artificial Sequence: Synthetic oligonucleotide
auuccuuccaaugacaguu

SEQ ID NO: 2384422 - RNA, 19 nt, Artificial Sequence
  Description of Artificial Sequence: Synthetic oligonucleotide
cucucuguaccacuauucc

SEQ ID NO: 2384423 - RNA, 19 nt, Artificial Sequence
  Description of Artificial Sequence: Synthetic oligonucleotide
aggggcuuuagcccauugc

SEQ ID NO: 2384424 - RNA, 19 nt, Artificial Sequence
  Description of Artificial Sequence: Synthetic oligonucleotide
ggcuuuagcccauugcugg

SEQ ID NO: 2384425 - RNA, 19 nt, Artificial Sequence
  Description of Artificial Sequence: Synthetic oligonucleotide
augccgauuucuuucaaga

SEQ ID NO: 2384426 - RNA, 19 nt, Artificial Sequence
  Description of Artificial Sequence: Synthetic oligonucleotide
cuuccaggggcuuuagccc

SEQ ID NO: 2384427 - RNA, 19 nt, Artificial Sequence
  Description of Artificial Sequence: Synthetic oligonucleotide
uugagauuauaguacugau

SEQ ID NO: 2384428 - RNA, 19 nt, Artificial Sequence
  Description of Artificial Sequence: Synthetic oligonucleotide
guaguuuucacuggcagca

SEQ ID NO: 2384429 - RNA, 19 nt, Artificial Sequence
  Description of Artificial Sequence: Synthetic oligonucleotide
aauccucaguuucccaacu

SEQ ID NO: 2384430 - RNA, 19 nt, Artificial Sequence
  Description of Artificial Sequence: Synthetic oligonucleotide
uaauugguuguuacaacuu

SEQ ID NO: 2384431 - RNA, 19 nt, Artificial Sequence
  Description of Artificial Sequence: Synthetic oligonucleotide
ugggacaaauauuuaggaa

SEQ ID NO: 2384432 - RNA, 19 nt, Artificial Sequence
  Description of Artificial Sequence: Synthetic oligonucleotide
uguuguuugucugcccggg

SEQ ID NO: 2384433 - RNA, 19 nt, Artificial Sequence
  Description of Artificial Sequence: Synthetic oligonucleotide
acguauucuugugaauccc

SEQ ID NO: 2384434 - RNA, 19 nt, Artificial Sequence
  Description of Artificial Sequence: Synthetic oligonucleotide
ugaagcugguuucccacca

SEQ ID NO: 2384435 - RNA, 19 nt, Artificial Sequence
  Description of Artificial Sequence: Synthetic oligonucleotide
cuuccaaugacaguuuauc

SEQ ID NO: 2384436 - RNA, 19 nt, Artificial Sequence
  Description of Artificial Sequence: Synthetic oligonucleotide
uuaaucucauguaguuuuc

SEQ ID NO: 2384437 - RNA, 19 nt, Artificial Sequence
  Description of Artificial Sequence: Synthetic oligonucleotide
agcgacagaccacagccag

SEQ ID NO: 2384438 - RNA, 19 nt, Artificial Sequence
  Description of Artificial Sequence: Synthetic oligonucleotide
guuagcaacaggcuuguaa

SEQ ID NO: 2384439 - RNA, 19 nt, Artificial Sequence
  Description of Artificial Sequence: Synthetic oligonucleotide
aagacucuucuauuugcaa

SEQ ID NO: 2384440 - RNA, 19 nt, Artificial Sequence
  Description of Artificial Sequence: Synthetic oligonucleotide
aguuucccaacuucaccuc

SEQ ID NO: 2384441 - RNA, 19 nt, Artificial Sequence
  Description of Artificial Sequence: Synthetic oligonucleotide
cucaguccuuccuugauuc

SEQ ID NO: 2384442 - RNA, 19 nt, Artificial Sequence
  Description of Artificial Sequence: Synthetic oligonucleotide
uuguuugucugcccgggcu

SEQ ID NO: 2384443 - RNA, 19 nt, Artificial Sequence
  Description of Artificial Sequence: Synthetic oligonucleotide
cugaugcuucucaaaggcg

SEQ ID NO: 2384444 - RNA, 19 nt, Artificial Sequence
  Description of Artificial Sequence: Synthetic oligonucleotide
uuccuuucauauucaauau

SEQ ID NO: 2384445 - RNA, 19 nt, Artificial Sequence
  Description of Artificial Sequence: Synthetic oligonucleotide
aucucuuuaaucucaugua

SEQ ID NO: 2384446 - RNA, 19 nt, Artificial Sequence
  Description of Artificial Sequence: Synthetic oligonucleotide
cuuucagguaacccacggg

SEQ ID NO: 2384447 - RNA, 19 nt, Artificial Sequence
  Description of Artificial Sequence: Synthetic oligonucleotide
uauugaugguuagcaacag

SEQ ID NO: 2384448 - RNA, 19 nt, Artificial Sequence
  Description of Artificial Sequence: Synthetic oligonucleotide
ucucuguaccacuauuccu

SEQ ID NO: 2384449 - RNA, 19 nt, Artificial Sequence
  Description of Artificial Sequence: Synthetic oligonucleotide
guaauugguuguuacaacu

SEQ ID NO: 2384450 - RNA, 19 nt, Artificial Sequence
  Description of Artificial Sequence: Synthetic oligonucleotide
ggacaaauauuuaggaacc

SEQ ID NO: 2384451 - RNA, 19 nt, Artificial Sequence
  Description of Artificial Sequence: Synthetic oligonucleotide
uuauaguacugaugcuucu

SEQ ID NO: 2384452 - RNA, 19 nt, Artificial Sequence
  Description of Artificial Sequence: Synthetic oligonucleotide
cacuauuccuuccaaugac

SEQ ID NO: 2384453 - RNA, 19 nt, Artificial Sequence
  Description of Artificial Sequence: Synthetic oligonucleotide
agacucuucuauuugcaau

SEQ ID NO: 2384454 - RNA, 19 nt, Artificial Sequence
  Description of Artificial Sequence: Synthetic oligonucleotide
uucagguaacccacgggcu

SEQ ID NO: 2384455 - RNA, 19 nt, Artificial Sequence
  Description of Artificial Sequence: Synthetic oligonucleotide
cuugagauuauaguacuga

SEQ ID NO: 2384456 - RNA, 19 nt, Artificial Sequence
  Description of Artificial Sequence: Synthetic oligonucleotide
cacucuucucuucagcuug

SEQ ID NO: 2384457 - RNA, 19 nt, Artificial Sequence
  Description of Artificial Sequence: Synthetic oligonucleotide
uuuggaagacucuucuauu

SEQ ID NO: 2384458 - RNA, 19 nt, Artificial Sequence
  Description of Artificial Sequence: Synthetic oligonucleotide
uuggaagacucuucuauuu

SEQ ID NO: 2384459 - RNA, 19 nt, Artificial Sequence
  Description of Artificial Sequence: Synthetic oligonucleotide
ugugauagccuuacagguu

SEQ ID NO: 2384460 - RNA, 19 nt, Artificial Sequence
  Description of Artificial Sequence: Synthetic oligonucleotide
gucagauccaguuccccgc

SEQ ID NO: 2384461 - RNA, 19 nt, Artificial Sequence
  Description of Artificial Sequence: Synthetic oligonucleotide
uagccuuacagguuuggaa

SEQ ID NO: 2384462 - RNA, 19 nt, Artificial Sequence
  Description of Artificial Sequence: Synthetic oligonucleotide
aguuuaucugaggagcucu

SEQ ID NO: 2384463 - RNA, 19 nt, Artificial Sequence
  Description of Artificial Sequence: Synthetic oligonucleotide
gauagccuuacagguuugg

SEQ ID NO: 2384464 - RNA, 19 nt, Artificial Sequence
  Description of Artificial Sequence: Synthetic oligonucleotide
gagcucucgguaaauacug

SEQ ID NO: 2384465 - RNA, 19 nt, Artificial Sequence
  Description of Artificial Sequence: Synthetic oligonucleotide
aaggcggaaaacagcaugu

SEQ ID NO: 2384466 - RNA, 19 nt, Artificial Sequence
  Description of Artificial Sequence: Synthetic oligonucleotide
accgccaaaagccggcguc

SEQ ID NO: 2384467 - RNA, 19 nt, Artificial Sequence
  Description of Artificial Sequence: Synthetic oligonucleotide
gcugggacaaauauuuagg

SEQ ID NO: 2384468 - RNA, 19 nt, Artificial Sequence
  Description of Artificial Sequence: Synthetic oligonucleotide
uuuagcccauugcugggac

SEQ ID NO: 2384469 - RNA, 19 nt, Artificial Sequence
  Description of Artificial Sequence: Synthetic oligonucleotide
uaacgucuguccuccaaca

SEQ ID NO: 2384470 - RNA, 19 nt, Artificial Sequence
  Description of Artificial Sequence: Synthetic oligonucleotide
gguaaugccuguauuccgg

SEQ ID NO: 2384471 - RNA, 19 nt, Artificial Sequence
  Description of Artificial Sequence: Synthetic oligonucleotide
aaccuugaccagccacacg

SEQ ID NO: 2384472 - RNA, 19 nt, Artificial Sequence
  Description of Artificial Sequence: Synthetic oligonucleotide
auugguuguuacaacuuug

SEQ ID NO: 2384473 - RNA, 19 nt, Artificial Sequence
  Description of Artificial Sequence: Synthetic oligonucleotide
cuugaccagccacacgccg

SEQ ID NO: 2384474 - RNA, 19 nt, Artificial Sequence
  Description of Artificial Sequence: Synthetic oligonucleotide
augguuagcaacaggcuug

SEQ ID NO: 2384475 - RNA, 19 nt, Artificial Sequence
  Description of Artificial Sequence: Synthetic oligonucleotide
uguauuccggcuucagcuc

SEQ ID NO: 2384476 - RNA, 19 nt, Artificial Sequence
  Description of Artificial Sequence: Synthetic oligonucleotide
uauuccuuccaaugacagu

SEQ ID NO: 2384477 - RNA, 19 nt, Artificial Sequence
  Description of Artificial Sequence: Synthetic oligonucleotide
cuugugcgcacgagcagcg

SEQ ID NO: 2384478 - RNA, 19 nt, Artificial Sequence
  Description of Artificial Sequence: Synthetic oligonucleotide
cagacggacagcgacagac

SEQ ID NO: 2384479 - RNA, 19 nt, Artificial Sequence
  Description of Artificial Sequence: Synthetic oligonucleotide
auucaauauuguauugaug

SEQ ID NO: 2384480 - RNA, 19 nt, Artificial Sequence
  Description of Artificial Sequence: Synthetic oligonucleotide
cuugugaaucccuuuuaca

SEQ ID NO: 2384481 - RNA, 19 nt, Artificial Sequence
  Description of Artificial Sequence: Synthetic oligonucleotide
uucuauuugcaaucucuuu

SEQ ID NO: 2384482 - RNA, 19 nt, Artificial Sequence
  Description of Artificial Sequence: Synthetic oligonucleotide
gcaacaggcuuguaauugg

SEQ ID NO: 2384483 - RNA, 19 nt, Artificial Sequence
  Description of Artificial Sequence: Synthetic oligonucleotide
cuuugcaagacaaauggau

SEQ ID NO: 2384484 - RNA, 19 nt, Artificial Sequence
  Description of Artificial Sequence: Synthetic oligonucleotide
ugcaagacaaauggaugcu

SEQ ID NO: 2384485 - RNA, 19 nt, Artificial Sequence
  Description of Artificial Sequence: Synthetic oligonucleotide
uccuuucauauucaauauu

SEQ ID NO: 2384486 - RNA, 19 nt, Artificial Sequence
  Description of Artificial Sequence: Synthetic oligonucleotide
cugggacaaauauuuagga

SEQ ID NO: 2384487 - RNA, 19 nt, Artificial Sequence
  Description of Artificial Sequence: Synthetic oligonucleotide
cuuugugauauccaccaaa

SEQ ID NO: 2384488 - RNA, 19 nt, Artificial Sequence
  Description of Artificial Sequence: Synthetic oligonucleotide
ugguuguuacaacuuuguc

SEQ ID NO: 2384489 - RNA, 19 nt, Artificial Sequence
  Description of Artificial Sequence: Synthetic oligonucleotide
uacagguuuggaagacucu

SEQ ID NO: 2384490 - RNA, 19 nt, Artificial Sequence
  Description of Artificial Sequence: Synthetic oligonucleotide
gauauccaccaaauccuug

SEQ ID NO: 2384491 - RNA, 19 nt, Artificial Sequence
  Description of Artificial Sequence: Synthetic oligonucleotide
cuuuuacauucugaaugcc

SEQ ID NO: 2384492 - RNA, 19 nt, Artificial Sequence
  Description of Artificial Sequence: Synthetic oligonucleotide
gacagacggacagcgacag

SEQ ID NO: 2384493 - RNA, 19 nt, Artificial Sequence
  Description of Artificial Sequence: Synthetic oligonucleotide
guaaugccuguauuccggc

SEQ ID NO: 2384494 - RNA, 19 nt, Artificial Sequence
  Description of Artificial Sequence: Synthetic oligonucleotide
uucugaaugccgauuucuu

SEQ ID NO: 2384495 - RNA, 19 nt, Artificial Sequence
  Description of Artificial Sequence: Synthetic oligonucleotide
gacagcgacagaccacagc

SEQ ID NO: 2384496 - RNA, 19 nt, Artificial Sequence
  Description of Artificial Sequence: Synthetic oligonucleotide
uaacccacgggcugcuuug

SEQ ID NO: 2384497 - RNA, 19 nt, Artificial Sequence
  Description of Artificial Sequence: Synthetic oligonucleotide
agacaaauggaugcucucu

SEQ ID NO: 2384498 - RNA, 19 nt, Artificial Sequence
  Description of Artificial Sequence: Synthetic oligonucleotide
uucuugugaaucccuuuua

SEQ ID NO: 2384499 - RNA, 19 nt, Artificial Sequence
  Description of Artificial Sequence: Synthetic oligonucleotide
gaagacucuucuauuugca

SEQ ID NO: 2384500 - RNA, 19 nt, Artificial Sequence
  Description of Artificial Sequence: Synthetic oligonucleotide
acguguuguuugucugccc

SEQ ID NO: 2384501 - RNA, 19 nt, Artificial Sequence
  Description of Artificial Sequence: Synthetic oligonucleotide
cucgguaaauacuguuaac

SEQ ID NO: 2384502 - RNA, 19 nt, Artificial Sequence
  Description of Artificial Sequence: Synthetic oligonucleotide
gacguguuguuugucugcc

SEQ ID NO: 2384503 - RNA, 19 nt, Artificial Sequence
  Description of Artificial Sequence: Synthetic oligonucleotide
agcaggucggcauuccgcu

SEQ ID NO: 2384504 - RNA, 19 nt, Artificial Sequence
  Description of Artificial Sequence: Synthetic oligonucleotide
gacuccggagcaccgagac

SEQ ID NO: 2384505 - RNA, 19 nt, Artificial Sequence
  Description of Artificial Sequence: Synthetic oligonucleotide
guuuggaagacucuucuau

SEQ ID NO: 2384506 - RNA, 19 nt, Artificial Sequence
  Description of Artificial Sequence: Synthetic oligonucleotide
acacuuugcaagacaaaug

SEQ ID NO: 2384507 - RNA, 19 nt, Artificial Sequence
  Description of Artificial Sequence: Synthetic oligonucleotide
ccucguuuaaaguaaacga

SEQ ID NO: 2384508 - RNA, 19 nt, Artificial Sequence
  Description of Artificial Sequence: Synthetic oligonucleotide
ucccacguauucuugugaa

SEQ ID NO: 2384509 - RNA, 19 nt, Artificial Sequence
  Description of Artificial Sequence: Synthetic oligonucleotide
cuguauuccggcuucagcu

SEQ ID NO: 2384510 - RNA, 19 nt, Artificial Sequence
  Description of Artificial Sequence: Synthetic oligonucleotide
ucuguaccacuauuccuuc

SEQ ID NO: 2384511 - RNA, 19 nt, Artificial Sequence
  Description of Artificial Sequence: Synthetic oligonucleotide
uuacauucugaaugccgau

SEQ ID NO: 2384512 - RNA, 19 nt, Artificial Sequence
  Description of Artificial Sequence: Synthetic oligonucleotide
caccgagaccgccaaaagc

SEQ ID NO: 2384513 - RNA, 19 nt, Artificial Sequence
  Description of Artificial Sequence: Synthetic oligonucleotide
cugguuucccaccaauauc

SEQ ID NO: 2384514 - RNA, 19 nt, Artificial Sequence
  Description of Artificial Sequence: Synthetic oligonucleotide
ugauagccuuacagguuug

SEQ ID NO: 2384515 - RNA, 19 nt, Artificial Sequence
  Description of Artificial Sequence: Synthetic oligonucleotide
gacggacagcgacagacca

SEQ ID NO: 2384516 - RNA, 19 nt, Artificial Sequence
  Description of Artificial Sequence: Synthetic oligonucleotide
ccaaugacaguuuaucuga

SEQ ID NO: 2384517 - RNA, 19 nt, Artificial Sequence
  Description of Artificial Sequence: Synthetic oligonucleotide
aagcugguuucccaccaau

SEQ ID NO: 2384518 - RNA, 19 nt, Artificial Sequence
  Description of Artificial Sequence: Synthetic oligonucleotide
caccaaauccuugagauua

SEQ ID NO: 2384519 - RNA, 19 nt, Artificial Sequence
  Description of Artificial Sequence: Synthetic oligonucleotide
ugaaucccuuuuacauucu

SEQ ID NO: 2384520 - RNA, 19 nt, Artificial Sequence
  Description of Artificial Sequence: Synthetic oligonucleotide
ugagucuguggcgugcggc

SEQ ID NO: 2384521 - RNA, 19 nt, Artificial Sequence
  Description of Artificial Sequence: Synthetic oligonucleotide
ucccuuuuacauucugaau

SEQ ID NO: 2384522 - RNA, 19 nt, Artificial Sequence
  Description of Artificial Sequence: Synthetic oligonucleotide
acgauaccucaguccuucc

SEQ ID NO: 2384523 - RNA, 19 nt, Artificial Sequence
  Description of Artificial Sequence: Synthetic oligonucleotide
cucguuuaaaguaaacgau

SEQ ID NO: 2384524 - RNA, 19 nt, Artificial Sequence
  Description of Artificial Sequence: Synthetic oligonucleotide
uaaugccuguauuccggcu

SEQ ID NO: 2384525 - RNA, 19 nt, Artificial Sequence
  Description of Artificial Sequence: Synthetic oligonucleotide
agauccucguuuaaaguaa

SEQ ID NO: 2384526 - RNA, 19 nt, Artificial Sequence
  Description of Artificial Sequence: Synthetic oligonucleotide
uuguuacaacuuuguccag

SEQ ID NO: 2384527 - RNA, 19 nt, Artificial Sequence
  Description of Artificial Sequence: Synthetic oligonucleotide
agacggacagcgacagacc

SEQ ID NO: 2384528 - RNA, 19 nt, Artificial Sequence
  Description of Artificial Sequence: Synthetic oligonucleotide
ugaccagccacacgccggu

SEQ ID NO: 2384529 - RNA, 19 nt, Artificial Sequence
  Description of Artificial Sequence: Synthetic oligonucleotide
cauguaguuuucacuggca

SEQ ID NO: 2384530 - RNA, 19 nt, Artificial Sequence
  Description of Artificial Sequence: Synthetic oligonucleotide
ugccgauuucuuucaagau

SEQ ID NO: 2384531 - RNA, 19 nt, Artificial Sequence
  Description of Artificial Sequence: Synthetic oligonucleotide
uccaggacguguuguuugu

SEQ ID NO: 2384532 - RNA, 19 nt, Artificial Sequence
  Description of Artificial Sequence: Synthetic oligonucleotide
cagcaggucggcauuccgc

SEQ ID NO: 2384533 - RNA, 19 nt, Artificial Sequence
  Description of Artificial Sequence: Synthetic oligonucleotide
ucggcauuccgcucucugu

SEQ ID NO: 2384534 - RNA, 19 nt, Artificial Sequence
  Description of Artificial Sequence: Synthetic oligonucleotide
uuuguccagcuguugugau

SEQ ID NO: 2384535 - RNA, 19 nt, Artificial Sequence
  Description of Artificial Sequence: Synthetic oligonucleotide
agcuugguaaugccuguau

SEQ ID NO: 2384536 - RNA, 19 nt, Artificial Sequence
  Description of Artificial Sequence: Synthetic oligonucleotide
acagguuuggaagacucuu

SEQ ID NO: 2384537 - RNA, 19 nt, Artificial Sequence
  Description of Artificial Sequence: Synthetic oligonucleotide
ucucagucacucuucucuu

SEQ ID NO: 2384538 - RNA, 19 nt, Artificial Sequence
  Description of Artificial Sequence: Synthetic oligonucleotide
auuccgcucucuguaccac

SEQ ID NO: 2384539 - RNA, 19 nt, Artificial Sequence
  Description of Artificial Sequence: Synthetic oligonucleotide
auccucguuuaaaguaaac

SEQ ID NO: 2384540 - RNA, 19 nt, Artificial Sequence
  Description of Artificial Sequence: Synthetic oligonucleotide
uccuuccaaugacaguuua

SEQ ID NO: 2384541 - RNA, 19 nt, Artificial Sequence
  Description of Artificial Sequence: Synthetic oligonucleotide
gagaccgccaaaagccggc

SEQ ID NO: 2384542 - RNA, 19 nt, Artificial Sequence
  Description of Artificial Sequence: Synthetic oligonucleotide
uucccaacuucaccucuuc

SEQ ID NO: 2384543 - RNA, 19 nt, Artificial Sequence
  Description of Artificial Sequence: Synthetic oligonucleotide
aguccuuccuugauucuug

SEQ ID NO: 2384544 - RNA, 19 nt, Artificial Sequence
  Description of Artificial Sequence: Synthetic oligonucleotide
uuagcccauugcugggaca

SEQ ID NO: 2384545 - RNA, 19 nt, Artificial Sequence
  Description of Artificial Sequence: Synthetic oligonucleotide
aucugaggagcucucggua

SEQ ID NO: 2384546 - RNA, 19 nt, Artificial Sequence
  Description of Artificial Sequence: Synthetic oligonucleotide
gaaccuugaccagccacac

SEQ ID NO: 2384547 - RNA, 19 nt, Artificial Sequence
  Description of Artificial Sequence: Synthetic oligonucleotide
agcucccacguauucuugu

SEQ ID NO: 2384548 - RNA, 19 nt, Artificial Sequence
  Description of Artificial Sequence: Synthetic oligonucleotide
cucucgguaaauacuguua

SEQ ID NO: 2384549 - RNA, 19 nt, Artificial Sequence
  Description of Artificial Sequence: Synthetic oligonucleotide
ucaguccuuccuugauucu

SEQ ID NO: 2384550 - RNA, 19 nt, Artificial Sequence
  Description of Artificial Sequence: Synthetic oligonucleotide
auagccuuacagguuugga

SEQ ID NO: 2384551 - RNA, 19 nt, Artificial Sequence
  Description of Artificial Sequence: Synthetic oligonucleotide
augagucuguggcgugcgg

SEQ ID NO: 2384552 - RNA, 19 nt, Artificial Sequence
  Description of Artificial Sequence: Synthetic oligonucleotide
cccaccaauaucaugaaua

SEQ ID NO: 2384553 - RNA, 19 nt, Artificial Sequence
  Description of Artificial Sequence: Synthetic oligonucleotide
cguguuguuugucugcccg

SEQ ID NO: 2384554 - RNA, 19 nt, Artificial Sequence
  Description of Artificial Sequence: Synthetic oligonucleotide
guuaacgucuguccuccaa

SEQ ID NO: 2384555 - RNA, 19 nt, Artificial Sequence
  Description of Artificial Sequence: Synthetic oligonucleotide
uccgcucucuguaccacua

SEQ ID NO: 2384556 - RNA, 19 nt, Artificial Sequence
  Description of Artificial Sequence: Synthetic oligonucleotide
uccuugauucuuggcaauc

SEQ ID NO: 2384557 - RNA, 19 nt, Artificial Sequence
  Description of Artificial Sequence: Synthetic oligonucleotide
acgccgguguucuguuugg

SEQ ID NO: 2384558 - RNA, 19 nt, Artificial Sequence
  Description of Artificial Sequence: Synthetic oligonucleotide
ccgguguucuguuuggcgc

SEQ ID NO: 2384559 - RNA, 19 nt, Artificial Sequence
  Description of Artificial Sequence: Synthetic oligonucleotide
cucuguaccacuauuccuu

SEQ ID NO: 2384560 - RNA, 19 nt, Artificial Sequence
  Description of Artificial Sequence: Synthetic oligonucleotide
uguuuggcgccggucagau

SEQ ID NO: 2384561 - RNA, 19 nt, Artificial Sequence
  Description of Artificial Sequence: Synthetic oligonucleotide
agaccacagccagacuccg

SEQ ID NO: 2384562 - RNA, 19 nt, Artificial Sequence
  Description of Artificial Sequence: Synthetic oligonucleotide
uugcaagauccucguuuaa

SEQ ID NO: 2384563 - RNA, 19 nt, Artificial Sequence
  Description of Artificial Sequence: Synthetic oligonucleotide
cuucagcucccacguauuc

SEQ ID NO: 2384564 - RNA, 19 nt, Artificial Sequence
  Description of Artificial Sequence: Synthetic oligonucleotide
cagguaacccacgggcugc

SEQ ID NO: 2384565 - RNA, 19 nt, Artificial Sequence
  Description of Artificial Sequence: Synthetic oligonucleotide
agcaccgagaccgccaaaa

SEQ ID NO: 2384566 - RNA, 19 nt, Artificial Sequence
  Description of Artificial Sequence: Synthetic oligonucleotide
gugauagccuuacagguuu

SEQ ID NO: 2384567 - RNA, 19 nt, Artificial Sequence
  Description of Artificial Sequence: Synthetic oligonucleotide
gccgguguucuguuuggcg

SEQ ID NO: 2384568 - RNA, 19 nt, Artificial Sequence
  Description of Artificial Sequence: Synthetic oligonucleotide
uuccuuccaaugacaguuu

SEQ ID NO: 2384569 - RNA, 19 nt, Artificial Sequence
  Description of Artificial Sequence: Synthetic oligonucleotide
uuguccagcuguugugaua

SEQ ID NO: 2384570 - RNA, 19 nt, Artificial Sequence
  Description of Artificial Sequence: Synthetic oligonucleotide
cucucuaggagcacugacu

SEQ ID NO: 2384571 - RNA, 19 nt, Artificial Sequence
  Description of Artificial Sequence: Synthetic oligonucleotide
caagauccucguuuaaagu

SEQ ID NO: 2384572 - RNA, 19 nt, Artificial Sequence
  Description of Artificial Sequence: Synthetic oligonucleotide
cauuccgcucucuguacca

SEQ ID NO: 2384573 - RNA, 19 nt, Artificial Sequence
  Description of Artificial Sequence: Synthetic oligonucleotide
ccacguauucuugugaauc

SEQ ID NO: 2384574 - RNA, 19 nt, Artificial Sequence
  Description of Artificial Sequence: Synthetic oligonucleotide
uuccgcucucuguaccacu

SEQ ID NO: 2384575 - RNA, 19 nt, Artificial Sequence
  Description of Artificial Sequence: Synthetic oligonucleotide
acggacagcgacagaccac

SEQ ID NO: 2384576 - RNA, 19 nt, Artificial Sequence
  Description of Artificial Sequence: Synthetic oligonucleotide
acgggcugcuuugugauau

SEQ ID NO: 2384577 - RNA, 19 nt, Artificial Sequence
  Description of Artificial Sequence: Synthetic oligonucleotide
uaggaaccuugaccagcca

SEQ ID NO: 2384578 - RNA, 19 nt, Artificial Sequence
  Description of Artificial Sequence: Synthetic oligonucleotide
caauauuguauugaugguu

SEQ ID NO: 2384579 - RNA, 19 nt, Artificial Sequence
  Description of Artificial Sequence: Synthetic oligonucleotide
uguuaacgucuguccucca

SEQ ID NO: 2384580 - RNA, 19 nt, Artificial Sequence
  Description of Artificial Sequence: Synthetic oligonucleotide
ccuugauucuuggcaaucc

SEQ ID NO: 2384581 - RNA, 19 nt, Artificial Sequence
  Description of Artificial Sequence: Synthetic oligonucleotide
ccaacacuuugcaagacaa

SEQ ID NO: 2384582 - RNA, 19 nt, Artificial Sequence
  Description of Artificial Sequence: Synthetic oligonucleotide
guuuaucugaggagcucuc

SEQ ID NO: 2384583 - RNA, 19 nt, Artificial Sequence
  Description of Artificial Sequence: Synthetic oligonucleotide
cuugauucuuggcaauccu

SEQ ID NO: 2384584 - RNA, 19 nt, Artificial Sequence
  Description of Artificial Sequence: Synthetic oligonucleotide
caguuuaucugaggagcuc

SEQ ID NO: 2384585 - RNA, 19 nt, Artificial Sequence
  Description of Artificial Sequence: Synthetic oligonucleotide
agaccgccaaaagccggcg

SEQ ID NO: 2384586 - RNA, 19 nt, Artificial Sequence
  Description of Artificial Sequence: Synthetic oligonucleotide
ccuugagauuauaguacug

SEQ ID NO: 2384587 - RNA, 19 nt, Artificial Sequence
  Description of Artificial Sequence: Synthetic oligonucleotide
gauccucguuuaaaguaaa

SEQ ID NO: 2384588 - RNA, 19 nt, Artificial Sequence
  Description of Artificial Sequence: Synthetic oligonucleotide
caggcuuguaauugguugu

SEQ ID NO: 2384589 - RNA, 19 nt, Artificial Sequence
  Description of Artificial Sequence: Synthetic oligonucleotide
ggggcuuuagcccauugcu

SEQ ID NO: 2384590 - RNA, 19 nt, Artificial Sequence
  Description of Artificial Sequence: Synthetic oligonucleotide
cuucuauuugcaaucucuu

SEQ ID NO: 2384591 - RNA, 19 nt, Artificial Sequence
  Description of Artificial Sequence: Synthetic oligonucleotide
aggucggcauuccgcucuc

SEQ ID NO: 2384592 - RNA, 19 nt, Artificial Sequence
  Description of Artificial Sequence: Synthetic oligonucleotide
ugcucucuaggagcacuga

SEQ ID NO: 2384593 - RNA, 19 nt, Artificial Sequence
  Description of Artificial Sequence: Synthetic oligonucleotide
gcuugugcgcacgagcagc

SEQ ID NO: 2384594 - RNA, 19 nt, Artificial Sequence
  Description of Artificial Sequence: Synthetic oligonucleotide
gcgugcggcggcuugugcg

SEQ ID NO: 2384595 - RNA, 19 nt, Artificial Sequence
  Description of Artificial Sequence: Synthetic oligonucleotide
aaggacagacggacagcga

SEQ ID NO: 2384596 - RNA, 19 nt, Artificial Sequence
  Description of Artificial Sequence: Synthetic oligonucleotide
gaaugccgauuucuuucaa

SEQ ID NO: 2384597 - RNA, 19 nt, Artificial Sequence
  Description of Artificial Sequence: Synthetic oligonucleotide
gaagcugguuucccaccaa

SEQ ID NO: 2384598 - RNA, 19 nt, Artificial Sequence
  Description of Artificial Sequence: Synthetic oligonucleotide
caacuuuguccagcuguug

SEQ ID NO: 2384599 - RNA, 19 nt, Artificial Sequence
  Description of Artificial Sequence: Synthetic oligonucleotide
gcauuccgcucucuguacc

SEQ ID NO: 2384600 - RNA, 19 nt, Artificial Sequence
  Description of Artificial Sequence: Synthetic oligonucleotide
ugaggagcucucgguaaau

SEQ ID NO: 2384601 - RNA, 19 nt, Artificial Sequence
  Description of Artificial Sequence: Synthetic oligonucleotide
gguguucuguuuggcgccg

SEQ ID NO: 2384602 - RNA, 19 nt, Artificial Sequence
  Description of Artificial Sequence: Synthetic oligonucleotide
guaccacuauuccuuccaa

SEQ ID NO: 2384603 - RNA, 19 nt, Artificial Sequence
  Description of Artificial Sequence: Synthetic oligonucleotide
cucccacguauucuuguga

SEQ ID NO: 2384604 - RNA, 19 nt, Artificial Sequence
  Description of Artificial Sequence: Synthetic oligonucleotide
aaacgauaccucaguccuu

SEQ ID NO: 2384605 - RNA, 19 nt, Artificial Sequence
  Description of Artificial Sequence: Synthetic oligonucleotide
cuuuagcccauugcuggga

SEQ ID NO: 2384606 - RNA, 19 nt, Artificial Sequence
  Description of Artificial Sequence: Synthetic oligonucleotide
ccgagaccgccaaaagccg

SEQ ID NO: 2384607 - RNA, 19 nt, Artificial Sequence
  Description of Artificial Sequence: Synthetic oligonucleotide
uuugucugcccgggcucgc

SEQ ID NO: 2384608 - RNA, 19 nt, Artificial Sequence
  Description of Artificial Sequence: Synthetic oligonucleotide
gcucucuaggagcacugac

SEQ ID NO: 2384609 - RNA, 19 nt, Artificial Sequence
  Description of Artificial Sequence: Synthetic oligonucleotide
ucugcccgggcucgcuuuc

SEQ ID NO: 2384610 - RNA, 19 nt, Artificial Sequence
  Description of Artificial Sequence: Synthetic oligonucleotide
gcucccacguauucuugug

SEQ ID NO: 2384611 - RNA, 19 nt, Artificial Sequence
  Description of Artificial Sequence: Synthetic oligonucleotide
cagauccaguuccccgcgc

SEQ ID NO: 2384612 - RNA, 19 nt, Artificial Sequence
  Description of Artificial Sequence: Synthetic oligonucleotide
gccuuacagguuuggaaga

SEQ ID NO: 2384613 - RNA, 19 nt, Artificial Sequence
  Description of Artificial Sequence: Synthetic oligonucleotide
gcucucuguaccacuauuc

SEQ ID NO: 2384614 - RNA, 19 nt, Artificial Sequence
  Description of Artificial Sequence: Synthetic oligonucleotide
gugcgcacgagcagcggcc

SEQ ID NO: 2384615 - RNA, 19 nt, Artificial Sequence
  Description of Artificial Sequence: Synthetic oligonucleotide
gcggcuugugcgcacgagc

SEQ ID NO: 2384616 - RNA, 19 nt, Artificial Sequence
  Description of Artificial Sequence: Synthetic oligonucleotide
gggcuuuagcccauugcug

SEQ ID NO: 2384617 - RNA, 19 nt, Artificial Sequence
  Description of Artificial Sequence: Synthetic oligonucleotide
caguuccccgcgcuccgcc

SEQ ID NO: 2384618 - RNA, 19 nt, Artificial Sequence
  Description of Artificial Sequence: Synthetic oligonucleotide
agcauguccaggacguguu

SEQ ID NO: 2384619 - RNA, 19 nt, Artificial Sequence
  Description of Artificial Sequence: Synthetic oligonucleotide
ggcauuccgcucucuguac

SEQ ID NO: 2384620 - RNA, 19 nt, Artificial Sequence
  Description of Artificial Sequence: Synthetic oligonucleotide
cauugcugggacaaauauu

SEQ ID NO: 2384621 - RNA, 19 nt, Artificial Sequence
  Description of Artificial Sequence: Synthetic oligonucleotide
cagcucccacguauucuug

SEQ ID NO: 2384622 - RNA, 19 nt, Artificial Sequence
  Description of Artificial Sequence: Synthetic oligonucleotide
ccgauuucuuucaagauuu

SEQ ID NO: 2384623 - RNA, 19 nt, Artificial Sequence
  Description of Artificial Sequence: Synthetic oligonucleotide
gcaccgagaccgccaaaag

SEQ ID NO: 2384624 - RNA, 19 nt, Artificial Sequence
  Description of Artificial Sequence: Synthetic oligonucleotide
cucgcuuuccaucuucuuu

SEQ ID NO: 2384625 - RNA, 19 nt, Artificial Sequence
  Description of Artificial Sequence: Synthetic oligonucleotide
accaaauccuugagauuau

SEQ ID NO: 2384626 - RNA, 19 nt, Artificial Sequence
  Description of Artificial Sequence: Synthetic oligonucleotide
aacccacgggcugcuuugu

SEQ ID NO: 2384627 - RNA, 19 nt, Artificial Sequence
  Description of Artificial Sequence: Synthetic oligonucleotide
ccgcgcuccgccaugaguc

SEQ ID NO: 2384628 - RNA, 19 nt, Artificial Sequence
  Description of Artificial Sequence: Synthetic oligonucleotide
ccuuacagguuuggaagac

SEQ ID NO: 2384629 - RNA, 19 nt, Artificial Sequence
  Description of Artificial Sequence: Synthetic oligonucleotide
cugaggagcucucgguaaa

SEQ ID NO: 2384630 - RNA, 19 nt, Artificial Sequence
  Description of Artificial Sequence: Synthetic oligonucleotide
guucuguuuggcgccgguc

SEQ ID NO: 2384631 - RNA, 19 nt, Artificial Sequence
  Description of Artificial Sequence: Synthetic oligonucleotide
gcugguuucccaccaauau

SEQ ID NO: 2384632 - RNA, 19 nt, Artificial Sequence
  Description of Artificial Sequence: Synthetic oligonucleotide
uuccccgcgcuccgccaug

SEQ ID NO: 2384633 - RNA, 19 nt, Artificial Sequence
  Description of Artificial Sequence: Synthetic oligonucleotide
ccuugaccagccacacgcc

SEQ ID NO: 2384634 - RNA, 19 nt, Artificial Sequence
  Description of Artificial Sequence: Synthetic oligonucleotide
gguuuggaagacucuucua

SEQ ID NO: 2384635 - RNA, 19 nt, Artificial Sequence
  Description of Artificial Sequence: Synthetic oligonucleotide
acccacgggcugcuuugug

SEQ ID NO: 2384636 - RNA, 19 nt, Artificial Sequence
  Description of Artificial Sequence: Synthetic oligonucleotide
guguucuguuuggcgccgg

SEQ ID NO: 2384637 - RNA, 19 nt, Artificial Sequence
  Description of Artificial Sequence: Synthetic oligonucleotide
cuuacagguuuggaagacu

SEQ ID NO: 2384638 - RNA, 19 nt, Artificial Sequence
  Description of Artificial Sequence: Synthetic oligonucleotide
ugucugcccgggcucgcuu

SEQ ID NO: 2384639 - RNA, 19 nt, Artificial Sequence
  Description of Artificial Sequence: Synthetic oligonucleotide
gccgauuucuuucaagauu

SEQ ID NO: 2384640 - RNA, 19 nt, Artificial Sequence
  Description of Artificial Sequence: Synthetic oligonucleotide
ggagcucucgguaaauacu

SEQ ID NO: 2384641 - RNA, 19 nt, Artificial Sequence
  Description of Artificial Sequence: Synthetic oligonucleotide
gccccaagcugaaggacag

SEQ ID NO: 2384642 - RNA, 19 nt, Artificial Sequence
  Description of Artificial Sequence: Synthetic oligonucleotide
caggggcuuuagcccauug

SEQ ID NO: 2384643 - RNA, 19 nt, Artificial Sequence
  Description of Artificial Sequence: Synthetic oligonucleotide
agcugguuucccaccaaua

SEQ ID NO: 2384644 - RNA, 19 nt, Artificial Sequence
  Description of Artificial Sequence: Synthetic oligonucleotide
cagcgacagaccacagcca

SEQ ID NO: 2384645 - RNA, 19 nt, Artificial Sequence
  Description of Artificial Sequence: Synthetic oligonucleotide
ccgccaugagucuguggcg

SEQ ID NO: 2384646 - RNA, 19 nt, Artificial Sequence
  Description of Artificial Sequence: Synthetic oligonucleotide
guauucuugugaaucccuu

SEQ ID NO: 2384647 - RNA, 19 nt, Artificial Sequence
  Description of Artificial Sequence: Synthetic oligonucleotide
uugucugcccgggcucgcu

SEQ ID NO: 2384648 - RNA, 19 nt, Artificial Sequence
  Description of Artificial Sequence: Synthetic oligonucleotide
guaacccacgggcugcuuu

SEQ ID NO: 2384649 - RNA, 19 nt, Artificial Sequence
  Description of Artificial Sequence: Synthetic oligonucleotide
ccaugagucuguggcgugc

SEQ ID NO: 2384650 - RNA, 19 nt, Artificial Sequence
  Description of Artificial Sequence: Synthetic oligonucleotide
gccaugagucuguggcgug

SEQ ID NO: 2384651 - RNA, 19 nt, Artificial Sequence
  Description of Artificial Sequence: Synthetic oligonucleotide
ggccccaagcugaaggaca

SEQ ID NO: 2384652 - RNA, 19 nt, Artificial Sequence
  Description of Artificial Sequence: Synthetic oligonucleotide
ggcuucagcucccacguau

SEQ ID NO: 2384653 - RNA, 19 nt, Artificial Sequence
  Description of Artificial Sequence: Synthetic oligonucleotide
uggcagcaggucggcauuc

SEQ ID NO: 2384654 - RNA, 19 nt, Artificial Sequence
  Description of Artificial Sequence: Synthetic oligonucleotide
cgguaaauacuguuaacgu

SEQ ID NO: 2384655 - RNA, 19 nt, Artificial Sequence
  Description of Artificial Sequence: Synthetic oligonucleotide
ugcggcggcuugugcgcac

SEQ ID NO: 2384656 - RNA, 19 nt, Artificial Sequence
  Description of Artificial Sequence: Synthetic oligonucleotide
uggcgugcggcggcuugug

SEQ ID NO: 2384657 - RNA, 19 nt, Artificial Sequence
  Description of Artificial Sequence: Synthetic oligonucleotide
agacuccggagcaccgaga

SEQ ID NO: 2384658 - RNA, 19 nt, Artificial Sequence
  Description of Artificial Sequence: Synthetic oligonucleotide
cgugcggcggcuugugcgc

SEQ ID NO: 2384659 - RNA, 19 nt, Artificial Sequence
  Description of Artificial Sequence: Synthetic oligonucleotide
gacagaccacagccagacu

SEQ ID NO: 2384660 - RNA, 19 nt, Artificial Sequence
  Description of Artificial Sequence: Synthetic oligonucleotide
ccagcuguugugauagccu

SEQ ID NO: 2384661 - RNA, 19 nt, Artificial Sequence
  Description of Artificial Sequence: Synthetic oligonucleotide
cuguuuggcgccggucaga

SEQ ID NO: 2384662 - RNA, 19 nt, Artificial Sequence
  Description of Artificial Sequence: Synthetic oligonucleotide
guuuggcgccggucagauc

SEQ ID NO: 2384663 - RNA, 19 nt, Artificial Sequence
  Description of Artificial Sequence: Synthetic oligonucleotide
cagccagacuccggagcac

SEQ ID NO: 2384664 - RNA, 19 nt, Artificial Sequence
  Description of Artificial Sequence: Synthetic oligonucleotide
ccauugcugggacaaauau

SEQ ID NO: 2384665 - RNA, 19 nt, Artificial Sequence
  Description of Artificial Sequence: Synthetic oligonucleotide
uccccgcgcuccgccauga

SEQ ID NO: 2384666 - RNA, 19 nt, Artificial Sequence
  Description of Artificial Sequence: Synthetic oligonucleotide
gcggccccaagcugaagga

SEQ ID NO: 2384667 - RNA, 19 nt, Artificial Sequence
  Description of Artificial Sequence: Synthetic oligonucleotide
gaccgccaaaagccggcgu

SEQ ID NO: 2384668 - RNA, 19 nt, Artificial Sequence
  Description of Artificial Sequence: Synthetic oligonucleotide
acacgccgguguucuguuu

SEQ ID NO: 2384669 - RNA, 19 nt, Artificial Sequence
  Description of Artificial Sequence: Synthetic oligonucleotide
gaccagccacacgccggug

SEQ ID NO: 2384670 - RNA, 19 nt, Artificial Sequence
  Description of Artificial Sequence: Synthetic oligonucleotide
gcuugguaaugccuguauu

SEQ ID NO: 2384671 - RNA, 19 nt, Artificial Sequence
  Description of Artificial Sequence: Synthetic oligonucleotide
ggcggcuugugcgcacgag

SEQ ID NO: 2384672 - RNA, 19 nt, Artificial Sequence
  Description of Artificial Sequence: Synthetic oligonucleotide
cggacagcgacagaccaca

SEQ ID NO: 2384673 - RNA, 19 nt, Artificial Sequence
  Description of Artificial Sequence: Synthetic oligonucleotide
ggcgugcggcggcuugugc

SEQ ID NO: 2384674 - RNA, 19 nt, Artificial Sequence
  Description of Artificial Sequence: Synthetic oligonucleotide
gagcaccgagaccgccaaa

SEQ ID NO: 2384675 - RNA, 19 nt, Artificial Sequence
  Description of Artificial Sequence: Synthetic oligonucleotide
ccuuccaaugacaguuuau

SEQ ID NO: 2384676 - RNA, 19 nt, Artificial Sequence
  Description of Artificial Sequence: Synthetic oligonucleotide
cacgggcugcuuugugaua

SEQ ID NO: 2384677 - RNA, 19 nt, Artificial Sequence
  Description of Artificial Sequence: Synthetic oligonucleotide
gcggcggcuugugcgcacg

SEQ ID NO: 2384678 - RNA, 19 nt, Artificial Sequence
  Description of Artificial Sequence: Synthetic oligonucleotide
ccggcuucagcucccacgu

SEQ ID NO: 2384679 - RNA, 19 nt, Artificial Sequence
  Description of Artificial Sequence: Synthetic oligonucleotide
gcgacagaccacagccaga

SEQ ID NO: 2384680 - RNA, 19 nt, Artificial Sequence
  Description of Artificial Sequence: Synthetic oligonucleotide
ccaggacguguuguuuguc

SEQ ID NO: 2384681 - RNA, 19 nt, Artificial Sequence
  Description of Artificial Sequence: Synthetic oligonucleotide
gcgccggucagauccaguu

SEQ ID NO: 2384682 - RNA, 19 nt, Artificial Sequence
  Description of Artificial Sequence: Synthetic oligonucleotide
guuccccgcgcuccgccau

SEQ ID NO: 2384683 - RNA, 19 nt, Artificial Sequence
  Description of Artificial Sequence: Synthetic oligonucleotide
ccaaauccuugagauuaua

SEQ ID NO: 2384684 - RNA, 19 nt, Artificial Sequence
  Description of Artificial Sequence: Synthetic oligonucleotide
cacacgccgguguucuguu

SEQ ID NO: 2384685 - RNA, 19 nt, Artificial Sequence
  Description of Artificial Sequence: Synthetic oligonucleotide
cagcggccccaagcugaag

SEQ ID NO: 2384686 - RNA, 19 nt, Artificial Sequence
  Description of Artificial Sequence: Synthetic oligonucleotide
gcgcacgagcagcggcccc

SEQ ID NO: 2384687 - RNA, 19 nt, Artificial Sequence
  Description of Artificial Sequence: Synthetic oligonucleotide
ggcucgcuuuccaucuucu

SEQ ID NO: 2384688 - RNA, 19 nt, Artificial Sequence
  Description of Artificial Sequence: Synthetic oligonucleotide
gguuucccaccaauaucau

SEQ ID NO: 2384689 - RNA, 19 nt, Artificial Sequence
  Description of Artificial Sequence: Synthetic oligonucleotide
ccggagcaccgagaccgcc

SEQ ID NO: 2384690 - RNA, 19 nt, Artificial Sequence
  Description of Artificial Sequence: Synthetic oligonucleotide
ccgggcucgcuuuccaucu

SEQ ID NO: 2384691 - RNA, 19 nt, Artificial Sequence
  Description of Artificial Sequence: Synthetic oligonucleotide
gugcggcggcuugugcgca

SEQ ID NO: 2384692 - RNA, 19 nt, Artificial Sequence
  Description of Artificial Sequence: Synthetic oligonucleotide
cggcauuccgcucucugua

SEQ ID NO: 2384693 - RNA, 19 nt, Artificial Sequence
  Description of Artificial Sequence: Synthetic oligonucleotide
ccaguuccccgcgcuccgc

SEQ ID NO: 2384694 - RNA, 19 nt, Artificial Sequence
  Description of Artificial Sequence: Synthetic oligonucleotide
ccacgggcugcuuugugau

SEQ ID NO: 2384695 - RNA, 19 nt, Artificial Sequence
  Description of Artificial Sequence: Synthetic oligonucleotide
gcgcuccgccaugagucug

SEQ ID NO: 2384696 - RNA, 19 nt, Artificial Sequence
  Description of Artificial Sequence: Synthetic oligonucleotide
guggcgugcggcggcuugu

SEQ ID NO: 2384697 - RNA, 19 nt, Artificial Sequence
  Description of Artificial Sequence: Synthetic oligonucleotide
ccucaguccuuccuugauu

SEQ ID NO: 2384698 - RNA, 19 nt, Artificial Sequence
  Description of Artificial Sequence: Synthetic oligonucleotide
cgauaccucaguccuuccu

SEQ ID NO: 2384699 - RNA, 19 nt, Artificial Sequence
  Description of Artificial Sequence: Synthetic oligonucleotide
gcuucagcucccacguauu

SEQ ID NO: 2384700 - RNA, 19 nt, Artificial Sequence
  Description of Artificial Sequence: Synthetic oligonucleotide
cccacguauucuugugaau

SEQ ID NO: 2384701 - RNA, 19 nt, Artificial Sequence
  Description of Artificial Sequence: Synthetic oligonucleotide
gcucgcuuuccaucuucuu

SEQ ID NO: 2384702 - RNA, 19 nt, Artificial Sequence
  Description of Artificial Sequence: Synthetic oligonucleotide
gcagcggccccaagcugaa

SEQ ID NO: 2384703 - RNA, 19 nt, Artificial Sequence
  Description of Artificial Sequence: Synthetic oligonucleotide
cggccccaagcugaaggac

SEQ ID NO: 2384704 - RNA, 19 nt, Artificial Sequence
  Description of Artificial Sequence: Synthetic oligonucleotide
cgccgguguucuguuuggc

SEQ ID NO: 2384705 - RNA, 19 nt, Artificial Sequence
  Description of Artificial Sequence: Synthetic oligonucleotide
gguuagcaacaggcuugua

SEQ ID NO: 2384706 - RNA, 19 nt, Artificial Sequence
  Description of Artificial Sequence: Synthetic oligonucleotide
ccacacgccgguguucugu

SEQ ID NO: 2384707 - RNA, 19 nt, Artificial Sequence
  Description of Artificial Sequence: Synthetic oligonucleotide
cgcacgagcagcggcccca

SEQ ID NO: 2384708 - RNA, 19 nt, Artificial Sequence
  Description of Artificial Sequence: Synthetic oligonucleotide
cgccaugagucuguggcgu

SEQ ID NO: 2384709 - RNA, 19 nt, Artificial Sequence
  Description of Artificial Sequence: Synthetic oligonucleotide
gcacgagcagcggccccaa

SEQ ID NO: 2384710 - RNA, 19 nt, Artificial Sequence
  Description of Artificial Sequence: Synthetic oligonucleotide
cccgcgcuccgccaugagu

SEQ ID NO: 2384711 - RNA, 19 nt, Artificial Sequence
  Description of Artificial Sequence: Synthetic oligonucleotide
ccagccacacgccgguguu

SEQ ID NO: 2384712 - RNA, 19 nt, Artificial Sequence
  Description of Artificial Sequence: Synthetic oligonucleotide
ccccgcgcuccgccaugag

SEQ ID NO: 2384713 - RNA, 19 nt, Artificial Sequence
  Description of Artificial Sequence: Synthetic oligonucleotide
ggcgccggucagauccagu

SEQ ID NO: 2384714 - RNA, 19 nt, Artificial Sequence
  Description of Artificial Sequence: Synthetic oligonucleotide
cgcuccgccaugagucugu

SEQ ID NO: 2384715 - RNA, 19 nt, Artificial Sequence
  Description of Artificial Sequence: Synthetic oligonucleotide
ggucggcauuccgcucucu

SEQ ID NO: 2384716 - RNA, 19 nt, Artificial Sequence
  Description of Artificial Sequence: Synthetic oligonucleotide
gguaacccacgggcugcuu

SEQ ID NO: 2384717 - RNA, 19 nt, Artificial Sequence
  Description of Artificial Sequence: Synthetic oligonucleotide
ccgcucucuguaccacuau

SEQ ID NO: 2384718 - RNA, 19 nt, Artificial Sequence
  Description of Artificial Sequence: Synthetic oligonucleotide
cgcgcuccgccaugagucu

SEQ ID NO: 2384719 - RNA, 19 nt, Artificial Sequence
  Description of Artificial Sequence: Synthetic oligonucleotide
cggcggcuugugcgcacga

SEQ ID NO: 2384720 - RNA, 19 nt, Artificial Sequence
  Description of Artificial Sequence: Synthetic oligonucleotide
cggcuucagcucccacgua

SEQ ID NO: 2384721 - RNA, 19 nt, Artificial Sequence
  Description of Artificial Sequence: Synthetic oligonucleotide
ccaggggcuuuagcccauu

SEQ ID NO: 2384722 - RNA, 19 nt, Artificial Sequence
  Description of Artificial Sequence: Synthetic oligonucleotide
aagugaaauuucuagaagc

SEQ ID NO: 2384723 - RNA, 19 nt, Artificial Sequence
  Description of Artificial Sequence: Synthetic oligonucleotide
auucauaccagauaacccc

SEQ ID NO: 2384724 - RNA, 19 nt, Artificial Sequence
  Description of Artificial Sequence: Synthetic oligonucleotide
uacucaacuauuuaaaucc

SEQ ID NO: 2384725 - RNA, 19 nt, Artificial Sequence
  Description of Artificial Sequence: Synthetic oligonucleotide
aacauuaguccacaggagg

SEQ ID NO: 2384726 - RNA, 19 nt, Artificial Sequence
  Description of Artificial Sequence: Synthetic oligonucleotide
agcaaaugcauucacaggg

SEQ ID NO: 2384727 - RNA, 19 nt, Artificial Sequence
  Description of Artificial Sequence: Synthetic oligonucleotide
aacauuaugaucacgguuc

SEQ ID NO: 2384728 - RNA, 19 nt, Artificial Sequence
  Description of Artificial Sequence: Synthetic oligonucleotide
ucaacauuaguccacagga

SEQ ID NO: 2384729 - RNA, 19 nt, Artificial Sequence
  Description of Artificial Sequence: Synthetic oligonucleotide
ugaaauuucuagaagcuca

SEQ ID NO: 2384730 - RNA, 19 nt, Artificial Sequence
  Description of Artificial Sequence: Synthetic oligonucleotide
aauuucuagaagcucauga

SEQ ID NO: 2384731 - RNA, 19 nt, Artificial Sequence
  Description of Artificial Sequence: Synthetic oligonucleotide
uaaaguaaauauagugugg

SEQ ID NO: 2384732 - RNA, 19 nt, Artificial Sequence
  Description of Artificial Sequence: Synthetic oligonucleotide
guaaaguaaauauagugug

SEQ ID NO: 2384733 - RNA, 19 nt, Artificial Sequence
  Description of Artificial Sequence: Synthetic oligonucleotide
aaaucuauuaaaucuacua

SEQ ID NO: 2384734 - RNA, 19 nt, Artificial Sequence
  Description of Artificial Sequence: Synthetic oligonucleotide
aaaguuaagaguacucugg

SEQ ID NO: 2384735 - RNA, 19 nt, Artificial Sequence
  Description of Artificial Sequence: Synthetic oligonucleotide
aacuauuuaaauccgccca

SEQ ID NO: 2384736 - RNA, 19 nt, Artificial Sequence
  Description of Artificial Sequence: Synthetic oligonucleotide
ucaacuauuuaaauccgcc

SEQ ID NO: 2384737 - RNA, 19 nt, Artificial Sequence
  Description of Artificial Sequence: Synthetic oligonucleotide
aacaauaccaucccaaauu

SEQ ID NO: 2384738 - RNA, 19 nt, Artificial Sequence
  Description of Artificial Sequence: Synthetic oligonucleotide
aauauaguguggcucuguc

SEQ ID NO: 2384739 - RNA, 19 nt, Artificial Sequence
  Description of Artificial Sequence: Synthetic oligonucleotide
agcucaugaaaacaauacc

SEQ ID NO: 2384740 - RNA, 19 nt, Artificial Sequence
  Description of Artificial Sequence: Synthetic oligonucleotide
uggacuuuccaauagaauc

SEQ ID NO: 2384741 - RNA, 19 nt, Artificial Sequence
  Description of Artificial Sequence: Synthetic oligonucleotide
aacaaucucugcuucccac

SEQ ID NO: 2384742 - RNA, 19 nt, Artificial Sequence
  Description of Artificial Sequence: Synthetic oligonucleotide
aagcucaugaaaacaauac

SEQ ID NO: 2384743 - RNA, 19 nt, Artificial Sequence
  Description of Artificial Sequence: Synthetic oligonucleotide
auguuuuaagcuuaggcca

SEQ ID NO: 2384744 - RNA, 19 nt, Artificial Sequence
  Description of Artificial Sequence: Synthetic oligonucleotide
guuaagaguacucugguca

SEQ ID NO: 2384745 - RNA, 19 nt, Artificial Sequence
  Description of Artificial Sequence: Synthetic oligonucleotide
aggcauaccauaaauaagg

SEQ ID NO: 2384746 - RNA, 19 nt, Artificial Sequence
  Description of Artificial Sequence: Synthetic oligonucleotide
agauugaucagucuucuca

SEQ ID NO: 2384747 - RNA, 19 nt, Artificial Sequence
  Description of Artificial Sequence: Synthetic oligonucleotide
ucaggcauaccauaaauaa

SEQ ID NO: 2384748 - RNA, 19 nt, Artificial Sequence
  Description of Artificial Sequence: Synthetic oligonucleotide
auaaauaaggacuguggca

SEQ ID NO: 2384749 - RNA, 19 nt, Artificial Sequence
  Description of Artificial Sequence: Synthetic oligonucleotide
uugcaagugaaauuucuag

SEQ ID NO: 2384750 - RNA, 19 nt, Artificial Sequence
  Description of Artificial Sequence: Synthetic oligonucleotide
acuguggcaacacaggaag

SEQ ID NO: 2384751 - RNA, 19 nt, Artificial Sequence
  Description of Artificial Sequence: Synthetic oligonucleotide
acugcaaucaccauccagg

SEQ ID NO: 2384752 - RNA, 19 nt, Artificial Sequence
  Description of Artificial Sequence: Synthetic oligonucleotide
auuaggaggccucaguaag

SEQ ID NO: 2384753 - RNA, 19 nt, Artificial Sequence
  Description of Artificial Sequence: Synthetic oligonucleotide
uuaaauccgcccaaacaag

SEQ ID NO: 2384754 - RNA, 19 nt, Artificial Sequence
  Description of Artificial Sequence: Synthetic oligonucleotide
ugccgaagcagauugauca

SEQ ID NO: 2384755 - RNA, 19 nt, Artificial Sequence
  Description of Artificial Sequence: Synthetic oligonucleotide
aucaacauuaguccacagg

SEQ ID NO: 2384756 - RNA, 19 nt, Artificial Sequence
  Description of Artificial Sequence: Synthetic oligonucleotide
uaagcuuaggccaaccaac

SEQ ID NO: 2384757 - RNA, 19 nt, Artificial Sequence
  Description of Artificial Sequence: Synthetic oligonucleotide
acugugaggacuugauggc

SEQ ID NO: 2384758 - RNA, 19 nt, Artificial Sequence
  Description of Artificial Sequence: Synthetic oligonucleotide
aaaacaauaccaucccaaa

SEQ ID NO: 2384759 - RNA, 19 nt, Artificial Sequence
  Description of Artificial Sequence: Synthetic oligonucleotide
agcauuuaacaaucucugc

SEQ ID NO: 2384760 - RNA, 19 nt, Artificial Sequence
  Description of Artificial Sequence: Synthetic oligonucleotide
cauaccauaaauaaggacu

SEQ ID NO: 2384761 - RNA, 19 nt, Artificial Sequence
  Description of Artificial Sequence: Synthetic oligonucleotide
auuuaaauccgcccaaaca

SEQ ID NO: 2384762 - RNA, 19 nt, Artificial Sequence
  Description of Artificial Sequence: Synthetic oligonucleotide
aauccgcccaaacaagcgg

SEQ ID NO: 2384763 - RNA, 19 nt, Artificial Sequence
  Description of Artificial Sequence: Synthetic oligonucleotide
uucuagaagcucaugaaaa

SEQ ID NO: 2384764 - RNA, 19 nt, Artificial Sequence
  Description of Artificial Sequence: Synthetic oligonucleotide
agcacugcaaucaccaucc

SEQ ID NO: 2384765 - RNA, 19 nt, Artificial Sequence
  Description of Artificial Sequence: Synthetic oligonucleotide
caucgcauguucaugagag

SEQ ID NO: 2384766 - RNA, 19 nt, Artificial Sequence
  Description of Artificial Sequence: Synthetic oligonucleotide
accacgaacauuaugauca

SEQ ID NO: 2384767 - RNA, 19 nt, Artificial Sequence
  Description of Artificial Sequence: Synthetic oligonucleotide
cauucauaccagauaaccc

SEQ ID NO: 2384768 - RNA, 19 nt, Artificial Sequence
  Description of Artificial Sequence: Synthetic oligonucleotide
aaauaaggacuguggcaac

SEQ ID NO: 2384769 - RNA, 19 nt, Artificial Sequence
  Description of Artificial Sequence: Synthetic oligonucleotide
auuaugaucacgguuccag

SEQ ID NO: 2384770 - RNA, 19 nt, Artificial Sequence
  Description of Artificial Sequence: Synthetic oligonucleotide
acauuaugaucacgguucc

SEQ ID NO: 2384771 - RNA, 19 nt, Artificial Sequence
  Description of Artificial Sequence: Synthetic oligonucleotide
ugugcaguaggacugggac

SEQ ID NO: 2384772 - RNA, 19 nt, Artificial Sequence
  Description of Artificial Sequence: Synthetic oligonucleotide
acagggaucaaauccaccu

SEQ ID NO: 2384773 - RNA, 19 nt, Artificial Sequence
  Description of Artificial Sequence: Synthetic oligonucleotide
uuucuagaagcucaugaaa

SEQ ID NO: 2384774 - RNA, 19 nt, Artificial Sequence
  Description of Artificial Sequence: Synthetic oligonucleotide
uaaauccgcccaaacaagc

SEQ ID NO: 2384775 - RNA, 19 nt, Artificial Sequence
  Description of Artificial Sequence: Synthetic oligonucleotide
uuaagcuuaggccaaccaa

SEQ ID NO: 2384776 - RNA, 19 nt, Artificial Sequence
  Description of Artificial Sequence: Synthetic oligonucleotide
aaguuaagaguacucuggu

SEQ ID NO: 2384777 - RNA, 19 nt, Artificial Sequence
  Description of Artificial Sequence: Synthetic oligonucleotide
ugguuacccagcuugaucu

SEQ ID NO: 2384778 - RNA, 19 nt, Artificial Sequence
  Description of Artificial Sequence: Synthetic oligonucleotide
cucaguaagaacaggagca

SEQ ID NO: 2384779 - RNA, 19 nt, Artificial Sequence
  Description of Artificial Sequence: Synthetic oligonucleotide
ugcacagcauuuaacaauc

SEQ ID NO: 2384780 - RNA, 19 nt, Artificial Sequence
  Description of Artificial Sequence: Synthetic oligonucleotide
acuugggucagaaaccacc

SEQ ID NO: 2384781 - RNA, 19 nt, Artificial Sequence
  Description of Artificial Sequence: Synthetic oligonucleotide
aaagucaguuugcaaguga

SEQ ID NO: 2384782 - RNA, 19 nt, Artificial Sequence
  Description of Artificial Sequence: Synthetic oligonucleotide
uagaaucauuuacucaggc

SEQ ID NO: 2384783 - RNA, 19 nt, Artificial Sequence
  Description of Artificial Sequence: Synthetic oligonucleotide
ucuagaagcucaugaaaac

SEQ ID NO: 2384784 - RNA, 19 nt, Artificial Sequence
  Description of Artificial Sequence: Synthetic oligonucleotide
gaaucauuuacucaggcau

SEQ ID NO: 2384785 - RNA, 19 nt, Artificial Sequence
  Description of Artificial Sequence: Synthetic oligonucleotide
caugagagcaaaugcauuc

SEQ ID NO: 2384786 - RNA, 19 nt, Artificial Sequence
  Description of Artificial Sequence: Synthetic oligonucleotide
ucgugcacagcauuuaaca

SEQ ID NO: 2384787 - RNA, 19 nt, Artificial Sequence
  Description of Artificial Sequence: Synthetic oligonucleotide
aacaggagcacugcaauca

SEQ ID NO: 2384788 - RNA, 19 nt, Artificial Sequence
  Description of Artificial Sequence: Synthetic oligonucleotide
uuaugaucacgguuccagg

SEQ ID NO: 2384789 - RNA, 19 nt, Artificial Sequence
  Description of Artificial Sequence: Synthetic oligonucleotide
caacuauuuaaauccgccc

SEQ ID NO: 2384790 - RNA, 19 nt, Artificial Sequence
  Description of Artificial Sequence: Synthetic oligonucleotide
uauuuaaauccgcccaaac

SEQ ID NO: 2384791 - RNA, 19 nt, Artificial Sequence
  Description of Artificial Sequence: Synthetic oligonucleotide
ugaaaacaauaccauccca

SEQ ID NO: 2384792 - RNA, 19 nt, Artificial Sequence
  Description of Artificial Sequence: Synthetic oligonucleotide
aguuaagaguacucugguc

SEQ ID NO: 2384793 - RNA, 19 nt, Artificial Sequence
  Description of Artificial Sequence: Synthetic oligonucleotide
caucccaaauugcaggugg

SEQ ID NO: 2384794 - RNA, 19 nt, Artificial Sequence
  Description of Artificial Sequence: Synthetic oligonucleotide
ucucaucgcauguucauga

SEQ ID NO: 2384795 - RNA, 19 nt, Artificial Sequence
  Description of Artificial Sequence: Synthetic oligonucleotide
acuuaaaugcagaaaucuc

SEQ ID NO: 2384796 - RNA, 19 nt, Artificial Sequence
  Description of Artificial Sequence: Synthetic oligonucleotide
uucauaccagauaacccca

SEQ ID NO: 2384797 - RNA, 19 nt, Artificial Sequence
  Description of Artificial Sequence: Synthetic oligonucleotide
ugcaguaggacugggacug

SEQ ID NO: 2384798 - RNA, 19 nt, Artificial Sequence
  Description of Artificial Sequence: Synthetic oligonucleotide
aaaugcauucacagggauc

SEQ ID NO: 2384799 - RNA, 19 nt, Artificial Sequence
  Description of Artificial Sequence: Synthetic oligonucleotide
aaauccgcccaaacaagcg

SEQ ID NO: 2384800 - RNA, 19 nt, Artificial Sequence
  Description of Artificial Sequence: Synthetic oligonucleotide
agaaucauuuacucaggca

SEQ ID NO: 2384801 - RNA, 19 nt, Artificial Sequence
  Description of Artificial Sequence: Synthetic oligonucleotide
aucuuacucaacuauuuaa

SEQ ID NO: 2384802 - RNA, 19 nt, Artificial Sequence
  Description of Artificial Sequence: Synthetic oligonucleotide
caauuuuccuucacuuggg

SEQ ID NO: 2384803 - RNA, 19 nt, Artificial Sequence
  Description of Artificial Sequence: Synthetic oligonucleotide
ugaucuuacucaacuauuu

SEQ ID NO: 2384804 - RNA, 19 nt, Artificial Sequence
  Description of Artificial Sequence: Synthetic oligonucleotide
uguuuuaagcuuaggccaa

SEQ ID NO: 2384805 - RNA, 19 nt, Artificial Sequence
  Description of Artificial Sequence: Synthetic oligonucleotide
cucaacuauuuaaauccgc

SEQ ID NO: 2384806 - RNA, 19 nt, Artificial Sequence
  Description of Artificial Sequence: Synthetic oligonucleotide
auuaguccacaggaggggc

SEQ ID NO: 2384807 - RNA, 19 nt, Artificial Sequence
  Description of Artificial Sequence: Synthetic oligonucleotide
aaggacuguggcaacacag

SEQ ID NO: 2384808 - RNA, 19 nt, Artificial Sequence
  Description of Artificial Sequence: Synthetic oligonucleotide
ucugucauucauaccagau

SEQ ID NO: 2384809 - RNA, 19 nt, Artificial Sequence
  Description of Artificial Sequence: Synthetic oligonucleotide
uggaauguuuuaagcuuag

SEQ ID NO: 2384810 - RNA, 19 nt, Artificial Sequence
  Description of Artificial Sequence: Synthetic oligonucleotide
uuuccaauagaaucauuua

SEQ ID NO: 2384811 - RNA, 19 nt, Artificial Sequence
  Description of Artificial Sequence: Synthetic oligonucleotide
uuuacucaggcauaccaua

SEQ ID NO: 2384812 - RNA, 19 nt, Artificial Sequence
  Description of Artificial Sequence: Synthetic oligonucleotide
aagaguacucuggucaucu

SEQ ID NO: 2384813 - RNA, 19 nt, Artificial Sequence
  Description of Artificial Sequence: Synthetic oligonucleotide
auaccauaaauaaggacug

SEQ ID NO: 2384814 - RNA, 19 nt, Artificial Sequence
  Description of Artificial Sequence: Synthetic oligonucleotide
acauuaguccacaggaggg

SEQ ID NO: 2384815 - RNA, 19 nt, Artificial Sequence
  Description of Artificial Sequence: Synthetic oligonucleotide
augguuacccagcuugauc

SEQ ID NO: 2384816 - RNA, 19 nt, Artificial Sequence
  Description of Artificial Sequence: Synthetic oligonucleotide
ucagucuucucaucgcaug

SEQ ID NO: 2384817 - RNA, 19 nt, Artificial Sequence
  Description of Artificial Sequence: Synthetic oligonucleotide
gagccucucagauuaggag

SEQ ID NO: 2384818 - RNA, 19 nt, Artificial Sequence
  Description of Artificial Sequence: Synthetic oligonucleotide
acgaguggaauguuuuaag

SEQ ID NO: 2384819 - RNA, 19 nt, Artificial Sequence
  Description of Artificial Sequence: Synthetic oligonucleotide
acuauuuaaauccgcccaa

SEQ ID NO: 2384820 - RNA, 19 nt, Artificial Sequence
  Description of Artificial Sequence: Synthetic oligonucleotide
aucucaauuuuccuucacu

SEQ ID NO: 2384821 - RNA, 19 nt, Artificial Sequence
  Description of Artificial Sequence: Synthetic oligonucleotide
guaaauauaguguggcucu

SEQ ID NO: 2384822 - RNA, 19 nt, Artificial Sequence
  Description of Artificial Sequence: Synthetic oligonucleotide
aguaagaacaggagcacug

SEQ ID NO: 2384823 - RNA, 19 nt, Artificial Sequence
  Description of Artificial Sequence: Synthetic oligonucleotide
ugaucagucuucucaucgc

SEQ ID NO: 2384824 - RNA, 19 nt, Artificial Sequence
  Description of Artificial Sequence: Synthetic oligonucleotide
cacgguuccagggacaacg

SEQ ID NO: 2384825 - RNA, 19 nt, Artificial Sequence
  Description of Artificial Sequence: Synthetic oligonucleotide
caggcauaccauaaauaag

SEQ ID NO: 2384826 - RNA, 19 nt, Artificial Sequence
  Description of Artificial Sequence: Synthetic oligonucleotide
ucgcauguucaugagagca

SEQ ID NO: 2384827 - RNA, 19 nt, Artificial Sequence
  Description of Artificial Sequence: Synthetic oligonucleotide
uugaucuuacucaacuauu

SEQ ID NO: 2384828 - RNA, 19 nt, Artificial Sequence
  Description of Artificial Sequence: Synthetic oligonucleotide
cacaucaacauuaguccac

SEQ ID NO: 2384829 - RNA, 19 nt, Artificial Sequence
  Description of Artificial Sequence: Synthetic oligonucleotide
agggacaacgaguggaaug

SEQ ID NO: 2384830 - RNA, 19 nt, Artificial Sequence
  Description of Artificial Sequence: Synthetic oligonucleotide
uuacucaggcauaccauaa

SEQ ID NO: 2384831 - RNA, 19 nt, Artificial Sequence
  Description of Artificial Sequence: Synthetic oligonucleotide
auaaggacuguggcaacac

SEQ ID NO: 2384832 - RNA, 19 nt, Artificial Sequence
  Description of Artificial Sequence: Synthetic oligonucleotide
aucgcauguucaugagagc

SEQ ID NO: 2384833 - RNA, 19 nt, Artificial Sequence
  Description of Artificial Sequence: Synthetic oligonucleotide
ugagagcaaaugcauucac

SEQ ID NO: 2384834 - RNA, 19 nt, Artificial Sequence
  Description of Artificial Sequence: Synthetic oligonucleotide
uuaagaguacucuggucau

SEQ ID NO: 2384835 - RNA, 19 nt, Artificial Sequence
  Description of Artificial Sequence: Synthetic oligonucleotide
agaacaggagcacugcaau

SEQ ID NO: 2384836 - RNA, 19 nt, Artificial Sequence
  Description of Artificial Sequence: Synthetic oligonucleotide
agucauuuggucgugcaca

SEQ ID NO: 2384837 - RNA, 19 nt, Artificial Sequence
  Description of Artificial Sequence: Synthetic oligonucleotide
caacauuaguccacaggag

SEQ ID NO: 2384838 - RNA, 19 nt, Artificial Sequence
  Description of Artificial Sequence: Synthetic oligonucleotide
caauagaaucauuuacuca

SEQ ID NO: 2384839 - RNA, 19 nt, Artificial Sequence
  Description of Artificial Sequence: Synthetic oligonucleotide
uuaggaggccucaguaaga

SEQ ID NO: 2384840 - RNA, 19 nt, Artificial Sequence
  Description of Artificial Sequence: Synthetic oligonucleotide
ugaucacgguuccagggac

SEQ ID NO: 2384841 - RNA, 19 nt, Artificial Sequence
  Description of Artificial Sequence: Synthetic oligonucleotide
ucaucgcauguucaugaga

SEQ ID NO: 2384842 - RNA, 19 nt, Artificial Sequence
  Description of Artificial Sequence: Synthetic oligonucleotide
aaauuucuagaagcucaug

SEQ ID NO: 2384843 - RNA, 19 nt, Artificial Sequence
  Description of Artificial Sequence: Synthetic oligonucleotide
caauaccaucccaaauugc

SEQ ID NO: 2384844 - RNA, 19 nt, Artificial Sequence
  Description of Artificial Sequence: Synthetic oligonucleotide
uuaggccaaccaacaagcc

SEQ ID NO: 2384845 - RNA, 19 nt, Artificial Sequence
  Description of Artificial Sequence: Synthetic oligonucleotide
aguaaugcugacgccacug

SEQ ID NO: 2384846 - RNA, 19 nt, Artificial Sequence
  Description of Artificial Sequence: Synthetic oligonucleotide
aaauauaguguggcucugu

SEQ ID NO: 2384847 - RNA, 19 nt, Artificial Sequence
  Description of Artificial Sequence: Synthetic oligonucleotide
acucaacuauuuaaauccg

SEQ ID NO: 2384848 - RNA, 19 nt, Artificial Sequence
  Description of Artificial Sequence: Synthetic oligonucleotide
aacgaguggaauguuuuaa

SEQ ID NO: 2384849 - RNA, 19 nt, Artificial Sequence
  Description of Artificial Sequence: Synthetic oligonucleotide
aaccaccacgaacauuaug

SEQ ID NO: 2384850 - RNA, 19 nt, Artificial Sequence
  Description of Artificial Sequence: Synthetic oligonucleotide
acacuuaaaugcagaaauc

SEQ ID NO: 2384851 - RNA, 19 nt, Artificial Sequence
  Description of Artificial Sequence: Synthetic oligonucleotide
gaguggaauguuuuaagcu

SEQ ID NO: 2384852 - RNA, 19 nt, Artificial Sequence
  Description of Artificial Sequence: Synthetic oligonucleotide
aggacuugauggcuucccg

SEQ ID NO: 2384853 - RNA, 19 nt, Artificial Sequence
  Description of Artificial Sequence: Synthetic oligonucleotide
cauuaguccacaggagggg

SEQ ID NO: 2384854 - RNA, 19 nt, Artificial Sequence
  Description of Artificial Sequence: Synthetic oligonucleotide
gcagaaaucucaauuuucc

SEQ ID NO: 2384855 - RNA, 19 nt, Artificial Sequence
  Description of Artificial Sequence: Synthetic oligonucleotide
auaccagauaaccccaaau

SEQ ID NO: 2384856 - RNA, 19 nt, Artificial Sequence
  Description of Artificial Sequence: Synthetic oligonucleotide
guggcucugucauucauac

SEQ ID NO: 2384857 - RNA, 19 nt, Artificial Sequence
  Description of Artificial Sequence: Synthetic oligonucleotide
agauuaggaggccucagua

SEQ ID NO: 2384858 - RNA, 19 nt, Artificial Sequence
  Description of Artificial Sequence: Synthetic oligonucleotide
acuugauggcuucccgggg

SEQ ID NO: 2384859 - RNA, 19 nt, Artificial Sequence
  Description of Artificial Sequence: Synthetic oligonucleotide
uucagccaugguuacccag

SEQ ID NO: 2384860 - RNA, 19 nt, Artificial Sequence
  Description of Artificial Sequence: Synthetic oligonucleotide
cugcaaucaccauccaggc

SEQ ID NO: 2384861 - RNA, 19 nt, Artificial Sequence
  Description of Artificial Sequence: Synthetic oligonucleotide
acaguaaugcugacgccac

SEQ ID NO: 2384862 - RNA, 19 nt, Artificial Sequence
  Description of Artificial Sequence: Synthetic oligonucleotide
ugcaaucaccauccaggcc

SEQ ID NO: 2384863 - RNA, 19 nt, Artificial Sequence
  Description of Artificial Sequence: Synthetic oligonucleotide
gaucagucuucucaucgca

SEQ ID NO: 2384864 - RNA, 19 nt, Artificial Sequence
  Description of Artificial Sequence: Synthetic oligonucleotide
augaucacgguuccaggga

SEQ ID NO: 2384865 - RNA, 19 nt, Artificial Sequence
  Description of Artificial Sequence: Synthetic oligonucleotide
gaguacucuggucaucuuc

SEQ ID NO: 2384866 - RNA, 19 nt, Artificial Sequence
  Description of Artificial Sequence: Synthetic oligonucleotide
ucucagauuaggaggccuc

SEQ ID NO: 2384867 - RNA, 19 nt, Artificial Sequence
  Description of Artificial Sequence: Synthetic oligonucleotide
aguacucuggucaucuuca

SEQ ID NO: 2384868 - RNA, 19 nt, Artificial Sequence
  Description of Artificial Sequence: Synthetic oligonucleotide
gcucaugaaaacaauacca

SEQ ID NO: 2384869 - RNA, 19 nt, Artificial Sequence
  Description of Artificial Sequence: Synthetic oligonucleotide
uaaggacuguggcaacaca

SEQ ID NO: 2384870 - RNA, 19 nt, Artificial Sequence
  Description of Artificial Sequence: Synthetic oligonucleotide
cuuuccaauagaaucauuu

SEQ ID NO: 2384871 - RNA, 19 nt, Artificial Sequence
  Description of Artificial Sequence: Synthetic oligonucleotide
gagcacugcaaucaccauc

SEQ ID NO: 2384872 - RNA, 19 nt, Artificial Sequence
  Description of Artificial Sequence: Synthetic oligonucleotide
uccgcccaaacaagcggcg

SEQ ID NO: 2384873 - RNA, 19 nt, Artificial Sequence
  Description of Artificial Sequence: Synthetic oligonucleotide
caaacaagcggcgggcggg

SEQ ID NO: 2384874 - RNA, 19 nt, Artificial Sequence
  Description of Artificial Sequence: Synthetic oligonucleotide
gcaagugaaauuucuagaa

SEQ ID NO: 2384875 - RNA, 19 nt, Artificial Sequence
  Description of Artificial Sequence: Synthetic oligonucleotide
uuuccuucacuugggucag

SEQ ID NO: 2384876 - RNA, 19 nt, Artificial Sequence
  Description of Artificial Sequence: Synthetic oligonucleotide
accaucccaaauugcaggu

SEQ ID NO: 2384877 - RNA, 19 nt, Artificial Sequence
  Description of Artificial Sequence: Synthetic oligonucleotide
uucugugucugugcaguag

SEQ ID NO: 2384878 - RNA, 19 nt, Artificial Sequence
  Description of Artificial Sequence: Synthetic oligonucleotide
cauucacagggaucaaauc

SEQ ID NO: 2384879 - RNA, 19 nt, Artificial Sequence
  Description of Artificial Sequence: Synthetic oligonucleotide
auccgcccaaacaagcggc

SEQ ID NO: 2384880 - RNA, 19 nt, Artificial Sequence
  Description of Artificial Sequence: Synthetic oligonucleotide
aacucccggaggcauucug

SEQ ID NO: 2384881 - RNA, 19 nt, Artificial Sequence
  Description of Artificial Sequence: Synthetic oligonucleotide
uguggcucugucauucaua

SEQ ID NO: 2384882 - RNA, 19 nt, Artificial Sequence
  Description of Artificial Sequence: Synthetic oligonucleotide
uacucaggcauaccauaaa

SEQ ID NO: 2384883 - RNA, 19 nt, Artificial Sequence
  Description of Artificial Sequence: Synthetic oligonucleotide
uucucaucgcauguucaug

SEQ ID NO: 2384884 - RNA, 19 nt, Artificial Sequence
  Description of Artificial Sequence: Synthetic oligonucleotide
uaguccacaggaggggcgg

SEQ ID NO: 2384885 - RNA, 19 nt, Artificial Sequence
  Description of Artificial Sequence: Synthetic oligonucleotide
uacucuggucaucuucagu

SEQ ID NO: 2384886 - RNA, 19 nt, Artificial Sequence
  Description of Artificial Sequence: Synthetic oligonucleotide
uucccggggaggcuggagc

SEQ ID NO: 2384887 - RNA, 19 nt, Artificial Sequence
  Description of Artificial Sequence: Synthetic oligonucleotide
cagauaaccccaaauaaau

SEQ ID NO: 2384888 - RNA, 19 nt, Artificial Sequence
  Description of Artificial Sequence: Synthetic oligonucleotide
aggagcacugcaaucacca

SEQ ID NO: 2384889 - RNA, 19 nt, Artificial Sequence
  Description of Artificial Sequence: Synthetic oligonucleotide
acaucaacauuaguccaca

SEQ ID NO: 2384890 - RNA, 19 nt, Artificial Sequence
  Description of Artificial Sequence: Synthetic oligonucleotide
uggcaacacaggaagcaaa

SEQ ID NO: 2384891 - RNA, 19 nt, Artificial Sequence
  Description of Artificial Sequence: Synthetic oligonucleotide
ggacuugauggcuucccgg

SEQ ID NO: 2384892 - RNA, 19 nt, Artificial Sequence
  Description of Artificial Sequence: Synthetic oligonucleotide
uaguguggcucugucauuc

SEQ ID NO: 2384893 - RNA, 19 nt, Artificial Sequence
  Description of Artificial Sequence: Synthetic oligonucleotide
gcauuuaacaaucucugcu

SEQ ID NO: 2384894 - RNA, 19 nt, Artificial Sequence
  Description of Artificial Sequence: Synthetic oligonucleotide
gugaaauuucuagaagcuc

SEQ ID NO: 2384895 - RNA, 19 nt, Artificial Sequence
  Description of Artificial Sequence: Synthetic oligonucleotide
cacugcaaucaccauccag

SEQ ID NO: 2384896 - RNA, 19 nt, Artificial Sequence
  Description of Artificial Sequence: Synthetic oligonucleotide
ucauaccagauaaccccaa

SEQ ID NO: 2384897 - RNA, 19 nt, Artificial Sequence
  Description of Artificial Sequence: Synthetic oligonucleotide
caucuucagucauuugguc

SEQ ID NO: 2384898 - RNA, 19 nt, Artificial Sequence
  Description of Artificial Sequence: Synthetic oligonucleotide
cucaucgcauguucaugag

SEQ ID NO: 2384899 - RNA, 19 nt, Artificial Sequence
  Description of Artificial Sequence: Synthetic oligonucleotide
ugugucugugcaguaggac

SEQ ID NO: 2384900 - RNA, 19 nt, Artificial Sequence
  Description of Artificial Sequence: Synthetic oligonucleotide
cacagggaucaaauccacc

SEQ ID NO: 2384901 - RNA, 19 nt, Artificial Sequence
  Description of Artificial Sequence: Synthetic oligonucleotide
aguaggacugggacugccg

SEQ ID NO: 2384902 - RNA, 19 nt, Artificial Sequence
  Description of Artificial Sequence: Synthetic oligonucleotide
gcauaccauaaauaaggac

SEQ ID NO: 2384903 - RNA, 19 nt, Artificial Sequence
  Description of Artificial Sequence: Synthetic oligonucleotide
auuuacucaggcauaccau

SEQ ID NO: 2384904 - RNA, 19 nt, Artificial Sequence
  Description of Artificial Sequence: Synthetic oligonucleotide
gacgccacugucacuggag

SEQ ID NO: 2384905 - RNA, 19 nt, Artificial Sequence
  Description of Artificial Sequence: Synthetic oligonucleotide
gaggacuugauggcuuccc

SEQ ID NO: 2384906 - RNA, 19 nt, Artificial Sequence
  Description of Artificial Sequence: Synthetic oligonucleotide
uuggucgugcacagcauuu

SEQ ID NO: 2384907 - RNA, 19 nt, Artificial Sequence
  Description of Artificial Sequence: Synthetic oligonucleotide
caucaacauuaguccacag

SEQ ID NO: 2384908 - RNA, 19 nt, Artificial Sequence
  Description of Artificial Sequence: Synthetic oligonucleotide
uccuggcaacucccggagg

SEQ ID NO: 2384909 - RNA, 19 nt, Artificial Sequence
  Description of Artificial Sequence: Synthetic oligonucleotide
ugcauucacagggaucaaa

SEQ ID NO: 2384910 - RNA, 19 nt, Artificial Sequence
  Description of Artificial Sequence: Synthetic oligonucleotide
cacgaacauuaugaucacg

SEQ ID NO: 2384911 - RNA, 19 nt, Artificial Sequence
  Description of Artificial Sequence: Synthetic oligonucleotide
acaacgaguggaauguuuu

SEQ ID NO: 2384912 - RNA, 19 nt, Artificial Sequence
  Description of Artificial Sequence: Synthetic oligonucleotide
cuggccgacggccuccucc

SEQ ID NO: 2384913 - RNA, 19 nt, Artificial Sequence
  Description of Artificial Sequence: Synthetic oligonucleotide
guacucuggucaucuucag

SEQ ID NO: 2384914 - RNA, 19 nt, Artificial Sequence
  Description of Artificial Sequence: Synthetic oligonucleotide
uaccauaaauaaggacugu

SEQ ID NO: 2384915 - RNA, 19 nt, Artificial Sequence
  Description of Artificial Sequence: Synthetic oligonucleotide
cagucauuuggucgugcac

SEQ ID NO: 2384916 - RNA, 19 nt, Artificial Sequence
  Description of Artificial Sequence: Synthetic oligonucleotide
guaggacugggacugccga

SEQ ID NO: 2384917 - RNA, 19 nt, Artificial Sequence
  Description of Artificial Sequence: Synthetic oligonucleotide
cgaguggaauguuuuaagc

SEQ ID NO: 2384918 - RNA, 19 nt, Artificial Sequence
  Description of Artificial Sequence: Synthetic oligonucleotide
ggaauguuuuaagcuuagg

SEQ ID NO: 2384919 - RNA, 19 nt, Artificial Sequence
  Description of Artificial Sequence: Synthetic oligonucleotide
cucaggcauaccauaaaua

SEQ ID NO: 2384920 - RNA, 19 nt, Artificial Sequence
  Description of Artificial Sequence: Synthetic oligonucleotide
uucccacaucaacauuagu

SEQ ID NO: 2384921 - RNA, 19 nt, Artificial Sequence
  Description of Artificial Sequence: Synthetic oligonucleotide
gaagcagauugaucagucu

SEQ ID NO: 2384922 - RNA, 19 nt, Artificial Sequence
  Description of Artificial Sequence: Synthetic oligonucleotide
ugacgccacugucacugga

SEQ ID NO: 2384923 - RNA, 19 nt, Artificial Sequence
  Description of Artificial Sequence: Synthetic oligonucleotide
cccaaauaaauaccuuaug

SEQ ID NO: 2384924 - RNA, 19 nt, Artificial Sequence
  Description of Artificial Sequence: Synthetic oligonucleotide
gucacuggaggguccuggc

SEQ ID NO: 2384925 - RNA, 19 nt, Artificial Sequence
  Description of Artificial Sequence: Synthetic oligonucleotide
gucaguuugcaagugaaau

SEQ ID NO: 2384926 - RNA, 19 nt, Artificial Sequence
  Description of Artificial Sequence: Synthetic oligonucleotide
uggccgacggccuccuccc

SEQ ID NO: 2384927 - RNA, 19 nt, Artificial Sequence
  Description of Artificial Sequence: Synthetic oligonucleotide
ccaaauugcagguggaaaa

SEQ ID NO: 2384928 - RNA, 19 nt, Artificial Sequence
  Description of Artificial Sequence: Synthetic oligonucleotide
cugucauucauaccagaua

SEQ ID NO: 2384929 - RNA, 19 nt, Artificial Sequence
  Description of Artificial Sequence: Synthetic oligonucleotide
uaagaguacucuggucauc

SEQ ID NO: 2384930 - RNA, 19 nt, Artificial Sequence
  Description of Artificial Sequence: Synthetic oligonucleotide
acugccgaagcagauugau

SEQ ID NO: 2384931 - RNA, 19 nt, Artificial Sequence
  Description of Artificial Sequence: Synthetic oligonucleotide
ccagauaaccccaaauaaa

SEQ ID NO: 2384932 - RNA, 19 nt, Artificial Sequence
  Description of Artificial Sequence: Synthetic oligonucleotide
aggaagcaaaagucaguuu

SEQ ID NO: 2384933 - RNA, 19 nt, Artificial Sequence
  Description of Artificial Sequence: Synthetic oligonucleotide
acaagcccuguggacuuuc

SEQ ID NO: 2384934 - RNA, 19 nt, Artificial Sequence
  Description of Artificial Sequence: Synthetic oligonucleotide
cccagcuugaucuuacuca

SEQ ID NO: 2384935 - RNA, 19 nt, Artificial Sequence
  Description of Artificial Sequence: Synthetic oligonucleotide
ucauuuggucgugcacagc

SEQ ID NO: 2384936 - RNA, 19 nt, Artificial Sequence
  Description of Artificial Sequence: Synthetic oligonucleotide
guuuuaagcuuaggccaac

SEQ ID NO: 2384937 - RNA, 19 nt, Artificial Sequence
  Description of Artificial Sequence: Synthetic oligonucleotide
ucccaaauugcagguggaa

SEQ ID NO: 2384938 - RNA, 19 nt, Artificial Sequence
  Description of Artificial Sequence: Synthetic oligonucleotide
caagcccuguggacuuucc

SEQ ID NO: 2384939 - RNA, 19 nt, Artificial Sequence
  Description of Artificial Sequence: Synthetic oligonucleotide
ugggacugccgaagcagau

SEQ ID NO: 2384940 - RNA, 19 nt, Artificial Sequence
  Description of Artificial Sequence: Synthetic oligonucleotide
uaggacugggacugccgaa

SEQ ID NO: 2384941 - RNA, 19 nt, Artificial Sequence
  Description of Artificial Sequence: Synthetic oligonucleotide
cugccgaagcagauugauc

SEQ ID NO: 2384942 - RNA, 19 nt, Artificial Sequence
  Description of Artificial Sequence: Synthetic oligonucleotide
cuguggacuuuccaauaga

SEQ ID NO: 2384943 - RNA, 19 nt, Artificial Sequence
  Description of Artificial Sequence: Synthetic oligonucleotide
uggcucugucauucauacc

SEQ ID NO: 2384944 - RNA, 19 nt, Artificial Sequence
  Description of Artificial Sequence: Synthetic oligonucleotide
cuauuuaaauccgcccaaa

SEQ ID NO: 2384945 - RNA, 19 nt, Artificial Sequence
  Description of Artificial Sequence: Synthetic oligonucleotide
ucccggaggcauucugugu

SEQ ID NO: 2384946 - RNA, 19 nt, Artificial Sequence
  Description of Artificial Sequence: Synthetic oligonucleotide
ggacuguggcaacacagga

SEQ ID NO: 2384947 - RNA, 19 nt, Artificial Sequence
  Description of Artificial Sequence: Synthetic oligonucleotide
caguuugcaagugaaauuu

SEQ ID NO: 2384948 - RNA, 19 nt, Artificial Sequence
  Description of Artificial Sequence: Synthetic oligonucleotide
cuccggacgccgcugucgc

SEQ ID NO: 2384949 - RNA, 19 nt, Artificial Sequence
  Description of Artificial Sequence: Synthetic oligonucleotide
cucugucauucauaccaga

SEQ ID NO: 2384950 - RNA, 19 nt, Artificial Sequence
  Description of Artificial Sequence: Synthetic oligonucleotide
cauucugugucugugcagu

SEQ ID NO: 2384951 - RNA, 19 nt, Artificial Sequence
  Description of Artificial Sequence: Synthetic oligonucleotide
ccaaccaacaagcccugug

SEQ ID NO: 2384952 - RNA, 19 nt, Artificial Sequence
  Description of Artificial Sequence: Synthetic oligonucleotide
gucgugcacagcauuuaac

SEQ ID NO: 2384953 - RNA, 19 nt, Artificial Sequence
  Description of Artificial Sequence: Synthetic oligonucleotide
gacgccgcugucgcugccg

SEQ ID NO: 2384954 - RNA, 19 nt, Artificial Sequence
  Description of Artificial Sequence: Synthetic oligonucleotide
cugacgccacugucacugg

SEQ ID NO: 2384955 - RNA, 19 nt, Artificial Sequence
  Description of Artificial Sequence: Synthetic oligonucleotide
cacuugggucagaaaccac

SEQ ID NO: 2384956 - RNA, 19 nt, Artificial Sequence
  Description of Artificial Sequence: Synthetic oligonucleotide
uacccagcuugaucuuacu

SEQ ID NO: 2384957 - RNA, 19 nt, Artificial Sequence
  Description of Artificial Sequence: Synthetic oligonucleotide
caagcggcgggcggggagg

SEQ ID NO: 2384958 - RNA, 19 nt, Artificial Sequence
  Description of Artificial Sequence: Synthetic oligonucleotide
gccgaagcagauugaucag

SEQ ID NO: 2384959 - RNA, 19 nt, Artificial Sequence
  Description of Artificial Sequence: Synthetic oligonucleotide
gccgggagcgcuccggacg

SEQ ID NO: 2384960 - RNA, 19 nt, Artificial Sequence
  Description of Artificial Sequence: Synthetic oligonucleotide
ccaaacaagcggcgggcgg

SEQ ID NO: 2384961 - RNA, 19 nt, Artificial Sequence
  Description of Artificial Sequence: Synthetic oligonucleotide
cauaccagauaaccccaaa

SEQ ID NO: 2384962 - RNA, 19 nt, Artificial Sequence
  Description of Artificial Sequence: Synthetic oligonucleotide
caguaggacugggacugcc

SEQ ID NO: 2384963 - RNA, 19 nt, Artificial Sequence
  Description of Artificial Sequence: Synthetic oligonucleotide
caccuucagccaugguuac

SEQ ID NO: 2384964 - RNA, 19 nt, Artificial Sequence
  Description of Artificial Sequence: Synthetic oligonucleotide
gggucagaaaccaccacga

SEQ ID NO: 2384965 - RNA, 19 nt, Artificial Sequence
  Description of Artificial Sequence: Synthetic oligonucleotide
agccgggagcgcuccggac

SEQ ID NO: 2384966 - RNA, 19 nt, Artificial Sequence
  Description of Artificial Sequence: Synthetic oligonucleotide
ggcauaccauaaauaagga

SEQ ID NO: 2384967 - RNA, 19 nt, Artificial Sequence
  Description of Artificial Sequence: Synthetic oligonucleotide
ggguccuguccacugugag

SEQ ID NO: 2384968 - RNA, 19 nt, Artificial Sequence
  Description of Artificial Sequence: Synthetic oligonucleotide
cugugucugugcaguagga

SEQ ID NO: 2384969 - RNA, 19 nt, Artificial Sequence
  Description of Artificial Sequence: Synthetic oligonucleotide
cgaagcagauugaucaguc

SEQ ID NO: 2384970 - RNA, 19 nt, Artificial Sequence
  Description of Artificial Sequence: Synthetic oligonucleotide
auucugugucugugcagua

SEQ ID NO: 2384971 - RNA, 19 nt, Artificial Sequence
  Description of Artificial Sequence: Synthetic oligonucleotide
gaucacgguuccagggaca

SEQ ID NO: 2384972 - RNA, 19 nt, Artificial Sequence
  Description of Artificial Sequence: Synthetic oligonucleotide
cucagauuaggaggccuca

SEQ ID NO: 2384973 - RNA, 19 nt, Artificial Sequence
  Description of Artificial Sequence: Synthetic oligonucleotide
cuucagucauuuggucgug

SEQ ID NO: 2384974 - RNA, 19 nt, Artificial Sequence
  Description of Artificial Sequence: Synthetic oligonucleotide
cugggacugccgaagcaga

SEQ ID NO: 2384975 - RNA, 19 nt, Artificial Sequence
  Description of Artificial Sequence: Synthetic oligonucleotide
agaaaccaccacgaacauu

SEQ ID NO: 2384976 - RNA, 19 nt, Artificial Sequence
  Description of Artificial Sequence: Synthetic oligonucleotide
gacuuuccaauagaaucau

SEQ ID NO: 2384977 - RNA, 19 nt, Artificial Sequence
  Description of Artificial Sequence: Synthetic oligonucleotide
uggucgugcacagcauuua

SEQ ID NO: 2384978 - RNA, 19 nt, Artificial Sequence
  Description of Artificial Sequence: Synthetic oligonucleotide
caacgaguggaauguuuua

SEQ ID NO: 2384979 - RNA, 19 nt, Artificial Sequence
  Description of Artificial Sequence: Synthetic oligonucleotide
ggguccuggcaacucccgg

SEQ ID NO: 2384980 - RNA, 19 nt, Artificial Sequence
  Description of Artificial Sequence: Synthetic oligonucleotide
acucccggaggcauucugu

SEQ ID NO: 2384981 - RNA, 19 nt, Artificial Sequence
  Description of Artificial Sequence: Synthetic oligonucleotide
gcaaaugcauucacaggga

SEQ ID NO: 2384982 - RNA, 19 nt, Artificial Sequence
  Description of Artificial Sequence: Synthetic oligonucleotide
aucccaaauugcaggugga

SEQ ID NO: 2384983 - RNA, 19 nt, Artificial Sequence
  Description of Artificial Sequence: Synthetic oligonucleotide
ccaccuucagccaugguua

SEQ ID NO: 2384984 - RNA, 19 nt, Artificial Sequence
  Description of Artificial Sequence: Synthetic oligonucleotide
aggguccuggcaacucccg

SEQ ID NO: 2384985 - RNA, 19 nt, Artificial Sequence
  Description of Artificial Sequence: Synthetic oligonucleotide
ccacaucaacauuagucca

SEQ ID NO: 2384986 - RNA, 19 nt, Artificial Sequence
  Description of Artificial Sequence: Synthetic oligonucleotide
agaguacucuggucaucuu

SEQ ID NO: 2384987 - RNA, 19 nt, Artificial Sequence
  Description of Artificial Sequence: Synthetic oligonucleotide
caaaugcauucacagggau

SEQ ID NO: 2384988 - RNA, 19 nt, Artificial Sequence
  Description of Artificial Sequence: Synthetic oligonucleotide
gggacaacgaguggaaugu

SEQ ID NO: 2384989 - RNA, 19 nt, Artificial Sequence
  Description of Artificial Sequence: Synthetic oligonucleotide
ccagcuugaucuuacucaa

SEQ ID NO: 2384990 - RNA, 19 nt, Artificial Sequence
  Description of Artificial Sequence: Synthetic oligonucleotide
aagcggcgggcggggaggg

SEQ ID NO: 2384991 - RNA, 19 nt, Artificial Sequence
  Description of Artificial Sequence: Synthetic oligonucleotide
guggcaacacaggaagcaa

SEQ ID NO: 2384992 - RNA, 19 nt, Artificial Sequence
  Description of Artificial Sequence: Synthetic oligonucleotide
ggccaucaggaucacagua

SEQ ID NO: 2384993 - RNA, 19 nt, Artificial Sequence
  Description of Artificial Sequence: Synthetic oligonucleotide
ggacugggacugccgaagc

SEQ ID NO: 2384994 - RNA, 19 nt, Artificial Sequence
  Description of Artificial Sequence: Synthetic oligonucleotide
aguccacaggaggggcggg

SEQ ID NO: 2384995 - RNA, 19 nt, Artificial Sequence
  Description of Artificial Sequence: Synthetic oligonucleotide
ggcaacacaggaagcaaaa

SEQ ID NO: 2384996 - RNA, 19 nt, Artificial Sequence
  Description of Artificial Sequence: Synthetic oligonucleotide
gcuugaucuuacucaacua

SEQ ID NO: 2384997 - RNA, 19 nt, Artificial Sequence
  Description of Artificial Sequence: Synthetic oligonucleotide
uggaggguccuggcaacuc

SEQ ID NO: 2384998 - RNA, 19 nt, Artificial Sequence
  Description of Artificial Sequence: Synthetic oligonucleotide
cuggagccucucagauuag

SEQ ID NO: 2384999 - RNA, 19 nt, Artificial Sequence
  Description of Artificial Sequence: Synthetic oligonucleotide
cauuaugaucacgguucca

SEQ ID NO: 2385000 - RNA, 19 nt, Artificial Sequence
  Description of Artificial Sequence: Synthetic oligonucleotide
guuacccagcuugaucuua

SEQ ID NO: 2385001 - RNA, 19 nt, Artificial Sequence
  Description of Artificial Sequence: Synthetic oligonucleotide
gguuccagggacaacgagu

SEQ ID NO: 2385002 - RNA, 19 nt, Artificial Sequence
  Description of Artificial Sequence: Synthetic oligonucleotide
gugcaguaggacugggacu

SEQ ID NO: 2385003 - RNA, 19 nt, Artificial Sequence
  Description of Artificial Sequence: Synthetic oligonucleotide
ggagccucucagauuagga

SEQ ID NO: 2385004 - RNA, 19 nt, Artificial Sequence
  Description of Artificial Sequence: Synthetic oligonucleotide
uggcaacucccggaggcau

SEQ ID NO: 2385005 - RNA, 19 nt, Artificial Sequence
  Description of Artificial Sequence: Synthetic oligonucleotide
cagauuaggaggccucagu

SEQ ID NO: 2385006 - RNA, 19 nt, Artificial Sequence
  Description of Artificial Sequence: Synthetic oligonucleotide
uccuguccacugugaggac

SEQ ID NO: 2385007 - RNA, 19 nt, Artificial Sequence
  Description of Artificial Sequence: Synthetic oligonucleotide
caggaagcaaaagucaguu

SEQ ID NO: 2385008 - RNA, 19 nt, Artificial Sequence
  Description of Artificial Sequence: Synthetic oligonucleotide
gacaacgaguggaauguuu

SEQ ID NO: 2385009 - RNA, 19 nt, Artificial Sequence
  Description of Artificial Sequence: Synthetic oligonucleotide
gcauguucaugagagcaaa

SEQ ID NO: 2385010 - RNA, 19 nt, Artificial Sequence
  Description of Artificial Sequence: Synthetic oligonucleotide
ggaucacaguaaugcugac

SEQ ID NO: 2385011 - RNA, 19 nt, Artificial Sequence
  Description of Artificial Sequence: Synthetic oligonucleotide
cagucuucucaucgcaugu

SEQ ID NO: 2385012 - RNA, 19 nt, Artificial Sequence
  Description of Artificial Sequence: Synthetic oligonucleotide
ggucgugcacagcauuuaa

SEQ ID NO: 2385013 - RNA, 19 nt, Artificial Sequence
  Description of Artificial Sequence: Synthetic oligonucleotide
ccacgaacauuaugaucac

SEQ ID NO: 2385014 - RNA, 19 nt, Artificial Sequence
  Description of Artificial Sequence: Synthetic oligonucleotide
aacaagcggcgggcgggga

SEQ ID NO: 2385015 - RNA, 19 nt, Artificial Sequence
  Description of Artificial Sequence: Synthetic oligonucleotide
aacaagcccuguggacuuu

SEQ ID NO: 2385016 - RNA, 19 nt, Artificial Sequence
  Description of Artificial Sequence: Synthetic oligonucleotide
gcuccggacgccgcugucg

SEQ ID NO: 2385017 - RNA, 19 nt, Artificial Sequence
  Description of Artificial Sequence: Synthetic oligonucleotide
ggcggguggguccugucca

SEQ ID NO: 2385018 - RNA, 19 nt, Artificial Sequence
  Description of Artificial Sequence: Synthetic oligonucleotide
ggucagaaaccaccacgaa

SEQ ID NO: 2385019 - RNA, 19 nt, Artificial Sequence
  Description of Artificial Sequence: Synthetic oligonucleotide
gcccaaacaagcggcgggc

SEQ ID NO: 2385020 - RNA, 19 nt, Artificial Sequence
  Description of Artificial Sequence: Synthetic oligonucleotide
guggacuuuccaauagaau

SEQ ID NO: 2385021 - RNA, 19 nt, Artificial Sequence
  Description of Artificial Sequence: Synthetic oligonucleotide
acgguuccagggacaacga

SEQ ID NO: 2385022 - RNA, 19 nt, Artificial Sequence
  Description of Artificial Sequence: Synthetic oligonucleotide
cauguucaugagagcaaau

SEQ ID NO: 2385023 - RNA, 19 nt, Artificial Sequence
  Description of Artificial Sequence: Synthetic oligonucleotide
guccacugugaggacuuga

SEQ ID NO: 2385024 - RNA, 19 nt, Artificial Sequence
  Description of Artificial Sequence: Synthetic oligonucleotide
cgcccaaacaagcggcggg

SEQ ID NO: 2385025 - RNA, 19 nt, Artificial Sequence
  Description of Artificial Sequence: Synthetic oligonucleotide
ucacgguuccagggacaac

SEQ ID NO: 2385026 - RNA, 19 nt, Artificial Sequence
  Description of Artificial Sequence: Synthetic oligonucleotide
cuucccggggaggcuggag

SEQ ID NO: 2385027 - RNA, 19 nt, Artificial Sequence
  Description of Artificial Sequence: Synthetic oligonucleotide
gggcggguggguccugucc

SEQ ID NO: 2385028 - RNA, 19 nt, Artificial Sequence
  Description of Artificial Sequence: Synthetic oligonucleotide
gcauucacagggaucaaau

SEQ ID NO: 2385029 - RNA, 19 nt, Artificial Sequence
  Description of Artificial Sequence: Synthetic oligonucleotide
cccaaacaagcggcgggcg

SEQ ID NO: 2385030 - RNA, 19 nt, Artificial Sequence
  Description of Artificial Sequence: Synthetic oligonucleotide
uggcagccgggagcgcucc

SEQ ID NO: 2385031 - RNA, 19 nt, Artificial Sequence
  Description of Artificial Sequence: Synthetic oligonucleotide
gcagauugaucagucuucu

SEQ ID NO: 2385032 - RNA, 19 nt, Artificial Sequence
  Description of Artificial Sequence: Synthetic oligonucleotide
cucucagauuaggaggccu

SEQ ID NO: 2385033 - RNA, 19 nt, Artificial Sequence
  Description of Artificial Sequence: Synthetic oligonucleotide
gggagcgcuccggacgccg

SEQ ID NO: 2385034 - RNA, 19 nt, Artificial Sequence
  Description of Artificial Sequence: Synthetic oligonucleotide
agcgcuccggacgccgcug

SEQ ID NO: 2385035 - RNA, 19 nt, Artificial Sequence
  Description of Artificial Sequence: Synthetic oligonucleotide
caacaagcccuguggacuu

SEQ ID NO: 2385036 - RNA, 19 nt, Artificial Sequence
  Description of Artificial Sequence: Synthetic oligonucleotide
cuggcaacucccggaggca

SEQ ID NO: 2385037 - RNA, 19 nt, Artificial Sequence
  Description of Artificial Sequence: Synthetic oligonucleotide
ccaugguuacccagcuuga

SEQ ID NO: 2385038 - RNA, 19 nt, Artificial Sequence
  Description of Artificial Sequence: Synthetic oligonucleotide
uccggacgccgcugucgcu

SEQ ID NO: 2385039 - RNA, 19 nt, Artificial Sequence
  Description of Artificial Sequence: Synthetic oligonucleotide
ccgggagcgcuccggacgc

SEQ ID NO: 2385040 - RNA, 19 nt, Artificial Sequence
  Description of Artificial Sequence: Synthetic oligonucleotide
cgugcacagcauuuaacaa

SEQ ID NO: 2385041 - RNA, 19 nt, Artificial Sequence
  Description of Artificial Sequence: Synthetic oligonucleotide
cugugaggacuugauggcu

SEQ ID NO: 2385042 - RNA, 19 nt, Artificial Sequence
  Description of Artificial Sequence: Synthetic oligonucleotide
cagggaucaaauccaccuu

SEQ ID NO: 2385043 - RNA, 19 nt, Artificial Sequence
  Description of Artificial Sequence: Synthetic oligonucleotide
gccacugucacuggagggu

SEQ ID NO: 2385044 - RNA, 19 nt, Artificial Sequence
  Description of Artificial Sequence: Synthetic oligonucleotide
augcauucacagggaucaa

SEQ ID NO: 2385045 - RNA, 19 nt, Artificial Sequence
  Description of Artificial Sequence: Synthetic oligonucleotide
guguggcucugucauucau

SEQ ID NO: 2385046 - RNA, 19 nt, Artificial Sequence
  Description of Artificial Sequence: Synthetic oligonucleotide
caaucaccauccaggccau

SEQ ID NO: 2385047 - RNA, 19 nt, Artificial Sequence
  Description of Artificial Sequence: Synthetic oligonucleotide
cagaaaccaccacgaacau

SEQ ID NO: 2385048 - RNA, 19 nt, Artificial Sequence
  Description of Artificial Sequence: Synthetic oligonucleotide
ggccaaccaacaagcccug

SEQ ID NO: 2385049 - RNA, 19 nt, Artificial Sequence
  Description of Artificial Sequence: Synthetic oligonucleotide
caugguuacccagcuugau

SEQ ID NO: 2385050 - RNA, 19 nt, Artificial Sequence
  Description of Artificial Sequence: Synthetic oligonucleotide
ccgcccaaacaagcggcgg

SEQ ID NO: 2385051 - RNA, 19 nt, Artificial Sequence
  Description of Artificial Sequence: Synthetic oligonucleotide
caguaaugcugacgccacu

SEQ ID NO: 2385052 - RNA, 19 nt, Artificial Sequence
  Description of Artificial Sequence: Synthetic oligonucleotide
cgaacauuaugaucacggu

SEQ ID NO: 2385053 - RNA, 19 nt, Artificial Sequence
  Description of Artificial Sequence: Synthetic oligonucleotide
gcccuguggacuuuccaau

SEQ ID NO: 2385054 - RNA, 19 nt, Artificial Sequence
  Description of Artificial Sequence: Synthetic oligonucleotide
gcaguaggacugggacugc

SEQ ID NO: 2385055 - RNA, 19 nt, Artificial Sequence
  Description of Artificial Sequence: Synthetic oligonucleotide
cgguuccagggacaacgag

SEQ ID NO: 2385056 - RNA, 19 nt, Artificial Sequence
  Description of Artificial Sequence: Synthetic oligonucleotide
cagccgggagcgcuccgga

SEQ ID NO: 2385057 - RNA, 19 nt, Artificial Sequence
  Description of Artificial Sequence: Synthetic oligonucleotide
gagcgcuccggacgccgcu

SEQ ID NO: 2385058 - RNA, 19 nt, Artificial Sequence
  Description of Artificial Sequence: Synthetic oligonucleotide
cccuguggacuuuccaaua

SEQ ID NO: 2385059 - RNA, 19 nt, Artificial Sequence
  Description of Artificial Sequence: Synthetic oligonucleotide
ggagcgcuccggacgccgc

SEQ ID NO: 2385060 - RNA, 19 nt, Artificial Sequence
  Description of Artificial Sequence: Synthetic oligonucleotide
gcggcgggcggggagggug

SEQ ID NO: 2385061 - RNA, 19 nt, Artificial Sequence
  Description of Artificial Sequence: Synthetic oligonucleotide
ccgacggccuccuccccuc

SEQ ID NO: 2385062 - RNA, 19 nt, Artificial Sequence
  Description of Artificial Sequence: Synthetic oligonucleotide
ggagcacugcaaucaccau

SEQ ID NO: 2385063 - RNA, 19 nt, Artificial Sequence
  Description of Artificial Sequence: Synthetic oligonucleotide
gguuacccagcuugaucuu

SEQ ID NO: 2385064 - RNA, 19 nt, Artificial Sequence
  Description of Artificial Sequence: Synthetic oligonucleotide
gcacugcaaucaccaucca

SEQ ID NO: 2385065 - RNA, 19 nt, Artificial Sequence
  Description of Artificial Sequence: Synthetic oligonucleotide
guccacaggaggggcgggu

SEQ ID NO: 2385066 - RNA, 19 nt, Artificial Sequence
  Description of Artificial Sequence: Synthetic oligonucleotide
ggacgccgcugucgcugcc

SEQ ID NO: 2385067 - RNA, 19 nt, Artificial Sequence
  Description of Artificial Sequence: Synthetic oligonucleotide
cuggaggguccuggcaacu

SEQ ID NO: 2385068 - RNA, 19 nt, Artificial Sequence
  Description of Artificial Sequence: Synthetic oligonucleotide
ccgaagcagauugaucagu

SEQ ID NO: 2385069 - RNA, 19 nt, Artificial Sequence
  Description of Artificial Sequence: Synthetic oligonucleotide
gaggggcggguggguccug

SEQ ID NO: 2385070 - RNA, 19 nt, Artificial Sequence
  Description of Artificial Sequence: Synthetic oligonucleotide
ggccgacggccuccucccc

SEQ ID NO: 2385071 - RNA, 19 nt, Artificial Sequence
  Description of Artificial Sequence: Synthetic oligonucleotide
cggacgccgcugucgcugc

SEQ ID NO: 2385072 - RNA, 19 nt, Artificial Sequence
  Description of Artificial Sequence: Synthetic oligonucleotide
cagggacaacgaguggaau

SEQ ID NO: 2385073 - RNA, 19 nt, Artificial Sequence
  Description of Artificial Sequence: Synthetic oligonucleotide
ggcuggagccucucagauu

SEQ ID NO: 2385074 - RNA, 19 nt, Artificial Sequence
  Description of Artificial Sequence: Synthetic oligonucleotide
ccauccaggccaucaggau

SEQ ID NO: 2385075 - RNA, 19 nt, Artificial Sequence
  Description of Artificial Sequence: Synthetic oligonucleotide
ggggcggguggguccuguc

SEQ ID NO: 2385076 - RNA, 19 nt, Artificial Sequence
  Description of Artificial Sequence: Synthetic oligonucleotide
gggacugccgaagcagauu

SEQ ID NO: 2385077 - RNA, 19 nt, Artificial Sequence
  Description of Artificial Sequence: Synthetic oligonucleotide
gccgacggccuccuccccu

SEQ ID NO: 2385078 - RNA, 19 nt, Artificial Sequence
  Description of Artificial Sequence: Synthetic oligonucleotide
ggaggggcggguggguccu

SEQ ID NO: 2385079 - RNA, 19 nt, Artificial Sequence
  Description of Artificial Sequence: Synthetic oligonucleotide
ggacaacgaguggaauguu

SEQ ID NO: 2385080 - RNA, 19 nt, Artificial Sequence
  Description of Artificial Sequence: Synthetic oligonucleotide
caacucccggaggcauucu

SEQ ID NO: 2385081 - RNA, 19 nt, Artificial Sequence
  Description of Artificial Sequence: Synthetic oligonucleotide
ggcaacucccggaggcauu

SEQ ID NO: 2385082 - RNA, 19 nt, Artificial Sequence
  Description of Artificial Sequence: Synthetic oligonucleotide
gccaaccaacaagcccugu

SEQ ID NO: 2385083 - RNA, 19 nt, Artificial Sequence
  Description of Artificial Sequence: Synthetic oligonucleotide
ccgcugcugcuggccgacg

SEQ ID NO: 2385084 - RNA, 19 nt, Artificial Sequence
  Description of Artificial Sequence: Synthetic oligonucleotide
gcuggccgacggccuccuc

SEQ ID NO: 2385085 - RNA, 19 nt, Artificial Sequence
  Description of Artificial Sequence: Synthetic oligonucleotide
gcgcuccggacgccgcugu

SEQ ID NO: 2385086 - RNA, 19 nt, Artificial Sequence
  Description of Artificial Sequence: Synthetic oligonucleotide
cgcuccggacgccgcuguc

SEQ ID NO: 2385087 - RNA, 19 nt, Artificial Sequence
  Description of Artificial Sequence: Synthetic oligonucleotide
cgggagcgcuccggacgcc

SEQ ID NO: 2385088 - RNA, 19 nt, Artificial Sequence
  Description of Artificial Sequence: Synthetic oligonucleotide
auuaaauccagaucccugc

SEQ ID NO: 2385089 - RNA, 19 nt, Artificial Sequence
  Description of Artificial Sequence: Synthetic oligonucleotide
ucuaccacgaagaugaggc

SEQ ID NO: 2385090 - RNA, 19 nt, Artificial Sequence
  Description of Artificial Sequence: Synthetic oligonucleotide
agaacaugcaggcaggagc

SEQ ID NO: 2385091 - RNA, 19 nt, Artificial Sequence
  Description of Artificial Sequence: Synthetic oligonucleotide
uccacauugaagccuaugg

SEQ ID NO: 2385092 - RNA, 19 nt, Artificial Sequence
  Description of Artificial Sequence: Synthetic oligonucleotide
gaagaugaggcccugagug

SEQ ID NO: 2385093 - RNA, 19 nt, Artificial Sequence
  Description of Artificial Sequence: Synthetic oligonucleotide
cuggcuaacgcuuugacag

SEQ ID NO: 2385094 - RNA, 19 nt, Artificial Sequence
  Description of Artificial Sequence: Synthetic oligonucleotide
aagccaaccaugaggaucc

SEQ ID NO: 2385095 - RNA, 19 nt, Artificial Sequence
  Description of Artificial Sequence: Synthetic oligonucleotide
gaaaagagcgcggacaccg

SEQ ID NO: 2385096 - RNA, 19 nt, Artificial Sequence
  Description of Artificial Sequence: Synthetic oligonucleotide
agucagcucgcucacaggc

SEQ ID NO: 2385097 - RNA, 19 nt, Artificial Sequence
  Description of Artificial Sequence: Synthetic oligonucleotide
aaguagugccuccacagag

SEQ ID NO: 2385098 - RNA, 19 nt, Artificial Sequence
  Description of Artificial Sequence: Synthetic oligonucleotide
caagagaacaugcaggcag

SEQ ID NO: 2385099 - RNA, 19 nt, Artificial Sequence
  Description of Artificial Sequence: Synthetic oligonucleotide
cugucuaccacgaagauga

SEQ ID NO: 2385100 - RNA, 19 nt, Artificial Sequence
  Description of Artificial Sequence: Synthetic oligonucleotide
uccaagccaaccaugagga

SEQ ID NO: 2385101 - RNA, 19 nt, Artificial Sequence
  Description of Artificial Sequence: Synthetic oligonucleotide
uuacugucuaccacgaaga

SEQ ID NO: 2385102 - RNA, 19 nt, Artificial Sequence
  Description of Artificial Sequence: Synthetic oligonucleotide
aagauccgcgaaaagagcg

SEQ ID NO: 2385103 - RNA, 19 nt, Artificial Sequence
  Description of Artificial Sequence: Synthetic oligonucleotide
aauuaaauccagaucccug

SEQ ID NO: 2385104 - RNA, 19 nt, Artificial Sequence
  Description of Artificial Sequence: Synthetic oligonucleotide
caucauacaggccugugcc

SEQ ID NO: 2385105 - RNA, 19 nt, Artificial Sequence
  Description of Artificial Sequence: Synthetic oligonucleotide
cacauugaagccuauggug

SEQ ID NO: 2385106 - RNA, 19 nt, Artificial Sequence
  Description of Artificial Sequence: Synthetic oligonucleotide
ucaugggacagccagucca

SEQ ID NO: 2385107 - RNA, 19 nt, Artificial Sequence
  Description of Artificial Sequence: Synthetic oligonucleotide
acgacaagagaacaugcag

SEQ ID NO: 2385108 - RNA, 19 nt, Artificial Sequence
  Description of Artificial Sequence: Synthetic oligonucleotide
acauugaagccuauggugg

SEQ ID NO: 2385109 - RNA, 19 nt, Artificial Sequence
  Description of Artificial Sequence: Synthetic oligonucleotide
auccgcaucugcuucuucc

SEQ ID NO: 2385110 - RNA, 19 nt, Artificial Sequence
  Description of Artificial Sequence: Synthetic oligonucleotide
gacaccgugaggcccaugg

SEQ ID NO: 2385111 - RNA, 19 nt, Artificial Sequence
  Description of Artificial Sequence: Synthetic oligonucleotide
aaccaugaggauccgcauc

SEQ ID NO: 2385112 - RNA, 19 nt, Artificial Sequence
  Description of Artificial Sequence: Synthetic oligonucleotide
aaauuaaauccagaucccu

SEQ ID NO: 2385113 - RNA, 19 nt, Artificial Sequence
  Description of Artificial Sequence: Synthetic oligonucleotide
aggaugguagucuugccag

SEQ ID NO: 2385114 - RNA, 19 nt, Artificial Sequence
  Description of Artificial Sequence: Synthetic oligonucleotide
agcgcggacaccgugaggc

SEQ ID NO: 2385115 - RNA, 19 nt, Artificial Sequence
  Description of Artificial Sequence: Synthetic oligonucleotide
aguuuguacaggaugguag

SEQ ID NO: 2385116 - RNA, 19 nt, Artificial Sequence
  Description of Artificial Sequence: Synthetic oligonucleotide
ugaagccccagcuugucag

SEQ ID NO: 2385117 - RNA, 19 nt, Artificial Sequence
  Description of Artificial Sequence: Synthetic oligonucleotide
aagccuauggugggaaugg

SEQ ID NO: 2385118 - RNA, 19 nt, Artificial Sequence
  Description of Artificial Sequence: Synthetic oligonucleotide
uuugacagcucaugggaca

SEQ ID NO: 2385119 - RNA, 19 nt, Artificial Sequence
  Description of Artificial Sequence: Synthetic oligonucleotide
guuggcaaacaccagcagc

SEQ ID NO: 2385120 - RNA, 19 nt, Artificial Sequence
  Description of Artificial Sequence: Synthetic oligonucleotide
uuaaauccagaucccugcu

SEQ ID NO: 2385121 - RNA, 19 nt, Artificial Sequence
  Description of Artificial Sequence: Synthetic oligonucleotide
aagagaacaugcaggcagg

SEQ ID NO: 2385122 - RNA, 19 nt, Artificial Sequence
  Description of Artificial Sequence: Synthetic oligonucleotide
cauugaagccuaugguggg

SEQ ID NO: 2385123 - RNA, 19 nt, Artificial Sequence
  Description of Artificial Sequence: Synthetic oligonucleotide
acagaggucgaaucuuguc

SEQ ID NO: 2385124 - RNA, 19 nt, Artificial Sequence
  Description of Artificial Sequence: Synthetic oligonucleotide
aacgcuuugacagcucaug

SEQ ID NO: 2385125 - RNA, 19 nt, Artificial Sequence
  Description of Artificial Sequence: Synthetic oligonucleotide
aggagugggaaggaagggc

SEQ ID NO: 2385126 - RNA, 19 nt, Artificial Sequence
  Description of Artificial Sequence: Synthetic oligonucleotide
ucuguggggaggaggagug

SEQ ID NO: 2385127 - RNA, 19 nt, Artificial Sequence
  Description of Artificial Sequence: Synthetic oligonucleotide
aggaagcccauccacaggu

SEQ ID NO: 2385128 - RNA, 19 nt, Artificial Sequence
  Description of Artificial Sequence: Synthetic oligonucleotide
ccuauggugggaauggugg

SEQ ID NO: 2385129 - RNA, 19 nt, Artificial Sequence
  Description of Artificial Sequence: Synthetic oligonucleotide
aagggcacugccugaggag

SEQ ID NO: 2385130 - RNA, 19 nt, Artificial Sequence
  Description of Artificial Sequence: Synthetic oligonucleotide
uccaacaucccagacugug

SEQ ID NO: 2385131 - RNA, 19 nt, Artificial Sequence
  Description of Artificial Sequence: Synthetic oligonucleotide
gaagcccauccacaggucc

SEQ ID NO: 2385132 - RNA, 19 nt, Artificial Sequence
  Description of Artificial Sequence: Synthetic oligonucleotide
uacgcaagugcugaagccc

SEQ ID NO: 2385133 - RNA, 19 nt, Artificial Sequence
  Description of Artificial Sequence: Synthetic oligonucleotide
acgcuuugacagcucaugg

SEQ ID NO: 2385134 - RNA, 19 nt, Artificial Sequence
  Description of Artificial Sequence: Synthetic oligonucleotide
acauguggccuggacauac

SEQ ID NO: 2385135 - RNA, 19 nt, Artificial Sequence
  Description of Artificial Sequence: Synthetic oligonucleotide
aagcccauccacagguccc

SEQ ID NO: 2385136 - RNA, 19 nt, Artificial Sequence
  Description of Artificial Sequence: Synthetic oligonucleotide
uccagcccaucauacaggc

SEQ ID NO: 2385137 - RNA, 19 nt, Artificial Sequence
  Description of Artificial Sequence: Synthetic oligonucleotide
acgaagaugaggcccugag

SEQ ID NO: 2385138 - RNA, 19 nt, Artificial Sequence
  Description of Artificial Sequence: Synthetic oligonucleotide
ugugccuuggguagcacau

SEQ ID NO: 2385139 - RNA, 19 nt, Artificial Sequence
  Description of Artificial Sequence: Synthetic oligonucleotide
ugguagucuugccagccgc

SEQ ID NO: 2385140 - RNA, 19 nt, Artificial Sequence
  Description of Artificial Sequence: Synthetic oligonucleotide
gaugguagucuugccagcc

SEQ ID NO: 2385141 - RNA, 19 nt, Artificial Sequence
  Description of Artificial Sequence: Synthetic oligonucleotide
agcacauguggccuggaca

SEQ ID NO: 2385142 - RNA, 19 nt, Artificial Sequence
  Description of Artificial Sequence: Synthetic oligonucleotide
gauccgcgaaaagagcgcg

SEQ ID NO: 2385143 - RNA, 19 nt, Artificial Sequence
  Description of Artificial Sequence: Synthetic oligonucleotide
cuacgcaagugcugaagcc

SEQ ID NO: 2385144 - RNA, 19 nt, Artificial Sequence
  Description of Artificial Sequence: Synthetic oligonucleotide
cuuugacagcucaugggac

SEQ ID NO: 2385145 - RNA, 19 nt, Artificial Sequence
  Description of Artificial Sequence: Synthetic oligonucleotide
ggagcuuccgggcagcagg

SEQ ID NO: 2385146 - RNA, 19 nt, Artificial Sequence
  Description of Artificial Sequence: Synthetic oligonucleotide
ucugugcccagagagcgag

SEQ ID NO: 2385147 - RNA, 19 nt, Artificial Sequence
  Description of Artificial Sequence: Synthetic oligonucleotide
cccaauuucaguuuguaca

SEQ ID NO: 2385148 - RNA, 19 nt, Artificial Sequence
  Description of Artificial Sequence: Synthetic oligonucleotide
gaguccgggagucugguca

SEQ ID NO: 2385149 - RNA, 19 nt, Artificial Sequence
  Description of Artificial Sequence: Synthetic oligonucleotide
gaagauccgcgaaaagagc

SEQ ID NO: 2385150 - RNA, 19 nt, Artificial Sequence
  Description of Artificial Sequence: Synthetic oligonucleotide
agauccgcgaaaagagcgc

SEQ ID NO: 2385151 - RNA, 19 nt, Artificial Sequence
  Description of Artificial Sequence: Synthetic oligonucleotide
uggacauaccacgugcggc

SEQ ID NO: 2385152 - RNA, 19 nt, Artificial Sequence
  Description of Artificial Sequence: Synthetic oligonucleotide
gaagccuauggugggaaug

SEQ ID NO: 2385153 - RNA, 19 nt, Artificial Sequence
  Description of Artificial Sequence: Synthetic oligonucleotide
ugaaacagauguucuuaua

SEQ ID NO: 2385154 - RNA, 19 nt, Artificial Sequence
  Description of Artificial Sequence: Synthetic oligonucleotide
ugccuuggguagcacaugu

SEQ ID NO: 2385155 - RNA, 19 nt, Artificial Sequence
  Description of Artificial Sequence: Synthetic oligonucleotide
gaacaugcaggcaggagca

SEQ ID NO: 2385156 - RNA, 19 nt, Artificial Sequence
  Description of Artificial Sequence: Synthetic oligonucleotide
caagccaaccaugaggauc

SEQ ID NO: 2385157 - RNA, 19 nt, Artificial Sequence
  Description of Artificial Sequence: Synthetic oligonucleotide
uccgcaucugcuucuuccc

SEQ ID NO: 2385158 - RNA, 19 nt, Artificial Sequence
  Description of Artificial Sequence: Synthetic oligonucleotide
caugaggauccgcaucugc

SEQ ID NO: 2385159 - RNA, 19 nt, Artificial Sequence
  Description of Artificial Sequence: Synthetic oligonucleotide
agucuggucaucccgggau

SEQ ID NO: 2385160 - RNA, 19 nt, Artificial Sequence
  Description of Artificial Sequence: Synthetic oligonucleotide
aggccugugccuuggguag

SEQ ID NO: 2385161 - RNA, 19 nt, Artificial Sequence
  Description of Artificial Sequence: Synthetic oligonucleotide
aauccagaucccugcuccu

SEQ ID NO: 2385162 - RNA, 19 nt, Artificial Sequence
  Description of Artificial Sequence: Synthetic oligonucleotide
cuggacauaccacgugcgg

SEQ ID NO: 2385163 - RNA, 19 nt, Artificial Sequence
  Description of Artificial Sequence: Synthetic oligonucleotide
cagagagcgaggcuccagg

SEQ ID NO: 2385164 - RNA, 19 nt, Artificial Sequence
  Description of Artificial Sequence: Synthetic oligonucleotide
caugguggggcccggggcg

SEQ ID NO: 2385165 - RNA, 19 nt, Artificial Sequence
  Description of Artificial Sequence: Synthetic oligonucleotide
aucccagacugugaaacag

SEQ ID NO: 2385166 - RNA, 19 nt, Artificial Sequence
  Description of Artificial Sequence: Synthetic oligonucleotide
cgaagauccgcgaaaagag

SEQ ID NO: 2385167 - RNA, 19 nt, Artificial Sequence
  Description of Artificial Sequence: Synthetic oligonucleotide
uguggccuggacauaccac

SEQ ID NO: 2385168 - RNA, 19 nt, Artificial Sequence
  Description of Artificial Sequence: Synthetic oligonucleotide
acugugaaacagauguucu

SEQ ID NO: 2385169 - RNA, 19 nt, Artificial Sequence
  Description of Artificial Sequence: Synthetic oligonucleotide
ucagcucgcucacaggcau

SEQ ID NO: 2385170 - RNA, 19 nt, Artificial Sequence
  Description of Artificial Sequence: Synthetic oligonucleotide
accgugaggcccauggugg

SEQ ID NO: 2385171 - RNA, 19 nt, Artificial Sequence
  Description of Artificial Sequence: Synthetic oligonucleotide
caugggacagccaguccag

SEQ ID NO: 2385172 - RNA, 19 nt, Artificial Sequence
  Description of Artificial Sequence: Synthetic oligonucleotide
acgcaagugcugaagcccc

SEQ ID NO: 2385173 - RNA, 19 nt, Artificial Sequence
  Description of Artificial Sequence: Synthetic oligonucleotide
ccuccaacaucccagacug

SEQ ID NO: 2385174 - RNA, 19 nt, Artificial Sequence
  Description of Artificial Sequence: Synthetic oligonucleotide
caucccgggaugcacgcgg

SEQ ID NO: 2385175 - RNA, 19 nt, Artificial Sequence
  Description of Artificial Sequence: Synthetic oligonucleotide
ugugcccagagagcgaggc

SEQ ID NO: 2385176 - RNA, 19 nt, Artificial Sequence
  Description of Artificial Sequence: Synthetic oligonucleotide
acugucuaccacgaagaug

SEQ ID NO: 2385177 - RNA, 19 nt, Artificial Sequence
  Description of Artificial Sequence: Synthetic oligonucleotide
gaaguagugccuccacaga

SEQ ID NO: 2385178 - RNA, 19 nt, Artificial Sequence
  Description of Artificial Sequence: Synthetic oligonucleotide
acauaccacgugcggcuac

SEQ ID NO: 2385179 - RNA, 19 nt, Artificial Sequence
  Description of Artificial Sequence: Synthetic oligonucleotide
cgacaagagaacaugcagg

SEQ ID NO: 2385180 - RNA, 19 nt, Artificial Sequence
  Description of Artificial Sequence: Synthetic oligonucleotide
agccgcauccaagccaacc

SEQ ID NO: 2385181 - RNA, 19 nt, Artificial Sequence
  Description of Artificial Sequence: Synthetic oligonucleotide
gcuuugacagcucauggga

SEQ ID NO: 2385182 - RNA, 19 nt, Artificial Sequence
  Description of Artificial Sequence: Synthetic oligonucleotide
ugaggaguccgggagucug

SEQ ID NO: 2385183 - RNA, 19 nt, Artificial Sequence
  Description of Artificial Sequence: Synthetic oligonucleotide
caggcucccacgacaagag

SEQ ID NO: 2385184 - RNA, 19 nt, Artificial Sequence
  Description of Artificial Sequence: Synthetic oligonucleotide
uucccgaagauccgcgaaa

SEQ ID NO: 2385185 - RNA, 19 nt, Artificial Sequence
  Description of Artificial Sequence: Synthetic oligonucleotide
gagaacaugcaggcaggag

SEQ ID NO: 2385186 - RNA, 19 nt, Artificial Sequence
  Description of Artificial Sequence: Synthetic oligonucleotide
cuccuccccuggaagaggg

SEQ ID NO: 2385187 - RNA, 19 nt, Artificial Sequence
  Description of Artificial Sequence: Synthetic oligonucleotide
aucauacaggccugugccu

SEQ ID NO: 2385188 - RNA, 19 nt, Artificial Sequence
  Description of Artificial Sequence: Synthetic oligonucleotide
cuaccacgaagaugaggcc

SEQ ID NO: 2385189 - RNA, 19 nt, Artificial Sequence
  Description of Artificial Sequence: Synthetic oligonucleotide
gucuaccacgaagaugagg

SEQ ID NO: 2385190 - RNA, 19 nt, Artificial Sequence
  Description of Artificial Sequence: Synthetic oligonucleotide
gcuacgcaagugcugaagc

SEQ ID NO: 2385191 - RNA, 19 nt, Artificial Sequence
  Description of Artificial Sequence: Synthetic oligonucleotide
ucucggucauuacugucua

SEQ ID NO: 2385192 - RNA, 19 nt, Artificial Sequence
  Description of Artificial Sequence: Synthetic oligonucleotide
accacgugcggcuacgcaa

SEQ ID NO: 2385193 - RNA, 19 nt, Artificial Sequence
  Description of Artificial Sequence: Synthetic oligonucleotide
agagcgcggacaccgugag

SEQ ID NO: 2385194 - RNA, 19 nt, Artificial Sequence
  Description of Artificial Sequence: Synthetic oligonucleotide
ugcggcuacgcaagugcug

SEQ ID NO: 2385195 - RNA, 19 nt, Artificial Sequence
  Description of Artificial Sequence: Synthetic oligonucleotide
uggcuaacgcuuugacagc

SEQ ID NO: 2385196 - RNA, 19 nt, Artificial Sequence
  Description of Artificial Sequence: Synthetic oligonucleotide
ucuggucaucccgggaugc

SEQ ID NO: 2385197 - RNA, 19 nt, Artificial Sequence
  Description of Artificial Sequence: Synthetic oligonucleotide
cacgacaagagaacaugca

SEQ ID NO: 2385198 - RNA, 19 nt, Artificial Sequence
  Description of Artificial Sequence: Synthetic oligonucleotide
acugccugaggaguccggg

SEQ ID NO: 2385199 - RNA, 19 nt, Artificial Sequence
  Description of Artificial Sequence: Synthetic oligonucleotide
uccgcgaaaagagcgcgga

SEQ ID NO: 2385200 - RNA, 19 nt, Artificial Sequence
  Description of Artificial Sequence: Synthetic oligonucleotide
cucacaggcauggcauugg

SEQ ID NO: 2385201 - RNA, 19 nt, Artificial Sequence
  Description of Artificial Sequence: Synthetic oligonucleotide
ucuucccgaagauccgcga

SEQ ID NO: 2385202 - RNA, 19 nt, Artificial Sequence
  Description of Artificial Sequence: Synthetic oligonucleotide
caccgugaggcccauggug

SEQ ID NO: 2385203 - RNA, 19 nt, Artificial Sequence
  Description of Artificial Sequence: Synthetic oligonucleotide
uacugucuaccacgaagau

SEQ ID NO: 2385204 - RNA, 19 nt, Artificial Sequence
  Description of Artificial Sequence: Synthetic oligonucleotide
cauccaagccaaccaugag

SEQ ID NO: 2385205 - RNA, 19 nt, Artificial Sequence
  Description of Artificial Sequence: Synthetic oligonucleotide
agugcugaagccccagcuu

SEQ ID NO: 2385206 - RNA, 19 nt, Artificial Sequence
  Description of Artificial Sequence: Synthetic oligonucleotide
ugcccagagagcgaggcuc

SEQ ID NO: 2385207 - RNA, 19 nt, Artificial Sequence
  Description of Artificial Sequence: Synthetic oligonucleotide
cauaccacgugcggcuacg

SEQ ID NO: 2385208 - RNA, 19 nt, Artificial Sequence
  Description of Artificial Sequence: Synthetic oligonucleotide
agggacgcggggugagggc

SEQ ID NO: 2385209 - RNA, 19 nt, Artificial Sequence
  Description of Artificial Sequence: Synthetic oligonucleotide
cuucuucccgaagauccgc

SEQ ID NO: 2385210 - RNA, 19 nt, Artificial Sequence
  Description of Artificial Sequence: Synthetic oligonucleotide
agcuugucagucagcucgc

SEQ ID NO: 2385211 - RNA, 19 nt, Artificial Sequence
  Description of Artificial Sequence: Synthetic oligonucleotide
auguggccuggacauacca

SEQ ID NO: 2385212 - RNA, 19 nt, Artificial Sequence
  Description of Artificial Sequence: Synthetic oligonucleotide
agcacggcaucccgaagcu

SEQ ID NO: 2385213 - RNA, 19 nt, Artificial Sequence
  Description of Artificial Sequence: Synthetic oligonucleotide
ugcacgcgggagcuuccgg

SEQ ID NO: 2385214 - RNA, 19 nt, Artificial Sequence
  Description of Artificial Sequence: Synthetic oligonucleotide
ucccacgacaagagaacau

SEQ ID NO: 2385215 - RNA, 19 nt, Artificial Sequence
  Description of Artificial Sequence: Synthetic oligonucleotide
ucauacaggccugugccuu

SEQ ID NO: 2385216 - RNA, 19 nt, Artificial Sequence
  Description of Artificial Sequence: Synthetic oligonucleotide
uuccacauugaagccuaug

SEQ ID NO: 2385217 - RNA, 19 nt, Artificial Sequence
  Description of Artificial Sequence: Synthetic oligonucleotide
agcagacuccuggacccgc

SEQ ID NO: 2385218 - RNA, 19 nt, Artificial Sequence
  Description of Artificial Sequence: Synthetic oligonucleotide
uggccuggacauaccacgu

SEQ ID NO: 2385219 - RNA, 19 nt, Artificial Sequence
  Description of Artificial Sequence: Synthetic oligonucleotide
ugucuaccacgaagaugag

SEQ ID NO: 2385220 - RNA, 19 nt, Artificial Sequence
  Description of Artificial Sequence: Synthetic oligonucleotide
cauacaggccugugccuug

SEQ ID NO: 2385221 - RNA, 19 nt, Artificial Sequence
  Description of Artificial Sequence: Synthetic oligonucleotide
uugaagccuauggugggaa

SEQ ID NO: 2385222 - RNA, 19 nt, Artificial Sequence
  Description of Artificial Sequence: Synthetic oligonucleotide
gcccucugugcccagagag

SEQ ID NO: 2385223 - RNA, 19 nt, Artificial Sequence
  Description of Artificial Sequence: Synthetic oligonucleotide
aggcaggagagcagagccc

SEQ ID NO: 2385224 - RNA, 19 nt, Artificial Sequence
  Description of Artificial Sequence: Synthetic oligonucleotide
cauguggccuggacauacc

SEQ ID NO: 2385225 - RNA, 19 nt, Artificial Sequence
  Description of Artificial Sequence: Synthetic oligonucleotide
acaagagaacaugcaggca

SEQ ID NO: 2385226 - RNA, 19 nt, Artificial Sequence
  Description of Artificial Sequence: Synthetic oligonucleotide
gagcccucugugcccagag

SEQ ID NO: 2385227 - RNA, 19 nt, Artificial Sequence
  Description of Artificial Sequence: Synthetic oligonucleotide
uaccacgugcggcuacgca

SEQ ID NO: 2385228 - RNA, 19 nt, Artificial Sequence
  Description of Artificial Sequence: Synthetic oligonucleotide
agcagcacggcaucccgaa

SEQ ID NO: 2385229 - RNA, 19 nt, Artificial Sequence
  Description of Artificial Sequence: Synthetic oligonucleotide
ccaucauacaggccugugc

SEQ ID NO: 2385230 - RNA, 19 nt, Artificial Sequence
  Description of Artificial Sequence: Synthetic oligonucleotide
gcgaaaagagcgcggacac

SEQ ID NO: 2385231 - RNA, 19 nt, Artificial Sequence
  Description of Artificial Sequence: Synthetic oligonucleotide
gucaucccgggaugcacgc

SEQ ID NO: 2385232 - RNA, 19 nt, Artificial Sequence
  Description of Artificial Sequence: Synthetic oligonucleotide
ccacgacaagagaacaugc

SEQ ID NO: 2385233 - RNA, 19 nt, Artificial Sequence
  Description of Artificial Sequence: Synthetic oligonucleotide
auccagaucccugcuccuc

SEQ ID NO: 2385234 - RNA, 19 nt, Artificial Sequence
  Description of Artificial Sequence: Synthetic oligonucleotide
gccuggacauaccacgugc

SEQ ID NO: 2385235 - RNA, 19 nt, Artificial Sequence
  Description of Artificial Sequence: Synthetic oligonucleotide
ccuggacauaccacgugcg

SEQ ID NO: 2385236 - RNA, 19 nt, Artificial Sequence
  Description of Artificial Sequence: Synthetic oligonucleotide
auacaggccugugccuugg

SEQ ID NO: 2385237 - RNA, 19 nt, Artificial Sequence
  Description of Artificial Sequence: Synthetic oligonucleotide
ccaaccaugaggauccgca

SEQ ID NO: 2385238 - RNA, 19 nt, Artificial Sequence
  Description of Artificial Sequence: Synthetic oligonucleotide
auaccacgugcggcuacgc

SEQ ID NO: 2385239 - RNA, 19 nt, Artificial Sequence
  Description of Artificial Sequence: Synthetic oligonucleotide
cacgcgggagcuuccgggc

SEQ ID NO: 2385240 - RNA, 19 nt, Artificial Sequence
  Description of Artificial Sequence: Synthetic oligonucleotide
aaaagagcgcggacaccgu

SEQ ID NO: 2385241 - RNA, 19 nt, Artificial Sequence
  Description of Artificial Sequence: Synthetic oligonucleotide
ggagucuggucaucccggg

SEQ ID NO: 2385242 - RNA, 19 nt, Artificial Sequence
  Description of Artificial Sequence: Synthetic oligonucleotide
cucaugggacagccagucc

SEQ ID NO: 2385243 - RNA, 19 nt, Artificial Sequence
  Description of Artificial Sequence: Synthetic oligonucleotide
cucucggucauuacugucu

SEQ ID NO: 2385244 - RNA, 19 nt, Artificial Sequence
  Description of Artificial Sequence: Synthetic oligonucleotide
ccucugugcccagagagcg

SEQ ID NO: 2385245 - RNA, 19 nt, Artificial Sequence
  Description of Artificial Sequence: Synthetic oligonucleotide
gucuggucaucccgggaug

SEQ ID NO: 2385246 - RNA, 19 nt, Artificial Sequence
  Description of Artificial Sequence: Synthetic oligonucleotide
ucccgaagauccgcgaaaa

SEQ ID NO: 2385247 - RNA, 19 nt, Artificial Sequence
  Description of Artificial Sequence: Synthetic oligonucleotide
ugggaaggaagggcacugc

SEQ ID NO: 2385248 - RNA, 19 nt, Artificial Sequence
  Description of Artificial Sequence: Synthetic oligonucleotide
acuccuggacccgcucucg

SEQ ID NO: 2385249 - RNA, 19 nt, Artificial Sequence
  Description of Artificial Sequence: Synthetic oligonucleotide
guagugccuccacagaggu

SEQ ID NO: 2385250 - RNA, 19 nt, Artificial Sequence
  Description of Artificial Sequence: Synthetic oligonucleotide
gggagucuggucaucccgg

SEQ ID NO: 2385251 - RNA, 19 nt, Artificial Sequence
  Description of Artificial Sequence: Synthetic oligonucleotide
agagaacaugcaggcagga

SEQ ID NO: 2385252 - RNA, 19 nt, Artificial Sequence
  Description of Artificial Sequence: Synthetic oligonucleotide
agggcacugccugaggagu

SEQ ID NO: 2385253 - RNA, 19 nt, Artificial Sequence
  Description of Artificial Sequence: Synthetic oligonucleotide
ucaucccgggaugcacgcg

SEQ ID NO: 2385254 - RNA, 19 nt, Artificial Sequence
  Description of Artificial Sequence: Synthetic oligonucleotide
uggucaucccgggaugcac

SEQ ID NO: 2385255 - RNA, 19 nt, Artificial Sequence
  Description of Artificial Sequence: Synthetic oligonucleotide
gugaaacagauguucuuau

SEQ ID NO: 2385256 - RNA, 19 nt, Artificial Sequence
  Description of Artificial Sequence: Synthetic oligonucleotide
ggucaucccgggaugcacg

SEQ ID NO: 2385257 - RNA, 19 nt, Artificial Sequence
  Description of Artificial Sequence: Synthetic oligonucleotide
ggagugggaaggaagggca

SEQ ID NO: 2385258 - RNA, 19 nt, Artificial Sequence
  Description of Artificial Sequence: Synthetic oligonucleotide
ugucuguggggaggaggag

SEQ ID NO: 2385259 - RNA, 19 nt, Artificial Sequence
  Description of Artificial Sequence: Synthetic oligonucleotide
uccuggacccgcucucggu

SEQ ID NO: 2385260 - RNA, 19 nt, Artificial Sequence
  Description of Artificial Sequence: Synthetic oligonucleotide
ggaugguagucuugccagc

SEQ ID NO: 2385261 - RNA, 19 nt, Artificial Sequence
  Description of Artificial Sequence: Synthetic oligonucleotide
aggcauggcauugggcaug

SEQ ID NO: 2385262 - RNA, 19 nt, Artificial Sequence
  Description of Artificial Sequence: Synthetic oligonucleotide
gcaguucaucagcagacuc

SEQ ID NO: 2385263 - RNA, 19 nt, Artificial Sequence
  Description of Artificial Sequence: Synthetic oligonucleotide
gcacgcgggagcuuccggg

SEQ ID NO: 2385264 - RNA, 19 nt, Artificial Sequence
  Description of Artificial Sequence: Synthetic oligonucleotide
ugaggcccaugguggggcc

SEQ ID NO: 2385265 - RNA, 19 nt, Artificial Sequence
  Description of Artificial Sequence: Synthetic oligonucleotide
cagggacgcggggugaggg

SEQ ID NO: 2385266 - RNA, 19 nt, Artificial Sequence
  Description of Artificial Sequence: Synthetic oligonucleotide
ccaguccagcccaucauac

SEQ ID NO: 2385267 - RNA, 19 nt, Artificial Sequence
  Description of Artificial Sequence: Synthetic oligonucleotide
cacugccugaggaguccgg

SEQ ID NO: 2385268 - RNA, 19 nt, Artificial Sequence
  Description of Artificial Sequence: Synthetic oligonucleotide
cuccuggacccgcucucgg

SEQ ID NO: 2385269 - RNA, 19 nt, Artificial Sequence
  Description of Artificial Sequence: Synthetic oligonucleotide
aguccgggagucuggucau

SEQ ID NO: 2385270 - RNA, 19 nt, Artificial Sequence
  Description of Artificial Sequence: Synthetic oligonucleotide
gagucuggucaucccggga

SEQ ID NO: 2385271 - RNA, 19 nt, Artificial Sequence
  Description of Artificial Sequence: Synthetic oligonucleotide
gcuggcuaacgcuuugaca

SEQ ID NO: 2385272 - RNA, 19 nt, Artificial Sequence
  Description of Artificial Sequence: Synthetic oligonucleotide
agccaguccagcccaucau

SEQ ID NO: 2385273 - RNA, 19 nt, Artificial Sequence
  Description of Artificial Sequence: Synthetic oligonucleotide
agcaggggccugccccugg

SEQ ID NO: 2385274 - RNA, 19 nt, Artificial Sequence
  Description of Artificial Sequence: Synthetic oligonucleotide
cccacgacaagagaacaug

SEQ ID NO: 2385275 - RNA, 19 nt, Artificial Sequence
  Description of Artificial Sequence: Synthetic oligonucleotide
cucggucauuacugucuac

SEQ ID NO: 2385276 - RNA, 19 nt, Artificial Sequence
  Description of Artificial Sequence: Synthetic oligonucleotide
gaugcacgcgggagcuucc

SEQ ID NO: 2385277 - RNA, 19 nt, Artificial Sequence
  Description of Artificial Sequence: Synthetic oligonucleotide
auccgcgaaaagagcgcgg

SEQ ID NO: 2385278 - RNA, 19 nt, Artificial Sequence
  Description of Artificial Sequence: Synthetic oligonucleotide
ccacagaggucgaaucuug

SEQ ID NO: 2385279 - RNA, 19 nt, Artificial Sequence
  Description of Artificial Sequence: Synthetic oligonucleotide
cgugcggcuacgcaagugc

SEQ ID NO: 2385280 - RNA, 19 nt, Artificial Sequence
  Description of Artificial Sequence: Synthetic oligonucleotide
cuggcuggcuaacgcuuug

SEQ ID NO: 2385281 - RNA, 19 nt, Artificial Sequence
  Description of Artificial Sequence: Synthetic oligonucleotide
ugccccuggcuggcuaacg

SEQ ID NO: 2385282 - RNA, 19 nt, Artificial Sequence
  Description of Artificial Sequence: Synthetic oligonucleotide
gcuuccgggcagcaggggc

SEQ ID NO: 2385283 - RNA, 19 nt, Artificial Sequence
  Description of Artificial Sequence: Synthetic oligonucleotide
ggacauaccacgugcggcu

SEQ ID NO: 2385284 - RNA, 19 nt, Artificial Sequence
  Description of Artificial Sequence: Synthetic oligonucleotide
ccccaauuucaguuuguac

SEQ ID NO: 2385285 - RNA, 19 nt, Artificial Sequence
  Description of Artificial Sequence: Synthetic oligonucleotide
gagagcgaggcuccaggcu

SEQ ID NO: 2385286 - RNA, 19 nt, Artificial Sequence
  Description of Artificial Sequence: Synthetic oligonucleotide
acccgcucucggucauuac

SEQ ID NO: 2385287 - RNA, 19 nt, Artificial Sequence
  Description of Artificial Sequence: Synthetic oligonucleotide
cugugccuuggguagcaca

SEQ ID NO: 2385288 - RNA, 19 nt, Artificial Sequence
  Description of Artificial Sequence: Synthetic oligonucleotide
gcauccaagccaaccauga

SEQ ID NO: 2385289 - RNA, 19 nt, Artificial Sequence
  Description of Artificial Sequence: Synthetic oligonucleotide
ccgcucucggucauuacug

SEQ ID NO: 2385290 - RNA, 19 nt, Artificial Sequence
  Description of Artificial Sequence: Synthetic oligonucleotide
ggcuacgcaagugcugaag

SEQ ID NO: 2385291 - RNA, 19 nt, Artificial Sequence
  Description of Artificial Sequence: Synthetic oligonucleotide
gccgcauccaagccaacca

SEQ ID NO: 2385292 - RNA, 19 nt, Artificial Sequence
  Description of Artificial Sequence: Synthetic oligonucleotide
caggccugugccuugggua

SEQ ID NO: 2385293 - RNA, 19 nt, Artificial Sequence
  Description of Artificial Sequence: Synthetic oligonucleotide
uagugccuccacagagguc

SEQ ID NO: 2385294 - RNA, 19 nt, Artificial Sequence
  Description of Artificial Sequence: Synthetic oligonucleotide
cuucccgaagauccgcgaa

SEQ ID NO: 2385295 - RNA, 19 nt, Artificial Sequence
  Description of Artificial Sequence: Synthetic oligonucleotide
uggcuggcuaacgcuuuga

SEQ ID NO: 2385296 - RNA, 19 nt, Artificial Sequence
  Description of Artificial Sequence: Synthetic oligonucleotide
ccacgugcggcuacgcaag

SEQ ID NO: 2385297 - RNA, 19 nt, Artificial Sequence
  Description of Artificial Sequence: Synthetic oligonucleotide
ccgaagauccgcgaaaaga

SEQ ID NO: 2385298 - RNA, 19 nt, Artificial Sequence
  Description of Artificial Sequence: Synthetic oligonucleotide
caguccagcccaucauaca

SEQ ID NO: 2385299 - RNA, 19 nt, Artificial Sequence
  Description of Artificial Sequence: Synthetic oligonucleotide
aggcuccaggcucccacga

SEQ ID NO: 2385300 - RNA, 19 nt, Artificial Sequence
  Description of Artificial Sequence: Synthetic oligonucleotide
ccugucuguggggaggagg

SEQ ID NO: 2385301 - RNA, 19 nt, Artificial Sequence
  Description of Artificial Sequence: Synthetic oligonucleotide
cugugcccagagagcgagg

SEQ ID NO: 2385302 - RNA, 19 nt, Artificial Sequence
  Description of Artificial Sequence: Synthetic oligonucleotide
gauccgcaucugcuucuuc

SEQ ID NO: 2385303 - RNA, 19 nt, Artificial Sequence
  Description of Artificial Sequence: Synthetic oligonucleotide
agcgaggcuccaggcuccc

SEQ ID NO: 2385304 - RNA, 19 nt, Artificial Sequence
  Description of Artificial Sequence: Synthetic oligonucleotide
augcacgcgggagcuuccg

SEQ ID NO: 2385305 - RNA, 19 nt, Artificial Sequence
  Description of Artificial Sequence: Synthetic oligonucleotide
gcacauguggccuggacau

SEQ ID NO: 2385306 - RNA, 19 nt, Artificial Sequence
  Description of Artificial Sequence: Synthetic oligonucleotide
ggcuggcuaacgcuuugac

SEQ ID NO: 2385307 - RNA, 19 nt, Artificial Sequence
  Description of Artificial Sequence: Synthetic oligonucleotide
agcccaucauacaggccug

SEQ ID NO: 2385308 - RNA, 19 nt, Artificial Sequence
  Description of Artificial Sequence: Synthetic oligonucleotide
cuguggggaggaggagugg

SEQ ID NO: 2385309 - RNA, 19 nt, Artificial Sequence
  Description of Artificial Sequence: Synthetic oligonucleotide
cucccacgacaagagaaca

SEQ ID NO: 2385310 - RNA, 19 nt, Artificial Sequence
  Description of Artificial Sequence: Synthetic oligonucleotide
ucccgggaugcacgcggga

SEQ ID NO: 2385311 - RNA, 19 nt, Artificial Sequence
  Description of Artificial Sequence: Synthetic oligonucleotide
aggcucccacgacaagaga

SEQ ID NO: 2385312 - RNA, 19 nt, Artificial Sequence
  Description of Artificial Sequence: Synthetic oligonucleotide
cuccacagaggucgaaucu

SEQ ID NO: 2385313 - RNA, 19 nt, Artificial Sequence
  Description of Artificial Sequence: Synthetic oligonucleotide
ggcucccacgacaagagaa

SEQ ID NO: 2385314 - RNA, 19 nt, Artificial Sequence
  Description of Artificial Sequence: Synthetic oligonucleotide
gcucccacgacaagagaac

SEQ ID NO: 2385315 - RNA, 19 nt, Artificial Sequence
  Description of Artificial Sequence: Synthetic oligonucleotide
agcccucugugcccagaga

SEQ ID NO: 2385316 - RNA, 19 nt, Artificial Sequence
  Description of Artificial Sequence: Synthetic oligonucleotide
cuggacccgcucucgguca

SEQ ID NO: 2385317 - RNA, 19 nt, Artificial Sequence
  Description of Artificial Sequence: Synthetic oligonucleotide
gccuauggugggaauggug

SEQ ID NO: 2385318 - RNA, 19 nt, Artificial Sequence
  Description of Artificial Sequence: Synthetic oligonucleotide
cugugaaacagauguucuu

SEQ ID NO: 2385319 - RNA, 19 nt, Artificial Sequence
  Description of Artificial Sequence: Synthetic oligonucleotide
agcucaugggacagccagu

SEQ ID NO: 2385320 - RNA, 19 nt, Artificial Sequence
  Description of Artificial Sequence: Synthetic oligonucleotide
caguuuguacaggauggua

SEQ ID NO: 2385321 - RNA, 19 nt, Artificial Sequence
  Description of Artificial Sequence: Synthetic oligonucleotide
ggccuggacauaccacgug

SEQ ID NO: 2385322 - RNA, 19 nt, Artificial Sequence
  Description of Artificial Sequence: Synthetic oligonucleotide
uggacccgcucucggucau

SEQ ID NO: 2385323 - RNA, 19 nt, Artificial Sequence
  Description of Artificial Sequence: Synthetic oligonucleotide
gcucacaggcauggcauug

SEQ ID NO: 2385324 - RNA, 19 nt, Artificial Sequence
  Description of Artificial Sequence: Synthetic oligonucleotide
acgcgggagcuuccgggca

SEQ ID NO: 2385325 - RNA, 19 nt, Artificial Sequence
  Description of Artificial Sequence: Synthetic oligonucleotide
aucccgggaugcacgcggg

SEQ ID NO: 2385326 - RNA, 19 nt, Artificial Sequence
  Description of Artificial Sequence: Synthetic oligonucleotide
cgggagucuggucaucccg

SEQ ID NO: 2385327 - RNA, 19 nt, Artificial Sequence
  Description of Artificial Sequence: Synthetic oligonucleotide
cugccugaggaguccggga

SEQ ID NO: 2385328 - RNA, 19 nt, Artificial Sequence
  Description of Artificial Sequence: Synthetic oligonucleotide
ggaugcacgcgggagcuuc

SEQ ID NO: 2385329 - RNA, 19 nt, Artificial Sequence
  Description of Artificial Sequence: Synthetic oligonucleotide
uuccgggcagcaggggccu

SEQ ID NO: 2385330 - RNA, 19 nt, Artificial Sequence
  Description of Artificial Sequence: Synthetic oligonucleotide
agccuauggugggaauggu

SEQ ID NO: 2385331 - RNA, 19 nt, Artificial Sequence
  Description of Artificial Sequence: Synthetic oligonucleotide
acgugcggcuacgcaagug

SEQ ID NO: 2385332 - RNA, 19 nt, Artificial Sequence
  Description of Artificial Sequence: Synthetic oligonucleotide
ccaacaucccagacuguga

SEQ ID NO: 2385333 - RNA, 19 nt, Artificial Sequence
  Description of Artificial Sequence: Synthetic oligonucleotide
gcucucggucauuacuguc

SEQ ID NO: 2385334 - RNA, 19 nt, Artificial Sequence
  Description of Artificial Sequence: Synthetic oligonucleotide
cagcucgcucacaggcaug

SEQ ID NO: 2385335 - RNA, 19 nt, Artificial Sequence
  Description of Artificial Sequence: Synthetic oligonucleotide
ggcgcgggcagggacgcgg

SEQ ID NO: 2385336 - RNA, 19 nt, Artificial Sequence
  Description of Artificial Sequence: Synthetic oligonucleotide
gaggcccaugguggggccc

SEQ ID NO: 2385337 - RNA, 19 nt, Artificial Sequence
  Description of Artificial Sequence: Synthetic oligonucleotide
gccagccgcauccaagcca

SEQ ID NO: 2385338 - RNA, 19 nt, Artificial Sequence
  Description of Artificial Sequence: Synthetic oligonucleotide
gcggcuacgcaagugcuga

SEQ ID NO: 2385339 - RNA, 19 nt, Artificial Sequence
  Description of Artificial Sequence: Synthetic oligonucleotide
cacagaggucgaaucuugu

SEQ ID NO: 2385340 - RNA, 19 nt, Artificial Sequence
  Description of Artificial Sequence: Synthetic oligonucleotide
cucugugcccagagagcga

SEQ ID NO: 2385341 - RNA, 19 nt, Artificial Sequence
  Description of Artificial Sequence: Synthetic oligonucleotide
gccccuggcuggcuaacgc

SEQ ID NO: 2385342 - RNA, 19 nt, Artificial Sequence
  Description of Artificial Sequence: Synthetic oligonucleotide
gguagucuugccagccgca

SEQ ID NO: 2385343 - RNA, 19 nt, Artificial Sequence
  Description of Artificial Sequence: Synthetic oligonucleotide
ccgggaugcacgcgggagc

SEQ ID NO: 2385344 - RNA, 19 nt, Artificial Sequence
  Description of Artificial Sequence: Synthetic oligonucleotide
gacauaccacgugcggcua

SEQ ID NO: 2385345 - RNA, 19 nt, Artificial Sequence
  Description of Artificial Sequence: Synthetic oligonucleotide
ccuggacccgcucucgguc

SEQ ID NO: 2385346 - RNA, 19 nt, Artificial Sequence
  Description of Artificial Sequence: Synthetic oligonucleotide
ccgugaggcccaugguggg

SEQ ID NO: 2385347 - RNA, 19 nt, Artificial Sequence
  Description of Artificial Sequence: Synthetic oligonucleotide
gccaggaagcccauccaca

SEQ ID NO: 2385348 - RNA, 19 nt, Artificial Sequence
  Description of Artificial Sequence: Synthetic oligonucleotide
ccagccgcauccaagccaa

SEQ ID NO: 2385349 - RNA, 19 nt, Artificial Sequence
  Description of Artificial Sequence: Synthetic oligonucleotide
cccgaagauccgcgaaaag

SEQ ID NO: 2385350 - RNA, 19 nt, Artificial Sequence
  Description of Artificial Sequence: Synthetic oligonucleotide
ggaaggaagggcacugccu

SEQ ID NO: 2385351 - RNA, 19 nt, Artificial Sequence
  Description of Artificial Sequence: Synthetic oligonucleotide
ccugaggaguccgggaguc

SEQ ID NO: 2385352 - RNA, 19 nt, Artificial Sequence
  Description of Artificial Sequence: Synthetic oligonucleotide
agagcccucugugcccaga

SEQ ID NO: 2385353 - RNA, 19 nt, Artificial Sequence
  Description of Artificial Sequence: Synthetic oligonucleotide
ccacauugaagccuauggu

SEQ ID NO: 2385354 - RNA, 19 nt, Artificial Sequence
  Description of Artificial Sequence: Synthetic oligonucleotide
caaccaugaggauccgcau

SEQ ID NO: 2385355 - RNA, 19 nt, Artificial Sequence
  Description of Artificial Sequence: Synthetic oligonucleotide
gacccgcucucggucauua

SEQ ID NO: 2385356 - RNA, 19 nt, Artificial Sequence
  Description of Artificial Sequence: Synthetic oligonucleotide
ggcuccaggcucccacgac

SEQ ID NO: 2385357 - RNA, 19 nt, Artificial Sequence
  Description of Artificial Sequence: Synthetic oligonucleotide
cuggucaucccgggaugca

SEQ ID NO: 2385358 - RNA, 19 nt, Artificial Sequence
  Description of Artificial Sequence: Synthetic oligonucleotide
cacgaagaugaggcccuga

SEQ ID NO: 2385359 - RNA, 19 nt, Artificial Sequence
  Description of Artificial Sequence: Synthetic oligonucleotide
ccgggagucuggucauccc

SEQ ID NO: 2385360 - RNA, 19 nt, Artificial Sequence
  Description of Artificial Sequence: Synthetic oligonucleotide
cggucauuacugucuacca

SEQ ID NO: 2385361 - RNA, 19 nt, Artificial Sequence
  Description of Artificial Sequence: Synthetic oligonucleotide
cgaggcuccaggcucccac

SEQ ID NO: 2385362 - RNA, 19 nt, Artificial Sequence
  Description of Artificial Sequence: Synthetic oligonucleotide
ggcuaacgcuuugacagcu

SEQ ID NO: 2385363 - RNA, 19 nt, Artificial Sequence
  Description of Artificial Sequence: Synthetic oligonucleotide
guagucuugccagccgcau

SEQ ID NO: 2385364 - RNA, 19 nt, Artificial Sequence
  Description of Artificial Sequence: Synthetic oligonucleotide
gccaaccaugaggauccgc

SEQ ID NO: 2385365 - RNA, 19 nt, Artificial Sequence
  Description of Artificial Sequence: Synthetic oligonucleotide
cgcgaaaagagcgcggaca

SEQ ID NO: 2385366 - RNA, 19 nt, Artificial Sequence
  Description of Artificial Sequence: Synthetic oligonucleotide
guagcacauguggccugga

SEQ ID NO: 2385367 - RNA, 19 nt, Artificial Sequence
  Description of Artificial Sequence: Synthetic oligonucleotide
gggagcuuccgggcagcag

SEQ ID NO: 2385368 - RNA, 19 nt, Artificial Sequence
  Description of Artificial Sequence: Synthetic oligonucleotide
gcuaacgcuuugacagcuc

SEQ ID NO: 2385369 - RNA, 19 nt, Artificial Sequence
  Description of Artificial Sequence: Synthetic oligonucleotide
cccgggaugcacgcgggag

SEQ ID NO: 2385370 - RNA, 19 nt, Artificial Sequence
  Description of Artificial Sequence: Synthetic oligonucleotide
ugccuccacagaggucgaa

SEQ ID NO: 2385371 - RNA, 19 nt, Artificial Sequence
  Description of Artificial Sequence: Synthetic oligonucleotide
cgaaaagagcgcggacacc

SEQ ID NO: 2385372 - RNA, 19 nt, Artificial Sequence
  Description of Artificial Sequence: Synthetic oligonucleotide
ccagagagcgaggcuccag

SEQ ID NO: 2385373 - RNA, 19 nt, Artificial Sequence
  Description of Artificial Sequence: Synthetic oligonucleotide
gcaggggccugccccuggc

SEQ ID NO: 2385374 - RNA, 19 nt, Artificial Sequence
  Description of Artificial Sequence: Synthetic oligonucleotide
ggaagcccauccacagguc

SEQ ID NO: 2385375 - RNA, 19 nt, Artificial Sequence
  Description of Artificial Sequence: Synthetic oligonucleotide
cccaucauacaggccugug

SEQ ID NO: 2385376 - RNA, 19 nt, Artificial Sequence
  Description of Artificial Sequence: Synthetic oligonucleotide
gcagggacgcggggugagg

SEQ ID NO: 2385377 - RNA, 19 nt, Artificial Sequence
  Description of Artificial Sequence: Synthetic oligonucleotide
acggcaucccgaagcucau

SEQ ID NO: 2385378 - RNA, 19 nt, Artificial Sequence
  Description of Artificial Sequence: Synthetic oligonucleotide
caggucccagcaggcagga

SEQ ID NO: 2385379 - RNA, 19 nt, Artificial Sequence
  Description of Artificial Sequence: Synthetic oligonucleotide
gcgcggacaccgugaggcc

SEQ ID NO: 2385380 - RNA, 19 nt, Artificial Sequence
  Description of Artificial Sequence: Synthetic oligonucleotide
cugccccuggcuggcuaac

SEQ ID NO: 2385381 - RNA, 19 nt, Artificial Sequence
  Description of Artificial Sequence: Synthetic oligonucleotide
ccgcgaaaagagcgcggac

SEQ ID NO: 2385382 - RNA, 19 nt, Artificial Sequence
  Description of Artificial Sequence: Synthetic oligonucleotide
cagccgcauccaagccaac

SEQ ID NO: 2385383 - RNA, 19 nt, Artificial Sequence
  Description of Artificial Sequence: Synthetic oligonucleotide
cgugaggcccauggugggg

SEQ ID NO: 2385384 - RNA, 19 nt, Artificial Sequence
  Description of Artificial Sequence: Synthetic oligonucleotide
gugcggcuacgcaagugcu

SEQ ID NO: 2385385 - RNA, 19 nt, Artificial Sequence
  Description of Artificial Sequence: Synthetic oligonucleotide
gcggacaccgugaggccca

SEQ ID NO: 2385386 - RNA, 19 nt, Artificial Sequence
  Description of Artificial Sequence: Synthetic oligonucleotide
ggccugugccuuggguagc

SEQ ID NO: 2385387 - RNA, 19 nt, Artificial Sequence
  Description of Artificial Sequence: Synthetic oligonucleotide
ggacgcggggugagggcug

SEQ ID NO: 2385388 - RNA, 19 nt, Artificial Sequence
  Description of Artificial Sequence: Synthetic oligonucleotide
ggccugucuguggggagga

SEQ ID NO: 2385389 - RNA, 19 nt, Artificial Sequence
  Description of Artificial Sequence: Synthetic oligonucleotide
cgcggacaccgugaggccc

SEQ ID NO: 2385390 - RNA, 19 nt, Artificial Sequence
  Description of Artificial Sequence: Synthetic oligonucleotide
cuccaacaucccagacugu

SEQ ID NO: 2385391 - RNA, 19 nt, Artificial Sequence
  Description of Artificial Sequence: Synthetic oligonucleotide
cccgcucucggucauuacu

SEQ ID NO: 2385392 - RNA, 19 nt, Artificial Sequence
  Description of Artificial Sequence: Synthetic oligonucleotide
cacauguggccuggacaua

SEQ ID NO: 2385393 - RNA, 19 nt, Artificial Sequence
  Description of Artificial Sequence: Synthetic oligonucleotide
cgcgggagcuuccgggcag

SEQ ID NO: 2385394 - RNA, 19 nt, Artificial Sequence
  Description of Artificial Sequence: Synthetic oligonucleotide
cagcaggggccugccccug

SEQ ID NO: 2385395 - RNA, 19 nt, Artificial Sequence
  Description of Artificial Sequence: Synthetic oligonucleotide
gccugugccuuggguagca

SEQ ID NO: 2385396 - RNA, 19 nt, Artificial Sequence
  Description of Artificial Sequence: Synthetic oligonucleotide
guccgggagucuggucauc

SEQ ID NO: 2385397 - RNA, 19 nt, Artificial Sequence
  Description of Artificial Sequence: Synthetic oligonucleotide
gugccuccacagaggucga

SEQ ID NO: 2385398 - RNA, 19 nt, Artificial Sequence
  Description of Artificial Sequence: Synthetic oligonucleotide
gcgggagcuuccgggcagc

SEQ ID NO: 2385399 - RNA, 19 nt, Artificial Sequence
  Description of Artificial Sequence: Synthetic oligonucleotide
gcccauccacaggucccag

SEQ ID NO: 2385400 - RNA, 19 nt, Artificial Sequence
  Description of Artificial Sequence: Synthetic oligonucleotide
ggcauggcauugggcaugu

SEQ ID NO: 2385401 - RNA, 19 nt, Artificial Sequence
  Description of Artificial Sequence: Synthetic oligonucleotide
gcgcgggcagggacgcggg

SEQ ID NO: 2385402 - RNA, 19 nt, Artificial Sequence
  Description of Artificial Sequence: Synthetic oligonucleotide
gccugucuguggggaggag

SEQ ID NO: 2385403 - RNA, 19 nt, Artificial Sequence
  Description of Artificial Sequence: Synthetic oligonucleotide
cgaagaugaggcccugagu

SEQ ID NO: 2385404 - RNA, 19 nt, Artificial Sequence
  Description of Artificial Sequence: Synthetic oligonucleotide
cacgugcggcuacgcaagu

SEQ ID NO: 2385405 - RNA, 19 nt, Artificial Sequence
  Description of Artificial Sequence: Synthetic oligonucleotide
ggcccaugguggggcccgg

SEQ ID NO: 2385406 - RNA, 19 nt, Artificial Sequence
  Description of Artificial Sequence: Synthetic oligonucleotide
ccugugccuuggguagcac

SEQ ID NO: 2385407 - RNA, 19 nt, Artificial Sequence
  Description of Artificial Sequence: Synthetic oligonucleotide
ccugccccuggcuggcuaa

SEQ ID NO: 2385408 - RNA, 19 nt, Artificial Sequence
  Description of Artificial Sequence: Synthetic oligonucleotide
ccgcauccaagccaaccau

SEQ ID NO: 2385409 - RNA, 19 nt, Artificial Sequence
  Description of Artificial Sequence: Synthetic oligonucleotide
ggacaccgugaggcccaug

SEQ ID NO: 2385410 - RNA, 19 nt, Artificial Sequence
  Description of Artificial Sequence: Synthetic oligonucleotide
caggggccugccccuggcu

SEQ ID NO: 2385411 - RNA, 19 nt, Artificial Sequence
  Description of Artificial Sequence: Synthetic oligonucleotide
ggauccgcaucugcuucuu

SEQ ID NO: 2385412 - RNA, 19 nt, Artificial Sequence
  Description of Artificial Sequence: Synthetic oligonucleotide
ccaagccaaccaugaggau

SEQ ID NO: 2385413 - RNA, 19 nt, Artificial Sequence
  Description of Artificial Sequence: Synthetic oligonucleotide
cccagagagcgaggcucca

SEQ ID NO: 2385414 - RNA, 19 nt, Artificial Sequence
  Description of Artificial Sequence: Synthetic oligonucleotide
cgggaugcacgcgggagcu

SEQ ID NO: 2385415 - RNA, 19 nt, Artificial Sequence
  Description of Artificial Sequence: Synthetic oligonucleotide
gcgaggcuccaggcuccca

SEQ ID NO: 2385416 - RNA, 19 nt, Artificial Sequence
  Description of Artificial Sequence: Synthetic oligonucleotide
cggcaucccgaagcucauc

SEQ ID NO: 2385417 - RNA, 19 nt, Artificial Sequence
  Description of Artificial Sequence: Synthetic oligonucleotide
cggcuacgcaagugcugaa

SEQ ID NO: 2385418 - RNA, 19 nt, Artificial Sequence
  Description of Artificial Sequence: Synthetic oligonucleotide
gggaugcacgcgggagcuu

SEQ ID NO: 2385419 - RNA, 19 nt, Artificial Sequence
  Description of Artificial Sequence: Synthetic oligonucleotide
ggacccgcucucggucauu

SEQ ID NO: 2385420 - RNA, 19 nt, Artificial Sequence
  Description of Artificial Sequence: Synthetic oligonucleotide
cggacaccgugaggcccau

SEQ ID NO: 2385421 - RNA, 19 nt, Artificial Sequence
  Description of Artificial Sequence: Synthetic oligonucleotide
ucugucacccucaagaaag

SEQ ID NO: 2385422 - RNA, 19 nt, Artificial Sequence
  Description of Artificial Sequence: Synthetic oligonucleotide
auagucgcagaccucagcc

SEQ ID NO: 2385423 - RNA, 19 nt, Artificial Sequence
  Description of Artificial Sequence: Synthetic oligonucleotide
gaacucacgaacuggaucc

SEQ ID NO: 2385424 - RNA, 19 nt, Artificial Sequence
  Description of Artificial Sequence: Synthetic oligonucleotide
aagauugcucaguguaugc

SEQ ID NO: 2385425 - RNA, 19 nt, Artificial Sequence
  Description of Artificial Sequence: Synthetic oligonucleotide
aggguuguacaacagcucc

SEQ ID NO: 2385426 - RNA, 19 nt, Artificial Sequence
  Description of Artificial Sequence: Synthetic oligonucleotide
accgggaugacuuugaccu

SEQ ID NO: 2385427 - RNA, 19 nt, Artificial Sequence
  Description of Artificial Sequence: Synthetic oligonucleotide
uuucugugcaaacucaaga

SEQ ID NO: 2385428 - RNA, 19 nt, Artificial Sequence
  Description of Artificial Sequence: Synthetic oligonucleotide
uguacaacagcuccucgcc

SEQ ID NO: 2385429 - RNA, 19 nt, Artificial Sequence
  Description of Artificial Sequence: Synthetic oligonucleotide
aacuggauccucugucacc

SEQ ID NO: 2385430 - RNA, 19 nt, Artificial Sequence
  Description of Artificial Sequence: Synthetic oligonucleotide
aacucaagauugcucagug

SEQ ID NO: 2385431 - RNA, 19 nt, Artificial Sequence
  Description of Artificial Sequence: Synthetic oligonucleotide
aacaccuucgucuggggug

SEQ ID NO: 2385432 - RNA, 19 nt, Artificial Sequence
  Description of Artificial Sequence: Synthetic oligonucleotide
cuuagcuugcacaugguug

SEQ ID NO: 2385433 - RNA, 19 nt, Artificial Sequence
  Description of Artificial Sequence: Synthetic oligonucleotide
auuuccacgcguguggucc

SEQ ID NO: 2385434 - RNA, 19 nt, Artificial Sequence
  Description of Artificial Sequence: Synthetic oligonucleotide
ucaaguaccgggaugacuu

SEQ ID NO: 2385435 - RNA, 19 nt, Artificial Sequence
  Description of Artificial Sequence: Synthetic oligonucleotide
cugugcaaacucaagauug

SEQ ID NO: 2385436 - RNA, 19 nt, Artificial Sequence
  Description of Artificial Sequence: Synthetic oligonucleotide
agaugcgcucaucagcucc

SEQ ID NO: 2385437 - RNA, 19 nt, Artificial Sequence
  Description of Artificial Sequence: Synthetic oligonucleotide
aaaggguuguacaacagcu

SEQ ID NO: 2385438 - RNA, 19 nt, Artificial Sequence
  Description of Artificial Sequence: Synthetic oligonucleotide
augaccuccaguccuggcc

SEQ ID NO: 2385439 - RNA, 19 nt, Artificial Sequence
  Description of Artificial Sequence: Synthetic oligonucleotide
uuagcuugcacaugguugu

SEQ ID NO: 2385440 - RNA, 19 nt, Artificial Sequence
  Description of Artificial Sequence: Synthetic oligonucleotide
acguggauggccccaaacc

SEQ ID NO: 2385441 - RNA, 19 nt, Artificial Sequence
  Description of Artificial Sequence: Synthetic oligonucleotide
acuggauccucugucaccc

SEQ ID NO: 2385442 - RNA, 19 nt, Artificial Sequence
  Description of Artificial Sequence: Synthetic oligonucleotide
ucaucagcucccaugaccu

SEQ ID NO: 2385443 - RNA, 19 nt, Artificial Sequence
  Description of Artificial Sequence: Synthetic oligonucleotide
ugauggguggucagcaccg

SEQ ID NO: 2385444 - RNA, 19 nt, Artificial Sequence
  Description of Artificial Sequence: Synthetic oligonucleotide
ucaagaaaggguuguacaa

SEQ ID NO: 2385445 - RNA, 19 nt, Artificial Sequence
  Description of Artificial Sequence: Synthetic oligonucleotide
ucagagacacuuccucgcg

SEQ ID NO: 2385446 - RNA, 19 nt, Artificial Sequence
  Description of Artificial Sequence: Synthetic oligonucleotide
gacuuugaccuucauaguc

SEQ ID NO: 2385447 - RNA, 19 nt, Artificial Sequence
  Description of Artificial Sequence: Synthetic oligonucleotide
acagccugcggguuagugc

SEQ ID NO: 2385448 - RNA, 19 nt, Artificial Sequence
  Description of Artificial Sequence: Synthetic oligonucleotide
ugcucgugaccacagaaca

SEQ ID NO: 2385449 - RNA, 19 nt, Artificial Sequence
  Description of Artificial Sequence: Synthetic oligonucleotide
ugaccuccaguccuggccg

SEQ ID NO: 2385450 - RNA, 19 nt, Artificial Sequence
  Description of Artificial Sequence: Synthetic oligonucleotide
acuuugaccuucauagucg

SEQ ID NO: 2385451 - RNA, 19 nt, Artificial Sequence
  Description of Artificial Sequence: Synthetic oligonucleotide
uucauagucgcagaccuca

SEQ ID NO: 2385452 - RNA, 19 nt, Artificial Sequence
  Description of Artificial Sequence: Synthetic oligonucleotide
ugaacucacgaacuggauc

SEQ ID NO: 2385453 - RNA, 19 nt, Artificial Sequence
  Description of Artificial Sequence: Synthetic oligonucleotide
agagacacuuccucgcggg

SEQ ID NO: 2385454 - RNA, 19 nt, Artificial Sequence
  Description of Artificial Sequence: Synthetic oligonucleotide
uggguggucagcaccgugg

SEQ ID NO: 2385455 - RNA, 19 nt, Artificial Sequence
  Description of Artificial Sequence: Synthetic oligonucleotide
uguaugcucgugaccacag

SEQ ID NO: 2385456 - RNA, 19 nt, Artificial Sequence
  Description of Artificial Sequence: Synthetic oligonucleotide
uaguugucuucaaguaccg

SEQ ID NO: 2385457 - RNA, 19 nt, Artificial Sequence
  Description of Artificial Sequence: Synthetic oligonucleotide
acgaacuggauccucuguc

SEQ ID NO: 2385458 - RNA, 19 nt, Artificial Sequence
  Description of Artificial Sequence: Synthetic oligonucleotide
aaagcaagcuggaagcgug

SEQ ID NO: 2385459 - RNA, 19 nt, Artificial Sequence
  Description of Artificial Sequence: Synthetic oligonucleotide
ggcaguguccuccagaugc

SEQ ID NO: 2385460 - RNA, 19 nt, Artificial Sequence
  Description of Artificial Sequence: Synthetic oligonucleotide
uucugugcaaacucaagau

SEQ ID NO: 2385461 - RNA, 19 nt, Artificial Sequence
  Description of Artificial Sequence: Synthetic oligonucleotide
uaugcucgugaccacagaa

SEQ ID NO: 2385462 - RNA, 19 nt, Artificial Sequence
  Description of Artificial Sequence: Synthetic oligonucleotide
gauggccccaaaccgaagc

SEQ ID NO: 2385463 - RNA, 19 nt, Artificial Sequence
  Description of Artificial Sequence: Synthetic oligonucleotide
ugcaaacucaagauugcuc

SEQ ID NO: 2385464 - RNA, 19 nt, Artificial Sequence
  Description of Artificial Sequence: Synthetic oligonucleotide
ucacccucaagaaaggguu

SEQ ID NO: 2385465 - RNA, 19 nt, Artificial Sequence
  Description of Artificial Sequence: Synthetic oligonucleotide
aaguagcucauguggccag

SEQ ID NO: 2385466 - RNA, 19 nt, Artificial Sequence
  Description of Artificial Sequence: Synthetic oligonucleotide
aguagguauaucaucguca

SEQ ID NO: 2385467 - RNA, 19 nt, Artificial Sequence
  Description of Artificial Sequence: Synthetic oligonucleotide
gauugcucaguguaugcuc

SEQ ID NO: 2385468 - RNA, 19 nt, Artificial Sequence
  Description of Artificial Sequence: Synthetic oligonucleotide
aaaccgaagcuccucccca

SEQ ID NO: 2385469 - RNA, 19 nt, Artificial Sequence
  Description of Artificial Sequence: Synthetic oligonucleotide
cagccugcggguuagugcg

SEQ ID NO: 2385470 - RNA, 19 nt, Artificial Sequence
  Description of Artificial Sequence: Synthetic oligonucleotide
auugcucaguguaugcucg

SEQ ID NO: 2385471 - RNA, 19 nt, Artificial Sequence
  Description of Artificial Sequence: Synthetic oligonucleotide
agagcauccccagagaaga

SEQ ID NO: 2385472 - RNA, 19 nt, Artificial Sequence
  Description of Artificial Sequence: Synthetic oligonucleotide
agugguguggcccggcguc

SEQ ID NO: 2385473 - RNA, 19 nt, Artificial Sequence
  Description of Artificial Sequence: Synthetic oligonucleotide
uuuuccugggcguacucac

SEQ ID NO: 2385474 - RNA, 19 nt, Artificial Sequence
  Description of Artificial Sequence: Synthetic oligonucleotide
uugcacaugguuguugcag

SEQ ID NO: 2385475 - RNA, 19 nt, Artificial Sequence
  Description of Artificial Sequence: Synthetic oligonucleotide
ucaguguaugcucgugacc

SEQ ID NO: 2385476 - RNA, 19 nt, Artificial Sequence
  Description of Artificial Sequence: Synthetic oligonucleotide
uggcccggcgucaagaggc

SEQ ID NO: 2385477 - RNA, 19 nt, Artificial Sequence
  Description of Artificial Sequence: Synthetic oligonucleotide
guacccaggaucuuggcca

SEQ ID NO: 2385478 - RNA, 19 nt, Artificial Sequence
  Description of Artificial Sequence: Synthetic oligonucleotide
ucaagauugcucaguguau

SEQ ID NO: 2385479 - RNA, 19 nt, Artificial Sequence
  Description of Artificial Sequence: Synthetic oligonucleotide
cuugggcacagccacgucc

SEQ ID NO: 2385480 - RNA, 19 nt, Artificial Sequence
  Description of Artificial Sequence: Synthetic oligonucleotide
agucgcagaccucagccag

SEQ ID NO: 2385481 - RNA, 19 nt, Artificial Sequence
  Description of Artificial Sequence: Synthetic oligonucleotide
acaugguuguugcagggcu

SEQ ID NO: 2385482 - RNA, 19 nt, Artificial Sequence
  Description of Artificial Sequence: Synthetic oligonucleotide
accuucauagucgcagacc

SEQ ID NO: 2385483 - RNA, 19 nt, Artificial Sequence
  Description of Artificial Sequence: Synthetic oligonucleotide
gcaaacucaagauugcuca

SEQ ID NO: 2385484 - RNA, 19 nt, Artificial Sequence
  Description of Artificial Sequence: Synthetic oligonucleotide
cucgugaccacagaacacc

SEQ ID NO: 2385485 - RNA, 19 nt, Artificial Sequence
  Description of Artificial Sequence: Synthetic oligonucleotide
aaggguuguacaacagcuc

SEQ ID NO: 2385486 - RNA, 19 nt, Artificial Sequence
  Description of Artificial Sequence: Synthetic oligonucleotide
acgaaguccccacugcaag

SEQ ID NO: 2385487 - RNA, 19 nt, Artificial Sequence
  Description of Artificial Sequence: Synthetic oligonucleotide
uuggccugugaacucacga

SEQ ID NO: 2385488 - RNA, 19 nt, Artificial Sequence
  Description of Artificial Sequence: Synthetic oligonucleotide
aaacucaagauugcucagu

SEQ ID NO: 2385489 - RNA, 19 nt, Artificial Sequence
  Description of Artificial Sequence: Synthetic oligonucleotide
auaucaucgucaucccucu

SEQ ID NO: 2385490 - RNA, 19 nt, Artificial Sequence
  Description of Artificial Sequence: Synthetic oligonucleotide
aggcaucgcacguggaugg

SEQ ID NO: 2385491 - RNA, 19 nt, Artificial Sequence
  Description of Artificial Sequence: Synthetic oligonucleotide
cucaagaaaggguuguaca

SEQ ID NO: 2385492 - RNA, 19 nt, Artificial Sequence
  Description of Artificial Sequence: Synthetic oligonucleotide
aagcgugcucgcucccugc

SEQ ID NO: 2385493 - RNA, 19 nt, Artificial Sequence
  Description of Artificial Sequence: Synthetic oligonucleotide
uccacuuucugugcaaacu

SEQ ID NO: 2385494 - RNA, 19 nt, Artificial Sequence
  Description of Artificial Sequence: Synthetic oligonucleotide
ucacgaaguccccacugca

SEQ ID NO: 2385495 - RNA, 19 nt, Artificial Sequence
  Description of Artificial Sequence: Synthetic oligonucleotide
cucaguguaugcucgugac

SEQ ID NO: 2385496 - RNA, 19 nt, Artificial Sequence
  Description of Artificial Sequence: Synthetic oligonucleotide
caaacucaagauugcucag

SEQ ID NO: 2385497 - RNA, 19 nt, Artificial Sequence
  Description of Artificial Sequence: Synthetic oligonucleotide
aggacagcuuagcuugcac

SEQ ID NO: 2385498 - RNA, 19 nt, Artificial Sequence
  Description of Artificial Sequence: Synthetic oligonucleotide
ucugguacaucugcugggc

SEQ ID NO: 2385499 - RNA, 19 nt, Artificial Sequence
  Description of Artificial Sequence: Synthetic oligonucleotide
gugaccacagaacaccuuc

SEQ ID NO: 2385500 - RNA, 19 nt, Artificial Sequence
  Description of Artificial Sequence: Synthetic oligonucleotide
uagcucauguggccagugg

SEQ ID NO: 2385501 - RNA, 19 nt, Artificial Sequence
  Description of Artificial Sequence: Synthetic oligonucleotide
caagaaaggguuguacaac

SEQ ID NO: 2385502 - RNA, 19 nt, Artificial Sequence
  Description of Artificial Sequence: Synthetic oligonucleotide
cuuggccaagcucugguac

SEQ ID NO: 2385503 - RNA, 19 nt, Artificial Sequence
  Description of Artificial Sequence: Synthetic oligonucleotide
uggguccgggcauucaucc

SEQ ID NO: 2385504 - RNA, 19 nt, Artificial Sequence
  Description of Artificial Sequence: Synthetic oligonucleotide
aagcaagcuggaagcgugc

SEQ ID NO: 2385505 - RNA, 19 nt, Artificial Sequence
  Description of Artificial Sequence: Synthetic oligonucleotide
caagauugcucaguguaug

SEQ ID NO: 2385506 - RNA, 19 nt, Artificial Sequence
  Description of Artificial Sequence: Synthetic oligonucleotide
uuccugggcguacucacga

SEQ ID NO: 2385507 - RNA, 19 nt, Artificial Sequence
  Description of Artificial Sequence: Synthetic oligonucleotide
acucacgaaguccccacug

SEQ ID NO: 2385508 - RNA, 19 nt, Artificial Sequence
  Description of Artificial Sequence: Synthetic oligonucleotide
caucgcacguggauggccc

SEQ ID NO: 2385509 - RNA, 19 nt, Artificial Sequence
  Description of Artificial Sequence: Synthetic oligonucleotide
ucauagucgcagaccucag

SEQ ID NO: 2385510 - RNA, 19 nt, Artificial Sequence
  Description of Artificial Sequence: Synthetic oligonucleotide
acagagcauccccagagaa

SEQ ID NO: 2385511 - RNA, 19 nt, Artificial Sequence
  Description of Artificial Sequence: Synthetic oligonucleotide
agcauccccagagaagagg

SEQ ID NO: 2385512 - RNA, 19 nt, Artificial Sequence
  Description of Artificial Sequence: Synthetic oligonucleotide
ccaugugacagccugcggg

SEQ ID NO: 2385513 - RNA, 19 nt, Artificial Sequence
  Description of Artificial Sequence: Synthetic oligonucleotide
uaccgggaugacuuugacc

SEQ ID NO: 2385514 - RNA, 19 nt, Artificial Sequence
  Description of Artificial Sequence: Synthetic oligonucleotide
gaagagggcuggugggucc

SEQ ID NO: 2385515 - RNA, 19 nt, Artificial Sequence
  Description of Artificial Sequence: Synthetic oligonucleotide
ugaccuucauagucgcaga

SEQ ID NO: 2385516 - RNA, 19 nt, Artificial Sequence
  Description of Artificial Sequence: Synthetic oligonucleotide
ugacuuugaccuucauagu

SEQ ID NO: 2385517 - RNA, 19 nt, Artificial Sequence
  Description of Artificial Sequence: Synthetic oligonucleotide
cucgcgggcuguaaucucc

SEQ ID NO: 2385518 - RNA, 19 nt, Artificial Sequence
  Description of Artificial Sequence: Synthetic oligonucleotide
acgcguguggucccagugg

SEQ ID NO: 2385519 - RNA, 19 nt, Artificial Sequence
  Description of Artificial Sequence: Synthetic oligonucleotide
ggcuguaaucuccagcagc

SEQ ID NO: 2385520 - RNA, 19 nt, Artificial Sequence
  Description of Artificial Sequence: Synthetic oligonucleotide
gaaguagcucauguggcca

SEQ ID NO: 2385521 - RNA, 19 nt, Artificial Sequence
  Description of Artificial Sequence: Synthetic oligonucleotide
cauagucgcagaccucagc

SEQ ID NO: 2385522 - RNA, 19 nt, Artificial Sequence
  Description of Artificial Sequence: Synthetic oligonucleotide
caguagguauaucaucguc

SEQ ID NO: 2385523 - RNA, 19 nt, Artificial Sequence
  Description of Artificial Sequence: Synthetic oligonucleotide
uucgucugggguggcaggg

SEQ ID NO: 2385524 - RNA, 19 nt, Artificial Sequence
  Description of Artificial Sequence: Synthetic oligonucleotide
acaccuucgucuggggugg

SEQ ID NO: 2385525 - RNA, 19 nt, Artificial Sequence
  Description of Artificial Sequence: Synthetic oligonucleotide
gguauaucaucgucauccc

SEQ ID NO: 2385526 - RNA, 19 nt, Artificial Sequence
  Description of Artificial Sequence: Synthetic oligonucleotide
augcucgugaccacagaac

SEQ ID NO: 2385527 - RNA, 19 nt, Artificial Sequence
  Description of Artificial Sequence: Synthetic oligonucleotide
uccccagagaagagggcug

SEQ ID NO: 2385528 - RNA, 19 nt, Artificial Sequence
  Description of Artificial Sequence: Synthetic oligonucleotide
aaguaccgggaugacuuug

SEQ ID NO: 2385529 - RNA, 19 nt, Artificial Sequence
  Description of Artificial Sequence: Synthetic oligonucleotide
agaagagggcugguggguc

SEQ ID NO: 2385530 - RNA, 19 nt, Artificial Sequence
  Description of Artificial Sequence: Synthetic oligonucleotide
ugggcaguguccuccagau

SEQ ID NO: 2385531 - RNA, 19 nt, Artificial Sequence
  Description of Artificial Sequence: Synthetic oligonucleotide
cuccccaugugacagccug

SEQ ID NO: 2385532 - RNA, 19 nt, Artificial Sequence
  Description of Artificial Sequence: Synthetic oligonucleotide
uguggcccggcgucaagag

SEQ ID NO: 2385533 - RNA, 19 nt, Artificial Sequence
  Description of Artificial Sequence: Synthetic oligonucleotide
uggccugugaacucacgaa

SEQ ID NO: 2385534 - RNA, 19 nt, Artificial Sequence
  Description of Artificial Sequence: Synthetic oligonucleotide
uccucgcccaguguagagg

SEQ ID NO: 2385535 - RNA, 19 nt, Artificial Sequence
  Description of Artificial Sequence: Synthetic oligonucleotide
acucaagauugcucagugu

SEQ ID NO: 2385536 - RNA, 19 nt, Artificial Sequence
  Description of Artificial Sequence: Synthetic oligonucleotide
agauugcucaguguaugcu

SEQ ID NO: 2385537 - RNA, 19 nt, Artificial Sequence
  Description of Artificial Sequence: Synthetic oligonucleotide
aguugucuucaaguaccgg

SEQ ID NO: 2385538 - RNA, 19 nt, Artificial Sequence
  Description of Artificial Sequence: Synthetic oligonucleotide
uguugcagggcuccacuuu

SEQ ID NO: 2385539 - RNA, 19 nt, Artificial Sequence
  Description of Artificial Sequence: Synthetic oligonucleotide
aucgcacguggauggcccc

SEQ ID NO: 2385540 - RNA, 19 nt, Artificial Sequence
  Description of Artificial Sequence: Synthetic oligonucleotide
cagagacacuuccucgcgg

SEQ ID NO: 2385541 - RNA, 19 nt, Artificial Sequence
  Description of Artificial Sequence: Synthetic oligonucleotide
gaugcgcucaucagcuccc

SEQ ID NO: 2385542 - RNA, 19 nt, Artificial Sequence
  Description of Artificial Sequence: Synthetic oligonucleotide
gaccuucauagucgcagac

SEQ ID NO: 2385543 - RNA, 19 nt, Artificial Sequence
  Description of Artificial Sequence: Synthetic oligonucleotide
gaucuuggccaagcucugg

SEQ ID NO: 2385544 - RNA, 19 nt, Artificial Sequence
  Description of Artificial Sequence: Synthetic oligonucleotide
uagucgcagaccucagcca

SEQ ID NO: 2385545 - RNA, 19 nt, Artificial Sequence
  Description of Artificial Sequence: Synthetic oligonucleotide
uccgcauuuccacgcgugu

SEQ ID NO: 2385546 - RNA, 19 nt, Artificial Sequence
  Description of Artificial Sequence: Synthetic oligonucleotide
ugccacuuggccugugaac

SEQ ID NO: 2385547 - RNA, 19 nt, Artificial Sequence
  Description of Artificial Sequence: Synthetic oligonucleotide
guacucacgaaguccccac

SEQ ID NO: 2385548 - RNA, 19 nt, Artificial Sequence
  Description of Artificial Sequence: Synthetic oligonucleotide
gaagcgugcucgcucccug

SEQ ID NO: 2385549 - RNA, 19 nt, Artificial Sequence
  Description of Artificial Sequence: Synthetic oligonucleotide
gacagcuuagcuugcacau

SEQ ID NO: 2385550 - RNA, 19 nt, Artificial Sequence
  Description of Artificial Sequence: Synthetic oligonucleotide
uggugauggguggucagca

SEQ ID NO: 2385551 - RNA, 19 nt, Artificial Sequence
  Description of Artificial Sequence: Synthetic oligonucleotide
ugugacagccugcggguua

SEQ ID NO: 2385552 - RNA, 19 nt, Artificial Sequence
  Description of Artificial Sequence: Synthetic oligonucleotide
gggcacaguagguauauca

SEQ ID NO: 2385553 - RNA, 19 nt, Artificial Sequence
  Description of Artificial Sequence: Synthetic oligonucleotide
guagguauaucaucgucau

SEQ ID NO: 2385554 - RNA, 19 nt, Artificial Sequence
  Description of Artificial Sequence: Synthetic oligonucleotide
guacaacagcuccucgccc

SEQ ID NO: 2385555 - RNA, 19 nt, Artificial Sequence
  Description of Artificial Sequence: Synthetic oligonucleotide
agcuccgcauuuccacgcg

SEQ ID NO: 2385556 - RNA, 19 nt, Artificial Sequence
  Description of Artificial Sequence: Synthetic oligonucleotide
auccccagagaagagggcu

SEQ ID NO: 2385557 - RNA, 19 nt, Artificial Sequence
  Description of Artificial Sequence: Synthetic oligonucleotide
uggauccucugucacccuc

SEQ ID NO: 2385558 - RNA, 19 nt, Artificial Sequence
  Description of Artificial Sequence: Synthetic oligonucleotide
cuucgucugggguggcagg

SEQ ID NO: 2385559 - RNA, 19 nt, Artificial Sequence
  Description of Artificial Sequence: Synthetic oligonucleotide
cacuuucugugcaaacuca

SEQ ID NO: 2385560 - RNA, 19 nt, Artificial Sequence
  Description of Artificial Sequence: Synthetic oligonucleotide
cuuggccugugaacucacg

SEQ ID NO: 2385561 - RNA, 19 nt, Artificial Sequence
  Description of Artificial Sequence: Synthetic oligonucleotide
uacucacgaaguccccacu

SEQ ID NO: 2385562 - RNA, 19 nt, Artificial Sequence
  Description of Artificial Sequence: Synthetic oligonucleotide
ugggcguacucacgaaguc

SEQ ID NO: 2385563 - RNA, 19 nt, Artificial Sequence
  Description of Artificial Sequence: Synthetic oligonucleotide
aaccgaagcuccuccccau

SEQ ID NO: 2385564 - RNA, 19 nt, Artificial Sequence
  Description of Artificial Sequence: Synthetic oligonucleotide
gguuagugcgcagaugcgc

SEQ ID NO: 2385565 - RNA, 19 nt, Artificial Sequence
  Description of Artificial Sequence: Synthetic oligonucleotide
accguggucagagacacuu

SEQ ID NO: 2385566 - RNA, 19 nt, Artificial Sequence
  Description of Artificial Sequence: Synthetic oligonucleotide
uagguauaucaucgucauc

SEQ ID NO: 2385567 - RNA, 19 nt, Artificial Sequence
  Description of Artificial Sequence: Synthetic oligonucleotide
cggguuagugcgcagaugc

SEQ ID NO: 2385568 - RNA, 19 nt, Artificial Sequence
  Description of Artificial Sequence: Synthetic oligonucleotide
uccuccccaugugacagcc

SEQ ID NO: 2385569 - RNA, 19 nt, Artificial Sequence
  Description of Artificial Sequence: Synthetic oligonucleotide
gagacacuuccucgcgggc

SEQ ID NO: 2385570 - RNA, 19 nt, Artificial Sequence
  Description of Artificial Sequence: Synthetic oligonucleotide
ucgcccaguguagagggca

SEQ ID NO: 2385571 - RNA, 19 nt, Artificial Sequence
  Description of Artificial Sequence: Synthetic oligonucleotide
uuuccacgcgugugguccc

SEQ ID NO: 2385572 - RNA, 19 nt, Artificial Sequence
  Description of Artificial Sequence: Synthetic oligonucleotide
uccagaugccagccacagc

SEQ ID NO: 2385573 - RNA, 19 nt, Artificial Sequence
  Description of Artificial Sequence: Synthetic oligonucleotide
ugcggguuagugcgcagau

SEQ ID NO: 2385574 - RNA, 19 nt, Artificial Sequence
  Description of Artificial Sequence: Synthetic oligonucleotide
ggcguacucacgaaguccc

SEQ ID NO: 2385575 - RNA, 19 nt, Artificial Sequence
  Description of Artificial Sequence: Synthetic oligonucleotide
cagcuccgcauuuccacgc

SEQ ID NO: 2385576 - RNA, 19 nt, Artificial Sequence
  Description of Artificial Sequence: Synthetic oligonucleotide
cuccagaugccagccacag

SEQ ID NO: 2385577 - RNA, 19 nt, Artificial Sequence
  Description of Artificial Sequence: Synthetic oligonucleotide
cuccgcauuuccacgcgug

SEQ ID NO: 2385578 - RNA, 19 nt, Artificial Sequence
  Description of Artificial Sequence: Synthetic oligonucleotide
gcacaugguuguugcaggg

SEQ ID NO: 2385579 - RNA, 19 nt, Artificial Sequence
  Description of Artificial Sequence: Synthetic oligonucleotide
uuagugcgcagaugcgcuc

SEQ ID NO: 2385580 - RNA, 19 nt, Artificial Sequence
  Description of Artificial Sequence: Synthetic oligonucleotide
caugaccuccaguccuggc

SEQ ID NO: 2385581 - RNA, 19 nt, Artificial Sequence
  Description of Artificial Sequence: Synthetic oligonucleotide
aacucacgaacuggauccu

SEQ ID NO: 2385582 - RNA, 19 nt, Artificial Sequence
  Description of Artificial Sequence: Synthetic oligonucleotide
cagcaccguggucagagac

SEQ ID NO: 2385583 - RNA, 19 nt, Artificial Sequence
  Description of Artificial Sequence: Synthetic oligonucleotide
uuccucgcgggcuguaauc

SEQ ID NO: 2385584 - RNA, 19 nt, Artificial Sequence
  Description of Artificial Sequence: Synthetic oligonucleotide
cacccucaagaaaggguug

SEQ ID NO: 2385585 - RNA, 19 nt, Artificial Sequence
  Description of Artificial Sequence: Synthetic oligonucleotide
aguguccuccagaugccag

SEQ ID NO: 2385586 - RNA, 19 nt, Artificial Sequence
  Description of Artificial Sequence: Synthetic oligonucleotide
acucacgaacuggauccuc

SEQ ID NO: 2385587 - RNA, 19 nt, Artificial Sequence
  Description of Artificial Sequence: Synthetic oligonucleotide
uagugcgcagaugcgcuca

SEQ ID NO: 2385588 - RNA, 19 nt, Artificial Sequence
  Description of Artificial Sequence: Synthetic oligonucleotide
uccucgcgggcuguaaucu

SEQ ID NO: 2385589 - RNA, 19 nt, Artificial Sequence
  Description of Artificial Sequence: Synthetic oligonucleotide
caguguagagggcacagua

SEQ ID NO: 2385590 - RNA, 19 nt, Artificial Sequence
  Description of Artificial Sequence: Synthetic oligonucleotide
aguaccgggaugacuuuga

SEQ ID NO: 2385591 - RNA, 19 nt, Artificial Sequence
  Description of Artificial Sequence: Synthetic oligonucleotide
cugccacugacagagcauc

SEQ ID NO: 2385592 - RNA, 19 nt, Artificial Sequence
  Description of Artificial Sequence: Synthetic oligonucleotide
ccucgcccaguguagaggg

SEQ ID NO: 2385593 - RNA, 19 nt, Artificial Sequence
  Description of Artificial Sequence: Synthetic oligonucleotide
ggacagcuuagcuugcaca

SEQ ID NO: 2385594 - RNA, 19 nt, Artificial Sequence
  Description of Artificial Sequence: Synthetic oligonucleotide
ugggcccaggacagcuuag

SEQ ID NO: 2385595 - RNA, 19 nt, Artificial Sequence
  Description of Artificial Sequence: Synthetic oligonucleotide
cacguggauggccccaaac

SEQ ID NO: 2385596 - RNA, 19 nt, Artificial Sequence
  Description of Artificial Sequence: Synthetic oligonucleotide
caguggcuccaaagcaagc

SEQ ID NO: 2385597 - RNA, 19 nt, Artificial Sequence
  Description of Artificial Sequence: Synthetic oligonucleotide
auggguggucagcaccgug

SEQ ID NO: 2385598 - RNA, 19 nt, Artificial Sequence
  Description of Artificial Sequence: Synthetic oligonucleotide
ggcauucauccucccacag

SEQ ID NO: 2385599 - RNA, 19 nt, Artificial Sequence
  Description of Artificial Sequence: Synthetic oligonucleotide
acccucaagaaaggguugu

SEQ ID NO: 2385600 - RNA, 19 nt, Artificial Sequence
  Description of Artificial Sequence: Synthetic oligonucleotide
ucgcgggcuguaaucucca

SEQ ID NO: 2385601 - RNA, 19 nt, Artificial Sequence
  Description of Artificial Sequence: Synthetic oligonucleotide
uugcucaguguaugcucgu

SEQ ID NO: 2385602 - RNA, 19 nt, Artificial Sequence
  Description of Artificial Sequence: Synthetic oligonucleotide
gugacagccugcggguuag

SEQ ID NO: 2385603 - RNA, 19 nt, Artificial Sequence
  Description of Artificial Sequence: Synthetic oligonucleotide
cacugacagagcaucccca

SEQ ID NO: 2385604 - RNA, 19 nt, Artificial Sequence
  Description of Artificial Sequence: Synthetic oligonucleotide
cacgcguguggucccagug

SEQ ID NO: 2385605 - RNA, 19 nt, Artificial Sequence
  Description of Artificial Sequence: Synthetic oligonucleotide
cgucaagaggcaucgcacg

SEQ ID NO: 2385606 - RNA, 19 nt, Artificial Sequence
  Description of Artificial Sequence: Synthetic oligonucleotide
uggaagcgugcucgcuccc

SEQ ID NO: 2385607 - RNA, 19 nt, Artificial Sequence
  Description of Artificial Sequence: Synthetic oligonucleotide
cacaggaaguagcucaugu

SEQ ID NO: 2385608 - RNA, 19 nt, Artificial Sequence
  Description of Artificial Sequence: Synthetic oligonucleotide
guggcccggcgucaagagg

SEQ ID NO: 2385609 - RNA, 19 nt, Artificial Sequence
  Description of Artificial Sequence: Synthetic oligonucleotide
cguggucagagacacuucc

SEQ ID NO: 2385610 - RNA, 19 nt, Artificial Sequence
  Description of Artificial Sequence: Synthetic oligonucleotide
guauaucaucgucaucccu

SEQ ID NO: 2385611 - RNA, 19 nt, Artificial Sequence
  Description of Artificial Sequence: Synthetic oligonucleotide
ccagcuccgcauuuccacg

SEQ ID NO: 2385612 - RNA, 19 nt, Artificial Sequence
  Description of Artificial Sequence: Synthetic oligonucleotide
cuccucgcccaguguagag

SEQ ID NO: 2385613 - RNA, 19 nt, Artificial Sequence
  Description of Artificial Sequence: Synthetic oligonucleotide
guggugauggguggucagc

SEQ ID NO: 2385614 - RNA, 19 nt, Artificial Sequence
  Description of Artificial Sequence: Synthetic oligonucleotide
cgcauuuccacgcgugugg

SEQ ID NO: 2385615 - RNA, 19 nt, Artificial Sequence
  Description of Artificial Sequence: Synthetic oligonucleotide
gguccgggcauucauccuc

SEQ ID NO: 2385616 - RNA, 19 nt, Artificial Sequence
  Description of Artificial Sequence: Synthetic oligonucleotide
guaccgggaugacuuugac

SEQ ID NO: 2385617 - RNA, 19 nt, Artificial Sequence
  Description of Artificial Sequence: Synthetic oligonucleotide
cauuuccacgcgugugguc

SEQ ID NO: 2385618 - RNA, 19 nt, Artificial Sequence
  Description of Artificial Sequence: Synthetic oligonucleotide
gaccacagaacaccuucgu

SEQ ID NO: 2385619 - RNA, 19 nt, Artificial Sequence
  Description of Artificial Sequence: Synthetic oligonucleotide
caugugacagccugcgggu

SEQ ID NO: 2385620 - RNA, 19 nt, Artificial Sequence
  Description of Artificial Sequence: Synthetic oligonucleotide
cuugcacaugguuguugca

SEQ ID NO: 2385621 - RNA, 19 nt, Artificial Sequence
  Description of Artificial Sequence: Synthetic oligonucleotide
guuagugcgcagaugcgcu

SEQ ID NO: 2385622 - RNA, 19 nt, Artificial Sequence
  Description of Artificial Sequence: Synthetic oligonucleotide
cccaaaccgaagcuccucc

SEQ ID NO: 2385623 - RNA, 19 nt, Artificial Sequence
  Description of Artificial Sequence: Synthetic oligonucleotide
guagcucauguggccagug

SEQ ID NO: 2385624 - RNA, 19 nt, Artificial Sequence
  Description of Artificial Sequence: Synthetic oligonucleotide
gaacaccuucgucuggggu

SEQ ID NO: 2385625 - RNA, 19 nt, Artificial Sequence
  Description of Artificial Sequence: Synthetic oligonucleotide
agcaccguggucagagaca

SEQ ID NO: 2385626 - RNA, 19 nt, Artificial Sequence
  Description of Artificial Sequence: Synthetic oligonucleotide
ccaaagcaagcuggaagcg

SEQ ID NO: 2385627 - RNA, 19 nt, Artificial Sequence
  Description of Artificial Sequence: Synthetic oligonucleotide
guggauggccccaaaccga

SEQ ID NO: 2385628 - RNA, 19 nt, Artificial Sequence
  Description of Artificial Sequence: Synthetic oligonucleotide
aggugcgccagcuccgcau

SEQ ID NO: 2385629 - RNA, 19 nt, Artificial Sequence
  Description of Artificial Sequence: Synthetic oligonucleotide
gucaagaggcaucgcacgu

SEQ ID NO: 2385630 - RNA, 19 nt, Artificial Sequence
  Description of Artificial Sequence: Synthetic oligonucleotide
ccacagaacaccuucgucu

SEQ ID NO: 2385631 - RNA, 19 nt, Artificial Sequence
  Description of Artificial Sequence: Synthetic oligonucleotide
gagcauccccagagaagag

SEQ ID NO: 2385632 - RNA, 19 nt, Artificial Sequence
  Description of Artificial Sequence: Synthetic oligonucleotide
cucacgaacuggauccucu

SEQ ID NO: 2385633 - RNA, 19 nt, Artificial Sequence
  Description of Artificial Sequence: Synthetic oligonucleotide
ucgcucccugcagaguacc

SEQ ID NO: 2385634 - RNA, 19 nt, Artificial Sequence
  Description of Artificial Sequence: Synthetic oligonucleotide
agcaagcuggaagcgugcu

SEQ ID NO: 2385635 - RNA, 19 nt, Artificial Sequence
  Description of Artificial Sequence: Synthetic oligonucleotide
cucgcucccugcagaguac

SEQ ID NO: 2385636 - RNA, 19 nt, Artificial Sequence
  Description of Artificial Sequence: Synthetic oligonucleotide
ggccccaaaccgaagcucc

SEQ ID NO: 2385637 - RNA, 19 nt, Artificial Sequence
  Description of Artificial Sequence: Synthetic oligonucleotide
cacgaaguccccacugcaa

SEQ ID NO: 2385638 - RNA, 19 nt, Artificial Sequence
  Description of Artificial Sequence: Synthetic oligonucleotide
gcgcucaucagcucccaug

SEQ ID NO: 2385639 - RNA, 19 nt, Artificial Sequence
  Description of Artificial Sequence: Synthetic oligonucleotide
aguccccacugcaaggcca

SEQ ID NO: 2385640 - RNA, 19 nt, Artificial Sequence
  Description of Artificial Sequence: Synthetic oligonucleotide
ucuugggcacagccacguc

SEQ ID NO: 2385641 - RNA, 19 nt, Artificial Sequence
  Description of Artificial Sequence: Synthetic oligonucleotide
guguaugcucgugaccaca

SEQ ID NO: 2385642 - RNA, 19 nt, Artificial Sequence
  Description of Artificial Sequence: Synthetic oligonucleotide
ccaaaccgaagcuccuccc

SEQ ID NO: 2385643 - RNA, 19 nt, Artificial Sequence
  Description of Artificial Sequence: Synthetic oligonucleotide
ccucaagaaaggguuguac

SEQ ID NO: 2385644 - RNA, 19 nt, Artificial Sequence
  Description of Artificial Sequence: Synthetic oligonucleotide
agcuccucgcccaguguag

SEQ ID NO: 2385645 - RNA, 19 nt, Artificial Sequence
  Description of Artificial Sequence: Synthetic oligonucleotide
gggcguacucacgaagucc

SEQ ID NO: 2385646 - RNA, 19 nt, Artificial Sequence
  Description of Artificial Sequence: Synthetic oligonucleotide
guaugcucgugaccacaga

SEQ ID NO: 2385647 - RNA, 19 nt, Artificial Sequence
  Description of Artificial Sequence: Synthetic oligonucleotide
gccacguccacagccacug

SEQ ID NO: 2385648 - RNA, 19 nt, Artificial Sequence
  Description of Artificial Sequence: Synthetic oligonucleotide
uggccaagcucugguacau

SEQ ID NO: 2385649 - RNA, 19 nt, Artificial Sequence
  Description of Artificial Sequence: Synthetic oligonucleotide
gcgggcuguaaucuccagc

SEQ ID NO: 2385650 - RNA, 19 nt, Artificial Sequence
  Description of Artificial Sequence: Synthetic oligonucleotide
guccgggcauucauccucc

SEQ ID NO: 2385651 - RNA, 19 nt, Artificial Sequence
  Description of Artificial Sequence: Synthetic oligonucleotide
guacaucugcugggcagug

SEQ ID NO: 2385652 - RNA, 19 nt, Artificial Sequence
  Description of Artificial Sequence: Synthetic oligonucleotide
cucgcccaguguagagggc

SEQ ID NO: 2385653 - RNA, 19 nt, Artificial Sequence
  Description of Artificial Sequence: Synthetic oligonucleotide
uccugggcguacucacgaa

SEQ ID NO: 2385654 - RNA, 19 nt, Artificial Sequence
  Description of Artificial Sequence: Synthetic oligonucleotide
ccugggcguacucacgaag

SEQ ID NO: 2385655 - RNA, 19 nt, Artificial Sequence
  Description of Artificial Sequence: Synthetic oligonucleotide
cacugccucccgugugugc

SEQ ID NO: 2385656 - RNA, 19 nt, Artificial Sequence
  Description of Artificial Sequence: Synthetic oligonucleotide
ugccucccgugugugcucc

SEQ ID NO: 2385657 - RNA, 19 nt, Artificial Sequence
  Description of Artificial Sequence: Synthetic oligonucleotide
ggguuagugcgcagaugcg

SEQ ID NO: 2385658 - RNA, 19 nt, Artificial Sequence
  Description of Artificial Sequence: Synthetic oligonucleotide
gcaccguggucagagacac

SEQ ID NO: 2385659 - RNA, 19 nt, Artificial Sequence
  Description of Artificial Sequence: Synthetic oligonucleotide
ggagugcccggaccugggg

SEQ ID NO: 2385660 - RNA, 19 nt, Artificial Sequence
  Description of Artificial Sequence: Synthetic oligonucleotide
cugggcguacucacgaagu

SEQ ID NO: 2385661 - RNA, 19 nt, Artificial Sequence
  Description of Artificial Sequence: Synthetic oligonucleotide
agggcacaguagguauauc

SEQ ID NO: 2385662 - RNA, 19 nt, Artificial Sequence
  Description of Artificial Sequence: Synthetic oligonucleotide
uccgggcauucauccuccc

SEQ ID NO: 2385663 - RNA, 19 nt, Artificial Sequence
  Description of Artificial Sequence: Synthetic oligonucleotide
gcgucaagaggcaucgcac

SEQ ID NO: 2385664 - RNA, 19 nt, Artificial Sequence
  Description of Artificial Sequence: Synthetic oligonucleotide
ccggcgucaagaggcaucg

SEQ ID NO: 2385665 - RNA, 19 nt, Artificial Sequence
  Description of Artificial Sequence: Synthetic oligonucleotide
cagaugcgcucaucagcuc

SEQ ID NO: 2385666 - RNA, 19 nt, Artificial Sequence
  Description of Artificial Sequence: Synthetic oligonucleotide
ugcgcucaucagcucccau

SEQ ID NO: 2385667 - RNA, 19 nt, Artificial Sequence
  Description of Artificial Sequence: Synthetic oligonucleotide
agugcgcagaugcgcucau

SEQ ID NO: 2385668 - RNA, 19 nt, Artificial Sequence
  Description of Artificial Sequence: Synthetic oligonucleotide
cugguacaucugcugggca

SEQ ID NO: 2385669 - RNA, 19 nt, Artificial Sequence
  Description of Artificial Sequence: Synthetic oligonucleotide
ugcgccagcuccgcauuuc

SEQ ID NO: 2385670 - RNA, 19 nt, Artificial Sequence
  Description of Artificial Sequence: Synthetic oligonucleotide
ccccaugugacagccugcg

SEQ ID NO: 2385671 - RNA, 19 nt, Artificial Sequence
  Description of Artificial Sequence: Synthetic oligonucleotide
gcagaugcgcucaucagcu

SEQ ID NO: 2385672 - RNA, 19 nt, Artificial Sequence
  Description of Artificial Sequence: Synthetic oligonucleotide
caaagcaagcuggaagcgu

SEQ ID NO: 2385673 - RNA, 19 nt, Artificial Sequence
  Description of Artificial Sequence: Synthetic oligonucleotide
ccgcaggugcgccagcucc

SEQ ID NO: 2385674 - RNA, 19 nt, Artificial Sequence
  Description of Artificial Sequence: Synthetic oligonucleotide
gugccacuuggccugugaa

SEQ ID NO: 2385675 - RNA, 19 nt, Artificial Sequence
  Description of Artificial Sequence: Synthetic oligonucleotide
ucgcacguggauggcccca

SEQ ID NO: 2385676 - RNA, 19 nt, Artificial Sequence
  Description of Artificial Sequence: Synthetic oligonucleotide
ugguuguugcagggcucca

SEQ ID NO: 2385677 - RNA, 19 nt, Artificial Sequence
  Description of Artificial Sequence: Synthetic oligonucleotide
gagggcacaguagguauau

SEQ ID NO: 2385678 - RNA, 19 nt, Artificial Sequence
  Description of Artificial Sequence: Synthetic oligonucleotide
gggcauucauccucccaca

SEQ ID NO: 2385679 - RNA, 19 nt, Artificial Sequence
  Description of Artificial Sequence: Synthetic oligonucleotide
ucgucugggguggcagggu

SEQ ID NO: 2385680 - RNA, 19 nt, Artificial Sequence
  Description of Artificial Sequence: Synthetic oligonucleotide
uccacgcguguggucccag

SEQ ID NO: 2385681 - RNA, 19 nt, Artificial Sequence
  Description of Artificial Sequence: Synthetic oligonucleotide
gugcaaacucaagauugcu

SEQ ID NO: 2385682 - RNA, 19 nt, Artificial Sequence
  Description of Artificial Sequence: Synthetic oligonucleotide
agcuuagcuugcacauggu

SEQ ID NO: 2385683 - RNA, 19 nt, Artificial Sequence
  Description of Artificial Sequence: Synthetic oligonucleotide
gguuguugcagggcuccac

SEQ ID NO: 2385684 - RNA, 19 nt, Artificial Sequence
  Description of Artificial Sequence: Synthetic oligonucleotide
agccugcggguuagugcgc

SEQ ID NO: 2385685 - RNA, 19 nt, Artificial Sequence
  Description of Artificial Sequence: Synthetic oligonucleotide
ggcaggugccacuuggccu

SEQ ID NO: 2385686 - RNA, 19 nt, Artificial Sequence
  Description of Artificial Sequence: Synthetic oligonucleotide
agagggcacaguagguaua

SEQ ID NO: 2385687 - RNA, 19 nt, Artificial Sequence
  Description of Artificial Sequence: Synthetic oligonucleotide
ggauccucugucacccuca

SEQ ID NO: 2385688 - RNA, 19 nt, Artificial Sequence
  Description of Artificial Sequence: Synthetic oligonucleotide
ccuucgucugggguggcag

SEQ ID NO: 2385689 - RNA, 19 nt, Artificial Sequence
  Description of Artificial Sequence: Synthetic oligonucleotide
gcucgugaccacagaacac

SEQ ID NO: 2385690 - RNA, 19 nt, Artificial Sequence
  Description of Artificial Sequence: Synthetic oligonucleotide
cauccucccacaggaagua

SEQ ID NO: 2385691 - RNA, 19 nt, Artificial Sequence
  Description of Artificial Sequence: Synthetic oligonucleotide
cagcuccucgcccagugua

SEQ ID NO: 2385692 - RNA, 19 nt, Artificial Sequence
  Description of Artificial Sequence: Synthetic oligonucleotide
gcaucgcacguggauggcc

SEQ ID NO: 2385693 - RNA, 19 nt, Artificial Sequence
  Description of Artificial Sequence: Synthetic oligonucleotide
uccuggccgcaggugcgcc

SEQ ID NO: 2385694 - RNA, 19 nt, Artificial Sequence
  Description of Artificial Sequence: Synthetic oligonucleotide
uuccacgcgugugguccca

SEQ ID NO: 2385695 - RNA, 19 nt, Artificial Sequence
  Description of Artificial Sequence: Synthetic oligonucleotide
ggcacaguagguauaucau

SEQ ID NO: 2385696 - RNA, 19 nt, Artificial Sequence
  Description of Artificial Sequence: Synthetic oligonucleotide
gcgccagcuccgcauuucc

SEQ ID NO: 2385697 - RNA, 19 nt, Artificial Sequence
  Description of Artificial Sequence: Synthetic oligonucleotide
agccugccacugacagagc

SEQ ID NO: 2385698 - RNA, 19 nt, Artificial Sequence
  Description of Artificial Sequence: Synthetic oligonucleotide
gguacaucugcugggcagu

SEQ ID NO: 2385699 - RNA, 19 nt, Artificial Sequence
  Description of Artificial Sequence: Synthetic oligonucleotide
uagcuugcacaugguuguu

SEQ ID NO: 2385700 - RNA, 19 nt, Artificial Sequence
  Description of Artificial Sequence: Synthetic oligonucleotide
cugccucccgugugugcuc

SEQ ID NO: 2385701 - RNA, 19 nt, Artificial Sequence
  Description of Artificial Sequence: Synthetic oligonucleotide
gguguggcccggcgucaag

SEQ ID NO: 2385702 - RNA, 19 nt, Artificial Sequence
  Description of Artificial Sequence: Synthetic oligonucleotide
cucuugggcacagccacgu

SEQ ID NO: 2385703 - RNA, 19 nt, Artificial Sequence
  Description of Artificial Sequence: Synthetic oligonucleotide
ugguguggcccggcgucaa

SEQ ID NO: 2385704 - RNA, 19 nt, Artificial Sequence
  Description of Artificial Sequence: Synthetic oligonucleotide
caguguccuccagaugcca

SEQ ID NO: 2385705 - RNA, 19 nt, Artificial Sequence
  Description of Artificial Sequence: Synthetic oligonucleotide
cugcggguuagugcgcaga

SEQ ID NO: 2385706 - RNA, 19 nt, Artificial Sequence
  Description of Artificial Sequence: Synthetic oligonucleotide
accuucgucugggguggca

SEQ ID NO: 2385707 - RNA, 19 nt, Artificial Sequence
  Description of Artificial Sequence: Synthetic oligonucleotide
ccaugaccuccaguccugg

SEQ ID NO: 2385708 - RNA, 19 nt, Artificial Sequence
  Description of Artificial Sequence: Synthetic oligonucleotide
gcgugcucgcucccugcag

SEQ ID NO: 2385709 - RNA, 19 nt, Artificial Sequence
  Description of Artificial Sequence: Synthetic oligonucleotide
cccggcgucaagaggcauc

SEQ ID NO: 2385710 - RNA, 19 nt, Artificial Sequence
  Description of Artificial Sequence: Synthetic oligonucleotide
gcucccugcagaguaccuc

SEQ ID NO: 2385711 - RNA, 19 nt, Artificial Sequence
  Description of Artificial Sequence: Synthetic oligonucleotide
gcuuagcuugcacaugguu

SEQ ID NO: 2385712 - RNA, 19 nt, Artificial Sequence
  Description of Artificial Sequence: Synthetic oligonucleotide
cgcaggugcgccagcuccg

SEQ ID NO: 2385713 - RNA, 19 nt, Artificial Sequence
  Description of Artificial Sequence: Synthetic oligonucleotide
gauggguggucagcaccgu

SEQ ID NO: 2385714 - RNA, 19 nt, Artificial Sequence
  Description of Artificial Sequence: Synthetic oligonucleotide
ccgcauuuccacgcgugug

SEQ ID NO: 2385715 - RNA, 19 nt, Artificial Sequence
  Description of Artificial Sequence: Synthetic oligonucleotide
gguggguccgggcauucau

SEQ ID NO: 2385716 - RNA, 19 nt, Artificial Sequence
  Description of Artificial Sequence: Synthetic oligonucleotide
ggcaucgcacguggauggc

SEQ ID NO: 2385717 - RNA, 19 nt, Artificial Sequence
  Description of Artificial Sequence: Synthetic oligonucleotide
ugacagccugcggguuagu

SEQ ID NO: 2385718 - RNA, 19 nt, Artificial Sequence
  Description of Artificial Sequence: Synthetic oligonucleotide
gcagggcuccacuuucugu

SEQ ID NO: 2385719 - RNA, 19 nt, Artificial Sequence
  Description of Artificial Sequence: Synthetic oligonucleotide
gcggguuagugcgcagaug

SEQ ID NO: 2385720 - RNA, 19 nt, Artificial Sequence
  Description of Artificial Sequence: Synthetic oligonucleotide
ggguuguacaacagcuccu

SEQ ID NO: 2385721 - RNA, 19 nt, Artificial Sequence
  Description of Artificial Sequence: Synthetic oligonucleotide
gcguacucacgaagucccc

SEQ ID NO: 2385722 - RNA, 19 nt, Artificial Sequence
  Description of Artificial Sequence: Synthetic oligonucleotide
cuuccucgcgggcuguaau

SEQ ID NO: 2385723 - RNA, 19 nt, Artificial Sequence
  Description of Artificial Sequence: Synthetic oligonucleotide
gugcccggaccuggggcug

SEQ ID NO: 2385724 - RNA, 19 nt, Artificial Sequence
  Description of Artificial Sequence: Synthetic oligonucleotide
ccguggucagagacacuuc

SEQ ID NO: 2385725 - RNA, 19 nt, Artificial Sequence
  Description of Artificial Sequence: Synthetic oligonucleotide
ggcccaggacagcuuagcu

SEQ ID NO: 2385726 - RNA, 19 nt, Artificial Sequence
  Description of Artificial Sequence: Synthetic oligonucleotide
caaguaccgggaugacuuu

SEQ ID NO: 2385727 - RNA, 19 nt, Artificial Sequence
  Description of Artificial Sequence: Synthetic oligonucleotide
ccugcggguuagugcgcag

SEQ ID NO: 2385728 - RNA, 19 nt, Artificial Sequence
  Description of Artificial Sequence: Synthetic oligonucleotide
ccucgcgggcuguaaucuc

SEQ ID NO: 2385729 - RNA, 19 nt, Artificial Sequence
  Description of Artificial Sequence: Synthetic oligonucleotide
guggcaggguacccaggau

SEQ ID NO: 2385730 - RNA, 19 nt, Artificial Sequence
  Description of Artificial Sequence: Synthetic oligonucleotide
gcccaggacagcuuagcuu

SEQ ID NO: 2385731 - RNA, 19 nt, Artificial Sequence
  Description of Artificial Sequence: Synthetic oligonucleotide
cguacucacgaagucccca

SEQ ID NO: 2385732 - RNA, 19 nt, Artificial Sequence
  Description of Artificial Sequence: Synthetic oligonucleotide
gucgcagaccucagccagu

SEQ ID NO: 2385733 - RNA, 19 nt, Artificial Sequence
  Description of Artificial Sequence: Synthetic oligonucleotide
cagugguguggcccggcgu

SEQ ID NO: 2385734 - RNA, 19 nt, Artificial Sequence
  Description of Artificial Sequence: Synthetic oligonucleotide
ccccaaaccgaagcuccuc

SEQ ID NO: 2385735 - RNA, 19 nt, Artificial Sequence
  Description of Artificial Sequence: Synthetic oligonucleotide
gcuccucgcccaguguaga

SEQ ID NO: 2385736 - RNA, 19 nt, Artificial Sequence
  Description of Artificial Sequence: Synthetic oligonucleotide
gugcgcagaugcgcucauc

SEQ ID NO: 2385737 - RNA, 19 nt, Artificial Sequence
  Description of Artificial Sequence: Synthetic oligonucleotide
caccuucgucugggguggc

SEQ ID NO: 2385738 - RNA, 19 nt, Artificial Sequence
  Description of Artificial Sequence: Synthetic oligonucleotide
ggccagugguguggcccgg

SEQ ID NO: 2385739 - RNA, 19 nt, Artificial Sequence
  Description of Artificial Sequence: Synthetic oligonucleotide
cgugcucgcucccugcaga

SEQ ID NO: 2385740 - RNA, 19 nt, Artificial Sequence
  Description of Artificial Sequence: Synthetic oligonucleotide
caggugcgccagcuccgca

SEQ ID NO: 2385741 - RNA, 19 nt, Artificial Sequence
  Description of Artificial Sequence: Synthetic oligonucleotide
gcguguggucccaguggug

SEQ ID NO: 2385742 - RNA, 19 nt, Artificial Sequence
  Description of Artificial Sequence: Synthetic oligonucleotide
ccacguccacagccacugc

SEQ ID NO: 2385743 - RNA, 19 nt, Artificial Sequence
  Description of Artificial Sequence: Synthetic oligonucleotide
ccugggcaggugccacuug

SEQ ID NO: 2385744 - RNA, 19 nt, Artificial Sequence
  Description of Artificial Sequence: Synthetic oligonucleotide
gccagugguguggcccggc

SEQ ID NO: 2385745 - RNA, 19 nt, Artificial Sequence
  Description of Artificial Sequence: Synthetic oligonucleotide
cagccacugccucccgugu

SEQ ID NO: 2385746 - RNA, 19 nt, Artificial Sequence
  Description of Artificial Sequence: Synthetic oligonucleotide
gccugcggguuagugcgca

SEQ ID NO: 2385747 - RNA, 19 nt, Artificial Sequence
  Description of Artificial Sequence: Synthetic oligonucleotide
ccgggcauucauccuccca

SEQ ID NO: 2385748 - RNA, 19 nt, Artificial Sequence
  Description of Artificial Sequence: Synthetic oligonucleotide
ggaagcgugcucgcucccu

SEQ ID NO: 2385749 - RNA, 19 nt, Artificial Sequence
  Description of Artificial Sequence: Synthetic oligonucleotide
ggccaagcucugguacauc

SEQ ID NO: 2385750 - RNA, 19 nt, Artificial Sequence
  Description of Artificial Sequence: Synthetic oligonucleotide
gcccaguguagagggcaca

SEQ ID NO: 2385751 - RNA, 19 nt, Artificial Sequence
  Description of Artificial Sequence: Synthetic oligonucleotide
gcuccgcauuuccacgcgu

SEQ ID NO: 2385752 - RNA, 19 nt, Artificial Sequence
  Description of Artificial Sequence: Synthetic oligonucleotide
ccaggaucuuggccaagcu

SEQ ID NO: 2385753 - RNA, 19 nt, Artificial Sequence
  Description of Artificial Sequence: Synthetic oligonucleotide
ggguccgggcauucauccu

SEQ ID NO: 2385754 - RNA, 19 nt, Artificial Sequence
  Description of Artificial Sequence: Synthetic oligonucleotide
ggugcgccagcuccgcauu

SEQ ID NO: 2385755 - RNA, 19 nt, Artificial Sequence
  Description of Artificial Sequence: Synthetic oligonucleotide
cgcgggcuguaaucuccag

SEQ ID NO: 2385756 - RNA, 19 nt, Artificial Sequence
  Description of Artificial Sequence: Synthetic oligonucleotide
gcacguggauggccccaaa

SEQ ID NO: 2385757 - RNA, 19 nt, Artificial Sequence
  Description of Artificial Sequence: Synthetic oligonucleotide
cuccaggaccugggcaggu

SEQ ID NO: 2385758 - RNA, 19 nt, Artificial Sequence
  Description of Artificial Sequence: Synthetic oligonucleotide
cccucaagaaaggguugua

SEQ ID NO: 2385759 - RNA, 19 nt, Artificial Sequence
  Description of Artificial Sequence: Synthetic oligonucleotide
caccguggucagagacacu

SEQ ID NO: 2385760 - RNA, 19 nt, Artificial Sequence
  Description of Artificial Sequence: Synthetic oligonucleotide
cgcguguggucccaguggu

SEQ ID NO: 2385761 - RNA, 19 nt, Artificial Sequence
  Description of Artificial Sequence: Synthetic oligonucleotide
gugcgccagcuccgcauuu

SEQ ID NO: 2385762 - RNA, 19 nt, Artificial Sequence
  Description of Artificial Sequence: Synthetic oligonucleotide
ccaguguagagggcacagu

SEQ ID NO: 2385763 - RNA, 19 nt, Artificial Sequence
  Description of Artificial Sequence: Synthetic oligonucleotide
cgucugggguggcagggua

SEQ ID NO: 2385764 - RNA, 19 nt, Artificial Sequence
  Description of Artificial Sequence: Synthetic oligonucleotide
ccggaccuggggcugcagu

SEQ ID NO: 2385765 - RNA, 19 nt, Artificial Sequence
  Description of Artificial Sequence: Synthetic oligonucleotide
cccggaccuggggcugcag

SEQ ID NO: 2385766 - RNA, 19 nt, Artificial Sequence
  Description of Artificial Sequence: Synthetic oligonucleotide
cccgugugugcuccucaau

SEQ ID NO: 2385767 - RNA, 19 nt, Artificial Sequence
  Description of Artificial Sequence: Synthetic oligonucleotide
ccacgcguguggucccagu

SEQ ID NO: 2385768 - RNA, 19 nt, Artificial Sequence
  Description of Artificial Sequence: Synthetic oligonucleotide
gcaggguacccaggaucuu

SEQ ID NO: 2385769 - RNA, 19 nt, Artificial Sequence
  Description of Artificial Sequence: Synthetic oligonucleotide
ccgggaugacuuugaccuu

SEQ ID NO: 2385770 - RNA, 19 nt, Artificial Sequence
  Description of Artificial Sequence: Synthetic oligonucleotide
cgcacguggauggccccaa

SEQ ID NO: 2385771 - RNA, 19 nt, Artificial Sequence
  Description of Artificial Sequence: Synthetic oligonucleotide
gccucccgugugugcuccu

SEQ ID NO: 2385772 - RNA, 19 nt, Artificial Sequence
  Description of Artificial Sequence: Synthetic oligonucleotide
gcccggcgucaagaggcau

SEQ ID NO: 2385773 - RNA, 19 nt, Artificial Sequence
  Description of Artificial Sequence: Synthetic oligonucleotide
aaaagggccaaguacacgg

SEQ ID NO: 2385774 - RNA, 19 nt, Artificial Sequence
  Description of Artificial Sequence: Synthetic oligonucleotide
aaauuucugcugcagcucc

SEQ ID NO: 2385775 - RNA, 19 nt, Artificial Sequence
  Description of Artificial Sequence: Synthetic oligonucleotide
uauuagagggaguagcucg

SEQ ID NO: 2385776 - RNA, 19 nt, Artificial Sequence
  Description of Artificial Sequence: Synthetic oligonucleotide
acaaacuuguucaugagcc

SEQ ID NO: 2385777 - RNA, 19 nt, Artificial Sequence
  Description of Artificial Sequence: Synthetic oligonucleotide
aacaaacugcccaugaggc

SEQ ID NO: 2385778 - RNA, 19 nt, Artificial Sequence
  Description of Artificial Sequence: Synthetic oligonucleotide
uugggguuuuauuagaggg

SEQ ID NO: 2385779 - RNA, 19 nt, Artificial Sequence
  Description of Artificial Sequence: Synthetic oligonucleotide
acuucgaaauuucugcugc

SEQ ID NO: 2385780 - RNA, 19 nt, Artificial Sequence
  Description of Artificial Sequence: Synthetic oligonucleotide
aaacuuguucaugagcccc

SEQ ID NO: 2385781 - RNA, 19 nt, Artificial Sequence
  Description of Artificial Sequence: Synthetic oligonucleotide
uuuuauuagagggaguagc

SEQ ID NO: 2385782 - RNA, 19 nt, Artificial Sequence
  Description of Artificial Sequence: Synthetic oligonucleotide
gauacauucaccacucugc

SEQ ID NO: 2385783 - RNA, 19 nt, Artificial Sequence
  Description of Artificial Sequence: Synthetic oligonucleotide
auacauucaccacucugcc

SEQ ID NO: 2385784 - RNA, 19 nt, Artificial Sequence
  Description of Artificial Sequence: Synthetic oligonucleotide
auacuugauacauucacca

SEQ ID NO: 2385785 - RNA, 19 nt, Artificial Sequence
  Description of Artificial Sequence: Synthetic oligonucleotide
uuuauuagagggaguagcu

SEQ ID NO: 2385786 - RNA, 19 nt, Artificial Sequence
  Description of Artificial Sequence: Synthetic oligonucleotide
agagggaguagcucggugc

SEQ ID NO: 2385787 - RNA, 19 nt, Artificial Sequence
  Description of Artificial Sequence: Synthetic oligonucleotide
gucacuucgaaauuucugc

SEQ ID NO: 2385788 - RNA, 19 nt, Artificial Sequence
  Description of Artificial Sequence: Synthetic oligonucleotide
ugggcaacaggcauugagg

SEQ ID NO: 2385789 - RNA, 19 nt, Artificial Sequence
  Description of Artificial Sequence: Synthetic oligonucleotide
uuucuccugaacaaacugc

SEQ ID NO: 2385790 - RNA, 19 nt, Artificial Sequence
  Description of Artificial Sequence: Synthetic oligonucleotide
uucuccugaacaaacugcc

SEQ ID NO: 2385791 - RNA, 19 nt, Artificial Sequence
  Description of Artificial Sequence: Synthetic oligonucleotide
acuugauacauucaccacu

SEQ ID NO: 2385792 - RNA, 19 nt, Artificial Sequence
  Description of Artificial Sequence: Synthetic oligonucleotide
ugauacauucaccacucug

SEQ ID NO: 2385793 - RNA, 19 nt, Artificial Sequence
  Description of Artificial Sequence: Synthetic oligonucleotide
cauacuugauacauucacc

SEQ ID NO: 2385794 - RNA, 19 nt, Artificial Sequence
  Description of Artificial Sequence: Synthetic oligonucleotide
ugcaggacgacauggcugg

SEQ ID NO: 2385795 - RNA, 19 nt, Artificial Sequence
  Description of Artificial Sequence: Synthetic oligonucleotide
uugaguucaccauuguucu

SEQ ID NO: 2385796 - RNA, 19 nt, Artificial Sequence
  Description of Artificial Sequence: Synthetic oligonucleotide
ucaugcaucccucucuuug

SEQ ID NO: 2385797 - RNA, 19 nt, Artificial Sequence
  Description of Artificial Sequence: Synthetic oligonucleotide
uucuucuggacucuuggug

SEQ ID NO: 2385798 - RNA, 19 nt, Artificial Sequence
  Description of Artificial Sequence: Synthetic oligonucleotide
ugaacaaacugcccaugag

SEQ ID NO: 2385799 - RNA, 19 nt, Artificial Sequence
  Description of Artificial Sequence: Synthetic oligonucleotide
ugucacuucgaaauuucug

SEQ ID NO: 2385800 - RNA, 19 nt, Artificial Sequence
  Description of Artificial Sequence: Synthetic oligonucleotide
cuugauacauucaccacuc

SEQ ID NO: 2385801 - RNA, 19 nt, Artificial Sequence
  Description of Artificial Sequence: Synthetic oligonucleotide
ucuugguggcuuuuggucc

SEQ ID NO: 2385802 - RNA, 19 nt, Artificial Sequence
  Description of Artificial Sequence: Synthetic oligonucleotide
acaaacugcccaugaggcc

SEQ ID NO: 2385803 - RNA, 19 nt, Artificial Sequence
  Description of Artificial Sequence: Synthetic oligonucleotide
cccauaagcacuauuaggc

SEQ ID NO: 2385804 - RNA, 19 nt, Artificial Sequence
  Description of Artificial Sequence: Synthetic oligonucleotide
auugaggaggaucuugucu

SEQ ID NO: 2385805 - RNA, 19 nt, Artificial Sequence
  Description of Artificial Sequence: Synthetic oligonucleotide
gagcauacuugauacauuc

SEQ ID NO: 2385806 - RNA, 19 nt, Artificial Sequence
  Description of Artificial Sequence: Synthetic oligonucleotide
uuuugguccugccaugucu

SEQ ID NO: 2385807 - RNA, 19 nt, Artificial Sequence
  Description of Artificial Sequence: Synthetic oligonucleotide
gauggugucacuucgaaau

SEQ ID NO: 2385808 - RNA, 19 nt, Artificial Sequence
  Description of Artificial Sequence: Synthetic oligonucleotide
ucgaaauuucugcugcagc

SEQ ID NO: 2385809 - RNA, 19 nt, Artificial Sequence
  Description of Artificial Sequence: Synthetic oligonucleotide
guugaguucaccauuguuc

SEQ ID NO: 2385810 - RNA, 19 nt, Artificial Sequence
  Description of Artificial Sequence: Synthetic oligonucleotide
auggauucuggacaggacu

SEQ ID NO: 2385811 - RNA, 19 nt, Artificial Sequence
  Description of Artificial Sequence: Synthetic oligonucleotide
uucucacccacccugggca

SEQ ID NO: 2385812 - RNA, 19 nt, Artificial Sequence
  Description of Artificial Sequence: Synthetic oligonucleotide
uuugugucuuccacaaacu

SEQ ID NO: 2385813 - RNA, 19 nt, Artificial Sequence
  Description of Artificial Sequence: Synthetic oligonucleotide
cuugggguuuuauuagagg

SEQ ID NO: 2385814 - RNA, 19 nt, Artificial Sequence
  Description of Artificial Sequence: Synthetic oligonucleotide
acuauuaggccagccuucc

SEQ ID NO: 2385815 - RNA, 19 nt, Artificial Sequence
  Description of Artificial Sequence: Synthetic oligonucleotide
aguagcucggugcagacau

SEQ ID NO: 2385816 - RNA, 19 nt, Artificial Sequence
  Description of Artificial Sequence: Synthetic oligonucleotide
uuugguccugccaugucug

SEQ ID NO: 2385817 - RNA, 19 nt, Artificial Sequence
  Description of Artificial Sequence: Synthetic oligonucleotide
ugucuguucucacccaccc

SEQ ID NO: 2385818 - RNA, 19 nt, Artificial Sequence
  Description of Artificial Sequence: Synthetic oligonucleotide
caaacugcccaugaggccc

SEQ ID NO: 2385819 - RNA, 19 nt, Artificial Sequence
  Description of Artificial Sequence: Synthetic oligonucleotide
uucaccauuguucuacuuu

SEQ ID NO: 2385820 - RNA, 19 nt, Artificial Sequence
  Description of Artificial Sequence: Synthetic oligonucleotide
ugaggcugagcauacuuga

SEQ ID NO: 2385821 - RNA, 19 nt, Artificial Sequence
  Description of Artificial Sequence: Synthetic oligonucleotide
cucggugcagacaucuugg

SEQ ID NO: 2385822 - RNA, 19 nt, Artificial Sequence
  Description of Artificial Sequence: Synthetic oligonucleotide
uguucaugagccccaccag

SEQ ID NO: 2385823 - RNA, 19 nt, Artificial Sequence
  Description of Artificial Sequence: Synthetic oligonucleotide
cuggacaggacugucaccc

SEQ ID NO: 2385824 - RNA, 19 nt, Artificial Sequence
  Description of Artificial Sequence: Synthetic oligonucleotide
uucaugagccccaccagcu

SEQ ID NO: 2385825 - RNA, 19 nt, Artificial Sequence
  Description of Artificial Sequence: Synthetic oligonucleotide
ugggguuuuauuagaggga

SEQ ID NO: 2385826 - RNA, 19 nt, Artificial Sequence
  Description of Artificial Sequence: Synthetic oligonucleotide
uuggucaccccauaagcac

SEQ ID NO: 2385827 - RNA, 19 nt, Artificial Sequence
  Description of Artificial Sequence: Synthetic oligonucleotide
auaagcacuauuaggccag

SEQ ID NO: 2385828 - RNA, 19 nt, Artificial Sequence
  Description of Artificial Sequence: Synthetic oligonucleotide
ucucuuugugucuuccaca

SEQ ID NO: 2385829 - RNA, 19 nt, Artificial Sequence
  Description of Artificial Sequence: Synthetic oligonucleotide
ugccuugggguuuuauuag

SEQ ID NO: 2385830 - RNA, 19 nt, Artificial Sequence
  Description of Artificial Sequence: Synthetic oligonucleotide
gcaacaggcauugaggagg

SEQ ID NO: 2385831 - RNA, 19 nt, Artificial Sequence
  Description of Artificial Sequence: Synthetic oligonucleotide
ucaccacucugccuugggg

SEQ ID NO: 2385832 - RNA, 19 nt, Artificial Sequence
  Description of Artificial Sequence: Synthetic oligonucleotide
accccaaucuuggucaccc

SEQ ID NO: 2385833 - RNA, 19 nt, Artificial Sequence
  Description of Artificial Sequence: Synthetic oligonucleotide
caaacuuguucaugagccc

SEQ ID NO: 2385834 - RNA, 19 nt, Artificial Sequence
  Description of Artificial Sequence: Synthetic oligonucleotide
gacucuugguggcuuuugg

SEQ ID NO: 2385835 - RNA, 19 nt, Artificial Sequence
  Description of Artificial Sequence: Synthetic oligonucleotide
aguucccgggcauggauuc

SEQ ID NO: 2385836 - RNA, 19 nt, Artificial Sequence
  Description of Artificial Sequence: Synthetic oligonucleotide
uucgaaauuucugcugcag

SEQ ID NO: 2385837 - RNA, 19 nt, Artificial Sequence
  Description of Artificial Sequence: Synthetic oligonucleotide
gaguucaccauuguucuac

SEQ ID NO: 2385838 - RNA, 19 nt, Artificial Sequence
  Description of Artificial Sequence: Synthetic oligonucleotide
agcacuauuaggccagccu

SEQ ID NO: 2385839 - RNA, 19 nt, Artificial Sequence
  Description of Artificial Sequence: Synthetic oligonucleotide
ucacuucgaaauuucugcu

SEQ ID NO: 2385840 - RNA, 19 nt, Artificial Sequence
  Description of Artificial Sequence: Synthetic oligonucleotide
cauaagcacuauuaggcca

SEQ ID NO: 2385841 - RNA, 19 nt, Artificial Sequence
  Description of Artificial Sequence: Synthetic oligonucleotide
accccauaagcacuauuag

SEQ ID NO: 2385842 - RNA, 19 nt, Artificial Sequence
  Description of Artificial Sequence: Synthetic oligonucleotide
aaucuuggucaccccauaa

SEQ ID NO: 2385843 - RNA, 19 nt, Artificial Sequence
  Description of Artificial Sequence: Synthetic oligonucleotide
cugugauggugucacuucg

SEQ ID NO: 2385844 - RNA, 19 nt, Artificial Sequence
  Description of Artificial Sequence: Synthetic oligonucleotide
ucuccugaacaaacugccc

SEQ ID NO: 2385845 - RNA, 19 nt, Artificial Sequence
  Description of Artificial Sequence: Synthetic oligonucleotide
cucuugguggcuuuugguc

SEQ ID NO: 2385846 - RNA, 19 nt, Artificial Sequence
  Description of Artificial Sequence: Synthetic oligonucleotide
gcauacuugauacauucac

SEQ ID NO: 2385847 - RNA, 19 nt, Artificial Sequence
  Description of Artificial Sequence: Synthetic oligonucleotide
ugugauggugucacuucga

SEQ ID NO: 2385848 - RNA, 19 nt, Artificial Sequence
  Description of Artificial Sequence: Synthetic oligonucleotide
aagcacuauuaggccagcc

SEQ ID NO: 2385849 - RNA, 19 nt, Artificial Sequence
  Description of Artificial Sequence: Synthetic oligonucleotide
uguucucacccacccuggg

SEQ ID NO: 2385850 - RNA, 19 nt, Artificial Sequence
  Description of Artificial Sequence: Synthetic oligonucleotide
auuagagggaguagcucgg

SEQ ID NO: 2385851 - RNA, 19 nt, Artificial Sequence
  Description of Artificial Sequence: Synthetic oligonucleotide
uggcuuuugguccugccau

SEQ ID NO: 2385852 - RNA, 19 nt, Artificial Sequence
  Description of Artificial Sequence: Synthetic oligonucleotide
gucaccccaaucuugguca

SEQ ID NO: 2385853 - RNA, 19 nt, Artificial Sequence
  Description of Artificial Sequence: Synthetic oligonucleotide
uucaccacucugccuuggg

SEQ ID NO: 2385854 - RNA, 19 nt, Artificial Sequence
  Description of Artificial Sequence: Synthetic oligonucleotide
guuuuauuagagggaguag

SEQ ID NO: 2385855 - RNA, 19 nt, Artificial Sequence
  Description of Artificial Sequence: Synthetic oligonucleotide
cugggcaacaggcauugag

SEQ ID NO: 2385856 - RNA, 19 nt, Artificial Sequence
  Description of Artificial Sequence: Synthetic oligonucleotide
aggaggaucuugucugcuc

SEQ ID NO: 2385857 - RNA, 19 nt, Artificial Sequence
  Description of Artificial Sequence: Synthetic oligonucleotide
aauuucugcugcagcuccg

SEQ ID NO: 2385858 - RNA, 19 nt, Artificial Sequence
  Description of Artificial Sequence: Synthetic oligonucleotide
aucuugucugcucuccucu

SEQ ID NO: 2385859 - RNA, 19 nt, Artificial Sequence
  Description of Artificial Sequence: Synthetic oligonucleotide
ugucaccccaaucuugguc

SEQ ID NO: 2385860 - RNA, 19 nt, Artificial Sequence
  Description of Artificial Sequence: Synthetic oligonucleotide
ugcuccuucuucuggacuc

SEQ ID NO: 2385861 - RNA, 19 nt, Artificial Sequence
  Description of Artificial Sequence: Synthetic oligonucleotide
cacuucgaaauuucugcug

SEQ ID NO: 2385862 - RNA, 19 nt, Artificial Sequence
  Description of Artificial Sequence: Synthetic oligonucleotide
uuauuagagggaguagcuc

SEQ ID NO: 2385863 - RNA, 19 nt, Artificial Sequence
  Description of Artificial Sequence: Synthetic oligonucleotide
agaguugaguucaccauug

SEQ ID NO: 2385864 - RNA, 19 nt, Artificial Sequence
  Description of Artificial Sequence: Synthetic oligonucleotide
uccucugugauggugucac

SEQ ID NO: 2385865 - RNA, 19 nt, Artificial Sequence
  Description of Artificial Sequence: Synthetic oligonucleotide
aggacgacauggcugggug

SEQ ID NO: 2385866 - RNA, 19 nt, Artificial Sequence
  Description of Artificial Sequence: Synthetic oligonucleotide
gaaauuucugcugcagcuc

SEQ ID NO: 2385867 - RNA, 19 nt, Artificial Sequence
  Description of Artificial Sequence: Synthetic oligonucleotide
aaagggccaaguacacggg

SEQ ID NO: 2385868 - RNA, 19 nt, Artificial Sequence
  Description of Artificial Sequence: Synthetic oligonucleotide
ggcugagcauacuugauac

SEQ ID NO: 2385869 - RNA, 19 nt, Artificial Sequence
  Description of Artificial Sequence: Synthetic oligonucleotide
aaacugcccaugaggcccc

SEQ ID NO: 2385870 - RNA, 19 nt, Artificial Sequence
  Description of Artificial Sequence: Synthetic oligonucleotide
cugaggcugagcauacuug

SEQ ID NO: 2385871 - RNA, 19 nt, Artificial Sequence
  Description of Artificial Sequence: Synthetic oligonucleotide
uuucagggcccugaggcug

SEQ ID NO: 2385872 - RNA, 19 nt, Artificial Sequence
  Description of Artificial Sequence: Synthetic oligonucleotide
cuuggucaccccauaagca

SEQ ID NO: 2385873 - RNA, 19 nt, Artificial Sequence
  Description of Artificial Sequence: Synthetic oligonucleotide
uggucaccccauaagcacu

SEQ ID NO: 2385874 - RNA, 19 nt, Artificial Sequence
  Description of Artificial Sequence: Synthetic oligonucleotide
ugccaugucuguucucacc

SEQ ID NO: 2385875 - RNA, 19 nt, Artificial Sequence
  Description of Artificial Sequence: Synthetic oligonucleotide
uugugucuuccacaaacuu

SEQ ID NO: 2385876 - RNA, 19 nt, Artificial Sequence
  Description of Artificial Sequence: Synthetic oligonucleotide
ucggugcagacaucuuggg

SEQ ID NO: 2385877 - RNA, 19 nt, Artificial Sequence
  Description of Artificial Sequence: Synthetic oligonucleotide
gggguuuuauuagagggag

SEQ ID NO: 2385878 - RNA, 19 nt, Artificial Sequence
  Description of Artificial Sequence: Synthetic oligonucleotide
ugcuggcucaguucccggg

SEQ ID NO: 2385879 - RNA, 19 nt, Artificial Sequence
  Description of Artificial Sequence: Synthetic oligonucleotide
uugucugcucuccucugcu

SEQ ID NO: 2385880 - RNA, 19 nt, Artificial Sequence
  Description of Artificial Sequence: Synthetic oligonucleotide
ugagcauacuugauacauu

SEQ ID NO: 2385881 - RNA, 19 nt, Artificial Sequence
  Description of Artificial Sequence: Synthetic oligonucleotide
cuugucugcucuccucugc

SEQ ID NO: 2385882 - RNA, 19 nt, Artificial Sequence
  Description of Artificial Sequence: Synthetic oligonucleotide
aguugaguucaccauuguu

SEQ ID NO: 2385883 - RNA, 19 nt, Artificial Sequence
  Description of Artificial Sequence: Synthetic oligonucleotide
caaaagggccaaguacacg

SEQ ID NO: 2385884 - RNA, 19 nt, Artificial Sequence
  Description of Artificial Sequence: Synthetic oligonucleotide
uagagggaguagcucggug

SEQ ID NO: 2385885 - RNA, 19 nt, Artificial Sequence
  Description of Artificial Sequence: Synthetic oligonucleotide
uccugaacaaacugcccau

SEQ ID NO: 2385886 - RNA, 19 nt, Artificial Sequence
  Description of Artificial Sequence: Synthetic oligonucleotide
auuucugcugcagcuccgg

SEQ ID NO: 2385887 - RNA, 19 nt, Artificial Sequence
  Description of Artificial Sequence: Synthetic oligonucleotide
cauggauucuggacaggac

SEQ ID NO: 2385888 - RNA, 19 nt, Artificial Sequence
  Description of Artificial Sequence: Synthetic oligonucleotide
agggcccugaggcugagca

SEQ ID NO: 2385889 - RNA, 19 nt, Artificial Sequence
  Description of Artificial Sequence: Synthetic oligonucleotide
caugucuguucucacccac

SEQ ID NO: 2385890 - RNA, 19 nt, Artificial Sequence
  Description of Artificial Sequence: Synthetic oligonucleotide
gacaucuuggguaccaaaa

SEQ ID NO: 2385891 - RNA, 19 nt, Artificial Sequence
  Description of Artificial Sequence: Synthetic oligonucleotide
ggugcagacaucuugggua

SEQ ID NO: 2385892 - RNA, 19 nt, Artificial Sequence
  Description of Artificial Sequence: Synthetic oligonucleotide
cuccugaacaaacugccca

SEQ ID NO: 2385893 - RNA, 19 nt, Artificial Sequence
  Description of Artificial Sequence: Synthetic oligonucleotide
gaucuugucugcucuccuc

SEQ ID NO: 2385894 - RNA, 19 nt, Artificial Sequence
  Description of Artificial Sequence: Synthetic oligonucleotide
ccagccuuccuucucaugc

SEQ ID NO: 2385895 - RNA, 19 nt, Artificial Sequence
  Description of Artificial Sequence: Synthetic oligonucleotide
cacuauuaggccagccuuc

SEQ ID NO: 2385896 - RNA, 19 nt, Artificial Sequence
  Description of Artificial Sequence: Synthetic oligonucleotide
acucuugguggcuuuuggu

SEQ ID NO: 2385897 - RNA, 19 nt, Artificial Sequence
  Description of Artificial Sequence: Synthetic oligonucleotide
uucugcugcagcuccggac

SEQ ID NO: 2385898 - RNA, 19 nt, Artificial Sequence
  Description of Artificial Sequence: Synthetic oligonucleotide
augucuguucucacccacc

SEQ ID NO: 2385899 - RNA, 19 nt, Artificial Sequence
  Description of Artificial Sequence: Synthetic oligonucleotide
cuguucucacccacccugg

SEQ ID NO: 2385900 - RNA, 19 nt, Artificial Sequence
  Description of Artificial Sequence: Synthetic oligonucleotide
ucugccuugggguuuuauu

SEQ ID NO: 2385901 - RNA, 19 nt, Artificial Sequence
  Description of Artificial Sequence: Synthetic oligonucleotide
ccauaagcacuauuaggcc

SEQ ID NO: 2385902 - RNA, 19 nt, Artificial Sequence
  Description of Artificial Sequence: Synthetic oligonucleotide
ucucaugcaucccucucuu

SEQ ID NO: 2385903 - RNA, 19 nt, Artificial Sequence
  Description of Artificial Sequence: Synthetic oligonucleotide
ggcaaaagggccaaguaca

SEQ ID NO: 2385904 - RNA, 19 nt, Artificial Sequence
  Description of Artificial Sequence: Synthetic oligonucleotide
aacuuguucaugagcccca

SEQ ID NO: 2385905 - RNA, 19 nt, Artificial Sequence
  Description of Artificial Sequence: Synthetic oligonucleotide
ucuugucugcucuccucug

SEQ ID NO: 2385906 - RNA, 19 nt, Artificial Sequence
  Description of Artificial Sequence: Synthetic oligonucleotide
gccaugucuguucucaccc

SEQ ID NO: 2385907 - RNA, 19 nt, Artificial Sequence
  Description of Artificial Sequence: Synthetic oligonucleotide
ucaguucccgggcauggau

SEQ ID NO: 2385908 - RNA, 19 nt, Artificial Sequence
  Description of Artificial Sequence: Synthetic oligonucleotide
ugauggugucacuucgaaa

SEQ ID NO: 2385909 - RNA, 19 nt, Artificial Sequence
  Description of Artificial Sequence: Synthetic oligonucleotide
ccccauaagcacuauuagg

SEQ ID NO: 2385910 - RNA, 19 nt, Artificial Sequence
  Description of Artificial Sequence: Synthetic oligonucleotide
uccuucuucuggacucuug

SEQ ID NO: 2385911 - RNA, 19 nt, Artificial Sequence
  Description of Artificial Sequence: Synthetic oligonucleotide
ucuggacaggacugucacc

SEQ ID NO: 2385912 - RNA, 19 nt, Artificial Sequence
  Description of Artificial Sequence: Synthetic oligonucleotide
gugcagacaucuuggguac

SEQ ID NO: 2385913 - RNA, 19 nt, Artificial Sequence
  Description of Artificial Sequence: Synthetic oligonucleotide
uugauacauucaccacucu

SEQ ID NO: 2385914 - RNA, 19 nt, Artificial Sequence
  Description of Artificial Sequence: Synthetic oligonucleotide
ccuucuucuggacucuugg

SEQ ID NO: 2385915 - RNA, 19 nt, Artificial Sequence
  Description of Artificial Sequence: Synthetic oligonucleotide
aguucaccauuguucuacu

SEQ ID NO: 2385916 - RNA, 19 nt, Artificial Sequence
  Description of Artificial Sequence: Synthetic oligonucleotide
ucugcuccuucuucuggac

SEQ ID NO: 2385917 - RNA, 19 nt, Artificial Sequence
  Description of Artificial Sequence: Synthetic oligonucleotide
gguuuuauuagagggagua

SEQ ID NO: 2385918 - RNA, 19 nt, Artificial Sequence
  Description of Artificial Sequence: Synthetic oligonucleotide
acuuguucaugagccccac

SEQ ID NO: 2385919 - RNA, 19 nt, Artificial Sequence
  Description of Artificial Sequence: Synthetic oligonucleotide
guucucacccacccugggc

SEQ ID NO: 2385920 - RNA, 19 nt, Artificial Sequence
  Description of Artificial Sequence: Synthetic oligonucleotide
cugaacaaacugcccauga

SEQ ID NO: 2385921 - RNA, 19 nt, Artificial Sequence
  Description of Artificial Sequence: Synthetic oligonucleotide
gugucuuccacaaacuugu

SEQ ID NO: 2385922 - RNA, 19 nt, Artificial Sequence
  Description of Artificial Sequence: Synthetic oligonucleotide
ugcaucccucucuuugugu

SEQ ID NO: 2385923 - RNA, 19 nt, Artificial Sequence
  Description of Artificial Sequence: Synthetic oligonucleotide
caccccauaagcacuauua

SEQ ID NO: 2385924 - RNA, 19 nt, Artificial Sequence
  Description of Artificial Sequence: Synthetic oligonucleotide
uagcucggugcagacaucu

SEQ ID NO: 2385925 - RNA, 19 nt, Artificial Sequence
  Description of Artificial Sequence: Synthetic oligonucleotide
cauugaggaggaucuuguc

SEQ ID NO: 2385926 - RNA, 19 nt, Artificial Sequence
  Description of Artificial Sequence: Synthetic oligonucleotide
augcaucccucucuuugug

SEQ ID NO: 2385927 - RNA, 19 nt, Artificial Sequence
  Description of Artificial Sequence: Synthetic oligonucleotide
gggagaguugaguucacca

SEQ ID NO: 2385928 - RNA, 19 nt, Artificial Sequence
  Description of Artificial Sequence: Synthetic oligonucleotide
agacaucuuggguaccaaa

SEQ ID NO: 2385929 - RNA, 19 nt, Artificial Sequence
  Description of Artificial Sequence: Synthetic oligonucleotide
ucccgggcauggauucugg

SEQ ID NO: 2385930 - RNA, 19 nt, Artificial Sequence
  Description of Artificial Sequence: Synthetic oligonucleotide
uccucugcuggcucaguuc

SEQ ID NO: 2385931 - RNA, 19 nt, Artificial Sequence
  Description of Artificial Sequence: Synthetic oligonucleotide
aggcugagcauacuugaua

SEQ ID NO: 2385932 - RNA, 19 nt, Artificial Sequence
  Description of Artificial Sequence: Synthetic oligonucleotide
ugucugcucuccucugcug

SEQ ID NO: 2385933 - RNA, 19 nt, Artificial Sequence
  Description of Artificial Sequence: Synthetic oligonucleotide
ucaugagccccaccagcuc

SEQ ID NO: 2385934 - RNA, 19 nt, Artificial Sequence
  Description of Artificial Sequence: Synthetic oligonucleotide
cugccuugggguuuuauua

SEQ ID NO: 2385935 - RNA, 19 nt, Artificial Sequence
  Description of Artificial Sequence: Synthetic oligonucleotide
uuucugcugcagcuccgga

SEQ ID NO: 2385936 - RNA, 19 nt, Artificial Sequence
  Description of Artificial Sequence: Synthetic oligonucleotide
cuuguucaugagccccacc

SEQ ID NO: 2385937 - RNA, 19 nt, Artificial Sequence
  Description of Artificial Sequence: Synthetic oligonucleotide
ggcaacaggcauugaggag

SEQ ID NO: 2385938 - RNA, 19 nt, Artificial Sequence
  Description of Artificial Sequence: Synthetic oligonucleotide
agccccaccagcuccuccu

SEQ ID NO: 2385939 - RNA, 19 nt, Artificial Sequence
  Description of Artificial Sequence: Synthetic oligonucleotide
uggacaggacugucacccc

SEQ ID NO: 2385940 - RNA, 19 nt, Artificial Sequence
  Description of Artificial Sequence: Synthetic oligonucleotide
gagaguugaguucaccauu

SEQ ID NO: 2385941 - RNA, 19 nt, Artificial Sequence
  Description of Artificial Sequence: Synthetic oligonucleotide
ccuugggguuuuauuagag

SEQ ID NO: 2385942 - RNA, 19 nt, Artificial Sequence
  Description of Artificial Sequence: Synthetic oligonucleotide
gggcauggauucuggacag

SEQ ID NO: 2385943 - RNA, 19 nt, Artificial Sequence
  Description of Artificial Sequence: Synthetic oligonucleotide
uggugucacuucgaaauuu

SEQ ID NO: 2385944 - RNA, 19 nt, Artificial Sequence
  Description of Artificial Sequence: Synthetic oligonucleotide
aggccagccuuccuucuca

SEQ ID NO: 2385945 - RNA, 19 nt, Artificial Sequence
  Description of Artificial Sequence: Synthetic oligonucleotide
auucuggacaggacuguca

SEQ ID NO: 2385946 - RNA, 19 nt, Artificial Sequence
  Description of Artificial Sequence: Synthetic oligonucleotide
cuucgaaauuucugcugca

SEQ ID NO: 2385947 - RNA, 19 nt, Artificial Sequence
  Description of Artificial Sequence: Synthetic oligonucleotide
uaagcacuauuaggccagc

SEQ ID NO: 2385948 - RNA, 19 nt, Artificial Sequence
  Description of Artificial Sequence: Synthetic oligonucleotide
gugauggugucacuucgaa

SEQ ID NO: 2385949 - RNA, 19 nt, Artificial Sequence
  Description of Artificial Sequence: Synthetic oligonucleotide
cuuccuucucaugcauccc

SEQ ID NO: 2385950 - RNA, 19 nt, Artificial Sequence
  Description of Artificial Sequence: Synthetic oligonucleotide
uuagagggaguagcucggu

SEQ ID NO: 2385951 - RNA, 19 nt, Artificial Sequence
  Description of Artificial Sequence: Synthetic oligonucleotide
gcucggugcagacaucuug

SEQ ID NO: 2385952 - RNA, 19 nt, Artificial Sequence
  Description of Artificial Sequence: Synthetic oligonucleotide
ggcauugaggaggaucuug

SEQ ID NO: 2385953 - RNA, 19 nt, Artificial Sequence
  Description of Artificial Sequence: Synthetic oligonucleotide
auucaccacucugccuugg

SEQ ID NO: 2385954 - RNA, 19 nt, Artificial Sequence
  Description of Artificial Sequence: Synthetic oligonucleotide
auggugucacuucgaaauu

SEQ ID NO: 2385955 - RNA, 19 nt, Artificial Sequence
  Description of Artificial Sequence: Synthetic oligonucleotide
agcauacuugauacauuca

SEQ ID NO: 2385956 - RNA, 19 nt, Artificial Sequence
  Description of Artificial Sequence: Synthetic oligonucleotide
gggcaacaggcauugagga

SEQ ID NO: 2385957 - RNA, 19 nt, Artificial Sequence
  Description of Artificial Sequence: Synthetic oligonucleotide
ugcccaugaggccccucug

SEQ ID NO: 2385958 - RNA, 19 nt, Artificial Sequence
  Description of Artificial Sequence: Synthetic oligonucleotide
uucccgggcauggauucug

SEQ ID NO: 2385959 - RNA, 19 nt, Artificial Sequence
  Description of Artificial Sequence: Synthetic oligonucleotide
cuuuugguccugccauguc

SEQ ID NO: 2385960 - RNA, 19 nt, Artificial Sequence
  Description of Artificial Sequence: Synthetic oligonucleotide
accacucugccuugggguu

SEQ ID NO: 2385961 - RNA, 19 nt, Artificial Sequence
  Description of Artificial Sequence: Synthetic oligonucleotide
ucaccccauaagcacuauu

SEQ ID NO: 2385962 - RNA, 19 nt, Artificial Sequence
  Description of Artificial Sequence: Synthetic oligonucleotide
caacaggcauugaggagga

SEQ ID NO: 2385963 - RNA, 19 nt, Artificial Sequence
  Description of Artificial Sequence: Synthetic oligonucleotide
ucaccccaaucuuggucac

SEQ ID NO: 2385964 - RNA, 19 nt, Artificial Sequence
  Description of Artificial Sequence: Synthetic oligonucleotide
cugagcauacuugauacau

SEQ ID NO: 2385965 - RNA, 19 nt, Artificial Sequence
  Description of Artificial Sequence: Synthetic oligonucleotide
ggugucacuucgaaauuuc

SEQ ID NO: 2385966 - RNA, 19 nt, Artificial Sequence
  Description of Artificial Sequence: Synthetic oligonucleotide
uugguccugccaugucugu

SEQ ID NO: 2385967 - RNA, 19 nt, Artificial Sequence
  Description of Artificial Sequence: Synthetic oligonucleotide
gcaucccucucuuuguguc

SEQ ID NO: 2385968 - RNA, 19 nt, Artificial Sequence
  Description of Artificial Sequence: Synthetic oligonucleotide
cugcuggcucaguucccgg

SEQ ID NO: 2385969 - RNA, 19 nt, Artificial Sequence
  Description of Artificial Sequence: Synthetic oligonucleotide
ucucacccacccugggcaa

SEQ ID NO: 2385970 - RNA, 19 nt, Artificial Sequence
  Description of Artificial Sequence: Synthetic oligonucleotide
agcuccggacugcaguuuu

SEQ ID NO: 2385971 - RNA, 19 nt, Artificial Sequence
  Description of Artificial Sequence: Synthetic oligonucleotide
acccacccugggcaacagg

SEQ ID NO: 2385972 - RNA, 19 nt, Artificial Sequence
  Description of Artificial Sequence: Synthetic oligonucleotide
caggacugucaccccaauc

SEQ ID NO: 2385973 - RNA, 19 nt, Artificial Sequence
  Description of Artificial Sequence: Synthetic oligonucleotide
ugcagacaucuuggguacc

SEQ ID NO: 2385974 - RNA, 19 nt, Artificial Sequence
  Description of Artificial Sequence: Synthetic oligonucleotide
caugcaucccucucuuugu

SEQ ID NO: 2385975 - RNA, 19 nt, Artificial Sequence
  Description of Artificial Sequence: Synthetic oligonucleotide
ucuggacucuugguggcuu

SEQ ID NO: 2385976 - RNA, 19 nt, Artificial Sequence
  Description of Artificial Sequence: Synthetic oligonucleotide
gcuggcucaguucccgggc

SEQ ID NO: 2385977 - RNA, 19 nt, Artificial Sequence
  Description of Artificial Sequence: Synthetic oligonucleotide
gcaaaagggccaaguacac

SEQ ID NO: 2385978 - RNA, 19 nt, Artificial Sequence
  Description of Artificial Sequence: Synthetic oligonucleotide
gguggcuuuugguccugcc

SEQ ID NO: 2385979 - RNA, 19 nt, Artificial Sequence
  Description of Artificial Sequence: Synthetic oligonucleotide
ggccccucugcaucugggg

SEQ ID NO: 2385980 - RNA, 19 nt, Artificial Sequence
  Description of Artificial Sequence: Synthetic oligonucleotide
ggcuuuugguccugccaug

SEQ ID NO: 2385981 - RNA, 19 nt, Artificial Sequence
  Description of Artificial Sequence: Synthetic oligonucleotide
gcucaguucccgggcaugg

SEQ ID NO: 2385982 - RNA, 19 nt, Artificial Sequence
  Description of Artificial Sequence: Synthetic oligonucleotide
uggcucaguucccgggcau

SEQ ID NO: 2385983 - RNA, 19 nt, Artificial Sequence
  Description of Artificial Sequence: Synthetic oligonucleotide
cuugguggcuuuugguccu

SEQ ID NO: 2385984 - RNA, 19 nt, Artificial Sequence
  Description of Artificial Sequence: Synthetic oligonucleotide
gacaggacugucaccccaa

SEQ ID NO: 2385985 - RNA, 19 nt, Artificial Sequence
  Description of Artificial Sequence: Synthetic oligonucleotide
acaggacugucaccccaau

SEQ ID NO: 2385986 - RNA, 19 nt, Artificial Sequence
  Description of Artificial Sequence: Synthetic oligonucleotide
caccacucugccuuggggu

SEQ ID NO: 2385987 - RNA, 19 nt, Artificial Sequence
  Description of Artificial Sequence: Synthetic oligonucleotide
ggagaguugaguucaccau

SEQ ID NO: 2385988 - RNA, 19 nt, Artificial Sequence
  Description of Artificial Sequence: Synthetic oligonucleotide
ggaguagcucggugcagac

SEQ ID NO: 2385989 - RNA, 19 nt, Artificial Sequence
  Description of Artificial Sequence: Synthetic oligonucleotide
ccgggcauggauucuggac

SEQ ID NO: 2385990 - RNA, 19 nt, Artificial Sequence
  Description of Artificial Sequence: Synthetic oligonucleotide
ggacaggacugucacccca

SEQ ID NO: 2385991 - RNA, 19 nt, Artificial Sequence
  Description of Artificial Sequence: Synthetic oligonucleotide
gagccccaccagcuccucc

SEQ ID NO: 2385992 - RNA, 19 nt, Artificial Sequence
  Description of Artificial Sequence: Synthetic oligonucleotide
gaguagcucggugcagaca

SEQ ID NO: 2385993 - RNA, 19 nt, Artificial Sequence
  Description of Artificial Sequence: Synthetic oligonucleotide
gcugagcauacuugauaca

SEQ ID NO: 2385994 - RNA, 19 nt, Artificial Sequence
  Description of Artificial Sequence: Synthetic oligonucleotide
caaucuuggucaccccaua

SEQ ID NO: 2385995 - RNA, 19 nt, Artificial Sequence
  Description of Artificial Sequence: Synthetic oligonucleotide
gcccaugaggccccucugc

SEQ ID NO: 2385996 - RNA, 19 nt, Artificial Sequence
  Description of Artificial Sequence: Synthetic oligonucleotide
gccuugggguuuuauuaga

SEQ ID NO: 2385997 - RNA, 19 nt, Artificial Sequence
  Description of Artificial Sequence: Synthetic oligonucleotide
cgaaauuucugcugcagcu

SEQ ID NO: 2385998 - RNA, 19 nt, Artificial Sequence
  Description of Artificial Sequence: Synthetic oligonucleotide
aggccccucugcaucuggg

SEQ ID NO: 2385999 - RNA, 19 nt, Artificial Sequence
  Description of Artificial Sequence: Synthetic oligonucleotide
cugcugcagcuccggacug

SEQ ID NO: 2386000 - RNA, 19 nt, Artificial Sequence
  Description of Artificial Sequence: Synthetic oligonucleotide
cuggcucaguucccgggca

SEQ ID NO: 2386001 - RNA, 19 nt, Artificial Sequence
  Description of Artificial Sequence: Synthetic oligonucleotide
ccugccaugucuguucuca

SEQ ID NO: 2386002 - RNA, 19 nt, Artificial Sequence
  Description of Artificial Sequence: Synthetic oligonucleotide
gcacuauuaggccagccuu

SEQ ID NO: 2386003 - RNA, 19 nt, Artificial Sequence
  Description of Artificial Sequence: Synthetic oligonucleotide
ugaggccccucugcaucug

SEQ ID NO: 2386004 - RNA, 19 nt, Artificial Sequence
  Description of Artificial Sequence: Synthetic oligonucleotide
augagccccaccagcuccu

SEQ ID NO: 2386005 - RNA, 19 nt, Artificial Sequence
  Description of Artificial Sequence: Synthetic oligonucleotide
ugguccugccaugucuguu

SEQ ID NO: 2386006 - RNA, 19 nt, Artificial Sequence
  Description of Artificial Sequence: Synthetic oligonucleotide
cuuccacaaacuuguucau

SEQ ID NO: 2386007 - RNA, 19 nt, Artificial Sequence
  Description of Artificial Sequence: Synthetic oligonucleotide
ggcauggauucuggacagg

SEQ ID NO: 2386008 - RNA, 19 nt, Artificial Sequence
  Description of Artificial Sequence: Synthetic oligonucleotide
uggacucuugguggcuuuu

SEQ ID NO: 2386009 - RNA, 19 nt, Artificial Sequence
  Description of Artificial Sequence: Synthetic oligonucleotide
caccccaaucuuggucacc

SEQ ID NO: 2386010 - RNA, 19 nt, Artificial Sequence
  Description of Artificial Sequence: Synthetic oligonucleotide
cgggcauggauucuggaca

SEQ ID NO: 2386011 - RNA, 19 nt, Artificial Sequence
  Description of Artificial Sequence: Synthetic oligonucleotide
ggacucuugguggcuuuug

SEQ ID NO: 2386012 - RNA, 19 nt, Artificial Sequence
  Description of Artificial Sequence: Synthetic oligonucleotide
uccugccaugucuguucuc

SEQ ID NO: 2386013 - RNA, 19 nt, Artificial Sequence
  Description of Artificial Sequence: Synthetic oligonucleotide
ggggagaguugaguucacc

SEQ ID NO: 2386014 - RNA, 19 nt, Artificial Sequence
  Description of Artificial Sequence: Synthetic oligonucleotide
cugcagcuccggacugcag

SEQ ID NO: 2386015 - RNA, 19 nt, Artificial Sequence
  Description of Artificial Sequence: Synthetic oligonucleotide
gugucacuucgaaauuucu

SEQ ID NO: 2386016 - RNA, 19 nt, Artificial Sequence
  Description of Artificial Sequence: Synthetic oligonucleotide
gaggaggaucuugucugcu

SEQ ID NO: 2386017 - RNA, 19 nt, Artificial Sequence
  Description of Artificial Sequence: Synthetic oligonucleotide
ucuccucugcuggcucagu

SEQ ID NO: 2386018 - RNA, 19 nt, Artificial Sequence
  Description of Artificial Sequence: Synthetic oligonucleotide
gcauugaggaggaucuugu

SEQ ID NO: 2386019 - RNA, 19 nt, Artificial Sequence
  Description of Artificial Sequence: Synthetic oligonucleotide
cccaccagcuccuccucug

SEQ ID NO: 2386020 - RNA, 19 nt, Artificial Sequence
  Description of Artificial Sequence: Synthetic oligonucleotide
cucacccacccugggcaac

SEQ ID NO: 2386021 - RNA, 19 nt, Artificial Sequence
  Description of Artificial Sequence: Synthetic oligonucleotide
aacaggcauugaggaggau

SEQ ID NO: 2386022 - RNA, 19 nt, Artificial Sequence
  Description of Artificial Sequence: Synthetic oligonucleotide
acugcccaugaggccccuc

SEQ ID NO: 2386023 - RNA, 19 nt, Artificial Sequence
  Description of Artificial Sequence: Synthetic oligonucleotide
guccugccaugucuguucu

SEQ ID NO: 2386024 - RNA, 19 nt, Artificial Sequence
  Description of Artificial Sequence: Synthetic oligonucleotide
cccucucuuugugucuucc

SEQ ID NO: 2386025 - RNA, 19 nt, Artificial Sequence
  Description of Artificial Sequence: Synthetic oligonucleotide
gaggcugagcauacuugau

SEQ ID NO: 2386026 - RNA, 19 nt, Artificial Sequence
  Description of Artificial Sequence: Synthetic oligonucleotide
ggaucuugucugcucuccu

SEQ ID NO: 2386027 - RNA, 19 nt, Artificial Sequence
  Description of Artificial Sequence: Synthetic oligonucleotide
cucugugauggugucacuu

SEQ ID NO: 2386028 - RNA, 19 nt, Artificial Sequence
  Description of Artificial Sequence: Synthetic oligonucleotide
cugcccaugaggccccucu

SEQ ID NO: 2386029 - RNA, 19 nt, Artificial Sequence
  Description of Artificial Sequence: Synthetic oligonucleotide
ggcucaguucccgggcaug

SEQ ID NO: 2386030 - RNA, 19 nt, Artificial Sequence
  Description of Artificial Sequence: Synthetic oligonucleotide
guucaccauuguucuacuu

SEQ ID NO: 2386031 - RNA, 19 nt, Artificial Sequence
  Description of Artificial Sequence: Synthetic oligonucleotide
ggcccugaggcugagcaua

SEQ ID NO: 2386032 - RNA, 19 nt, Artificial Sequence
  Description of Artificial Sequence: Synthetic oligonucleotide
gccagccuuccuucucaug

SEQ ID NO: 2386033 - RNA, 19 nt, Artificial Sequence
  Description of Artificial Sequence: Synthetic oligonucleotide
cucaguucccgggcaugga

SEQ ID NO: 2386034 - RNA, 19 nt, Artificial Sequence
  Description of Artificial Sequence: Synthetic oligonucleotide
cagacaucuuggguaccaa

SEQ ID NO: 2386035 - RNA, 19 nt, Artificial Sequence
  Description of Artificial Sequence: Synthetic oligonucleotide
guagcucggugcagacauc

SEQ ID NO: 2386036 - RNA, 19 nt, Artificial Sequence
  Description of Artificial Sequence: Synthetic oligonucleotide
cccaugaggccccucugca

SEQ ID NO: 2386037 - RNA, 19 nt, Artificial Sequence
  Description of Artificial Sequence: Synthetic oligonucleotide
ccuccucugugaugguguc

SEQ ID NO: 2386038 - RNA, 19 nt, Artificial Sequence
  Description of Artificial Sequence: Synthetic oligonucleotide
cuccucugugaugguguca

SEQ ID NO: 2386039 - RNA, 19 nt, Artificial Sequence
  Description of Artificial Sequence: Synthetic oligonucleotide
cacccugggcaacaggcau

SEQ ID NO: 2386040 - RNA, 19 nt, Artificial Sequence
  Description of Artificial Sequence: Synthetic oligonucleotide
cugcuccuucuucuggacu

SEQ ID NO: 2386041 - RNA, 19 nt, Artificial Sequence
  Description of Artificial Sequence: Synthetic oligonucleotide
ugagccccaccagcuccuc

SEQ ID NO: 2386042 - RNA, 19 nt, Artificial Sequence
  Description of Artificial Sequence: Synthetic oligonucleotide
ccucucuuugugucuucca

SEQ ID NO: 2386043 - RNA, 19 nt, Artificial Sequence
  Description of Artificial Sequence: Synthetic oligonucleotide
ccaugucuguucucaccca

SEQ ID NO: 2386044 - RNA, 19 nt, Artificial Sequence
  Description of Artificial Sequence: Synthetic oligonucleotide
aggcauugaggaggaucuu

SEQ ID NO: 2386045 - RNA, 19 nt, Artificial Sequence
  Description of Artificial Sequence: Synthetic oligonucleotide
acccugggcaacaggcauu

SEQ ID NO: 2386046 - RNA, 19 nt, Artificial Sequence
  Description of Artificial Sequence: Synthetic oligonucleotide
ccccaaucuuggucacccc

SEQ ID NO: 2386047 - RNA, 19 nt, Artificial Sequence
  Description of Artificial Sequence: Synthetic oligonucleotide
gcuuuugguccugccaugu

SEQ ID NO: 2386048 - RNA, 19 nt, Artificial Sequence
  Description of Artificial Sequence: Synthetic oligonucleotide
gcugcagcuccggacugca

SEQ ID NO: 2386049 - RNA, 19 nt, Artificial Sequence
  Description of Artificial Sequence: Synthetic oligonucleotide
ggucaccccauaagcacua

SEQ ID NO: 2386050 - RNA, 19 nt, Artificial Sequence
  Description of Artificial Sequence: Synthetic oligonucleotide
caguucccgggcauggauu

SEQ ID NO: 2386051 - RNA, 19 nt, Artificial Sequence
  Description of Artificial Sequence: Synthetic oligonucleotide
cugucaccccaaucuuggu

SEQ ID NO: 2386052 - RNA, 19 nt, Artificial Sequence
  Description of Artificial Sequence: Synthetic oligonucleotide
gcaggacgacauggcuggg

SEQ ID NO: 2386053 - RNA, 19 nt, Artificial Sequence
  Description of Artificial Sequence: Synthetic oligonucleotide
ggguuuuauuagagggagu

SEQ ID NO: 2386054 - RNA, 19 nt, Artificial Sequence
  Description of Artificial Sequence: Synthetic oligonucleotide
agcucggugcagacaucuu

SEQ ID NO: 2386055 - RNA, 19 nt, Artificial Sequence
  Description of Artificial Sequence: Synthetic oligonucleotide
caggacgacauggcugggu

SEQ ID NO: 2386056 - RNA, 19 nt, Artificial Sequence
  Description of Artificial Sequence: Synthetic oligonucleotide
gcccugaggcugagcauac

SEQ ID NO: 2386057 - RNA, 19 nt, Artificial Sequence
  Description of Artificial Sequence: Synthetic oligonucleotide
ccugaggcugagcauacuu

SEQ ID NO: 2386058 - RNA, 19 nt, Artificial Sequence
  Description of Artificial Sequence: Synthetic oligonucleotide
ccuucucaugcaucccucu

SEQ ID NO: 2386059 - RNA, 19 nt, Artificial Sequence
  Description of Artificial Sequence: Synthetic oligonucleotide
cuccucugcuggcucaguu

SEQ ID NO: 2386060 - RNA, 19 nt, Artificial Sequence
  Description of Artificial Sequence: Synthetic oligonucleotide
cucaugcaucccucucuuu

SEQ ID NO: 2386061 - RNA, 19 nt, Artificial Sequence
  Description of Artificial Sequence: Synthetic oligonucleotide
cuggacucuugguggcuuu

SEQ ID NO: 2386062 - RNA, 19 nt, Artificial Sequence
  Description of Artificial Sequence: Synthetic oligonucleotide
guucccgggcauggauucu

SEQ ID NO: 2386063 - RNA, 19 nt, Artificial Sequence
  Description of Artificial Sequence: Synthetic oligonucleotide
gccccaccagcuccuccuc

SEQ ID NO: 2386064 - RNA, 19 nt, Artificial Sequence
  Description of Artificial Sequence: Synthetic oligonucleotide
cccgggcauggauucugga

SEQ ID NO: 2386065 - RNA, 19 nt, Artificial Sequence
  Description of Artificial Sequence: Synthetic oligonucleotide
gucaccccauaagcacuau

SEQ ID NO: 2386066 - RNA, 19 nt, Artificial Sequence
  Description of Artificial Sequence: Synthetic oligonucleotide
cucugccuugggguuuuau

SEQ ID NO: 2386067 - RNA, 19 nt, Artificial Sequence
  Description of Artificial Sequence: Synthetic oligonucleotide
ccaugaggccccucugcau

SEQ ID NO: 2386068 - RNA, 19 nt, Artificial Sequence
  Description of Artificial Sequence: Synthetic oligonucleotide
acucugccuugggguuuua

SEQ ID NO: 2386069 - RNA, 19 nt, Artificial Sequence
  Description of Artificial Sequence: Synthetic oligonucleotide
cggugcagacaucuugggu

SEQ ID NO: 2386070 - RNA, 19 nt, Artificial Sequence
  Description of Artificial Sequence: Synthetic oligonucleotide
ggccagccuuccuucucau

SEQ ID NO: 2386071 - RNA, 19 nt, Artificial Sequence
  Description of Artificial Sequence: Synthetic oligonucleotide
gggcccugaggcugagcau

SEQ ID NO: 2386072 - RNA, 19 nt, Artificial Sequence
  Description of Artificial Sequence: Synthetic oligonucleotide
ccucugugauggugucacu

SEQ ID NO: 2386073 - RNA, 19 nt, Artificial Sequence
  Description of Artificial Sequence: Synthetic oligonucleotide
cagcuccggacugcaguuu

SEQ ID NO: 2386074 - RNA, 19 nt, Artificial Sequence
  Description of Artificial Sequence: Synthetic oligonucleotide
ccugggcaacaggcauuga

SEQ ID NO: 2386075 - RNA, 19 nt, Artificial Sequence
  Description of Artificial Sequence: Synthetic oligonucleotide
ccccaccagcuccuccucu

SEQ ID NO: 2386076 - RNA, 19 nt, Artificial Sequence
  Description of Artificial Sequence: Synthetic oligonucleotide
ccacucugccuugggguuu

SEQ ID NO: 2386077 - RNA, 19 nt, Artificial Sequence
  Description of Artificial Sequence: Synthetic oligonucleotide
cccugaggcugagcauacu

SEQ ID NO: 2386078 - RNA, 19 nt, Artificial Sequence
  Description of Artificial Sequence: Synthetic oligonucleotide
aauuagacucauuucauca

SEQ ID NO: 2386079 - RNA, 19 nt, Artificial Sequence
  Description of Artificial Sequence: Synthetic oligonucleotide
auaacgugaacguaggaac

SEQ ID NO: 2386080 - RNA, 19 nt, Artificial Sequence
  Description of Artificial Sequence: Synthetic oligonucleotide
aaagacugcaguuccuugc

SEQ ID NO: 2386081 - RNA, 19 nt, Artificial Sequence
  Description of Artificial Sequence: Synthetic oligonucleotide
uuuguauggagcagcaugg

SEQ ID NO: 2386082 - RNA, 19 nt, Artificial Sequence
  Description of Artificial Sequence: Synthetic oligonucleotide
uccacauugauccaguugu

SEQ ID NO: 2386083 - RNA, 19 nt, Artificial Sequence
  Description of Artificial Sequence: Synthetic oligonucleotide
uaaauaacgugaacguagg

SEQ ID NO: 2386084 - RNA, 19 nt, Artificial Sequence
  Description of Artificial Sequence: Synthetic oligonucleotide
acaacugcgcccuucaucg

SEQ ID NO: 2386085 - RNA, 19 nt, Artificial Sequence
  Description of Artificial Sequence: Synthetic oligonucleotide
uuguuagcgauccacuugg

SEQ ID NO: 2386086 - RNA, 19 nt, Artificial Sequence
  Description of Artificial Sequence: Synthetic oligonucleotide
uuagcgauccacuuggugc

SEQ ID NO: 2386087 - RNA, 19 nt, Artificial Sequence
  Description of Artificial Sequence: Synthetic oligonucleotide
uguaccaaaagacugcagu

SEQ ID NO: 2386088 - RNA, 19 nt, Artificial Sequence
  Description of Artificial Sequence: Synthetic oligonucleotide
aauaaaacagcaccgucau

SEQ ID NO: 2386089 - RNA, 19 nt, Artificial Sequence
  Description of Artificial Sequence: Synthetic oligonucleotide
auuuguauggagcagcaug

SEQ ID NO: 2386090 - RNA, 19 nt, Artificial Sequence
  Description of Artificial Sequence: Synthetic oligonucleotide
guaaauaacgugaacguag

SEQ ID NO: 2386091 - RNA, 19 nt, Artificial Sequence
  Description of Artificial Sequence: Synthetic oligonucleotide
ugcaguacaacagaggacc

SEQ ID NO: 2386092 - RNA, 19 nt, Artificial Sequence
  Description of Artificial Sequence: Synthetic oligonucleotide
uuagucugcaguacaacag

SEQ ID NO: 2386093 - RNA, 19 nt, Artificial Sequence
  Description of Artificial Sequence: Synthetic oligonucleotide
acguuguucaaauaaaaca

SEQ ID NO: 2386094 - RNA, 19 nt, Artificial Sequence
  Description of Artificial Sequence: Synthetic oligonucleotide
ucguuuauuuguauggagc

SEQ ID NO: 2386095 - RNA, 19 nt, Artificial Sequence
  Description of Artificial Sequence: Synthetic oligonucleotide
ugaacguaggaacaacugc

SEQ ID NO: 2386096 - RNA, 19 nt, Artificial Sequence
  Description of Artificial Sequence: Synthetic oligonucleotide
uaguuguaccaaaagacug

SEQ ID NO: 2386097 - RNA, 19 nt, Artificial Sequence
  Description of Artificial Sequence: Synthetic oligonucleotide
ucauguaacgacaggaggu

SEQ ID NO: 2386098 - RNA, 19 nt, Artificial Sequence
  Description of Artificial Sequence: Synthetic oligonucleotide
aaauaaaacagcaccguca

SEQ ID NO: 2386099 - RNA, 19 nt, Artificial Sequence
  Description of Artificial Sequence: Synthetic oligonucleotide
aguacaacagaggaccugc

SEQ ID NO: 2386100 - RNA, 19 nt, Artificial Sequence
  Description of Artificial Sequence: Synthetic oligonucleotide
gaacguaggaacaacugcg

SEQ ID NO: 2386101 - RNA, 19 nt, Artificial Sequence
  Description of Artificial Sequence: Synthetic oligonucleotide
acaacagaggaccugcagg

SEQ ID NO: 2386102 - RNA, 19 nt, Artificial Sequence
  Description of Artificial Sequence: Synthetic oligonucleotide
aacagcaccgucauguaac

SEQ ID NO: 2386103 - RNA, 19 nt, Artificial Sequence
  Description of Artificial Sequence: Synthetic oligonucleotide
aaaagguccagcuggcuga

SEQ ID NO: 2386104 - RNA, 19 nt, Artificial Sequence
  Description of Artificial Sequence: Synthetic oligonucleotide
uuuagucugcaguacaaca

SEQ ID NO: 2386105 - RNA, 19 nt, Artificial Sequence
  Description of Artificial Sequence: Synthetic oligonucleotide
uguucaaauaaaacagcac

SEQ ID NO: 2386106 - RNA, 19 nt, Artificial Sequence
  Description of Artificial Sequence: Synthetic oligonucleotide
cugucguuuauuuguaugg

SEQ ID NO: 2386107 - RNA, 19 nt, Artificial Sequence
  Description of Artificial Sequence: Synthetic oligonucleotide
uacaccaguaaauaacgug

SEQ ID NO: 2386108 - RNA, 19 nt, Artificial Sequence
  Description of Artificial Sequence: Synthetic oligonucleotide
acauugauccaguuguuag

SEQ ID NO: 2386109 - RNA, 19 nt, Artificial Sequence
  Description of Artificial Sequence: Synthetic oligonucleotide
agcaccgucauguaacgac

SEQ ID NO: 2386110 - RNA, 19 nt, Artificial Sequence
  Description of Artificial Sequence: Synthetic oligonucleotide
aauaacgugaacguaggaa

SEQ ID NO: 2386111 - RNA, 19 nt, Artificial Sequence
  Description of Artificial Sequence: Synthetic oligonucleotide
uguauggagcagcaugggg

SEQ ID NO: 2386112 - RNA, 19 nt, Artificial Sequence
  Description of Artificial Sequence: Synthetic oligonucleotide
uagacucauuucaucauag

SEQ ID NO: 2386113 - RNA, 19 nt, Artificial Sequence
  Description of Artificial Sequence: Synthetic oligonucleotide
aacaaagcuugccgugccc

SEQ ID NO: 2386114 - RNA, 19 nt, Artificial Sequence
  Description of Artificial Sequence: Synthetic oligonucleotide
auugauccaguuguuagcg

SEQ ID NO: 2386115 - RNA, 19 nt, Artificial Sequence
  Description of Artificial Sequence: Synthetic oligonucleotide
cugaauuagacucauuuca

SEQ ID NO: 2386116 - RNA, 19 nt, Artificial Sequence
  Description of Artificial Sequence: Synthetic oligonucleotide
uccugaauuagacucauuu

SEQ ID NO: 2386117 - RNA, 19 nt, Artificial Sequence
  Description of Artificial Sequence: Synthetic oligonucleotide
aaagggcgcagacucauug

SEQ ID NO: 2386118 - RNA, 19 nt, Artificial Sequence
  Description of Artificial Sequence: Synthetic oligonucleotide
cuguacaccaguaaauaac

SEQ ID NO: 2386119 - RNA, 19 nt, Artificial Sequence
  Description of Artificial Sequence: Synthetic oligonucleotide
ucgucacucaggaagcccg

SEQ ID NO: 2386120 - RNA, 19 nt, Artificial Sequence
  Description of Artificial Sequence: Synthetic oligonucleotide
aacccuuucaucugugcca

SEQ ID NO: 2386121 - RNA, 19 nt, Artificial Sequence
  Description of Artificial Sequence: Synthetic oligonucleotide
aacguaggaacaacugcgc

SEQ ID NO: 2386122 - RNA, 19 nt, Artificial Sequence
  Description of Artificial Sequence: Synthetic oligonucleotide
gucauguaacgacaggagg

SEQ ID NO: 2386123 - RNA, 19 nt, Artificial Sequence
  Description of Artificial Sequence: Synthetic oligonucleotide
caacagaggaccugcaggg

SEQ ID NO: 2386124 - RNA, 19 nt, Artificial Sequence
  Description of Artificial Sequence: Synthetic oligonucleotide
caggaggucucaaagggcg

SEQ ID NO: 2386125 - RNA, 19 nt, Artificial Sequence
  Description of Artificial Sequence: Synthetic oligonucleotide
guagucguccacuucaccc

SEQ ID NO: 2386126 - RNA, 19 nt, Artificial Sequence
  Description of Artificial Sequence: Synthetic oligonucleotide
agacucauugaccucucgg

SEQ ID NO: 2386127 - RNA, 19 nt, Artificial Sequence
  Description of Artificial Sequence: Synthetic oligonucleotide
uaacccuuucaucugugcc

SEQ ID NO: 2386128 - RNA, 19 nt, Artificial Sequence
  Description of Artificial Sequence: Synthetic oligonucleotide
aacugcgcccuucaucgcg

SEQ ID NO: 2386129 - RNA, 19 nt, Artificial Sequence
  Description of Artificial Sequence: Synthetic oligonucleotide
acaucauccugaauuagac

SEQ ID NO: 2386130 - RNA, 19 nt, Artificial Sequence
  Description of Artificial Sequence: Synthetic oligonucleotide
aaggggcagggcaagaucg

SEQ ID NO: 2386131 - RNA, 19 nt, Artificial Sequence
  Description of Artificial Sequence: Synthetic oligonucleotide
aucggccagaucuuuaguc

SEQ ID NO: 2386132 - RNA, 19 nt, Artificial Sequence
  Description of Artificial Sequence: Synthetic oligonucleotide
agguaguuguaccaaaaga

SEQ ID NO: 2386133 - RNA, 19 nt, Artificial Sequence
  Description of Artificial Sequence: Synthetic oligonucleotide
ccaguaaauaacgugaacg

SEQ ID NO: 2386134 - RNA, 19 nt, Artificial Sequence
  Description of Artificial Sequence: Synthetic oligonucleotide
uauggagcagcauggggcc

SEQ ID NO: 2386135 - RNA, 19 nt, Artificial Sequence
  Description of Artificial Sequence: Synthetic oligonucleotide
ucgagugucucggagauca

SEQ ID NO: 2386136 - RNA, 19 nt, Artificial Sequence
  Description of Artificial Sequence: Synthetic oligonucleotide
cauugauccaguuguuagc

SEQ ID NO: 2386137 - RNA, 19 nt, Artificial Sequence
  Description of Artificial Sequence: Synthetic oligonucleotide
uuggccucgcgucagagcu

SEQ ID NO: 2386138 - RNA, 19 nt, Artificial Sequence
  Description of Artificial Sequence: Synthetic oligonucleotide
accaguaaauaacgugaac

SEQ ID NO: 2386139 - RNA, 19 nt, Artificial Sequence
  Description of Artificial Sequence: Synthetic oligonucleotide
acguaggaacaacugcgcc

SEQ ID NO: 2386140 - RNA, 19 nt, Artificial Sequence
  Description of Artificial Sequence: Synthetic oligonucleotide
acgacaggaggucucaaag

SEQ ID NO: 2386141 - RNA, 19 nt, Artificial Sequence
  Description of Artificial Sequence: Synthetic oligonucleotide
uuugacgaugggcagugac

SEQ ID NO: 2386142 - RNA, 19 nt, Artificial Sequence
  Description of Artificial Sequence: Synthetic oligonucleotide
gguaguuguaccaaaagac

SEQ ID NO: 2386143 - RNA, 19 nt, Artificial Sequence
  Description of Artificial Sequence: Synthetic oligonucleotide
ccuguugucugcuacaggg

SEQ ID NO: 2386144 - RNA, 19 nt, Artificial Sequence
  Description of Artificial Sequence: Synthetic oligonucleotide
aagacugcaguuccuugcu

SEQ ID NO: 2386145 - RNA, 19 nt, Artificial Sequence
  Description of Artificial Sequence: Synthetic oligonucleotide
gaauuagacucauuucauc

SEQ ID NO: 2386146 - RNA, 19 nt, Artificial Sequence
  Description of Artificial Sequence: Synthetic oligonucleotide
ugacguuguucaaauaaaa

SEQ ID NO: 2386147 - RNA, 19 nt, Artificial Sequence
  Description of Artificial Sequence: Synthetic oligonucleotide
guuguucaaauaaaacagc

SEQ ID NO: 2386148 - RNA, 19 nt, Artificial Sequence
  Description of Artificial Sequence: Synthetic oligonucleotide
uagucugcaguacaacaga

SEQ ID NO: 2386149 - RNA, 19 nt, Artificial Sequence
  Description of Artificial Sequence: Synthetic oligonucleotide
ugguccaacagcuggaaaa

SEQ ID NO: 2386150 - RNA, 19 nt, Artificial Sequence
  Description of Artificial Sequence: Synthetic oligonucleotide
caggcgaccaucaugguuc

SEQ ID NO: 2386151 - RNA, 19 nt, Artificial Sequence
  Description of Artificial Sequence: Synthetic oligonucleotide
ucauagguccuguugucug

SEQ ID NO: 2386152 - RNA, 19 nt, Artificial Sequence
  Description of Artificial Sequence: Synthetic oligonucleotide
gagaucaacaucauccuga

SEQ ID NO: 2386153 - RNA, 19 nt, Artificial Sequence
  Description of Artificial Sequence: Synthetic oligonucleotide
acucauugaccucucggag

SEQ ID NO: 2386154 - RNA, 19 nt, Artificial Sequence
  Description of Artificial Sequence: Synthetic oligonucleotide
uuagacucauuucaucaua

SEQ ID NO: 2386155 - RNA, 19 nt, Artificial Sequence
  Description of Artificial Sequence: Synthetic oligonucleotide
agaucuuuagucugcagua

SEQ ID NO: 2386156 - RNA, 19 nt, Artificial Sequence
  Description of Artificial Sequence: Synthetic oligonucleotide
aguagucguccacuucacc

SEQ ID NO: 2386157 - RNA, 19 nt, Artificial Sequence
  Description of Artificial Sequence: Synthetic oligonucleotide
guauggagcagcauggggc

SEQ ID NO: 2386158 - RNA, 19 nt, Artificial Sequence
  Description of Artificial Sequence: Synthetic oligonucleotide
ucuggcuccgcuguaaccc

SEQ ID NO: 2386159 - RNA, 19 nt, Artificial Sequence
  Description of Artificial Sequence: Synthetic oligonucleotide
cuguccaaggcccauucgg

SEQ ID NO: 2386160 - RNA, 19 nt, Artificial Sequence
  Description of Artificial Sequence: Synthetic oligonucleotide
agacucauuucaucauagg

SEQ ID NO: 2386161 - RNA, 19 nt, Artificial Sequence
  Description of Artificial Sequence: Synthetic oligonucleotide
aaauaacgugaacguagga

SEQ ID NO: 2386162 - RNA, 19 nt, Artificial Sequence
  Description of Artificial Sequence: Synthetic oligonucleotide
acaccaguaaauaacguga

SEQ ID NO: 2386163 - RNA, 19 nt, Artificial Sequence
  Description of Artificial Sequence: Synthetic oligonucleotide
gucguuuauuuguauggag

SEQ ID NO: 2386164 - RNA, 19 nt, Artificial Sequence
  Description of Artificial Sequence: Synthetic oligonucleotide
agggucuuugacgaugggc

SEQ ID NO: 2386165 - RNA, 19 nt, Artificial Sequence
  Description of Artificial Sequence: Synthetic oligonucleotide
agaucggccagaucuuuag

SEQ ID NO: 2386166 - RNA, 19 nt, Artificial Sequence
  Description of Artificial Sequence: Synthetic oligonucleotide
aaagcuugccgugcccggc

SEQ ID NO: 2386167 - RNA, 19 nt, Artificial Sequence
  Description of Artificial Sequence: Synthetic oligonucleotide
gcuggaacaaagcuugccg

SEQ ID NO: 2386168 - RNA, 19 nt, Artificial Sequence
  Description of Artificial Sequence: Synthetic oligonucleotide
auuagacucauuucaucau

SEQ ID NO: 2386169 - RNA, 19 nt, Artificial Sequence
  Description of Artificial Sequence: Synthetic oligonucleotide
uugacgaugggcagugacu

SEQ ID NO: 2386170 - RNA, 19 nt, Artificial Sequence
  Description of Artificial Sequence: Synthetic oligonucleotide
gacguuguucaaauaaaac

SEQ ID NO: 2386171 - RNA, 19 nt, Artificial Sequence
  Description of Artificial Sequence: Synthetic oligonucleotide
uagcgauccacuuggugcc

SEQ ID NO: 2386172 - RNA, 19 nt, Artificial Sequence
  Description of Artificial Sequence: Synthetic oligonucleotide
cuugacacgaagguucccc

SEQ ID NO: 2386173 - RNA, 19 nt, Artificial Sequence
  Description of Artificial Sequence: Synthetic oligonucleotide
cuugcuggggcuugacacg

SEQ ID NO: 2386174 - RNA, 19 nt, Artificial Sequence
  Description of Artificial Sequence: Synthetic oligonucleotide
agggcgcagacucauugac

SEQ ID NO: 2386175 - RNA, 19 nt, Artificial Sequence
  Description of Artificial Sequence: Synthetic oligonucleotide
gacacgaagguuccccuug

SEQ ID NO: 2386176 - RNA, 19 nt, Artificial Sequence
  Description of Artificial Sequence: Synthetic oligonucleotide
uguaacgacaggaggucuc

SEQ ID NO: 2386177 - RNA, 19 nt, Artificial Sequence
  Description of Artificial Sequence: Synthetic oligonucleotide
aucuuuagucugcaguaca

SEQ ID NO: 2386178 - RNA, 19 nt, Artificial Sequence
  Description of Artificial Sequence: Synthetic oligonucleotide
auacucuucagugggcagg

SEQ ID NO: 2386179 - RNA, 19 nt, Artificial Sequence
  Description of Artificial Sequence: Synthetic oligonucleotide
acugcaguuccuugcuggg

SEQ ID NO: 2386180 - RNA, 19 nt, Artificial Sequence
  Description of Artificial Sequence: Synthetic oligonucleotide
gucggagccgccuucacgc

SEQ ID NO: 2386181 - RNA, 19 nt, Artificial Sequence
  Description of Artificial Sequence: Synthetic oligonucleotide
ucuuugacgaugggcagug

SEQ ID NO: 2386182 - RNA, 19 nt, Artificial Sequence
  Description of Artificial Sequence: Synthetic oligonucleotide
uggggcuugacacgaaggu

SEQ ID NO: 2386183 - RNA, 19 nt, Artificial Sequence
  Description of Artificial Sequence: Synthetic oligonucleotide
agugggcaggaucuggcuc

SEQ ID NO: 2386184 - RNA, 19 nt, Artificial Sequence
  Description of Artificial Sequence: Synthetic oligonucleotide
uccucgucacucaggaagc

SEQ ID NO: 2386185 - RNA, 19 nt, Artificial Sequence
  Description of Artificial Sequence: Synthetic oligonucleotide
uguaacccuuucaucugug

SEQ ID NO: 2386186 - RNA, 19 nt, Artificial Sequence
  Description of Artificial Sequence: Synthetic oligonucleotide
acagcaccgucauguaacg

SEQ ID NO: 2386187 - RNA, 19 nt, Artificial Sequence
  Description of Artificial Sequence: Synthetic oligonucleotide
ucggccagaucuuuagucu

SEQ ID NO: 2386188 - RNA, 19 nt, Artificial Sequence
  Description of Artificial Sequence: Synthetic oligonucleotide
gaugaugaggcgacacucc

SEQ ID NO: 2386189 - RNA, 19 nt, Artificial Sequence
  Description of Artificial Sequence: Synthetic oligonucleotide
uagucguccacuucaccca

SEQ ID NO: 2386190 - RNA, 19 nt, Artificial Sequence
  Description of Artificial Sequence: Synthetic oligonucleotide
agguccuguugucugcuac

SEQ ID NO: 2386191 - RNA, 19 nt, Artificial Sequence
  Description of Artificial Sequence: Synthetic oligonucleotide
ggcaagaucggccagaucu

SEQ ID NO: 2386192 - RNA, 19 nt, Artificial Sequence
  Description of Artificial Sequence: Synthetic oligonucleotide
acaaagcuugccgugcccg

SEQ ID NO: 2386193 - RNA, 19 nt, Artificial Sequence
  Description of Artificial Sequence: Synthetic oligonucleotide
ugucguuuauuuguaugga

SEQ ID NO: 2386194 - RNA, 19 nt, Artificial Sequence
  Description of Artificial Sequence: Synthetic oligonucleotide
aaacagcaccgucauguaa

SEQ ID NO: 2386195 - RNA, 19 nt, Artificial Sequence
  Description of Artificial Sequence: Synthetic oligonucleotide
uuguaccaaaagacugcag

SEQ ID NO: 2386196 - RNA, 19 nt, Artificial Sequence
  Description of Artificial Sequence: Synthetic oligonucleotide
cagguaguuguaccaaaag

SEQ ID NO: 2386197 - RNA, 19 nt, Artificial Sequence
  Description of Artificial Sequence: Synthetic oligonucleotide
cauagguccuguugucugc

SEQ ID NO: 2386198 - RNA, 19 nt, Artificial Sequence
  Description of Artificial Sequence: Synthetic oligonucleotide
ugcuacagggaagacaguc

SEQ ID NO: 2386199 - RNA, 19 nt, Artificial Sequence
  Description of Artificial Sequence: Synthetic oligonucleotide
ggugacguuguucaaauaa

SEQ ID NO: 2386200 - RNA, 19 nt, Artificial Sequence
  Description of Artificial Sequence: Synthetic oligonucleotide
cuacagggaagacagucuc

SEQ ID NO: 2386201 - RNA, 19 nt, Artificial Sequence
  Description of Artificial Sequence: Synthetic oligonucleotide
aaaacagcaccgucaugua

SEQ ID NO: 2386202 - RNA, 19 nt, Artificial Sequence
  Description of Artificial Sequence: Synthetic oligonucleotide
agucguccacuucacccac

SEQ ID NO: 2386203 - RNA, 19 nt, Artificial Sequence
  Description of Artificial Sequence: Synthetic oligonucleotide
uguaggcccuguccaaggc

SEQ ID NO: 2386204 - RNA, 19 nt, Artificial Sequence
  Description of Artificial Sequence: Synthetic oligonucleotide
uucaucgcggcugcaggcg

SEQ ID NO: 2386205 - RNA, 19 nt, Artificial Sequence
  Description of Artificial Sequence: Synthetic oligonucleotide
aacgacaggaggucucaaa

SEQ ID NO: 2386206 - RNA, 19 nt, Artificial Sequence
  Description of Artificial Sequence: Synthetic oligonucleotide
uccuguugucugcuacagg

SEQ ID NO: 2386207 - RNA, 19 nt, Artificial Sequence
  Description of Artificial Sequence: Synthetic oligonucleotide
guuagcgauccacuuggug

SEQ ID NO: 2386208 - RNA, 19 nt, Artificial Sequence
  Description of Artificial Sequence: Synthetic oligonucleotide
ccucauacucuucaguggg

SEQ ID NO: 2386209 - RNA, 19 nt, Artificial Sequence
  Description of Artificial Sequence: Synthetic oligonucleotide
agaucaacaucauccugaa

SEQ ID NO: 2386210 - RNA, 19 nt, Artificial Sequence
  Description of Artificial Sequence: Synthetic oligonucleotide
uuguauggagcagcauggg

SEQ ID NO: 2386211 - RNA, 19 nt, Artificial Sequence
  Description of Artificial Sequence: Synthetic oligonucleotide
cauuucaucauagguccug

SEQ ID NO: 2386212 - RNA, 19 nt, Artificial Sequence
  Description of Artificial Sequence: Synthetic oligonucleotide
accgucauguaacgacagg

SEQ ID NO: 2386213 - RNA, 19 nt, Artificial Sequence
  Description of Artificial Sequence: Synthetic oligonucleotide
gacacuccucgucacucag

SEQ ID NO: 2386214 - RNA, 19 nt, Artificial Sequence
  Description of Artificial Sequence: Synthetic oligonucleotide
aagggcgcagacucauuga

SEQ ID NO: 2386215 - RNA, 19 nt, Artificial Sequence
  Description of Artificial Sequence: Synthetic oligonucleotide
gugggcaggaucuggcucc

SEQ ID NO: 2386216 - RNA, 19 nt, Artificial Sequence
  Description of Artificial Sequence: Synthetic oligonucleotide
aguaaauaacgugaacgua

SEQ ID NO: 2386217 - RNA, 19 nt, Artificial Sequence
  Description of Artificial Sequence: Synthetic oligonucleotide
uccaaggcccauucgggcu

SEQ ID NO: 2386218 - RNA, 19 nt, Artificial Sequence
  Description of Artificial Sequence: Synthetic oligonucleotide
agugucucggagaucaaca

SEQ ID NO: 2386219 - RNA, 19 nt, Artificial Sequence
  Description of Artificial Sequence: Synthetic oligonucleotide
gugaacguaggaacaacug

SEQ ID NO: 2386220 - RNA, 19 nt, Artificial Sequence
  Description of Artificial Sequence: Synthetic oligonucleotide
aguuguuagcgauccacuu

SEQ ID NO: 2386221 - RNA, 19 nt, Artificial Sequence
  Description of Artificial Sequence: Synthetic oligonucleotide
guccacauugauccaguug

SEQ ID NO: 2386222 - RNA, 19 nt, Artificial Sequence
  Description of Artificial Sequence: Synthetic oligonucleotide
ugaggcgacacuccucguc

SEQ ID NO: 2386223 - RNA, 19 nt, Artificial Sequence
  Description of Artificial Sequence: Synthetic oligonucleotide
cauguaacgacaggagguc

SEQ ID NO: 2386224 - RNA, 19 nt, Artificial Sequence
  Description of Artificial Sequence: Synthetic oligonucleotide
aacgugaacguaggaacaa

SEQ ID NO: 2386225 - RNA, 19 nt, Artificial Sequence
  Description of Artificial Sequence: Synthetic oligonucleotide
ucauuucaucauagguccu

SEQ ID NO: 2386226 - RNA, 19 nt, Artificial Sequence
  Description of Artificial Sequence: Synthetic oligonucleotide
cuucaucgcggcugcaggc

SEQ ID NO: 2386227 - RNA, 19 nt, Artificial Sequence
  Description of Artificial Sequence: Synthetic oligonucleotide
caguaaauaacgugaacgu

SEQ ID NO: 2386228 - RNA, 19 nt, Artificial Sequence
  Description of Artificial Sequence: Synthetic oligonucleotide
uugacacgaagguuccccu

SEQ ID NO: 2386229 - RNA, 19 nt, Artificial Sequence
  Description of Artificial Sequence: Synthetic oligonucleotide
auaaaacagcaccgucaug

SEQ ID NO: 2386230 - RNA, 19 nt, Artificial Sequence
  Description of Artificial Sequence: Synthetic oligonucleotide
caaagcuugccgugcccgg

SEQ ID NO: 2386231 - RNA, 19 nt, Artificial Sequence
  Description of Artificial Sequence: Synthetic oligonucleotide
gucugcaguacaacagagg

SEQ ID NO: 2386232 - RNA, 19 nt, Artificial Sequence
  Description of Artificial Sequence: Synthetic oligonucleotide
gaggcgacacuccucguca

SEQ ID NO: 2386233 - RNA, 19 nt, Artificial Sequence
  Description of Artificial Sequence: Synthetic oligonucleotide
ucacccacccaaccuugcc

SEQ ID NO: 2386234 - RNA, 19 nt, Artificial Sequence
  Description of Artificial Sequence: Synthetic oligonucleotide
agucccugucguuuauuug

SEQ ID NO: 2386235 - RNA, 19 nt, Artificial Sequence
  Description of Artificial Sequence: Synthetic oligonucleotide
gugccuucgagugucucgg

SEQ ID NO: 2386236 - RNA, 19 nt, Artificial Sequence
  Description of Artificial Sequence: Synthetic oligonucleotide
cugcaguacaacagaggac

SEQ ID NO: 2386237 - RNA, 19 nt, Artificial Sequence
  Description of Artificial Sequence: Synthetic oligonucleotide
uucacgcgccagacgagcc

SEQ ID NO: 2386238 - RNA, 19 nt, Artificial Sequence
  Description of Artificial Sequence: Synthetic oligonucleotide
acgugaacguaggaacaac

SEQ ID NO: 2386239 - RNA, 19 nt, Artificial Sequence
  Description of Artificial Sequence: Synthetic oligonucleotide
agucugcaguacaacagag

SEQ ID NO: 2386240 - RNA, 19 nt, Artificial Sequence
  Description of Artificial Sequence: Synthetic oligonucleotide
cucgcgucagagcuccacg

SEQ ID NO: 2386241 - RNA, 19 nt, Artificial Sequence
  Description of Artificial Sequence: Synthetic oligonucleotide
uugcaucuuggccucgcgu

SEQ ID NO: 2386242 - RNA, 19 nt, Artificial Sequence
  Description of Artificial Sequence: Synthetic oligonucleotide
cacgcgggcaucacuguag

SEQ ID NO: 2386243 - RNA, 19 nt, Artificial Sequence
  Description of Artificial Sequence: Synthetic oligonucleotide
guaguuguaccaaaagacu

SEQ ID NO: 2386244 - RNA, 19 nt, Artificial Sequence
  Description of Artificial Sequence: Synthetic oligonucleotide
ucgcgucagagcuccacgc

SEQ ID NO: 2386245 - RNA, 19 nt, Artificial Sequence
  Description of Artificial Sequence: Synthetic oligonucleotide
gcgaccaucaugguucugg

SEQ ID NO: 2386246 - RNA, 19 nt, Artificial Sequence
  Description of Artificial Sequence: Synthetic oligonucleotide
gcucauugccuccucauac

SEQ ID NO: 2386247 - RNA, 19 nt, Artificial Sequence
  Description of Artificial Sequence: Synthetic oligonucleotide
guugucugcuacagggaag

SEQ ID NO: 2386248 - RNA, 19 nt, Artificial Sequence
  Description of Artificial Sequence: Synthetic oligonucleotide
cuugcaucuuggccucgcg

SEQ ID NO: 2386249 - RNA, 19 nt, Artificial Sequence
  Description of Artificial Sequence: Synthetic oligonucleotide
ccugaauuagacucauuuc

SEQ ID NO: 2386250 - RNA, 19 nt, Artificial Sequence
  Description of Artificial Sequence: Synthetic oligonucleotide
ugaugaggcgacacuccuc

SEQ ID NO: 2386251 - RNA, 19 nt, Artificial Sequence
  Description of Artificial Sequence: Synthetic oligonucleotide
aucauagguccuguugucu

SEQ ID NO: 2386252 - RNA, 19 nt, Artificial Sequence
  Description of Artificial Sequence: Synthetic oligonucleotide
aagcuugccgugcccggcu

SEQ ID NO: 2386253 - RNA, 19 nt, Artificial Sequence
  Description of Artificial Sequence: Synthetic oligonucleotide
gucccugucguuuauuugu

SEQ ID NO: 2386254 - RNA, 19 nt, Artificial Sequence
  Description of Artificial Sequence: Synthetic oligonucleotide
ggugccacgggugaccagg

SEQ ID NO: 2386255 - RNA, 19 nt, Artificial Sequence
  Description of Artificial Sequence: Synthetic oligonucleotide
ggagaucaacaucauccug

SEQ ID NO: 2386256 - RNA, 19 nt, Artificial Sequence
  Description of Artificial Sequence: Synthetic oligonucleotide
gggucuuugacgaugggca

SEQ ID NO: 2386257 - RNA, 19 nt, Artificial Sequence
  Description of Artificial Sequence: Synthetic oligonucleotide
acgcgggcaucacuguagg

SEQ ID NO: 2386258 - RNA, 19 nt, Artificial Sequence
  Description of Artificial Sequence: Synthetic oligonucleotide
gguccaacagcuggaaaag

SEQ ID NO: 2386259 - RNA, 19 nt, Artificial Sequence
  Description of Artificial Sequence: Synthetic oligonucleotide
aggaacaacugcgcccuuc

SEQ ID NO: 2386260 - RNA, 19 nt, Artificial Sequence
  Description of Artificial Sequence: Synthetic oligonucleotide
caccgucauguaacgacag

SEQ ID NO: 2386261 - RNA, 19 nt, Artificial Sequence
  Description of Artificial Sequence: Synthetic oligonucleotide
ugcucauugccuccucaua

SEQ ID NO: 2386262 - RNA, 19 nt, Artificial Sequence
  Description of Artificial Sequence: Synthetic oligonucleotide
cagaucuuuagucugcagu

SEQ ID NO: 2386263 - RNA, 19 nt, Artificial Sequence
  Description of Artificial Sequence: Synthetic oligonucleotide
cuuggccucgcgucagagc

SEQ ID NO: 2386264 - RNA, 19 nt, Artificial Sequence
  Description of Artificial Sequence: Synthetic oligonucleotide
uccuugcuggggcuugaca

SEQ ID NO: 2386265 - RNA, 19 nt, Artificial Sequence
  Description of Artificial Sequence: Synthetic oligonucleotide
ccugucguuuauuuguaug

SEQ ID NO: 2386266 - RNA, 19 nt, Artificial Sequence
  Description of Artificial Sequence: Synthetic oligonucleotide
cguaggaacaacugcgccc

SEQ ID NO: 2386267 - RNA, 19 nt, Artificial Sequence
  Description of Artificial Sequence: Synthetic oligonucleotide
gcuguaacccuuucaucug

SEQ ID NO: 2386268 - RNA, 19 nt, Artificial Sequence
  Description of Artificial Sequence: Synthetic oligonucleotide
cuucacgcgccagacgagc

SEQ ID NO: 2386269 - RNA, 19 nt, Artificial Sequence
  Description of Artificial Sequence: Synthetic oligonucleotide
ucacgcgccagacgagcca

SEQ ID NO: 2386270 - RNA, 19 nt, Artificial Sequence
  Description of Artificial Sequence: Synthetic oligonucleotide
gauccaguuguuagcgauc

SEQ ID NO: 2386271 - RNA, 19 nt, Artificial Sequence
  Description of Artificial Sequence: Synthetic oligonucleotide
uguuagcgauccacuuggu

SEQ ID NO: 2386272 - RNA, 19 nt, Artificial Sequence
  Description of Artificial Sequence: Synthetic oligonucleotide
gacgaugggcagugacuug

SEQ ID NO: 2386273 - RNA, 19 nt, Artificial Sequence
  Description of Artificial Sequence: Synthetic oligonucleotide
guccaacagcuggaaaagg

SEQ ID NO: 2386274 - RNA, 19 nt, Artificial Sequence
  Description of Artificial Sequence: Synthetic oligonucleotide
ggucuuugacgaugggcag

SEQ ID NO: 2386275 - RNA, 19 nt, Artificial Sequence
  Description of Artificial Sequence: Synthetic oligonucleotide
ucucggagcugcaggcgac

SEQ ID NO: 2386276 - RNA, 19 nt, Artificial Sequence
  Description of Artificial Sequence: Synthetic oligonucleotide
gagugucucggagaucaac

SEQ ID NO: 2386277 - RNA, 19 nt, Artificial Sequence
  Description of Artificial Sequence: Synthetic oligonucleotide
cagacucauugaccucucg

SEQ ID NO: 2386278 - RNA, 19 nt, Artificial Sequence
  Description of Artificial Sequence: Synthetic oligonucleotide
cucgucacucaggaagccc

SEQ ID NO: 2386279 - RNA, 19 nt, Artificial Sequence
  Description of Artificial Sequence: Synthetic oligonucleotide
uauuuguauggagcagcau

SEQ ID NO: 2386280 - RNA, 19 nt, Artificial Sequence
  Description of Artificial Sequence: Synthetic oligonucleotide
ucccugucguuuauuugua

SEQ ID NO: 2386281 - RNA, 19 nt, Artificial Sequence
  Description of Artificial Sequence: Synthetic oligonucleotide
gugacguuguucaaauaaa

SEQ ID NO: 2386282 - RNA, 19 nt, Artificial Sequence
  Description of Artificial Sequence: Synthetic oligonucleotide
cagggaagacagucucgcc

SEQ ID NO: 2386283 - RNA, 19 nt, Artificial Sequence
  Description of Artificial Sequence: Synthetic oligonucleotide
aggcgacacuccucgucac

SEQ ID NO: 2386284 - RNA, 19 nt, Artificial Sequence
  Description of Artificial Sequence: Synthetic oligonucleotide
cucggagaucaacaucauc

SEQ ID NO: 2386285 - RNA, 19 nt, Artificial Sequence
  Description of Artificial Sequence: Synthetic oligonucleotide
gcgggcaucacuguaggcc

SEQ ID NO: 2386286 - RNA, 19 nt, Artificial Sequence
  Description of Artificial Sequence: Synthetic oligonucleotide
guaggaacaacugcgcccu

SEQ ID NO: 2386287 - RNA, 19 nt, Artificial Sequence
  Description of Artificial Sequence: Synthetic oligonucleotide
uccaguuguuagcgaucca

SEQ ID NO: 2386288 - RNA, 19 nt, Artificial Sequence
  Description of Artificial Sequence: Synthetic oligonucleotide
gaggucucaaagggcgcag

SEQ ID NO: 2386289 - RNA, 19 nt, Artificial Sequence
  Description of Artificial Sequence: Synthetic oligonucleotide
ggaugaugaggcgacacuc

SEQ ID NO: 2386290 - RNA, 19 nt, Artificial Sequence
  Description of Artificial Sequence: Synthetic oligonucleotide
caccaguaaauaacgugaa

SEQ ID NO: 2386291 - RNA, 19 nt, Artificial Sequence
  Description of Artificial Sequence: Synthetic oligonucleotide
guaccaaaagacugcaguu

SEQ ID NO: 2386292 - RNA, 19 nt, Artificial Sequence
  Description of Artificial Sequence: Synthetic oligonucleotide
gggcuugacacgaagguuc

SEQ ID NO: 2386293 - RNA, 19 nt, Artificial Sequence
  Description of Artificial Sequence: Synthetic oligonucleotide
gcgucagagcuccacgcgg

SEQ ID NO: 2386294 - RNA, 19 nt, Artificial Sequence
  Description of Artificial Sequence: Synthetic oligonucleotide
guaacgacaggaggucuca

SEQ ID NO: 2386295 - RNA, 19 nt, Artificial Sequence
  Description of Artificial Sequence: Synthetic oligonucleotide
cgaagguuccccuugucac

SEQ ID NO: 2386296 - RNA, 19 nt, Artificial Sequence
  Description of Artificial Sequence: Synthetic oligonucleotide
ggaacaacugcgcccuuca

SEQ ID NO: 2386297 - RNA, 19 nt, Artificial Sequence
  Description of Artificial Sequence: Synthetic oligonucleotide
gccuucacgcgccagacga

SEQ ID NO: 2386298 - RNA, 19 nt, Artificial Sequence
  Description of Artificial Sequence: Synthetic oligonucleotide
ccaguuguuagcgauccac

SEQ ID NO: 2386299 - RNA, 19 nt, Artificial Sequence
  Description of Artificial Sequence: Synthetic oligonucleotide
acugcgcccuucaucgcgg

SEQ ID NO: 2386300 - RNA, 19 nt, Artificial Sequence
  Description of Artificial Sequence: Synthetic oligonucleotide
caguacaacagaggaccug

SEQ ID NO: 2386301 - RNA, 19 nt, Artificial Sequence
  Description of Artificial Sequence: Synthetic oligonucleotide
auguaacgacaggaggucu

SEQ ID NO: 2386302 - RNA, 19 nt, Artificial Sequence
  Description of Artificial Sequence: Synthetic oligonucleotide
ggucggagccgccuucacg

SEQ ID NO: 2386303 - RNA, 19 nt, Artificial Sequence
  Description of Artificial Sequence: Synthetic oligonucleotide
cugcaguuccuugcugggg

SEQ ID NO: 2386304 - RNA, 19 nt, Artificial Sequence
  Description of Artificial Sequence: Synthetic oligonucleotide
aguuccuugcuggggcuug

SEQ ID NO: 2386305 - RNA, 19 nt, Artificial Sequence
  Description of Artificial Sequence: Synthetic oligonucleotide
uugaccucucggagcugca

SEQ ID NO: 2386306 - RNA, 19 nt, Artificial Sequence
  Description of Artificial Sequence: Synthetic oligonucleotide
cuggaacaaagcuugccgu

SEQ ID NO: 2386307 - RNA, 19 nt, Artificial Sequence
  Description of Artificial Sequence: Synthetic oligonucleotide
gaguagucguccacuucac

SEQ ID NO: 2386308 - RNA, 19 nt, Artificial Sequence
  Description of Artificial Sequence: Synthetic oligonucleotide
aggcagccgccaugcaagg

SEQ ID NO: 2386309 - RNA, 19 nt, Artificial Sequence
  Description of Artificial Sequence: Synthetic oligonucleotide
ccuucaucgcggcugcagg

SEQ ID NO: 2386310 - RNA, 19 nt, Artificial Sequence
  Description of Artificial Sequence: Synthetic oligonucleotide
caaccuugcccaucaggca

SEQ ID NO: 2386311 - RNA, 19 nt, Artificial Sequence
  Description of Artificial Sequence: Synthetic oligonucleotide
gcuguacaccaguaaauaa

SEQ ID NO: 2386312 - RNA, 19 nt, Artificial Sequence
  Description of Artificial Sequence: Synthetic oligonucleotide
ggcgcagacucauugaccu

SEQ ID NO: 2386313 - RNA, 19 nt, Artificial Sequence
  Description of Artificial Sequence: Synthetic oligonucleotide
ugacacgaagguuccccuu

SEQ ID NO: 2386314 - RNA, 19 nt, Artificial Sequence
  Description of Artificial Sequence: Synthetic oligonucleotide
gaccugcagggucuuugac

SEQ ID NO: 2386315 - RNA, 19 nt, Artificial Sequence
  Description of Artificial Sequence: Synthetic oligonucleotide
ccggcugggguccacauug

SEQ ID NO: 2386316 - RNA, 19 nt, Artificial Sequence
  Description of Artificial Sequence: Synthetic oligonucleotide
cuugccgugcccggcuggg

SEQ ID NO: 2386317 - RNA, 19 nt, Artificial Sequence
  Description of Artificial Sequence: Synthetic oligonucleotide
ugagcugcauggugcucau

SEQ ID NO: 2386318 - RNA, 19 nt, Artificial Sequence
  Description of Artificial Sequence: Synthetic oligonucleotide
cgacaggaggucucaaagg

SEQ ID NO: 2386319 - RNA, 19 nt, Artificial Sequence
  Description of Artificial Sequence: Synthetic oligonucleotide
aagaucggccagaucuuua

SEQ ID NO: 2386320 - RNA, 19 nt, Artificial Sequence
  Description of Artificial Sequence: Synthetic oligonucleotide
ggcagggcaagaucggcca

SEQ ID NO: 2386321 - RNA, 19 nt, Artificial Sequence
  Description of Artificial Sequence: Synthetic oligonucleotide
caucauccugaauuagacu

SEQ ID NO: 2386322 - RNA, 19 nt, Artificial Sequence
  Description of Artificial Sequence: Synthetic oligonucleotide
cucaaagggcgcagacuca

SEQ ID NO: 2386323 - RNA, 19 nt, Artificial Sequence
  Description of Artificial Sequence: Synthetic oligonucleotide
cacccaaccuugcccauca

SEQ ID NO: 2386324 - RNA, 19 nt, Artificial Sequence
  Description of Artificial Sequence: Synthetic oligonucleotide
accggugacguuguucaaa

SEQ ID NO: 2386325 - RNA, 19 nt, Artificial Sequence
  Description of Artificial Sequence: Synthetic oligonucleotide
cauggggccgccgcuguac

SEQ ID NO: 2386326 - RNA, 19 nt, Artificial Sequence
  Description of Artificial Sequence: Synthetic oligonucleotide
cgccagacgagccaucucc

SEQ ID NO: 2386327 - RNA, 19 nt, Artificial Sequence
  Description of Artificial Sequence: Synthetic oligonucleotide
ccaccggugacguuguuca

SEQ ID NO: 2386328 - RNA, 19 nt, Artificial Sequence
  Description of Artificial Sequence: Synthetic oligonucleotide
auggagcagcauggggccg

SEQ ID NO: 2386329 - RNA, 19 nt, Artificial Sequence
  Description of Artificial Sequence: Synthetic oligonucleotide
gcaaggaguagucguccac

SEQ ID NO: 2386330 - RNA, 19 nt, Artificial Sequence
  Description of Artificial Sequence: Synthetic oligonucleotide
cucucggagcugcaggcga

SEQ ID NO: 2386331 - RNA, 19 nt, Artificial Sequence
  Description of Artificial Sequence: Synthetic oligonucleotide
caguuguuagcgauccacu

SEQ ID NO: 2386332 - RNA, 19 nt, Artificial Sequence
  Description of Artificial Sequence: Synthetic oligonucleotide
cauucgggcugcgggucgg

SEQ ID NO: 2386333 - RNA, 19 nt, Artificial Sequence
  Description of Artificial Sequence: Synthetic oligonucleotide
gccuucgagugucucggag

SEQ ID NO: 2386334 - RNA, 19 nt, Artificial Sequence
  Description of Artificial Sequence: Synthetic oligonucleotide
ccacgggugaccaggcagc

SEQ ID NO: 2386335 - RNA, 19 nt, Artificial Sequence
  Description of Artificial Sequence: Synthetic oligonucleotide
gccgcuguacaccaguaaa

SEQ ID NO: 2386336 - RNA, 19 nt, Artificial Sequence
  Description of Artificial Sequence: Synthetic oligonucleotide
gguccuguugucugcuaca

SEQ ID NO: 2386337 - RNA, 19 nt, Artificial Sequence
  Description of Artificial Sequence: Synthetic oligonucleotide
caacugcgcccuucaucgc

SEQ ID NO: 2386338 - RNA, 19 nt, Artificial Sequence
  Description of Artificial Sequence: Synthetic oligonucleotide
cgggcaucacuguaggccc

SEQ ID NO: 2386339 - RNA, 19 nt, Artificial Sequence
  Description of Artificial Sequence: Synthetic oligonucleotide
ugccacgggugaccaggca

SEQ ID NO: 2386340 - RNA, 19 nt, Artificial Sequence
  Description of Artificial Sequence: Synthetic oligonucleotide
cuucgagugucucggagau

SEQ ID NO: 2386341 - RNA, 19 nt, Artificial Sequence
  Description of Artificial Sequence: Synthetic oligonucleotide
ggcuugacacgaagguucc

SEQ ID NO: 2386342 - RNA, 19 nt, Artificial Sequence
  Description of Artificial Sequence: Synthetic oligonucleotide
ccuugucacagugccuucg

SEQ ID NO: 2386343 - RNA, 19 nt, Artificial Sequence
  Description of Artificial Sequence: Synthetic oligonucleotide
cacauugauccaguuguua

SEQ ID NO: 2386344 - RNA, 19 nt, Artificial Sequence
  Description of Artificial Sequence: Synthetic oligonucleotide
aggcgaccaucaugguucu

SEQ ID NO: 2386345 - RNA, 19 nt, Artificial Sequence
  Description of Artificial Sequence: Synthetic oligonucleotide
gcggcugcaggcgggaagg

SEQ ID NO: 2386346 - RNA, 19 nt, Artificial Sequence
  Description of Artificial Sequence: Synthetic oligonucleotide
gaucggccagaucuuuagu

SEQ ID NO: 2386347 - RNA, 19 nt, Artificial Sequence
  Description of Artificial Sequence: Synthetic oligonucleotide
ggccagaucuuuagucugc

SEQ ID NO: 2386348 - RNA, 19 nt, Artificial Sequence
  Description of Artificial Sequence: Synthetic oligonucleotide
ggagcugcaggcgaccauc

SEQ ID NO: 2386349 - RNA, 19 nt, Artificial Sequence
  Description of Artificial Sequence: Synthetic oligonucleotide
cacgaagguuccccuuguc

SEQ ID NO: 2386350 - RNA, 19 nt, Artificial Sequence
  Description of Artificial Sequence: Synthetic oligonucleotide
ugucugcuacagggaagac

SEQ ID NO: 2386351 - RNA, 19 nt, Artificial Sequence
  Description of Artificial Sequence: Synthetic oligonucleotide
ggugcucauugccuccuca

SEQ ID NO: 2386352 - RNA, 19 nt, Artificial Sequence
  Description of Artificial Sequence: Synthetic oligonucleotide
cacgggugaccaggcagcc

SEQ ID NO: 2386353 - RNA, 19 nt, Artificial Sequence
  Description of Artificial Sequence: Synthetic oligonucleotide
ugcgcccuucaucgcggcu

SEQ ID NO: 2386354 - RNA, 19 nt, Artificial Sequence
  Description of Artificial Sequence: Synthetic oligonucleotide
ugccuucgagugucucgga

SEQ ID NO: 2386355 - RNA, 19 nt, Artificial Sequence
  Description of Artificial Sequence: Synthetic oligonucleotide
uaacgacaggaggucucaa

SEQ ID NO: 2386356 - RNA, 19 nt, Artificial Sequence
  Description of Artificial Sequence: Synthetic oligonucleotide
cgucagagcuccacgcggg

SEQ ID NO: 2386357 - RNA, 19 nt, Artificial Sequence
  Description of Artificial Sequence: Synthetic oligonucleotide
agcuccacgcgggcaucac

SEQ ID NO: 2386358 - RNA, 19 nt, Artificial Sequence
  Description of Artificial Sequence: Synthetic oligonucleotide
ugcaggcgaccaucauggu

SEQ ID NO: 2386359 - RNA, 19 nt, Artificial Sequence
  Description of Artificial Sequence: Synthetic oligonucleotide
cuguaacccuuucaucugu

SEQ ID NO: 2386360 - RNA, 19 nt, Artificial Sequence
  Description of Artificial Sequence: Synthetic oligonucleotide
agggcaagaucggccagau

SEQ ID NO: 2386361 - RNA, 19 nt, Artificial Sequence
  Description of Artificial Sequence: Synthetic oligonucleotide
cacuucacccacccaaccu

SEQ ID NO: 2386362 - RNA, 19 nt, Artificial Sequence
  Description of Artificial Sequence: Synthetic oligonucleotide
auggggccgccgcuguaca

SEQ ID NO: 2386363 - RNA, 19 nt, Artificial Sequence
  Description of Artificial Sequence: Synthetic oligonucleotide
ccuucgagugucucggaga

SEQ ID NO: 2386364 - RNA, 19 nt, Artificial Sequence
  Description of Artificial Sequence: Synthetic oligonucleotide
ggcagguaguuguaccaaa

SEQ ID NO: 2386365 - RNA, 19 nt, Artificial Sequence
  Description of Artificial Sequence: Synthetic oligonucleotide
aggucucaaagggcgcaga

SEQ ID NO: 2386366 - RNA, 19 nt, Artificial Sequence
  Description of Artificial Sequence: Synthetic oligonucleotide
gguucugguccaacagcug

SEQ ID NO: 2386367 - RNA, 19 nt, Artificial Sequence
  Description of Artificial Sequence: Synthetic oligonucleotide
guacaccaguaaauaacgu

SEQ ID NO: 2386368 - RNA, 19 nt, Artificial Sequence
  Description of Artificial Sequence: Synthetic oligonucleotide
ccacuucacccacccaacc

SEQ ID NO: 2386369 - RNA, 19 nt, Artificial Sequence
  Description of Artificial Sequence: Synthetic oligonucleotide
ccuguccaaggcccauucg

SEQ ID NO: 2386370 - RNA, 19 nt, Artificial Sequence
  Description of Artificial Sequence: Synthetic oligonucleotide
ccgucauguaacgacagga

SEQ ID NO: 2386371 - RNA, 19 nt, Artificial Sequence
  Description of Artificial Sequence: Synthetic oligonucleotide
augaggcgacacuccucgu

SEQ ID NO: 2386372 - RNA, 19 nt, Artificial Sequence
  Description of Artificial Sequence: Synthetic oligonucleotide
ugcgggucggagccgccuu

SEQ ID NO: 2386373 - RNA, 19 nt, Artificial Sequence
  Description of Artificial Sequence: Synthetic oligonucleotide
ggaccugcagggucuuuga

SEQ ID NO: 2386374 - RNA, 19 nt, Artificial Sequence
  Description of Artificial Sequence: Synthetic oligonucleotide
caggaucuggcuccgcugu

SEQ ID NO: 2386375 - RNA, 19 nt, Artificial Sequence
  Description of Artificial Sequence: Synthetic oligonucleotide
uucgagugucucggagauc

SEQ ID NO: 2386376 - RNA, 19 nt, Artificial Sequence
  Description of Artificial Sequence: Synthetic oligonucleotide
ggccucgcgucagagcucc

SEQ ID NO: 2386377 - RNA, 19 nt, Artificial Sequence
  Description of Artificial Sequence: Synthetic oligonucleotide
caucaggcagguaguugua

SEQ ID NO: 2386378 - RNA, 19 nt, Artificial Sequence
  Description of Artificial Sequence: Synthetic oligonucleotide
uggccucgcgucagagcuc

SEQ ID NO: 2386379 - RNA, 19 nt, Artificial Sequence
  Description of Artificial Sequence: Synthetic oligonucleotide
ccaugcaaggaguagucgu

SEQ ID NO: 2386380 - RNA, 19 nt, Artificial Sequence
  Description of Artificial Sequence: Synthetic oligonucleotide
aggaucuggcuccgcugua

SEQ ID NO: 2386381 - RNA, 19 nt, Artificial Sequence
  Description of Artificial Sequence: Synthetic oligonucleotide
gcaccgucauguaacgaca

SEQ ID NO: 2386382 - RNA, 19 nt, Artificial Sequence
  Description of Artificial Sequence: Synthetic oligonucleotide
gggcgcagacucauugacc

SEQ ID NO: 2386383 - RNA, 19 nt, Artificial Sequence
  Description of Artificial Sequence: Synthetic oligonucleotide
gucuuugacgaugggcagu

SEQ ID NO: 2386384 - RNA, 19 nt, Artificial Sequence
  Description of Artificial Sequence: Synthetic oligonucleotide
gcagguaguuguaccaaaa

SEQ ID NO: 2386385 - RNA, 19 nt, Artificial Sequence
  Description of Artificial Sequence: Synthetic oligonucleotide
gcuugccgugcccggcugg

SEQ ID NO: 2386386 - RNA, 19 nt, Artificial Sequence
  Description of Artificial Sequence: Synthetic oligonucleotide
ccauucgggcugcgggucg

SEQ ID NO: 2386387 - RNA, 19 nt, Artificial Sequence
  Description of Artificial Sequence: Synthetic oligonucleotide
uggggccgccgcuguacac

SEQ ID NO: 2386388 - RNA, 19 nt, Artificial Sequence
  Description of Artificial Sequence: Synthetic oligonucleotide
ucugugccagguggaugau

SEQ ID NO: 2386389 - RNA, 19 nt, Artificial Sequence
  Description of Artificial Sequence: Synthetic oligonucleotide
gucguccacuucacccacc

SEQ ID NO: 2386390 - RNA, 19 nt, Artificial Sequence
  Description of Artificial Sequence: Synthetic oligonucleotide
agguuccccuugucacagu

SEQ ID NO: 2386391 - RNA, 19 nt, Artificial Sequence
  Description of Artificial Sequence: Synthetic oligonucleotide
agcgauccacuuggugcca

SEQ ID NO: 2386392 - RNA, 19 nt, Artificial Sequence
  Description of Artificial Sequence: Synthetic oligonucleotide
cagggcaagaucggccaga

SEQ ID NO: 2386393 - RNA, 19 nt, Artificial Sequence
  Description of Artificial Sequence: Synthetic oligonucleotide
uggcuccgcuguaacccuu

SEQ ID NO: 2386394 - RNA, 19 nt, Artificial Sequence
  Description of Artificial Sequence: Synthetic oligonucleotide
ggggccgccgcuguacacc

SEQ ID NO: 2386395 - RNA, 19 nt, Artificial Sequence
  Description of Artificial Sequence: Synthetic oligonucleotide
gccgccaugcaaggaguag

SEQ ID NO: 2386396 - RNA, 19 nt, Artificial Sequence
  Description of Artificial Sequence: Synthetic oligonucleotide
gugcucauugccuccucau

SEQ ID NO: 2386397 - RNA, 19 nt, Artificial Sequence
  Description of Artificial Sequence: Synthetic oligonucleotide
cgcgucagagcuccacgcg

SEQ ID NO: 2386398 - RNA, 19 nt, Artificial Sequence
  Description of Artificial Sequence: Synthetic oligonucleotide
ccuucacgcgccagacgag

SEQ ID NO: 2386399 - RNA, 19 nt, Artificial Sequence
  Description of Artificial Sequence: Synthetic oligonucleotide
cagcauggggccgccgcug

SEQ ID NO: 2386400 - RNA, 19 nt, Artificial Sequence
  Description of Artificial Sequence: Synthetic oligonucleotide
cggccagaucuuuagucug

SEQ ID NO: 2386401 - RNA, 19 nt, Artificial Sequence
  Description of Artificial Sequence: Synthetic oligonucleotide
gcuacagggaagacagucu

SEQ ID NO: 2386402 - RNA, 19 nt, Artificial Sequence
  Description of Artificial Sequence: Synthetic oligonucleotide
gcgacacuccucgucacuc

SEQ ID NO: 2386403 - RNA, 19 nt, Artificial Sequence
  Description of Artificial Sequence: Synthetic oligonucleotide
gugccacgggugaccaggc

SEQ ID NO: 2386404 - RNA, 19 nt, Artificial Sequence
  Description of Artificial Sequence: Synthetic oligonucleotide
cauccugaauuagacucau

SEQ ID NO: 2386405 - RNA, 19 nt, Artificial Sequence
  Description of Artificial Sequence: Synthetic oligonucleotide
ccgcuguaacccuuucauc

SEQ ID NO: 2386406 - RNA, 19 nt, Artificial Sequence
  Description of Artificial Sequence: Synthetic oligonucleotide
cgauccacuuggugccacg

SEQ ID NO: 2386407 - RNA, 19 nt, Artificial Sequence
  Description of Artificial Sequence: Synthetic oligonucleotide
cccaucaggcagguaguug

SEQ ID NO: 2386408 - RNA, 19 nt, Artificial Sequence
  Description of Artificial Sequence: Synthetic oligonucleotide
ccucucggagcugcaggcg

SEQ ID NO: 2386409 - RNA, 19 nt, Artificial Sequence
  Description of Artificial Sequence: Synthetic oligonucleotide
gagcuccacgcgggcauca

SEQ ID NO: 2386410 - RNA, 19 nt, Artificial Sequence
  Description of Artificial Sequence: Synthetic oligonucleotide
ggaucuggcuccgcuguaa

SEQ ID NO: 2386411 - RNA, 19 nt, Artificial Sequence
  Description of Artificial Sequence: Synthetic oligonucleotide
gcuugacacgaagguuccc

SEQ ID NO: 2386412 - RNA, 19 nt, Artificial Sequence
  Description of Artificial Sequence: Synthetic oligonucleotide
cuggcuccgcuguaacccu

SEQ ID NO: 2386413 - RNA, 19 nt, Artificial Sequence
  Description of Artificial Sequence: Synthetic oligonucleotide
gccgccuucacgcgccaga

SEQ ID NO: 2386414 - RNA, 19 nt, Artificial Sequence
  Description of Artificial Sequence: Synthetic oligonucleotide
cgugaacguaggaacaacu

SEQ ID NO: 2386415 - RNA, 19 nt, Artificial Sequence
  Description of Artificial Sequence: Synthetic oligonucleotide
auucgggcugcgggucgga

SEQ ID NO: 2386416 - RNA, 19 nt, Artificial Sequence
  Description of Artificial Sequence: Synthetic oligonucleotide
cuuugacgaugggcaguga

SEQ ID NO: 2386417 - RNA, 19 nt, Artificial Sequence
  Description of Artificial Sequence: Synthetic oligonucleotide
gggccgccgcuguacacca

SEQ ID NO: 2386418 - RNA, 19 nt, Artificial Sequence
  Description of Artificial Sequence: Synthetic oligonucleotide
cccaccggugacguuguuc

SEQ ID NO: 2386419 - RNA, 19 nt, Artificial Sequence
  Description of Artificial Sequence: Synthetic oligonucleotide
ggaaaagguccagcuggcu

SEQ ID NO: 2386420 - RNA, 19 nt, Artificial Sequence
  Description of Artificial Sequence: Synthetic oligonucleotide
cagcaccgucauguaacga

SEQ ID NO: 2386421 - RNA, 19 nt, Artificial Sequence
  Description of Artificial Sequence: Synthetic oligonucleotide
acgcgccagacgagccauc

SEQ ID NO: 2386422 - RNA, 19 nt, Artificial Sequence
  Description of Artificial Sequence: Synthetic oligonucleotide
agccgccuucacgcgccag

SEQ ID NO: 2386423 - RNA, 19 nt, Artificial Sequence
  Description of Artificial Sequence: Synthetic oligonucleotide
ccucgcgucagagcuccac

SEQ ID NO: 2386424 - RNA, 19 nt, Artificial Sequence
  Description of Artificial Sequence: Synthetic oligonucleotide
gcgcagacucauugaccuc

SEQ ID NO: 2386425 - RNA, 19 nt, Artificial Sequence
  Description of Artificial Sequence: Synthetic oligonucleotide
agccgccaugcaaggagua

SEQ ID NO: 2386426 - RNA, 19 nt, Artificial Sequence
  Description of Artificial Sequence: Synthetic oligonucleotide
gcaguuccuugcuggggcu

SEQ ID NO: 2386427 - RNA, 19 nt, Artificial Sequence
  Description of Artificial Sequence: Synthetic oligonucleotide
cccuugucacagugccuuc

SEQ ID NO: 2386428 - RNA, 19 nt, Artificial Sequence
  Description of Artificial Sequence: Synthetic oligonucleotide
gcuccgcuguaacccuuuc

SEQ ID NO: 2386429 - RNA, 19 nt, Artificial Sequence
  Description of Artificial Sequence: Synthetic oligonucleotide
ggcgacacuccucgucacu

SEQ ID NO: 2386430 - RNA, 19 nt, Artificial Sequence
  Description of Artificial Sequence: Synthetic oligonucleotide
cccauucgggcugcggguc

SEQ ID NO: 2386431 - RNA, 19 nt, Artificial Sequence
  Description of Artificial Sequence: Synthetic oligonucleotide
caccggugacguuguucaa

SEQ ID NO: 2386432 - RNA, 19 nt, Artificial Sequence
  Description of Artificial Sequence: Synthetic oligonucleotide
ccggugacguuguucaaau

SEQ ID NO: 2386433 - RNA, 19 nt, Artificial Sequence
  Description of Artificial Sequence: Synthetic oligonucleotide
gggucggagccgccuucac

SEQ ID NO: 2386434 - RNA, 19 nt, Artificial Sequence
  Description of Artificial Sequence: Synthetic oligonucleotide
gcgauccacuuggugccac

SEQ ID NO: 2386435 - RNA, 19 nt, Artificial Sequence
  Description of Artificial Sequence: Synthetic oligonucleotide
gcaguacaacagaggaccu

SEQ ID NO: 2386436 - RNA, 19 nt, Artificial Sequence
  Description of Artificial Sequence: Synthetic oligonucleotide
caaagggcgcagacucauu

SEQ ID NO: 2386437 - RNA, 19 nt, Artificial Sequence
  Description of Artificial Sequence: Synthetic oligonucleotide
ccgccuucacgcgccagac

SEQ ID NO: 2386438 - RNA, 19 nt, Artificial Sequence
  Description of Artificial Sequence: Synthetic oligonucleotide
gggcaagaucggccagauc

SEQ ID NO: 2386439 - RNA, 19 nt, Artificial Sequence
  Description of Artificial Sequence: Synthetic oligonucleotide
gcccauucgggcugcgggu

SEQ ID NO: 2386440 - RNA, 19 nt, Artificial Sequence
  Description of Artificial Sequence: Synthetic oligonucleotide
ccgcuguacaccaguaaau

SEQ ID NO: 2386441 - RNA, 19 nt, Artificial Sequence
  Description of Artificial Sequence: Synthetic oligonucleotide
gccgugcccggcugggguc

SEQ ID NO: 2386442 - RNA, 19 nt, Artificial Sequence
  Description of Artificial Sequence: Synthetic oligonucleotide
gccgccgcuguacaccagu

SEQ ID NO: 2386443 - RNA, 19 nt, Artificial Sequence
  Description of Artificial Sequence: Synthetic oligonucleotide
cugcuacagggaagacagu

SEQ ID NO: 2386444 - RNA, 19 nt, Artificial Sequence
  Description of Artificial Sequence: Synthetic oligonucleotide
cgccuucacgcgccagacg

SEQ ID NO: 2386445 - RNA, 19 nt, Artificial Sequence
  Description of Artificial Sequence: Synthetic oligonucleotide
ccacccaaccuugcccauc

SEQ ID NO: 2386446 - RNA, 19 nt, Artificial Sequence
  Description of Artificial Sequence: Synthetic oligonucleotide
cgcgggcaucacuguaggc

SEQ ID NO: 2386447 - RNA, 19 nt, Artificial Sequence
  Description of Artificial Sequence: Synthetic oligonucleotide
ucgcggcugcaggcgggaa

SEQ ID NO: 2386448 - RNA, 19 nt, Artificial Sequence
  Description of Artificial Sequence: Synthetic oligonucleotide
gcaagaucggccagaucuu

SEQ ID NO: 2386449 - RNA, 19 nt, Artificial Sequence
  Description of Artificial Sequence: Synthetic oligonucleotide
gcgccagacgagccaucuc

SEQ ID NO: 2386450 - RNA, 19 nt, Artificial Sequence
  Description of Artificial Sequence: Synthetic oligonucleotide
cgacacuccucgucacuca

SEQ ID NO: 2386451 - RNA, 19 nt, Artificial Sequence
  Description of Artificial Sequence: Synthetic oligonucleotide
gcgggucggagccgccuuc

SEQ ID NO: 2386452 - RNA, 19 nt, Artificial Sequence
  Description of Artificial Sequence: Synthetic oligonucleotide
cacgcgccagacgagccau

SEQ ID NO: 2386453 - RNA, 19 nt, Artificial Sequence
  Description of Artificial Sequence: Synthetic oligonucleotide
gccagacgagccaucuccu

SEQ ID NO: 2386454 - RNA, 19 nt, Artificial Sequence
  Description of Artificial Sequence: Synthetic oligonucleotide
ccgccaugcaaggaguagu

SEQ ID NO: 2386455 - RNA, 19 nt, Artificial Sequence
  Description of Artificial Sequence: Synthetic oligonucleotide
cuugcccaucaggcaggua

SEQ ID NO: 2386456 - RNA, 19 nt, Artificial Sequence
  Description of Artificial Sequence: Synthetic oligonucleotide
cugcagggucuuugacgau

SEQ ID NO: 2386457 - RNA, 19 nt, Artificial Sequence
  Description of Artificial Sequence: Synthetic oligonucleotide
cgaccaucaugguucuggu

SEQ ID NO: 2386458 - RNA, 19 nt, Artificial Sequence
  Description of Artificial Sequence: Synthetic oligonucleotide
gcugcgggucggagccgcc

SEQ ID NO: 2386459 - RNA, 19 nt, Artificial Sequence
  Description of Artificial Sequence: Synthetic oligonucleotide
ccacgcgggcaucacugua

SEQ ID NO: 2386460 - RNA, 19 nt, Artificial Sequence
  Description of Artificial Sequence: Synthetic oligonucleotide
cugcgggucggagccgccu

SEQ ID NO: 2386461 - RNA, 19 nt, Artificial Sequence
  Description of Artificial Sequence: Synthetic oligonucleotide
cccugucguuuauuuguau

SEQ ID NO: 2386462 - RNA, 19 nt, Artificial Sequence
  Description of Artificial Sequence: Synthetic oligonucleotide
cgccgcuguacaccaguaa

SEQ ID NO: 2386463 - RNA, 19 nt, Artificial Sequence
  Description of Artificial Sequence: Synthetic oligonucleotide
cguccacuucacccaccca

SEQ ID NO: 2386464 - RNA, 19 nt, Artificial Sequence
  Description of Artificial Sequence: Synthetic oligonucleotide
ggcuccgcuguaacccuuu

SEQ ID NO: 2386465 - RNA, 19 nt, Artificial Sequence
  Description of Artificial Sequence: Synthetic oligonucleotide
cggugacguuguucaaaua

SEQ ID NO: 2386466 - RNA, 19 nt, Artificial Sequence
  Description of Artificial Sequence: Synthetic oligonucleotide
cgggucggagccgccuuca

SEQ ID NO: 2386467 - RNA, 19 nt, Artificial Sequence
  Description of Artificial Sequence: Synthetic oligonucleotide
cccacccaaccuugcccau

SEQ ID NO: 2386468 - RNA, 19 nt, Artificial Sequence
  Description of Artificial Sequence: Synthetic oligonucleotide
gggcagugacuugcaucuu

SEQ ID NO: 2386469 - RNA, 19 nt, Artificial Sequence
  Description of Artificial Sequence: Synthetic oligonucleotide
gcccuguccaaggcccauu

SEQ ID NO: 2386470 - RNA, 19 nt, Artificial Sequence
  Description of Artificial Sequence: Synthetic oligonucleotide
gccucgcgucagagcucca

SEQ ID NO: 2386471 - RNA, 19 nt, Artificial Sequence
  Description of Artificial Sequence: Synthetic oligonucleotide
cccggcugggguccacauu

SEQ ID NO: 2386472 - RNA, 19 nt, Artificial Sequence
  Description of Artificial Sequence: Synthetic oligonucleotide
cggagcugcaggcgaccau

SEQ ID NO: 2386473 - RNA, 19 nt, Artificial Sequence
  Description of Artificial Sequence: Synthetic oligonucleotide
cgugcccggcuggggucca

SEQ ID NO: 2386474 - RNA, 19 nt, Artificial Sequence
  Description of Artificial Sequence: Synthetic oligonucleotide
ccccaccggugacguuguu

SEQ ID NO: 2386475 - RNA, 19 nt, Artificial Sequence
  Description of Artificial Sequence: Synthetic oligonucleotide
aaaagagugauuuugucuc

SEQ ID NO: 2386476 - RNA, 19 nt, Artificial Sequence
  Description of Artificial Sequence: Synthetic oligonucleotide
aaaaguaagagaagagucc

SEQ ID NO: 2386477 - RNA, 19 nt, Artificial Sequence
  Description of Artificial Sequence: Synthetic oligonucleotide
aauacagugugcugcagac

SEQ ID NO: 2386478 - RNA, 19 nt, Artificial Sequence
  Description of Artificial Sequence: Synthetic oligonucleotide
uaagagaagaguccggugg

SEQ ID NO: 2386479 - RNA, 19 nt, Artificial Sequence
  Description of Artificial Sequence: Synthetic oligonucleotide
aaaguaagagaagaguccg

SEQ ID NO: 2386480 - RNA, 19 nt, Artificial Sequence
  Description of Artificial Sequence: Synthetic oligonucleotide
aaauacaggugucaucaac

SEQ ID NO: 2386481 - RNA, 19 nt, Artificial Sequence
  Description of Artificial Sequence: Synthetic oligonucleotide
aaaugaacacuauguuacc

SEQ ID NO: 2386482 - RNA, 19 nt, Artificial Sequence
  Description of Artificial Sequence: Synthetic oligonucleotide
uuagcagugugacagcugg

SEQ ID NO: 2386483 - RNA, 19 nt, Artificial Sequence
  Description of Artificial Sequence: Synthetic oligonucleotide
auuaggacacaccuguggc

SEQ ID NO: 2386484 - RNA, 19 nt, Artificial Sequence
  Description of Artificial Sequence: Synthetic oligonucleotide
uaccagauguaauugacgg

SEQ ID NO: 2386485 - RNA, 19 nt, Artificial Sequence
  Description of Artificial Sequence: Synthetic oligonucleotide
uguagguuauagcauaugc

SEQ ID NO: 2386486 - RNA, 19 nt, Artificial Sequence
  Description of Artificial Sequence: Synthetic oligonucleotide
uaauugacgguguagagga

SEQ ID NO: 2386487 - RNA, 19 nt, Artificial Sequence
  Description of Artificial Sequence: Synthetic oligonucleotide
ugaucuaucaacugugcag

SEQ ID NO: 2386488 - RNA, 19 nt, Artificial Sequence
  Description of Artificial Sequence: Synthetic oligonucleotide
uagguuauagcauaugcug

SEQ ID NO: 2386489 - RNA, 19 nt, Artificial Sequence
  Description of Artificial Sequence: Synthetic oligonucleotide
aacagcagagguaucaggc

SEQ ID NO: 2386490 - RNA, 19 nt, Artificial Sequence
  Description of Artificial Sequence: Synthetic oligonucleotide
uguggaaacauccauugac

SEQ ID NO: 2386491 - RNA, 19 nt, Artificial Sequence
  Description of Artificial Sequence: Synthetic oligonucleotide
acuauguuaccacuuuggc

SEQ ID NO: 2386492 - RNA, 19 nt, Artificial Sequence
  Description of Artificial Sequence: Synthetic oligonucleotide
auauaugccacaguugggc

SEQ ID NO: 2386493 - RNA, 19 nt, Artificial Sequence
  Description of Artificial Sequence: Synthetic oligonucleotide
gaaaagcucagauaaaaga

SEQ ID NO: 2386494 - RNA, 19 nt, Artificial Sequence
  Description of Artificial Sequence: Synthetic oligonucleotide
augauuagcagugugacag

SEQ ID NO: 2386495 - RNA, 19 nt, Artificial Sequence
  Description of Artificial Sequence: Synthetic oligonucleotide
ugacccacaauguaaauca

SEQ ID NO: 2386496 - RNA, 19 nt, Artificial Sequence
  Description of Artificial Sequence: Synthetic oligonucleotide
uaaaagagugauuuugucu

SEQ ID NO: 2386497 - RNA, 19 nt, Artificial Sequence
  Description of Artificial Sequence: Synthetic oligonucleotide
caaaaguaagagaagaguc

SEQ ID NO: 2386498 - RNA, 19 nt, Artificial Sequence
  Description of Artificial Sequence: Synthetic oligonucleotide
ugcauuaggacacaccugu

SEQ ID NO: 2386499 - RNA, 19 nt, Artificial Sequence
  Description of Artificial Sequence: Synthetic oligonucleotide
ucagauaaaagagugauuu

SEQ ID NO: 2386500 - RNA, 19 nt, Artificial Sequence
  Description of Artificial Sequence: Synthetic oligonucleotide
auaaaagagugauuuuguc

SEQ ID NO: 2386501 - RNA, 19 nt, Artificial Sequence
  Description of Artificial Sequence: Synthetic oligonucleotide
aaaagacuaggucaggaaa

SEQ ID NO: 2386502 - RNA, 19 nt, Artificial Sequence
  Description of Artificial Sequence: Synthetic oligonucleotide
aguaugaucuaucaacugu

SEQ ID NO: 2386503 - RNA, 19 nt, Artificial Sequence
  Description of Artificial Sequence: Synthetic oligonucleotide
aacucgcugacccacaaug

SEQ ID NO: 2386504 - RNA, 19 nt, Artificial Sequence
  Description of Artificial Sequence: Synthetic oligonucleotide
uuuuaugauuagcagugug

SEQ ID NO: 2386505 - RNA, 19 nt, Artificial Sequence
  Description of Artificial Sequence: Synthetic oligonucleotide
augaacacuauguuaccac

SEQ ID NO: 2386506 - RNA, 19 nt, Artificial Sequence
  Description of Artificial Sequence: Synthetic oligonucleotide
aauguacaguaucuccccg

SEQ ID NO: 2386507 - RNA, 19 nt, Artificial Sequence
  Description of Artificial Sequence: Synthetic oligonucleotide
agauaaaagagugauuuug

SEQ ID NO: 2386508 - RNA, 19 nt, Artificial Sequence
  Description of Artificial Sequence: Synthetic oligonucleotide
gaagcgaacucgcugaccc

SEQ ID NO: 2386509 - RNA, 19 nt, Artificial Sequence
  Description of Artificial Sequence: Synthetic oligonucleotide
auugacauugcccaggcaa

SEQ ID NO: 2386510 - RNA, 19 nt, Artificial Sequence
  Description of Artificial Sequence: Synthetic oligonucleotide
aacauccauugacauugcc

SEQ ID NO: 2386511 - RNA, 19 nt, Artificial Sequence
  Description of Artificial Sequence: Synthetic oligonucleotide
ucauucucagcucugagua

SEQ ID NO: 2386512 - RNA, 19 nt, Artificial Sequence
  Description of Artificial Sequence: Synthetic oligonucleotide
uguaugagccagcaaauuc

SEQ ID NO: 2386513 - RNA, 19 nt, Artificial Sequence
  Description of Artificial Sequence: Synthetic oligonucleotide
ugagccagcaaauucccag

SEQ ID NO: 2386514 - RNA, 19 nt, Artificial Sequence
  Description of Artificial Sequence: Synthetic oligonucleotide
agaaugguggaagagcugg

SEQ ID NO: 2386515 - RNA, 19 nt, Artificial Sequence
  Description of Artificial Sequence: Synthetic oligonucleotide
ucaggcuugacaaaaugaa

SEQ ID NO: 2386516 - RNA, 19 nt, Artificial Sequence
  Description of Artificial Sequence: Synthetic oligonucleotide
  modified_base (14)..(14): a, c, u, g, unknown or other
aacaagugacgccnuaaaa

SEQ ID NO: 2386517 - RNA, 19 nt, Artificial Sequence
  Description of Artificial Sequence: Synthetic oligonucleotide
agagguaucaggcuugaca

SEQ ID NO: 2386518 - RNA, 19 nt, Artificial Sequence
  Description of Artificial Sequence: Synthetic oligonucleotide
ucaggaaaacaagugacgc

SEQ ID NO: 2386519 - RNA, 19 nt, Artificial Sequence
  Description of Artificial Sequence: Synthetic oligonucleotide
acuugcacuguguccagcc

SEQ ID NO: 2386520 - RNA, 19 nt, Artificial Sequence
  Description of Artificial Sequence: Synthetic oligonucleotide
uggagagugcauuaggaca

SEQ ID NO: 2386521 - RNA, 19 nt, Artificial Sequence
  Description of Artificial Sequence: Synthetic oligonucleotide
aaauacagugugcugcaga

SEQ ID NO: 2386522 - RNA, 19 nt, Artificial Sequence
  Description of Artificial Sequence: Synthetic oligonucleotide
gaucuaucaacugugcagc

SEQ ID NO: 2386523 - RNA, 19 nt, Artificial Sequence
  Description of Artificial Sequence: Synthetic oligonucleotide
cacuauguuaccacuuugg

SEQ ID NO: 2386524 - RNA, 19 nt, Artificial Sequence
  Description of Artificial Sequence: Synthetic oligonucleotide
uguaauugacgguguagag

SEQ ID NO: 2386525 - RNA, 19 nt, Artificial Sequence
  Description of Artificial Sequence: Synthetic oligonucleotide
aagacuaggucaggaaaac

SEQ ID NO: 2386526 - RNA, 19 nt, Artificial Sequence
  Description of Artificial Sequence: Synthetic oligonucleotide
gcaaguaugaucuaucaac

SEQ ID NO: 2386527 - RNA, 19 nt, Artificial Sequence
  Description of Artificial Sequence: Synthetic oligonucleotide
aaguaugaucuaucaacug

SEQ ID NO: 2386528 - RNA, 19 nt, Artificial Sequence
  Description of Artificial Sequence: Synthetic oligonucleotide
cauaugcuguccuuguggg

SEQ ID NO: 2386529 - RNA, 19 nt, Artificial Sequence
  Description of Artificial Sequence: Synthetic oligonucleotide
uguguccagccauauaugc

SEQ ID NO: 2386530 - RNA, 19 nt, Artificial Sequence
  Description of Artificial Sequence: Synthetic oligonucleotide
caaaauacaggugucauca

SEQ ID NO: 2386531 - RNA, 19 nt, Artificial Sequence
  Description of Artificial Sequence: Synthetic oligonucleotide
uuaugauuagcagugugac

SEQ ID NO: 2386532 - RNA, 19 nt, Artificial Sequence
  Description of Artificial Sequence: Synthetic oligonucleotide
guaauugacgguguagagg

SEQ ID NO: 2386533 - RNA, 19 nt, Artificial Sequence
  Description of Artificial Sequence: Synthetic oligonucleotide
aagagcugggagcaaaagu

SEQ ID NO: 2386534 - RNA, 19 nt, Artificial Sequence
  Description of Artificial Sequence: Synthetic oligonucleotide
cauuaggacacaccugugg

SEQ ID NO: 2386535 - RNA, 19 nt, Artificial Sequence
  Description of Artificial Sequence: Synthetic oligonucleotide
uuuagcugcuggaacuugc

SEQ ID NO: 2386536 - RNA, 19 nt, Artificial Sequence
  Description of Artificial Sequence: Synthetic oligonucleotide
caaagaaugguggaagagc

SEQ ID NO: 2386537 - RNA, 19 nt, Artificial Sequence
  Description of Artificial Sequence: Synthetic oligonucleotide
  modified_base (16)..(16): a, c, u, g, unknown or other
aaaacaagugacgccnuaa

SEQ ID NO: 2386538 - RNA, 19 nt, Artificial Sequence
  Description of Artificial Sequence: Synthetic oligonucleotide
cugucuguagguuauagca

SEQ ID NO: 2386539 - RNA, 19 nt, Artificial Sequence
  Description of Artificial Sequence: Synthetic oligonucleotide
ugcgucacagcgaagcuca

SEQ ID NO: 2386540 - RNA, 19 nt, Artificial Sequence
  Description of Artificial Sequence: Synthetic oligonucleotide
auuggauucucuucuguga

SEQ ID NO: 2386541 - RNA, 19 nt, Artificial Sequence
  Description of Artificial Sequence: Synthetic oligonucleotide
ucaaagaaugguggaagag

SEQ ID NO: 2386542 - RNA, 19 nt, Artificial Sequence
  Description of Artificial Sequence: Synthetic oligonucleotide
acagauaccagauguaauu

SEQ ID NO: 2386543 - RNA, 19 nt, Artificial Sequence
  Description of Artificial Sequence: Synthetic oligonucleotide
ugaggcaauguacaguauc

SEQ ID NO: 2386544 - RNA, 19 nt, Artificial Sequence
  Description of Artificial Sequence: Synthetic oligonucleotide
caauguacaguaucucccc

SEQ ID NO: 2386545 - RNA, 19 nt, Artificial Sequence
  Description of Artificial Sequence: Synthetic oligonucleotide
acaaaaugaacacuauguu

SEQ ID NO: 2386546 - RNA, 19 nt, Artificial Sequence
  Description of Artificial Sequence: Synthetic oligonucleotide
cauccauugacauugccca

SEQ ID NO: 2386547 - RNA, 19 nt, Artificial Sequence
  Description of Artificial Sequence: Synthetic oligonucleotide
guaugagccagcaaauucc

SEQ ID NO: 2386548 - RNA, 19 nt, Artificial Sequence
  Description of Artificial Sequence: Synthetic oligonucleotide
ugugcucuguccacuuugg

SEQ ID NO: 2386549 - RNA, 19 nt, Artificial Sequence
  Description of Artificial Sequence: Synthetic oligonucleotide
aacagcauacaaaggccac

SEQ ID NO: 2386550 - RNA, 19 nt, Artificial Sequence
  Description of Artificial Sequence: Synthetic oligonucleotide
gagguaucaggcuugacaa

SEQ ID NO: 2386551 - RNA, 19 nt, Artificial Sequence
  Description of Artificial Sequence: Synthetic oligonucleotide
auacaggugucaucaacag

SEQ ID NO: 2386552 - RNA, 19 nt, Artificial Sequence
  Description of Artificial Sequence: Synthetic oligonucleotide
aacacuauguuaccacuuu

SEQ ID NO: 2386553 - RNA, 19 nt, Artificial Sequence
  Description of Artificial Sequence: Synthetic oligonucleotide
gucacagcgaagcucacgc

SEQ ID NO: 2386554 - RNA, 19 nt, Artificial Sequence
  Description of Artificial Sequence: Synthetic oligonucleotide
  modified_base (15)..(15): a, c, u, g, unknown or other
aaacaagugacgccnuaaa

SEQ ID NO: 2386555 - RNA, 19 nt, Artificial Sequence
  Description of Artificial Sequence: Synthetic oligonucleotide
aggaguucaaucauggcug

SEQ ID NO: 2386556 - RNA, 19 nt, Artificial Sequence
  Description of Artificial Sequence: Synthetic oligonucleotide
ugagguauccuguggcuug

SEQ ID NO: 2386557 - RNA, 19 nt, Artificial Sequence
  Description of Artificial Sequence: Synthetic oligonucleotide
uguacaguaucuccccgac

SEQ ID NO: 2386558 - RNA, 19 nt, Artificial Sequence
  Description of Artificial Sequence: Synthetic oligonucleotide
uccacuuuggcuguguuuc

SEQ ID NO: 2386559 - RNA, 19 nt, Artificial Sequence
  Description of Artificial Sequence: Synthetic oligonucleotide
guaugaucuaucaacugug

SEQ ID NO: 2386560 - RNA, 19 nt, Artificial Sequence
  Description of Artificial Sequence: Synthetic oligonucleotide
aaagacuaggucaggaaaa

SEQ ID NO: 2386561 - RNA, 19 nt, Artificial Sequence
  Description of Artificial Sequence: Synthetic oligonucleotide
cauauaugccacaguuggg

SEQ ID NO: 2386562 - RNA, 19 nt, Artificial Sequence
  Description of Artificial Sequence: Synthetic oligonucleotide
accaguuuuaugauuagca

SEQ ID NO: 2386563 - RNA, 19 nt, Artificial Sequence
  Description of Artificial Sequence: Synthetic oligonucleotide
aacugugcagcugugcucu

SEQ ID NO: 2386564 - RNA, 19 nt, Artificial Sequence
  Description of Artificial Sequence: Synthetic oligonucleotide
uagagaagucccuguauga

SEQ ID NO: 2386565 - RNA, 19 nt, Artificial Sequence
  Description of Artificial Sequence: Synthetic oligonucleotide
acagcauacaaaggccacc

SEQ ID NO: 2386566 - RNA, 19 nt, Artificial Sequence
  Description of Artificial Sequence: Synthetic oligonucleotide
auaugcuguccuugugggc

SEQ ID NO: 2386567 - RNA, 19 nt, Artificial Sequence
  Description of Artificial Sequence: Synthetic oligonucleotide
gucaggaaaacaagugacg

SEQ ID NO: 2386568 - RNA, 19 nt, Artificial Sequence
  Description of Artificial Sequence: Synthetic oligonucleotide
uaugauuagcagugugaca

SEQ ID NO: 2386569 - RNA, 19 nt, Artificial Sequence
  Description of Artificial Sequence: Synthetic oligonucleotide
uugacgguguagaggagug

SEQ ID NO: 2386570 - RNA, 19 nt, Artificial Sequence
  Description of Artificial Sequence: Synthetic oligonucleotide
cauugcccaggcaaaauac

SEQ ID NO: 2386571 - RNA, 19 nt, Artificial Sequence
  Description of Artificial Sequence: Synthetic oligonucleotide
uggaacuugcacugugucc

SEQ ID NO: 2386572 - RNA, 19 nt, Artificial Sequence
  Description of Artificial Sequence: Synthetic oligonucleotide
agugugacagcugggcccc

SEQ ID NO: 2386573 - RNA, 19 nt, Artificial Sequence
  Description of Artificial Sequence: Synthetic oligonucleotide
agauaccagauguaauuga

SEQ ID NO: 2386574 - RNA, 19 nt, Artificial Sequence
  Description of Artificial Sequence: Synthetic oligonucleotide
ugcaaugagguauccugug

SEQ ID NO: 2386575 - RNA, 19 nt, Artificial Sequence
  Description of Artificial Sequence: Synthetic oligonucleotide
agaaaagcucagauaaaag

SEQ ID NO: 2386576 - RNA, 19 nt, Artificial Sequence
  Description of Artificial Sequence: Synthetic oligonucleotide
caggaaaacaagugacgcc

SEQ ID NO: 2386577 - RNA, 19 nt, Artificial Sequence
  Description of Artificial Sequence: Synthetic oligonucleotide
uauaugccacaguugggca

SEQ ID NO: 2386578 - RNA, 19 nt, Artificial Sequence
  Description of Artificial Sequence: Synthetic oligonucleotide
gagccagcaaauucccagg

SEQ ID NO: 2386579 - RNA, 19 nt, Artificial Sequence
  Description of Artificial Sequence: Synthetic oligonucleotide
guauccuguggcuugacca

SEQ ID NO: 2386580 - RNA, 19 nt, Artificial Sequence
  Description of Artificial Sequence: Synthetic oligonucleotide
ggugucaucaacagcagag

SEQ ID NO: 2386581 - RNA, 19 nt, Artificial Sequence
  Description of Artificial Sequence: Synthetic oligonucleotide
ggcuugaccaguuuuauga

SEQ ID NO: 2386582 - RNA, 19 nt, Artificial Sequence
  Description of Artificial Sequence: Synthetic oligonucleotide
acagagaaagccaugugca

SEQ ID NO: 2386583 - RNA, 19 nt, Artificial Sequence
  Description of Artificial Sequence: Synthetic oligonucleotide
aaggcaggaguucaaucau

SEQ ID NO: 2386584 - RNA, 19 nt, Artificial Sequence
  Description of Artificial Sequence: Synthetic oligonucleotide
aaguaagagaagaguccgg

SEQ ID NO: 2386585 - RNA, 19 nt, Artificial Sequence
  Description of Artificial Sequence: Synthetic oligonucleotide
uggcaaguaugaucuauca

SEQ ID NO: 2386586 - RNA, 19 nt, Artificial Sequence
  Description of Artificial Sequence: Synthetic oligonucleotide
auaugccacaguugggcag

SEQ ID NO: 2386587 - RNA, 19 nt, Artificial Sequence
  Description of Artificial Sequence: Synthetic oligonucleotide
cacuuuggcaaguaugauc

SEQ ID NO: 2386588 - RNA, 19 nt, Artificial Sequence
  Description of Artificial Sequence: Synthetic oligonucleotide
cuauguuaccacuuuggca

SEQ ID NO: 2386589 - RNA, 19 nt, Artificial Sequence
  Description of Artificial Sequence: Synthetic oligonucleotide
cagcucugaguacagauac

SEQ ID NO: 2386590 - RNA, 19 nt, Artificial Sequence
  Description of Artificial Sequence: Synthetic oligonucleotide
auaccagauguaauugacg

SEQ ID NO: 2386591 - RNA, 19 nt, Artificial Sequence
  Description of Artificial Sequence: Synthetic oligonucleotide
uuggcaaguaugaucuauc

SEQ ID NO: 2386592 - RNA, 19 nt, Artificial Sequence
  Description of Artificial Sequence: Synthetic oligonucleotide
aguaagagaagaguccggu

SEQ ID NO: 2386593 - RNA, 19 nt, Artificial Sequence
  Description of Artificial Sequence: Synthetic oligonucleotide
gcauacaaaggccaccggg

SEQ ID NO: 2386594 - RNA, 19 nt, Artificial Sequence
  Description of Artificial Sequence: Synthetic oligonucleotide
uacagauaccagauguaau

SEQ ID NO: 2386595 - RNA, 19 nt, Artificial Sequence
  Description of Artificial Sequence: Synthetic oligonucleotide
uggaaacauccauugacau

SEQ ID NO: 2386596 - RNA, 19 nt, Artificial Sequence
  Description of Artificial Sequence: Synthetic oligonucleotide
gcauaugcuguccuugugg

SEQ ID NO: 2386597 - RNA, 19 nt, Artificial Sequence
  Description of Artificial Sequence: Synthetic oligonucleotide
cuuuggcuguguuucauuc

SEQ ID NO: 2386598 - RNA, 19 nt, Artificial Sequence
  Description of Artificial Sequence: Synthetic oligonucleotide
uguguuucauucucagcuc

SEQ ID NO: 2386599 - RNA, 19 nt, Artificial Sequence
  Description of Artificial Sequence: Synthetic oligonucleotide
uguggcuugaccaguuuua

SEQ ID NO: 2386600 - RNA, 19 nt, Artificial Sequence
  Description of Artificial Sequence: Synthetic oligonucleotide
aggucagaaaagcucagau

SEQ ID NO: 2386601 - RNA, 19 nt, Artificial Sequence
  Description of Artificial Sequence: Synthetic oligonucleotide
augaucuaucaacugugca

SEQ ID NO: 2386602 - RNA, 19 nt, Artificial Sequence
  Description of Artificial Sequence: Synthetic oligonucleotide
aaaucacugcccaacugcu

SEQ ID NO: 2386603 - RNA, 19 nt, Artificial Sequence
  Description of Artificial Sequence: Synthetic oligonucleotide
uugacauugcccaggcaaa

SEQ ID NO: 2386604 - RNA, 19 nt, Artificial Sequence
  Description of Artificial Sequence: Synthetic oligonucleotide
acgcuuuagcugcuggaac

SEQ ID NO: 2386605 - RNA, 19 nt, Artificial Sequence
  Description of Artificial Sequence: Synthetic oligonucleotide
acuaggucaggaaaacaag

SEQ ID NO: 2386606 - RNA, 19 nt, Artificial Sequence
  Description of Artificial Sequence: Synthetic oligonucleotide
uuaggacacaccuguggcu

SEQ ID NO: 2386607 - RNA, 19 nt, Artificial Sequence
  Description of Artificial Sequence: Synthetic oligonucleotide
gauaaaagagugauuuugu

SEQ ID NO: 2386608 - RNA, 19 nt, Artificial Sequence
  Description of Artificial Sequence: Synthetic oligonucleotide
uccauagagaagucccugu

SEQ ID NO: 2386609 - RNA, 19 nt, Artificial Sequence
  Description of Artificial Sequence: Synthetic oligonucleotide
caaucauggcugagggugg

SEQ ID NO: 2386610 - RNA, 19 nt, Artificial Sequence
  Description of Artificial Sequence: Synthetic oligonucleotide
cuguguuucauucucagcu

SEQ ID NO: 2386611 - RNA, 19 nt, Artificial Sequence
  Description of Artificial Sequence: Synthetic oligonucleotide
gaaagccaugugcaaugag

SEQ ID NO: 2386612 - RNA, 19 nt, Artificial Sequence
  Description of Artificial Sequence: Synthetic oligonucleotide
uuuggcaaguaugaucuau

SEQ ID NO: 2386613 - RNA, 19 nt, Artificial Sequence
  Description of Artificial Sequence: Synthetic oligonucleotide
cuagaguuguggaaacauc

SEQ ID NO: 2386614 - RNA, 19 nt, Artificial Sequence
  Description of Artificial Sequence: Synthetic oligonucleotide
gacuaggucaggaaaacaa

SEQ ID NO: 2386615 - RNA, 19 nt, Artificial Sequence
  Description of Artificial Sequence: Synthetic oligonucleotide
guaagagaagaguccggug

SEQ ID NO: 2386616 - RNA, 19 nt, Artificial Sequence
  Description of Artificial Sequence: Synthetic oligonucleotide
cagcauacaaaggccaccg

SEQ ID NO: 2386617 - RNA, 19 nt, Artificial Sequence
  Description of Artificial Sequence: Synthetic oligonucleotide
ucuguagguuauagcauau

SEQ ID NO: 2386618 - RNA, 19 nt, Artificial Sequence
  Description of Artificial Sequence: Synthetic oligonucleotide
ucuaucaacugugcagcug

SEQ ID NO: 2386619 - RNA, 19 nt, Artificial Sequence
  Description of Artificial Sequence: Synthetic oligonucleotide
ucuggcuagaguuguggaa

SEQ ID NO: 2386620 - RNA, 19 nt, Artificial Sequence
  Description of Artificial Sequence: Synthetic oligonucleotide
ugcuggaacuugcacugug

SEQ ID NO: 2386621 - RNA, 19 nt, Artificial Sequence
  Description of Artificial Sequence: Synthetic oligonucleotide
uuguggaaacauccauuga

SEQ ID NO: 2386622 - RNA, 19 nt, Artificial Sequence
  Description of Artificial Sequence: Synthetic oligonucleotide
ugauuagcagugugacagc

SEQ ID NO: 2386623 - RNA, 19 nt, Artificial Sequence
  Description of Artificial Sequence: Synthetic oligonucleotide
gcucuguccacuuuggcug

SEQ ID NO: 2386624 - RNA, 19 nt, Artificial Sequence
  Description of Artificial Sequence: Synthetic oligonucleotide
aacuugcacuguguccagc

SEQ ID NO: 2386625 - RNA, 19 nt, Artificial Sequence
  Description of Artificial Sequence: Synthetic oligonucleotide
gauguguugguggaaggca

SEQ ID NO: 2386626 - RNA, 19 nt, Artificial Sequence
  Description of Artificial Sequence: Synthetic oligonucleotide
aagucccuguaugagccag

SEQ ID NO: 2386627 - RNA, 19 nt, Artificial Sequence
  Description of Artificial Sequence: Synthetic oligonucleotide
gugucaucaacagcagagg

SEQ ID NO: 2386628 - RNA, 19 nt, Artificial Sequence
  Description of Artificial Sequence: Synthetic oligonucleotide
uucucagcucugaguacag

SEQ ID NO: 2386629 - RNA, 19 nt, Artificial Sequence
  Description of Artificial Sequence: Synthetic oligonucleotide
auucucagcucugaguaca

SEQ ID NO: 2386630 - RNA, 19 nt, Artificial Sequence
  Description of Artificial Sequence: Synthetic oligonucleotide
agaggagugaggcaaugua

SEQ ID NO: 2386631 - RNA, 19 nt, Artificial Sequence
  Description of Artificial Sequence: Synthetic oligonucleotide
uuccauagagaagucccug

SEQ ID NO: 2386632 - RNA, 19 nt, Artificial Sequence
  Description of Artificial Sequence: Synthetic oligonucleotide
cagauaccagauguaauug

SEQ ID NO: 2386633 - RNA, 19 nt, Artificial Sequence
  Description of Artificial Sequence: Synthetic oligonucleotide
gacugucuguagguuauag

SEQ ID NO: 2386634 - RNA, 19 nt, Artificial Sequence
  Description of Artificial Sequence: Synthetic oligonucleotide
guggagagugcauuaggac

SEQ ID NO: 2386635 - RNA, 19 nt, Artificial Sequence
  Description of Artificial Sequence: Synthetic oligonucleotide
gguuauagcauaugcuguc

SEQ ID NO: 2386636 - RNA, 19 nt, Artificial Sequence
  Description of Artificial Sequence: Synthetic oligonucleotide
auguacaguaucuccccga

SEQ ID NO: 2386637 - RNA, 19 nt, Artificial Sequence
  Description of Artificial Sequence: Synthetic oligonucleotide
gucugcgucacagcgaagc

SEQ ID NO: 2386638 - RNA, 19 nt, Artificial Sequence
  Description of Artificial Sequence: Synthetic oligonucleotide
agcgaacucgcugacccac

SEQ ID NO: 2386639 - RNA, 19 nt, Artificial Sequence
  Description of Artificial Sequence: Synthetic oligonucleotide
caaguaugaucuaucaacu

SEQ ID NO: 2386640 - RNA, 19 nt, Artificial Sequence
  Description of Artificial Sequence: Synthetic oligonucleotide
gcaauguacaguaucuccc

SEQ ID NO: 2386641 - RNA, 19 nt, Artificial Sequence
  Description of Artificial Sequence: Synthetic oligonucleotide
cugcaauuggauucucuuc

SEQ ID NO: 2386642 - RNA, 19 nt, Artificial Sequence
  Description of Artificial Sequence: Synthetic oligonucleotide
aucaggcuugacaaaauga

SEQ ID NO: 2386643 - RNA, 19 nt, Artificial Sequence
  Description of Artificial Sequence: Synthetic oligonucleotide
uagcauaugcuguccuugu

SEQ ID NO: 2386644 - RNA, 19 nt, Artificial Sequence
  Description of Artificial Sequence: Synthetic oligonucleotide
gcaaauucccaggagcagg

SEQ ID NO: 2386645 - RNA, 19 nt, Artificial Sequence
  Description of Artificial Sequence: Synthetic oligonucleotide
gaagagcugggagcaaaag

SEQ ID NO: 2386646 - RNA, 19 nt, Artificial Sequence
  Description of Artificial Sequence: Synthetic oligonucleotide
caacagcauacaaaggcca

SEQ ID NO: 2386647 - RNA, 19 nt, Artificial Sequence
  Description of Artificial Sequence: Synthetic oligonucleotide
agcauacaaaggccaccgg

SEQ ID NO: 2386648 - RNA, 19 nt, Artificial Sequence
  Description of Artificial Sequence: Synthetic oligonucleotide
gcaaugagguauccugugg

SEQ ID NO: 2386649 - RNA, 19 nt, Artificial Sequence
  Description of Artificial Sequence: Synthetic oligonucleotide
ggcugcugaaguuccauag

SEQ ID NO: 2386650 - RNA, 19 nt, Artificial Sequence
  Description of Artificial Sequence: Synthetic oligonucleotide
acugcccaacugcucacuc

SEQ ID NO: 2386651 - RNA, 19 nt, Artificial Sequence
  Description of Artificial Sequence: Synthetic oligonucleotide
agaagaguccggugggccu

SEQ ID NO: 2386652 - RNA, 19 nt, Artificial Sequence
  Description of Artificial Sequence: Synthetic oligonucleotide
gaccaguuuuaugauuagc

SEQ ID NO: 2386653 - RNA, 19 nt, Artificial Sequence
  Description of Artificial Sequence: Synthetic oligonucleotide
ggcaggaguucaaucaugg

SEQ ID NO: 2386654 - RNA, 19 nt, Artificial Sequence
  Description of Artificial Sequence: Synthetic oligonucleotide
gagcaggucagaaaagcuc

SEQ ID NO: 2386655 - RNA, 19 nt, Artificial Sequence
  Description of Artificial Sequence: Synthetic oligonucleotide
ucugcgucacagcgaagcu

SEQ ID NO: 2386656 - RNA, 19 nt, Artificial Sequence
  Description of Artificial Sequence: Synthetic oligonucleotide
agguuauagcauaugcugu

SEQ ID NO: 2386657 - RNA, 19 nt, Artificial Sequence
  Description of Artificial Sequence: Synthetic oligonucleotide
uucaaucauggcugagggu

SEQ ID NO: 2386658 - RNA, 19 nt, Artificial Sequence
  Description of Artificial Sequence: Synthetic oligonucleotide
agagaaagccaugugcaau

SEQ ID NO: 2386659 - RNA, 19 nt, Artificial Sequence
  Description of Artificial Sequence: Synthetic oligonucleotide
gggugucugcgucacagcg

SEQ ID NO: 2386660 - RNA, 19 nt, Artificial Sequence
  Description of Artificial Sequence: Synthetic oligonucleotide
aagaaugguggaagagcug

SEQ ID NO: 2386661 - RNA, 19 nt, Artificial Sequence
  Description of Artificial Sequence: Synthetic oligonucleotide
uugggcagacccugggaug

SEQ ID NO: 2386662 - RNA, 19 nt, Artificial Sequence
  Description of Artificial Sequence: Synthetic oligonucleotide
uggauucucuucugugaac

SEQ ID NO: 2386663 - RNA, 19 nt, Artificial Sequence
  Description of Artificial Sequence: Synthetic oligonucleotide
acauugcccaggcaaaaua

SEQ ID NO: 2386664 - RNA, 19 nt, Artificial Sequence
  Description of Artificial Sequence: Synthetic oligonucleotide
uguagaggagugaggcaau

SEQ ID NO: 2386665 - RNA, 19 nt, Artificial Sequence
  Description of Artificial Sequence: Synthetic oligonucleotide
cucacgcuuuagcugcugg

SEQ ID NO: 2386666 - RNA, 19 nt, Artificial Sequence
  Description of Artificial Sequence: Synthetic oligonucleotide
uaucaacugugcagcugug

SEQ ID NO: 2386667 - RNA, 19 nt, Artificial Sequence
  Description of Artificial Sequence: Synthetic oligonucleotide
agcauaugcuguccuugug

SEQ ID NO: 2386668 - RNA, 19 nt, Artificial Sequence
  Description of Artificial Sequence: Synthetic oligonucleotide
caggaguucaaucauggcu

SEQ ID NO: 2386669 - RNA, 19 nt, Artificial Sequence
  Description of Artificial Sequence: Synthetic oligonucleotide
gucuguagguuauagcaua

SEQ ID NO: 2386670 - RNA, 19 nt, Artificial Sequence
  Description of Artificial Sequence: Synthetic oligonucleotide
ugggccuagggcucggcug

SEQ ID NO: 2386671 - RNA, 19 nt, Artificial Sequence
  Description of Artificial Sequence: Synthetic oligonucleotide
gagugcauuaggacacacc

SEQ ID NO: 2386672 - RNA, 19 nt, Artificial Sequence
  Description of Artificial Sequence: Synthetic oligonucleotide
cugugcucuguccacuuug

SEQ ID NO: 2386673 - RNA, 19 nt, Artificial Sequence
  Description of Artificial Sequence: Synthetic oligonucleotide
guaucuccccgacugucug

SEQ ID NO: 2386674 - RNA, 19 nt, Artificial Sequence
  Description of Artificial Sequence: Synthetic oligonucleotide
uuaccacuuuggcaaguau

SEQ ID NO: 2386675 - RNA, 19 nt, Artificial Sequence
  Description of Artificial Sequence: Synthetic oligonucleotide
uggcuugaccaguuuuaug

SEQ ID NO: 2386676 - RNA, 19 nt, Artificial Sequence
  Description of Artificial Sequence: Synthetic oligonucleotide
ggagugaggcaauguacag

SEQ ID NO: 2386677 - RNA, 19 nt, Artificial Sequence
  Description of Artificial Sequence: Synthetic oligonucleotide
auguguugguggaaggcag

SEQ ID NO: 2386678 - RNA, 19 nt, Artificial Sequence
  Description of Artificial Sequence: Synthetic oligonucleotide
guacagauaccagauguaa

SEQ ID NO: 2386679 - RNA, 19 nt, Artificial Sequence
  Description of Artificial Sequence: Synthetic oligonucleotide
cauucucagcucugaguac

SEQ ID NO: 2386680 - RNA, 19 nt, Artificial Sequence
  Description of Artificial Sequence: Synthetic oligonucleotide
cuguguccagccauauaug

SEQ ID NO: 2386681 - RNA, 19 nt, Artificial Sequence
  Description of Artificial Sequence: Synthetic oligonucleotide
agaguuguggaaacaucca

SEQ ID NO: 2386682 - RNA, 19 nt, Artificial Sequence
  Description of Artificial Sequence: Synthetic oligonucleotide
guguagaggagugaggcaa

SEQ ID NO: 2386683 - RNA, 19 nt, Artificial Sequence
  Description of Artificial Sequence: Synthetic oligonucleotide
uggcuagaguuguggaaac

SEQ ID NO: 2386684 - RNA, 19 nt, Artificial Sequence
  Description of Artificial Sequence: Synthetic oligonucleotide
  modified_base (17)..(17): a, c, u, g, unknown or other
gaaaacaagugacgccnua

SEQ ID NO: 2386685 - RNA, 19 nt, Artificial Sequence
  Description of Artificial Sequence: Synthetic oligonucleotide
uggcuguguuucauucuca

SEQ ID NO: 2386686 - RNA, 19 nt, Artificial Sequence
  Description of Artificial Sequence: Synthetic oligonucleotide
uccccgacugucuguaggu

SEQ ID NO: 2386687 - RNA, 19 nt, Artificial Sequence
  Description of Artificial Sequence: Synthetic oligonucleotide
agauguaauugacggugua

SEQ ID NO: 2386688 - RNA, 19 nt, Artificial Sequence
  Description of Artificial Sequence: Synthetic oligonucleotide
gaguccggugggccuaggg

SEQ ID NO: 2386689 - RNA, 19 nt, Artificial Sequence
  Description of Artificial Sequence: Synthetic oligonucleotide
ugcacuguguccagccaua

SEQ ID NO: 2386690 - RNA, 19 nt, Artificial Sequence
  Description of Artificial Sequence: Synthetic oligonucleotide
aauugacgguguagaggag

SEQ ID NO: 2386691 - RNA, 19 nt, Artificial Sequence
  Description of Artificial Sequence: Synthetic oligonucleotide
aguuguggaaacauccauu

SEQ ID NO: 2386692 - RNA, 19 nt, Artificial Sequence
  Description of Artificial Sequence: Synthetic oligonucleotide
guagguuauagcauaugcu

SEQ ID NO: 2386693 - RNA, 19 nt, Artificial Sequence
  Description of Artificial Sequence: Synthetic oligonucleotide
aggcaaaauacagguguca

SEQ ID NO: 2386694 - RNA, 19 nt, Artificial Sequence
  Description of Artificial Sequence: Synthetic oligonucleotide
aagcgaacucgcugaccca

SEQ ID NO: 2386695 - RNA, 19 nt, Artificial Sequence
  Description of Artificial Sequence: Synthetic oligonucleotide
uagaggagugaggcaaugu

SEQ ID NO: 2386696 - RNA, 19 nt, Artificial Sequence
  Description of Artificial Sequence: Synthetic oligonucleotide
ggguggagagugcauuagg

SEQ ID NO: 2386697 - RNA, 19 nt, Artificial Sequence
  Description of Artificial Sequence: Synthetic oligonucleotide
guuucauucucagcucuga

SEQ ID NO: 2386698 - RNA, 19 nt, Artificial Sequence
  Description of Artificial Sequence: Synthetic oligonucleotide
uugugggcugcugaaguuc

SEQ ID NO: 2386699 - RNA, 19 nt, Artificial Sequence
  Description of Artificial Sequence: Synthetic oligonucleotide
cugggccccaacagcauac

SEQ ID NO: 2386700 - RNA, 19 nt, Artificial Sequence
  Description of Artificial Sequence: Synthetic oligonucleotide
ggauucucuucugugaaca

SEQ ID NO: 2386701 - RNA, 19 nt, Artificial Sequence
  Description of Artificial Sequence: Synthetic oligonucleotide
auuagcagugugacagcug

SEQ ID NO: 2386702 - RNA, 19 nt, Artificial Sequence
  Description of Artificial Sequence: Synthetic oligonucleotide
gugucugcgucacagcgaa

SEQ ID NO: 2386703 - RNA, 19 nt, Artificial Sequence
  Description of Artificial Sequence: Synthetic oligonucleotide
gguaucaggcuugacaaaa

SEQ ID NO: 2386704 - RNA, 19 nt, Artificial Sequence
  Description of Artificial Sequence: Synthetic oligonucleotide
caguugggcagacccuggg

SEQ ID NO: 2386705 - RNA, 19 nt, Artificial Sequence
  Description of Artificial Sequence: Synthetic oligonucleotide
agaaagccaugugcaauga

SEQ ID NO: 2386706 - RNA, 19 nt, Artificial Sequence
  Description of Artificial Sequence: Synthetic oligonucleotide
ugaggguggagagugcauu

SEQ ID NO: 2386707 - RNA, 19 nt, Artificial Sequence
  Description of Artificial Sequence: Synthetic oligonucleotide
gauuagcagugugacagcu

SEQ ID NO: 2386708 - RNA, 19 nt, Artificial Sequence
  Description of Artificial Sequence: Synthetic oligonucleotide
ugacauugcccaggcaaaa

SEQ ID NO: 2386709 - RNA, 19 nt, Artificial Sequence
  Description of Artificial Sequence: Synthetic oligonucleotide
uguuaccacuuuggcaagu

SEQ ID NO: 2386710 - RNA, 19 nt, Artificial Sequence
  Description of Artificial Sequence: Synthetic oligonucleotide
gcaaaaguaagagaagagu

SEQ ID NO: 2386711 - RNA, 19 nt, Artificial Sequence
  Description of Artificial Sequence: Synthetic oligonucleotide
agcucagauaaaagaguga

SEQ ID NO: 2386712 - RNA, 19 nt, Artificial Sequence
  Description of Artificial Sequence: Synthetic oligonucleotide
cuggcuagaguuguggaaa

SEQ ID NO: 2386713 - RNA, 19 nt, Artificial Sequence
  Description of Artificial Sequence: Synthetic oligonucleotide
agacuaggucaggaaaaca

SEQ ID NO: 2386714 - RNA, 19 nt, Artificial Sequence
  Description of Artificial Sequence: Synthetic oligonucleotide
agucccuguaugagccagc

SEQ ID NO: 2386715 - RNA, 19 nt, Artificial Sequence
  Description of Artificial Sequence: Synthetic oligonucleotide
aggguggagagugcauuag

SEQ ID NO: 2386716 - RNA, 19 nt, Artificial Sequence
  Description of Artificial Sequence: Synthetic oligonucleotide
cuuuagcugcuggaacuug

SEQ ID NO: 2386717 - RNA, 19 nt, Artificial Sequence
  Description of Artificial Sequence: Synthetic oligonucleotide
gaguucaaucauggcugag

SEQ ID NO: 2386718 - RNA, 19 nt, Artificial Sequence
  Description of Artificial Sequence: Synthetic oligonucleotide
caugugcaaugagguaucc

SEQ ID NO: 2386719 - RNA, 19 nt, Artificial Sequence
  Description of Artificial Sequence: Synthetic oligonucleotide
cuguagguuauagcauaug

SEQ ID NO: 2386720 - RNA, 19 nt, Artificial Sequence
  Description of Artificial Sequence: Synthetic oligonucleotide
gguauccuguggcuugacc

SEQ ID NO: 2386721 - RNA, 19 nt, Artificial Sequence
  Description of Artificial Sequence: Synthetic oligonucleotide
uaucuccccgacugucugu

SEQ ID NO: 2386722 - RNA, 19 nt, Artificial Sequence
  Description of Artificial Sequence: Synthetic oligonucleotide
gcuguguuucauucucagc

SEQ ID NO: 2386723 - RNA, 19 nt, Artificial Sequence
  Description of Artificial Sequence: Synthetic oligonucleotide
acgguguagaggagugagg

SEQ ID NO: 2386724 - RNA, 19 nt, Artificial Sequence
  Description of Artificial Sequence: Synthetic oligonucleotide
gugcauuaggacacaccug

SEQ ID NO: 2386725 - RNA, 19 nt, Artificial Sequence
  Description of Artificial Sequence: Synthetic oligonucleotide
guguuucauucucagcucu

SEQ ID NO: 2386726 - RNA, 19 nt, Artificial Sequence
  Description of Artificial Sequence: Synthetic oligonucleotide
ggucagaaaagcucagaua

SEQ ID NO: 2386727 - RNA, 19 nt, Artificial Sequence
  Description of Artificial Sequence: Synthetic oligonucleotide
cccuguaugagccagcaaa

SEQ ID NO: 2386728 - RNA, 19 nt, Artificial Sequence
  Description of Artificial Sequence: Synthetic oligonucleotide
aagaguccggugggccuag

SEQ ID NO: 2386729 - RNA, 19 nt, Artificial Sequence
  Description of Artificial Sequence: Synthetic oligonucleotide
agguaucaggcuugacaaa

SEQ ID NO: 2386730 - RNA, 19 nt, Artificial Sequence
  Description of Artificial Sequence: Synthetic oligonucleotide
gcagugugacagcugggcc

SEQ ID NO: 2386731 - RNA, 19 nt, Artificial Sequence
  Description of Artificial Sequence: Synthetic oligonucleotide
gaggguggagagugcauua

SEQ ID NO: 2386732 - RNA, 19 nt, Artificial Sequence
  Description of Artificial Sequence: Synthetic oligonucleotide
gacccacaauguaaaucac

SEQ ID NO: 2386733 - RNA, 19 nt, Artificial Sequence
  Description of Artificial Sequence: Synthetic oligonucleotide
gcgaagcucacgcuuuagc

SEQ ID NO: 2386734 - RNA, 19 nt, Artificial Sequence
  Description of Artificial Sequence: Synthetic oligonucleotide
uccggugggccuagggcuc

SEQ ID NO: 2386735 - RNA, 19 nt, Artificial Sequence
  Description of Artificial Sequence: Synthetic oligonucleotide
guggcucuggcuagaguug

SEQ ID NO: 2386736 - RNA, 19 nt, Artificial Sequence
  Description of Artificial Sequence: Synthetic oligonucleotide
augugcaaugagguauccu

SEQ ID NO: 2386737 - RNA, 19 nt, Artificial Sequence
  Description of Artificial Sequence: Synthetic oligonucleotide
auacagugugcugcagaca

SEQ ID NO: 2386738 - RNA, 19 nt, Artificial Sequence
  Description of Artificial Sequence: Synthetic oligonucleotide
ggcaaguaugaucuaucaa

SEQ ID NO: 2386739 - RNA, 19 nt, Artificial Sequence
  Description of Artificial Sequence: Synthetic oligonucleotide
ucucagcucugaguacaga

SEQ ID NO: 2386740 - RNA, 19 nt, Artificial Sequence
  Description of Artificial Sequence: Synthetic oligonucleotide
caguaucuccccgacuguc

SEQ ID NO: 2386741 - RNA, 19 nt, Artificial Sequence
  Description of Artificial Sequence: Synthetic oligonucleotide
ugacgguguagaggaguga

SEQ ID NO: 2386742 - RNA, 19 nt, Artificial Sequence
  Description of Artificial Sequence: Synthetic oligonucleotide
ugucugcgucacagcgaag

SEQ ID NO: 2386743 - RNA, 19 nt, Artificial Sequence
  Description of Artificial Sequence: Synthetic oligonucleotide
guugggcagacccugggau

SEQ ID NO: 2386744 - RNA, 19 nt, Artificial Sequence
  Description of Artificial Sequence: Synthetic oligonucleotide
agcgaagcucacgcuuuag

SEQ ID NO: 2386745 - RNA, 19 nt, Artificial Sequence
  Description of Artificial Sequence: Synthetic oligonucleotide
aggcaggaguucaaucaug

SEQ ID NO: 2386746 - RNA, 19 nt, Artificial Sequence
  Description of Artificial Sequence: Synthetic oligonucleotide
cauagagaagucccuguau

SEQ ID NO: 2386747 - RNA, 19 nt, Artificial Sequence
  Description of Artificial Sequence: Synthetic oligonucleotide
gguguagaggagugaggca

SEQ ID NO: 2386748 - RNA, 19 nt, Artificial Sequence
  Description of Artificial Sequence: Synthetic oligonucleotide
acucgcugacccacaaugu

SEQ ID NO: 2386749 - RNA, 19 nt, Artificial Sequence
  Description of Artificial Sequence: Synthetic oligonucleotide
cuugcacuguguccagcca

SEQ ID NO: 2386750 - RNA, 19 nt, Artificial Sequence
  Description of Artificial Sequence: Synthetic oligonucleotide
gagugaggcaauguacagu

SEQ ID NO: 2386751 - RNA, 19 nt, Artificial Sequence
  Description of Artificial Sequence: Synthetic oligonucleotide
ucugggugucugcgucaca

SEQ ID NO: 2386752 - RNA, 19 nt, Artificial Sequence
  Description of Artificial Sequence: Synthetic oligonucleotide
gggccuagggcucggcugc

SEQ ID NO: 2386753 - RNA, 19 nt, Artificial Sequence
  Description of Artificial Sequence: Synthetic oligonucleotide
ccaugugcaaugagguauc

SEQ ID NO: 2386754 - RNA, 19 nt, Artificial Sequence
  Description of Artificial Sequence: Synthetic oligonucleotide
cucgcugacccacaaugua

SEQ ID NO: 2386755 - RNA, 19 nt, Artificial Sequence
  Description of Artificial Sequence: Synthetic oligonucleotide
caauuggauucucuucugu

SEQ ID NO: 2386756 - RNA, 19 nt, Artificial Sequence
  Description of Artificial Sequence: Synthetic oligonucleotide
aucauggcugaggguggag

SEQ ID NO: 2386757 - RNA, 19 nt, Artificial Sequence
  Description of Artificial Sequence: Synthetic oligonucleotide
guuaccacuuuggcaagua

SEQ ID NO: 2386758 - RNA, 19 nt, Artificial Sequence
  Description of Artificial Sequence: Synthetic oligonucleotide
acagcgaagcucacgcuuu

SEQ ID NO: 2386759 - RNA, 19 nt, Artificial Sequence
  Description of Artificial Sequence: Synthetic oligonucleotide
guccggugggccuagggcu

SEQ ID NO: 2386760 - RNA, 19 nt, Artificial Sequence
  Description of Artificial Sequence: Synthetic oligonucleotide
ucccuguaugagccagcaa

SEQ ID NO: 2386761 - RNA, 19 nt, Artificial Sequence
  Description of Artificial Sequence: Synthetic oligonucleotide
cugcgucacagcgaagcuc

SEQ ID NO: 2386762 - RNA, 19 nt, Artificial Sequence
  Description of Artificial Sequence: Synthetic oligonucleotide
gagagugcauuaggacaca

SEQ ID NO: 2386763 - RNA, 19 nt, Artificial Sequence
  Description of Artificial Sequence: Synthetic oligonucleotide
gaacacuauguuaccacuu

SEQ ID NO: 2386764 - RNA, 19 nt, Artificial Sequence
  Description of Artificial Sequence: Synthetic oligonucleotide
agguauccuguggcuugac

SEQ ID NO: 2386765 - RNA, 19 nt, Artificial Sequence
  Description of Artificial Sequence: Synthetic oligonucleotide
guuuuaugauuagcagugu

SEQ ID NO: 2386766 - RNA, 19 nt, Artificial Sequence
  Description of Artificial Sequence: Synthetic oligonucleotide
gaagaguccggugggccua

SEQ ID NO: 2386767 - RNA, 19 nt, Artificial Sequence
  Description of Artificial Sequence: Synthetic oligonucleotide
cuugaccaguuuuaugauu

SEQ ID NO: 2386768 - RNA, 19 nt, Artificial Sequence
  Description of Artificial Sequence: Synthetic oligonucleotide
gucccuguaugagccagca

SEQ ID NO: 2386769 - RNA, 19 nt, Artificial Sequence
  Description of Artificial Sequence: Synthetic oligonucleotide
uagggcucggcugcugcaa

SEQ ID NO: 2386770 - RNA, 19 nt, Artificial Sequence
  Description of Artificial Sequence: Synthetic oligonucleotide
ccccaacagcauacaaagg

SEQ ID NO: 2386771 - RNA, 19 nt, Artificial Sequence
  Description of Artificial Sequence: Synthetic oligonucleotide
guuccauagagaagucccu

SEQ ID NO: 2386772 - RNA, 19 nt, Artificial Sequence
  Description of Artificial Sequence: Synthetic oligonucleotide
cagauaaaagagugauuuu

SEQ ID NO: 2386773 - RNA, 19 nt, Artificial Sequence
  Description of Artificial Sequence: Synthetic oligonucleotide
gucugggugucugcgucac

SEQ ID NO: 2386774 - RNA, 19 nt, Artificial Sequence
  Description of Artificial Sequence: Synthetic oligonucleotide
gcugcaauuggauucucuu

SEQ ID NO: 2386775 - RNA, 19 nt, Artificial Sequence
  Description of Artificial Sequence: Synthetic oligonucleotide
cccaggcaaaauacaggug

SEQ ID NO: 2386776 - RNA, 19 nt, Artificial Sequence
  Description of Artificial Sequence: Synthetic oligonucleotide
gugcaaugagguauccugu

SEQ ID NO: 2386777 - RNA, 19 nt, Artificial Sequence
  Description of Artificial Sequence: Synthetic oligonucleotide
aucuccccgacugucugua

SEQ ID NO: 2386778 - RNA, 19 nt, Artificial Sequence
  Description of Artificial Sequence: Synthetic oligonucleotide
ggcucggcugcugcaauug

SEQ ID NO: 2386779 - RNA, 19 nt, Artificial Sequence
  Description of Artificial Sequence: Synthetic oligonucleotide
gacauugcccaggcaaaau

SEQ ID NO: 2386780 - RNA, 19 nt, Artificial Sequence
  Description of Artificial Sequence: Synthetic oligonucleotide
agggcucggcugcugcaau

SEQ ID NO: 2386781 - RNA, 19 nt, Artificial Sequence
  Description of Artificial Sequence: Synthetic oligonucleotide
cacagcgaagcucacgcuu

SEQ ID NO: 2386782 - RNA, 19 nt, Artificial Sequence
  Description of Artificial Sequence: Synthetic oligonucleotide
ggugucugcgucacagcga

SEQ ID NO: 2386783 - RNA, 19 nt, Artificial Sequence
  Description of Artificial Sequence: Synthetic oligonucleotide
gcauuaggacacaccugug

SEQ ID NO: 2386784 - RNA, 19 nt, Artificial Sequence
  Description of Artificial Sequence: Synthetic oligonucleotide
cuuuggcaaguaugaucua

SEQ ID NO: 2386785 - RNA, 19 nt, Artificial Sequence
  Description of Artificial Sequence: Synthetic oligonucleotide
ggagcaggucagaaaagcu

SEQ ID NO: 2386786 - RNA, 19 nt, Artificial Sequence
  Description of Artificial Sequence: Synthetic oligonucleotide
guaucaggcuugacaaaau

SEQ ID NO: 2386787 - RNA, 19 nt, Artificial Sequence
  Description of Artificial Sequence: Synthetic oligonucleotide
gaacucgcugacccacaau

SEQ ID NO: 2386788 - RNA, 19 nt, Artificial Sequence
  Description of Artificial Sequence: Synthetic oligonucleotide
gccaccgggaagaagcgaa

SEQ ID NO: 2386789 - RNA, 19 nt, Artificial Sequence
  Description of Artificial Sequence: Synthetic oligonucleotide
cuugugggcugcugaaguu

SEQ ID NO: 2386790 - RNA, 19 nt, Artificial Sequence
  Description of Artificial Sequence: Synthetic oligonucleotide
cagagguaucaggcuugac

SEQ ID NO: 2386791 - RNA, 19 nt, Artificial Sequence
  Description of Artificial Sequence: Synthetic oligonucleotide
ggcuagaguuguggaaaca

SEQ ID NO: 2386792 - RNA, 19 nt, Artificial Sequence
  Description of Artificial Sequence: Synthetic oligonucleotide
ccaccgggaagaagcgaac

SEQ ID NO: 2386793 - RNA, 19 nt, Artificial Sequence
  Description of Artificial Sequence: Synthetic oligonucleotide
ccauagagaagucccugua

SEQ ID NO: 2386794 - RNA, 19 nt, Artificial Sequence
  Description of Artificial Sequence: Synthetic oligonucleotide
guggaaggcaggaguucaa

SEQ ID NO: 2386795 - RNA, 19 nt, Artificial Sequence
  Description of Artificial Sequence: Synthetic oligonucleotide
cgaagcucacgcuuuagcu

SEQ ID NO: 2386796 - RNA, 19 nt, Artificial Sequence
  Description of Artificial Sequence: Synthetic oligonucleotide
ggacacaccuguggcucug

SEQ ID NO: 2386797 - RNA, 19 nt, Artificial Sequence
  Description of Artificial Sequence: Synthetic oligonucleotide
agaguccggugggccuagg

SEQ ID NO: 2386798 - RNA, 19 nt, Artificial Sequence
  Description of Artificial Sequence: Synthetic oligonucleotide
cgucacagcgaagcucacg

SEQ ID NO: 2386799 - RNA, 19 nt, Artificial Sequence
  Description of Artificial Sequence: Synthetic oligonucleotide
gcagagguaucaggcuuga

SEQ ID NO: 2386800 - RNA, 19 nt, Artificial Sequence
  Description of Artificial Sequence: Synthetic oligonucleotide
ccuguggcucuggcuagag

SEQ ID NO: 2386801 - RNA, 19 nt, Artificial Sequence
  Description of Artificial Sequence: Synthetic oligonucleotide
  modified_base (18)..(18): a, c, u, g, unknown or other
ggaaaacaagugacgccnu

SEQ ID NO: 2386802 - RNA, 19 nt, Artificial Sequence
  Description of Artificial Sequence: Synthetic oligonucleotide
ggcucuggcuagaguugug

SEQ ID NO: 2386803 - RNA, 19 nt, Artificial Sequence
  Description of Artificial Sequence: Synthetic oligonucleotide
caccgggaagaagcgaacu

SEQ ID NO: 2386804 - RNA, 19 nt, Artificial Sequence
  Description of Artificial Sequence: Synthetic oligonucleotide
cagcgaagcucacgcuuua

SEQ ID NO: 2386805 - RNA, 19 nt, Artificial Sequence
  Description of Artificial Sequence: Synthetic oligonucleotide
cccgacugucuguagguua

SEQ ID NO: 2386806 - RNA, 19 nt, Artificial Sequence
  Description of Artificial Sequence: Synthetic oligonucleotide
gcccaacugcucacucucc

SEQ ID NO: 2386807 - RNA, 19 nt, Artificial Sequence
  Description of Artificial Sequence: Synthetic oligonucleotide
gggcugcugaaguuccaua

SEQ ID NO: 2386808 - RNA, 19 nt, Artificial Sequence
  Description of Artificial Sequence: Synthetic oligonucleotide
gcugggccccaacagcaua

SEQ ID NO: 2386809 - RNA, 19 nt, Artificial Sequence
  Description of Artificial Sequence: Synthetic oligonucleotide
ccgacugucuguagguuau

SEQ ID NO: 2386810 - RNA, 19 nt, Artificial Sequence
  Description of Artificial Sequence: Synthetic oligonucleotide
cuguggcucuggcuagagu

SEQ ID NO: 2386811 - RNA, 19 nt, Artificial Sequence
  Description of Artificial Sequence: Synthetic oligonucleotide
gcgaacucgcugacccaca

SEQ ID NO: 2386812 - RNA, 19 nt, Artificial Sequence
  Description of Artificial Sequence: Synthetic oligonucleotide
ccggugggccuagggcucg

SEQ ID NO: 2386813 - RNA, 19 nt, Artificial Sequence
  Description of Artificial Sequence: Synthetic oligonucleotide
cgaacucgcugacccacaa

SEQ ID NO: 2386814 - RNA, 19 nt, Artificial Sequence
  Description of Artificial Sequence: Synthetic oligonucleotide
gugugacagcugggcccca

SEQ ID NO: 2386815 - RNA, 19 nt, Artificial Sequence
  Description of Artificial Sequence: Synthetic oligonucleotide
gcugugcucuguccacuuu

SEQ ID NO: 2386816 - RNA, 19 nt, Artificial Sequence
  Description of Artificial Sequence: Synthetic oligonucleotide
gcgucacagcgaagcucac

SEQ ID NO: 2386817 - RNA, 19 nt, Artificial Sequence
  Description of Artificial Sequence: Synthetic oligonucleotide
ccacuuuggcaaguaugau

SEQ ID NO: 2386818 - RNA, 19 nt, Artificial Sequence
  Description of Artificial Sequence: Synthetic oligonucleotide
gggcucggcugcugcaauu

SEQ ID NO: 2386819 - RNA, 19 nt, Artificial Sequence
  Description of Artificial Sequence: Synthetic oligonucleotide
ggccuagggcucggcugcu

SEQ ID NO: 2386820 - RNA, 19 nt, Artificial Sequence
  Description of Artificial Sequence: Synthetic oligonucleotide
cgacugucuguagguuaua

SEQ ID NO: 2386821 - RNA, 19 nt, Artificial Sequence
  Description of Artificial Sequence: Synthetic oligonucleotide
ccccgacugucuguagguu

SEQ ID NO: 2386822 - RNA, 19 nt, Artificial Sequence
  Description of Artificial Sequence: Synthetic oligonucleotide
aaaugagagagacaggugg

SEQ ID NO: 2386823 - RNA, 19 nt, Artificial Sequence
  Description of Artificial Sequence: Synthetic oligonucleotide
uguguaguuuccaagagcc

SEQ ID NO: 2386824 - RNA, 19 nt, Artificial Sequence
  Description of Artificial Sequence: Synthetic oligonucleotide
uggugcaagagaaacaugg

SEQ ID NO: 2386825 - RNA, 19 nt, Artificial Sequence
  Description of Artificial Sequence: Synthetic oligonucleotide
ucgaauuugaauuugugcu

SEQ ID NO: 2386826 - RNA, 19 nt, Artificial Sequence
  Description of Artificial Sequence: Synthetic oligonucleotide
uucaauguaguaaugcccc

SEQ ID NO: 2386827 - RNA, 19 nt, Artificial Sequence
  Description of Artificial Sequence: Synthetic oligonucleotide
uggacuaggacuuggagag

SEQ ID NO: 2386828 - RNA, 19 nt, Artificial Sequence
  Description of Artificial Sequence: Synthetic oligonucleotide
ugcaagagaaacauggccc

SEQ ID NO: 2386829 - RNA, 19 nt, Artificial Sequence
  Description of Artificial Sequence: Synthetic oligonucleotide
aaggcaauaaguaccaggg

SEQ ID NO: 2386830 - RNA, 19 nt, Artificial Sequence
  Description of Artificial Sequence: Synthetic oligonucleotide
gaagagaugaauucugagc

SEQ ID NO: 2386831 - RNA, 19 nt, Artificial Sequence
  Description of Artificial Sequence: Synthetic oligonucleotide
agaacccuggacuaggagc

SEQ ID NO: 2386832 - RNA, 19 nt, Artificial Sequence
  Description of Artificial Sequence: Synthetic oligonucleotide
aauguaguaaugccccagg

SEQ ID NO: 2386833 - RNA, 19 nt, Artificial Sequence
  Description of Artificial Sequence: Synthetic oligonucleotide
guaggugucaucgugaagg

SEQ ID NO: 2386834 - RNA, 19 nt, Artificial Sequence
  Description of Artificial Sequence: Synthetic oligonucleotide
uuuugguugggauucaaug

SEQ ID NO: 2386835 - RNA, 19 nt, Artificial Sequence
  Description of Artificial Sequence: Synthetic oligonucleotide
gaaggcaauaaguaccagg

SEQ ID NO: 2386836 - RNA, 19 nt, Artificial Sequence
  Description of Artificial Sequence: Synthetic oligonucleotide
aguugagguagacuguacc

SEQ ID NO: 2386837 - RNA, 19 nt, Artificial Sequence
  Description of Artificial Sequence: Synthetic oligonucleotide
guaguaaugccccaggccc

SEQ ID NO: 2386838 - RNA, 19 nt, Artificial Sequence
  Description of Artificial Sequence: Synthetic oligonucleotide
auucaauguaguaaugccc

SEQ ID NO: 2386839 - RNA, 19 nt, Artificial Sequence
  Description of Artificial Sequence: Synthetic oligonucleotide
cuucggguaaugcagaagg

SEQ ID NO: 2386840 - RNA, 19 nt, Artificial Sequence
  Description of Artificial Sequence: Synthetic oligonucleotide
ugaauuugugcuuggagcu

SEQ ID NO: 2386841 - RNA, 19 nt, Artificial Sequence
  Description of Artificial Sequence: Synthetic oligonucleotide
acuaugcuuguauuucugc

SEQ ID NO: 2386842 - RNA, 19 nt, Artificial Sequence
  Description of Artificial Sequence: Synthetic oligonucleotide
cugagaauguccauugugc

SEQ ID NO: 2386843 - RNA, 19 nt, Artificial Sequence
  Description of Artificial Sequence: Synthetic oligonucleotide
uguaguaaugccccaggcc

SEQ ID NO: 2386844 - RNA, 19 nt, Artificial Sequence
  Description of Artificial Sequence: Synthetic oligonucleotide
auaaguaccagggugagga

SEQ ID NO: 2386845 - RNA, 19 nt, Artificial Sequence
  Description of Artificial Sequence: Synthetic oligonucleotide
auguguaguuuccaagagc

SEQ ID NO: 2386846 - RNA, 19 nt, Artificial Sequence
  Description of Artificial Sequence: Synthetic oligonucleotide
gaauucugagcugagaaug

SEQ ID NO: 2386847 - RNA, 19 nt, Artificial Sequence
  Description of Artificial Sequence: Synthetic oligonucleotide
aaggugaacagcuggagaa

SEQ ID NO: 2386848 - RNA, 19 nt, Artificial Sequence
  Description of Artificial Sequence: Synthetic oligonucleotide
uuugguugggauucaaugu

SEQ ID NO: 2386849 - RNA, 19 nt, Artificial Sequence
  Description of Artificial Sequence: Synthetic oligonucleotide
uuuccaagagccuccuugg

SEQ ID NO: 2386850 - RNA, 19 nt, Artificial Sequence
  Description of Artificial Sequence: Synthetic oligonucleotide
gacacauuguauuccacug

SEQ ID NO: 2386851 - RNA, 19 nt, Artificial Sequence
  Description of Artificial Sequence: Synthetic oligonucleotide
acacauuguauuccacugc

SEQ ID NO: 2386852 - RNA, 19 nt, Artificial Sequence
  Description of Artificial Sequence: Synthetic oligonucleotide
acugccauguaguugaggu

SEQ ID NO: 2386853 - RNA, 19 nt, Artificial Sequence
  Description of Artificial Sequence: Synthetic oligonucleotide
aaugagagagacagguggg

SEQ ID NO: 2386854 - RNA, 19 nt, Artificial Sequence
  Description of Artificial Sequence: Synthetic oligonucleotide
aggugagccgcccauaagg

SEQ ID NO: 2386855 - RNA, 19 nt, Artificial Sequence
  Description of Artificial Sequence: Synthetic oligonucleotide
guagacuguacccugcucc

SEQ ID NO: 2386856 - RNA, 19 nt, Artificial Sequence
  Description of Artificial Sequence: Synthetic oligonucleotide
aaacauggccccaaguguc

SEQ ID NO: 2386857 - RNA, 19 nt, Artificial Sequence
  Description of Artificial Sequence: Synthetic oligonucleotide
ugccauguaguugagguag

SEQ ID NO: 2386858 - RNA, 19 nt, Artificial Sequence
  Description of Artificial Sequence: Synthetic oligonucleotide
auguaguaaugccccaggc

SEQ ID NO: 2386859 - RNA, 19 nt, Artificial Sequence
  Description of Artificial Sequence: Synthetic oligonucleotide
uguacccugcuccaugucc

SEQ ID NO: 2386860 - RNA, 19 nt, Artificial Sequence
  Description of Artificial Sequence: Synthetic oligonucleotide
ugggauucaauguaguaau

SEQ ID NO: 2386861 - RNA, 19 nt, Artificial Sequence
  Description of Artificial Sequence: Synthetic oligonucleotide
ugugcuuggagcugaacac

SEQ ID NO: 2386862 - RNA, 19 nt, Artificial Sequence
  Description of Artificial Sequence: Synthetic oligonucleotide
cacauuguauuccacugcc

SEQ ID NO: 2386863 - RNA, 19 nt, Artificial Sequence
  Description of Artificial Sequence: Synthetic oligonucleotide
guugagguagacuguaccc

SEQ ID NO: 2386864 - RNA, 19 nt, Artificial Sequence
  Description of Artificial Sequence: Synthetic oligonucleotide
gaagaguaggucaagguga

SEQ ID NO: 2386865 - RNA, 19 nt, Artificial Sequence
  Description of Artificial Sequence: Synthetic oligonucleotide
uuguauuccacugccaugu

SEQ ID NO: 2386866 - RNA, 19 nt, Artificial Sequence
  Description of Artificial Sequence: Synthetic oligonucleotide
auacuggugguagugggcc

SEQ ID NO: 2386867 - RNA, 19 nt, Artificial Sequence
  Description of Artificial Sequence: Synthetic oligonucleotide
uccauguccuguuugaauc

SEQ ID NO: 2386868 - RNA, 19 nt, Artificial Sequence
  Description of Artificial Sequence: Synthetic oligonucleotide
uccauguguaguuuccaag

SEQ ID NO: 2386869 - RNA, 19 nt, Artificial Sequence
  Description of Artificial Sequence: Synthetic oligonucleotide
uugauugccgucuucgggu

SEQ ID NO: 2386870 - RNA, 19 nt, Artificial Sequence
  Description of Artificial Sequence: Synthetic oligonucleotide
augguagagaacccuggac

SEQ ID NO: 2386871 - RNA, 19 nt, Artificial Sequence
  Description of Artificial Sequence: Synthetic oligonucleotide
aaagaacuaugcuuguauu

SEQ ID NO: 2386872 - RNA, 19 nt, Artificial Sequence
  Description of Artificial Sequence: Synthetic oligonucleotide
uguccuugggcuacaagca

SEQ ID NO: 2386873 - RNA, 19 nt, Artificial Sequence
  Description of Artificial Sequence: Synthetic oligonucleotide
guggaguugguccagguug

SEQ ID NO: 2386874 - RNA, 19 nt, Artificial Sequence
  Description of Artificial Sequence: Synthetic oligonucleotide
guugauugccgucuucggg

SEQ ID NO: 2386875 - RNA, 19 nt, Artificial Sequence
  Description of Artificial Sequence: Synthetic oligonucleotide
uuugaauccaaaggugagc

SEQ ID NO: 2386876 - RNA, 19 nt, Artificial Sequence
  Description of Artificial Sequence: Synthetic oligonucleotide
aguaccagggugaggaggc

SEQ ID NO: 2386877 - RNA, 19 nt, Artificial Sequence
  Description of Artificial Sequence: Synthetic oligonucleotide
ggagaaagaacuaugcuug

SEQ ID NO: 2386878 - RNA, 19 nt, Artificial Sequence
  Description of Artificial Sequence: Synthetic oligonucleotide
ggcaauaaguaccagggug

SEQ ID NO: 2386879 - RNA, 19 nt, Artificial Sequence
  Description of Artificial Sequence: Synthetic oligonucleotide
aauccaaaggugagccgcc

SEQ ID NO: 2386880 - RNA, 19 nt, Artificial Sequence
  Description of Artificial Sequence: Synthetic oligonucleotide
uacaagcagucccagcaag

SEQ ID NO: 2386881 - RNA, 19 nt, Artificial Sequence
  Description of Artificial Sequence: Synthetic oligonucleotide
agugccguuguuguggugg

SEQ ID NO: 2386882 - RNA, 19 nt, Artificial Sequence
  Description of Artificial Sequence: Synthetic oligonucleotide
uguaguuuccaagagccuc

SEQ ID NO: 2386883 - RNA, 19 nt, Artificial Sequence
  Description of Artificial Sequence: Synthetic oligonucleotide
acaggauucgaauuugaau

SEQ ID NO: 2386884 - RNA, 19 nt, Artificial Sequence
  Description of Artificial Sequence: Synthetic oligonucleotide
uguggcauacuggugguag

SEQ ID NO: 2386885 - RNA, 19 nt, Artificial Sequence
  Description of Artificial Sequence: Synthetic oligonucleotide
aaguaccagggugaggagg

SEQ ID NO: 2386886 - RNA, 19 nt, Artificial Sequence
  Description of Artificial Sequence: Synthetic oligonucleotide
gugcaagagaaacauggcc

SEQ ID NO: 2386887 - RNA, 19 nt, Artificial Sequence
  Description of Artificial Sequence: Synthetic oligonucleotide
aauaaguaccagggugagg

SEQ ID NO: 2386888 - RNA, 19 nt, Artificial Sequence
  Description of Artificial Sequence: Synthetic oligonucleotide
agaagcuuuggcccagggg

SEQ ID NO: 2386889 - RNA, 19 nt, Artificial Sequence
  Description of Artificial Sequence: Synthetic oligonucleotide
ugguugggauucaauguag

SEQ ID NO: 2386890 - RNA, 19 nt, Artificial Sequence
  Description of Artificial Sequence: Synthetic oligonucleotide
uucugcaacagaagcuuug

SEQ ID NO: 2386891 - RNA, 19 nt, Artificial Sequence
  Description of Artificial Sequence: Synthetic oligonucleotide
ugaguuggguacaggauuc

SEQ ID NO: 2386892 - RNA, 19 nt, Artificial Sequence
  Description of Artificial Sequence: Synthetic oligonucleotide
ugcuuggagcugaacacag

SEQ ID NO: 2386893 - RNA, 19 nt, Artificial Sequence
  Description of Artificial Sequence: Synthetic oligonucleotide
cucgaagagaugaauucug

SEQ ID NO: 2386894 - RNA, 19 nt, Artificial Sequence
  Description of Artificial Sequence: Synthetic oligonucleotide
uugguugggauucaaugua

SEQ ID NO: 2386895 - RNA, 19 nt, Artificial Sequence
  Description of Artificial Sequence: Synthetic oligonucleotide
ugaauccaaaggugagccg

SEQ ID NO: 2386896 - RNA, 19 nt, Artificial Sequence
  Description of Artificial Sequence: Synthetic oligonucleotide
cucucgaagagaugaauuc

SEQ ID NO: 2386897 - RNA, 19 nt, Artificial Sequence
  Description of Artificial Sequence: Synthetic oligonucleotide
gaccuuugguuuugguugg

SEQ ID NO: 2386898 - RNA, 19 nt, Artificial Sequence
  Description of Artificial Sequence: Synthetic oligonucleotide
cauguguaguuuccaagag

SEQ ID NO: 2386899 - RNA, 19 nt, Artificial Sequence
  Description of Artificial Sequence: Synthetic oligonucleotide
uaguccauguguaguuucc

SEQ ID NO: 2386900 - RNA, 19 nt, Artificial Sequence
  Description of Artificial Sequence: Synthetic oligonucleotide
uagucucaggaagaguagg

SEQ ID NO: 2386901 - RNA, 19 nt, Artificial Sequence
  Description of Artificial Sequence: Synthetic oligonucleotide
agccuguagucucaggaag

SEQ ID NO: 2386902 - RNA, 19 nt, Artificial Sequence
  Description of Artificial Sequence: Synthetic oligonucleotide
agguugauugccgucuucg

SEQ ID NO: 2386903 - RNA, 19 nt, Artificial Sequence
  Description of Artificial Sequence: Synthetic oligonucleotide
ugaugagaggcagcaagag

SEQ ID NO: 2386904 - RNA, 19 nt, Artificial Sequence
  Description of Artificial Sequence: Synthetic oligonucleotide
guaacuguggcauacuggu

SEQ ID NO: 2386905 - RNA, 19 nt, Artificial Sequence
  Description of Artificial Sequence: Synthetic oligonucleotide
ucucgaagagaugaauucu

SEQ ID NO: 2386906 - RNA, 19 nt, Artificial Sequence
  Description of Artificial Sequence: Synthetic oligonucleotide
gaaagaacuaugcuuguau

SEQ ID NO: 2386907 - RNA, 19 nt, Artificial Sequence
  Description of Artificial Sequence: Synthetic oligonucleotide
uuugugacggacacgucuu

SEQ ID NO: 2386908 - RNA, 19 nt, Artificial Sequence
  Description of Artificial Sequence: Synthetic oligonucleotide
ugaacacagggcugggagc

SEQ ID NO: 2386909 - RNA, 19 nt, Artificial Sequence
  Description of Artificial Sequence: Synthetic oligonucleotide
uuggagcucucgaagagau

SEQ ID NO: 2386910 - RNA, 19 nt, Artificial Sequence
  Description of Artificial Sequence: Synthetic oligonucleotide
gaacacagggcugggagcc

SEQ ID NO: 2386911 - RNA, 19 nt, Artificial Sequence
  Description of Artificial Sequence: Synthetic oligonucleotide
auguccauugugcugccug

SEQ ID NO: 2386912 - RNA, 19 nt, Artificial Sequence
  Description of Artificial Sequence: Synthetic oligonucleotide
ggucaaggugaacagcugg

SEQ ID NO: 2386913 - RNA, 19 nt, Artificial Sequence
  Description of Artificial Sequence: Synthetic oligonucleotide
cauacuggugguagugggc

SEQ ID NO: 2386914 - RNA, 19 nt, Artificial Sequence
  Description of Artificial Sequence: Synthetic oligonucleotide
aaugccccaggccccuuuc

SEQ ID NO: 2386915 - RNA, 19 nt, Artificial Sequence
  Description of Artificial Sequence: Synthetic oligonucleotide
uguugugguggguaacugu

SEQ ID NO: 2386916 - RNA, 19 nt, Artificial Sequence
  Description of Artificial Sequence: Synthetic oligonucleotide
uucggguaaugcagaaggc

SEQ ID NO: 2386917 - RNA, 19 nt, Artificial Sequence
  Description of Artificial Sequence: Synthetic oligonucleotide
ugggaagcugagcagccug

SEQ ID NO: 2386918 - RNA, 19 nt, Artificial Sequence
  Description of Artificial Sequence: Synthetic oligonucleotide
ggauucaauguaguaaugc

SEQ ID NO: 2386919 - RNA, 19 nt, Artificial Sequence
  Description of Artificial Sequence: Synthetic oligonucleotide
uuaguccauguguaguuuc

SEQ ID NO: 2386920 - RNA, 19 nt, Artificial Sequence
  Description of Artificial Sequence: Synthetic oligonucleotide
uugagguagacuguacccu

SEQ ID NO: 2386921 - RNA, 19 nt, Artificial Sequence
  Description of Artificial Sequence: Synthetic oligonucleotide
caucgugaaggauggcagg

SEQ ID NO: 2386922 - RNA, 19 nt, Artificial Sequence
  Description of Artificial Sequence: Synthetic oligonucleotide
uugcugugcuuucuguggc

SEQ ID NO: 2386923 - RNA, 19 nt, Artificial Sequence
  Description of Artificial Sequence: Synthetic oligonucleotide
ucggguaaugcagaaggca

SEQ ID NO: 2386924 - RNA, 19 nt, Artificial Sequence
  Description of Artificial Sequence: Synthetic oligonucleotide
uaguaaugccccaggcccc

SEQ ID NO: 2386925 - RNA, 19 nt, Artificial Sequence
  Description of Artificial Sequence: Synthetic oligonucleotide
guauuccacugccauguag

SEQ ID NO: 2386926 - RNA, 19 nt, Artificial Sequence
  Description of Artificial Sequence: Synthetic oligonucleotide
aggaggaccaggccaauga

SEQ ID NO: 2386927 - RNA, 19 nt, Artificial Sequence
  Description of Artificial Sequence: Synthetic oligonucleotide
guugugguggguaacugug

SEQ ID NO: 2386928 - RNA, 19 nt, Artificial Sequence
  Description of Artificial Sequence: Synthetic oligonucleotide
aaguguccaguguugggaa

SEQ ID NO: 2386929 - RNA, 19 nt, Artificial Sequence
  Description of Artificial Sequence: Synthetic oligonucleotide
uguaggugucaucgugaag

SEQ ID NO: 2386930 - RNA, 19 nt, Artificial Sequence
  Description of Artificial Sequence: Synthetic oligonucleotide
guccuguuugaauccaaag

SEQ ID NO: 2386931 - RNA, 19 nt, Artificial Sequence
  Description of Artificial Sequence: Synthetic oligonucleotide
gcccauaaggaaaugagag

SEQ ID NO: 2386932 - RNA, 19 nt, Artificial Sequence
  Description of Artificial Sequence: Synthetic oligonucleotide
cuaugcuuguauuucugca

SEQ ID NO: 2386933 - RNA, 19 nt, Artificial Sequence
  Description of Artificial Sequence: Synthetic oligonucleotide
gaugguagagaacccugga

SEQ ID NO: 2386934 - RNA, 19 nt, Artificial Sequence
  Description of Artificial Sequence: Synthetic oligonucleotide
agagaaacauggccccaag

SEQ ID NO: 2386935 - RNA, 19 nt, Artificial Sequence
  Description of Artificial Sequence: Synthetic oligonucleotide
aaggugagccgcccauaag

SEQ ID NO: 2386936 - RNA, 19 nt, Artificial Sequence
  Description of Artificial Sequence: Synthetic oligonucleotide
gaacccuggacuaggagca

SEQ ID NO: 2386937 - RNA, 19 nt, Artificial Sequence
  Description of Artificial Sequence: Synthetic oligonucleotide
uguccuguuugaauccaaa

SEQ ID NO: 2386938 - RNA, 19 nt, Artificial Sequence
  Description of Artificial Sequence: Synthetic oligonucleotide
gcuacaagcagucccagca

SEQ ID NO: 2386939 - RNA, 19 nt, Artificial Sequence
  Description of Artificial Sequence: Synthetic oligonucleotide
aggauucgaauuugaauuu

SEQ ID NO: 2386940 - RNA, 19 nt, Artificial Sequence
  Description of Artificial Sequence: Synthetic oligonucleotide
auucgaauuugaauuugug

SEQ ID NO: 2386941 - RNA, 19 nt, Artificial Sequence
  Description of Artificial Sequence: Synthetic oligonucleotide
agggcugggagccauuagu

SEQ ID NO: 2386942 - RNA, 19 nt, Artificial Sequence
  Description of Artificial Sequence: Synthetic oligonucleotide
uaacuguggcauacuggug

SEQ ID NO: 2386943 - RNA, 19 nt, Artificial Sequence
  Description of Artificial Sequence: Synthetic oligonucleotide
gagaacccuggacuaggag

SEQ ID NO: 2386944 - RNA, 19 nt, Artificial Sequence
  Description of Artificial Sequence: Synthetic oligonucleotide
ugggaaggacacauuguau

SEQ ID NO: 2386945 - RNA, 19 nt, Artificial Sequence
  Description of Artificial Sequence: Synthetic oligonucleotide
gaauuugugcuuggagcug

SEQ ID NO: 2386946 - RNA, 19 nt, Artificial Sequence
  Description of Artificial Sequence: Synthetic oligonucleotide
cauaaggaaaugagagaga

SEQ ID NO: 2386947 - RNA, 19 nt, Artificial Sequence
  Description of Artificial Sequence: Synthetic oligonucleotide
gauuggucacuggugcaag

SEQ ID NO: 2386948 - RNA, 19 nt, Artificial Sequence
  Description of Artificial Sequence: Synthetic oligonucleotide
gagccauuaguccaugugu

SEQ ID NO: 2386949 - RNA, 19 nt, Artificial Sequence
  Description of Artificial Sequence: Synthetic oligonucleotide
caauaaguaccagggugag

SEQ ID NO: 2386950 - RNA, 19 nt, Artificial Sequence
  Description of Artificial Sequence: Synthetic oligonucleotide
ugguggguaacuguggcau

SEQ ID NO: 2386951 - RNA, 19 nt, Artificial Sequence
  Description of Artificial Sequence: Synthetic oligonucleotide
ugacggacacgucuucccu

SEQ ID NO: 2386952 - RNA, 19 nt, Artificial Sequence
  Description of Artificial Sequence: Synthetic oligonucleotide
cuuguauuucugcaacaga

SEQ ID NO: 2386953 - RNA, 19 nt, Artificial Sequence
  Description of Artificial Sequence: Synthetic oligonucleotide
guggggauaggcaugguca

SEQ ID NO: 2386954 - RNA, 19 nt, Artificial Sequence
  Description of Artificial Sequence: Synthetic oligonucleotide
gagggauuggucacuggug

SEQ ID NO: 2386955 - RNA, 19 nt, Artificial Sequence
  Description of Artificial Sequence: Synthetic oligonucleotide
cugagcagccuguagucuc

SEQ ID NO: 2386956 - RNA, 19 nt, Artificial Sequence
  Description of Artificial Sequence: Synthetic oligonucleotide
uggggauaggcauggucac

SEQ ID NO: 2386957 - RNA, 19 nt, Artificial Sequence
  Description of Artificial Sequence: Synthetic oligonucleotide
ggagccauuaguccaugug

SEQ ID NO: 2386958 - RNA, 19 nt, Artificial Sequence
  Description of Artificial Sequence: Synthetic oligonucleotide
guagucucaggaagaguag

SEQ ID NO: 2386959 - RNA, 19 nt, Artificial Sequence
  Description of Artificial Sequence: Synthetic oligonucleotide
ggaaaugagagagacaggu

SEQ ID NO: 2386960 - RNA, 19 nt, Artificial Sequence
  Description of Artificial Sequence: Synthetic oligonucleotide
gcuggagaaagaacuaugc

SEQ ID NO: 2386961 - RNA, 19 nt, Artificial Sequence
  Description of Artificial Sequence: Synthetic oligonucleotide
ggagcucucgaagagauga

SEQ ID NO: 2386962 - RNA, 19 nt, Artificial Sequence
  Description of Artificial Sequence: Synthetic oligonucleotide
aagaguaggucaaggugaa

SEQ ID NO: 2386963 - RNA, 19 nt, Artificial Sequence
  Description of Artificial Sequence: Synthetic oligonucleotide
gacggacacgucuucccug

SEQ ID NO: 2386964 - RNA, 19 nt, Artificial Sequence
  Description of Artificial Sequence: Synthetic oligonucleotide
gaacuaugcuuguauuucu

SEQ ID NO: 2386965 - RNA, 19 nt, Artificial Sequence
  Description of Artificial Sequence: Synthetic oligonucleotide
uggcauacuggugguagug

SEQ ID NO: 2386966 - RNA, 19 nt, Artificial Sequence
  Description of Artificial Sequence: Synthetic oligonucleotide
gguugauugccgucuucgg

SEQ ID NO: 2386967 - RNA, 19 nt, Artificial Sequence
  Description of Artificial Sequence: Synthetic oligonucleotide
uccaaaggugagccgccca

SEQ ID NO: 2386968 - RNA, 19 nt, Artificial Sequence
  Description of Artificial Sequence: Synthetic oligonucleotide
gggccgaugguagagaacc

SEQ ID NO: 2386969 - RNA, 19 nt, Artificial Sequence
  Description of Artificial Sequence: Synthetic oligonucleotide
cuaggacuuggagagggug

SEQ ID NO: 2386970 - RNA, 19 nt, Artificial Sequence
  Description of Artificial Sequence: Synthetic oligonucleotide
guagagaacccuggacuag

SEQ ID NO: 2386971 - RNA, 19 nt, Artificial Sequence
  Description of Artificial Sequence: Synthetic oligonucleotide
agcuggagaaagaacuaug

SEQ ID NO: 2386972 - RNA, 19 nt, Artificial Sequence
  Description of Artificial Sequence: Synthetic oligonucleotide
guugguccagguugagggc

SEQ ID NO: 2386973 - RNA, 19 nt, Artificial Sequence
  Description of Artificial Sequence: Synthetic oligonucleotide
ucgugaaggauggcaggag

SEQ ID NO: 2386974 - RNA, 19 nt, Artificial Sequence
  Description of Artificial Sequence: Synthetic oligonucleotide
gaacagcuggagaaagaac

SEQ ID NO: 2386975 - RNA, 19 nt, Artificial Sequence
  Description of Artificial Sequence: Synthetic oligonucleotide
auccaaaggugagccgccc

SEQ ID NO: 2386976 - RNA, 19 nt, Artificial Sequence
  Description of Artificial Sequence: Synthetic oligonucleotide
aggcaauaaguaccagggu

SEQ ID NO: 2386977 - RNA, 19 nt, Artificial Sequence
  Description of Artificial Sequence: Synthetic oligonucleotide
uuucugcaacagaagcuuu

SEQ ID NO: 2386978 - RNA, 19 nt, Artificial Sequence
  Description of Artificial Sequence: Synthetic oligonucleotide
cugcaacagaagcuuuggc

SEQ ID NO: 2386979 - RNA, 19 nt, Artificial Sequence
  Description of Artificial Sequence: Synthetic oligonucleotide
uuccacugccauguaguug

SEQ ID NO: 2386980 - RNA, 19 nt, Artificial Sequence
  Description of Artificial Sequence: Synthetic oligonucleotide
guaguagagcuugcugugc

SEQ ID NO: 2386981 - RNA, 19 nt, Artificial Sequence
  Description of Artificial Sequence: Synthetic oligonucleotide
aucgugaaggauggcagga

SEQ ID NO: 2386982 - RNA, 19 nt, Artificial Sequence
  Description of Artificial Sequence: Synthetic oligonucleotide
guugggauucaauguagua

SEQ ID NO: 2386983 - RNA, 19 nt, Artificial Sequence
  Description of Artificial Sequence: Synthetic oligonucleotide
gcaauaaguaccaggguga

SEQ ID NO: 2386984 - RNA, 19 nt, Artificial Sequence
  Description of Artificial Sequence: Synthetic oligonucleotide
auuggucacuggugcaaga

SEQ ID NO: 2386985 - RNA, 19 nt, Artificial Sequence
  Description of Artificial Sequence: Synthetic oligonucleotide
acggacacgucuucccugu

SEQ ID NO: 2386986 - RNA, 19 nt, Artificial Sequence
  Description of Artificial Sequence: Synthetic oligonucleotide
uuguugugguggguaacug

SEQ ID NO: 2386987 - RNA, 19 nt, Artificial Sequence
  Description of Artificial Sequence: Synthetic oligonucleotide
augaugagaggcagcaaga

SEQ ID NO: 2386988 - RNA, 19 nt, Artificial Sequence
  Description of Artificial Sequence: Synthetic oligonucleotide
aggagcagugccguuguug

SEQ ID NO: 2386989 - RNA, 19 nt, Artificial Sequence
  Description of Artificial Sequence: Synthetic oligonucleotide
caaguguccaguguuggga

SEQ ID NO: 2386990 - RNA, 19 nt, Artificial Sequence
  Description of Artificial Sequence: Synthetic oligonucleotide
ggugguagugggccugugg

SEQ ID NO: 2386991 - RNA, 19 nt, Artificial Sequence
  Description of Artificial Sequence: Synthetic oligonucleotide
gguacaggauucgaauuug

SEQ ID NO: 2386992 - RNA, 19 nt, Artificial Sequence
  Description of Artificial Sequence: Synthetic oligonucleotide
gauucgaauuugaauuugu

SEQ ID NO: 2386993 - RNA, 19 nt, Artificial Sequence
  Description of Artificial Sequence: Synthetic oligonucleotide
uucuguggcuguagguguc

SEQ ID NO: 2386994 - RNA, 19 nt, Artificial Sequence
  Description of Artificial Sequence: Synthetic oligonucleotide
agguagacuguacccugcu

SEQ ID NO: 2386995 - RNA, 19 nt, Artificial Sequence
  Description of Artificial Sequence: Synthetic oligonucleotide
ccgucuucggguaaugcag

SEQ ID NO: 2386996 - RNA, 19 nt, Artificial Sequence
  Description of Artificial Sequence: Synthetic oligonucleotide
agucucaggaagaguaggu

SEQ ID NO: 2386997 - RNA, 19 nt, Artificial Sequence
  Description of Artificial Sequence: Synthetic oligonucleotide
ccagguugagggccgaugg

SEQ ID NO: 2386998 - RNA, 19 nt, Artificial Sequence
  Description of Artificial Sequence: Synthetic oligonucleotide
gccauuaguccauguguag

SEQ ID NO: 2386999 - RNA, 19 nt, Artificial Sequence
  Description of Artificial Sequence: Synthetic oligonucleotide
agaugaauucugagcugag

SEQ ID NO: 2387000 - RNA, 19 nt, Artificial Sequence
  Description of Artificial Sequence: Synthetic oligonucleotide
guggguaacuguggcauac

SEQ ID NO: 2387001 - RNA, 19 nt, Artificial Sequence
  Description of Artificial Sequence: Synthetic oligonucleotide
caacagaagcuuuggccca

SEQ ID NO: 2387002 - RNA, 19 nt, Artificial Sequence
  Description of Artificial Sequence: Synthetic oligonucleotide
ugguagguugauugccguc

SEQ ID NO: 2387003 - RNA, 19 nt, Artificial Sequence
  Description of Artificial Sequence: Synthetic oligonucleotide
agcugagaauguccauugu

SEQ ID NO: 2387004 - RNA, 19 nt, Artificial Sequence
  Description of Artificial Sequence: Synthetic oligonucleotide
gcugggagccauuagucca

SEQ ID NO: 2387005 - RNA, 19 nt, Artificial Sequence
  Description of Artificial Sequence: Synthetic oligonucleotide
gugccguuguugugguggg

SEQ ID NO: 2387006 - RNA, 19 nt, Artificial Sequence
  Description of Artificial Sequence: Synthetic oligonucleotide
cauuguauuccacugccau

SEQ ID NO: 2387007 - RNA, 19 nt, Artificial Sequence
  Description of Artificial Sequence: Synthetic oligonucleotide
gagaaagaacuaugcuugu

SEQ ID NO: 2387008 - RNA, 19 nt, Artificial Sequence
  Description of Artificial Sequence: Synthetic oligonucleotide
cagaagcuuuggcccaggg

SEQ ID NO: 2387009 - RNA, 19 nt, Artificial Sequence
  Description of Artificial Sequence: Synthetic oligonucleotide
auuaguccauguguaguuu

SEQ ID NO: 2387010 - RNA, 19 nt, Artificial Sequence
  Description of Artificial Sequence: Synthetic oligonucleotide
uagguugauugccgucuuc

SEQ ID NO: 2387011 - RNA, 19 nt, Artificial Sequence
  Description of Artificial Sequence: Synthetic oligonucleotide
ugauugccgucuucgggua

SEQ ID NO: 2387012 - RNA, 19 nt, Artificial Sequence
  Description of Artificial Sequence: Synthetic oligonucleotide
gucaaggugaacagcugga

SEQ ID NO: 2387013 - RNA, 19 nt, Artificial Sequence
  Description of Artificial Sequence: Synthetic oligonucleotide
auugugcugccugugggaa

SEQ ID NO: 2387014 - RNA, 19 nt, Artificial Sequence
  Description of Artificial Sequence: Synthetic oligonucleotide
ccauguguaguuuccaaga

SEQ ID NO: 2387015 - RNA, 19 nt, Artificial Sequence
  Description of Artificial Sequence: Synthetic oligonucleotide
cuuggagccuggacuagga

SEQ ID NO: 2387016 - RNA, 19 nt, Artificial Sequence
  Description of Artificial Sequence: Synthetic oligonucleotide
ggguaacuguggcauacug

SEQ ID NO: 2387017 - RNA, 19 nt, Artificial Sequence
  Description of Artificial Sequence: Synthetic oligonucleotide
ccauguccuguuugaaucc

SEQ ID NO: 2387018 - RNA, 19 nt, Artificial Sequence
  Description of Artificial Sequence: Synthetic oligonucleotide
gguagagaacccuggacua

SEQ ID NO: 2387019 - RNA, 19 nt, Artificial Sequence
  Description of Artificial Sequence: Synthetic oligonucleotide
ggcauacuggugguagugg

SEQ ID NO: 2387020 - RNA, 19 nt, Artificial Sequence
  Description of Artificial Sequence: Synthetic oligonucleotide
ccgcccauaaggaaaugag

SEQ ID NO: 2387021 - RNA, 19 nt, Artificial Sequence
  Description of Artificial Sequence: Synthetic oligonucleotide
aguccauguguaguuucca

SEQ ID NO: 2387022 - RNA, 19 nt, Artificial Sequence
  Description of Artificial Sequence: Synthetic oligonucleotide
uugugacggacacgucuuc

SEQ ID NO: 2387023 - RNA, 19 nt, Artificial Sequence
  Description of Artificial Sequence: Synthetic oligonucleotide
gucucaggaagaguagguc

SEQ ID NO: 2387024 - RNA, 19 nt, Artificial Sequence
  Description of Artificial Sequence: Synthetic oligonucleotide
aguuggguacaggauucga

SEQ ID NO: 2387025 - RNA, 19 nt, Artificial Sequence
  Description of Artificial Sequence: Synthetic oligonucleotide
uucccuguccuugggcuac

SEQ ID NO: 2387026 - RNA, 19 nt, Artificial Sequence
  Description of Artificial Sequence: Synthetic oligonucleotide
aguaaugccccaggccccu

SEQ ID NO: 2387027 - RNA, 19 nt, Artificial Sequence
  Description of Artificial Sequence: Synthetic oligonucleotide
ggacacgucuucccugucc

SEQ ID NO: 2387028 - RNA, 19 nt, Artificial Sequence
  Description of Artificial Sequence: Synthetic oligonucleotide
ccaaguguccaguguuggg

SEQ ID NO: 2387029 - RNA, 19 nt, Artificial Sequence
  Description of Artificial Sequence: Synthetic oligonucleotide
guaaugcagaaggcaauaa

SEQ ID NO: 2387030 - RNA, 19 nt, Artificial Sequence
  Description of Artificial Sequence: Synthetic oligonucleotide
ugagggccgaugguagaga

SEQ ID NO: 2387031 - RNA, 19 nt, Artificial Sequence
  Description of Artificial Sequence: Synthetic oligonucleotide
cauuaguccauguguaguu

SEQ ID NO: 2387032 - RNA, 19 nt, Artificial Sequence
  Description of Artificial Sequence: Synthetic oligonucleotide
agccauuaguccaugugua

SEQ ID NO: 2387033 - RNA, 19 nt, Artificial Sequence
  Description of Artificial Sequence: Synthetic oligonucleotide
aacccuggacuaggagcag

SEQ ID NO: 2387034 - RNA, 19 nt, Artificial Sequence
  Description of Artificial Sequence: Synthetic oligonucleotide
guccauguguaguuuccaa

SEQ ID NO: 2387035 - RNA, 19 nt, Artificial Sequence
  Description of Artificial Sequence: Synthetic oligonucleotide
cuugggcuacaagcagucc

SEQ ID NO: 2387036 - RNA, 19 nt, Artificial Sequence
  Description of Artificial Sequence: Synthetic oligonucleotide
gugaggaggccaaggagga

SEQ ID NO: 2387037 - RNA, 19 nt, Artificial Sequence
  Description of Artificial Sequence: Synthetic oligonucleotide
gcccaggggagcuuggagc

SEQ ID NO: 2387038 - RNA, 19 nt, Artificial Sequence
  Description of Artificial Sequence: Synthetic oligonucleotide
gagggccgaugguagagaa

SEQ ID NO: 2387039 - RNA, 19 nt, Artificial Sequence
  Description of Artificial Sequence: Synthetic oligonucleotide
cuguaggugucaucgugaa

SEQ ID NO: 2387040 - RNA, 19 nt, Artificial Sequence
  Description of Artificial Sequence: Synthetic oligonucleotide
ggacacauuguauuccacu

SEQ ID NO: 2387041 - RNA, 19 nt, Artificial Sequence
  Description of Artificial Sequence: Synthetic oligonucleotide
agcucucgaagagaugaau

SEQ ID NO: 2387042 - RNA, 19 nt, Artificial Sequence
  Description of Artificial Sequence: Synthetic oligonucleotide
guacaggauucgaauuuga

SEQ ID NO: 2387043 - RNA, 19 nt, Artificial Sequence
  Description of Artificial Sequence: Synthetic oligonucleotide
cuuggagcucucgaagaga

SEQ ID NO: 2387044 - RNA, 19 nt, Artificial Sequence
  Description of Artificial Sequence: Synthetic oligonucleotide
ugccgucuucggguaaugc

SEQ ID NO: 2387045 - RNA, 19 nt, Artificial Sequence
  Description of Artificial Sequence: Synthetic oligonucleotide
gugguggguaacuguggca

SEQ ID NO: 2387046 - RNA, 19 nt, Artificial Sequence
  Description of Artificial Sequence: Synthetic oligonucleotide
uggguaacuguggcauacu

SEQ ID NO: 2387047 - RNA, 19 nt, Artificial Sequence
  Description of Artificial Sequence: Synthetic oligonucleotide
cugaguuggguacaggauu

SEQ ID NO: 2387048 - RNA, 19 nt, Artificial Sequence
  Description of Artificial Sequence: Synthetic oligonucleotide
cuccuuggagccuggacua

SEQ ID NO: 2387049 - RNA, 19 nt, Artificial Sequence
  Description of Artificial Sequence: Synthetic oligonucleotide
auugccgucuucggguaau

SEQ ID NO: 2387050 - RNA, 19 nt, Artificial Sequence
  Description of Artificial Sequence: Synthetic oligonucleotide
ccgaugguagagaacccug

SEQ ID NO: 2387051 - RNA, 19 nt, Artificial Sequence
  Description of Artificial Sequence: Synthetic oligonucleotide
cccauaaggaaaugagaga

SEQ ID NO: 2387052 - RNA, 19 nt, Artificial Sequence
  Description of Artificial Sequence: Synthetic oligonucleotide
agggccgaugguagagaac

SEQ ID NO: 2387053 - RNA, 19 nt, Artificial Sequence
  Description of Artificial Sequence: Synthetic oligonucleotide
gugaacagcuggagaaaga

SEQ ID NO: 2387054 - RNA, 19 nt, Artificial Sequence
  Description of Artificial Sequence: Synthetic oligonucleotide
aggucaaggugaacagcug

SEQ ID NO: 2387055 - RNA, 19 nt, Artificial Sequence
  Description of Artificial Sequence: Synthetic oligonucleotide
cuacaagcagucccagcaa

SEQ ID NO: 2387056 - RNA, 19 nt, Artificial Sequence
  Description of Artificial Sequence: Synthetic oligonucleotide
ggagcagugccguuguugu

SEQ ID NO: 2387057 - RNA, 19 nt, Artificial Sequence
  Description of Artificial Sequence: Synthetic oligonucleotide
aggugaacagcuggagaaa

SEQ ID NO: 2387058 - RNA, 19 nt, Artificial Sequence
  Description of Artificial Sequence: Synthetic oligonucleotide
ccaguguugggaagcugag

SEQ ID NO: 2387059 - RNA, 19 nt, Artificial Sequence
  Description of Artificial Sequence: Synthetic oligonucleotide
ugguuuugguugggauuca

SEQ ID NO: 2387060 - RNA, 19 nt, Artificial Sequence
  Description of Artificial Sequence: Synthetic oligonucleotide
gccgucuucggguaaugca

SEQ ID NO: 2387061 - RNA, 19 nt, Artificial Sequence
  Description of Artificial Sequence: Synthetic oligonucleotide
gggauucaauguaguaaug

SEQ ID NO: 2387062 - RNA, 19 nt, Artificial Sequence
  Description of Artificial Sequence: Synthetic oligonucleotide
ugucaucgugaaggauggc

SEQ ID NO: 2387063 - RNA, 19 nt, Artificial Sequence
  Description of Artificial Sequence: Synthetic oligonucleotide
agagaacccuggacuagga

SEQ ID NO: 2387064 - RNA, 19 nt, Artificial Sequence
  Description of Artificial Sequence: Synthetic oligonucleotide
ggcuacaagcagucccagc

SEQ ID NO: 2387065 - RNA, 19 nt, Artificial Sequence
  Description of Artificial Sequence: Synthetic oligonucleotide
cccaaguguccaguguugg

SEQ ID NO: 2387066 - RNA, 19 nt, Artificial Sequence
  Description of Artificial Sequence: Synthetic oligonucleotide
gguagacuguacccugcuc

SEQ ID NO: 2387067 - RNA, 19 nt, Artificial Sequence
  Description of Artificial Sequence: Synthetic oligonucleotide
gcuguaggugucaucguga

SEQ ID NO: 2387068 - RNA, 19 nt, Artificial Sequence
  Description of Artificial Sequence: Synthetic oligonucleotide
caagagaaacauggcccca

SEQ ID NO: 2387069 - RNA, 19 nt, Artificial Sequence
  Description of Artificial Sequence: Synthetic oligonucleotide
ugggagccauuaguccaug

SEQ ID NO: 2387070 - RNA, 19 nt, Artificial Sequence
  Description of Artificial Sequence: Synthetic oligonucleotide
aggaggccaaggaggacca

SEQ ID NO: 2387071 - RNA, 19 nt, Artificial Sequence
  Description of Artificial Sequence: Synthetic oligonucleotide
gauugccgucuucggguaa

SEQ ID NO: 2387072 - RNA, 19 nt, Artificial Sequence
  Description of Artificial Sequence: Synthetic oligonucleotide
gggagcuuggagcucucga

SEQ ID NO: 2387073 - RNA, 19 nt, Artificial Sequence
  Description of Artificial Sequence: Synthetic oligonucleotide
uugccgucuucggguaaug

SEQ ID NO: 2387074 - RNA, 19 nt, Artificial Sequence
  Description of Artificial Sequence: Synthetic oligonucleotide
gugagccgcccauaaggaa

SEQ ID NO: 2387075 - RNA, 19 nt, Artificial Sequence
  Description of Artificial Sequence: Synthetic oligonucleotide
gagcagccuguagucucag

SEQ ID NO: 2387076 - RNA, 19 nt, Artificial Sequence
  Description of Artificial Sequence: Synthetic oligonucleotide
caggccccuuuccuccacc

SEQ ID NO: 2387077 - RNA, 19 nt, Artificial Sequence
  Description of Artificial Sequence: Synthetic oligonucleotide
ggugagccgcccauaagga

SEQ ID NO: 2387078 - RNA, 19 nt, Artificial Sequence
  Description of Artificial Sequence: Synthetic oligonucleotide
gggauuggucacuggugca

SEQ ID NO: 2387079 - RNA, 19 nt, Artificial Sequence
  Description of Artificial Sequence: Synthetic oligonucleotide
cacccugaguuggguacag

SEQ ID NO: 2387080 - RNA, 19 nt, Artificial Sequence
  Description of Artificial Sequence: Synthetic oligonucleotide
aguuuccaagagccuccuu

SEQ ID NO: 2387081 - RNA, 19 nt, Artificial Sequence
  Description of Artificial Sequence: Synthetic oligonucleotide
ggauuggucacuggugcaa

SEQ ID NO: 2387082 - RNA, 19 nt, Artificial Sequence
  Description of Artificial Sequence: Synthetic oligonucleotide
cuccauguccuguuugaau

SEQ ID NO: 2387083 - RNA, 19 nt, Artificial Sequence
  Description of Artificial Sequence: Synthetic oligonucleotide
cuguacccugcuccauguc

SEQ ID NO: 2387084 - RNA, 19 nt, Artificial Sequence
  Description of Artificial Sequence: Synthetic oligonucleotide
ccuuggagccuggacuagg

SEQ ID NO: 2387085 - RNA, 19 nt, Artificial Sequence
  Description of Artificial Sequence: Synthetic oligonucleotide
guacccugcuccauguccu

SEQ ID NO: 2387086 - RNA, 19 nt, Artificial Sequence
  Description of Artificial Sequence: Synthetic oligonucleotide
guaccagggugaggaggcc

SEQ ID NO: 2387087 - RNA, 19 nt, Artificial Sequence
  Description of Artificial Sequence: Synthetic oligonucleotide
gagccuggacuaggacuug

SEQ ID NO: 2387088 - RNA, 19 nt, Artificial Sequence
  Description of Artificial Sequence: Synthetic oligonucleotide
accagggugaggaggccaa

SEQ ID NO: 2387089 - RNA, 19 nt, Artificial Sequence
  Description of Artificial Sequence: Synthetic oligonucleotide
auguccuguuugaauccaa

SEQ ID NO: 2387090 - RNA, 19 nt, Artificial Sequence
  Description of Artificial Sequence: Synthetic oligonucleotide
guccaguguugggaagcug

SEQ ID NO: 2387091 - RNA, 19 nt, Artificial Sequence
  Description of Artificial Sequence: Synthetic oligonucleotide
ccauguaguugagguagac

SEQ ID NO: 2387092 - RNA, 19 nt, Artificial Sequence
  Description of Artificial Sequence: Synthetic oligonucleotide
gagcucucgaagagaugaa

SEQ ID NO: 2387093 - RNA, 19 nt, Artificial Sequence
  Description of Artificial Sequence: Synthetic oligonucleotide
agacuguacccugcuccau

SEQ ID NO: 2387094 - RNA, 19 nt, Artificial Sequence
  Description of Artificial Sequence: Synthetic oligonucleotide
guggcauacuggugguagu

SEQ ID NO: 2387095 - RNA, 19 nt, Artificial Sequence
  Description of Artificial Sequence: Synthetic oligonucleotide
cggguaaugcagaaggcaa

SEQ ID NO: 2387096 - RNA, 19 nt, Artificial Sequence
  Description of Artificial Sequence: Synthetic oligonucleotide
ccuccuuggagccuggacu

SEQ ID NO: 2387097 - RNA, 19 nt, Artificial Sequence
  Description of Artificial Sequence: Synthetic oligonucleotide
uaggagcagugccguuguu

SEQ ID NO: 2387098 - RNA, 19 nt, Artificial Sequence
  Description of Artificial Sequence: Synthetic oligonucleotide
ggagaggguggaguugguc

SEQ ID NO: 2387099 - RNA, 19 nt, Artificial Sequence
  Description of Artificial Sequence: Synthetic oligonucleotide
ugccguuguuguggugggu

SEQ ID NO: 2387100 - RNA, 19 nt, Artificial Sequence
  Description of Artificial Sequence: Synthetic oligonucleotide
gguugggauucaauguagu

SEQ ID NO: 2387101 - RNA, 19 nt, Artificial Sequence
  Description of Artificial Sequence: Synthetic oligonucleotide
guagguugauugccgucuu

SEQ ID NO: 2387102 - RNA, 19 nt, Artificial Sequence
  Description of Artificial Sequence: Synthetic oligonucleotide
gccgcccauaaggaaauga

SEQ ID NO: 2387103 - RNA, 19 nt, Artificial Sequence
  Description of Artificial Sequence: Synthetic oligonucleotide
cgcccauaaggaaaugaga

SEQ ID NO: 2387104 - RNA, 19 nt, Artificial Sequence
  Description of Artificial Sequence: Synthetic oligonucleotide
guguaguuuccaagagccu

SEQ ID NO: 2387105 - RNA, 19 nt, Artificial Sequence
  Description of Artificial Sequence: Synthetic oligonucleotide
cagugccguuguuguggug

SEQ ID NO: 2387106 - RNA, 19 nt, Artificial Sequence
  Description of Artificial Sequence: Synthetic oligonucleotide
ggggagcuuggagcucucg

SEQ ID NO: 2387107 - RNA, 19 nt, Artificial Sequence
  Description of Artificial Sequence: Synthetic oligonucleotide
gagccgcccauaaggaaau

SEQ ID NO: 2387108 - RNA, 19 nt, Artificial Sequence
  Description of Artificial Sequence: Synthetic oligonucleotide
caaaggugagccgcccaua

SEQ ID NO: 2387109 - RNA, 19 nt, Artificial Sequence
  Description of Artificial Sequence: Synthetic oligonucleotide
caggagaguagcagcuuuu

SEQ ID NO: 2387110 - RNA, 19 nt, Artificial Sequence
  Description of Artificial Sequence: Synthetic oligonucleotide
ggccgaugguagagaaccc

SEQ ID NO: 2387111 - RNA, 19 nt, Artificial Sequence
  Description of Artificial Sequence: Synthetic oligonucleotide
gguggguaacuguggcaua

SEQ ID NO: 2387112 - RNA, 19 nt, Artificial Sequence
  Description of Artificial Sequence: Synthetic oligonucleotide
ggccuguggcugguaguag

SEQ ID NO: 2387113 - RNA, 19 nt, Artificial Sequence
  Description of Artificial Sequence: Synthetic oligonucleotide
ccauuaguccauguguagu

SEQ ID NO: 2387114 - RNA, 19 nt, Artificial Sequence
  Description of Artificial Sequence: Synthetic oligonucleotide
gcaggagaguagcagcuuu

SEQ ID NO: 2387115 - RNA, 19 nt, Artificial Sequence
  Description of Artificial Sequence: Synthetic oligonucleotide
agccgcccauaaggaaaug

SEQ ID NO: 2387116 - RNA, 19 nt, Artificial Sequence
  Description of Artificial Sequence: Synthetic oligonucleotide
ggauggcaggagaguagca

SEQ ID NO: 2387117 - RNA, 19 nt, Artificial Sequence
  Description of Artificial Sequence: Synthetic oligonucleotide
cagguugagggccgauggu

SEQ ID NO: 2387118 - RNA, 19 nt, Artificial Sequence
  Description of Artificial Sequence: Synthetic oligonucleotide
ggacuaggagcagugccgu

SEQ ID NO: 2387119 - RNA, 19 nt, Artificial Sequence
  Description of Artificial Sequence: Synthetic oligonucleotide
gccguuguuguggugggua

SEQ ID NO: 2387120 - RNA, 19 nt, Artificial Sequence
  Description of Artificial Sequence: Synthetic oligonucleotide
gcucucgaagagaugaauu

SEQ ID NO: 2387121 - RNA, 19 nt, Artificial Sequence
  Description of Artificial Sequence: Synthetic oligonucleotide
gguggaguugguccagguu

SEQ ID NO: 2387122 - RNA, 19 nt, Artificial Sequence
  Description of Artificial Sequence: Synthetic oligonucleotide
ccugaguuggguacaggau

SEQ ID NO: 2387123 - RNA, 19 nt, Artificial Sequence
  Description of Artificial Sequence: Synthetic oligonucleotide
cgucuucggguaaugcaga

SEQ ID NO: 2387124 - RNA, 19 nt, Artificial Sequence
  Description of Artificial Sequence: Synthetic oligonucleotide
gccgaugguagagaacccu

SEQ ID NO: 2387125 - RNA, 19 nt, Artificial Sequence
  Description of Artificial Sequence: Synthetic oligonucleotide
gacuaggagcagugccguu

SEQ ID NO: 2387126 - RNA, 19 nt, Artificial Sequence
  Description of Artificial Sequence: Synthetic oligonucleotide
ccguuguugugguggguaa

SEQ ID NO: 2387127 - RNA, 19 nt, Artificial Sequence
  Description of Artificial Sequence: Synthetic oligonucleotide
agccuccuuggagccugga

SEQ ID NO: 2387128 - RNA, 19 nt, Artificial Sequence
  Description of Artificial Sequence: Synthetic oligonucleotide
gcugagcagccuguagucu

SEQ ID NO: 2387129 - RNA, 19 nt, Artificial Sequence
  Description of Artificial Sequence: Synthetic oligonucleotide
gggagccauuaguccaugu

SEQ ID NO: 2387130 - RNA, 19 nt, Artificial Sequence
  Description of Artificial Sequence: Synthetic oligonucleotide
cuguggcauacugguggua

SEQ ID NO: 2387131 - RNA, 19 nt, Artificial Sequence
  Description of Artificial Sequence: Synthetic oligonucleotide
cuggugguagugggccugu

SEQ ID NO: 2387132 - RNA, 19 nt, Artificial Sequence
  Description of Artificial Sequence: Synthetic oligonucleotide
gugcugccugugggaagga

SEQ ID NO: 2387133 - RNA, 19 nt, Artificial Sequence
  Description of Artificial Sequence: Synthetic oligonucleotide
caaggaggaccaggccaau

SEQ ID NO: 2387134 - RNA, 19 nt, Artificial Sequence
  Description of Artificial Sequence: Synthetic oligonucleotide
cggacacgucuucccuguc

SEQ ID NO: 2387135 - RNA, 19 nt, Artificial Sequence
  Description of Artificial Sequence: Synthetic oligonucleotide
guaaugccccaggccccuu

SEQ ID NO: 2387136 - RNA, 19 nt, Artificial Sequence
  Description of Artificial Sequence: Synthetic oligonucleotide
ccccuggaccuuugguuuu

SEQ ID NO: 2387137 - RNA, 19 nt, Artificial Sequence
  Description of Artificial Sequence: Synthetic oligonucleotide
agaaauucaagucagucac

SEQ ID NO: 2387138 - RNA, 19 nt, Artificial Sequence
  Description of Artificial Sequence: Synthetic oligonucleotide
ucaaaguuacccaacagga

SEQ ID NO: 2387139 - RNA, 19 nt, Artificial Sequence
  Description of Artificial Sequence: Synthetic oligonucleotide
guaucuuccaaauucgggg

SEQ ID NO: 2387140 - RNA, 19 nt, Artificial Sequence
  Description of Artificial Sequence: Synthetic oligonucleotide
aaauucggggcccucaagg

SEQ ID NO: 2387141 - RNA, 19 nt, Artificial Sequence
  Description of Artificial Sequence: Synthetic oligonucleotide
uggagggacauccagaugc

SEQ ID NO: 2387142 - RNA, 19 nt, Artificial Sequence
  Description of Artificial Sequence: Synthetic oligonucleotide
aaaguuacccaacaggaaa

SEQ ID NO: 2387143 - RNA, 19 nt, Artificial Sequence
  Description of Artificial Sequence: Synthetic oligonucleotide
uacccaacaggaaaguucg

SEQ ID NO: 2387144 - RNA, 19 nt, Artificial Sequence
  Description of Artificial Sequence: Synthetic oligonucleotide
guuaaggcuaaccagauca

SEQ ID NO: 2387145 - RNA, 19 nt, Artificial Sequence
  Description of Artificial Sequence: Synthetic oligonucleotide
aauucaaaguuacccaaca

SEQ ID NO: 2387146 - RNA, 19 nt, Artificial Sequence
  Description of Artificial Sequence: Synthetic oligonucleotide
uguuccuugcggaagagcc

SEQ ID NO: 2387147 - RNA, 19 nt, Artificial Sequence
  Description of Artificial Sequence: Synthetic oligonucleotide
aaauucaagucagucacag

SEQ ID NO: 2387148 - RNA, 19 nt, Artificial Sequence
  Description of Artificial Sequence: Synthetic oligonucleotide
agggagagcacacccaucc

SEQ ID NO: 2387149 - RNA, 19 nt, Artificial Sequence
  Description of Artificial Sequence: Synthetic oligonucleotide
aaggaggcggaccaacagc

SEQ ID NO: 2387150 - RNA, 19 nt, Artificial Sequence
  Description of Artificial Sequence: Synthetic oligonucleotide
aucaagaauucaaaguuac

SEQ ID NO: 2387151 - RNA, 19 nt, Artificial Sequence
  Description of Artificial Sequence: Synthetic oligonucleotide
acuucucagcaccaaagac

SEQ ID NO: 2387152 - RNA, 19 nt, Artificial Sequence
  Description of Artificial Sequence: Synthetic oligonucleotide
aaguucgcaaacccgcuuc

SEQ ID NO: 2387153 - RNA, 19 nt, Artificial Sequence
  Description of Artificial Sequence: Synthetic oligonucleotide
gaucagaaauucaagucag

SEQ ID NO: 2387154 - RNA, 19 nt, Artificial Sequence
  Description of Artificial Sequence: Synthetic oligonucleotide
uagcaaguucucaugagug

SEQ ID NO: 2387155 - RNA, 19 nt, Artificial Sequence
  Description of Artificial Sequence: Synthetic oligonucleotide
uuacccaacaggaaaguuc

SEQ ID NO: 2387156 - RNA, 19 nt, Artificial Sequence
  Description of Artificial Sequence: Synthetic oligonucleotide
ucaagaauucaaaguuacc

SEQ ID NO: 2387157 - RNA, 19 nt, Artificial Sequence
  Description of Artificial Sequence: Synthetic oligonucleotide
uucgcaaacccgcuucagg

SEQ ID NO: 2387158 - RNA, 19 nt, Artificial Sequence
  Description of Artificial Sequence: Synthetic oligonucleotide
agaauucaaaguuacccaa

SEQ ID NO: 2387159 - RNA, 19 nt, Artificial Sequence
  Description of Artificial Sequence: Synthetic oligonucleotide
agaccugaaaucccagcac

SEQ ID NO: 2387160 - RNA, 19 nt, Artificial Sequence
  Description of Artificial Sequence: Synthetic oligonucleotide
acaggaaaguucgcaaacc

SEQ ID NO: 2387161 - RNA, 19 nt, Artificial Sequence
  Description of Artificial Sequence: Synthetic oligonucleotide
acaggaguagagcacucgg

SEQ ID NO: 2387162 - RNA, 19 nt, Artificial Sequence
  Description of Artificial Sequence: Synthetic oligonucleotide
cucaugaguguccagcacc

SEQ ID NO: 2387163 - RNA, 19 nt, Artificial Sequence
  Description of Artificial Sequence: Synthetic oligonucleotide
uugcggaagagccuguccc

SEQ ID NO: 2387164 - RNA, 19 nt, Artificial Sequence
  Description of Artificial Sequence: Synthetic oligonucleotide
aaguuacccaacaggaaag

SEQ ID NO: 2387165 - RNA, 19 nt, Artificial Sequence
  Description of Artificial Sequence: Synthetic oligonucleotide
gucacagauacauggggag

SEQ ID NO: 2387166 - RNA, 19 nt, Artificial Sequence
  Description of Artificial Sequence: Synthetic oligonucleotide
aagucagauuuguaagacu

SEQ ID NO: 2387167 - RNA, 19 nt, Artificial Sequence
  Description of Artificial Sequence: Synthetic oligonucleotide
agcacacccauccacacca

SEQ ID NO: 2387168 - RNA, 19 nt, Artificial Sequence
  Description of Artificial Sequence: Synthetic oligonucleotide
aagaaggcuccaugagggg

SEQ ID NO: 2387169 - RNA, 19 nt, Artificial Sequence
  Description of Artificial Sequence: Synthetic oligonucleotide
aagaaggaggcggaccaac

SEQ ID NO: 2387170 - RNA, 19 nt, Artificial Sequence
  Description of Artificial Sequence: Synthetic oligonucleotide
ucggcaaaggccuguaucu

SEQ ID NO: 2387171 - RNA, 19 nt, Artificial Sequence
  Description of Artificial Sequence: Synthetic oligonucleotide
agagcacucggcaaaggcc

SEQ ID NO: 2387172 - RNA, 19 nt, Artificial Sequence
  Description of Artificial Sequence: Synthetic oligonucleotide
aaagccuagggagagcaca

SEQ ID NO: 2387173 - RNA, 19 nt, Artificial Sequence
  Description of Artificial Sequence: Synthetic oligonucleotide
agaaggcuccaugaggggc

SEQ ID NO: 2387174 - RNA, 19 nt, Artificial Sequence
  Description of Artificial Sequence: Synthetic oligonucleotide
agauacauggggagugucc

SEQ ID NO: 2387175 - RNA, 19 nt, Artificial Sequence
  Description of Artificial Sequence: Synthetic oligonucleotide
aauucggggcccucaaggu

SEQ ID NO: 2387176 - RNA, 19 nt, Artificial Sequence
  Description of Artificial Sequence: Synthetic oligonucleotide
cuaaccagaucaagaauuc

SEQ ID NO: 2387177 - RNA, 19 nt, Artificial Sequence
  Description of Artificial Sequence: Synthetic oligonucleotide
gaagucagauuuguaagac

SEQ ID NO: 2387178 - RNA, 19 nt, Artificial Sequence
  Description of Artificial Sequence: Synthetic oligonucleotide
aaggcuaaccagaucaaga

SEQ ID NO: 2387179 - RNA, 19 nt, Artificial Sequence
  Description of Artificial Sequence: Synthetic oligonucleotide
guggucaagaaggaggcgg

SEQ ID NO: 2387180 - RNA, 19 nt, Artificial Sequence
  Description of Artificial Sequence: Synthetic oligonucleotide
ggaucagaaauucaaguca

SEQ ID NO: 2387181 - RNA, 19 nt, Artificial Sequence
  Description of Artificial Sequence: Synthetic oligonucleotide
caggaaaguucgcaaaccc

SEQ ID NO: 2387182 - RNA, 19 nt, Artificial Sequence
  Description of Artificial Sequence: Synthetic oligonucleotide
caaguucucaugagugucc

SEQ ID NO: 2387183 - RNA, 19 nt, Artificial Sequence
  Description of Artificial Sequence: Synthetic oligonucleotide
uuucuggugucaguagccg

SEQ ID NO: 2387184 - RNA, 19 nt, Artificial Sequence
  Description of Artificial Sequence: Synthetic oligonucleotide
ucgcaaacccgcuucagga

SEQ ID NO: 2387185 - RNA, 19 nt, Artificial Sequence
  Description of Artificial Sequence: Synthetic oligonucleotide
aggaguagagcacucggca

SEQ ID NO: 2387186 - RNA, 19 nt, Artificial Sequence
  Description of Artificial Sequence: Synthetic oligonucleotide
cuguaucuuccaaauucgg

SEQ ID NO: 2387187 - RNA, 19 nt, Artificial Sequence
  Description of Artificial Sequence: Synthetic oligonucleotide
aggaggcggaccaacagcc

SEQ ID NO: 2387188 - RNA, 19 nt, Artificial Sequence
  Description of Artificial Sequence: Synthetic oligonucleotide
cucgugaagggacacaguc

SEQ ID NO: 2387189 - RNA, 19 nt, Artificial Sequence
  Description of Artificial Sequence: Synthetic oligonucleotide
acucucagccaguagcaag

SEQ ID NO: 2387190 - RNA, 19 nt, Artificial Sequence
  Description of Artificial Sequence: Synthetic oligonucleotide
gaaggaggcggaccaacag

SEQ ID NO: 2387191 - RNA, 19 nt, Artificial Sequence
  Description of Artificial Sequence: Synthetic oligonucleotide
uccagagaccugaaauccc

SEQ ID NO: 2387192 - RNA, 19 nt, Artificial Sequence
  Description of Artificial Sequence: Synthetic oligonucleotide
aaccagaucaagaauucaa

SEQ ID NO: 2387193 - RNA, 19 nt, Artificial Sequence
  Description of Artificial Sequence: Synthetic oligonucleotide
cuuucugcaccauguggcc

SEQ ID NO: 2387194 - RNA, 19 nt, Artificial Sequence
  Description of Artificial Sequence: Synthetic oligonucleotide
aaggccuguaucuuccaaa

SEQ ID NO: 2387195 - RNA, 19 nt, Artificial Sequence
  Description of Artificial Sequence: Synthetic oligonucleotide
uucuggugucaguagccgg

SEQ ID NO: 2387196 - RNA, 19 nt, Artificial Sequence
  Description of Artificial Sequence: Synthetic oligonucleotide
gaaggcauggaccauggcu

SEQ ID NO: 2387197 - RNA, 19 nt, Artificial Sequence
  Description of Artificial Sequence: Synthetic oligonucleotide
uguggaugaggaaggcaug

SEQ ID NO: 2387198 - RNA, 19 nt, Artificial Sequence
  Description of Artificial Sequence: Synthetic oligonucleotide
gaggcggaccaacagccgg

SEQ ID NO: 2387199 - RNA, 19 nt, Artificial Sequence
  Description of Artificial Sequence: Synthetic oligonucleotide
uaaggcuaaccagaucaag

SEQ ID NO: 2387200 - RNA, 19 nt, Artificial Sequence
  Description of Artificial Sequence: Synthetic oligonucleotide
ucaucgggugacuucucag

SEQ ID NO: 2387201 - RNA, 19 nt, Artificial Sequence
  Description of Artificial Sequence: Synthetic oligonucleotide
cuccagagaccugaaaucc

SEQ ID NO: 2387202 - RNA, 19 nt, Artificial Sequence
  Description of Artificial Sequence: Synthetic oligonucleotide
agaacugaggcugcagguc

SEQ ID NO: 2387203 - RNA, 19 nt, Artificial Sequence
  Description of Artificial Sequence: Synthetic oligonucleotide
gaauucaaaguuacccaac

SEQ ID NO: 2387204 - RNA, 19 nt, Artificial Sequence
  Description of Artificial Sequence: Synthetic oligonucleotide
aggaaaguucgcaaacccg

SEQ ID NO: 2387205 - RNA, 19 nt, Artificial Sequence
  Description of Artificial Sequence: Synthetic oligonucleotide
uuaaggcuaaccagaucaa

SEQ ID NO: 2387206 - RNA, 19 nt, Artificial Sequence
  Description of Artificial Sequence: Synthetic oligonucleotide
uggggaguguccuuugugu

SEQ ID NO: 2387207 - RNA, 19 nt, Artificial Sequence
  Description of Artificial Sequence: Synthetic oligonucleotide
aggcuaaccagaucaagaa

SEQ ID NO: 2387208 - RNA, 19 nt, Artificial Sequence
  Description of Artificial Sequence: Synthetic oligonucleotide
ggaaaguucgcaaacccgc

SEQ ID NO: 2387209 - RNA, 19 nt, Artificial Sequence
  Description of Artificial Sequence: Synthetic oligonucleotide
agcaaguucucaugagugu

SEQ ID NO: 2387210 - RNA, 19 nt, Artificial Sequence
  Description of Artificial Sequence: Synthetic oligonucleotide
caucgggugacuucucagc

SEQ ID NO: 2387211 - RNA, 19 nt, Artificial Sequence
  Description of Artificial Sequence: Synthetic oligonucleotide
aagccuagggagagcacac

SEQ ID NO: 2387212 - RNA, 19 nt, Artificial Sequence
  Description of Artificial Sequence: Synthetic oligonucleotide
ggaguguacucucagccag

SEQ ID NO: 2387213 - RNA, 19 nt, Artificial Sequence
  Description of Artificial Sequence: Synthetic oligonucleotide
agucagauuuguaagacuu

SEQ ID NO: 2387214 - RNA, 19 nt, Artificial Sequence
  Description of Artificial Sequence: Synthetic oligonucleotide
ugugguuagccccgguuaa

SEQ ID NO: 2387215 - RNA, 19 nt, Artificial Sequence
  Description of Artificial Sequence: Synthetic oligonucleotide
acacagucucaucugagaa

SEQ ID NO: 2387216 - RNA, 19 nt, Artificial Sequence
  Description of Artificial Sequence: Synthetic oligonucleotide
ugguuagccccgguuaagg

SEQ ID NO: 2387217 - RNA, 19 nt, Artificial Sequence
  Description of Artificial Sequence: Synthetic oligonucleotide
cucaagguguggaugagga

SEQ ID NO: 2387218 - RNA, 19 nt, Artificial Sequence
  Description of Artificial Sequence: Synthetic oligonucleotide
ucgugaagggacacagucu

SEQ ID NO: 2387219 - RNA, 19 nt, Artificial Sequence
  Description of Artificial Sequence: Synthetic oligonucleotide
gucuguggcuccuggaaag

SEQ ID NO: 2387220 - RNA, 19 nt, Artificial Sequence
  Description of Artificial Sequence: Synthetic oligonucleotide
gacucugugguuagccccg

SEQ ID NO: 2387221 - RNA, 19 nt, Artificial Sequence
  Description of Artificial Sequence: Synthetic oligonucleotide
gacacagucucaucugaga

SEQ ID NO: 2387222 - RNA, 19 nt, Artificial Sequence
  Description of Artificial Sequence: Synthetic oligonucleotide
uggucaagaaggaggcgga

SEQ ID NO: 2387223 - RNA, 19 nt, Artificial Sequence
  Description of Artificial Sequence: Synthetic oligonucleotide
aaaguucgcaaacccgcuu

SEQ ID NO: 2387224 - RNA, 19 nt, Artificial Sequence
  Description of Artificial Sequence: Synthetic oligonucleotide
ccagaucaagaauucaaag

SEQ ID NO: 2387225 - RNA, 19 nt, Artificial Sequence
  Description of Artificial Sequence: Synthetic oligonucleotide
ggaugggugcuccagagac

SEQ ID NO: 2387226 - RNA, 19 nt, Artificial Sequence
  Description of Artificial Sequence: Synthetic oligonucleotide
aucgggugacuucucagca

SEQ ID NO: 2387227 - RNA, 19 nt, Artificial Sequence
  Description of Artificial Sequence: Synthetic oligonucleotide
gagaggacucugugguuag

SEQ ID NO: 2387228 - RNA, 19 nt, Artificial Sequence
  Description of Artificial Sequence: Synthetic oligonucleotide
ucucaugaguguccagcac

SEQ ID NO: 2387229 - RNA, 19 nt, Artificial Sequence
  Description of Artificial Sequence: Synthetic oligonucleotide
aaaggccuguaucuuccaa

SEQ ID NO: 2387230 - RNA, 19 nt, Artificial Sequence
  Description of Artificial Sequence: Synthetic oligonucleotide
caggaguagagcacucggc

SEQ ID NO: 2387231 - RNA, 19 nt, Artificial Sequence
  Description of Artificial Sequence: Synthetic oligonucleotide
uuccuugcggaagagccug

SEQ ID NO: 2387232 - RNA, 19 nt, Artificial Sequence
  Description of Artificial Sequence: Synthetic oligonucleotide
acaguggcgaccccggggu

SEQ ID NO: 2387233 - RNA, 19 nt, Artificial Sequence
  Description of Artificial Sequence: Synthetic oligonucleotide
gccaaaaucuguuccuugc

SEQ ID NO: 2387234 - RNA, 19 nt, Artificial Sequence
  Description of Artificial Sequence: Synthetic oligonucleotide
ugcaccauguggccgugga

SEQ ID NO: 2387235 - RNA, 19 nt, Artificial Sequence
  Description of Artificial Sequence: Synthetic oligonucleotide
agggacacagucucaucug

SEQ ID NO: 2387236 - RNA, 19 nt, Artificial Sequence
  Description of Artificial Sequence: Synthetic oligonucleotide
gaucaagaauucaaaguua

SEQ ID NO: 2387237 - RNA, 19 nt, Artificial Sequence
  Description of Artificial Sequence: Synthetic oligonucleotide
uaaccagaucaagaauuca

SEQ ID NO: 2387238 - RNA, 19 nt, Artificial Sequence
  Description of Artificial Sequence: Synthetic oligonucleotide
ggaaaggguccccagcucc

SEQ ID NO: 2387239 - RNA, 19 nt, Artificial Sequence
  Description of Artificial Sequence: Synthetic oligonucleotide
aguagagcacucggcaaag

SEQ ID NO: 2387240 - RNA, 19 nt, Artificial Sequence
  Description of Artificial Sequence: Synthetic oligonucleotide
ugaagggacacagucucau

SEQ ID NO: 2387241 - RNA, 19 nt, Artificial Sequence
  Description of Artificial Sequence: Synthetic oligonucleotide
caccgccaaaaucuguucc

SEQ ID NO: 2387242 - RNA, 19 nt, Artificial Sequence
  Description of Artificial Sequence: Synthetic oligonucleotide
uuuguguucuguggccacc

SEQ ID NO: 2387243 - RNA, 19 nt, Artificial Sequence
  Description of Artificial Sequence: Synthetic oligonucleotide
agucacagauacaugggga

SEQ ID NO: 2387244 - RNA, 19 nt, Artificial Sequence
  Description of Artificial Sequence: Synthetic oligonucleotide
cucggcaaaggccuguauc

SEQ ID NO: 2387245 - RNA, 19 nt, Artificial Sequence
  Description of Artificial Sequence: Synthetic oligonucleotide
ggggucgcaaggcugagag

SEQ ID NO: 2387246 - RNA, 19 nt, Artificial Sequence
  Description of Artificial Sequence: Synthetic oligonucleotide
uggaucaucgggugacuuc

SEQ ID NO: 2387247 - RNA, 19 nt, Artificial Sequence
  Description of Artificial Sequence: Synthetic oligonucleotide
gauggaugggugcuccaga

SEQ ID NO: 2387248 - RNA, 19 nt, Artificial Sequence
  Description of Artificial Sequence: Synthetic oligonucleotide
ucugugguuagccccgguu

SEQ ID NO: 2387249 - RNA, 19 nt, Artificial Sequence
  Description of Artificial Sequence: Synthetic oligonucleotide
cuuuguguucuguggccac

SEQ ID NO: 2387250 - RNA, 19 nt, Artificial Sequence
  Description of Artificial Sequence: Synthetic oligonucleotide
ucacagauacauggggagu

SEQ ID NO: 2387251 - RNA, 19 nt, Artificial Sequence
  Description of Artificial Sequence: Synthetic oligonucleotide
augggugcuccagagaccu

SEQ ID NO: 2387252 - RNA, 19 nt, Artificial Sequence
  Description of Artificial Sequence: Synthetic oligonucleotide
agggacauccagaugcuug

SEQ ID NO: 2387253 - RNA, 19 nt, Artificial Sequence
  Description of Artificial Sequence: Synthetic oligonucleotide
gaagagaagucagauuugu

SEQ ID NO: 2387254 - RNA, 19 nt, Artificial Sequence
  Description of Artificial Sequence: Synthetic oligonucleotide
agccugucccuuucugcac

SEQ ID NO: 2387255 - RNA, 19 nt, Artificial Sequence
  Description of Artificial Sequence: Synthetic oligonucleotide
aucaucgggugacuucuca

SEQ ID NO: 2387256 - RNA, 19 nt, Artificial Sequence
  Description of Artificial Sequence: Synthetic oligonucleotide
aaacccgcuucaggaagag

SEQ ID NO: 2387257 - RNA, 19 nt, Artificial Sequence
  Description of Artificial Sequence: Synthetic oligonucleotide
aggccuguaucuuccaaau

SEQ ID NO: 2387258 - RNA, 19 nt, Artificial Sequence
  Description of Artificial Sequence: Synthetic oligonucleotide
guagcaaguucucaugagu

SEQ ID NO: 2387259 - RNA, 19 nt, Artificial Sequence
  Description of Artificial Sequence: Synthetic oligonucleotide
gggacauccagaugcuugc

SEQ ID NO: 2387260 - RNA, 19 nt, Artificial Sequence
  Description of Artificial Sequence: Synthetic oligonucleotide
uggugucaguagccggagg

SEQ ID NO: 2387261 - RNA, 19 nt, Artificial Sequence
  Description of Artificial Sequence: Synthetic oligonucleotide
uccaaauucggggcccuca

SEQ ID NO: 2387262 - RNA, 19 nt, Artificial Sequence
  Description of Artificial Sequence: Synthetic oligonucleotide
aguucgcaaacccgcuuca

SEQ ID NO: 2387263 - RNA, 19 nt, Artificial Sequence
  Description of Artificial Sequence: Synthetic oligonucleotide
aacagccggaguguacucu

SEQ ID NO: 2387264 - RNA, 19 nt, Artificial Sequence
  Description of Artificial Sequence: Synthetic oligonucleotide
gauacauggggaguguccu

SEQ ID NO: 2387265 - RNA, 19 nt, Artificial Sequence
  Description of Artificial Sequence: Synthetic oligonucleotide
gaaaggguccccagcuccc

SEQ ID NO: 2387266 - RNA, 19 nt, Artificial Sequence
  Description of Artificial Sequence: Synthetic oligonucleotide
aucugagaacugaggcugc

SEQ ID NO: 2387267 - RNA, 19 nt, Artificial Sequence
  Description of Artificial Sequence: Synthetic oligonucleotide
gcaaacccgcuucaggaag

SEQ ID NO: 2387268 - RNA, 19 nt, Artificial Sequence
  Description of Artificial Sequence: Synthetic oligonucleotide
ggaggugcgggcaagagga

SEQ ID NO: 2387269 - RNA, 19 nt, Artificial Sequence
  Description of Artificial Sequence: Synthetic oligonucleotide
ugcggaagagccugucccu

SEQ ID NO: 2387270 - RNA, 19 nt, Artificial Sequence
  Description of Artificial Sequence: Synthetic oligonucleotide
accagaucaagaauucaaa

SEQ ID NO: 2387271 - RNA, 19 nt, Artificial Sequence
  Description of Artificial Sequence: Synthetic oligonucleotide
ugcaggucuguggagggac

SEQ ID NO: 2387272 - RNA, 19 nt, Artificial Sequence
  Description of Artificial Sequence: Synthetic oligonucleotide
accaugggacaguggcgac

SEQ ID NO: 2387273 - RNA, 19 nt, Artificial Sequence
  Description of Artificial Sequence: Synthetic oligonucleotide
ggucgcaaggcugagagga

SEQ ID NO: 2387274 - RNA, 19 nt, Artificial Sequence
  Description of Artificial Sequence: Synthetic oligonucleotide
cagagaccugaaaucccag

SEQ ID NO: 2387275 - RNA, 19 nt, Artificial Sequence
  Description of Artificial Sequence: Synthetic oligonucleotide
ccggaguguacucucagcc

SEQ ID NO: 2387276 - RNA, 19 nt, Artificial Sequence
  Description of Artificial Sequence: Synthetic oligonucleotide
acccauccacaccaccguc

SEQ ID NO: 2387277 - RNA, 19 nt, Artificial Sequence
  Description of Artificial Sequence: Synthetic oligonucleotide
gagagcacacccauccaca

SEQ ID NO: 2387278 - RNA, 19 nt, Artificial Sequence
  Description of Artificial Sequence: Synthetic oligonucleotide
caaauucggggcccucaag

SEQ ID NO: 2387279 - RNA, 19 nt, Artificial Sequence
  Description of Artificial Sequence: Synthetic oligonucleotide
guguucuguggccaccaug

SEQ ID NO: 2387280 - RNA, 19 nt, Artificial Sequence
  Description of Artificial Sequence: Synthetic oligonucleotide
aggcugagaggacucugug

SEQ ID NO: 2387281 - RNA, 19 nt, Artificial Sequence
  Description of Artificial Sequence: Synthetic oligonucleotide
ucgggugacuucucagcac

SEQ ID NO: 2387282 - RNA, 19 nt, Artificial Sequence
  Description of Artificial Sequence: Synthetic oligonucleotide
uguggccaccaugggacag

SEQ ID NO: 2387283 - RNA, 19 nt, Artificial Sequence
  Description of Artificial Sequence: Synthetic oligonucleotide
aggggccucgugaagggac

SEQ ID NO: 2387284 - RNA, 19 nt, Artificial Sequence
  Description of Artificial Sequence: Synthetic oligonucleotide
agccggaguguacucucag

SEQ ID NO: 2387285 - RNA, 19 nt, Artificial Sequence
  Description of Artificial Sequence: Synthetic oligonucleotide
agccuagggagagcacacc

SEQ ID NO: 2387286 - RNA, 19 nt, Artificial Sequence
  Description of Artificial Sequence: Synthetic oligonucleotide
uacauggggaguguccuuu

SEQ ID NO: 2387287 - RNA, 19 nt, Artificial Sequence
  Description of Artificial Sequence: Synthetic oligonucleotide
uguggccguggaucaucgg

SEQ ID NO: 2387288 - RNA, 19 nt, Artificial Sequence
  Description of Artificial Sequence: Synthetic oligonucleotide
guuagccccgguuaaggcu

SEQ ID NO: 2387289 - RNA, 19 nt, Artificial Sequence
  Description of Artificial Sequence: Synthetic oligonucleotide
cccgguuaaggcuaaccag

SEQ ID NO: 2387290 - RNA, 19 nt, Artificial Sequence
  Description of Artificial Sequence: Synthetic oligonucleotide
aagagaagucagauuugua

SEQ ID NO: 2387291 - RNA, 19 nt, Artificial Sequence
  Description of Artificial Sequence: Synthetic oligonucleotide
gguuagccccgguuaaggc

SEQ ID NO: 2387292 - RNA, 19 nt, Artificial Sequence
  Description of Artificial Sequence: Synthetic oligonucleotide
gcaagaggaucagaaauuc

SEQ ID NO: 2387293 - RNA, 19 nt, Artificial Sequence
  Description of Artificial Sequence: Synthetic oligonucleotide
acaccaccgucuguggcuc

SEQ ID NO: 2387294 - RNA, 19 nt, Artificial Sequence
  Description of Artificial Sequence: Synthetic oligonucleotide
guagagcacucggcaaagg

SEQ ID NO: 2387295 - RNA, 19 nt, Artificial Sequence
  Description of Artificial Sequence: Synthetic oligonucleotide
ucgcaaggcugagaggacu

SEQ ID NO: 2387296 - RNA, 19 nt, Artificial Sequence
  Description of Artificial Sequence: Synthetic oligonucleotide
accaacagccggaguguac

SEQ ID NO: 2387297 - RNA, 19 nt, Artificial Sequence
  Description of Artificial Sequence: Synthetic oligonucleotide
guguacucucagccaguag

SEQ ID NO: 2387298 - RNA, 19 nt, Artificial Sequence
  Description of Artificial Sequence: Synthetic oligonucleotide
aggugcgggcaagaggauc

SEQ ID NO: 2387299 - RNA, 19 nt, Artificial Sequence
  Description of Artificial Sequence: Synthetic oligonucleotide
caaacccgcuucaggaaga

SEQ ID NO: 2387300 - RNA, 19 nt, Artificial Sequence
  Description of Artificial Sequence: Synthetic oligonucleotide
auguggccguggaucaucg

SEQ ID NO: 2387301 - RNA, 19 nt, Artificial Sequence
  Description of Artificial Sequence: Synthetic oligonucleotide
gccuagggagagcacaccc

SEQ ID NO: 2387302 - RNA, 19 nt, Artificial Sequence
  Description of Artificial Sequence: Synthetic oligonucleotide
gugacuucucagcaccaaa

SEQ ID NO: 2387303 - RNA, 19 nt, Artificial Sequence
  Description of Artificial Sequence: Synthetic oligonucleotide
gagcacucggcaaaggccu

SEQ ID NO: 2387304 - RNA, 19 nt, Artificial Sequence
  Description of Artificial Sequence: Synthetic oligonucleotide
ccgguuaaggcuaaccaga

SEQ ID NO: 2387305 - RNA, 19 nt, Artificial Sequence
  Description of Artificial Sequence: Synthetic oligonucleotide
auggaccauggcuccagau

SEQ ID NO: 2387306 - RNA, 19 nt, Artificial Sequence
  Description of Artificial Sequence: Synthetic oligonucleotide
gcuccagauggaugggugc

SEQ ID NO: 2387307 - RNA, 19 nt, Artificial Sequence
  Description of Artificial Sequence: Synthetic oligonucleotide
gaaaguucgcaaacccgcu

SEQ ID NO: 2387308 - RNA, 19 nt, Artificial Sequence
  Description of Artificial Sequence: Synthetic oligonucleotide
cuguuccuugcggaagagc

SEQ ID NO: 2387309 - RNA, 19 nt, Artificial Sequence
  Description of Artificial Sequence: Synthetic oligonucleotide
uguguucuguggccaccau

SEQ ID NO: 2387310 - RNA, 19 nt, Artificial Sequence
  Description of Artificial Sequence: Synthetic oligonucleotide
gggaguguccuuuguguuc

SEQ ID NO: 2387311 - RNA, 19 nt, Artificial Sequence
  Description of Artificial Sequence: Synthetic oligonucleotide
caccaugggacaguggcga

SEQ ID NO: 2387312 - RNA, 19 nt, Artificial Sequence
  Description of Artificial Sequence: Synthetic oligonucleotide
guucgcaaacccgcuucag

SEQ ID NO: 2387313 - RNA, 19 nt, Artificial Sequence
  Description of Artificial Sequence: Synthetic oligonucleotide
ggugucaguagccggaggu

SEQ ID NO: 2387314 - RNA, 19 nt, Artificial Sequence
  Description of Artificial Sequence: Synthetic oligonucleotide
ucaguagccggaggugguc

SEQ ID NO: 2387315 - RNA, 19 nt, Artificial Sequence
  Description of Artificial Sequence: Synthetic oligonucleotide
ccaggaagaaggcuccaug

SEQ ID NO: 2387316 - RNA, 19 nt, Artificial Sequence
  Description of Artificial Sequence: Synthetic oligonucleotide
gcaaagccuagggagagca

SEQ ID NO: 2387317 - RNA, 19 nt, Artificial Sequence
  Description of Artificial Sequence: Synthetic oligonucleotide
gugguuagccccgguuaag

SEQ ID NO: 2387318 - RNA, 19 nt, Artificial Sequence
  Description of Artificial Sequence: Synthetic oligonucleotide
ggagguggucaagaaggag

SEQ ID NO: 2387319 - RNA, 19 nt, Artificial Sequence
  Description of Artificial Sequence: Synthetic oligonucleotide
gccucgugaagggacacag

SEQ ID NO: 2387320 - RNA, 19 nt, Artificial Sequence
  Description of Artificial Sequence: Synthetic oligonucleotide
cggaccaacagccggagug

SEQ ID NO: 2387321 - RNA, 19 nt, Artificial Sequence
  Description of Artificial Sequence: Synthetic oligonucleotide
gggcaagaggaucagaaau

SEQ ID NO: 2387322 - RNA, 19 nt, Artificial Sequence
  Description of Artificial Sequence: Synthetic oligonucleotide
aguagccggagguggucaa

SEQ ID NO: 2387323 - RNA, 19 nt, Artificial Sequence
  Description of Artificial Sequence: Synthetic oligonucleotide
aguguacucucagccagua

SEQ ID NO: 2387324 - RNA, 19 nt, Artificial Sequence
  Description of Artificial Sequence: Synthetic oligonucleotide
gguuaaggcuaaccagauc

SEQ ID NO: 2387325 - RNA, 19 nt, Artificial Sequence
  Description of Artificial Sequence: Synthetic oligonucleotide
acccaacaggaaaguucgc

SEQ ID NO: 2387326 - RNA, 19 nt, Artificial Sequence
  Description of Artificial Sequence: Synthetic oligonucleotide
cugugguuagccccgguua

SEQ ID NO: 2387327 - RNA, 19 nt, Artificial Sequence
  Description of Artificial Sequence: Synthetic oligonucleotide
ggacacagucucaucugag

SEQ ID NO: 2387328 - RNA, 19 nt, Artificial Sequence
  Description of Artificial Sequence: Synthetic oligonucleotide
gcuaaccagaucaagaauu

SEQ ID NO: 2387329 - RNA, 19 nt, Artificial Sequence
  Description of Artificial Sequence: Synthetic oligonucleotide
caccgucuguggcuccugg

SEQ ID NO: 2387330 - RNA, 19 nt, Artificial Sequence
  Description of Artificial Sequence: Synthetic oligonucleotide
ggugcgggcaagaggauca

SEQ ID NO: 2387331 - RNA, 19 nt, Artificial Sequence
  Description of Artificial Sequence: Synthetic oligonucleotide
gcucccaggaagaaggcuc

SEQ ID NO: 2387332 - RNA, 19 nt, Artificial Sequence
  Description of Artificial Sequence: Synthetic oligonucleotide
auacauggggaguguccuu

SEQ ID NO: 2387333 - RNA, 19 nt, Artificial Sequence
  Description of Artificial Sequence: Synthetic oligonucleotide
gggacacagucucaucuga

SEQ ID NO: 2387334 - RNA, 19 nt, Artificial Sequence
  Description of Artificial Sequence: Synthetic oligonucleotide
cagauacauggggaguguc

SEQ ID NO: 2387335 - RNA, 19 nt, Artificial Sequence
  Description of Artificial Sequence: Synthetic oligonucleotide
ccaccaugggacaguggcg

SEQ ID NO: 2387336 - RNA, 19 nt, Artificial Sequence
  Description of Artificial Sequence: Synthetic oligonucleotide
ccagagaccugaaauccca

SEQ ID NO: 2387337 - RNA, 19 nt, Artificial Sequence
  Description of Artificial Sequence: Synthetic oligonucleotide
caacagccggaguguacuc

SEQ ID NO: 2387338 - RNA, 19 nt, Artificial Sequence
  Description of Artificial Sequence: Synthetic oligonucleotide
ccaacaggaaaguucgcaa

SEQ ID NO: 2387339 - RNA, 19 nt, Artificial Sequence
  Description of Artificial Sequence: Synthetic oligonucleotide
caugaguguccagcaccag

SEQ ID NO: 2387340 - RNA, 19 nt, Artificial Sequence
  Description of Artificial Sequence: Synthetic oligonucleotide
gguggucaagaaggaggcg

SEQ ID NO: 2387341 - RNA, 19 nt, Artificial Sequence
  Description of Artificial Sequence: Synthetic oligonucleotide
acucugugguuagccccgg

SEQ ID NO: 2387342 - RNA, 19 nt, Artificial Sequence
  Description of Artificial Sequence: Synthetic oligonucleotide
gaccccggggucgcaaggc

SEQ ID NO: 2387343 - RNA, 19 nt, Artificial Sequence
  Description of Artificial Sequence: Synthetic oligonucleotide
cacaccaccgucuguggcu

SEQ ID NO: 2387344 - RNA, 19 nt, Artificial Sequence
  Description of Artificial Sequence: Synthetic oligonucleotide
cgggugacuucucagcacc

SEQ ID NO: 2387345 - RNA, 19 nt, Artificial Sequence
  Description of Artificial Sequence: Synthetic oligonucleotide
ucggggcccucaaggugug

SEQ ID NO: 2387346 - RNA, 19 nt, Artificial Sequence
  Description of Artificial Sequence: Synthetic oligonucleotide
gccugucccuuucugcacc

SEQ ID NO: 2387347 - RNA, 19 nt, Artificial Sequence
  Description of Artificial Sequence: Synthetic oligonucleotide
caaaggccuguaucuucca

SEQ ID NO: 2387348 - RNA, 19 nt, Artificial Sequence
  Description of Artificial Sequence: Synthetic oligonucleotide
guagccggagguggucaag

SEQ ID NO: 2387349 - RNA, 19 nt, Artificial Sequence
  Description of Artificial Sequence: Synthetic oligonucleotide
gaguguccuuuguguucug

SEQ ID NO: 2387350 - RNA, 19 nt, Artificial Sequence
  Description of Artificial Sequence: Synthetic oligonucleotide
ggaucaucgggugacuucu

SEQ ID NO: 2387351 - RNA, 19 nt, Artificial Sequence
  Description of Artificial Sequence: Synthetic oligonucleotide
ucugcaccauguggccgug

SEQ ID NO: 2387352 - RNA, 19 nt, Artificial Sequence
  Description of Artificial Sequence: Synthetic oligonucleotide
acucggcaaaggccuguau

SEQ ID NO: 2387353 - RNA, 19 nt, Artificial Sequence
  Description of Artificial Sequence: Synthetic oligonucleotide
ugggugcuccagagaccug

SEQ ID NO: 2387354 - RNA, 19 nt, Artificial Sequence
  Description of Artificial Sequence: Synthetic oligonucleotide
ccucaagguguggaugagg

SEQ ID NO: 2387355 - RNA, 19 nt, Artificial Sequence
  Description of Artificial Sequence: Synthetic oligonucleotide
ugcgggcaagaggaucaga

SEQ ID NO: 2387356 - RNA, 19 nt, Artificial Sequence
  Description of Artificial Sequence: Synthetic oligonucleotide
ggccguggaucaucgggug

SEQ ID NO: 2387357 - RNA, 19 nt, Artificial Sequence
  Description of Artificial Sequence: Synthetic oligonucleotide
gguguggaugaggaaggca

SEQ ID NO: 2387358 - RNA, 19 nt, Artificial Sequence
  Description of Artificial Sequence: Synthetic oligonucleotide
gggucgcaaggcugagagg

SEQ ID NO: 2387359 - RNA, 19 nt, Artificial Sequence
  Description of Artificial Sequence: Synthetic oligonucleotide
gaucaucgggugacuucuc

SEQ ID NO: 2387360 - RNA, 19 nt, Artificial Sequence
  Description of Artificial Sequence: Synthetic oligonucleotide
gaccauggcuccagaugga

SEQ ID NO: 2387361 - RNA, 19 nt, Artificial Sequence
  Description of Artificial Sequence: Synthetic oligonucleotide
ggaggcggaccaacagccg

SEQ ID NO: 2387362 - RNA, 19 nt, Artificial Sequence
  Description of Artificial Sequence: Synthetic oligonucleotide
accugucuggccaccgcca

SEQ ID NO: 2387363 - RNA, 19 nt, Artificial Sequence
  Description of Artificial Sequence: Synthetic oligonucleotide
ggaguguccuuuguguucu

SEQ ID NO: 2387364 - RNA, 19 nt, Artificial Sequence
  Description of Artificial Sequence: Synthetic oligonucleotide
gucgcaaggcugagaggac

SEQ ID NO: 2387365 - RNA, 19 nt, Artificial Sequence
  Description of Artificial Sequence: Synthetic oligonucleotide
uuccaaauucggggcccuc

SEQ ID NO: 2387366 - RNA, 19 nt, Artificial Sequence
  Description of Artificial Sequence: Synthetic oligonucleotide
aggcggaccaacagccgga

SEQ ID NO: 2387367 - RNA, 19 nt, Artificial Sequence
  Description of Artificial Sequence: Synthetic oligonucleotide
gcgggcaagaggaucagaa

SEQ ID NO: 2387368 - RNA, 19 nt, Artificial Sequence
  Description of Artificial Sequence: Synthetic oligonucleotide
cucgggaggugcgggcaag

SEQ ID NO: 2387369 - RNA, 19 nt, Artificial Sequence
  Description of Artificial Sequence: Synthetic oligonucleotide
accaccgucuguggcuccu

SEQ ID NO: 2387370 - RNA, 19 nt, Artificial Sequence
  Description of Artificial Sequence: Synthetic oligonucleotide
ggcccucaagguguggaug

SEQ ID NO: 2387371 - RNA, 19 nt, Artificial Sequence
  Description of Artificial Sequence: Synthetic oligonucleotide
cagauggaugggugcucca

SEQ ID NO: 2387372 - RNA, 19 nt, Artificial Sequence
  Description of Artificial Sequence: Synthetic oligonucleotide
agcacucggcaaaggccug

SEQ ID NO: 2387373 - RNA, 19 nt, Artificial Sequence
  Description of Artificial Sequence: Synthetic oligonucleotide
uagccccgguuaaggcuaa

SEQ ID NO: 2387374 - RNA, 19 nt, Artificial Sequence
  Description of Artificial Sequence: Synthetic oligonucleotide
ccacaccaccgucuguggc

SEQ ID NO: 2387375 - RNA, 19 nt, Artificial Sequence
  Description of Artificial Sequence: Synthetic oligonucleotide
ccccgguuaaggcuaacca

SEQ ID NO: 2387376 - RNA, 19 nt, Artificial Sequence
  Description of Artificial Sequence: Synthetic oligonucleotide
ggucaagaaggaggcggac

SEQ ID NO: 2387377 - RNA, 19 nt, Artificial Sequence
  Description of Artificial Sequence: Synthetic oligonucleotide
ggcuaaccagaucaagaau

SEQ ID NO: 2387378 - RNA, 19 nt, Artificial Sequence
  Description of Artificial Sequence: Synthetic oligonucleotide
caguagccggaggugguca

SEQ ID NO: 2387379 - RNA, 19 nt, Artificial Sequence
  Description of Artificial Sequence: Synthetic oligonucleotide
guuacccaacaggaaaguu

SEQ ID NO: 2387380 - RNA, 19 nt, Artificial Sequence
  Description of Artificial Sequence: Synthetic oligonucleotide
gaguguacucucagccagu

SEQ ID NO: 2387381 - RNA, 19 nt, Artificial Sequence
  Description of Artificial Sequence: Synthetic oligonucleotide
cgccaaaaucuguuccuug

SEQ ID NO: 2387382 - RNA, 19 nt, Artificial Sequence
  Description of Artificial Sequence: Synthetic oligonucleotide
gugcgggcaagaggaucag

SEQ ID NO: 2387383 - RNA, 19 nt, Artificial Sequence
  Description of Artificial Sequence: Synthetic oligonucleotide
cuguggccaccaugggaca

SEQ ID NO: 2387384 - RNA, 19 nt, Artificial Sequence
  Description of Artificial Sequence: Synthetic oligonucleotide
ccaccgccaaaaucuguuc

SEQ ID NO: 2387385 - RNA, 19 nt, Artificial Sequence
  Description of Artificial Sequence: Synthetic oligonucleotide
caccaccgucuguggcucc

SEQ ID NO: 2387386 - RNA, 19 nt, Artificial Sequence
  Description of Artificial Sequence: Synthetic oligonucleotide
cuccagauggaugggugcu

SEQ ID NO: 2387387 - RNA, 19 nt, Artificial Sequence
  Description of Artificial Sequence: Synthetic oligonucleotide
guggcgaccccggggucgc

SEQ ID NO: 2387388 - RNA, 19 nt, Artificial Sequence
  Description of Artificial Sequence: Synthetic oligonucleotide
ggcggaccaacagccggag

SEQ ID NO: 2387389 - RNA, 19 nt, Artificial Sequence
  Description of Artificial Sequence: Synthetic oligonucleotide
gccccgguuaaggcuaacc

SEQ ID NO: 2387390 - RNA, 19 nt, Artificial Sequence
  Description of Artificial Sequence: Synthetic oligonucleotide
gaccaacagccggagugua

SEQ ID NO: 2387391 - RNA, 19 nt, Artificial Sequence
  Description of Artificial Sequence: Synthetic oligonucleotide
ggugacuucucagcaccaa

SEQ ID NO: 2387392 - RNA, 19 nt, Artificial Sequence
  Description of Artificial Sequence: Synthetic oligonucleotide
cacccauccacaccaccgu

SEQ ID NO: 2387393 - RNA, 19 nt, Artificial Sequence
  Description of Artificial Sequence: Synthetic oligonucleotide
cugcaccauguggccgugg

SEQ ID NO: 2387394 - RNA, 19 nt, Artificial Sequence
  Description of Artificial Sequence: Synthetic oligonucleotide
cgcaaggcugagaggacuc

SEQ ID NO: 2387395 - RNA, 19 nt, Artificial Sequence
  Description of Artificial Sequence: Synthetic oligonucleotide
cagcaccagggcaaagccu

SEQ ID NO: 2387396 - RNA, 19 nt, Artificial Sequence
  Description of Artificial Sequence: Synthetic oligonucleotide
agccccgguuaaggcuaac

SEQ ID NO: 2387397 - RNA, 19 nt, Artificial Sequence
  Description of Artificial Sequence: Synthetic oligonucleotide
ccaccugucuggccaccgc

SEQ ID NO: 2387398 - RNA, 19 nt, Artificial Sequence
  Description of Artificial Sequence: Synthetic oligonucleotide
ccaaauucggggcccucaa

SEQ ID NO: 2387399 - RNA, 19 nt, Artificial Sequence
  Description of Artificial Sequence: Synthetic oligonucleotide
gccguggaucaucggguga

SEQ ID NO: 2387400 - RNA, 19 nt, Artificial Sequence
  Description of Artificial Sequence: Synthetic oligonucleotide
cugucuggccaccgccaaa

SEQ ID NO: 2387401 - RNA, 19 nt, Artificial Sequence
  Description of Artificial Sequence: Synthetic oligonucleotide
ggaccaacagccggagugu

SEQ ID NO: 2387402 - RNA, 19 nt, Artificial Sequence
  Description of Artificial Sequence: Synthetic oligonucleotide
cggaguguacucucagcca

SEQ ID NO: 2387403 - RNA, 19 nt, Artificial Sequence
  Description of Artificial Sequence: Synthetic oligonucleotide
ccgucuguggcuccuggaa

SEQ ID NO: 2387404 - RNA, 19 nt, Artificial Sequence
  Description of Artificial Sequence: Synthetic oligonucleotide
caguggcgaccccgggguc

SEQ ID NO: 2387405 - RNA, 19 nt, Artificial Sequence
  Description of Artificial Sequence: Synthetic oligonucleotide
ccaacagccggaguguacu

SEQ ID NO: 2387406 - RNA, 19 nt, Artificial Sequence
  Description of Artificial Sequence: Synthetic oligonucleotide
cugagaggacucugugguu

SEQ ID NO: 2387407 - RNA, 19 nt, Artificial Sequence
  Description of Artificial Sequence: Synthetic oligonucleotide
cccucaagguguggaugag

SEQ ID NO: 2387408 - RNA, 19 nt, Artificial Sequence
  Description of Artificial Sequence: Synthetic oligonucleotide
cccggggucgcaaggcuga

SEQ ID NO: 2387409 - RNA, 19 nt, Artificial Sequence
  Description of Artificial Sequence: Synthetic oligonucleotide
gggugacuucucagcacca

SEQ ID NO: 2387410 - RNA, 19 nt, Artificial Sequence
  Description of Artificial Sequence: Synthetic oligonucleotide
ccugucccuuucugcacca

SEQ ID NO: 2387411 - RNA, 19 nt, Artificial Sequence
  Description of Artificial Sequence: Synthetic oligonucleotide
ccccggggucgcaaggcug

SEQ ID NO: 2387412 - RNA, 19 nt, Artificial Sequence
  Description of Artificial Sequence: Synthetic oligonucleotide
guggaucaucgggugacuu

SEQ ID NO: 2387413 - RNA, 19 nt, Artificial Sequence
  Description of Artificial Sequence: Synthetic oligonucleotide
ggugcuccagagaccugaa

SEQ ID NO: 2387414 - RNA, 19 nt, Artificial Sequence
  Description of Artificial Sequence: Synthetic oligonucleotide
gccaccgccaaaaucuguu

SEQ ID NO: 2387415 - RNA, 19 nt, Artificial Sequence
  Description of Artificial Sequence: Synthetic oligonucleotide
cacucggcaaaggccugua

SEQ ID NO: 2387416 - RNA, 19 nt, Artificial Sequence
  Description of Artificial Sequence: Synthetic oligonucleotide
gggccucgugaagggacac

SEQ ID NO: 2387417 - RNA, 19 nt, Artificial Sequence
  Description of Artificial Sequence: Synthetic oligonucleotide
cgcaaacccgcuucaggaa

SEQ ID NO: 2387418 - RNA, 19 nt, Artificial Sequence
  Description of Artificial Sequence: Synthetic oligonucleotide
cgggcaagaggaucagaaa

SEQ ID NO: 2387419 - RNA, 19 nt, Artificial Sequence
  Description of Artificial Sequence: Synthetic oligonucleotide
ggccucgugaagggacaca

SEQ ID NO: 2387420 - RNA, 19 nt, Artificial Sequence
  Description of Artificial Sequence: Synthetic oligonucleotide
ggacauccagaugcuugcu

SEQ ID NO: 2387421 - RNA, 19 nt, Artificial Sequence
  Description of Artificial Sequence: Synthetic oligonucleotide
ccgcuucaggaagagaagu

SEQ ID NO: 2387422 - RNA, 19 nt, Artificial Sequence
  Description of Artificial Sequence: Synthetic oligonucleotide
gcaaggcugagaggacucu

SEQ ID NO: 2387423 - RNA, 19 nt, Artificial Sequence
  Description of Artificial Sequence: Synthetic oligonucleotide
cucugugguuagccccggu

SEQ ID NO: 2387424 - RNA, 19 nt, Artificial Sequence
  Description of Artificial Sequence: Synthetic oligonucleotide
gaggugcgggcaagaggau

SEQ ID NO: 2387425 - RNA, 19 nt, Artificial Sequence
  Description of Artificial Sequence: Synthetic oligonucleotide
gggcccucaagguguggau

SEQ ID NO: 2387426 - RNA, 19 nt, Artificial Sequence
  Description of Artificial Sequence: Synthetic oligonucleotide
cgguuaaggcuaaccagau

SEQ ID NO: 2387427 - RNA, 19 nt, Artificial Sequence
  Description of Artificial Sequence: Synthetic oligonucleotide
uggcgaccccggggucgca

SEQ ID NO: 2387428 - RNA, 19 nt, Artificial Sequence
  Description of Artificial Sequence: Synthetic oligonucleotide
ccucgugaagggacacagu

SEQ ID NO: 2387429 - RNA, 19 nt, Artificial Sequence
  Description of Artificial Sequence: Synthetic oligonucleotide
ccaccgucuguggcuccug

SEQ ID NO: 2387430 - RNA, 19 nt, Artificial Sequence
  Description of Artificial Sequence: Synthetic oligonucleotide
gcacucggcaaaggccugu

SEQ ID NO: 2387431 - RNA, 19 nt, Artificial Sequence
  Description of Artificial Sequence: Synthetic oligonucleotide
ggccaccgccaaaaucugu

SEQ ID NO: 2387432 - RNA, 19 nt, Artificial Sequence
  Description of Artificial Sequence: Synthetic oligonucleotide
ccggggucgcaaggcugag

SEQ ID NO: 2387433 - RNA, 19 nt, Artificial Sequence
  Description of Artificial Sequence: Synthetic oligonucleotide
gcggaagagccugucccuu

SEQ ID NO: 2387434 - RNA, 19 nt, Artificial Sequence
  Description of Artificial Sequence: Synthetic oligonucleotide
gcggaccaacagccggagu

SEQ ID NO: 2387435 - RNA, 19 nt, Artificial Sequence
  Description of Artificial Sequence: Synthetic oligonucleotide
gcuccaugaggggccucgu

SEQ ID NO: 2387436 - RNA, 19 nt, Artificial Sequence
  Description of Artificial Sequence: Synthetic oligonucleotide
ccgccaaaaucuguuccuu

SEQ ID NO: 2387437 - RNA, 19 nt, Artificial Sequence
  Description of Artificial Sequence: Synthetic oligonucleotide
cggggucgcaaggcugaga

SEQ ID NO: 2387438 - RNA, 19 nt, Artificial Sequence
  Description of Artificial Sequence: Synthetic oligonucleotide
ccauguggccguggaucau

SEQ ID NO: 2387439 - RNA, 19 nt, Artificial Sequence
  Description of Artificial Sequence: Synthetic oligonucleotide
aauucauacauauucuuag

SEQ ID NO: 2387440 - RNA, 19 nt, Artificial Sequence
  Description of Artificial Sequence: Synthetic oligonucleotide
uggaaagccaaaaugaccg

SEQ ID NO: 2387441 - RNA, 19 nt, Artificial Sequence
  Description of Artificial Sequence: Synthetic oligonucleotide
acaaguuucucauugaggg

SEQ ID NO: 2387442 - RNA, 19 nt, Artificial Sequence
  Description of Artificial Sequence: Synthetic oligonucleotide
uuuuguguaauucauacau

SEQ ID NO: 2387443 - RNA, 19 nt, Artificial Sequence
  Description of Artificial Sequence: Synthetic oligonucleotide
uauggugaaaaccaagacc

SEQ ID NO: 2387444 - RNA, 19 nt, Artificial Sequence
  Description of Artificial Sequence: Synthetic oligonucleotide
cugacauaagccuugaugc

SEQ ID NO: 2387445 - RNA, 19 nt, Artificial Sequence
  Description of Artificial Sequence: Synthetic oligonucleotide
ugauuaaccaggcucauca

SEQ ID NO: 2387446 - RNA, 19 nt, Artificial Sequence
  Description of Artificial Sequence: Synthetic oligonucleotide
ugcaauacagugcuuagag

SEQ ID NO: 2387447 - RNA, 19 nt, Artificial Sequence
  Description of Artificial Sequence: Synthetic oligonucleotide
ucaucaggaacuaucuugg

SEQ ID NO: 2387448 - RNA, 19 nt, Artificial Sequence
  Description of Artificial Sequence: Synthetic oligonucleotide
cauauucuuagcaaauucc

SEQ ID NO: 2387449 - RNA, 19 nt, Artificial Sequence
  Description of Artificial Sequence: Synthetic oligonucleotide
auugagggcaaucugugac

SEQ ID NO: 2387450 - RNA, 19 nt, Artificial Sequence
  Description of Artificial Sequence: Synthetic oligonucleotide
uguaauucauacauauucu

SEQ ID NO: 2387451 - RNA, 19 nt, Artificial Sequence
  Description of Artificial Sequence: Synthetic oligonucleotide
aguccaaucacccgguugg

SEQ ID NO: 2387452 - RNA, 19 nt, Artificial Sequence
  Description of Artificial Sequence: Synthetic oligonucleotide
auugauguugcuguugagc

SEQ ID NO: 2387453 - RNA, 19 nt, Artificial Sequence
  Description of Artificial Sequence: Synthetic oligonucleotide
uacuugauuaaccaggcuc

SEQ ID NO: 2387454 - RNA, 19 nt, Artificial Sequence
  Description of Artificial Sequence: Synthetic oligonucleotide
aacaucacucccaucgucc

SEQ ID NO: 2387455 - RNA, 19 nt, Artificial Sequence
  Description of Artificial Sequence: Synthetic oligonucleotide
aggugaauggguuuugggg

SEQ ID NO: 2387456 - RNA, 19 nt, Artificial Sequence
  Description of Artificial Sequence: Synthetic oligonucleotide
ucaacaguucccagcaggg

SEQ ID NO: 2387457 - RNA, 19 nt, Artificial Sequence
  Description of Artificial Sequence: Synthetic oligonucleotide
uuugucaacaguucccagc

SEQ ID NO: 2387458 - RNA, 19 nt, Artificial Sequence
  Description of Artificial Sequence: Synthetic oligonucleotide
uaauacgcauacuucacug

SEQ ID NO: 2387459 - RNA, 19 nt, Artificial Sequence
  Description of Artificial Sequence: Synthetic oligonucleotide
uucuuagcaaauuccaugu

SEQ ID NO: 2387460 - RNA, 19 nt, Artificial Sequence
  Description of Artificial Sequence: Synthetic oligonucleotide
caauacagugcuuagagca

SEQ ID NO: 2387461 - RNA, 19 nt, Artificial Sequence
  Description of Artificial Sequence: Synthetic oligonucleotide
uuguguaauucauacauau

SEQ ID NO: 2387462 - RNA, 19 nt, Artificial Sequence
  Description of Artificial Sequence: Synthetic oligonucleotide
ucuucugacucauugugug

SEQ ID NO: 2387463 - RNA, 19 nt, Artificial Sequence
  Description of Artificial Sequence: Synthetic oligonucleotide
agaggcuccgcccacuugc

SEQ ID NO: 2387464 - RNA, 19 nt, Artificial Sequence
  Description of Artificial Sequence: Synthetic oligonucleotide
cuaggaugagcucauuugg

SEQ ID NO: 2387465 - RNA, 19 nt, Artificial Sequence
  Description of Artificial Sequence: Synthetic oligonucleotide
cauaguuucaaagucauca

SEQ ID NO: 2387466 - RNA, 19 nt, Artificial Sequence
  Description of Artificial Sequence: Synthetic oligonucleotide
auggugaaaaccaagacca

SEQ ID NO: 2387467 - RNA, 19 nt, Artificial Sequence
  Description of Artificial Sequence: Synthetic oligonucleotide
uugagcauaguuucaaagu

SEQ ID NO: 2387468 - RNA, 19 nt, Artificial Sequence
  Description of Artificial Sequence: Synthetic oligonucleotide
acgauggaaagccaaaaug

SEQ ID NO: 2387469 - RNA, 19 nt, Artificial Sequence
  Description of Artificial Sequence: Synthetic oligonucleotide
ucacaaguuucucauugag

SEQ ID NO: 2387470 - RNA, 19 nt, Artificial Sequence
  Description of Artificial Sequence: Synthetic oligonucleotide
ucuuagggcucauucacag

SEQ ID NO: 2387471 - RNA, 19 nt, Artificial Sequence
  Description of Artificial Sequence: Synthetic oligonucleotide
ucaggaacuaucuugggua

SEQ ID NO: 2387472 - RNA, 19 nt, Artificial Sequence
  Description of Artificial Sequence: Synthetic oligonucleotide
ucauacauauucuuagcaa

SEQ ID NO: 2387473 - RNA, 19 nt, Artificial Sequence
  Description of Artificial Sequence: Synthetic oligonucleotide
agugcuuagagcauccugg

SEQ ID NO: 2387474 - RNA, 19 nt, Artificial Sequence
  Description of Artificial Sequence: Synthetic oligonucleotide
agggacacccauuaaagug

SEQ ID NO: 2387475 - RNA, 19 nt, Artificial Sequence
  Description of Artificial Sequence: Synthetic oligonucleotide
uuguguggcacugaaaagc

SEQ ID NO: 2387476 - RNA, 19 nt, Artificial Sequence
  Description of Artificial Sequence: Synthetic oligonucleotide
cuuuccagacagcacaucc

SEQ ID NO: 2387477 - RNA, 19 nt, Artificial Sequence
  Description of Artificial Sequence: Synthetic oligonucleotide
ugaguguuugucaacaguu

SEQ ID NO: 2387478 - RNA, 19 nt, Artificial Sequence
  Description of Artificial Sequence: Synthetic oligonucleotide
agauuggccagguagguca

SEQ ID NO: 2387479 - RNA, 19 nt, Artificial Sequence
  Description of Artificial Sequence: Synthetic oligonucleotide
uucaugaugaggucaacuc

SEQ ID NO: 2387480 - RNA, 19 nt, Artificial Sequence
  Description of Artificial Sequence: Synthetic oligonucleotide
cugucuacgauggaaagcc

SEQ ID NO: 2387481 - RNA, 19 nt, Artificial Sequence
  Description of Artificial Sequence: Synthetic oligonucleotide
aauacgcauacuucacugu

SEQ ID NO: 2387482 - RNA, 19 nt, Artificial Sequence
  Description of Artificial Sequence: Synthetic oligonucleotide
agccuugaugcucaugcgc

SEQ ID NO: 2387483 - RNA, 19 nt, Artificial Sequence
  Description of Artificial Sequence: Synthetic oligonucleotide
ggugagauuggccagguag

SEQ ID NO: 2387484 - RNA, 19 nt, Artificial Sequence
  Description of Artificial Sequence: Synthetic oligonucleotide
uguucugugaugucauggc

SEQ ID NO: 2387485 - RNA, 19 nt, Artificial Sequence
  Description of Artificial Sequence: Synthetic oligonucleotide
aggaugagcucauuugggg

SEQ ID NO: 2387486 - RNA, 19 nt, Artificial Sequence
  Description of Artificial Sequence: Synthetic oligonucleotide
aggugugaacaucacuccc

SEQ ID NO: 2387487 - RNA, 19 nt, Artificial Sequence
  Description of Artificial Sequence: Synthetic oligonucleotide
ugcauaccagccuaggaug

SEQ ID NO: 2387488 - RNA, 19 nt, Artificial Sequence
  Description of Artificial Sequence: Synthetic oligonucleotide
uaucuuggguacuugauua

SEQ ID NO: 2387489 - RNA, 19 nt, Artificial Sequence
  Description of Artificial Sequence: Synthetic oligonucleotide
guaguauucauggaugagc

SEQ ID NO: 2387490 - RNA, 19 nt, Artificial Sequence
  Description of Artificial Sequence: Synthetic oligonucleotide
cuuggguacuugauuaacc

SEQ ID NO: 2387491 - RNA, 19 nt, Artificial Sequence
  Description of Artificial Sequence: Synthetic oligonucleotide
uaaaacaugucuucaugau

SEQ ID NO: 2387492 - RNA, 19 nt, Artificial Sequence
  Description of Artificial Sequence: Synthetic oligonucleotide
ugaggucaacuccaaugcg

SEQ ID NO: 2387493 - RNA, 19 nt, Artificial Sequence
  Description of Artificial Sequence: Synthetic oligonucleotide
cauaauacgcauacuucac

SEQ ID NO: 2387494 - RNA, 19 nt, Artificial Sequence
  Description of Artificial Sequence: Synthetic oligonucleotide
uguguggcacugaaaagca

SEQ ID NO: 2387495 - RNA, 19 nt, Artificial Sequence
  Description of Artificial Sequence: Synthetic oligonucleotide
cuuagagcauccuggauuc

SEQ ID NO: 2387496 - RNA, 19 nt, Artificial Sequence
  Description of Artificial Sequence: Synthetic oligonucleotide
uggguuuuggggcuucccg

SEQ ID NO: 2387497 - RNA, 19 nt, Artificial Sequence
  Description of Artificial Sequence: Synthetic oligonucleotide
ucauucacagguucacaag

SEQ ID NO: 2387498 - RNA, 19 nt, Artificial Sequence
  Description of Artificial Sequence: Synthetic oligonucleotide
aacccuuugccuccacuuc

SEQ ID NO: 2387499 - RNA, 19 nt, Artificial Sequence
  Description of Artificial Sequence: Synthetic oligonucleotide
aacuaucuuggguacuuga

SEQ ID NO: 2387500 - RNA, 19 nt, Artificial Sequence
  Description of Artificial Sequence: Synthetic oligonucleotide
uugcauaccagccuaggau

SEQ ID NO: 2387501 - RNA, 19 nt, Artificial Sequence
  Description of Artificial Sequence: Synthetic oligonucleotide
ucacuggagaguccaauca

SEQ ID NO: 2387502 - RNA, 19 nt, Artificial Sequence
  Description of Artificial Sequence: Synthetic oligonucleotide
cuaaaacaugucuucauga

SEQ ID NO: 2387503 - RNA, 19 nt, Artificial Sequence
  Description of Artificial Sequence: Synthetic oligonucleotide
ugcuguugagcauaguuuc

SEQ ID NO: 2387504 - RNA, 19 nt, Artificial Sequence
  Description of Artificial Sequence: Synthetic oligonucleotide
guuccgauaacccgggcag

SEQ ID NO: 2387505 - RNA, 19 nt, Artificial Sequence
  Description of Artificial Sequence: Synthetic oligonucleotide
aaccaagaccagcacaagu

SEQ ID NO: 2387506 - RNA, 19 nt, Artificial Sequence
  Description of Artificial Sequence: Synthetic oligonucleotide
aaaagcaguuggugacuuc

SEQ ID NO: 2387507 - RNA, 19 nt, Artificial Sequence
  Description of Artificial Sequence: Synthetic oligonucleotide
ggagaguccaaucacccgg

SEQ ID NO: 2387508 - RNA, 19 nt, Artificial Sequence
  Description of Artificial Sequence: Synthetic oligonucleotide
aguccuauggugaaaacca

SEQ ID NO: 2387509 - RNA, 19 nt, Artificial Sequence
  Description of Artificial Sequence: Synthetic oligonucleotide
auaauacgcauacuucacu

SEQ ID NO: 2387510 - RNA, 19 nt, Artificial Sequence
  Description of Artificial Sequence: Synthetic oligonucleotide
auacgcauacuucacugug

SEQ ID NO: 2387511 - RNA, 19 nt, Artificial Sequence
  Description of Artificial Sequence: Synthetic oligonucleotide
agcacaagugccucuuagg

SEQ ID NO: 2387512 - RNA, 19 nt, Artificial Sequence
  Description of Artificial Sequence: Synthetic oligonucleotide
caggguuccgauaacccgg

SEQ ID NO: 2387513 - RNA, 19 nt, Artificial Sequence
  Description of Artificial Sequence: Synthetic oligonucleotide
gaggugaauggguuuuggg

SEQ ID NO: 2387514 - RNA, 19 nt, Artificial Sequence
  Description of Artificial Sequence: Synthetic oligonucleotide
uuggggcuaaaacaugucu

SEQ ID NO: 2387515 - RNA, 19 nt, Artificial Sequence
  Description of Artificial Sequence: Synthetic oligonucleotide
aacaguucccagcaggguu

SEQ ID NO: 2387516 - RNA, 19 nt, Artificial Sequence
  Description of Artificial Sequence: Synthetic oligonucleotide
acuggagaguccaaucacc

SEQ ID NO: 2387517 - RNA, 19 nt, Artificial Sequence
  Description of Artificial Sequence: Synthetic oligonucleotide
cauacauauucuuagcaaa

SEQ ID NO: 2387518 - RNA, 19 nt, Artificial Sequence
  Description of Artificial Sequence: Synthetic oligonucleotide
cauacuucacugugagagg

SEQ ID NO: 2387519 - RNA, 19 nt, Artificial Sequence
  Description of Artificial Sequence: Synthetic oligonucleotide
guuggugacuuccacugag

SEQ ID NO: 2387520 - RNA, 19 nt, Artificial Sequence
  Description of Artificial Sequence: Synthetic oligonucleotide
guaggucaccaucagcagg

SEQ ID NO: 2387521 - RNA, 19 nt, Artificial Sequence
  Description of Artificial Sequence: Synthetic oligonucleotide
auauucuuagcaaauucca

SEQ ID NO: 2387522 - RNA, 19 nt, Artificial Sequence
  Description of Artificial Sequence: Synthetic oligonucleotide
aagccaaaaugaccgggug

SEQ ID NO: 2387523 - RNA, 19 nt, Artificial Sequence
  Description of Artificial Sequence: Synthetic oligonucleotide
uguuugucaacaguuccca

SEQ ID NO: 2387524 - RNA, 19 nt, Artificial Sequence
  Description of Artificial Sequence: Synthetic oligonucleotide
acugcaauacagugcuuag

SEQ ID NO: 2387525 - RNA, 19 nt, Artificial Sequence
  Description of Artificial Sequence: Synthetic oligonucleotide
gacugggugagauuggcca

SEQ ID NO: 2387526 - RNA, 19 nt, Artificial Sequence
  Description of Artificial Sequence: Synthetic oligonucleotide
ucuacgauggaaagccaaa

SEQ ID NO: 2387527 - RNA, 19 nt, Artificial Sequence
  Description of Artificial Sequence: Synthetic oligonucleotide
ucauggaugagcaccgaau

SEQ ID NO: 2387528 - RNA, 19 nt, Artificial Sequence
  Description of Artificial Sequence: Synthetic oligonucleotide
gaugucauggccuguugca

SEQ ID NO: 2387529 - RNA, 19 nt, Artificial Sequence
  Description of Artificial Sequence: Synthetic oligonucleotide
ucucucguagcugucuacg

SEQ ID NO: 2387530 - RNA, 19 nt, Artificial Sequence
  Description of Artificial Sequence: Synthetic oligonucleotide
gcugacauaagccuugaug

SEQ ID NO: 2387531 - RNA, 19 nt, Artificial Sequence
  Description of Artificial Sequence: Synthetic oligonucleotide
aauuccaugucaacagcca

SEQ ID NO: 2387532 - RNA, 19 nt, Artificial Sequence
  Description of Artificial Sequence: Synthetic oligonucleotide
cuauggugaaaaccaagac

SEQ ID NO: 2387533 - RNA, 19 nt, Artificial Sequence
  Description of Artificial Sequence: Synthetic oligonucleotide
ugugacugggugagauugg

SEQ ID NO: 2387534 - RNA, 19 nt, Artificial Sequence
  Description of Artificial Sequence: Synthetic oligonucleotide
caaauuccaugucaacagc

SEQ ID NO: 2387535 - RNA, 19 nt, Artificial Sequence
  Description of Artificial Sequence: Synthetic oligonucleotide
acucccaucguccucccag

SEQ ID NO: 2387536 - RNA, 19 nt, Artificial Sequence
  Description of Artificial Sequence: Synthetic oligonucleotide
aagucaucaggaacuaucu

SEQ ID NO: 2387537 - RNA, 19 nt, Artificial Sequence
  Description of Artificial Sequence: Synthetic oligonucleotide
gaggugugaacaucacucc

SEQ ID NO: 2387538 - RNA, 19 nt, Artificial Sequence
  Description of Artificial Sequence: Synthetic oligonucleotide
uucugacucauuguguggc

SEQ ID NO: 2387539 - RNA, 19 nt, Artificial Sequence
  Description of Artificial Sequence: Synthetic oligonucleotide
gaguccuauggugaaaacc

SEQ ID NO: 2387540 - RNA, 19 nt, Artificial Sequence
  Description of Artificial Sequence: Synthetic oligonucleotide
aaacccuuugccuccacuu

SEQ ID NO: 2387541 - RNA, 19 nt, Artificial Sequence
  Description of Artificial Sequence: Synthetic oligonucleotide
uuuccagacagcacauccu

SEQ ID NO: 2387542 - RNA, 19 nt, Artificial Sequence
  Description of Artificial Sequence: Synthetic oligonucleotide
uacagugcuuagagcaucc

SEQ ID NO: 2387543 - RNA, 19 nt, Artificial Sequence
  Description of Artificial Sequence: Synthetic oligonucleotide
uggagaguccaaucacccg

SEQ ID NO: 2387544 - RNA, 19 nt, Artificial Sequence
  Description of Artificial Sequence: Synthetic oligonucleotide
aaagccaaaaugaccgggu

SEQ ID NO: 2387545 - RNA, 19 nt, Artificial Sequence
  Description of Artificial Sequence: Synthetic oligonucleotide
acuugauuaaccaggcuca

SEQ ID NO: 2387546 - RNA, 19 nt, Artificial Sequence
  Description of Artificial Sequence: Synthetic oligonucleotide
acgcauacuucacugugag

SEQ ID NO: 2387547 - RNA, 19 nt, Artificial Sequence
  Description of Artificial Sequence: Synthetic oligonucleotide
agcaguuggugacuuccac

SEQ ID NO: 2387548 - RNA, 19 nt, Artificial Sequence
  Description of Artificial Sequence: Synthetic oligonucleotide
cauacugcaauacagugcu

SEQ ID NO: 2387549 - RNA, 19 nt, Artificial Sequence
  Description of Artificial Sequence: Synthetic oligonucleotide
caaucugugacugggugag

SEQ ID NO: 2387550 - RNA, 19 nt, Artificial Sequence
  Description of Artificial Sequence: Synthetic oligonucleotide
uccacugaguguuugucaa

SEQ ID NO: 2387551 - RNA, 19 nt, Artificial Sequence
  Description of Artificial Sequence: Synthetic oligonucleotide
ggguacuugauuaaccagg

SEQ ID NO: 2387552 - RNA, 19 nt, Artificial Sequence
  Description of Artificial Sequence: Synthetic oligonucleotide
ccuggauucgagcagaggc

SEQ ID NO: 2387553 - RNA, 19 nt, Artificial Sequence
  Description of Artificial Sequence: Synthetic oligonucleotide
uacgcauacuucacuguga

SEQ ID NO: 2387554 - RNA, 19 nt, Artificial Sequence
  Description of Artificial Sequence: Synthetic oligonucleotide
aacccgggcagcucccucg

SEQ ID NO: 2387555 - RNA, 19 nt, Artificial Sequence
  Description of Artificial Sequence: Synthetic oligonucleotide
ugacauaagccuugaugcu

SEQ ID NO: 2387556 - RNA, 19 nt, Artificial Sequence
  Description of Artificial Sequence: Synthetic oligonucleotide
uugcuguugagcauaguuu

SEQ ID NO: 2387557 - RNA, 19 nt, Artificial Sequence
  Description of Artificial Sequence: Synthetic oligonucleotide
agggcucauucacagguuc

SEQ ID NO: 2387558 - RNA, 19 nt, Artificial Sequence
  Description of Artificial Sequence: Synthetic oligonucleotide
cacaagugccucuuagggc

SEQ ID NO: 2387559 - RNA, 19 nt, Artificial Sequence
  Description of Artificial Sequence: Synthetic oligonucleotide
gcacaagugccucuuaggg

SEQ ID NO: 2387560 - RNA, 19 nt, Artificial Sequence
  Description of Artificial Sequence: Synthetic oligonucleotide
cauucuggagaccuguguc

SEQ ID NO: 2387561 - RNA, 19 nt, Artificial Sequence
  Description of Artificial Sequence: Synthetic oligonucleotide
accaagaccagcacaagug

SEQ ID NO: 2387562 - RNA, 19 nt, Artificial Sequence
  Description of Artificial Sequence: Synthetic oligonucleotide
aauggguuuuggggcuucc

SEQ ID NO: 2387563 - RNA, 19 nt, Artificial Sequence
  Description of Artificial Sequence: Synthetic oligonucleotide
cagacaccuuuccagacag

SEQ ID NO: 2387564 - RNA, 19 nt, Artificial Sequence
  Description of Artificial Sequence: Synthetic oligonucleotide
ugaacaucacucccaucgu

SEQ ID NO: 2387565 - RNA, 19 nt, Artificial Sequence
  Description of Artificial Sequence: Synthetic oligonucleotide
gugaaaaccaagaccagca

SEQ ID NO: 2387566 - RNA, 19 nt, Artificial Sequence
  Description of Artificial Sequence: Synthetic oligonucleotide
gugagauuggccagguagg

SEQ ID NO: 2387567 - RNA, 19 nt, Artificial Sequence
  Description of Artificial Sequence: Synthetic oligonucleotide
uguugcauaccagccuagg

SEQ ID NO: 2387568 - RNA, 19 nt, Artificial Sequence
  Description of Artificial Sequence: Synthetic oligonucleotide
gauucgagcagaggcuccg

SEQ ID NO: 2387569 - RNA, 19 nt, Artificial Sequence
  Description of Artificial Sequence: Synthetic oligonucleotide
auaccagccuaggaugagc

SEQ ID NO: 2387570 - RNA, 19 nt, Artificial Sequence
  Description of Artificial Sequence: Synthetic oligonucleotide
cucguugcgucucucguag

SEQ ID NO: 2387571 - RNA, 19 nt, Artificial Sequence
  Description of Artificial Sequence: Synthetic oligonucleotide
guucagugucauaauacgc

SEQ ID NO: 2387572 - RNA, 19 nt, Artificial Sequence
  Description of Artificial Sequence: Synthetic oligonucleotide
acccgguuggggcuaaaac

SEQ ID NO: 2387573 - RNA, 19 nt, Artificial Sequence
  Description of Artificial Sequence: Synthetic oligonucleotide
agcaggguuccgauaaccc

SEQ ID NO: 2387574 - RNA, 19 nt, Artificial Sequence
  Description of Artificial Sequence: Synthetic oligonucleotide
acacccauuaaagugcuga

SEQ ID NO: 2387575 - RNA, 19 nt, Artificial Sequence
  Description of Artificial Sequence: Synthetic oligonucleotide
ugaggugaauggguuuugg

SEQ ID NO: 2387576 - RNA, 19 nt, Artificial Sequence
  Description of Artificial Sequence: Synthetic oligonucleotide
guucugugaugucauggcc

SEQ ID NO: 2387577 - RNA, 19 nt, Artificial Sequence
  Description of Artificial Sequence: Synthetic oligonucleotide
uggggcuaaaacaugucuu

SEQ ID NO: 2387578 - RNA, 19 nt, Artificial Sequence
  Description of Artificial Sequence: Synthetic oligonucleotide
ugucagcagacaccuuucc

SEQ ID NO: 2387579 - RNA, 19 nt, Artificial Sequence
  Description of Artificial Sequence: Synthetic oligonucleotide
aagaccagcacaagugccu

SEQ ID NO: 2387580 - RNA, 19 nt, Artificial Sequence
  Description of Artificial Sequence: Synthetic oligonucleotide
acugaguguuugucaacag

SEQ ID NO: 2387581 - RNA, 19 nt, Artificial Sequence
  Description of Artificial Sequence: Synthetic oligonucleotide
uugagggcaaucugugacu

SEQ ID NO: 2387582 - RNA, 19 nt, Artificial Sequence
  Description of Artificial Sequence: Synthetic oligonucleotide
uucacagguucacaaguuu

SEQ ID NO: 2387583 - RNA, 19 nt, Artificial Sequence
  Description of Artificial Sequence: Synthetic oligonucleotide
aauacagugcuuagagcau

SEQ ID NO: 2387584 - RNA, 19 nt, Artificial Sequence
  Description of Artificial Sequence: Synthetic oligonucleotide
cuuugccuccacuucaguc

SEQ ID NO: 2387585 - RNA, 19 nt, Artificial Sequence
  Description of Artificial Sequence: Synthetic oligonucleotide
ugccucuuagggcucauuc

SEQ ID NO: 2387586 - RNA, 19 nt, Artificial Sequence
  Description of Artificial Sequence: Synthetic oligonucleotide
auacagugcuuagagcauc

SEQ ID NO: 2387587 - RNA, 19 nt, Artificial Sequence
  Description of Artificial Sequence: Synthetic oligonucleotide
cuuagggcucauucacagg

SEQ ID NO: 2387588 - RNA, 19 nt, Artificial Sequence
  Description of Artificial Sequence: Synthetic oligonucleotide
agcugucuacgauggaaag

SEQ ID NO: 2387589 - RNA, 19 nt, Artificial Sequence
  Description of Artificial Sequence: Synthetic oligonucleotide
cugugacugggugagauug

SEQ ID NO: 2387590 - RNA, 19 nt, Artificial Sequence
  Description of Artificial Sequence: Synthetic oligonucleotide
auacuucacugugagaggu

SEQ ID NO: 2387591 - RNA, 19 nt, Artificial Sequence
  Description of Artificial Sequence: Synthetic oligonucleotide
uaccagccuaggaugagcu

SEQ ID NO: 2387592 - RNA, 19 nt, Artificial Sequence
  Description of Artificial Sequence: Synthetic oligonucleotide
uuuuggggcuucccggcug

SEQ ID NO: 2387593 - RNA, 19 nt, Artificial Sequence
  Description of Artificial Sequence: Synthetic oligonucleotide
auccucagcauacugcaau

SEQ ID NO: 2387594 - RNA, 19 nt, Artificial Sequence
  Description of Artificial Sequence: Synthetic oligonucleotide
ugcguucagugucauaaua

SEQ ID NO: 2387595 - RNA, 19 nt, Artificial Sequence
  Description of Artificial Sequence: Synthetic oligonucleotide
uacugcaauacagugcuua

SEQ ID NO: 2387596 - RNA, 19 nt, Artificial Sequence
  Description of Artificial Sequence: Synthetic oligonucleotide
accgaauguucugugaugu

SEQ ID NO: 2387597 - RNA, 19 nt, Artificial Sequence
  Description of Artificial Sequence: Synthetic oligonucleotide
uucauggaugagcaccgaa

SEQ ID NO: 2387598 - RNA, 19 nt, Artificial Sequence
  Description of Artificial Sequence: Synthetic oligonucleotide
ucaugcgcccauucuggag

SEQ ID NO: 2387599 - RNA, 19 nt, Artificial Sequence
  Description of Artificial Sequence: Synthetic oligonucleotide
augagcaccgaauguucug

SEQ ID NO: 2387600 - RNA, 19 nt, Artificial Sequence
  Description of Artificial Sequence: Synthetic oligonucleotide
guguuugucaacaguuccc

SEQ ID NO: 2387601 - RNA, 19 nt, Artificial Sequence
  Description of Artificial Sequence: Synthetic oligonucleotide
ucuuggguacuugauuaac

SEQ ID NO: 2387602 - RNA, 19 nt, Artificial Sequence
  Description of Artificial Sequence: Synthetic oligonucleotide
ucucguagcugucuacgau

SEQ ID NO: 2387603 - RNA, 19 nt, Artificial Sequence
  Description of Artificial Sequence: Synthetic oligonucleotide
gaccuguguccacagugag

SEQ ID NO: 2387604 - RNA, 19 nt, Artificial Sequence
  Description of Artificial Sequence: Synthetic oligonucleotide
ugacucauuguguggcacu

SEQ ID NO: 2387605 - RNA, 19 nt, Artificial Sequence
  Description of Artificial Sequence: Synthetic oligonucleotide
cagcacauccucagcauac

SEQ ID NO: 2387606 - RNA, 19 nt, Artificial Sequence
  Description of Artificial Sequence: Synthetic oligonucleotide
ucaucaagaagcggccuac

SEQ ID NO: 2387607 - RNA, 19 nt, Artificial Sequence
  Description of Artificial Sequence: Synthetic oligonucleotide
caucaggaacuaucuuggg

SEQ ID NO: 2387608 - RNA, 19 nt, Artificial Sequence
  Description of Artificial Sequence: Synthetic oligonucleotide
uacuucacugugagaggug

SEQ ID NO: 2387609 - RNA, 19 nt, Artificial Sequence
  Description of Artificial Sequence: Synthetic oligonucleotide
accaucagcaggucauuga

SEQ ID NO: 2387610 - RNA, 19 nt, Artificial Sequence
  Description of Artificial Sequence: Synthetic oligonucleotide
ugagaggugugaacaucac

SEQ ID NO: 2387611 - RNA, 19 nt, Artificial Sequence
  Description of Artificial Sequence: Synthetic oligonucleotide
cacugaaaagcaguuggug

SEQ ID NO: 2387612 - RNA, 19 nt, Artificial Sequence
  Description of Artificial Sequence: Synthetic oligonucleotide
cucauucacagguucacaa

SEQ ID NO: 2387613 - RNA, 19 nt, Artificial Sequence
  Description of Artificial Sequence: Synthetic oligonucleotide
uccagacagcacauccuca

SEQ ID NO: 2387614 - RNA, 19 nt, Artificial Sequence
  Description of Artificial Sequence: Synthetic oligonucleotide
ugagcaccgaauguucugu

SEQ ID NO: 2387615 - RNA, 19 nt, Artificial Sequence
  Description of Artificial Sequence: Synthetic oligonucleotide
ccuaggaugagcucauuug

SEQ ID NO: 2387616 - RNA, 19 nt, Artificial Sequence
  Description of Artificial Sequence: Synthetic oligonucleotide
auacauauucuuagcaaau

SEQ ID NO: 2387617 - RNA, 19 nt, Artificial Sequence
  Description of Artificial Sequence: Synthetic oligonucleotide
gguacuugauuaaccaggc

SEQ ID NO: 2387618 - RNA, 19 nt, Artificial Sequence
  Description of Artificial Sequence: Synthetic oligonucleotide
cguucagugucauaauacg

SEQ ID NO: 2387619 - RNA, 19 nt, Artificial Sequence
  Description of Artificial Sequence: Synthetic oligonucleotide
uucgagcagaggcuccgcc

SEQ ID NO: 2387620 - RNA, 19 nt, Artificial Sequence
  Description of Artificial Sequence: Synthetic oligonucleotide
ugucaacaguucccagcag

SEQ ID NO: 2387621 - RNA, 19 nt, Artificial Sequence
  Description of Artificial Sequence: Synthetic oligonucleotide
caggaacuaucuuggguac

SEQ ID NO: 2387622 - RNA, 19 nt, Artificial Sequence
  Description of Artificial Sequence: Synthetic oligonucleotide
uggaugagcaccgaauguu

SEQ ID NO: 2387623 - RNA, 19 nt, Artificial Sequence
  Description of Artificial Sequence: Synthetic oligonucleotide
ggugaaaaccaagaccagc

SEQ ID NO: 2387624 - RNA, 19 nt, Artificial Sequence
  Description of Artificial Sequence: Synthetic oligonucleotide
uccaaucacccgguugggg

SEQ ID NO: 2387625 - RNA, 19 nt, Artificial Sequence
  Description of Artificial Sequence: Synthetic oligonucleotide
uagagcauccuggauucga

SEQ ID NO: 2387626 - RNA, 19 nt, Artificial Sequence
  Description of Artificial Sequence: Synthetic oligonucleotide
gcaggguuccgauaacccg

SEQ ID NO: 2387627 - RNA, 19 nt, Artificial Sequence
  Description of Artificial Sequence: Synthetic oligonucleotide
uugcgucucucguagcugu

SEQ ID NO: 2387628 - RNA, 19 nt, Artificial Sequence
  Description of Artificial Sequence: Synthetic oligonucleotide
ugugagaggugugaacauc

SEQ ID NO: 2387629 - RNA, 19 nt, Artificial Sequence
  Description of Artificial Sequence: Synthetic oligonucleotide
gucaacuccaaugcguuca

SEQ ID NO: 2387630 - RNA, 19 nt, Artificial Sequence
  Description of Artificial Sequence: Synthetic oligonucleotide
ugagauuggccagguaggu

SEQ ID NO: 2387631 - RNA, 19 nt, Artificial Sequence
  Description of Artificial Sequence: Synthetic oligonucleotide
gcuguaguauucauggaug

SEQ ID NO: 2387632 - RNA, 19 nt, Artificial Sequence
  Description of Artificial Sequence: Synthetic oligonucleotide
guugcauaccagccuagga

SEQ ID NO: 2387633 - RNA, 19 nt, Artificial Sequence
  Description of Artificial Sequence: Synthetic oligonucleotide
ucauuguguggcacugaaa

SEQ ID NO: 2387634 - RNA, 19 nt, Artificial Sequence
  Description of Artificial Sequence: Synthetic oligonucleotide
acaucacucccaucguccu

SEQ ID NO: 2387635 - RNA, 19 nt, Artificial Sequence
  Description of Artificial Sequence: Synthetic oligonucleotide
ugucuacgauggaaagcca

SEQ ID NO: 2387636 - RNA, 19 nt, Artificial Sequence
  Description of Artificial Sequence: Synthetic oligonucleotide
ucccucguugcgucucucg

SEQ ID NO: 2387637 - RNA, 19 nt, Artificial Sequence
  Description of Artificial Sequence: Synthetic oligonucleotide
uccgcccacuugcuguagg

SEQ ID NO: 2387638 - RNA, 19 nt, Artificial Sequence
  Description of Artificial Sequence: Synthetic oligonucleotide
gucacuggagaguccaauc

SEQ ID NO: 2387639 - RNA, 19 nt, Artificial Sequence
  Description of Artificial Sequence: Synthetic oligonucleotide
gagggcaaucugugacugg

SEQ ID NO: 2387640 - RNA, 19 nt, Artificial Sequence
  Description of Artificial Sequence: Synthetic oligonucleotide
agcaccgaauguucuguga

SEQ ID NO: 2387641 - RNA, 19 nt, Artificial Sequence
  Description of Artificial Sequence: Synthetic oligonucleotide
cauugauguugcuguugag

SEQ ID NO: 2387642 - RNA, 19 nt, Artificial Sequence
  Description of Artificial Sequence: Synthetic oligonucleotide
agucugaguccuaugguga

SEQ ID NO: 2387643 - RNA, 19 nt, Artificial Sequence
  Description of Artificial Sequence: Synthetic oligonucleotide
ucccaucguccucccaggg

SEQ ID NO: 2387644 - RNA, 19 nt, Artificial Sequence
  Description of Artificial Sequence: Synthetic oligonucleotide
cacccauuaaagugcugac

SEQ ID NO: 2387645 - RNA, 19 nt, Artificial Sequence
  Description of Artificial Sequence: Synthetic oligonucleotide
cagcacaagugccucuuag

SEQ ID NO: 2387646 - RNA, 19 nt, Artificial Sequence
  Description of Artificial Sequence: Synthetic oligonucleotide
cucagcauacugcaauaca

SEQ ID NO: 2387647 - RNA, 19 nt, Artificial Sequence
  Description of Artificial Sequence: Synthetic oligonucleotide
ugauguugcuguugagcau

SEQ ID NO: 2387648 - RNA, 19 nt, Artificial Sequence
  Description of Artificial Sequence: Synthetic oligonucleotide
cagugcuuagagcauccug

SEQ ID NO: 2387649 - RNA, 19 nt, Artificial Sequence
  Description of Artificial Sequence: Synthetic oligonucleotide
caugcgcccauucuggaga

SEQ ID NO: 2387650 - RNA, 19 nt, Artificial Sequence
  Description of Artificial Sequence: Synthetic oligonucleotide
ggcaaucugugacugggug

SEQ ID NO: 2387651 - RNA, 19 nt, Artificial Sequence
  Description of Artificial Sequence: Synthetic oligonucleotide
agaagcggccuacaguguu

SEQ ID NO: 2387652 - RNA, 19 nt, Artificial Sequence
  Description of Artificial Sequence: Synthetic oligonucleotide
uggauucgagcagaggcuc

SEQ ID NO: 2387653 - RNA, 19 nt, Artificial Sequence
  Description of Artificial Sequence: Synthetic oligonucleotide
guugcuguugagcauaguu

SEQ ID NO: 2387654 - RNA, 19 nt, Artificial Sequence
  Description of Artificial Sequence: Synthetic oligonucleotide
augcgcccauucuggagac

SEQ ID NO: 2387655 - RNA, 19 nt, Artificial Sequence
  Description of Artificial Sequence: Synthetic oligonucleotide
ugaguccuauggugaaaac

SEQ ID NO: 2387656 - RNA, 19 nt, Artificial Sequence
  Description of Artificial Sequence: Synthetic oligonucleotide
uuagagcauccuggauucg

SEQ ID NO: 2387657 - RNA, 19 nt, Artificial Sequence
  Description of Artificial Sequence: Synthetic oligonucleotide
ccuauggugaaaaccaaga

SEQ ID NO: 2387658 - RNA, 19 nt, Artificial Sequence
  Description of Artificial Sequence: Synthetic oligonucleotide
gguaggucaccaucagcag

SEQ ID NO: 2387659 - RNA, 19 nt, Artificial Sequence
  Description of Artificial Sequence: Synthetic oligonucleotide
ggggcuaaaacaugucuuc

SEQ ID NO: 2387660 - RNA, 19 nt, Artificial Sequence
  Description of Artificial Sequence: Synthetic oligonucleotide
cacugugagaggugugaac

SEQ ID NO: 2387661 - RNA, 19 nt, Artificial Sequence
  Description of Artificial Sequence: Synthetic oligonucleotide
caccgaauguucugugaug

SEQ ID NO: 2387662 - RNA, 19 nt, Artificial Sequence
  Description of Artificial Sequence: Synthetic oligonucleotide
agugaggugaauggguuuu

SEQ ID NO: 2387663 - RNA, 19 nt, Artificial Sequence
  Description of Artificial Sequence: Synthetic oligonucleotide
gcaauacagugcuuagagc

SEQ ID NO: 2387664 - RNA, 19 nt, Artificial Sequence
  Description of Artificial Sequence: Synthetic oligonucleotide
gcuguaggucacuggagag

SEQ ID NO: 2387665 - RNA, 19 nt, Artificial Sequence
  Description of Artificial Sequence: Synthetic oligonucleotide
uccucagcauacugcaaua

SEQ ID NO: 2387666 - RNA, 19 nt, Artificial Sequence
  Description of Artificial Sequence: Synthetic oligonucleotide
cucccaucguccucccagg

SEQ ID NO: 2387667 - RNA, 19 nt, Artificial Sequence
  Description of Artificial Sequence: Synthetic oligonucleotide
gcauacugcaauacagugc

SEQ ID NO: 2387668 - RNA, 19 nt, Artificial Sequence
  Description of Artificial Sequence: Synthetic oligonucleotide
cauucacagguucacaagu

SEQ ID NO: 2387669 - RNA, 19 nt, Artificial Sequence
  Description of Artificial Sequence: Synthetic oligonucleotide
uccgauaacccgggcagcu

SEQ ID NO: 2387670 - RNA, 19 nt, Artificial Sequence
  Description of Artificial Sequence: Synthetic oligonucleotide
uccuggauucgagcagagg

SEQ ID NO: 2387671 - RNA, 19 nt, Artificial Sequence
  Description of Artificial Sequence: Synthetic oligonucleotide
gaacuaucuuggguacuug

SEQ ID NO: 2387672 - RNA, 19 nt, Artificial Sequence
  Description of Artificial Sequence: Synthetic oligonucleotide
guugucagcagacaccuuu

SEQ ID NO: 2387673 - RNA, 19 nt, Artificial Sequence
  Description of Artificial Sequence: Synthetic oligonucleotide
acccauuaaagugcugaca

SEQ ID NO: 2387674 - RNA, 19 nt, Artificial Sequence
  Description of Artificial Sequence: Synthetic oligonucleotide
ggaugagcucauuugggga

SEQ ID NO: 2387675 - RNA, 19 nt, Artificial Sequence
  Description of Artificial Sequence: Synthetic oligonucleotide
auucgagcagaggcuccgc

SEQ ID NO: 2387676 - RNA, 19 nt, Artificial Sequence
  Description of Artificial Sequence: Synthetic oligonucleotide
aagugcugacauaagccuu

SEQ ID NO: 2387677 - RNA, 19 nt, Artificial Sequence
  Description of Artificial Sequence: Synthetic oligonucleotide
gaagcggccuacaguguug

SEQ ID NO: 2387678 - RNA, 19 nt, Artificial Sequence
  Description of Artificial Sequence: Synthetic oligonucleotide
cuuccacugaguguuuguc

SEQ ID NO: 2387679 - RNA, 19 nt, Artificial Sequence
  Description of Artificial Sequence: Synthetic oligonucleotide
aucguccucccagggacac

SEQ ID NO: 2387680 - RNA, 19 nt, Artificial Sequence
  Description of Artificial Sequence: Synthetic oligonucleotide
uugauuaaccaggcucauc

SEQ ID NO: 2387681 - RNA, 19 nt, Artificial Sequence
  Description of Artificial Sequence: Synthetic oligonucleotide
gucagcagacaccuuucca

SEQ ID NO: 2387682 - RNA, 19 nt, Artificial Sequence
  Description of Artificial Sequence: Synthetic oligonucleotide
cuguugcauaccagccuag

SEQ ID NO: 2387683 - RNA, 19 nt, Artificial Sequence
  Description of Artificial Sequence: Synthetic oligonucleotide
agucaucaggaacuaucuu

SEQ ID NO: 2387684 - RNA, 19 nt, Artificial Sequence
  Description of Artificial Sequence: Synthetic oligonucleotide
acagcacauccucagcaua

SEQ ID NO: 2387685 - RNA, 19 nt, Artificial Sequence
  Description of Artificial Sequence: Synthetic oligonucleotide
aucugugacugggugagau

SEQ ID NO: 2387686 - RNA, 19 nt, Artificial Sequence
  Description of Artificial Sequence: Synthetic oligonucleotide
cuucacugugagaggugug

SEQ ID NO: 2387687 - RNA, 19 nt, Artificial Sequence
  Description of Artificial Sequence: Synthetic oligonucleotide
gugacugggugagauuggc

SEQ ID NO: 2387688 - RNA, 19 nt, Artificial Sequence
  Description of Artificial Sequence: Synthetic oligonucleotide
gauaacccgggcagcuccc

SEQ ID NO: 2387689 - RNA, 19 nt, Artificial Sequence
  Description of Artificial Sequence: Synthetic oligonucleotide
gaggucaacuccaaugcgu

SEQ ID NO: 2387690 - RNA, 19 nt, Artificial Sequence
  Description of Artificial Sequence: Synthetic oligonucleotide
gugaugucauggccuguug

SEQ ID NO: 2387691 - RNA, 19 nt, Artificial Sequence
  Description of Artificial Sequence: Synthetic oligonucleotide
cucauuguguggcacugaa

SEQ ID NO: 2387692 - RNA, 19 nt, Artificial Sequence
  Description of Artificial Sequence: Synthetic oligonucleotide
gcucaugcgcccauucugg

SEQ ID NO: 2387693 - RNA, 19 nt, Artificial Sequence
  Description of Artificial Sequence: Synthetic oligonucleotide
gguuccgauaacccgggca

SEQ ID NO: 2387694 - RNA, 19 nt, Artificial Sequence
  Description of Artificial Sequence: Synthetic oligonucleotide
cauaccagccuaggaugag

SEQ ID NO: 2387695 - RNA, 19 nt, Artificial Sequence
  Description of Artificial Sequence: Synthetic oligonucleotide
aagcggccuacaguguugu

SEQ ID NO: 2387696 - RNA, 19 nt, Artificial Sequence
  Description of Artificial Sequence: Synthetic oligonucleotide
guugcgucucucguagcug

SEQ ID NO: 2387697 - RNA, 19 nt, Artificial Sequence
  Description of Artificial Sequence: Synthetic oligonucleotide
cugacucauuguguggcac

SEQ ID NO: 2387698 - RNA, 19 nt, Artificial Sequence
  Description of Artificial Sequence: Synthetic oligonucleotide
ucugugacugggugagauu

SEQ ID NO: 2387699 - RNA, 19 nt, Artificial Sequence
  Description of Artificial Sequence: Synthetic oligonucleotide
gagaggugugaacaucacu

SEQ ID NO: 2387700 - RNA, 19 nt, Artificial Sequence
  Description of Artificial Sequence: Synthetic oligonucleotide
aggguuccgauaacccggg

SEQ ID NO: 2387701 - RNA, 19 nt, Artificial Sequence
  Description of Artificial Sequence: Synthetic oligonucleotide
uugaugcucaugcgcccau

SEQ ID NO: 2387702 - RNA, 19 nt, Artificial Sequence
  Description of Artificial Sequence: Synthetic oligonucleotide
gaauguucugugaugucau

SEQ ID NO: 2387703 - RNA, 19 nt, Artificial Sequence
  Description of Artificial Sequence: Synthetic oligonucleotide
uucccagcaggguuccgau

SEQ ID NO: 2387704 - RNA, 19 nt, Artificial Sequence
  Description of Artificial Sequence: Synthetic oligonucleotide
gcguucagugucauaauac

SEQ ID NO: 2387705 - RNA, 19 nt, Artificial Sequence
  Description of Artificial Sequence: Synthetic oligonucleotide
auaagccuugaugcucaug

SEQ ID NO: 2387706 - RNA, 19 nt, Artificial Sequence
  Description of Artificial Sequence: Synthetic oligonucleotide
auucacagguucacaaguu

SEQ ID NO: 2387707 - RNA, 19 nt, Artificial Sequence
  Description of Artificial Sequence: Synthetic oligonucleotide
gugaauggguuuuggggcu

SEQ ID NO: 2387708 - RNA, 19 nt, Artificial Sequence
  Description of Artificial Sequence: Synthetic oligonucleotide
gagauuggccagguagguc

SEQ ID NO: 2387709 - RNA, 19 nt, Artificial Sequence
  Description of Artificial Sequence: Synthetic oligonucleotide
gcaaucugugacuggguga

SEQ ID NO: 2387710 - RNA, 19 nt, Artificial Sequence
  Description of Artificial Sequence: Synthetic oligonucleotide
aagaagcggccuacagugu

SEQ ID NO: 2387711 - RNA, 19 nt, Artificial Sequence
  Description of Artificial Sequence: Synthetic oligonucleotide
uucccggcuguaguauuca

SEQ ID NO: 2387712 - RNA, 19 nt, Artificial Sequence
  Description of Artificial Sequence: Synthetic oligonucleotide
agacaccuuuccagacagc

SEQ ID NO: 2387713 - RNA, 19 nt, Artificial Sequence
  Description of Artificial Sequence: Synthetic oligonucleotide
cuggauucgagcagaggcu

SEQ ID NO: 2387714 - RNA, 19 nt, Artificial Sequence
  Description of Artificial Sequence: Synthetic oligonucleotide
uagggcucauucacagguu

SEQ ID NO: 2387715 - RNA, 19 nt, Artificial Sequence
  Description of Artificial Sequence: Synthetic oligonucleotide
agcacauccucagcauacu

SEQ ID NO: 2387716 - RNA, 19 nt, Artificial Sequence
  Description of Artificial Sequence: Synthetic oligonucleotide
gucucucguagcugucuac

SEQ ID NO: 2387717 - RNA, 19 nt, Artificial Sequence
  Description of Artificial Sequence: Synthetic oligonucleotide
gaaacccuuugccuccacu

SEQ ID NO: 2387718 - RNA, 19 nt, Artificial Sequence
  Description of Artificial Sequence: Synthetic oligonucleotide
gucuacgauggaaagccaa

SEQ ID NO: 2387719 - RNA, 19 nt, Artificial Sequence
  Description of Artificial Sequence: Synthetic oligonucleotide
guuggggcuaaaacauguc

SEQ ID NO: 2387720 - RNA, 19 nt, Artificial Sequence
  Description of Artificial Sequence: Synthetic oligonucleotide
cucucguagcugucuacga

SEQ ID NO: 2387721 - RNA, 19 nt, Artificial Sequence
  Description of Artificial Sequence: Synthetic oligonucleotide
aggaacuaucuuggguacu

SEQ ID NO: 2387722 - RNA, 19 nt, Artificial Sequence
  Description of Artificial Sequence: Synthetic oligonucleotide
ggcuguaguauucauggau

SEQ ID NO: 2387723 - RNA, 19 nt, Artificial Sequence
  Description of Artificial Sequence: Synthetic oligonucleotide
cagcauacugcaauacagu

SEQ ID NO: 2387724 - RNA, 19 nt, Artificial Sequence
  Description of Artificial Sequence: Synthetic oligonucleotide
aggucaacuccaaugcguu

SEQ ID NO: 2387725 - RNA, 19 nt, Artificial Sequence
  Description of Artificial Sequence: Synthetic oligonucleotide
cugaguguuugucaacagu

SEQ ID NO: 2387726 - RNA, 19 nt, Artificial Sequence
  Description of Artificial Sequence: Synthetic oligonucleotide
cuacgauggaaagccaaaa

SEQ ID NO: 2387727 - RNA, 19 nt, Artificial Sequence
  Description of Artificial Sequence: Synthetic oligonucleotide
guccaaucacccgguuggg

SEQ ID NO: 2387728 - RNA, 19 nt, Artificial Sequence
  Description of Artificial Sequence: Synthetic oligonucleotide
agcucccucguugcgucuc

SEQ ID NO: 2387729 - RNA, 19 nt, Artificial Sequence
  Description of Artificial Sequence: Synthetic oligonucleotide
cccgguuggggcuaaaaca

SEQ ID NO: 2387730 - RNA, 19 nt, Artificial Sequence
  Description of Artificial Sequence: Synthetic oligonucleotide
aaucugugacugggugaga

SEQ ID NO: 2387731 - RNA, 19 nt, Artificial Sequence
  Description of Artificial Sequence: Synthetic oligonucleotide
cuaucuuggguacuugauu

SEQ ID NO: 2387732 - RNA, 19 nt, Artificial Sequence
  Description of Artificial Sequence: Synthetic oligonucleotide
ugggugagauuggccaggu

SEQ ID NO: 2387733 - RNA, 19 nt, Artificial Sequence
  Description of Artificial Sequence: Synthetic oligonucleotide
ugcugacauaagccuugau

SEQ ID NO: 2387734 - RNA, 19 nt, Artificial Sequence
  Description of Artificial Sequence: Synthetic oligonucleotide
gcagacaccuuuccagaca

SEQ ID NO: 2387735 - RNA, 19 nt, Artificial Sequence
  Description of Artificial Sequence: Synthetic oligonucleotide
ucguugcgucucucguagc

SEQ ID NO: 2387736 - RNA, 19 nt, Artificial Sequence
  Description of Artificial Sequence: Synthetic oligonucleotide
gugaggugaauggguuuug

SEQ ID NO: 2387737 - RNA, 19 nt, Artificial Sequence
  Description of Artificial Sequence: Synthetic oligonucleotide
ugcgucucucguagcuguc

SEQ ID NO: 2387738 - RNA, 19 nt, Artificial Sequence
  Description of Artificial Sequence: Synthetic oligonucleotide
ucauggccuguugcauacc

SEQ ID NO: 2387739 - RNA, 19 nt, Artificial Sequence
  Description of Artificial Sequence: Synthetic oligonucleotide
caagugccucuuagggcuc

SEQ ID NO: 2387740 - RNA, 19 nt, Artificial Sequence
  Description of Artificial Sequence: Synthetic oligonucleotide
ucacucccaucguccuccc

SEQ ID NO: 2387741 - RNA, 19 nt, Artificial Sequence
  Description of Artificial Sequence: Synthetic oligonucleotide
cugcaauacagugcuuaga

SEQ ID NO: 2387742 - RNA, 19 nt, Artificial Sequence
  Description of Artificial Sequence: Synthetic oligonucleotide
uaacccgggcagcucccuc

SEQ ID NO: 2387743 - RNA, 19 nt, Artificial Sequence
  Description of Artificial Sequence: Synthetic oligonucleotide
ggccuguugcauaccagcc

SEQ ID NO: 2387744 - RNA, 19 nt, Artificial Sequence
  Description of Artificial Sequence: Synthetic oligonucleotide
auucauggaugagcaccga

SEQ ID NO: 2387745 - RNA, 19 nt, Artificial Sequence
  Description of Artificial Sequence: Synthetic oligonucleotide
guaggucacuggagagucc

SEQ ID NO: 2387746 - RNA, 19 nt, Artificial Sequence
  Description of Artificial Sequence: Synthetic oligonucleotide
gaauggguuuuggggcuuc

SEQ ID NO: 2387747 - RNA, 19 nt, Artificial Sequence
  Description of Artificial Sequence: Synthetic oligonucleotide
acucauuguguggcacuga

SEQ ID NO: 2387748 - RNA, 19 nt, Artificial Sequence
  Description of Artificial Sequence: Synthetic oligonucleotide
aaucacccgguuggggcua

SEQ ID NO: 2387749 - RNA, 19 nt, Artificial Sequence
  Description of Artificial Sequence: Synthetic oligonucleotide
cgauaacccgggcagcucc

SEQ ID NO: 2387750 - RNA, 19 nt, Artificial Sequence
  Description of Artificial Sequence: Synthetic oligonucleotide
agcggccuacaguguuguc

SEQ ID NO: 2387751 - RNA, 19 nt, Artificial Sequence
  Description of Artificial Sequence: Synthetic oligonucleotide
cggccuacaguguugucag

SEQ ID NO: 2387752 - RNA, 19 nt, Artificial Sequence
  Description of Artificial Sequence: Synthetic oligonucleotide
ucccagggacacccauuaa

SEQ ID NO: 2387753 - RNA, 19 nt, Artificial Sequence
  Description of Artificial Sequence: Synthetic oligonucleotide
gugugaacaucacucccau

SEQ ID NO: 2387754 - RNA, 19 nt, Artificial Sequence
  Description of Artificial Sequence: Synthetic oligonucleotide
caguucccagcaggguucc

SEQ ID NO: 2387755 - RNA, 19 nt, Artificial Sequence
  Description of Artificial Sequence: Synthetic oligonucleotide
auccuggauucgagcagag

SEQ ID NO: 2387756 - RNA, 19 nt, Artificial Sequence
  Description of Artificial Sequence: Synthetic oligonucleotide
ggucaacuccaaugcguuc

SEQ ID NO: 2387757 - RNA, 19 nt, Artificial Sequence
  Description of Artificial Sequence: Synthetic oligonucleotide
gggcuaaaacaugucuuca

SEQ ID NO: 2387758 - RNA, 19 nt, Artificial Sequence
  Description of Artificial Sequence: Synthetic oligonucleotide
ccagccuaggaugagcuca

SEQ ID NO: 2387759 - RNA, 19 nt, Artificial Sequence
  Description of Artificial Sequence: Synthetic oligonucleotide
gguuggggcuaaaacaugu

SEQ ID NO: 2387760 - RNA, 19 nt, Artificial Sequence
  Description of Artificial Sequence: Synthetic oligonucleotide
cagggacacccauuaaagu

SEQ ID NO: 2387761 - RNA, 19 nt, Artificial Sequence
  Description of Artificial Sequence: Synthetic oligonucleotide
caaucacccgguuggggcu

SEQ ID NO: 2387762 - RNA, 19 nt, Artificial Sequence
  Description of Artificial Sequence: Synthetic oligonucleotide
ggauucgagcagaggcucc

SEQ ID NO: 2387763 - RNA, 19 nt, Artificial Sequence
  Description of Artificial Sequence: Synthetic oligonucleotide
gagaguccaaucacccggu

SEQ ID NO: 2387764 - RNA, 19 nt, Artificial Sequence
  Description of Artificial Sequence: Synthetic oligonucleotide
auaacccgggcagcucccu

SEQ ID NO: 2387765 - RNA, 19 nt, Artificial Sequence
  Description of Artificial Sequence: Synthetic oligonucleotide
cauccucagcauacugcaa

SEQ ID NO: 2387766 - RNA, 19 nt, Artificial Sequence
  Description of Artificial Sequence: Synthetic oligonucleotide
gcuguugagcauaguuuca

SEQ ID NO: 2387767 - RNA, 19 nt, Artificial Sequence
  Description of Artificial Sequence: Synthetic oligonucleotide
caucguccucccagggaca

SEQ ID NO: 2387768 - RNA, 19 nt, Artificial Sequence
  Description of Artificial Sequence: Synthetic oligonucleotide
aggcuccgcccacuugcug

SEQ ID NO: 2387769 - RNA, 19 nt, Artificial Sequence
  Description of Artificial Sequence: Synthetic oligonucleotide
ccuguugcauaccagccua

SEQ ID NO: 2387770 - RNA, 19 nt, Artificial Sequence
  Description of Artificial Sequence: Synthetic oligonucleotide
guuuuggggcuucccggcu

SEQ ID NO: 2387771 - RNA, 19 nt, Artificial Sequence
  Description of Artificial Sequence: Synthetic oligonucleotide
cucauuuggggagacuuuu

SEQ ID NO: 2387772 - RNA, 19 nt, Artificial Sequence
  Description of Artificial Sequence: Synthetic oligonucleotide
ccucagcauacugcaauac

SEQ ID NO: 2387773 - RNA, 19 nt, Artificial Sequence
  Description of Artificial Sequence: Synthetic oligonucleotide
cccagggacacccauuaaa

SEQ ID NO: 2387774 - RNA, 19 nt, Artificial Sequence
  Description of Artificial Sequence: Synthetic oligonucleotide
cuguaggucacuggagagu

SEQ ID NO: 2387775 - RNA, 19 nt, Artificial Sequence
  Description of Artificial Sequence: Synthetic oligonucleotide
acccgggcagcucccucgu

SEQ ID NO: 2387776 - RNA, 19 nt, Artificial Sequence
  Description of Artificial Sequence: Synthetic oligonucleotide
ucguccucccagggacacc

SEQ ID NO: 2387777 - RNA, 19 nt, Artificial Sequence
  Description of Artificial Sequence: Synthetic oligonucleotide
ugcgcccauucuggagacc

SEQ ID NO: 2387778 - RNA, 19 nt, Artificial Sequence
  Description of Artificial Sequence: Synthetic oligonucleotide
gcaccgaauguucugugau

SEQ ID NO: 2387779 - RNA, 19 nt, Artificial Sequence
  Description of Artificial Sequence: Synthetic oligonucleotide
cugugagaggugugaacau

SEQ ID NO: 2387780 - RNA, 19 nt, Artificial Sequence
  Description of Artificial Sequence: Synthetic oligonucleotide
ggaacuaucuuggguacuu

SEQ ID NO: 2387781 - RNA, 19 nt, Artificial Sequence
  Description of Artificial Sequence: Synthetic oligonucleotide
ccgggcagcucccucguug

SEQ ID NO: 2387782 - RNA, 19 nt, Artificial Sequence
  Description of Artificial Sequence: Synthetic oligonucleotide
ccgaauguucugugauguc

SEQ ID NO: 2387783 - RNA, 19 nt, Artificial Sequence
  Description of Artificial Sequence: Synthetic oligonucleotide
gcauaguuucaaagucauc

SEQ ID NO: 2387784 - RNA, 19 nt, Artificial Sequence
  Description of Artificial Sequence: Synthetic oligonucleotide
gggcagcucccucguugcg

SEQ ID NO: 2387785 - RNA, 19 nt, Artificial Sequence
  Description of Artificial Sequence: Synthetic oligonucleotide
ggcuccgcccacuugcugu

SEQ ID NO: 2387786 - RNA, 19 nt, Artificial Sequence
  Description of Artificial Sequence: Synthetic oligonucleotide
gugucauaauacgcauacu

SEQ ID NO: 2387787 - RNA, 19 nt, Artificial Sequence
  Description of Artificial Sequence: Synthetic oligonucleotide
cuugauuaaccaggcucau

SEQ ID NO: 2387788 - RNA, 19 nt, Artificial Sequence
  Description of Artificial Sequence: Synthetic oligonucleotide
gccuguugcauaccagccu

SEQ ID NO: 2387789 - RNA, 19 nt, Artificial Sequence
  Description of Artificial Sequence: Synthetic oligonucleotide
caaugcguucagugucaua

SEQ ID NO: 2387790 - RNA, 19 nt, Artificial Sequence
  Description of Artificial Sequence: Synthetic oligonucleotide
ccagcaggguuccgauaac

SEQ ID NO: 2387791 - RNA, 19 nt, Artificial Sequence
  Description of Artificial Sequence: Synthetic oligonucleotide
caacaguucccagcagggu

SEQ ID NO: 2387792 - RNA, 19 nt, Artificial Sequence
  Description of Artificial Sequence: Synthetic oligonucleotide
cagugaggugaauggguuu

SEQ ID NO: 2387793 - RNA, 19 nt, Artificial Sequence
  Description of Artificial Sequence: Synthetic oligonucleotide
cuccgcccacuugcuguag

SEQ ID NO: 2387794 - RNA, 19 nt, Artificial Sequence
  Description of Artificial Sequence: Synthetic oligonucleotide
gguucacaaguuucucauu

SEQ ID NO: 2387795 - RNA, 19 nt, Artificial Sequence
  Description of Artificial Sequence: Synthetic oligonucleotide
ggggcuucccggcuguagu

SEQ ID NO: 2387796 - RNA, 19 nt, Artificial Sequence
  Description of Artificial Sequence: Synthetic oligonucleotide
ggguuccgauaacccgggc

SEQ ID NO: 2387797 - RNA, 19 nt, Artificial Sequence
  Description of Artificial Sequence: Synthetic oligonucleotide
ggacacccauuaaagugcu

SEQ ID NO: 2387798 - RNA, 19 nt, Artificial Sequence
  Description of Artificial Sequence: Synthetic oligonucleotide
auacugcaauacagugcuu

SEQ ID NO: 2387799 - RNA, 19 nt, Artificial Sequence
  Description of Artificial Sequence: Synthetic oligonucleotide
gccuaggaugagcucauuu

SEQ ID NO: 2387800 - RNA, 19 nt, Artificial Sequence
  Description of Artificial Sequence: Synthetic oligonucleotide
gaggcuccgcccacuugcu

SEQ ID NO: 2387801 - RNA, 19 nt, Artificial Sequence
  Description of Artificial Sequence: Synthetic oligonucleotide
ggucacuggagaguccaau

SEQ ID NO: 2387802 - RNA, 19 nt, Artificial Sequence
  Description of Artificial Sequence: Synthetic oligonucleotide
gcgcccauucuggagaccu

SEQ ID NO: 2387803 - RNA, 19 nt, Artificial Sequence
  Description of Artificial Sequence: Synthetic oligonucleotide
gggcuucccggcuguagua

SEQ ID NO: 2387804 - RNA, 19 nt, Artificial Sequence
  Description of Artificial Sequence: Synthetic oligonucleotide
ccaugucaacagccacuuc

SEQ ID NO: 2387805 - RNA, 19 nt, Artificial Sequence
  Description of Artificial Sequence: Synthetic oligonucleotide
cucccucguugcgucucuc

SEQ ID NO: 2387806 - RNA, 19 nt, Artificial Sequence
  Description of Artificial Sequence: Synthetic oligonucleotide
aucacccgguuggggcuaa

SEQ ID NO: 2387807 - RNA, 19 nt, Artificial Sequence
  Description of Artificial Sequence: Synthetic oligonucleotide
ggagaccuguguccacagu

SEQ ID NO: 2387808 - RNA, 19 nt, Artificial Sequence
  Description of Artificial Sequence: Synthetic oligonucleotide
guuucucauugagggcaau

SEQ ID NO: 2387809 - RNA, 19 nt, Artificial Sequence
  Description of Artificial Sequence: Synthetic oligonucleotide
ccucguugcgucucucgua

SEQ ID NO: 2387810 - RNA, 19 nt, Artificial Sequence
  Description of Artificial Sequence: Synthetic oligonucleotide
cacccgguuggggcuaaaa

SEQ ID NO: 2387811 - RNA, 19 nt, Artificial Sequence
  Description of Artificial Sequence: Synthetic oligonucleotide
agccuaggaugagcucauu

SEQ ID NO: 2387812 - RNA, 19 nt, Artificial Sequence
  Description of Artificial Sequence: Synthetic oligonucleotide
ggcagcucccucguugcgu

SEQ ID NO: 2387813 - RNA, 19 nt, Artificial Sequence
  Description of Artificial Sequence: Synthetic oligonucleotide
ccgauaacccgggcagcuc

SEQ ID NO: 2387814 - RNA, 19 nt, Artificial Sequence
  Description of Artificial Sequence: Synthetic oligonucleotide
ucacccgguuggggcuaaa

SEQ ID NO: 2387815 - RNA, 19 nt, Artificial Sequence
  Description of Artificial Sequence: Synthetic oligonucleotide
cguugcgucucucguagcu

SEQ ID NO: 2387816 - RNA, 19 nt, Artificial Sequence
  Description of Artificial Sequence: Synthetic oligonucleotide
cgcauacuucacugugaga

SEQ ID NO: 2387817 - RNA, 19 nt, Artificial Sequence
  Description of Artificial Sequence: Synthetic oligonucleotide
caacuccaaugcguucagu

SEQ ID NO: 2387818 - RNA, 19 nt, Artificial Sequence
  Description of Artificial Sequence: Synthetic oligonucleotide
gcucauuuggggagacuuu

SEQ ID NO: 2387819 - RNA, 19 nt, Artificial Sequence
  Description of Artificial Sequence: Synthetic oligonucleotide
gggugagauuggccaggua

SEQ ID NO: 2387820 - RNA, 19 nt, Artificial Sequence
  Description of Artificial Sequence: Synthetic oligonucleotide
gcgucucucguagcugucu

SEQ ID NO: 2387821 - RNA, 19 nt, Artificial Sequence
  Description of Artificial Sequence: Synthetic oligonucleotide
cggcuguaguauucaugga

SEQ ID NO: 2387822 - RNA, 19 nt, Artificial Sequence
  Description of Artificial Sequence: Synthetic oligonucleotide
cguagcugucuacgaugga

SEQ ID NO: 2387823 - RNA, 19 nt, Artificial Sequence
  Description of Artificial Sequence: Synthetic oligonucleotide
cgucucucguagcugucua

SEQ ID NO: 2387824 - RNA, 19 nt, Artificial Sequence
  Description of Artificial Sequence: Synthetic oligonucleotide
gcucccucguugcgucucu

SEQ ID NO: 2387825 - RNA, 19 nt, Artificial Sequence
  Description of Artificial Sequence: Synthetic oligonucleotide
ccagcacaagugccucuua

SEQ ID NO: 2387826 - RNA, 19 nt, Artificial Sequence
  Description of Artificial Sequence: Synthetic oligonucleotide
gcagaggcuccgcccacuu

SEQ ID NO: 2387827 - RNA, 19 nt, Artificial Sequence
  Description of Artificial Sequence: Synthetic oligonucleotide
gugccucuuagggcucauu

SEQ ID NO: 2387828 - RNA, 19 nt, Artificial Sequence
  Description of Artificial Sequence: Synthetic oligonucleotide
ccucccagggacacccauu

SEQ ID NO: 2387829 - RNA, 19 nt, Artificial Sequence
  Description of Artificial Sequence: Synthetic oligonucleotide
ccaaugcguucagugucau

SEQ ID NO: 2387830 - RNA, 19 nt, Artificial Sequence
  Description of Artificial Sequence: Synthetic oligonucleotide
uccauuuucucauucaucg

SEQ ID NO: 2387831 - RNA, 19 nt, Artificial Sequence
  Description of Artificial Sequence: Synthetic oligonucleotide
auugaugucaucaauaaac

SEQ ID NO: 2387832 - RNA, 19 nt, Artificial Sequence
  Description of Artificial Sequence: Synthetic oligonucleotide
aauuuagacucuuggauag

SEQ ID NO: 2387833 - RNA, 19 nt, Artificial Sequence
  Description of Artificial Sequence: Synthetic oligonucleotide
gaugccauaaaauauugcc

SEQ ID NO: 2387834 - RNA, 19 nt, Artificial Sequence
  Description of Artificial Sequence: Synthetic oligonucleotide
aaucucauuaguuaucuga

SEQ ID NO: 2387835 - RNA, 19 nt, Artificial Sequence
  Description of Artificial Sequence: Synthetic oligonucleotide
uuuagauaggccuucacca

SEQ ID NO: 2387836 - RNA, 19 nt, Artificial Sequence
  Description of Artificial Sequence: Synthetic oligonucleotide
uauuucuuuagauaggccu

SEQ ID NO: 2387837 - RNA, 19 nt, Artificial Sequence
  Description of Artificial Sequence: Synthetic oligonucleotide
auacauucccuccauuucc

SEQ ID NO: 2387838 - RNA, 19 nt, Artificial Sequence
  Description of Artificial Sequence: Synthetic oligonucleotide
gucguauuucuuuagauag

SEQ ID NO: 2387839 - RNA, 19 nt, Artificial Sequence
  Description of Artificial Sequence: Synthetic oligonucleotide
uaaaguaugguugaagucu

SEQ ID NO: 2387840 - RNA, 19 nt, Artificial Sequence
  Description of Artificial Sequence: Synthetic oligonucleotide
uuuggcgcucucaaaaugg

SEQ ID NO: 2387841 - RNA, 19 nt, Artificial Sequence
  Description of Artificial Sequence: Synthetic oligonucleotide
ucucccgugagcaaaacag

SEQ ID NO: 2387842 - RNA, 19 nt, Artificial Sequence
  Description of Artificial Sequence: Synthetic oligonucleotide
aaauuuagacucuuggaua

SEQ ID NO: 2387843 - RNA, 19 nt, Artificial Sequence
  Description of Artificial Sequence: Synthetic oligonucleotide
auaaaguaugguugaaguc

SEQ ID NO: 2387844 - RNA, 19 nt, Artificial Sequence
  Description of Artificial Sequence: Synthetic oligonucleotide
uucugcauuggccacagcc

SEQ ID NO: 2387845 - RNA, 19 nt, Artificial Sequence
  Description of Artificial Sequence: Synthetic oligonucleotide
aaugcuguccguuggauaa

SEQ ID NO: 2387846 - RNA, 19 nt, Artificial Sequence
  Description of Artificial Sequence: Synthetic oligonucleotide
aauacucuggaaugcuguc

SEQ ID NO: 2387847 - RNA, 19 nt, Artificial Sequence
  Description of Artificial Sequence: Synthetic oligonucleotide
guugucaacguuuggaacc

SEQ ID NO: 2387848 - RNA, 19 nt, Artificial Sequence
  Description of Artificial Sequence: Synthetic oligonucleotide
uuuuguaacuucuuuuacu

SEQ ID NO: 2387849 - RNA, 19 nt, Artificial Sequence
  Description of Artificial Sequence: Synthetic oligonucleotide
auagcaagaguccaggaca

SEQ ID NO: 2387850 - RNA, 19 nt, Artificial Sequence
  Description of Artificial Sequence: Synthetic oligonucleotide
uucgcugaaacaucauugg

SEQ ID NO: 2387851 - RNA, 19 nt, Artificial Sequence
  Description of Artificial Sequence: Synthetic oligonucleotide
aagauggaagaauacucug

SEQ ID NO: 2387852 - RNA, 19 nt, Artificial Sequence
  Description of Artificial Sequence: Synthetic oligonucleotide
uaugguugaagucucuugu

SEQ ID NO: 2387853 - RNA, 19 nt, Artificial Sequence
  Description of Artificial Sequence: Synthetic oligonucleotide
cuuuagauaggccuucacc

SEQ ID NO: 2387854 - RNA, 19 nt, Artificial Sequence
  Description of Artificial Sequence: Synthetic oligonucleotide
uguugaugccauaaaauau

SEQ ID NO: 2387855 - RNA, 19 nt, Artificial Sequence
  Description of Artificial Sequence: Synthetic oligonucleotide
guuggauaaaguaugguug

SEQ ID NO: 2387856 - RNA, 19 nt, Artificial Sequence
  Description of Artificial Sequence: Synthetic oligonucleotide
uuuguaacuucuuuuacuu

SEQ ID NO: 2387857 - RNA, 19 nt, Artificial Sequence
  Description of Artificial Sequence: Synthetic oligonucleotide
aguuaucugaucuccccac

SEQ ID NO: 2387858 - RNA, 19 nt, Artificial Sequence
  Description of Artificial Sequence: Synthetic oligonucleotide
aaaauugguccugauguug

SEQ ID NO: 2387859 - RNA, 19 nt, Artificial Sequence
  Description of Artificial Sequence: Synthetic oligonucleotide
ucaaugagcguggaggccg

SEQ ID NO: 2387860 - RNA, 19 nt, Artificial Sequence
  Description of Artificial Sequence: Synthetic oligonucleotide
auugccauagcaagagucc

SEQ ID NO: 2387861 - RNA, 19 nt, Artificial Sequence
  Description of Artificial Sequence: Synthetic oligonucleotide
gauaaaguaugguugaagu

SEQ ID NO: 2387862 - RNA, 19 nt, Artificial Sequence
  Description of Artificial Sequence: Synthetic oligonucleotide
caugucugcaucauugagc

SEQ ID NO: 2387863 - RNA, 19 nt, Artificial Sequence
  Description of Artificial Sequence: Synthetic oligonucleotide
uaaucugagcuuuuguaac

SEQ ID NO: 2387864 - RNA, 19 nt, Artificial Sequence
  Description of Artificial Sequence: Synthetic oligonucleotide
uuggauaaaguaugguuga

SEQ ID NO: 2387865 - RNA, 19 nt, Artificial Sequence
  Description of Artificial Sequence: Synthetic oligonucleotide
caagcuauacauucccucc

SEQ ID NO: 2387866 - RNA, 19 nt, Artificial Sequence
  Description of Artificial Sequence: Synthetic oligonucleotide
aaaguaugguugaagucuc

SEQ ID NO: 2387867 - RNA, 19 nt, Artificial Sequence
  Description of Artificial Sequence: Synthetic oligonucleotide
ucguauuucuuuagauagg

SEQ ID NO: 2387868 - RNA, 19 nt, Artificial Sequence
  Description of Artificial Sequence: Synthetic oligonucleotide
ugguagugaagucuccagg

SEQ ID NO: 2387869 - RNA, 19 nt, Artificial Sequence
  Description of Artificial Sequence: Synthetic oligonucleotide
auauugaugucaucaauaa

SEQ ID NO: 2387870 - RNA, 19 nt, Artificial Sequence
  Description of Artificial Sequence: Synthetic oligonucleotide
uauuaaucugagcuuuugu

SEQ ID NO: 2387871 - RNA, 19 nt, Artificial Sequence
  Description of Artificial Sequence: Synthetic oligonucleotide
uauguuguuuugcaauugu

SEQ ID NO: 2387872 - RNA, 19 nt, Artificial Sequence
  Description of Artificial Sequence: Synthetic oligonucleotide
uuguccaagcuauacauuc

SEQ ID NO: 2387873 - RNA, 19 nt, Artificial Sequence
  Description of Artificial Sequence: Synthetic oligonucleotide
auugaucacuggcauauug

SEQ ID NO: 2387874 - RNA, 19 nt, Artificial Sequence
  Description of Artificial Sequence: Synthetic oligonucleotide
auuaaucugagcuuuugua

SEQ ID NO: 2387875 - RNA, 19 nt, Artificial Sequence
  Description of Artificial Sequence: Synthetic oligonucleotide
ucucaaaaugguagugaag

SEQ ID NO: 2387876 - RNA, 19 nt, Artificial Sequence
  Description of Artificial Sequence: Synthetic oligonucleotide
uggcauauugaugucauca

SEQ ID NO: 2387877 - RNA, 19 nt, Artificial Sequence
  Description of Artificial Sequence: Synthetic oligonucleotide
ucuuccuacacaugucugc

SEQ ID NO: 2387878 - RNA, 19 nt, Artificial Sequence
  Description of Artificial Sequence: Synthetic oligonucleotide
cauuaguuaucugaucucc

SEQ ID NO: 2387879 - RNA, 19 nt, Artificial Sequence
  Description of Artificial Sequence: Synthetic oligonucleotide
uuguuuugcaauugugucu

SEQ ID NO: 2387880 - RNA, 19 nt, Artificial Sequence
  Description of Artificial Sequence: Synthetic oligonucleotide
uccguuggauaaaguaugg

SEQ ID NO: 2387881 - RNA, 19 nt, Artificial Sequence
  Description of Artificial Sequence: Synthetic oligonucleotide
uguccguuggauaaaguau

SEQ ID NO: 2387882 - RNA, 19 nt, Artificial Sequence
  Description of Artificial Sequence: Synthetic oligonucleotide
aguuuucgcaguccccugc

SEQ ID NO: 2387883 - RNA, 19 nt, Artificial Sequence
  Description of Artificial Sequence: Synthetic oligonucleotide
caucgcaucgucaaauuug

SEQ ID NO: 2387884 - RNA, 19 nt, Artificial Sequence
  Description of Artificial Sequence: Synthetic oligonucleotide
ggaagaauacucuggaaug

SEQ ID NO: 2387885 - RNA, 19 nt, Artificial Sequence
  Description of Artificial Sequence: Synthetic oligonucleotide
auuggccacagccaagcgg

SEQ ID NO: 2387886 - RNA, 19 nt, Artificial Sequence
  Description of Artificial Sequence: Synthetic oligonucleotide
gaagaauacucuggaaugc

SEQ ID NO: 2387887 - RNA, 19 nt, Artificial Sequence
  Description of Artificial Sequence: Synthetic oligonucleotide
uagacucuuggauagcugu

SEQ ID NO: 2387888 - RNA, 19 nt, Artificial Sequence
  Description of Artificial Sequence: Synthetic oligonucleotide
agcagaacaucaccuacag

SEQ ID NO: 2387889 - RNA, 19 nt, Artificial Sequence
  Description of Artificial Sequence: Synthetic oligonucleotide
agccaagcggccuuccugc

SEQ ID NO: 2387890 - RNA, 19 nt, Artificial Sequence
  Description of Artificial Sequence: Synthetic oligonucleotide
ucaccuacagucuauuaau

SEQ ID NO: 2387891 - RNA, 19 nt, Artificial Sequence
  Description of Artificial Sequence: Synthetic oligonucleotide
ucauucaucgcaucgucaa

SEQ ID NO: 2387892 - RNA, 19 nt, Artificial Sequence
  Description of Artificial Sequence: Synthetic oligonucleotide
ucauugaucacuggcauau

SEQ ID NO: 2387893 - RNA, 19 nt, Artificial Sequence
  Description of Artificial Sequence: Synthetic oligonucleotide
cauccucuuauccacguag

SEQ ID NO: 2387894 - RNA, 19 nt, Artificial Sequence
  Description of Artificial Sequence: Synthetic oligonucleotide
agauggaagaauacucugg

SEQ ID NO: 2387895 - RNA, 19 nt, Artificial Sequence
  Description of Artificial Sequence: Synthetic oligonucleotide
caucaaugagcguggaggc

SEQ ID NO: 2387896 - RNA, 19 nt, Artificial Sequence
  Description of Artificial Sequence: Synthetic oligonucleotide
uguccaagcuauacauucc

SEQ ID NO: 2387897 - RNA, 19 nt, Artificial Sequence
  Description of Artificial Sequence: Synthetic oligonucleotide
aagcuauacauucccucca

SEQ ID NO: 2387898 - RNA, 19 nt, Artificial Sequence
  Description of Artificial Sequence: Synthetic oligonucleotide
uccacucagcccaucaaug

SEQ ID NO: 2387899 - RNA, 19 nt, Artificial Sequence
  Description of Artificial Sequence: Synthetic oligonucleotide
auacucuggaaugcugucc

SEQ ID NO: 2387900 - RNA, 19 nt, Artificial Sequence
  Description of Artificial Sequence: Synthetic oligonucleotide
agcuuuauguuguuuugca

SEQ ID NO: 2387901 - RNA, 19 nt, Artificial Sequence
  Description of Artificial Sequence: Synthetic oligonucleotide
uaucugaucuccccacuca

SEQ ID NO: 2387902 - RNA, 19 nt, Artificial Sequence
  Description of Artificial Sequence: Synthetic oligonucleotide
aaccaagauggaagaauac

SEQ ID NO: 2387903 - RNA, 19 nt, Artificial Sequence
  Description of Artificial Sequence: Synthetic oligonucleotide
uaguuaucugaucucccca

SEQ ID NO: 2387904 - RNA, 19 nt, Artificial Sequence
  Description of Artificial Sequence: Synthetic oligonucleotide
aucaccuacagucuauuaa

SEQ ID NO: 2387905 - RNA, 19 nt, Artificial Sequence
  Description of Artificial Sequence: Synthetic oligonucleotide
uguuuugcaauugugucua

SEQ ID NO: 2387906 - RNA, 19 nt, Artificial Sequence
  Description of Artificial Sequence: Synthetic oligonucleotide
uuuagacucuuggauagcu

SEQ ID NO: 2387907 - RNA, 19 nt, Artificial Sequence
  Description of Artificial Sequence: Synthetic oligonucleotide
uauugaugucaucaauaaa

SEQ ID NO: 2387908 - RNA, 19 nt, Artificial Sequence
  Description of Artificial Sequence: Synthetic oligonucleotide
aauucugcauuggccacag

SEQ ID NO: 2387909 - RNA, 19 nt, Artificial Sequence
  Description of Artificial Sequence: Synthetic oligonucleotide
accuacagucuauuaaucu

SEQ ID NO: 2387910 - RNA, 19 nt, Artificial Sequence
  Description of Artificial Sequence: Synthetic oligonucleotide
ucuggaaugcuguccguug

SEQ ID NO: 2387911 - RNA, 19 nt, Artificial Sequence
  Description of Artificial Sequence: Synthetic oligonucleotide
aagaauacucuggaaugcu

SEQ ID NO: 2387912 - RNA, 19 nt, Artificial Sequence
  Description of Artificial Sequence: Synthetic oligonucleotide
uagcuguacuucagggucg

SEQ ID NO: 2387913 - RNA, 19 nt, Artificial Sequence
  Description of Artificial Sequence: Synthetic oligonucleotide
guucgcugaaacaucauug

SEQ ID NO: 2387914 - RNA, 19 nt, Artificial Sequence
  Description of Artificial Sequence: Synthetic oligonucleotide
uuauccacguagcuuucga

SEQ ID NO: 2387915 - RNA, 19 nt, Artificial Sequence
  Description of Artificial Sequence: Synthetic oligonucleotide
acaaucucauuaguuaucu

SEQ ID NO: 2387916 - RNA, 19 nt, Artificial Sequence
  Description of Artificial Sequence: Synthetic oligonucleotide
agaggcaacaccucccugu

SEQ ID NO: 2387917 - RNA, 19 nt, Artificial Sequence
  Description of Artificial Sequence: Synthetic oligonucleotide
aaauugguccugauguugu

SEQ ID NO: 2387918 - RNA, 19 nt, Artificial Sequence
  Description of Artificial Sequence: Synthetic oligonucleotide
ucauuaguuaucugaucuc

SEQ ID NO: 2387919 - RNA, 19 nt, Artificial Sequence
  Description of Artificial Sequence: Synthetic oligonucleotide
ugguugaagucucuuguuc

SEQ ID NO: 2387920 - RNA, 19 nt, Artificial Sequence
  Description of Artificial Sequence: Synthetic oligonucleotide
uuauguuguuuugcaauug

SEQ ID NO: 2387921 - RNA, 19 nt, Artificial Sequence
  Description of Artificial Sequence: Synthetic oligonucleotide
cuacagucuauuaaucuga

SEQ ID NO: 2387922 - RNA, 19 nt, Artificial Sequence
  Description of Artificial Sequence: Synthetic oligonucleotide
aucgcaucgucaaauuugg

SEQ ID NO: 2387923 - RNA, 19 nt, Artificial Sequence
  Description of Artificial Sequence: Synthetic oligonucleotide
ugaucacuggcauauugau

SEQ ID NO: 2387924 - RNA, 19 nt, Artificial Sequence
  Description of Artificial Sequence: Synthetic oligonucleotide
acuuuugcuggucaccgga

SEQ ID NO: 2387925 - RNA, 19 nt, Artificial Sequence
  Description of Artificial Sequence: Synthetic oligonucleotide
uuaucugaucuccccacuc

SEQ ID NO: 2387926 - RNA, 19 nt, Artificial Sequence
  Description of Artificial Sequence: Synthetic oligonucleotide
ucuuccacucagcccauca

SEQ ID NO: 2387927 - RNA, 19 nt, Artificial Sequence
  Description of Artificial Sequence: Synthetic oligonucleotide
gguugaagucucuuguucc

SEQ ID NO: 2387928 - RNA, 19 nt, Artificial Sequence
  Description of Artificial Sequence: Synthetic oligonucleotide
cugauguugucaacguuug

SEQ ID NO: 2387929 - RNA, 19 nt, Artificial Sequence
  Description of Artificial Sequence: Synthetic oligonucleotide
ucccgugagcaaaacagcu

SEQ ID NO: 2387930 - RNA, 19 nt, Artificial Sequence
  Description of Artificial Sequence: Synthetic oligonucleotide
ugccgcacaaucucauuag

SEQ ID NO: 2387931 - RNA, 19 nt, Artificial Sequence
  Description of Artificial Sequence: Synthetic oligonucleotide
ccaucaaugagcguggagg

SEQ ID NO: 2387932 - RNA, 19 nt, Artificial Sequence
  Description of Artificial Sequence: Synthetic oligonucleotide
uccuacacaugucugcauc

SEQ ID NO: 2387933 - RNA, 19 nt, Artificial Sequence
  Description of Artificial Sequence: Synthetic oligonucleotide
uuagauaggccuucaccau

SEQ ID NO: 2387934 - RNA, 19 nt, Artificial Sequence
  Description of Artificial Sequence: Synthetic oligonucleotide
auuuagacucuuggauagc

SEQ ID NO: 2387935 - RNA, 19 nt, Artificial Sequence
  Description of Artificial Sequence: Synthetic oligonucleotide
aucaauaaacacagucauc

SEQ ID NO: 2387936 - RNA, 19 nt, Artificial Sequence
  Description of Artificial Sequence: Synthetic oligonucleotide
cucauuaguuaucugaucu

SEQ ID NO: 2387937 - RNA, 19 nt, Artificial Sequence
  Description of Artificial Sequence: Synthetic oligonucleotide
guccaagcuauacauuccc

SEQ ID NO: 2387938 - RNA, 19 nt, Artificial Sequence
  Description of Artificial Sequence: Synthetic oligonucleotide
accaagauggaagaauacu

SEQ ID NO: 2387939 - RNA, 19 nt, Artificial Sequence
  Description of Artificial Sequence: Synthetic oligonucleotide
uagugaagucuccagguuu

SEQ ID NO: 2387940 - RNA, 19 nt, Artificial Sequence
  Description of Artificial Sequence: Synthetic oligonucleotide
agucuauuaaucugagcuu

SEQ ID NO: 2387941 - RNA, 19 nt, Artificial Sequence
  Description of Artificial Sequence: Synthetic oligonucleotide
uccagguuuguccaagcua

SEQ ID NO: 2387942 - RNA, 19 nt, Artificial Sequence
  Description of Artificial Sequence: Synthetic oligonucleotide
uugcaauugugucuaucaa

SEQ ID NO: 2387943 - RNA, 19 nt, Artificial Sequence
  Description of Artificial Sequence: Synthetic oligonucleotide
uagauaggccuucaccauc

SEQ ID NO: 2387944 - RNA, 19 nt, Artificial Sequence
  Description of Artificial Sequence: Synthetic oligonucleotide
ucuuuagauaggccuucac

SEQ ID NO: 2387945 - RNA, 19 nt, Artificial Sequence
  Description of Artificial Sequence: Synthetic oligonucleotide
cucaaaaugguagugaagu

SEQ ID NO: 2387946 - RNA, 19 nt, Artificial Sequence
  Description of Artificial Sequence: Synthetic oligonucleotide
aucauugguucuguggcag

SEQ ID NO: 2387947 - RNA, 19 nt, Artificial Sequence
  Description of Artificial Sequence: Synthetic oligonucleotide
uguacuucagggucguauu

SEQ ID NO: 2387948 - RNA, 19 nt, Artificial Sequence
  Description of Artificial Sequence: Synthetic oligonucleotide
cuguugaugccauaaaaua

SEQ ID NO: 2387949 - RNA, 19 nt, Artificial Sequence
  Description of Artificial Sequence: Synthetic oligonucleotide
cacaaucucauuaguuauc

SEQ ID NO: 2387950 - RNA, 19 nt, Artificial Sequence
  Description of Artificial Sequence: Synthetic oligonucleotide
uccucuuauccacguagcu

SEQ ID NO: 2387951 - RNA, 19 nt, Artificial Sequence
  Description of Artificial Sequence: Synthetic oligonucleotide
ccaagauggaagaauacuc

SEQ ID NO: 2387952 - RNA, 19 nt, Artificial Sequence
  Description of Artificial Sequence: Synthetic oligonucleotide
gccagguuugccuucagag

SEQ ID NO: 2387953 - RNA, 19 nt, Artificial Sequence
  Description of Artificial Sequence: Synthetic oligonucleotide
cuggaaugcuguccguugg

SEQ ID NO: 2387954 - RNA, 19 nt, Artificial Sequence
  Description of Artificial Sequence: Synthetic oligonucleotide
uacuuuugcuggucaccgg

SEQ ID NO: 2387955 - RNA, 19 nt, Artificial Sequence
  Description of Artificial Sequence: Synthetic oligonucleotide
ccuacagucuauuaaucug

SEQ ID NO: 2387956 - RNA, 19 nt, Artificial Sequence
  Description of Artificial Sequence: Synthetic oligonucleotide
cagcccaucaaugagcgug

SEQ ID NO: 2387957 - RNA, 19 nt, Artificial Sequence
  Description of Artificial Sequence: Synthetic oligonucleotide
cuauuaaucugagcuuuug

SEQ ID NO: 2387958 - RNA, 19 nt, Artificial Sequence
  Description of Artificial Sequence: Synthetic oligonucleotide
ucuauuaaucugagcuuuu

SEQ ID NO: 2387959 - RNA, 19 nt, Artificial Sequence
  Description of Artificial Sequence: Synthetic oligonucleotide
guccguuggauaaaguaug

SEQ ID NO: 2387960 - RNA, 19 nt, Artificial Sequence
  Description of Artificial Sequence: Synthetic oligonucleotide
uccaagcuauacauucccu

SEQ ID NO: 2387961 - RNA, 19 nt, Artificial Sequence
  Description of Artificial Sequence: Synthetic oligonucleotide
cuuuauguuguuuugcaau

SEQ ID NO: 2387962 - RNA, 19 nt, Artificial Sequence
  Description of Artificial Sequence: Synthetic oligonucleotide
aucgucaaauuuggccugc

SEQ ID NO: 2387963 - RNA, 19 nt, Artificial Sequence
  Description of Artificial Sequence: Synthetic oligonucleotide
auccucuuauccacguagc

SEQ ID NO: 2387964 - RNA, 19 nt, Artificial Sequence
  Description of Artificial Sequence: Synthetic oligonucleotide
agugaagucuccagguuug

SEQ ID NO: 2387965 - RNA, 19 nt, Artificial Sequence
  Description of Artificial Sequence: Synthetic oligonucleotide
uuccacucagcccaucaau

SEQ ID NO: 2387966 - RNA, 19 nt, Artificial Sequence
  Description of Artificial Sequence: Synthetic oligonucleotide
uuuguccaagcuauacauu

SEQ ID NO: 2387967 - RNA, 19 nt, Artificial Sequence
  Description of Artificial Sequence: Synthetic oligonucleotide
uugucaacguuuggaacca

SEQ ID NO: 2387968 - RNA, 19 nt, Artificial Sequence
  Description of Artificial Sequence: Synthetic oligonucleotide
ggauaaaguaugguugaag

SEQ ID NO: 2387969 - RNA, 19 nt, Artificial Sequence
  Description of Artificial Sequence: Synthetic oligonucleotide
ucgaugguucgcugaaaca

SEQ ID NO: 2387970 - RNA, 19 nt, Artificial Sequence
  Description of Artificial Sequence: Synthetic oligonucleotide
uugguccugauguugucaa

SEQ ID NO: 2387971 - RNA, 19 nt, Artificial Sequence
  Description of Artificial Sequence: Synthetic oligonucleotide
agaacaucaccuacagucu

SEQ ID NO: 2387972 - RNA, 19 nt, Artificial Sequence
  Description of Artificial Sequence: Synthetic oligonucleotide
uggaaugcuguccguugga

SEQ ID NO: 2387973 - RNA, 19 nt, Artificial Sequence
  Description of Artificial Sequence: Synthetic oligonucleotide
ucagggucguauuucuuua

SEQ ID NO: 2387974 - RNA, 19 nt, Artificial Sequence
  Description of Artificial Sequence: Synthetic oligonucleotide
ggcgcucucaaaaugguag

SEQ ID NO: 2387975 - RNA, 19 nt, Artificial Sequence
  Description of Artificial Sequence: Synthetic oligonucleotide
cucccgugagcaaaacagc

SEQ ID NO: 2387976 - RNA, 19 nt, Artificial Sequence
  Description of Artificial Sequence: Synthetic oligonucleotide
caucgucaaauuuggccug

SEQ ID NO: 2387977 - RNA, 19 nt, Artificial Sequence
  Description of Artificial Sequence: Synthetic oligonucleotide
ucuuuuacuuuugcugguc

SEQ ID NO: 2387978 - RNA, 19 nt, Artificial Sequence
  Description of Artificial Sequence: Synthetic oligonucleotide
gacucuuggauagcuguac

SEQ ID NO: 2387979 - RNA, 19 nt, Artificial Sequence
  Description of Artificial Sequence: Synthetic oligonucleotide
caucaauaaacacagucau

SEQ ID NO: 2387980 - RNA, 19 nt, Artificial Sequence
  Description of Artificial Sequence: Synthetic oligonucleotide
guagcuuucgaugguucgc

SEQ ID NO: 2387981 - RNA, 19 nt, Artificial Sequence
  Description of Artificial Sequence: Synthetic oligonucleotide
caagauggaagaauacucu

SEQ ID NO: 2387982 - RNA, 19 nt, Artificial Sequence
  Description of Artificial Sequence: Synthetic oligonucleotide
uuggcgcucucaaaauggu

SEQ ID NO: 2387983 - RNA, 19 nt, Artificial Sequence
  Description of Artificial Sequence: Synthetic oligonucleotide
aucucauuaguuaucugau

SEQ ID NO: 2387984 - RNA, 19 nt, Artificial Sequence
  Description of Artificial Sequence: Synthetic oligonucleotide
cucucaaaaugguagugaa

SEQ ID NO: 2387985 - RNA, 19 nt, Artificial Sequence
  Description of Artificial Sequence: Synthetic oligonucleotide
ugagcguggaggccgccug

SEQ ID NO: 2387986 - RNA, 19 nt, Artificial Sequence
  Description of Artificial Sequence: Synthetic oligonucleotide
guauuucuuuagauaggcc

SEQ ID NO: 2387987 - RNA, 19 nt, Artificial Sequence
  Description of Artificial Sequence: Synthetic oligonucleotide
caagcggccuuccugcuug

SEQ ID NO: 2387988 - RNA, 19 nt, Artificial Sequence
  Description of Artificial Sequence: Synthetic oligonucleotide
acucuuggauagcuguacu

SEQ ID NO: 2387989 - RNA, 19 nt, Artificial Sequence
  Description of Artificial Sequence: Synthetic oligonucleotide
acaccucccuguugaugcc

SEQ ID NO: 2387990 - RNA, 19 nt, Artificial Sequence
  Description of Artificial Sequence: Synthetic oligonucleotide
agaauacucuggaaugcug

SEQ ID NO: 2387991 - RNA, 19 nt, Artificial Sequence
  Description of Artificial Sequence: Synthetic oligonucleotide
gaugguucgcugaaacauc

SEQ ID NO: 2387992 - RNA, 19 nt, Artificial Sequence
  Description of Artificial Sequence: Synthetic oligonucleotide
cuuauccacguagcuuucg

SEQ ID NO: 2387993 - RNA, 19 nt, Artificial Sequence
  Description of Artificial Sequence: Synthetic oligonucleotide
cagcuuuauguuguuuugc

SEQ ID NO: 2387994 - RNA, 19 nt, Artificial Sequence
  Description of Artificial Sequence: Synthetic oligonucleotide
cauugguucuguggcagag

SEQ ID NO: 2387995 - RNA, 19 nt, Artificial Sequence
  Description of Artificial Sequence: Synthetic oligonucleotide
cgcaucgucaaauuuggcc

SEQ ID NO: 2387996 - RNA, 19 nt, Artificial Sequence
  Description of Artificial Sequence: Synthetic oligonucleotide
auugguccugauguuguca

SEQ ID NO: 2387997 - RNA, 19 nt, Artificial Sequence
  Description of Artificial Sequence: Synthetic oligonucleotide
cauucccuccauuuccauc

SEQ ID NO: 2387998 - RNA, 19 nt, Artificial Sequence
  Description of Artificial Sequence: Synthetic oligonucleotide
ccagguuugccuucagagg

SEQ ID NO: 2387999 - RNA, 19 nt, Artificial Sequence
  Description of Artificial Sequence: Synthetic oligonucleotide
uagcuuucgaugguucgcu

SEQ ID NO: 2388000 - RNA, 19 nt, Artificial Sequence
  Description of Artificial Sequence: Synthetic oligonucleotide
agauaggccuucaccauca

SEQ ID NO: 2388001 - RNA, 19 nt, Artificial Sequence
  Description of Artificial Sequence: Synthetic oligonucleotide
aaugagcguggaggccgcc

SEQ ID NO: 2388002 - RNA, 19 nt, Artificial Sequence
  Description of Artificial Sequence: Synthetic oligonucleotide
ugcuguccguuggauaaag

SEQ ID NO: 2388003 - RNA, 19 nt, Artificial Sequence
  Description of Artificial Sequence: Synthetic oligonucleotide
ucauugguucuguggcaga

SEQ ID NO: 2388004 - RNA, 19 nt, Artificial Sequence
  Description of Artificial Sequence: Synthetic oligonucleotide
agcuauacauucccuccau

SEQ ID NO: 2388005 - RNA, 19 nt, Artificial Sequence
  Description of Artificial Sequence: Synthetic oligonucleotide
uucaucgcaucgucaaauu

SEQ ID NO: 2388006 - RNA, 19 nt, Artificial Sequence
  Description of Artificial Sequence: Synthetic oligonucleotide
cuguccguuggauaaagua

SEQ ID NO: 2388007 - RNA, 19 nt, Artificial Sequence
  Description of Artificial Sequence: Synthetic oligonucleotide
uccccacucauugaucacu

SEQ ID NO: 2388008 - RNA, 19 nt, Artificial Sequence
  Description of Artificial Sequence: Synthetic oligonucleotide
gaacaucaccuacagucua

SEQ ID NO: 2388009 - RNA, 19 nt, Artificial Sequence
  Description of Artificial Sequence: Synthetic oligonucleotide
cucuuauccacguagcuuu

SEQ ID NO: 2388010 - RNA, 19 nt, Artificial Sequence
  Description of Artificial Sequence: Synthetic oligonucleotide
augguucgcugaaacauca

SEQ ID NO: 2388011 - RNA, 19 nt, Artificial Sequence
  Description of Artificial Sequence: Synthetic oligonucleotide
augguugaagucucuuguu

SEQ ID NO: 2388012 - RNA, 19 nt, Artificial Sequence
  Description of Artificial Sequence: Synthetic oligonucleotide
gcaucgucaaauuuggccu

SEQ ID NO: 2388013 - RNA, 19 nt, Artificial Sequence
  Description of Artificial Sequence: Synthetic oligonucleotide
agcaagaguccaggacagc

SEQ ID NO: 2388014 - RNA, 19 nt, Artificial Sequence
  Description of Artificial Sequence: Synthetic oligonucleotide
uggauaaaguaugguugaa

SEQ ID NO: 2388015 - RNA, 19 nt, Artificial Sequence
  Description of Artificial Sequence: Synthetic oligonucleotide
caccaucacaguuuucgca

SEQ ID NO: 2388016 - RNA, 19 nt, Artificial Sequence
  Description of Artificial Sequence: Synthetic oligonucleotide
acuggcauauugaugucau

SEQ ID NO: 2388017 - RNA, 19 nt, Artificial Sequence
  Description of Artificial Sequence: Synthetic oligonucleotide
agcccaucaaugagcgugg

SEQ ID NO: 2388018 - RNA, 19 nt, Artificial Sequence
  Description of Artificial Sequence: Synthetic oligonucleotide
cuauacauucccuccauuu

SEQ ID NO: 2388019 - RNA, 19 nt, Artificial Sequence
  Description of Artificial Sequence: Synthetic oligonucleotide
gaaugcuguccguuggaua

SEQ ID NO: 2388020 - RNA, 19 nt, Artificial Sequence
  Description of Artificial Sequence: Synthetic oligonucleotide
cagcagaacaucaccuaca

SEQ ID NO: 2388021 - RNA, 19 nt, Artificial Sequence
  Description of Artificial Sequence: Synthetic oligonucleotide
cuuucgaugguucgcugaa

SEQ ID NO: 2388022 - RNA, 19 nt, Artificial Sequence
  Description of Artificial Sequence: Synthetic oligonucleotide
caaugagcguggaggccgc

SEQ ID NO: 2388023 - RNA, 19 nt, Artificial Sequence
  Description of Artificial Sequence: Synthetic oligonucleotide
ucgcaucgucaaauuuggc

SEQ ID NO: 2388024 - RNA, 19 nt, Artificial Sequence
  Description of Artificial Sequence: Synthetic oligonucleotide
uuuucgcaguccccugcuc

SEQ ID NO: 2388025 - RNA, 19 nt, Artificial Sequence
  Description of Artificial Sequence: Synthetic oligonucleotide
aguaugguugaagucucuu

SEQ ID NO: 2388026 - RNA, 19 nt, Artificial Sequence
  Description of Artificial Sequence: Synthetic oligonucleotide
caucauugguucuguggca

SEQ ID NO: 2388027 - RNA, 19 nt, Artificial Sequence
  Description of Artificial Sequence: Synthetic oligonucleotide
ccauaggugcuccccaucc

SEQ ID NO: 2388028 - RNA, 19 nt, Artificial Sequence
  Description of Artificial Sequence: Synthetic oligonucleotide
aaguaugguugaagucucu

SEQ ID NO: 2388029 - RNA, 19 nt, Artificial Sequence
  Description of Artificial Sequence: Synthetic oligonucleotide
acguagcuuucgaugguuc

SEQ ID NO: 2388030 - RNA, 19 nt, Artificial Sequence
  Description of Artificial Sequence: Synthetic oligonucleotide
agcuuucgaugguucgcug

SEQ ID NO: 2388031 - RNA, 19 nt, Artificial Sequence
  Description of Artificial Sequence: Synthetic oligonucleotide
aagcggccuuccugcuugg

SEQ ID NO: 2388032 - RNA, 19 nt, Artificial Sequence
  Description of Artificial Sequence: Synthetic oligonucleotide
ugcucucccgugagcaaaa

SEQ ID NO: 2388033 - RNA, 19 nt, Artificial Sequence
  Description of Artificial Sequence: Synthetic oligonucleotide
ggcauauugaugucaucaa

SEQ ID NO: 2388034 - RNA, 19 nt, Artificial Sequence
  Description of Artificial Sequence: Synthetic oligonucleotide
ucacuggcauauugauguc

SEQ ID NO: 2388035 - RNA, 19 nt, Artificial Sequence
  Description of Artificial Sequence: Synthetic oligonucleotide
uggaaccaagauggaagaa

SEQ ID NO: 2388036 - RNA, 19 nt, Artificial Sequence
  Description of Artificial Sequence: Synthetic oligonucleotide
uuccuacacaugucugcau

SEQ ID NO: 2388037 - RNA, 19 nt, Artificial Sequence
  Description of Artificial Sequence: Synthetic oligonucleotide
cguagcuuucgaugguucg

SEQ ID NO: 2388038 - RNA, 19 nt, Artificial Sequence
  Description of Artificial Sequence: Synthetic oligonucleotide
uggcgcucucaaaauggua

SEQ ID NO: 2388039 - RNA, 19 nt, Artificial Sequence
  Description of Artificial Sequence: Synthetic oligonucleotide
gucuauuaaucugagcuuu

SEQ ID NO: 2388040 - RNA, 19 nt, Artificial Sequence
  Description of Artificial Sequence: Synthetic oligonucleotide
ccauuuccaucaucugccg

SEQ ID NO: 2388041 - RNA, 19 nt, Artificial Sequence
  Description of Artificial Sequence: Synthetic oligonucleotide
ugguccugauguugucaac

SEQ ID NO: 2388042 - RNA, 19 nt, Artificial Sequence
  Description of Artificial Sequence: Synthetic oligonucleotide
ugguucgcugaaacaucau

SEQ ID NO: 2388043 - RNA, 19 nt, Artificial Sequence
  Description of Artificial Sequence: Synthetic oligonucleotide
guuaucugaucuccccacu

SEQ ID NO: 2388044 - RNA, 19 nt, Artificial Sequence
  Description of Artificial Sequence: Synthetic oligonucleotide
uuucgaugguucgcugaaa

SEQ ID NO: 2388045 - RNA, 19 nt, Artificial Sequence
  Description of Artificial Sequence: Synthetic oligonucleotide
gcuuuauguuguuuugcaa

SEQ ID NO: 2388046 - RNA, 19 nt, Artificial Sequence
  Description of Artificial Sequence: Synthetic oligonucleotide
acauucccuccauuuccau

SEQ ID NO: 2388047 - RNA, 19 nt, Artificial Sequence
  Description of Artificial Sequence: Synthetic oligonucleotide
caacaccucccuguugaug

SEQ ID NO: 2388048 - RNA, 19 nt, Artificial Sequence
  Description of Artificial Sequence: Synthetic oligonucleotide
ucgucaaauuuggccugca

SEQ ID NO: 2388049 - RNA, 19 nt, Artificial Sequence
  Description of Artificial Sequence: Synthetic oligonucleotide
gcucucaaaaugguaguga

SEQ ID NO: 2388050 - RNA, 19 nt, Artificial Sequence
  Description of Artificial Sequence: Synthetic oligonucleotide
caacguuuggaaccaagau

SEQ ID NO: 2388051 - RNA, 19 nt, Artificial Sequence
  Description of Artificial Sequence: Synthetic oligonucleotide
gcuuucgaugguucgcuga

SEQ ID NO: 2388052 - RNA, 19 nt, Artificial Sequence
  Description of Artificial Sequence: Synthetic oligonucleotide
cuccccacucauugaucac

SEQ ID NO: 2388053 - RNA, 19 nt, Artificial Sequence
  Description of Artificial Sequence: Synthetic oligonucleotide
gagcguggaggccgccugc

SEQ ID NO: 2388054 - RNA, 19 nt, Artificial Sequence
  Description of Artificial Sequence: Synthetic oligonucleotide
aggcaacaccucccuguug

SEQ ID NO: 2388055 - RNA, 19 nt, Artificial Sequence
  Description of Artificial Sequence: Synthetic oligonucleotide
gugcacagcagaacaucac

SEQ ID NO: 2388056 - RNA, 19 nt, Artificial Sequence
  Description of Artificial Sequence: Synthetic oligonucleotide
guggaggccgccugcaucu

SEQ ID NO: 2388057 - RNA, 19 nt, Artificial Sequence
  Description of Artificial Sequence: Synthetic oligonucleotide
gaggcccauaggugcuccc

SEQ ID NO: 2388058 - RNA, 19 nt, Artificial Sequence
  Description of Artificial Sequence: Synthetic oligonucleotide
agcuguacuucagggucgu

SEQ ID NO: 2388059 - RNA, 19 nt, Artificial Sequence
  Description of Artificial Sequence: Synthetic oligonucleotide
cacuggcauauugauguca

SEQ ID NO: 2388060 - RNA, 19 nt, Artificial Sequence
  Description of Artificial Sequence: Synthetic oligonucleotide
aguccccugcucucccgug

SEQ ID NO: 2388061 - RNA, 19 nt, Artificial Sequence
  Description of Artificial Sequence: Synthetic oligonucleotide
ucagcccaucaaugagcgu

SEQ ID NO: 2388062 - RNA, 19 nt, Artificial Sequence
  Description of Artificial Sequence: Synthetic oligonucleotide
acaucaccuacagucuauu

SEQ ID NO: 2388063 - RNA, 19 nt, Artificial Sequence
  Description of Artificial Sequence: Synthetic oligonucleotide
cauucaucgcaucgucaaa

SEQ ID NO: 2388064 - RNA, 19 nt, Artificial Sequence
  Description of Artificial Sequence: Synthetic oligonucleotide
acagcaagccagccacauu

SEQ ID NO: 2388065 - RNA, 19 nt, Artificial Sequence
  Description of Artificial Sequence: Synthetic oligonucleotide
ggaaccaagauggaagaau

SEQ ID NO: 2388066 - RNA, 19 nt, Artificial Sequence
  Description of Artificial Sequence: Synthetic oligonucleotide
guccugauguugucaacgu

SEQ ID NO: 2388067 - RNA, 19 nt, Artificial Sequence
  Description of Artificial Sequence: Synthetic oligonucleotide
guuuucgcaguccccugcu

SEQ ID NO: 2388068 - RNA, 19 nt, Artificial Sequence
  Description of Artificial Sequence: Synthetic oligonucleotide
cucucccgugagcaaaaca

SEQ ID NO: 2388069 - RNA, 19 nt, Artificial Sequence
  Description of Artificial Sequence: Synthetic oligonucleotide
cagaggcaacaccucccug

SEQ ID NO: 2388070 - RNA, 19 nt, Artificial Sequence
  Description of Artificial Sequence: Synthetic oligonucleotide
cuuccacucagcccaucaa

SEQ ID NO: 2388071 - RNA, 19 nt, Artificial Sequence
  Description of Artificial Sequence: Synthetic oligonucleotide
guagugaagucuccagguu

SEQ ID NO: 2388072 - RNA, 19 nt, Artificial Sequence
  Description of Artificial Sequence: Synthetic oligonucleotide
ccagguuuguccaagcuau

SEQ ID NO: 2388073 - RNA, 19 nt, Artificial Sequence
  Description of Artificial Sequence: Synthetic oligonucleotide
caucaccuacagucuauua

SEQ ID NO: 2388074 - RNA, 19 nt, Artificial Sequence
  Description of Artificial Sequence: Synthetic oligonucleotide
cgcacaaucucauuaguua

SEQ ID NO: 2388075 - RNA, 19 nt, Artificial Sequence
  Description of Artificial Sequence: Synthetic oligonucleotide
gcauauugaugucaucaau

SEQ ID NO: 2388076 - RNA, 19 nt, Artificial Sequence
  Description of Artificial Sequence: Synthetic oligonucleotide
agacucuuggauagcugua

SEQ ID NO: 2388077 - RNA, 19 nt, Artificial Sequence
  Description of Artificial Sequence: Synthetic oligonucleotide
augagcguggaggccgccu

SEQ ID NO: 2388078 - RNA, 19 nt, Artificial Sequence
  Description of Artificial Sequence: Synthetic oligonucleotide
gccauaaaauauugccaua

SEQ ID NO: 2388079 - RNA, 19 nt, Artificial Sequence
  Description of Artificial Sequence: Synthetic oligonucleotide
ccccacucauugaucacug

SEQ ID NO: 2388080 - RNA, 19 nt, Artificial Sequence
  Description of Artificial Sequence: Synthetic oligonucleotide
cccacucauugaucacugg

SEQ ID NO: 2388081 - RNA, 19 nt, Artificial Sequence
  Description of Artificial Sequence: Synthetic oligonucleotide
cccuccuggaggcccauag

SEQ ID NO: 2388082 - RNA, 19 nt, Artificial Sequence
  Description of Artificial Sequence: Synthetic oligonucleotide
ugucaacguuuggaaccaa

SEQ ID NO: 2388083 - RNA, 19 nt, Artificial Sequence
  Description of Artificial Sequence: Synthetic oligonucleotide
cccaucaaugagcguggag

SEQ ID NO: 2388084 - RNA, 19 nt, Artificial Sequence
  Description of Artificial Sequence: Synthetic oligonucleotide
ccacucagcccaucaauga

SEQ ID NO: 2388085 - RNA, 19 nt, Artificial Sequence
  Description of Artificial Sequence: Synthetic oligonucleotide
aucugccgcacaaucucau

SEQ ID NO: 2388086 - RNA, 19 nt, Artificial Sequence
  Description of Artificial Sequence: Synthetic oligonucleotide
gggucguauuucuuuagau

SEQ ID NO: 2388087 - RNA, 19 nt, Artificial Sequence
  Description of Artificial Sequence: Synthetic oligonucleotide
ggccuuccugcuuggccag

SEQ ID NO: 2388088 - RNA, 19 nt, Artificial Sequence
  Description of Artificial Sequence: Synthetic oligonucleotide
caucuuccucccuccugga

SEQ ID NO: 2388089 - RNA, 19 nt, Artificial Sequence
  Description of Artificial Sequence: Synthetic oligonucleotide
guacuucagggucguauuu

SEQ ID NO: 2388090 - RNA, 19 nt, Artificial Sequence
  Description of Artificial Sequence: Synthetic oligonucleotide
ccccauccucuuauccacg

SEQ ID NO: 2388091 - RNA, 19 nt, Artificial Sequence
  Description of Artificial Sequence: Synthetic oligonucleotide
gcaguccccugcucucccg

SEQ ID NO: 2388092 - RNA, 19 nt, Artificial Sequence
  Description of Artificial Sequence: Synthetic oligonucleotide
gguucgcugaaacaucauu

SEQ ID NO: 2388093 - RNA, 19 nt, Artificial Sequence
  Description of Artificial Sequence: Synthetic oligonucleotide
cccuguugaugccauaaaa

SEQ ID NO: 2388094 - RNA, 19 nt, Artificial Sequence
  Description of Artificial Sequence: Synthetic oligonucleotide
cacagccaagcggccuucc

SEQ ID NO: 2388095 - RNA, 19 nt, Artificial Sequence
  Description of Artificial Sequence: Synthetic oligonucleotide
agcguggaggccgccugca

SEQ ID NO: 2388096 - RNA, 19 nt, Artificial Sequence
  Description of Artificial Sequence: Synthetic oligonucleotide
gaggccgccugcaucuucu

SEQ ID NO: 2388097 - RNA, 19 nt, Artificial Sequence
  Description of Artificial Sequence: Synthetic oligonucleotide
cauaggugcuccccauccu

SEQ ID NO: 2388098 - RNA, 19 nt, Artificial Sequence
  Description of Artificial Sequence: Synthetic oligonucleotide
cguuggauaaaguaugguu

SEQ ID NO: 2388099 - RNA, 19 nt, Artificial Sequence
  Description of Artificial Sequence: Synthetic oligonucleotide
ggccuuccccaauucugca

SEQ ID NO: 2388100 - RNA, 19 nt, Artificial Sequence
  Description of Artificial Sequence: Synthetic oligonucleotide
cuacacaugucugcaucau

SEQ ID NO: 2388101 - RNA, 19 nt, Artificial Sequence
  Description of Artificial Sequence: Synthetic oligonucleotide
gugcuccccauccucuuau

SEQ ID NO: 2388102 - RNA, 19 nt, Artificial Sequence
  Description of Artificial Sequence: Synthetic oligonucleotide
cgcucucaaaaugguagug

SEQ ID NO: 2388103 - RNA, 19 nt, Artificial Sequence
  Description of Artificial Sequence: Synthetic oligonucleotide
cccauaggugcuccccauc

SEQ ID NO: 2388104 - RNA, 19 nt, Artificial Sequence
  Description of Artificial Sequence: Synthetic oligonucleotide
gcgcucucaaaaugguagu

SEQ ID NO: 2388105 - RNA, 19 nt, Artificial Sequence
  Description of Artificial Sequence: Synthetic oligonucleotide
ggugcuccccauccucuua

SEQ ID NO: 2388106 - RNA, 19 nt, Artificial Sequence
  Description of Artificial Sequence: Synthetic oligonucleotide
ggaggccgccugcaucuuc

SEQ ID NO: 2388107 - RNA, 19 nt, Artificial Sequence
  Description of Artificial Sequence: Synthetic oligonucleotide
gugaagucuccagguuugu

SEQ ID NO: 2388108 - RNA, 19 nt, Artificial Sequence
  Description of Artificial Sequence: Synthetic oligonucleotide
ccgugagcaaaacagcuuu

SEQ ID NO: 2388109 - RNA, 19 nt, Artificial Sequence
  Description of Artificial Sequence: Synthetic oligonucleotide
gcagaacaucaccuacagu

SEQ ID NO: 2388110 - RNA, 19 nt, Artificial Sequence
  Description of Artificial Sequence: Synthetic oligonucleotide
cguggaggccgccugcauc

SEQ ID NO: 2388111 - RNA, 19 nt, Artificial Sequence
  Description of Artificial Sequence: Synthetic oligonucleotide
cggccuuccugcuuggcca

SEQ ID NO: 2388112 - RNA, 19 nt, Artificial Sequence
  Description of Artificial Sequence: Synthetic oligonucleotide
cucuggaaugcuguccguu

SEQ ID NO: 2388113 - RNA, 19 nt, Artificial Sequence
  Description of Artificial Sequence: Synthetic oligonucleotide
ggaaugcuguccguuggau

SEQ ID NO: 2388114 - RNA, 19 nt, Artificial Sequence
  Description of Artificial Sequence: Synthetic oligonucleotide
gcuauacauucccuccauu

SEQ ID NO: 2388115 - RNA, 19 nt, Artificial Sequence
  Description of Artificial Sequence: Synthetic oligonucleotide
cgaugguucgcugaaacau

SEQ ID NO: 2388116 - RNA, 19 nt, Artificial Sequence
  Description of Artificial Sequence: Synthetic oligonucleotide
cguuuggaaccaagaugga

SEQ ID NO: 2388117 - RNA, 19 nt, Artificial Sequence
  Description of Artificial Sequence: Synthetic oligonucleotide
cgcaguccccugcucuccc

SEQ ID NO: 2388118 - RNA, 19 nt, Artificial Sequence
  Description of Artificial Sequence: Synthetic oligonucleotide
cgugagcaaaacagcuuua

SEQ ID NO: 2388119 - RNA, 19 nt, Artificial Sequence
  Description of Artificial Sequence: Synthetic oligonucleotide
gcucucccgugagcaaaac

SEQ ID NO: 2388120 - RNA, 19 nt, Artificial Sequence
  Description of Artificial Sequence: Synthetic oligonucleotide
gccuuccccaauucugcau

SEQ ID NO: 2388121 - RNA, 19 nt, Artificial Sequence
  Description of Artificial Sequence: Synthetic oligonucleotide
ccucuuauccacguagcuu

SEQ ID NO: 2388122 - RNA, 19 nt, Artificial Sequence
  Description of Artificial Sequence: Synthetic oligonucleotide
ucccuccuggaggcccaua

SEQ ID NO: 2388123 - RNA, 19 nt, Artificial Sequence
  Description of Artificial Sequence: Synthetic oligonucleotide
cauugaucacuggcauauu

SEQ ID NO: 2388124 - RNA, 19 nt, Artificial Sequence
  Description of Artificial Sequence: Synthetic oligonucleotide
ccauccucuuauccacgua

SEQ ID NO: 2388125 - RNA, 19 nt, Artificial Sequence
  Description of Artificial Sequence: Synthetic oligonucleotide
cccgugagcaaaacagcuu

SEQ ID NO: 2388126 - RNA, 19 nt, Artificial Sequence
  Description of Artificial Sequence: Synthetic oligonucleotide
gcaacaccucccuguugau

SEQ ID NO: 2388127 - RNA, 19 nt, Artificial Sequence
  Description of Artificial Sequence: Synthetic oligonucleotide
gcccauaggugcuccccau

SEQ ID NO: 2388128 - RNA, 19 nt, Artificial Sequence
  Description of Artificial Sequence: Synthetic oligonucleotide
ccguuggauaaaguauggu

SEQ ID NO: 2388129 - RNA, 19 nt, Artificial Sequence
  Description of Artificial Sequence: Synthetic oligonucleotide
gcccaucaaugagcgugga

SEQ ID NO: 2388130 - RNA, 19 nt, Artificial Sequence
  Description of Artificial Sequence: Synthetic oligonucleotide
ccacguagcuuucgauggu

SEQ ID NO: 2388131 - RNA, 19 nt, Artificial Sequence
  Description of Artificial Sequence: Synthetic oligonucleotide
ccacagccaagcggccuuc

SEQ ID NO: 2388132 - RNA, 19 nt, Artificial Sequence
  Description of Artificial Sequence: Synthetic oligonucleotide
gccaagcggccuuccugcu

SEQ ID NO: 2388133 - RNA, 19 nt, Artificial Sequence
  Description of Artificial Sequence: Synthetic oligonucleotide
ccaagcggccuuccugcuu

SEQ ID NO: 2388134 - RNA, 19 nt, Artificial Sequence
  Description of Artificial Sequence: Synthetic oligonucleotide
gcguggaggccgccugcau

SEQ ID NO: 2388135 - RNA, 19 nt, Artificial Sequence
  Description of Artificial Sequence: Synthetic oligonucleotide
uuaauuguaggaauguugc

SEQ ID NO: 2388136 - RNA, 19 nt, Artificial Sequence
  Description of Artificial Sequence: Synthetic oligonucleotide
aauguuauguaacuggccu

SEQ ID NO: 2388137 - RNA, 19 nt, Artificial Sequence
  Description of Artificial Sequence: Synthetic oligonucleotide
aaaaucuuuucaaagacag

SEQ ID NO: 2388138 - RNA, 19 nt, Artificial Sequence
  Description of Artificial Sequence: Synthetic oligonucleotide
uuugcaacuucucauauug

SEQ ID NO: 2388139 - RNA, 19 nt, Artificial Sequence
  Description of Artificial Sequence: Synthetic oligonucleotide
aaauuaaggacauuccuga

SEQ ID NO: 2388140 - RNA, 19 nt, Artificial Sequence
  Description of Artificial Sequence: Synthetic oligonucleotide
acuacuaaagcauagcucu

SEQ ID NO: 2388141 - RNA, 19 nt, Artificial Sequence
  Description of Artificial Sequence: Synthetic oligonucleotide
aacgagaaaauccucuccg

SEQ ID NO: 2388142 - RNA, 19 nt, Artificial Sequence
  Description of Artificial Sequence: Synthetic oligonucleotide
cauuccaucaaucucaacc

SEQ ID NO: 2388143 - RNA, 19 nt, Artificial Sequence
  Description of Artificial Sequence: Synthetic oligonucleotide
auuaaggacauuccugacc

SEQ ID NO: 2388144 - RNA, 19 nt, Artificial Sequence
  Description of Artificial Sequence: Synthetic oligonucleotide
uggaauguuauguaacugg

SEQ ID NO: 2388145 - RNA, 19 nt, Artificial Sequence
  Description of Artificial Sequence: Synthetic oligonucleotide
uuaaggacauuccugacca

SEQ ID NO: 2388146 - RNA, 19 nt, Artificial Sequence
  Description of Artificial Sequence: Synthetic oligonucleotide
ucacuagaaauuaaggaca

SEQ ID NO: 2388147 - RNA, 19 nt, Artificial Sequence
  Description of Artificial Sequence: Synthetic oligonucleotide
gaucauuagcaucaggucc

SEQ ID NO: 2388148 - RNA, 19 nt, Artificial Sequence
  Description of Artificial Sequence: Synthetic oligonucleotide
uucauuguauuuaauuggc

SEQ ID NO: 2388149 - RNA, 19 nt, Artificial Sequence
  Description of Artificial Sequence: Synthetic oligonucleotide
ucuaucuacaccuuguuuc

SEQ ID NO: 2388150 - RNA, 19 nt, Artificial Sequence
  Description of Artificial Sequence: Synthetic oligonucleotide
uuauguaacuggccuaugg

SEQ ID NO: 2388151 - RNA, 19 nt, Artificial Sequence
  Description of Artificial Sequence: Synthetic oligonucleotide
acaaguuguacuuggcagc

SEQ ID NO: 2388152 - RNA, 19 nt, Artificial Sequence
  Description of Artificial Sequence: Synthetic oligonucleotide
uacaugucaauccugaguc

SEQ ID NO: 2388153 - RNA, 19 nt, Artificial Sequence
  Description of Artificial Sequence: Synthetic oligonucleotide
acugccauuggauacucgc

SEQ ID NO: 2388154 - RNA, 19 nt, Artificial Sequence
  Description of Artificial Sequence: Synthetic oligonucleotide
auugacuccauccugccuc

SEQ ID NO: 2388155 - RNA, 19 nt, Artificial Sequence
  Description of Artificial Sequence: Synthetic oligonucleotide
uacaaguuguacuuggcag

SEQ ID NO: 2388156 - RNA, 19 nt, Artificial Sequence
  Description of Artificial Sequence: Synthetic oligonucleotide
aauuaaggacauuccugac

SEQ ID NO: 2388157 - RNA, 19 nt, Artificial Sequence
  Description of Artificial Sequence: Synthetic oligonucleotide
gucacuagaaauuaaggac

SEQ ID NO: 2388158 - RNA, 19 nt, Artificial Sequence
  Description of Artificial Sequence: Synthetic oligonucleotide
ucagcauacaugucaaucc

SEQ ID NO: 2388159 - RNA, 19 nt, Artificial Sequence
  Description of Artificial Sequence: Synthetic oligonucleotide
aauguugcugauucuuguc

SEQ ID NO: 2388160 - RNA, 19 nt, Artificial Sequence
  Description of Artificial Sequence: Synthetic oligonucleotide
aagacagggaaguaacgag

SEQ ID NO: 2388161 - RNA, 19 nt, Artificial Sequence
  Description of Artificial Sequence: Synthetic oligonucleotide
agucggacagcacaggggc

SEQ ID NO: 2388162 - RNA, 19 nt, Artificial Sequence
  Description of Artificial Sequence: Synthetic oligonucleotide
auuggauacucgcuguagc

SEQ ID NO: 2388163 - RNA, 19 nt, Artificial Sequence
  Description of Artificial Sequence: Synthetic oligonucleotide
aauccugagucucuccuuc

SEQ ID NO: 2388164 - RNA, 19 nt, Artificial Sequence
  Description of Artificial Sequence: Synthetic oligonucleotide
uagaaauuaaggacauucc

SEQ ID NO: 2388165 - RNA, 19 nt, Artificial Sequence
  Description of Artificial Sequence: Synthetic oligonucleotide
accaccucaacauagugag

SEQ ID NO: 2388166 - RNA, 19 nt, Artificial Sequence
  Description of Artificial Sequence: Synthetic oligonucleotide
gaaauuaaggacauuccug

SEQ ID NO: 2388167 - RNA, 19 nt, Artificial Sequence
  Description of Artificial Sequence: Synthetic oligonucleotide
uguaacuggccuaugguga

SEQ ID NO: 2388168 - RNA, 19 nt, Artificial Sequence
  Description of Artificial Sequence: Synthetic oligonucleotide
cauuguauuuaauuggcac

SEQ ID NO: 2388169 - RNA, 19 nt, Artificial Sequence
  Description of Artificial Sequence: Synthetic oligonucleotide
agaaauuaaggacauuccu

SEQ ID NO: 2388170 - RNA, 19 nt, Artificial Sequence
  Description of Artificial Sequence: Synthetic oligonucleotide
ucucauauuguucucuugu

SEQ ID NO: 2388171 - RNA, 19 nt, Artificial Sequence
  Description of Artificial Sequence: Synthetic oligonucleotide
aguaacgagucuuagcucu

SEQ ID NO: 2388172 - RNA, 19 nt, Artificial Sequence
  Description of Artificial Sequence: Synthetic oligonucleotide
aaaguaguagagcuugggu

SEQ ID NO: 2388173 - RNA, 19 nt, Artificial Sequence
  Description of Artificial Sequence: Synthetic oligonucleotide
aacagcuguaugucugccc

SEQ ID NO: 2388174 - RNA, 19 nt, Artificial Sequence
  Description of Artificial Sequence: Synthetic oligonucleotide
ucuuuucaaagacagggaa

SEQ ID NO: 2388175 - RNA, 19 nt, Artificial Sequence
  Description of Artificial Sequence: Synthetic oligonucleotide
gaaguaacgagucuuagcu

SEQ ID NO: 2388176 - RNA, 19 nt, Artificial Sequence
  Description of Artificial Sequence: Synthetic oligonucleotide
uauugcugacagcagagug

SEQ ID NO: 2388177 - RNA, 19 nt, Artificial Sequence
  Description of Artificial Sequence: Synthetic oligonucleotide
caaaauggcuucuaacagc

SEQ ID NO: 2388178 - RNA, 19 nt, Artificial Sequence
  Description of Artificial Sequence: Synthetic oligonucleotide
aaaauggcuucuaacagcu

SEQ ID NO: 2388179 - RNA, 19 nt, Artificial Sequence
  Description of Artificial Sequence: Synthetic oligonucleotide
ucuugucucaagaaauucu

SEQ ID NO: 2388180 - RNA, 19 nt, Artificial Sequence
  Description of Artificial Sequence: Synthetic oligonucleotide
ucuugaaugccugaagcag

SEQ ID NO: 2388181 - RNA, 19 nt, Artificial Sequence
  Description of Artificial Sequence: Synthetic oligonucleotide
ucacuacuaaagcauagcu

SEQ ID NO: 2388182 - RNA, 19 nt, Artificial Sequence
  Description of Artificial Sequence: Synthetic oligonucleotide
uuaaauggagccugggcga

SEQ ID NO: 2388183 - RNA, 19 nt, Artificial Sequence
  Description of Artificial Sequence: Synthetic oligonucleotide
uggcacauauugcugacag

SEQ ID NO: 2388184 - RNA, 19 nt, Artificial Sequence
  Description of Artificial Sequence: Synthetic oligonucleotide
aaguaacgagucuuagcuc

SEQ ID NO: 2388185 - RNA, 19 nt, Artificial Sequence
  Description of Artificial Sequence: Synthetic oligonucleotide
cugucacuagaaauuaagg

SEQ ID NO: 2388186 - RNA, 19 nt, Artificial Sequence
  Description of Artificial Sequence: Synthetic oligonucleotide
uauguaacuggccuauggu

SEQ ID NO: 2388187 - RNA, 19 nt, Artificial Sequence
  Description of Artificial Sequence: Synthetic oligonucleotide
ucuggaauguuauguaacu

SEQ ID NO: 2388188 - RNA, 19 nt, Artificial Sequence
  Description of Artificial Sequence: Synthetic oligonucleotide
cauauugcugacagcagag

SEQ ID NO: 2388189 - RNA, 19 nt, Artificial Sequence
  Description of Artificial Sequence: Synthetic oligonucleotide
ggaacuucuuaauuguagg

SEQ ID NO: 2388190 - RNA, 19 nt, Artificial Sequence
  Description of Artificial Sequence: Synthetic oligonucleotide
cauauuguucucuugucuc

SEQ ID NO: 2388191 - RNA, 19 nt, Artificial Sequence
  Description of Artificial Sequence: Synthetic oligonucleotide
uguagccaucuuaagaccu

SEQ ID NO: 2388192 - RNA, 19 nt, Artificial Sequence
  Description of Artificial Sequence: Synthetic oligonucleotide
aacauagugagcaucugga

SEQ ID NO: 2388193 - RNA, 19 nt, Artificial Sequence
  Description of Artificial Sequence: Synthetic oligonucleotide
ucucuucacuacuaaagca

SEQ ID NO: 2388194 - RNA, 19 nt, Artificial Sequence
  Description of Artificial Sequence: Synthetic oligonucleotide
agagcuuggguuugguuuc

SEQ ID NO: 2388195 - RNA, 19 nt, Artificial Sequence
  Description of Artificial Sequence: Synthetic oligonucleotide
ucugccgugaaaguaguag

SEQ ID NO: 2388196 - RNA, 19 nt, Artificial Sequence
  Description of Artificial Sequence: Synthetic oligonucleotide
caucggauugacuccaucc

SEQ ID NO: 2388197 - RNA, 19 nt, Artificial Sequence
  Description of Artificial Sequence: Synthetic oligonucleotide
cuucuuaauuguaggaaug

SEQ ID NO: 2388198 - RNA, 19 nt, Artificial Sequence
  Description of Artificial Sequence: Synthetic oligonucleotide
uuucaaagacuccugggau

SEQ ID NO: 2388199 - RNA, 19 nt, Artificial Sequence
  Description of Artificial Sequence: Synthetic oligonucleotide
ugaaaguaguagagcuugg

SEQ ID NO: 2388200 - RNA, 19 nt, Artificial Sequence
  Description of Artificial Sequence: Synthetic oligonucleotide
auacaugucaauccugagu

SEQ ID NO: 2388201 - RNA, 19 nt, Artificial Sequence
  Description of Artificial Sequence: Synthetic oligonucleotide
uaauuggcacauauugcug

SEQ ID NO: 2388202 - RNA, 19 nt, Artificial Sequence
  Description of Artificial Sequence: Synthetic oligonucleotide
guuuaaauggagccugggc

SEQ ID NO: 2388203 - RNA, 19 nt, Artificial Sequence
  Description of Artificial Sequence: Synthetic oligonucleotide
ucauuguauuuaauuggca

SEQ ID NO: 2388204 - RNA, 19 nt, Artificial Sequence
  Description of Artificial Sequence: Synthetic oligonucleotide
cucucuucacuacuaaagc

SEQ ID NO: 2388205 - RNA, 19 nt, Artificial Sequence
  Description of Artificial Sequence: Synthetic oligonucleotide
ucuugacugugucagcggc

SEQ ID NO: 2388206 - RNA, 19 nt, Artificial Sequence
  Description of Artificial Sequence: Synthetic oligonucleotide
cucaaccaaagguacuugg

SEQ ID NO: 2388207 - RNA, 19 nt, Artificial Sequence
  Description of Artificial Sequence: Synthetic oligonucleotide
aacuucuuaauuguaggaa

SEQ ID NO: 2388208 - RNA, 19 nt, Artificial Sequence
  Description of Artificial Sequence: Synthetic oligonucleotide
aaaauccucuccguggucu

SEQ ID NO: 2388209 - RNA, 19 nt, Artificial Sequence
  Description of Artificial Sequence: Synthetic oligonucleotide
uuggauacucgcuguagcc

SEQ ID NO: 2388210 - RNA, 19 nt, Artificial Sequence
  Description of Artificial Sequence: Synthetic oligonucleotide
ugccgugaaaguaguagag

SEQ ID NO: 2388211 - RNA, 19 nt, Artificial Sequence
  Description of Artificial Sequence: Synthetic oligonucleotide
ucaaccaaagguacuuggu

SEQ ID NO: 2388212 - RNA, 19 nt, Artificial Sequence
  Description of Artificial Sequence: Synthetic oligonucleotide
aguaguagagcuuggguuu

SEQ ID NO: 2388213 - RNA, 19 nt, Artificial Sequence
  Description of Artificial Sequence: Synthetic oligonucleotide
ucaagaaauucuucuucga

SEQ ID NO: 2388214 - RNA, 19 nt, Artificial Sequence
  Description of Artificial Sequence: Synthetic oligonucleotide
acauauugcugacagcaga

SEQ ID NO: 2388215 - RNA, 19 nt, Artificial Sequence
  Description of Artificial Sequence: Synthetic oligonucleotide
gugaaaguaguagagcuug

SEQ ID NO: 2388216 - RNA, 19 nt, Artificial Sequence
  Description of Artificial Sequence: Synthetic oligonucleotide
agaaaauccucuccguggu

SEQ ID NO: 2388217 - RNA, 19 nt, Artificial Sequence
  Description of Artificial Sequence: Synthetic oligonucleotide
auugcugacagcagagugg

SEQ ID NO: 2388218 - RNA, 19 nt, Artificial Sequence
  Description of Artificial Sequence: Synthetic oligonucleotide
ugccauuggauacucgcug

SEQ ID NO: 2388219 - RNA, 19 nt, Artificial Sequence
  Description of Artificial Sequence: Synthetic oligonucleotide
auuccugaccaccucaaca

SEQ ID NO: 2388220 - RNA, 19 nt, Artificial Sequence
  Description of Artificial Sequence: Synthetic oligonucleotide
uuuccaugacuccugguuc

SEQ ID NO: 2388221 - RNA, 19 nt, Artificial Sequence
  Description of Artificial Sequence: Synthetic oligonucleotide
augucugcccaacugagcu

SEQ ID NO: 2388222 - RNA, 19 nt, Artificial Sequence
  Description of Artificial Sequence: Synthetic oligonucleotide
uccguggucuuucaaaauc

SEQ ID NO: 2388223 - RNA, 19 nt, Artificial Sequence
  Description of Artificial Sequence: Synthetic oligonucleotide
ucuuaagaccugcugucac

SEQ ID NO: 2388224 - RNA, 19 nt, Artificial Sequence
  Description of Artificial Sequence: Synthetic oligonucleotide
uuguauuuaauuggcacau

SEQ ID NO: 2388225 - RNA, 19 nt, Artificial Sequence
  Description of Artificial Sequence: Synthetic oligonucleotide
uucacuacuaaagcauagc

SEQ ID NO: 2388226 - RNA, 19 nt, Artificial Sequence
  Description of Artificial Sequence: Synthetic oligonucleotide
uuucuggaauguuauguaa

SEQ ID NO: 2388227 - RNA, 19 nt, Artificial Sequence
  Description of Artificial Sequence: Synthetic oligonucleotide
cuucacuacuaaagcauag

SEQ ID NO: 2388228 - RNA, 19 nt, Artificial Sequence
  Description of Artificial Sequence: Synthetic oligonucleotide
ucaaagacuccugggaucu

SEQ ID NO: 2388229 - RNA, 19 nt, Artificial Sequence
  Description of Artificial Sequence: Synthetic oligonucleotide
aacugagcugguugccaac

SEQ ID NO: 2388230 - RNA, 19 nt, Artificial Sequence
  Description of Artificial Sequence: Synthetic oligonucleotide
auauuguucucuugucuca

SEQ ID NO: 2388231 - RNA, 19 nt, Artificial Sequence
  Description of Artificial Sequence: Synthetic oligonucleotide
gauucuugucuugaaugcc

SEQ ID NO: 2388232 - RNA, 19 nt, Artificial Sequence
  Description of Artificial Sequence: Synthetic oligonucleotide
uagcaucagguccagggug

SEQ ID NO: 2388233 - RNA, 19 nt, Artificial Sequence
  Description of Artificial Sequence: Synthetic oligonucleotide
agggaagucggacagcaca

SEQ ID NO: 2388234 - RNA, 19 nt, Artificial Sequence
  Description of Artificial Sequence: Synthetic oligonucleotide
agcagagugguuuuguuuu

SEQ ID NO: 2388235 - RNA, 19 nt, Artificial Sequence
  Description of Artificial Sequence: Synthetic oligonucleotide
gaauguuauguaacuggcc

SEQ ID NO: 2388236 - RNA, 19 nt, Artificial Sequence
  Description of Artificial Sequence: Synthetic oligonucleotide
cuaacagcuguaugucugc

SEQ ID NO: 2388237 - RNA, 19 nt, Artificial Sequence
  Description of Artificial Sequence: Synthetic oligonucleotide
caucuuaagaccugcuguc

SEQ ID NO: 2388238 - RNA, 19 nt, Artificial Sequence
  Description of Artificial Sequence: Synthetic oligonucleotide
cacuacuaaagcauagcuc

SEQ ID NO: 2388239 - RNA, 19 nt, Artificial Sequence
  Description of Artificial Sequence: Synthetic oligonucleotide
caucaaucucaaccaaagg

SEQ ID NO: 2388240 - RNA, 19 nt, Artificial Sequence
  Description of Artificial Sequence: Synthetic oligonucleotide
aaagcaggcgcccauccuu

SEQ ID NO: 2388241 - RNA, 19 nt, Artificial Sequence
  Description of Artificial Sequence: Synthetic oligonucleotide
ucuucgaacuccacuccug

SEQ ID NO: 2388242 - RNA, 19 nt, Artificial Sequence
  Description of Artificial Sequence: Synthetic oligonucleotide
ugcccaacugagcugguug

SEQ ID NO: 2388243 - RNA, 19 nt, Artificial Sequence
  Description of Artificial Sequence: Synthetic oligonucleotide
aggaacuucuuaauuguag

SEQ ID NO: 2388244 - RNA, 19 nt, Artificial Sequence
  Description of Artificial Sequence: Synthetic oligonucleotide
uucccguacaaguuguacu

SEQ ID NO: 2388245 - RNA, 19 nt, Artificial Sequence
  Description of Artificial Sequence: Synthetic oligonucleotide
ucggauugacuccauccug

SEQ ID NO: 2388246 - RNA, 19 nt, Artificial Sequence
  Description of Artificial Sequence: Synthetic oligonucleotide
ucuucacuacuaaagcaua

SEQ ID NO: 2388247 - RNA, 19 nt, Artificial Sequence
  Description of Artificial Sequence: Synthetic oligonucleotide
ugacacugccauuggauac

SEQ ID NO: 2388248 - RNA, 19 nt, Artificial Sequence
  Description of Artificial Sequence: Synthetic oligonucleotide
uucaaagacuccugggauc

SEQ ID NO: 2388249 - RNA, 19 nt, Artificial Sequence
  Description of Artificial Sequence: Synthetic oligonucleotide
aucggauugacuccauccu

SEQ ID NO: 2388250 - RNA, 19 nt, Artificial Sequence
  Description of Artificial Sequence: Synthetic oligonucleotide
uguuauguaacuggccuau

SEQ ID NO: 2388251 - RNA, 19 nt, Artificial Sequence
  Description of Artificial Sequence: Synthetic oligonucleotide
agccugggcgaucauuagc

SEQ ID NO: 2388252 - RNA, 19 nt, Artificial Sequence
  Description of Artificial Sequence: Synthetic oligonucleotide
caacgagaaaauccucucc

SEQ ID NO: 2388253 - RNA, 19 nt, Artificial Sequence
  Description of Artificial Sequence: Synthetic oligonucleotide
acuaaagcauagcucuccu

SEQ ID NO: 2388254 - RNA, 19 nt, Artificial Sequence
  Description of Artificial Sequence: Synthetic oligonucleotide
aucauuagcaucaggucca

SEQ ID NO: 2388255 - RNA, 19 nt, Artificial Sequence
  Description of Artificial Sequence: Synthetic oligonucleotide
uucucauauuguucucuug

SEQ ID NO: 2388256 - RNA, 19 nt, Artificial Sequence
  Description of Artificial Sequence: Synthetic oligonucleotide
ucuccguggucuuucaaaa

SEQ ID NO: 2388257 - RNA, 19 nt, Artificial Sequence
  Description of Artificial Sequence: Synthetic oligonucleotide
ugugucagcggcauuccau

SEQ ID NO: 2388258 - RNA, 19 nt, Artificial Sequence
  Description of Artificial Sequence: Synthetic oligonucleotide
caaccaaagguacuugguc

SEQ ID NO: 2388259 - RNA, 19 nt, Artificial Sequence
  Description of Artificial Sequence: Synthetic oligonucleotide
acaccuuguuucuggaaug

SEQ ID NO: 2388260 - RNA, 19 nt, Artificial Sequence
  Description of Artificial Sequence: Synthetic oligonucleotide
uugucucaagaaauucuuc

SEQ ID NO: 2388261 - RNA, 19 nt, Artificial Sequence
  Description of Artificial Sequence: Synthetic oligonucleotide
uucuaacagcuguaugucu

SEQ ID NO: 2388262 - RNA, 19 nt, Artificial Sequence
  Description of Artificial Sequence: Synthetic oligonucleotide
cuguagccaucuuaagacc

SEQ ID NO: 2388263 - RNA, 19 nt, Artificial Sequence
  Description of Artificial Sequence: Synthetic oligonucleotide
uucuucgaacuccacuccu

SEQ ID NO: 2388264 - RNA, 19 nt, Artificial Sequence
  Description of Artificial Sequence: Synthetic oligonucleotide
cuucgaacuccacuccugc

SEQ ID NO: 2388265 - RNA, 19 nt, Artificial Sequence
  Description of Artificial Sequence: Synthetic oligonucleotide
cauacaugucaauccugag

SEQ ID NO: 2388266 - RNA, 19 nt, Artificial Sequence
  Description of Artificial Sequence: Synthetic oligonucleotide
cucauauuguucucuuguc

SEQ ID NO: 2388267 - RNA, 19 nt, Artificial Sequence
  Description of Artificial Sequence: Synthetic oligonucleotide
uacuuggcagcaagguagc

SEQ ID NO: 2388268 - RNA, 19 nt, Artificial Sequence
  Description of Artificial Sequence: Synthetic oligonucleotide
agcggcauuccaucaaucu

SEQ ID NO: 2388269 - RNA, 19 nt, Artificial Sequence
  Description of Artificial Sequence: Synthetic oligonucleotide
ucuacaccuuguuucugga

SEQ ID NO: 2388270 - RNA, 19 nt, Artificial Sequence
  Description of Artificial Sequence: Synthetic oligonucleotide
ccaucaaucucaaccaaag

SEQ ID NO: 2388271 - RNA, 19 nt, Artificial Sequence
  Description of Artificial Sequence: Synthetic oligonucleotide
ucucuugucucaagaaauu

SEQ ID NO: 2388272 - RNA, 19 nt, Artificial Sequence
  Description of Artificial Sequence: Synthetic oligonucleotide
guacaaguuguacuuggca

SEQ ID NO: 2388273 - RNA, 19 nt, Artificial Sequence
  Description of Artificial Sequence: Synthetic oligonucleotide
aggggcgcugaguucuucc

SEQ ID NO: 2388274 - RNA, 19 nt, Artificial Sequence
  Description of Artificial Sequence: Synthetic oligonucleotide
ggaauguuauguaacuggc

SEQ ID NO: 2388275 - RNA, 19 nt, Artificial Sequence
  Description of Artificial Sequence: Synthetic oligonucleotide
cuugaaugccugaagcaga

SEQ ID NO: 2388276 - RNA, 19 nt, Artificial Sequence
  Description of Artificial Sequence: Synthetic oligonucleotide
ggaaguaacgagucuuagc

SEQ ID NO: 2388277 - RNA, 19 nt, Artificial Sequence
  Description of Artificial Sequence: Synthetic oligonucleotide
cacauauugcugacagcag

SEQ ID NO: 2388278 - RNA, 19 nt, Artificial Sequence
  Description of Artificial Sequence: Synthetic oligonucleotide
gacauuccugaccaccuca

SEQ ID NO: 2388279 - RNA, 19 nt, Artificial Sequence
  Description of Artificial Sequence: Synthetic oligonucleotide
cuucuucgaacuccacucc

SEQ ID NO: 2388280 - RNA, 19 nt, Artificial Sequence
  Description of Artificial Sequence: Synthetic oligonucleotide
guugcugauucuugucuug

SEQ ID NO: 2388281 - RNA, 19 nt, Artificial Sequence
  Description of Artificial Sequence: Synthetic oligonucleotide
guauuuaauuggcacauau

SEQ ID NO: 2388282 - RNA, 19 nt, Artificial Sequence
  Description of Artificial Sequence: Synthetic oligonucleotide
guuugguuuccaugacucc

SEQ ID NO: 2388283 - RNA, 19 nt, Artificial Sequence
  Description of Artificial Sequence: Synthetic oligonucleotide
ucccguacaaguuguacuu

SEQ ID NO: 2388284 - RNA, 19 nt, Artificial Sequence
  Description of Artificial Sequence: Synthetic oligonucleotide
cugaagcagagggaagucg

SEQ ID NO: 2388285 - RNA, 19 nt, Artificial Sequence
  Description of Artificial Sequence: Synthetic oligonucleotide
gucuugaaugccugaagca

SEQ ID NO: 2388286 - RNA, 19 nt, Artificial Sequence
  Description of Artificial Sequence: Synthetic oligonucleotide
cucuugacugugucagcgg

SEQ ID NO: 2388287 - RNA, 19 nt, Artificial Sequence
  Description of Artificial Sequence: Synthetic oligonucleotide
agcuguaugucugcccaac

SEQ ID NO: 2388288 - RNA, 19 nt, Artificial Sequence
  Description of Artificial Sequence: Synthetic oligonucleotide
caugucaauccugagucuc

SEQ ID NO: 2388289 - RNA, 19 nt, Artificial Sequence
  Description of Artificial Sequence: Synthetic oligonucleotide
accugcugucacuagaaau

SEQ ID NO: 2388290 - RNA, 19 nt, Artificial Sequence
  Description of Artificial Sequence: Synthetic oligonucleotide
caagaaauucuucuucgaa

SEQ ID NO: 2388291 - RNA, 19 nt, Artificial Sequence
  Description of Artificial Sequence: Synthetic oligonucleotide
guaugucugcccaacugag

SEQ ID NO: 2388292 - RNA, 19 nt, Artificial Sequence
  Description of Artificial Sequence: Synthetic oligonucleotide
guaacuggccuauggugac

SEQ ID NO: 2388293 - RNA, 19 nt, Artificial Sequence
  Description of Artificial Sequence: Synthetic oligonucleotide
caccucaacauagugagca

SEQ ID NO: 2388294 - RNA, 19 nt, Artificial Sequence
  Description of Artificial Sequence: Synthetic oligonucleotide
uuuugcaacuucucauauu

SEQ ID NO: 2388295 - RNA, 19 nt, Artificial Sequence
  Description of Artificial Sequence: Synthetic oligonucleotide
gcugucacuagaaauuaag

SEQ ID NO: 2388296 - RNA, 19 nt, Artificial Sequence
  Description of Artificial Sequence: Synthetic oligonucleotide
uccuucccguacaaguugu

SEQ ID NO: 2388297 - RNA, 19 nt, Artificial Sequence
  Description of Artificial Sequence: Synthetic oligonucleotide
gauggcucuugacuguguc

SEQ ID NO: 2388298 - RNA, 19 nt, Artificial Sequence
  Description of Artificial Sequence: Synthetic oligonucleotide
acgagaaaauccucuccgu

SEQ ID NO: 2388299 - RNA, 19 nt, Artificial Sequence
  Description of Artificial Sequence: Synthetic oligonucleotide
cugaguucuuccaccauca

SEQ ID NO: 2388300 - RNA, 19 nt, Artificial Sequence
  Description of Artificial Sequence: Synthetic oligonucleotide
gcacauauugcugacagca

SEQ ID NO: 2388301 - RNA, 19 nt, Artificial Sequence
  Description of Artificial Sequence: Synthetic oligonucleotide
gagucuuagcucucuucac

SEQ ID NO: 2388302 - RNA, 19 nt, Artificial Sequence
  Description of Artificial Sequence: Synthetic oligonucleotide
uuaagaccugcugucacua

SEQ ID NO: 2388303 - RNA, 19 nt, Artificial Sequence
  Description of Artificial Sequence: Synthetic oligonucleotide
cauuggauacucgcuguag

SEQ ID NO: 2388304 - RNA, 19 nt, Artificial Sequence
  Description of Artificial Sequence: Synthetic oligonucleotide
ucagcggcauuccaucaau

SEQ ID NO: 2388305 - RNA, 19 nt, Artificial Sequence
  Description of Artificial Sequence: Synthetic oligonucleotide
agacuccugggaucuaucu

SEQ ID NO: 2388306 - RNA, 19 nt, Artificial Sequence
  Description of Artificial Sequence: Synthetic oligonucleotide
uugcaacuucucauauugu

SEQ ID NO: 2388307 - RNA, 19 nt, Artificial Sequence
  Description of Artificial Sequence: Synthetic oligonucleotide
ucaacauagugagcaucug

SEQ ID NO: 2388308 - RNA, 19 nt, Artificial Sequence
  Description of Artificial Sequence: Synthetic oligonucleotide
aucuaucuacaccuuguuu

SEQ ID NO: 2388309 - RNA, 19 nt, Artificial Sequence
  Description of Artificial Sequence: Synthetic oligonucleotide
ucucaaccaaagguacuug

SEQ ID NO: 2388310 - RNA, 19 nt, Artificial Sequence
  Description of Artificial Sequence: Synthetic oligonucleotide
cucgcuguagccaucuuaa

SEQ ID NO: 2388311 - RNA, 19 nt, Artificial Sequence
  Description of Artificial Sequence: Synthetic oligonucleotide
gcuucuaacagcuguaugu

SEQ ID NO: 2388312 - RNA, 19 nt, Artificial Sequence
  Description of Artificial Sequence: Synthetic oligonucleotide
cuaaagcauagcucuccuc

SEQ ID NO: 2388313 - RNA, 19 nt, Artificial Sequence
  Description of Artificial Sequence: Synthetic oligonucleotide
auguuauguaacuggccua

SEQ ID NO: 2388314 - RNA, 19 nt, Artificial Sequence
  Description of Artificial Sequence: Synthetic oligonucleotide
aggaauguugcugauucuu

SEQ ID NO: 2388315 - RNA, 19 nt, Artificial Sequence
  Description of Artificial Sequence: Synthetic oligonucleotide
agguagcugaggauggcuc

SEQ ID NO: 2388316 - RNA, 19 nt, Artificial Sequence
  Description of Artificial Sequence: Synthetic oligonucleotide
gcucuugacugugucagcg

SEQ ID NO: 2388317 - RNA, 19 nt, Artificial Sequence
  Description of Artificial Sequence: Synthetic oligonucleotide
ugcugucacuagaaauuaa

SEQ ID NO: 2388318 - RNA, 19 nt, Artificial Sequence
  Description of Artificial Sequence: Synthetic oligonucleotide
uagccaucuuaagaccugc

SEQ ID NO: 2388319 - RNA, 19 nt, Artificial Sequence
  Description of Artificial Sequence: Synthetic oligonucleotide
uaggaauguugcugauucu

SEQ ID NO: 2388320 - RNA, 19 nt, Artificial Sequence
  Description of Artificial Sequence: Synthetic oligonucleotide
ccguacaaguuguacuugg

SEQ ID NO: 2388321 - RNA, 19 nt, Artificial Sequence
  Description of Artificial Sequence: Synthetic oligonucleotide
uugacuccauccugccucu

SEQ ID NO: 2388322 - RNA, 19 nt, Artificial Sequence
  Description of Artificial Sequence: Synthetic oligonucleotide
aucuuaagaccugcuguca

SEQ ID NO: 2388323 - RNA, 19 nt, Artificial Sequence
  Description of Artificial Sequence: Synthetic oligonucleotide
gaaaauccucuccgugguc

SEQ ID NO: 2388324 - RNA, 19 nt, Artificial Sequence
  Description of Artificial Sequence: Synthetic oligonucleotide
caggcgcccauccuuuugc

SEQ ID NO: 2388325 - RNA, 19 nt, Artificial Sequence
  Description of Artificial Sequence: Synthetic oligonucleotide
uaucuacaccuuguuucug

SEQ ID NO: 2388326 - RNA, 19 nt, Artificial Sequence
  Description of Artificial Sequence: Synthetic oligonucleotide
cuucccguacaaguuguac

SEQ ID NO: 2388327 - RNA, 19 nt, Artificial Sequence
  Description of Artificial Sequence: Synthetic oligonucleotide
gugucagcggcauuccauc

SEQ ID NO: 2388328 - RNA, 19 nt, Artificial Sequence
  Description of Artificial Sequence: Synthetic oligonucleotide
cuaucuacaccuuguuucu

SEQ ID NO: 2388329 - RNA, 19 nt, Artificial Sequence
  Description of Artificial Sequence: Synthetic oligonucleotide
cugccgugaaaguaguaga

SEQ ID NO: 2388330 - RNA, 19 nt, Artificial Sequence
  Description of Artificial Sequence: Synthetic oligonucleotide
uaguagagcuuggguuugg

SEQ ID NO: 2388331 - RNA, 19 nt, Artificial Sequence
  Description of Artificial Sequence: Synthetic oligonucleotide
aacgagucuuagcucucuu

SEQ ID NO: 2388332 - RNA, 19 nt, Artificial Sequence
  Description of Artificial Sequence: Synthetic oligonucleotide
ggaauguugcugauucuug

SEQ ID NO: 2388333 - RNA, 19 nt, Artificial Sequence
  Description of Artificial Sequence: Synthetic oligonucleotide
ugcugauucuugucuugaa

SEQ ID NO: 2388334 - RNA, 19 nt, Artificial Sequence
  Description of Artificial Sequence: Synthetic oligonucleotide
guaguagagcuuggguuug

SEQ ID NO: 2388335 - RNA, 19 nt, Artificial Sequence
  Description of Artificial Sequence: Synthetic oligonucleotide
auauugcugacagcagagu

SEQ ID NO: 2388336 - RNA, 19 nt, Artificial Sequence
  Description of Artificial Sequence: Synthetic oligonucleotide
augccugaagcagagggaa

SEQ ID NO: 2388337 - RNA, 19 nt, Artificial Sequence
  Description of Artificial Sequence: Synthetic oligonucleotide
ucgcuguagccaucuuaag

SEQ ID NO: 2388338 - RNA, 19 nt, Artificial Sequence
  Description of Artificial Sequence: Synthetic oligonucleotide
uccugggaucuaucuacac

SEQ ID NO: 2388339 - RNA, 19 nt, Artificial Sequence
  Description of Artificial Sequence: Synthetic oligonucleotide
gccaucuuaagaccugcug

SEQ ID NO: 2388340 - RNA, 19 nt, Artificial Sequence
  Description of Artificial Sequence: Synthetic oligonucleotide
ugccaacgagaaaauccuc

SEQ ID NO: 2388341 - RNA, 19 nt, Artificial Sequence
  Description of Artificial Sequence: Synthetic oligonucleotide
gggaucuaucuacaccuug

SEQ ID NO: 2388342 - RNA, 19 nt, Artificial Sequence
  Description of Artificial Sequence: Synthetic oligonucleotide
ugucaauccugagucucuc

SEQ ID NO: 2388343 - RNA, 19 nt, Artificial Sequence
  Description of Artificial Sequence: Synthetic oligonucleotide
caaguuguacuuggcagca

SEQ ID NO: 2388344 - RNA, 19 nt, Artificial Sequence
  Description of Artificial Sequence: Synthetic oligonucleotide
cuugucucaagaaauucuu

SEQ ID NO: 2388345 - RNA, 19 nt, Artificial Sequence
  Description of Artificial Sequence: Synthetic oligonucleotide
ggauugacuccauccugcc

SEQ ID NO: 2388346 - RNA, 19 nt, Artificial Sequence
  Description of Artificial Sequence: Synthetic oligonucleotide
uccaugacuccugguucag

SEQ ID NO: 2388347 - RNA, 19 nt, Artificial Sequence
  Description of Artificial Sequence: Synthetic oligonucleotide
gagccugggcgaucauuag

SEQ ID NO: 2388348 - RNA, 19 nt, Artificial Sequence
  Description of Artificial Sequence: Synthetic oligonucleotide
uaacgagucuuagcucucu

SEQ ID NO: 2388349 - RNA, 19 nt, Artificial Sequence
  Description of Artificial Sequence: Synthetic oligonucleotide
uuggcacauauugcugaca

SEQ ID NO: 2388350 - RNA, 19 nt, Artificial Sequence
  Description of Artificial Sequence: Synthetic oligonucleotide
ugguugccaacgagaaaau

SEQ ID NO: 2388351 - RNA, 19 nt, Artificial Sequence
  Description of Artificial Sequence: Synthetic oligonucleotide
cuugacugugucagcggca

SEQ ID NO: 2388352 - RNA, 19 nt, Artificial Sequence
  Description of Artificial Sequence: Synthetic oligonucleotide
auacucgcuguagccaucu

SEQ ID NO: 2388353 - RNA, 19 nt, Artificial Sequence
  Description of Artificial Sequence: Synthetic oligonucleotide
auccucuccguggucuuuc

SEQ ID NO: 2388354 - RNA, 19 nt, Artificial Sequence
  Description of Artificial Sequence: Synthetic oligonucleotide
cauuccugaccaccucaac

SEQ ID NO: 2388355 - RNA, 19 nt, Artificial Sequence
  Description of Artificial Sequence: Synthetic oligonucleotide
cuugucuugaaugccugaa

SEQ ID NO: 2388356 - RNA, 19 nt, Artificial Sequence
  Description of Artificial Sequence: Synthetic oligonucleotide
uuccucugacucccaggcu

SEQ ID NO: 2388357 - RNA, 19 nt, Artificial Sequence
  Description of Artificial Sequence: Synthetic oligonucleotide
uccugaccaccucaacaua

SEQ ID NO: 2388358 - RNA, 19 nt, Artificial Sequence
  Description of Artificial Sequence: Synthetic oligonucleotide
guuauguaacuggccuaug

SEQ ID NO: 2388359 - RNA, 19 nt, Artificial Sequence
  Description of Artificial Sequence: Synthetic oligonucleotide
cuuaagaccugcugucacu

SEQ ID NO: 2388360 - RNA, 19 nt, Artificial Sequence
  Description of Artificial Sequence: Synthetic oligonucleotide
cuuagcucucuucacuacu

SEQ ID NO: 2388361 - RNA, 19 nt, Artificial Sequence
  Description of Artificial Sequence: Synthetic oligonucleotide
augucaauccugagucucu

SEQ ID NO: 2388362 - RNA, 19 nt, Artificial Sequence
  Description of Artificial Sequence: Synthetic oligonucleotide
cacugccauuggauacucg

SEQ ID NO: 2388363 - RNA, 19 nt, Artificial Sequence
  Description of Artificial Sequence: Synthetic oligonucleotide
gccucugccgugaaaguag

SEQ ID NO: 2388364 - RNA, 19 nt, Artificial Sequence
  Description of Artificial Sequence: Synthetic oligonucleotide
cggauugacuccauccugc

SEQ ID NO: 2388365 - RNA, 19 nt, Artificial Sequence
  Description of Artificial Sequence: Synthetic oligonucleotide
gggaaguaacgagucuuag

SEQ ID NO: 2388366 - RNA, 19 nt, Artificial Sequence
  Description of Artificial Sequence: Synthetic oligonucleotide
agcugaggauggcucuuga

SEQ ID NO: 2388367 - RNA, 19 nt, Artificial Sequence
  Description of Artificial Sequence: Synthetic oligonucleotide
gcgaucauuagcaucaggu

SEQ ID NO: 2388368 - RNA, 19 nt, Artificial Sequence
  Description of Artificial Sequence: Synthetic oligonucleotide
aguagagcuuggguuuggu

SEQ ID NO: 2388369 - RNA, 19 nt, Artificial Sequence
  Description of Artificial Sequence: Synthetic oligonucleotide
agccaucggauugacucca

SEQ ID NO: 2388370 - RNA, 19 nt, Artificial Sequence
  Description of Artificial Sequence: Synthetic oligonucleotide
ggcacauauugcugacagc

SEQ ID NO: 2388371 - RNA, 19 nt, Artificial Sequence
  Description of Artificial Sequence: Synthetic oligonucleotide
gacacugccauuggauacu

SEQ ID NO: 2388372 - RNA, 19 nt, Artificial Sequence
  Description of Artificial Sequence: Synthetic oligonucleotide
ggguuuaaauggagccugg

SEQ ID NO: 2388373 - RNA, 19 nt, Artificial Sequence
  Description of Artificial Sequence: Synthetic oligonucleotide
cgaucauuagcaucagguc

SEQ ID NO: 2388374 - RNA, 19 nt, Artificial Sequence
  Description of Artificial Sequence: Synthetic oligonucleotide
cauuagcaucagguccagg

SEQ ID NO: 2388375 - RNA, 19 nt, Artificial Sequence
  Description of Artificial Sequence: Synthetic oligonucleotide
gcggcauuccaucaaucuc

SEQ ID NO: 2388376 - RNA, 19 nt, Artificial Sequence
  Description of Artificial Sequence: Synthetic oligonucleotide
gauacucgcuguagccauc

SEQ ID NO: 2388377 - RNA, 19 nt, Artificial Sequence
  Description of Artificial Sequence: Synthetic oligonucleotide
uccucuccguggucuuuca

SEQ ID NO: 2388378 - RNA, 19 nt, Artificial Sequence
  Description of Artificial Sequence: Synthetic oligonucleotide
aaguuguacuuggcagcaa

SEQ ID NO: 2388379 - RNA, 19 nt, Artificial Sequence
  Description of Artificial Sequence: Synthetic oligonucleotide
caacugagcugguugccaa

SEQ ID NO: 2388380 - RNA, 19 nt, Artificial Sequence
  Description of Artificial Sequence: Synthetic oligonucleotide
gcccaacugagcugguugc

SEQ ID NO: 2388381 - RNA, 19 nt, Artificial Sequence
  Description of Artificial Sequence: Synthetic oligonucleotide
gagcuuggguuugguuucc

SEQ ID NO: 2388382 - RNA, 19 nt, Artificial Sequence
  Description of Artificial Sequence: Synthetic oligonucleotide
gucggacagcacaggggcg

SEQ ID NO: 2388383 - RNA, 19 nt, Artificial Sequence
  Description of Artificial Sequence: Synthetic oligonucleotide
guaacgagucuuagcucuc

SEQ ID NO: 2388384 - RNA, 19 nt, Artificial Sequence
  Description of Artificial Sequence: Synthetic oligonucleotide
cgaacuccacuccugcugc

SEQ ID NO: 2388385 - RNA, 19 nt, Artificial Sequence
  Description of Artificial Sequence: Synthetic oligonucleotide
gucagcggcauuccaucaa

SEQ ID NO: 2388386 - RNA, 19 nt, Artificial Sequence
  Description of Artificial Sequence: Synthetic oligonucleotide
agggaaguaacgagucuua

SEQ ID NO: 2388387 - RNA, 19 nt, Artificial Sequence
  Description of Artificial Sequence: Synthetic oligonucleotide
ccuuguuucuggaauguua

SEQ ID NO: 2388388 - RNA, 19 nt, Artificial Sequence
  Description of Artificial Sequence: Synthetic oligonucleotide
cggcauuccaucaaucuca

SEQ ID NO: 2388389 - RNA, 19 nt, Artificial Sequence
  Description of Artificial Sequence: Synthetic oligonucleotide
gccugggcgaucauuagca

SEQ ID NO: 2388390 - RNA, 19 nt, Artificial Sequence
  Description of Artificial Sequence: Synthetic oligonucleotide
cagcggcauuccaucaauc

SEQ ID NO: 2388391 - RNA, 19 nt, Artificial Sequence
  Description of Artificial Sequence: Synthetic oligonucleotide
aauccucuccguggucuuu

SEQ ID NO: 2388392 - RNA, 19 nt, Artificial Sequence
  Description of Artificial Sequence: Synthetic oligonucleotide
ccaucuuaagaccugcugu

SEQ ID NO: 2388393 - RNA, 19 nt, Artificial Sequence
  Description of Artificial Sequence: Synthetic oligonucleotide
aagcaggcgcccauccuuu

SEQ ID NO: 2388394 - RNA, 19 nt, Artificial Sequence
  Description of Artificial Sequence: Synthetic oligonucleotide
ucugcccaacugagcuggu

SEQ ID NO: 2388395 - RNA, 19 nt, Artificial Sequence
  Description of Artificial Sequence: Synthetic oligonucleotide
ccgugaaaguaguagagcu

SEQ ID NO: 2388396 - RNA, 19 nt, Artificial Sequence
  Description of Artificial Sequence: Synthetic oligonucleotide
ccuuuugcaacuucucaua

SEQ ID NO: 2388397 - RNA, 19 nt, Artificial Sequence
  Description of Artificial Sequence: Synthetic oligonucleotide
acuggccuauggugacacu

SEQ ID NO: 2388398 - RNA, 19 nt, Artificial Sequence
  Description of Artificial Sequence: Synthetic oligonucleotide
gguagcugaggauggcucu

SEQ ID NO: 2388399 - RNA, 19 nt, Artificial Sequence
  Description of Artificial Sequence: Synthetic oligonucleotide
agccaucuuaagaccugcu

SEQ ID NO: 2388400 - RNA, 19 nt, Artificial Sequence
  Description of Artificial Sequence: Synthetic oligonucleotide
ggcucuugacugugucagc

SEQ ID NO: 2388401 - RNA, 19 nt, Artificial Sequence
  Description of Artificial Sequence: Synthetic oligonucleotide
gcugauucuugucuugaau

SEQ ID NO: 2388402 - RNA, 19 nt, Artificial Sequence
  Description of Artificial Sequence: Synthetic oligonucleotide
cagguccuucccguacaag

SEQ ID NO: 2388403 - RNA, 19 nt, Artificial Sequence
  Description of Artificial Sequence: Synthetic oligonucleotide
gccaacgagaaaauccucu

SEQ ID NO: 2388404 - RNA, 19 nt, Artificial Sequence
  Description of Artificial Sequence: Synthetic oligonucleotide
cacaggggcgcugaguucu

SEQ ID NO: 2388405 - RNA, 19 nt, Artificial Sequence
  Description of Artificial Sequence: Synthetic oligonucleotide
accuuguuucuggaauguu

SEQ ID NO: 2388406 - RNA, 19 nt, Artificial Sequence
  Description of Artificial Sequence: Synthetic oligonucleotide
aggcugcaggaacuucuua

SEQ ID NO: 2388407 - RNA, 19 nt, Artificial Sequence
  Description of Artificial Sequence: Synthetic oligonucleotide
gcaucuggagguggcuucc

SEQ ID NO: 2388408 - RNA, 19 nt, Artificial Sequence
  Description of Artificial Sequence: Synthetic oligonucleotide
cgcuguagccaucuuaaga

SEQ ID NO: 2388409 - RNA, 19 nt, Artificial Sequence
  Description of Artificial Sequence: Synthetic oligonucleotide
ccaccucaacauagugagc

SEQ ID NO: 2388410 - RNA, 19 nt, Artificial Sequence
  Description of Artificial Sequence: Synthetic oligonucleotide
gggcgcugaguucuuccac

SEQ ID NO: 2388411 - RNA, 19 nt, Artificial Sequence
  Description of Artificial Sequence: Synthetic oligonucleotide
gccauuggauacucgcugu

SEQ ID NO: 2388412 - RNA, 19 nt, Artificial Sequence
  Description of Artificial Sequence: Synthetic oligonucleotide
agccagcagccaucggauu

SEQ ID NO: 2388413 - RNA, 19 nt, Artificial Sequence
  Description of Artificial Sequence: Synthetic oligonucleotide
gcgcugaguucuuccacca

SEQ ID NO: 2388414 - RNA, 19 nt, Artificial Sequence
  Description of Artificial Sequence: Synthetic oligonucleotide
cccaacugagcugguugcc

SEQ ID NO: 2388415 - RNA, 19 nt, Artificial Sequence
  Description of Artificial Sequence: Synthetic oligonucleotide
ggcauuccaucaaucucaa

SEQ ID NO: 2388416 - RNA, 19 nt, Artificial Sequence
  Description of Artificial Sequence: Synthetic oligonucleotide
agcagccaucggauugacu

SEQ ID NO: 2388417 - RNA, 19 nt, Artificial Sequence
  Description of Artificial Sequence: Synthetic oligonucleotide
ccaucggauugacuccauc

SEQ ID NO: 2388418 - RNA, 19 nt, Artificial Sequence
  Description of Artificial Sequence: Synthetic oligonucleotide
cccguacaaguuguacuug

SEQ ID NO: 2388419 - RNA, 19 nt, Artificial Sequence
  Description of Artificial Sequence: Synthetic oligonucleotide
gacucccaggcugcaggaa

SEQ ID NO: 2388420 - RNA, 19 nt, Artificial Sequence
  Description of Artificial Sequence: Synthetic oligonucleotide
cagcagccaucggauugac

SEQ ID NO: 2388421 - RNA, 19 nt, Artificial Sequence
  Description of Artificial Sequence: Synthetic oligonucleotide
caucagguccagggugcca

SEQ ID NO: 2388422 - RNA, 19 nt, Artificial Sequence
  Description of Artificial Sequence: Synthetic oligonucleotide
cucugccgugaaaguagua

SEQ ID NO: 2388423 - RNA, 19 nt, Artificial Sequence
  Description of Artificial Sequence: Synthetic oligonucleotide
cagcaagguagcugaggau

SEQ ID NO: 2388424 - RNA, 19 nt, Artificial Sequence
  Description of Artificial Sequence: Synthetic oligonucleotide
ggcgcccauccuuuugcaa

SEQ ID NO: 2388425 - RNA, 19 nt, Artificial Sequence
  Description of Artificial Sequence: Synthetic oligonucleotide
ccagcagccaucggauuga

SEQ ID NO: 2388426 - RNA, 19 nt, Artificial Sequence
  Description of Artificial Sequence: Synthetic oligonucleotide
guagcugaggauggcucuu

SEQ ID NO: 2388427 - RNA, 19 nt, Artificial Sequence
  Description of Artificial Sequence: Synthetic oligonucleotide
auggagccugggcgaucau

SEQ ID NO: 2388428 - RNA, 19 nt, Artificial Sequence
  Description of Artificial Sequence: Synthetic oligonucleotide
cuauggugacacugccauu

SEQ ID NO: 2388429 - RNA, 19 nt, Artificial Sequence
  Description of Artificial Sequence: Synthetic oligonucleotide
caggggcgcugaguucuuc

SEQ ID NO: 2388430 - RNA, 19 nt, Artificial Sequence
  Description of Artificial Sequence: Synthetic oligonucleotide
cgugaaaguaguagagcuu

SEQ ID NO: 2388431 - RNA, 19 nt, Artificial Sequence
  Description of Artificial Sequence: Synthetic oligonucleotide
ccucugccgugaaaguagu

SEQ ID NO: 2388432 - RNA, 19 nt, Artificial Sequence
  Description of Artificial Sequence: Synthetic oligonucleotide
ggauggcucuugacugugu

SEQ ID NO: 2388433 - RNA, 19 nt, Artificial Sequence
  Description of Artificial Sequence: Synthetic oligonucleotide
ccucuccguggucuuucaa

SEQ ID NO: 2388434 - RNA, 19 nt, Artificial Sequence
  Description of Artificial Sequence: Synthetic oligonucleotide
ccugggcgaucauuagcau

SEQ ID NO: 2388435 - RNA, 19 nt, Artificial Sequence
  Description of Artificial Sequence: Synthetic oligonucleotide
cugcccaacugagcugguu

SEQ ID NO: 2388436 - RNA, 19 nt, Artificial Sequence
  Description of Artificial Sequence: Synthetic oligonucleotide
gccaucggauugacuccau

SEQ ID NO: 2388437 - RNA, 19 nt, Artificial Sequence
  Description of Artificial Sequence: Synthetic oligonucleotide
gcccauccuuuugcaacuu

SEQ ID NO: 2388438 - RNA, 19 nt, Artificial Sequence
  Description of Artificial Sequence: Synthetic oligonucleotide
acuucuauccacuuuaucc

SEQ ID NO: 2388439 - RNA, 19 nt, Artificial Sequence
  Description of Artificial Sequence: Synthetic oligonucleotide
aacaugguucacuaaagcc

SEQ ID NO: 2388440 - RNA, 19 nt, Artificial Sequence
  Description of Artificial Sequence: Synthetic oligonucleotide
aaguauugucaucuaaccc

SEQ ID NO: 2388441 - RNA, 19 nt, Artificial Sequence
  Description of Artificial Sequence: Synthetic oligonucleotide
agugcugccacauaauccc

SEQ ID NO: 2388442 - RNA, 19 nt, Artificial Sequence
  Description of Artificial Sequence: Synthetic oligonucleotide
ugggacuuaaaucacaugc

SEQ ID NO: 2388443 - RNA, 19 nt, Artificial Sequence
  Description of Artificial Sequence: Synthetic oligonucleotide
uccaauugcauauauuggg

SEQ ID NO: 2388444 - RNA, 19 nt, Artificial Sequence
  Description of Artificial Sequence: Synthetic oligonucleotide
uaaacagucacacacggcu

SEQ ID NO: 2388445 - RNA, 19 nt, Artificial Sequence
  Description of Artificial Sequence: Synthetic oligonucleotide
acauaaucccacuuguugc

SEQ ID NO: 2388446 - RNA, 19 nt, Artificial Sequence
  Description of Artificial Sequence: Synthetic oligonucleotide
aaagauuuugcccaucacu

SEQ ID NO: 2388447 - RNA, 19 nt, Artificial Sequence
  Description of Artificial Sequence: Synthetic oligonucleotide
ucuucguugacccauuucc

SEQ ID NO: 2388448 - RNA, 19 nt, Artificial Sequence
  Description of Artificial Sequence: Synthetic oligonucleotide
aguauugucaucuaacccu

SEQ ID NO: 2388449 - RNA, 19 nt, Artificial Sequence
  Description of Artificial Sequence: Synthetic oligonucleotide
ugguuaaacagucacacac

SEQ ID NO: 2388450 - RNA, 19 nt, Artificial Sequence
  Description of Artificial Sequence: Synthetic oligonucleotide
cauacaagcaaccauggag

SEQ ID NO: 2388451 - RNA, 19 nt, Artificial Sequence
  Description of Artificial Sequence: Synthetic oligonucleotide
aaugcuuccacuguguuga

SEQ ID NO: 2388452 - RNA, 19 nt, Artificial Sequence
  Description of Artificial Sequence: Synthetic oligonucleotide
cugacauucaacaggacag

SEQ ID NO: 2388453 - RNA, 19 nt, Artificial Sequence
  Description of Artificial Sequence: Synthetic oligonucleotide
uucaucauccacuuauuag

SEQ ID NO: 2388454 - RNA, 19 nt, Artificial Sequence
  Description of Artificial Sequence: Synthetic oligonucleotide
ucaucauccacuuauuagu

SEQ ID NO: 2388455 - RNA, 19 nt, Artificial Sequence
  Description of Artificial Sequence: Synthetic oligonucleotide
aucacaugcagucaaccac

SEQ ID NO: 2388456 - RNA, 19 nt, Artificial Sequence
  Description of Artificial Sequence: Synthetic oligonucleotide
uucacuaacgccauugccu

SEQ ID NO: 2388457 - RNA, 19 nt, Artificial Sequence
  Description of Artificial Sequence: Synthetic oligonucleotide
ucaucuaacccuccaauug

SEQ ID NO: 2388458 - RNA, 19 nt, Artificial Sequence
  Description of Artificial Sequence: Synthetic oligonucleotide
auuagugagaggaucaaac

SEQ ID NO: 2388459 - RNA, 19 nt, Artificial Sequence
  Description of Artificial Sequence: Synthetic oligonucleotide
acaaucaaaaugcuggcug

SEQ ID NO: 2388460 - RNA, 19 nt, Artificial Sequence
  Description of Artificial Sequence: Synthetic oligonucleotide
aacagucacacacggcuac

SEQ ID NO: 2388461 - RNA, 19 nt, Artificial Sequence
  Description of Artificial Sequence: Synthetic oligonucleotide
uucacuaaagccacagagc

SEQ ID NO: 2388462 - RNA, 19 nt, Artificial Sequence
  Description of Artificial Sequence: Synthetic oligonucleotide
aagauuuugcccaucacug

SEQ ID NO: 2388463 - RNA, 19 nt, Artificial Sequence
  Description of Artificial Sequence: Synthetic oligonucleotide
ugcuucgagggucauaccg

SEQ ID NO: 2388464 - RNA, 19 nt, Artificial Sequence
  Description of Artificial Sequence: Synthetic oligonucleotide
auaaacaugguucacuaaa

SEQ ID NO: 2388465 - RNA, 19 nt, Artificial Sequence
  Description of Artificial Sequence: Synthetic oligonucleotide
ucaacggagcucaaagggg

SEQ ID NO: 2388466 - RNA, 19 nt, Artificial Sequence
  Description of Artificial Sequence: Synthetic oligonucleotide
cauuaguggacccaugacc

SEQ ID NO: 2388467 - RNA, 19 nt, Artificial Sequence
  Description of Artificial Sequence: Synthetic oligonucleotide
acuguugcgaucccuacuc

SEQ ID NO: 2388468 - RNA, 19 nt, Artificial Sequence
  Description of Artificial Sequence: Synthetic oligonucleotide
uacuccacuggucagauuc

SEQ ID NO: 2388469 - RNA, 19 nt, Artificial Sequence
  Description of Artificial Sequence: Synthetic oligonucleotide
augaccuacaucucggauc

SEQ ID NO: 2388470 - RNA, 19 nt, Artificial Sequence
  Description of Artificial Sequence: Synthetic oligonucleotide
auuaugaccaccaacggca

SEQ ID NO: 2388471 - RNA, 19 nt, Artificial Sequence
  Description of Artificial Sequence: Synthetic oligonucleotide
uucuacacuggacaaggag

SEQ ID NO: 2388472 - RNA, 19 nt, Artificial Sequence
  Description of Artificial Sequence: Synthetic oligonucleotide
cucaacggagcucaaaggg

SEQ ID NO: 2388473 - RNA, 19 nt, Artificial Sequence
  Description of Artificial Sequence: Synthetic oligonucleotide
ucuugguguucauugauug

SEQ ID NO: 2388474 - RNA, 19 nt, Artificial Sequence
  Description of Artificial Sequence: Synthetic oligonucleotide
agagccaacgccuccacgg

SEQ ID NO: 2388475 - RNA, 19 nt, Artificial Sequence
  Description of Artificial Sequence: Synthetic oligonucleotide
aauuccucgccucuuggug

SEQ ID NO: 2388476 - RNA, 19 nt, Artificial Sequence
  Description of Artificial Sequence: Synthetic oligonucleotide
cacugcauaaacaugguuc

SEQ ID NO: 2388477 - RNA, 19 nt, Artificial Sequence
  Description of Artificial Sequence: Synthetic oligonucleotide
ugaccuacaucucggaucu

SEQ ID NO: 2388478 - RNA, 19 nt, Artificial Sequence
  Description of Artificial Sequence: Synthetic oligonucleotide
ggaguuaucaucaaaacca

SEQ ID NO: 2388479 - RNA, 19 nt, Artificial Sequence
  Description of Artificial Sequence: Synthetic oligonucleotide
uccacuuuauccagauggg

SEQ ID NO: 2388480 - RNA, 19 nt, Artificial Sequence
  Description of Artificial Sequence: Synthetic oligonucleotide
uaugcauugccauuaugac

SEQ ID NO: 2388481 - RNA, 19 nt, Artificial Sequence
  Description of Artificial Sequence: Synthetic oligonucleotide
aacauacaagcaaccaugg

SEQ ID NO: 2388482 - RNA, 19 nt, Artificial Sequence
  Description of Artificial Sequence: Synthetic oligonucleotide
aguucacuaacgccauugc

SEQ ID NO: 2388483 - RNA, 19 nt, Artificial Sequence
  Description of Artificial Sequence: Synthetic oligonucleotide
uuagugagaggaucaaaca

SEQ ID NO: 2388484 - RNA, 19 nt, Artificial Sequence
  Description of Artificial Sequence: Synthetic oligonucleotide
acggcaaagauuuugccca

SEQ ID NO: 2388485 - RNA, 19 nt, Artificial Sequence
  Description of Artificial Sequence: Synthetic oligonucleotide
aaaugcuuccacuguguug

SEQ ID NO: 2388486 - RNA, 19 nt, Artificial Sequence
  Description of Artificial Sequence: Synthetic oligonucleotide
acuuauuagugagaggauc

SEQ ID NO: 2388487 - RNA, 19 nt, Artificial Sequence
  Description of Artificial Sequence: Synthetic oligonucleotide
ugagacacagguccaacca

SEQ ID NO: 2388488 - RNA, 19 nt, Artificial Sequence
  Description of Artificial Sequence: Synthetic oligonucleotide
guuaucaucaaaaccacca

SEQ ID NO: 2388489 - RNA, 19 nt, Artificial Sequence
  Description of Artificial Sequence: Synthetic oligonucleotide
aaccagcucccacuuauuc

SEQ ID NO: 2388490 - RNA, 19 nt, Artificial Sequence
  Description of Artificial Sequence: Synthetic oligonucleotide
caauugcauauauugggcc

SEQ ID NO: 2388491 - RNA, 19 nt, Artificial Sequence
  Description of Artificial Sequence: Synthetic oligonucleotide
agggucauaccgcucaacg

SEQ ID NO: 2388492 - RNA, 19 nt, Artificial Sequence
  Description of Artificial Sequence: Synthetic oligonucleotide
agugagaggaucaaacauc

SEQ ID NO: 2388493 - RNA, 19 nt, Artificial Sequence
  Description of Artificial Sequence: Synthetic oligonucleotide
auccagauggggaugauac

SEQ ID NO: 2388494 - RNA, 19 nt, Artificial Sequence
  Description of Artificial Sequence: Synthetic oligonucleotide
uuccuaaguguucauugcc

SEQ ID NO: 2388495 - RNA, 19 nt, Artificial Sequence
  Description of Artificial Sequence: Synthetic oligonucleotide
cuacacuggacaaggaggc

SEQ ID NO: 2388496 - RNA, 19 nt, Artificial Sequence
  Description of Artificial Sequence: Synthetic oligonucleotide
uguugagguaugcauugcc

SEQ ID NO: 2388497 - RNA, 19 nt, Artificial Sequence
  Description of Artificial Sequence: Synthetic oligonucleotide
ucaaaggggaguuaucauc

SEQ ID NO: 2388498 - RNA, 19 nt, Artificial Sequence
  Description of Artificial Sequence: Synthetic oligonucleotide
acauuaguggacccaugac

SEQ ID NO: 2388499 - RNA, 19 nt, Artificial Sequence
  Description of Artificial Sequence: Synthetic oligonucleotide
cauuaugaccaccaacggc

SEQ ID NO: 2388500 - RNA, 19 nt, Artificial Sequence
  Description of Artificial Sequence: Synthetic oligonucleotide
ucacuaacgccauugccug

SEQ ID NO: 2388501 - RNA, 19 nt, Artificial Sequence
  Description of Artificial Sequence: Synthetic oligonucleotide
ucaucaaaaccaccaacaa

SEQ ID NO: 2388502 - RNA, 19 nt, Artificial Sequence
  Description of Artificial Sequence: Synthetic oligonucleotide
caucuaacccuccaauugc

SEQ ID NO: 2388503 - RNA, 19 nt, Artificial Sequence
  Description of Artificial Sequence: Synthetic oligonucleotide
uccuaaguguucauugcca

SEQ ID NO: 2388504 - RNA, 19 nt, Artificial Sequence
  Description of Artificial Sequence: Synthetic oligonucleotide
uuaaacagucacacacggc

SEQ ID NO: 2388505 - RNA, 19 nt, Artificial Sequence
  Description of Artificial Sequence: Synthetic oligonucleotide
ucacacacggcuacaccgg

SEQ ID NO: 2388506 - RNA, 19 nt, Artificial Sequence
  Description of Artificial Sequence: Synthetic oligonucleotide
ugugguugcauuguugcug

SEQ ID NO: 2388507 - RNA, 19 nt, Artificial Sequence
  Description of Artificial Sequence: Synthetic oligonucleotide
acaguauugacagucacaa

SEQ ID NO: 2388508 - RNA, 19 nt, Artificial Sequence
  Description of Artificial Sequence: Synthetic oligonucleotide
auuaguggacccaugaccu

SEQ ID NO: 2388509 - RNA, 19 nt, Artificial Sequence
  Description of Artificial Sequence: Synthetic oligonucleotide
cuuccuaaguguucauugc

SEQ ID NO: 2388510 - RNA, 19 nt, Artificial Sequence
  Description of Artificial Sequence: Synthetic oligonucleotide
ucauuggugccacuguacu

SEQ ID NO: 2388511 - RNA, 19 nt, Artificial Sequence
  Description of Artificial Sequence: Synthetic oligonucleotide
agucacacacggcuacacc

SEQ ID NO: 2388512 - RNA, 19 nt, Artificial Sequence
  Description of Artificial Sequence: Synthetic oligonucleotide
augauaccuuucuacacug

SEQ ID NO: 2388513 - RNA, 19 nt, Artificial Sequence
  Description of Artificial Sequence: Synthetic oligonucleotide
gauaccuuucuacacugga

SEQ ID NO: 2388514 - RNA, 19 nt, Artificial Sequence
  Description of Artificial Sequence: Synthetic oligonucleotide
ugacccauuuccuugacuu

SEQ ID NO: 2388515 - RNA, 19 nt, Artificial Sequence
  Description of Artificial Sequence: Synthetic oligonucleotide
aggccaaagcaauuccucg

SEQ ID NO: 2388516 - RNA, 19 nt, Artificial Sequence
  Description of Artificial Sequence: Synthetic oligonucleotide
uaucucuccacaucacuga

SEQ ID NO: 2388517 - RNA, 19 nt, Artificial Sequence
  Description of Artificial Sequence: Synthetic oligonucleotide
uaaagccacagagccaacg

SEQ ID NO: 2388518 - RNA, 19 nt, Artificial Sequence
  Description of Artificial Sequence: Synthetic oligonucleotide
ucuggcugguuaaacaguc

SEQ ID NO: 2388519 - RNA, 19 nt, Artificial Sequence
  Description of Artificial Sequence: Synthetic oligonucleotide
ugauaccuuucuacacugg

SEQ ID NO: 2388520 - RNA, 19 nt, Artificial Sequence
  Description of Artificial Sequence: Synthetic oligonucleotide
ugucauaucucuccacauc

SEQ ID NO: 2388521 - RNA, 19 nt, Artificial Sequence
  Description of Artificial Sequence: Synthetic oligonucleotide
acuaaagccacagagccaa

SEQ ID NO: 2388522 - RNA, 19 nt, Artificial Sequence
  Description of Artificial Sequence: Synthetic oligonucleotide
aguuaucaucaaaaccacc

SEQ ID NO: 2388523 - RNA, 19 nt, Artificial Sequence
  Description of Artificial Sequence: Synthetic oligonucleotide
acuuguugcuucgaggguc

SEQ ID NO: 2388524 - RNA, 19 nt, Artificial Sequence
  Description of Artificial Sequence: Synthetic oligonucleotide
acccaugaccuacaucucg

SEQ ID NO: 2388525 - RNA, 19 nt, Artificial Sequence
  Description of Artificial Sequence: Synthetic oligonucleotide
ugcauaaacaugguucacu

SEQ ID NO: 2388526 - RNA, 19 nt, Artificial Sequence
  Description of Artificial Sequence: Synthetic oligonucleotide
gaagcaaguauugucaucu

SEQ ID NO: 2388527 - RNA, 19 nt, Artificial Sequence
  Description of Artificial Sequence: Synthetic oligonucleotide
auccacuuauuagugagag

SEQ ID NO: 2388528 - RNA, 19 nt, Artificial Sequence
  Description of Artificial Sequence: Synthetic oligonucleotide
accaccaacaacauacaag

SEQ ID NO: 2388529 - RNA, 19 nt, Artificial Sequence
  Description of Artificial Sequence: Synthetic oligonucleotide
ggacuuaaaucacaugcag

SEQ ID NO: 2388530 - RNA, 19 nt, Artificial Sequence
  Description of Artificial Sequence: Synthetic oligonucleotide
uucauuggugccacuguac

SEQ ID NO: 2388531 - RNA, 19 nt, Artificial Sequence
  Description of Artificial Sequence: Synthetic oligonucleotide
guugcuucgagggucauac

SEQ ID NO: 2388532 - RNA, 19 nt, Artificial Sequence
  Description of Artificial Sequence: Synthetic oligonucleotide
caaaggggaguuaucauca

SEQ ID NO: 2388533 - RNA, 19 nt, Artificial Sequence
  Description of Artificial Sequence: Synthetic oligonucleotide
gaugauaccuuucuacacu

SEQ ID NO: 2388534 - RNA, 19 nt, Artificial Sequence
  Description of Artificial Sequence: Synthetic oligonucleotide
acaacagcugacauucaac

SEQ ID NO: 2388535 - RNA, 19 nt, Artificial Sequence
  Description of Artificial Sequence: Synthetic oligonucleotide
ggaucaaaugcuuccacug

SEQ ID NO: 2388536 - RNA, 19 nt, Artificial Sequence
  Description of Artificial Sequence: Synthetic oligonucleotide
ucguugacccauuuccuug

SEQ ID NO: 2388537 - RNA, 19 nt, Artificial Sequence
  Description of Artificial Sequence: Synthetic oligonucleotide
uggacaaggaggccacucc

SEQ ID NO: 2388538 - RNA, 19 nt, Artificial Sequence
  Description of Artificial Sequence: Synthetic oligonucleotide
uggaucaaaugcuuccacu

SEQ ID NO: 2388539 - RNA, 19 nt, Artificial Sequence
  Description of Artificial Sequence: Synthetic oligonucleotide
uguucauuggugccacugu

SEQ ID NO: 2388540 - RNA, 19 nt, Artificial Sequence
  Description of Artificial Sequence: Synthetic oligonucleotide
cuugguguucauugauugc

SEQ ID NO: 2388541 - RNA, 19 nt, Artificial Sequence
  Description of Artificial Sequence: Synthetic oligonucleotide
uuuauccagauggggauga

SEQ ID NO: 2388542 - RNA, 19 nt, Artificial Sequence
  Description of Artificial Sequence: Synthetic oligonucleotide
ucuauccacuuuauccaga

SEQ ID NO: 2388543 - RNA, 19 nt, Artificial Sequence
  Description of Artificial Sequence: Synthetic oligonucleotide
cuuauucagcacuggauca

SEQ ID NO: 2388544 - RNA, 19 nt, Artificial Sequence
  Description of Artificial Sequence: Synthetic oligonucleotide
gaguucacuaacgccauug

SEQ ID NO: 2388545 - RNA, 19 nt, Artificial Sequence
  Description of Artificial Sequence: Synthetic oligonucleotide
acaaggaggccacuccguc

SEQ ID NO: 2388546 - RNA, 19 nt, Artificial Sequence
  Description of Artificial Sequence: Synthetic oligonucleotide
auaccuuucuacacuggac

SEQ ID NO: 2388547 - RNA, 19 nt, Artificial Sequence
  Description of Artificial Sequence: Synthetic oligonucleotide
ugccacuguacuccacugg

SEQ ID NO: 2388548 - RNA, 19 nt, Artificial Sequence
  Description of Artificial Sequence: Synthetic oligonucleotide
auugccauuaugaccacca

SEQ ID NO: 2388549 - RNA, 19 nt, Artificial Sequence
  Description of Artificial Sequence: Synthetic oligonucleotide
auggggaugauaccuuucu

SEQ ID NO: 2388550 - RNA, 19 nt, Artificial Sequence
  Description of Artificial Sequence: Synthetic oligonucleotide
uuccuugacuucuauccac

SEQ ID NO: 2388551 - RNA, 19 nt, Artificial Sequence
  Description of Artificial Sequence: Synthetic oligonucleotide
guucacuaacgccauugcc

SEQ ID NO: 2388552 - RNA, 19 nt, Artificial Sequence
  Description of Artificial Sequence: Synthetic oligonucleotide
uugagguaugcauugccau

SEQ ID NO: 2388553 - RNA, 19 nt, Artificial Sequence
  Description of Artificial Sequence: Synthetic oligonucleotide
caacagcugacauucaaca

SEQ ID NO: 2388554 - RNA, 19 nt, Artificial Sequence
  Description of Artificial Sequence: Synthetic oligonucleotide
cacuuuauccagaugggga

SEQ ID NO: 2388555 - RNA, 19 nt, Artificial Sequence
  Description of Artificial Sequence: Synthetic oligonucleotide
auaucucuccacaucacug

SEQ ID NO: 2388556 - RNA, 19 nt, Artificial Sequence
  Description of Artificial Sequence: Synthetic oligonucleotide
ggacccaugaccuacaucu

SEQ ID NO: 2388557 - RNA, 19 nt, Artificial Sequence
  Description of Artificial Sequence: Synthetic oligonucleotide
accuacaucucggaucugg

SEQ ID NO: 2388558 - RNA, 19 nt, Artificial Sequence
  Description of Artificial Sequence: Synthetic oligonucleotide
uccuugacuucuauccacu

SEQ ID NO: 2388559 - RNA, 19 nt, Artificial Sequence
  Description of Artificial Sequence: Synthetic oligonucleotide
gguuaaacagucacacacg

SEQ ID NO: 2388560 - RNA, 19 nt, Artificial Sequence
  Description of Artificial Sequence: Synthetic oligonucleotide
uguugcgaucccuacucca

SEQ ID NO: 2388561 - RNA, 19 nt, Artificial Sequence
  Description of Artificial Sequence: Synthetic oligonucleotide
ccacuuguugcuucgaggg

SEQ ID NO: 2388562 - RNA, 19 nt, Artificial Sequence
  Description of Artificial Sequence: Synthetic oligonucleotide
ccaauugcauauauugggc

SEQ ID NO: 2388563 - RNA, 19 nt, Artificial Sequence
  Description of Artificial Sequence: Synthetic oligonucleotide
gcuuccuaaguguucauug

SEQ ID NO: 2388564 - RNA, 19 nt, Artificial Sequence
  Description of Artificial Sequence: Synthetic oligonucleotide
aacgccuccacggggagug

SEQ ID NO: 2388565 - RNA, 19 nt, Artificial Sequence
  Description of Artificial Sequence: Synthetic oligonucleotide
caggacaguauugacaguc

SEQ ID NO: 2388566 - RNA, 19 nt, Artificial Sequence
  Description of Artificial Sequence: Synthetic oligonucleotide
agauuuugcccaucacugu

SEQ ID NO: 2388567 - RNA, 19 nt, Artificial Sequence
  Description of Artificial Sequence: Synthetic oligonucleotide
ucccacuuauucagcacug

SEQ ID NO: 2388568 - RNA, 19 nt, Artificial Sequence
  Description of Artificial Sequence: Synthetic oligonucleotide
acaugacuucuucagcaca

SEQ ID NO: 2388569 - RNA, 19 nt, Artificial Sequence
  Description of Artificial Sequence: Synthetic oligonucleotide
aggccacuccgucauugcc

SEQ ID NO: 2388570 - RNA, 19 nt, Artificial Sequence
  Description of Artificial Sequence: Synthetic oligonucleotide
ugaagcaaguauugucauc

SEQ ID NO: 2388571 - RNA, 19 nt, Artificial Sequence
  Description of Artificial Sequence: Synthetic oligonucleotide
aaggggaguuaucaucaaa

SEQ ID NO: 2388572 - RNA, 19 nt, Artificial Sequence
  Description of Artificial Sequence: Synthetic oligonucleotide
ugcugggacuuaaaucaca

SEQ ID NO: 2388573 - RNA, 19 nt, Artificial Sequence
  Description of Artificial Sequence: Synthetic oligonucleotide
accaacggcaaagauuuug

SEQ ID NO: 2388574 - RNA, 19 nt, Artificial Sequence
  Description of Artificial Sequence: Synthetic oligonucleotide
agugagacacagguccaac

SEQ ID NO: 2388575 - RNA, 19 nt, Artificial Sequence
  Description of Artificial Sequence: Synthetic oligonucleotide
ucucggaucuggcugguua

SEQ ID NO: 2388576 - RNA, 19 nt, Artificial Sequence
  Description of Artificial Sequence: Synthetic oligonucleotide
agcaaguauugucaucuaa

SEQ ID NO: 2388577 - RNA, 19 nt, Artificial Sequence
  Description of Artificial Sequence: Synthetic oligonucleotide
caaagcaauuccucgccuc

SEQ ID NO: 2388578 - RNA, 19 nt, Artificial Sequence
  Description of Artificial Sequence: Synthetic oligonucleotide
auuccucgccucuuggugu

SEQ ID NO: 2388579 - RNA, 19 nt, Artificial Sequence
  Description of Artificial Sequence: Synthetic oligonucleotide
accggcaccagcucugcag

SEQ ID NO: 2388580 - RNA, 19 nt, Artificial Sequence
  Description of Artificial Sequence: Synthetic oligonucleotide
aucccuacuccaccucugg

SEQ ID NO: 2388581 - RNA, 19 nt, Artificial Sequence
  Description of Artificial Sequence: Synthetic oligonucleotide
caacggcaaagauuuugcc

SEQ ID NO: 2388582 - RNA, 19 nt, Artificial Sequence
  Description of Artificial Sequence: Synthetic oligonucleotide
uacaccggcaccagcucug

SEQ ID NO: 2388583 - RNA, 19 nt, Artificial Sequence
  Description of Artificial Sequence: Synthetic oligonucleotide
agugguaagugcugccaca

SEQ ID NO: 2388584 - RNA, 19 nt, Artificial Sequence
  Description of Artificial Sequence: Synthetic oligonucleotide
ggggaugauaccuuucuac

SEQ ID NO: 2388585 - RNA, 19 nt, Artificial Sequence
  Description of Artificial Sequence: Synthetic oligonucleotide
gugagacacagguccaacc

SEQ ID NO: 2388586 - RNA, 19 nt, Artificial Sequence
  Description of Artificial Sequence: Synthetic oligonucleotide
cauccaucaccugugguug

SEQ ID NO: 2388587 - RNA, 19 nt, Artificial Sequence
  Description of Artificial Sequence: Synthetic oligonucleotide
auccaucaccugugguugc

SEQ ID NO: 2388588 - RNA, 19 nt, Artificial Sequence
  Description of Artificial Sequence: Synthetic oligonucleotide
ucccacuuguugcuucgag

SEQ ID NO: 2388589 - RNA, 19 nt, Artificial Sequence
  Description of Artificial Sequence: Synthetic oligonucleotide
ucccuacuccaccucuggg

SEQ ID NO: 2388590 - RNA, 19 nt, Artificial Sequence
  Description of Artificial Sequence: Synthetic oligonucleotide
cuaaguguucauugccauc

SEQ ID NO: 2388591 - RNA, 19 nt, Artificial Sequence
  Description of Artificial Sequence: Synthetic oligonucleotide
gcugguuaaacagucacac

SEQ ID NO: 2388592 - RNA, 19 nt, Artificial Sequence
  Description of Artificial Sequence: Synthetic oligonucleotide
uugcgaucccuacuccacc

SEQ ID NO: 2388593 - RNA, 19 nt, Artificial Sequence
  Description of Artificial Sequence: Synthetic oligonucleotide
uuauucagcacuggaucaa

SEQ ID NO: 2388594 - RNA, 19 nt, Artificial Sequence
  Description of Artificial Sequence: Synthetic oligonucleotide
uauccacuuuauccagaug

SEQ ID NO: 2388595 - RNA, 19 nt, Artificial Sequence
  Description of Artificial Sequence: Synthetic oligonucleotide
accauggaguucacuaacg

SEQ ID NO: 2388596 - RNA, 19 nt, Artificial Sequence
  Description of Artificial Sequence: Synthetic oligonucleotide
uccagauggggaugauacc

SEQ ID NO: 2388597 - RNA, 19 nt, Artificial Sequence
  Description of Artificial Sequence: Synthetic oligonucleotide
caaagauuuugcccaucac

SEQ ID NO: 2388598 - RNA, 19 nt, Artificial Sequence
  Description of Artificial Sequence: Synthetic oligonucleotide
gacaguauugacagucaca

SEQ ID NO: 2388599 - RNA, 19 nt, Artificial Sequence
  Description of Artificial Sequence: Synthetic oligonucleotide
uuugcccaucacuguugcg

SEQ ID NO: 2388600 - RNA, 19 nt, Artificial Sequence
  Description of Artificial Sequence: Synthetic oligonucleotide
ugagguaugcauugccauu

SEQ ID NO: 2388601 - RNA, 19 nt, Artificial Sequence
  Description of Artificial Sequence: Synthetic oligonucleotide
ggaugauaccuuucuacac

SEQ ID NO: 2388602 - RNA, 19 nt, Artificial Sequence
  Description of Artificial Sequence: Synthetic oligonucleotide
cauugccugcucuucguug

SEQ ID NO: 2388603 - RNA, 19 nt, Artificial Sequence
  Description of Artificial Sequence: Synthetic oligonucleotide
uugcauuguugcugcuggg

SEQ ID NO: 2388604 - RNA, 19 nt, Artificial Sequence
  Description of Artificial Sequence: Synthetic oligonucleotide
cacauuaguggacccauga

SEQ ID NO: 2388605 - RNA, 19 nt, Artificial Sequence
  Description of Artificial Sequence: Synthetic oligonucleotide
gagccaacgccuccacggg

SEQ ID NO: 2388606 - RNA, 19 nt, Artificial Sequence
  Description of Artificial Sequence: Synthetic oligonucleotide
uaccgcucaacggagcuca

SEQ ID NO: 2388607 - RNA, 19 nt, Artificial Sequence
  Description of Artificial Sequence: Synthetic oligonucleotide
ccacuuauuagugagagga

SEQ ID NO: 2388608 - RNA, 19 nt, Artificial Sequence
  Description of Artificial Sequence: Synthetic oligonucleotide
ucuaacccuccaauugcau

SEQ ID NO: 2388609 - RNA, 19 nt, Artificial Sequence
  Description of Artificial Sequence: Synthetic oligonucleotide
ccaacggcaaagauuuugc

SEQ ID NO: 2388610 - RNA, 19 nt, Artificial Sequence
  Description of Artificial Sequence: Synthetic oligonucleotide
gcaaguauugucaucuaac

SEQ ID NO: 2388611 - RNA, 19 nt, Artificial Sequence
  Description of Artificial Sequence: Synthetic oligonucleotide
aggggaguuaucaucaaaa

SEQ ID NO: 2388612 - RNA, 19 nt, Artificial Sequence
  Description of Artificial Sequence: Synthetic oligonucleotide
gaucaaaugcuuccacugu

SEQ ID NO: 2388613 - RNA, 19 nt, Artificial Sequence
  Description of Artificial Sequence: Synthetic oligonucleotide
auugccgcccacugcauaa

SEQ ID NO: 2388614 - RNA, 19 nt, Artificial Sequence
  Description of Artificial Sequence: Synthetic oligonucleotide
uuaugaccaccaacggcaa

SEQ ID NO: 2388615 - RNA, 19 nt, Artificial Sequence
  Description of Artificial Sequence: Synthetic oligonucleotide
uucguugacccauuuccuu

SEQ ID NO: 2388616 - RNA, 19 nt, Artificial Sequence
  Description of Artificial Sequence: Synthetic oligonucleotide
acagguccaaccagcuccc

SEQ ID NO: 2388617 - RNA, 19 nt, Artificial Sequence
  Description of Artificial Sequence: Synthetic oligonucleotide
uggaguucacuaacgccau

SEQ ID NO: 2388618 - RNA, 19 nt, Artificial Sequence
  Description of Artificial Sequence: Synthetic oligonucleotide
acacagguccaaccagcuc

SEQ ID NO: 2388619 - RNA, 19 nt, Artificial Sequence
  Description of Artificial Sequence: Synthetic oligonucleotide
acagagccaacgccuccac

SEQ ID NO: 2388620 - RNA, 19 nt, Artificial Sequence
  Description of Artificial Sequence: Synthetic oligonucleotide
guauugucaucuaacccuc

SEQ ID NO: 2388621 - RNA, 19 nt, Artificial Sequence
  Description of Artificial Sequence: Synthetic oligonucleotide
agcucccacuuauucagca

SEQ ID NO: 2388622 - RNA, 19 nt, Artificial Sequence
  Description of Artificial Sequence: Synthetic oligonucleotide
acuaacgccauugccugcu

SEQ ID NO: 2388623 - RNA, 19 nt, Artificial Sequence
  Description of Artificial Sequence: Synthetic oligonucleotide
caacggagcucaaagggga

SEQ ID NO: 2388624 - RNA, 19 nt, Artificial Sequence
  Description of Artificial Sequence: Synthetic oligonucleotide
ugcugccacauaaucccac

SEQ ID NO: 2388625 - RNA, 19 nt, Artificial Sequence
  Description of Artificial Sequence: Synthetic oligonucleotide
gcagucaaccacauuagug

SEQ ID NO: 2388626 - RNA, 19 nt, Artificial Sequence
  Description of Artificial Sequence: Synthetic oligonucleotide
ugcgaucccuacuccaccu

SEQ ID NO: 2388627 - RNA, 19 nt, Artificial Sequence
  Description of Artificial Sequence: Synthetic oligonucleotide
uaguggacccaugaccuac

SEQ ID NO: 2388628 - RNA, 19 nt, Artificial Sequence
  Description of Artificial Sequence: Synthetic oligonucleotide
ucacugaagcaaguauugu

SEQ ID NO: 2388629 - RNA, 19 nt, Artificial Sequence
  Description of Artificial Sequence: Synthetic oligonucleotide
gacuucuauccacuuuauc

SEQ ID NO: 2388630 - RNA, 19 nt, Artificial Sequence
  Description of Artificial Sequence: Synthetic oligonucleotide
auuuugcccaucacuguug

SEQ ID NO: 2388631 - RNA, 19 nt, Artificial Sequence
  Description of Artificial Sequence: Synthetic oligonucleotide
accuuucuacacuggacaa

SEQ ID NO: 2388632 - RNA, 19 nt, Artificial Sequence
  Description of Artificial Sequence: Synthetic oligonucleotide
gaucaaacaucuccaugcu

SEQ ID NO: 2388633 - RNA, 19 nt, Artificial Sequence
  Description of Artificial Sequence: Synthetic oligonucleotide
acacuggacaaggaggcca

SEQ ID NO: 2388634 - RNA, 19 nt, Artificial Sequence
  Description of Artificial Sequence: Synthetic oligonucleotide
ugacuucuauccacuuuau

SEQ ID NO: 2388635 - RNA, 19 nt, Artificial Sequence
  Description of Artificial Sequence: Synthetic oligonucleotide
uugcugcugggacuuaaau

SEQ ID NO: 2388636 - RNA, 19 nt, Artificial Sequence
  Description of Artificial Sequence: Synthetic oligonucleotide
ucacuguugcgaucccuac

SEQ ID NO: 2388637 - RNA, 19 nt, Artificial Sequence
  Description of Artificial Sequence: Synthetic oligonucleotide
gcucaacggagcucaaagg

SEQ ID NO: 2388638 - RNA, 19 nt, Artificial Sequence
  Description of Artificial Sequence: Synthetic oligonucleotide
uacaagcaaccauggaguu

SEQ ID NO: 2388639 - RNA, 19 nt, Artificial Sequence
  Description of Artificial Sequence: Synthetic oligonucleotide
cacacggcuacaccggcac

SEQ ID NO: 2388640 - RNA, 19 nt, Artificial Sequence
  Description of Artificial Sequence: Synthetic oligonucleotide
guguucauuggugccacug

SEQ ID NO: 2388641 - RNA, 19 nt, Artificial Sequence
  Description of Artificial Sequence: Synthetic oligonucleotide
cauuggugccacuguacuc

SEQ ID NO: 2388642 - RNA, 19 nt, Artificial Sequence
  Description of Artificial Sequence: Synthetic oligonucleotide
gucauaccgcucaacggag

SEQ ID NO: 2388643 - RNA, 19 nt, Artificial Sequence
  Description of Artificial Sequence: Synthetic oligonucleotide
ucuccacaucacugaagca

SEQ ID NO: 2388644 - RNA, 19 nt, Artificial Sequence
  Description of Artificial Sequence: Synthetic oligonucleotide
acggggaguguucauuggu

SEQ ID NO: 2388645 - RNA, 19 nt, Artificial Sequence
  Description of Artificial Sequence: Synthetic oligonucleotide
gcaaccauggaguucacua

SEQ ID NO: 2388646 - RNA, 19 nt, Artificial Sequence
  Description of Artificial Sequence: Synthetic oligonucleotide
caaccacauuaguggaccc

SEQ ID NO: 2388647 - RNA, 19 nt, Artificial Sequence
  Description of Artificial Sequence: Synthetic oligonucleotide
aaguguucauugccaucau

SEQ ID NO: 2388648 - RNA, 19 nt, Artificial Sequence
  Description of Artificial Sequence: Synthetic oligonucleotide
gccaaagcaauuccucgcc

SEQ ID NO: 2388649 - RNA, 19 nt, Artificial Sequence
  Description of Artificial Sequence: Synthetic oligonucleotide
ggggaguuaucaucaaaac

SEQ ID NO: 2388650 - RNA, 19 nt, Artificial Sequence
  Description of Artificial Sequence: Synthetic oligonucleotide
aacggagcucaaaggggag

SEQ ID NO: 2388651 - RNA, 19 nt, Artificial Sequence
  Description of Artificial Sequence: Synthetic oligonucleotide
ggccaaagcaauuccucgc

SEQ ID NO: 2388652 - RNA, 19 nt, Artificial Sequence
  Description of Artificial Sequence: Synthetic oligonucleotide
gauuuugcccaucacuguu

SEQ ID NO: 2388653 - RNA, 19 nt, Artificial Sequence
  Description of Artificial Sequence: Synthetic oligonucleotide
uguacuccacuggucagau

SEQ ID NO: 2388654 - RNA, 19 nt, Artificial Sequence
  Description of Artificial Sequence: Synthetic oligonucleotide
cuuguugcuucgaggguca

SEQ ID NO: 2388655 - RNA, 19 nt, Artificial Sequence
  Description of Artificial Sequence: Synthetic oligonucleotide
acacggcuacaccggcacc

SEQ ID NO: 2388656 - RNA, 19 nt, Artificial Sequence
  Description of Artificial Sequence: Synthetic oligonucleotide
agccaacgccuccacgggg

SEQ ID NO: 2388657 - RNA, 19 nt, Artificial Sequence
  Description of Artificial Sequence: Synthetic oligonucleotide
guugcgaucccuacuccac

SEQ ID NO: 2388658 - RNA, 19 nt, Artificial Sequence
  Description of Artificial Sequence: Synthetic oligonucleotide
acauucaacaggacaguau

SEQ ID NO: 2388659 - RNA, 19 nt, Artificial Sequence
  Description of Artificial Sequence: Synthetic oligonucleotide
cccaugaccuacaucucgg

SEQ ID NO: 2388660 - RNA, 19 nt, Artificial Sequence
  Description of Artificial Sequence: Synthetic oligonucleotide
cacuggacaaggaggccac

SEQ ID NO: 2388661 - RNA, 19 nt, Artificial Sequence
  Description of Artificial Sequence: Synthetic oligonucleotide
ugagaggaucaaacaucuc

SEQ ID NO: 2388662 - RNA, 19 nt, Artificial Sequence
  Description of Artificial Sequence: Synthetic oligonucleotide
ugcuuccacuguguugagg

SEQ ID NO: 2388663 - RNA, 19 nt, Artificial Sequence
  Description of Artificial Sequence: Synthetic oligonucleotide
uaacgccauugccugcucu

SEQ ID NO: 2388664 - RNA, 19 nt, Artificial Sequence
  Description of Artificial Sequence: Synthetic oligonucleotide
gaggccacuccgucauugc

SEQ ID NO: 2388665 - RNA, 19 nt, Artificial Sequence
  Description of Artificial Sequence: Synthetic oligonucleotide
ccauuaugaccaccaacgg

SEQ ID NO: 2388666 - RNA, 19 nt, Artificial Sequence
  Description of Artificial Sequence: Synthetic oligonucleotide
aagcaaguauugucaucua

SEQ ID NO: 2388667 - RNA, 19 nt, Artificial Sequence
  Description of Artificial Sequence: Synthetic oligonucleotide
cagauucaaugucauaucu

SEQ ID NO: 2388668 - RNA, 19 nt, Artificial Sequence
  Description of Artificial Sequence: Synthetic oligonucleotide
cacggggaguguucauugg

SEQ ID NO: 2388669 - RNA, 19 nt, Artificial Sequence
  Description of Artificial Sequence: Synthetic oligonucleotide
ggaucuggcugguuaaaca

SEQ ID NO: 2388670 - RNA, 19 nt, Artificial Sequence
  Description of Artificial Sequence: Synthetic oligonucleotide
cacuccgucauugccgccc

SEQ ID NO: 2388671 - RNA, 19 nt, Artificial Sequence
  Description of Artificial Sequence: Synthetic oligonucleotide
agauggggaugauaccuuu

SEQ ID NO: 2388672 - RNA, 19 nt, Artificial Sequence
  Description of Artificial Sequence: Synthetic oligonucleotide
uugccauuaugaccaccaa

SEQ ID NO: 2388673 - RNA, 19 nt, Artificial Sequence
  Description of Artificial Sequence: Synthetic oligonucleotide
gcaauuccucgccucuugg

SEQ ID NO: 2388674 - RNA, 19 nt, Artificial Sequence
  Description of Artificial Sequence: Synthetic oligonucleotide
uggggaugauaccuuucua

SEQ ID NO: 2388675 - RNA, 19 nt, Artificial Sequence
  Description of Artificial Sequence: Synthetic oligonucleotide
aaacagucacacacggcua

SEQ ID NO: 2388676 - RNA, 19 nt, Artificial Sequence
  Description of Artificial Sequence: Synthetic oligonucleotide
ccauggaguucacuaacgc

SEQ ID NO: 2388677 - RNA, 19 nt, Artificial Sequence
  Description of Artificial Sequence: Synthetic oligonucleotide
gcauaaacaugguucacua

SEQ ID NO: 2388678 - RNA, 19 nt, Artificial Sequence
  Description of Artificial Sequence: Synthetic oligonucleotide
cccacuuguugcuucgagg

SEQ ID NO: 2388679 - RNA, 19 nt, Artificial Sequence
  Description of Artificial Sequence: Synthetic oligonucleotide
ugaccaccaacggcaaaga

SEQ ID NO: 2388680 - RNA, 19 nt, Artificial Sequence
  Description of Artificial Sequence: Synthetic oligonucleotide
cuaacccuccaauugcaua

SEQ ID NO: 2388681 - RNA, 19 nt, Artificial Sequence
  Description of Artificial Sequence: Synthetic oligonucleotide
agccacagagccaacgccu

SEQ ID NO: 2388682 - RNA, 19 nt, Artificial Sequence
  Description of Artificial Sequence: Synthetic oligonucleotide
gauggggaugauaccuuuc

SEQ ID NO: 2388683 - RNA, 19 nt, Artificial Sequence
  Description of Artificial Sequence: Synthetic oligonucleotide
ggacaguauugacagucac

SEQ ID NO: 2388684 - RNA, 19 nt, Artificial Sequence
  Description of Artificial Sequence: Synthetic oligonucleotide
cccaucacuguugcgaucc

SEQ ID NO: 2388685 - RNA, 19 nt, Artificial Sequence
  Description of Artificial Sequence: Synthetic oligonucleotide
gaucccuacuccaccucug

SEQ ID NO: 2388686 - RNA, 19 nt, Artificial Sequence
  Description of Artificial Sequence: Synthetic oligonucleotide
caaccauggaguucacuaa

SEQ ID NO: 2388687 - RNA, 19 nt, Artificial Sequence
  Description of Artificial Sequence: Synthetic oligonucleotide
cugguuaaacagucacaca

SEQ ID NO: 2388688 - RNA, 19 nt, Artificial Sequence
  Description of Artificial Sequence: Synthetic oligonucleotide
cacacacggcuacaccggc

SEQ ID NO: 2388689 - RNA, 19 nt, Artificial Sequence
  Description of Artificial Sequence: Synthetic oligonucleotide
gcauuguugcugcugggac

SEQ ID NO: 2388690 - RNA, 19 nt, Artificial Sequence
  Description of Artificial Sequence: Synthetic oligonucleotide
cuucccauccaucaccugu

SEQ ID NO: 2388691 - RNA, 19 nt, Artificial Sequence
  Description of Artificial Sequence: Synthetic oligonucleotide
uuaguggacccaugaccua

SEQ ID NO: 2388692 - RNA, 19 nt, Artificial Sequence
  Description of Artificial Sequence: Synthetic oligonucleotide
uggacccaugaccuacauc

SEQ ID NO: 2388693 - RNA, 19 nt, Artificial Sequence
  Description of Artificial Sequence: Synthetic oligonucleotide
cucuucguugacccauuuc

SEQ ID NO: 2388694 - RNA, 19 nt, Artificial Sequence
  Description of Artificial Sequence: Synthetic oligonucleotide
caucuccaugcuuccuaag

SEQ ID NO: 2388695 - RNA, 19 nt, Artificial Sequence
  Description of Artificial Sequence: Synthetic oligonucleotide
agcucaaaggggaguuauc

SEQ ID NO: 2388696 - RNA, 19 nt, Artificial Sequence
  Description of Artificial Sequence: Synthetic oligonucleotide
cuguugcgaucccuacucc

SEQ ID NO: 2388697 - RNA, 19 nt, Artificial Sequence
  Description of Artificial Sequence: Synthetic oligonucleotide
auaccgcucaacggagcuc

SEQ ID NO: 2388698 - RNA, 19 nt, Artificial Sequence
  Description of Artificial Sequence: Synthetic oligonucleotide
gcucaaaggggaguuauca

SEQ ID NO: 2388699 - RNA, 19 nt, Artificial Sequence
  Description of Artificial Sequence: Synthetic oligonucleotide
cauugccauuaugaccacc

SEQ ID NO: 2388700 - RNA, 19 nt, Artificial Sequence
  Description of Artificial Sequence: Synthetic oligonucleotide
gguaugcauugccauuaug

SEQ ID NO: 2388701 - RNA, 19 nt, Artificial Sequence
  Description of Artificial Sequence: Synthetic oligonucleotide
gugccacuguacuccacug

SEQ ID NO: 2388702 - RNA, 19 nt, Artificial Sequence
  Description of Artificial Sequence: Synthetic oligonucleotide
cauaucucuccacaucacu

SEQ ID NO: 2388703 - RNA, 19 nt, Artificial Sequence
  Description of Artificial Sequence: Synthetic oligonucleotide
gacauucaacaggacagua

SEQ ID NO: 2388704 - RNA, 19 nt, Artificial Sequence
  Description of Artificial Sequence: Synthetic oligonucleotide
aggacaguauugacaguca

SEQ ID NO: 2388705 - RNA, 19 nt, Artificial Sequence
  Description of Artificial Sequence: Synthetic oligonucleotide
cacuaacgccauugccugc

SEQ ID NO: 2388706 - RNA, 19 nt, Artificial Sequence
  Description of Artificial Sequence: Synthetic oligonucleotide
ggccacuccgucauugccg

SEQ ID NO: 2388707 - RNA, 19 nt, Artificial Sequence
  Description of Artificial Sequence: Synthetic oligonucleotide
agcacuggaucaaaugcuu

SEQ ID NO: 2388708 - RNA, 19 nt, Artificial Sequence
  Description of Artificial Sequence: Synthetic oligonucleotide
cacuuauucagcacuggau

SEQ ID NO: 2388709 - RNA, 19 nt, Artificial Sequence
  Description of Artificial Sequence: Synthetic oligonucleotide
cagagccaacgccuccacg

SEQ ID NO: 2388710 - RNA, 19 nt, Artificial Sequence
  Description of Artificial Sequence: Synthetic oligonucleotide
uucgagggucauaccgcuc

SEQ ID NO: 2388711 - RNA, 19 nt, Artificial Sequence
  Description of Artificial Sequence: Synthetic oligonucleotide
ccacuuuauccagaugggg

SEQ ID NO: 2388712 - RNA, 19 nt, Artificial Sequence
  Description of Artificial Sequence: Synthetic oligonucleotide
cacuggucagauucaaugu

SEQ ID NO: 2388713 - RNA, 19 nt, Artificial Sequence
  Description of Artificial Sequence: Synthetic oligonucleotide
gguugcauuguugcugcug

SEQ ID NO: 2388714 - RNA, 19 nt, Artificial Sequence
  Description of Artificial Sequence: Synthetic oligonucleotide
agguaugcauugccauuau

SEQ ID NO: 2388715 - RNA, 19 nt, Artificial Sequence
  Description of Artificial Sequence: Synthetic oligonucleotide
gcuucgagggucauaccgc

SEQ ID NO: 2388716 - RNA, 19 nt, Artificial Sequence
  Description of Artificial Sequence: Synthetic oligonucleotide
caaggaggccacuccguca

SEQ ID NO: 2388717 - RNA, 19 nt, Artificial Sequence
  Description of Artificial Sequence: Synthetic oligonucleotide
cuccaugcuuccuaagugu

SEQ ID NO: 2388718 - RNA, 19 nt, Artificial Sequence
  Description of Artificial Sequence: Synthetic oligonucleotide
aucacuguugcgaucccua

SEQ ID NO: 2388719 - RNA, 19 nt, Artificial Sequence
  Description of Artificial Sequence: Synthetic oligonucleotide
ugccgcccacugcauaaac

SEQ ID NO: 2388720 - RNA, 19 nt, Artificial Sequence
  Description of Artificial Sequence: Synthetic oligonucleotide
acgccauugccugcucuuc

SEQ ID NO: 2388721 - RNA, 19 nt, Artificial Sequence
  Description of Artificial Sequence: Synthetic oligonucleotide
cugcauaaacaugguucac

SEQ ID NO: 2388722 - RNA, 19 nt, Artificial Sequence
  Description of Artificial Sequence: Synthetic oligonucleotide
uugcuucgagggucauacc

SEQ ID NO: 2388723 - RNA, 19 nt, Artificial Sequence
  Description of Artificial Sequence: Synthetic oligonucleotide
cuaaagccacagagccaac

SEQ ID NO: 2388724 - RNA, 19 nt, Artificial Sequence
  Description of Artificial Sequence: Synthetic oligonucleotide
ugcuuccuaaguguucauu

SEQ ID NO: 2388725 - RNA, 19 nt, Artificial Sequence
  Description of Artificial Sequence: Synthetic oligonucleotide
cgcucaacggagcucaaag

SEQ ID NO: 2388726 - RNA, 19 nt, Artificial Sequence
  Description of Artificial Sequence: Synthetic oligonucleotide
caccucugggagugguaag

SEQ ID NO: 2388727 - RNA, 19 nt, Artificial Sequence
  Description of Artificial Sequence: Synthetic oligonucleotide
cagcucccacuuauucagc

SEQ ID NO: 2388728 - RNA, 19 nt, Artificial Sequence
  Description of Artificial Sequence: Synthetic oligonucleotide
acuccgucauugccgccca

SEQ ID NO: 2388729 - RNA, 19 nt, Artificial Sequence
  Description of Artificial Sequence: Synthetic oligonucleotide
ucauugccgcccacugcau

SEQ ID NO: 2388730 - RNA, 19 nt, Artificial Sequence
  Description of Artificial Sequence: Synthetic oligonucleotide
cauuguugcugcugggacu

SEQ ID NO: 2388731 - RNA, 19 nt, Artificial Sequence
  Description of Artificial Sequence: Synthetic oligonucleotide
ugcucuucguugacccauu

SEQ ID NO: 2388732 - RNA, 19 nt, Artificial Sequence
  Description of Artificial Sequence: Synthetic oligonucleotide
cuucguugacccauuuccu

SEQ ID NO: 2388733 - RNA, 19 nt, Artificial Sequence
  Description of Artificial Sequence: Synthetic oligonucleotide
cucccacuuauucagcacu

SEQ ID NO: 2388734 - RNA, 19 nt, Artificial Sequence
  Description of Artificial Sequence: Synthetic oligonucleotide
gucaucuaacccuccaauu

SEQ ID NO: 2388735 - RNA, 19 nt, Artificial Sequence
  Description of Artificial Sequence: Synthetic oligonucleotide
aagcaaccauggaguucac

SEQ ID NO: 2388736 - RNA, 19 nt, Artificial Sequence
  Description of Artificial Sequence: Synthetic oligonucleotide
acagucacacacggcuaca

SEQ ID NO: 2388737 - RNA, 19 nt, Artificial Sequence
  Description of Artificial Sequence: Synthetic oligonucleotide
cauugauugccuucaucau

SEQ ID NO: 2388738 - RNA, 19 nt, Artificial Sequence
  Description of Artificial Sequence: Synthetic oligonucleotide
ccaccaacggcaaagauuu

SEQ ID NO: 2388739 - RNA, 19 nt, Artificial Sequence
  Description of Artificial Sequence: Synthetic oligonucleotide
ccuuucuacacuggacaag

SEQ ID NO: 2388740 - RNA, 19 nt, Artificial Sequence
  Description of Artificial Sequence: Synthetic oligonucleotide
uuccucgccucuugguguu

SEQ ID NO: 2388741 - RNA, 19 nt, Artificial Sequence
  Description of Artificial Sequence: Synthetic oligonucleotide
cccuaaggaggccaaagca

SEQ ID NO: 2388742 - RNA, 19 nt, Artificial Sequence
  Description of Artificial Sequence: Synthetic oligonucleotide
cauaccgcucaacggagcu

SEQ ID NO: 2388743 - RNA, 19 nt, Artificial Sequence
  Description of Artificial Sequence: Synthetic oligonucleotide
augcuuccacuguguugag

SEQ ID NO: 2388744 - RNA, 19 nt, Artificial Sequence
  Description of Artificial Sequence: Synthetic oligonucleotide
acggagcucaaaggggagu

SEQ ID NO: 2388745 - RNA, 19 nt, Artificial Sequence
  Description of Artificial Sequence: Synthetic oligonucleotide
gagggucauaccgcucaac

SEQ ID NO: 2388746 - RNA, 19 nt, Artificial Sequence
  Description of Artificial Sequence: Synthetic oligonucleotide
ggagugguaagugcugcca

SEQ ID NO: 2388747 - RNA, 19 nt, Artificial Sequence
  Description of Artificial Sequence: Synthetic oligonucleotide
uguugcuucgagggucaua

SEQ ID NO: 2388748 - RNA, 19 nt, Artificial Sequence
  Description of Artificial Sequence: Synthetic oligonucleotide
cuacaucucggaucuggcu

SEQ ID NO: 2388749 - RNA, 19 nt, Artificial Sequence
  Description of Artificial Sequence: Synthetic oligonucleotide
cuucgagggucauaccgcu

SEQ ID NO: 2388750 - RNA, 19 nt, Artificial Sequence
  Description of Artificial Sequence: Synthetic oligonucleotide
ucggaucuggcugguuaaa

SEQ ID NO: 2388751 - RNA, 19 nt, Artificial Sequence
  Description of Artificial Sequence: Synthetic oligonucleotide
aguggacccaugaccuaca

SEQ ID NO: 2388752 - RNA, 19 nt, Artificial Sequence
  Description of Artificial Sequence: Synthetic oligonucleotide
ccacggggaguguucauug

SEQ ID NO: 2388753 - RNA, 19 nt, Artificial Sequence
  Description of Artificial Sequence: Synthetic oligonucleotide
cacggcuacaccggcacca

SEQ ID NO: 2388754 - RNA, 19 nt, Artificial Sequence
  Description of Artificial Sequence: Synthetic oligonucleotide
cuguguugagguaugcauu

SEQ ID NO: 2388755 - RNA, 19 nt, Artificial Sequence
  Description of Artificial Sequence: Synthetic oligonucleotide
cacaucacugaagcaagua

SEQ ID NO: 2388756 - RNA, 19 nt, Artificial Sequence
  Description of Artificial Sequence: Synthetic oligonucleotide
acaugcagucaaccacauu

SEQ ID NO: 2388757 - RNA, 19 nt, Artificial Sequence
  Description of Artificial Sequence: Synthetic oligonucleotide
acggcuacaccggcaccag

SEQ ID NO: 2388758 - RNA, 19 nt, Artificial Sequence
  Description of Artificial Sequence: Synthetic oligonucleotide
uuauccagauggggaugau

SEQ ID NO: 2388759 - RNA, 19 nt, Artificial Sequence
  Description of Artificial Sequence: Synthetic oligonucleotide
cucaaaggggaguuaucau

SEQ ID NO: 2388760 - RNA, 19 nt, Artificial Sequence
  Description of Artificial Sequence: Synthetic oligonucleotide
cuaacgccauugccugcuc

SEQ ID NO: 2388761 - RNA, 19 nt, Artificial Sequence
  Description of Artificial Sequence: Synthetic oligonucleotide
gagcucaaaggggaguuau

SEQ ID NO: 2388762 - RNA, 19 nt, Artificial Sequence
  Description of Artificial Sequence: Synthetic oligonucleotide
ggugccacuguacuccacu

SEQ ID NO: 2388763 - RNA, 19 nt, Artificial Sequence
  Description of Artificial Sequence: Synthetic oligonucleotide
ugguugcauuguugcugcu

SEQ ID NO: 2388764 - RNA, 19 nt, Artificial Sequence
  Description of Artificial Sequence: Synthetic oligonucleotide
ugccuucaucauccacuua

SEQ ID NO: 2388765 - RNA, 19 nt, Artificial Sequence
  Description of Artificial Sequence: Synthetic oligonucleotide
caauuccucgccucuuggu

SEQ ID NO: 2388766 - RNA, 19 nt, Artificial Sequence
  Description of Artificial Sequence: Synthetic oligonucleotide
cacuuauuagugagaggau

SEQ ID NO: 2388767 - RNA, 19 nt, Artificial Sequence
  Description of Artificial Sequence: Synthetic oligonucleotide
cccuacuccaccucuggga

SEQ ID NO: 2388768 - RNA, 19 nt, Artificial Sequence
  Description of Artificial Sequence: Synthetic oligonucleotide
guaagugcugccacauaau

SEQ ID NO: 2388769 - RNA, 19 nt, Artificial Sequence
  Description of Artificial Sequence: Synthetic oligonucleotide
caugaccuacaucucggau

SEQ ID NO: 2388770 - RNA, 19 nt, Artificial Sequence
  Description of Artificial Sequence: Synthetic oligonucleotide
gccucuugguguucauuga

SEQ ID NO: 2388771 - RNA, 19 nt, Artificial Sequence
  Description of Artificial Sequence: Synthetic oligonucleotide
acacacggcuacaccggca

SEQ ID NO: 2388772 - RNA, 19 nt, Artificial Sequence
  Description of Artificial Sequence: Synthetic oligonucleotide
ggucagauucaaugucaua

SEQ ID NO: 2388773 - RNA, 19 nt, Artificial Sequence
  Description of Artificial Sequence: Synthetic oligonucleotide
ccacauuaguggacccaug

SEQ ID NO: 2388774 - RNA, 19 nt, Artificial Sequence
  Description of Artificial Sequence: Synthetic oligonucleotide
ccgucauugccgcccacug

SEQ ID NO: 2388775 - RNA, 19 nt, Artificial Sequence
  Description of Artificial Sequence: Synthetic oligonucleotide
cugugguugcauuguugcu

SEQ ID NO: 2388776 - RNA, 19 nt, Artificial Sequence
  Description of Artificial Sequence: Synthetic oligonucleotide
acuggacaaggaggccacu

SEQ ID NO: 2388777 - RNA, 19 nt, Artificial Sequence
  Description of Artificial Sequence: Synthetic oligonucleotide
gugguaagugcugccacau

SEQ ID NO: 2388778 - RNA, 19 nt, Artificial Sequence
  Description of Artificial Sequence: Synthetic oligonucleotide
uugccgcccacugcauaaa

SEQ ID NO: 2388779 - RNA, 19 nt, Artificial Sequence
  Description of Artificial Sequence: Synthetic oligonucleotide
ccagauggggaugauaccu

SEQ ID NO: 2388780 - RNA, 19 nt, Artificial Sequence
  Description of Artificial Sequence: Synthetic oligonucleotide
cacuguugcgaucccuacu

SEQ ID NO: 2388781 - RNA, 19 nt, Artificial Sequence
  Description of Artificial Sequence: Synthetic oligonucleotide
cuacaccggcaccagcucu

SEQ ID NO: 2388782 - RNA, 19 nt, Artificial Sequence
  Description of Artificial Sequence: Synthetic oligonucleotide
cgccauugccugcucuucg

SEQ ID NO: 2388783 - RNA, 19 nt, Artificial Sequence
  Description of Artificial Sequence: Synthetic oligonucleotide
cagauggggaugauaccuu

SEQ ID NO: 2388784 - RNA, 19 nt, Artificial Sequence
  Description of Artificial Sequence: Synthetic oligonucleotide
gcugccacauaaucccacu

SEQ ID NO: 2388785 - RNA, 19 nt, Artificial Sequence
  Description of Artificial Sequence: Synthetic oligonucleotide
cauugccgcccacugcaua

SEQ ID NO: 2388786 - RNA, 19 nt, Artificial Sequence
  Description of Artificial Sequence: Synthetic oligonucleotide
ggaggccaaagcaauuccu

SEQ ID NO: 2388787 - RNA, 19 nt, Artificial Sequence
  Description of Artificial Sequence: Synthetic oligonucleotide
ccuaaguguucauugccau

SEQ ID NO: 2388788 - RNA, 19 nt, Artificial Sequence
  Description of Artificial Sequence: Synthetic oligonucleotide
cuccacuggucagauucaa

SEQ ID NO: 2388789 - RNA, 19 nt, Artificial Sequence
  Description of Artificial Sequence: Synthetic oligonucleotide
cguugacccauuuccuuga

SEQ ID NO: 2388790 - RNA, 19 nt, Artificial Sequence
  Description of Artificial Sequence: Synthetic oligonucleotide
cacaugcagucaaccacau

SEQ ID NO: 2388791 - RNA, 19 nt, Artificial Sequence
  Description of Artificial Sequence: Synthetic oligonucleotide
gaccuacaucucggaucug

SEQ ID NO: 2388792 - RNA, 19 nt, Artificial Sequence
  Description of Artificial Sequence: Synthetic oligonucleotide
ccaucacuguugcgauccc

SEQ ID NO: 2388793 - RNA, 19 nt, Artificial Sequence
  Description of Artificial Sequence: Synthetic oligonucleotide
ccaugaccuacaucucgga

SEQ ID NO: 2388794 - RNA, 19 nt, Artificial Sequence
  Description of Artificial Sequence: Synthetic oligonucleotide
caguauugacagucacaau

SEQ ID NO: 2388795 - RNA, 19 nt, Artificial Sequence
  Description of Artificial Sequence: Synthetic oligonucleotide
ccaacgccuccacggggag

SEQ ID NO: 2388796 - RNA, 19 nt, Artificial Sequence
  Description of Artificial Sequence: Synthetic oligonucleotide
guccaaccagcucccacuu

SEQ ID NO: 2388797 - RNA, 19 nt, Artificial Sequence
  Description of Artificial Sequence: Synthetic oligonucleotide
gcgaucccuacuccaccuc

SEQ ID NO: 2388798 - RNA, 19 nt, Artificial Sequence
  Description of Artificial Sequence: Synthetic oligonucleotide
cgcccacugcauaaacaug

SEQ ID NO: 2388799 - RNA, 19 nt, Artificial Sequence
  Description of Artificial Sequence: Synthetic oligonucleotide
gccgcccacugcauaaaca

SEQ ID NO: 2388800 - RNA, 19 nt, Artificial Sequence
  Description of Artificial Sequence: Synthetic oligonucleotide
gccauugccugcucuucgu

SEQ ID NO: 2388801 - RNA, 19 nt, Artificial Sequence
  Description of Artificial Sequence: Synthetic oligonucleotide
uccucgccucuugguguuc

SEQ ID NO: 2388802 - RNA, 19 nt, Artificial Sequence
  Description of Artificial Sequence: Synthetic oligonucleotide
aggaggccacuccgucauu

SEQ ID NO: 2388803 - RNA, 19 nt, Artificial Sequence
  Description of Artificial Sequence: Synthetic oligonucleotide
ccgcccacugcauaaacau

SEQ ID NO: 2388804 - RNA, 19 nt, Artificial Sequence
  Description of Artificial Sequence: Synthetic oligonucleotide
cggaucuggcugguuaaac

SEQ ID NO: 2388805 - RNA, 19 nt, Artificial Sequence
  Description of Artificial Sequence: Synthetic oligonucleotide
ccaccucugggagugguaa

SEQ ID NO: 2388806 - RNA, 19 nt, Artificial Sequence
  Description of Artificial Sequence: Synthetic oligonucleotide
ggagcucaaaggggaguua

SEQ ID NO: 2388807 - RNA, 19 nt, Artificial Sequence
  Description of Artificial Sequence: Synthetic oligonucleotide
aucucggaucuggcugguu

SEQ ID NO: 2388808 - RNA, 19 nt, Artificial Sequence
  Description of Artificial Sequence: Synthetic oligonucleotide
gccuccacggggaguguuc

SEQ ID NO: 2388809 - RNA, 19 nt, Artificial Sequence
  Description of Artificial Sequence: Synthetic oligonucleotide
ccucuugguguucauugau

SEQ ID NO: 2388810 - RNA, 19 nt, Artificial Sequence
  Description of Artificial Sequence: Synthetic oligonucleotide
caccggcaccagcucugca

SEQ ID NO: 2388811 - RNA, 19 nt, Artificial Sequence
  Description of Artificial Sequence: Synthetic oligonucleotide
ccacuccgucauugccgcc

SEQ ID NO: 2388812 - RNA, 19 nt, Artificial Sequence
  Description of Artificial Sequence: Synthetic oligonucleotide
cuccaccucugggaguggu

SEQ ID NO: 2388813 - RNA, 19 nt, Artificial Sequence
  Description of Artificial Sequence: Synthetic oligonucleotide
ccuccacggggaguguuca

SEQ ID NO: 2388814 - RNA, 19 nt, Artificial Sequence
  Description of Artificial Sequence: Synthetic oligonucleotide
accgcucaacggagcucaa

SEQ ID NO: 2388815 - RNA, 19 nt, Artificial Sequence
  Description of Artificial Sequence: Synthetic oligonucleotide
ggaguucacuaacgccauu

SEQ ID NO: 2388816 - RNA, 19 nt, Artificial Sequence
  Description of Artificial Sequence: Synthetic oligonucleotide
acgccuccacggggagugu

SEQ ID NO: 2388817 - RNA, 19 nt, Artificial Sequence
  Description of Artificial Sequence: Synthetic oligonucleotide
caucucggaucuggcuggu

SEQ ID NO: 2388818 - RNA, 19 nt, Artificial Sequence
  Description of Artificial Sequence: Synthetic oligonucleotide
ccuugacuucuauccacuu

SEQ ID NO: 2388819 - RNA, 19 nt, Artificial Sequence
  Description of Artificial Sequence: Synthetic oligonucleotide
cucgccucuugguguucau

SEQ ID NO: 2388820 - RNA, 19 nt, Artificial Sequence
  Description of Artificial Sequence: Synthetic oligonucleotide
ccacugcauaaacaugguu

SEQ ID NO: 2388821 - RNA, 19 nt, Artificial Sequence
  Description of Artificial Sequence: Synthetic oligonucleotide
cgaucccuacuccaccucu

SEQ ID NO: 2388822 - RNA, 19 nt, Artificial Sequence
  Description of Artificial Sequence: Synthetic oligonucleotide
ccucgccucuugguguuca

SEQ ID NO: 2388823 - RNA, 19 nt, Artificial Sequence
  Description of Artificial Sequence: Synthetic oligonucleotide
cuccacggggaguguucau

SEQ ID NO: 2388824 - RNA, 19 nt, Artificial Sequence
  Description of Artificial Sequence: Synthetic oligonucleotide
cggcuacaccggcaccagc

SEQ ID NO: 2388825 - RNA, 19 nt, Artificial Sequence
  Description of Artificial Sequence: Synthetic oligonucleotide
cccauccaucaccuguggu

SEQ ID NO: 2388826 - RNA, 19 nt, Artificial Sequence
  Description of Artificial Sequence: Synthetic oligonucleotide
caacgccuccacggggagu

SEQ ID NO: 2388827 - RNA, 19 nt, Artificial Sequence
  Description of Artificial Sequence: Synthetic oligonucleotide
caccaacggcaaagauuuu

SEQ ID NO: 2388828 - RNA, 19 nt, Artificial Sequence
  Description of Artificial Sequence: Synthetic oligonucleotide
ccauugccugcucuucguu

SEQ ID NO: 2388829 - RNA, 19 nt, Artificial Sequence
  Description of Artificial Sequence: Synthetic oligonucleotide
ccgcucaacggagcucaaa

SEQ ID NO: 2388830 - RNA, 19 nt, Artificial Sequence
  Description of Artificial Sequence: Synthetic oligonucleotide
cggagcucaaaggggaguu

SEQ ID NO: 2388831 - RNA, 19 nt, Artificial Sequence
  Description of Artificial Sequence: Synthetic oligonucleotide
agagauaaaaccuccagcc

SEQ ID NO: 2388832 - RNA, 19 nt, Artificial Sequence
  Description of Artificial Sequence: Synthetic oligonucleotide
agguuuaagggguugaggc

SEQ ID NO: 2388833 - RNA, 19 nt, Artificial Sequence
  Description of Artificial Sequence: Synthetic oligonucleotide
aguaggaaagucuugucac

SEQ ID NO: 2388834 - RNA, 19 nt, Artificial Sequence
  Description of Artificial Sequence: Synthetic oligonucleotide
ucaucagacaccaugaaau

SEQ ID NO: 2388835 - RNA, 19 nt, Artificial Sequence
  Description of Artificial Sequence: Synthetic oligonucleotide
aaaggguacggacuuggcg

SEQ ID NO: 2388836 - RNA, 19 nt, Artificial Sequence
  Description of Artificial Sequence: Synthetic oligonucleotide
gaaacguucaguucuggcc

SEQ ID NO: 2388837 - RNA, 19 nt, Artificial Sequence
  Description of Artificial Sequence: Synthetic oligonucleotide
aacaaaggagagcggaggg

SEQ ID NO: 2388838 - RNA, 19 nt, Artificial Sequence
  Description of Artificial Sequence: Synthetic oligonucleotide
aauuuugcgaguauggggu

SEQ ID NO: 2388839 - RNA, 19 nt, Artificial Sequence
  Description of Artificial Sequence: Synthetic oligonucleotide
augaaauccccucuucccc

SEQ ID NO: 2388840 - RNA, 19 nt, Artificial Sequence
  Description of Artificial Sequence: Synthetic oligonucleotide
aaacguucaguucuggccu

SEQ ID NO: 2388841 - RNA, 19 nt, Artificial Sequence
  Description of Artificial Sequence: Synthetic oligonucleotide
gaggggaucacaaacacag

SEQ ID NO: 2388842 - RNA, 19 nt, Artificial Sequence
  Description of Artificial Sequence: Synthetic oligonucleotide
aagaguacuugagcgacgc

SEQ ID NO: 2388843 - RNA, 19 nt, Artificial Sequence
  Description of Artificial Sequence: Synthetic oligonucleotide
aaggguacggacuuggcga

SEQ ID NO: 2388844 - RNA, 19 nt, Artificial Sequence
  Description of Artificial Sequence: Synthetic oligonucleotide
caauuuugcgaguaugggg

SEQ ID NO: 2388845 - RNA, 19 nt, Artificial Sequence
  Description of Artificial Sequence: Synthetic oligonucleotide
gcauaaacaaaggagagcg

SEQ ID NO: 2388846 - RNA, 19 nt, Artificial Sequence
  Description of Artificial Sequence: Synthetic oligonucleotide
uaaacaaaggagagcggag

SEQ ID NO: 2388847 - RNA, 19 nt, Artificial Sequence
  Description of Artificial Sequence: Synthetic oligonucleotide
uuuucggccgcacucuccg

SEQ ID NO: 2388848 - RNA, 19 nt, Artificial Sequence
  Description of Artificial Sequence: Synthetic oligonucleotide
aucaucucuccucuggaac

SEQ ID NO: 2388849 - RNA, 19 nt, Artificial Sequence
  Description of Artificial Sequence: Synthetic oligonucleotide
accacguuagacuggagag

SEQ ID NO: 2388850 - RNA, 19 nt, Artificial Sequence
  Description of Artificial Sequence: Synthetic oligonucleotide
cugguuguggcaaggaggg

SEQ ID NO: 2388851 - RNA, 19 nt, Artificial Sequence
  Description of Artificial Sequence: Synthetic oligonucleotide
uaacuaaaaggguacggac

SEQ ID NO: 2388852 - RNA, 19 nt, Artificial Sequence
  Description of Artificial Sequence: Synthetic oligonucleotide
aaggggaccacguuagacu

SEQ ID NO: 2388853 - RNA, 19 nt, Artificial Sequence
  Description of Artificial Sequence: Synthetic oligonucleotide
acuugagcgacgcaucggg

SEQ ID NO: 2388854 - RNA, 19 nt, Artificial Sequence
  Description of Artificial Sequence: Synthetic oligonucleotide
aagcaaaaggacaauuuug

SEQ ID NO: 2388855 - RNA, 19 nt, Artificial Sequence
  Description of Artificial Sequence: Synthetic oligonucleotide
ugggcgugaagcaaaagga

SEQ ID NO: 2388856 - RNA, 19 nt, Artificial Sequence
  Description of Artificial Sequence: Synthetic oligonucleotide
cacacgcagagauaaaacc

SEQ ID NO: 2388857 - RNA, 19 nt, Artificial Sequence
  Description of Artificial Sequence: Synthetic oligonucleotide
gaguaugggguuugggacg

SEQ ID NO: 2388858 - RNA, 19 nt, Artificial Sequence
  Description of Artificial Sequence: Synthetic oligonucleotide
uucccaucagagcaagggg

SEQ ID NO: 2388859 - RNA, 19 nt, Artificial Sequence
  Description of Artificial Sequence: Synthetic oligonucleotide
acuucugaaacguucaguu

SEQ ID NO: 2388860 - RNA, 19 nt, Artificial Sequence
  Description of Artificial Sequence: Synthetic oligonucleotide
ggagagcuaacuaaaaggg

SEQ ID NO: 2388861 - RNA, 19 nt, Artificial Sequence
  Description of Artificial Sequence: Synthetic oligonucleotide
ugaagcaaaaggacaauuu

SEQ ID NO: 2388862 - RNA, 19 nt, Artificial Sequence
  Description of Artificial Sequence: Synthetic oligonucleotide
caaaaggacaauuuugcga

SEQ ID NO: 2388863 - RNA, 19 nt, Artificial Sequence
  Description of Artificial Sequence: Synthetic oligonucleotide
uugagcgacgcaucgggcg

SEQ ID NO: 2388864 - RNA, 19 nt, Artificial Sequence
  Description of Artificial Sequence: Synthetic oligonucleotide
cagagauaaaaccuccagc

SEQ ID NO: 2388865 - RNA, 19 nt, Artificial Sequence
  Description of Artificial Sequence: Synthetic oligonucleotide
ucccaucagagcaaggggc

SEQ ID NO: 2388866 - RNA, 19 nt, Artificial Sequence
  Description of Artificial Sequence: Synthetic oligonucleotide
acaauuuugcgaguauggg

SEQ ID NO: 2388867 - RNA, 19 nt, Artificial Sequence
  Description of Artificial Sequence: Synthetic oligonucleotide
agagcugcaugcugggcgc

SEQ ID NO: 2388868 - RNA, 19 nt, Artificial Sequence
  Description of Artificial Sequence: Synthetic oligonucleotide
aacucgccuggauuuuggc

SEQ ID NO: 2388869 - RNA, 19 nt, Artificial Sequence
  Description of Artificial Sequence: Synthetic oligonucleotide
aacuaaaaggguacggacu

SEQ ID NO: 2388870 - RNA, 19 nt, Artificial Sequence
  Description of Artificial Sequence: Synthetic oligonucleotide
gaaagaguacuugagcgac

SEQ ID NO: 2388871 - RNA, 19 nt, Artificial Sequence
  Description of Artificial Sequence: Synthetic oligonucleotide
ggaucacaaacacaguagg

SEQ ID NO: 2388872 - RNA, 19 nt, Artificial Sequence
  Description of Artificial Sequence: Synthetic oligonucleotide
aggaggggaucacaaacac

SEQ ID NO: 2388873 - RNA, 19 nt, Artificial Sequence
  Description of Artificial Sequence: Synthetic oligonucleotide
ucaguucuggccuagucuc

SEQ ID NO: 2388874 - RNA, 19 nt, Artificial Sequence
  Description of Artificial Sequence: Synthetic oligonucleotide
acuaaaaggguacggacuu

SEQ ID NO: 2388875 - RNA, 19 nt, Artificial Sequence
  Description of Artificial Sequence: Synthetic oligonucleotide
ucugaaacguucaguucug

SEQ ID NO: 2388876 - RNA, 19 nt, Artificial Sequence
  Description of Artificial Sequence: Synthetic oligonucleotide
ugaaacguucaguucuggc

SEQ ID NO: 2388877 - RNA, 19 nt, Artificial Sequence
  Description of Artificial Sequence: Synthetic oligonucleotide
cauaaacaaaggagagcgg

SEQ ID NO: 2388878 - RNA, 19 nt, Artificial Sequence
  Description of Artificial Sequence: Synthetic oligonucleotide
gaaaaggcgaaaggggacc

SEQ ID NO: 2388879 - RNA, 19 nt, Artificial Sequence
  Description of Artificial Sequence: Synthetic oligonucleotide
gacaccaugaaauccccuc

SEQ ID NO: 2388880 - RNA, 19 nt, Artificial Sequence
  Description of Artificial Sequence: Synthetic oligonucleotide
guggaaagaguacuugagc

SEQ ID NO: 2388881 - RNA, 19 nt, Artificial Sequence
  Description of Artificial Sequence: Synthetic oligonucleotide
ggagaaaaggcgaaagggg

SEQ ID NO: 2388882 - RNA, 19 nt, Artificial Sequence
  Description of Artificial Sequence: Synthetic oligonucleotide
ugggcgcaaggacaggugg

SEQ ID NO: 2388883 - RNA, 19 nt, Artificial Sequence
  Description of Artificial Sequence: Synthetic oligonucleotide
cucgccuggauuuuggcug

SEQ ID NO: 2388884 - RNA, 19 nt, Artificial Sequence
  Description of Artificial Sequence: Synthetic oligonucleotide
agaaaaggcgaaaggggac

SEQ ID NO: 2388885 - RNA, 19 nt, Artificial Sequence
  Description of Artificial Sequence: Synthetic oligonucleotide
agggguugaggcuaggcug

SEQ ID NO: 2388886 - RNA, 19 nt, Artificial Sequence
  Description of Artificial Sequence: Synthetic oligonucleotide
aggacuuccuuucccauca

SEQ ID NO: 2388887 - RNA, 19 nt, Artificial Sequence
  Description of Artificial Sequence: Synthetic oligonucleotide
ucaucucuccucuggaacu

SEQ ID NO: 2388888 - RNA, 19 nt, Artificial Sequence
  Description of Artificial Sequence: Synthetic oligonucleotide
acaguaggaaagucuuguc

SEQ ID NO: 2388889 - RNA, 19 nt, Artificial Sequence
  Description of Artificial Sequence: Synthetic oligonucleotide
aaggcgaaaggggaccacg

SEQ ID NO: 2388890 - RNA, 19 nt, Artificial Sequence
  Description of Artificial Sequence: Synthetic oligonucleotide
cagagcugcaugcugggcg

SEQ ID NO: 2388891 - RNA, 19 nt, Artificial Sequence
  Description of Artificial Sequence: Synthetic oligonucleotide
uuugggacgagggugggga

SEQ ID NO: 2388892 - RNA, 19 nt, Artificial Sequence
  Description of Artificial Sequence: Synthetic oligonucleotide
uccuacugagccuccaggc

SEQ ID NO: 2388893 - RNA, 19 nt, Artificial Sequence
  Description of Artificial Sequence: Synthetic oligonucleotide
aguacgcgcagcgaagcgc

SEQ ID NO: 2388894 - RNA, 19 nt, Artificial Sequence
  Description of Artificial Sequence: Synthetic oligonucleotide
gagaaaaggcgaaagggga

SEQ ID NO: 2388895 - RNA, 19 nt, Artificial Sequence
  Description of Artificial Sequence: Synthetic oligonucleotide
aaagaguacuugagcgacg

SEQ ID NO: 2388896 - RNA, 19 nt, Artificial Sequence
  Description of Artificial Sequence: Synthetic oligonucleotide
cuacugagccuccaggcgc

SEQ ID NO: 2388897 - RNA, 19 nt, Artificial Sequence
  Description of Artificial Sequence: Synthetic oligonucleotide
aaggggacgcggcaucauc

SEQ ID NO: 2388898 - RNA, 19 nt, Artificial Sequence
  Description of Artificial Sequence: Synthetic oligonucleotide
uuagacuggagagcuaacu

SEQ ID NO: 2388899 - RNA, 19 nt, Artificial Sequence
  Description of Artificial Sequence: Synthetic oligonucleotide
guacuugagcgacgcaucg

SEQ ID NO: 2388900 - RNA, 19 nt, Artificial Sequence
  Description of Artificial Sequence: Synthetic oligonucleotide
gcaaaaggacaauuuugcg

SEQ ID NO: 2388901 - RNA, 19 nt, Artificial Sequence
  Description of Artificial Sequence: Synthetic oligonucleotide
uagacuggagagcuaacua

SEQ ID NO: 2388902 - RNA, 19 nt, Artificial Sequence
  Description of Artificial Sequence: Synthetic oligonucleotide
ugaaauccccucuuccccu

SEQ ID NO: 2388903 - RNA, 19 nt, Artificial Sequence
  Description of Artificial Sequence: Synthetic oligonucleotide
ugcaguacgcgcagcgaag

SEQ ID NO: 2388904 - RNA, 19 nt, Artificial Sequence
  Description of Artificial Sequence: Synthetic oligonucleotide
cacgcagagauaaaaccuc

SEQ ID NO: 2388905 - RNA, 19 nt, Artificial Sequence
  Description of Artificial Sequence: Synthetic oligonucleotide
agacuggagagcuaacuaa

SEQ ID NO: 2388906 - RNA, 19 nt, Artificial Sequence
  Description of Artificial Sequence: Synthetic oligonucleotide
aucaucagacaccaugaaa

SEQ ID NO: 2388907 - RNA, 19 nt, Artificial Sequence
  Description of Artificial Sequence: Synthetic oligonucleotide
agagcuaacuaaaagggua

SEQ ID NO: 2388908 - RNA, 19 nt, Artificial Sequence
  Description of Artificial Sequence: Synthetic oligonucleotide
ugagcgacgcaucgggcgc

SEQ ID NO: 2388909 - RNA, 19 nt, Artificial Sequence
  Description of Artificial Sequence: Synthetic oligonucleotide
uggggagaaaaggcgaaag

SEQ ID NO: 2388910 - RNA, 19 nt, Artificial Sequence
  Description of Artificial Sequence: Synthetic oligonucleotide
aguacuugagcgacgcauc

SEQ ID NO: 2388911 - RNA, 19 nt, Artificial Sequence
  Description of Artificial Sequence: Synthetic oligonucleotide
cuaacuaaaaggguacgga

SEQ ID NO: 2388912 - RNA, 19 nt, Artificial Sequence
  Description of Artificial Sequence: Synthetic oligonucleotide
aggggaccacguuagacug

SEQ ID NO: 2388913 - RNA, 19 nt, Artificial Sequence
  Description of Artificial Sequence: Synthetic oligonucleotide
gaccacguuagacuggaga

SEQ ID NO: 2388914 - RNA, 19 nt, Artificial Sequence
  Description of Artificial Sequence: Synthetic oligonucleotide
aaacucgccuggauuuugg

SEQ ID NO: 2388915 - RNA, 19 nt, Artificial Sequence
  Description of Artificial Sequence: Synthetic oligonucleotide
gagcuaacuaaaaggguac

SEQ ID NO: 2388916 - RNA, 19 nt, Artificial Sequence
  Description of Artificial Sequence: Synthetic oligonucleotide
acgcagagauaaaaccucc

SEQ ID NO: 2388917 - RNA, 19 nt, Artificial Sequence
  Description of Artificial Sequence: Synthetic oligonucleotide
uuuccuagccccagguuua

SEQ ID NO: 2388918 - RNA, 19 nt, Artificial Sequence
  Description of Artificial Sequence: Synthetic oligonucleotide
acaaaggagagcggagggg

SEQ ID NO: 2388919 - RNA, 19 nt, Artificial Sequence
  Description of Artificial Sequence: Synthetic oligonucleotide
aggguacggacuuggcgac

SEQ ID NO: 2388920 - RNA, 19 nt, Artificial Sequence
  Description of Artificial Sequence: Synthetic oligonucleotide
agcuaacuaaaaggguacg

SEQ ID NO: 2388921 - RNA, 19 nt, Artificial Sequence
  Description of Artificial Sequence: Synthetic oligonucleotide
acacgcagagauaaaaccu

SEQ ID NO: 2388922 - RNA, 19 nt, Artificial Sequence
  Description of Artificial Sequence: Synthetic oligonucleotide
ggcaucaucucuccucugg

SEQ ID NO: 2388923 - RNA, 19 nt, Artificial Sequence
  Description of Artificial Sequence: Synthetic oligonucleotide
acaccaugaaauccccucu

SEQ ID NO: 2388924 - RNA, 19 nt, Artificial Sequence
  Description of Artificial Sequence: Synthetic oligonucleotide
uuugcgaguaugggguuug

SEQ ID NO: 2388925 - RNA, 19 nt, Artificial Sequence
  Description of Artificial Sequence: Synthetic oligonucleotide
aaaggcgaaaggggaccac

SEQ ID NO: 2388926 - RNA, 19 nt, Artificial Sequence
  Description of Artificial Sequence: Synthetic oligonucleotide
aaaaggcgaaaggggacca

SEQ ID NO: 2388927 - RNA, 19 nt, Artificial Sequence
  Description of Artificial Sequence: Synthetic oligonucleotide
cuggauuuuggcugcagca

SEQ ID NO: 2388928 - RNA, 19 nt, Artificial Sequence
  Description of Artificial Sequence: Synthetic oligonucleotide
gcuaacuaaaaggguacgg

SEQ ID NO: 2388929 - RNA, 19 nt, Artificial Sequence
  Description of Artificial Sequence: Synthetic oligonucleotide
ugcacacgcagagauaaaa

SEQ ID NO: 2388930 - RNA, 19 nt, Artificial Sequence
  Description of Artificial Sequence: Synthetic oligonucleotide
agcguuggcucccggauca

SEQ ID NO: 2388931 - RNA, 19 nt, Artificial Sequence
  Description of Artificial Sequence: Synthetic oligonucleotide
aguucuggccuagucuccg

SEQ ID NO: 2388932 - RNA, 19 nt, Artificial Sequence
  Description of Artificial Sequence: Synthetic oligonucleotide
gaucacaaacacaguagga

SEQ ID NO: 2388933 - RNA, 19 nt, Artificial Sequence
  Description of Artificial Sequence: Synthetic oligonucleotide
caguaggaaagucuuguca

SEQ ID NO: 2388934 - RNA, 19 nt, Artificial Sequence
  Description of Artificial Sequence: Synthetic oligonucleotide
uguggccccggaaacucgc

SEQ ID NO: 2388935 - RNA, 19 nt, Artificial Sequence
  Description of Artificial Sequence: Synthetic oligonucleotide
cuagucuccgcuggggccg

SEQ ID NO: 2388936 - RNA, 19 nt, Artificial Sequence
  Description of Artificial Sequence: Synthetic oligonucleotide
cagcgaagcgcaccgaggc

SEQ ID NO: 2388937 - RNA, 19 nt, Artificial Sequence
  Description of Artificial Sequence: Synthetic oligonucleotide
cuccuacugagccuccagg

SEQ ID NO: 2388938 - RNA, 19 nt, Artificial Sequence
  Description of Artificial Sequence: Synthetic oligonucleotide
uuccccucuuuccuagccc

SEQ ID NO: 2388939 - RNA, 19 nt, Artificial Sequence
  Description of Artificial Sequence: Synthetic oligonucleotide
gggaucacaaacacaguag

SEQ ID NO: 2388940 - RNA, 19 nt, Artificial Sequence
  Description of Artificial Sequence: Synthetic oligonucleotide
gcuuuugcauaaacaaagg

SEQ ID NO: 2388941 - RNA, 19 nt, Artificial Sequence
  Description of Artificial Sequence: Synthetic oligonucleotide
uacggacuuggcgacgccg

SEQ ID NO: 2388942 - RNA, 19 nt, Artificial Sequence
  Description of Artificial Sequence: Synthetic oligonucleotide
cagguuuaagggguugagg

SEQ ID NO: 2388943 - RNA, 19 nt, Artificial Sequence
  Description of Artificial Sequence: Synthetic oligonucleotide
gucacugcgaaggggacgc

SEQ ID NO: 2388944 - RNA, 19 nt, Artificial Sequence
  Description of Artificial Sequence: Synthetic oligonucleotide
uacuugagcgacgcaucgg

SEQ ID NO: 2388945 - RNA, 19 nt, Artificial Sequence
  Description of Artificial Sequence: Synthetic oligonucleotide
cuggccuagucuccgcugg

SEQ ID NO: 2388946 - RNA, 19 nt, Artificial Sequence
  Description of Artificial Sequence: Synthetic oligonucleotide
ugcggaugacuccuccuac

SEQ ID NO: 2388947 - RNA, 19 nt, Artificial Sequence
  Description of Artificial Sequence: Synthetic oligonucleotide
agagcggaggggcugcucu

SEQ ID NO: 2388948 - RNA, 19 nt, Artificial Sequence
  Description of Artificial Sequence: Synthetic oligonucleotide
uggcucccggaucaucuag

SEQ ID NO: 2388949 - RNA, 19 nt, Artificial Sequence
  Description of Artificial Sequence: Synthetic oligonucleotide
uaagggguugaggcuaggc

SEQ ID NO: 2388950 - RNA, 19 nt, Artificial Sequence
  Description of Artificial Sequence: Synthetic oligonucleotide
cuuuucggccgcacucucc

SEQ ID NO: 2388951 - RNA, 19 nt, Artificial Sequence
  Description of Artificial Sequence: Synthetic oligonucleotide
ucuggccuagucuccgcug

SEQ ID NO: 2388952 - RNA, 19 nt, Artificial Sequence
  Description of Artificial Sequence: Synthetic oligonucleotide
gaaacucgccuggauuuug

SEQ ID NO: 2388953 - RNA, 19 nt, Artificial Sequence
  Description of Artificial Sequence: Synthetic oligonucleotide
gacgcggcaucaucucucc

SEQ ID NO: 2388954 - RNA, 19 nt, Artificial Sequence
  Description of Artificial Sequence: Synthetic oligonucleotide
cuugagcgacgcaucgggc

SEQ ID NO: 2388955 - RNA, 19 nt, Artificial Sequence
  Description of Artificial Sequence: Synthetic oligonucleotide
ugcgaguaugggguuuggg

SEQ ID NO: 2388956 - RNA, 19 nt, Artificial Sequence
  Description of Artificial Sequence: Synthetic oligonucleotide
caaacacaguaggaaaguc

SEQ ID NO: 2388957 - RNA, 19 nt, Artificial Sequence
  Description of Artificial Sequence: Synthetic oligonucleotide
acggacuuggcgacgccgc

SEQ ID NO: 2388958 - RNA, 19 nt, Artificial Sequence
  Description of Artificial Sequence: Synthetic oligonucleotide
cuuucccaucagagcaagg

SEQ ID NO: 2388959 - RNA, 19 nt, Artificial Sequence
  Description of Artificial Sequence: Synthetic oligonucleotide
gacaggugggcgugaagca

SEQ ID NO: 2388960 - RNA, 19 nt, Artificial Sequence
  Description of Artificial Sequence: Synthetic oligonucleotide
aaauccccucuuccccucu

SEQ ID NO: 2388961 - RNA, 19 nt, Artificial Sequence
  Description of Artificial Sequence: Synthetic oligonucleotide
guuuaagggguugaggcua

SEQ ID NO: 2388962 - RNA, 19 nt, Artificial Sequence
  Description of Artificial Sequence: Synthetic oligonucleotide
augacuccuccuacugagc

SEQ ID NO: 2388963 - RNA, 19 nt, Artificial Sequence
  Description of Artificial Sequence: Synthetic oligonucleotide
uucggccgcacucuccgcu

SEQ ID NO: 2388964 - RNA, 19 nt, Artificial Sequence
  Description of Artificial Sequence: Synthetic oligonucleotide
aguaugggguuugggacga

SEQ ID NO: 2388965 - RNA, 19 nt, Artificial Sequence
  Description of Artificial Sequence: Synthetic oligonucleotide
ccaugaaauccccucuucc

SEQ ID NO: 2388966 - RNA, 19 nt, Artificial Sequence
  Description of Artificial Sequence: Synthetic oligonucleotide
gacuuggcgacgccgcgac

SEQ ID NO: 2388967 - RNA, 19 nt, Artificial Sequence
  Description of Artificial Sequence: Synthetic oligonucleotide
uggccuagucuccgcuggg

SEQ ID NO: 2388968 - RNA, 19 nt, Artificial Sequence
  Description of Artificial Sequence: Synthetic oligonucleotide
ggacaauuuugcgaguaug

SEQ ID NO: 2388969 - RNA, 19 nt, Artificial Sequence
  Description of Artificial Sequence: Synthetic oligonucleotide
gcaaggggcaucaucagac

SEQ ID NO: 2388970 - RNA, 19 nt, Artificial Sequence
  Description of Artificial Sequence: Synthetic oligonucleotide
ucuuuccuagccccagguu

SEQ ID NO: 2388971 - RNA, 19 nt, Artificial Sequence
  Description of Artificial Sequence: Synthetic oligonucleotide
gaaauccccucuuccccuc

SEQ ID NO: 2388972 - RNA, 19 nt, Artificial Sequence
  Description of Artificial Sequence: Synthetic oligonucleotide
ggaacuucugaaacguuca

SEQ ID NO: 2388973 - RNA, 19 nt, Artificial Sequence
  Description of Artificial Sequence: Synthetic oligonucleotide
aacguucaguucuggccua

SEQ ID NO: 2388974 - RNA, 19 nt, Artificial Sequence
  Description of Artificial Sequence: Synthetic oligonucleotide
cugaaacguucaguucugg

SEQ ID NO: 2388975 - RNA, 19 nt, Artificial Sequence
  Description of Artificial Sequence: Synthetic oligonucleotide
ucggagggaaaagggguga

SEQ ID NO: 2388976 - RNA, 19 nt, Artificial Sequence
  Description of Artificial Sequence: Synthetic oligonucleotide
cuaaaaggguacggacuug

SEQ ID NO: 2388977 - RNA, 19 nt, Artificial Sequence
  Description of Artificial Sequence: Synthetic oligonucleotide
gcgaguaugggguuuggga

SEQ ID NO: 2388978 - RNA, 19 nt, Artificial Sequence
  Description of Artificial Sequence: Synthetic oligonucleotide
aagcgcaccgaggcugcgg

SEQ ID NO: 2388979 - RNA, 19 nt, Artificial Sequence
  Description of Artificial Sequence: Synthetic oligonucleotide
cgaaaggggaccacguuag

SEQ ID NO: 2388980 - RNA, 19 nt, Artificial Sequence
  Description of Artificial Sequence: Synthetic oligonucleotide
caguacgcgcagcgaagcg

SEQ ID NO: 2388981 - RNA, 19 nt, Artificial Sequence
  Description of Artificial Sequence: Synthetic oligonucleotide
guugaggcuaggcuggggu

SEQ ID NO: 2388982 - RNA, 19 nt, Artificial Sequence
  Description of Artificial Sequence: Synthetic oligonucleotide
cuuccucgccauguggccc

SEQ ID NO: 2388983 - RNA, 19 nt, Artificial Sequence
  Description of Artificial Sequence: Synthetic oligonucleotide
cgaguaugggguuugggac

SEQ ID NO: 2388984 - RNA, 19 nt, Artificial Sequence
  Description of Artificial Sequence: Synthetic oligonucleotide
ggggaucacaaacacagua

SEQ ID NO: 2388985 - RNA, 19 nt, Artificial Sequence
  Description of Artificial Sequence: Synthetic oligonucleotide
aggugugggacaggacuuc

SEQ ID NO: 2388986 - RNA, 19 nt, Artificial Sequence
  Description of Artificial Sequence: Synthetic oligonucleotide
gaguacuugagcgacgcau

SEQ ID NO: 2388987 - RNA, 19 nt, Artificial Sequence
  Description of Artificial Sequence: Synthetic oligonucleotide
ggcucggagggaaaagggg

SEQ ID NO: 2388988 - RNA, 19 nt, Artificial Sequence
  Description of Artificial Sequence: Synthetic oligonucleotide
gguuguggcaaggagggga

SEQ ID NO: 2388989 - RNA, 19 nt, Artificial Sequence
  Description of Artificial Sequence: Synthetic oligonucleotide
gagagcuaacuaaaagggu

SEQ ID NO: 2388990 - RNA, 19 nt, Artificial Sequence
  Description of Artificial Sequence: Synthetic oligonucleotide
agcgcaccgaggcugcgga

SEQ ID NO: 2388991 - RNA, 19 nt, Artificial Sequence
  Description of Artificial Sequence: Synthetic oligonucleotide
uuuugcgaguaugggguuu

SEQ ID NO: 2388992 - RNA, 19 nt, Artificial Sequence
  Description of Artificial Sequence: Synthetic oligonucleotide
uugggacgaggguggggag

SEQ ID NO: 2388993 - RNA, 19 nt, Artificial Sequence
  Description of Artificial Sequence: Synthetic oligonucleotide
ggacaggacuuccuuuccc

SEQ ID NO: 2388994 - RNA, 19 nt, Artificial Sequence
  Description of Artificial Sequence: Synthetic oligonucleotide
ggcgugaagcaaaaggaca

SEQ ID NO: 2388995 - RNA, 19 nt, Artificial Sequence
  Description of Artificial Sequence: Synthetic oligonucleotide
auaaaaccuccagccacaa

SEQ ID NO: 2388996 - RNA, 19 nt, Artificial Sequence
  Description of Artificial Sequence: Synthetic oligonucleotide
cagggcugcggaugacucc

SEQ ID NO: 2388997 - RNA, 19 nt, Artificial Sequence
  Description of Artificial Sequence: Synthetic oligonucleotide
guuugggacgagggugggg

SEQ ID NO: 2388998 - RNA, 19 nt, Artificial Sequence
  Description of Artificial Sequence: Synthetic oligonucleotide
agaguacuugagcgacgca

SEQ ID NO: 2388999 - RNA, 19 nt, Artificial Sequence
  Description of Artificial Sequence: Synthetic oligonucleotide
auuuuggcugcagcagcgu

SEQ ID NO: 2389000 - RNA, 19 nt, Artificial Sequence
  Description of Artificial Sequence: Synthetic oligonucleotide
gacgaggguggggagaaaa

SEQ ID NO: 2389001 - RNA, 19 nt, Artificial Sequence
  Description of Artificial Sequence: Synthetic oligonucleotide
agcgaagcgcaccgaggcu

SEQ ID NO: 2389002 - RNA, 19 nt, Artificial Sequence
  Description of Artificial Sequence: Synthetic oligonucleotide
cacugcgaaggggacgcgg

SEQ ID NO: 2389003 - RNA, 19 nt, Artificial Sequence
  Description of Artificial Sequence: Synthetic oligonucleotide
acgaggguggggagaaaag

SEQ ID NO: 2389004 - RNA, 19 nt, Artificial Sequence
  Description of Artificial Sequence: Synthetic oligonucleotide
ugguuguggcaaggagggg

SEQ ID NO: 2389005 - RNA, 19 nt, Artificial Sequence
  Description of Artificial Sequence: Synthetic oligonucleotide
uugcgaguaugggguuugg

SEQ ID NO: 2389006 - RNA, 19 nt, Artificial Sequence
  Description of Artificial Sequence: Synthetic oligonucleotide
cugggcgcaaggacaggug

SEQ ID NO: 2389007 - RNA, 19 nt, Artificial Sequence
  Description of Artificial Sequence: Synthetic oligonucleotide
cuuggcgacgccgcgacga

SEQ ID NO: 2389008 - RNA, 19 nt, Artificial Sequence
  Description of Artificial Sequence: Synthetic oligonucleotide
ccuagucuccgcuggggcc

SEQ ID NO: 2389009 - RNA, 19 nt, Artificial Sequence
  Description of Artificial Sequence: Synthetic oligonucleotide
gcaggugugggacaggacu

SEQ ID NO: 2389010 - RNA, 19 nt, Artificial Sequence
  Description of Artificial Sequence: Synthetic oligonucleotide
cacguuagacuggagagcu

SEQ ID NO: 2389011 - RNA, 19 nt, Artificial Sequence
  Description of Artificial Sequence: Synthetic oligonucleotide
gguacggacuuggcgacgc

SEQ ID NO: 2389012 - RNA, 19 nt, Artificial Sequence
  Description of Artificial Sequence: Synthetic oligonucleotide
caaggggcaucaucagaca

SEQ ID NO: 2389013 - RNA, 19 nt, Artificial Sequence
  Description of Artificial Sequence: Synthetic oligonucleotide
guuagacuggagagcuaac

SEQ ID NO: 2389014 - RNA, 19 nt, Artificial Sequence
  Description of Artificial Sequence: Synthetic oligonucleotide
cacucuccgcucuuuaucu

SEQ ID NO: 2389015 - RNA, 19 nt, Artificial Sequence
  Description of Artificial Sequence: Synthetic oligonucleotide
ugggacgaggguggggaga

SEQ ID NO: 2389016 - RNA, 19 nt, Artificial Sequence
  Description of Artificial Sequence: Synthetic oligonucleotide
guacgcgcagcgaagcgca

SEQ ID NO: 2389017 - RNA, 19 nt, Artificial Sequence
  Description of Artificial Sequence: Synthetic oligonucleotide
gguuuaagggguugaggcu

SEQ ID NO: 2389018 - RNA, 19 nt, Artificial Sequence
  Description of Artificial Sequence: Synthetic oligonucleotide
uuucggccgcacucuccgc

SEQ ID NO: 2389019 - RNA, 19 nt, Artificial Sequence
  Description of Artificial Sequence: Synthetic oligonucleotide
aggggacgcggcaucaucu

SEQ ID NO: 2389020 - RNA, 19 nt, Artificial Sequence
  Description of Artificial Sequence: Synthetic oligonucleotide
acuuggcgacgccgcgacg

SEQ ID NO: 2389021 - RNA, 19 nt, Artificial Sequence
  Description of Artificial Sequence: Synthetic oligonucleotide
cugcaguacgcgcagcgaa

SEQ ID NO: 2389022 - RNA, 19 nt, Artificial Sequence
  Description of Artificial Sequence: Synthetic oligonucleotide
gggguggaaagaguacuug

SEQ ID NO: 2389023 - RNA, 19 nt, Artificial Sequence
  Description of Artificial Sequence: Synthetic oligonucleotide
cugcucucaggggugcggc

SEQ ID NO: 2389024 - RNA, 19 nt, Artificial Sequence
  Description of Artificial Sequence: Synthetic oligonucleotide
cacggaggcuuuugcauaa

SEQ ID NO: 2389025 - RNA, 19 nt, Artificial Sequence
  Description of Artificial Sequence: Synthetic oligonucleotide
ugcucucaggggugcggcu

SEQ ID NO: 2389026 - RNA, 19 nt, Artificial Sequence
  Description of Artificial Sequence: Synthetic oligonucleotide
ugcgaaggggacgcggcau

SEQ ID NO: 2389027 - RNA, 19 nt, Artificial Sequence
  Description of Artificial Sequence: Synthetic oligonucleotide
uuggcucccggaucaucua

SEQ ID NO: 2389028 - RNA, 19 nt, Artificial Sequence
  Description of Artificial Sequence: Synthetic oligonucleotide
gggcgugaagcaaaaggac

SEQ ID NO: 2389029 - RNA, 19 nt, Artificial Sequence
  Description of Artificial Sequence: Synthetic oligonucleotide
aucgggcgcccucugcagu

SEQ ID NO: 2389030 - RNA, 19 nt, Artificial Sequence
  Description of Artificial Sequence: Synthetic oligonucleotide
agcgacgcaucgggcgccc

SEQ ID NO: 2389031 - RNA, 19 nt, Artificial Sequence
  Description of Artificial Sequence: Synthetic oligonucleotide
gcggcucggagggaaaagg

SEQ ID NO: 2389032 - RNA, 19 nt, Artificial Sequence
  Description of Artificial Sequence: Synthetic oligonucleotide
auguggccccggaaacucg

SEQ ID NO: 2389033 - RNA, 19 nt, Artificial Sequence
  Description of Artificial Sequence: Synthetic oligonucleotide
acguucaguucuggccuag

SEQ ID NO: 2389034 - RNA, 19 nt, Artificial Sequence
  Description of Artificial Sequence: Synthetic oligonucleotide
caggugggcgugaagcaaa

SEQ ID NO: 2389035 - RNA, 19 nt, Artificial Sequence
  Description of Artificial Sequence: Synthetic oligonucleotide
gcagcgaagcgcaccgagg

SEQ ID NO: 2389036 - RNA, 19 nt, Artificial Sequence
  Description of Artificial Sequence: Synthetic oligonucleotide
gaagcgcaccgaggcugcg

SEQ ID NO: 2389037 - RNA, 19 nt, Artificial Sequence
  Description of Artificial Sequence: Synthetic oligonucleotide
ucucaggggugcggcucgg

SEQ ID NO: 2389038 - RNA, 19 nt, Artificial Sequence
  Description of Artificial Sequence: Synthetic oligonucleotide
ggcgcaaggacaggugggc

SEQ ID NO: 2389039 - RNA, 19 nt, Artificial Sequence
  Description of Artificial Sequence: Synthetic oligonucleotide
gccuagucuccgcuggggc

SEQ ID NO: 2389040 - RNA, 19 nt, Artificial Sequence
  Description of Artificial Sequence: Synthetic oligonucleotide
gcgaaaggggaccacguua

SEQ ID NO: 2389041 - RNA, 19 nt, Artificial Sequence
  Description of Artificial Sequence: Synthetic oligonucleotide
ccacguuagacuggagagc

SEQ ID NO: 2389042 - RNA, 19 nt, Artificial Sequence
  Description of Artificial Sequence: Synthetic oligonucleotide
aggcgaaaggggaccacgu

SEQ ID NO: 2389043 - RNA, 19 nt, Artificial Sequence
  Description of Artificial Sequence: Synthetic oligonucleotide
gccccggaaacucgccugg

SEQ ID NO: 2389044 - RNA, 19 nt, Artificial Sequence
  Description of Artificial Sequence: Synthetic oligonucleotide
agacaccaugaaauccccu

SEQ ID NO: 2389045 - RNA, 19 nt, Artificial Sequence
  Description of Artificial Sequence: Synthetic oligonucleotide
uccuccuacugagccucca

SEQ ID NO: 2389046 - RNA, 19 nt, Artificial Sequence
  Description of Artificial Sequence: Synthetic oligonucleotide
gcgaagcgcaccgaggcug

SEQ ID NO: 2389047 - RNA, 19 nt, Artificial Sequence
  Description of Artificial Sequence: Synthetic oligonucleotide
ucgggcgcccucugcagua

SEQ ID NO: 2389048 - RNA, 19 nt, Artificial Sequence
  Description of Artificial Sequence: Synthetic oligonucleotide
ucacugcgaaggggacgcg

SEQ ID NO: 2389049 - RNA, 19 nt, Artificial Sequence
  Description of Artificial Sequence: Synthetic oligonucleotide
acaaccccaggagcccgag

SEQ ID NO: 2389050 - RNA, 19 nt, Artificial Sequence
  Description of Artificial Sequence: Synthetic oligonucleotide
ggaaaaggggugacaggca

SEQ ID NO: 2389051 - RNA, 19 nt, Artificial Sequence
  Description of Artificial Sequence: Synthetic oligonucleotide
ugcugggcgcaaggacagg

SEQ ID NO: 2389052 - RNA, 19 nt, Artificial Sequence
  Description of Artificial Sequence: Synthetic oligonucleotide
ccgcgacgaagccagggcg

SEQ ID NO: 2389053 - RNA, 19 nt, Artificial Sequence
  Description of Artificial Sequence: Synthetic oligonucleotide
guacggacuuggcgacgcc

SEQ ID NO: 2389054 - RNA, 19 nt, Artificial Sequence
  Description of Artificial Sequence: Synthetic oligonucleotide
gcaguacgcgcagcgaagc

SEQ ID NO: 2389055 - RNA, 19 nt, Artificial Sequence
  Description of Artificial Sequence: Synthetic oligonucleotide
ggcgcacggaggcuuuugc

SEQ ID NO: 2389056 - RNA, 19 nt, Artificial Sequence
  Description of Artificial Sequence: Synthetic oligonucleotide
gccgcgacgaagccagggc

SEQ ID NO: 2389057 - RNA, 19 nt, Artificial Sequence
  Description of Artificial Sequence: Synthetic oligonucleotide
ccagguuuaagggguugag

SEQ ID NO: 2389058 - RNA, 19 nt, Artificial Sequence
  Description of Artificial Sequence: Synthetic oligonucleotide
cagcguuggcucccggauc

SEQ ID NO: 2389059 - RNA, 19 nt, Artificial Sequence
  Description of Artificial Sequence: Synthetic oligonucleotide
ggcugcggaugacuccucc

SEQ ID NO: 2389060 - RNA, 19 nt, Artificial Sequence
  Description of Artificial Sequence: Synthetic oligonucleotide
gugaagcaaaaggacaauu

SEQ ID NO: 2389061 - RNA, 19 nt, Artificial Sequence
  Description of Artificial Sequence: Synthetic oligonucleotide
cucuuuccuagccccaggu

SEQ ID NO: 2389062 - RNA, 19 nt, Artificial Sequence
  Description of Artificial Sequence: Synthetic oligonucleotide
gagcggaggggcugcucuc

SEQ ID NO: 2389063 - RNA, 19 nt, Artificial Sequence
  Description of Artificial Sequence: Synthetic oligonucleotide
ggccuagucuccgcugggg

SEQ ID NO: 2389064 - RNA, 19 nt, Artificial Sequence
  Description of Artificial Sequence: Synthetic oligonucleotide
aggggaucacaaacacagu

SEQ ID NO: 2389065 - RNA, 19 nt, Artificial Sequence
  Description of Artificial Sequence: Synthetic oligonucleotide
ggcaaggaggggaucacaa

SEQ ID NO: 2389066 - RNA, 19 nt, Artificial Sequence
  Description of Artificial Sequence: Synthetic oligonucleotide
gagcgacgcaucgggcgcc

SEQ ID NO: 2389067 - RNA, 19 nt, Artificial Sequence
  Description of Artificial Sequence: Synthetic oligonucleotide
agcggaggggcugcucuca

SEQ ID NO: 2389068 - RNA, 19 nt, Artificial Sequence
  Description of Artificial Sequence: Synthetic oligonucleotide
gaggcuaggcuggggugga

SEQ ID NO: 2389069 - RNA, 19 nt, Artificial Sequence
  Description of Artificial Sequence: Synthetic oligonucleotide
ccuuucccaucagagcaag

SEQ ID NO: 2389070 - RNA, 19 nt, Artificial Sequence
  Description of Artificial Sequence: Synthetic oligonucleotide
cccgguccccuuuucggcc

SEQ ID NO: 2389071 - RNA, 19 nt, Artificial Sequence
  Description of Artificial Sequence: Synthetic oligonucleotide
ggaggggaucacaaacaca

SEQ ID NO: 2389072 - RNA, 19 nt, Artificial Sequence
  Description of Artificial Sequence: Synthetic oligonucleotide
gcgacgaagccagggcggg

SEQ ID NO: 2389073 - RNA, 19 nt, Artificial Sequence
  Description of Artificial Sequence: Synthetic oligonucleotide
uggcgacgccgcgacgaag

SEQ ID NO: 2389074 - RNA, 19 nt, Artificial Sequence
  Description of Artificial Sequence: Synthetic oligonucleotide
gcaaggaggggaucacaaa

SEQ ID NO: 2389075 - RNA, 19 nt, Artificial Sequence
  Description of Artificial Sequence: Synthetic oligonucleotide
ggcucccggaucaucuagc

SEQ ID NO: 2389076 - RNA, 19 nt, Artificial Sequence
  Description of Artificial Sequence: Synthetic oligonucleotide
uccucgccauguggccccg

SEQ ID NO: 2389077 - RNA, 19 nt, Artificial Sequence
  Description of Artificial Sequence: Synthetic oligonucleotide
ggacgcggcaucaucucuc

SEQ ID NO: 2389078 - RNA, 19 nt, Artificial Sequence
  Description of Artificial Sequence: Synthetic oligonucleotide
gcgcaaggacaggugggcg

SEQ ID NO: 2389079 - RNA, 19 nt, Artificial Sequence
  Description of Artificial Sequence: Synthetic oligonucleotide
cucgccauguggccccgga

SEQ ID NO: 2389080 - RNA, 19 nt, Artificial Sequence
  Description of Artificial Sequence: Synthetic oligonucleotide
gucuccgcuggggccgccg

SEQ ID NO: 2389081 - RNA, 19 nt, Artificial Sequence
  Description of Artificial Sequence: Synthetic oligonucleotide
cugcgaaggggacgcggca

SEQ ID NO: 2389082 - RNA, 19 nt, Artificial Sequence
  Description of Artificial Sequence: Synthetic oligonucleotide
ccgguccccuuuucggccg

SEQ ID NO: 2389083 - RNA, 19 nt, Artificial Sequence
  Description of Artificial Sequence: Synthetic oligonucleotide
aggcgcacggaggcuuuug

SEQ ID NO: 2389084 - RNA, 19 nt, Artificial Sequence
  Description of Artificial Sequence: Synthetic oligonucleotide
ggugggcgugaagcaaaag

SEQ ID NO: 2389085 - RNA, 19 nt, Artificial Sequence
  Description of Artificial Sequence: Synthetic oligonucleotide
cuccgcuggggccgccgcc

SEQ ID NO: 2389086 - RNA, 19 nt, Artificial Sequence
  Description of Artificial Sequence: Synthetic oligonucleotide
ggggacgcggcaucaucuc

SEQ ID NO: 2389087 - RNA, 19 nt, Artificial Sequence
  Description of Artificial Sequence: Synthetic oligonucleotide
gacgcaucgggcgcccucu

SEQ ID NO: 2389088 - RNA, 19 nt, Artificial Sequence
  Description of Artificial Sequence: Synthetic oligonucleotide
gcucggagggaaaaggggu

SEQ ID NO: 2389089 - RNA, 19 nt, Artificial Sequence
  Description of Artificial Sequence: Synthetic oligonucleotide
acgcggcaucaucucuccu

SEQ ID NO: 2389090 - RNA, 19 nt, Artificial Sequence
  Description of Artificial Sequence: Synthetic oligonucleotide
ggguacggacuuggcgacg

SEQ ID NO: 2389091 - RNA, 19 nt, Artificial Sequence
  Description of Artificial Sequence: Synthetic oligonucleotide
gcggcaucaucucuccucu

SEQ ID NO: 2389092 - RNA, 19 nt, Artificial Sequence
  Description of Artificial Sequence: Synthetic oligonucleotide
acgcaucgggcgcccucug

SEQ ID NO: 2389093 - RNA, 19 nt, Artificial Sequence
  Description of Artificial Sequence: Synthetic oligonucleotide
guaugggguuugggacgag

SEQ ID NO: 2389094 - RNA, 19 nt, Artificial Sequence
  Description of Artificial Sequence: Synthetic oligonucleotide
gcgcccucugcaguacgcg

SEQ ID NO: 2389095 - RNA, 19 nt, Artificial Sequence
  Description of Artificial Sequence: Synthetic oligonucleotide
cgaagcgcaccgaggcugc

SEQ ID NO: 2389096 - RNA, 19 nt, Artificial Sequence
  Description of Artificial Sequence: Synthetic oligonucleotide
cgcagcgaagcgcaccgag

SEQ ID NO: 2389097 - RNA, 19 nt, Artificial Sequence
  Description of Artificial Sequence: Synthetic oligonucleotide
cguuagacuggagagcuaa

SEQ ID NO: 2389098 - RNA, 19 nt, Artificial Sequence
  Description of Artificial Sequence: Synthetic oligonucleotide
gcgaaggggacgcggcauc

SEQ ID NO: 2389099 - RNA, 19 nt, Artificial Sequence
  Description of Artificial Sequence: Synthetic oligonucleotide
aggugggcgugaagcaaaa

SEQ ID NO: 2389100 - RNA, 19 nt, Artificial Sequence
  Description of Artificial Sequence: Synthetic oligonucleotide
gggcgcccucugcaguacg

SEQ ID NO: 2389101 - RNA, 19 nt, Artificial Sequence
  Description of Artificial Sequence: Synthetic oligonucleotide
gcgcacggaggcuuuugca

SEQ ID NO: 2389102 - RNA, 19 nt, Artificial Sequence
  Description of Artificial Sequence: Synthetic oligonucleotide
gcagggcugcggaugacuc

SEQ ID NO: 2389103 - RNA, 19 nt, Artificial Sequence
  Description of Artificial Sequence: Synthetic oligonucleotide
cggaggcuuuugcauaaac

SEQ ID NO: 2389104 - RNA, 19 nt, Artificial Sequence
  Description of Artificial Sequence: Synthetic oligonucleotide
ggcgcccucugcaguacgc

SEQ ID NO: 2389105 - RNA, 19 nt, Artificial Sequence
  Description of Artificial Sequence: Synthetic oligonucleotide
augcacacgcagagauaaa

SEQ ID NO: 2389106 - RNA, 19 nt, Artificial Sequence
  Description of Artificial Sequence: Synthetic oligonucleotide
gcggaggggcugcucucag

SEQ ID NO: 2389107 - RNA, 19 nt, Artificial Sequence
  Description of Artificial Sequence: Synthetic oligonucleotide
gcagcguuggcucccggau

SEQ ID NO: 2389108 - RNA, 19 nt, Artificial Sequence
  Description of Artificial Sequence: Synthetic oligonucleotide
gcgacgccgcgacgaagcc

SEQ ID NO: 2389109 - RNA, 19 nt, Artificial Sequence
  Description of Artificial Sequence: Synthetic oligonucleotide
gcggaugacuccuccuacu

SEQ ID NO: 2389110 - RNA, 19 nt, Artificial Sequence
  Description of Artificial Sequence: Synthetic oligonucleotide
caaggacaggugggcguga

SEQ ID NO: 2389111 - RNA, 19 nt, Artificial Sequence
  Description of Artificial Sequence: Synthetic oligonucleotide
guccccuuuucggccgcac

SEQ ID NO: 2389112 - RNA, 19 nt, Artificial Sequence
  Description of Artificial Sequence: Synthetic oligonucleotide
ggacuuggcgacgccgcga

SEQ ID NO: 2389113 - RNA, 19 nt, Artificial Sequence
  Description of Artificial Sequence: Synthetic oligonucleotide
cgcccucugcaguacgcgc

SEQ ID NO: 2389114 - RNA, 19 nt, Artificial Sequence
  Description of Artificial Sequence: Synthetic oligonucleotide
acguuagacuggagagcua

SEQ ID NO: 2389115 - RNA, 19 nt, Artificial Sequence
  Description of Artificial Sequence: Synthetic oligonucleotide
gcugcggaugacuccuccu

SEQ ID NO: 2389116 - RNA, 19 nt, Artificial Sequence
  Description of Artificial Sequence: Synthetic oligonucleotide
cggacuuggcgacgccgcg

SEQ ID NO: 2389117 - RNA, 19 nt, Artificial Sequence
  Description of Artificial Sequence: Synthetic oligonucleotide
ggcuaggcugggguggaaa

SEQ ID NO: 2389118 - RNA, 19 nt, Artificial Sequence
  Description of Artificial Sequence: Synthetic oligonucleotide
gaaggggacgcggcaucau

SEQ ID NO: 2389119 - RNA, 19 nt, Artificial Sequence
  Description of Artificial Sequence: Synthetic oligonucleotide
gggacgcggcaucaucucu

SEQ ID NO: 2389120 - RNA, 19 nt, Artificial Sequence
  Description of Artificial Sequence: Synthetic oligonucleotide
gugcggcucggagggaaaa

SEQ ID NO: 2389121 - RNA, 19 nt, Artificial Sequence
  Description of Artificial Sequence: Synthetic oligonucleotide
ggaccacguuagacuggag

SEQ ID NO: 2389122 - RNA, 19 nt, Artificial Sequence
  Description of Artificial Sequence: Synthetic oligonucleotide
cggaaacucgccuggauuu

SEQ ID NO: 2389123 - RNA, 19 nt, Artificial Sequence
  Description of Artificial Sequence: Synthetic oligonucleotide
ggcgaaaggggaccacguu

SEQ ID NO: 2389124 - RNA, 19 nt, Artificial Sequence
  Description of Artificial Sequence: Synthetic oligonucleotide
gcgcaccgaggcugcggag

SEQ ID NO: 2389125 - RNA, 19 nt, Artificial Sequence
  Description of Artificial Sequence: Synthetic oligonucleotide
ggcagggcugcggaugacu

SEQ ID NO: 2389126 - RNA, 19 nt, Artificial Sequence
  Description of Artificial Sequence: Synthetic oligonucleotide
cucaggggugcggcucgga

SEQ ID NO: 2389127 - RNA, 19 nt, Artificial Sequence
  Description of Artificial Sequence: Synthetic oligonucleotide
gggugcggcucggagggaa

SEQ ID NO: 2389128 - RNA, 19 nt, Artificial Sequence
  Description of Artificial Sequence: Synthetic oligonucleotide
cgccgcgacgaagccaggg

SEQ ID NO: 2389129 - RNA, 19 nt, Artificial Sequence
  Description of Artificial Sequence: Synthetic oligonucleotide
ccggaaacucgccuggauu

SEQ ID NO: 2389130 - RNA, 19 nt, Artificial Sequence
  Description of Artificial Sequence: Synthetic oligonucleotide
cgcacggaggcuuuugcau

SEQ ID NO: 2389131 - RNA, 19 nt, Artificial Sequence
  Description of Artificial Sequence: Synthetic oligonucleotide
acgccgcgacgaagccagg

SEQ ID NO: 2389132 - RNA, 19 nt, Artificial Sequence
  Description of Artificial Sequence: Synthetic oligonucleotide
ggugcggcucggagggaaa

SEQ ID NO: 2389133 - RNA, 19 nt, Artificial Sequence
  Description of Artificial Sequence: Synthetic oligonucleotide
cgacgaagccagggcgggg

SEQ ID NO: 2389134 - RNA, 19 nt, Artificial Sequence
  Description of Artificial Sequence: Synthetic oligonucleotide
cggcaucaucucuccucug

SEQ ID NO: 2389135 - RNA, 19 nt, Artificial Sequence
  Description of Artificial Sequence: Synthetic oligonucleotide
cgacgcaucgggcgcccuc

SEQ ID NO: 2389136 - RNA, 19 nt, Artificial Sequence
  Description of Artificial Sequence: Synthetic oligonucleotide
cccuuuucggccgcacucu

SEQ ID NO: 2389137 - RNA, 19 nt, Artificial Sequence
  Description of Artificial Sequence: Synthetic oligonucleotide
gguccccuuuucggccgca

SEQ ID NO: 2389138 - RNA, 19 nt, Artificial Sequence
  Description of Artificial Sequence: Synthetic oligonucleotide
ccucgccauguggccccgg

SEQ ID NO: 2389139 - RNA, 19 nt, Artificial Sequence
  Description of Artificial Sequence: Synthetic oligonucleotide
cccggaaacucgccuggau

SEQ ID NO: 2389140 - RNA, 19 nt, Artificial Sequence
  Description of Artificial Sequence: Synthetic oligonucleotide
ccgcacucuccgcucuuua

SEQ ID NO: 2389141 - RNA, 19 nt, Artificial Sequence
  Description of Artificial Sequence: Synthetic oligonucleotide
ggacgaggguggggagaaa

SEQ ID NO: 2389142 - RNA, 19 nt, Artificial Sequence
  Description of Artificial Sequence: Synthetic oligonucleotide
cgcacucuccgcucuuuau

SEQ ID NO: 2389143 - RNA, 19 nt, Artificial Sequence
  Description of Artificial Sequence: Synthetic oligonucleotide
ggagagcggaggggcugcu

SEQ ID NO: 2389144 - RNA, 19 nt, Artificial Sequence
  Description of Artificial Sequence: Synthetic oligonucleotide
cgacgccgcgacgaagcca

SEQ ID NO: 2389145 - RNA, 19 nt, Artificial Sequence
  Description of Artificial Sequence: Synthetic oligonucleotide
cgggcgcccucugcaguac

SEQ ID NO: 2389146 - RNA, 19 nt, Artificial Sequence
  Description of Artificial Sequence: Synthetic oligonucleotide
ggggugcggcucggaggga

SEQ ID NO: 2389147 - RNA, 19 nt, Artificial Sequence
  Description of Artificial Sequence: Synthetic oligonucleotide
caggcgcacggaggcuuuu

SEQ ID NO: 2389148 - RNA, 19 nt, Artificial Sequence
  Description of Artificial Sequence: Synthetic oligonucleotide
gccccagguuuaagggguu

SEQ ID NO: 2389149 - RNA, 19 nt, Artificial Sequence
  Description of Artificial Sequence: Synthetic oligonucleotide
cgccuggauuuuggcugca

SEQ ID NO: 2389150 - RNA, 19 nt, Artificial Sequence
  Description of Artificial Sequence: Synthetic oligonucleotide
gcguuggcucccggaucau

SEQ ID NO: 2389151 - RNA, 19 nt, Artificial Sequence
  Description of Artificial Sequence: Synthetic oligonucleotide
ccgggucccgguccccuuu

SEQ ID NO: 2389152 - RNA, 19 nt, Artificial Sequence
  Description of Artificial Sequence: Synthetic oligonucleotide
gcgacgcaucgggcgcccu

SEQ ID NO: 2389153 - RNA, 19 nt, Artificial Sequence
  Description of Artificial Sequence: Synthetic oligonucleotide
cccgggucccgguccccuu

SEQ ID NO: 2389154 - RNA, 19 nt, Artificial Sequence
  Description of Artificial Sequence: Synthetic oligonucleotide
aaugacaacacucaugaug

SEQ ID NO: 2389155 - RNA, 19 nt, Artificial Sequence
  Description of Artificial Sequence: Synthetic oligonucleotide
aaaacacucaagcagaaca

SEQ ID NO: 2389156 - RNA, 19 nt, Artificial Sequence
  Description of Artificial Sequence: Synthetic oligonucleotide
uuucaaagcccucagaacc

SEQ ID NO: 2389157 - RNA, 19 nt, Artificial Sequence
  Description of Artificial Sequence: Synthetic oligonucleotide
uccaagauagcucucauug

SEQ ID NO: 2389158 - RNA, 19 nt, Artificial Sequence
  Description of Artificial Sequence: Synthetic oligonucleotide
uucacagacugaaugaggg

SEQ ID NO: 2389159 - RNA, 19 nt, Artificial Sequence
  Description of Artificial Sequence: Synthetic oligonucleotide
cucucauugaaguuuaugg

SEQ ID NO: 2389160 - RNA, 19 nt, Artificial Sequence
  Description of Artificial Sequence: Synthetic oligonucleotide
accgaaauaguuuucaaag

SEQ ID NO: 2389161 - RNA, 19 nt, Artificial Sequence
  Description of Artificial Sequence: Synthetic oligonucleotide
gaucaucacaaucugacag

SEQ ID NO: 2389162 - RNA, 19 nt, Artificial Sequence
  Description of Artificial Sequence: Synthetic oligonucleotide
ucuauguacagcaaacagc

SEQ ID NO: 2389163 - RNA, 19 nt, Artificial Sequence
  Description of Artificial Sequence: Synthetic oligonucleotide
augacaacacucaugaugc

SEQ ID NO: 2389164 - RNA, 19 nt, Artificial Sequence
  Description of Artificial Sequence: Synthetic oligonucleotide
aucacaaucugacagcuuc

SEQ ID NO: 2389165 - RNA, 19 nt, Artificial Sequence
  Description of Artificial Sequence: Synthetic oligonucleotide
ucucauugaaguuuauggg

SEQ ID NO: 2389166 - RNA, 19 nt, Artificial Sequence
  Description of Artificial Sequence: Synthetic oligonucleotide
cuaagagagacccagggcc

SEQ ID NO: 2389167 - RNA, 19 nt, Artificial Sequence
  Description of Artificial Sequence: Synthetic oligonucleotide
  modified_base (3)..(3): a, c, u, g, unknown or other
uunuucuugauuuccaccu

SEQ ID NO: 2389168 - RNA, 19 nt, Artificial Sequence
  Description of Artificial Sequence: Synthetic oligonucleotide
uguacagcaaacagcagug

SEQ ID NO: 2389169 - RNA, 19 nt, Artificial Sequence
  Description of Artificial Sequence: Synthetic oligonucleotide
gaugcuauugauccugucc

SEQ ID NO: 2389170 - RNA, 19 nt, Artificial Sequence
  Description of Artificial Sequence: Synthetic oligonucleotide
aucaucacaaucugacagc

SEQ ID NO: 2389171 - RNA, 19 nt, Artificial Sequence
  Description of Artificial Sequence: Synthetic oligonucleotide
cucauugaaguuuaugggc

SEQ ID NO: 2389172 - RNA, 19 nt, Artificial Sequence
  Description of Artificial Sequence: Synthetic oligonucleotide
aguguuuuaacggaggaag

SEQ ID NO: 2389173 - RNA, 19 nt, Artificial Sequence
  Description of Artificial Sequence: Synthetic oligonucleotide
uuagccucuauguacagca

SEQ ID NO: 2389174 - RNA, 19 nt, Artificial Sequence
  Description of Artificial Sequence: Synthetic oligonucleotide
agucuugagaagugggucc

SEQ ID NO: 2389175 - RNA, 19 nt, Artificial Sequence
  Description of Artificial Sequence: Synthetic oligonucleotide
guugauauacucuucccag

SEQ ID NO: 2389176 - RNA, 19 nt, Artificial Sequence
  Description of Artificial Sequence: Synthetic oligonucleotide
uugauuuccaccucaguug

SEQ ID NO: 2389177 - RNA, 19 nt, Artificial Sequence
  Description of Artificial Sequence: Synthetic oligonucleotide
uguugauauacucuuccca

SEQ ID NO: 2389178 - RNA, 19 nt, Artificial Sequence
  Description of Artificial Sequence: Synthetic oligonucleotide
caugaugcaagucuuggcc

SEQ ID NO: 2389179 - RNA, 19 nt, Artificial Sequence
  Description of Artificial Sequence: Synthetic oligonucleotide
  modified_base (4)..(4): a, c, u, g, unknown or other
cuunuucuugauuuccacc

SEQ ID NO: 2389180 - RNA, 19 nt, Artificial Sequence
  Description of Artificial Sequence: Synthetic oligonucleotide
gacuaagagagacccaggg

SEQ ID NO: 2389181 - RNA, 19 nt, Artificial Sequence
  Description of Artificial Sequence: Synthetic oligonucleotide
cucaggaguguuuuaacgg

SEQ ID NO: 2389182 - RNA, 19 nt, Artificial Sequence
  Description of Artificial Sequence: Synthetic oligonucleotide
ucaagaucaucacaaucug

SEQ ID NO: 2389183 - RNA, 19 nt, Artificial Sequence
  Description of Artificial Sequence: Synthetic oligonucleotide
aaacacucaagcagaacac

SEQ ID NO: 2389184 - RNA, 19 nt, Artificial Sequence
  Description of Artificial Sequence: Synthetic oligonucleotide
cagaacacggucaagauca

SEQ ID NO: 2389185 - RNA, 19 nt, Artificial Sequence
  Description of Artificial Sequence: Synthetic oligonucleotide
aaauaguuuucaaagcccu

SEQ ID NO: 2389186 - RNA, 19 nt, Artificial Sequence
  Description of Artificial Sequence: Synthetic oligonucleotide
gagacuaagagagacccag

SEQ ID NO: 2389187 - RNA, 19 nt, Artificial Sequence
  Description of Artificial Sequence: Synthetic oligonucleotide
gaacuguucccacagagca

SEQ ID NO: 2389188 - RNA, 19 nt, Artificial Sequence
  Description of Artificial Sequence: Synthetic oligonucleotide
aguaaccugaaaugacaac

SEQ ID NO: 2389189 - RNA, 19 nt, Artificial Sequence
  Description of Artificial Sequence: Synthetic oligonucleotide
auguacagcaaacagcagu

SEQ ID NO: 2389190 - RNA, 19 nt, Artificial Sequence
  Description of Artificial Sequence: Synthetic oligonucleotide
agcgacaccacgccguugc

SEQ ID NO: 2389191 - RNA, 19 nt, Artificial Sequence
  Description of Artificial Sequence: Synthetic oligonucleotide
aacacucaagcagaacacg

SEQ ID NO: 2389192 - RNA, 19 nt, Artificial Sequence
  Description of Artificial Sequence: Synthetic oligonucleotide
uauugauccuguccuuccg

SEQ ID NO: 2389193 - RNA, 19 nt, Artificial Sequence
  Description of Artificial Sequence: Synthetic oligonucleotide
ggcgaaaacacucaagcag

SEQ ID NO: 2389194 - RNA, 19 nt, Artificial Sequence
  Description of Artificial Sequence: Synthetic oligonucleotide
gaagguuccccaugaacag

SEQ ID NO: 2389195 - RNA, 19 nt, Artificial Sequence
  Description of Artificial Sequence: Synthetic oligonucleotide
cucuauguacagcaaacag

SEQ ID NO: 2389196 - RNA, 19 nt, Artificial Sequence
  Description of Artificial Sequence: Synthetic oligonucleotide
ugauauacucuucccaguc

SEQ ID NO: 2389197 - RNA, 19 nt, Artificial Sequence
  Description of Artificial Sequence: Synthetic oligonucleotide
uaaccugaaaugacaacac

SEQ ID NO: 2389198 - RNA, 19 nt, Artificial Sequence
  Description of Artificial Sequence: Synthetic oligonucleotide
ucaggaguguuuuaacgga

SEQ ID NO: 2389199 - RNA, 19 nt, Artificial Sequence
  Description of Artificial Sequence: Synthetic oligonucleotide
ugauuuccaccucaguugu

SEQ ID NO: 2389200 - RNA, 19 nt, Artificial Sequence
  Description of Artificial Sequence: Synthetic oligonucleotide
augcuauugauccuguccu

SEQ ID NO: 2389201 - RNA, 19 nt, Artificial Sequence
  Description of Artificial Sequence: Synthetic oligonucleotide
uguugccucaggcaggagc

SEQ ID NO: 2389202 - RNA, 19 nt, Artificial Sequence
  Description of Artificial Sequence: Synthetic oligonucleotide
acacacacacaccacaugu

SEQ ID NO: 2389203 - RNA, 19 nt, Artificial Sequence
  Description of Artificial Sequence: Synthetic oligonucleotide
gauccuguccuuccguccg

SEQ ID NO: 2389204 - RNA, 19 nt, Artificial Sequence
  Description of Artificial Sequence: Synthetic oligonucleotide
aacagcugcaggccaauca

SEQ ID NO: 2389205 - RNA, 19 nt, Artificial Sequence
  Description of Artificial Sequence: Synthetic oligonucleotide
cacagacugaaugagggcg

SEQ ID NO: 2389206 - RNA, 19 nt, Artificial Sequence
  Description of Artificial Sequence: Synthetic oligonucleotide
guaaccugaaaugacaaca

SEQ ID NO: 2389207 - RNA, 19 nt, Artificial Sequence
  Description of Artificial Sequence: Synthetic oligonucleotide
gugccauuuuccaagauag

SEQ ID NO: 2389208 - RNA, 19 nt, Artificial Sequence
  Description of Artificial Sequence: Synthetic oligonucleotide
ucaguuguugccucaggca

SEQ ID NO: 2389209 - RNA, 19 nt, Artificial Sequence
  Description of Artificial Sequence: Synthetic oligonucleotide
caaucaggggcgaaaacac

SEQ ID NO: 2389210 - RNA, 19 nt, Artificial Sequence
  Description of Artificial Sequence: Synthetic oligonucleotide
uuguugauauacucuuccc

SEQ ID NO: 2389211 - RNA, 19 nt, Artificial Sequence
  Description of Artificial Sequence: Synthetic oligonucleotide
uuuaacggaggaagucuug

SEQ ID NO: 2389212 - RNA, 19 nt, Artificial Sequence
  Description of Artificial Sequence: Synthetic oligonucleotide
auuaccgaaauaguuuuca

SEQ ID NO: 2389213 - RNA, 19 nt, Artificial Sequence
  Description of Artificial Sequence: Synthetic oligonucleotide
uuuaugggccacaccacac

SEQ ID NO: 2389214 - RNA, 19 nt, Artificial Sequence
  Description of Artificial Sequence: Synthetic oligonucleotide
uagcaugccaggaacuaug

SEQ ID NO: 2389215 - RNA, 19 nt, Artificial Sequence
  Description of Artificial Sequence: Synthetic oligonucleotide
caccacaccacuuguuucg

SEQ ID NO: 2389216 - RNA, 19 nt, Artificial Sequence
  Description of Artificial Sequence: Synthetic oligonucleotide
uuaugggccacaccacacc

SEQ ID NO: 2389217 - RNA, 19 nt, Artificial Sequence
  Description of Artificial Sequence: Synthetic oligonucleotide
cuauugauccuguccuucc

SEQ ID NO: 2389218 - RNA, 19 nt, Artificial Sequence
  Description of Artificial Sequence: Synthetic oligonucleotide
acuuguuucgaagguuccc

SEQ ID NO: 2389219 - RNA, 19 nt, Artificial Sequence
  Description of Artificial Sequence: Synthetic oligonucleotide
uguccuuccguccguagga

SEQ ID NO: 2389220 - RNA, 19 nt, Artificial Sequence
  Description of Artificial Sequence: Synthetic oligonucleotide
cauggagacuaagagagac

SEQ ID NO: 2389221 - RNA, 19 nt, Artificial Sequence
  Description of Artificial Sequence: Synthetic oligonucleotide
aagauagcucucauugaag

SEQ ID NO: 2389222 - RNA, 19 nt, Artificial Sequence
  Description of Artificial Sequence: Synthetic oligonucleotide
  modified_base (9)..(9): a, c, u, g, unknown or other
agggccuunuucuugauuu

SEQ ID NO: 2389223 - RNA, 19 nt, Artificial Sequence
  Description of Artificial Sequence: Synthetic oligonucleotide
cuuguuucgaagguucccc

SEQ ID NO: 2389224 - RNA, 19 nt, Artificial Sequence
  Description of Artificial Sequence: Synthetic oligonucleotide
ugguccauggagacuaaga

SEQ ID NO: 2389225 - RNA, 19 nt, Artificial Sequence
  Description of Artificial Sequence: Synthetic oligonucleotide
uacucuucccagucaaagc

SEQ ID NO: 2389226 - RNA, 19 nt, Artificial Sequence
  Description of Artificial Sequence: Synthetic oligonucleotide
auauacucuucccagucaa

SEQ ID NO: 2389227 - RNA, 19 nt, Artificial Sequence
  Description of Artificial Sequence: Synthetic oligonucleotide
uaagagagacccagggccu

SEQ ID NO: 2389228 - RNA, 19 nt, Artificial Sequence
  Description of Artificial Sequence: Synthetic oligonucleotide
uaccgaaauaguuuucaaa

SEQ ID NO: 2389229 - RNA, 19 nt, Artificial Sequence
  Description of Artificial Sequence: Synthetic oligonucleotide
uuuuaacggaggaagucuu

SEQ ID NO: 2389230 - RNA, 19 nt, Artificial Sequence
  Description of Artificial Sequence: Synthetic oligonucleotide
ucgaagguuccccaugaac

SEQ ID NO: 2389231 - RNA, 19 nt, Artificial Sequence
  Description of Artificial Sequence: Synthetic oligonucleotide
cucaguuguugccucaggc

SEQ ID NO: 2389232 - RNA, 19 nt, Artificial Sequence
  Description of Artificial Sequence: Synthetic oligonucleotide
gaugagcgacaccacgccg

SEQ ID NO: 2389233 - RNA, 19 nt, Artificial Sequence
  Description of Artificial Sequence: Synthetic oligonucleotide
uguuuuaacggaggaaguc

SEQ ID NO: 2389234 - RNA, 19 nt, Artificial Sequence
  Description of Artificial Sequence: Synthetic oligonucleotide
acagagcaaggguucuagc

SEQ ID NO: 2389235 - RNA, 19 nt, Artificial Sequence
  Description of Artificial Sequence: Synthetic oligonucleotide
auacucuucccagucaaag

SEQ ID NO: 2389236 - RNA, 19 nt, Artificial Sequence
  Description of Artificial Sequence: Synthetic oligonucleotide
acggaggaagucuugagaa

SEQ ID NO: 2389237 - RNA, 19 nt, Artificial Sequence
  Description of Artificial Sequence: Synthetic oligonucleotide
ggggcgaaaacacucaagc

SEQ ID NO: 2389238 - RNA, 19 nt, Artificial Sequence
  Description of Artificial Sequence: Synthetic oligonucleotide
acucaugaugcuauugauc

SEQ ID NO: 2389239 - RNA, 19 nt, Artificial Sequence
  Description of Artificial Sequence: Synthetic oligonucleotide
cuauguaaaaguuuguuuu

SEQ ID NO: 2389240 - RNA, 19 nt, Artificial Sequence
  Description of Artificial Sequence: Synthetic oligonucleotide
cacaccacuuguuucgaag

SEQ ID NO: 2389241 - RNA, 19 nt, Artificial Sequence
  Description of Artificial Sequence: Synthetic oligonucleotide
uuaacggaggaagucuuga

SEQ ID NO: 2389242 - RNA, 19 nt, Artificial Sequence
  Description of Artificial Sequence: Synthetic oligonucleotide
uguaaaaguuuguuuuauu

SEQ ID NO: 2389243 - RNA, 19 nt, Artificial Sequence
  Description of Artificial Sequence: Synthetic oligonucleotide
agagcaaggguucuagcau

SEQ ID NO: 2389244 - RNA, 19 nt, Artificial Sequence
  Description of Artificial Sequence: Synthetic oligonucleotide
ugaaugagggcgcccacaa

SEQ ID NO: 2389245 - RNA, 19 nt, Artificial Sequence
  Description of Artificial Sequence: Synthetic oligonucleotide
  modified_base (15)..(15): a, c, u, g, unknown or other
agacccagggccuunuucu

SEQ ID NO: 2389246 - RNA, 19 nt, Artificial Sequence
  Description of Artificial Sequence: Synthetic oligonucleotide
gauauacucuucccaguca

SEQ ID NO: 2389247 - RNA, 19 nt, Artificial Sequence
  Description of Artificial Sequence: Synthetic oligonucleotide
ucaucacaaucugacagcu

SEQ ID NO: 2389248 - RNA, 19 nt, Artificial Sequence
  Description of Artificial Sequence: Synthetic oligonucleotide
augaugcaagucuuggccu

SEQ ID NO: 2389249 - RNA, 19 nt, Artificial Sequence
  Description of Artificial Sequence: Synthetic oligonucleotide
acagacugaaugagggcgc

SEQ ID NO: 2389250 - RNA, 19 nt, Artificial Sequence
  Description of Artificial Sequence: Synthetic oligonucleotide
aucaggggcgaaaacacuc

SEQ ID NO: 2389251 - RNA, 19 nt, Artificial Sequence
  Description of Artificial Sequence: Synthetic oligonucleotide
  modified_base (2)..(2): a, c, u, g, unknown or other
unuucuugauuuccaccuc

SEQ ID NO: 2389252 - RNA, 19 nt, Artificial Sequence
  Description of Artificial Sequence: Synthetic oligonucleotide
cuuggccccacuuagccuc

SEQ ID NO: 2389253 - RNA, 19 nt, Artificial Sequence
  Description of Artificial Sequence: Synthetic oligonucleotide
uaacggaggaagucuugag

SEQ ID NO: 2389254 - RNA, 19 nt, Artificial Sequence
  Description of Artificial Sequence: Synthetic oligonucleotide
gaaguuuaugggccacacc

SEQ ID NO: 2389255 - RNA, 19 nt, Artificial Sequence
  Description of Artificial Sequence: Synthetic oligonucleotide
ccugggauuaccgaaauag

SEQ ID NO: 2389256 - RNA, 19 nt, Artificial Sequence
  Description of Artificial Sequence: Synthetic oligonucleotide
ucaggggcgaaaacacuca

SEQ ID NO: 2389257 - RNA, 19 nt, Artificial Sequence
  Description of Artificial Sequence: Synthetic oligonucleotide
ucccagucaaagccucugg

SEQ ID NO: 2389258 - RNA, 19 nt, Artificial Sequence
  Description of Artificial Sequence: Synthetic oligonucleotide
uacacuagccaugaugcaa

SEQ ID NO: 2389259 - RNA, 19 nt, Artificial Sequence
  Description of Artificial Sequence: Synthetic oligonucleotide
gucaagaucaucacaaucu

SEQ ID NO: 2389260 - RNA, 19 nt, Artificial Sequence
  Description of Artificial Sequence: Synthetic oligonucleotide
cacacacacacacacacca

SEQ ID NO: 2389261 - RNA, 19 nt, Artificial Sequence
  Description of Artificial Sequence: Synthetic oligonucleotide
auggagacuaagagagacc

SEQ ID NO: 2389262 - RNA, 19 nt, Artificial Sequence
  Description of Artificial Sequence: Synthetic oligonucleotide
acaugugcacaccugccca

SEQ ID NO: 2389263 - RNA, 19 nt, Artificial Sequence
  Description of Artificial Sequence: Synthetic oligonucleotide
uucuagcaugccaggaacu

SEQ ID NO: 2389264 - RNA, 19 nt, Artificial Sequence
  Description of Artificial Sequence: Synthetic oligonucleotide
ugaaguuuaugggccacac

SEQ ID NO: 2389265 - RNA, 19 nt, Artificial Sequence
  Description of Artificial Sequence: Synthetic oligonucleotide
ucacaaucugacagcuucu

SEQ ID NO: 2389266 - RNA, 19 nt, Artificial Sequence
  Description of Artificial Sequence: Synthetic oligonucleotide
uuaccgaaauaguuuucaa

SEQ ID NO: 2389267 - RNA, 19 nt, Artificial Sequence
  Description of Artificial Sequence: Synthetic oligonucleotide
caagauagcucucauugaa

SEQ ID NO: 2389268 - RNA, 19 nt, Artificial Sequence
  Description of Artificial Sequence: Synthetic oligonucleotide
agcaucagaacuguuccca

SEQ ID NO: 2389269 - RNA, 19 nt, Artificial Sequence
  Description of Artificial Sequence: Synthetic oligonucleotide
caguccacggugcuguugc

SEQ ID NO: 2389270 - RNA, 19 nt, Artificial Sequence
  Description of Artificial Sequence: Synthetic oligonucleotide
auugauccuguccuuccgu

SEQ ID NO: 2389271 - RNA, 19 nt, Artificial Sequence
  Description of Artificial Sequence: Synthetic oligonucleotide
cuagccaugaugcaagucu

SEQ ID NO: 2389272 - RNA, 19 nt, Artificial Sequence
  Description of Artificial Sequence: Synthetic oligonucleotide
gaacccugaaagugcgcag

SEQ ID NO: 2389273 - RNA, 19 nt, Artificial Sequence
  Description of Artificial Sequence: Synthetic oligonucleotide
ggcuacacuagccaugaug

SEQ ID NO: 2389274 - RNA, 19 nt, Artificial Sequence
  Description of Artificial Sequence: Synthetic oligonucleotide
cugggcauugcccagcauc

SEQ ID NO: 2389275 - RNA, 19 nt, Artificial Sequence
  Description of Artificial Sequence: Synthetic oligonucleotide
ucuucccagucaaagccuc

SEQ ID NO: 2389276 - RNA, 19 nt, Artificial Sequence
  Description of Artificial Sequence: Synthetic oligonucleotide
agaaguggguccaggcuac

SEQ ID NO: 2389277 - RNA, 19 nt, Artificial Sequence
  Description of Artificial Sequence: Synthetic oligonucleotide
uuuccaagauagcucucau

SEQ ID NO: 2389278 - RNA, 19 nt, Artificial Sequence
  Description of Artificial Sequence: Synthetic oligonucleotide
gagaaguggguccaggcua

SEQ ID NO: 2389279 - RNA, 19 nt, Artificial Sequence
  Description of Artificial Sequence: Synthetic oligonucleotide
aggaguguuuuaacggagg

SEQ ID NO: 2389280 - RNA, 19 nt, Artificial Sequence
  Description of Artificial Sequence: Synthetic oligonucleotide
ugccauuuuccaagauagc

SEQ ID NO: 2389281 - RNA, 19 nt, Artificial Sequence
  Description of Artificial Sequence: Synthetic oligonucleotide
uuguuucgaagguucccca

SEQ ID NO: 2389282 - RNA, 19 nt, Artificial Sequence
  Description of Artificial Sequence: Synthetic oligonucleotide
aaguggguccaggcuacac

SEQ ID NO: 2389283 - RNA, 19 nt, Artificial Sequence
  Description of Artificial Sequence: Synthetic oligonucleotide
aaaugacaacacucaugau

SEQ ID NO: 2389284 - RNA, 19 nt, Artificial Sequence
  Description of Artificial Sequence: Synthetic oligonucleotide
aggguucuagcaugccagg

SEQ ID NO: 2389285 - RNA, 19 nt, Artificial Sequence
  Description of Artificial Sequence: Synthetic oligonucleotide
acaacacucaugaugcuau

SEQ ID NO: 2389286 - RNA, 19 nt, Artificial Sequence
  Description of Artificial Sequence: Synthetic oligonucleotide
ccgaaauaguuuucaaagc

SEQ ID NO: 2389287 - RNA, 19 nt, Artificial Sequence
  Description of Artificial Sequence: Synthetic oligonucleotide
cacuuguuucgaagguucc

SEQ ID NO: 2389288 - RNA, 19 nt, Artificial Sequence
  Description of Artificial Sequence: Synthetic oligonucleotide
aacccugaaagugcgcaga

SEQ ID NO: 2389289 - RNA, 19 nt, Artificial Sequence
  Description of Artificial Sequence: Synthetic oligonucleotide
guccguaggaggcaagcug

SEQ ID NO: 2389290 - RNA, 19 nt, Artificial Sequence
  Description of Artificial Sequence: Synthetic oligonucleotide
guccauggagacuaagaga

SEQ ID NO: 2389291 - RNA, 19 nt, Artificial Sequence
  Description of Artificial Sequence: Synthetic oligonucleotide
cacaccugcccacuuggcc

SEQ ID NO: 2389292 - RNA, 19 nt, Artificial Sequence
  Description of Artificial Sequence: Synthetic oligonucleotide
cacacacacaccacaugug

SEQ ID NO: 2389293 - RNA, 19 nt, Artificial Sequence
  Description of Artificial Sequence: Synthetic oligonucleotide
uccuuccguccguaggagg

SEQ ID NO: 2389294 - RNA, 19 nt, Artificial Sequence
  Description of Artificial Sequence: Synthetic oligonucleotide
agccucuggugccauuuuc

SEQ ID NO: 2389295 - RNA, 19 nt, Artificial Sequence
  Description of Artificial Sequence: Synthetic oligonucleotide
acuuagccucuauguacag

SEQ ID NO: 2389296 - RNA, 19 nt, Artificial Sequence
  Description of Artificial Sequence: Synthetic oligonucleotide
aaagcccucagaacccuga

SEQ ID NO: 2389297 - RNA, 19 nt, Artificial Sequence
  Description of Artificial Sequence: Synthetic oligonucleotide
cugaaagugcgcagagcug

SEQ ID NO: 2389298 - RNA, 19 nt, Artificial Sequence
  Description of Artificial Sequence: Synthetic oligonucleotide
uguugcgcuugacgcugcg

SEQ ID NO: 2389299 - RNA, 19 nt, Artificial Sequence
  Description of Artificial Sequence: Synthetic oligonucleotide
cuugacgcugcgccgcagg

SEQ ID NO: 2389300 - RNA, 19 nt, Artificial Sequence
  Description of Artificial Sequence: Synthetic oligonucleotide
ucccacagagcaaggguuc

SEQ ID NO: 2389301 - RNA, 19 nt, Artificial Sequence
  Description of Artificial Sequence: Synthetic oligonucleotide
ucuagcaugccaggaacua

SEQ ID NO: 2389302 - RNA, 19 nt, Artificial Sequence
  Description of Artificial Sequence: Synthetic oligonucleotide
uugauccuguccuuccguc

SEQ ID NO: 2389303 - RNA, 19 nt, Artificial Sequence
  Description of Artificial Sequence: Synthetic oligonucleotide
cuugauuuccaccucaguu

SEQ ID NO: 2389304 - RNA, 19 nt, Artificial Sequence
  Description of Artificial Sequence: Synthetic oligonucleotide
cuuagccucuauguacagc

SEQ ID NO: 2389305 - RNA, 19 nt, Artificial Sequence
  Description of Artificial Sequence: Synthetic oligonucleotide
uugaaguuuaugggccaca

SEQ ID NO: 2389306 - RNA, 19 nt, Artificial Sequence
  Description of Artificial Sequence: Synthetic oligonucleotide
ucaggcaggagccgcccga

SEQ ID NO: 2389307 - RNA, 19 nt, Artificial Sequence
  Description of Artificial Sequence: Synthetic oligonucleotide
cacagagcaaggguucuag

SEQ ID NO: 2389308 - RNA, 19 nt, Artificial Sequence
  Description of Artificial Sequence: Synthetic oligonucleotide
ccacuuagccucuauguac

SEQ ID NO: 2389309 - RNA, 19 nt, Artificial Sequence
  Description of Artificial Sequence: Synthetic oligonucleotide
guuuuaacggaggaagucu

SEQ ID NO: 2389310 - RNA, 19 nt, Artificial Sequence
  Description of Artificial Sequence: Synthetic oligonucleotide
cauugaaguuuaugggcca

SEQ ID NO: 2389311 - RNA, 19 nt, Artificial Sequence
  Description of Artificial Sequence: Synthetic oligonucleotide
gaguaaccugaaaugacaa

SEQ ID NO: 2389312 - RNA, 19 nt, Artificial Sequence
  Description of Artificial Sequence: Synthetic oligonucleotide
cacacacacacacaccaca

SEQ ID NO: 2389313 - RNA, 19 nt, Artificial Sequence
  Description of Artificial Sequence: Synthetic oligonucleotide
uggguccaggcuacacuag

SEQ ID NO: 2389314 - RNA, 19 nt, Artificial Sequence
  Description of Artificial Sequence: Synthetic oligonucleotide
acuggcggcagcugauucu

SEQ ID NO: 2389315 - RNA, 19 nt, Artificial Sequence
  Description of Artificial Sequence: Synthetic oligonucleotide
acgccguugcaguccacgg

SEQ ID NO: 2389316 - RNA, 19 nt, Artificial Sequence
  Description of Artificial Sequence: Synthetic oligonucleotide
cagcaucagaacuguuccc

SEQ ID NO: 2389317 - RNA, 19 nt, Artificial Sequence
  Description of Artificial Sequence: Synthetic oligonucleotide
agccucuauguacagcaaa

SEQ ID NO: 2389318 - RNA, 19 nt, Artificial Sequence
  Description of Artificial Sequence: Synthetic oligonucleotide
  modified_base (7)..(7): a, c, u, g, unknown or other
ggccuunuucuugauuucc

SEQ ID NO: 2389319 - RNA, 19 nt, Artificial Sequence
  Description of Artificial Sequence: Synthetic oligonucleotide
ggaguaaccugaaaugaca

SEQ ID NO: 2389320 - RNA, 19 nt, Artificial Sequence
  Description of Artificial Sequence: Synthetic oligonucleotide
agacuaagagagacccagg

SEQ ID NO: 2389321 - RNA, 19 nt, Artificial Sequence
  Description of Artificial Sequence: Synthetic oligonucleotide
gauuaccgaaauaguuuuc

SEQ ID NO: 2389322 - RNA, 19 nt, Artificial Sequence
  Description of Artificial Sequence: Synthetic oligonucleotide
gacugaaugagggcgccca

SEQ ID NO: 2389323 - RNA, 19 nt, Artificial Sequence
  Description of Artificial Sequence: Synthetic oligonucleotide
cucacacccagacuuccuc

SEQ ID NO: 2389324 - RNA, 19 nt, Artificial Sequence
  Description of Artificial Sequence: Synthetic oligonucleotide
gccaggaacuauguaaaag

SEQ ID NO: 2389325 - RNA, 19 nt, Artificial Sequence
  Description of Artificial Sequence: Synthetic oligonucleotide
agacugaaugagggcgccc

SEQ ID NO: 2389326 - RNA, 19 nt, Artificial Sequence
  Description of Artificial Sequence: Synthetic oligonucleotide
uuggccucacacccagacu

SEQ ID NO: 2389327 - RNA, 19 nt, Artificial Sequence
  Description of Artificial Sequence: Synthetic oligonucleotide
  modified_base (5)..(5): a, c, u, g, unknown or other
ccuunuucuugauuuccac

SEQ ID NO: 2389328 - RNA, 19 nt, Artificial Sequence
  Description of Artificial Sequence: Synthetic oligonucleotide
gcaagucuuggccucacac

SEQ ID NO: 2389329 - RNA, 19 nt, Artificial Sequence
  Description of Artificial Sequence: Synthetic oligonucleotide
acacacacacacacaccac

SEQ ID NO: 2389330 - RNA, 19 nt, Artificial Sequence
  Description of Artificial Sequence: Synthetic oligonucleotide
cacacacacacaccacaug

SEQ ID NO: 2389331 - RNA, 19 nt, Artificial Sequence
  Description of Artificial Sequence: Synthetic oligonucleotide
ugagggcgcccacaauugu

SEQ ID NO: 2389332 - RNA, 19 nt, Artificial Sequence
  Description of Artificial Sequence: Synthetic oligonucleotide
cacaauugucuucaggccu

SEQ ID NO: 2389333 - RNA, 19 nt, Artificial Sequence
  Description of Artificial Sequence: Synthetic oligonucleotide
gacaacacucaugaugcua

SEQ ID NO: 2389334 - RNA, 19 nt, Artificial Sequence
  Description of Artificial Sequence: Synthetic oligonucleotide
uuccaagauagcucucauu

SEQ ID NO: 2389335 - RNA, 19 nt, Artificial Sequence
  Description of Artificial Sequence: Synthetic oligonucleotide
gaagucuugagaagugggu

SEQ ID NO: 2389336 - RNA, 19 nt, Artificial Sequence
  Description of Artificial Sequence: Synthetic oligonucleotide
ggaguguuuuaacggagga

SEQ ID NO: 2389337 - RNA, 19 nt, Artificial Sequence
  Description of Artificial Sequence: Synthetic oligonucleotide
ucuugagaaguggguccag

SEQ ID NO: 2389338 - RNA, 19 nt, Artificial Sequence
  Description of Artificial Sequence: Synthetic oligonucleotide
ccuuccguccguaggaggc

SEQ ID NO: 2389339 - RNA, 19 nt, Artificial Sequence
  Description of Artificial Sequence: Synthetic oligonucleotide
acaccacgccguugcaguc

SEQ ID NO: 2389340 - RNA, 19 nt, Artificial Sequence
  Description of Artificial Sequence: Synthetic oligonucleotide
ugaugcuauugauccuguc

SEQ ID NO: 2389341 - RNA, 19 nt, Artificial Sequence
  Description of Artificial Sequence: Synthetic oligonucleotide
ugacaacacucaugaugcu

SEQ ID NO: 2389342 - RNA, 19 nt, Artificial Sequence
  Description of Artificial Sequence: Synthetic oligonucleotide
gacgccuccccucccgccc

SEQ ID NO: 2389343 - RNA, 19 nt, Artificial Sequence
  Description of Artificial Sequence: Synthetic oligonucleotide
agccgcccgaugugggagc

SEQ ID NO: 2389344 - RNA, 19 nt, Artificial Sequence
  Description of Artificial Sequence: Synthetic oligonucleotide
ugcaagucuuggccucaca

SEQ ID NO: 2389345 - RNA, 19 nt, Artificial Sequence
  Description of Artificial Sequence: Synthetic oligonucleotide
ccacuuguuucgaagguuc

SEQ ID NO: 2389346 - RNA, 19 nt, Artificial Sequence
  Description of Artificial Sequence: Synthetic oligonucleotide
aagcccucagaacccugaa

SEQ ID NO: 2389347 - RNA, 19 nt, Artificial Sequence
  Description of Artificial Sequence: Synthetic oligonucleotide
cacgccguugcaguccacg

SEQ ID NO: 2389348 - RNA, 19 nt, Artificial Sequence
  Description of Artificial Sequence: Synthetic oligonucleotide
ugccaggaacuauguaaaa

SEQ ID NO: 2389349 - RNA, 19 nt, Artificial Sequence
  Description of Artificial Sequence: Synthetic oligonucleotide
gaguguuuuaacggaggaa

SEQ ID NO: 2389350 - RNA, 19 nt, Artificial Sequence
  Description of Artificial Sequence: Synthetic oligonucleotide
augagcgacaccacgccgu

SEQ ID NO: 2389351 - RNA, 19 nt, Artificial Sequence
  Description of Artificial Sequence: Synthetic oligonucleotide
gcgaaaacacucaagcaga

SEQ ID NO: 2389352 - RNA, 19 nt, Artificial Sequence
  Description of Artificial Sequence: Synthetic oligonucleotide
gccguugcaguccacggug

SEQ ID NO: 2389353 - RNA, 19 nt, Artificial Sequence
  Description of Artificial Sequence: Synthetic oligonucleotide
cccagcaucagaacuguuc

SEQ ID NO: 2389354 - RNA, 19 nt, Artificial Sequence
  Description of Artificial Sequence: Synthetic oligonucleotide
augagggcgcccacaauug

SEQ ID NO: 2389355 - RNA, 19 nt, Artificial Sequence
  Description of Artificial Sequence: Synthetic oligonucleotide
ggugccauuuuccaagaua

SEQ ID NO: 2389356 - RNA, 19 nt, Artificial Sequence
  Description of Artificial Sequence: Synthetic oligonucleotide
ugcuauugauccuguccuu

SEQ ID NO: 2389357 - RNA, 19 nt, Artificial Sequence
  Description of Artificial Sequence: Synthetic oligonucleotide
cuucaggccugggauuacc

SEQ ID NO: 2389358 - RNA, 19 nt, Artificial Sequence
  Description of Artificial Sequence: Synthetic oligonucleotide
cacaccacaugugcacacc

SEQ ID NO: 2389359 - RNA, 19 nt, Artificial Sequence
  Description of Artificial Sequence: Synthetic oligonucleotide
cagacugaaugagggcgcc

SEQ ID NO: 2389360 - RNA, 19 nt, Artificial Sequence
  Description of Artificial Sequence: Synthetic oligonucleotide
aacuguucccacagagcaa

SEQ ID NO: 2389361 - RNA, 19 nt, Artificial Sequence
  Description of Artificial Sequence: Synthetic oligonucleotide
gaugcaagucuuggccuca

SEQ ID NO: 2389362 - RNA, 19 nt, Artificial Sequence
  Description of Artificial Sequence: Synthetic oligonucleotide
gcaaacagcagugggguca

SEQ ID NO: 2389363 - RNA, 19 nt, Artificial Sequence
  Description of Artificial Sequence: Synthetic oligonucleotide
gcugcaggccaaucagggg

SEQ ID NO: 2389364 - RNA, 19 nt, Artificial Sequence
  Description of Artificial Sequence: Synthetic oligonucleotide
gggaguaaccugaaaugac

SEQ ID NO: 2389365 - RNA, 19 nt, Artificial Sequence
  Description of Artificial Sequence: Synthetic oligonucleotide
ggggaguaaccugaaauga

SEQ ID NO: 2389366 - RNA, 19 nt, Artificial Sequence
  Description of Artificial Sequence: Synthetic oligonucleotide
cugcgcuuccucccucugg

SEQ ID NO: 2389367 - RNA, 19 nt, Artificial Sequence
  Description of Artificial Sequence: Synthetic oligonucleotide
ccaggaacuauguaaaagu

SEQ ID NO: 2389368 - RNA, 19 nt, Artificial Sequence
  Description of Artificial Sequence: Synthetic oligonucleotide
guugcaguccacggugcug

SEQ ID NO: 2389369 - RNA, 19 nt, Artificial Sequence
  Description of Artificial Sequence: Synthetic oligonucleotide
cacggucaagaucaucaca

SEQ ID NO: 2389370 - RNA, 19 nt, Artificial Sequence
  Description of Artificial Sequence: Synthetic oligonucleotide
guggguccaggcuacacua

SEQ ID NO: 2389371 - RNA, 19 nt, Artificial Sequence
  Description of Artificial Sequence: Synthetic oligonucleotide
accucaguuguugccucag

SEQ ID NO: 2389372 - RNA, 19 nt, Artificial Sequence
  Description of Artificial Sequence: Synthetic oligonucleotide
cccacuuggccccacuuag

SEQ ID NO: 2389373 - RNA, 19 nt, Artificial Sequence
  Description of Artificial Sequence: Synthetic oligonucleotide
aggggcgaaaacacucaag

SEQ ID NO: 2389374 - RNA, 19 nt, Artificial Sequence
  Description of Artificial Sequence: Synthetic oligonucleotide
ggauuaccgaaauaguuuu

SEQ ID NO: 2389375 - RNA, 19 nt, Artificial Sequence
  Description of Artificial Sequence: Synthetic oligonucleotide
ugagcgacaccacgccguu

SEQ ID NO: 2389376 - RNA, 19 nt, Artificial Sequence
  Description of Artificial Sequence: Synthetic oligonucleotide
gaacuauguaaaaguuugu

SEQ ID NO: 2389377 - RNA, 19 nt, Artificial Sequence
  Description of Artificial Sequence: Synthetic oligonucleotide
acacacacacacaccacau

SEQ ID NO: 2389378 - RNA, 19 nt, Artificial Sequence
  Description of Artificial Sequence: Synthetic oligonucleotide
gucuugagaagugggucca

SEQ ID NO: 2389379 - RNA, 19 nt, Artificial Sequence
  Description of Artificial Sequence: Synthetic oligonucleotide
gccucuauguacagcaaac

SEQ ID NO: 2389380 - RNA, 19 nt, Artificial Sequence
  Description of Artificial Sequence: Synthetic oligonucleotide
accacgccguugcagucca

SEQ ID NO: 2389381 - RNA, 19 nt, Artificial Sequence
  Description of Artificial Sequence: Synthetic oligonucleotide
uccguccguaggaggcaag

SEQ ID NO: 2389382 - RNA, 19 nt, Artificial Sequence
  Description of Artificial Sequence: Synthetic oligonucleotide
augcaagucuuggccucac

SEQ ID NO: 2389383 - RNA, 19 nt, Artificial Sequence
  Description of Artificial Sequence: Synthetic oligonucleotide
ugugcacaccugcccacuu

SEQ ID NO: 2389384 - RNA, 19 nt, Artificial Sequence
  Description of Artificial Sequence: Synthetic oligonucleotide
accacuuguuucgaagguu

SEQ ID NO: 2389385 - RNA, 19 nt, Artificial Sequence
  Description of Artificial Sequence: Synthetic oligonucleotide
agggcgcccacaauugucu

SEQ ID NO: 2389386 - RNA, 19 nt, Artificial Sequence
  Description of Artificial Sequence: Synthetic oligonucleotide
augggccacaccacaccac

SEQ ID NO: 2389387 - RNA, 19 nt, Artificial Sequence
  Description of Artificial Sequence: Synthetic oligonucleotide
caggcuacacuagccauga

SEQ ID NO: 2389388 - RNA, 19 nt, Artificial Sequence
  Description of Artificial Sequence: Synthetic oligonucleotide
gagccgcccgaugugggag

SEQ ID NO: 2389389 - RNA, 19 nt, Artificial Sequence
  Description of Artificial Sequence: Synthetic oligonucleotide
gugcacaccugcccacuug

SEQ ID NO: 2389390 - RNA, 19 nt, Artificial Sequence
  Description of Artificial Sequence: Synthetic oligonucleotide
gggcgaaaacacucaagca

SEQ ID NO: 2389391 - RNA, 19 nt, Artificial Sequence
  Description of Artificial Sequence: Synthetic oligonucleotide
cccgaugagcgacaccacg

SEQ ID NO: 2389392 - RNA, 19 nt, Artificial Sequence
  Description of Artificial Sequence: Synthetic oligonucleotide
agcaugccaggaacuaugu

SEQ ID NO: 2389393 - RNA, 19 nt, Artificial Sequence
  Description of Artificial Sequence: Synthetic oligonucleotide
caggccugggauuaccgaa

SEQ ID NO: 2389394 - RNA, 19 nt, Artificial Sequence
  Description of Artificial Sequence: Synthetic oligonucleotide
cuucucccgacgccucccc

SEQ ID NO: 2389395 - RNA, 19 nt, Artificial Sequence
  Description of Artificial Sequence: Synthetic oligonucleotide
augaugcuauugauccugu

SEQ ID NO: 2389396 - RNA, 19 nt, Artificial Sequence
  Description of Artificial Sequence: Synthetic oligonucleotide
cugggauuaccgaaauagu

SEQ ID NO: 2389397 - RNA, 19 nt, Artificial Sequence
  Description of Artificial Sequence: Synthetic oligonucleotide
aagagagacccagggccuu

SEQ ID NO: 2389398 - RNA, 19 nt, Artificial Sequence
  Description of Artificial Sequence: Synthetic oligonucleotide
gcaucagaacuguucccac

SEQ ID NO: 2389399 - RNA, 19 nt, Artificial Sequence
  Description of Artificial Sequence: Synthetic oligonucleotide
gcuauugauccuguccuuc

SEQ ID NO: 2389400 - RNA, 19 nt, Artificial Sequence
  Description of Artificial Sequence: Synthetic oligonucleotide
gguccaggcuacacuagcc

SEQ ID NO: 2389401 - RNA, 19 nt, Artificial Sequence
  Description of Artificial Sequence: Synthetic oligonucleotide
agcccucagaacccugaaa

SEQ ID NO: 2389402 - RNA, 19 nt, Artificial Sequence
  Description of Artificial Sequence: Synthetic oligonucleotide
uggugccauuuuccaagau

SEQ ID NO: 2389403 - RNA, 19 nt, Artificial Sequence
  Description of Artificial Sequence: Synthetic oligonucleotide
cacucaagcagaacacggu

SEQ ID NO: 2389404 - RNA, 19 nt, Artificial Sequence
  Description of Artificial Sequence: Synthetic oligonucleotide
uucucccgacgccuccccu

SEQ ID NO: 2389405 - RNA, 19 nt, Artificial Sequence
  Description of Artificial Sequence: Synthetic oligonucleotide
uuggccccacuuagccucu

SEQ ID NO: 2389406 - RNA, 19 nt, Artificial Sequence
  Description of Artificial Sequence: Synthetic oligonucleotide
ucuucaggccugggauuac

SEQ ID NO: 2389407 - RNA, 19 nt, Artificial Sequence
  Description of Artificial Sequence: Synthetic oligonucleotide
guccuuccguccguaggag

SEQ ID NO: 2389408 - RNA, 19 nt, Artificial Sequence
  Description of Artificial Sequence: Synthetic oligonucleotide
accacaccacuuguuucga

SEQ ID NO: 2389409 - RNA, 19 nt, Artificial Sequence
  Description of Artificial Sequence: Synthetic oligonucleotide
gggauuaccgaaauaguuu

SEQ ID NO: 2389410 - RNA, 19 nt, Artificial Sequence
  Description of Artificial Sequence: Synthetic oligonucleotide
cagcaaacagcaguggggu

SEQ ID NO: 2389411 - RNA, 19 nt, Artificial Sequence
  Description of Artificial Sequence: Synthetic oligonucleotide
ccaagauagcucucauuga

SEQ ID NO: 2389412 - RNA, 19 nt, Artificial Sequence
  Description of Artificial Sequence: Synthetic oligonucleotide
augugcacaccugcccacu

SEQ ID NO: 2389413 - RNA, 19 nt, Artificial Sequence
  Description of Artificial Sequence: Synthetic oligonucleotide
cacucaugaugcuauugau

SEQ ID NO: 2389414 - RNA, 19 nt, Artificial Sequence
  Description of Artificial Sequence: Synthetic oligonucleotide
guguuuuaacggaggaagu

SEQ ID NO: 2389415 - RNA, 19 nt, Artificial Sequence
  Description of Artificial Sequence: Synthetic oligonucleotide
cgaugagcgacaccacgcc

SEQ ID NO: 2389416 - RNA, 19 nt, Artificial Sequence
  Description of Artificial Sequence: Synthetic oligonucleotide
uuccguccguaggaggcaa

SEQ ID NO: 2389417 - RNA, 19 nt, Artificial Sequence
  Description of Artificial Sequence: Synthetic oligonucleotide
agucuuggccucacaccca

SEQ ID NO: 2389418 - RNA, 19 nt, Artificial Sequence
  Description of Artificial Sequence: Synthetic oligonucleotide
gugggagccgggcccgaug

SEQ ID NO: 2389419 - RNA, 19 nt, Artificial Sequence
  Description of Artificial Sequence: Synthetic oligonucleotide
  modified_base (6)..(6): a, c, u, g, unknown or other
gccuunuucuugauuucca

SEQ ID NO: 2389420 - RNA, 19 nt, Artificial Sequence
  Description of Artificial Sequence: Synthetic oligonucleotide
caggggcgccucaggagug

SEQ ID NO: 2389421 - RNA, 19 nt, Artificial Sequence
  Description of Artificial Sequence: Synthetic oligonucleotide
gaacagcugcaggccaauc

SEQ ID NO: 2389422 - RNA, 19 nt, Artificial Sequence
  Description of Artificial Sequence: Synthetic oligonucleotide
gccaaucaggggcgaaaac

SEQ ID NO: 2389423 - RNA, 19 nt, Artificial Sequence
  Description of Artificial Sequence: Synthetic oligonucleotide
gccccacuuagccucuaug

SEQ ID NO: 2389424 - RNA, 19 nt, Artificial Sequence
  Description of Artificial Sequence: Synthetic oligonucleotide
ccacuuggccccacuuagc

SEQ ID NO: 2389425 - RNA, 19 nt, Artificial Sequence
  Description of Artificial Sequence: Synthetic oligonucleotide
caccacuuguuucgaaggu

SEQ ID NO: 2389426 - RNA, 19 nt, Artificial Sequence
  Description of Artificial Sequence: Synthetic oligonucleotide
gcgcccacaauugucuuca

SEQ ID NO: 2389427 - RNA, 19 nt, Artificial Sequence
  Description of Artificial Sequence: Synthetic oligonucleotide
ugacuggcggcagcugauu

SEQ ID NO: 2389428 - RNA, 19 nt, Artificial Sequence
  Description of Artificial Sequence: Synthetic oligonucleotide
caccucaguuguugccuca

SEQ ID NO: 2389429 - RNA, 19 nt, Artificial Sequence
  Description of Artificial Sequence: Synthetic oligonucleotide
ccgaugugggagccgggcc

SEQ ID NO: 2389430 - RNA, 19 nt, Artificial Sequence
  Description of Artificial Sequence: Synthetic oligonucleotide
ggcgcccacaauugucuuc

SEQ ID NO: 2389431 - RNA, 19 nt, Artificial Sequence
  Description of Artificial Sequence: Synthetic oligonucleotide
cuuccguccguaggaggca

SEQ ID NO: 2389432 - RNA, 19 nt, Artificial Sequence
  Description of Artificial Sequence: Synthetic oligonucleotide
caggggcgaaaacacucaa

SEQ ID NO: 2389433 - RNA, 19 nt, Artificial Sequence
  Description of Artificial Sequence: Synthetic oligonucleotide
gaaguggguccaggcuaca

SEQ ID NO: 2389434 - RNA, 19 nt, Artificial Sequence
  Description of Artificial Sequence: Synthetic oligonucleotide
ggagacuaagagagaccca

SEQ ID NO: 2389435 - RNA, 19 nt, Artificial Sequence
  Description of Artificial Sequence: Synthetic oligonucleotide
uccucccucugggcauugc

SEQ ID NO: 2389436 - RNA, 19 nt, Artificial Sequence
  Description of Artificial Sequence: Synthetic oligonucleotide
agaacacggucaagaucau

SEQ ID NO: 2389437 - RNA, 19 nt, Artificial Sequence
  Description of Artificial Sequence: Synthetic oligonucleotide
gaaugagggcgcccacaau

SEQ ID NO: 2389438 - RNA, 19 nt, Artificial Sequence
  Description of Artificial Sequence: Synthetic oligonucleotide
gagcgacaccacgccguug

SEQ ID NO: 2389439 - RNA, 19 nt, Artificial Sequence
  Description of Artificial Sequence: Synthetic oligonucleotide
ccuguccuuccguccguag

SEQ ID NO: 2389440 - RNA, 19 nt, Artificial Sequence
  Description of Artificial Sequence: Synthetic oligonucleotide
ggguucuagcaugccagga

SEQ ID NO: 2389441 - RNA, 19 nt, Artificial Sequence
  Description of Artificial Sequence: Synthetic oligonucleotide
acggugcuguugcgcuuga

SEQ ID NO: 2389442 - RNA, 19 nt, Artificial Sequence
  Description of Artificial Sequence: Synthetic oligonucleotide
uccuguccuuccguccgua

SEQ ID NO: 2389443 - RNA, 19 nt, Artificial Sequence
  Description of Artificial Sequence: Synthetic oligonucleotide
gcaggggcgccucaggagu

SEQ ID NO: 2389444 - RNA, 19 nt, Artificial Sequence
  Description of Artificial Sequence: Synthetic oligonucleotide
uuccucccucugggcauug

SEQ ID NO: 2389445 - RNA, 19 nt, Artificial Sequence
  Description of Artificial Sequence: Synthetic oligonucleotide
cuagcaugccaggaacuau

SEQ ID NO: 2389446 - RNA, 19 nt, Artificial Sequence
  Description of Artificial Sequence: Synthetic oligonucleotide
cccgaugugggagccgggc

SEQ ID NO: 2389447 - RNA, 19 nt, Artificial Sequence
  Description of Artificial Sequence: Synthetic oligonucleotide
ugcaguccacggugcuguu

SEQ ID NO: 2389448 - RNA, 19 nt, Artificial Sequence
  Description of Artificial Sequence: Synthetic oligonucleotide
ccaccucaguuguugccuc

SEQ ID NO: 2389449 - RNA, 19 nt, Artificial Sequence
  Description of Artificial Sequence: Synthetic oligonucleotide
cccacuuagccucuaugua

SEQ ID NO: 2389450 - RNA, 19 nt, Artificial Sequence
  Description of Artificial Sequence: Synthetic oligonucleotide
agccgggcccgaugagcga

SEQ ID NO: 2389451 - RNA, 19 nt, Artificial Sequence
  Description of Artificial Sequence: Synthetic oligonucleotide
cccugaaagugcgcagagc

SEQ ID NO: 2389452 - RNA, 19 nt, Artificial Sequence
  Description of Artificial Sequence: Synthetic oligonucleotide
ccccacuuagccucuaugu

SEQ ID NO: 2389453 - RNA, 19 nt, Artificial Sequence
  Description of Artificial Sequence: Synthetic oligonucleotide
ggagccgcccgauguggga

SEQ ID NO: 2389454 - RNA, 19 nt, Artificial Sequence
  Description of Artificial Sequence: Synthetic oligonucleotide
ugugggagccgggcccgau

SEQ ID NO: 2389455 - RNA, 19 nt, Artificial Sequence
  Description of Artificial Sequence: Synthetic oligonucleotide
ccguccguaggaggcaagc

SEQ ID NO: 2389456 - RNA, 19 nt, Artificial Sequence
  Description of Artificial Sequence: Synthetic oligonucleotide
gcgcuugacgcugcgccgc

SEQ ID NO: 2389457 - RNA, 19 nt, Artificial Sequence
  Description of Artificial Sequence: Synthetic oligonucleotide
ggccaaucaggggcgaaaa

SEQ ID NO: 2389458 - RNA, 19 nt, Artificial Sequence
  Description of Artificial Sequence: Synthetic oligonucleotide
aggggcgccucaggagugu

SEQ ID NO: 2389459 - RNA, 19 nt, Artificial Sequence
  Description of Artificial Sequence: Synthetic oligonucleotide
cacuagccaugaugcaagu

SEQ ID NO: 2389460 - RNA, 19 nt, Artificial Sequence
  Description of Artificial Sequence: Synthetic oligonucleotide
ccauggagacuaagagaga

SEQ ID NO: 2389461 - RNA, 19 nt, Artificial Sequence
  Description of Artificial Sequence: Synthetic oligonucleotide
caucacaaucugacagcuu

SEQ ID NO: 2389462 - RNA, 19 nt, Artificial Sequence
  Description of Artificial Sequence: Synthetic oligonucleotide
  modified_base (18)..(18): a, c, u, g, unknown or other
gagagacccagggccuunu

SEQ ID NO: 2389463 - RNA, 19 nt, Artificial Sequence
  Description of Artificial Sequence: Synthetic oligonucleotide
gcacaccugcccacuuggc

SEQ ID NO: 2389464 - RNA, 19 nt, Artificial Sequence
  Description of Artificial Sequence: Synthetic oligonucleotide
gcccacuuggccccacuua

SEQ ID NO: 2389465 - RNA, 19 nt, Artificial Sequence
  Description of Artificial Sequence: Synthetic oligonucleotide
ggccucacacccagacuuc

SEQ ID NO: 2389466 - RNA, 19 nt, Artificial Sequence
  Description of Artificial Sequence: Synthetic oligonucleotide
gauuuccaccucaguuguu

SEQ ID NO: 2389467 - RNA, 19 nt, Artificial Sequence
  Description of Artificial Sequence: Synthetic oligonucleotide
gccgggcccgaugagcgac

SEQ ID NO: 2389468 - RNA, 19 nt, Artificial Sequence
  Description of Artificial Sequence: Synthetic oligonucleotide
gccgcaggcugggccauug

SEQ ID NO: 2389469 - RNA, 19 nt, Artificial Sequence
  Description of Artificial Sequence: Synthetic oligonucleotide
ccugcgcuuccucccucug

SEQ ID NO: 2389470 - RNA, 19 nt, Artificial Sequence
  Description of Artificial Sequence: Synthetic oligonucleotide
cgacaccacgccguugcag

SEQ ID NO: 2389471 - RNA, 19 nt, Artificial Sequence
  Description of Artificial Sequence: Synthetic oligonucleotide
gccugggauuaccgaaaua

SEQ ID NO: 2389472 - RNA, 19 nt, Artificial Sequence
  Description of Artificial Sequence: Synthetic oligonucleotide
gccgcccgaugugggagcc

SEQ ID NO: 2389473 - RNA, 19 nt, Artificial Sequence
  Description of Artificial Sequence: Synthetic oligonucleotide
caggccaaucaggggcgaa

SEQ ID NO: 2389474 - RNA, 19 nt, Artificial Sequence
  Description of Artificial Sequence: Synthetic oligonucleotide
ggcgccucaggaguguuuu

SEQ ID NO: 2389475 - RNA, 19 nt, Artificial Sequence
  Description of Artificial Sequence: Synthetic oligonucleotide
gcgacaccacgccguugca

SEQ ID NO: 2389476 - RNA, 19 nt, Artificial Sequence
  Description of Artificial Sequence: Synthetic oligonucleotide
accugcccacuuggcccca

SEQ ID NO: 2389477 - RNA, 19 nt, Artificial Sequence
  Description of Artificial Sequence: Synthetic oligonucleotide
ccgcaggcugggccauugc

SEQ ID NO: 2389478 - RNA, 19 nt, Artificial Sequence
  Description of Artificial Sequence: Synthetic oligonucleotide
gcccgaugugggagccggg

SEQ ID NO: 2389479 - RNA, 19 nt, Artificial Sequence
  Description of Artificial Sequence: Synthetic oligonucleotide
cgacgccuccccucccgcc

SEQ ID NO: 2389480 - RNA, 19 nt, Artificial Sequence
  Description of Artificial Sequence: Synthetic oligonucleotide
ccacaccacuuguuucgaa

SEQ ID NO: 2389481 - RNA, 19 nt, Artificial Sequence
  Description of Artificial Sequence: Synthetic oligonucleotide
gcccgaugagcgacaccac

SEQ ID NO: 2389482 - RNA, 19 nt, Artificial Sequence
  Description of Artificial Sequence: Synthetic oligonucleotide
cgccucaggaguguuuuaa

SEQ ID NO: 2389483 - RNA, 19 nt, Artificial Sequence
  Description of Artificial Sequence: Synthetic oligonucleotide
gcaggccaaucaggggcga

SEQ ID NO: 2389484 - RNA, 19 nt, Artificial Sequence
  Description of Artificial Sequence: Synthetic oligonucleotide
ccguaggaggcaagcuggu

SEQ ID NO: 2389485 - RNA, 19 nt, Artificial Sequence
  Description of Artificial Sequence: Synthetic oligonucleotide
caggcaggagccgcccgau

SEQ ID NO: 2389486 - RNA, 19 nt, Artificial Sequence
  Description of Artificial Sequence: Synthetic oligonucleotide
gcgccucaggaguguuuua

SEQ ID NO: 2389487 - RNA, 19 nt, Artificial Sequence
  Description of Artificial Sequence: Synthetic oligonucleotide
ccgcccgaugugggagccg

SEQ ID NO: 2389488 - RNA, 19 nt, Artificial Sequence
  Description of Artificial Sequence: Synthetic oligonucleotide
ccacaccacaccacuuguu

SEQ ID NO: 2389489 - RNA, 19 nt, Artificial Sequence
  Description of Artificial Sequence: Synthetic oligonucleotide
ggccccacuuagccucuau

SEQ ID NO: 2389490 - RNA, 19 nt, Artificial Sequence
  Description of Artificial Sequence: Synthetic oligonucleotide
cguugcaguccacggugcu

SEQ ID NO: 2389491 - RNA, 19 nt, Artificial Sequence
  Description of Artificial Sequence: Synthetic oligonucleotide
gggcgcccacaauugucuu

SEQ ID NO: 2389492 - RNA, 19 nt, Artificial Sequence
  Description of Artificial Sequence: Synthetic oligonucleotide
ccacgccguugcaguccac

SEQ ID NO: 2389493 - RNA, 19 nt, Artificial Sequence
  Description of Artificial Sequence: Synthetic oligonucleotide
cgcuugacgcugcgccgca

SEQ ID NO: 2389494 - RNA, 19 nt, Artificial Sequence
  Description of Artificial Sequence: Synthetic oligonucleotide
cgggcccgaugagcgacac

SEQ ID NO: 2389495 - RNA, 19 nt, Artificial Sequence
  Description of Artificial Sequence: Synthetic oligonucleotide
cguccguaggaggcaagcu

SEQ ID NO: 2389496 - RNA, 19 nt, Artificial Sequence
  Description of Artificial Sequence: Synthetic oligonucleotide
cgccguugcaguccacggu

SEQ ID NO: 2389497 - RNA, 19 nt, Artificial Sequence
  Description of Artificial Sequence: Synthetic oligonucleotide
ggggcgccucaggaguguu

SEQ ID NO: 2389498 - RNA, 19 nt, Artificial Sequence
  Description of Artificial Sequence: Synthetic oligonucleotide
cgccgcaggcugggccauu

SEQ ID NO: 2389499 - RNA, 19 nt, Artificial Sequence
  Description of Artificial Sequence: Synthetic oligonucleotide
ugaauuauaggcauuaucc

SEQ ID NO: 2389500 - RNA, 19 nt, Artificial Sequence
  Description of Artificial Sequence: Synthetic oligonucleotide
aauuauaggcauuauccac

SEQ ID NO: 2389501 - RNA, 19 nt, Artificial Sequence
  Description of Artificial Sequence: Synthetic oligonucleotide
cucuaauugaauuauaggc

SEQ ID NO: 2389502 - RNA, 19 nt, Artificial Sequence
  Description of Artificial Sequence: Synthetic oligonucleotide
uuuuauuugcucaugacac

SEQ ID NO: 2389503 - RNA, 19 nt, Artificial Sequence
  Description of Artificial Sequence: Synthetic oligonucleotide
ucuaauugaauuauaggca

SEQ ID NO: 2389504 - RNA, 19 nt, Artificial Sequence
  Description of Artificial Sequence: Synthetic oligonucleotide
auaggcauuauccacuaac

SEQ ID NO: 2389505 - RNA, 19 nt, Artificial Sequence
  Description of Artificial Sequence: Synthetic oligonucleotide
uacucuaauugaauuauag

SEQ ID NO: 2389506 - RNA, 19 nt, Artificial Sequence
  Description of Artificial Sequence: Synthetic oligonucleotide
acacucaugaaguacuggc

SEQ ID NO: 2389507 - RNA, 19 nt, Artificial Sequence
  Description of Artificial Sequence: Synthetic oligonucleotide
caugacacugacaugacag

SEQ ID NO: 2389508 - RNA, 19 nt, Artificial Sequence
  Description of Artificial Sequence: Synthetic oligonucleotide
gaaagugcagaaugguucg

SEQ ID NO: 2389509 - RNA, 19 nt, Artificial Sequence
  Description of Artificial Sequence: Synthetic oligonucleotide
acucuaauugaauuauagg

SEQ ID NO: 2389510 - RNA, 19 nt, Artificial Sequence
  Description of Artificial Sequence: Synthetic oligonucleotide
aaagacagguguaagagcu

SEQ ID NO: 2389511 - RNA, 19 nt, Artificial Sequence
  Description of Artificial Sequence: Synthetic oligonucleotide
ucugucuuccugaaacugg

SEQ ID NO: 2389512 - RNA, 19 nt, Artificial Sequence
  Description of Artificial Sequence: Synthetic oligonucleotide
aauacucuaauugaauuau

SEQ ID NO: 2389513 - RNA, 19 nt, Artificial Sequence
  Description of Artificial Sequence: Synthetic oligonucleotide
uugcucaugacacugacau

SEQ ID NO: 2389514 - RNA, 19 nt, Artificial Sequence
  Description of Artificial Sequence: Synthetic oligonucleotide
agcaccacuuccuaggccg

SEQ ID NO: 2389515 - RNA, 19 nt, Artificial Sequence
  Description of Artificial Sequence: Synthetic oligonucleotide
ucuagucccgaccuguggg

SEQ ID NO: 2389516 - RNA, 19 nt, Artificial Sequence
  Description of Artificial Sequence: Synthetic oligonucleotide
acuuuuauuugcucaugac

SEQ ID NO: 2389517 - RNA, 19 nt, Artificial Sequence
  Description of Artificial Sequence: Synthetic oligonucleotide
agcacacacacacagguag

SEQ ID NO: 2389518 - RNA, 19 nt, Artificial Sequence
  Description of Artificial Sequence: Synthetic oligonucleotide
agaaagugcagaaugguuc

SEQ ID NO: 2389519 - RNA, 19 nt, Artificial Sequence
  Description of Artificial Sequence: Synthetic oligonucleotide
acccacgaaaccuacgagc

SEQ ID NO: 2389520 - RNA, 19 nt, Artificial Sequence
  Description of Artificial Sequence: Synthetic oligonucleotide
uacgagcacacacacacag

SEQ ID NO: 2389521 - RNA, 19 nt, Artificial Sequence
  Description of Artificial Sequence: Synthetic oligonucleotide
ugaaguacuggccuguccu

SEQ ID NO: 2389522 - RNA, 19 nt, Artificial Sequence
  Description of Artificial Sequence: Synthetic oligonucleotide
uuauccacuaaccuccaga

SEQ ID NO: 2389523 - RNA, 19 nt, Artificial Sequence
  Description of Artificial Sequence: Synthetic oligonucleotide
gaaaccuacgagcacacac

SEQ ID NO: 2389524 - RNA, 19 nt, Artificial Sequence
  Description of Artificial Sequence: Synthetic oligonucleotide
aaccuacgagcacacacac

SEQ ID NO: 2389525 - RNA, 19 nt, Artificial Sequence
  Description of Artificial Sequence: Synthetic oligonucleotide
acaaagacagguguaagag

SEQ ID NO: 2389526 - RNA, 19 nt, Artificial Sequence
  Description of Artificial Sequence: Synthetic oligonucleotide
uaggcauuauccacuaacc

SEQ ID NO: 2389527 - RNA, 19 nt, Artificial Sequence
  Description of Artificial Sequence: Synthetic oligonucleotide
uugaauuauaggcauuauc

SEQ ID NO: 2389528 - RNA, 19 nt, Artificial Sequence
  Description of Artificial Sequence: Synthetic oligonucleotide
gacaugacaggguucacug

SEQ ID NO: 2389529 - RNA, 19 nt, Artificial Sequence
  Description of Artificial Sequence: Synthetic oligonucleotide
ugaaacuggucucaaggac

SEQ ID NO: 2389530 - RNA, 19 nt, Artificial Sequence
  Description of Artificial Sequence: Synthetic oligonucleotide
gaauuauaggcauuaucca

SEQ ID NO: 2389531 - RNA, 19 nt, Artificial Sequence
  Description of Artificial Sequence: Synthetic oligonucleotide
ugaggacaaagacaggugu

SEQ ID NO: 2389532 - RNA, 19 nt, Artificial Sequence
  Description of Artificial Sequence: Synthetic oligonucleotide
uccagcaccacuuccuagg

SEQ ID NO: 2389533 - RNA, 19 nt, Artificial Sequence
  Description of Artificial Sequence: Synthetic oligonucleotide
aauugaauuauaggcauua

SEQ ID NO: 2389534 - RNA, 19 nt, Artificial Sequence
  Description of Artificial Sequence: Synthetic oligonucleotide
auuugcucaugacacugac

SEQ ID NO: 2389535 - RNA, 19 nt, Artificial Sequence
  Description of Artificial Sequence: Synthetic oligonucleotide
uuuaccugccugcacaccu

SEQ ID NO: 2389536 - RNA, 19 nt, Artificial Sequence
  Description of Artificial Sequence: Synthetic oligonucleotide
uuauuugcucaugacacug

SEQ ID NO: 2389537 - RNA, 19 nt, Artificial Sequence
  Description of Artificial Sequence: Synthetic oligonucleotide
ucagcuucuagucccgacc

SEQ ID NO: 2389538 - RNA, 19 nt, Artificial Sequence
  Description of Artificial Sequence: Synthetic oligonucleotide
cuuuuauuugcucaugaca

SEQ ID NO: 2389539 - RNA, 19 nt, Artificial Sequence
  Description of Artificial Sequence: Synthetic oligonucleotide
ggagggaauacucuaauug

SEQ ID NO: 2389540 - RNA, 19 nt, Artificial Sequence
  Description of Artificial Sequence: Synthetic oligonucleotide
ugguggaugugauaaggag

SEQ ID NO: 2389541 - RNA, 19 nt, Artificial Sequence
  Description of Artificial Sequence: Synthetic oligonucleotide
gauggcuuuaccugccugc

SEQ ID NO: 2389542 - RNA, 19 nt, Artificial Sequence
  Description of Artificial Sequence: Synthetic oligonucleotide
aacacacucaugaaguacu

SEQ ID NO: 2389543 - RNA, 19 nt, Artificial Sequence
  Description of Artificial Sequence: Synthetic oligonucleotide
aaguacuggccuguccucc

SEQ ID NO: 2389544 - RNA, 19 nt, Artificial Sequence
  Description of Artificial Sequence: Synthetic oligonucleotide
guggaugugauaaggagcc

SEQ ID NO: 2389545 - RNA, 19 nt, Artificial Sequence
  Description of Artificial Sequence: Synthetic oligonucleotide
ugacacugacaugacaggg

SEQ ID NO: 2389546 - RNA, 19 nt, Artificial Sequence
  Description of Artificial Sequence: Synthetic oligonucleotide
gagcauagguuccagcacc

SEQ ID NO: 2389547 - RNA, 19 nt, Artificial Sequence
  Description of Artificial Sequence: Synthetic oligonucleotide
cuuccuaggccgaagggag

SEQ ID NO: 2389548 - RNA, 19 nt, Artificial Sequence
  Description of Artificial Sequence: Synthetic oligonucleotide
acucaugaaguacuggccu

SEQ ID NO: 2389549 - RNA, 19 nt, Artificial Sequence
  Description of Artificial Sequence: Synthetic oligonucleotide
agugcagaaugguucgggg

SEQ ID NO: 2389550 - RNA, 19 nt, Artificial Sequence
  Description of Artificial Sequence: Synthetic oligonucleotide
uuuauuugcucaugacacu

SEQ ID NO: 2389551 - RNA, 19 nt, Artificial Sequence
  Description of Artificial Sequence: Synthetic oligonucleotide
gaauacucuaauugaauua

SEQ ID NO: 2389552 - RNA, 19 nt, Artificial Sequence
  Description of Artificial Sequence: Synthetic oligonucleotide
ugcacaccuucccugagcc

SEQ ID NO: 2389553 - RNA, 19 nt, Artificial Sequence
  Description of Artificial Sequence: Synthetic oligonucleotide
augaaguacuggccugucc

SEQ ID NO: 2389554 - RNA, 19 nt, Artificial Sequence
  Description of Artificial Sequence: Synthetic oligonucleotide
auuauaggcauuauccacu

SEQ ID NO: 2389555 - RNA, 19 nt, Artificial Sequence
  Description of Artificial Sequence: Synthetic oligonucleotide
aggagcauagguuccagca

SEQ ID NO: 2389556 - RNA, 19 nt, Artificial Sequence
  Description of Artificial Sequence: Synthetic oligonucleotide
augacacugacaugacagg

SEQ ID NO: 2389557 - RNA, 19 nt, Artificial Sequence
  Description of Artificial Sequence: Synthetic oligonucleotide
uauccacuaaccuccagaa

SEQ ID NO: 2389558 - RNA, 19 nt, Artificial Sequence
  Description of Artificial Sequence: Synthetic oligonucleotide
acugguggaugugauaagg

SEQ ID NO: 2389559 - RNA, 19 nt, Artificial Sequence
  Description of Artificial Sequence: Synthetic oligonucleotide
gacaaagacagguguaaga

SEQ ID NO: 2389560 - RNA, 19 nt, Artificial Sequence
  Description of Artificial Sequence: Synthetic oligonucleotide
caaagacagguguaagagc

SEQ ID NO: 2389561 - RNA, 19 nt, Artificial Sequence
  Description of Artificial Sequence: Synthetic oligonucleotide
aagugcagaaugguucggg

SEQ ID NO: 2389562 - RNA, 19 nt, Artificial Sequence
  Description of Artificial Sequence: Synthetic oligonucleotide
acuaaccuccagaacacac

SEQ ID NO: 2389563 - RNA, 19 nt, Artificial Sequence
  Description of Artificial Sequence: Synthetic oligonucleotide
uaaccuccagaacacacuc

SEQ ID NO: 2389564 - RNA, 19 nt, Artificial Sequence
  Description of Artificial Sequence: Synthetic oligonucleotide
uucuagucccgaccugugg

SEQ ID NO: 2389565 - RNA, 19 nt, Artificial Sequence
  Description of Artificial Sequence: Synthetic oligonucleotide
ccugaaacuggucucaagg

SEQ ID NO: 2389566 - RNA, 19 nt, Artificial Sequence
  Description of Artificial Sequence: Synthetic oligonucleotide
ggagagauggcuuuaccug

SEQ ID NO: 2389567 - RNA, 19 nt, Artificial Sequence
  Description of Artificial Sequence: Synthetic oligonucleotide
cacucaugaaguacuggcc

SEQ ID NO: 2389568 - RNA, 19 nt, Artificial Sequence
  Description of Artificial Sequence: Synthetic oligonucleotide
uguggagaggggccaacag

SEQ ID NO: 2389569 - RNA, 19 nt, Artificial Sequence
  Description of Artificial Sequence: Synthetic oligonucleotide
gaaacuggucucaaggaca

SEQ ID NO: 2389570 - RNA, 19 nt, Artificial Sequence
  Description of Artificial Sequence: Synthetic oligonucleotide
cuccagaacacacucauga

SEQ ID NO: 2389571 - RNA, 19 nt, Artificial Sequence
  Description of Artificial Sequence: Synthetic oligonucleotide
aaaccuacgagcacacaca

SEQ ID NO: 2389572 - RNA, 19 nt, Artificial Sequence
  Description of Artificial Sequence: Synthetic oligonucleotide
gcauuauccacuaaccucc

SEQ ID NO: 2389573 - RNA, 19 nt, Artificial Sequence
  Description of Artificial Sequence: Synthetic oligonucleotide
uauuugcucaugacacuga

SEQ ID NO: 2389574 - RNA, 19 nt, Artificial Sequence
  Description of Artificial Sequence: Synthetic oligonucleotide
acugacaugacaggguuca

SEQ ID NO: 2389575 - RNA, 19 nt, Artificial Sequence
  Description of Artificial Sequence: Synthetic oligonucleotide
ccuacgagcacacacacac

SEQ ID NO: 2389576 - RNA, 19 nt, Artificial Sequence
  Description of Artificial Sequence: Synthetic oligonucleotide
ucagccacccacgaaaccu

SEQ ID NO: 2389577 - RNA, 19 nt, Artificial Sequence
  Description of Artificial Sequence: Synthetic oligonucleotide
uuccuguguguggagaggg

SEQ ID NO: 2389578 - RNA, 19 nt, Artificial Sequence
  Description of Artificial Sequence: Synthetic oligonucleotide
ucaugacacugacaugaca

SEQ ID NO: 2389579 - RNA, 19 nt, Artificial Sequence
  Description of Artificial Sequence: Synthetic oligonucleotide
aaagugcagaaugguucgg

SEQ ID NO: 2389580 - RNA, 19 nt, Artificial Sequence
  Description of Artificial Sequence: Synthetic oligonucleotide
agcgucagcacguggagga

SEQ ID NO: 2389581 - RNA, 19 nt, Artificial Sequence
  Description of Artificial Sequence: Synthetic oligonucleotide
agcccucagcuucuagucc

SEQ ID NO: 2389582 - RNA, 19 nt, Artificial Sequence
  Description of Artificial Sequence: Synthetic oligonucleotide
gacucagccacccacgaaa

SEQ ID NO: 2389583 - RNA, 19 nt, Artificial Sequence
  Description of Artificial Sequence: Synthetic oligonucleotide
ugagcccucagcuucuagu

SEQ ID NO: 2389584 - RNA, 19 nt, Artificial Sequence
  Description of Artificial Sequence: Synthetic oligonucleotide
cugcccacgacucagccac

SEQ ID NO: 2389585 - RNA, 19 nt, Artificial Sequence
  Description of Artificial Sequence: Synthetic oligonucleotide
aggcauuauccacuaaccu

SEQ ID NO: 2389586 - RNA, 19 nt, Artificial Sequence
  Description of Artificial Sequence: Synthetic oligonucleotide
uuauaggcauuauccacua

SEQ ID NO: 2389587 - RNA, 19 nt, Artificial Sequence
  Description of Artificial Sequence: Synthetic oligonucleotide
agagauggcuuuaccugcc

SEQ ID NO: 2389588 - RNA, 19 nt, Artificial Sequence
  Description of Artificial Sequence: Synthetic oligonucleotide
ggcauuauccacuaaccuc

SEQ ID NO: 2389589 - RNA, 19 nt, Artificial Sequence
  Description of Artificial Sequence: Synthetic oligonucleotide
gaacacacucaugaaguac

SEQ ID NO: 2389590 - RNA, 19 nt, Artificial Sequence
  Description of Artificial Sequence: Synthetic oligonucleotide
cuaauugaauuauaggcau

SEQ ID NO: 2389591 - RNA, 19 nt, Artificial Sequence
  Description of Artificial Sequence: Synthetic oligonucleotide
acaugacaggguucacugg

SEQ ID NO: 2389592 - RNA, 19 nt, Artificial Sequence
  Description of Artificial Sequence: Synthetic oligonucleotide
cccaugcucagguagaggg

SEQ ID NO: 2389593 - RNA, 19 nt, Artificial Sequence
  Description of Artificial Sequence: Synthetic oligonucleotide
gacaggguucacugguucc

SEQ ID NO: 2389594 - RNA, 19 nt, Artificial Sequence
  Description of Artificial Sequence: Synthetic oligonucleotide
caugcucagguagaggggc

SEQ ID NO: 2389595 - RNA, 19 nt, Artificial Sequence
  Description of Artificial Sequence: Synthetic oligonucleotide
uaauugaauuauaggcauu

SEQ ID NO: 2389596 - RNA, 19 nt, Artificial Sequence
  Description of Artificial Sequence: Synthetic oligonucleotide
uccuaggccgaagggaggg

SEQ ID NO: 2389597 - RNA, 19 nt, Artificial Sequence
  Description of Artificial Sequence: Synthetic oligonucleotide
cucaugaaguacuggccug

SEQ ID NO: 2389598 - RNA, 19 nt, Artificial Sequence
  Description of Artificial Sequence: Synthetic oligonucleotide
aagaaagugcagaaugguu

SEQ ID NO: 2389599 - RNA, 19 nt, Artificial Sequence
  Description of Artificial Sequence: Synthetic oligonucleotide
gggucugucuuccugaaac

SEQ ID NO: 2389600 - RNA, 19 nt, Artificial Sequence
  Description of Artificial Sequence: Synthetic oligonucleotide
accuccagaacacacucau

SEQ ID NO: 2389601 - RNA, 19 nt, Artificial Sequence
  Description of Artificial Sequence: Synthetic oligonucleotide
cuguguguggagaggggcc

SEQ ID NO: 2389602 - RNA, 19 nt, Artificial Sequence
  Description of Artificial Sequence: Synthetic oligonucleotide
gguggaugugauaaggagc

SEQ ID NO: 2389603 - RNA, 19 nt, Artificial Sequence
  Description of Artificial Sequence: Synthetic oligonucleotide
guucacugguuccugugug

SEQ ID NO: 2389604 - RNA, 19 nt, Artificial Sequence
  Description of Artificial Sequence: Synthetic oligonucleotide
uccuguguguggagagggg

SEQ ID NO: 2389605 - RNA, 19 nt, Artificial Sequence
  Description of Artificial Sequence: Synthetic oligonucleotide
uuccuaggccgaagggagg

SEQ ID NO: 2389606 - RNA, 19 nt, Artificial Sequence
  Description of Artificial Sequence: Synthetic oligonucleotide
ugggagagauggcuuuacc

SEQ ID NO: 2389607 - RNA, 19 nt, Artificial Sequence
  Description of Artificial Sequence: Synthetic oligonucleotide
accugcccacgacucagcc

SEQ ID NO: 2389608 - RNA, 19 nt, Artificial Sequence
  Description of Artificial Sequence: Synthetic oligonucleotide
cacgacucagccacccacg

SEQ ID NO: 2389609 - RNA, 19 nt, Artificial Sequence
  Description of Artificial Sequence: Synthetic oligonucleotide
gaagggagggaauacucua

SEQ ID NO: 2389610 - RNA, 19 nt, Artificial Sequence
  Description of Artificial Sequence: Synthetic oligonucleotide
aaacuggucucaaggacaa

SEQ ID NO: 2389611 - RNA, 19 nt, Artificial Sequence
  Description of Artificial Sequence: Synthetic oligonucleotide
auuauccacuaaccuccag

SEQ ID NO: 2389612 - RNA, 19 nt, Artificial Sequence
  Description of Artificial Sequence: Synthetic oligonucleotide
gcucaugacacugacauga

SEQ ID NO: 2389613 - RNA, 19 nt, Artificial Sequence
  Description of Artificial Sequence: Synthetic oligonucleotide
ucccugagcccucagcuuc

SEQ ID NO: 2389614 - RNA, 19 nt, Artificial Sequence
  Description of Artificial Sequence: Synthetic oligonucleotide
ccaacagcugcacaggagc

SEQ ID NO: 2389615 - RNA, 19 nt, Artificial Sequence
  Description of Artificial Sequence: Synthetic oligonucleotide
gguagaggggcucaggguc

SEQ ID NO: 2389616 - RNA, 19 nt, Artificial Sequence
  Description of Artificial Sequence: Synthetic oligonucleotide
uccuccagaagcccaugcu

SEQ ID NO: 2389617 - RNA, 19 nt, Artificial Sequence
  Description of Artificial Sequence: Synthetic oligonucleotide
guggagaggggccaacagc

SEQ ID NO: 2389618 - RNA, 19 nt, Artificial Sequence
  Description of Artificial Sequence: Synthetic oligonucleotide
cugaaacuggucucaagga

SEQ ID NO: 2389619 - RNA, 19 nt, Artificial Sequence
  Description of Artificial Sequence: Synthetic oligonucleotide
uucacugguuccugugugu

SEQ ID NO: 2389620 - RNA, 19 nt, Artificial Sequence
  Description of Artificial Sequence: Synthetic oligonucleotide
uccagaacacacucaugaa

SEQ ID NO: 2389621 - RNA, 19 nt, Artificial Sequence
  Description of Artificial Sequence: Synthetic oligonucleotide
uccugaaacuggucucaag

SEQ ID NO: 2389622 - RNA, 19 nt, Artificial Sequence
  Description of Artificial Sequence: Synthetic oligonucleotide
ugacaugacaggguucacu

SEQ ID NO: 2389623 - RNA, 19 nt, Artificial Sequence
  Description of Artificial Sequence: Synthetic oligonucleotide
acuuccuaggccgaaggga

SEQ ID NO: 2389624 - RNA, 19 nt, Artificial Sequence
  Description of Artificial Sequence: Synthetic oligonucleotide
acacugacaugacaggguu

SEQ ID NO: 2389625 - RNA, 19 nt, Artificial Sequence
  Description of Artificial Sequence: Synthetic oligonucleotide
guacugguggaugugauaa

SEQ ID NO: 2389626 - RNA, 19 nt, Artificial Sequence
  Description of Artificial Sequence: Synthetic oligonucleotide
uacugguggaugugauaag

SEQ ID NO: 2389627 - RNA, 19 nt, Artificial Sequence
  Description of Artificial Sequence: Synthetic oligonucleotide
acguggaggaagguggcgg

SEQ ID NO: 2389628 - RNA, 19 nt, Artificial Sequence
  Description of Artificial Sequence: Synthetic oligonucleotide
gagcccucagcuucuaguc

SEQ ID NO: 2389629 - RNA, 19 nt, Artificial Sequence
  Description of Artificial Sequence: Synthetic oligonucleotide
ucagguagaggggcucagg

SEQ ID NO: 2389630 - RNA, 19 nt, Artificial Sequence
  Description of Artificial Sequence: Synthetic oligonucleotide
auagguuccagcaccacuu

SEQ ID NO: 2389631 - RNA, 19 nt, Artificial Sequence
  Description of Artificial Sequence: Synthetic oligonucleotide
uuccagcaccacuuccuag

SEQ ID NO: 2389632 - RNA, 19 nt, Artificial Sequence
  Description of Artificial Sequence: Synthetic oligonucleotide
acugguuccugugugugga

SEQ ID NO: 2389633 - RNA, 19 nt, Artificial Sequence
  Description of Artificial Sequence: Synthetic oligonucleotide
uguguguggagaggggcca

SEQ ID NO: 2389634 - RNA, 19 nt, Artificial Sequence
  Description of Artificial Sequence: Synthetic oligonucleotide
agauggcuuuaccugccug

SEQ ID NO: 2389635 - RNA, 19 nt, Artificial Sequence
  Description of Artificial Sequence: Synthetic oligonucleotide
ucacugguuccugugugug

SEQ ID NO: 2389636 - RNA, 19 nt, Artificial Sequence
  Description of Artificial Sequence: Synthetic oligonucleotide
agaacacacucaugaagua

SEQ ID NO: 2389637 - RNA, 19 nt, Artificial Sequence
  Description of Artificial Sequence: Synthetic oligonucleotide
cacacucaugaaguacugg

SEQ ID NO: 2389638 - RNA, 19 nt, Artificial Sequence
  Description of Artificial Sequence: Synthetic oligonucleotide
aggacaaagacagguguaa

SEQ ID NO: 2389639 - RNA, 19 nt, Artificial Sequence
  Description of Artificial Sequence: Synthetic oligonucleotide
cuccagaagcccaugcuca

SEQ ID NO: 2389640 - RNA, 19 nt, Artificial Sequence
  Description of Artificial Sequence: Synthetic oligonucleotide
gaaguacuggccuguccuc

SEQ ID NO: 2389641 - RNA, 19 nt, Artificial Sequence
  Description of Artificial Sequence: Synthetic oligonucleotide
gguuccuguguguggagag

SEQ ID NO: 2389642 - RNA, 19 nt, Artificial Sequence
  Description of Artificial Sequence: Synthetic oligonucleotide
acgaaaccuacgagcacac

SEQ ID NO: 2389643 - RNA, 19 nt, Artificial Sequence
  Description of Artificial Sequence: Synthetic oligonucleotide
cacuuccuaggccgaaggg

SEQ ID NO: 2389644 - RNA, 19 nt, Artificial Sequence
  Description of Artificial Sequence: Synthetic oligonucleotide
cucaugacacugacaugac

SEQ ID NO: 2389645 - RNA, 19 nt, Artificial Sequence
  Description of Artificial Sequence: Synthetic oligonucleotide
ugccugcacaccuucccug

SEQ ID NO: 2389646 - RNA, 19 nt, Artificial Sequence
  Description of Artificial Sequence: Synthetic oligonucleotide
gucugucuuccugaaacug

SEQ ID NO: 2389647 - RNA, 19 nt, Artificial Sequence
  Description of Artificial Sequence: Synthetic oligonucleotide
agggaauacucuaauugaa

SEQ ID NO: 2389648 - RNA, 19 nt, Artificial Sequence
  Description of Artificial Sequence: Synthetic oligonucleotide
aguacuggccuguccucca

SEQ ID NO: 2389649 - RNA, 19 nt, Artificial Sequence
  Description of Artificial Sequence: Synthetic oligonucleotide
ugcucaugacacugacaug

SEQ ID NO: 2389650 - RNA, 19 nt, Artificial Sequence
  Description of Artificial Sequence: Synthetic oligonucleotide
uauaggcauuauccacuaa

SEQ ID NO: 2389651 - RNA, 19 nt, Artificial Sequence
  Description of Artificial Sequence: Synthetic oligonucleotide
cacgaaaccuacgagcaca

SEQ ID NO: 2389652 - RNA, 19 nt, Artificial Sequence
  Description of Artificial Sequence: Synthetic oligonucleotide
agguagaggggcucagggu

SEQ ID NO: 2389653 - RNA, 19 nt, Artificial Sequence
  Description of Artificial Sequence: Synthetic oligonucleotide
agggagggaauacucuaau

SEQ ID NO: 2389654 - RNA, 19 nt, Artificial Sequence
  Description of Artificial Sequence: Synthetic oligonucleotide
auugaauuauaggcauuau

SEQ ID NO: 2389655 - RNA, 19 nt, Artificial Sequence
  Description of Artificial Sequence: Synthetic oligonucleotide
acucagccacccacgaaac

SEQ ID NO: 2389656 - RNA, 19 nt, Artificial Sequence
  Description of Artificial Sequence: Synthetic oligonucleotide
guuccuguguguggagagg

SEQ ID NO: 2389657 - RNA, 19 nt, Artificial Sequence
  Description of Artificial Sequence: Synthetic oligonucleotide
gucuuccugaaacuggucu

SEQ ID NO: 2389658 - RNA, 19 nt, Artificial Sequence
  Description of Artificial Sequence: Synthetic oligonucleotide
uuuuggucgcuguccuggu

SEQ ID NO: 2389659 - RNA, 19 nt, Artificial Sequence
  Description of Artificial Sequence: Synthetic oligonucleotide
aagggagggaauacucuaa

SEQ ID NO: 2389660 - RNA, 19 nt, Artificial Sequence
  Description of Artificial Sequence: Synthetic oligonucleotide
cuucuagucccgaccugug

SEQ ID NO: 2389661 - RNA, 19 nt, Artificial Sequence
  Description of Artificial Sequence: Synthetic oligonucleotide
aggaagguggcggggaugu

SEQ ID NO: 2389662 - RNA, 19 nt, Artificial Sequence
  Description of Artificial Sequence: Synthetic oligonucleotide
ugucuuccugaaacugguc

SEQ ID NO: 2389663 - RNA, 19 nt, Artificial Sequence
  Description of Artificial Sequence: Synthetic oligonucleotide
cucagcuucuagucccgac

SEQ ID NO: 2389664 - RNA, 19 nt, Artificial Sequence
  Description of Artificial Sequence: Synthetic oligonucleotide
acaggguucacugguuccu

SEQ ID NO: 2389665 - RNA, 19 nt, Artificial Sequence
  Description of Artificial Sequence: Synthetic oligonucleotide
ggcuuuaccugccugcaca

SEQ ID NO: 2389666 - RNA, 19 nt, Artificial Sequence
  Description of Artificial Sequence: Synthetic oligonucleotide
caggagcauagguuccagc

SEQ ID NO: 2389667 - RNA, 19 nt, Artificial Sequence
  Description of Artificial Sequence: Synthetic oligonucleotide
ggagcauagguuccagcac

SEQ ID NO: 2389668 - RNA, 19 nt, Artificial Sequence
  Description of Artificial Sequence: Synthetic oligonucleotide
caugacaggguucacuggu

SEQ ID NO: 2389669 - RNA, 19 nt, Artificial Sequence
  Description of Artificial Sequence: Synthetic oligonucleotide
ucggcaucugggagagaug

SEQ ID NO: 2389670 - RNA, 19 nt, Artificial Sequence
  Description of Artificial Sequence: Synthetic oligonucleotide
aucugggagagauggcuuu

SEQ ID NO: 2389671 - RNA, 19 nt, Artificial Sequence
  Description of Artificial Sequence: Synthetic oligonucleotide
cugcacaccuucccugagc

SEQ ID NO: 2389672 - RNA, 19 nt, Artificial Sequence
  Description of Artificial Sequence: Synthetic oligonucleotide
ggaauacucuaauugaauu

SEQ ID NO: 2389673 - RNA, 19 nt, Artificial Sequence
  Description of Artificial Sequence: Synthetic oligonucleotide
cuaaccuccagaacacacu

SEQ ID NO: 2389674 - RNA, 19 nt, Artificial Sequence
  Description of Artificial Sequence: Synthetic oligonucleotide
acuggccuguccuccagaa

SEQ ID NO: 2389675 - RNA, 19 nt, Artificial Sequence
  Description of Artificial Sequence: Synthetic oligonucleotide
cacccacgaaaccuacgag

SEQ ID NO: 2389676 - RNA, 19 nt, Artificial Sequence
  Description of Artificial Sequence: Synthetic oligonucleotide
acgagcacacacacacagg

SEQ ID NO: 2389677 - RNA, 19 nt, Artificial Sequence
  Description of Artificial Sequence: Synthetic oligonucleotide
acgacucagccacccacga

SEQ ID NO: 2389678 - RNA, 19 nt, Artificial Sequence
  Description of Artificial Sequence: Synthetic oligonucleotide
cucagccacccacgaaacc

SEQ ID NO: 2389679 - RNA, 19 nt, Artificial Sequence
  Description of Artificial Sequence: Synthetic oligonucleotide
agcugcacaggagcauagg

SEQ ID NO: 2389680 - RNA, 19 nt, Artificial Sequence
  Description of Artificial Sequence: Synthetic oligonucleotide
cuuccugaaacuggucuca

SEQ ID NO: 2389681 - RNA, 19 nt, Artificial Sequence
  Description of Artificial Sequence: Synthetic oligonucleotide
auggcuuuaccugccugca

SEQ ID NO: 2389682 - RNA, 19 nt, Artificial Sequence
  Description of Artificial Sequence: Synthetic oligonucleotide
ugguuccuguguguggaga

SEQ ID NO: 2389683 - RNA, 19 nt, Artificial Sequence
  Description of Artificial Sequence: Synthetic oligonucleotide
ggacaaagacagguguaag

SEQ ID NO: 2389684 - RNA, 19 nt, Artificial Sequence
  Description of Artificial Sequence: Synthetic oligonucleotide
guccuccagaagcccaugc

SEQ ID NO: 2389685 - RNA, 19 nt, Artificial Sequence
  Description of Artificial Sequence: Synthetic oligonucleotide
uggcuuuaccugccugcac

SEQ ID NO: 2389686 - RNA, 19 nt, Artificial Sequence
  Description of Artificial Sequence: Synthetic oligonucleotide
acaggagcauagguuccag

SEQ ID NO: 2389687 - RNA, 19 nt, Artificial Sequence
  Description of Artificial Sequence: Synthetic oligonucleotide
uacuggccuguccuccaga

SEQ ID NO: 2389688 - RNA, 19 nt, Artificial Sequence
  Description of Artificial Sequence: Synthetic oligonucleotide
agcuucuagucccgaccug

SEQ ID NO: 2389689 - RNA, 19 nt, Artificial Sequence
  Description of Artificial Sequence: Synthetic oligonucleotide
cuuuaccugccugcacacc

SEQ ID NO: 2389690 - RNA, 19 nt, Artificial Sequence
  Description of Artificial Sequence: Synthetic oligonucleotide
ccacuaaccuccagaacac

SEQ ID NO: 2389691 - RNA, 19 nt, Artificial Sequence
  Description of Artificial Sequence: Synthetic oligonucleotide
acacacucaugaaguacug

SEQ ID NO: 2389692 - RNA, 19 nt, Artificial Sequence
  Description of Artificial Sequence: Synthetic oligonucleotide
uuuggucgcuguccuggua

SEQ ID NO: 2389693 - RNA, 19 nt, Artificial Sequence
  Description of Artificial Sequence: Synthetic oligonucleotide
uuaccugccugcacaccuu

SEQ ID NO: 2389694 - RNA, 19 nt, Artificial Sequence
  Description of Artificial Sequence: Synthetic oligonucleotide
aggguucacugguuccugu

SEQ ID NO: 2389695 - RNA, 19 nt, Artificial Sequence
  Description of Artificial Sequence: Synthetic oligonucleotide
gacacugacaugacagggu

SEQ ID NO: 2389696 - RNA, 19 nt, Artificial Sequence
  Description of Artificial Sequence: Synthetic oligonucleotide
caacagcugcacaggagca

SEQ ID NO: 2389697 - RNA, 19 nt, Artificial Sequence
  Description of Artificial Sequence: Synthetic oligonucleotide
gaggacaaagacaggugua

SEQ ID NO: 2389698 - RNA, 19 nt, Artificial Sequence
  Description of Artificial Sequence: Synthetic oligonucleotide
uaccugccugcacaccuuc

SEQ ID NO: 2389699 - RNA, 19 nt, Artificial Sequence
  Description of Artificial Sequence: Synthetic oligonucleotide
accacuuccuaggccgaag

SEQ ID NO: 2389700 - RNA, 19 nt, Artificial Sequence
  Description of Artificial Sequence: Synthetic oligonucleotide
cacugacaugacaggguuc

SEQ ID NO: 2389701 - RNA, 19 nt, Artificial Sequence
  Description of Artificial Sequence: Synthetic oligonucleotide
cauuauccacuaaccucca

SEQ ID NO: 2389702 - RNA, 19 nt, Artificial Sequence
  Description of Artificial Sequence: Synthetic oligonucleotide
cuucccugagcccucagcu

SEQ ID NO: 2389703 - RNA, 19 nt, Artificial Sequence
  Description of Artificial Sequence: Synthetic oligonucleotide
uaggccgaagggagggaau

SEQ ID NO: 2389704 - RNA, 19 nt, Artificial Sequence
  Description of Artificial Sequence: Synthetic oligonucleotide
aggggcucagggucugucu

SEQ ID NO: 2389705 - RNA, 19 nt, Artificial Sequence
  Description of Artificial Sequence: Synthetic oligonucleotide
guacuggccuguccuccag

SEQ ID NO: 2389706 - RNA, 19 nt, Artificial Sequence
  Description of Artificial Sequence: Synthetic oligonucleotide
cccacgaaaccuacgagca

SEQ ID NO: 2389707 - RNA, 19 nt, Artificial Sequence
  Description of Artificial Sequence: Synthetic oligonucleotide
caagaaagugcagaauggu

SEQ ID NO: 2389708 - RNA, 19 nt, Artificial Sequence
  Description of Artificial Sequence: Synthetic oligonucleotide
agcauagguuccagcacca

SEQ ID NO: 2389709 - RNA, 19 nt, Artificial Sequence
  Description of Artificial Sequence: Synthetic oligonucleotide
ccaugcucagguagagggg

SEQ ID NO: 2389710 - RNA, 19 nt, Artificial Sequence
  Description of Artificial Sequence: Synthetic oligonucleotide
cugucuuccugaaacuggu

SEQ ID NO: 2389711 - RNA, 19 nt, Artificial Sequence
  Description of Artificial Sequence: Synthetic oligonucleotide
cagcaccacuuccuaggcc

SEQ ID NO: 2389712 - RNA, 19 nt, Artificial Sequence
  Description of Artificial Sequence: Synthetic oligonucleotide
cauagguuccagcaccacu

SEQ ID NO: 2389713 - RNA, 19 nt, Artificial Sequence
  Description of Artificial Sequence: Synthetic oligonucleotide
ucugggagagauggcuuua

SEQ ID NO: 2389714 - RNA, 19 nt, Artificial Sequence
  Description of Artificial Sequence: Synthetic oligonucleotide
cugguuccuguguguggag

SEQ ID NO: 2389715 - RNA, 19 nt, Artificial Sequence
  Description of Artificial Sequence: Synthetic oligonucleotide
caccaccugcccacgacuc

SEQ ID NO: 2389716 - RNA, 19 nt, Artificial Sequence
  Description of Artificial Sequence: Synthetic oligonucleotide
gggagagauggcuuuaccu

SEQ ID NO: 2389717 - RNA, 19 nt, Artificial Sequence
  Description of Artificial Sequence: Synthetic oligonucleotide
guggaggaagguggcgggg

SEQ ID NO: 2389718 - RNA, 19 nt, Artificial Sequence
  Description of Artificial Sequence: Synthetic oligonucleotide
agcccaugcucagguagag

SEQ ID NO: 2389719 - RNA, 19 nt, Artificial Sequence
  Description of Artificial Sequence: Synthetic oligonucleotide
accaccugcccacgacuca

SEQ ID NO: 2389720 - RNA, 19 nt, Artificial Sequence
  Description of Artificial Sequence: Synthetic oligonucleotide
cacguggaggaagguggcg

SEQ ID NO: 2389721 - RNA, 19 nt, Artificial Sequence
  Description of Artificial Sequence: Synthetic oligonucleotide
auacucuaauugaauuaua

SEQ ID NO: 2389722 - RNA, 19 nt, Artificial Sequence
  Description of Artificial Sequence: Synthetic oligonucleotide
cacacacacacagguagga

SEQ ID NO: 2389723 - RNA, 19 nt, Artificial Sequence
  Description of Artificial Sequence: Synthetic oligonucleotide
uguguggagaggggccaac

SEQ ID NO: 2389724 - RNA, 19 nt, Artificial Sequence
  Description of Artificial Sequence: Synthetic oligonucleotide
ggguucacugguuccugug

SEQ ID NO: 2389725 - RNA, 19 nt, Artificial Sequence
  Description of Artificial Sequence: Synthetic oligonucleotide
gcacacacacacagguagg

SEQ ID NO: 2389726 - RNA, 19 nt, Artificial Sequence
  Description of Artificial Sequence: Synthetic oligonucleotide
uucccugagcccucagcuu

SEQ ID NO: 2389727 - RNA, 19 nt, Artificial Sequence
  Description of Artificial Sequence: Synthetic oligonucleotide
ccacuuccuaggccgaagg

SEQ ID NO: 2389728 - RNA, 19 nt, Artificial Sequence
  Description of Artificial Sequence: Synthetic oligonucleotide
cugggagagauggcuuuac

SEQ ID NO: 2389729 - RNA, 19 nt, Artificial Sequence
  Description of Artificial Sequence: Synthetic oligonucleotide
agaggggccaacagcugca

SEQ ID NO: 2389730 - RNA, 19 nt, Artificial Sequence
  Description of Artificial Sequence: Synthetic oligonucleotide
caugaaguacuggccuguc

SEQ ID NO: 2389731 - RNA, 19 nt, Artificial Sequence
  Description of Artificial Sequence: Synthetic oligonucleotide
cuggccuguccuccagaag

SEQ ID NO: 2389732 - RNA, 19 nt, Artificial Sequence
  Description of Artificial Sequence: Synthetic oligonucleotide
accugccugcacaccuucc

SEQ ID NO: 2389733 - RNA, 19 nt, Artificial Sequence
  Description of Artificial Sequence: Synthetic oligonucleotide
gcuuuaccugccugcacac

SEQ ID NO: 2389734 - RNA, 19 nt, Artificial Sequence
  Description of Artificial Sequence: Synthetic oligonucleotide
agccacccacgaaaccuac

SEQ ID NO: 2389735 - RNA, 19 nt, Artificial Sequence
  Description of Artificial Sequence: Synthetic oligonucleotide
ccuccagaagcccaugcuc

SEQ ID NO: 2389736 - RNA, 19 nt, Artificial Sequence
  Description of Artificial Sequence: Synthetic oligonucleotide
ccgaagggagggaauacuc

SEQ ID NO: 2389737 - RNA, 19 nt, Artificial Sequence
  Description of Artificial Sequence: Synthetic oligonucleotide
ccugccugcacaccuuccc

SEQ ID NO: 2389738 - RNA, 19 nt, Artificial Sequence
  Description of Artificial Sequence: Synthetic oligonucleotide
uuccugaaacuggucucaa

SEQ ID NO: 2389739 - RNA, 19 nt, Artificial Sequence
  Description of Artificial Sequence: Synthetic oligonucleotide
cagcgucagcacguggagg

SEQ ID NO: 2389740 - RNA, 19 nt, Artificial Sequence
  Description of Artificial Sequence: Synthetic oligonucleotide
ccuguguguggagaggggc

SEQ ID NO: 2389741 - RNA, 19 nt, Artificial Sequence
  Description of Artificial Sequence: Synthetic oligonucleotide
cuacgagcacacacacaca

SEQ ID NO: 2389742 - RNA, 19 nt, Artificial Sequence
  Description of Artificial Sequence: Synthetic oligonucleotide
guuccagcaccacuuccua

SEQ ID NO: 2389743 - RNA, 19 nt, Artificial Sequence
  Description of Artificial Sequence: Synthetic oligonucleotide
cggcaucugggagagaugg

SEQ ID NO: 2389744 - RNA, 19 nt, Artificial Sequence
  Description of Artificial Sequence: Synthetic oligonucleotide
uagaggggcucagggucug

SEQ ID NO: 2389745 - RNA, 19 nt, Artificial Sequence
  Description of Artificial Sequence: Synthetic oligonucleotide
cagaagcccaugcucaggu

SEQ ID NO: 2389746 - RNA, 19 nt, Artificial Sequence
  Description of Artificial Sequence: Synthetic oligonucleotide
cacaccuucccugagcccu

SEQ ID NO: 2389747 - RNA, 19 nt, Artificial Sequence
  Description of Artificial Sequence: Synthetic oligonucleotide
gggccaacagcugcacagg

SEQ ID NO: 2389748 - RNA, 19 nt, Artificial Sequence
  Description of Artificial Sequence: Synthetic oligonucleotide
caccugcccacgacucagc

SEQ ID NO: 2389749 - RNA, 19 nt, Artificial Sequence
  Description of Artificial Sequence: Synthetic oligonucleotide
caggguucacugguuccug

SEQ ID NO: 2389750 - RNA, 19 nt, Artificial Sequence
  Description of Artificial Sequence: Synthetic oligonucleotide
ccagcaccacuuccuaggc

SEQ ID NO: 2389751 - RNA, 19 nt, Artificial Sequence
  Description of Artificial Sequence: Synthetic oligonucleotide
agggucugucuuccugaaa

SEQ ID NO: 2389752 - RNA, 19 nt, Artificial Sequence
  Description of Artificial Sequence: Synthetic oligonucleotide
cacaggagcauagguucca

SEQ ID NO: 2389753 - RNA, 19 nt, Artificial Sequence
  Description of Artificial Sequence: Synthetic oligonucleotide
aggggccaacagcugcaca

SEQ ID NO: 2389754 - RNA, 19 nt, Artificial Sequence
  Description of Artificial Sequence: Synthetic oligonucleotide
gccaacagcugcacaggag

SEQ ID NO: 2389755 - RNA, 19 nt, Artificial Sequence
  Description of Artificial Sequence: Synthetic oligonucleotide
ccacgacucagccacccac

SEQ ID NO: 2389756 - RNA, 19 nt, Artificial Sequence
  Description of Artificial Sequence: Synthetic oligonucleotide
gagauggcuuuaccugccu

SEQ ID NO: 2389757 - RNA, 19 nt, Artificial Sequence
  Description of Artificial Sequence: Synthetic oligonucleotide
cuggucucaaggacaacau

SEQ ID NO: 2389758 - RNA, 19 nt, Artificial Sequence
  Description of Artificial Sequence: Synthetic oligonucleotide
cguggaggaagguggcggg

SEQ ID NO: 2389759 - RNA, 19 nt, Artificial Sequence
  Description of Artificial Sequence: Synthetic oligonucleotide
ccacccacgaaaccuacga

SEQ ID NO: 2389760 - RNA, 19 nt, Artificial Sequence
  Description of Artificial Sequence: Synthetic oligonucleotide
gguacugguggaugugaua

SEQ ID NO: 2389761 - RNA, 19 nt, Artificial Sequence
  Description of Artificial Sequence: Synthetic oligonucleotide
cugcacaggagcauagguu

SEQ ID NO: 2389762 - RNA, 19 nt, Artificial Sequence
  Description of Artificial Sequence: Synthetic oligonucleotide
ugcccacgacucagccacc

SEQ ID NO: 2389763 - RNA, 19 nt, Artificial Sequence
  Description of Artificial Sequence: Synthetic oligonucleotide
cagcuucuagucccgaccu

SEQ ID NO: 2389764 - RNA, 19 nt, Artificial Sequence
  Description of Artificial Sequence: Synthetic oligonucleotide
ccuucccugagcccucagc

SEQ ID NO: 2389765 - RNA, 19 nt, Artificial Sequence
  Description of Artificial Sequence: Synthetic oligonucleotide
gcugcacaggagcauaggu

SEQ ID NO: 2389766 - RNA, 19 nt, Artificial Sequence
  Description of Artificial Sequence: Synthetic oligonucleotide
gaggggccaacagcugcac

SEQ ID NO: 2389767 - RNA, 19 nt, Artificial Sequence
  Description of Artificial Sequence: Synthetic oligonucleotide
gguucacugguuccugugu

SEQ ID NO: 2389768 - RNA, 19 nt, Artificial Sequence
  Description of Artificial Sequence: Synthetic oligonucleotide
gcacaggagcauagguucc

SEQ ID NO: 2389769 - RNA, 19 nt, Artificial Sequence
  Description of Artificial Sequence: Synthetic oligonucleotide
aggccgaagggagggaaua

SEQ ID NO: 2389770 - RNA, 19 nt, Artificial Sequence
  Description of Artificial Sequence: Synthetic oligonucleotide
cugacaugacaggguucac

SEQ ID NO: 2389771 - RNA, 19 nt, Artificial Sequence
  Description of Artificial Sequence: Synthetic oligonucleotide
gaggggcucagggucuguc

SEQ ID NO: 2389772 - RNA, 19 nt, Artificial Sequence
  Description of Artificial Sequence: Synthetic oligonucleotide
gagcacacacacacaggua

SEQ ID NO: 2389773 - RNA, 19 nt, Artificial Sequence
  Description of Artificial Sequence: Synthetic oligonucleotide
accuacgagcacacacaca

SEQ ID NO: 2389774 - RNA, 19 nt, Artificial Sequence
  Description of Artificial Sequence: Synthetic oligonucleotide
gggaauacucuaauugaau

SEQ ID NO: 2389775 - RNA, 19 nt, Artificial Sequence
  Description of Artificial Sequence: Synthetic oligonucleotide
cccucagcuucuagucccg

SEQ ID NO: 2389776 - RNA, 19 nt, Artificial Sequence
  Description of Artificial Sequence: Synthetic oligonucleotide
guguggagaggggccaaca

SEQ ID NO: 2389777 - RNA, 19 nt, Artificial Sequence
  Description of Artificial Sequence: Synthetic oligonucleotide
cuaggccgaagggagggaa

SEQ ID NO: 2389778 - RNA, 19 nt, Artificial Sequence
  Description of Artificial Sequence: Synthetic oligonucleotide
ccagaagcccaugcucagg

SEQ ID NO: 2389779 - RNA, 19 nt, Artificial Sequence
  Description of Artificial Sequence: Synthetic oligonucleotide
gguuccagcaccacuuccu

SEQ ID NO: 2389780 - RNA, 19 nt, Artificial Sequence
  Description of Artificial Sequence: Synthetic oligonucleotide
augcucagguagaggggcu

SEQ ID NO: 2389781 - RNA, 19 nt, Artificial Sequence
  Description of Artificial Sequence: Synthetic oligonucleotide
ccuccagaacacacucaug

SEQ ID NO: 2389782 - RNA, 19 nt, Artificial Sequence
  Description of Artificial Sequence: Synthetic oligonucleotide
ggucugucuuccugaaacu

SEQ ID NO: 2389783 - RNA, 19 nt, Artificial Sequence
  Description of Artificial Sequence: Synthetic oligonucleotide
ggccaacagcugcacagga

SEQ ID NO: 2389784 - RNA, 19 nt, Artificial Sequence
  Description of Artificial Sequence: Synthetic oligonucleotide
cacuaaccuccagaacaca

SEQ ID NO: 2389785 - RNA, 19 nt, Artificial Sequence
  Description of Artificial Sequence: Synthetic oligonucleotide
guagaggggcucagggucu

SEQ ID NO: 2389786 - RNA, 19 nt, Artificial Sequence
  Description of Artificial Sequence: Synthetic oligonucleotide
ccacgaaaccuacgagcac

SEQ ID NO: 2389787 - RNA, 19 nt, Artificial Sequence
  Description of Artificial Sequence: Synthetic oligonucleotide
cagccacccacgaaaccua

SEQ ID NO: 2389788 - RNA, 19 nt, Artificial Sequence
  Description of Artificial Sequence: Synthetic oligonucleotide
gccacccacgaaaccuacg

SEQ ID NO: 2389789 - RNA, 19 nt, Artificial Sequence
  Description of Artificial Sequence: Synthetic oligonucleotide
gccugcacaccuucccuga

SEQ ID NO: 2389790 - RNA, 19 nt, Artificial Sequence
  Description of Artificial Sequence: Synthetic oligonucleotide
caucugggagagauggcuu

SEQ ID NO: 2389791 - RNA, 19 nt, Artificial Sequence
  Description of Artificial Sequence: Synthetic oligonucleotide
gcuucuagucccgaccugu

SEQ ID NO: 2389792 - RNA, 19 nt, Artificial Sequence
  Description of Artificial Sequence: Synthetic oligonucleotide
ccaccugcccacgacucag

SEQ ID NO: 2389793 - RNA, 19 nt, Artificial Sequence
  Description of Artificial Sequence: Synthetic oligonucleotide
gcccaugcucagguagagg

SEQ ID NO: 2389794 - RNA, 19 nt, Artificial Sequence
  Description of Artificial Sequence: Synthetic oligonucleotide
gggcucagggucugucuuc

SEQ ID NO: 2389795 - RNA, 19 nt, Artificial Sequence
  Description of Artificial Sequence: Synthetic oligonucleotide
gcacaccuucccugagccc

SEQ ID NO: 2389796 - RNA, 19 nt, Artificial Sequence
  Description of Artificial Sequence: Synthetic oligonucleotide
cgagcacacacacacaggu

SEQ ID NO: 2389797 - RNA, 19 nt, Artificial Sequence
  Description of Artificial Sequence: Synthetic oligonucleotide
gcacguggaggaagguggc

SEQ ID NO: 2389798 - RNA, 19 nt, Artificial Sequence
  Description of Artificial Sequence: Synthetic oligonucleotide
ccugcacaccuucccugag

SEQ ID NO: 2389799 - RNA, 19 nt, Artificial Sequence
  Description of Artificial Sequence: Synthetic oligonucleotide
ggccgaagggagggaauac

SEQ ID NO: 2389800 - RNA, 19 nt, Artificial Sequence
  Description of Artificial Sequence: Synthetic oligonucleotide
cccaccaccugcccacgac

SEQ ID NO: 2389801 - RNA, 19 nt, Artificial Sequence
  Description of Artificial Sequence: Synthetic oligonucleotide
cugccugcacaccuucccu

SEQ ID NO: 2389802 - RNA, 19 nt, Artificial Sequence
  Description of Artificial Sequence: Synthetic oligonucleotide
gcauagguuccagcaccac

SEQ ID NO: 2389803 - RNA, 19 nt, Artificial Sequence
  Description of Artificial Sequence: Synthetic oligonucleotide
gccuguccuccagaagccc

SEQ ID NO: 2389804 - RNA, 19 nt, Artificial Sequence
  Description of Artificial Sequence: Synthetic oligonucleotide
gggagggaauacucuaauu

SEQ ID NO: 2389805 - RNA, 19 nt, Artificial Sequence
  Description of Artificial Sequence: Synthetic oligonucleotide
gcccacgacucagccaccc

SEQ ID NO: 2389806 - RNA, 19 nt, Artificial Sequence
  Description of Artificial Sequence: Synthetic oligonucleotide
ccugcccacgacucagcca

SEQ ID NO: 2389807 - RNA, 19 nt, Artificial Sequence
  Description of Artificial Sequence: Synthetic oligonucleotide
guguguggagaggggccaa

SEQ ID NO: 2389808 - RNA, 19 nt, Artificial Sequence
  Description of Artificial Sequence: Synthetic oligonucleotide
cgaagggagggaauacucu

SEQ ID NO: 2389809 - RNA, 19 nt, Artificial Sequence
  Description of Artificial Sequence: Synthetic oligonucleotide
gccgaagggagggaauacu

SEQ ID NO: 2389810 - RNA, 19 nt, Artificial Sequence
  Description of Artificial Sequence: Synthetic oligonucleotide
ggggcucagggucugucuu

SEQ ID NO: 2389811 - RNA, 19 nt, Artificial Sequence
  Description of Artificial Sequence: Synthetic oligonucleotide
caccacuuccuaggccgaa

SEQ ID NO: 2389812 - RNA, 19 nt, Artificial Sequence
  Description of Artificial Sequence: Synthetic oligonucleotide
ccaccaccugcccacgacu

SEQ ID NO: 2389813 - RNA, 19 nt, Artificial Sequence
  Description of Artificial Sequence: Synthetic oligonucleotide
cccacgacucagccaccca

SEQ ID NO: 2389814 - RNA, 19 nt, Artificial Sequence
  Description of Artificial Sequence: Synthetic oligonucleotide
gcccaccaccugcccacga

SEQ ID NO: 2389815 - RNA, 19 nt, Artificial Sequence
  Description of Artificial Sequence: Synthetic oligonucleotide
ccuaggccgaagggaggga

SEQ ID NO: 2389816 - RNA, 19 nt, Artificial Sequence
  Description of Artificial Sequence: Synthetic oligonucleotide
gcucagggucugucuuccu

SEQ ID NO: 2389817 - RNA, 19 nt, Artificial Sequence
  Description of Artificial Sequence: Synthetic oligonucleotide
cgaaaccuacgagcacaca

SEQ ID NO: 2389818 - RNA, 19 nt, Artificial Sequence
  Description of Artificial Sequence: Synthetic oligonucleotide
cgacucagccacccacgaa

SEQ ID NO: 2389819 - RNA, 19 nt, Artificial Sequence
  Description of Artificial Sequence: Synthetic oligonucleotide
aagaauacaaccuauacuc

SEQ ID NO: 2389820 - RNA, 19 nt, Artificial Sequence
  Description of Artificial Sequence: Synthetic oligonucleotide
ucuaauaugauccagucga

SEQ ID NO: 2389821 - RNA, 19 nt, Artificial Sequence
  Description of Artificial Sequence: Synthetic oligonucleotide
uacauaaguacuaagaccc

SEQ ID NO: 2389822 - RNA, 19 nt, Artificial Sequence
  Description of Artificial Sequence: Synthetic oligonucleotide
acucaauaagaauacaacc

SEQ ID NO: 2389823 - RNA, 19 nt, Artificial Sequence
  Description of Artificial Sequence: Synthetic oligonucleotide
aaaauuuacagaucugcag

SEQ ID NO: 2389824 - RNA, 19 nt, Artificial Sequence
  Description of Artificial Sequence: Synthetic oligonucleotide
gaacuugaauuucagaucg

SEQ ID NO: 2389825 - RNA, 19 nt, Artificial Sequence
  Description of Artificial Sequence: Synthetic oligonucleotide
uguguagucagacugaaca

SEQ ID NO: 2389826 - RNA, 19 nt, Artificial Sequence
  Description of Artificial Sequence: Synthetic oligonucleotide
uugaauuucagaucgagca

SEQ ID NO: 2389827 - RNA, 19 nt, Artificial Sequence
  Description of Artificial Sequence: Synthetic oligonucleotide
agcuucacaauaucuaucc

SEQ ID NO: 2389828 - RNA, 19 nt, Artificial Sequence
  Description of Artificial Sequence: Synthetic oligonucleotide
aacuuuaacaucuggauuu

SEQ ID NO: 2389829 - RNA, 19 nt, Artificial Sequence
  Description of Artificial Sequence: Synthetic oligonucleotide
aaaccauuuuccuuaauga

SEQ ID NO: 2389830 - RNA, 19 nt, Artificial Sequence
  Description of Artificial Sequence: Synthetic oligonucleotide
ucagacugaacaaacaaga

SEQ ID NO: 2389831 - RNA, 19 nt, Artificial Sequence
  Description of Artificial Sequence: Synthetic oligonucleotide
uccuuaaugaaguacauaa

SEQ ID NO: 2389832 - RNA, 19 nt, Artificial Sequence
  Description of Artificial Sequence: Synthetic oligonucleotide
aaugugaccacgauguuuc

SEQ ID NO: 2389833 - RNA, 19 nt, Artificial Sequence
  Description of Artificial Sequence: Synthetic oligonucleotide
agaagcucaaaacacaaug

SEQ ID NO: 2389834 - RNA, 19 nt, Artificial Sequence
  Description of Artificial Sequence: Synthetic oligonucleotide
ucuacuacuuuuccaaaag

SEQ ID NO: 2389835 - RNA, 19 nt, Artificial Sequence
  Description of Artificial Sequence: Synthetic oligonucleotide
ucuaccacccauuuuauga

SEQ ID NO: 2389836 - RNA, 19 nt, Artificial Sequence
  Description of Artificial Sequence: Synthetic oligonucleotide
uaagaauacaaccuauacu

SEQ ID NO: 2389837 - RNA, 19 nt, Artificial Sequence
  Description of Artificial Sequence: Synthetic oligonucleotide
aauaugauccagucgaaau

SEQ ID NO: 2389838 - RNA, 19 nt, Artificial Sequence
  Description of Artificial Sequence: Synthetic oligonucleotide
uuuucaggcuuuaagucag

SEQ ID NO: 2389839 - RNA, 19 nt, Artificial Sequence
  Description of Artificial Sequence: Synthetic oligonucleotide
uaugauccagucgaaaugg

SEQ ID NO: 2389840 - RNA, 19 nt, Artificial Sequence
  Description of Artificial Sequence: Synthetic oligonucleotide
uuacuguacguucaucacg

SEQ ID NO: 2389841 - RNA, 19 nt, Artificial Sequence
  Description of Artificial Sequence: Synthetic oligonucleotide
uucacaauaucuauccaca

SEQ ID NO: 2389842 - RNA, 19 nt, Artificial Sequence
  Description of Artificial Sequence: Synthetic oligonucleotide
ugaacaaacaagauguuuu

SEQ ID NO: 2389843 - RNA, 19 nt, Artificial Sequence
  Description of Artificial Sequence: Synthetic oligonucleotide
uucaaaaccacuccaacau

SEQ ID NO: 2389844 - RNA, 19 nt, Artificial Sequence
  Description of Artificial Sequence: Synthetic oligonucleotide
caucuugggauuauaagcc

SEQ ID NO: 2389845 - RNA, 19 nt, Artificial Sequence
  Description of Artificial Sequence: Synthetic oligonucleotide
ugugagucaauuuauuacu

SEQ ID NO: 2389846 - RNA, 19 nt, Artificial Sequence
  Description of Artificial Sequence: Synthetic oligonucleotide
ugaacgaugaugugaagug

SEQ ID NO: 2389847 - RNA, 19 nt, Artificial Sequence
  Description of Artificial Sequence: Synthetic oligonucleotide
auccguuguauucaagugc

SEQ ID NO: 2389848 - RNA, 19 nt, Artificial Sequence
  Description of Artificial Sequence: Synthetic oligonucleotide
uacucaauaagaauacaac

SEQ ID NO: 2389849 - RNA, 19 nt, Artificial Sequence
  Description of Artificial Sequence: Synthetic oligonucleotide
aucauugccaaauguuccc

SEQ ID NO: 2389850 - RNA, 19 nt, Artificial Sequence
  Description of Artificial Sequence: Synthetic oligonucleotide
uucuaauaugauccagucg

SEQ ID NO: 2389851 - RNA, 19 nt, Artificial Sequence
  Description of Artificial Sequence: Synthetic oligonucleotide
ucaauaagaauacaaccua

SEQ ID NO: 2389852 - RNA, 19 nt, Artificial Sequence
  Description of Artificial Sequence: Synthetic oligonucleotide
cauuuuaugaucgaugcac

SEQ ID NO: 2389853 - RNA, 19 nt, Artificial Sequence
  Description of Artificial Sequence: Synthetic oligonucleotide
uuaacaucuggauuuauua

SEQ ID NO: 2389854 - RNA, 19 nt, Artificial Sequence
  Description of Artificial Sequence: Synthetic oligonucleotide
ucuauaaugucuuguagau

SEQ ID NO: 2389855 - RNA, 19 nt, Artificial Sequence
  Description of Artificial Sequence: Synthetic oligonucleotide
auuacuguacguucaucac

SEQ ID NO: 2389856 - RNA, 19 nt, Artificial Sequence
  Description of Artificial Sequence: Synthetic oligonucleotide
uguacguucaucacguuuc

SEQ ID NO: 2389857 - RNA, 19 nt, Artificial Sequence
  Description of Artificial Sequence: Synthetic oligonucleotide
uuugauaugccaucuuucu

SEQ ID NO: 2389858 - RNA, 19 nt, Artificial Sequence
  Description of Artificial Sequence: Synthetic oligonucleotide
auugccaaauguucccugc

SEQ ID NO: 2389859 - RNA, 19 nt, Artificial Sequence
  Description of Artificial Sequence: Synthetic oligonucleotide
agucaauuuauuacugugc

SEQ ID NO: 2389860 - RNA, 19 nt, Artificial Sequence
  Description of Artificial Sequence: Synthetic oligonucleotide
ugauaugccaucuuucuaa

SEQ ID NO: 2389861 - RNA, 19 nt, Artificial Sequence
  Description of Artificial Sequence: Synthetic oligonucleotide
gauuuauuacuguacguuc

SEQ ID NO: 2389862 - RNA, 19 nt, Artificial Sequence
  Description of Artificial Sequence: Synthetic oligonucleotide
uuucaaaaccacuccaaca

SEQ ID NO: 2389863 - RNA, 19 nt, Artificial Sequence
  Description of Artificial Sequence: Synthetic oligonucleotide
acuacuuuuccaaaagcac

SEQ ID NO: 2389864 - RNA, 19 nt, Artificial Sequence
  Description of Artificial Sequence: Synthetic oligonucleotide
agacugaacaaacaagaug

SEQ ID NO: 2389865 - RNA, 19 nt, Artificial Sequence
  Description of Artificial Sequence: Synthetic oligonucleotide
caagguaguacucaauaag

SEQ ID NO: 2389866 - RNA, 19 nt, Artificial Sequence
  Description of Artificial Sequence: Synthetic oligonucleotide
ucacguuucaucuugggau

SEQ ID NO: 2389867 - RNA, 19 nt, Artificial Sequence
  Description of Artificial Sequence: Synthetic oligonucleotide
uuuacagaucugcagauuu

SEQ ID NO: 2389868 - RNA, 19 nt, Artificial Sequence
  Description of Artificial Sequence: Synthetic oligonucleotide
acugcuacaugucuaccac

SEQ ID NO: 2389869 - RNA, 19 nt, Artificial Sequence
  Description of Artificial Sequence: Synthetic oligonucleotide
gcuaaaauaacuucaggug

SEQ ID NO: 2389870 - RNA, 19 nt, Artificial Sequence
  Description of Artificial Sequence: Synthetic oligonucleotide
acuuaguacgucuccacuc

SEQ ID NO: 2389871 - RNA, 19 nt, Artificial Sequence
  Description of Artificial Sequence: Synthetic oligonucleotide
auuuuccuuaaugaaguac

SEQ ID NO: 2389872 - RNA, 19 nt, Artificial Sequence
  Description of Artificial Sequence: Synthetic oligonucleotide
aucugcagauuugauaugc

SEQ ID NO: 2389873 - RNA, 19 nt, Artificial Sequence
  Description of Artificial Sequence: Synthetic oligonucleotide
gucgaaauggcagaaaacc

SEQ ID NO: 2389874 - RNA, 19 nt, Artificial Sequence
  Description of Artificial Sequence: Synthetic oligonucleotide
auaugauccagucgaaaug

SEQ ID NO: 2389875 - RNA, 19 nt, Artificial Sequence
  Description of Artificial Sequence: Synthetic oligonucleotide
uguaaauccaagguaguac

SEQ ID NO: 2389876 - RNA, 19 nt, Artificial Sequence
  Description of Artificial Sequence: Synthetic oligonucleotide
ugcuacaugucuaccaccc

SEQ ID NO: 2389877 - RNA, 19 nt, Artificial Sequence
  Description of Artificial Sequence: Synthetic oligonucleotide
caggcuuuaagucagugug

SEQ ID NO: 2389878 - RNA, 19 nt, Artificial Sequence
  Description of Artificial Sequence: Synthetic oligonucleotide
uaguacucaauaagaauac

SEQ ID NO: 2389879 - RNA, 19 nt, Artificial Sequence
  Description of Artificial Sequence: Synthetic oligonucleotide
acguucaucacguuucauc

SEQ ID NO: 2389880 - RNA, 19 nt, Artificial Sequence
  Description of Artificial Sequence: Synthetic oligonucleotide
uacuguacguucaucacgu

SEQ ID NO: 2389881 - RNA, 19 nt, Artificial Sequence
  Description of Artificial Sequence: Synthetic oligonucleotide
gaugaugugaagugcggug

SEQ ID NO: 2389882 - RNA, 19 nt, Artificial Sequence
  Description of Artificial Sequence: Synthetic oligonucleotide
gaaguacauaaguacuaag

SEQ ID NO: 2389883 - RNA, 19 nt, Artificial Sequence
  Description of Artificial Sequence: Synthetic oligonucleotide
uucccugcuaucaugaguc

SEQ ID NO: 2389884 - RNA, 19 nt, Artificial Sequence
  Description of Artificial Sequence: Synthetic oligonucleotide
uccguuguauucaagugcu

SEQ ID NO: 2389885 - RNA, 19 nt, Artificial Sequence
  Description of Artificial Sequence: Synthetic oligonucleotide
uuucuaauaugauccaguc

SEQ ID NO: 2389886 - RNA, 19 nt, Artificial Sequence
  Description of Artificial Sequence: Synthetic oligonucleotide
ucgaaauggcagaaaacca

SEQ ID NO: 2389887 - RNA, 19 nt, Artificial Sequence
  Description of Artificial Sequence: Synthetic oligonucleotide
aaaauaacuucaggugcuc

SEQ ID NO: 2389888 - RNA, 19 nt, Artificial Sequence
  Description of Artificial Sequence: Synthetic oligonucleotide
gaaaguacuguggggaucc

SEQ ID NO: 2389889 - RNA, 19 nt, Artificial Sequence
  Description of Artificial Sequence: Synthetic oligonucleotide
gaagcucaaaacacaaugc

SEQ ID NO: 2389890 - RNA, 19 nt, Artificial Sequence
  Description of Artificial Sequence: Synthetic oligonucleotide
guauuaacaauuucauauc

SEQ ID NO: 2389891 - RNA, 19 nt, Artificial Sequence
  Description of Artificial Sequence: Synthetic oligonucleotide
ugugguuacuuuuguagcu

SEQ ID NO: 2389892 - RNA, 19 nt, Artificial Sequence
  Description of Artificial Sequence: Synthetic oligonucleotide
uaacaucuggauuuauuac

SEQ ID NO: 2389893 - RNA, 19 nt, Artificial Sequence
  Description of Artificial Sequence: Synthetic oligonucleotide
aaauccaagguaguacuca

SEQ ID NO: 2389894 - RNA, 19 nt, Artificial Sequence
  Description of Artificial Sequence: Synthetic oligonucleotide
agaauacaaccuauacucc

SEQ ID NO: 2389895 - RNA, 19 nt, Artificial Sequence
  Description of Artificial Sequence: Synthetic oligonucleotide
gaucgaugcacucuacuac

SEQ ID NO: 2389896 - RNA, 19 nt, Artificial Sequence
  Description of Artificial Sequence: Synthetic oligonucleotide
augucuaccacccauuuua

SEQ ID NO: 2389897 - RNA, 19 nt, Artificial Sequence
  Description of Artificial Sequence: Synthetic oligonucleotide
uuuaugaucgaugcacucu

SEQ ID NO: 2389898 - RNA, 19 nt, Artificial Sequence
  Description of Artificial Sequence: Synthetic oligonucleotide
ugccaucuuucuaauauga

SEQ ID NO: 2389899 - RNA, 19 nt, Artificial Sequence
  Description of Artificial Sequence: Synthetic oligonucleotide
uuuaacaucuggauuuauu

SEQ ID NO: 2389900 - RNA, 19 nt, Artificial Sequence
  Description of Artificial Sequence: Synthetic oligonucleotide
gauccguuguauucaagug

SEQ ID NO: 2389901 - RNA, 19 nt, Artificial Sequence
  Description of Artificial Sequence: Synthetic oligonucleotide
cacuccaacaucuggacac

SEQ ID NO: 2389902 - RNA, 19 nt, Artificial Sequence
  Description of Artificial Sequence: Synthetic oligonucleotide
gugugagucaauuuauuac

SEQ ID NO: 2389903 - RNA, 19 nt, Artificial Sequence
  Description of Artificial Sequence: Synthetic oligonucleotide
gucaauuuauuacugugca

SEQ ID NO: 2389904 - RNA, 19 nt, Artificial Sequence
  Description of Artificial Sequence: Synthetic oligonucleotide
auuugauaugccaucuuuc

SEQ ID NO: 2389905 - RNA, 19 nt, Artificial Sequence
  Description of Artificial Sequence: Synthetic oligonucleotide
uguagauaccaguguacug

SEQ ID NO: 2389906 - RNA, 19 nt, Artificial Sequence
  Description of Artificial Sequence: Synthetic oligonucleotide
uuuauuacuguacguucau

SEQ ID NO: 2389907 - RNA, 19 nt, Artificial Sequence
  Description of Artificial Sequence: Synthetic oligonucleotide
cuuguagauaccaguguac

SEQ ID NO: 2389908 - RNA, 19 nt, Artificial Sequence
  Description of Artificial Sequence: Synthetic oligonucleotide
uuaugaucgaugcacucua

SEQ ID NO: 2389909 - RNA, 19 nt, Artificial Sequence
  Description of Artificial Sequence: Synthetic oligonucleotide
gggauuauaagccucugug

SEQ ID NO: 2389910 - RNA, 19 nt, Artificial Sequence
  Description of Artificial Sequence: Synthetic oligonucleotide
ugagucaauuuauuacugu

SEQ ID NO: 2389911 - RNA, 19 nt, Artificial Sequence
  Description of Artificial Sequence: Synthetic oligonucleotide
uaaugucuuguagauacca

SEQ ID NO: 2389912 - RNA, 19 nt, Artificial Sequence
  Description of Artificial Sequence: Synthetic oligonucleotide
aaugucuuguagauaccag

SEQ ID NO: 2389913 - RNA, 19 nt, Artificial Sequence
  Description of Artificial Sequence: Synthetic oligonucleotide
cucaauaagaauacaaccu

SEQ ID NO: 2389914 - RNA, 19 nt, Artificial Sequence
  Description of Artificial Sequence: Synthetic oligonucleotide
cacaaugcaaaugugacca

SEQ ID NO: 2389915 - RNA, 19 nt, Artificial Sequence
  Description of Artificial Sequence: Synthetic oligonucleotide
cucuauaaugucuuguaga

SEQ ID NO: 2389916 - RNA, 19 nt, Artificial Sequence
  Description of Artificial Sequence: Synthetic oligonucleotide
uccaucauugccaaauguu

SEQ ID NO: 2389917 - RNA, 19 nt, Artificial Sequence
  Description of Artificial Sequence: Synthetic oligonucleotide
aaaacacaaugcaaaugug

SEQ ID NO: 2389918 - RNA, 19 nt, Artificial Sequence
  Description of Artificial Sequence: Synthetic oligonucleotide
aauccaagguaguacucaa

SEQ ID NO: 2389919 - RNA, 19 nt, Artificial Sequence
  Description of Artificial Sequence: Synthetic oligonucleotide
ugauccagucgaaauggca

SEQ ID NO: 2389920 - RNA, 19 nt, Artificial Sequence
  Description of Artificial Sequence: Synthetic oligonucleotide
aaugcaaaugugaccacga

SEQ ID NO: 2389921 - RNA, 19 nt, Artificial Sequence
  Description of Artificial Sequence: Synthetic oligonucleotide
uuacuuuuguagcuacuuc

SEQ ID NO: 2389922 - RNA, 19 nt, Artificial Sequence
  Description of Artificial Sequence: Synthetic oligonucleotide
gacccagaagcucaaaaca

SEQ ID NO: 2389923 - RNA, 19 nt, Artificial Sequence
  Description of Artificial Sequence: Synthetic oligonucleotide
guaguacucaauaagaaua

SEQ ID NO: 2389924 - RNA, 19 nt, Artificial Sequence
  Description of Artificial Sequence: Synthetic oligonucleotide
cuacuacuuuuccaaaagc

SEQ ID NO: 2389925 - RNA, 19 nt, Artificial Sequence
  Description of Artificial Sequence: Synthetic oligonucleotide
ucuugcacuuaguacgucu

SEQ ID NO: 2389926 - RNA, 19 nt, Artificial Sequence
  Description of Artificial Sequence: Synthetic oligonucleotide
acaaccuauacuccagaca

SEQ ID NO: 2389927 - RNA, 19 nt, Artificial Sequence
  Description of Artificial Sequence: Synthetic oligonucleotide
uuauaagccucuguguagu

SEQ ID NO: 2389928 - RNA, 19 nt, Artificial Sequence
  Description of Artificial Sequence: Synthetic oligonucleotide
uguauucaagugcuccaga

SEQ ID NO: 2389929 - RNA, 19 nt, Artificial Sequence
  Description of Artificial Sequence: Synthetic oligonucleotide
ucaucacguuucaucuugg

SEQ ID NO: 2389930 - RNA, 19 nt, Artificial Sequence
  Description of Artificial Sequence: Synthetic oligonucleotide
augaugugaagugcggugg

SEQ ID NO: 2389931 - RNA, 19 nt, Artificial Sequence
  Description of Artificial Sequence: Synthetic oligonucleotide
uggauuuauuacuguacgu

SEQ ID NO: 2389932 - RNA, 19 nt, Artificial Sequence
  Description of Artificial Sequence: Synthetic oligonucleotide
aagacccagaagcucaaaa

SEQ ID NO: 2389933 - RNA, 19 nt, Artificial Sequence
  Description of Artificial Sequence: Synthetic oligonucleotide
uaccaguguacugugaugu

SEQ ID NO: 2389934 - RNA, 19 nt, Artificial Sequence
  Description of Artificial Sequence: Synthetic oligonucleotide
uaucuugcacuuaguacgu

SEQ ID NO: 2389935 - RNA, 19 nt, Artificial Sequence
  Description of Artificial Sequence: Synthetic oligonucleotide
uuuuaugaucgaugcacuc

SEQ ID NO: 2389936 - RNA, 19 nt, Artificial Sequence
  Description of Artificial Sequence: Synthetic oligonucleotide
ccaacaucuggacacagcg

SEQ ID NO: 2389937 - RNA, 19 nt, Artificial Sequence
  Description of Artificial Sequence: Synthetic oligonucleotide
cuucaccuaaaguauuaac

SEQ ID NO: 2389938 - RNA, 19 nt, Artificial Sequence
  Description of Artificial Sequence: Synthetic oligonucleotide
aucgaugcacucuacuacu

SEQ ID NO: 2389939 - RNA, 19 nt, Artificial Sequence
  Description of Artificial Sequence: Synthetic oligonucleotide
auuuauuacuguacguuca

SEQ ID NO: 2389940 - RNA, 19 nt, Artificial Sequence
  Description of Artificial Sequence: Synthetic oligonucleotide
agugugagucaauuuauua

SEQ ID NO: 2389941 - RNA, 19 nt, Artificial Sequence
  Description of Artificial Sequence: Synthetic oligonucleotide
uuguagauaccaguguacu

SEQ ID NO: 2389942 - RNA, 19 nt, Artificial Sequence
  Description of Artificial Sequence: Synthetic oligonucleotide
cccauuuuaugaucgaugc

SEQ ID NO: 2389943 - RNA, 19 nt, Artificial Sequence
  Description of Artificial Sequence: Synthetic oligonucleotide
ugaucgaugcacucuacua

SEQ ID NO: 2389944 - RNA, 19 nt, Artificial Sequence
  Description of Artificial Sequence: Synthetic oligonucleotide
ucuugggauuauaagccuc

SEQ ID NO: 2389945 - RNA, 19 nt, Artificial Sequence
  Description of Artificial Sequence: Synthetic oligonucleotide
ugaagugcgguggugaguc

SEQ ID NO: 2389946 - RNA, 19 nt, Artificial Sequence
  Description of Artificial Sequence: Synthetic oligonucleotide
ugugaagugcgguggugag

SEQ ID NO: 2389947 - RNA, 19 nt, Artificial Sequence
  Description of Artificial Sequence: Synthetic oligonucleotide
acccagaagcucaaaacac

SEQ ID NO: 2389948 - RNA, 19 nt, Artificial Sequence
  Description of Artificial Sequence: Synthetic oligonucleotide
gucagacugaacaaacaag

SEQ ID NO: 2389949 - RNA, 19 nt, Artificial Sequence
  Description of Artificial Sequence: Synthetic oligonucleotide
uaaauccaagguaguacuc

SEQ ID NO: 2389950 - RNA, 19 nt, Artificial Sequence
  Description of Artificial Sequence: Synthetic oligonucleotide
agcggaaaguacugugggg

SEQ ID NO: 2389951 - RNA, 19 nt, Artificial Sequence
  Description of Artificial Sequence: Synthetic oligonucleotide
uagauaccaguguacugug

SEQ ID NO: 2389952 - RNA, 19 nt, Artificial Sequence
  Description of Artificial Sequence: Synthetic oligonucleotide
aucacguuucaucuuggga

SEQ ID NO: 2389953 - RNA, 19 nt, Artificial Sequence
  Description of Artificial Sequence: Synthetic oligonucleotide
auaaugucuuguagauacc

SEQ ID NO: 2389954 - RNA, 19 nt, Artificial Sequence
  Description of Artificial Sequence: Synthetic oligonucleotide
uacaaccuauacuccagac

SEQ ID NO: 2389955 - RNA, 19 nt, Artificial Sequence
  Description of Artificial Sequence: Synthetic oligonucleotide
agucgaaauggcagaaaac

SEQ ID NO: 2389956 - RNA, 19 nt, Artificial Sequence
  Description of Artificial Sequence: Synthetic oligonucleotide
uccaacaucuggacacagc

SEQ ID NO: 2389957 - RNA, 19 nt, Artificial Sequence
  Description of Artificial Sequence: Synthetic oligonucleotide
guaaauccaagguaguacu

SEQ ID NO: 2389958 - RNA, 19 nt, Artificial Sequence
  Description of Artificial Sequence: Synthetic oligonucleotide
accacccauuuuaugaucg

SEQ ID NO: 2389959 - RNA, 19 nt, Artificial Sequence
  Description of Artificial Sequence: Synthetic oligonucleotide
uugcacuuaguacgucucc

SEQ ID NO: 2389960 - RNA, 19 nt, Artificial Sequence
  Description of Artificial Sequence: Synthetic oligonucleotide
ugggauuauaagccucugu

SEQ ID NO: 2389961 - RNA, 19 nt, Artificial Sequence
  Description of Artificial Sequence: Synthetic oligonucleotide
cagggcuaaaauaacuuca

SEQ ID NO: 2389962 - RNA, 19 nt, Artificial Sequence
  Description of Artificial Sequence: Synthetic oligonucleotide
cacaugguugagaccaccc

SEQ ID NO: 2389963 - RNA, 19 nt, Artificial Sequence
  Description of Artificial Sequence: Synthetic oligonucleotide
uugauaugccaucuuucua

SEQ ID NO: 2389964 - RNA, 19 nt, Artificial Sequence
  Description of Artificial Sequence: Synthetic oligonucleotide
gaacgaugaugugaagugc

SEQ ID NO: 2389965 - RNA, 19 nt, Artificial Sequence
  Description of Artificial Sequence: Synthetic oligonucleotide
uucggugacucuucccaag

SEQ ID NO: 2389966 - RNA, 19 nt, Artificial Sequence
  Description of Artificial Sequence: Synthetic oligonucleotide
agggcuaaaauaacuucag

SEQ ID NO: 2389967 - RNA, 19 nt, Artificial Sequence
  Description of Artificial Sequence: Synthetic oligonucleotide
uuaguacgucuccacucug

SEQ ID NO: 2389968 - RNA, 19 nt, Artificial Sequence
  Description of Artificial Sequence: Synthetic oligonucleotide
cacucuacuacuuuuccaa

SEQ ID NO: 2389969 - RNA, 19 nt, Artificial Sequence
  Description of Artificial Sequence: Synthetic oligonucleotide
uaguacgucuccacucuga

SEQ ID NO: 2389970 - RNA, 19 nt, Artificial Sequence
  Description of Artificial Sequence: Synthetic oligonucleotide
augccaucuuucuaauaug

SEQ ID NO: 2389971 - RNA, 19 nt, Artificial Sequence
  Description of Artificial Sequence: Synthetic oligonucleotide
gacacagcggaaaguacug

SEQ ID NO: 2389972 - RNA, 19 nt, Artificial Sequence
  Description of Artificial Sequence: Synthetic oligonucleotide
ugguuacuuuuguagcuac

SEQ ID NO: 2389973 - RNA, 19 nt, Artificial Sequence
  Description of Artificial Sequence: Synthetic oligonucleotide
aucuggauuuauuacugua

SEQ ID NO: 2389974 - RNA, 19 nt, Artificial Sequence
  Description of Artificial Sequence: Synthetic oligonucleotide
caucacguuucaucuuggg

SEQ ID NO: 2389975 - RNA, 19 nt, Artificial Sequence
  Description of Artificial Sequence: Synthetic oligonucleotide
ucgagcagcuucacaauau

SEQ ID NO: 2389976 - RNA, 19 nt, Artificial Sequence
  Description of Artificial Sequence: Synthetic oligonucleotide
cuucccaagugaacgauga

SEQ ID NO: 2389977 - RNA, 19 nt, Artificial Sequence
  Description of Artificial Sequence: Synthetic oligonucleotide
augaucgaugcacucuacu

SEQ ID NO: 2389978 - RNA, 19 nt, Artificial Sequence
  Description of Artificial Sequence: Synthetic oligonucleotide
uaauaugauccagucgaaa

SEQ ID NO: 2389979 - RNA, 19 nt, Artificial Sequence
  Description of Artificial Sequence: Synthetic oligonucleotide
uuaagucagugugagucaa

SEQ ID NO: 2389980 - RNA, 19 nt, Artificial Sequence
  Description of Artificial Sequence: Synthetic oligonucleotide
cacagcggaaaguacugug

SEQ ID NO: 2389981 - RNA, 19 nt, Artificial Sequence
  Description of Artificial Sequence: Synthetic oligonucleotide
auaaguacuaagacccaga

SEQ ID NO: 2389982 - RNA, 19 nt, Artificial Sequence
  Description of Artificial Sequence: Synthetic oligonucleotide
auacaaccuauacuccaga

SEQ ID NO: 2389983 - RNA, 19 nt, Artificial Sequence
  Description of Artificial Sequence: Synthetic oligonucleotide
gauuugauaugccaucuuu

SEQ ID NO: 2389984 - RNA, 19 nt, Artificial Sequence
  Description of Artificial Sequence: Synthetic oligonucleotide
ccaucuuucuaauaugauc

SEQ ID NO: 2389985 - RNA, 19 nt, Artificial Sequence
  Description of Artificial Sequence: Synthetic oligonucleotide
uccaggaauccuuuccauc

SEQ ID NO: 2389986 - RNA, 19 nt, Artificial Sequence
  Description of Artificial Sequence: Synthetic oligonucleotide
guagauaccaguguacugu

SEQ ID NO: 2389987 - RNA, 19 nt, Artificial Sequence
  Description of Artificial Sequence: Synthetic oligonucleotide
gugagucaauuuauuacug

SEQ ID NO: 2389988 - RNA, 19 nt, Artificial Sequence
  Description of Artificial Sequence: Synthetic oligonucleotide
uaugaucgaugcacucuac

SEQ ID NO: 2389989 - RNA, 19 nt, Artificial Sequence
  Description of Artificial Sequence: Synthetic oligonucleotide
caaccuauacuccagacau

SEQ ID NO: 2389990 - RNA, 19 nt, Artificial Sequence
  Description of Artificial Sequence: Synthetic oligonucleotide
uugccaaauguucccugcu

SEQ ID NO: 2389991 - RNA, 19 nt, Artificial Sequence
  Description of Artificial Sequence: Synthetic oligonucleotide
gauaccaguguacugugau

SEQ ID NO: 2389992 - RNA, 19 nt, Artificial Sequence
  Description of Artificial Sequence: Synthetic oligonucleotide
aagucagugugagucaauu

SEQ ID NO: 2389993 - RNA, 19 nt, Artificial Sequence
  Description of Artificial Sequence: Synthetic oligonucleotide
gguugagaccaccccaggg

SEQ ID NO: 2389994 - RNA, 19 nt, Artificial Sequence
  Description of Artificial Sequence: Synthetic oligonucleotide
uacaugucuaccacccauu

SEQ ID NO: 2389995 - RNA, 19 nt, Artificial Sequence
  Description of Artificial Sequence: Synthetic oligonucleotide
auccagucgaaauggcaga

SEQ ID NO: 2389996 - RNA, 19 nt, Artificial Sequence
  Description of Artificial Sequence: Synthetic oligonucleotide
acccauuuuaugaucgaug

SEQ ID NO: 2389997 - RNA, 19 nt, Artificial Sequence
  Description of Artificial Sequence: Synthetic oligonucleotide
auuaacaauuucauaucuu

SEQ ID NO: 2389998 - RNA, 19 nt, Artificial Sequence
  Description of Artificial Sequence: Synthetic oligonucleotide
aaaagcaccuucaccuaaa

SEQ ID NO: 2389999 - RNA, 19 nt, Artificial Sequence
  Description of Artificial Sequence: Synthetic oligonucleotide
ccuuaaugaaguacauaag

SEQ ID NO: 2390000 - RNA, 19 nt, Artificial Sequence
  Description of Artificial Sequence: Synthetic oligonucleotide
ucggugacucuucccaagu

SEQ ID NO: 2390001 - RNA, 19 nt, Artificial Sequence
  Description of Artificial Sequence: Synthetic oligonucleotide
aaccuauacuccagacauc

SEQ ID NO: 2390002 - RNA, 19 nt, Artificial Sequence
  Description of Artificial Sequence: Synthetic oligonucleotide
uguucccugcuaucaugag

SEQ ID NO: 2390003 - RNA, 19 nt, Artificial Sequence
  Description of Artificial Sequence: Synthetic oligonucleotide
gggcuaaaauaacuucagg

SEQ ID NO: 2390004 - RNA, 19 nt, Artificial Sequence
  Description of Artificial Sequence: Synthetic oligonucleotide
acucuucccaagugaacga

SEQ ID NO: 2390005 - RNA, 19 nt, Artificial Sequence
  Description of Artificial Sequence: Synthetic oligonucleotide
gugaccacgauguuucaaa

SEQ ID NO: 2390006 - RNA, 19 nt, Artificial Sequence
  Description of Artificial Sequence: Synthetic oligonucleotide
cauugccaaauguucccug

SEQ ID NO: 2390007 - RNA, 19 nt, Artificial Sequence
  Description of Artificial Sequence: Synthetic oligonucleotide
uacuaagacccagaagcuc

SEQ ID NO: 2390008 - RNA, 19 nt, Artificial Sequence
  Description of Artificial Sequence: Synthetic oligonucleotide
cugcuacaugucuaccacc

SEQ ID NO: 2390009 - RNA, 19 nt, Artificial Sequence
  Description of Artificial Sequence: Synthetic oligonucleotide
ucauugccaaauguucccu

SEQ ID NO: 2390010 - RNA, 19 nt, Artificial Sequence
  Description of Artificial Sequence: Synthetic oligonucleotide
ggcuuuaagucagugugag

SEQ ID NO: 2390011 - RNA, 19 nt, Artificial Sequence
  Description of Artificial Sequence: Synthetic oligonucleotide
agugaacgaugaugugaag

SEQ ID NO: 2390012 - RNA, 19 nt, Artificial Sequence
  Description of Artificial Sequence: Synthetic oligonucleotide
augaaguacauaaguacua

SEQ ID NO: 2390013 - RNA, 19 nt, Artificial Sequence
  Description of Artificial Sequence: Synthetic oligonucleotide
uuauuacuguacguucauc

SEQ ID NO: 2390014 - RNA, 19 nt, Artificial Sequence
  Description of Artificial Sequence: Synthetic oligonucleotide
guggggauccguuguauuc

SEQ ID NO: 2390015 - RNA, 19 nt, Artificial Sequence
  Description of Artificial Sequence: Synthetic oligonucleotide
ugucuaccacccauuuuau

SEQ ID NO: 2390016 - RNA, 19 nt, Artificial Sequence
  Description of Artificial Sequence: Synthetic oligonucleotide
gcagauuugauaugccauc

SEQ ID NO: 2390017 - RNA, 19 nt, Artificial Sequence
  Description of Artificial Sequence: Synthetic oligonucleotide
acgaugaugugaagugcgg

SEQ ID NO: 2390018 - RNA, 19 nt, Artificial Sequence
  Description of Artificial Sequence: Synthetic oligonucleotide
ugccaaauguucccugcua

SEQ ID NO: 2390019 - RNA, 19 nt, Artificial Sequence
  Description of Artificial Sequence: Synthetic oligonucleotide
ucccugcuaucaugagucg

SEQ ID NO: 2390020 - RNA, 19 nt, Artificial Sequence
  Description of Artificial Sequence: Synthetic oligonucleotide
ucacaugguugagaccacc

SEQ ID NO: 2390021 - RNA, 19 nt, Artificial Sequence
  Description of Artificial Sequence: Synthetic oligonucleotide
aagugcgguggugaguccu

SEQ ID NO: 2390022 - RNA, 19 nt, Artificial Sequence
  Description of Artificial Sequence: Synthetic oligonucleotide
cagucgaaauggcagaaaa

SEQ ID NO: 2390023 - RNA, 19 nt, Artificial Sequence
  Description of Artificial Sequence: Synthetic oligonucleotide
agauuugauaugccaucuu

SEQ ID NO: 2390024 - RNA, 19 nt, Artificial Sequence
  Description of Artificial Sequence: Synthetic oligonucleotide
augugaagugcggugguga

SEQ ID NO: 2390025 - RNA, 19 nt, Artificial Sequence
  Description of Artificial Sequence: Synthetic oligonucleotide
acucuacuacuuuuccaaa

SEQ ID NO: 2390026 - RNA, 19 nt, Artificial Sequence
  Description of Artificial Sequence: Synthetic oligonucleotide
cucuacuacuuuuccaaaa

SEQ ID NO: 2390027 - RNA, 19 nt, Artificial Sequence
  Description of Artificial Sequence: Synthetic oligonucleotide
guacuguggggauccguug

SEQ ID NO: 2390028 - RNA, 19 nt, Artificial Sequence
  Description of Artificial Sequence: Synthetic oligonucleotide
uggugaguccugugguuac

SEQ ID NO: 2390029 - RNA, 19 nt, Artificial Sequence
  Description of Artificial Sequence: Synthetic oligonucleotide
cagaucugcagauuugaua

SEQ ID NO: 2390030 - RNA, 19 nt, Artificial Sequence
  Description of Artificial Sequence: Synthetic oligonucleotide
uaccacccauuuuaugauc

SEQ ID NO: 2390031 - RNA, 19 nt, Artificial Sequence
  Description of Artificial Sequence: Synthetic oligonucleotide
uugggauuauaagccucug

SEQ ID NO: 2390032 - RNA, 19 nt, Artificial Sequence
  Description of Artificial Sequence: Synthetic oligonucleotide
cuuaguacgucuccacucu

SEQ ID NO: 2390033 - RNA, 19 nt, Artificial Sequence
  Description of Artificial Sequence: Synthetic oligonucleotide
cuaauaugauccagucgaa

SEQ ID NO: 2390034 - RNA, 19 nt, Artificial Sequence
  Description of Artificial Sequence: Synthetic oligonucleotide
agucagugugagucaauuu

SEQ ID NO: 2390035 - RNA, 19 nt, Artificial Sequence
  Description of Artificial Sequence: Synthetic oligonucleotide
gucuaccacccauuuuaug

SEQ ID NO: 2390036 - RNA, 19 nt, Artificial Sequence
  Description of Artificial Sequence: Synthetic oligonucleotide
aaguacuguggggauccgu

SEQ ID NO: 2390037 - RNA, 19 nt, Artificial Sequence
  Description of Artificial Sequence: Synthetic oligonucleotide
aguacuguggggauccguu

SEQ ID NO: 2390038 - RNA, 19 nt, Artificial Sequence
  Description of Artificial Sequence: Synthetic oligonucleotide
gugaacgaugaugugaagu

SEQ ID NO: 2390039 - RNA, 19 nt, Artificial Sequence
  Description of Artificial Sequence: Synthetic oligonucleotide
gauaugccaucuuucuaau

SEQ ID NO: 2390040 - RNA, 19 nt, Artificial Sequence
  Description of Artificial Sequence: Synthetic oligonucleotide
uccagucgaaauggcagaa

SEQ ID NO: 2390041 - RNA, 19 nt, Artificial Sequence
  Description of Artificial Sequence: Synthetic oligonucleotide
ucgaugcacucuacuacuu

SEQ ID NO: 2390042 - RNA, 19 nt, Artificial Sequence
  Description of Artificial Sequence: Synthetic oligonucleotide
uguggggauccguuguauu

SEQ ID NO: 2390043 - RNA, 19 nt, Artificial Sequence
  Description of Artificial Sequence: Synthetic oligonucleotide
ggauccguuguauucaagu

SEQ ID NO: 2390044 - RNA, 19 nt, Artificial Sequence
  Description of Artificial Sequence: Synthetic oligonucleotide
cuguguagucagacugaac

SEQ ID NO: 2390045 - RNA, 19 nt, Artificial Sequence
  Description of Artificial Sequence: Synthetic oligonucleotide
acauaaguacuaagaccca

SEQ ID NO: 2390046 - RNA, 19 nt, Artificial Sequence
  Description of Artificial Sequence: Synthetic oligonucleotide
ggauuauaagccucugugu

SEQ ID NO: 2390047 - RNA, 19 nt, Artificial Sequence
  Description of Artificial Sequence: Synthetic oligonucleotide
cguuguauucaagugcucc

SEQ ID NO: 2390048 - RNA, 19 nt, Artificial Sequence
  Description of Artificial Sequence: Synthetic oligonucleotide
auuuacagaucugcagauu

SEQ ID NO: 2390049 - RNA, 19 nt, Artificial Sequence
  Description of Artificial Sequence: Synthetic oligonucleotide
guacguucaucacguuuca

SEQ ID NO: 2390050 - RNA, 19 nt, Artificial Sequence
  Description of Artificial Sequence: Synthetic oligonucleotide
aucacaugguugagaccac

SEQ ID NO: 2390051 - RNA, 19 nt, Artificial Sequence
  Description of Artificial Sequence: Synthetic oligonucleotide
acuuuaacaucuggauuua

SEQ ID NO: 2390052 - RNA, 19 nt, Artificial Sequence
  Description of Artificial Sequence: Synthetic oligonucleotide
ggugcucuauaaugucuug

SEQ ID NO: 2390053 - RNA, 19 nt, Artificial Sequence
  Description of Artificial Sequence: Synthetic oligonucleotide
accccagggcuaaaauaac

SEQ ID NO: 2390054 - RNA, 19 nt, Artificial Sequence
  Description of Artificial Sequence: Synthetic oligonucleotide
ccauuuuccuuaaugaagu

SEQ ID NO: 2390055 - RNA, 19 nt, Artificial Sequence
  Description of Artificial Sequence: Synthetic oligonucleotide
auaugccaucuuucuaaua

SEQ ID NO: 2390056 - RNA, 19 nt, Artificial Sequence
  Description of Artificial Sequence: Synthetic oligonucleotide
gucuuguagauaccagugu

SEQ ID NO: 2390057 - RNA, 19 nt, Artificial Sequence
  Description of Artificial Sequence: Synthetic oligonucleotide
aguguacugugauguucau

SEQ ID NO: 2390058 - RNA, 19 nt, Artificial Sequence
  Description of Artificial Sequence: Synthetic oligonucleotide
gaagugcgguggugagucc

SEQ ID NO: 2390059 - RNA, 19 nt, Artificial Sequence
  Description of Artificial Sequence: Synthetic oligonucleotide
ugaguccugugguuacuuu

SEQ ID NO: 2390060 - RNA, 19 nt, Artificial Sequence
  Description of Artificial Sequence: Synthetic oligonucleotide
gugacucuucccaagugaa

SEQ ID NO: 2390061 - RNA, 19 nt, Artificial Sequence
  Description of Artificial Sequence: Synthetic oligonucleotide
aucuugcacuuaguacguc

SEQ ID NO: 2390062 - RNA, 19 nt, Artificial Sequence
  Description of Artificial Sequence: Synthetic oligonucleotide
ugagaccaccccagggcua

SEQ ID NO: 2390063 - RNA, 19 nt, Artificial Sequence
  Description of Artificial Sequence: Synthetic oligonucleotide
ugcgguggugaguccugug

SEQ ID NO: 2390064 - RNA, 19 nt, Artificial Sequence
  Description of Artificial Sequence: Synthetic oligonucleotide
ucagaucgagcagcuucac

SEQ ID NO: 2390065 - RNA, 19 nt, Artificial Sequence
  Description of Artificial Sequence: Synthetic oligonucleotide
guucccugcuaucaugagu

SEQ ID NO: 2390066 - RNA, 19 nt, Artificial Sequence
  Description of Artificial Sequence: Synthetic oligonucleotide
cccaagugaacgaugaugu

SEQ ID NO: 2390067 - RNA, 19 nt, Artificial Sequence
  Description of Artificial Sequence: Synthetic oligonucleotide
ccugcuaucaugagucgga

SEQ ID NO: 2390068 - RNA, 19 nt, Artificial Sequence
  Description of Artificial Sequence: Synthetic oligonucleotide
aggugcucuauaaugucuu

SEQ ID NO: 2390069 - RNA, 19 nt, Artificial Sequence
  Description of Artificial Sequence: Synthetic oligonucleotide
caccuaaaguauuaacaau

SEQ ID NO: 2390070 - RNA, 19 nt, Artificial Sequence
  Description of Artificial Sequence: Synthetic oligonucleotide
cuguaaauccaagguagua

SEQ ID NO: 2390071 - RNA, 19 nt, Artificial Sequence
  Description of Artificial Sequence: Synthetic oligonucleotide
ccuucggugacucuuccca

SEQ ID NO: 2390072 - RNA, 19 nt, Artificial Sequence
  Description of Artificial Sequence: Synthetic oligonucleotide
gaucgagcagcuucacaau

SEQ ID NO: 2390073 - RNA, 19 nt, Artificial Sequence
  Description of Artificial Sequence: Synthetic oligonucleotide
accuucaccuaaaguauua

SEQ ID NO: 2390074 - RNA, 19 nt, Artificial Sequence
  Description of Artificial Sequence: Synthetic oligonucleotide
accaguguacugugauguu

SEQ ID NO: 2390075 - RNA, 19 nt, Artificial Sequence
  Description of Artificial Sequence: Synthetic oligonucleotide
acacagcggaaaguacugu

SEQ ID NO: 2390076 - RNA, 19 nt, Artificial Sequence
  Description of Artificial Sequence: Synthetic oligonucleotide
augugaccacgauguuuca

SEQ ID NO: 2390077 - RNA, 19 nt, Artificial Sequence
  Description of Artificial Sequence: Synthetic oligonucleotide
cagacugaacaaacaagau

SEQ ID NO: 2390078 - RNA, 19 nt, Artificial Sequence
  Description of Artificial Sequence: Synthetic oligonucleotide
cacaauaucuauccacauu

SEQ ID NO: 2390079 - RNA, 19 nt, Artificial Sequence
  Description of Artificial Sequence: Synthetic oligonucleotide
cccagaagcucaaaacaca

SEQ ID NO: 2390080 - RNA, 19 nt, Artificial Sequence
  Description of Artificial Sequence: Synthetic oligonucleotide
agauaccaguguacuguga

SEQ ID NO: 2390081 - RNA, 19 nt, Artificial Sequence
  Description of Artificial Sequence: Synthetic oligonucleotide
cagauuugauaugccaucu

SEQ ID NO: 2390082 - RNA, 19 nt, Artificial Sequence
  Description of Artificial Sequence: Synthetic oligonucleotide
ggaaaguacuguggggauc

SEQ ID NO: 2390083 - RNA, 19 nt, Artificial Sequence
  Description of Artificial Sequence: Synthetic oligonucleotide
gagaccaccccagggcuaa

SEQ ID NO: 2390084 - RNA, 19 nt, Artificial Sequence
  Description of Artificial Sequence: Synthetic oligonucleotide
ccaagguaguacucaauaa

SEQ ID NO: 2390085 - RNA, 19 nt, Artificial Sequence
  Description of Artificial Sequence: Synthetic oligonucleotide
ccaagugaacgaugaugug

SEQ ID NO: 2390086 - RNA, 19 nt, Artificial Sequence
  Description of Artificial Sequence: Synthetic oligonucleotide
agugcgguggugaguccug

SEQ ID NO: 2390087 - RNA, 19 nt, Artificial Sequence
  Description of Artificial Sequence: Synthetic oligonucleotide
cuucggugacucuucccaa

SEQ ID NO: 2390088 - RNA, 19 nt, Artificial Sequence
  Description of Artificial Sequence: Synthetic oligonucleotide
cagaucgagcagcuucaca

SEQ ID NO: 2390089 - RNA, 19 nt, Artificial Sequence
  Description of Artificial Sequence: Synthetic oligonucleotide
cacuuaguacgucuccacu

SEQ ID NO: 2390090 - RNA, 19 nt, Artificial Sequence
  Description of Artificial Sequence: Synthetic oligonucleotide
uacguucaucacguuucau

SEQ ID NO: 2390091 - RNA, 19 nt, Artificial Sequence
  Description of Artificial Sequence: Synthetic oligonucleotide
cugaacaaacaagauguuu

SEQ ID NO: 2390092 - RNA, 19 nt, Artificial Sequence
  Description of Artificial Sequence: Synthetic oligonucleotide
ccaguguacugugauguuc

SEQ ID NO: 2390093 - RNA, 19 nt, Artificial Sequence
  Description of Artificial Sequence: Synthetic oligonucleotide
ggacacagcggaaaguacu

SEQ ID NO: 2390094 - RNA, 19 nt, Artificial Sequence
  Description of Artificial Sequence: Synthetic oligonucleotide
acuguacguucaucacguu

SEQ ID NO: 2390095 - RNA, 19 nt, Artificial Sequence
  Description of Artificial Sequence: Synthetic oligonucleotide
caauaucuauccacauuuu

SEQ ID NO: 2390096 - RNA, 19 nt, Artificial Sequence
  Description of Artificial Sequence: Synthetic oligonucleotide
auccaagguaguacucaau

SEQ ID NO: 2390097 - RNA, 19 nt, Artificial Sequence
  Description of Artificial Sequence: Synthetic oligonucleotide
cccugcuaucaugagucgg

SEQ ID NO: 2390098 - RNA, 19 nt, Artificial Sequence
  Description of Artificial Sequence: Synthetic oligonucleotide
gugcucuauaaugucuugu

SEQ ID NO: 2390099 - RNA, 19 nt, Artificial Sequence
  Description of Artificial Sequence: Synthetic oligonucleotide
ccauuuuaugaucgaugca

SEQ ID NO: 2390100 - RNA, 19 nt, Artificial Sequence
  Description of Artificial Sequence: Synthetic oligonucleotide
cacguuucaucuugggauu

SEQ ID NO: 2390101 - RNA, 19 nt, Artificial Sequence
  Description of Artificial Sequence: Synthetic oligonucleotide
cuguacguucaucacguuu

SEQ ID NO: 2390102 - RNA, 19 nt, Artificial Sequence
  Description of Artificial Sequence: Synthetic oligonucleotide
acguuucaucuugggauua

SEQ ID NO: 2390103 - RNA, 19 nt, Artificial Sequence
  Description of Artificial Sequence: Synthetic oligonucleotide
guccugugguuacuuuugu

SEQ ID NO: 2390104 - RNA, 19 nt, Artificial Sequence
  Description of Artificial Sequence: Synthetic oligonucleotide
gggauccguuguauucaag

SEQ ID NO: 2390105 - RNA, 19 nt, Artificial Sequence
  Description of Artificial Sequence: Synthetic oligonucleotide
ggggauccguuguauucaa

SEQ ID NO: 2390106 - RNA, 19 nt, Artificial Sequence
  Description of Artificial Sequence: Synthetic oligonucleotide
gaccaccccagggcuaaaa

SEQ ID NO: 2390107 - RNA, 19 nt, Artificial Sequence
  Description of Artificial Sequence: Synthetic oligonucleotide
caugucuaccacccauuuu

SEQ ID NO: 2390108 - RNA, 19 nt, Artificial Sequence
  Description of Artificial Sequence: Synthetic oligonucleotide
cugugauguucaucaucgu

SEQ ID NO: 2390109 - RNA, 19 nt, Artificial Sequence
  Description of Artificial Sequence: Synthetic oligonucleotide
caccuucaccuaaaguauu

SEQ ID NO: 2390110 - RNA, 19 nt, Artificial Sequence
  Description of Artificial Sequence: Synthetic oligonucleotide
cacccauuuuaugaucgau

SEQ ID NO: 2390111 - RNA, 19 nt, Artificial Sequence
  Description of Artificial Sequence: Synthetic oligonucleotide
ccguuguauucaagugcuc

SEQ ID NO: 2390112 - RNA, 19 nt, Artificial Sequence
  Description of Artificial Sequence: Synthetic oligonucleotide
ccacccauuuuaugaucga

SEQ ID NO: 2390113 - RNA, 19 nt, Artificial Sequence
  Description of Artificial Sequence: Synthetic oligonucleotide
caaaugugaccacgauguu

SEQ ID NO: 2390114 - RNA, 19 nt, Artificial Sequence
  Description of Artificial Sequence: Synthetic oligonucleotide
ccaccccagggcuaaaaua

SEQ ID NO: 2390115 - RNA, 19 nt, Artificial Sequence
  Description of Artificial Sequence: Synthetic oligonucleotide
cccagggcuaaaauaacuu

SEQ ID NO: 2390116 - RNA, 19 nt, Artificial Sequence
  Description of Artificial Sequence: Synthetic oligonucleotide
cggugacucuucccaagug

SEQ ID NO: 2390117 - RNA, 19 nt, Artificial Sequence
  Description of Artificial Sequence: Synthetic oligonucleotide
ccccagggcuaaaauaacu

SEQ ID NO: 2390118 - RNA, 19 nt, Artificial Sequence
  Description of Artificial Sequence: Synthetic oligonucleotide
gccaucuuucuaauaugau

SEQ ID NO: 2390119 - RNA, 19 nt, Artificial Sequence
  Description of Artificial Sequence: Synthetic oligonucleotide
ccagucgaaauggcagaaa

SEQ ID NO: 2390120 - RNA, 19 nt, Artificial Sequence
  Description of Artificial Sequence: Synthetic oligonucleotide
agaccaccccagggcuaaa

SEQ ID NO: 2390121 - RNA, 19 nt, Artificial Sequence
  Description of Artificial Sequence: Synthetic oligonucleotide
gugcgguggugaguccugu

SEQ ID NO: 2390122 - RNA, 19 nt, Artificial Sequence
  Description of Artificial Sequence: Synthetic oligonucleotide
cgaugaugugaagugcggu

SEQ ID NO: 2390123 - RNA, 19 nt, Artificial Sequence
  Description of Artificial Sequence: Synthetic oligonucleotide
cggaaaguacuguggggau

SEQ ID NO: 2390124 - RNA, 19 nt, Artificial Sequence
  Description of Artificial Sequence: Synthetic oligonucleotide
cgaugcacucuacuacuuu

SEQ ID NO: 2390125 - RNA, 19 nt, Artificial Sequence
  Description of Artificial Sequence: Synthetic oligonucleotide
uaaacagaaguucagauug

SEQ ID NO: 2390126 - RNA, 19 nt, Artificial Sequence
  Description of Artificial Sequence: Synthetic oligonucleotide
acuuauuuaaaccuuauca

SEQ ID NO: 2390127 - RNA, 19 nt, Artificial Sequence
  Description of Artificial Sequence: Synthetic oligonucleotide
aacacacacacacacacac

SEQ ID NO: 2390128 - RNA, 19 nt, Artificial Sequence
  Description of Artificial Sequence: Synthetic oligonucleotide
ucuacuaacagccacggga

SEQ ID NO: 2390129 - RNA, 19 nt, Artificial Sequence
  Description of Artificial Sequence: Synthetic oligonucleotide
acauaaacaaauuugagua

SEQ ID NO: 2390130 - RNA, 19 nt, Artificial Sequence
  Description of Artificial Sequence: Synthetic oligonucleotide
ugggaaucuacuaacagcc

SEQ ID NO: 2390131 - RNA, 19 nt, Artificial Sequence
  Description of Artificial Sequence: Synthetic oligonucleotide
guuguaaacacacacacac

SEQ ID NO: 2390132 - RNA, 19 nt, Artificial Sequence
  Description of Artificial Sequence: Synthetic oligonucleotide
guuuauuugacuuagggaa

SEQ ID NO: 2390133 - RNA, 19 nt, Artificial Sequence
  Description of Artificial Sequence: Synthetic oligonucleotide
uguaaacacacacacacac

SEQ ID NO: 2390134 - RNA, 19 nt, Artificial Sequence
  Description of Artificial Sequence: Synthetic oligonucleotide
uuagacagauuucauauac

SEQ ID NO: 2390135 - RNA, 19 nt, Artificial Sequence
  Description of Artificial Sequence: Synthetic oligonucleotide
ucguuuauuugacuuaggg

SEQ ID NO: 2390136 - RNA, 19 nt, Artificial Sequence
  Description of Artificial Sequence: Synthetic oligonucleotide
aauaaacagaaguucagau

SEQ ID NO: 2390137 - RNA, 19 nt, Artificial Sequence
  Description of Artificial Sequence: Synthetic oligonucleotide
uuaucacuuauuuaaaccu

SEQ ID NO: 2390138 - RNA, 19 nt, Artificial Sequence
  Description of Artificial Sequence: Synthetic oligonucleotide
uaaacacacacacacacac

SEQ ID NO: 2390139 - RNA, 19 nt, Artificial Sequence
  Description of Artificial Sequence: Synthetic oligonucleotide
ugaguaauacuuuauauuu

SEQ ID NO: 2390140 - RNA, 19 nt, Artificial Sequence
  Description of Artificial Sequence: Synthetic oligonucleotide
acguuguaaacacacacac

SEQ ID NO: 2390141 - RNA, 19 nt, Artificial Sequence
  Description of Artificial Sequence: Synthetic oligonucleotide
aaugaaucguuuauuugac

SEQ ID NO: 2390142 - RNA, 19 nt, Artificial Sequence
  Description of Artificial Sequence: Synthetic oligonucleotide
uuuaacacauucauuguuc

SEQ ID NO: 2390143 - RNA, 19 nt, Artificial Sequence
  Description of Artificial Sequence: Synthetic oligonucleotide
agauuucauauacuucugc

SEQ ID NO: 2390144 - RNA, 19 nt, Artificial Sequence
  Description of Artificial Sequence: Synthetic oligonucleotide
guuugugucccucaaagag

SEQ ID NO: 2390145 - RNA, 19 nt, Artificial Sequence
  Description of Artificial Sequence: Synthetic oligonucleotide
aauuuaacacauucauugu

SEQ ID NO: 2390146 - RNA, 19 nt, Artificial Sequence
  Description of Artificial Sequence: Synthetic oligonucleotide
uucauucacacguuuaagc

SEQ ID NO: 2390147 - RNA, 19 nt, Artificial Sequence
  Description of Artificial Sequence: Synthetic oligonucleotide
cuggaauuagcuuugggag

SEQ ID NO: 2390148 - RNA, 19 nt, Artificial Sequence
  Description of Artificial Sequence: Synthetic oligonucleotide
aauccuuuggcaauaaaca

SEQ ID NO: 2390149 - RNA, 19 nt, Artificial Sequence
  Description of Artificial Sequence: Synthetic oligonucleotide
cauucaauuuaacacauuc

SEQ ID NO: 2390150 - RNA, 19 nt, Artificial Sequence
  Description of Artificial Sequence: Synthetic oligonucleotide
agagcauugacagccaggc

SEQ ID NO: 2390151 - RNA, 19 nt, Artificial Sequence
  Description of Artificial Sequence: Synthetic oligonucleotide
uuugaguaauacuuuauau

SEQ ID NO: 2390152 - RNA, 19 nt, Artificial Sequence
  Description of Artificial Sequence: Synthetic oligonucleotide
uuucacguuguaaacacac

SEQ ID NO: 2390153 - RNA, 19 nt, Artificial Sequence
  Description of Artificial Sequence: Synthetic oligonucleotide
aaucguuuauuugacuuag

SEQ ID NO: 2390154 - RNA, 19 nt, Artificial Sequence
  Description of Artificial Sequence: Synthetic oligonucleotide
uguuauuggcuccuuagac

SEQ ID NO: 2390155 - RNA, 19 nt, Artificial Sequence
  Description of Artificial Sequence: Synthetic oligonucleotide
uuuuaucacuuauuuaaac

SEQ ID NO: 2390156 - RNA, 19 nt, Artificial Sequence
  Description of Artificial Sequence: Synthetic oligonucleotide
acaaauuugaguaauacuu

SEQ ID NO: 2390157 - RNA, 19 nt, Artificial Sequence
  Description of Artificial Sequence: Synthetic oligonucleotide
uguucuuguucaaugaauc

SEQ ID NO: 2390158 - RNA, 19 nt, Artificial Sequence
  Description of Artificial Sequence: Synthetic oligonucleotide
aaacauaaacaaauuugag

SEQ ID NO: 2390159 - RNA, 19 nt, Artificial Sequence
  Description of Artificial Sequence: Synthetic oligonucleotide
uggaguuguacgcugagga

SEQ ID NO: 2390160 - RNA, 19 nt, Artificial Sequence
  Description of Artificial Sequence: Synthetic oligonucleotide
acuaucuaucacucauucc

SEQ ID NO: 2390161 - RNA, 19 nt, Artificial Sequence
  Description of Artificial Sequence: Synthetic oligonucleotide
ucacguuguaaacacacac

SEQ ID NO: 2390162 - RNA, 19 nt, Artificial Sequence
  Description of Artificial Sequence: Synthetic oligonucleotide
aaucuacuaacagccacgg

SEQ ID NO: 2390163 - RNA, 19 nt, Artificial Sequence
  Description of Artificial Sequence: Synthetic oligonucleotide
caaagagugucacagguac

SEQ ID NO: 2390164 - RNA, 19 nt, Artificial Sequence
  Description of Artificial Sequence: Synthetic oligonucleotide
uguucaaugaaucguuuau

SEQ ID NO: 2390165 - RNA, 19 nt, Artificial Sequence
  Description of Artificial Sequence: Synthetic oligonucleotide
ucagcauguaaaauugaga

SEQ ID NO: 2390166 - RNA, 19 nt, Artificial Sequence
  Description of Artificial Sequence: Synthetic oligonucleotide
caaugaaucguuuauuuga

SEQ ID NO: 2390167 - RNA, 19 nt, Artificial Sequence
  Description of Artificial Sequence: Synthetic oligonucleotide
gaaucuacuaacagccacg

SEQ ID NO: 2390168 - RNA, 19 nt, Artificial Sequence
  Description of Artificial Sequence: Synthetic oligonucleotide
ugaaagauccaggcaaacg

SEQ ID NO: 2390169 - RNA, 19 nt, Artificial Sequence
  Description of Artificial Sequence: Synthetic oligonucleotide
aagaaggaucccucucccc

SEQ ID NO: 2390170 - RNA, 19 nt, Artificial Sequence
  Description of Artificial Sequence: Synthetic oligonucleotide
aggcuuuuggcuguggucc

SEQ ID NO: 2390171 - RNA, 19 nt, Artificial Sequence
  Description of Artificial Sequence: Synthetic oligonucleotide
ugaaucguuuauuugacuu

SEQ ID NO: 2390172 - RNA, 19 nt, Artificial Sequence
  Description of Artificial Sequence: Synthetic oligonucleotide
uguaaaauugagagucaga

SEQ ID NO: 2390173 - RNA, 19 nt, Artificial Sequence
  Description of Artificial Sequence: Synthetic oligonucleotide
ucccguuugcucuagaaga

SEQ ID NO: 2390174 - RNA, 19 nt, Artificial Sequence
  Description of Artificial Sequence: Synthetic oligonucleotide
gaauccuuuggcaauaaac

SEQ ID NO: 2390175 - RNA, 19 nt, Artificial Sequence
  Description of Artificial Sequence: Synthetic oligonucleotide
cuucaaaaccugcuggucc

SEQ ID NO: 2390176 - RNA, 19 nt, Artificial Sequence
  Description of Artificial Sequence: Synthetic oligonucleotide
uugugucccucaaagagug

SEQ ID NO: 2390177 - RNA, 19 nt, Artificial Sequence
  Description of Artificial Sequence: Synthetic oligonucleotide
uguggaaggcaccugcgag

SEQ ID NO: 2390178 - RNA, 19 nt, Artificial Sequence
  Description of Artificial Sequence: Synthetic oligonucleotide
auuuaaaccuuaucauuca

SEQ ID NO: 2390179 - RNA, 19 nt, Artificial Sequence
  Description of Artificial Sequence: Synthetic oligonucleotide
guuuucacguuguaaacac

SEQ ID NO: 2390180 - RNA, 19 nt, Artificial Sequence
  Description of Artificial Sequence: Synthetic oligonucleotide
auccuuuggcaauaaacag

SEQ ID NO: 2390181 - RNA, 19 nt, Artificial Sequence
  Description of Artificial Sequence: Synthetic oligonucleotide
uugagagucagaacuuggc

SEQ ID NO: 2390182 - RNA, 19 nt, Artificial Sequence
  Description of Artificial Sequence: Synthetic oligonucleotide
uuaacacauucauuguucu

SEQ ID NO: 2390183 - RNA, 19 nt, Artificial Sequence
  Description of Artificial Sequence: Synthetic oligonucleotide
uggagauuugcuucucccg

SEQ ID NO: 2390184 - RNA, 19 nt, Artificial Sequence
  Description of Artificial Sequence: Synthetic oligonucleotide
uucaaaaccugcugguccc

SEQ ID NO: 2390185 - RNA, 19 nt, Artificial Sequence
  Description of Artificial Sequence: Synthetic oligonucleotide
acguuugugucccucaaag

SEQ ID NO: 2390186 - RNA, 19 nt, Artificial Sequence
  Description of Artificial Sequence: Synthetic oligonucleotide
uuaagcacuggccuggaau

SEQ ID NO: 2390187 - RNA, 19 nt, Artificial Sequence
  Description of Artificial Sequence: Synthetic oligonucleotide
aauugagagucagaacuug

SEQ ID NO: 2390188 - RNA, 19 nt, Artificial Sequence
  Description of Artificial Sequence: Synthetic oligonucleotide
cugucagcauguaaaauug

SEQ ID NO: 2390189 - RNA, 19 nt, Artificial Sequence
  Description of Artificial Sequence: Synthetic oligonucleotide
aaaccuuaucauucaauuu

SEQ ID NO: 2390190 - RNA, 19 nt, Artificial Sequence
  Description of Artificial Sequence: Synthetic oligonucleotide
gaaagauccaggcaaacgu

SEQ ID NO: 2390191 - RNA, 19 nt, Artificial Sequence
  Description of Artificial Sequence: Synthetic oligonucleotide
ucuuguucaaugaaucguu

SEQ ID NO: 2390192 - RNA, 19 nt, Artificial Sequence
  Description of Artificial Sequence: Synthetic oligonucleotide
uagauuuggccagaaaucu

SEQ ID NO: 2390193 - RNA, 19 nt, Artificial Sequence
  Description of Artificial Sequence: Synthetic oligonucleotide
ugaaaucaucuugaaagca

SEQ ID NO: 2390194 - RNA, 19 nt, Artificial Sequence
  Description of Artificial Sequence: Synthetic oligonucleotide
cauguguccuguuauuggc

SEQ ID NO: 2390195 - RNA, 19 nt, Artificial Sequence
  Description of Artificial Sequence: Synthetic oligonucleotide
acacguuuaagcacuggcc

SEQ ID NO: 2390196 - RNA, 19 nt, Artificial Sequence
  Description of Artificial Sequence: Synthetic oligonucleotide
auaaacagaaguucagauu

SEQ ID NO: 2390197 - RNA, 19 nt, Artificial Sequence
  Description of Artificial Sequence: Synthetic oligonucleotide
auuugaguaauacuuuaua

SEQ ID NO: 2390198 - RNA, 19 nt, Artificial Sequence
  Description of Artificial Sequence: Synthetic oligonucleotide
uuggagauuugcuucuccc

SEQ ID NO: 2390199 - RNA, 19 nt, Artificial Sequence
  Description of Artificial Sequence: Synthetic oligonucleotide
auaaacaaauuugaguaau

SEQ ID NO: 2390200 - RNA, 19 nt, Artificial Sequence
  Description of Artificial Sequence: Synthetic oligonucleotide
cacacacacacacacacac

SEQ ID NO: 2390201 - RNA, 19 nt, Artificial Sequence
  Description of Artificial Sequence: Synthetic oligonucleotide
uucuuguucaaugaaucgu

SEQ ID NO: 2390202 - RNA, 19 nt, Artificial Sequence
  Description of Artificial Sequence: Synthetic oligonucleotide
uuuaaaccuuaucauucaa

SEQ ID NO: 2390203 - RNA, 19 nt, Artificial Sequence
  Description of Artificial Sequence: Synthetic oligonucleotide
agcauugacagccaggcuu

SEQ ID NO: 2390204 - RNA, 19 nt, Artificial Sequence
  Description of Artificial Sequence: Synthetic oligonucleotide
uuggccuaaguauuuacaa

SEQ ID NO: 2390205 - RNA, 19 nt, Artificial Sequence
  Description of Artificial Sequence: Synthetic oligonucleotide
acuuggccuaaguauuuac

SEQ ID NO: 2390206 - RNA, 19 nt, Artificial Sequence
  Description of Artificial Sequence: Synthetic oligonucleotide
gacuaucuaucacucauuc

SEQ ID NO: 2390207 - RNA, 19 nt, Artificial Sequence
  Description of Artificial Sequence: Synthetic oligonucleotide
cugccgagagcauugacag

SEQ ID NO: 2390208 - RNA, 19 nt, Artificial Sequence
  Description of Artificial Sequence: Synthetic oligonucleotide
cuacuaacagccacgggac

SEQ ID NO: 2390209 - RNA, 19 nt, Artificial Sequence
  Description of Artificial Sequence: Synthetic oligonucleotide
cauucacacguuuaagcac

SEQ ID NO: 2390210 - RNA, 19 nt, Artificial Sequence
  Description of Artificial Sequence: Synthetic oligonucleotide
aguucagauugacugucag

SEQ ID NO: 2390211 - RNA, 19 nt, Artificial Sequence
  Description of Artificial Sequence: Synthetic oligonucleotide
uagguuggagauuugcuuc

SEQ ID NO: 2390212 - RNA, 19 nt, Artificial Sequence
  Description of Artificial Sequence: Synthetic oligonucleotide
cuagaagaggaguuugcug

SEQ ID NO: 2390213 - RNA, 19 nt, Artificial Sequence
  Description of Artificial Sequence: Synthetic oligonucleotide
cacagaaguucuuuguaac

SEQ ID NO: 2390214 - RNA, 19 nt, Artificial Sequence
  Description of Artificial Sequence: Synthetic oligonucleotide
cacacguuuaagcacuggc

SEQ ID NO: 2390215 - RNA, 19 nt, Artificial Sequence
  Description of Artificial Sequence: Synthetic oligonucleotide
ucacagaaguucuuuguaa

SEQ ID NO: 2390216 - RNA, 19 nt, Artificial Sequence
  Description of Artificial Sequence: Synthetic oligonucleotide
gauuucauauacuucugcu

SEQ ID NO: 2390217 - RNA, 19 nt, Artificial Sequence
  Description of Artificial Sequence: Synthetic oligonucleotide
uaucacuuauuuaaaccuu

SEQ ID NO: 2390218 - RNA, 19 nt, Artificial Sequence
  Description of Artificial Sequence: Synthetic oligonucleotide
uuguaaacacacacacaca

SEQ ID NO: 2390219 - RNA, 19 nt, Artificial Sequence
  Description of Artificial Sequence: Synthetic oligonucleotide
agcauguaaaauugagagu

SEQ ID NO: 2390220 - RNA, 19 nt, Artificial Sequence
  Description of Artificial Sequence: Synthetic oligonucleotide
gauuuggccagaaaucuga

SEQ ID NO: 2390221 - RNA, 19 nt, Artificial Sequence
  Description of Artificial Sequence: Synthetic oligonucleotide
aggcaaacguuuguguccc

SEQ ID NO: 2390222 - RNA, 19 nt, Artificial Sequence
  Description of Artificial Sequence: Synthetic oligonucleotide
auguaaaauugagagucag

SEQ ID NO: 2390223 - RNA, 19 nt, Artificial Sequence
  Description of Artificial Sequence: Synthetic oligonucleotide
ggaauuagcuuugggaggg

SEQ ID NO: 2390224 - RNA, 19 nt, Artificial Sequence
  Description of Artificial Sequence: Synthetic oligonucleotide
auuguucuuguucaaugaa

SEQ ID NO: 2390225 - RNA, 19 nt, Artificial Sequence
  Description of Artificial Sequence: Synthetic oligonucleotide
cagauugacugucagcaug

SEQ ID NO: 2390226 - RNA, 19 nt, Artificial Sequence
  Description of Artificial Sequence: Synthetic oligonucleotide
cucaugggaauccuuuggc

SEQ ID NO: 2390227 - RNA, 19 nt, Artificial Sequence
  Description of Artificial Sequence: Synthetic oligonucleotide
aguucuuuguaaccugagu

SEQ ID NO: 2390228 - RNA, 19 nt, Artificial Sequence
  Description of Artificial Sequence: Synthetic oligonucleotide
ucuagaagaggaguuugcu

SEQ ID NO: 2390229 - RNA, 19 nt, Artificial Sequence
  Description of Artificial Sequence: Synthetic oligonucleotide
guagauuuggccagaaauc

SEQ ID NO: 2390230 - RNA, 19 nt, Artificial Sequence
  Description of Artificial Sequence: Synthetic oligonucleotide
uuuucacguuguaaacaca

SEQ ID NO: 2390231 - RNA, 19 nt, Artificial Sequence
  Description of Artificial Sequence: Synthetic oligonucleotide
uucacguuguaaacacaca

SEQ ID NO: 2390232 - RNA, 19 nt, Artificial Sequence
  Description of Artificial Sequence: Synthetic oligonucleotide
uggcaauaaacagaaguuc

SEQ ID NO: 2390233 - RNA, 19 nt, Artificial Sequence
  Description of Artificial Sequence: Synthetic oligonucleotide
uuauuugacuuagggaaaa

SEQ ID NO: 2390234 - RNA, 19 nt, Artificial Sequence
  Description of Artificial Sequence: Synthetic oligonucleotide
ucacuuauuuaaaccuuau

SEQ ID NO: 2390235 - RNA, 19 nt, Artificial Sequence
  Description of Artificial Sequence: Synthetic oligonucleotide
auucacacguuuaagcacu

SEQ ID NO: 2390236 - RNA, 19 nt, Artificial Sequence
  Description of Artificial Sequence: Synthetic oligonucleotide
aauuagcuuugggagggug

SEQ ID NO: 2390237 - RNA, 19 nt, Artificial Sequence
  Description of Artificial Sequence: Synthetic oligonucleotide
cuucagucacagaagucac

SEQ ID NO: 2390238 - RNA, 19 nt, Artificial Sequence
  Description of Artificial Sequence: Synthetic oligonucleotide
uccuuagacagauuucaua

SEQ ID NO: 2390239 - RNA, 19 nt, Artificial Sequence
  Description of Artificial Sequence: Synthetic oligonucleotide
ucacagguaccugugguca

SEQ ID NO: 2390240 - RNA, 19 nt, Artificial Sequence
  Description of Artificial Sequence: Synthetic oligonucleotide
gaaguucagauugacuguc

SEQ ID NO: 2390241 - RNA, 19 nt, Artificial Sequence
  Description of Artificial Sequence: Synthetic oligonucleotide
uaagcacuggccuggaauu

SEQ ID NO: 2390242 - RNA, 19 nt, Artificial Sequence
  Description of Artificial Sequence: Synthetic oligonucleotide
gauguggaaggcaccugcg

SEQ ID NO: 2390243 - RNA, 19 nt, Artificial Sequence
  Description of Artificial Sequence: Synthetic oligonucleotide
gaaagcaaagaaggauccc

SEQ ID NO: 2390244 - RNA, 19 nt, Artificial Sequence
  Description of Artificial Sequence: Synthetic oligonucleotide
agcaaagaaggaucccucu

SEQ ID NO: 2390245 - RNA, 19 nt, Artificial Sequence
  Description of Artificial Sequence: Synthetic oligonucleotide
gaaucguuuauuugacuua

SEQ ID NO: 2390246 - RNA, 19 nt, Artificial Sequence
  Description of Artificial Sequence: Synthetic oligonucleotide
uuguucaaugaaucguuua

SEQ ID NO: 2390247 - RNA, 19 nt, Artificial Sequence
  Description of Artificial Sequence: Synthetic oligonucleotide
ggaaucuacuaacagccac

SEQ ID NO: 2390248 - RNA, 19 nt, Artificial Sequence
  Description of Artificial Sequence: Synthetic oligonucleotide
aaacguuugugucccucaa

SEQ ID NO: 2390249 - RNA, 19 nt, Artificial Sequence
  Description of Artificial Sequence: Synthetic oligonucleotide
aaguucuuuguaaccugag

SEQ ID NO: 2390250 - RNA, 19 nt, Artificial Sequence
  Description of Artificial Sequence: Synthetic oligonucleotide
gagagcauugacagccagg

SEQ ID NO: 2390251 - RNA, 19 nt, Artificial Sequence
  Description of Artificial Sequence: Synthetic oligonucleotide
aaauugagagucagaacuu

SEQ ID NO: 2390252 - RNA, 19 nt, Artificial Sequence
  Description of Artificial Sequence: Synthetic oligonucleotide
uggcuccuuagacagauuu

SEQ ID NO: 2390253 - RNA, 19 nt, Artificial Sequence
  Description of Artificial Sequence: Synthetic oligonucleotide
ugacugucagcauguaaaa

SEQ ID NO: 2390254 - RNA, 19 nt, Artificial Sequence
  Description of Artificial Sequence: Synthetic oligonucleotide
acguuuaagcacuggccug

SEQ ID NO: 2390255 - RNA, 19 nt, Artificial Sequence
  Description of Artificial Sequence: Synthetic oligonucleotide
uggccuaaguauuuacaaa

SEQ ID NO: 2390256 - RNA, 19 nt, Artificial Sequence
  Description of Artificial Sequence: Synthetic oligonucleotide
uaucuaucacucauuccuu

SEQ ID NO: 2390257 - RNA, 19 nt, Artificial Sequence
  Description of Artificial Sequence: Synthetic oligonucleotide
cuucauucacacguuuaag

SEQ ID NO: 2390258 - RNA, 19 nt, Artificial Sequence
  Description of Artificial Sequence: Synthetic oligonucleotide
acccaagaggcucauggga

SEQ ID NO: 2390259 - RNA, 19 nt, Artificial Sequence
  Description of Artificial Sequence: Synthetic oligonucleotide
uuuguaaccugaguagauu

SEQ ID NO: 2390260 - RNA, 19 nt, Artificial Sequence
  Description of Artificial Sequence: Synthetic oligonucleotide
augaaucguuuauuugacu

SEQ ID NO: 2390261 - RNA, 19 nt, Artificial Sequence
  Description of Artificial Sequence: Synthetic oligonucleotide
cacuuauuuaaaccuuauc

SEQ ID NO: 2390262 - RNA, 19 nt, Artificial Sequence
  Description of Artificial Sequence: Synthetic oligonucleotide
aucauucaauuuaacacau

SEQ ID NO: 2390263 - RNA, 19 nt, Artificial Sequence
  Description of Artificial Sequence: Synthetic oligonucleotide
gauuugcuucucccguuug

SEQ ID NO: 2390264 - RNA, 19 nt, Artificial Sequence
  Description of Artificial Sequence: Synthetic oligonucleotide
cacaaugggaaucuacuaa

SEQ ID NO: 2390265 - RNA, 19 nt, Artificial Sequence
  Description of Artificial Sequence: Synthetic oligonucleotide
cuuggccuaaguauuuaca

SEQ ID NO: 2390266 - RNA, 19 nt, Artificial Sequence
  Description of Artificial Sequence: Synthetic oligonucleotide
cucccguuugcucuagaag

SEQ ID NO: 2390267 - RNA, 19 nt, Artificial Sequence
  Description of Artificial Sequence: Synthetic oligonucleotide
aaacagaaguucagauuga

SEQ ID NO: 2390268 - RNA, 19 nt, Artificial Sequence
  Description of Artificial Sequence: Synthetic oligonucleotide
aacguuugugucccucaaa

SEQ ID NO: 2390269 - RNA, 19 nt, Artificial Sequence
  Description of Artificial Sequence: Synthetic oligonucleotide
aaagauccaggcaaacguu

SEQ ID NO: 2390270 - RNA, 19 nt, Artificial Sequence
  Description of Artificial Sequence: Synthetic oligonucleotide
ggccuaaguauuuacaaaa

SEQ ID NO: 2390271 - RNA, 19 nt, Artificial Sequence
  Description of Artificial Sequence: Synthetic oligonucleotide
cacguuguaaacacacaca

SEQ ID NO: 2390272 - RNA, 19 nt, Artificial Sequence
  Description of Artificial Sequence: Synthetic oligonucleotide
agguuggagauuugcuucu

SEQ ID NO: 2390273 - RNA, 19 nt, Artificial Sequence
  Description of Artificial Sequence: Synthetic oligonucleotide
aucuacuaacagccacggg

SEQ ID NO: 2390274 - RNA, 19 nt, Artificial Sequence
  Description of Artificial Sequence: Synthetic oligonucleotide
ggcaauaaacagaaguuca

SEQ ID NO: 2390275 - RNA, 19 nt, Artificial Sequence
  Description of Artificial Sequence: Synthetic oligonucleotide
augggaauccuuuggcaau

SEQ ID NO: 2390276 - RNA, 19 nt, Artificial Sequence
  Description of Artificial Sequence: Synthetic oligonucleotide
agauugacugucagcaugu

SEQ ID NO: 2390277 - RNA, 19 nt, Artificial Sequence
  Description of Artificial Sequence: Synthetic oligonucleotide
cuguagguuggagauuugc

SEQ ID NO: 2390278 - RNA, 19 nt, Artificial Sequence
  Description of Artificial Sequence: Synthetic oligonucleotide
acacacacacacuuuucau

SEQ ID NO: 2390279 - RNA, 19 nt, Artificial Sequence
  Description of Artificial Sequence: Synthetic oligonucleotide
gcucaugggaauccuuugg

SEQ ID NO: 2390280 - RNA, 19 nt, Artificial Sequence
  Description of Artificial Sequence: Synthetic oligonucleotide
caugggaauccuuuggcaa

SEQ ID NO: 2390281 - RNA, 19 nt, Artificial Sequence
  Description of Artificial Sequence: Synthetic oligonucleotide
gaaggaucccucuccccac

SEQ ID NO: 2390282 - RNA, 19 nt, Artificial Sequence
  Description of Artificial Sequence: Synthetic oligonucleotide
uucacacguuuaagcacug

SEQ ID NO: 2390283 - RNA, 19 nt, Artificial Sequence
  Description of Artificial Sequence: Synthetic oligonucleotide
aaacacacacacacacaca

SEQ ID NO: 2390284 - RNA, 19 nt, Artificial Sequence
  Description of Artificial Sequence: Synthetic oligonucleotide
accauguguccuguuauug

SEQ ID NO: 2390285 - RNA, 19 nt, Artificial Sequence
  Description of Artificial Sequence: Synthetic oligonucleotide
gccgagagcauugacagcc

SEQ ID NO: 2390286 - RNA, 19 nt, Artificial Sequence
  Description of Artificial Sequence: Synthetic oligonucleotide
uguacgcugaggacauaaa

SEQ ID NO: 2390287 - RNA, 19 nt, Artificial Sequence
  Description of Artificial Sequence: Synthetic oligonucleotide
uuguacgcugaggacauaa

SEQ ID NO: 2390288 - RNA, 19 nt, Artificial Sequence
  Description of Artificial Sequence: Synthetic oligonucleotide
aaccuucauucacacguuu

SEQ ID NO: 2390289 - RNA, 19 nt, Artificial Sequence
  Description of Artificial Sequence: Synthetic oligonucleotide
cacacacacacacuuuuca

SEQ ID NO: 2390290 - RNA, 19 nt, Artificial Sequence
  Description of Artificial Sequence: Synthetic oligonucleotide
acgggacuaucuaucacuc

SEQ ID NO: 2390291 - RNA, 19 nt, Artificial Sequence
  Description of Artificial Sequence: Synthetic oligonucleotide
ugugguccugucuguaguc

SEQ ID NO: 2390292 - RNA, 19 nt, Artificial Sequence
  Description of Artificial Sequence: Synthetic oligonucleotide
cagaacuuggccuaaguau

SEQ ID NO: 2390293 - RNA, 19 nt, Artificial Sequence
  Description of Artificial Sequence: Synthetic oligonucleotide
ucauucaauuuaacacauu

SEQ ID NO: 2390294 - RNA, 19 nt, Artificial Sequence
  Description of Artificial Sequence: Synthetic oligonucleotide
agaagaggaguuugcugau

SEQ ID NO: 2390295 - RNA, 19 nt, Artificial Sequence
  Description of Artificial Sequence: Synthetic oligonucleotide
ucacacguuuaagcacugg

SEQ ID NO: 2390296 - RNA, 19 nt, Artificial Sequence
  Description of Artificial Sequence: Synthetic oligonucleotide
aagauccaggcaaacguuu

SEQ ID NO: 2390297 - RNA, 19 nt, Artificial Sequence
  Description of Artificial Sequence: Synthetic oligonucleotide
aucuaucacucauuccuuu

SEQ ID NO: 2390298 - RNA, 19 nt, Artificial Sequence
  Description of Artificial Sequence: Synthetic oligonucleotide
uguccuguuauuggcuccu

SEQ ID NO: 2390299 - RNA, 19 nt, Artificial Sequence
  Description of Artificial Sequence: Synthetic oligonucleotide
guacgcugaggacauaaaa

SEQ ID NO: 2390300 - RNA, 19 nt, Artificial Sequence
  Description of Artificial Sequence: Synthetic oligonucleotide
cuugaaagcaaagaaggau

SEQ ID NO: 2390301 - RNA, 19 nt, Artificial Sequence
  Description of Artificial Sequence: Synthetic oligonucleotide
auucauuguucuuguucaa

SEQ ID NO: 2390302 - RNA, 19 nt, Artificial Sequence
  Description of Artificial Sequence: Synthetic oligonucleotide
aucacuuauuuaaaccuua

SEQ ID NO: 2390303 - RNA, 19 nt, Artificial Sequence
  Description of Artificial Sequence: Synthetic oligonucleotide
guaaacacacacacacaca

SEQ ID NO: 2390304 - RNA, 19 nt, Artificial Sequence
  Description of Artificial Sequence: Synthetic oligonucleotide
gaucccucuccccaccaca

SEQ ID NO: 2390305 - RNA, 19 nt, Artificial Sequence
  Description of Artificial Sequence: Synthetic oligonucleotide
acacacacacacacuuuuc

SEQ ID NO: 2390306 - RNA, 19 nt, Artificial Sequence
  Description of Artificial Sequence: Synthetic oligonucleotide
aaguucagauugacuguca

SEQ ID NO: 2390307 - RNA, 19 nt, Artificial Sequence
  Description of Artificial Sequence: Synthetic oligonucleotide
cuggucccggcacaauggg

SEQ ID NO: 2390308 - RNA, 19 nt, Artificial Sequence
  Description of Artificial Sequence: Synthetic oligonucleotide
uuuaagcacuggccuggaa

SEQ ID NO: 2390309 - RNA, 19 nt, Artificial Sequence
  Description of Artificial Sequence: Synthetic oligonucleotide
agcacuggccuggaauuag

SEQ ID NO: 2390310 - RNA, 19 nt, Artificial Sequence
  Description of Artificial Sequence: Synthetic oligonucleotide
agccacgggacuaucuauc

SEQ ID NO: 2390311 - RNA, 19 nt, Artificial Sequence
  Description of Artificial Sequence: Synthetic oligonucleotide
aucguuuauuugacuuagg

SEQ ID NO: 2390312 - RNA, 19 nt, Artificial Sequence
  Description of Artificial Sequence: Synthetic oligonucleotide
agcuuugggagggugcucu

SEQ ID NO: 2390313 - RNA, 19 nt, Artificial Sequence
  Description of Artificial Sequence: Synthetic oligonucleotide
agauccaggcaaacguuug

SEQ ID NO: 2390314 - RNA, 19 nt, Artificial Sequence
  Description of Artificial Sequence: Synthetic oligonucleotide
cuuagacagauuucauaua

SEQ ID NO: 2390315 - RNA, 19 nt, Artificial Sequence
  Description of Artificial Sequence: Synthetic oligonucleotide
aguuguacgcugaggacau

SEQ ID NO: 2390316 - RNA, 19 nt, Artificial Sequence
  Description of Artificial Sequence: Synthetic oligonucleotide
guaccuguggucagaggug

SEQ ID NO: 2390317 - RNA, 19 nt, Artificial Sequence
  Description of Artificial Sequence: Synthetic oligonucleotide
guagguuggagauuugcuu

SEQ ID NO: 2390318 - RNA, 19 nt, Artificial Sequence
  Description of Artificial Sequence: Synthetic oligonucleotide
cugaaagauccaggcaaac

SEQ ID NO: 2390319 - RNA, 19 nt, Artificial Sequence
  Description of Artificial Sequence: Synthetic oligonucleotide
uccuguuauuggcuccuua

SEQ ID NO: 2390320 - RNA, 19 nt, Artificial Sequence
  Description of Artificial Sequence: Synthetic oligonucleotide
cacaaacccaagaggcuca

SEQ ID NO: 2390321 - RNA, 19 nt, Artificial Sequence
  Description of Artificial Sequence: Synthetic oligonucleotide
ccuucagucacagaaguca

SEQ ID NO: 2390322 - RNA, 19 nt, Artificial Sequence
  Description of Artificial Sequence: Synthetic oligonucleotide
ggccagaaaucugaaauca

SEQ ID NO: 2390323 - RNA, 19 nt, Artificial Sequence
  Description of Artificial Sequence: Synthetic oligonucleotide
ugcucuagaagaggaguuu

SEQ ID NO: 2390324 - RNA, 19 nt, Artificial Sequence
  Description of Artificial Sequence: Synthetic oligonucleotide
agguaccuguggucagagg

SEQ ID NO: 2390325 - RNA, 19 nt, Artificial Sequence
  Description of Artificial Sequence: Synthetic oligonucleotide
uguagucauggcugugguu

SEQ ID NO: 2390326 - RNA, 19 nt, Artificial Sequence
  Description of Artificial Sequence: Synthetic oligonucleotide
aacuuggccuaaguauuua

SEQ ID NO: 2390327 - RNA, 19 nt, Artificial Sequence
  Description of Artificial Sequence: Synthetic oligonucleotide
cuucugcucuucaaaaccu

SEQ ID NO: 2390328 - RNA, 19 nt, Artificial Sequence
  Description of Artificial Sequence: Synthetic oligonucleotide
uggucccggcacaauggga

SEQ ID NO: 2390329 - RNA, 19 nt, Artificial Sequence
  Description of Artificial Sequence: Synthetic oligonucleotide
ugaguagauuuggccagaa

SEQ ID NO: 2390330 - RNA, 19 nt, Artificial Sequence
  Description of Artificial Sequence: Synthetic oligonucleotide
gcaaagaaggaucccucuc

SEQ ID NO: 2390331 - RNA, 19 nt, Artificial Sequence
  Description of Artificial Sequence: Synthetic oligonucleotide
ugguccugucuguagucau

SEQ ID NO: 2390332 - RNA, 19 nt, Artificial Sequence
  Description of Artificial Sequence: Synthetic oligonucleotide
ugugucccucaaagagugu

SEQ ID NO: 2390333 - RNA, 19 nt, Artificial Sequence
  Description of Artificial Sequence: Synthetic oligonucleotide
ccuuagacagauuucauau

SEQ ID NO: 2390334 - RNA, 19 nt, Artificial Sequence
  Description of Artificial Sequence: Synthetic oligonucleotide
gauccaggcaaacguuugu

SEQ ID NO: 2390335 - RNA, 19 nt, Artificial Sequence
  Description of Artificial Sequence: Synthetic oligonucleotide
cguuuauuugacuuaggga

SEQ ID NO: 2390336 - RNA, 19 nt, Artificial Sequence
  Description of Artificial Sequence: Synthetic oligonucleotide
cuuuguaaccugaguagau

SEQ ID NO: 2390337 - RNA, 19 nt, Artificial Sequence
  Description of Artificial Sequence: Synthetic oligonucleotide
agucagaacuuggccuaag

SEQ ID NO: 2390338 - RNA, 19 nt, Artificial Sequence
  Description of Artificial Sequence: Synthetic oligonucleotide
gaguagauuuggccagaaa

SEQ ID NO: 2390339 - RNA, 19 nt, Artificial Sequence
  Description of Artificial Sequence: Synthetic oligonucleotide
gggacuaucuaucacucau

SEQ ID NO: 2390340 - RNA, 19 nt, Artificial Sequence
  Description of Artificial Sequence: Synthetic oligonucleotide
cccugaaagauccaggcaa

SEQ ID NO: 2390341 - RNA, 19 nt, Artificial Sequence
  Description of Artificial Sequence: Synthetic oligonucleotide
ggagauuugcuucucccgu

SEQ ID NO: 2390342 - RNA, 19 nt, Artificial Sequence
  Description of Artificial Sequence: Synthetic oligonucleotide
cacacacacacacacacuu

SEQ ID NO: 2390343 - RNA, 19 nt, Artificial Sequence
  Description of Artificial Sequence: Synthetic oligonucleotide
cguuuaagcacuggccugg

SEQ ID NO: 2390344 - RNA, 19 nt, Artificial Sequence
  Description of Artificial Sequence: Synthetic oligonucleotide
acacacacacacacacaca

SEQ ID NO: 2390345 - RNA, 19 nt, Artificial Sequence
  Description of Artificial Sequence: Synthetic oligonucleotide
acacacacacacacacacu

SEQ ID NO: 2390346 - RNA, 19 nt, Artificial Sequence
  Description of Artificial Sequence: Synthetic oligonucleotide
auuuggccagaaaucugaa

SEQ ID NO: 2390347 - RNA, 19 nt, Artificial Sequence
  Description of Artificial Sequence: Synthetic oligonucleotide
aggauguggaaggcaccug

SEQ ID NO: 2390348 - RNA, 19 nt, Artificial Sequence
  Description of Artificial Sequence: Synthetic oligonucleotide
gcugccgagagcauugaca

SEQ ID NO: 2390349 - RNA, 19 nt, Artificial Sequence
  Description of Artificial Sequence: Synthetic oligonucleotide
ggugcucuguagguuggag

SEQ ID NO: 2390350 - RNA, 19 nt, Artificial Sequence
  Description of Artificial Sequence: Synthetic oligonucleotide
uucucccguuugcucuaga

SEQ ID NO: 2390351 - RNA, 19 nt, Artificial Sequence
  Description of Artificial Sequence: Synthetic oligonucleotide
ggcacaaugggaaucuacu

SEQ ID NO: 2390352 - RNA, 19 nt, Artificial Sequence
  Description of Artificial Sequence: Synthetic oligonucleotide
ccacaaacccaagaggcuc

SEQ ID NO: 2390353 - RNA, 19 nt, Artificial Sequence
  Description of Artificial Sequence: Synthetic oligonucleotide
gucagaacuuggccuaagu

SEQ ID NO: 2390354 - RNA, 19 nt, Artificial Sequence
  Description of Artificial Sequence: Synthetic oligonucleotide
accuucauucacacguuua

SEQ ID NO: 2390355 - RNA, 19 nt, Artificial Sequence
  Description of Artificial Sequence: Synthetic oligonucleotide
aggcucaugggaauccuuu

SEQ ID NO: 2390356 - RNA, 19 nt, Artificial Sequence
  Description of Artificial Sequence: Synthetic oligonucleotide
gagauuugcuucucccguu

SEQ ID NO: 2390357 - RNA, 19 nt, Artificial Sequence
  Description of Artificial Sequence: Synthetic oligonucleotide
gucagaggugguggaguug

SEQ ID NO: 2390358 - RNA, 19 nt, Artificial Sequence
  Description of Artificial Sequence: Synthetic oligonucleotide
cuuguucaaugaaucguuu

SEQ ID NO: 2390359 - RNA, 19 nt, Artificial Sequence
  Description of Artificial Sequence: Synthetic oligonucleotide
cacacacacacacacuuuu

SEQ ID NO: 2390360 - RNA, 19 nt, Artificial Sequence
  Description of Artificial Sequence: Synthetic oligonucleotide
ucccggcacaaugggaauc

SEQ ID NO: 2390361 - RNA, 19 nt, Artificial Sequence
  Description of Artificial Sequence: Synthetic oligonucleotide
ucccucuccccaccacaaa

SEQ ID NO: 2390362 - RNA, 19 nt, Artificial Sequence
  Description of Artificial Sequence: Synthetic oligonucleotide
cacacacuuuucauuccua

SEQ ID NO: 2390363 - RNA, 19 nt, Artificial Sequence
  Description of Artificial Sequence: Synthetic oligonucleotide
ggucccggcacaaugggaa

SEQ ID NO: 2390364 - RNA, 19 nt, Artificial Sequence
  Description of Artificial Sequence: Synthetic oligonucleotide
ccguuugcucuagaagagg

SEQ ID NO: 2390365 - RNA, 19 nt, Artificial Sequence
  Description of Artificial Sequence: Synthetic oligonucleotide
acaaacccaagaggcucau

SEQ ID NO: 2390366 - RNA, 19 nt, Artificial Sequence
  Description of Artificial Sequence: Synthetic oligonucleotide
acacacacacacacacuuu

SEQ ID NO: 2390367 - RNA, 19 nt, Artificial Sequence
  Description of Artificial Sequence: Synthetic oligonucleotide
gacugucagcauguaaaau

SEQ ID NO: 2390368 - RNA, 19 nt, Artificial Sequence
  Description of Artificial Sequence: Synthetic oligonucleotide
cuucucccguuugcucuag

SEQ ID NO: 2390369 - RNA, 19 nt, Artificial Sequence
  Description of Artificial Sequence: Synthetic oligonucleotide
ccugaaagauccaggcaaa

SEQ ID NO: 2390370 - RNA, 19 nt, Artificial Sequence
  Description of Artificial Sequence: Synthetic oligonucleotide
gauugacugucagcaugua

SEQ ID NO: 2390371 - RNA, 19 nt, Artificial Sequence
  Description of Artificial Sequence: Synthetic oligonucleotide
gcaaacguuugugucccuc

SEQ ID NO: 2390372 - RNA, 19 nt, Artificial Sequence
  Description of Artificial Sequence: Synthetic oligonucleotide
ggaauccuuuggcaauaaa

SEQ ID NO: 2390373 - RNA, 19 nt, Artificial Sequence
  Description of Artificial Sequence: Synthetic oligonucleotide
cugugguccugucuguagu

SEQ ID NO: 2390374 - RNA, 19 nt, Artificial Sequence
  Description of Artificial Sequence: Synthetic oligonucleotide
uaacagccacgggacuauc

SEQ ID NO: 2390375 - RNA, 19 nt, Artificial Sequence
  Description of Artificial Sequence: Synthetic oligonucleotide
gagcauugacagccaggcu

SEQ ID NO: 2390376 - RNA, 19 nt, Artificial Sequence
  Description of Artificial Sequence: Synthetic oligonucleotide
gggaaucuacuaacagcca

SEQ ID NO: 2390377 - RNA, 19 nt, Artificial Sequence
  Description of Artificial Sequence: Synthetic oligonucleotide
ggaucccucuccccaccac

SEQ ID NO: 2390378 - RNA, 19 nt, Artificial Sequence
  Description of Artificial Sequence: Synthetic oligonucleotide
cggcacaaugggaaucuac

SEQ ID NO: 2390379 - RNA, 19 nt, Artificial Sequence
  Description of Artificial Sequence: Synthetic oligonucleotide
ccacgggacuaucuaucac

SEQ ID NO: 2390380 - RNA, 19 nt, Artificial Sequence
  Description of Artificial Sequence: Synthetic oligonucleotide
cuaacagccacgggacuau

SEQ ID NO: 2390381 - RNA, 19 nt, Artificial Sequence
  Description of Artificial Sequence: Synthetic oligonucleotide
ggccuggaauuagcuuugg

SEQ ID NO: 2390382 - RNA, 19 nt, Artificial Sequence
  Description of Artificial Sequence: Synthetic oligonucleotide
gaauuagcuuugggagggu

SEQ ID NO: 2390383 - RNA, 19 nt, Artificial Sequence
  Description of Artificial Sequence: Synthetic oligonucleotide
cgagagcauugacagccag

SEQ ID NO: 2390384 - RNA, 19 nt, Artificial Sequence
  Description of Artificial Sequence: Synthetic oligonucleotide
gguuggagauuugcuucuc

SEQ ID NO: 2390385 - RNA, 19 nt, Artificial Sequence
  Description of Artificial Sequence: Synthetic oligonucleotide
ggugguggaguuguacgcu

SEQ ID NO: 2390386 - RNA, 19 nt, Artificial Sequence
  Description of Artificial Sequence: Synthetic oligonucleotide
ggcugccgagagcauugac

SEQ ID NO: 2390387 - RNA, 19 nt, Artificial Sequence
  Description of Artificial Sequence: Synthetic oligonucleotide
cagccacgggacuaucuau

SEQ ID NO: 2390388 - RNA, 19 nt, Artificial Sequence
  Description of Artificial Sequence: Synthetic oligonucleotide
ggucagaggugguggaguu

SEQ ID NO: 2390389 - RNA, 19 nt, Artificial Sequence
  Description of Artificial Sequence: Synthetic oligonucleotide
ggcuuuuggcugugguccu

SEQ ID NO: 2390390 - RNA, 19 nt, Artificial Sequence
  Description of Artificial Sequence: Synthetic oligonucleotide
cacauucauuguucuuguu

SEQ ID NO: 2390391 - RNA, 19 nt, Artificial Sequence
  Description of Artificial Sequence: Synthetic oligonucleotide
gaggcucaugggaauccuu

SEQ ID NO: 2390392 - RNA, 19 nt, Artificial Sequence
  Description of Artificial Sequence: Synthetic oligonucleotide
gccaggcuuuuggcugugg

SEQ ID NO: 2390393 - RNA, 19 nt, Artificial Sequence
  Description of Artificial Sequence: Synthetic oligonucleotide
ggacuaucuaucacucauu

SEQ ID NO: 2390394 - RNA, 19 nt, Artificial Sequence
  Description of Artificial Sequence: Synthetic oligonucleotide
gucccggcacaaugggaau

SEQ ID NO: 2390395 - RNA, 19 nt, Artificial Sequence
  Description of Artificial Sequence: Synthetic oligonucleotide
gccagaaaucugaaaucau

SEQ ID NO: 2390396 - RNA, 19 nt, Artificial Sequence
  Description of Artificial Sequence: Synthetic oligonucleotide
cagaggugguggaguugua

SEQ ID NO: 2390397 - RNA, 19 nt, Artificial Sequence
  Description of Artificial Sequence: Synthetic oligonucleotide
guuguacgcugaggacaua

SEQ ID NO: 2390398 - RNA, 19 nt, Artificial Sequence
  Description of Artificial Sequence: Synthetic oligonucleotide
cgggacuaucuaucacuca

SEQ ID NO: 2390399 - RNA, 19 nt, Artificial Sequence
  Description of Artificial Sequence: Synthetic oligonucleotide
ggcugugguccugucugua

SEQ ID NO: 2390400 - RNA, 19 nt, Artificial Sequence
  Description of Artificial Sequence: Synthetic oligonucleotide
cccggcacaaugggaaucu

SEQ ID NO: 2390401 - RNA, 19 nt, Artificial Sequence
  Description of Artificial Sequence: Synthetic oligonucleotide
ggcaaacguuugugucccu

SEQ ID NO: 2390402 - RNA, 19 nt, Artificial Sequence
  Description of Artificial Sequence: Synthetic oligonucleotide
gggcugccgagagcauuga

SEQ ID NO: 2390403 - RNA, 19 nt, Artificial Sequence
  Description of Artificial Sequence: Synthetic oligonucleotide
guccuguuauuggcuccuu

SEQ ID NO: 2390404 - RNA, 19 nt, Artificial Sequence
  Description of Artificial Sequence: Synthetic oligonucleotide
ccggcacaaugggaaucua

SEQ ID NO: 2390405 - RNA, 19 nt, Artificial Sequence
  Description of Artificial Sequence: Synthetic oligonucleotide
accaggaccacuuugaccg

SEQ ID NO: 2390406 - RNA, 19 nt, Artificial Sequence
  Description of Artificial Sequence: Synthetic oligonucleotide
aaauccuggguccagggac

SEQ ID NO: 2390407 - RNA, 19 nt, Artificial Sequence
  Description of Artificial Sequence: Synthetic oligonucleotide
ugucuugcaacccacgacg

SEQ ID NO: 2390408 - RNA, 19 nt, Artificial Sequence
  Description of Artificial Sequence: Synthetic oligonucleotide
cauuauagcgcucaaacac

SEQ ID NO: 2390409 - RNA, 19 nt, Artificial Sequence
  Description of Artificial Sequence: Synthetic oligonucleotide
gacauuauagcgcucaaac

SEQ ID NO: 2390410 - RNA, 19 nt, Artificial Sequence
  Description of Artificial Sequence: Synthetic oligonucleotide
guuuggacuggucacaucg

SEQ ID NO: 2390411 - RNA, 19 nt, Artificial Sequence
  Description of Artificial Sequence: Synthetic oligonucleotide
acugcgacugcugagagcc

SEQ ID NO: 2390412 - RNA, 19 nt, Artificial Sequence
  Description of Artificial Sequence: Synthetic oligonucleotide
auaaugggcacuccuuugc

SEQ ID NO: 2390413 - RNA, 19 nt, Artificial Sequence
  Description of Artificial Sequence: Synthetic oligonucleotide
agucuagaaauccuggguc

SEQ ID NO: 2390414 - RNA, 19 nt, Artificial Sequence
  Description of Artificial Sequence: Synthetic oligonucleotide
uuacccuucauuugcagag

SEQ ID NO: 2390415 - RNA, 19 nt, Artificial Sequence
  Description of Artificial Sequence: Synthetic oligonucleotide
gaaguuacgacugcgacug

SEQ ID NO: 2390416 - RNA, 19 nt, Artificial Sequence
  Description of Artificial Sequence: Synthetic oligonucleotide
aaaacuccggguaauccgc

SEQ ID NO: 2390417 - RNA, 19 nt, Artificial Sequence
  Description of Artificial Sequence: Synthetic oligonucleotide
caacccacgacgauaaugg

SEQ ID NO: 2390418 - RNA, 19 nt, Artificial Sequence
  Description of Artificial Sequence: Synthetic oligonucleotide
agagcuaagggucugagaa

SEQ ID NO: 2390419 - RNA, 19 nt, Artificial Sequence
  Description of Artificial Sequence: Synthetic oligonucleotide
uauuaacgguuccagagcu

SEQ ID NO: 2390420 - RNA, 19 nt, Artificial Sequence
  Description of Artificial Sequence: Synthetic oligonucleotide
uugcagagugacauuauag

SEQ ID NO: 2390421 - RNA, 19 nt, Artificial Sequence
  Description of Artificial Sequence: Synthetic oligonucleotide
ucuggguaccaccuguugg

SEQ ID NO: 2390422 - RNA, 19 nt, Artificial Sequence
  Description of Artificial Sequence: Synthetic oligonucleotide
acuuugaccgagcacccgc

SEQ ID NO: 2390423 - RNA, 19 nt, Artificial Sequence
  Description of Artificial Sequence: Synthetic oligonucleotide
ugaccuugccauaucgugg

SEQ ID NO: 2390424 - RNA, 19 nt, Artificial Sequence
  Description of Artificial Sequence: Synthetic oligonucleotide
agcuaagggucugagaacc

SEQ ID NO: 2390425 - RNA, 19 nt, Artificial Sequence
  Description of Artificial Sequence: Synthetic oligonucleotide
uccaacugagggaaguggg

SEQ ID NO: 2390426 - RNA, 19 nt, Artificial Sequence
  Description of Artificial Sequence: Synthetic oligonucleotide
cagagugacauuauagcgc

SEQ ID NO: 2390427 - RNA, 19 nt, Artificial Sequence
  Description of Artificial Sequence: Synthetic oligonucleotide
gagguguacagguuuaccc

SEQ ID NO: 2390428 - RNA, 19 nt, Artificial Sequence
  Description of Artificial Sequence: Synthetic oligonucleotide
aagugugucaccucugggu

SEQ ID NO: 2390429 - RNA, 19 nt, Artificial Sequence
  Description of Artificial Sequence: Synthetic oligonucleotide
aacgguuccagagcuaagg

SEQ ID NO: 2390430 - RNA, 19 nt, Artificial Sequence
  Description of Artificial Sequence: Synthetic oligonucleotide
gucacaucgaagcagagga

SEQ ID NO: 2390431 - RNA, 19 nt, Artificial Sequence
  Description of Artificial Sequence: Synthetic oligonucleotide
acauugucaaagcuguuug

SEQ ID NO: 2390432 - RNA, 19 nt, Artificial Sequence
  Description of Artificial Sequence: Synthetic oligonucleotide
caggguagaacaagggucg

SEQ ID NO: 2390433 - RNA, 19 nt, Artificial Sequence
  Description of Artificial Sequence: Synthetic oligonucleotide
agagugacauuauagcgcu

SEQ ID NO: 2390434 - RNA, 19 nt, Artificial Sequence
  Description of Artificial Sequence: Synthetic oligonucleotide
acagggagucuauuaacgg

SEQ ID NO: 2390435 - RNA, 19 nt, Artificial Sequence
  Description of Artificial Sequence: Synthetic oligonucleotide
uuauagcgcucaaacacug

SEQ ID NO: 2390436 - RNA, 19 nt, Artificial Sequence
  Description of Artificial Sequence: Synthetic oligonucleotide
agaagugugucaccucugg

SEQ ID NO: 2390437 - RNA, 19 nt, Artificial Sequence
  Description of Artificial Sequence: Synthetic oligonucleotide
gaugucuucccgcagcccc

SEQ ID NO: 2390438 - RNA, 19 nt, Artificial Sequence
  Description of Artificial Sequence: Synthetic oligonucleotide
uucgccagcaccuuguccu

SEQ ID NO: 2390439 - RNA, 19 nt, Artificial Sequence
  Description of Artificial Sequence: Synthetic oligonucleotide
cugagagccaccuuagcag

SEQ ID NO: 2390440 - RNA, 19 nt, Artificial Sequence
  Description of Artificial Sequence: Synthetic oligonucleotide
cuauuaacgguuccagagc

SEQ ID NO: 2390441 - RNA, 19 nt, Artificial Sequence
  Description of Artificial Sequence: Synthetic oligonucleotide
agcgcucaaacacuguggg

SEQ ID NO: 2390442 - RNA, 19 nt, Artificial Sequence
  Description of Artificial Sequence: Synthetic oligonucleotide
aagcuguuuggacugguca

SEQ ID NO: 2390443 - RNA, 19 nt, Artificial Sequence
  Description of Artificial Sequence: Synthetic oligonucleotide
agcuguuuggacuggucac

SEQ ID NO: 2390444 - RNA, 19 nt, Artificial Sequence
  Description of Artificial Sequence: Synthetic oligonucleotide
aggagcaagacauuggcau

SEQ ID NO: 2390445 - RNA, 19 nt, Artificial Sequence
  Description of Artificial Sequence: Synthetic oligonucleotide
agcgaugucuucccgcagc

SEQ ID NO: 2390446 - RNA, 19 nt, Artificial Sequence
  Description of Artificial Sequence: Synthetic oligonucleotide
accuguuggagacauuguc

SEQ ID NO: 2390447 - RNA, 19 nt, Artificial Sequence
  Description of Artificial Sequence: Synthetic oligonucleotide
aagaccaucaucagcgaug

SEQ ID NO: 2390448 - RNA, 19 nt, Artificial Sequence
  Description of Artificial Sequence: Synthetic oligonucleotide
gcagagugacauuauagcg

SEQ ID NO: 2390449 - RNA, 19 nt, Artificial Sequence
  Description of Artificial Sequence: Synthetic oligonucleotide
uuuacccuucauuugcaga

SEQ ID NO: 2390450 - RNA, 19 nt, Artificial Sequence
  Description of Artificial Sequence: Synthetic oligonucleotide
caccuuagcagcuucccgg

SEQ ID NO: 2390451 - RNA, 19 nt, Artificial Sequence
  Description of Artificial Sequence: Synthetic oligonucleotide
uuagcagcuucccggaaga

SEQ ID NO: 2390452 - RNA, 19 nt, Artificial Sequence
  Description of Artificial Sequence: Synthetic oligonucleotide
ucaagguaggucacugcgc

SEQ ID NO: 2390453 - RNA, 19 nt, Artificial Sequence
  Description of Artificial Sequence: Synthetic oligonucleotide
agaaguuacgacugcgacu

SEQ ID NO: 2390454 - RNA, 19 nt, Artificial Sequence
  Description of Artificial Sequence: Synthetic oligonucleotide
acauuauagcgcucaaaca

SEQ ID NO: 2390455 - RNA, 19 nt, Artificial Sequence
  Description of Artificial Sequence: Synthetic oligonucleotide
cauugucaaagcuguuugg

SEQ ID NO: 2390456 - RNA, 19 nt, Artificial Sequence
  Description of Artificial Sequence: Synthetic oligonucleotide
uaggucacgggcuccaacc

SEQ ID NO: 2390457 - RNA, 19 nt, Artificial Sequence
  Description of Artificial Sequence: Synthetic oligonucleotide
ugucucagucuagaaaucc

SEQ ID NO: 2390458 - RNA, 19 nt, Artificial Sequence
  Description of Artificial Sequence: Synthetic oligonucleotide
aucaggguagaacaagggu

SEQ ID NO: 2390459 - RNA, 19 nt, Artificial Sequence
  Description of Artificial Sequence: Synthetic oligonucleotide
gucuagaaauccugggucc

SEQ ID NO: 2390460 - RNA, 19 nt, Artificial Sequence
  Description of Artificial Sequence: Synthetic oligonucleotide
uugucaaagcuguuuggac

SEQ ID NO: 2390461 - RNA, 19 nt, Artificial Sequence
  Description of Artificial Sequence: Synthetic oligonucleotide
agugacauuauagcgcuca

SEQ ID NO: 2390462 - RNA, 19 nt, Artificial Sequence
  Description of Artificial Sequence: Synthetic oligonucleotide
acgggcuccaacccauucc

SEQ ID NO: 2390463 - RNA, 19 nt, Artificial Sequence
  Description of Artificial Sequence: Synthetic oligonucleotide
gcgagcagaacacucaagg

SEQ ID NO: 2390464 - RNA, 19 nt, Artificial Sequence
  Description of Artificial Sequence: Synthetic oligonucleotide
uggacuggucacaucgaag

SEQ ID NO: 2390465 - RNA, 19 nt, Artificial Sequence
  Description of Artificial Sequence: Synthetic oligonucleotide
ucaucagcgaugucuuccc

SEQ ID NO: 2390466 - RNA, 19 nt, Artificial Sequence
  Description of Artificial Sequence: Synthetic oligonucleotide
agucuauuaacgguuccag

SEQ ID NO: 2390467 - RNA, 19 nt, Artificial Sequence
  Description of Artificial Sequence: Synthetic oligonucleotide
ggacuggucacaucgaagc

SEQ ID NO: 2390468 - RNA, 19 nt, Artificial Sequence
  Description of Artificial Sequence: Synthetic oligonucleotide
uacagguuuacccuucauu

SEQ ID NO: 2390469 - RNA, 19 nt, Artificial Sequence
  Description of Artificial Sequence: Synthetic oligonucleotide
cuugccauaucguggcccc

SEQ ID NO: 2390470 - RNA, 19 nt, Artificial Sequence
  Description of Artificial Sequence: Synthetic oligonucleotide
cugaccuugccauaucgug

SEQ ID NO: 2390471 - RNA, 19 nt, Artificial Sequence
  Description of Artificial Sequence: Synthetic oligonucleotide
ugaccgagcacccgcuuag

SEQ ID NO: 2390472 - RNA, 19 nt, Artificial Sequence
  Description of Artificial Sequence: Synthetic oligonucleotide
uuugcagagugacauuaua

SEQ ID NO: 2390473 - RNA, 19 nt, Artificial Sequence
  Description of Artificial Sequence: Synthetic oligonucleotide
agaucugucuugcaaccca

SEQ ID NO: 2390474 - RNA, 19 nt, Artificial Sequence
  Description of Artificial Sequence: Synthetic oligonucleotide
uuaacgguuccagagcuaa

SEQ ID NO: 2390475 - RNA, 19 nt, Artificial Sequence
  Description of Artificial Sequence: Synthetic oligonucleotide
ucagcgaugucuucccgca

SEQ ID NO: 2390476 - RNA, 19 nt, Artificial Sequence
  Description of Artificial Sequence: Synthetic oligonucleotide
acugcugagagccaccuua

SEQ ID NO: 2390477 - RNA, 19 nt, Artificial Sequence
  Description of Artificial Sequence: Synthetic oligonucleotide
aacuccggguaauccgccg

SEQ ID NO: 2390478 - RNA, 19 nt, Artificial Sequence
  Description of Artificial Sequence: Synthetic oligonucleotide
cuuagcagcuucccggaag

SEQ ID NO: 2390479 - RNA, 19 nt, Artificial Sequence
  Description of Artificial Sequence: Synthetic oligonucleotide
ucuggagguguacagguuu

SEQ ID NO: 2390480 - RNA, 19 nt, Artificial Sequence
  Description of Artificial Sequence: Synthetic oligonucleotide
aacccacgacgauaauggg

SEQ ID NO: 2390481 - RNA, 19 nt, Artificial Sequence
  Description of Artificial Sequence: Synthetic oligonucleotide
acgguuccagagcuaaggg

SEQ ID NO: 2390482 - RNA, 19 nt, Artificial Sequence
  Description of Artificial Sequence: Synthetic oligonucleotide
guagaacaagggucggagg

SEQ ID NO: 2390483 - RNA, 19 nt, Artificial Sequence
  Description of Artificial Sequence: Synthetic oligonucleotide
ugggucuuucuccaacuga

SEQ ID NO: 2390484 - RNA, 19 nt, Artificial Sequence
  Description of Artificial Sequence: Synthetic oligonucleotide
auuauagcgcucaaacacu

SEQ ID NO: 2390485 - RNA, 19 nt, Artificial Sequence
  Description of Artificial Sequence: Synthetic oligonucleotide
gagcagaacacucaaggua

SEQ ID NO: 2390486 - RNA, 19 nt, Artificial Sequence
  Description of Artificial Sequence: Synthetic oligonucleotide
aguuccaaaccagucaggu

SEQ ID NO: 2390487 - RNA, 19 nt, Artificial Sequence
  Description of Artificial Sequence: Synthetic oligonucleotide
aaagcuguuuggacugguc

SEQ ID NO: 2390488 - RNA, 19 nt, Artificial Sequence
  Description of Artificial Sequence: Synthetic oligonucleotide
aaggugaguuccaaaccag

SEQ ID NO: 2390489 - RNA, 19 nt, Artificial Sequence
  Description of Artificial Sequence: Synthetic oligonucleotide
ucucccgcagccugggccg

SEQ ID NO: 2390490 - RNA, 19 nt, Artificial Sequence
  Description of Artificial Sequence: Synthetic oligonucleotide
uagaaauccuggguccagg

SEQ ID NO: 2390491 - RNA, 19 nt, Artificial Sequence
  Description of Artificial Sequence: Synthetic oligonucleotide
acuggucacaucgaagcag

SEQ ID NO: 2390492 - RNA, 19 nt, Artificial Sequence
  Description of Artificial Sequence: Synthetic oligonucleotide
aucguggccccugugauag

SEQ ID NO: 2390493 - RNA, 19 nt, Artificial Sequence
  Description of Artificial Sequence: Synthetic oligonucleotide
cagaaguuacgacugcgac

SEQ ID NO: 2390494 - RNA, 19 nt, Artificial Sequence
  Description of Artificial Sequence: Synthetic oligonucleotide
aggucacgggcuccaaccc

SEQ ID NO: 2390495 - RNA, 19 nt, Artificial Sequence
  Description of Artificial Sequence: Synthetic oligonucleotide
gaacaagggucggaggcgg

SEQ ID NO: 2390496 - RNA, 19 nt, Artificial Sequence
  Description of Artificial Sequence: Synthetic oligonucleotide
auaggucacgggcuccaac

SEQ ID NO: 2390497 - RNA, 19 nt, Artificial Sequence
  Description of Artificial Sequence: Synthetic oligonucleotide
uguacagguuuacccuuca

SEQ ID NO: 2390498 - RNA, 19 nt, Artificial Sequence
  Description of Artificial Sequence: Synthetic oligonucleotide
ucacaucgaagcagaggag

SEQ ID NO: 2390499 - RNA, 19 nt, Artificial Sequence
  Description of Artificial Sequence: Synthetic oligonucleotide
aaacuccggguaauccgcc

SEQ ID NO: 2390500 - RNA, 19 nt, Artificial Sequence
  Description of Artificial Sequence: Synthetic oligonucleotide
acccacgacgauaaugggc

SEQ ID NO: 2390501 - RNA, 19 nt, Artificial Sequence
  Description of Artificial Sequence: Synthetic oligonucleotide
uugcaacccacgacgauaa

SEQ ID NO: 2390502 - RNA, 19 nt, Artificial Sequence
  Description of Artificial Sequence: Synthetic oligonucleotide
gguaccaccuguuggagac

SEQ ID NO: 2390503 - RNA, 19 nt, Artificial Sequence
  Description of Artificial Sequence: Synthetic oligonucleotide
uuuggacuggucacaucga

SEQ ID NO: 2390504 - RNA, 19 nt, Artificial Sequence
  Description of Artificial Sequence: Synthetic oligonucleotide
cacugaccuugccauaucg

SEQ ID NO: 2390505 - RNA, 19 nt, Artificial Sequence
  Description of Artificial Sequence: Synthetic oligonucleotide
uuacgacugcgacugcuga

SEQ ID NO: 2390506 - RNA, 19 nt, Artificial Sequence
  Description of Artificial Sequence: Synthetic oligonucleotide
ggagacauugucaaagcug

SEQ ID NO: 2390507 - RNA, 19 nt, Artificial Sequence
  Description of Artificial Sequence: Synthetic oligonucleotide
ugucauggaggcgagcaga

SEQ ID NO: 2390508 - RNA, 19 nt, Artificial Sequence
  Description of Artificial Sequence: Synthetic oligonucleotide
ucugggucuuucuccaacu

SEQ ID NO: 2390509 - RNA, 19 nt, Artificial Sequence
  Description of Artificial Sequence: Synthetic oligonucleotide
guuuacccuucauuugcag

SEQ ID NO: 2390510 - RNA, 19 nt, Artificial Sequence
  Description of Artificial Sequence: Synthetic oligonucleotide
gguagaacaagggucggag

SEQ ID NO: 2390511 - RNA, 19 nt, Artificial Sequence
  Description of Artificial Sequence: Synthetic oligonucleotide
uguccuugcgaagaucugu

SEQ ID NO: 2390512 - RNA, 19 nt, Artificial Sequence
  Description of Artificial Sequence: Synthetic oligonucleotide
uuagcggcgccuccucucc

SEQ ID NO: 2390513 - RNA, 19 nt, Artificial Sequence
  Description of Artificial Sequence: Synthetic oligonucleotide
agugugucaccucugggua

SEQ ID NO: 2390514 - RNA, 19 nt, Artificial Sequence
  Description of Artificial Sequence: Synthetic oligonucleotide
accggcucagccuggggac

SEQ ID NO: 2390515 - RNA, 19 nt, Artificial Sequence
  Description of Artificial Sequence: Synthetic oligonucleotide
aucgaagcagaggagcaag

SEQ ID NO: 2390516 - RNA, 19 nt, Artificial Sequence
  Description of Artificial Sequence: Synthetic oligonucleotide
uuguucgccagcaccuugu

SEQ ID NO: 2390517 - RNA, 19 nt, Artificial Sequence
  Description of Artificial Sequence: Synthetic oligonucleotide
aaguuacgacugcgacugc

SEQ ID NO: 2390518 - RNA, 19 nt, Artificial Sequence
  Description of Artificial Sequence: Synthetic oligonucleotide
guucuaccggcucagccug

SEQ ID NO: 2390519 - RNA, 19 nt, Artificial Sequence
  Description of Artificial Sequence: Synthetic oligonucleotide
uaauccgccgccagaaguu

SEQ ID NO: 2390520 - RNA, 19 nt, Artificial Sequence
  Description of Artificial Sequence: Synthetic oligonucleotide
auggaggcgagcagaacac

SEQ ID NO: 2390521 - RNA, 19 nt, Artificial Sequence
  Description of Artificial Sequence: Synthetic oligonucleotide
ugagaaccugucucagucu

SEQ ID NO: 2390522 - RNA, 19 nt, Artificial Sequence
  Description of Artificial Sequence: Synthetic oligonucleotide
agcagcuucccggaagacg

SEQ ID NO: 2390523 - RNA, 19 nt, Artificial Sequence
  Description of Artificial Sequence: Synthetic oligonucleotide
uuggacuggucacaucgaa

SEQ ID NO: 2390524 - RNA, 19 nt, Artificial Sequence
  Description of Artificial Sequence: Synthetic oligonucleotide
uacgacugcgacugcugag

SEQ ID NO: 2390525 - RNA, 19 nt, Artificial Sequence
  Description of Artificial Sequence: Synthetic oligonucleotide
ugggccgccuucaucccgg

SEQ ID NO: 2390526 - RNA, 19 nt, Artificial Sequence
  Description of Artificial Sequence: Synthetic oligonucleotide
uaccggcucagccugggga

SEQ ID NO: 2390527 - RNA, 19 nt, Artificial Sequence
  Description of Artificial Sequence: Synthetic oligonucleotide
gaucuggagguguacaggu

SEQ ID NO: 2390528 - RNA, 19 nt, Artificial Sequence
  Description of Artificial Sequence: Synthetic oligonucleotide
auaucguggccccugugau

SEQ ID NO: 2390529 - RNA, 19 nt, Artificial Sequence
  Description of Artificial Sequence: Synthetic oligonucleotide
guuccaaaccagucaggug

SEQ ID NO: 2390530 - RNA, 19 nt, Artificial Sequence
  Description of Artificial Sequence: Synthetic oligonucleotide
accgagcacccgcuuagcg

SEQ ID NO: 2390531 - RNA, 19 nt, Artificial Sequence
  Description of Artificial Sequence: Synthetic oligonucleotide
gucggaggcggucauaguc

SEQ ID NO: 2390532 - RNA, 19 nt, Artificial Sequence
  Description of Artificial Sequence: Synthetic oligonucleotide
uugcgaagaucugucuugc

SEQ ID NO: 2390533 - RNA, 19 nt, Artificial Sequence
  Description of Artificial Sequence: Synthetic oligonucleotide
cugucuugcaacccacgac

SEQ ID NO: 2390534 - RNA, 19 nt, Artificial Sequence
  Description of Artificial Sequence: Synthetic oligonucleotide
gguuccagagcuaaggguc

SEQ ID NO: 2390535 - RNA, 19 nt, Artificial Sequence
  Description of Artificial Sequence: Synthetic oligonucleotide
caguggagcccaucugugg

SEQ ID NO: 2390536 - RNA, 19 nt, Artificial Sequence
  Description of Artificial Sequence: Synthetic oligonucleotide
cauaucguggccccuguga

SEQ ID NO: 2390537 - RNA, 19 nt, Artificial Sequence
  Description of Artificial Sequence: Synthetic oligonucleotide
acccuucauuugcagagug

SEQ ID NO: 2390538 - RNA, 19 nt, Artificial Sequence
  Description of Artificial Sequence: Synthetic oligonucleotide
cuguuggagacauugucaa

SEQ ID NO: 2390539 - RNA, 19 nt, Artificial Sequence
  Description of Artificial Sequence: Synthetic oligonucleotide
uccuuugcagaaguguguc

SEQ ID NO: 2390540 - RNA, 19 nt, Artificial Sequence
  Description of Artificial Sequence: Synthetic oligonucleotide
ucacugcgcccacugaccu

SEQ ID NO: 2390541 - RNA, 19 nt, Artificial Sequence
  Description of Artificial Sequence: Synthetic oligonucleotide
gaaauccuggguccaggga

SEQ ID NO: 2390542 - RNA, 19 nt, Artificial Sequence
  Description of Artificial Sequence: Synthetic oligonucleotide
uaacgguuccagagcuaag

SEQ ID NO: 2390543 - RNA, 19 nt, Artificial Sequence
  Description of Artificial Sequence: Synthetic oligonucleotide
ucucugggaaggcccguug

SEQ ID NO: 2390544 - RNA, 19 nt, Artificial Sequence
  Description of Artificial Sequence: Synthetic oligonucleotide
gggucuuucuccaacugag

SEQ ID NO: 2390545 - RNA, 19 nt, Artificial Sequence
  Description of Artificial Sequence: Synthetic oligonucleotide
gcaaggugaguuccaaacc

SEQ ID NO: 2390546 - RNA, 19 nt, Artificial Sequence
  Description of Artificial Sequence: Synthetic oligonucleotide
uggccccugugauagguca

SEQ ID NO: 2390547 - RNA, 19 nt, Artificial Sequence
  Description of Artificial Sequence: Synthetic oligonucleotide
aggcccguuggcgaagacc

SEQ ID NO: 2390548 - RNA, 19 nt, Artificial Sequence
  Description of Artificial Sequence: Synthetic oligonucleotide
cacguugucauggaggcga

SEQ ID NO: 2390549 - RNA, 19 nt, Artificial Sequence
  Description of Artificial Sequence: Synthetic oligonucleotide
gacgauaaugggcacuccu

SEQ ID NO: 2390550 - RNA, 19 nt, Artificial Sequence
  Description of Artificial Sequence: Synthetic oligonucleotide
accagucaggugaccaggc

SEQ ID NO: 2390551 - RNA, 19 nt, Artificial Sequence
  Description of Artificial Sequence: Synthetic oligonucleotide
cuggguaccaccuguugga

SEQ ID NO: 2390552 - RNA, 19 nt, Artificial Sequence
  Description of Artificial Sequence: Synthetic oligonucleotide
gucuauuaacgguuccaga

SEQ ID NO: 2390553 - RNA, 19 nt, Artificial Sequence
  Description of Artificial Sequence: Synthetic oligonucleotide
gagaaccugucucagucua

SEQ ID NO: 2390554 - RNA, 19 nt, Artificial Sequence
  Description of Artificial Sequence: Synthetic oligonucleotide
guuacgacugcgacugcug

SEQ ID NO: 2390555 - RNA, 19 nt, Artificial Sequence
  Description of Artificial Sequence: Synthetic oligonucleotide
aaacacuguggggcuguag

SEQ ID NO: 2390556 - RNA, 19 nt, Artificial Sequence
  Description of Artificial Sequence: Synthetic oligonucleotide
ugacauuauagcgcucaaa

SEQ ID NO: 2390557 - RNA, 19 nt, Artificial Sequence
  Description of Artificial Sequence: Synthetic oligonucleotide
acugcgcccacugaccuug

SEQ ID NO: 2390558 - RNA, 19 nt, Artificial Sequence
  Description of Artificial Sequence: Synthetic oligonucleotide
ugauaggucacgggcucca

SEQ ID NO: 2390559 - RNA, 19 nt, Artificial Sequence
  Description of Artificial Sequence: Synthetic oligonucleotide
cugcugagagccaccuuag

SEQ ID NO: 2390560 - RNA, 19 nt, Artificial Sequence
  Description of Artificial Sequence: Synthetic oligonucleotide
ucuaccggcucagccuggg

SEQ ID NO: 2390561 - RNA, 19 nt, Artificial Sequence
  Description of Artificial Sequence: Synthetic oligonucleotide
cugggaaggcccguuggcg

SEQ ID NO: 2390562 - RNA, 19 nt, Artificial Sequence
  Description of Artificial Sequence: Synthetic oligonucleotide
aguuacgacugcgacugcu

SEQ ID NO: 2390563 - RNA, 19 nt, Artificial Sequence
  Description of Artificial Sequence: Synthetic oligonucleotide
aaccugucucagucuagaa

SEQ ID NO: 2390564 - RNA, 19 nt, Artificial Sequence
  Description of Artificial Sequence: Synthetic oligonucleotide
cuguagcucucugggaagg

SEQ ID NO: 2390565 - RNA, 19 nt, Artificial Sequence
  Description of Artificial Sequence: Synthetic oligonucleotide
uccggagcuuguucgccag

SEQ ID NO: 2390566 - RNA, 19 nt, Artificial Sequence
  Description of Artificial Sequence: Synthetic oligonucleotide
uggggacuagguccagccc

SEQ ID NO: 2390567 - RNA, 19 nt, Artificial Sequence
  Description of Artificial Sequence: Synthetic oligonucleotide
ggucacaucgaagcagagg

SEQ ID NO: 2390568 - RNA, 19 nt, Artificial Sequence
  Description of Artificial Sequence: Synthetic oligonucleotide
gaaccugucucagucuaga

SEQ ID NO: 2390569 - RNA, 19 nt, Artificial Sequence
  Description of Artificial Sequence: Synthetic oligonucleotide
ggcgaagaccaucaucagc

SEQ ID NO: 2390570 - RNA, 19 nt, Artificial Sequence
  Description of Artificial Sequence: Synthetic oligonucleotide
ucuugcaacccacgacgau

SEQ ID NO: 2390571 - RNA, 19 nt, Artificial Sequence
  Description of Artificial Sequence: Synthetic oligonucleotide
gaucugucuugcaacccac

SEQ ID NO: 2390572 - RNA, 19 nt, Artificial Sequence
  Description of Artificial Sequence: Synthetic oligonucleotide
cuucauuugcagagugaca

SEQ ID NO: 2390573 - RNA, 19 nt, Artificial Sequence
  Description of Artificial Sequence: Synthetic oligonucleotide
cuuguucgccagcaccuug

SEQ ID NO: 2390574 - RNA, 19 nt, Artificial Sequence
  Description of Artificial Sequence: Synthetic oligonucleotide
cuuccacguugucauggag

SEQ ID NO: 2390575 - RNA, 19 nt, Artificial Sequence
  Description of Artificial Sequence: Synthetic oligonucleotide
gacuagguccagcccaguc

SEQ ID NO: 2390576 - RNA, 19 nt, Artificial Sequence
  Description of Artificial Sequence: Synthetic oligonucleotide
uguagcucucugggaaggc

SEQ ID NO: 2390577 - RNA, 19 nt, Artificial Sequence
  Description of Artificial Sequence: Synthetic oligonucleotide
aggaccacuuugaccgagc

SEQ ID NO: 2390578 - RNA, 19 nt, Artificial Sequence
  Description of Artificial Sequence: Synthetic oligonucleotide
cuccaacccauuccuccgg

SEQ ID NO: 2390579 - RNA, 19 nt, Artificial Sequence
  Description of Artificial Sequence: Synthetic oligonucleotide
uccuugcgaagaucugucu

SEQ ID NO: 2390580 - RNA, 19 nt, Artificial Sequence
  Description of Artificial Sequence: Synthetic oligonucleotide
uucuaccggcucagccugg

SEQ ID NO: 2390581 - RNA, 19 nt, Artificial Sequence
  Description of Artificial Sequence: Synthetic oligonucleotide
agguaggucacugcgccca

SEQ ID NO: 2390582 - RNA, 19 nt, Artificial Sequence
  Description of Artificial Sequence: Synthetic oligonucleotide
uugaccgagcacccgcuua

SEQ ID NO: 2390583 - RNA, 19 nt, Artificial Sequence
  Description of Artificial Sequence: Synthetic oligonucleotide
agcuuguucgccagcaccu

SEQ ID NO: 2390584 - RNA, 19 nt, Artificial Sequence
  Description of Artificial Sequence: Synthetic oligonucleotide
cuuagcggcgccuccucuc

SEQ ID NO: 2390585 - RNA, 19 nt, Artificial Sequence
  Description of Artificial Sequence: Synthetic oligonucleotide
agggucugagaaccugucu

SEQ ID NO: 2390586 - RNA, 19 nt, Artificial Sequence
  Description of Artificial Sequence: Synthetic oligonucleotide
guagcucucugggaaggcc

SEQ ID NO: 2390587 - RNA, 19 nt, Artificial Sequence
  Description of Artificial Sequence: Synthetic oligonucleotide
gaccacuuugaccgagcac

SEQ ID NO: 2390588 - RNA, 19 nt, Artificial Sequence
  Description of Artificial Sequence: Synthetic oligonucleotide
cccacgacgauaaugggca

SEQ ID NO: 2390589 - RNA, 19 nt, Artificial Sequence
  Description of Artificial Sequence: Synthetic oligonucleotide
gacugcgacugcugagagc

SEQ ID NO: 2390590 - RNA, 19 nt, Artificial Sequence
  Description of Artificial Sequence: Synthetic oligonucleotide
acgacugcgacugcugaga

SEQ ID NO: 2390591 - RNA, 19 nt, Artificial Sequence
  Description of Artificial Sequence: Synthetic oligonucleotide
ggagucuauuaacgguucc

SEQ ID NO: 2390592 - RNA, 19 nt, Artificial Sequence
  Description of Artificial Sequence: Synthetic oligonucleotide
cgaagaucugucuugcaac

SEQ ID NO: 2390593 - RNA, 19 nt, Artificial Sequence
  Description of Artificial Sequence: Synthetic oligonucleotide
agggagucuauuaacgguu

SEQ ID NO: 2390594 - RNA, 19 nt, Artificial Sequence
  Description of Artificial Sequence: Synthetic oligonucleotide
acaagggucggaggcgguc

SEQ ID NO: 2390595 - RNA, 19 nt, Artificial Sequence
  Description of Artificial Sequence: Synthetic oligonucleotide
ugcgaagaucugucuugca

SEQ ID NO: 2390596 - RNA, 19 nt, Artificial Sequence
  Description of Artificial Sequence: Synthetic oligonucleotide
ggcaucaggguagaacaag

SEQ ID NO: 2390597 - RNA, 19 nt, Artificial Sequence
  Description of Artificial Sequence: Synthetic oligonucleotide
guaauccgccgccagaagu

SEQ ID NO: 2390598 - RNA, 19 nt, Artificial Sequence
  Description of Artificial Sequence: Synthetic oligonucleotide
cagcccagucaacagagca

SEQ ID NO: 2390599 - RNA, 19 nt, Artificial Sequence
  Description of Artificial Sequence: Synthetic oligonucleotide
gucacugcgcccacugacc

SEQ ID NO: 2390600 - RNA, 19 nt, Artificial Sequence
  Description of Artificial Sequence: Synthetic oligonucleotide
ugccauaucguggccccug

SEQ ID NO: 2390601 - RNA, 19 nt, Artificial Sequence
  Description of Artificial Sequence: Synthetic oligonucleotide
ugcgacugcugagagccac

SEQ ID NO: 2390602 - RNA, 19 nt, Artificial Sequence
  Description of Artificial Sequence: Synthetic oligonucleotide
aucugucuugcaacccacg

SEQ ID NO: 2390603 - RNA, 19 nt, Artificial Sequence
  Description of Artificial Sequence: Synthetic oligonucleotide
gcagaggagcaagacauug

SEQ ID NO: 2390604 - RNA, 19 nt, Artificial Sequence
  Description of Artificial Sequence: Synthetic oligonucleotide
ggucugagaaccugucuca

SEQ ID NO: 2390605 - RNA, 19 nt, Artificial Sequence
  Description of Artificial Sequence: Synthetic oligonucleotide
gcaacccacgacgauaaug

SEQ ID NO: 2390606 - RNA, 19 nt, Artificial Sequence
  Description of Artificial Sequence: Synthetic oligonucleotide
ccuguuggagacauuguca

SEQ ID NO: 2390607 - RNA, 19 nt, Artificial Sequence
  Description of Artificial Sequence: Synthetic oligonucleotide
agucaacagagcagaucag

SEQ ID NO: 2390608 - RNA, 19 nt, Artificial Sequence
  Description of Artificial Sequence: Synthetic oligonucleotide
ggucuuucuccaacugagg

SEQ ID NO: 2390609 - RNA, 19 nt, Artificial Sequence
  Description of Artificial Sequence: Synthetic oligonucleotide
cuugcaacccacgacgaua

SEQ ID NO: 2390610 - RNA, 19 nt, Artificial Sequence
  Description of Artificial Sequence: Synthetic oligonucleotide
agaaccugucucagucuag

SEQ ID NO: 2390611 - RNA, 19 nt, Artificial Sequence
  Description of Artificial Sequence: Synthetic oligonucleotide
ggggacuagguccagccca

SEQ ID NO: 2390612 - RNA, 19 nt, Artificial Sequence
  Description of Artificial Sequence: Synthetic oligonucleotide
acugaccuugccauaucgu

SEQ ID NO: 2390613 - RNA, 19 nt, Artificial Sequence
  Description of Artificial Sequence: Synthetic oligonucleotide
gggaccaggccucagugga

SEQ ID NO: 2390614 - RNA, 19 nt, Artificial Sequence
  Description of Artificial Sequence: Synthetic oligonucleotide
ggcuguagcucucugggaa

SEQ ID NO: 2390615 - RNA, 19 nt, Artificial Sequence
  Description of Artificial Sequence: Synthetic oligonucleotide
gugugucaccucuggguac

SEQ ID NO: 2390616 - RNA, 19 nt, Artificial Sequence
  Description of Artificial Sequence: Synthetic oligonucleotide
uggagguguacagguuuac

SEQ ID NO: 2390617 - RNA, 19 nt, Artificial Sequence
  Description of Artificial Sequence: Synthetic oligonucleotide
uuugaccgagcacccgcuu

SEQ ID NO: 2390618 - RNA, 19 nt, Artificial Sequence
  Description of Artificial Sequence: Synthetic oligonucleotide
cagucuagaaauccugggu

SEQ ID NO: 2390619 - RNA, 19 nt, Artificial Sequence
  Description of Artificial Sequence: Synthetic oligonucleotide
ccaccuguuggagacauug

SEQ ID NO: 2390620 - RNA, 19 nt, Artificial Sequence
  Description of Artificial Sequence: Synthetic oligonucleotide
uaccaccuguuggagacau

SEQ ID NO: 2390621 - RNA, 19 nt, Artificial Sequence
  Description of Artificial Sequence: Synthetic oligonucleotide
ccgagcacccgcuuagcgg

SEQ ID NO: 2390622 - RNA, 19 nt, Artificial Sequence
  Description of Artificial Sequence: Synthetic oligonucleotide
gcacagggagucuauuaac

SEQ ID NO: 2390623 - RNA, 19 nt, Artificial Sequence
  Description of Artificial Sequence: Synthetic oligonucleotide
gaagaccaucaucagcgau

SEQ ID NO: 2390624 - RNA, 19 nt, Artificial Sequence
  Description of Artificial Sequence: Synthetic oligonucleotide
cagucaggugaccaggcaa

SEQ ID NO: 2390625 - RNA, 19 nt, Artificial Sequence
  Description of Artificial Sequence: Synthetic oligonucleotide
ggggugugguucuaccggc

SEQ ID NO: 2390626 - RNA, 19 nt, Artificial Sequence
  Description of Artificial Sequence: Synthetic oligonucleotide
gguaauccgccgccagaag

SEQ ID NO: 2390627 - RNA, 19 nt, Artificial Sequence
  Description of Artificial Sequence: Synthetic oligonucleotide
gcagaucagcuucuggguc

SEQ ID NO: 2390628 - RNA, 19 nt, Artificial Sequence
  Description of Artificial Sequence: Synthetic oligonucleotide
cacuuugaccgagcacccg

SEQ ID NO: 2390629 - RNA, 19 nt, Artificial Sequence
  Description of Artificial Sequence: Synthetic oligonucleotide
cgagcacccgcuuagcggc

SEQ ID NO: 2390630 - RNA, 19 nt, Artificial Sequence
  Description of Artificial Sequence: Synthetic oligonucleotide
guccuugcgaagaucuguc

SEQ ID NO: 2390631 - RNA, 19 nt, Artificial Sequence
  Description of Artificial Sequence: Synthetic oligonucleotide
gcgaagaucugucuugcaa

SEQ ID NO: 2390632 - RNA, 19 nt, Artificial Sequence
  Description of Artificial Sequence: Synthetic oligonucleotide
acgauaaugggcacuccuu

SEQ ID NO: 2390633 - RNA, 19 nt, Artificial Sequence
  Description of Artificial Sequence: Synthetic oligonucleotide
aagggucggaggcggucau

SEQ ID NO: 2390634 - RNA, 19 nt, Artificial Sequence
  Description of Artificial Sequence: Synthetic oligonucleotide
ggagguguacagguuuacc

SEQ ID NO: 2390635 - RNA, 19 nt, Artificial Sequence
  Description of Artificial Sequence: Synthetic oligonucleotide
gguucuaccggcucagccu

SEQ ID NO: 2390636 - RNA, 19 nt, Artificial Sequence
  Description of Artificial Sequence: Synthetic oligonucleotide
ccugucucagucuagaaau

SEQ ID NO: 2390637 - RNA, 19 nt, Artificial Sequence
  Description of Artificial Sequence: Synthetic oligonucleotide
aauccgccgccagaaguua

SEQ ID NO: 2390638 - RNA, 19 nt, Artificial Sequence
  Description of Artificial Sequence: Synthetic oligonucleotide
cugggccgccuucaucccg

SEQ ID NO: 2390639 - RNA, 19 nt, Artificial Sequence
  Description of Artificial Sequence: Synthetic oligonucleotide
agcacccgcuuagcggcgc

SEQ ID NO: 2390640 - RNA, 19 nt, Artificial Sequence
  Description of Artificial Sequence: Synthetic oligonucleotide
accuuguccuugcgaagau

SEQ ID NO: 2390641 - RNA, 19 nt, Artificial Sequence
  Description of Artificial Sequence: Synthetic oligonucleotide
ggcccguuggcgaagacca

SEQ ID NO: 2390642 - RNA, 19 nt, Artificial Sequence
  Description of Artificial Sequence: Synthetic oligonucleotide
gugauaggucacgggcucc

SEQ ID NO: 2390643 - RNA, 19 nt, Artificial Sequence
  Description of Artificial Sequence: Synthetic oligonucleotide
cagagcuaagggucugaga

SEQ ID NO: 2390644 - RNA, 19 nt, Artificial Sequence
  Description of Artificial Sequence: Synthetic oligonucleotide
ccgccagaaguuacgacug

SEQ ID NO: 2390645 - RNA, 19 nt, Artificial Sequence
  Description of Artificial Sequence: Synthetic oligonucleotide
gggucggaggcggucauag

SEQ ID NO: 2390646 - RNA, 19 nt, Artificial Sequence
  Description of Artificial Sequence: Synthetic oligonucleotide
aggcaaggugaguuccaaa

SEQ ID NO: 2390647 - RNA, 19 nt, Artificial Sequence
  Description of Artificial Sequence: Synthetic oligonucleotide
uggaggcgagcagaacacu

SEQ ID NO: 2390648 - RNA, 19 nt, Artificial Sequence
  Description of Artificial Sequence: Synthetic oligonucleotide
gugacauuauagcgcucaa

SEQ ID NO: 2390649 - RNA, 19 nt, Artificial Sequence
  Description of Artificial Sequence: Synthetic oligonucleotide
gcgcucaaacacugugggg

SEQ ID NO: 2390650 - RNA, 19 nt, Artificial Sequence
  Description of Artificial Sequence: Synthetic oligonucleotide
gccgccagaaguuacgacu

SEQ ID NO: 2390651 - RNA, 19 nt, Artificial Sequence
  Description of Artificial Sequence: Synthetic oligonucleotide
ucccggaagacggcuucca

SEQ ID NO: 2390652 - RNA, 19 nt, Artificial Sequence
  Description of Artificial Sequence: Synthetic oligonucleotide
ccacuuugaccgagcaccc

SEQ ID NO: 2390653 - RNA, 19 nt, Artificial Sequence
  Description of Artificial Sequence: Synthetic oligonucleotide
auccgccgccagaaguuac

SEQ ID NO: 2390654 - RNA, 19 nt, Artificial Sequence
  Description of Artificial Sequence: Synthetic oligonucleotide
ccagaaguuacgacugcga

SEQ ID NO: 2390655 - RNA, 19 nt, Artificial Sequence
  Description of Artificial Sequence: Synthetic oligonucleotide
cuccuuugcagaagugugu

SEQ ID NO: 2390656 - RNA, 19 nt, Artificial Sequence
  Description of Artificial Sequence: Synthetic oligonucleotide
aacaagggucggaggcggu

SEQ ID NO: 2390657 - RNA, 19 nt, Artificial Sequence
  Description of Artificial Sequence: Synthetic oligonucleotide
cuggagguguacagguuua

SEQ ID NO: 2390658 - RNA, 19 nt, Artificial Sequence
  Description of Artificial Sequence: Synthetic oligonucleotide
cacgggcuccaacccauuc

SEQ ID NO: 2390659 - RNA, 19 nt, Artificial Sequence
  Description of Artificial Sequence: Synthetic oligonucleotide
gucucagucuagaaauccu

SEQ ID NO: 2390660 - RNA, 19 nt, Artificial Sequence
  Description of Artificial Sequence: Synthetic oligonucleotide
gggacuagguccagcccag

SEQ ID NO: 2390661 - RNA, 19 nt, Artificial Sequence
  Description of Artificial Sequence: Synthetic oligonucleotide
gucuugcaacccacgacga

SEQ ID NO: 2390662 - RNA, 19 nt, Artificial Sequence
  Description of Artificial Sequence: Synthetic oligonucleotide
auuaacgguuccagagcua

SEQ ID NO: 2390663 - RNA, 19 nt, Artificial Sequence
  Description of Artificial Sequence: Synthetic oligonucleotide
gguuuacccuucauuugca

SEQ ID NO: 2390664 - RNA, 19 nt, Artificial Sequence
  Description of Artificial Sequence: Synthetic oligonucleotide
ggaccacuuugaccgagca

SEQ ID NO: 2390665 - RNA, 19 nt, Artificial Sequence
  Description of Artificial Sequence: Synthetic oligonucleotide
ucguggccccugugauagg

SEQ ID NO: 2390666 - RNA, 19 nt, Artificial Sequence
  Description of Artificial Sequence: Synthetic oligonucleotide
gucauggaggcgagcagaa

SEQ ID NO: 2390667 - RNA, 19 nt, Artificial Sequence
  Description of Artificial Sequence: Synthetic oligonucleotide
ggaggcgagcagaacacuc

SEQ ID NO: 2390668 - RNA, 19 nt, Artificial Sequence
  Description of Artificial Sequence: Synthetic oligonucleotide
ugucaccucuggguaccac

SEQ ID NO: 2390669 - RNA, 19 nt, Artificial Sequence
  Description of Artificial Sequence: Synthetic oligonucleotide
acccgcuuagcggcgccuc

SEQ ID NO: 2390670 - RNA, 19 nt, Artificial Sequence
  Description of Artificial Sequence: Synthetic oligonucleotide
cagcgaugucuucccgcag

SEQ ID NO: 2390671 - RNA, 19 nt, Artificial Sequence
  Description of Artificial Sequence: Synthetic oligonucleotide
gagcacccgcuuagcggcg

SEQ ID NO: 2390672 - RNA, 19 nt, Artificial Sequence
  Description of Artificial Sequence: Synthetic oligonucleotide
ugcaacccacgacgauaau

SEQ ID NO: 2390673 - RNA, 19 nt, Artificial Sequence
  Description of Artificial Sequence: Synthetic oligonucleotide
gccccugugauaggucacg

SEQ ID NO: 2390674 - RNA, 19 nt, Artificial Sequence
  Description of Artificial Sequence: Synthetic oligonucleotide
gcccagucaacagagcaga

SEQ ID NO: 2390675 - RNA, 19 nt, Artificial Sequence
  Description of Artificial Sequence: Synthetic oligonucleotide
acguugucauggaggcgag

SEQ ID NO: 2390676 - RNA, 19 nt, Artificial Sequence
  Description of Artificial Sequence: Synthetic oligonucleotide
cuuugaccgagcacccgcu

SEQ ID NO: 2390677 - RNA, 19 nt, Artificial Sequence
  Description of Artificial Sequence: Synthetic oligonucleotide
ccagucaacagagcagauc

SEQ ID NO: 2390678 - RNA, 19 nt, Artificial Sequence
  Description of Artificial Sequence: Synthetic oligonucleotide
gaccgagcacccgcuuagc

SEQ ID NO: 2390679 - RNA, 19 nt, Artificial Sequence
  Description of Artificial Sequence: Synthetic oligonucleotide
caagggucggaggcgguca

SEQ ID NO: 2390680 - RNA, 19 nt, Artificial Sequence
  Description of Artificial Sequence: Synthetic oligonucleotide
caacagagcagaucagcuu

SEQ ID NO: 2390681 - RNA, 19 nt, Artificial Sequence
  Description of Artificial Sequence: Synthetic oligonucleotide
caucgaagcagaggagcaa

SEQ ID NO: 2390682 - RNA, 19 nt, Artificial Sequence
  Description of Artificial Sequence: Synthetic oligonucleotide
ggucacgggcuccaaccca

SEQ ID NO: 2390683 - RNA, 19 nt, Artificial Sequence
  Description of Artificial Sequence: Synthetic oligonucleotide
ggcgagcagaacacucaag

SEQ ID NO: 2390684 - RNA, 19 nt, Artificial Sequence
  Description of Artificial Sequence: Synthetic oligonucleotide
ggguaauccgccgccagaa

SEQ ID NO: 2390685 - RNA, 19 nt, Artificial Sequence
  Description of Artificial Sequence: Synthetic oligonucleotide
ccaacccauuccuccggag

SEQ ID NO: 2390686 - RNA, 19 nt, Artificial Sequence
  Description of Artificial Sequence: Synthetic oligonucleotide
gauaggucacgggcuccaa

SEQ ID NO: 2390687 - RNA, 19 nt, Artificial Sequence
  Description of Artificial Sequence: Synthetic oligonucleotide
uugccauaucguggccccu

SEQ ID NO: 2390688 - RNA, 19 nt, Artificial Sequence
  Description of Artificial Sequence: Synthetic oligonucleotide
ccagagcuaagggucugag

SEQ ID NO: 2390689 - RNA, 19 nt, Artificial Sequence
  Description of Artificial Sequence: Synthetic oligonucleotide
gguguacagguuuacccuu

SEQ ID NO: 2390690 - RNA, 19 nt, Artificial Sequence
  Description of Artificial Sequence: Synthetic oligonucleotide
ccguuggcgaagaccauca

SEQ ID NO: 2390691 - RNA, 19 nt, Artificial Sequence
  Description of Artificial Sequence: Synthetic oligonucleotide
ucgccagcaccuuguccuu

SEQ ID NO: 2390692 - RNA, 19 nt, Artificial Sequence
  Description of Artificial Sequence: Synthetic oligonucleotide
ucacgggcuccaacccauu

SEQ ID NO: 2390693 - RNA, 19 nt, Artificial Sequence
  Description of Artificial Sequence: Synthetic oligonucleotide
ccgccuucaucccgggcgg

SEQ ID NO: 2390694 - RNA, 19 nt, Artificial Sequence
  Description of Artificial Sequence: Synthetic oligonucleotide
gugguucuaccggcucagc

SEQ ID NO: 2390695 - RNA, 19 nt, Artificial Sequence
  Description of Artificial Sequence: Synthetic oligonucleotide
gguaggucacugcgcccac

SEQ ID NO: 2390696 - RNA, 19 nt, Artificial Sequence
  Description of Artificial Sequence: Synthetic oligonucleotide
cuucugggucuuucuccaa

SEQ ID NO: 2390697 - RNA, 19 nt, Artificial Sequence
  Description of Artificial Sequence: Synthetic oligonucleotide
agcagaggagcaagacauu

SEQ ID NO: 2390698 - RNA, 19 nt, Artificial Sequence
  Description of Artificial Sequence: Synthetic oligonucleotide
cagaacacucaagguaggu

SEQ ID NO: 2390699 - RNA, 19 nt, Artificial Sequence
  Description of Artificial Sequence: Synthetic oligonucleotide
cucagccuggggacuaggu

SEQ ID NO: 2390700 - RNA, 19 nt, Artificial Sequence
  Description of Artificial Sequence: Synthetic oligonucleotide
ggguagaacaagggucgga

SEQ ID NO: 2390701 - RNA, 19 nt, Artificial Sequence
  Description of Artificial Sequence: Synthetic oligonucleotide
caccuguuggagacauugu

SEQ ID NO: 2390702 - RNA, 19 nt, Artificial Sequence
  Description of Artificial Sequence: Synthetic oligonucleotide
cccuucauuugcagaguga

SEQ ID NO: 2390703 - RNA, 19 nt, Artificial Sequence
  Description of Artificial Sequence: Synthetic oligonucleotide
gggcacuccuuugcagaag

SEQ ID NO: 2390704 - RNA, 19 nt, Artificial Sequence
  Description of Artificial Sequence: Synthetic oligonucleotide
guacagguuuacccuucau

SEQ ID NO: 2390705 - RNA, 19 nt, Artificial Sequence
  Description of Artificial Sequence: Synthetic oligonucleotide
ccagaucuggagguguaca

SEQ ID NO: 2390706 - RNA, 19 nt, Artificial Sequence
  Description of Artificial Sequence: Synthetic oligonucleotide
guaccaccuguuggagaca

SEQ ID NO: 2390707 - RNA, 19 nt, Artificial Sequence
  Description of Artificial Sequence: Synthetic oligonucleotide
ccggguaauccgccgccag

SEQ ID NO: 2390708 - RNA, 19 nt, Artificial Sequence
  Description of Artificial Sequence: Synthetic oligonucleotide
cacgacgauaaugggcacu

SEQ ID NO: 2390709 - RNA, 19 nt, Artificial Sequence
  Description of Artificial Sequence: Synthetic oligonucleotide
ccccugugauaggucacgg

SEQ ID NO: 2390710 - RNA, 19 nt, Artificial Sequence
  Description of Artificial Sequence: Synthetic oligonucleotide
gggcuguagcucucuggga

SEQ ID NO: 2390711 - RNA, 19 nt, Artificial Sequence
  Description of Artificial Sequence: Synthetic oligonucleotide
caaagcuguuuggacuggu

SEQ ID NO: 2390712 - RNA, 19 nt, Artificial Sequence
  Description of Artificial Sequence: Synthetic oligonucleotide
aggcggucauagucaucuu

SEQ ID NO: 2390713 - RNA, 19 nt, Artificial Sequence
  Description of Artificial Sequence: Synthetic oligonucleotide
gucacgggcuccaacccau

SEQ ID NO: 2390714 - RNA, 19 nt, Artificial Sequence
  Description of Artificial Sequence: Synthetic oligonucleotide
cccguuggcgaagaccauc

SEQ ID NO: 2390715 - RNA, 19 nt, Artificial Sequence
  Description of Artificial Sequence: Synthetic oligonucleotide
guggccccugugauagguc

SEQ ID NO: 2390716 - RNA, 19 nt, Artificial Sequence
  Description of Artificial Sequence: Synthetic oligonucleotide
ccugggccgccuucauccc

SEQ ID NO: 2390717 - RNA, 19 nt, Artificial Sequence
  Description of Artificial Sequence: Synthetic oligonucleotide
ccauaucguggccccugug

SEQ ID NO: 2390718 - RNA, 19 nt, Artificial Sequence
  Description of Artificial Sequence: Synthetic oligonucleotide
cccggaagacggcuuccac

SEQ ID NO: 2390719 - RNA, 19 nt, Artificial Sequence
  Description of Artificial Sequence: Synthetic oligonucleotide
cgacugcgacugcugagag

SEQ ID NO: 2390720 - RNA, 19 nt, Artificial Sequence
  Description of Artificial Sequence: Synthetic oligonucleotide
ccacgacgauaaugggcac

SEQ ID NO: 2390721 - RNA, 19 nt, Artificial Sequence
  Description of Artificial Sequence: Synthetic oligonucleotide
cccgcuuagcggcgccucc

SEQ ID NO: 2390722 - RNA, 19 nt, Artificial Sequence
  Description of Artificial Sequence: Synthetic oligonucleotide
cugcgacugcugagagcca

SEQ ID NO: 2390723 - RNA, 19 nt, Artificial Sequence
  Description of Artificial Sequence: Synthetic oligonucleotide
gcacccgcuuagcggcgcc

SEQ ID NO: 2390724 - RNA, 19 nt, Artificial Sequence
  Description of Artificial Sequence: Synthetic oligonucleotide
ggccccugugauaggucac

SEQ ID NO: 2390725 - RNA, 19 nt, Artificial Sequence
  Description of Artificial Sequence: Synthetic oligonucleotide
gugucaccucuggguacca

SEQ ID NO: 2390726 - RNA, 19 nt, Artificial Sequence
  Description of Artificial Sequence: Synthetic oligonucleotide
ccggagcuuguucgccagc

SEQ ID NO: 2390727 - RNA, 19 nt, Artificial Sequence
  Description of Artificial Sequence: Synthetic oligonucleotide
cgaagaccaucaucagcga

SEQ ID NO: 2390728 - RNA, 19 nt, Artificial Sequence
  Description of Artificial Sequence: Synthetic oligonucleotide
ccuugcgaagaucugucuu

SEQ ID NO: 2390729 - RNA, 19 nt, Artificial Sequence
  Description of Artificial Sequence: Synthetic oligonucleotide
guaggucacugcgcccacu

SEQ ID NO: 2390730 - RNA, 19 nt, Artificial Sequence
  Description of Artificial Sequence: Synthetic oligonucleotide
cauuggcaucaggguagaa

SEQ ID NO: 2390731 - RNA, 19 nt, Artificial Sequence
  Description of Artificial Sequence: Synthetic oligonucleotide
gcggcgccuccucucccgc

SEQ ID NO: 2390732 - RNA, 19 nt, Artificial Sequence
  Description of Artificial Sequence: Synthetic oligonucleotide
gcuaagggucugagaaccu

SEQ ID NO: 2390733 - RNA, 19 nt, Artificial Sequence
  Description of Artificial Sequence: Synthetic oligonucleotide
agggucggaggcggucaua

SEQ ID NO: 2390734 - RNA, 19 nt, Artificial Sequence
  Description of Artificial Sequence: Synthetic oligonucleotide
gcuuagcggcgccuccucu

SEQ ID NO: 2390735 - RNA, 19 nt, Artificial Sequence
  Description of Artificial Sequence: Synthetic oligonucleotide
cgacgauaaugggcacucc

SEQ ID NO: 2390736 - RNA, 19 nt, Artificial Sequence
  Description of Artificial Sequence: Synthetic oligonucleotide
cgauaaugggcacuccuuu

SEQ ID NO: 2390737 - RNA, 19 nt, Artificial Sequence
  Description of Artificial Sequence: Synthetic oligonucleotide
cgccgccagaaguuacgac

SEQ ID NO: 2390738 - RNA, 19 nt, Artificial Sequence
  Description of Artificial Sequence: Synthetic oligonucleotide
accaccuguuggagacauu

SEQ ID NO: 2390739 - RNA, 19 nt, Artificial Sequence
  Description of Artificial Sequence: Synthetic oligonucleotide
ccaggaccacuuugaccga

SEQ ID NO: 2390740 - RNA, 19 nt, Artificial Sequence
  Description of Artificial Sequence: Synthetic oligonucleotide
cguugucauggaggcgagc

SEQ ID NO: 2390741 - RNA, 19 nt, Artificial Sequence
  Description of Artificial Sequence: Synthetic oligonucleotide
cggagcuuguucgccagca

SEQ ID NO: 2390742 - RNA, 19 nt, Artificial Sequence
  Description of Artificial Sequence: Synthetic oligonucleotide
ggucggaggcggucauagu

SEQ ID NO: 2390743 - RNA, 19 nt, Artificial Sequence
  Description of Artificial Sequence: Synthetic oligonucleotide
cggguaauccgccgccaga

SEQ ID NO: 2390744 - RNA, 19 nt, Artificial Sequence
  Description of Artificial Sequence: Synthetic oligonucleotide
cggcuuccacguugucaug

SEQ ID NO: 2390745 - RNA, 19 nt, Artificial Sequence
  Description of Artificial Sequence: Synthetic oligonucleotide
gcuuguucgccagcaccuu

SEQ ID NO: 2390746 - RNA, 19 nt, Artificial Sequence
  Description of Artificial Sequence: Synthetic oligonucleotide
cccagucaacagagcagau

SEQ ID NO: 2390747 - RNA, 19 nt, Artificial Sequence
  Description of Artificial Sequence: Synthetic oligonucleotide
ggacuagguccagcccagu

SEQ ID NO: 2390748 - RNA, 19 nt, Artificial Sequence
  Description of Artificial Sequence: Synthetic oligonucleotide
gcuucccggaagacggcuu

SEQ ID NO: 2390749 - RNA, 19 nt, Artificial Sequence
  Description of Artificial Sequence: Synthetic oligonucleotide
cacccgcuuagcggcgccu

SEQ ID NO: 2390750 - RNA, 19 nt, Artificial Sequence
  Description of Artificial Sequence: Synthetic oligonucleotide
cguggccccugugauaggu

SEQ ID NO: 2390751 - RNA, 19 nt, Artificial Sequence
  Description of Artificial Sequence: Synthetic oligonucleotide
cgacugcugagagccaccu

SEQ ID NO: 2390752 - RNA, 19 nt, Artificial Sequence
  Description of Artificial Sequence: Synthetic oligonucleotide
ccgcuuagcggcgccuccu

SEQ ID NO: 2390753 - RNA, 19 nt, Artificial Sequence
  Description of Artificial Sequence: Synthetic oligonucleotide
ccggcucagccuggggacu

SEQ ID NO: 2390754 - RNA, 19 nt, Artificial Sequence
  Description of Artificial Sequence: Synthetic oligonucleotide
ccgcagccugggccgccuu

SEQ ID NO: 2390755 - RNA, 19 nt, Artificial Sequence
  Description of Artificial Sequence: Synthetic oligonucleotide
uguauaaacaacuuuaaca

SEQ ID NO: 2390756 - RNA, 19 nt, Artificial Sequence
  Description of Artificial Sequence: Synthetic oligonucleotide
uuugauugauuuuauaucc

SEQ ID NO: 2390757 - RNA, 19 nt, Artificial Sequence
  Description of Artificial Sequence: Synthetic oligonucleotide
uuuaacauuauccauuugu

SEQ ID NO: 2390758 - RNA, 19 nt, Artificial Sequence
  Description of Artificial Sequence: Synthetic oligonucleotide
auuugaaagaauuuucuuc

SEQ ID NO: 2390759 - RNA, 19 nt, Artificial Sequence
  Description of Artificial Sequence: Synthetic oligonucleotide
uuuauauccaucauuaguu

SEQ ID NO: 2390760 - RNA, 19 nt, Artificial Sequence
  Description of Artificial Sequence: Synthetic oligonucleotide
uuuuauauccaucauuagu

SEQ ID NO: 2390761 - RNA, 19 nt, Artificial Sequence
  Description of Artificial Sequence: Synthetic oligonucleotide
uuaacagcagaaaacaagu

SEQ ID NO: 2390762 - RNA, 19 nt, Artificial Sequence
  Description of Artificial Sequence: Synthetic oligonucleotide
aagaaggauauucuccugg

SEQ ID NO: 2390763 - RNA, 19 nt, Artificial Sequence
  Description of Artificial Sequence: Synthetic oligonucleotide
aacauuauccauuugugaa

SEQ ID NO: 2390764 - RNA, 19 nt, Artificial Sequence
  Description of Artificial Sequence: Synthetic oligonucleotide
agaaugaaggacuucggac

SEQ ID NO: 2390765 - RNA, 19 nt, Artificial Sequence
  Description of Artificial Sequence: Synthetic oligonucleotide
uuuauagcccaguugauca

SEQ ID NO: 2390766 - RNA, 19 nt, Artificial Sequence
  Description of Artificial Sequence: Synthetic oligonucleotide
uuaacauuauccauuugug

SEQ ID NO: 2390767 - RNA, 19 nt, Artificial Sequence
  Description of Artificial Sequence: Synthetic oligonucleotide
uggacaaccaccaaaggca

SEQ ID NO: 2390768 - RNA, 19 nt, Artificial Sequence
  Description of Artificial Sequence: Synthetic oligonucleotide
ugaagaauuauaaaagcua

SEQ ID NO: 2390769 - RNA, 19 nt, Artificial Sequence
  Description of Artificial Sequence: Synthetic oligonucleotide
aaugucaugaucugaucug

SEQ ID NO: 2390770 - RNA, 19 nt, Artificial Sequence
  Description of Artificial Sequence: Synthetic oligonucleotide
aauuguauaaacaacuuua

SEQ ID NO: 2390771 - RNA, 19 nt, Artificial Sequence
  Description of Artificial Sequence: Synthetic oligonucleotide
aaugaaggacuucggacuc

SEQ ID NO: 2390772 - RNA, 19 nt, Artificial Sequence
  Description of Artificial Sequence: Synthetic oligonucleotide
uuuuaucuuaugcaccucc

SEQ ID NO: 2390773 - RNA, 19 nt, Artificial Sequence
  Description of Artificial Sequence: Synthetic oligonucleotide
auuugugaaucaguaaugc

SEQ ID NO: 2390774 - RNA, 19 nt, Artificial Sequence
  Description of Artificial Sequence: Synthetic oligonucleotide
cuuaauucuucuuguauag

SEQ ID NO: 2390775 - RNA, 19 nt, Artificial Sequence
  Description of Artificial Sequence: Synthetic oligonucleotide
uaaugauccaucuucauua

SEQ ID NO: 2390776 - RNA, 19 nt, Artificial Sequence
  Description of Artificial Sequence: Synthetic oligonucleotide
uaauucuucuuguauagca

SEQ ID NO: 2390777 - RNA, 19 nt, Artificial Sequence
  Description of Artificial Sequence: Synthetic oligonucleotide
ugaaagcugagucuguaag

SEQ ID NO: 2390778 - RNA, 19 nt, Artificial Sequence
  Description of Artificial Sequence: Synthetic oligonucleotide
acaagaaugaaggacuucg

SEQ ID NO: 2390779 - RNA, 19 nt, Artificial Sequence
  Description of Artificial Sequence: Synthetic oligonucleotide
uuaugcaccuccuuuaaug

SEQ ID NO: 2390780 - RNA, 19 nt, Artificial Sequence
  Description of Artificial Sequence: Synthetic oligonucleotide
uauagcagcguacauuuca

SEQ ID NO: 2390781 - RNA, 19 nt, Artificial Sequence
  Description of Artificial Sequence: Synthetic oligonucleotide
uuggacaaccaccaaaggc

SEQ ID NO: 2390782 - RNA, 19 nt, Artificial Sequence
  Description of Artificial Sequence: Synthetic oligonucleotide
aaaggcacccuguagaaaa

SEQ ID NO: 2390783 - RNA, 19 nt, Artificial Sequence
  Description of Artificial Sequence: Synthetic oligonucleotide
aacuguguguucucacggc

SEQ ID NO: 2390784 - RNA, 19 nt, Artificial Sequence
  Description of Artificial Sequence: Synthetic oligonucleotide
uugugaaucaguaaugcua

SEQ ID NO: 2390785 - RNA, 19 nt, Artificial Sequence
  Description of Artificial Sequence: Synthetic oligonucleotide
uucaccugaagaauuauaa

SEQ ID NO: 2390786 - RNA, 19 nt, Artificial Sequence
  Description of Artificial Sequence: Synthetic oligonucleotide
uauuucugaaugucaauug

SEQ ID NO: 2390787 - RNA, 19 nt, Artificial Sequence
  Description of Artificial Sequence: Synthetic oligonucleotide
ugcauguucguuuacuuca

SEQ ID NO: 2390788 - RNA, 19 nt, Artificial Sequence
  Description of Artificial Sequence: Synthetic oligonucleotide
ucuuaaagcuugacaaaag

SEQ ID NO: 2390789 - RNA, 19 nt, Artificial Sequence
  Description of Artificial Sequence: Synthetic oligonucleotide
gaucugaucugagugacgg

SEQ ID NO: 2390790 - RNA, 19 nt, Artificial Sequence
  Description of Artificial Sequence: Synthetic oligonucleotide
cagaaaacaaguucugggc

SEQ ID NO: 2390791 - RNA, 19 nt, Artificial Sequence
  Description of Artificial Sequence: Synthetic oligonucleotide
ugugaaucaguaaugcuau

SEQ ID NO: 2390792 - RNA, 19 nt, Artificial Sequence
  Description of Artificial Sequence: Synthetic oligonucleotide
agucuguaaguuucugugc

SEQ ID NO: 2390793 - RNA, 19 nt, Artificial Sequence
  Description of Artificial Sequence: Synthetic oligonucleotide
gauuggacaaccaccaaag

SEQ ID NO: 2390794 - RNA, 19 nt, Artificial Sequence
  Description of Artificial Sequence: Synthetic oligonucleotide
ugucaauuguauaaacaac

SEQ ID NO: 2390795 - RNA, 19 nt, Artificial Sequence
  Description of Artificial Sequence: Synthetic oligonucleotide
uguauagcagcguacauuu

SEQ ID NO: 2390796 - RNA, 19 nt, Artificial Sequence
  Description of Artificial Sequence: Synthetic oligonucleotide
aagaaugaaggacuucgga

SEQ ID NO: 2390797 - RNA, 19 nt, Artificial Sequence
  Description of Artificial Sequence: Synthetic oligonucleotide
uuuguaccaacccaccaca

SEQ ID NO: 2390798 - RNA, 19 nt, Artificial Sequence
  Description of Artificial Sequence: Synthetic oligonucleotide
agaacuguguguucucacg

SEQ ID NO: 2390799 - RNA, 19 nt, Artificial Sequence
  Description of Artificial Sequence: Synthetic oligonucleotide
aauuuguaccaacccacca

SEQ ID NO: 2390800 - RNA, 19 nt, Artificial Sequence
  Description of Artificial Sequence: Synthetic oligonucleotide
agaaggauauucuccuggg

SEQ ID NO: 2390801 - RNA, 19 nt, Artificial Sequence
  Description of Artificial Sequence: Synthetic oligonucleotide
ucagacauucccagauugg

SEQ ID NO: 2390802 - RNA, 19 nt, Artificial Sequence
  Description of Artificial Sequence: Synthetic oligonucleotide
gaacuguguguucucacgg

SEQ ID NO: 2390803 - RNA, 19 nt, Artificial Sequence
  Description of Artificial Sequence: Synthetic oligonucleotide
uuguauaaacaacuuuaac

SEQ ID NO: 2390804 - RNA, 19 nt, Artificial Sequence
  Description of Artificial Sequence: Synthetic oligonucleotide
uaacauuauccauuuguga

SEQ ID NO: 2390805 - RNA, 19 nt, Artificial Sequence
  Description of Artificial Sequence: Synthetic oligonucleotide
caguugaucagacauuccc

SEQ ID NO: 2390806 - RNA, 19 nt, Artificial Sequence
  Description of Artificial Sequence: Synthetic oligonucleotide
uuaaugauccaucuucauu

SEQ ID NO: 2390807 - RNA, 19 nt, Artificial Sequence
  Description of Artificial Sequence: Synthetic oligonucleotide
acauggaauauauuucuga

SEQ ID NO: 2390808 - RNA, 19 nt, Artificial Sequence
  Description of Artificial Sequence: Synthetic oligonucleotide
aaucuucgcaugcuguucu

SEQ ID NO: 2390809 - RNA, 19 nt, Artificial Sequence
  Description of Artificial Sequence: Synthetic oligonucleotide
cuguuuauagcccaguuga

SEQ ID NO: 2390810 - RNA, 19 nt, Artificial Sequence
  Description of Artificial Sequence: Synthetic oligonucleotide
uguucguuuacuucaccug

SEQ ID NO: 2390811 - RNA, 19 nt, Artificial Sequence
  Description of Artificial Sequence: Synthetic oligonucleotide
auuuuauauccaucauuag

SEQ ID NO: 2390812 - RNA, 19 nt, Artificial Sequence
  Description of Artificial Sequence: Synthetic oligonucleotide
aaauugagaacuguguguu

SEQ ID NO: 2390813 - RNA, 19 nt, Artificial Sequence
  Description of Artificial Sequence: Synthetic oligonucleotide
gaagaauuauaaaagcuaa

SEQ ID NO: 2390814 - RNA, 19 nt, Artificial Sequence
  Description of Artificial Sequence: Synthetic oligonucleotide
aucagacauucccagauug

SEQ ID NO: 2390815 - RNA, 19 nt, Artificial Sequence
  Description of Artificial Sequence: Synthetic oligonucleotide
ucaauuguauaaacaacuu

SEQ ID NO: 2390816 - RNA, 19 nt, Artificial Sequence
  Description of Artificial Sequence: Synthetic oligonucleotide
ucugagucgguguugagau

SEQ ID NO: 2390817 - RNA, 19 nt, Artificial Sequence
  Description of Artificial Sequence: Synthetic oligonucleotide
ugagucgguguugagaugc

SEQ ID NO: 2390818 - RNA, 19 nt, Artificial Sequence
  Description of Artificial Sequence: Synthetic oligonucleotide
uaugcaccuccuuuaauga

SEQ ID NO: 2390819 - RNA, 19 nt, Artificial Sequence
  Description of Artificial Sequence: Synthetic oligonucleotide
uugagaugcuggaagguga

SEQ ID NO: 2390820 - RNA, 19 nt, Artificial Sequence
  Description of Artificial Sequence: Synthetic oligonucleotide
gacauucccagauuggaca

SEQ ID NO: 2390821 - RNA, 19 nt, Artificial Sequence
  Description of Artificial Sequence: Synthetic oligonucleotide
cugaaugucaauuguauaa

SEQ ID NO: 2390822 - RNA, 19 nt, Artificial Sequence
  Description of Artificial Sequence: Synthetic oligonucleotide
cauuugugaaucaguaaug

SEQ ID NO: 2390823 - RNA, 19 nt, Artificial Sequence
  Description of Artificial Sequence: Synthetic oligonucleotide
guuuacuucaccugaagaa

SEQ ID NO: 2390824 - RNA, 19 nt, Artificial Sequence
  Description of Artificial Sequence: Synthetic oligonucleotide
uuuaucuuaugcaccuccu

SEQ ID NO: 2390825 - RNA, 19 nt, Artificial Sequence
  Description of Artificial Sequence: Synthetic oligonucleotide
auucccagauuggacaacc

SEQ ID NO: 2390826 - RNA, 19 nt, Artificial Sequence
  Description of Artificial Sequence: Synthetic oligonucleotide
uuugugaaucaguaaugcu

SEQ ID NO: 2390827 - RNA, 19 nt, Artificial Sequence
  Description of Artificial Sequence: Synthetic oligonucleotide
ugguguuaacagcagaaaa

SEQ ID NO: 2390828 - RNA, 19 nt, Artificial Sequence
  Description of Artificial Sequence: Synthetic oligonucleotide
uuuacuucaccugaagaau

SEQ ID NO: 2390829 - RNA, 19 nt, Artificial Sequence
  Description of Artificial Sequence: Synthetic oligonucleotide
ugcugcuuuaaucuucgca

SEQ ID NO: 2390830 - RNA, 19 nt, Artificial Sequence
  Description of Artificial Sequence: Synthetic oligonucleotide
ugcucucuaaaugucauga

SEQ ID NO: 2390831 - RNA, 19 nt, Artificial Sequence
  Description of Artificial Sequence: Synthetic oligonucleotide
ucauuaguuucucuacuuc

SEQ ID NO: 2390832 - RNA, 19 nt, Artificial Sequence
  Description of Artificial Sequence: Synthetic oligonucleotide
uuuuggacagucuucucuc

SEQ ID NO: 2390833 - RNA, 19 nt, Artificial Sequence
  Description of Artificial Sequence: Synthetic oligonucleotide
aaaacaaguucugggcuug

SEQ ID NO: 2390834 - RNA, 19 nt, Artificial Sequence
  Description of Artificial Sequence: Synthetic oligonucleotide
uauauccaucauuaguuuc

SEQ ID NO: 2390835 - RNA, 19 nt, Artificial Sequence
  Description of Artificial Sequence: Synthetic oligonucleotide
uccaucauuaguuucucua

SEQ ID NO: 2390836 - RNA, 19 nt, Artificial Sequence
  Description of Artificial Sequence: Synthetic oligonucleotide
ucuuguauagcagcguaca

SEQ ID NO: 2390837 - RNA, 19 nt, Artificial Sequence
  Description of Artificial Sequence: Synthetic oligonucleotide
uucuuaaagcuugacaaaa

SEQ ID NO: 2390838 - RNA, 19 nt, Artificial Sequence
  Description of Artificial Sequence: Synthetic oligonucleotide
ugaaucaguaaugcuauuc

SEQ ID NO: 2390839 - RNA, 19 nt, Artificial Sequence
  Description of Artificial Sequence: Synthetic oligonucleotide
uuuggcauagacuccuuaa

SEQ ID NO: 2390840 - RNA, 19 nt, Artificial Sequence
  Description of Artificial Sequence: Synthetic oligonucleotide
ugauugauuuuauauccau

SEQ ID NO: 2390841 - RNA, 19 nt, Artificial Sequence
  Description of Artificial Sequence: Synthetic oligonucleotide
uccuuaauucuucuuguau

SEQ ID NO: 2390842 - RNA, 19 nt, Artificial Sequence
  Description of Artificial Sequence: Synthetic oligonucleotide
uaucuuaugcaccuccuuu

SEQ ID NO: 2390843 - RNA, 19 nt, Artificial Sequence
  Description of Artificial Sequence: Synthetic oligonucleotide
gaagccaguggauguacag

SEQ ID NO: 2390844 - RNA, 19 nt, Artificial Sequence
  Description of Artificial Sequence: Synthetic oligonucleotide
caagaaugaaggacuucgg

SEQ ID NO: 2390845 - RNA, 19 nt, Artificial Sequence
  Description of Artificial Sequence: Synthetic oligonucleotide
gaaugaaggacuucggacu

SEQ ID NO: 2390846 - RNA, 19 nt, Artificial Sequence
  Description of Artificial Sequence: Synthetic oligonucleotide
gcagacucuguuuauagcc

SEQ ID NO: 2390847 - RNA, 19 nt, Artificial Sequence
  Description of Artificial Sequence: Synthetic oligonucleotide
ugaaugucaauuguauaaa

SEQ ID NO: 2390848 - RNA, 19 nt, Artificial Sequence
  Description of Artificial Sequence: Synthetic oligonucleotide
uuucucuacuucucguuca

SEQ ID NO: 2390849 - RNA, 19 nt, Artificial Sequence
  Description of Artificial Sequence: Synthetic oligonucleotide
aaugauccaucuucauuaa

SEQ ID NO: 2390850 - RNA, 19 nt, Artificial Sequence
  Description of Artificial Sequence: Synthetic oligonucleotide
caugcuguucuuuucuaac

SEQ ID NO: 2390851 - RNA, 19 nt, Artificial Sequence
  Description of Artificial Sequence: Synthetic oligonucleotide
aagccgguaacauggaaua

SEQ ID NO: 2390852 - RNA, 19 nt, Artificial Sequence
  Description of Artificial Sequence: Synthetic oligonucleotide
auuggacaaccaccaaagg

SEQ ID NO: 2390853 - RNA, 19 nt, Artificial Sequence
  Description of Artificial Sequence: Synthetic oligonucleotide
uauucuuggcuucaccuuu

SEQ ID NO: 2390854 - RNA, 19 nt, Artificial Sequence
  Description of Artificial Sequence: Synthetic oligonucleotide
auugagaacuguguguucu

SEQ ID NO: 2390855 - RNA, 19 nt, Artificial Sequence
  Description of Artificial Sequence: Synthetic oligonucleotide
aaugcuauucuuggcuuca

SEQ ID NO: 2390856 - RNA, 19 nt, Artificial Sequence
  Description of Artificial Sequence: Synthetic oligonucleotide
uauauuucugaaugucaau

SEQ ID NO: 2390857 - RNA, 19 nt, Artificial Sequence
  Description of Artificial Sequence: Synthetic oligonucleotide
auguucguuuacuucaccu

SEQ ID NO: 2390858 - RNA, 19 nt, Artificial Sequence
  Description of Artificial Sequence: Synthetic oligonucleotide
guucucacggcuuugcuga

SEQ ID NO: 2390859 - RNA, 19 nt, Artificial Sequence
  Description of Artificial Sequence: Synthetic oligonucleotide
acauuauccauuugugaau

SEQ ID NO: 2390860 - RNA, 19 nt, Artificial Sequence
  Description of Artificial Sequence: Synthetic oligonucleotide
acuccuuaauucuucuugu

SEQ ID NO: 2390861 - RNA, 19 nt, Artificial Sequence
  Description of Artificial Sequence: Synthetic oligonucleotide
agguucuuaaagcuugaca

SEQ ID NO: 2390862 - RNA, 19 nt, Artificial Sequence
  Description of Artificial Sequence: Synthetic oligonucleotide
ucguuuacuucaccugaag

SEQ ID NO: 2390863 - RNA, 19 nt, Artificial Sequence
  Description of Artificial Sequence: Synthetic oligonucleotide
auauccaucauuaguuucu

SEQ ID NO: 2390864 - RNA, 19 nt, Artificial Sequence
  Description of Artificial Sequence: Synthetic oligonucleotide
cuuuaaugauccaucuuca

SEQ ID NO: 2390865 - RNA, 19 nt, Artificial Sequence
  Description of Artificial Sequence: Synthetic oligonucleotide
agauuggacaaccaccaaa

SEQ ID NO: 2390866 - RNA, 19 nt, Artificial Sequence
  Description of Artificial Sequence: Synthetic oligonucleotide
uuguuuuggacagucuucu

SEQ ID NO: 2390867 - RNA, 19 nt, Artificial Sequence
  Description of Artificial Sequence: Synthetic oligonucleotide
ugucaugaucugaucugag

SEQ ID NO: 2390868 - RNA, 19 nt, Artificial Sequence
  Description of Artificial Sequence: Synthetic oligonucleotide
aagguucuuaaagcuugac

SEQ ID NO: 2390869 - RNA, 19 nt, Artificial Sequence
  Description of Artificial Sequence: Synthetic oligonucleotide
ugaucugaucugagugacg

SEQ ID NO: 2390870 - RNA, 19 nt, Artificial Sequence
  Description of Artificial Sequence: Synthetic oligonucleotide
agaaggaacccuuccgugu

SEQ ID NO: 2390871 - RNA, 19 nt, Artificial Sequence
  Description of Artificial Sequence: Synthetic oligonucleotide
cagacucuguuuauagccc

SEQ ID NO: 2390872 - RNA, 19 nt, Artificial Sequence
  Description of Artificial Sequence: Synthetic oligonucleotide
guaccaacccaccacaguc

SEQ ID NO: 2390873 - RNA, 19 nt, Artificial Sequence
  Description of Artificial Sequence: Synthetic oligonucleotide
uuauagcccaguugaucag

SEQ ID NO: 2390874 - RNA, 19 nt, Artificial Sequence
  Description of Artificial Sequence: Synthetic oligonucleotide
uuuaaugauccaucuucau

SEQ ID NO: 2390875 - RNA, 19 nt, Artificial Sequence
  Description of Artificial Sequence: Synthetic oligonucleotide
aacauggaauauauuucug

SEQ ID NO: 2390876 - RNA, 19 nt, Artificial Sequence
  Description of Artificial Sequence: Synthetic oligonucleotide
auagacuccuuaauucuuc

SEQ ID NO: 2390877 - RNA, 19 nt, Artificial Sequence
  Description of Artificial Sequence: Synthetic oligonucleotide
auauauuucugaaugucaa

SEQ ID NO: 2390878 - RNA, 19 nt, Artificial Sequence
  Description of Artificial Sequence: Synthetic oligonucleotide
uuauauccaucauuaguuu

SEQ ID NO: 2390879 - RNA, 19 nt, Artificial Sequence
  Description of Artificial Sequence: Synthetic oligonucleotide
agcugagucuguaaguuuc

SEQ ID NO: 2390880 - RNA, 19 nt, Artificial Sequence
  Description of Artificial Sequence: Synthetic oligonucleotide
guguuaacagcagaaaaca

SEQ ID NO: 2390881 - RNA, 19 nt, Artificial Sequence
  Description of Artificial Sequence: Synthetic oligonucleotide
gguaacauggaauauauuu

SEQ ID NO: 2390882 - RNA, 19 nt, Artificial Sequence
  Description of Artificial Sequence: Synthetic oligonucleotide
gaugcuggaaggugagcgc

SEQ ID NO: 2390883 - RNA, 19 nt, Artificial Sequence
  Description of Artificial Sequence: Synthetic oligonucleotide
gaauuuguaccaacccacc

SEQ ID NO: 2390884 - RNA, 19 nt, Artificial Sequence
  Description of Artificial Sequence: Synthetic oligonucleotide
ucuuaugcaccuccuuuaa

SEQ ID NO: 2390885 - RNA, 19 nt, Artificial Sequence
  Description of Artificial Sequence: Synthetic oligonucleotide
uuggcauuugaaagaauuu

SEQ ID NO: 2390886 - RNA, 19 nt, Artificial Sequence
  Description of Artificial Sequence: Synthetic oligonucleotide
aaagccgguaacauggaau

SEQ ID NO: 2390887 - RNA, 19 nt, Artificial Sequence
  Description of Artificial Sequence: Synthetic oligonucleotide
ucaccugaagaauuauaaa

SEQ ID NO: 2390888 - RNA, 19 nt, Artificial Sequence
  Description of Artificial Sequence: Synthetic oligonucleotide
uguaccaacccaccacagu

SEQ ID NO: 2390889 - RNA, 19 nt, Artificial Sequence
  Description of Artificial Sequence: Synthetic oligonucleotide
uuaaucuucgcaugcuguu

SEQ ID NO: 2390890 - RNA, 19 nt, Artificial Sequence
  Description of Artificial Sequence: Synthetic oligonucleotide
gucaauuguauaaacaacu

SEQ ID NO: 2390891 - RNA, 19 nt, Artificial Sequence
  Description of Artificial Sequence: Synthetic oligonucleotide
ugagugacggcggaauuug

SEQ ID NO: 2390892 - RNA, 19 nt, Artificial Sequence
  Description of Artificial Sequence: Synthetic oligonucleotide
guucguuuacuucaccuga

SEQ ID NO: 2390893 - RNA, 19 nt, Artificial Sequence
  Description of Artificial Sequence: Synthetic oligonucleotide
agcagcguacauuucauuu

SEQ ID NO: 2390894 - RNA, 19 nt, Artificial Sequence
  Description of Artificial Sequence: Synthetic oligonucleotide
aucugaucugagugacggc

SEQ ID NO: 2390895 - RNA, 19 nt, Artificial Sequence
  Description of Artificial Sequence: Synthetic oligonucleotide
ugcuauucuuggcuucacc

SEQ ID NO: 2390896 - RNA, 19 nt, Artificial Sequence
  Description of Artificial Sequence: Synthetic oligonucleotide
aguucugggcuugaaagcu

SEQ ID NO: 2390897 - RNA, 19 nt, Artificial Sequence
  Description of Artificial Sequence: Synthetic oligonucleotide
cauuauccauuugugaauc

SEQ ID NO: 2390898 - RNA, 19 nt, Artificial Sequence
  Description of Artificial Sequence: Synthetic oligonucleotide
cuuugcugaagccagugga

SEQ ID NO: 2390899 - RNA, 19 nt, Artificial Sequence
  Description of Artificial Sequence: Synthetic oligonucleotide
ucccagauuggacaaccac

SEQ ID NO: 2390900 - RNA, 19 nt, Artificial Sequence
  Description of Artificial Sequence: Synthetic oligonucleotide
aaaagccgguaacauggaa

SEQ ID NO: 2390901 - RNA, 19 nt, Artificial Sequence
  Description of Artificial Sequence: Synthetic oligonucleotide
gucgguguugagaugcugg

SEQ ID NO: 2390902 - RNA, 19 nt, Artificial Sequence
  Description of Artificial Sequence: Synthetic oligonucleotide
cucacggcuuugcugaagc

SEQ ID NO: 2390903 - RNA, 19 nt, Artificial Sequence
  Description of Artificial Sequence: Synthetic oligonucleotide
agacauucccagauuggac

SEQ ID NO: 2390904 - RNA, 19 nt, Artificial Sequence
  Description of Artificial Sequence: Synthetic oligonucleotide
uuguaccaacccaccacag

SEQ ID NO: 2390905 - RNA, 19 nt, Artificial Sequence
  Description of Artificial Sequence: Synthetic oligonucleotide
uggcauagacuccuuaauu

SEQ ID NO: 2390906 - RNA, 19 nt, Artificial Sequence
  Description of Artificial Sequence: Synthetic oligonucleotide
ggaauuuguaccaacccac

SEQ ID NO: 2390907 - RNA, 19 nt, Artificial Sequence
  Description of Artificial Sequence: Synthetic oligonucleotide
uugaucagacauucccaga

SEQ ID NO: 2390908 - RNA, 19 nt, Artificial Sequence
  Description of Artificial Sequence: Synthetic oligonucleotide
acccuuccgugucugaguc

SEQ ID NO: 2390909 - RNA, 19 nt, Artificial Sequence
  Description of Artificial Sequence: Synthetic oligonucleotide
guuucucuacuucucguuc

SEQ ID NO: 2390910 - RNA, 19 nt, Artificial Sequence
  Description of Artificial Sequence: Synthetic oligonucleotide
guugagaugcuggaaggug

SEQ ID NO: 2390911 - RNA, 19 nt, Artificial Sequence
  Description of Artificial Sequence: Synthetic oligonucleotide
uucucuacuucucguucac

SEQ ID NO: 2390912 - RNA, 19 nt, Artificial Sequence
  Description of Artificial Sequence: Synthetic oligonucleotide
uggacagucuucucuccug

SEQ ID NO: 2390913 - RNA, 19 nt, Artificial Sequence
  Description of Artificial Sequence: Synthetic oligonucleotide
uaguuucucuacuucucgu

SEQ ID NO: 2390914 - RNA, 19 nt, Artificial Sequence
  Description of Artificial Sequence: Synthetic oligonucleotide
uuaucuuaugcaccuccuu

SEQ ID NO: 2390915 - RNA, 19 nt, Artificial Sequence
  Description of Artificial Sequence: Synthetic oligonucleotide
aacccuuccgugucugagu

SEQ ID NO: 2390916 - RNA, 19 nt, Artificial Sequence
  Description of Artificial Sequence: Synthetic oligonucleotide
gugacggcggaauuuguac

SEQ ID NO: 2390917 - RNA, 19 nt, Artificial Sequence
  Description of Artificial Sequence: Synthetic oligonucleotide
uucguuuacuucaccugaa

SEQ ID NO: 2390918 - RNA, 19 nt, Artificial Sequence
  Description of Artificial Sequence: Synthetic oligonucleotide
ugaucugagugacggcgga

SEQ ID NO: 2390919 - RNA, 19 nt, Artificial Sequence
  Description of Artificial Sequence: Synthetic oligonucleotide
uguuuauagcccaguugau

SEQ ID NO: 2390920 - RNA, 19 nt, Artificial Sequence
  Description of Artificial Sequence: Synthetic oligonucleotide
uagacuccuuaauucuucu

SEQ ID NO: 2390921 - RNA, 19 nt, Artificial Sequence
  Description of Artificial Sequence: Synthetic oligonucleotide
aacugcucucuaaauguca

SEQ ID NO: 2390922 - RNA, 19 nt, Artificial Sequence
  Description of Artificial Sequence: Synthetic oligonucleotide
uucagugcauguucguuua

SEQ ID NO: 2390923 - RNA, 19 nt, Artificial Sequence
  Description of Artificial Sequence: Synthetic oligonucleotide
aaccaccaaaggcacccug

SEQ ID NO: 2390924 - RNA, 19 nt, Artificial Sequence
  Description of Artificial Sequence: Synthetic oligonucleotide
auuauccauuugugaauca

SEQ ID NO: 2390925 - RNA, 19 nt, Artificial Sequence
  Description of Artificial Sequence: Synthetic oligonucleotide
uguguucucacggcuuugc

SEQ ID NO: 2390926 - RNA, 19 nt, Artificial Sequence
  Description of Artificial Sequence: Synthetic oligonucleotide
uuguauagcagcguacauu

SEQ ID NO: 2390927 - RNA, 19 nt, Artificial Sequence
  Description of Artificial Sequence: Synthetic oligonucleotide
aguggagcagcuuucuguu

SEQ ID NO: 2390928 - RNA, 19 nt, Artificial Sequence
  Description of Artificial Sequence: Synthetic oligonucleotide
gagaacuguguguucucac

SEQ ID NO: 2390929 - RNA, 19 nt, Artificial Sequence
  Description of Artificial Sequence: Synthetic oligonucleotide
uaccaacccaccacagucu

SEQ ID NO: 2390930 - RNA, 19 nt, Artificial Sequence
  Description of Artificial Sequence: Synthetic oligonucleotide
agcuugacaaaagaaggau

SEQ ID NO: 2390931 - RNA, 19 nt, Artificial Sequence
  Description of Artificial Sequence: Synthetic oligonucleotide
uguguguucucacggcuuu

SEQ ID NO: 2390932 - RNA, 19 nt, Artificial Sequence
  Description of Artificial Sequence: Synthetic oligonucleotide
caacguacucucacccucc

SEQ ID NO: 2390933 - RNA, 19 nt, Artificial Sequence
  Description of Artificial Sequence: Synthetic oligonucleotide
uauagcccaguugaucaga

SEQ ID NO: 2390934 - RNA, 19 nt, Artificial Sequence
  Description of Artificial Sequence: Synthetic oligonucleotide
ucgguguugagaugcugga

SEQ ID NO: 2390935 - RNA, 19 nt, Artificial Sequence
  Description of Artificial Sequence: Synthetic oligonucleotide
ucuacuucucguucacuuu

SEQ ID NO: 2390936 - RNA, 19 nt, Artificial Sequence
  Description of Artificial Sequence: Synthetic oligonucleotide
ugaguggagcagcuuucug

SEQ ID NO: 2390937 - RNA, 19 nt, Artificial Sequence
  Description of Artificial Sequence: Synthetic oligonucleotide
cccagauuggacaaccacc

SEQ ID NO: 2390938 - RNA, 19 nt, Artificial Sequence
  Description of Artificial Sequence: Synthetic oligonucleotide
gacggcggaauuuguacca

SEQ ID NO: 2390939 - RNA, 19 nt, Artificial Sequence
  Description of Artificial Sequence: Synthetic oligonucleotide
augcuggaaggugagcgcg

SEQ ID NO: 2390940 - RNA, 19 nt, Artificial Sequence
  Description of Artificial Sequence: Synthetic oligonucleotide
uuguuauacuugguguuaa

SEQ ID NO: 2390941 - RNA, 19 nt, Artificial Sequence
  Description of Artificial Sequence: Synthetic oligonucleotide
auagcccaguugaucagac

SEQ ID NO: 2390942 - RNA, 19 nt, Artificial Sequence
  Description of Artificial Sequence: Synthetic oligonucleotide
uucuguuguuauacuuggu

SEQ ID NO: 2390943 - RNA, 19 nt, Artificial Sequence
  Description of Artificial Sequence: Synthetic oligonucleotide
aaagguucuuaaagcuuga

SEQ ID NO: 2390944 - RNA, 19 nt, Artificial Sequence
  Description of Artificial Sequence: Synthetic oligonucleotide
agcagcuuucuguuguuau

SEQ ID NO: 2390945 - RNA, 19 nt, Artificial Sequence
  Description of Artificial Sequence: Synthetic oligonucleotide
uaaucuucgcaugcuguuc

SEQ ID NO: 2390946 - RNA, 19 nt, Artificial Sequence
  Description of Artificial Sequence: Synthetic oligonucleotide
uugguguuaacagcagaaa

SEQ ID NO: 2390947 - RNA, 19 nt, Artificial Sequence
  Description of Artificial Sequence: Synthetic oligonucleotide
cauuaguuucucuacuucu

SEQ ID NO: 2390948 - RNA, 19 nt, Artificial Sequence
  Description of Artificial Sequence: Synthetic oligonucleotide
gaacccuuccgugucugag

SEQ ID NO: 2390949 - RNA, 19 nt, Artificial Sequence
  Description of Artificial Sequence: Synthetic oligonucleotide
aagcugagucuguaaguuu

SEQ ID NO: 2390950 - RNA, 19 nt, Artificial Sequence
  Description of Artificial Sequence: Synthetic oligonucleotide
aaggaacccuuccgugucu

SEQ ID NO: 2390951 - RNA, 19 nt, Artificial Sequence
  Description of Artificial Sequence: Synthetic oligonucleotide
cauguucguuuacuucacc

SEQ ID NO: 2390952 - RNA, 19 nt, Artificial Sequence
  Description of Artificial Sequence: Synthetic oligonucleotide
acggcuuugcugaagccag

SEQ ID NO: 2390953 - RNA, 19 nt, Artificial Sequence
  Description of Artificial Sequence: Synthetic oligonucleotide
agcgcgccgagcacgaagc

SEQ ID NO: 2390954 - RNA, 19 nt, Artificial Sequence
  Description of Artificial Sequence: Synthetic oligonucleotide
uucgcaugcuguucuuuuc

SEQ ID NO: 2390955 - RNA, 19 nt, Artificial Sequence
  Description of Artificial Sequence: Synthetic oligonucleotide
caacugcucucuaaauguc

SEQ ID NO: 2390956 - RNA, 19 nt, Artificial Sequence
  Description of Artificial Sequence: Synthetic oligonucleotide
ggcuugaaagcugagucug

SEQ ID NO: 2390957 - RNA, 19 nt, Artificial Sequence
  Description of Artificial Sequence: Synthetic oligonucleotide
ugcuggaaggugagcgcgc

SEQ ID NO: 2390958 - RNA, 19 nt, Artificial Sequence
  Description of Artificial Sequence: Synthetic oligonucleotide
gcggaauuuguaccaaccc

SEQ ID NO: 2390959 - RNA, 19 nt, Artificial Sequence
  Description of Artificial Sequence: Synthetic oligonucleotide
uccgugucugagucggugu

SEQ ID NO: 2390960 - RNA, 19 nt, Artificial Sequence
  Description of Artificial Sequence: Synthetic oligonucleotide
auccauuugugaaucagua

SEQ ID NO: 2390961 - RNA, 19 nt, Artificial Sequence
  Description of Artificial Sequence: Synthetic oligonucleotide
uucccagauuggacaacca

SEQ ID NO: 2390962 - RNA, 19 nt, Artificial Sequence
  Description of Artificial Sequence: Synthetic oligonucleotide
acgaagccggacagcaccc

SEQ ID NO: 2390963 - RNA, 19 nt, Artificial Sequence
  Description of Artificial Sequence: Synthetic oligonucleotide
accuccuuuaaugauccau

SEQ ID NO: 2390964 - RNA, 19 nt, Artificial Sequence
  Description of Artificial Sequence: Synthetic oligonucleotide
gcaacugcucucuaaaugu

SEQ ID NO: 2390965 - RNA, 19 nt, Artificial Sequence
  Description of Artificial Sequence: Synthetic oligonucleotide
ucugagugacggcggaauu

SEQ ID NO: 2390966 - RNA, 19 nt, Artificial Sequence
  Description of Artificial Sequence: Synthetic oligonucleotide
caccaaaggcacccuguag

SEQ ID NO: 2390967 - RNA, 19 nt, Artificial Sequence
  Description of Artificial Sequence: Synthetic oligonucleotide
cuucuuguauagcagcgua

SEQ ID NO: 2390968 - RNA, 19 nt, Artificial Sequence
  Description of Artificial Sequence: Synthetic oligonucleotide
ccuccuuuaaugauccauc

SEQ ID NO: 2390969 - RNA, 19 nt, Artificial Sequence
  Description of Artificial Sequence: Synthetic oligonucleotide
ucagugcauguucguuuac

SEQ ID NO: 2390970 - RNA, 19 nt, Artificial Sequence
  Description of Artificial Sequence: Synthetic oligonucleotide
ccagauuggacaaccacca

SEQ ID NO: 2390971 - RNA, 19 nt, Artificial Sequence
  Description of Artificial Sequence: Synthetic oligonucleotide
gagcgcgccgagcacgaag

SEQ ID NO: 2390972 - RNA, 19 nt, Artificial Sequence
  Description of Artificial Sequence: Synthetic oligonucleotide
uggcuucaccuuuuauuuc

SEQ ID NO: 2390973 - RNA, 19 nt, Artificial Sequence
  Description of Artificial Sequence: Synthetic oligonucleotide
cagacauucccagauugga

SEQ ID NO: 2390974 - RNA, 19 nt, Artificial Sequence
  Description of Artificial Sequence: Synthetic oligonucleotide
ggcagacucuguuuauagc

SEQ ID NO: 2390975 - RNA, 19 nt, Artificial Sequence
  Description of Artificial Sequence: Synthetic oligonucleotide
aguggauguacaggaggca

SEQ ID NO: 2390976 - RNA, 19 nt, Artificial Sequence
  Description of Artificial Sequence: Synthetic oligonucleotide
cauuugaaagaauuuucuu

SEQ ID NO: 2390977 - RNA, 19 nt, Artificial Sequence
  Description of Artificial Sequence: Synthetic oligonucleotide
ggcggaauuuguaccaacc

SEQ ID NO: 2390978 - RNA, 19 nt, Artificial Sequence
  Description of Artificial Sequence: Synthetic oligonucleotide
ggacagucuucucuccugc

SEQ ID NO: 2390979 - RNA, 19 nt, Artificial Sequence
  Description of Artificial Sequence: Synthetic oligonucleotide
aaacaaguucugggcuuga

SEQ ID NO: 2390980 - RNA, 19 nt, Artificial Sequence
  Description of Artificial Sequence: Synthetic oligonucleotide
gcuauucuuggcuucaccu

SEQ ID NO: 2390981 - RNA, 19 nt, Artificial Sequence
  Description of Artificial Sequence: Synthetic oligonucleotide
augcaccuccuuuaaugau

SEQ ID NO: 2390982 - RNA, 19 nt, Artificial Sequence
  Description of Artificial Sequence: Synthetic oligonucleotide
auagcagcguacauuucau

SEQ ID NO: 2390983 - RNA, 19 nt, Artificial Sequence
  Description of Artificial Sequence: Synthetic oligonucleotide
ccuuccgugucugagucgg

SEQ ID NO: 2390984 - RNA, 19 nt, Artificial Sequence
  Description of Artificial Sequence: Synthetic oligonucleotide
guaaguuucugugcagcaa

SEQ ID NO: 2390985 - RNA, 19 nt, Artificial Sequence
  Description of Artificial Sequence: Synthetic oligonucleotide
gucaugaucugaucugagu

SEQ ID NO: 2390986 - RNA, 19 nt, Artificial Sequence
  Description of Artificial Sequence: Synthetic oligonucleotide
caauuguauaaacaacuuu

SEQ ID NO: 2390987 - RNA, 19 nt, Artificial Sequence
  Description of Artificial Sequence: Synthetic oligonucleotide
augcuauucuuggcuucac

SEQ ID NO: 2390988 - RNA, 19 nt, Artificial Sequence
  Description of Artificial Sequence: Synthetic oligonucleotide
cuucaccugaagaauuaua

SEQ ID NO: 2390989 - RNA, 19 nt, Artificial Sequence
  Description of Artificial Sequence: Synthetic oligonucleotide
ccuuaauucuucuuguaua

SEQ ID NO: 2390990 - RNA, 19 nt, Artificial Sequence
  Description of Artificial Sequence: Synthetic oligonucleotide
gacaaccaccaaaggcacc

SEQ ID NO: 2390991 - RNA, 19 nt, Artificial Sequence
  Description of Artificial Sequence: Synthetic oligonucleotide
ucucacggcuuugcugaag

SEQ ID NO: 2390992 - RNA, 19 nt, Artificial Sequence
  Description of Artificial Sequence: Synthetic oligonucleotide
aggugagcgcgccgagcac

SEQ ID NO: 2390993 - RNA, 19 nt, Artificial Sequence
  Description of Artificial Sequence: Synthetic oligonucleotide
aucugagugacggcggaau

SEQ ID NO: 2390994 - RNA, 19 nt, Artificial Sequence
  Description of Artificial Sequence: Synthetic oligonucleotide
uagcccaguugaucagaca

SEQ ID NO: 2390995 - RNA, 19 nt, Artificial Sequence
  Description of Artificial Sequence: Synthetic oligonucleotide
gcguacauuucauuuuauc

SEQ ID NO: 2390996 - RNA, 19 nt, Artificial Sequence
  Description of Artificial Sequence: Synthetic oligonucleotide
gcauagacuccuuaauucu

SEQ ID NO: 2390997 - RNA, 19 nt, Artificial Sequence
  Description of Artificial Sequence: Synthetic oligonucleotide
cacaagaaugaaggacuuc

SEQ ID NO: 2390998 - RNA, 19 nt, Artificial Sequence
  Description of Artificial Sequence: Synthetic oligonucleotide
ggugagcgcgccgagcacg

SEQ ID NO: 2390999 - RNA, 19 nt, Artificial Sequence
  Description of Artificial Sequence: Synthetic oligonucleotide
acauuucauuuuaucuuau

SEQ ID NO: 2391000 - RNA, 19 nt, Artificial Sequence
  Description of Artificial Sequence: Synthetic oligonucleotide
accaacccaccacagucuu

SEQ ID NO: 2391001 - RNA, 19 nt, Artificial Sequence
  Description of Artificial Sequence: Synthetic oligonucleotide
cuggaaggugagcgcgccg

SEQ ID NO: 2391002 - RNA, 19 nt, Artificial Sequence
  Description of Artificial Sequence: Synthetic oligonucleotide
cagcguacauuucauuuua

SEQ ID NO: 2391003 - RNA, 19 nt, Artificial Sequence
  Description of Artificial Sequence: Synthetic oligonucleotide
ccaacguacucucacccuc

SEQ ID NO: 2391004 - RNA, 19 nt, Artificial Sequence
  Description of Artificial Sequence: Synthetic oligonucleotide
gcagcaacugcucucuaaa

SEQ ID NO: 2391005 - RNA, 19 nt, Artificial Sequence
  Description of Artificial Sequence: Synthetic oligonucleotide
ggacuucggacucuggaaa

SEQ ID NO: 2391006 - RNA, 19 nt, Artificial Sequence
  Description of Artificial Sequence: Synthetic oligonucleotide
cucguucacuuuguucaac

SEQ ID NO: 2391007 - RNA, 19 nt, Artificial Sequence
  Description of Artificial Sequence: Synthetic oligonucleotide
acuucucguucacuuuguu

SEQ ID NO: 2391008 - RNA, 19 nt, Artificial Sequence
  Description of Artificial Sequence: Synthetic oligonucleotide
cacggcuuugcugaagcca

SEQ ID NO: 2391009 - RNA, 19 nt, Artificial Sequence
  Description of Artificial Sequence: Synthetic oligonucleotide
gguuguuuuggacagucuu

SEQ ID NO: 2391010 - RNA, 19 nt, Artificial Sequence
  Description of Artificial Sequence: Synthetic oligonucleotide
cccaguugaucagacauuc

SEQ ID NO: 2391011 - RNA, 19 nt, Artificial Sequence
  Description of Artificial Sequence: Synthetic oligonucleotide
cugagucgguguugagaug

SEQ ID NO: 2391012 - RNA, 19 nt, Artificial Sequence
  Description of Artificial Sequence: Synthetic oligonucleotide
cuugaaagcugagucugua

SEQ ID NO: 2391013 - RNA, 19 nt, Artificial Sequence
  Description of Artificial Sequence: Synthetic oligonucleotide
agucgguguugagaugcug

SEQ ID NO: 2391014 - RNA, 19 nt, Artificial Sequence
  Description of Artificial Sequence: Synthetic oligonucleotide
uagcagcguacauuucauu

SEQ ID NO: 2391015 - RNA, 19 nt, Artificial Sequence
  Description of Artificial Sequence: Synthetic oligonucleotide
gcgccgagcacgaagccgg

SEQ ID NO: 2391016 - RNA, 19 nt, Artificial Sequence
  Description of Artificial Sequence: Synthetic oligonucleotide
ucuucgcaugcuguucuuu

SEQ ID NO: 2391017 - RNA, 19 nt, Artificial Sequence
  Description of Artificial Sequence: Synthetic oligonucleotide
cauagacuccuuaauucuu

SEQ ID NO: 2391018 - RNA, 19 nt, Artificial Sequence
  Description of Artificial Sequence: Synthetic oligonucleotide
ccccaacguacucucaccc

SEQ ID NO: 2391019 - RNA, 19 nt, Artificial Sequence
  Description of Artificial Sequence: Synthetic oligonucleotide
ggacaaccaccaaaggcac

SEQ ID NO: 2391020 - RNA, 19 nt, Artificial Sequence
  Description of Artificial Sequence: Synthetic oligonucleotide
ccaguugaucagacauucc

SEQ ID NO: 2391021 - RNA, 19 nt, Artificial Sequence
  Description of Artificial Sequence: Synthetic oligonucleotide
aggaacccuuccgugucug

SEQ ID NO: 2391022 - RNA, 19 nt, Artificial Sequence
  Description of Artificial Sequence: Synthetic oligonucleotide
agugacggcggaauuugua

SEQ ID NO: 2391023 - RNA, 19 nt, Artificial Sequence
  Description of Artificial Sequence: Synthetic oligonucleotide
cuauucuuggcuucaccuu

SEQ ID NO: 2391024 - RNA, 19 nt, Artificial Sequence
  Description of Artificial Sequence: Synthetic oligonucleotide
gaucagacauucccagauu

SEQ ID NO: 2391025 - RNA, 19 nt, Artificial Sequence
  Description of Artificial Sequence: Synthetic oligonucleotide
cugcugcuuuaaucuucgc

SEQ ID NO: 2391026 - RNA, 19 nt, Artificial Sequence
  Description of Artificial Sequence: Synthetic oligonucleotide
gggguuguuuuggacaguc

SEQ ID NO: 2391027 - RNA, 19 nt, Artificial Sequence
  Description of Artificial Sequence: Synthetic oligonucleotide
cuuguauagcagcguacau

SEQ ID NO: 2391028 - RNA, 19 nt, Artificial Sequence
  Description of Artificial Sequence: Synthetic oligonucleotide
guauagcagcguacauuuc

SEQ ID NO: 2391029 - RNA, 19 nt, Artificial Sequence
  Description of Artificial Sequence: Synthetic oligonucleotide
cguuuacuucaccugaaga

SEQ ID NO: 2391030 - RNA, 19 nt, Artificial Sequence
  Description of Artificial Sequence: Synthetic oligonucleotide
gcauguucguuuacuucac

SEQ ID NO: 2391031 - RNA, 19 nt, Artificial Sequence
  Description of Artificial Sequence: Synthetic oligonucleotide
agcguacauuucauuuuau

SEQ ID NO: 2391032 - RNA, 19 nt, Artificial Sequence
  Description of Artificial Sequence: Synthetic oligonucleotide
cgagcacgaagccggacag

SEQ ID NO: 2391033 - RNA, 19 nt, Artificial Sequence
  Description of Artificial Sequence: Synthetic oligonucleotide
cuucgcaugcuguucuuuu

SEQ ID NO: 2391034 - RNA, 19 nt, Artificial Sequence
  Description of Artificial Sequence: Synthetic oligonucleotide
agccgguaacauggaauau

SEQ ID NO: 2391035 - RNA, 19 nt, Artificial Sequence
  Description of Artificial Sequence: Synthetic oligonucleotide
gcuggaaggugagcgcgcc

SEQ ID NO: 2391036 - RNA, 19 nt, Artificial Sequence
  Description of Artificial Sequence: Synthetic oligonucleotide
cagauuggacaaccaccaa

SEQ ID NO: 2391037 - RNA, 19 nt, Artificial Sequence
  Description of Artificial Sequence: Synthetic oligonucleotide
cuuaugcaccuccuuuaau

SEQ ID NO: 2391038 - RNA, 19 nt, Artificial Sequence
  Description of Artificial Sequence: Synthetic oligonucleotide
gggcuugaaagcugagucu

SEQ ID NO: 2391039 - RNA, 19 nt, Artificial Sequence
  Description of Artificial Sequence: Synthetic oligonucleotide
acggcggaauuuguaccaa

SEQ ID NO: 2391040 - RNA, 19 nt, Artificial Sequence
  Description of Artificial Sequence: Synthetic oligonucleotide
gccgguaacauggaauaua

SEQ ID NO: 2391041 - RNA, 19 nt, Artificial Sequence
  Description of Artificial Sequence: Synthetic oligonucleotide
gcagcguacauuucauuuu

SEQ ID NO: 2391042 - RNA, 19 nt, Artificial Sequence
  Description of Artificial Sequence: Synthetic oligonucleotide
caacccaccacagucuuuu

SEQ ID NO: 2391043 - RNA, 19 nt, Artificial Sequence
  Description of Artificial Sequence: Synthetic oligonucleotide
ccgguaacauggaauauau

SEQ ID NO: 2391044 - RNA, 19 nt, Artificial Sequence
  Description of Artificial Sequence: Synthetic oligonucleotide
cagugcauguucguuuacu

SEQ ID NO: 2391045 - RNA, 19 nt, Artificial Sequence
  Description of Artificial Sequence: Synthetic oligonucleotide
gugaguggagcagcuuucu

SEQ ID NO: 2391046 - RNA, 19 nt, Artificial Sequence
  Description of Artificial Sequence: Synthetic oligonucleotide
ccgagcacgaagccggaca

SEQ ID NO: 2391047 - RNA, 19 nt, Artificial Sequence
  Description of Artificial Sequence: Synthetic oligonucleotide
ccagaaggaacccuuccgu

SEQ ID NO: 2391048 - RNA, 19 nt, Artificial Sequence
  Description of Artificial Sequence: Synthetic oligonucleotide
cuguguguucucacggcuu

SEQ ID NO: 2391049 - RNA, 19 nt, Artificial Sequence
  Description of Artificial Sequence: Synthetic oligonucleotide
cccuuccgugucugagucg

SEQ ID NO: 2391050 - RNA, 19 nt, Artificial Sequence
  Description of Artificial Sequence: Synthetic oligonucleotide
ggaacccuuccgugucuga

SEQ ID NO: 2391051 - RNA, 19 nt, Artificial Sequence
  Description of Artificial Sequence: Synthetic oligonucleotide
gugagcgcgccgagcacga

SEQ ID NO: 2391052 - RNA, 19 nt, Artificial Sequence
  Description of Artificial Sequence: Synthetic oligonucleotide
cagcaacugcucucuaaau

SEQ ID NO: 2391053 - RNA, 19 nt, Artificial Sequence
  Description of Artificial Sequence: Synthetic oligonucleotide
cugagugacggcggaauuu

SEQ ID NO: 2391054 - RNA, 19 nt, Artificial Sequence
  Description of Artificial Sequence: Synthetic oligonucleotide
gcucucuaaaugucaugau

SEQ ID NO: 2391055 - RNA, 19 nt, Artificial Sequence
  Description of Artificial Sequence: Synthetic oligonucleotide
gcugaagccaguggaugua

SEQ ID NO: 2391056 - RNA, 19 nt, Artificial Sequence
  Description of Artificial Sequence: Synthetic oligonucleotide
gagucgguguugagaugcu

SEQ ID NO: 2391057 - RNA, 19 nt, Artificial Sequence
  Description of Artificial Sequence: Synthetic oligonucleotide
gagugacggcggaauuugu

SEQ ID NO: 2391058 - RNA, 19 nt, Artificial Sequence
  Description of Artificial Sequence: Synthetic oligonucleotide
cgcgccgagcacgaagccg

SEQ ID NO: 2391059 - RNA, 19 nt, Artificial Sequence
  Description of Artificial Sequence: Synthetic oligonucleotide
cggcggaauuuguaccaac

SEQ ID NO: 2391060 - RNA, 19 nt, Artificial Sequence
  Description of Artificial Sequence: Synthetic oligonucleotide
ugagcgcgccgagcacgaa

SEQ ID NO: 2391061 - RNA, 19 nt, Artificial Sequence
  Description of Artificial Sequence: Synthetic oligonucleotide
gugcagcaacugcucucua

SEQ ID NO: 2391062 - RNA, 19 nt, Artificial Sequence
  Description of Artificial Sequence: Synthetic oligonucleotide
gcgcgccgagcacgaagcc

SEQ ID NO: 2391063 - RNA, 19 nt, Artificial Sequence
  Description of Artificial Sequence: Synthetic oligonucleotide
cccaacguacucucacccu

SEQ ID NO: 2391064 - RNA, 19 nt, Artificial Sequence
  Description of Artificial Sequence: Synthetic oligonucleotide
cuuccgugucugagucggu

SEQ ID NO: 2391065 - RNA, 19 nt, Artificial Sequence
  Description of Artificial Sequence: Synthetic oligonucleotide
ggguuguuuuggacagucu

SEQ ID NO: 2391066 - RNA, 19 nt, Artificial Sequence
  Description of Artificial Sequence: Synthetic oligonucleotide
cgaagccggacagcacccc

SEQ ID NO: 2391067 - RNA, 19 nt, Artificial Sequence
  Description of Artificial Sequence: Synthetic oligonucleotide
cgguguugagaugcuggaa

SEQ ID NO: 2391068 - RNA, 19 nt, Artificial Sequence
  Description of Artificial Sequence: Synthetic oligonucleotide
ccaacccaccacagucuuu

SEQ ID NO: 2391069 - RNA, 19 nt, Artificial Sequence
  Description of Artificial Sequence: Synthetic oligonucleotide
cgccgagcacgaagccgga

SEQ ID NO: 2391070 - RNA, 19 nt, Artificial Sequence
  Description of Artificial Sequence: Synthetic oligonucleotide
aauaaagacggauuuauuc

SEQ ID NO: 2391071 - RNA, 19 nt, Artificial Sequence
  Description of Artificial Sequence: Synthetic oligonucleotide
aauguuugcacccucccgc

SEQ ID NO: 2391072 - RNA, 19 nt, Artificial Sequence
  Description of Artificial Sequence: Synthetic oligonucleotide
uucaaaaguauuuugccgg

SEQ ID NO: 2391073 - RNA, 19 nt, Artificial Sequence
  Description of Artificial Sequence: Synthetic oligonucleotide
aacugcuggacuuaucagc

SEQ ID NO: 2391074 - RNA, 19 nt, Artificial Sequence
  Description of Artificial Sequence: Synthetic oligonucleotide
cuuauuuuccagaaguucc

SEQ ID NO: 2391075 - RNA, 19 nt, Artificial Sequence
  Description of Artificial Sequence: Synthetic oligonucleotide
uuuacuuguagguauaaga

SEQ ID NO: 2391076 - RNA, 19 nt, Artificial Sequence
  Description of Artificial Sequence: Synthetic oligonucleotide
aagaauuuccuaaccagcc

SEQ ID NO: 2391077 - RNA, 19 nt, Artificial Sequence
  Description of Artificial Sequence: Synthetic oligonucleotide
uuauucugcauccugaagu

SEQ ID NO: 2391078 - RNA, 19 nt, Artificial Sequence
  Description of Artificial Sequence: Synthetic oligonucleotide
aacauagagaccaccagcg

SEQ ID NO: 2391079 - RNA, 19 nt, Artificial Sequence
  Description of Artificial Sequence: Synthetic oligonucleotide
acuuguagguauaagaaac

SEQ ID NO: 2391080 - RNA, 19 nt, Artificial Sequence
  Description of Artificial Sequence: Synthetic oligonucleotide
acggauuuauucugcaucc

SEQ ID NO: 2391081 - RNA, 19 nt, Artificial Sequence
  Description of Artificial Sequence: Synthetic oligonucleotide
auaaagacggauuuauucu

SEQ ID NO: 2391082 - RNA, 19 nt, Artificial Sequence
  Description of Artificial Sequence: Synthetic oligonucleotide
aaugugagcuuccuccgac

SEQ ID NO: 2391083 - RNA, 19 nt, Artificial Sequence
  Description of Artificial Sequence: Synthetic oligonucleotide
agcguagucauccagcuuc

SEQ ID NO: 2391084 - RNA, 19 nt, Artificial Sequence
  Description of Artificial Sequence: Synthetic oligonucleotide
ucgaaugugagcuuccucc

SEQ ID NO: 2391085 - RNA, 19 nt, Artificial Sequence
  Description of Artificial Sequence: Synthetic oligonucleotide
aaaauaaagacggauuuau

SEQ ID NO: 2391086 - RNA, 19 nt, Artificial Sequence
  Description of Artificial Sequence: Synthetic oligonucleotide
uguagguauaagaaacugc

SEQ ID NO: 2391087 - RNA, 19 nt, Artificial Sequence
  Description of Artificial Sequence: Synthetic oligonucleotide
agguugaaauguuugcacc

SEQ ID NO: 2391088 - RNA, 19 nt, Artificial Sequence
  Description of Artificial Sequence: Synthetic oligonucleotide
auaaucucggucaacacgg

SEQ ID NO: 2391089 - RNA, 19 nt, Artificial Sequence
  Description of Artificial Sequence: Synthetic oligonucleotide
uauaagaaacugcuggacu

SEQ ID NO: 2391090 - RNA, 19 nt, Artificial Sequence
  Description of Artificial Sequence: Synthetic oligonucleotide
cuaacuacugucaccacag

SEQ ID NO: 2391091 - RNA, 19 nt, Artificial Sequence
  Description of Artificial Sequence: Synthetic oligonucleotide
agcgaucaaacuuuaguuc

SEQ ID NO: 2391092 - RNA, 19 nt, Artificial Sequence
  Description of Artificial Sequence: Synthetic oligonucleotide
aguuccauuuguccgcugc

SEQ ID NO: 2391093 - RNA, 19 nt, Artificial Sequence
  Description of Artificial Sequence: Synthetic oligonucleotide
aaagacggauuuauucugc

SEQ ID NO: 2391094 - RNA, 19 nt, Artificial Sequence
  Description of Artificial Sequence: Synthetic oligonucleotide
uuccuaaccagccauucgc

SEQ ID NO: 2391095 - RNA, 19 nt, Artificial Sequence
  Description of Artificial Sequence: Synthetic oligonucleotide
ucuaacuacugucaccaca

SEQ ID NO: 2391096 - RNA, 19 nt, Artificial Sequence
  Description of Artificial Sequence: Synthetic oligonucleotide
uaaagacggauuuauucug

SEQ ID NO: 2391097 - RNA, 19 nt, Artificial Sequence
  Description of Artificial Sequence: Synthetic oligonucleotide
cauagagaccaccagcgcg

SEQ ID NO: 2391098 - RNA, 19 nt, Artificial Sequence
  Description of Artificial Sequence: Synthetic oligonucleotide
aguauuuugccgguuuccc

SEQ ID NO: 2391099 - RNA, 19 nt, Artificial Sequence
  Description of Artificial Sequence: Synthetic oligonucleotide
aagcgaucaaacuuuaguu

SEQ ID NO: 2391100 - RNA, 19 nt, Artificial Sequence
  Description of Artificial Sequence: Synthetic oligonucleotide
acagaauccaacaucauga

SEQ ID NO: 2391101 - RNA, 19 nt, Artificial Sequence
  Description of Artificial Sequence: Synthetic oligonucleotide
aaaaguauuuugccgguuu

SEQ ID NO: 2391102 - RNA, 19 nt, Artificial Sequence
  Description of Artificial Sequence: Synthetic oligonucleotide
ugaaauguuugcacccucc

SEQ ID NO: 2391103 - RNA, 19 nt, Artificial Sequence
  Description of Artificial Sequence: Synthetic oligonucleotide
gaagaauuuccuaaccagc

SEQ ID NO: 2391104 - RNA, 19 nt, Artificial Sequence
  Description of Artificial Sequence: Synthetic oligonucleotide
gaacagaguacccacuggc

SEQ ID NO: 2391105 - RNA, 19 nt, Artificial Sequence
  Description of Artificial Sequence: Synthetic oligonucleotide
uugaaaggcagaagcguag

SEQ ID NO: 2391106 - RNA, 19 nt, Artificial Sequence
  Description of Artificial Sequence: Synthetic oligonucleotide
uuuccuaaccagccauucg

SEQ ID NO: 2391107 - RNA, 19 nt, Artificial Sequence
  Description of Artificial Sequence: Synthetic oligonucleotide
acaucaugaccuugaaagg

SEQ ID NO: 2391108 - RNA, 19 nt, Artificial Sequence
  Description of Artificial Sequence: Synthetic oligonucleotide
aaucucggucaacacggac

SEQ ID NO: 2391109 - RNA, 19 nt, Artificial Sequence
  Description of Artificial Sequence: Synthetic oligonucleotide
ugagaagcgaucaaacuuu

SEQ ID NO: 2391110 - RNA, 19 nt, Artificial Sequence
  Description of Artificial Sequence: Synthetic oligonucleotide
aacagaguacccacuggcc

SEQ ID NO: 2391111 - RNA, 19 nt, Artificial Sequence
  Description of Artificial Sequence: Synthetic oligonucleotide
uggcccaugagacuggcag

SEQ ID NO: 2391112 - RNA, 19 nt, Artificial Sequence
  Description of Artificial Sequence: Synthetic oligonucleotide
aacuacugucaccacagga

SEQ ID NO: 2391113 - RNA, 19 nt, Artificial Sequence
  Description of Artificial Sequence: Synthetic oligonucleotide
cagacuucagcacauaauc

SEQ ID NO: 2391114 - RNA, 19 nt, Artificial Sequence
  Description of Artificial Sequence: Synthetic oligonucleotide
augagcgugacuuuggaaa

SEQ ID NO: 2391115 - RNA, 19 nt, Artificial Sequence
  Description of Artificial Sequence: Synthetic oligonucleotide
ucggucaacacggacaaag

SEQ ID NO: 2391116 - RNA, 19 nt, Artificial Sequence
  Description of Artificial Sequence: Synthetic oligonucleotide
gacuucagcacauaaucuc

SEQ ID NO: 2391117 - RNA, 19 nt, Artificial Sequence
  Description of Artificial Sequence: Synthetic oligonucleotide
gacggauuuauucugcauc

SEQ ID NO: 2391118 - RNA, 19 nt, Artificial Sequence
  Description of Artificial Sequence: Synthetic oligonucleotide
agaagcguagucauccagc

SEQ ID NO: 2391119 - RNA, 19 nt, Artificial Sequence
  Description of Artificial Sequence: Synthetic oligonucleotide
cuuccuccgaccaaugagc

SEQ ID NO: 2391120 - RNA, 19 nt, Artificial Sequence
  Description of Artificial Sequence: Synthetic oligonucleotide
auaagaaacugcuggacuu

SEQ ID NO: 2391121 - RNA, 19 nt, Artificial Sequence
  Description of Artificial Sequence: Synthetic oligonucleotide
aaguccaccacuucuugau

SEQ ID NO: 2391122 - RNA, 19 nt, Artificial Sequence
  Description of Artificial Sequence: Synthetic oligonucleotide
uuguagguauaagaaacug

SEQ ID NO: 2391123 - RNA, 19 nt, Artificial Sequence
  Description of Artificial Sequence: Synthetic oligonucleotide
acuucagcacauaaucucg

SEQ ID NO: 2391124 - RNA, 19 nt, Artificial Sequence
  Description of Artificial Sequence: Synthetic oligonucleotide
caucaugaccuugaaaggc

SEQ ID NO: 2391125 - RNA, 19 nt, Artificial Sequence
  Description of Artificial Sequence: Synthetic oligonucleotide
ucaaaaguauuuugccggu

SEQ ID NO: 2391126 - RNA, 19 nt, Artificial Sequence
  Description of Artificial Sequence: Synthetic oligonucleotide
agguuguucagcauggcuc

SEQ ID NO: 2391127 - RNA, 19 nt, Artificial Sequence
  Description of Artificial Sequence: Synthetic oligonucleotide
ugcuggacuuaucagcccc

SEQ ID NO: 2391128 - RNA, 19 nt, Artificial Sequence
  Description of Artificial Sequence: Synthetic oligonucleotide
agccgaagaauuuccuaac

SEQ ID NO: 2391129 - RNA, 19 nt, Artificial Sequence
  Description of Artificial Sequence: Synthetic oligonucleotide
auagagaccaccagcgcgg

SEQ ID NO: 2391130 - RNA, 19 nt, Artificial Sequence
  Description of Artificial Sequence: Synthetic oligonucleotide
cacaguaggacucccggcc

SEQ ID NO: 2391131 - RNA, 19 nt, Artificial Sequence
  Description of Artificial Sequence: Synthetic oligonucleotide
uuccuccgaccaaugagcg

SEQ ID NO: 2391132 - RNA, 19 nt, Artificial Sequence
  Description of Artificial Sequence: Synthetic oligonucleotide
agagagccgaagaauuucc

SEQ ID NO: 2391133 - RNA, 19 nt, Artificial Sequence
  Description of Artificial Sequence: Synthetic oligonucleotide
aagacggauuuauucugca

SEQ ID NO: 2391134 - RNA, 19 nt, Artificial Sequence
  Description of Artificial Sequence: Synthetic oligonucleotide
acacaguaggacucccggc

SEQ ID NO: 2391135 - RNA, 19 nt, Artificial Sequence
  Description of Artificial Sequence: Synthetic oligonucleotide
acugagaagcgaucaaacu

SEQ ID NO: 2391136 - RNA, 19 nt, Artificial Sequence
  Description of Artificial Sequence: Synthetic oligonucleotide
cuucagcacauaaucucgg

SEQ ID NO: 2391137 - RNA, 19 nt, Artificial Sequence
  Description of Artificial Sequence: Synthetic oligonucleotide
gaagcgaucaaacuuuagu

SEQ ID NO: 2391138 - RNA, 19 nt, Artificial Sequence
  Description of Artificial Sequence: Synthetic oligonucleotide
ugcccaggcaacagaaucc

SEQ ID NO: 2391139 - RNA, 19 nt, Artificial Sequence
  Description of Artificial Sequence: Synthetic oligonucleotide
agaauuuccuaaccagcca

SEQ ID NO: 2391140 - RNA, 19 nt, Artificial Sequence
  Description of Artificial Sequence: Synthetic oligonucleotide
cacacaguaggacucccgg

SEQ ID NO: 2391141 - RNA, 19 nt, Artificial Sequence
  Description of Artificial Sequence: Synthetic oligonucleotide
auuuugccgguuuccccgc

SEQ ID NO: 2391142 - RNA, 19 nt, Artificial Sequence
  Description of Artificial Sequence: Synthetic oligonucleotide
ucacacaguaggacucccg

SEQ ID NO: 2391143 - RNA, 19 nt, Artificial Sequence
  Description of Artificial Sequence: Synthetic oligonucleotide
ucucggucaacacggacaa

SEQ ID NO: 2391144 - RNA, 19 nt, Artificial Sequence
  Description of Artificial Sequence: Synthetic oligonucleotide
auuuccuaaccagccauuc

SEQ ID NO: 2391145 - RNA, 19 nt, Artificial Sequence
  Description of Artificial Sequence: Synthetic oligonucleotide
auaagcuuccuccucgaau

SEQ ID NO: 2391146 - RNA, 19 nt, Artificial Sequence
  Description of Artificial Sequence: Synthetic oligonucleotide
ugugagcuuccuccgacca

SEQ ID NO: 2391147 - RNA, 19 nt, Artificial Sequence
  Description of Artificial Sequence: Synthetic oligonucleotide
uggaggauggccuuauuuu

SEQ ID NO: 2391148 - RNA, 19 nt, Artificial Sequence
  Description of Artificial Sequence: Synthetic oligonucleotide
augugagcuuccuccgacc

SEQ ID NO: 2391149 - RNA, 19 nt, Artificial Sequence
  Description of Artificial Sequence: Synthetic oligonucleotide
ggccgaaacacugagaagc

SEQ ID NO: 2391150 - RNA, 19 nt, Artificial Sequence
  Description of Artificial Sequence: Synthetic oligonucleotide
uccuaaccagccauucgcc

SEQ ID NO: 2391151 - RNA, 19 nt, Artificial Sequence
  Description of Artificial Sequence: Synthetic oligonucleotide
gcgcccaaaauaaagacgg

SEQ ID NO: 2391152 - RNA, 19 nt, Artificial Sequence
  Description of Artificial Sequence: Synthetic oligonucleotide
aaugagcgugacuuuggaa

SEQ ID NO: 2391153 - RNA, 19 nt, Artificial Sequence
  Description of Artificial Sequence: Synthetic oligonucleotide
caucucuccacaugcggcc

SEQ ID NO: 2391154 - RNA, 19 nt, Artificial Sequence
  Description of Artificial Sequence: Synthetic oligonucleotide
cacugagaagcgaucaaac

SEQ ID NO: 2391155 - RNA, 19 nt, Artificial Sequence
  Description of Artificial Sequence: Synthetic oligonucleotide
auucgccuggacgagacuc

SEQ ID NO: 2391156 - RNA, 19 nt, Artificial Sequence
  Description of Artificial Sequence: Synthetic oligonucleotide
cuuugaggacagcagguug

SEQ ID NO: 2391157 - RNA, 19 nt, Artificial Sequence
  Description of Artificial Sequence: Synthetic oligonucleotide
gaagcuucggcagagccuc

SEQ ID NO: 2391158 - RNA, 19 nt, Artificial Sequence
  Description of Artificial Sequence: Synthetic oligonucleotide
acaguaggacucccggccg

SEQ ID NO: 2391159 - RNA, 19 nt, Artificial Sequence
  Description of Artificial Sequence: Synthetic oligonucleotide
uuauaagcuuccuccucga

SEQ ID NO: 2391160 - RNA, 19 nt, Artificial Sequence
  Description of Artificial Sequence: Synthetic oligonucleotide
ucccuuuacuuguagguau

SEQ ID NO: 2391161 - RNA, 19 nt, Artificial Sequence
  Description of Artificial Sequence: Synthetic oligonucleotide
uaacuacugucaccacagg

SEQ ID NO: 2391162 - RNA, 19 nt, Artificial Sequence
  Description of Artificial Sequence: Synthetic oligonucleotide
cagcacauaaucucgguca

SEQ ID NO: 2391163 - RNA, 19 nt, Artificial Sequence
  Description of Artificial Sequence: Synthetic oligonucleotide
auccgcuccagcuuuccuc

SEQ ID NO: 2391164 - RNA, 19 nt, Artificial Sequence
  Description of Artificial Sequence: Synthetic oligonucleotide
ggaaaacagguucuguccc

SEQ ID NO: 2391165 - RNA, 19 nt, Artificial Sequence
  Description of Artificial Sequence: Synthetic oligonucleotide
caugagacuggcagagagc

SEQ ID NO: 2391166 - RNA, 19 nt, Artificial Sequence
  Description of Artificial Sequence: Synthetic oligonucleotide
gauggccuuauuuuccaga

SEQ ID NO: 2391167 - RNA, 19 nt, Artificial Sequence
  Description of Artificial Sequence: Synthetic oligonucleotide
ucuucccgaagcuucggca

SEQ ID NO: 2391168 - RNA, 19 nt, Artificial Sequence
  Description of Artificial Sequence: Synthetic oligonucleotide
guauuuugccgguuucccc

SEQ ID NO: 2391169 - RNA, 19 nt, Artificial Sequence
  Description of Artificial Sequence: Synthetic oligonucleotide
guauaagaaacugcuggac

SEQ ID NO: 2391170 - RNA, 19 nt, Artificial Sequence
  Description of Artificial Sequence: Synthetic oligonucleotide
cuucccgaagcuucggcag

SEQ ID NO: 2391171 - RNA, 19 nt, Artificial Sequence
  Description of Artificial Sequence: Synthetic oligonucleotide
gagccgaagaauuuccuaa

SEQ ID NO: 2391172 - RNA, 19 nt, Artificial Sequence
  Description of Artificial Sequence: Synthetic oligonucleotide
ugagcgugacuuuggaaaa

SEQ ID NO: 2391173 - RNA, 19 nt, Artificial Sequence
  Description of Artificial Sequence: Synthetic oligonucleotide
uacugucaccacaggaaca

SEQ ID NO: 2391174 - RNA, 19 nt, Artificial Sequence
  Description of Artificial Sequence: Synthetic oligonucleotide
acacggacaaagccauccg

SEQ ID NO: 2391175 - RNA, 19 nt, Artificial Sequence
  Description of Artificial Sequence: Synthetic oligonucleotide
accuugaaaggcagaagcg

SEQ ID NO: 2391176 - RNA, 19 nt, Artificial Sequence
  Description of Artificial Sequence: Synthetic oligonucleotide
acuacugucaccacaggaa

SEQ ID NO: 2391177 - RNA, 19 nt, Artificial Sequence
  Description of Artificial Sequence: Synthetic oligonucleotide
aauccaacaucaugaccuu

SEQ ID NO: 2391178 - RNA, 19 nt, Artificial Sequence
  Description of Artificial Sequence: Synthetic oligonucleotide
ugcagacuucagcacauaa

SEQ ID NO: 2391179 - RNA, 19 nt, Artificial Sequence
  Description of Artificial Sequence: Synthetic oligonucleotide
cagaauccaacaucaugac

SEQ ID NO: 2391180 - RNA, 19 nt, Artificial Sequence
  Description of Artificial Sequence: Synthetic oligonucleotide
ugacuuuggaaaacagguu

SEQ ID NO: 2391181 - RNA, 19 nt, Artificial Sequence
  Description of Artificial Sequence: Synthetic oligonucleotide
uugaaauguuugcacccuc

SEQ ID NO: 2391182 - RNA, 19 nt, Artificial Sequence
  Description of Artificial Sequence: Synthetic oligonucleotide
gucaacacggacaaagcca

SEQ ID NO: 2391183 - RNA, 19 nt, Artificial Sequence
  Description of Artificial Sequence: Synthetic oligonucleotide
uggcgcccaaaauaaagac

SEQ ID NO: 2391184 - RNA, 19 nt, Artificial Sequence
  Description of Artificial Sequence: Synthetic oligonucleotide
uacccacuggcccaugaga

SEQ ID NO: 2391185 - RNA, 19 nt, Artificial Sequence
  Description of Artificial Sequence: Synthetic oligonucleotide
ggcagagccuccuuguccg

SEQ ID NO: 2391186 - RNA, 19 nt, Artificial Sequence
  Description of Artificial Sequence: Synthetic oligonucleotide
auggccuuauuuuccagaa

SEQ ID NO: 2391187 - RNA, 19 nt, Artificial Sequence
  Description of Artificial Sequence: Synthetic oligonucleotide
ggucaacacggacaaagcc

SEQ ID NO: 2391188 - RNA, 19 nt, Artificial Sequence
  Description of Artificial Sequence: Synthetic oligonucleotide
gcauccugaagucuucccg

SEQ ID NO: 2391189 - RNA, 19 nt, Artificial Sequence
  Description of Artificial Sequence: Synthetic oligonucleotide
uugccgguuuccccgcugg

SEQ ID NO: 2391190 - RNA, 19 nt, Artificial Sequence
  Description of Artificial Sequence: Synthetic oligonucleotide
cugucacacaguaggacuc

SEQ ID NO: 2391191 - RNA, 19 nt, Artificial Sequence
  Description of Artificial Sequence: Synthetic oligonucleotide
uccugaagucuucccgaag

SEQ ID NO: 2391192 - RNA, 19 nt, Artificial Sequence
  Description of Artificial Sequence: Synthetic oligonucleotide
aaauaaagacggauuuauu

SEQ ID NO: 2391193 - RNA, 19 nt, Artificial Sequence
  Description of Artificial Sequence: Synthetic oligonucleotide
accaaugagcgugacuuug

SEQ ID NO: 2391194 - RNA, 19 nt, Artificial Sequence
  Description of Artificial Sequence: Synthetic oligonucleotide
ggaacagaguacccacugg

SEQ ID NO: 2391195 - RNA, 19 nt, Artificial Sequence
  Description of Artificial Sequence: Synthetic oligonucleotide
ugaccuugaaaggcagaag

SEQ ID NO: 2391196 - RNA, 19 nt, Artificial Sequence
  Description of Artificial Sequence: Synthetic oligonucleotide
caugcuggggccagccccg

SEQ ID NO: 2391197 - RNA, 19 nt, Artificial Sequence
  Description of Artificial Sequence: Synthetic oligonucleotide
aucaugaccuugaaaggca

SEQ ID NO: 2391198 - RNA, 19 nt, Artificial Sequence
  Description of Artificial Sequence: Synthetic oligonucleotide
ucugcauccugaagucuuc

SEQ ID NO: 2391199 - RNA, 19 nt, Artificial Sequence
  Description of Artificial Sequence: Synthetic oligonucleotide
uccucgaaugugagcuucc

SEQ ID NO: 2391200 - RNA, 19 nt, Artificial Sequence
  Description of Artificial Sequence: Synthetic oligonucleotide
gaaacacugagaagcgauc

SEQ ID NO: 2391201 - RNA, 19 nt, Artificial Sequence
  Description of Artificial Sequence: Synthetic oligonucleotide
cuugaaaggcagaagcgua

SEQ ID NO: 2391202 - RNA, 19 nt, Artificial Sequence
  Description of Artificial Sequence: Synthetic oligonucleotide
uaggacucccggccgaaac

SEQ ID NO: 2391203 - RNA, 19 nt, Artificial Sequence
  Description of Artificial Sequence: Synthetic oligonucleotide
caccacaggaacagaguac

SEQ ID NO: 2391204 - RNA, 19 nt, Artificial Sequence
  Description of Artificial Sequence: Synthetic oligonucleotide
cacggacaaagccauccgc

SEQ ID NO: 2391205 - RNA, 19 nt, Artificial Sequence
  Description of Artificial Sequence: Synthetic oligonucleotide
uucggcagagccuccuugu

SEQ ID NO: 2391206 - RNA, 19 nt, Artificial Sequence
  Description of Artificial Sequence: Synthetic oligonucleotide
ggcaucucuccacaugcgg

SEQ ID NO: 2391207 - RNA, 19 nt, Artificial Sequence
  Description of Artificial Sequence: Synthetic oligonucleotide
ucccgcuuucgccagcucu

SEQ ID NO: 2391208 - RNA, 19 nt, Artificial Sequence
  Description of Artificial Sequence: Synthetic oligonucleotide
aucucggucaacacggaca

SEQ ID NO: 2391209 - RNA, 19 nt, Artificial Sequence
  Description of Artificial Sequence: Synthetic oligonucleotide
ugagcuuccuccgaccaau

SEQ ID NO: 2391210 - RNA, 19 nt, Artificial Sequence
  Description of Artificial Sequence: Synthetic oligonucleotide
gaagcguagucauccagcu

SEQ ID NO: 2391211 - RNA, 19 nt, Artificial Sequence
  Description of Artificial Sequence: Synthetic oligonucleotide
agcacauaaucucggucaa

SEQ ID NO: 2391212 - RNA, 19 nt, Artificial Sequence
  Description of Artificial Sequence: Synthetic oligonucleotide
cagaagcguagucauccag

SEQ ID NO: 2391213 - RNA, 19 nt, Artificial Sequence
  Description of Artificial Sequence: Synthetic oligonucleotide
aagcuuccuccucgaaugu

SEQ ID NO: 2391214 - RNA, 19 nt, Artificial Sequence
  Description of Artificial Sequence: Synthetic oligonucleotide
cauccugaagucuucccga

SEQ ID NO: 2391215 - RNA, 19 nt, Artificial Sequence
  Description of Artificial Sequence: Synthetic oligonucleotide
agagccgaagaauuuccua

SEQ ID NO: 2391216 - RNA, 19 nt, Artificial Sequence
  Description of Artificial Sequence: Synthetic oligonucleotide
uaaucucggucaacacgga

SEQ ID NO: 2391217 - RNA, 19 nt, Artificial Sequence
  Description of Artificial Sequence: Synthetic oligonucleotide
gugcccaggcaacagaauc

SEQ ID NO: 2391218 - RNA, 19 nt, Artificial Sequence
  Description of Artificial Sequence: Synthetic oligonucleotide
aucucuccacaugcggccc

SEQ ID NO: 2391219 - RNA, 19 nt, Artificial Sequence
  Description of Artificial Sequence: Synthetic oligonucleotide
cagcuugggcacaucacug

SEQ ID NO: 2391220 - RNA, 19 nt, Artificial Sequence
  Description of Artificial Sequence: Synthetic oligonucleotide
cgugacuuuggaaaacagg

SEQ ID NO: 2391221 - RNA, 19 nt, Artificial Sequence
  Description of Artificial Sequence: Synthetic oligonucleotide
auggcucuaacuacuguca

SEQ ID NO: 2391222 - RNA, 19 nt, Artificial Sequence
  Description of Artificial Sequence: Synthetic oligonucleotide
agacuucagcacauaaucu

SEQ ID NO: 2391223 - RNA, 19 nt, Artificial Sequence
  Description of Artificial Sequence: Synthetic oligonucleotide
ccaggauuucuuucaaaag

SEQ ID NO: 2391224 - RNA, 19 nt, Artificial Sequence
  Description of Artificial Sequence: Synthetic oligonucleotide
uucgccuggacgagacucu

SEQ ID NO: 2391225 - RNA, 19 nt, Artificial Sequence
  Description of Artificial Sequence: Synthetic oligonucleotide
gcugggacucaccagguug

SEQ ID NO: 2391226 - RNA, 19 nt, Artificial Sequence
  Description of Artificial Sequence: Synthetic oligonucleotide
cucguccccacgcugcugc

SEQ ID NO: 2391227 - RNA, 19 nt, Artificial Sequence
  Description of Artificial Sequence: Synthetic oligonucleotide
cagccauucgccuggacga

SEQ ID NO: 2391228 - RNA, 19 nt, Artificial Sequence
  Description of Artificial Sequence: Synthetic oligonucleotide
gaaugugagcuuccuccga

SEQ ID NO: 2391229 - RNA, 19 nt, Artificial Sequence
  Description of Artificial Sequence: Synthetic oligonucleotide
ggcgcccaaaauaaagacg

SEQ ID NO: 2391230 - RNA, 19 nt, Artificial Sequence
  Description of Artificial Sequence: Synthetic oligonucleotide
ccaugagacuggcagagag

SEQ ID NO: 2391231 - RNA, 19 nt, Artificial Sequence
  Description of Artificial Sequence: Synthetic oligonucleotide
auguuugcacccucccgcu

SEQ ID NO: 2391232 - RNA, 19 nt, Artificial Sequence
  Description of Artificial Sequence: Synthetic oligonucleotide
cuuguagguauaagaaacu

SEQ ID NO: 2391233 - RNA, 19 nt, Artificial Sequence
  Description of Artificial Sequence: Synthetic oligonucleotide
ggaggauggccuuauuuuc

SEQ ID NO: 2391234 - RNA, 19 nt, Artificial Sequence
  Description of Artificial Sequence: Synthetic oligonucleotide
ucccaccgcgccuagcgcc

SEQ ID NO: 2391235 - RNA, 19 nt, Artificial Sequence
  Description of Artificial Sequence: Synthetic oligonucleotide
gcucuaacuacugucacca

SEQ ID NO: 2391236 - RNA, 19 nt, Artificial Sequence
  Description of Artificial Sequence: Synthetic oligonucleotide
aagccauccgcuccagcuu

SEQ ID NO: 2391237 - RNA, 19 nt, Artificial Sequence
  Description of Artificial Sequence: Synthetic oligonucleotide
agacggauuuauucugcau

SEQ ID NO: 2391238 - RNA, 19 nt, Artificial Sequence
  Description of Artificial Sequence: Synthetic oligonucleotide
aauuuccuaaccagccauu

SEQ ID NO: 2391239 - RNA, 19 nt, Artificial Sequence
  Description of Artificial Sequence: Synthetic oligonucleotide
ucuucaaccuuggcuucca

SEQ ID NO: 2391240 - RNA, 19 nt, Artificial Sequence
  Description of Artificial Sequence: Synthetic oligonucleotide
agcgugacuuuggaaaaca

SEQ ID NO: 2391241 - RNA, 19 nt, Artificial Sequence
  Description of Artificial Sequence: Synthetic oligonucleotide
ggccuuauuuuccagaagu

SEQ ID NO: 2391242 - RNA, 19 nt, Artificial Sequence
  Description of Artificial Sequence: Synthetic oligonucleotide
cucugcagacuucagcaca

SEQ ID NO: 2391243 - RNA, 19 nt, Artificial Sequence
  Description of Artificial Sequence: Synthetic oligonucleotide
gcuuucgccagcucugcag

SEQ ID NO: 2391244 - RNA, 19 nt, Artificial Sequence
  Description of Artificial Sequence: Synthetic oligonucleotide
ccaaugagcgugacuuugg

SEQ ID NO: 2391245 - RNA, 19 nt, Artificial Sequence
  Description of Artificial Sequence: Synthetic oligonucleotide
ggcucuaacuacugucacc

SEQ ID NO: 2391246 - RNA, 19 nt, Artificial Sequence
  Description of Artificial Sequence: Synthetic oligonucleotide
aggcaacagaauccaacau

SEQ ID NO: 2391247 - RNA, 19 nt, Artificial Sequence
  Description of Artificial Sequence: Synthetic oligonucleotide
ugcacccucccgcuuucgc

SEQ ID NO: 2391248 - RNA, 19 nt, Artificial Sequence
  Description of Artificial Sequence: Synthetic oligonucleotide
acacugagaagcgaucaaa

SEQ ID NO: 2391249 - RNA, 19 nt, Artificial Sequence
  Description of Artificial Sequence: Synthetic oligonucleotide
aggacucccggccgaaaca

SEQ ID NO: 2391250 - RNA, 19 nt, Artificial Sequence
  Description of Artificial Sequence: Synthetic oligonucleotide
aguacccacuggcccauga

SEQ ID NO: 2391251 - RNA, 19 nt, Artificial Sequence
  Description of Artificial Sequence: Synthetic oligonucleotide
uuuguccgcugcugggacu

SEQ ID NO: 2391252 - RNA, 19 nt, Artificial Sequence
  Description of Artificial Sequence: Synthetic oligonucleotide
gccgaagaauuuccuaacc

SEQ ID NO: 2391253 - RNA, 19 nt, Artificial Sequence
  Description of Artificial Sequence: Synthetic oligonucleotide
cagaguacccacuggccca

SEQ ID NO: 2391254 - RNA, 19 nt, Artificial Sequence
  Description of Artificial Sequence: Synthetic oligonucleotide
uuugcacccucccgcuuuc

SEQ ID NO: 2391255 - RNA, 19 nt, Artificial Sequence
  Description of Artificial Sequence: Synthetic oligonucleotide
cuucggcagagccuccuug

SEQ ID NO: 2391256 - RNA, 19 nt, Artificial Sequence
  Description of Artificial Sequence: Synthetic oligonucleotide
gcuggcgcccaaaauaaag

SEQ ID NO: 2391257 - RNA, 19 nt, Artificial Sequence
  Description of Artificial Sequence: Synthetic oligonucleotide
agaagcgaucaaacuuuag

SEQ ID NO: 2391258 - RNA, 19 nt, Artificial Sequence
  Description of Artificial Sequence: Synthetic oligonucleotide
aaguuccauuuguccgcug

SEQ ID NO: 2391259 - RNA, 19 nt, Artificial Sequence
  Description of Artificial Sequence: Synthetic oligonucleotide
gccuggacgagacucuugc

SEQ ID NO: 2391260 - RNA, 19 nt, Artificial Sequence
  Description of Artificial Sequence: Synthetic oligonucleotide
gcucccaccgcgccuagcg

SEQ ID NO: 2391261 - RNA, 19 nt, Artificial Sequence
  Description of Artificial Sequence: Synthetic oligonucleotide
cacaggaacagaguaccca

SEQ ID NO: 2391262 - RNA, 19 nt, Artificial Sequence
  Description of Artificial Sequence: Synthetic oligonucleotide
ucgccagcucugcagacuu

SEQ ID NO: 2391263 - RNA, 19 nt, Artificial Sequence
  Description of Artificial Sequence: Synthetic oligonucleotide
uuucgccagcucugcagac

SEQ ID NO: 2391264 - RNA, 19 nt, Artificial Sequence
  Description of Artificial Sequence: Synthetic oligonucleotide
cucgaaugugagcuuccuc

SEQ ID NO: 2391265 - RNA, 19 nt, Artificial Sequence
  Description of Artificial Sequence: Synthetic oligonucleotide
gucuuuccccagguggagg

SEQ ID NO: 2391266 - RNA, 19 nt, Artificial Sequence
  Description of Artificial Sequence: Synthetic oligonucleotide
caugcggccccgcagucuc

SEQ ID NO: 2391267 - RNA, 19 nt, Artificial Sequence
  Description of Artificial Sequence: Synthetic oligonucleotide
gcgccuagcgccgagaggc

SEQ ID NO: 2391268 - RNA, 19 nt, Artificial Sequence
  Description of Artificial Sequence: Synthetic oligonucleotide
ucccgaagcuucggcagag

SEQ ID NO: 2391269 - RNA, 19 nt, Artificial Sequence
  Description of Artificial Sequence: Synthetic oligonucleotide
ucccaggauuucuuucaaa

SEQ ID NO: 2391270 - RNA, 19 nt, Artificial Sequence
  Description of Artificial Sequence: Synthetic oligonucleotide
gacucuugccugucacaca

SEQ ID NO: 2391271 - RNA, 19 nt, Artificial Sequence
  Description of Artificial Sequence: Synthetic oligonucleotide
ccauuuguccgcugcuggg

SEQ ID NO: 2391272 - RNA, 19 nt, Artificial Sequence
  Description of Artificial Sequence: Synthetic oligonucleotide
ccccuuugaggacagcagg

SEQ ID NO: 2391273 - RNA, 19 nt, Artificial Sequence
  Description of Artificial Sequence: Synthetic oligonucleotide
caaugagcgugacuuugga

SEQ ID NO: 2391274 - RNA, 19 nt, Artificial Sequence
  Description of Artificial Sequence: Synthetic oligonucleotide
ccuccgaccaaugagcgug

SEQ ID NO: 2391275 - RNA, 19 nt, Artificial Sequence
  Description of Artificial Sequence: Synthetic oligonucleotide
gccgaaacacugagaagcg

SEQ ID NO: 2391276 - RNA, 19 nt, Artificial Sequence
  Description of Artificial Sequence: Synthetic oligonucleotide
cgaaugugagcuuccuccg

SEQ ID NO: 2391277 - RNA, 19 nt, Artificial Sequence
  Description of Artificial Sequence: Synthetic oligonucleotide
uucgccagcucugcagacu

SEQ ID NO: 2391278 - RNA, 19 nt, Artificial Sequence
  Description of Artificial Sequence: Synthetic oligonucleotide
cucuaacuacugucaccac

SEQ ID NO: 2391279 - RNA, 19 nt, Artificial Sequence
  Description of Artificial Sequence: Synthetic oligonucleotide
guugaaauguuugcacccu

SEQ ID NO: 2391280 - RNA, 19 nt, Artificial Sequence
  Description of Artificial Sequence: Synthetic oligonucleotide
ucggcagagccuccuuguc

SEQ ID NO: 2391281 - RNA, 19 nt, Artificial Sequence
  Description of Artificial Sequence: Synthetic oligonucleotide
agcauggcucuaacuacug

SEQ ID NO: 2391282 - RNA, 19 nt, Artificial Sequence
  Description of Artificial Sequence: Synthetic oligonucleotide
cuggacgagacucuugccu

SEQ ID NO: 2391283 - RNA, 19 nt, Artificial Sequence
  Description of Artificial Sequence: Synthetic oligonucleotide
gagcgugacuuuggaaaac

SEQ ID NO: 2391284 - RNA, 19 nt, Artificial Sequence
  Description of Artificial Sequence: Synthetic oligonucleotide
uccuccgaccaaugagcgu

SEQ ID NO: 2391285 - RNA, 19 nt, Artificial Sequence
  Description of Artificial Sequence: Synthetic oligonucleotide
gcaucucuccacaugcggc

SEQ ID NO: 2391286 - RNA, 19 nt, Artificial Sequence
  Description of Artificial Sequence: Synthetic oligonucleotide
cuccucgaaugugagcuuc

SEQ ID NO: 2391287 - RNA, 19 nt, Artificial Sequence
  Description of Artificial Sequence: Synthetic oligonucleotide
acgagacucuugccuguca

SEQ ID NO: 2391288 - RNA, 19 nt, Artificial Sequence
  Description of Artificial Sequence: Synthetic oligonucleotide
cccaggauuucuuucaaaa

SEQ ID NO: 2391289 - RNA, 19 nt, Artificial Sequence
  Description of Artificial Sequence: Synthetic oligonucleotide
aguccaccacuucuugauu

SEQ ID NO: 2391290 - RNA, 19 nt, Artificial Sequence
  Description of Artificial Sequence: Synthetic oligonucleotide
auccaacaucaugaccuug

SEQ ID NO: 2391291 - RNA, 19 nt, Artificial Sequence
  Description of Artificial Sequence: Synthetic oligonucleotide
acuucuugauucacauuuu

SEQ ID NO: 2391292 - RNA, 19 nt, Artificial Sequence
  Description of Artificial Sequence: Synthetic oligonucleotide
uagagaccaccagcgcggc

SEQ ID NO: 2391293 - RNA, 19 nt, Artificial Sequence
  Description of Artificial Sequence: Synthetic oligonucleotide
agcuuccuccucgaaugug

SEQ ID NO: 2391294 - RNA, 19 nt, Artificial Sequence
  Description of Artificial Sequence: Synthetic oligonucleotide
gcacaucacugucuuuccc

SEQ ID NO: 2391295 - RNA, 19 nt, Artificial Sequence
  Description of Artificial Sequence: Synthetic oligonucleotide
caaccuuggcuuccaccuc

SEQ ID NO: 2391296 - RNA, 19 nt, Artificial Sequence
  Description of Artificial Sequence: Synthetic oligonucleotide
cuucaaccuuggcuuccac

SEQ ID NO: 2391297 - RNA, 19 nt, Artificial Sequence
  Description of Artificial Sequence: Synthetic oligonucleotide
cacccucccgcuuucgcca

SEQ ID NO: 2391298 - RNA, 19 nt, Artificial Sequence
  Description of Artificial Sequence: Synthetic oligonucleotide
gagaagcgaucaaacuuua

SEQ ID NO: 2391299 - RNA, 19 nt, Artificial Sequence
  Description of Artificial Sequence: Synthetic oligonucleotide
cuuguccgccaugcugggg

SEQ ID NO: 2391300 - RNA, 19 nt, Artificial Sequence
  Description of Artificial Sequence: Synthetic oligonucleotide
gaaguuccauuuguccgcu

SEQ ID NO: 2391301 - RNA, 19 nt, Artificial Sequence
  Description of Artificial Sequence: Synthetic oligonucleotide
agccauucgccuggacgag

SEQ ID NO: 2391302 - RNA, 19 nt, Artificial Sequence
  Description of Artificial Sequence: Synthetic oligonucleotide
ugguggugcccaggcaaca

SEQ ID NO: 2391303 - RNA, 19 nt, Artificial Sequence
  Description of Artificial Sequence: Synthetic oligonucleotide
ccauucgccuggacgagac

SEQ ID NO: 2391304 - RNA, 19 nt, Artificial Sequence
  Description of Artificial Sequence: Synthetic oligonucleotide
cuagcgccgagaggccagg

SEQ ID NO: 2391305 - RNA, 19 nt, Artificial Sequence
  Description of Artificial Sequence: Synthetic oligonucleotide
ugaggacagcagguugaaa

SEQ ID NO: 2391306 - RNA, 19 nt, Artificial Sequence
  Description of Artificial Sequence: Synthetic oligonucleotide
gcacccucccgcuuucgcc

SEQ ID NO: 2391307 - RNA, 19 nt, Artificial Sequence
  Description of Artificial Sequence: Synthetic oligonucleotide
gacgagacucuugccuguc

SEQ ID NO: 2391308 - RNA, 19 nt, Artificial Sequence
  Description of Artificial Sequence: Synthetic oligonucleotide
ccgguuuccccgcuggcgc

SEQ ID NO: 2391309 - RNA, 19 nt, Artificial Sequence
  Description of Artificial Sequence: Synthetic oligonucleotide
cugaagucuucccgaagcu

SEQ ID NO: 2391310 - RNA, 19 nt, Artificial Sequence
  Description of Artificial Sequence: Synthetic oligonucleotide
gguggugcccaggcaacag

SEQ ID NO: 2391311 - RNA, 19 nt, Artificial Sequence
  Description of Artificial Sequence: Synthetic oligonucleotide
ccggccgaaacacugagaa

SEQ ID NO: 2391312 - RNA, 19 nt, Artificial Sequence
  Description of Artificial Sequence: Synthetic oligonucleotide
caacacggacaaagccauc

SEQ ID NO: 2391313 - RNA, 19 nt, Artificial Sequence
  Description of Artificial Sequence: Synthetic oligonucleotide
uugcacccucccgcuuucg

SEQ ID NO: 2391314 - RNA, 19 nt, Artificial Sequence
  Description of Artificial Sequence: Synthetic oligonucleotide
agaguacccacuggcccau

SEQ ID NO: 2391315 - RNA, 19 nt, Artificial Sequence
  Description of Artificial Sequence: Synthetic oligonucleotide
acccucccgcuuucgccag

SEQ ID NO: 2391316 - RNA, 19 nt, Artificial Sequence
  Description of Artificial Sequence: Synthetic oligonucleotide
cagguuguucagcauggcu

SEQ ID NO: 2391317 - RNA, 19 nt, Artificial Sequence
  Description of Artificial Sequence: Synthetic oligonucleotide
agagaccaccagcgcggcu

SEQ ID NO: 2391318 - RNA, 19 nt, Artificial Sequence
  Description of Artificial Sequence: Synthetic oligonucleotide
cucccuuuacuuguaggua

SEQ ID NO: 2391319 - RNA, 19 nt, Artificial Sequence
  Description of Artificial Sequence: Synthetic oligonucleotide
cccgcuuucgccagcucug

SEQ ID NO: 2391320 - RNA, 19 nt, Artificial Sequence
  Description of Artificial Sequence: Synthetic oligonucleotide
gccgguuuccccgcuggcg

SEQ ID NO: 2391321 - RNA, 19 nt, Artificial Sequence
  Description of Artificial Sequence: Synthetic oligonucleotide
gcgugacuuuggaaaacag

SEQ ID NO: 2391322 - RNA, 19 nt, Artificial Sequence
  Description of Artificial Sequence: Synthetic oligonucleotide
guuugcacccucccgcuuu

SEQ ID NO: 2391323 - RNA, 19 nt, Artificial Sequence
  Description of Artificial Sequence: Synthetic oligonucleotide
aguaggacucccggccgaa

SEQ ID NO: 2391324 - RNA, 19 nt, Artificial Sequence
  Description of Artificial Sequence: Synthetic oligonucleotide
gagagccgaagaauuuccu

SEQ ID NO: 2391325 - RNA, 19 nt, Artificial Sequence
  Description of Artificial Sequence: Synthetic oligonucleotide
ccuagcgccgagaggccag

SEQ ID NO: 2391326 - RNA, 19 nt, Artificial Sequence
  Description of Artificial Sequence: Synthetic oligonucleotide
gugagcuuccuccgaccaa

SEQ ID NO: 2391327 - RNA, 19 nt, Artificial Sequence
  Description of Artificial Sequence: Synthetic oligonucleotide
ccuggacgagacucuugcc

SEQ ID NO: 2391328 - RNA, 19 nt, Artificial Sequence
  Description of Artificial Sequence: Synthetic oligonucleotide
agcuucggcagagccuccu

SEQ ID NO: 2391329 - RNA, 19 nt, Artificial Sequence
  Description of Artificial Sequence: Synthetic oligonucleotide
acaugcggccccgcagucu

SEQ ID NO: 2391330 - RNA, 19 nt, Artificial Sequence
  Description of Artificial Sequence: Synthetic oligonucleotide
caguaggacucccggccga

SEQ ID NO: 2391331 - RNA, 19 nt, Artificial Sequence
  Description of Artificial Sequence: Synthetic oligonucleotide
uccgaccaaugagcgugac

SEQ ID NO: 2391332 - RNA, 19 nt, Artificial Sequence
  Description of Artificial Sequence: Synthetic oligonucleotide
cacaugcggccccgcaguc

SEQ ID NO: 2391333 - RNA, 19 nt, Artificial Sequence
  Description of Artificial Sequence: Synthetic oligonucleotide
gcagaagcguagucaucca

SEQ ID NO: 2391334 - RNA, 19 nt, Artificial Sequence
  Description of Artificial Sequence: Synthetic oligonucleotide
cccgcagucuccccucccg

SEQ ID NO: 2391335 - RNA, 19 nt, Artificial Sequence
  Description of Artificial Sequence: Synthetic oligonucleotide
caggaacagaguacccacu

SEQ ID NO: 2391336 - RNA, 19 nt, Artificial Sequence
  Description of Artificial Sequence: Synthetic oligonucleotide
ucguccccacgcugcugca

SEQ ID NO: 2391337 - RNA, 19 nt, Artificial Sequence
  Description of Artificial Sequence: Synthetic oligonucleotide
ucuccacaugcggccccgc

SEQ ID NO: 2391338 - RNA, 19 nt, Artificial Sequence
  Description of Artificial Sequence: Synthetic oligonucleotide
ugggcacaucacugucuuu

SEQ ID NO: 2391339 - RNA, 19 nt, Artificial Sequence
  Description of Artificial Sequence: Synthetic oligonucleotide
cccacgcugcugcaggaac

SEQ ID NO: 2391340 - RNA, 19 nt, Artificial Sequence
  Description of Artificial Sequence: Synthetic oligonucleotide
gaccaaugagcgugacuuu

SEQ ID NO: 2391341 - RNA, 19 nt, Artificial Sequence
  Description of Artificial Sequence: Synthetic oligonucleotide
caacagaauccaacaucau

SEQ ID NO: 2391342 - RNA, 19 nt, Artificial Sequence
  Description of Artificial Sequence: Synthetic oligonucleotide
cggcagagccuccuugucc

SEQ ID NO: 2391343 - RNA, 19 nt, Artificial Sequence
  Description of Artificial Sequence: Synthetic oligonucleotide
gcccaggcaacagaaucca

SEQ ID NO: 2391344 - RNA, 19 nt, Artificial Sequence
  Description of Artificial Sequence: Synthetic oligonucleotide
gcccaaaauaaagacggau

SEQ ID NO: 2391345 - RNA, 19 nt, Artificial Sequence
  Description of Artificial Sequence: Synthetic oligonucleotide
cccgcuggcgcccaaaaua

SEQ ID NO: 2391346 - RNA, 19 nt, Artificial Sequence
  Description of Artificial Sequence: Synthetic oligonucleotide
gggccccucguccccacgc

SEQ ID NO: 2391347 - RNA, 19 nt, Artificial Sequence
  Description of Artificial Sequence: Synthetic oligonucleotide
ucgccuggacgagacucuu

SEQ ID NO: 2391348 - RNA, 19 nt, Artificial Sequence
  Description of Artificial Sequence: Synthetic oligonucleotide
ugggacucaccagguuguu

SEQ ID NO: 2391349 - RNA, 19 nt, Artificial Sequence
  Description of Artificial Sequence: Synthetic oligonucleotide
cgaaacacugagaagcgau

SEQ ID NO: 2391350 - RNA, 19 nt, Artificial Sequence
  Description of Artificial Sequence: Synthetic oligonucleotide
uagcgccgagaggccaggc

SEQ ID NO: 2391351 - RNA, 19 nt, Artificial Sequence
  Description of Artificial Sequence: Synthetic oligonucleotide
augcuggggccagccccgg

SEQ ID NO: 2391352 - RNA, 19 nt, Artificial Sequence
  Description of Artificial Sequence: Synthetic oligonucleotide
gguuuccccgcuggcgccc

SEQ ID NO: 2391353 - RNA, 19 nt, Artificial Sequence
  Description of Artificial Sequence: Synthetic oligonucleotide
ccaacaucaugaccuugaa

SEQ ID NO: 2391354 - RNA, 19 nt, Artificial Sequence
  Description of Artificial Sequence: Synthetic oligonucleotide
gggacucaccagguuguuc

SEQ ID NO: 2391355 - RNA, 19 nt, Artificial Sequence
  Description of Artificial Sequence: Synthetic oligonucleotide
ccgcuggcgcccaaaauaa

SEQ ID NO: 2391356 - RNA, 19 nt, Artificial Sequence
  Description of Artificial Sequence: Synthetic oligonucleotide
ccgcagucuccccucccgg

SEQ ID NO: 2391357 - RNA, 19 nt, Artificial Sequence
  Description of Artificial Sequence: Synthetic oligonucleotide
caaaaguauuuugccgguu

SEQ ID NO: 2391358 - RNA, 19 nt, Artificial Sequence
  Description of Artificial Sequence: Synthetic oligonucleotide
gucacagcuugggcacauc

SEQ ID NO: 2391359 - RNA, 19 nt, Artificial Sequence
  Description of Artificial Sequence: Synthetic oligonucleotide
ccacgcugcugcaggaaca

SEQ ID NO: 2391360 - RNA, 19 nt, Artificial Sequence
  Description of Artificial Sequence: Synthetic oligonucleotide
uuuccccgcuggcgcccaa

SEQ ID NO: 2391361 - RNA, 19 nt, Artificial Sequence
  Description of Artificial Sequence: Synthetic oligonucleotide
ccaccacuucuugauucac

SEQ ID NO: 2391362 - RNA, 19 nt, Artificial Sequence
  Description of Artificial Sequence: Synthetic oligonucleotide
agacuggcagagagccgaa

SEQ ID NO: 2391363 - RNA, 19 nt, Artificial Sequence
  Description of Artificial Sequence: Synthetic oligonucleotide
cccuuugaggacagcaggu

SEQ ID NO: 2391364 - RNA, 19 nt, Artificial Sequence
  Description of Artificial Sequence: Synthetic oligonucleotide
cccuuuacuuguagguaua

SEQ ID NO: 2391365 - RNA, 19 nt, Artificial Sequence
  Description of Artificial Sequence: Synthetic oligonucleotide
gcauggcucuaacuacugu

SEQ ID NO: 2391366 - RNA, 19 nt, Artificial Sequence
  Description of Artificial Sequence: Synthetic oligonucleotide
ccuaaccagccauucgccu

SEQ ID NO: 2391367 - RNA, 19 nt, Artificial Sequence
  Description of Artificial Sequence: Synthetic oligonucleotide
uuccccgcuggcgcccaaa

SEQ ID NO: 2391368 - RNA, 19 nt, Artificial Sequence
  Description of Artificial Sequence: Synthetic oligonucleotide
ccuuuacuuguagguauaa

SEQ ID NO: 2391369 - RNA, 19 nt, Artificial Sequence
  Description of Artificial Sequence: Synthetic oligonucleotide
ccauccgcuccagcuuucc

SEQ ID NO: 2391370 - RNA, 19 nt, Artificial Sequence
  Description of Artificial Sequence: Synthetic oligonucleotide
cggccgaaacacugagaag

SEQ ID NO: 2391371 - RNA, 19 nt, Artificial Sequence
  Description of Artificial Sequence: Synthetic oligonucleotide
accgcgccuagcgccgaga

SEQ ID NO: 2391372 - RNA, 19 nt, Artificial Sequence
  Description of Artificial Sequence: Synthetic oligonucleotide
caccgcgccuagcgccgag

SEQ ID NO: 2391373 - RNA, 19 nt, Artificial Sequence
  Description of Artificial Sequence: Synthetic oligonucleotide
ccgcgccuagcgccgagag

SEQ ID NO: 2391374 - RNA, 19 nt, Artificial Sequence
  Description of Artificial Sequence: Synthetic oligonucleotide
cauccgcuccagcuuuccu

SEQ ID NO: 2391375 - RNA, 19 nt, Artificial Sequence
  Description of Artificial Sequence: Synthetic oligonucleotide
cucccgcuuucgccagcuc

SEQ ID NO: 2391376 - RNA, 19 nt, Artificial Sequence
  Description of Artificial Sequence: Synthetic oligonucleotide
guuuccccgcuggcgccca

SEQ ID NO: 2391377 - RNA, 19 nt, Artificial Sequence
  Description of Artificial Sequence: Synthetic oligonucleotide
ccgaaacacugagaagcga

SEQ ID NO: 2391378 - RNA, 19 nt, Artificial Sequence
  Description of Artificial Sequence: Synthetic oligonucleotide
cauucgccuggacgagacu

SEQ ID NO: 2391379 - RNA, 19 nt, Artificial Sequence
  Description of Artificial Sequence: Synthetic oligonucleotide
gccauucgccuggacgaga

SEQ ID NO: 2391380 - RNA, 19 nt, Artificial Sequence
  Description of Artificial Sequence: Synthetic oligonucleotide
cgaagcuucggcagagccu

SEQ ID NO: 2391381 - RNA, 19 nt, Artificial Sequence
  Description of Artificial Sequence: Synthetic oligonucleotide
acgcugcugcaggaacaua

SEQ ID NO: 2391382 - RNA, 19 nt, Artificial Sequence
  Description of Artificial Sequence: Synthetic oligonucleotide
gccccgcagucuccccucc

SEQ ID NO: 2391383 - RNA, 19 nt, Artificial Sequence
  Description of Artificial Sequence: Synthetic oligonucleotide
cgcccaaaauaaagacgga

SEQ ID NO: 2391384 - RNA, 19 nt, Artificial Sequence
  Description of Artificial Sequence: Synthetic oligonucleotide
gccuagcgccgagaggcca

SEQ ID NO: 2391385 - RNA, 19 nt, Artificial Sequence
  Description of Artificial Sequence: Synthetic oligonucleotide
cgccgagaggccaggcauc

SEQ ID NO: 2391386 - RNA, 19 nt, Artificial Sequence
  Description of Artificial Sequence: Synthetic oligonucleotide
gcgcggcucccaccgcgcc

SEQ ID NO: 2391387 - RNA, 19 nt, Artificial Sequence
  Description of Artificial Sequence: Synthetic oligonucleotide
cucggucaacacggacaaa

SEQ ID NO: 2391388 - RNA, 19 nt, Artificial Sequence
  Description of Artificial Sequence: Synthetic oligonucleotide
cccggccgaaacacugaga

SEQ ID NO: 2391389 - RNA, 19 nt, Artificial Sequence
  Description of Artificial Sequence: Synthetic oligonucleotide
gccgagaggccaggcaucu

SEQ ID NO: 2391390 - RNA, 19 nt, Artificial Sequence
  Description of Artificial Sequence: Synthetic oligonucleotide
cgccuagcgccgagaggcc

SEQ ID NO: 2391391 - RNA, 19 nt, Artificial Sequence
  Description of Artificial Sequence: Synthetic oligonucleotide
ccuuugaggacagcagguu

SEQ ID NO: 2391392 - RNA, 19 nt, Artificial Sequence
  Description of Artificial Sequence: Synthetic oligonucleotide
ggugcccaggcaacagaau

SEQ ID NO: 2391393 - RNA, 19 nt, Artificial Sequence
  Description of Artificial Sequence: Synthetic oligonucleotide
gccauccgcuccagcuuuc

SEQ ID NO: 2391394 - RNA, 19 nt, Artificial Sequence
  Description of Artificial Sequence: Synthetic oligonucleotide
ccgaccaaugagcgugacu

SEQ ID NO: 2391395 - RNA, 19 nt, Artificial Sequence
  Description of Artificial Sequence: Synthetic oligonucleotide
ccucguccccacgcugcug

SEQ ID NO: 2391396 - RNA, 19 nt, Artificial Sequence
  Description of Artificial Sequence: Synthetic oligonucleotide
ccucgaaugugagcuuccu

SEQ ID NO: 2391397 - RNA, 19 nt, Artificial Sequence
  Description of Artificial Sequence: Synthetic oligonucleotide
gcuucggcagagccuccuu

SEQ ID NO: 2391398 - RNA, 19 nt, Artificial Sequence
  Description of Artificial Sequence: Synthetic oligonucleotide
cgcuuucgccagcucugca

SEQ ID NO: 2391399 - RNA, 19 nt, Artificial Sequence
  Description of Artificial Sequence: Synthetic oligonucleotide
cgcuggcgcccaaaauaaa

SEQ ID NO: 2391400 - RNA, 19 nt, Artificial Sequence
  Description of Artificial Sequence: Synthetic oligonucleotide
ccgggccccucguccccac

SEQ ID NO: 2391401 - RNA, 19 nt, Artificial Sequence
  Description of Artificial Sequence: Synthetic oligonucleotide
cgggccccucguccccacg

SEQ ID NO: 2391402 - RNA, 19 nt, Artificial Sequence
  Description of Artificial Sequence: Synthetic oligonucleotide
ccuccucgaaugugagcuu

SEQ ID NO: 2391403 - RNA, 19 nt, Artificial Sequence
  Description of Artificial Sequence: Synthetic oligonucleotide
ccucccgcuuucgccagcu

SEQ ID NO: 2391404 - RNA, 19 nt, Artificial Sequence
  Description of Artificial Sequence: Synthetic oligonucleotide
ccccacgcugcugcaggaa

SEQ ID NO: 2391405 - RNA, 19 nt, Artificial Sequence
  Description of Artificial Sequence: Synthetic oligonucleotide
ccaccgcgccuagcgccga

SEQ ID NO: 2391406 - RNA, 19 nt, Artificial Sequence
  Description of Artificial Sequence: Synthetic oligonucleotide
uuuucuuucacaauuaaga

SEQ ID NO: 2391407 - RNA, 19 nt, Artificial Sequence
  Description of Artificial Sequence: Synthetic oligonucleotide
aaauggaucaaccacuuuc

SEQ ID NO: 2391408 - RNA, 19 nt, Artificial Sequence
  Description of Artificial Sequence: Synthetic oligonucleotide
uuucuaauauugaacaucg

SEQ ID NO: 2391409 - RNA, 19 nt, Artificial Sequence
  Description of Artificial Sequence: Synthetic oligonucleotide
aauauugaacaucgcaggc

SEQ ID NO: 2391410 - RNA, 19 nt, Artificial Sequence
  Description of Artificial Sequence: Synthetic oligonucleotide
aauuuugguuccuugaguc

SEQ ID NO: 2391411 - RNA, 19 nt, Artificial Sequence
  Description of Artificial Sequence: Synthetic oligonucleotide
aauguuucuaauauugaac

SEQ ID NO: 2391412 - RNA, 19 nt, Artificial Sequence
  Description of Artificial Sequence: Synthetic oligonucleotide
ucuaauauugaacaucgca

SEQ ID NO: 2391413 - RNA, 19 nt, Artificial Sequence
  Description of Artificial Sequence: Synthetic oligonucleotide
cuaauauugaacaucgcag

SEQ ID NO: 2391414 - RNA, 19 nt, Artificial Sequence
  Description of Artificial Sequence: Synthetic oligonucleotide
uaauauugaacaucgcagg

SEQ ID NO: 2391415 - RNA, 19 nt, Artificial Sequence
  Description of Artificial Sequence: Synthetic oligonucleotide
guucauauccaucagcucg

SEQ ID NO: 2391416 - RNA, 19 nt, Artificial Sequence
  Description of Artificial Sequence: Synthetic oligonucleotide
aacacacgacccuugaggc

SEQ ID NO: 2391417 - RNA, 19 nt, Artificial Sequence
  Description of Artificial Sequence: Synthetic oligonucleotide
accacuuucuucuuggcgc

SEQ ID NO: 2391418 - RNA, 19 nt, Artificial Sequence
  Description of Artificial Sequence: Synthetic oligonucleotide
ucaguaauuagcuugaauu

SEQ ID NO: 2391419 - RNA, 19 nt, Artificial Sequence
  Description of Artificial Sequence: Synthetic oligonucleotide
cuggauuuuaaacagauuc

SEQ ID NO: 2391420 - RNA, 19 nt, Artificial Sequence
  Description of Artificial Sequence: Synthetic oligonucleotide
ugaauuuucuaaaugcaac

SEQ ID NO: 2391421 - RNA, 19 nt, Artificial Sequence
  Description of Artificial Sequence: Synthetic oligonucleotide
uuuagcaccugucucauca

SEQ ID NO: 2391422 - RNA, 19 nt, Artificial Sequence
  Description of Artificial Sequence: Synthetic oligonucleotide
uuauuaaccacuuccuuca

SEQ ID NO: 2391423 - RNA, 19 nt, Artificial Sequence
  Description of Artificial Sequence: Synthetic oligonucleotide
ucagaugcaauuuugguuc

SEQ ID NO: 2391424 - RNA, 19 nt, Artificial Sequence
  Description of Artificial Sequence: Synthetic oligonucleotide
uuuaaacagauucuuggac

SEQ ID NO: 2391425 - RNA, 19 nt, Artificial Sequence
  Description of Artificial Sequence: Synthetic oligonucleotide
agaacuaccuccuucacca

SEQ ID NO: 2391426 - RNA, 19 nt, Artificial Sequence
  Description of Artificial Sequence: Synthetic oligonucleotide
uuaaacagauucuuggacu

SEQ ID NO: 2391427 - RNA, 19 nt, Artificial Sequence
  Description of Artificial Sequence: Synthetic oligonucleotide
aacauccucaguaauuagc

SEQ ID NO: 2391428 - RNA, 19 nt, Artificial Sequence
  Description of Artificial Sequence: Synthetic oligonucleotide
uugaccauggagcacaucu

SEQ ID NO: 2391429 - RNA, 19 nt, Artificial Sequence
  Description of Artificial Sequence: Synthetic oligonucleotide
uuucccaauucaaacuugg

SEQ ID NO: 2391430 - RNA, 19 nt, Artificial Sequence
  Description of Artificial Sequence: Synthetic oligonucleotide
uauugaacaucgcaggcgc

SEQ ID NO: 2391431 - RNA, 19 nt, Artificial Sequence
  Description of Artificial Sequence: Synthetic oligonucleotide
aacgaagacaucaugaaga

SEQ ID NO: 2391432 - RNA, 19 nt, Artificial Sequence
  Description of Artificial Sequence: Synthetic oligonucleotide
ucgaaaauggaucaaccac

SEQ ID NO: 2391433 - RNA, 19 nt, Artificial Sequence
  Description of Artificial Sequence: Synthetic oligonucleotide
cuuucuucgaaaauggauc

SEQ ID NO: 2391434 - RNA, 19 nt, Artificial Sequence
  Description of Artificial Sequence: Synthetic oligonucleotide
aacuucgucauucugcaga

SEQ ID NO: 2391435 - RNA, 19 nt, Artificial Sequence
  Description of Artificial Sequence: Synthetic oligonucleotide
auuagcuugaauuuucuaa

SEQ ID NO: 2391436 - RNA, 19 nt, Artificial Sequence
  Description of Artificial Sequence: Synthetic oligonucleotide
uucgucauucugcagauca

SEQ ID NO: 2391437 - RNA, 19 nt, Artificial Sequence
  Description of Artificial Sequence: Synthetic oligonucleotide
aaguuagucagacaguuuu

SEQ ID NO: 2391438 - RNA, 19 nt, Artificial Sequence
  Description of Artificial Sequence: Synthetic oligonucleotide
uuuuaaacagauucuugga

SEQ ID NO: 2391439 - RNA, 19 nt, Artificial Sequence
  Description of Artificial Sequence: Synthetic oligonucleotide
uuuucuaugucuuucccaa

SEQ ID NO: 2391440 - RNA, 19 nt, Artificial Sequence
  Description of Artificial Sequence: Synthetic oligonucleotide
auauccaucagcucguuca

SEQ ID NO: 2391441 - RNA, 19 nt, Artificial Sequence
  Description of Artificial Sequence: Synthetic oligonucleotide
ucaacuuuagcaccugucu

SEQ ID NO: 2391442 - RNA, 19 nt, Artificial Sequence
  Description of Artificial Sequence: Synthetic oligonucleotide
cuuauuaaccacuuccuuc

SEQ ID NO: 2391443 - RNA, 19 nt, Artificial Sequence
  Description of Artificial Sequence: Synthetic oligonucleotide
ugcaacuucgucauucugc

SEQ ID NO: 2391444 - RNA, 19 nt, Artificial Sequence
  Description of Artificial Sequence: Synthetic oligonucleotide
uaaacagauucuuggacug

SEQ ID NO: 2391445 - RNA, 19 nt, Artificial Sequence
  Description of Artificial Sequence: Synthetic oligonucleotide
gaagaggauaaauggacug

SEQ ID NO: 2391446 - RNA, 19 nt, Artificial Sequence
  Description of Artificial Sequence: Synthetic oligonucleotide
augaagaggauaaauggac

SEQ ID NO: 2391447 - RNA, 19 nt, Artificial Sequence
  Description of Artificial Sequence: Synthetic oligonucleotide
gauaaauggacuggcaagc

SEQ ID NO: 2391448 - RNA, 19 nt, Artificial Sequence
  Description of Artificial Sequence: Synthetic oligonucleotide
auggagcacaucuuguccc

SEQ ID NO: 2391449 - RNA, 19 nt, Artificial Sequence
  Description of Artificial Sequence: Synthetic oligonucleotide
uggaaucaacuuauuaacc

SEQ ID NO: 2391450 - RNA, 19 nt, Artificial Sequence
  Description of Artificial Sequence: Synthetic oligonucleotide
auaaccaucagucgucuug

SEQ ID NO: 2391451 - RNA, 19 nt, Artificial Sequence
  Description of Artificial Sequence: Synthetic oligonucleotide
aaccacuuucuucuuggcg

SEQ ID NO: 2391452 - RNA, 19 nt, Artificial Sequence
  Description of Artificial Sequence: Synthetic oligonucleotide
uaacgaagacaucaugaag

SEQ ID NO: 2391453 - RNA, 19 nt, Artificial Sequence
  Description of Artificial Sequence: Synthetic oligonucleotide
ugguucauauccaucagcu

SEQ ID NO: 2391454 - RNA, 19 nt, Artificial Sequence
  Description of Artificial Sequence: Synthetic oligonucleotide
gaaucaacuuauuaaccac

SEQ ID NO: 2391455 - RNA, 19 nt, Artificial Sequence
  Description of Artificial Sequence: Synthetic oligonucleotide
aaugcugucuggaaucaac

SEQ ID NO: 2391456 - RNA, 19 nt, Artificial Sequence
  Description of Artificial Sequence: Synthetic oligonucleotide
agcaaauaaccaucagucg

SEQ ID NO: 2391457 - RNA, 19 nt, Artificial Sequence
  Description of Artificial Sequence: Synthetic oligonucleotide
acagacggagcaaauaacc

SEQ ID NO: 2391458 - RNA, 19 nt, Artificial Sequence
  Description of Artificial Sequence: Synthetic oligonucleotide
ugggcuucaaucauagucu

SEQ ID NO: 2391459 - RNA, 19 nt, Artificial Sequence
  Description of Artificial Sequence: Synthetic oligonucleotide
ucuuucuucgaaaauggau

SEQ ID NO: 2391460 - RNA, 19 nt, Artificial Sequence
  Description of Artificial Sequence: Synthetic oligonucleotide
cauucugcagaucagcaag

SEQ ID NO: 2391461 - RNA, 19 nt, Artificial Sequence
  Description of Artificial Sequence: Synthetic oligonucleotide
aguguuuucccaauguuuc

SEQ ID NO: 2391462 - RNA, 19 nt, Artificial Sequence
  Description of Artificial Sequence: Synthetic oligonucleotide
ucacuucaaacacacgacc

SEQ ID NO: 2391463 - RNA, 19 nt, Artificial Sequence
  Description of Artificial Sequence: Synthetic oligonucleotide
gcuugaauuuucuaaaugc

SEQ ID NO: 2391464 - RNA, 19 nt, Artificial Sequence
  Description of Artificial Sequence: Synthetic oligonucleotide
uuucuucgaaaauggauca

SEQ ID NO: 2391465 - RNA, 19 nt, Artificial Sequence
  Description of Artificial Sequence: Synthetic oligonucleotide
agaggauaaauggacuggc

SEQ ID NO: 2391466 - RNA, 19 nt, Artificial Sequence
  Description of Artificial Sequence: Synthetic oligonucleotide
uucccaauguuucuaauau

SEQ ID NO: 2391467 - RNA, 19 nt, Artificial Sequence
  Description of Artificial Sequence: Synthetic oligonucleotide
uucgaaaauggaucaacca

SEQ ID NO: 2391468 - RNA, 19 nt, Artificial Sequence
  Description of Artificial Sequence: Synthetic oligonucleotide
gaguuuucccaauucaaac

SEQ ID NO: 2391469 - RNA, 19 nt, Artificial Sequence
  Description of Artificial Sequence: Synthetic oligonucleotide
uuuccaucaucuucuugcg

SEQ ID NO: 2391470 - RNA, 19 nt, Artificial Sequence
  Description of Artificial Sequence: Synthetic oligonucleotide
uucaaucauagucugccac

SEQ ID NO: 2391471 - RNA, 19 nt, Artificial Sequence
  Description of Artificial Sequence: Synthetic oligonucleotide
uuugcccugaacauccuca

SEQ ID NO: 2391472 - RNA, 19 nt, Artificial Sequence
  Description of Artificial Sequence: Synthetic oligonucleotide
ugaagaggauaaauggacu

SEQ ID NO: 2391473 - RNA, 19 nt, Artificial Sequence
  Description of Artificial Sequence: Synthetic oligonucleotide
cuucgaaaauggaucaacc

SEQ ID NO: 2391474 - RNA, 19 nt, Artificial Sequence
  Description of Artificial Sequence: Synthetic oligonucleotide
uuacuuuucuaacgaagac

SEQ ID NO: 2391475 - RNA, 19 nt, Artificial Sequence
  Description of Artificial Sequence: Synthetic oligonucleotide
ucccaauucaaacuugggu

SEQ ID NO: 2391476 - RNA, 19 nt, Artificial Sequence
  Description of Artificial Sequence: Synthetic oligonucleotide
auuugucuguacuucucgg

SEQ ID NO: 2391477 - RNA, 19 nt, Artificial Sequence
  Description of Artificial Sequence: Synthetic oligonucleotide
auauugaacaucgcaggcg

SEQ ID NO: 2391478 - RNA, 19 nt, Artificial Sequence
  Description of Artificial Sequence: Synthetic oligonucleotide
ucauaccagucuuucuucg

SEQ ID NO: 2391479 - RNA, 19 nt, Artificial Sequence
  Description of Artificial Sequence: Synthetic oligonucleotide
uuucacgucauaccagucu

SEQ ID NO: 2391480 - RNA, 19 nt, Artificial Sequence
  Description of Artificial Sequence: Synthetic oligonucleotide
ugaguuuucccaauucaaa

SEQ ID NO: 2391481 - RNA, 19 nt, Artificial Sequence
  Description of Artificial Sequence: Synthetic oligonucleotide
uggugcugugcauaggagg

SEQ ID NO: 2391482 - RNA, 19 nt, Artificial Sequence
  Description of Artificial Sequence: Synthetic oligonucleotide
uacuuuucuaacgaagaca

SEQ ID NO: 2391483 - RNA, 19 nt, Artificial Sequence
  Description of Artificial Sequence: Synthetic oligonucleotide
aauggaucaaccacuuucu

SEQ ID NO: 2391484 - RNA, 19 nt, Artificial Sequence
  Description of Artificial Sequence: Synthetic oligonucleotide
uugccgaccgccauggugc

SEQ ID NO: 2391485 - RNA, 19 nt, Artificial Sequence
  Description of Artificial Sequence: Synthetic oligonucleotide
cugcagaucagcaaggcuc

SEQ ID NO: 2391486 - RNA, 19 nt, Artificial Sequence
  Description of Artificial Sequence: Synthetic oligonucleotide
auaaauggacuggcaagcc

SEQ ID NO: 2391487 - RNA, 19 nt, Artificial Sequence
  Description of Artificial Sequence: Synthetic oligonucleotide
aaucaacuuauuaaccacu

SEQ ID NO: 2391488 - RNA, 19 nt, Artificial Sequence
  Description of Artificial Sequence: Synthetic oligonucleotide
cauuugucuguacuucucg

SEQ ID NO: 2391489 - RNA, 19 nt, Artificial Sequence
  Description of Artificial Sequence: Synthetic oligonucleotide
aacagacggagcaaauaac

SEQ ID NO: 2391490 - RNA, 19 nt, Artificial Sequence
  Description of Artificial Sequence: Synthetic oligonucleotide
uugcguaucugguuguugc

SEQ ID NO: 2391491 - RNA, 19 nt, Artificial Sequence
  Description of Artificial Sequence: Synthetic oligonucleotide
cacuucaaacacacgaccc

SEQ ID NO: 2391492 - RNA, 19 nt, Artificial Sequence
  Description of Artificial Sequence: Synthetic oligonucleotide
aacuuauuaaccacuuccu

SEQ ID NO: 2391493 - RNA, 19 nt, Artificial Sequence
  Description of Artificial Sequence: Synthetic oligonucleotide
acacagaacagacggagca

SEQ ID NO: 2391494 - RNA, 19 nt, Artificial Sequence
  Description of Artificial Sequence: Synthetic oligonucleotide
acgaagacaucaugaagag

SEQ ID NO: 2391495 - RNA, 19 nt, Artificial Sequence
  Description of Artificial Sequence: Synthetic oligonucleotide
uaauuagcuugaauuuucu

SEQ ID NO: 2391496 - RNA, 19 nt, Artificial Sequence
  Description of Artificial Sequence: Synthetic oligonucleotide
acuaguguuuucccaaugu

SEQ ID NO: 2391497 - RNA, 19 nt, Artificial Sequence
  Description of Artificial Sequence: Synthetic oligonucleotide
guuucuaauauugaacauc

SEQ ID NO: 2391498 - RNA, 19 nt, Artificial Sequence
  Description of Artificial Sequence: Synthetic oligonucleotide
ggauaaauggacuggcaag

SEQ ID NO: 2391499 - RNA, 19 nt, Artificial Sequence
  Description of Artificial Sequence: Synthetic oligonucleotide
agucauuugucuguacuuc

SEQ ID NO: 2391500 - RNA, 19 nt, Artificial Sequence
  Description of Artificial Sequence: Synthetic oligonucleotide
uucuaacgaagacaucaug

SEQ ID NO: 2391501 - RNA, 19 nt, Artificial Sequence
  Description of Artificial Sequence: Synthetic oligonucleotide
uccucaguaauuagcuuga

SEQ ID NO: 2391502 - RNA, 19 nt, Artificial Sequence
  Description of Artificial Sequence: Synthetic oligonucleotide
uucccaauucaaacuuggg

SEQ ID NO: 2391503 - RNA, 19 nt, Artificial Sequence
  Description of Artificial Sequence: Synthetic oligonucleotide
uuucuaaaugcaacuucgu

SEQ ID NO: 2391504 - RNA, 19 nt, Artificial Sequence
  Description of Artificial Sequence: Synthetic oligonucleotide
gaacagacggagcaaauaa

SEQ ID NO: 2391505 - RNA, 19 nt, Artificial Sequence
  Description of Artificial Sequence: Synthetic oligonucleotide
aagucauuugucuguacuu

SEQ ID NO: 2391506 - RNA, 19 nt, Artificial Sequence
  Description of Artificial Sequence: Synthetic oligonucleotide
uaaauggacuggcaagccu

SEQ ID NO: 2391507 - RNA, 19 nt, Artificial Sequence
  Description of Artificial Sequence: Synthetic oligonucleotide
acuucaaacacacgacccu

SEQ ID NO: 2391508 - RNA, 19 nt, Artificial Sequence
  Description of Artificial Sequence: Synthetic oligonucleotide
gguaagauccaugccaugg

SEQ ID NO: 2391509 - RNA, 19 nt, Artificial Sequence
  Description of Artificial Sequence: Synthetic oligonucleotide
aucagucgucuugacaucc

SEQ ID NO: 2391510 - RNA, 19 nt, Artificial Sequence
  Description of Artificial Sequence: Synthetic oligonucleotide
ggaaucaacuuauuaacca

SEQ ID NO: 2391511 - RNA, 19 nt, Artificial Sequence
  Description of Artificial Sequence: Synthetic oligonucleotide
ucuucgaaaauggaucaac

SEQ ID NO: 2391512 - RNA, 19 nt, Artificial Sequence
  Description of Artificial Sequence: Synthetic oligonucleotide
auuaaccacuuccuucaag

SEQ ID NO: 2391513 - RNA, 19 nt, Artificial Sequence
  Description of Artificial Sequence: Synthetic oligonucleotide
aaacagauucuuggacugg

SEQ ID NO: 2391514 - RNA, 19 nt, Artificial Sequence
  Description of Artificial Sequence: Synthetic oligonucleotide
ugcagaucagcaaggcuca

SEQ ID NO: 2391515 - RNA, 19 nt, Artificial Sequence
  Description of Artificial Sequence: Synthetic oligonucleotide
caugaagaggauaaaugga

SEQ ID NO: 2391516 - RNA, 19 nt, Artificial Sequence
  Description of Artificial Sequence: Synthetic oligonucleotide
aacuaccuccuucaccaug

SEQ ID NO: 2391517 - RNA, 19 nt, Artificial Sequence
  Description of Artificial Sequence: Synthetic oligonucleotide
ggacuggugguucauaucc

SEQ ID NO: 2391518 - RNA, 19 nt, Artificial Sequence
  Description of Artificial Sequence: Synthetic oligonucleotide
aggauaaauggacuggcaa

SEQ ID NO: 2391519 - RNA, 19 nt, Artificial Sequence
  Description of Artificial Sequence: Synthetic oligonucleotide
aauuagcuugaauuuucua

SEQ ID NO: 2391520 - RNA, 19 nt, Artificial Sequence
  Description of Artificial Sequence: Synthetic oligonucleotide
uucaaacacacgacccuug

SEQ ID NO: 2391521 - RNA, 19 nt, Artificial Sequence
  Description of Artificial Sequence: Synthetic oligonucleotide
uaguguuuucccaauguuu

SEQ ID NO: 2391522 - RNA, 19 nt, Artificial Sequence
  Description of Artificial Sequence: Synthetic oligonucleotide
aucgcaggcgcuuucacgu

SEQ ID NO: 2391523 - RNA, 19 nt, Artificial Sequence
  Description of Artificial Sequence: Synthetic oligonucleotide
cuuauucuugccgaccgcc

SEQ ID NO: 2391524 - RNA, 19 nt, Artificial Sequence
  Description of Artificial Sequence: Synthetic oligonucleotide
caugccauggaaguuaguc

SEQ ID NO: 2391525 - RNA, 19 nt, Artificial Sequence
  Description of Artificial Sequence: Synthetic oligonucleotide
uguacuucucgggucauga

SEQ ID NO: 2391526 - RNA, 19 nt, Artificial Sequence
  Description of Artificial Sequence: Synthetic oligonucleotide
uggaucaaccacuuucuuc

SEQ ID NO: 2391527 - RNA, 19 nt, Artificial Sequence
  Description of Artificial Sequence: Synthetic oligonucleotide
uaagauccaugccauggaa

SEQ ID NO: 2391528 - RNA, 19 nt, Artificial Sequence
  Description of Artificial Sequence: Synthetic oligonucleotide
ucucgggucaugauuucca

SEQ ID NO: 2391529 - RNA, 19 nt, Artificial Sequence
  Description of Artificial Sequence: Synthetic oligonucleotide
aaauaaccaucagucgucu

SEQ ID NO: 2391530 - RNA, 19 nt, Artificial Sequence
  Description of Artificial Sequence: Synthetic oligonucleotide
ugcauaggaggucuugcgu

SEQ ID NO: 2391531 - RNA, 19 nt, Artificial Sequence
  Description of Artificial Sequence: Synthetic oligonucleotide
ugcguaucugguuguugcg

SEQ ID NO: 2391532 - RNA, 19 nt, Artificial Sequence
  Description of Artificial Sequence: Synthetic oligonucleotide
uucuaauauugaacaucgc

SEQ ID NO: 2391533 - RNA, 19 nt, Artificial Sequence
  Description of Artificial Sequence: Synthetic oligonucleotide
guaauuagcuugaauuuuc

SEQ ID NO: 2391534 - RNA, 19 nt, Artificial Sequence
  Description of Artificial Sequence: Synthetic oligonucleotide
aacagauucuuggacuggu

SEQ ID NO: 2391535 - RNA, 19 nt, Artificial Sequence
  Description of Artificial Sequence: Synthetic oligonucleotide
acacacgacccuugaggcc

SEQ ID NO: 2391536 - RNA, 19 nt, Artificial Sequence
  Description of Artificial Sequence: Synthetic oligonucleotide
ucccggguaagauccaugc

SEQ ID NO: 2391537 - RNA, 19 nt, Artificial Sequence
  Description of Artificial Sequence: Synthetic oligonucleotide
uuucgucaggcgcuuauuc

SEQ ID NO: 2391538 - RNA, 19 nt, Artificial Sequence
  Description of Artificial Sequence: Synthetic oligonucleotide
uuauucuugccgaccgcca

SEQ ID NO: 2391539 - RNA, 19 nt, Artificial Sequence
  Description of Artificial Sequence: Synthetic oligonucleotide
caauguuucuaauauugaa

SEQ ID NO: 2391540 - RNA, 19 nt, Artificial Sequence
  Description of Artificial Sequence: Synthetic oligonucleotide
uucacgucauaccagucuu

SEQ ID NO: 2391541 - RNA, 19 nt, Artificial Sequence
  Description of Artificial Sequence: Synthetic oligonucleotide
ucugcagaucagcaaggcu

SEQ ID NO: 2391542 - RNA, 19 nt, Artificial Sequence
  Description of Artificial Sequence: Synthetic oligonucleotide
aguaauuagcuugaauuuu

SEQ ID NO: 2391543 - RNA, 19 nt, Artificial Sequence
  Description of Artificial Sequence: Synthetic oligonucleotide
uggaaguuagucagacagu

SEQ ID NO: 2391544 - RNA, 19 nt, Artificial Sequence
  Description of Artificial Sequence: Synthetic oligonucleotide
cucgugacuaguguuuucc

SEQ ID NO: 2391545 - RNA, 19 nt, Artificial Sequence
  Description of Artificial Sequence: Synthetic oligonucleotide
cuaacgaagacaucaugaa

SEQ ID NO: 2391546 - RNA, 19 nt, Artificial Sequence
  Description of Artificial Sequence: Synthetic oligonucleotide
agacggagcaaauaaccau

SEQ ID NO: 2391547 - RNA, 19 nt, Artificial Sequence
  Description of Artificial Sequence: Synthetic oligonucleotide
aaccaacacagaacagacg

SEQ ID NO: 2391548 - RNA, 19 nt, Artificial Sequence
  Description of Artificial Sequence: Synthetic oligonucleotide
gcucacuucaaacacacga

SEQ ID NO: 2391549 - RNA, 19 nt, Artificial Sequence
  Description of Artificial Sequence: Synthetic oligonucleotide
acuuauuaaccacuuccuu

SEQ ID NO: 2391550 - RNA, 19 nt, Artificial Sequence
  Description of Artificial Sequence: Synthetic oligonucleotide
cagaacuaccuccuucacc

SEQ ID NO: 2391551 - RNA, 19 nt, Artificial Sequence
  Description of Artificial Sequence: Synthetic oligonucleotide
uucuugccgaccgccaugg

SEQ ID NO: 2391552 - RNA, 19 nt, Artificial Sequence
  Description of Artificial Sequence: Synthetic oligonucleotide
aaauggacuggcaagccuu

SEQ ID NO: 2391553 - RNA, 19 nt, Artificial Sequence
  Description of Artificial Sequence: Synthetic oligonucleotide
uucgucaggcgcuuauucu

SEQ ID NO: 2391554 - RNA, 19 nt, Artificial Sequence
  Description of Artificial Sequence: Synthetic oligonucleotide
uaaccaucagucgucuuga

SEQ ID NO: 2391555 - RNA, 19 nt, Artificial Sequence
  Description of Artificial Sequence: Synthetic oligonucleotide
cuuggcgcccuucuugccg

SEQ ID NO: 2391556 - RNA, 19 nt, Artificial Sequence
  Description of Artificial Sequence: Synthetic oligonucleotide
aggcucacuucaaacacac

SEQ ID NO: 2391557 - RNA, 19 nt, Artificial Sequence
  Description of Artificial Sequence: Synthetic oligonucleotide
ggaucaaccacuuucuucu

SEQ ID NO: 2391558 - RNA, 19 nt, Artificial Sequence
  Description of Artificial Sequence: Synthetic oligonucleotide
uacuucucgggucaugauu

SEQ ID NO: 2391559 - RNA, 19 nt, Artificial Sequence
  Description of Artificial Sequence: Synthetic oligonucleotide
gacggagcaaauaaccauc

SEQ ID NO: 2391560 - RNA, 19 nt, Artificial Sequence
  Description of Artificial Sequence: Synthetic oligonucleotide
uuucccaaugcugucugga

SEQ ID NO: 2391561 - RNA, 19 nt, Artificial Sequence
  Description of Artificial Sequence: Synthetic oligonucleotide
cuggcaagccuuuucuaug

SEQ ID NO: 2391562 - RNA, 19 nt, Artificial Sequence
  Description of Artificial Sequence: Synthetic oligonucleotide
aaucuggauuuuaaacaga

SEQ ID NO: 2391563 - RNA, 19 nt, Artificial Sequence
  Description of Artificial Sequence: Synthetic oligonucleotide
gacuaguguuuucccaaug

SEQ ID NO: 2391564 - RNA, 19 nt, Artificial Sequence
  Description of Artificial Sequence: Synthetic oligonucleotide
gagcacaucuugucccggg

SEQ ID NO: 2391565 - RNA, 19 nt, Artificial Sequence
  Description of Artificial Sequence: Synthetic oligonucleotide
uggcaagccuuuucuaugu

SEQ ID NO: 2391566 - RNA, 19 nt, Artificial Sequence
  Description of Artificial Sequence: Synthetic oligonucleotide
cuaaaugcaacuucgucau

SEQ ID NO: 2391567 - RNA, 19 nt, Artificial Sequence
  Description of Artificial Sequence: Synthetic oligonucleotide
caggcgcuuauucuugccg

SEQ ID NO: 2391568 - RNA, 19 nt, Artificial Sequence
  Description of Artificial Sequence: Synthetic oligonucleotide
caucgcaggcgcuuucacg

SEQ ID NO: 2391569 - RNA, 19 nt, Artificial Sequence
  Description of Artificial Sequence: Synthetic oligonucleotide
uaggaggucuugcguaucu

SEQ ID NO: 2391570 - RNA, 19 nt, Artificial Sequence
  Description of Artificial Sequence: Synthetic oligonucleotide
ggucuugcguaucugguug

SEQ ID NO: 2391571 - RNA, 19 nt, Artificial Sequence
  Description of Artificial Sequence: Synthetic oligonucleotide
uauucuugccgaccgccau

SEQ ID NO: 2391572 - RNA, 19 nt, Artificial Sequence
  Description of Artificial Sequence: Synthetic oligonucleotide
accagucuuucuucgaaaa

SEQ ID NO: 2391573 - RNA, 19 nt, Artificial Sequence
  Description of Artificial Sequence: Synthetic oligonucleotide
ugucuguacuucucggguc

SEQ ID NO: 2391574 - RNA, 19 nt, Artificial Sequence
  Description of Artificial Sequence: Synthetic oligonucleotide
ucgugacuaguguuuuccc

SEQ ID NO: 2391575 - RNA, 19 nt, Artificial Sequence
  Description of Artificial Sequence: Synthetic oligonucleotide
uucuugccgccuuucguca

SEQ ID NO: 2391576 - RNA, 19 nt, Artificial Sequence
  Description of Artificial Sequence: Synthetic oligonucleotide
gugacuaguguuuucccaa

SEQ ID NO: 2391577 - RNA, 19 nt, Artificial Sequence
  Description of Artificial Sequence: Synthetic oligonucleotide
acuucgucauucugcagau

SEQ ID NO: 2391578 - RNA, 19 nt, Artificial Sequence
  Description of Artificial Sequence: Synthetic oligonucleotide
cuugccgaccgccauggug

SEQ ID NO: 2391579 - RNA, 19 nt, Artificial Sequence
  Description of Artificial Sequence: Synthetic oligonucleotide
acaucgcaggcgcuuucac

SEQ ID NO: 2391580 - RNA, 19 nt, Artificial Sequence
  Description of Artificial Sequence: Synthetic oligonucleotide
ucccaaugcugucuggaau

SEQ ID NO: 2391581 - RNA, 19 nt, Artificial Sequence
  Description of Artificial Sequence: Synthetic oligonucleotide
accaucagucgucuugaca

SEQ ID NO: 2391582 - RNA, 19 nt, Artificial Sequence
  Description of Artificial Sequence: Synthetic oligonucleotide
gcaaauaaccaucagucgu

SEQ ID NO: 2391583 - RNA, 19 nt, Artificial Sequence
  Description of Artificial Sequence: Synthetic oligonucleotide
ucagcaaggcucacuucaa

SEQ ID NO: 2391584 - RNA, 19 nt, Artificial Sequence
  Description of Artificial Sequence: Synthetic oligonucleotide
uggacuggcaagccuuuuc

SEQ ID NO: 2391585 - RNA, 19 nt, Artificial Sequence
  Description of Artificial Sequence: Synthetic oligonucleotide
ucagucgucuugacaucca

SEQ ID NO: 2391586 - RNA, 19 nt, Artificial Sequence
  Description of Artificial Sequence: Synthetic oligonucleotide
uucugcagaucagcaaggc

SEQ ID NO: 2391587 - RNA, 19 nt, Artificial Sequence
  Description of Artificial Sequence: Synthetic oligonucleotide
ucucaucaccaguaguuuu

SEQ ID NO: 2391588 - RNA, 19 nt, Artificial Sequence
  Description of Artificial Sequence: Synthetic oligonucleotide
auucuugccgaccgccaug

SEQ ID NO: 2391589 - RNA, 19 nt, Artificial Sequence
  Description of Artificial Sequence: Synthetic oligonucleotide
ucgucuugacauccacaug

SEQ ID NO: 2391590 - RNA, 19 nt, Artificial Sequence
  Description of Artificial Sequence: Synthetic oligonucleotide
aggcgcuuucacgucauac

SEQ ID NO: 2391591 - RNA, 19 nt, Artificial Sequence
  Description of Artificial Sequence: Synthetic oligonucleotide
ggcgcuuucacgucauacc

SEQ ID NO: 2391592 - RNA, 19 nt, Artificial Sequence
  Description of Artificial Sequence: Synthetic oligonucleotide
uauuaaccacuuccuucaa

SEQ ID NO: 2391593 - RNA, 19 nt, Artificial Sequence
  Description of Artificial Sequence: Synthetic oligonucleotide
ugcugugcauaggaggucu

SEQ ID NO: 2391594 - RNA, 19 nt, Artificial Sequence
  Description of Artificial Sequence: Synthetic oligonucleotide
uccaugaguuuucccaauu

SEQ ID NO: 2391595 - RNA, 19 nt, Artificial Sequence
  Description of Artificial Sequence: Synthetic oligonucleotide
acuggugguucauauccau

SEQ ID NO: 2391596 - RNA, 19 nt, Artificial Sequence
  Description of Artificial Sequence: Synthetic oligonucleotide
aauaaccaucagucgucuu

SEQ ID NO: 2391597 - RNA, 19 nt, Artificial Sequence
  Description of Artificial Sequence: Synthetic oligonucleotide
uuugguuccuugaguccuc

SEQ ID NO: 2391598 - RNA, 19 nt, Artificial Sequence
  Description of Artificial Sequence: Synthetic oligonucleotide
ucaagucauuugucuguac

SEQ ID NO: 2391599 - RNA, 19 nt, Artificial Sequence
  Description of Artificial Sequence: Synthetic oligonucleotide
cagacggagcaaauaacca

SEQ ID NO: 2391600 - RNA, 19 nt, Artificial Sequence
  Description of Artificial Sequence: Synthetic oligonucleotide
ucgucaggcgcuuauucuu

SEQ ID NO: 2391601 - RNA, 19 nt, Artificial Sequence
  Description of Artificial Sequence: Synthetic oligonucleotide
cuuucccaaugcugucugg

SEQ ID NO: 2391602 - RNA, 19 nt, Artificial Sequence
  Description of Artificial Sequence: Synthetic oligonucleotide
uugcggaucuggcggaccu

SEQ ID NO: 2391603 - RNA, 19 nt, Artificial Sequence
  Description of Artificial Sequence: Synthetic oligonucleotide
gucuguacuucucggguca

SEQ ID NO: 2391604 - RNA, 19 nt, Artificial Sequence
  Description of Artificial Sequence: Synthetic oligonucleotide
aacaucgcaggcgcuuuca

SEQ ID NO: 2391605 - RNA, 19 nt, Artificial Sequence
  Description of Artificial Sequence: Synthetic oligonucleotide
ugacuaguguuuucccaau

SEQ ID NO: 2391606 - RNA, 19 nt, Artificial Sequence
  Description of Artificial Sequence: Synthetic oligonucleotide
uaccagucuuucuucgaaa

SEQ ID NO: 2391607 - RNA, 19 nt, Artificial Sequence
  Description of Artificial Sequence: Synthetic oligonucleotide
gcaacuucgucauucugca

SEQ ID NO: 2391608 - RNA, 19 nt, Artificial Sequence
  Description of Artificial Sequence: Synthetic oligonucleotide
uucuuggacuggugguuca

SEQ ID NO: 2391609 - RNA, 19 nt, Artificial Sequence
  Description of Artificial Sequence: Synthetic oligonucleotide
uucucgggucaugauuucc

SEQ ID NO: 2391610 - RNA, 19 nt, Artificial Sequence
  Description of Artificial Sequence: Synthetic oligonucleotide
uucaagucauuugucugua

SEQ ID NO: 2391611 - RNA, 19 nt, Artificial Sequence
  Description of Artificial Sequence: Synthetic oligonucleotide
uucccaaugcugucuggaa

SEQ ID NO: 2391612 - RNA, 19 nt, Artificial Sequence
  Description of Artificial Sequence: Synthetic oligonucleotide
cuuuucuaacgaagacauc

SEQ ID NO: 2391613 - RNA, 19 nt, Artificial Sequence
  Description of Artificial Sequence: Synthetic oligonucleotide
cuugccgccuuucgucagg

SEQ ID NO: 2391614 - RNA, 19 nt, Artificial Sequence
  Description of Artificial Sequence: Synthetic oligonucleotide
uucuugcggaucuggcgga

SEQ ID NO: 2391615 - RNA, 19 nt, Artificial Sequence
  Description of Artificial Sequence: Synthetic oligonucleotide
uuucuaugucuuucccaau

SEQ ID NO: 2391616 - RNA, 19 nt, Artificial Sequence
  Description of Artificial Sequence: Synthetic oligonucleotide
cuuucacgucauaccaguc

SEQ ID NO: 2391617 - RNA, 19 nt, Artificial Sequence
  Description of Artificial Sequence: Synthetic oligonucleotide
ucuugccgccuuucgucag

SEQ ID NO: 2391618 - RNA, 19 nt, Artificial Sequence
  Description of Artificial Sequence: Synthetic oligonucleotide
cuggugcugugcauaggag

SEQ ID NO: 2391619 - RNA, 19 nt, Artificial Sequence
  Description of Artificial Sequence: Synthetic oligonucleotide
ugaccauggagcacaucuu

SEQ ID NO: 2391620 - RNA, 19 nt, Artificial Sequence
  Description of Artificial Sequence: Synthetic oligonucleotide
acagaacagacggagcaaa

SEQ ID NO: 2391621 - RNA, 19 nt, Artificial Sequence
  Description of Artificial Sequence: Synthetic oligonucleotide
ugcugucuggaaucaacuu

SEQ ID NO: 2391622 - RNA, 19 nt, Artificial Sequence
  Description of Artificial Sequence: Synthetic oligonucleotide
aagacaucaugaagaggau

SEQ ID NO: 2391623 - RNA, 19 nt, Artificial Sequence
  Description of Artificial Sequence: Synthetic oligonucleotide
gaggauaaauggacuggca

SEQ ID NO: 2391624 - RNA, 19 nt, Artificial Sequence
  Description of Artificial Sequence: Synthetic oligonucleotide
caagucauuugucuguacu

SEQ ID NO: 2391625 - RNA, 19 nt, Artificial Sequence
  Description of Artificial Sequence: Synthetic oligonucleotide
uggacuggugguucauauc

SEQ ID NO: 2391626 - RNA, 19 nt, Artificial Sequence
  Description of Artificial Sequence: Synthetic oligonucleotide
agaacagacggagcaaaua

SEQ ID NO: 2391627 - RNA, 19 nt, Artificial Sequence
  Description of Artificial Sequence: Synthetic oligonucleotide
cuggugguucauauccauc

SEQ ID NO: 2391628 - RNA, 19 nt, Artificial Sequence
  Description of Artificial Sequence: Synthetic oligonucleotide
uugaacaucgcaggcgcuu

SEQ ID NO: 2391629 - RNA, 19 nt, Artificial Sequence
  Description of Artificial Sequence: Synthetic oligonucleotide
gucgucuugacauccacau

SEQ ID NO: 2391630 - RNA, 19 nt, Artificial Sequence
  Description of Artificial Sequence: Synthetic oligonucleotide
cauaccagucuuucuucga

SEQ ID NO: 2391631 - RNA, 19 nt, Artificial Sequence
  Description of Artificial Sequence: Synthetic oligonucleotide
uccuugaguccucgugacu

SEQ ID NO: 2391632 - RNA, 19 nt, Artificial Sequence
  Description of Artificial Sequence: Synthetic oligonucleotide
acgucauaccagucuuucu

SEQ ID NO: 2391633 - RNA, 19 nt, Artificial Sequence
  Description of Artificial Sequence: Synthetic oligonucleotide
cacgucauaccagucuuuc

SEQ ID NO: 2391634 - RNA, 19 nt, Artificial Sequence
  Description of Artificial Sequence: Synthetic oligonucleotide
auaggaggucuugcguauc

SEQ ID NO: 2391635 - RNA, 19 nt, Artificial Sequence
  Description of Artificial Sequence: Synthetic oligonucleotide
cacacgacccuugaggcca

SEQ ID NO: 2391636 - RNA, 19 nt, Artificial Sequence
  Description of Artificial Sequence: Synthetic oligonucleotide
uucuucgaaaauggaucaa

SEQ ID NO: 2391637 - RNA, 19 nt, Artificial Sequence
  Description of Artificial Sequence: Synthetic oligonucleotide
gucauuugucuguacuucu

SEQ ID NO: 2391638 - RNA, 19 nt, Artificial Sequence
  Description of Artificial Sequence: Synthetic oligonucleotide
cuugcguaucugguuguug

SEQ ID NO: 2391639 - RNA, 19 nt, Artificial Sequence
  Description of Artificial Sequence: Synthetic oligonucleotide
agcaccugucucaucacca

SEQ ID NO: 2391640 - RNA, 19 nt, Artificial Sequence
  Description of Artificial Sequence: Synthetic oligonucleotide
caucagucgucuugacauc

SEQ ID NO: 2391641 - RNA, 19 nt, Artificial Sequence
  Description of Artificial Sequence: Synthetic oligonucleotide
aggucuugcguaucugguu

SEQ ID NO: 2391642 - RNA, 19 nt, Artificial Sequence
  Description of Artificial Sequence: Synthetic oligonucleotide
cccaaugcugucuggaauc

SEQ ID NO: 2391643 - RNA, 19 nt, Artificial Sequence
  Description of Artificial Sequence: Synthetic oligonucleotide
acggagcaaauaaccauca

SEQ ID NO: 2391644 - RNA, 19 nt, Artificial Sequence
  Description of Artificial Sequence: Synthetic oligonucleotide
cagucgucuugacauccac

SEQ ID NO: 2391645 - RNA, 19 nt, Artificial Sequence
  Description of Artificial Sequence: Synthetic oligonucleotide
caacuucgucauucugcag

SEQ ID NO: 2391646 - RNA, 19 nt, Artificial Sequence
  Description of Artificial Sequence: Synthetic oligonucleotide
gcugucuggaaucaacuua

SEQ ID NO: 2391647 - RNA, 19 nt, Artificial Sequence
  Description of Artificial Sequence: Synthetic oligonucleotide
cacaucuugucccggguaa

SEQ ID NO: 2391648 - RNA, 19 nt, Artificial Sequence
  Description of Artificial Sequence: Synthetic oligonucleotide
aauggacuggcaagccuuu

SEQ ID NO: 2391649 - RNA, 19 nt, Artificial Sequence
  Description of Artificial Sequence: Synthetic oligonucleotide
acagauucuuggacuggug

SEQ ID NO: 2391650 - RNA, 19 nt, Artificial Sequence
  Description of Artificial Sequence: Synthetic oligonucleotide
auggaucaaccacuuucuu

SEQ ID NO: 2391651 - RNA, 19 nt, Artificial Sequence
  Description of Artificial Sequence: Synthetic oligonucleotide
ugaacaucgcaggcgcuuu

SEQ ID NO: 2391652 - RNA, 19 nt, Artificial Sequence
  Description of Artificial Sequence: Synthetic oligonucleotide
ccggguaagauccaugcca

SEQ ID NO: 2391653 - RNA, 19 nt, Artificial Sequence
  Description of Artificial Sequence: Synthetic oligonucleotide
gccgccuuucgucaggcgc

SEQ ID NO: 2391654 - RNA, 19 nt, Artificial Sequence
  Description of Artificial Sequence: Synthetic oligonucleotide
uugaguccucgugacuagu

SEQ ID NO: 2391655 - RNA, 19 nt, Artificial Sequence
  Description of Artificial Sequence: Synthetic oligonucleotide
agucgucuugacauccaca

SEQ ID NO: 2391656 - RNA, 19 nt, Artificial Sequence
  Description of Artificial Sequence: Synthetic oligonucleotide
gaacaucgcaggcgcuuuc

SEQ ID NO: 2391657 - RNA, 19 nt, Artificial Sequence
  Description of Artificial Sequence: Synthetic oligonucleotide
cgggucaugauuuccauca

SEQ ID NO: 2391658 - RNA, 19 nt, Artificial Sequence
  Description of Artificial Sequence: Synthetic oligonucleotide
gcaccugucucaucaccag

SEQ ID NO: 2391659 - RNA, 19 nt, Artificial Sequence
  Description of Artificial Sequence: Synthetic oligonucleotide
ccacuuucuucuuggcgcc

SEQ ID NO: 2391660 - RNA, 19 nt, Artificial Sequence
  Description of Artificial Sequence: Synthetic oligonucleotide
gcgcuuucacgucauacca

SEQ ID NO: 2391661 - RNA, 19 nt, Artificial Sequence
  Description of Artificial Sequence: Synthetic oligonucleotide
gaguccucgugacuagugu

SEQ ID NO: 2391662 - RNA, 19 nt, Artificial Sequence
  Description of Artificial Sequence: Synthetic oligonucleotide
cuucucgggucaugauuuc

SEQ ID NO: 2391663 - RNA, 19 nt, Artificial Sequence
  Description of Artificial Sequence: Synthetic oligonucleotide
ccauggaaguuagucagac

SEQ ID NO: 2391664 - RNA, 19 nt, Artificial Sequence
  Description of Artificial Sequence: Synthetic oligonucleotide
agaugcaauuuugguuccu

SEQ ID NO: 2391665 - RNA, 19 nt, Artificial Sequence
  Description of Artificial Sequence: Synthetic oligonucleotide
accugucucaucaccagua

SEQ ID NO: 2391666 - RNA, 19 nt, Artificial Sequence
  Description of Artificial Sequence: Synthetic oligonucleotide
ccaugaguuuucccaauuc

SEQ ID NO: 2391667 - RNA, 19 nt, Artificial Sequence
  Description of Artificial Sequence: Synthetic oligonucleotide
gucuuucuucgaaaaugga

SEQ ID NO: 2391668 - RNA, 19 nt, Artificial Sequence
  Description of Artificial Sequence: Synthetic oligonucleotide
cuugcggaucuggcggacc

SEQ ID NO: 2391669 - RNA, 19 nt, Artificial Sequence
  Description of Artificial Sequence: Synthetic oligonucleotide
gcccugaacauccucagua

SEQ ID NO: 2391670 - RNA, 19 nt, Artificial Sequence
  Description of Artificial Sequence: Synthetic oligonucleotide
gcauaggaggucuugcgua

SEQ ID NO: 2391671 - RNA, 19 nt, Artificial Sequence
  Description of Artificial Sequence: Synthetic oligonucleotide
gacuggcaagccuuuucua

SEQ ID NO: 2391672 - RNA, 19 nt, Artificial Sequence
  Description of Artificial Sequence: Synthetic oligonucleotide
cccaauucaaacuuggguu

SEQ ID NO: 2391673 - RNA, 19 nt, Artificial Sequence
  Description of Artificial Sequence: Synthetic oligonucleotide
gcuuucacgucauaccagu

SEQ ID NO: 2391674 - RNA, 19 nt, Artificial Sequence
  Description of Artificial Sequence: Synthetic oligonucleotide
cacaugggcuucaaucaua

SEQ ID NO: 2391675 - RNA, 19 nt, Artificial Sequence
  Description of Artificial Sequence: Synthetic oligonucleotide
uccucgugacuaguguuuu

SEQ ID NO: 2391676 - RNA, 19 nt, Artificial Sequence
  Description of Artificial Sequence: Synthetic oligonucleotide
ugccgccuuucgucaggcg

SEQ ID NO: 2391677 - RNA, 19 nt, Artificial Sequence
  Description of Artificial Sequence: Synthetic oligonucleotide
auugaacaucgcaggcgcu

SEQ ID NO: 2391678 - RNA, 19 nt, Artificial Sequence
  Description of Artificial Sequence: Synthetic oligonucleotide
aggaggucuugcguaucug

SEQ ID NO: 2391679 - RNA, 19 nt, Artificial Sequence
  Description of Artificial Sequence: Synthetic oligonucleotide
uugccgccuuucgucaggc

SEQ ID NO: 2391680 - RNA, 19 nt, Artificial Sequence
  Description of Artificial Sequence: Synthetic oligonucleotide
ggaaguuagucagacaguu

SEQ ID NO: 2391681 - RNA, 19 nt, Artificial Sequence
  Description of Artificial Sequence: Synthetic oligonucleotide
ugacauccacaugggcuuc

SEQ ID NO: 2391682 - RNA, 19 nt, Artificial Sequence
  Description of Artificial Sequence: Synthetic oligonucleotide
cucaguaauuagcuugaau

SEQ ID NO: 2391683 - RNA, 19 nt, Artificial Sequence
  Description of Artificial Sequence: Synthetic oligonucleotide
gaggucuugcguaucuggu

SEQ ID NO: 2391684 - RNA, 19 nt, Artificial Sequence
  Description of Artificial Sequence: Synthetic oligonucleotide
cauaggaggucuugcguau

SEQ ID NO: 2391685 - RNA, 19 nt, Artificial Sequence
  Description of Artificial Sequence: Synthetic oligonucleotide
gaugcaauuuugguuccuu

SEQ ID NO: 2391686 - RNA, 19 nt, Artificial Sequence
  Description of Artificial Sequence: Synthetic oligonucleotide
ucuugcguaucugguuguu

SEQ ID NO: 2391687 - RNA, 19 nt, Artificial Sequence
  Description of Artificial Sequence: Synthetic oligonucleotide
ggugcugugcauaggaggu

SEQ ID NO: 2391688 - RNA, 19 nt, Artificial Sequence
  Description of Artificial Sequence: Synthetic oligonucleotide
ugguuccuugaguccucgu

SEQ ID NO: 2391689 - RNA, 19 nt, Artificial Sequence
  Description of Artificial Sequence: Synthetic oligonucleotide
uggguuucuucagcauuuu

SEQ ID NO: 2391690 - RNA, 19 nt, Artificial Sequence
  Description of Artificial Sequence: Synthetic oligonucleotide
ucauauccaucagcucguu

SEQ ID NO: 2391691 - RNA, 19 nt, Artificial Sequence
  Description of Artificial Sequence: Synthetic oligonucleotide
ggguaagauccaugccaug

SEQ ID NO: 2391692 - RNA, 19 nt, Artificial Sequence
  Description of Artificial Sequence: Synthetic oligonucleotide
ggacuggcaagccuuuucu

SEQ ID NO: 2391693 - RNA, 19 nt, Artificial Sequence
  Description of Artificial Sequence: Synthetic oligonucleotide
gcaagccuuuucuaugucu

SEQ ID NO: 2391694 - RNA, 19 nt, Artificial Sequence
  Description of Artificial Sequence: Synthetic oligonucleotide
ugcggaucuggcggaccug

SEQ ID NO: 2391695 - RNA, 19 nt, Artificial Sequence
  Description of Artificial Sequence: Synthetic oligonucleotide
acgacccuugaggccauca

SEQ ID NO: 2391696 - RNA, 19 nt, Artificial Sequence
  Description of Artificial Sequence: Synthetic oligonucleotide
ucgcaggcgcuuucacguc

SEQ ID NO: 2391697 - RNA, 19 nt, Artificial Sequence
  Description of Artificial Sequence: Synthetic oligonucleotide
cacagaacagacggagcaa

SEQ ID NO: 2391698 - RNA, 19 nt, Artificial Sequence
  Description of Artificial Sequence: Synthetic oligonucleotide
gaaguuagucagacaguuu

SEQ ID NO: 2391699 - RNA, 19 nt, Artificial Sequence
  Description of Artificial Sequence: Synthetic oligonucleotide
ucuugccgaccgccauggu

SEQ ID NO: 2391700 - RNA, 19 nt, Artificial Sequence
  Description of Artificial Sequence: Synthetic oligonucleotide
cccuucuugccgccuuucg

SEQ ID NO: 2391701 - RNA, 19 nt, Artificial Sequence
  Description of Artificial Sequence: Synthetic oligonucleotide
cgcuuucacgucauaccag

SEQ ID NO: 2391702 - RNA, 19 nt, Artificial Sequence
  Description of Artificial Sequence: Synthetic oligonucleotide
cugucucaucaccaguagu

SEQ ID NO: 2391703 - RNA, 19 nt, Artificial Sequence
  Description of Artificial Sequence: Synthetic oligonucleotide
ggcucacuucaaacacacg

SEQ ID NO: 2391704 - RNA, 19 nt, Artificial Sequence
  Description of Artificial Sequence: Synthetic oligonucleotide
ccagaacuaccuccuucac

SEQ ID NO: 2391705 - RNA, 19 nt, Artificial Sequence
  Description of Artificial Sequence: Synthetic oligonucleotide
cccggguaagauccaugcc

SEQ ID NO: 2391706 - RNA, 19 nt, Artificial Sequence
  Description of Artificial Sequence: Synthetic oligonucleotide
cgugacuaguguuuuccca

SEQ ID NO: 2391707 - RNA, 19 nt, Artificial Sequence
  Description of Artificial Sequence: Synthetic oligonucleotide
cuucgucauucugcagauc

SEQ ID NO: 2391708 - RNA, 19 nt, Artificial Sequence
  Description of Artificial Sequence: Synthetic oligonucleotide
cgucaggcgcuuauucuug

SEQ ID NO: 2391709 - RNA, 19 nt, Artificial Sequence
  Description of Artificial Sequence: Synthetic oligonucleotide
gcggaucuggcggaccugc

SEQ ID NO: 2391710 - RNA, 19 nt, Artificial Sequence
  Description of Artificial Sequence: Synthetic oligonucleotide
gugcugugcauaggagguc

SEQ ID NO: 2391711 - RNA, 19 nt, Artificial Sequence
  Description of Artificial Sequence: Synthetic oligonucleotide
ccauggagcuccaugaguu

SEQ ID NO: 2391712 - RNA, 19 nt, Artificial Sequence
  Description of Artificial Sequence: Synthetic oligonucleotide
cccugaacauccucaguaa

SEQ ID NO: 2391713 - RNA, 19 nt, Artificial Sequence
  Description of Artificial Sequence: Synthetic oligonucleotide
cggagcaaauaaccaucag

SEQ ID NO: 2391714 - RNA, 19 nt, Artificial Sequence
  Description of Artificial Sequence: Synthetic oligonucleotide
gaacuaccuccuucaccau

SEQ ID NO: 2391715 - RNA, 19 nt, Artificial Sequence
  Description of Artificial Sequence: Synthetic oligonucleotide
guacuucucgggucaugau

SEQ ID NO: 2391716 - RNA, 19 nt, Artificial Sequence
  Description of Artificial Sequence: Synthetic oligonucleotide
ccucgugacuaguguuuuc

SEQ ID NO: 2391717 - RNA, 19 nt, Artificial Sequence
  Description of Artificial Sequence: Synthetic oligonucleotide
cagaucagcaaggcucacu

SEQ ID NO: 2391718 - RNA, 19 nt, Artificial Sequence
  Description of Artificial Sequence: Synthetic oligonucleotide
caaugcugucuggaaucaa

SEQ ID NO: 2391719 - RNA, 19 nt, Artificial Sequence
  Description of Artificial Sequence: Synthetic oligonucleotide
cauggagcuccaugaguuu

SEQ ID NO: 2391720 - RNA, 19 nt, Artificial Sequence
  Description of Artificial Sequence: Synthetic oligonucleotide
ccaaugcugucuggaauca

SEQ ID NO: 2391721 - RNA, 19 nt, Artificial Sequence
  Description of Artificial Sequence: Synthetic oligonucleotide
guccucgugacuaguguuu

SEQ ID NO: 2391722 - RNA, 19 nt, Artificial Sequence
  Description of Artificial Sequence: Synthetic oligonucleotide
caccugucucaucaccagu

SEQ ID NO: 2391723 - RNA, 19 nt, Artificial Sequence
  Description of Artificial Sequence: Synthetic oligonucleotide
gccauggaaguuagucaga

SEQ ID NO: 2391724 - RNA, 19 nt, Artificial Sequence
  Description of Artificial Sequence: Synthetic oligonucleotide
caugggcuucaaucauagu

SEQ ID NO: 2391725 - RNA, 19 nt, Artificial Sequence
  Description of Artificial Sequence: Synthetic oligonucleotide
gcguaucugguuguugcgu

SEQ ID NO: 2391726 - RNA, 19 nt, Artificial Sequence
  Description of Artificial Sequence: Synthetic oligonucleotide
ccuucuugccgccuuucgu

SEQ ID NO: 2391727 - RNA, 19 nt, Artificial Sequence
  Description of Artificial Sequence: Synthetic oligonucleotide
gcagaucagcaaggcucac

SEQ ID NO: 2391728 - RNA, 19 nt, Artificial Sequence
  Description of Artificial Sequence: Synthetic oligonucleotide
acacgacccuugaggccau

SEQ ID NO: 2391729 - RNA, 19 nt, Artificial Sequence
  Description of Artificial Sequence: Synthetic oligonucleotide
ccgccuuucgucaggcgcu

SEQ ID NO: 2391730 - RNA, 19 nt, Artificial Sequence
  Description of Artificial Sequence: Synthetic oligonucleotide
cggguaagauccaugccau

SEQ ID NO: 2391731 - RNA, 19 nt, Artificial Sequence
  Description of Artificial Sequence: Synthetic oligonucleotide
ccuuucgucaggcgcuuau

SEQ ID NO: 2391732 - RNA, 19 nt, Artificial Sequence
  Description of Artificial Sequence: Synthetic oligonucleotide
cgcaggcgcuuucacguca

SEQ ID NO: 2391733 - RNA, 19 nt, Artificial Sequence
  Description of Artificial Sequence: Synthetic oligonucleotide
cguaucugguuguugcguu

SEQ ID NO: 2391734 - RNA, 19 nt, Artificial Sequence
  Description of Artificial Sequence: Synthetic oligonucleotide
cacgacccuugaggccauc

SEQ ID NO: 2391735 - RNA, 19 nt, Artificial Sequence
  Description of Artificial Sequence: Synthetic oligonucleotide
caggcgcuuucacgucaua

SEQ ID NO: 2391736 - RNA, 19 nt, Artificial Sequence
  Description of Artificial Sequence: Synthetic oligonucleotide
ccucaguaauuagcuugaa

SEQ ID NO: 2391737 - RNA, 19 nt, Artificial Sequence
  Description of Artificial Sequence: Synthetic oligonucleotide
gcaggcgcuuucacgucau

SEQ ID NO: 2391738 - RNA, 19 nt, Artificial Sequence
  Description of Artificial Sequence: Synthetic oligonucleotide
ccaugccauggaaguuagu

SEQ ID NO: 2391739 - RNA, 19 nt, Artificial Sequence
  Description of Artificial Sequence: Synthetic oligonucleotide
gcgcccuucuugccgccuu

SEQ ID NO: 2391740 - RNA, 19 nt, Artificial Sequence
  Description of Artificial Sequence: Synthetic oligonucleotide
gccuuucgucaggcgcuua

SEQ ID NO: 2391741 - RNA, 19 nt, Artificial Sequence
  Description of Artificial Sequence: Synthetic oligonucleotide
ggcgcccuucuugccgccu

SEQ ID NO: 2391742 - RNA, 19 nt, Artificial Sequence
  Description of Artificial Sequence: Synthetic oligonucleotide
cgccuuucgucaggcgcuu

SEQ ID NO: 2391743 - RNA, 19 nt, Artificial Sequence
  Description of Artificial Sequence: Synthetic oligonucleotide
gaaagaagcagauccaucc

SEQ ID NO: 2391744 - RNA, 19 nt, Artificial Sequence
  Description of Artificial Sequence: Synthetic oligonucleotide
agugauucucgguagaaac

SEQ ID NO: 2391745 - RNA, 19 nt, Artificial Sequence
  Description of Artificial Sequence: Synthetic oligonucleotide
uuugguguuagacaucagc

SEQ ID NO: 2391746 - RNA, 19 nt, Artificial Sequence
  Description of Artificial Sequence: Synthetic oligonucleotide
ucggcauccgaauagagcc

SEQ ID NO: 2391747 - RNA, 19 nt, Artificial Sequence
  Description of Artificial Sequence: Synthetic oligonucleotide
uugaagauuucuuugcuga

SEQ ID NO: 2391748 - RNA, 19 nt, Artificial Sequence
  Description of Artificial Sequence: Synthetic oligonucleotide
ugauucucgguagaaacgg

SEQ ID NO: 2391749 - RNA, 19 nt, Artificial Sequence
  Description of Artificial Sequence: Synthetic oligonucleotide
cacagagagagguagagug

SEQ ID NO: 2391750 - RNA, 19 nt, Artificial Sequence
  Description of Artificial Sequence: Synthetic oligonucleotide
cacgagauugccaucagag

SEQ ID NO: 2391751 - RNA, 19 nt, Artificial Sequence
  Description of Artificial Sequence: Synthetic oligonucleotide
uccgaauagagcccuuugg

SEQ ID NO: 2391752 - RNA, 19 nt, Artificial Sequence
  Description of Artificial Sequence: Synthetic oligonucleotide
agaaccacggcuucacacg

SEQ ID NO: 2391753 - RNA, 19 nt, Artificial Sequence
  Description of Artificial Sequence: Synthetic oligonucleotide
ucuggcuugucucagcucu

SEQ ID NO: 2391754 - RNA, 19 nt, Artificial Sequence
  Description of Artificial Sequence: Synthetic oligonucleotide
aaaugccggaggcugcagc

SEQ ID NO: 2391755 - RNA, 19 nt, Artificial Sequence
  Description of Artificial Sequence: Synthetic oligonucleotide
ucgaguguggccuuguuga

SEQ ID NO: 2391756 - RNA, 19 nt, Artificial Sequence
  Description of Artificial Sequence: Synthetic oligonucleotide
ucuagcacgagauugccau

SEQ ID NO: 2391757 - RNA, 19 nt, Artificial Sequence
  Description of Artificial Sequence: Synthetic oligonucleotide
caccuugcaggaaagaagc

SEQ ID NO: 2391758 - RNA, 19 nt, Artificial Sequence
  Description of Artificial Sequence: Synthetic oligonucleotide
agaaacggaagauguguuc

SEQ ID NO: 2391759 - RNA, 19 nt, Artificial Sequence
  Description of Artificial Sequence: Synthetic oligonucleotide
uucgcaggcgaaaugccgg

SEQ ID NO: 2391760 - RNA, 19 nt, Artificial Sequence
  Description of Artificial Sequence: Synthetic oligonucleotide
uguugaagauuucuuugcu

SEQ ID NO: 2391761 - RNA, 19 nt, Artificial Sequence
  Description of Artificial Sequence: Synthetic oligonucleotide
augcaggcagcguucaggc

SEQ ID NO: 2391762 - RNA, 19 nt, Artificial Sequence
  Description of Artificial Sequence: Synthetic oligonucleotide
ugcuauaggacuggaagcc

SEQ ID NO: 2391763 - RNA, 19 nt, Artificial Sequence
  Description of Artificial Sequence: Synthetic oligonucleotide
ugguguuagacaucagcag

SEQ ID NO: 2391764 - RNA, 19 nt, Artificial Sequence
  Description of Artificial Sequence: Synthetic oligonucleotide
aacaggccaagagggagcc

SEQ ID NO: 2391765 - RNA, 19 nt, Artificial Sequence
  Description of Artificial Sequence: Synthetic oligonucleotide
uucucgguagaaacggaag

SEQ ID NO: 2391766 - RNA, 19 nt, Artificial Sequence
  Description of Artificial Sequence: Synthetic oligonucleotide
cuugucucagcucuuggag

SEQ ID NO: 2391767 - RNA, 19 nt, Artificial Sequence
  Description of Artificial Sequence: Synthetic oligonucleotide
ggaagauguguucugaggc

SEQ ID NO: 2391768 - RNA, 19 nt, Artificial Sequence
  Description of Artificial Sequence: Synthetic oligonucleotide
aagauguguucugaggcag

SEQ ID NO: 2391769 - RNA, 19 nt, Artificial Sequence
  Description of Artificial Sequence: Synthetic oligonucleotide
aaacggaagauguguucug

SEQ ID NO: 2391770 - RNA, 19 nt, Artificial Sequence
  Description of Artificial Sequence: Synthetic oligonucleotide
gaagagagcccgcaugggc

SEQ ID NO: 2391771 - RNA, 19 nt, Artificial Sequence
  Description of Artificial Sequence: Synthetic oligonucleotide
aucacuucgaguguggccu

SEQ ID NO: 2391772 - RNA, 19 nt, Artificial Sequence
  Description of Artificial Sequence: Synthetic oligonucleotide
gguguuagacaucagcagc

SEQ ID NO: 2391773 - RNA, 19 nt, Artificial Sequence
  Description of Artificial Sequence: Synthetic oligonucleotide
cagcguucaggcaacaggc

SEQ ID NO: 2391774 - RNA, 19 nt, Artificial Sequence
  Description of Artificial Sequence: Synthetic oligonucleotide
cugcuauaggacuggaagc

SEQ ID NO: 2391775 - RNA, 19 nt, Artificial Sequence
  Description of Artificial Sequence: Synthetic oligonucleotide
gaauagagcccuuuggugu

SEQ ID NO: 2391776 - RNA, 19 nt, Artificial Sequence
  Description of Artificial Sequence: Synthetic oligonucleotide
agagagguagaguggaggu

SEQ ID NO: 2391777 - RNA, 19 nt, Artificial Sequence
  Description of Artificial Sequence: Synthetic oligonucleotide
agauccauccggccgggac

SEQ ID NO: 2391778 - RNA, 19 nt, Artificial Sequence
  Description of Artificial Sequence: Synthetic oligonucleotide
guacacuccagccaggaca

SEQ ID NO: 2391779 - RNA, 19 nt, Artificial Sequence
  Description of Artificial Sequence: Synthetic oligonucleotide
uccaucgccgccgagcacg

SEQ ID NO: 2391780 - RNA, 19 nt, Artificial Sequence
  Description of Artificial Sequence: Synthetic oligonucleotide
cacguguuccugaucagcc

SEQ ID NO: 2391781 - RNA, 19 nt, Artificial Sequence
  Description of Artificial Sequence: Synthetic oligonucleotide
acggcuucacacguguucc

SEQ ID NO: 2391782 - RNA, 19 nt, Artificial Sequence
  Description of Artificial Sequence: Synthetic oligonucleotide
gaagauguguucugaggca

SEQ ID NO: 2391783 - RNA, 19 nt, Artificial Sequence
  Description of Artificial Sequence: Synthetic oligonucleotide
uucgaguguggccuuguug

SEQ ID NO: 2391784 - RNA, 19 nt, Artificial Sequence
  Description of Artificial Sequence: Synthetic oligonucleotide
uauaggacuggaagccaca

SEQ ID NO: 2391785 - RNA, 19 nt, Artificial Sequence
  Description of Artificial Sequence: Synthetic oligonucleotide
uuccugaucagccgcuccc

SEQ ID NO: 2391786 - RNA, 19 nt, Artificial Sequence
  Description of Artificial Sequence: Synthetic oligonucleotide
gugauucucgguagaaacg

SEQ ID NO: 2391787 - RNA, 19 nt, Artificial Sequence
  Description of Artificial Sequence: Synthetic oligonucleotide
aucgccgccgagcacgcgc

SEQ ID NO: 2391788 - RNA, 19 nt, Artificial Sequence
  Description of Artificial Sequence: Synthetic oligonucleotide
cucggcauccgaauagagc

SEQ ID NO: 2391789 - RNA, 19 nt, Artificial Sequence
  Description of Artificial Sequence: Synthetic oligonucleotide
cuauaggacuggaagccac

SEQ ID NO: 2391790 - RNA, 19 nt, Artificial Sequence
  Description of Artificial Sequence: Synthetic oligonucleotide
uguucgcaggcgaaaugcc

SEQ ID NO: 2391791 - RNA, 19 nt, Artificial Sequence
  Description of Artificial Sequence: Synthetic oligonucleotide
ugggcacagagagagguag

SEQ ID NO: 2391792 - RNA, 19 nt, Artificial Sequence
  Description of Artificial Sequence: Synthetic oligonucleotide
caagagggagccugcgucg

SEQ ID NO: 2391793 - RNA, 19 nt, Artificial Sequence
  Description of Artificial Sequence: Synthetic oligonucleotide
ucuguucgcaggcgaaaug

SEQ ID NO: 2391794 - RNA, 19 nt, Artificial Sequence
  Description of Artificial Sequence: Synthetic oligonucleotide
ggucguggggucuagcacg

SEQ ID NO: 2391795 - RNA, 19 nt, Artificial Sequence
  Description of Artificial Sequence: Synthetic oligonucleotide
ucuccaucgccgccgagca

SEQ ID NO: 2391796 - RNA, 19 nt, Artificial Sequence
  Description of Artificial Sequence: Synthetic oligonucleotide
cuguucgcaggcgaaaugc

SEQ ID NO: 2391797 - RNA, 19 nt, Artificial Sequence
  Description of Artificial Sequence: Synthetic oligonucleotide
gaccccgcagaagagagcc

SEQ ID NO: 2391798 - RNA, 19 nt, Artificial Sequence
  Description of Artificial Sequence: Synthetic oligonucleotide
ugucucagcucuuggagua

SEQ ID NO: 2391799 - RNA, 19 nt, Artificial Sequence
  Description of Artificial Sequence: Synthetic oligonucleotide
uugucucagcucuuggagu

SEQ ID NO: 2391800 - RNA, 19 nt, Artificial Sequence
  Description of Artificial Sequence: Synthetic oligonucleotide
gagcucggcauccgaauag

SEQ ID NO: 2391801 - RNA, 19 nt, Artificial Sequence
  Description of Artificial Sequence: Synthetic oligonucleotide
cagaaccacggcuucacac

SEQ ID NO: 2391802 - RNA, 19 nt, Artificial Sequence
  Description of Artificial Sequence: Synthetic oligonucleotide
acguguuccugaucagccg

SEQ ID NO: 2391803 - RNA, 19 nt, Artificial Sequence
  Description of Artificial Sequence: Synthetic oligonucleotide
gagguaucaccuugcagga

SEQ ID NO: 2391804 - RNA, 19 nt, Artificial Sequence
  Description of Artificial Sequence: Synthetic oligonucleotide
uuggucguggggucuagca

SEQ ID NO: 2391805 - RNA, 19 nt, Artificial Sequence
  Description of Artificial Sequence: Synthetic oligonucleotide
cugaccccgcagaagagag

SEQ ID NO: 2391806 - RNA, 19 nt, Artificial Sequence
  Description of Artificial Sequence: Synthetic oligonucleotide
uagaaacggaagauguguu

SEQ ID NO: 2391807 - RNA, 19 nt, Artificial Sequence
  Description of Artificial Sequence: Synthetic oligonucleotide
uuggaguagcgccucugca

SEQ ID NO: 2391808 - RNA, 19 nt, Artificial Sequence
  Description of Artificial Sequence: Synthetic oligonucleotide
aacggaagauguguucuga

SEQ ID NO: 2391809 - RNA, 19 nt, Artificial Sequence
  Description of Artificial Sequence: Synthetic oligonucleotide
uucuugcuuggucgugggg

SEQ ID NO: 2391810 - RNA, 19 nt, Artificial Sequence
  Description of Artificial Sequence: Synthetic oligonucleotide
gaucuucggccucaggauc

SEQ ID NO: 2391811 - RNA, 19 nt, Artificial Sequence
  Description of Artificial Sequence: Synthetic oligonucleotide
uagcacgagauugccauca

SEQ ID NO: 2391812 - RNA, 19 nt, Artificial Sequence
  Description of Artificial Sequence: Synthetic oligonucleotide
uugcaggaaagaagcagau

SEQ ID NO: 2391813 - RNA, 19 nt, Artificial Sequence
  Description of Artificial Sequence: Synthetic oligonucleotide
gacagagguaucaccuugc

SEQ ID NO: 2391814 - RNA, 19 nt, Artificial Sequence
  Description of Artificial Sequence: Synthetic oligonucleotide
acgagauugccaucagagu

SEQ ID NO: 2391815 - RNA, 19 nt, Artificial Sequence
  Description of Artificial Sequence: Synthetic oligonucleotide
guucgcaggcgaaaugccg

SEQ ID NO: 2391816 - RNA, 19 nt, Artificial Sequence
  Description of Artificial Sequence: Synthetic oligonucleotide
guagaaacggaagaugugu

SEQ ID NO: 2391817 - RNA, 19 nt, Artificial Sequence
  Description of Artificial Sequence: Synthetic oligonucleotide
acgccaggcagcccgaucu

SEQ ID NO: 2391818 - RNA, 19 nt, Artificial Sequence
  Description of Artificial Sequence: Synthetic oligonucleotide
gauccauccggccgggaca

SEQ ID NO: 2391819 - RNA, 19 nt, Artificial Sequence
  Description of Artificial Sequence: Synthetic oligonucleotide
accgugauggagguucggg

SEQ ID NO: 2391820 - RNA, 19 nt, Artificial Sequence
  Description of Artificial Sequence: Synthetic oligonucleotide
uggucguggggucuagcac

SEQ ID NO: 2391821 - RNA, 19 nt, Artificial Sequence
  Description of Artificial Sequence: Synthetic oligonucleotide
uggcccguacacuccagcc

SEQ ID NO: 2391822 - RNA, 19 nt, Artificial Sequence
  Description of Artificial Sequence: Synthetic oligonucleotide
aucaccuugcaggaaagaa

SEQ ID NO: 2391823 - RNA, 19 nt, Artificial Sequence
  Description of Artificial Sequence: Synthetic oligonucleotide
accacggcuucacacgugu

SEQ ID NO: 2391824 - RNA, 19 nt, Artificial Sequence
  Description of Artificial Sequence: Synthetic oligonucleotide
cuugcuuggucgugggguc

SEQ ID NO: 2391825 - RNA, 19 nt, Artificial Sequence
  Description of Artificial Sequence: Synthetic oligonucleotide
agaagagagcccgcauggg

SEQ ID NO: 2391826 - RNA, 19 nt, Artificial Sequence
  Description of Artificial Sequence: Synthetic oligonucleotide
uucggccucaggaucacuu

SEQ ID NO: 2391827 - RNA, 19 nt, Artificial Sequence
  Description of Artificial Sequence: Synthetic oligonucleotide
uccugaucagccgcucccg

SEQ ID NO: 2391828 - RNA, 19 nt, Artificial Sequence
  Description of Artificial Sequence: Synthetic oligonucleotide
cagagcaaaggucaggaua

SEQ ID NO: 2391829 - RNA, 19 nt, Artificial Sequence
  Description of Artificial Sequence: Synthetic oligonucleotide
cuucgcgaucuccaucgcc

SEQ ID NO: 2391830 - RNA, 19 nt, Artificial Sequence
  Description of Artificial Sequence: Synthetic oligonucleotide
agcguucaggcaacaggcc

SEQ ID NO: 2391831 - RNA, 19 nt, Artificial Sequence
  Description of Artificial Sequence: Synthetic oligonucleotide
cuccacgcuguccagagca

SEQ ID NO: 2391832 - RNA, 19 nt, Artificial Sequence
  Description of Artificial Sequence: Synthetic oligonucleotide
ggacagagguaucaccuug

SEQ ID NO: 2391833 - RNA, 19 nt, Artificial Sequence
  Description of Artificial Sequence: Synthetic oligonucleotide
cuugcucuggcuugucuca

SEQ ID NO: 2391834 - RNA, 19 nt, Artificial Sequence
  Description of Artificial Sequence: Synthetic oligonucleotide
acgcuguccagagcaaagg

SEQ ID NO: 2391835 - RNA, 19 nt, Artificial Sequence
  Description of Artificial Sequence: Synthetic oligonucleotide
uggaggugcuggcgugugg

SEQ ID NO: 2391836 - RNA, 19 nt, Artificial Sequence
  Description of Artificial Sequence: Synthetic oligonucleotide
cgagauugccaucagaguc

SEQ ID NO: 2391837 - RNA, 19 nt, Artificial Sequence
  Description of Artificial Sequence: Synthetic oligonucleotide
agguucuguucgcaggcga

SEQ ID NO: 2391838 - RNA, 19 nt, Artificial Sequence
  Description of Artificial Sequence: Synthetic oligonucleotide
cuucucagccacgccaggc

SEQ ID NO: 2391839 - RNA, 19 nt, Artificial Sequence
  Description of Artificial Sequence: Synthetic oligonucleotide
agcacgagauugccaucag

SEQ ID NO: 2391840 - RNA, 19 nt, Artificial Sequence
  Description of Artificial Sequence: Synthetic oligonucleotide
guuccugaucagccgcucc

SEQ ID NO: 2391841 - RNA, 19 nt, Artificial Sequence
  Description of Artificial Sequence: Synthetic oligonucleotide
gguagaaacggaagaugug

SEQ ID NO: 2391842 - RNA, 19 nt, Artificial Sequence
  Description of Artificial Sequence: Synthetic oligonucleotide
auccggccgggacagcagg

SEQ ID NO: 2391843 - RNA, 19 nt, Artificial Sequence
  Description of Artificial Sequence: Synthetic oligonucleotide
aggaucacuucgagugugg

SEQ ID NO: 2391844 - RNA, 19 nt, Artificial Sequence
  Description of Artificial Sequence: Synthetic oligonucleotide
uaucaccuugcaggaaaga

SEQ ID NO: 2391845 - RNA, 19 nt, Artificial Sequence
  Description of Artificial Sequence: Synthetic oligonucleotide
gagccugcgucgcucacca

SEQ ID NO: 2391846 - RNA, 19 nt, Artificial Sequence
  Description of Artificial Sequence: Synthetic oligonucleotide
ggucaggauagcccgggcc

SEQ ID NO: 2391847 - RNA, 19 nt, Artificial Sequence
  Description of Artificial Sequence: Synthetic oligonucleotide
ugcaggaaagaagcagauc

SEQ ID NO: 2391848 - RNA, 19 nt, Artificial Sequence
  Description of Artificial Sequence: Synthetic oligonucleotide
acgcuucgcgaucuccauc

SEQ ID NO: 2391849 - RNA, 19 nt, Artificial Sequence
  Description of Artificial Sequence: Synthetic oligonucleotide
ggcgaaaugccggaggcug

SEQ ID NO: 2391850 - RNA, 19 nt, Artificial Sequence
  Description of Artificial Sequence: Synthetic oligonucleotide
gcguguggcagcuggaggc

SEQ ID NO: 2391851 - RNA, 19 nt, Artificial Sequence
  Description of Artificial Sequence: Synthetic oligonucleotide
uguggcagcuggaggcggu

SEQ ID NO: 2391852 - RNA, 19 nt, Artificial Sequence
  Description of Artificial Sequence: Synthetic oligonucleotide
ugaccccgcagaagagagc

SEQ ID NO: 2391853 - RNA, 19 nt, Artificial Sequence
  Description of Artificial Sequence: Synthetic oligonucleotide
uucuguucgcaggcgaaau

SEQ ID NO: 2391854 - RNA, 19 nt, Artificial Sequence
  Description of Artificial Sequence: Synthetic oligonucleotide
cgcuucgcgaucuccaucg

SEQ ID NO: 2391855 - RNA, 19 nt, Artificial Sequence
  Description of Artificial Sequence: Synthetic oligonucleotide
cacacguguuccugaucag

SEQ ID NO: 2391856 - RNA, 19 nt, Artificial Sequence
  Description of Artificial Sequence: Synthetic oligonucleotide
cgaauagagcccuuuggug

SEQ ID NO: 2391857 - RNA, 19 nt, Artificial Sequence
  Description of Artificial Sequence: Synthetic oligonucleotide
gauucucgguagaaacgga

SEQ ID NO: 2391858 - RNA, 19 nt, Artificial Sequence
  Description of Artificial Sequence: Synthetic oligonucleotide
cagcagguucuguucgcag

SEQ ID NO: 2391859 - RNA, 19 nt, Artificial Sequence
  Description of Artificial Sequence: Synthetic oligonucleotide
gcccguacacuccagccag

SEQ ID NO: 2391860 - RNA, 19 nt, Artificial Sequence
  Description of Artificial Sequence: Synthetic oligonucleotide
aggacagagguaucaccuu

SEQ ID NO: 2391861 - RNA, 19 nt, Artificial Sequence
  Description of Artificial Sequence: Synthetic oligonucleotide
ucgcaggcgaaaugccgga

SEQ ID NO: 2391862 - RNA, 19 nt, Artificial Sequence
  Description of Artificial Sequence: Synthetic oligonucleotide
ucggccucaggaucacuuc

SEQ ID NO: 2391863 - RNA, 19 nt, Artificial Sequence
  Description of Artificial Sequence: Synthetic oligonucleotide
uggcuugucucagcucuug

SEQ ID NO: 2391864 - RNA, 19 nt, Artificial Sequence
  Description of Artificial Sequence: Synthetic oligonucleotide
ccgugauggagguucgggg

SEQ ID NO: 2391865 - RNA, 19 nt, Artificial Sequence
  Description of Artificial Sequence: Synthetic oligonucleotide
uagagcccuuugguguuag

SEQ ID NO: 2391866 - RNA, 19 nt, Artificial Sequence
  Description of Artificial Sequence: Synthetic oligonucleotide
cuagcacgagauugccauc

SEQ ID NO: 2391867 - RNA, 19 nt, Artificial Sequence
  Description of Artificial Sequence: Synthetic oligonucleotide
agagcccgcaugggcacac

SEQ ID NO: 2391868 - RNA, 19 nt, Artificial Sequence
  Description of Artificial Sequence: Synthetic oligonucleotide
gaaccacggcuucacacgu

SEQ ID NO: 2391869 - RNA, 19 nt, Artificial Sequence
  Description of Artificial Sequence: Synthetic oligonucleotide
ugggcacaccugcauccac

SEQ ID NO: 2391870 - RNA, 19 nt, Artificial Sequence
  Description of Artificial Sequence: Synthetic oligonucleotide
gccugcgucgcucaccacc

SEQ ID NO: 2391871 - RNA, 19 nt, Artificial Sequence
  Description of Artificial Sequence: Synthetic oligonucleotide
ggcguguggcagcuggagg

SEQ ID NO: 2391872 - RNA, 19 nt, Artificial Sequence
  Description of Artificial Sequence: Synthetic oligonucleotide
cuggcccguacacuccagc

SEQ ID NO: 2391873 - RNA, 19 nt, Artificial Sequence
  Description of Artificial Sequence: Synthetic oligonucleotide
ccaggcagcccgaucuucg

SEQ ID NO: 2391874 - RNA, 19 nt, Artificial Sequence
  Description of Artificial Sequence: Synthetic oligonucleotide
cagcuggaggcggugggcg

SEQ ID NO: 2391875 - RNA, 19 nt, Artificial Sequence
  Description of Artificial Sequence: Synthetic oligonucleotide
cagguucuguucgcaggcg

SEQ ID NO: 2391876 - RNA, 19 nt, Artificial Sequence
  Description of Artificial Sequence: Synthetic oligonucleotide
cauccggccgggacagcag

SEQ ID NO: 2391877 - RNA, 19 nt, Artificial Sequence
  Description of Artificial Sequence: Synthetic oligonucleotide
ggaggugcuggcguguggc

SEQ ID NO: 2391878 - RNA, 19 nt, Artificial Sequence
  Description of Artificial Sequence: Synthetic oligonucleotide
uccgcacgcuucgcgaucu

SEQ ID NO: 2391879 - RNA, 19 nt, Artificial Sequence
  Description of Artificial Sequence: Synthetic oligonucleotide
agggguggacuugcucugg

SEQ ID NO: 2391880 - RNA, 19 nt, Artificial Sequence
  Description of Artificial Sequence: Synthetic oligonucleotide
agugccaugcaggcagcgu

SEQ ID NO: 2391881 - RNA, 19 nt, Artificial Sequence
  Description of Artificial Sequence: Synthetic oligonucleotide
gcgaucuccaucgccgccg

SEQ ID NO: 2391882 - RNA, 19 nt, Artificial Sequence
  Description of Artificial Sequence: Synthetic oligonucleotide
augccggaggcugcagccg

SEQ ID NO: 2391883 - RNA, 19 nt, Artificial Sequence
  Description of Artificial Sequence: Synthetic oligonucleotide
agcucggcauccgaauaga

SEQ ID NO: 2391884 - RNA, 19 nt, Artificial Sequence
  Description of Artificial Sequence: Synthetic oligonucleotide
ggucuagcacgagauugcc

SEQ ID NO: 2391885 - RNA, 19 nt, Artificial Sequence
  Description of Artificial Sequence: Synthetic oligonucleotide
cccgcaugggcacaccugc

SEQ ID NO: 2391886 - RNA, 19 nt, Artificial Sequence
  Description of Artificial Sequence: Synthetic oligonucleotide
aguccagggcacagcugac

SEQ ID NO: 2391887 - RNA, 19 nt, Artificial Sequence
  Description of Artificial Sequence: Synthetic oligonucleotide
ccuuugguguuagacauca

SEQ ID NO: 2391888 - RNA, 19 nt, Artificial Sequence
  Description of Artificial Sequence: Synthetic oligonucleotide
uggggucuagcacgagauu

SEQ ID NO: 2391889 - RNA, 19 nt, Artificial Sequence
  Description of Artificial Sequence: Synthetic oligonucleotide
aaccacggcuucacacgug

SEQ ID NO: 2391890 - RNA, 19 nt, Artificial Sequence
  Description of Artificial Sequence: Synthetic oligonucleotide
accucggcuggcccguaca

SEQ ID NO: 2391891 - RNA, 19 nt, Artificial Sequence
  Description of Artificial Sequence: Synthetic oligonucleotide
gccucaggaucacuucgag

SEQ ID NO: 2391892 - RNA, 19 nt, Artificial Sequence
  Description of Artificial Sequence: Synthetic oligonucleotide
gacuccgcgggccgggcuc

SEQ ID NO: 2391893 - RNA, 19 nt, Artificial Sequence
  Description of Artificial Sequence: Synthetic oligonucleotide
aguggaggugcuggcgugu

SEQ ID NO: 2391894 - RNA, 19 nt, Artificial Sequence
  Description of Artificial Sequence: Synthetic oligonucleotide
gcguucaggcaacaggcca

SEQ ID NO: 2391895 - RNA, 19 nt, Artificial Sequence
  Description of Artificial Sequence: Synthetic oligonucleotide
gaucagccgcucccggcuc

SEQ ID NO: 2391896 - RNA, 19 nt, Artificial Sequence
  Description of Artificial Sequence: Synthetic oligonucleotide
cagcucggcguccgcacgc

SEQ ID NO: 2391897 - RNA, 19 nt, Artificial Sequence
  Description of Artificial Sequence: Synthetic oligonucleotide
cucccagaaccacggcuuc

SEQ ID NO: 2391898 - RNA, 19 nt, Artificial Sequence
  Description of Artificial Sequence: Synthetic oligonucleotide
guccagggcacagcugacc

SEQ ID NO: 2391899 - RNA, 19 nt, Artificial Sequence
  Description of Artificial Sequence: Synthetic oligonucleotide
caggauagcccgggccucc

SEQ ID NO: 2391900 - RNA, 19 nt, Artificial Sequence
  Description of Artificial Sequence: Synthetic oligonucleotide
agagggagccugcgucgcu

SEQ ID NO: 2391901 - RNA, 19 nt, Artificial Sequence
  Description of Artificial Sequence: Synthetic oligonucleotide
ggaucacuucgaguguggc

SEQ ID NO: 2391902 - RNA, 19 nt, Artificial Sequence
  Description of Artificial Sequence: Synthetic oligonucleotide
ggcguccgcacgcuucgcg

SEQ ID NO: 2391903 - RNA, 19 nt, Artificial Sequence
  Description of Artificial Sequence: Synthetic oligonucleotide
cuuggucguggggucuagc

SEQ ID NO: 2391904 - RNA, 19 nt, Artificial Sequence
  Description of Artificial Sequence: Synthetic oligonucleotide
gcuucacacguguuccuga

SEQ ID NO: 2391905 - RNA, 19 nt, Artificial Sequence
  Description of Artificial Sequence: Synthetic oligonucleotide
agggagccugcgucgcuca

SEQ ID NO: 2391906 - RNA, 19 nt, Artificial Sequence
  Description of Artificial Sequence: Synthetic oligonucleotide
gaucuccaucgccgccgag

SEQ ID NO: 2391907 - RNA, 19 nt, Artificial Sequence
  Description of Artificial Sequence: Synthetic oligonucleotide
ggaagccacaugggcacag

SEQ ID NO: 2391908 - RNA, 19 nt, Artificial Sequence
  Description of Artificial Sequence: Synthetic oligonucleotide
augggcacaccugcaucca

SEQ ID NO: 2391909 - RNA, 19 nt, Artificial Sequence
  Description of Artificial Sequence: Synthetic oligonucleotide
cagugccaugcaggcagcg

SEQ ID NO: 2391910 - RNA, 19 nt, Artificial Sequence
  Description of Artificial Sequence: Synthetic oligonucleotide
agaguccagggcacagcug

SEQ ID NO: 2391911 - RNA, 19 nt, Artificial Sequence
  Description of Artificial Sequence: Synthetic oligonucleotide
cuccgcggcggugccagcg

SEQ ID NO: 2391912 - RNA, 19 nt, Artificial Sequence
  Description of Artificial Sequence: Synthetic oligonucleotide
cagaguccagggcacagcu

SEQ ID NO: 2391913 - RNA, 19 nt, Artificial Sequence
  Description of Artificial Sequence: Synthetic oligonucleotide
gucuagcacgagauugcca

SEQ ID NO: 2391914 - RNA, 19 nt, Artificial Sequence
  Description of Artificial Sequence: Synthetic oligonucleotide
accccgcagaagagagccc

SEQ ID NO: 2391915 - RNA, 19 nt, Artificial Sequence
  Description of Artificial Sequence: Synthetic oligonucleotide
guucuguucgcaggcgaaa

SEQ ID NO: 2391916 - RNA, 19 nt, Artificial Sequence
  Description of Artificial Sequence: Synthetic oligonucleotide
uagcccgggccuccuuuuc

SEQ ID NO: 2391917 - RNA, 19 nt, Artificial Sequence
  Description of Artificial Sequence: Synthetic oligonucleotide
ggugcagggcucccagaac

SEQ ID NO: 2391918 - RNA, 19 nt, Artificial Sequence
  Description of Artificial Sequence: Synthetic oligonucleotide
agagcccuuugguguuaga

SEQ ID NO: 2391919 - RNA, 19 nt, Artificial Sequence
  Description of Artificial Sequence: Synthetic oligonucleotide
ucacuucgaguguggccuu

SEQ ID NO: 2391920 - RNA, 19 nt, Artificial Sequence
  Description of Artificial Sequence: Synthetic oligonucleotide
ccugaucagccgcucccgg

SEQ ID NO: 2391921 - RNA, 19 nt, Artificial Sequence
  Description of Artificial Sequence: Synthetic oligonucleotide
aggcgaaaugccggaggcu

SEQ ID NO: 2391922 - RNA, 19 nt, Artificial Sequence
  Description of Artificial Sequence: Synthetic oligonucleotide
gcaugggcacaccugcauc

SEQ ID NO: 2391923 - RNA, 19 nt, Artificial Sequence
  Description of Artificial Sequence: Synthetic oligonucleotide
gcuauaggacuggaagcca

SEQ ID NO: 2391924 - RNA, 19 nt, Artificial Sequence
  Description of Artificial Sequence: Synthetic oligonucleotide
cucgguagaaacggaagau

SEQ ID NO: 2391925 - RNA, 19 nt, Artificial Sequence
  Description of Artificial Sequence: Synthetic oligonucleotide
gauagcccgggccuccuuu

SEQ ID NO: 2391926 - RNA, 19 nt, Artificial Sequence
  Description of Artificial Sequence: Synthetic oligonucleotide
ggcccguacacuccagcca

SEQ ID NO: 2391927 - RNA, 19 nt, Artificial Sequence
  Description of Artificial Sequence: Synthetic oligonucleotide
cuucacacguguuccugau

SEQ ID NO: 2391928 - RNA, 19 nt, Artificial Sequence
  Description of Artificial Sequence: Synthetic oligonucleotide
guggaggugcuggcgugug

SEQ ID NO: 2391929 - RNA, 19 nt, Artificial Sequence
  Description of Artificial Sequence: Synthetic oligonucleotide
caccgugauggagguucgg

SEQ ID NO: 2391930 - RNA, 19 nt, Artificial Sequence
  Description of Artificial Sequence: Synthetic oligonucleotide
ugcuuggucguggggucua

SEQ ID NO: 2391931 - RNA, 19 nt, Artificial Sequence
  Description of Artificial Sequence: Synthetic oligonucleotide
gucguggggucuagcacga

SEQ ID NO: 2391932 - RNA, 19 nt, Artificial Sequence
  Description of Artificial Sequence: Synthetic oligonucleotide
ccaccgugauggagguucg

SEQ ID NO: 2391933 - RNA, 19 nt, Artificial Sequence
  Description of Artificial Sequence: Synthetic oligonucleotide
gugccaugcaggcagcguu

SEQ ID NO: 2391934 - RNA, 19 nt, Artificial Sequence
  Description of Artificial Sequence: Synthetic oligonucleotide
gcacgagauugccaucaga

SEQ ID NO: 2391935 - RNA, 19 nt, Artificial Sequence
  Description of Artificial Sequence: Synthetic oligonucleotide
ccgggccuccuuuucuugc

SEQ ID NO: 2391936 - RNA, 19 nt, Artificial Sequence
  Description of Artificial Sequence: Synthetic oligonucleotide
ccgaauagagcccuuuggu

SEQ ID NO: 2391937 - RNA, 19 nt, Artificial Sequence
  Description of Artificial Sequence: Synthetic oligonucleotide
agguaucaccuugcaggaa

SEQ ID NO: 2391938 - RNA, 19 nt, Artificial Sequence
  Description of Artificial Sequence: Synthetic oligonucleotide
agccugcgucgcucaccac

SEQ ID NO: 2391939 - RNA, 19 nt, Artificial Sequence
  Description of Artificial Sequence: Synthetic oligonucleotide
cacuucgaguguggccuug

SEQ ID NO: 2391940 - RNA, 19 nt, Artificial Sequence
  Description of Artificial Sequence: Synthetic oligonucleotide
ggcagcguucaggcaacag

SEQ ID NO: 2391941 - RNA, 19 nt, Artificial Sequence
  Description of Artificial Sequence: Synthetic oligonucleotide
ggagcucggcauccgaaua

SEQ ID NO: 2391942 - RNA, 19 nt, Artificial Sequence
  Description of Artificial Sequence: Synthetic oligonucleotide
gcucggcauccgaauagag

SEQ ID NO: 2391943 - RNA, 19 nt, Artificial Sequence
  Description of Artificial Sequence: Synthetic oligonucleotide
guccgcacgcuucgcgauc

SEQ ID NO: 2391944 - RNA, 19 nt, Artificial Sequence
  Description of Artificial Sequence: Synthetic oligonucleotide
gaccuucaccucggcuggc

SEQ ID NO: 2391945 - RNA, 19 nt, Artificial Sequence
  Description of Artificial Sequence: Synthetic oligonucleotide
cacgccaggcagcccgauc

SEQ ID NO: 2391946 - RNA, 19 nt, Artificial Sequence
  Description of Artificial Sequence: Synthetic oligonucleotide
cgguagaaacggaagaugu

SEQ ID NO: 2391947 - RNA, 19 nt, Artificial Sequence
  Description of Artificial Sequence: Synthetic oligonucleotide
gguucuguucgcaggcgaa

SEQ ID NO: 2391948 - RNA, 19 nt, Artificial Sequence
  Description of Artificial Sequence: Synthetic oligonucleotide
ucguggggucuagcacgag

SEQ ID NO: 2391949 - RNA, 19 nt, Artificial Sequence
  Description of Artificial Sequence: Synthetic oligonucleotide
gcgaaaugccggaggcugc

SEQ ID NO: 2391950 - RNA, 19 nt, Artificial Sequence
  Description of Artificial Sequence: Synthetic oligonucleotide
gggcgugguggcgggaggg

SEQ ID NO: 2391951 - RNA, 19 nt, Artificial Sequence
  Description of Artificial Sequence: Synthetic oligonucleotide
ggccuuguugaagauuucu

SEQ ID NO: 2391952 - RNA, 19 nt, Artificial Sequence
  Description of Artificial Sequence: Synthetic oligonucleotide
aggauagcccgggccuccu

SEQ ID NO: 2391953 - RNA, 19 nt, Artificial Sequence
  Description of Artificial Sequence: Synthetic oligonucleotide
augggcacagagagaggua

SEQ ID NO: 2391954 - RNA, 19 nt, Artificial Sequence
  Description of Artificial Sequence: Synthetic oligonucleotide
ggcggugccagcgcccagc

SEQ ID NO: 2391955 - RNA, 19 nt, Artificial Sequence
  Description of Artificial Sequence: Synthetic oligonucleotide
agcacgcgcgccgcgccug

SEQ ID NO: 2391956 - RNA, 19 nt, Artificial Sequence
  Description of Artificial Sequence: Synthetic oligonucleotide
uagcgccucugcagugauu

SEQ ID NO: 2391957 - RNA, 19 nt, Artificial Sequence
  Description of Artificial Sequence: Synthetic oligonucleotide
gcacgcuucgcgaucucca

SEQ ID NO: 2391958 - RNA, 19 nt, Artificial Sequence
  Description of Artificial Sequence: Synthetic oligonucleotide
cggcauccgaauagagccc

SEQ ID NO: 2391959 - RNA, 19 nt, Artificial Sequence
  Description of Artificial Sequence: Synthetic oligonucleotide
cuccaucgccgccgagcac

SEQ ID NO: 2391960 - RNA, 19 nt, Artificial Sequence
  Description of Artificial Sequence: Synthetic oligonucleotide
cccguacacuccagccagg

SEQ ID NO: 2391961 - RNA, 19 nt, Artificial Sequence
  Description of Artificial Sequence: Synthetic oligonucleotide
ggccucaggaucacuucga

SEQ ID NO: 2391962 - RNA, 19 nt, Artificial Sequence
  Description of Artificial Sequence: Synthetic oligonucleotide
agcucggcguccgcacgcu

SEQ ID NO: 2391963 - RNA, 19 nt, Artificial Sequence
  Description of Artificial Sequence: Synthetic oligonucleotide
cccgcagaagagagcccgc

SEQ ID NO: 2391964 - RNA, 19 nt, Artificial Sequence
  Description of Artificial Sequence: Synthetic oligonucleotide
ggcauccgaauagagcccu

SEQ ID NO: 2391965 - RNA, 19 nt, Artificial Sequence
  Description of Artificial Sequence: Synthetic oligonucleotide
cagcccgaucuucggccuc

SEQ ID NO: 2391966 - RNA, 19 nt, Artificial Sequence
  Description of Artificial Sequence: Synthetic oligonucleotide
caccucggcuggcccguac

SEQ ID NO: 2391967 - RNA, 19 nt, Artificial Sequence
  Description of Artificial Sequence: Synthetic oligonucleotide
gcguccgcacgcuucgcga

SEQ ID NO: 2391968 - RNA, 19 nt, Artificial Sequence
  Description of Artificial Sequence: Synthetic oligonucleotide
gcgggagggguggacuugc

SEQ ID NO: 2391969 - RNA, 19 nt, Artificial Sequence
  Description of Artificial Sequence: Synthetic oligonucleotide
guagcgccucugcagugau

SEQ ID NO: 2391970 - RNA, 19 nt, Artificial Sequence
  Description of Artificial Sequence: Synthetic oligonucleotide
gcuccacgcuguccagagc

SEQ ID NO: 2391971 - RNA, 19 nt, Artificial Sequence
  Description of Artificial Sequence: Synthetic oligonucleotide
gccugcggccguagcaucc

SEQ ID NO: 2391972 - RNA, 19 nt, Artificial Sequence
  Description of Artificial Sequence: Synthetic oligonucleotide
cguacacuccagccaggac

SEQ ID NO: 2391973 - RNA, 19 nt, Artificial Sequence
  Description of Artificial Sequence: Synthetic oligonucleotide
ccaucgccgccgagcacgc

SEQ ID NO: 2391974 - RNA, 19 nt, Artificial Sequence
  Description of Artificial Sequence: Synthetic oligonucleotide
ccgccgagcacgcgcgccg

SEQ ID NO: 2391975 - RNA, 19 nt, Artificial Sequence
  Description of Artificial Sequence: Synthetic oligonucleotide
cacgcuucgcgaucuccau

SEQ ID NO: 2391976 - RNA, 19 nt, Artificial Sequence
  Description of Artificial Sequence: Synthetic oligonucleotide
uccauccggccgggacagc

SEQ ID NO: 2391977 - RNA, 19 nt, Artificial Sequence
  Description of Artificial Sequence: Synthetic oligonucleotide
cagcgcccagcucggcguc

SEQ ID NO: 2391978 - RNA, 19 nt, Artificial Sequence
  Description of Artificial Sequence: Synthetic oligonucleotide
ggcgggagggguggacuug

SEQ ID NO: 2391979 - RNA, 19 nt, Artificial Sequence
  Description of Artificial Sequence: Synthetic oligonucleotide
caucgccgccgagcacgcg

SEQ ID NO: 2391980 - RNA, 19 nt, Artificial Sequence
  Description of Artificial Sequence: Synthetic oligonucleotide
gcuuggucguggggucuag

SEQ ID NO: 2391981 - RNA, 19 nt, Artificial Sequence
  Description of Artificial Sequence: Synthetic oligonucleotide
gcccgcaugggcacaccug

SEQ ID NO: 2391982 - RNA, 19 nt, Artificial Sequence
  Description of Artificial Sequence: Synthetic oligonucleotide
cguggggucuagcacgaga

SEQ ID NO: 2391983 - RNA, 19 nt, Artificial Sequence
  Description of Artificial Sequence: Synthetic oligonucleotide
cccgggccuccuuuucuug

SEQ ID NO: 2391984 - RNA, 19 nt, Artificial Sequence
  Description of Artificial Sequence: Synthetic oligonucleotide
cauccgaauagagcccuuu

SEQ ID NO: 2391985 - RNA, 19 nt, Artificial Sequence
  Description of Artificial Sequence: Synthetic oligonucleotide
gggcacagagagagguaga

SEQ ID NO: 2391986 - RNA, 19 nt, Artificial Sequence
  Description of Artificial Sequence: Synthetic oligonucleotide
gccgagcacgcgcgccgcg

SEQ ID NO: 2391987 - RNA, 19 nt, Artificial Sequence
  Description of Artificial Sequence: Synthetic oligonucleotide
cccgaucuucggccucagg

SEQ ID NO: 2391988 - RNA, 19 nt, Artificial Sequence
  Description of Artificial Sequence: Synthetic oligonucleotide
ugccagcgcccagcucggc

SEQ ID NO: 2391989 - RNA, 19 nt, Artificial Sequence
  Description of Artificial Sequence: Synthetic oligonucleotide
guggcgggagggguggacu

SEQ ID NO: 2391990 - RNA, 19 nt, Artificial Sequence
  Description of Artificial Sequence: Synthetic oligonucleotide
gccaugcaggcagcguuca

SEQ ID NO: 2391991 - RNA, 19 nt, Artificial Sequence
  Description of Artificial Sequence: Synthetic oligonucleotide
gccuuguugaagauuucuu

SEQ ID NO: 2391992 - RNA, 19 nt, Artificial Sequence
  Description of Artificial Sequence: Synthetic oligonucleotide
ccugcgucgcucaccaccu

SEQ ID NO: 2391993 - RNA, 19 nt, Artificial Sequence
  Description of Artificial Sequence: Synthetic oligonucleotide
gguggcgggagggguggac

SEQ ID NO: 2391994 - RNA, 19 nt, Artificial Sequence
  Description of Artificial Sequence: Synthetic oligonucleotide
gccaagagggagccugcgu

SEQ ID NO: 2391995 - RNA, 19 nt, Artificial Sequence
  Description of Artificial Sequence: Synthetic oligonucleotide
cgcacgcuucgcgaucucc

SEQ ID NO: 2391996 - RNA, 19 nt, Artificial Sequence
  Description of Artificial Sequence: Synthetic oligonucleotide
cacgcgcgccgcgccugcg

SEQ ID NO: 2391997 - RNA, 19 nt, Artificial Sequence
  Description of Artificial Sequence: Synthetic oligonucleotide
gagcacgcgcgccgcgccu

SEQ ID NO: 2391998 - RNA, 19 nt, Artificial Sequence
  Description of Artificial Sequence: Synthetic oligonucleotide
cgccucugcagugauucuc

SEQ ID NO: 2391999 - RNA, 19 nt, Artificial Sequence
  Description of Artificial Sequence: Synthetic oligonucleotide
ccauccggccgggacagca

SEQ ID NO: 2392000 - RNA, 19 nt, Artificial Sequence
  Description of Artificial Sequence: Synthetic oligonucleotide
cgaucuucggccucaggau

SEQ ID NO: 2392001 - RNA, 19 nt, Artificial Sequence
  Description of Artificial Sequence: Synthetic oligonucleotide
gcagcccgaucuucggccu

SEQ ID NO: 2392002 - RNA, 19 nt, Artificial Sequence
  Description of Artificial Sequence: Synthetic oligonucleotide
ccguacacuccagccagga

SEQ ID NO: 2392003 - RNA, 19 nt, Artificial Sequence
  Description of Artificial Sequence: Synthetic oligonucleotide
cgagcacgcgcgccgcgcc

SEQ ID NO: 2392004 - RNA, 19 nt, Artificial Sequence
  Description of Artificial Sequence: Synthetic oligonucleotide
gccgccgagcacgcgcgcc

SEQ ID NO: 2392005 - RNA, 19 nt, Artificial Sequence
  Description of Artificial Sequence: Synthetic oligonucleotide
cuucgaguguggccuuguu

SEQ ID NO: 2392006 - RNA, 19 nt, Artificial Sequence
  Description of Artificial Sequence: Synthetic oligonucleotide
ccgagcacgcgcgccgcgc

SEQ ID NO: 2392007 - RNA, 19 nt, Artificial Sequence
  Description of Artificial Sequence: Synthetic oligonucleotide
cuggcuugucucagcucuu

SEQ ID NO: 2392008 - RNA, 19 nt, Artificial Sequence
  Description of Artificial Sequence: Synthetic oligonucleotide
ucaccucggcuggcccgua

SEQ ID NO: 2392009 - RNA, 19 nt, Artificial Sequence
  Description of Artificial Sequence: Synthetic oligonucleotide
gugcuggcguguggcagcu

SEQ ID NO: 2392010 - RNA, 19 nt, Artificial Sequence
  Description of Artificial Sequence: Synthetic oligonucleotide
gcacgcgcgccgcgccugc

SEQ ID NO: 2392011 - RNA, 19 nt, Artificial Sequence
  Description of Artificial Sequence: Synthetic oligonucleotide
ccgcagaagagagcccgca

SEQ ID NO: 2392012 - RNA, 19 nt, Artificial Sequence
  Description of Artificial Sequence: Synthetic oligonucleotide
cggugggcgugguggcggg

SEQ ID NO: 2392013 - RNA, 19 nt, Artificial Sequence
  Description of Artificial Sequence: Synthetic oligonucleotide
cagauccauccggccggga

SEQ ID NO: 2392014 - RNA, 19 nt, Artificial Sequence
  Description of Artificial Sequence: Synthetic oligonucleotide
ccgcggcggugccagcgcc

SEQ ID NO: 2392015 - RNA, 19 nt, Artificial Sequence
  Description of Artificial Sequence: Synthetic oligonucleotide
ccgcaugggcacaccugca

SEQ ID NO: 2392016 - RNA, 19 nt, Artificial Sequence
  Description of Artificial Sequence: Synthetic oligonucleotide
gggacuccgcgggccgggc

SEQ ID NO: 2392017 - RNA, 19 nt, Artificial Sequence
  Description of Artificial Sequence: Synthetic oligonucleotide
ccagagcaaaggucaggau

SEQ ID NO: 2392018 - RNA, 19 nt, Artificial Sequence
  Description of Artificial Sequence: Synthetic oligonucleotide
cgcgccugcggccguagca

SEQ ID NO: 2392019 - RNA, 19 nt, Artificial Sequence
  Description of Artificial Sequence: Synthetic oligonucleotide
cgaucuccaucgccgccga

SEQ ID NO: 2392020 - RNA, 19 nt, Artificial Sequence
  Description of Artificial Sequence: Synthetic oligonucleotide
gcggugccagcgcccagcu

SEQ ID NO: 2392021 - RNA, 19 nt, Artificial Sequence
  Description of Artificial Sequence: Synthetic oligonucleotide
cgggacuccgcgggccggg

SEQ ID NO: 2392022 - RNA, 19 nt, Artificial Sequence
  Description of Artificial Sequence: Synthetic oligonucleotide
gccgcgccugcggccguag

SEQ ID NO: 2392023 - RNA, 19 nt, Artificial Sequence
  Description of Artificial Sequence: Synthetic oligonucleotide
ggacuccgcgggccgggcu

SEQ ID NO: 2392024 - RNA, 19 nt, Artificial Sequence
  Description of Artificial Sequence: Synthetic oligonucleotide
gccacgccaggcagcccga

SEQ ID NO: 2392025 - RNA, 19 nt, Artificial Sequence
  Description of Artificial Sequence: Synthetic oligonucleotide
gcgccugcggccguagcau

SEQ ID NO: 2392026 - RNA, 19 nt, Artificial Sequence
  Description of Artificial Sequence: Synthetic oligonucleotide
ccgcgccugcggccguagc

SEQ ID NO: 2392027 - RNA, 19 nt, Artificial Sequence
  Description of Artificial Sequence: Synthetic oligonucleotide
cgcaugggcacaccugcau

SEQ ID NO: 2392028 - RNA, 19 nt, Artificial Sequence
  Description of Artificial Sequence: Synthetic oligonucleotide
ggauagcccgggccuccuu

SEQ ID NO: 2392029 - RNA, 19 nt, Artificial Sequence
  Description of Artificial Sequence: Synthetic oligonucleotide
ccgcacgcuucgcgaucuc

SEQ ID NO: 2392030 - RNA, 19 nt, Artificial Sequence
  Description of Artificial Sequence: Synthetic oligonucleotide
cgccgagcacgcgcgccgc

SEQ ID NO: 2392031 - RNA, 19 nt, Artificial Sequence
  Description of Artificial Sequence: Synthetic oligonucleotide
cguccgcacgcuucgcgau

SEQ ID NO: 2392032 - RNA, 19 nt, Artificial Sequence
  Description of Artificial Sequence: Synthetic oligonucleotide
gggcuccgcggcggugcca

SEQ ID NO: 2392033 - RNA, 19 nt, Artificial Sequence
  Description of Artificial Sequence: Synthetic oligonucleotide
ccacggcuucacacguguu

SEQ ID NO: 2392034 - RNA, 19 nt, Artificial Sequence
  Description of Artificial Sequence: Synthetic oligonucleotide
cggcguccgcacgcuucgc

SEQ ID NO: 2392035 - RNA, 19 nt, Artificial Sequence
  Description of Artificial Sequence: Synthetic oligonucleotide
gcucggcguccgcacgcuu

SEQ ID NO: 2392036 - RNA, 19 nt, Artificial Sequence
  Description of Artificial Sequence: Synthetic oligonucleotide
cgccaggcagcccgaucuu

SEQ ID NO: 2392037 - RNA, 19 nt, Artificial Sequence
  Description of Artificial Sequence: Synthetic oligonucleotide
ccacgccaggcagcccgau

SEQ ID NO: 2392038 - RNA, 19 nt, Artificial Sequence
  Description of Artificial Sequence: Synthetic oligonucleotide
aaauuaauaauacaauccc

SEQ ID NO: 2392039 - RNA, 19 nt, Artificial Sequence
  Description of Artificial Sequence: Synthetic oligonucleotide
aauaauacaaucccaaugg

SEQ ID NO: 2392040 - RNA, 19 nt, Artificial Sequence
  Description of Artificial Sequence: Synthetic oligonucleotide
uuuaccaugauuuauuuag

SEQ ID NO: 2392041 - RNA, 19 nt, Artificial Sequence
  Description of Artificial Sequence: Synthetic oligonucleotide
uaaaauacaagucauguuc

SEQ ID NO: 2392042 - RNA, 19 nt, Artificial Sequence
  Description of Artificial Sequence: Synthetic oligonucleotide
aauacaaucccaauggaac

SEQ ID NO: 2392043 - RNA, 19 nt, Artificial Sequence
  Description of Artificial Sequence: Synthetic oligonucleotide
uauaauuugguaaauacau

SEQ ID NO: 2392044 - RNA, 19 nt, Artificial Sequence
  Description of Artificial Sequence: Synthetic oligonucleotide
aacauugucuaauaauggg

SEQ ID NO: 2392045 - RNA, 19 nt, Artificial Sequence
  Description of Artificial Sequence: Synthetic oligonucleotide
uuagacaccaggaaaaugc

SEQ ID NO: 2392046 - RNA, 19 nt, Artificial Sequence
  Description of Artificial Sequence: Synthetic oligonucleotide
uuuacagacagaaacauaa

SEQ ID NO: 2392047 - RNA, 19 nt, Artificial Sequence
  Description of Artificial Sequence: Synthetic oligonucleotide
aauguaaacuuccuaaacu

SEQ ID NO: 2392048 - RNA, 19 nt, Artificial Sequence
  Description of Artificial Sequence: Synthetic oligonucleotide
uuaauguauguguacaggg

SEQ ID NO: 2392049 - RNA, 19 nt, Artificial Sequence
  Description of Artificial Sequence: Synthetic oligonucleotide
agaacuaucaauucaaagu

SEQ ID NO: 2392050 - RNA, 19 nt, Artificial Sequence
  Description of Artificial Sequence: Synthetic oligonucleotide
gauuuauuuagacaccagg

SEQ ID NO: 2392051 - RNA, 19 nt, Artificial Sequence
  Description of Artificial Sequence: Synthetic oligonucleotide
auuagaaacgaauguaaac

SEQ ID NO: 2392052 - RNA, 19 nt, Artificial Sequence
  Description of Artificial Sequence: Synthetic oligonucleotide
uugguaaauacauauaaca

SEQ ID NO: 2392053 - RNA, 19 nt, Artificial Sequence
  Description of Artificial Sequence: Synthetic oligonucleotide
aacacuuucuuuuauguga

SEQ ID NO: 2392054 - RNA, 19 nt, Artificial Sequence
  Description of Artificial Sequence: Synthetic oligonucleotide
agaaacauaauuuacuggu

SEQ ID NO: 2392055 - RNA, 19 nt, Artificial Sequence
  Description of Artificial Sequence: Synthetic oligonucleotide
aaaauacaagucauguucc

SEQ ID NO: 2392056 - RNA, 19 nt, Artificial Sequence
  Description of Artificial Sequence: Synthetic oligonucleotide
auuauuuguaauaggaggc

SEQ ID NO: 2392057 - RNA, 19 nt, Artificial Sequence
  Description of Artificial Sequence: Synthetic oligonucleotide
uaauaauacaaucccaaug

SEQ ID NO: 2392058 - RNA, 19 nt, Artificial Sequence
  Description of Artificial Sequence: Synthetic oligonucleotide
ugaauuggaaacuucagca

SEQ ID NO: 2392059 - RNA, 19 nt, Artificial Sequence
  Description of Artificial Sequence: Synthetic oligonucleotide
aaagccauaugacacauga

SEQ ID NO: 2392060 - RNA, 19 nt, Artificial Sequence
  Description of Artificial Sequence: Synthetic oligonucleotide
gauaaauuggcugauuggg

SEQ ID NO: 2392061 - RNA, 19 nt, Artificial Sequence
  Description of Artificial Sequence: Synthetic oligonucleotide
agauugacauuauauauag

SEQ ID NO: 2392062 - RNA, 19 nt, Artificial Sequence
  Description of Artificial Sequence: Synthetic oligonucleotide
uaauuauuuguaauaggag

SEQ ID NO: 2392063 - RNA, 19 nt, Artificial Sequence
  Description of Artificial Sequence: Synthetic oligonucleotide
ugacauuauauauaggaug

SEQ ID NO: 2392064 - RNA, 19 nt, Artificial Sequence
  Description of Artificial Sequence: Synthetic oligonucleotide
cauauaauuugguaaauac

SEQ ID NO: 2392065 - RNA, 19 nt, Artificial Sequence
  Description of Artificial Sequence: Synthetic oligonucleotide
gacauuauucaucugagac

SEQ ID NO: 2392066 - RNA, 19 nt, Artificial Sequence
  Description of Artificial Sequence: Synthetic oligonucleotide
aaaaugcuaauauuuacaa

SEQ ID NO: 2392067 - RNA, 19 nt, Artificial Sequence
  Description of Artificial Sequence: Synthetic oligonucleotide
uaacauugucuaauaaugg

SEQ ID NO: 2392068 - RNA, 19 nt, Artificial Sequence
  Description of Artificial Sequence: Synthetic oligonucleotide
aacucauauaauuugguaa

SEQ ID NO: 2392069 - RNA, 19 nt, Artificial Sequence
  Description of Artificial Sequence: Synthetic oligonucleotide
aagaacuaucaauucaaag

SEQ ID NO: 2392070 - RNA, 19 nt, Artificial Sequence
  Description of Artificial Sequence: Synthetic oligonucleotide
ugagguaacagguagccag

SEQ ID NO: 2392071 - RNA, 19 nt, Artificial Sequence
  Description of Artificial Sequence: Synthetic oligonucleotide
agcacaguaaaauacaagu

SEQ ID NO: 2392072 - RNA, 19 nt, Artificial Sequence
  Description of Artificial Sequence: Synthetic oligonucleotide
aaacuuccuaaacuaacuc

SEQ ID NO: 2392073 - RNA, 19 nt, Artificial Sequence
  Description of Artificial Sequence: Synthetic oligonucleotide
agaacugggguauuccucc

SEQ ID NO: 2392074 - RNA, 19 nt, Artificial Sequence
  Description of Artificial Sequence: Synthetic oligonucleotide
uaaagaacuaucaauucaa

SEQ ID NO: 2392075 - RNA, 19 nt, Artificial Sequence
  Description of Artificial Sequence: Synthetic oligonucleotide
uacuaauuugagaaaauac

SEQ ID NO: 2392076 - RNA, 19 nt, Artificial Sequence
  Description of Artificial Sequence: Synthetic oligonucleotide
aagacauugcauaaagaac

SEQ ID NO: 2392077 - RNA, 19 nt, Artificial Sequence
  Description of Artificial Sequence: Synthetic oligonucleotide
agaaggaggaaguaugagg

SEQ ID NO: 2392078 - RNA, 19 nt, Artificial Sequence
  Description of Artificial Sequence: Synthetic oligonucleotide
aaucacuuaguccaugaca

SEQ ID NO: 2392079 - RNA, 19 nt, Artificial Sequence
  Description of Artificial Sequence: Synthetic oligonucleotide
auaauuuacugguaaaggu

SEQ ID NO: 2392080 - RNA, 19 nt, Artificial Sequence
  Description of Artificial Sequence: Synthetic oligonucleotide
cucuauuaaaacauacugc

SEQ ID NO: 2392081 - RNA, 19 nt, Artificial Sequence
  Description of Artificial Sequence: Synthetic oligonucleotide
uuaagcacaguaaaauaca

SEQ ID NO: 2392082 - RNA, 19 nt, Artificial Sequence
  Description of Artificial Sequence: Synthetic oligonucleotide
uauuuagacaccaggaaaa

SEQ ID NO: 2392083 - RNA, 19 nt, Artificial Sequence
  Description of Artificial Sequence: Synthetic oligonucleotide
uuuaauguauguguacagg

SEQ ID NO: 2392084 - RNA, 19 nt, Artificial Sequence
  Description of Artificial Sequence: Synthetic oligonucleotide
auaaagaacuaucaauuca

SEQ ID NO: 2392085 - RNA, 19 nt, Artificial Sequence
  Description of Artificial Sequence: Synthetic oligonucleotide
ucuuuuaugugaagggugc

SEQ ID NO: 2392086 - RNA, 19 nt, Artificial Sequence
  Description of Artificial Sequence: Synthetic oligonucleotide
uguaauaggaggccaaacu

SEQ ID NO: 2392087 - RNA, 19 nt, Artificial Sequence
  Description of Artificial Sequence: Synthetic oligonucleotide
uuuauuuagacaccaggaa

SEQ ID NO: 2392088 - RNA, 19 nt, Artificial Sequence
  Description of Artificial Sequence: Synthetic oligonucleotide
uaauuuacugguaaagguc

SEQ ID NO: 2392089 - RNA, 19 nt, Artificial Sequence
  Description of Artificial Sequence: Synthetic oligonucleotide
aaguacagaauuagaaacg

SEQ ID NO: 2392090 - RNA, 19 nt, Artificial Sequence
  Description of Artificial Sequence: Synthetic oligonucleotide
uacagaauuagaaacgaau

SEQ ID NO: 2392091 - RNA, 19 nt, Artificial Sequence
  Description of Artificial Sequence: Synthetic oligonucleotide
uguacagggugccaaagcc

SEQ ID NO: 2392092 - RNA, 19 nt, Artificial Sequence
  Description of Artificial Sequence: Synthetic oligonucleotide
ugagacauaauuauuugua

SEQ ID NO: 2392093 - RNA, 19 nt, Artificial Sequence
  Description of Artificial Sequence: Synthetic oligonucleotide
agauaaauuggcugauugg

SEQ ID NO: 2392094 - RNA, 19 nt, Artificial Sequence
  Description of Artificial Sequence: Synthetic oligonucleotide
auugcuaagacauugcaua

SEQ ID NO: 2392095 - RNA, 19 nt, Artificial Sequence
  Description of Artificial Sequence: Synthetic oligonucleotide
uaaacuuccuaaacuaacu

SEQ ID NO: 2392096 - RNA, 19 nt, Artificial Sequence
  Description of Artificial Sequence: Synthetic oligonucleotide
cauaauuuacugguaaagg

SEQ ID NO: 2392097 - RNA, 19 nt, Artificial Sequence
  Description of Artificial Sequence: Synthetic oligonucleotide
aguaaaauacaagucaugu

SEQ ID NO: 2392098 - RNA, 19 nt, Artificial Sequence
  Description of Artificial Sequence: Synthetic oligonucleotide
ugcaucacgacacuagagc

SEQ ID NO: 2392099 - RNA, 19 nt, Artificial Sequence
  Description of Artificial Sequence: Synthetic oligonucleotide
uucuuuuaugugaagggug

SEQ ID NO: 2392100 - RNA, 19 nt, Artificial Sequence
  Description of Artificial Sequence: Synthetic oligonucleotide
ugcauaaagaacuaucaau

SEQ ID NO: 2392101 - RNA, 19 nt, Artificial Sequence
  Description of Artificial Sequence: Synthetic oligonucleotide
aaacuaacucagcugaggu

SEQ ID NO: 2392102 - RNA, 19 nt, Artificial Sequence
  Description of Artificial Sequence: Synthetic oligonucleotide
aacuuccuaaacuaacuca

SEQ ID NO: 2392103 - RNA, 19 nt, Artificial Sequence
  Description of Artificial Sequence: Synthetic oligonucleotide
auuaauaccuugcaaacuu

SEQ ID NO: 2392104 - RNA, 19 nt, Artificial Sequence
  Description of Artificial Sequence: Synthetic oligonucleotide
acuaauuugagaaaauaca

SEQ ID NO: 2392105 - RNA, 19 nt, Artificial Sequence
  Description of Artificial Sequence: Synthetic oligonucleotide
gaaacgaauguaaacuucc

SEQ ID NO: 2392106 - RNA, 19 nt, Artificial Sequence
  Description of Artificial Sequence: Synthetic oligonucleotide
aauuggcugauugggaaac

SEQ ID NO: 2392107 - RNA, 19 nt, Artificial Sequence
  Description of Artificial Sequence: Synthetic oligonucleotide
ugaaaacaaguacagaauu

SEQ ID NO: 2392108 - RNA, 19 nt, Artificial Sequence
  Description of Artificial Sequence: Synthetic oligonucleotide
aagguaguuuuccuauagg

SEQ ID NO: 2392109 - RNA, 19 nt, Artificial Sequence
  Description of Artificial Sequence: Synthetic oligonucleotide
uaccuugcaaacuuuacca

SEQ ID NO: 2392110 - RNA, 19 nt, Artificial Sequence
  Description of Artificial Sequence: Synthetic oligonucleotide
ucaucugagacauaauuau

SEQ ID NO: 2392111 - RNA, 19 nt, Artificial Sequence
  Description of Artificial Sequence: Synthetic oligonucleotide
aauuaauaauacaauccca

SEQ ID NO: 2392112 - RNA, 19 nt, Artificial Sequence
  Description of Artificial Sequence: Synthetic oligonucleotide
aauaccuugcaaacuuuac

SEQ ID NO: 2392113 - RNA, 19 nt, Artificial Sequence
  Description of Artificial Sequence: Synthetic oligonucleotide
cagguagccagauaaauug

SEQ ID NO: 2392114 - RNA, 19 nt, Artificial Sequence
  Description of Artificial Sequence: Synthetic oligonucleotide
uaaacuaacucagcugagg

SEQ ID NO: 2392115 - RNA, 19 nt, Artificial Sequence
  Description of Artificial Sequence: Synthetic oligonucleotide
aacuaucaauucaaaguac

SEQ ID NO: 2392116 - RNA, 19 nt, Artificial Sequence
  Description of Artificial Sequence: Synthetic oligonucleotide
uuuuacugauuucugaguu

SEQ ID NO: 2392117 - RNA, 19 nt, Artificial Sequence
  Description of Artificial Sequence: Synthetic oligonucleotide
guaguuuuccuauaggaga

SEQ ID NO: 2392118 - RNA, 19 nt, Artificial Sequence
  Description of Artificial Sequence: Synthetic oligonucleotide
ccaugauuuauuuagacac

SEQ ID NO: 2392119 - RNA, 19 nt, Artificial Sequence
  Description of Artificial Sequence: Synthetic oligonucleotide
gaacuaucaauucaaagua

SEQ ID NO: 2392120 - RNA, 19 nt, Artificial Sequence
  Description of Artificial Sequence: Synthetic oligonucleotide
cagaaacauaauuuacugg

SEQ ID NO: 2392121 - RNA, 19 nt, Artificial Sequence
  Description of Artificial Sequence: Synthetic oligonucleotide
uuauucaucugagacauaa

SEQ ID NO: 2392122 - RNA, 19 nt, Artificial Sequence
  Description of Artificial Sequence: Synthetic oligonucleotide
augauuauuuuaugacuuc

SEQ ID NO: 2392123 - RNA, 19 nt, Artificial Sequence
  Description of Artificial Sequence: Synthetic oligonucleotide
aucaauucaaaguacuaau

SEQ ID NO: 2392124 - RNA, 19 nt, Artificial Sequence
  Description of Artificial Sequence: Synthetic oligonucleotide
acucauauaauuugguaaa

SEQ ID NO: 2392125 - RNA, 19 nt, Artificial Sequence
  Description of Artificial Sequence: Synthetic oligonucleotide
gacauaauuauuuguaaua

SEQ ID NO: 2392126 - RNA, 19 nt, Artificial Sequence
  Description of Artificial Sequence: Synthetic oligonucleotide
aagacauuauucaucugag

SEQ ID NO: 2392127 - RNA, 19 nt, Artificial Sequence
  Description of Artificial Sequence: Synthetic oligonucleotide
guaacagguagccagauaa

SEQ ID NO: 2392128 - RNA, 19 nt, Artificial Sequence
  Description of Artificial Sequence: Synthetic oligonucleotide
aauuaauaccuugcaaacu

SEQ ID NO: 2392129 - RNA, 19 nt, Artificial Sequence
  Description of Artificial Sequence: Synthetic oligonucleotide
uuccuaaacuaacucagcu

SEQ ID NO: 2392130 - RNA, 19 nt, Artificial Sequence
  Description of Artificial Sequence: Synthetic oligonucleotide
acgaauguaaacuuccuaa

SEQ ID NO: 2392131 - RNA, 19 nt, Artificial Sequence
  Description of Artificial Sequence: Synthetic oligonucleotide
uugacauuauauauaggau

SEQ ID NO: 2392132 - RNA, 19 nt, Artificial Sequence
  Description of Artificial Sequence: Synthetic oligonucleotide
acauaauuuacugguaaag

SEQ ID NO: 2392133 - RNA, 19 nt, Artificial Sequence
  Description of Artificial Sequence: Synthetic oligonucleotide
acauuauucaucugagaca

SEQ ID NO: 2392134 - RNA, 19 nt, Artificial Sequence
  Description of Artificial Sequence: Synthetic oligonucleotide
auacaagucauguuccuca

SEQ ID NO: 2392135 - RNA, 19 nt, Artificial Sequence
  Description of Artificial Sequence: Synthetic oligonucleotide
ucugaguuaagcacaguaa

SEQ ID NO: 2392136 - RNA, 19 nt, Artificial Sequence
  Description of Artificial Sequence: Synthetic oligonucleotide
aaaacacacuuguaccuga

SEQ ID NO: 2392137 - RNA, 19 nt, Artificial Sequence
  Description of Artificial Sequence: Synthetic oligonucleotide
uaaauuggcugauugggaa

SEQ ID NO: 2392138 - RNA, 19 nt, Artificial Sequence
  Description of Artificial Sequence: Synthetic oligonucleotide
guugaaaguucucuguggc

SEQ ID NO: 2392139 - RNA, 19 nt, Artificial Sequence
  Description of Artificial Sequence: Synthetic oligonucleotide
uuauuuguaauaggaggcc

SEQ ID NO: 2392140 - RNA, 19 nt, Artificial Sequence
  Description of Artificial Sequence: Synthetic oligonucleotide
aaauacaagucauguuccu

SEQ ID NO: 2392141 - RNA, 19 nt, Artificial Sequence
  Description of Artificial Sequence: Synthetic oligonucleotide
cauaaagaacuaucaauuc

SEQ ID NO: 2392142 - RNA, 19 nt, Artificial Sequence
  Description of Artificial Sequence: Synthetic oligonucleotide
uuccucaccagauugacau

SEQ ID NO: 2392143 - RNA, 19 nt, Artificial Sequence
  Description of Artificial Sequence: Synthetic oligonucleotide
uauauauaggauguguuua

SEQ ID NO: 2392144 - RNA, 19 nt, Artificial Sequence
  Description of Artificial Sequence: Synthetic oligonucleotide
ucagcagugcaucacgaca

SEQ ID NO: 2392145 - RNA, 19 nt, Artificial Sequence
  Description of Artificial Sequence: Synthetic oligonucleotide
caugauuuauuuagacacc

SEQ ID NO: 2392146 - RNA, 19 nt, Artificial Sequence
  Description of Artificial Sequence: Synthetic oligonucleotide
uguaaacuuccuaaacuaa

SEQ ID NO: 2392147 - RNA, 19 nt, Artificial Sequence
  Description of Artificial Sequence: Synthetic oligonucleotide
acacaugauuauuuuauga

SEQ ID NO: 2392148 - RNA, 19 nt, Artificial Sequence
  Description of Artificial Sequence: Synthetic oligonucleotide
uggaaacaagacauuauuc

SEQ ID NO: 2392149 - RNA, 19 nt, Artificial Sequence
  Description of Artificial Sequence: Synthetic oligonucleotide
gcucuauuaaaacauacug

SEQ ID NO: 2392150 - RNA, 19 nt, Artificial Sequence
  Description of Artificial Sequence: Synthetic oligonucleotide
uuaauaauacaaucccaau

SEQ ID NO: 2392151 - RNA, 19 nt, Artificial Sequence
  Description of Artificial Sequence: Synthetic oligonucleotide
caagacauuauucaucuga

SEQ ID NO: 2392152 - RNA, 19 nt, Artificial Sequence
  Description of Artificial Sequence: Synthetic oligonucleotide
aaguacuaauuugagaaaa

SEQ ID NO: 2392153 - RNA, 19 nt, Artificial Sequence
  Description of Artificial Sequence: Synthetic oligonucleotide
acagaauuagaaacgaaug

SEQ ID NO: 2392154 - RNA, 19 nt, Artificial Sequence
  Description of Artificial Sequence: Synthetic oligonucleotide
uccuaaacuaacucagcug

SEQ ID NO: 2392155 - RNA, 19 nt, Artificial Sequence
  Description of Artificial Sequence: Synthetic oligonucleotide
acuucagcagugcaucacg

SEQ ID NO: 2392156 - RNA, 19 nt, Artificial Sequence
  Description of Artificial Sequence: Synthetic oligonucleotide
cuauaggagagaacugggg

SEQ ID NO: 2392157 - RNA, 19 nt, Artificial Sequence
  Description of Artificial Sequence: Synthetic oligonucleotide
ggaaacaagacauuauuca

SEQ ID NO: 2392158 - RNA, 19 nt, Artificial Sequence
  Description of Artificial Sequence: Synthetic oligonucleotide
uucugaguuaagcacagua

SEQ ID NO: 2392159 - RNA, 19 nt, Artificial Sequence
  Description of Artificial Sequence: Synthetic oligonucleotide
uaucaauucaaaguacuaa

SEQ ID NO: 2392160 - RNA, 19 nt, Artificial Sequence
  Description of Artificial Sequence: Synthetic oligonucleotide
auugcauaaagaacuauca

SEQ ID NO: 2392161 - RNA, 19 nt, Artificial Sequence
  Description of Artificial Sequence: Synthetic oligonucleotide
ugauuauuuuaugacuuca

SEQ ID NO: 2392162 - RNA, 19 nt, Artificial Sequence
  Description of Artificial Sequence: Synthetic oligonucleotide
cagauaaauuggcugauug

SEQ ID NO: 2392163 - RNA, 19 nt, Artificial Sequence
  Description of Artificial Sequence: Synthetic oligonucleotide
aggccaaacuuuuaaaagu

SEQ ID NO: 2392164 - RNA, 19 nt, Artificial Sequence
  Description of Artificial Sequence: Synthetic oligonucleotide
gacuauugcuaagacauug

SEQ ID NO: 2392165 - RNA, 19 nt, Artificial Sequence
  Description of Artificial Sequence: Synthetic oligonucleotide
acuuccuaaacuaacucag

SEQ ID NO: 2392166 - RNA, 19 nt, Artificial Sequence
  Description of Artificial Sequence: Synthetic oligonucleotide
acuauugcuaagacauugc

SEQ ID NO: 2392167 - RNA, 19 nt, Artificial Sequence
  Description of Artificial Sequence: Synthetic oligonucleotide
aauggaacucauauaauuu

SEQ ID NO: 2392168 - RNA, 19 nt, Artificial Sequence
  Description of Artificial Sequence: Synthetic oligonucleotide
uuguaccugaauuggaaac

SEQ ID NO: 2392169 - RNA, 19 nt, Artificial Sequence
  Description of Artificial Sequence: Synthetic oligonucleotide
agacagaaacauaauuuac

SEQ ID NO: 2392170 - RNA, 19 nt, Artificial Sequence
  Description of Artificial Sequence: Synthetic oligonucleotide
aacaacagcucuauuaaaa

SEQ ID NO: 2392171 - RNA, 19 nt, Artificial Sequence
  Description of Artificial Sequence: Synthetic oligonucleotide
uagccagauaaauuggcug

SEQ ID NO: 2392172 - RNA, 19 nt, Artificial Sequence
  Description of Artificial Sequence: Synthetic oligonucleotide
auauaauuugguaaauaca

SEQ ID NO: 2392173 - RNA, 19 nt, Artificial Sequence
  Description of Artificial Sequence: Synthetic oligonucleotide
accaugauuuauuuagaca

SEQ ID NO: 2392174 - RNA, 19 nt, Artificial Sequence
  Description of Artificial Sequence: Synthetic oligonucleotide
agccauaugacacaugauu

SEQ ID NO: 2392175 - RNA, 19 nt, Artificial Sequence
  Description of Artificial Sequence: Synthetic oligonucleotide
uauugcuaagacauugcau

SEQ ID NO: 2392176 - RNA, 19 nt, Artificial Sequence
  Description of Artificial Sequence: Synthetic oligonucleotide
gacacaugauuauuuuaug

SEQ ID NO: 2392177 - RNA, 19 nt, Artificial Sequence
  Description of Artificial Sequence: Synthetic oligonucleotide
ucuaauaauggguuacguu

SEQ ID NO: 2392178 - RNA, 19 nt, Artificial Sequence
  Description of Artificial Sequence: Synthetic oligonucleotide
aauuagaaacgaauguaaa

SEQ ID NO: 2392179 - RNA, 19 nt, Artificial Sequence
  Description of Artificial Sequence: Synthetic oligonucleotide
uuucuuuuaugugaagggu

SEQ ID NO: 2392180 - RNA, 19 nt, Artificial Sequence
  Description of Artificial Sequence: Synthetic oligonucleotide
auacaaucccaauggaacu

SEQ ID NO: 2392181 - RNA, 19 nt, Artificial Sequence
  Description of Artificial Sequence: Synthetic oligonucleotide
gauugggaaacuuaucucu

SEQ ID NO: 2392182 - RNA, 19 nt, Artificial Sequence
  Description of Artificial Sequence: Synthetic oligonucleotide
agaaacgaauguaaacuuc

SEQ ID NO: 2392183 - RNA, 19 nt, Artificial Sequence
  Description of Artificial Sequence: Synthetic oligonucleotide
uuuaugugaagggugcugu

SEQ ID NO: 2392184 - RNA, 19 nt, Artificial Sequence
  Description of Artificial Sequence: Synthetic oligonucleotide
uuaccaugauuuauuuaga

SEQ ID NO: 2392185 - RNA, 19 nt, Artificial Sequence
  Description of Artificial Sequence: Synthetic oligonucleotide
agugacuauugcuaagaca

SEQ ID NO: 2392186 - RNA, 19 nt, Artificial Sequence
  Description of Artificial Sequence: Synthetic oligonucleotide
gcuaagacauugcauaaag

SEQ ID NO: 2392187 - RNA, 19 nt, Artificial Sequence
  Description of Artificial Sequence: Synthetic oligonucleotide
aaacaaacacuuucuuuua

SEQ ID NO: 2392188 - RNA, 19 nt, Artificial Sequence
  Description of Artificial Sequence: Synthetic oligonucleotide
uaccaugauuuauuuagac

SEQ ID NO: 2392189 - RNA, 19 nt, Artificial Sequence
  Description of Artificial Sequence: Synthetic oligonucleotide
aguacagaauuagaaacga

SEQ ID NO: 2392190 - RNA, 19 nt, Artificial Sequence
  Description of Artificial Sequence: Synthetic oligonucleotide
uaauaauggguuacguuuu

SEQ ID NO: 2392191 - RNA, 19 nt, Artificial Sequence
  Description of Artificial Sequence: Synthetic oligonucleotide
auauauaggauguguuuaa

SEQ ID NO: 2392192 - RNA, 19 nt, Artificial Sequence
  Description of Artificial Sequence: Synthetic oligonucleotide
acuaacucagcugagguaa

SEQ ID NO: 2392193 - RNA, 19 nt, Artificial Sequence
  Description of Artificial Sequence: Synthetic oligonucleotide
acauauaacauugucuaau

SEQ ID NO: 2392194 - RNA, 19 nt, Artificial Sequence
  Description of Artificial Sequence: Synthetic oligonucleotide
auuacagugacuauugcua

SEQ ID NO: 2392195 - RNA, 19 nt, Artificial Sequence
  Description of Artificial Sequence: Synthetic oligonucleotide
agaauuagaaacgaaugua

SEQ ID NO: 2392196 - RNA, 19 nt, Artificial Sequence
  Description of Artificial Sequence: Synthetic oligonucleotide
ugggaaacuuaucucuucu

SEQ ID NO: 2392197 - RNA, 19 nt, Artificial Sequence
  Description of Artificial Sequence: Synthetic oligonucleotide
aaaaccccugaaaacaagu

SEQ ID NO: 2392198 - RNA, 19 nt, Artificial Sequence
  Description of Artificial Sequence: Synthetic oligonucleotide
agccagauaaauuggcuga

SEQ ID NO: 2392199 - RNA, 19 nt, Artificial Sequence
  Description of Artificial Sequence: Synthetic oligonucleotide
acacuuguaccugaauugg

SEQ ID NO: 2392200 - RNA, 19 nt, Artificial Sequence
  Description of Artificial Sequence: Synthetic oligonucleotide
aaauuggcugauugggaaa

SEQ ID NO: 2392201 - RNA, 19 nt, Artificial Sequence
  Description of Artificial Sequence: Synthetic oligonucleotide
uuuuaugugaagggugcug

SEQ ID NO: 2392202 - RNA, 19 nt, Artificial Sequence
  Description of Artificial Sequence: Synthetic oligonucleotide
uauuuguaauaggaggcca

SEQ ID NO: 2392203 - RNA, 19 nt, Artificial Sequence
  Description of Artificial Sequence: Synthetic oligonucleotide
ugaaaguucucuguggcau

SEQ ID NO: 2392204 - RNA, 19 nt, Artificial Sequence
  Description of Artificial Sequence: Synthetic oligonucleotide
acuaucaauucaaaguacu

SEQ ID NO: 2392205 - RNA, 19 nt, Artificial Sequence
  Description of Artificial Sequence: Synthetic oligonucleotide
aacgaauguaaacuuccua

SEQ ID NO: 2392206 - RNA, 19 nt, Artificial Sequence
  Description of Artificial Sequence: Synthetic oligonucleotide
ugcaagguaguuuuccuau

SEQ ID NO: 2392207 - RNA, 19 nt, Artificial Sequence
  Description of Artificial Sequence: Synthetic oligonucleotide
ugaacccuggaaacaagac

SEQ ID NO: 2392208 - RNA, 19 nt, Artificial Sequence
  Description of Artificial Sequence: Synthetic oligonucleotide
accagauugacauuauaua

SEQ ID NO: 2392209 - RNA, 19 nt, Artificial Sequence
  Description of Artificial Sequence: Synthetic oligonucleotide
uuacugauuucugaguuaa

SEQ ID NO: 2392210 - RNA, 19 nt, Artificial Sequence
  Description of Artificial Sequence: Synthetic oligonucleotide
uaugacacaugauuauuuu

SEQ ID NO: 2392211 - RNA, 19 nt, Artificial Sequence
  Description of Artificial Sequence: Synthetic oligonucleotide
uguaccugaauuggaaacu

SEQ ID NO: 2392212 - RNA, 19 nt, Artificial Sequence
  Description of Artificial Sequence: Synthetic oligonucleotide
augauuuauuuagacacca

SEQ ID NO: 2392213 - RNA, 19 nt, Artificial Sequence
  Description of Artificial Sequence: Synthetic oligonucleotide
uugucuaauaauggguuac

SEQ ID NO: 2392214 - RNA, 19 nt, Artificial Sequence
  Description of Artificial Sequence: Synthetic oligonucleotide
uacugguaaaggucuuggg

SEQ ID NO: 2392215 - RNA, 19 nt, Artificial Sequence
  Description of Artificial Sequence: Synthetic oligonucleotide
ucaugaguuugccuuucug

SEQ ID NO: 2392216 - RNA, 19 nt, Artificial Sequence
  Description of Artificial Sequence: Synthetic oligonucleotide
auauaacauugucuaauaa

SEQ ID NO: 2392217 - RNA, 19 nt, Artificial Sequence
  Description of Artificial Sequence: Synthetic oligonucleotide
uaggaggccaaacuuuuaa

SEQ ID NO: 2392218 - RNA, 19 nt, Artificial Sequence
  Description of Artificial Sequence: Synthetic oligonucleotide
aucacuuaguccaugacaa

SEQ ID NO: 2392219 - RNA, 19 nt, Artificial Sequence
  Description of Artificial Sequence: Synthetic oligonucleotide
aacuuaucucuucuuuaaa

SEQ ID NO: 2392220 - RNA, 19 nt, Artificial Sequence
  Description of Artificial Sequence: Synthetic oligonucleotide
cuuccuaaacuaacucagc

SEQ ID NO: 2392221 - RNA, 19 nt, Artificial Sequence
  Description of Artificial Sequence: Synthetic oligonucleotide
augagaaggaggaaguaug

SEQ ID NO: 2392222 - RNA, 19 nt, Artificial Sequence
  Description of Artificial Sequence: Synthetic oligonucleotide
aaacauacugcaagguagu

SEQ ID NO: 2392223 - RNA, 19 nt, Artificial Sequence
  Description of Artificial Sequence: Synthetic oligonucleotide
aaacaacagcucuauuaaa

SEQ ID NO: 2392224 - RNA, 19 nt, Artificial Sequence
  Description of Artificial Sequence: Synthetic oligonucleotide
uuuuccuauaggagagaac

SEQ ID NO: 2392225 - RNA, 19 nt, Artificial Sequence
  Description of Artificial Sequence: Synthetic oligonucleotide
cuaaacuaacucagcugag

SEQ ID NO: 2392226 - RNA, 19 nt, Artificial Sequence
  Description of Artificial Sequence: Synthetic oligonucleotide
uuuacugguaaaggucuug

SEQ ID NO: 2392227 - RNA, 19 nt, Artificial Sequence
  Description of Artificial Sequence: Synthetic oligonucleotide
aacuuuaccaugauuuauu

SEQ ID NO: 2392228 - RNA, 19 nt, Artificial Sequence
  Description of Artificial Sequence: Synthetic oligonucleotide
acauugucuaauaaugggu

SEQ ID NO: 2392229 - RNA, 19 nt, Artificial Sequence
  Description of Artificial Sequence: Synthetic oligonucleotide
aacagguagccagauaaau

SEQ ID NO: 2392230 - RNA, 19 nt, Artificial Sequence
  Description of Artificial Sequence: Synthetic oligonucleotide
gugacuauugcuaagacau

SEQ ID NO: 2392231 - RNA, 19 nt, Artificial Sequence
  Description of Artificial Sequence: Synthetic oligonucleotide
acacacuuguaccugaauu

SEQ ID NO: 2392232 - RNA, 19 nt, Artificial Sequence
  Description of Artificial Sequence: Synthetic oligonucleotide
uuuacugauuucugaguua

SEQ ID NO: 2392233 - RNA, 19 nt, Artificial Sequence
  Description of Artificial Sequence: Synthetic oligonucleotide
uguauguguacagggugcc

SEQ ID NO: 2392234 - RNA, 19 nt, Artificial Sequence
  Description of Artificial Sequence: Synthetic oligonucleotide
ucauauaauuugguaaaua

SEQ ID NO: 2392235 - RNA, 19 nt, Artificial Sequence
  Description of Artificial Sequence: Synthetic oligonucleotide
aucacgacacuagagcaag

SEQ ID NO: 2392236 - RNA, 19 nt, Artificial Sequence
  Description of Artificial Sequence: Synthetic oligonucleotide
ugaguuugccuuucugaac

SEQ ID NO: 2392237 - RNA, 19 nt, Artificial Sequence
  Description of Artificial Sequence: Synthetic oligonucleotide
gaacucauauaauuuggua

SEQ ID NO: 2392238 - RNA, 19 nt, Artificial Sequence
  Description of Artificial Sequence: Synthetic oligonucleotide
gacaccaggaaaaugcuaa

SEQ ID NO: 2392239 - RNA, 19 nt, Artificial Sequence
  Description of Artificial Sequence: Synthetic oligonucleotide
cagcucuauuaaaacauac

SEQ ID NO: 2392240 - RNA, 19 nt, Artificial Sequence
  Description of Artificial Sequence: Synthetic oligonucleotide
agugcaucacgacacuaga

SEQ ID NO: 2392241 - RNA, 19 nt, Artificial Sequence
  Description of Artificial Sequence: Synthetic oligonucleotide
cacuuaguccaugacaaac

SEQ ID NO: 2392242 - RNA, 19 nt, Artificial Sequence
  Description of Artificial Sequence: Synthetic oligonucleotide
aacuaacucagcugaggua

SEQ ID NO: 2392243 - RNA, 19 nt, Artificial Sequence
  Description of Artificial Sequence: Synthetic oligonucleotide
auaggagagaacuggggua

SEQ ID NO: 2392244 - RNA, 19 nt, Artificial Sequence
  Description of Artificial Sequence: Synthetic oligonucleotide
aaguuuuaauguaugugua

SEQ ID NO: 2392245 - RNA, 19 nt, Artificial Sequence
  Description of Artificial Sequence: Synthetic oligonucleotide
cagugcaucacgacacuag

SEQ ID NO: 2392246 - RNA, 19 nt, Artificial Sequence
  Description of Artificial Sequence: Synthetic oligonucleotide
gacagaaacauaauuuacu

SEQ ID NO: 2392247 - RNA, 19 nt, Artificial Sequence
  Description of Artificial Sequence: Synthetic oligonucleotide
auuucugaguuaagcacag

SEQ ID NO: 2392248 - RNA, 19 nt, Artificial Sequence
  Description of Artificial Sequence: Synthetic oligonucleotide
acugcaagguaguuuuccu

SEQ ID NO: 2392249 - RNA, 19 nt, Artificial Sequence
  Description of Artificial Sequence: Synthetic oligonucleotide
uugcuaagacauugcauaa

SEQ ID NO: 2392250 - RNA, 19 nt, Artificial Sequence
  Description of Artificial Sequence: Synthetic oligonucleotide
acagugacuauugcuaaga

SEQ ID NO: 2392251 - RNA, 19 nt, Artificial Sequence
  Description of Artificial Sequence: Synthetic oligonucleotide
aaacgaauguaaacuuccu

SEQ ID NO: 2392252 - RNA, 19 nt, Artificial Sequence
  Description of Artificial Sequence: Synthetic oligonucleotide
uuaugugaagggugcugug

SEQ ID NO: 2392253 - RNA, 19 nt, Artificial Sequence
  Description of Artificial Sequence: Synthetic oligonucleotide
auugucuaauaauggguua

SEQ ID NO: 2392254 - RNA, 19 nt, Artificial Sequence
  Description of Artificial Sequence: Synthetic oligonucleotide
uuucugaacccuggaaaca

SEQ ID NO: 2392255 - RNA, 19 nt, Artificial Sequence
  Description of Artificial Sequence: Synthetic oligonucleotide
cagcagugcaucacgacac

SEQ ID NO: 2392256 - RNA, 19 nt, Artificial Sequence
  Description of Artificial Sequence: Synthetic oligonucleotide
acuuuaccaugauuuauuu

SEQ ID NO: 2392257 - RNA, 19 nt, Artificial Sequence
  Description of Artificial Sequence: Synthetic oligonucleotide
uaugugaagggugcugugu

SEQ ID NO: 2392258 - RNA, 19 nt, Artificial Sequence
  Description of Artificial Sequence: Synthetic oligonucleotide
aaagaacuaucaauucaaa

SEQ ID NO: 2392259 - RNA, 19 nt, Artificial Sequence
  Description of Artificial Sequence: Synthetic oligonucleotide
acgacacuagagcaagaug

SEQ ID NO: 2392260 - RNA, 19 nt, Artificial Sequence
  Description of Artificial Sequence: Synthetic oligonucleotide
auaaauuggcugauuggga

SEQ ID NO: 2392261 - RNA, 19 nt, Artificial Sequence
  Description of Artificial Sequence: Synthetic oligonucleotide
acuuaguccaugacaaaca

SEQ ID NO: 2392262 - RNA, 19 nt, Artificial Sequence
  Description of Artificial Sequence: Synthetic oligonucleotide
uuuguaauaggaggccaaa

SEQ ID NO: 2392263 - RNA, 19 nt, Artificial Sequence
  Description of Artificial Sequence: Synthetic oligonucleotide
cauauaacauugucuaaua

SEQ ID NO: 2392264 - RNA, 19 nt, Artificial Sequence
  Description of Artificial Sequence: Synthetic oligonucleotide
cagauugacauuauauaua

SEQ ID NO: 2392265 - RNA, 19 nt, Artificial Sequence
  Description of Artificial Sequence: Synthetic oligonucleotide
ccuaaacuaacucagcuga

SEQ ID NO: 2392266 - RNA, 19 nt, Artificial Sequence
  Description of Artificial Sequence: Synthetic oligonucleotide
cuauugcuaagacauugca

SEQ ID NO: 2392267 - RNA, 19 nt, Artificial Sequence
  Description of Artificial Sequence: Synthetic oligonucleotide
uguguacagggugccaaag

SEQ ID NO: 2392268 - RNA, 19 nt, Artificial Sequence
  Description of Artificial Sequence: Synthetic oligonucleotide
agcucuauuaaaacauacu

SEQ ID NO: 2392269 - RNA, 19 nt, Artificial Sequence
  Description of Artificial Sequence: Synthetic oligonucleotide
uucugaacccuggaaacaa

SEQ ID NO: 2392270 - RNA, 19 nt, Artificial Sequence
  Description of Artificial Sequence: Synthetic oligonucleotide
ugacaaacaacagcucuau

SEQ ID NO: 2392271 - RNA, 19 nt, Artificial Sequence
  Description of Artificial Sequence: Synthetic oligonucleotide
augcuaauauuuacaaaca

SEQ ID NO: 2392272 - RNA, 19 nt, Artificial Sequence
  Description of Artificial Sequence: Synthetic oligonucleotide
aacacacuuguaccugaau

SEQ ID NO: 2392273 - RNA, 19 nt, Artificial Sequence
  Description of Artificial Sequence: Synthetic oligonucleotide
ugcaaacuuuaccaugauu

SEQ ID NO: 2392274 - RNA, 19 nt, Artificial Sequence
  Description of Artificial Sequence: Synthetic oligonucleotide
uauucaucugagacauaau

SEQ ID NO: 2392275 - RNA, 19 nt, Artificial Sequence
  Description of Artificial Sequence: Synthetic oligonucleotide
cauuucaugaguuugccuu

SEQ ID NO: 2392276 - RNA, 19 nt, Artificial Sequence
  Description of Artificial Sequence: Synthetic oligonucleotide
accccugaaaacaaguaca

SEQ ID NO: 2392277 - RNA, 19 nt, Artificial Sequence
  Description of Artificial Sequence: Synthetic oligonucleotide
ccuauaggagagaacuggg

SEQ ID NO: 2392278 - RNA, 19 nt, Artificial Sequence
  Description of Artificial Sequence: Synthetic oligonucleotide
uacaaucccaauggaacuc

SEQ ID NO: 2392279 - RNA, 19 nt, Artificial Sequence
  Description of Artificial Sequence: Synthetic oligonucleotide
uacugauuucugaguuaag

SEQ ID NO: 2392280 - RNA, 19 nt, Artificial Sequence
  Description of Artificial Sequence: Synthetic oligonucleotide
uuguaauaggaggccaaac

SEQ ID NO: 2392281 - RNA, 19 nt, Artificial Sequence
  Description of Artificial Sequence: Synthetic oligonucleotide
aaccccaguacaaucacuu

SEQ ID NO: 2392282 - RNA, 19 nt, Artificial Sequence
  Description of Artificial Sequence: Synthetic oligonucleotide
cagaauuagaaacgaaugu

SEQ ID NO: 2392283 - RNA, 19 nt, Artificial Sequence
  Description of Artificial Sequence: Synthetic oligonucleotide
uucagcagugcaucacgac

SEQ ID NO: 2392284 - RNA, 19 nt, Artificial Sequence
  Description of Artificial Sequence: Synthetic oligonucleotide
caugacaaacaacagcucu

SEQ ID NO: 2392285 - RNA, 19 nt, Artificial Sequence
  Description of Artificial Sequence: Synthetic oligonucleotide
agcugagguaacagguagc

SEQ ID NO: 2392286 - RNA, 19 nt, Artificial Sequence
  Description of Artificial Sequence: Synthetic oligonucleotide
agguagccagauaaauugg

SEQ ID NO: 2392287 - RNA, 19 nt, Artificial Sequence
  Description of Artificial Sequence: Synthetic oligonucleotide
acauuauauauaggaugug

SEQ ID NO: 2392288 - RNA, 19 nt, Artificial Sequence
  Description of Artificial Sequence: Synthetic oligonucleotide
cauuauucaucugagacau

SEQ ID NO: 2392289 - RNA, 19 nt, Artificial Sequence
  Description of Artificial Sequence: Synthetic oligonucleotide
guguacagggugccaaagc

SEQ ID NO: 2392290 - RNA, 19 nt, Artificial Sequence
  Description of Artificial Sequence: Synthetic oligonucleotide
cuaucaauucaaaguacua

SEQ ID NO: 2392291 - RNA, 19 nt, Artificial Sequence
  Description of Artificial Sequence: Synthetic oligonucleotide
aggaaaaugcuaauauuua

SEQ ID NO: 2392292 - RNA, 19 nt, Artificial Sequence
  Description of Artificial Sequence: Synthetic oligonucleotide
uaaaggucuugggaacccc

SEQ ID NO: 2392293 - RNA, 19 nt, Artificial Sequence
  Description of Artificial Sequence: Synthetic oligonucleotide
cuuaguccaugacaaacaa

SEQ ID NO: 2392294 - RNA, 19 nt, Artificial Sequence
  Description of Artificial Sequence: Synthetic oligonucleotide
uucaugaguuugccuuucu

SEQ ID NO: 2392295 - RNA, 19 nt, Artificial Sequence
  Description of Artificial Sequence: Synthetic oligonucleotide
caaucacuuaguccaugac

SEQ ID NO: 2392296 - RNA, 19 nt, Artificial Sequence
  Description of Artificial Sequence: Synthetic oligonucleotide
aaaggucuugggaacccca

SEQ ID NO: 2392297 - RNA, 19 nt, Artificial Sequence
  Description of Artificial Sequence: Synthetic oligonucleotide
auaugacacaugauuauuu

SEQ ID NO: 2392298 - RNA, 19 nt, Artificial Sequence
  Description of Artificial Sequence: Synthetic oligonucleotide
gaaacauaauuuacuggua

SEQ ID NO: 2392299 - RNA, 19 nt, Artificial Sequence
  Description of Artificial Sequence: Synthetic oligonucleotide
aguacuaauuugagaaaau

SEQ ID NO: 2392300 - RNA, 19 nt, Artificial Sequence
  Description of Artificial Sequence: Synthetic oligonucleotide
uaccugaauuggaaacuuc

SEQ ID NO: 2392301 - RNA, 19 nt, Artificial Sequence
  Description of Artificial Sequence: Synthetic oligonucleotide
cauuauauauaggaugugu

SEQ ID NO: 2392302 - RNA, 19 nt, Artificial Sequence
  Description of Artificial Sequence: Synthetic oligonucleotide
guaauaggaggccaaacuu

SEQ ID NO: 2392303 - RNA, 19 nt, Artificial Sequence
  Description of Artificial Sequence: Synthetic oligonucleotide
caaacuuuaccaugauuua

SEQ ID NO: 2392304 - RNA, 19 nt, Artificial Sequence
  Description of Artificial Sequence: Synthetic oligonucleotide
auaauuugguaaauacaua

SEQ ID NO: 2392305 - RNA, 19 nt, Artificial Sequence
  Description of Artificial Sequence: Synthetic oligonucleotide
auuuagacaccaggaaaau

SEQ ID NO: 2392306 - RNA, 19 nt, Artificial Sequence
  Description of Artificial Sequence: Synthetic oligonucleotide
acuuguaccugaauuggaa

SEQ ID NO: 2392307 - RNA, 19 nt, Artificial Sequence
  Description of Artificial Sequence: Synthetic oligonucleotide
ugggaaccccaguacaauc

SEQ ID NO: 2392308 - RNA, 19 nt, Artificial Sequence
  Description of Artificial Sequence: Synthetic oligonucleotide
guacuaauuugagaaaaua

SEQ ID NO: 2392309 - RNA, 19 nt, Artificial Sequence
  Description of Artificial Sequence: Synthetic oligonucleotide
cuuguaccugaauuggaaa

SEQ ID NO: 2392310 - RNA, 19 nt, Artificial Sequence
  Description of Artificial Sequence: Synthetic oligonucleotide
uggcugauugggaaacuua

SEQ ID NO: 2392311 - RNA, 19 nt, Artificial Sequence
  Description of Artificial Sequence: Synthetic oligonucleotide
aguccaugacaaacaacag

SEQ ID NO: 2392312 - RNA, 19 nt, Artificial Sequence
  Description of Artificial Sequence: Synthetic oligonucleotide
acaaucccaauggaacuca

SEQ ID NO: 2392313 - RNA, 19 nt, Artificial Sequence
  Description of Artificial Sequence: Synthetic oligonucleotide
ugcuaagacauugcauaaa

SEQ ID NO: 2392314 - RNA, 19 nt, Artificial Sequence
  Description of Artificial Sequence: Synthetic oligonucleotide
auuuguaauaggaggccaa

SEQ ID NO: 2392315 - RNA, 19 nt, Artificial Sequence
  Description of Artificial Sequence: Synthetic oligonucleotide
aaaccccugaaaacaagua

SEQ ID NO: 2392316 - RNA, 19 nt, Artificial Sequence
  Description of Artificial Sequence: Synthetic oligonucleotide
gguagccagauaaauuggc

SEQ ID NO: 2392317 - RNA, 19 nt, Artificial Sequence
  Description of Artificial Sequence: Synthetic oligonucleotide
gcaaacuuuaccaugauuu

SEQ ID NO: 2392318 - RNA, 19 nt, Artificial Sequence
  Description of Artificial Sequence: Synthetic oligonucleotide
cuaacucagcugagguaac

SEQ ID NO: 2392319 - RNA, 19 nt, Artificial Sequence
  Description of Artificial Sequence: Synthetic oligonucleotide
cagugacuauugcuaagac

SEQ ID NO: 2392320 - RNA, 19 nt, Artificial Sequence
  Description of Artificial Sequence: Synthetic oligonucleotide
gcugagguaacagguagcc

SEQ ID NO: 2392321 - RNA, 19 nt, Artificial Sequence
  Description of Artificial Sequence: Synthetic oligonucleotide
uaacucagcugagguaaca

SEQ ID NO: 2392322 - RNA, 19 nt, Artificial Sequence
  Description of Artificial Sequence: Synthetic oligonucleotide
aggaggccaaacuuuuaaa

SEQ ID NO: 2392323 - RNA, 19 nt, Artificial Sequence
  Description of Artificial Sequence: Synthetic oligonucleotide
ugccuuucugaacccugga

SEQ ID NO: 2392324 - RNA, 19 nt, Artificial Sequence
  Description of Artificial Sequence: Synthetic oligonucleotide
ggaggccaaacuuuuaaaa

SEQ ID NO: 2392325 - RNA, 19 nt, Artificial Sequence
  Description of Artificial Sequence: Synthetic oligonucleotide
acugggguauuccuccaaa

SEQ ID NO: 2392326 - RNA, 19 nt, Artificial Sequence
  Description of Artificial Sequence: Synthetic oligonucleotide
gaugagaaggaggaaguau

SEQ ID NO: 2392327 - RNA, 19 nt, Artificial Sequence
  Description of Artificial Sequence: Synthetic oligonucleotide
ucacuuaguccaugacaaa

SEQ ID NO: 2392328 - RNA, 19 nt, Artificial Sequence
  Description of Artificial Sequence: Synthetic oligonucleotide
cugagacauaauuauuugu

SEQ ID NO: 2392329 - RNA, 19 nt, Artificial Sequence
  Description of Artificial Sequence: Synthetic oligonucleotide
gcaucacgacacuagagca

SEQ ID NO: 2392330 - RNA, 19 nt, Artificial Sequence
  Description of Artificial Sequence: Synthetic oligonucleotide
ugacuauugcuaagacauu

SEQ ID NO: 2392331 - RNA, 19 nt, Artificial Sequence
  Description of Artificial Sequence: Synthetic oligonucleotide
augacaaacaacagcucua

SEQ ID NO: 2392332 - RNA, 19 nt, Artificial Sequence
  Description of Artificial Sequence: Synthetic oligonucleotide
caccagauugacauuauau

SEQ ID NO: 2392333 - RNA, 19 nt, Artificial Sequence
  Description of Artificial Sequence: Synthetic oligonucleotide
acauacugcaagguaguuu

SEQ ID NO: 2392334 - RNA, 19 nt, Artificial Sequence
  Description of Artificial Sequence: Synthetic oligonucleotide
ggaugggcauuacagugac

SEQ ID NO: 2392335 - RNA, 19 nt, Artificial Sequence
  Description of Artificial Sequence: Synthetic oligonucleotide
gugcaucacgacacuagag

SEQ ID NO: 2392336 - RNA, 19 nt, Artificial Sequence
  Description of Artificial Sequence: Synthetic oligonucleotide
cuuuaccaugauuuauuua

SEQ ID NO: 2392337 - RNA, 19 nt, Artificial Sequence
  Description of Artificial Sequence: Synthetic oligonucleotide
aacauacugcaagguaguu

SEQ ID NO: 2392338 - RNA, 19 nt, Artificial Sequence
  Description of Artificial Sequence: Synthetic oligonucleotide
aggaugggcauuacaguga

SEQ ID NO: 2392339 - RNA, 19 nt, Artificial Sequence
  Description of Artificial Sequence: Synthetic oligonucleotide
ggugcuguguugaaaguuc

SEQ ID NO: 2392340 - RNA, 19 nt, Artificial Sequence
  Description of Artificial Sequence: Synthetic oligonucleotide
aaacacacuuguaccugaa

SEQ ID NO: 2392341 - RNA, 19 nt, Artificial Sequence
  Description of Artificial Sequence: Synthetic oligonucleotide
ugaagggugcuguguugaa

SEQ ID NO: 2392342 - RNA, 19 nt, Artificial Sequence
  Description of Artificial Sequence: Synthetic oligonucleotide
ucacgacacuagagcaaga

SEQ ID NO: 2392343 - RNA, 19 nt, Artificial Sequence
  Description of Artificial Sequence: Synthetic oligonucleotide
caucacgacacuagagcaa

SEQ ID NO: 2392344 - RNA, 19 nt, Artificial Sequence
  Description of Artificial Sequence: Synthetic oligonucleotide
uugggaaccccaguacaau

SEQ ID NO: 2392345 - RNA, 19 nt, Artificial Sequence
  Description of Artificial Sequence: Synthetic oligonucleotide
gcacaguaaaauacaaguc

SEQ ID NO: 2392346 - RNA, 19 nt, Artificial Sequence
  Description of Artificial Sequence: Synthetic oligonucleotide
cuggaaacaagacauuauu

SEQ ID NO: 2392347 - RNA, 19 nt, Artificial Sequence
  Description of Artificial Sequence: Synthetic oligonucleotide
ugggcauuacagugacuau

SEQ ID NO: 2392348 - RNA, 19 nt, Artificial Sequence
  Description of Artificial Sequence: Synthetic oligonucleotide
cacuuguaccugaauugga

SEQ ID NO: 2392349 - RNA, 19 nt, Artificial Sequence
  Description of Artificial Sequence: Synthetic oligonucleotide
gggugccaaagccauauga

SEQ ID NO: 2392350 - RNA, 19 nt, Artificial Sequence
  Description of Artificial Sequence: Synthetic oligonucleotide
ggaaccccaguacaaucac

SEQ ID NO: 2392351 - RNA, 19 nt, Artificial Sequence
  Description of Artificial Sequence: Synthetic oligonucleotide
uuggcugauugggaaacuu

SEQ ID NO: 2392352 - RNA, 19 nt, Artificial Sequence
  Description of Artificial Sequence: Synthetic oligonucleotide
aaucccaauggaacucaua

SEQ ID NO: 2392353 - RNA, 19 nt, Artificial Sequence
  Description of Artificial Sequence: Synthetic oligonucleotide
gaacugggguauuccucca

SEQ ID NO: 2392354 - RNA, 19 nt, Artificial Sequence
  Description of Artificial Sequence: Synthetic oligonucleotide
aagccauaugacacaugau

SEQ ID NO: 2392355 - RNA, 19 nt, Artificial Sequence
  Description of Artificial Sequence: Synthetic oligonucleotide
acagcucuauuaaaacaua

SEQ ID NO: 2392356 - RNA, 19 nt, Artificial Sequence
  Description of Artificial Sequence: Synthetic oligonucleotide
ccagauugacauuauauau

SEQ ID NO: 2392357 - RNA, 19 nt, Artificial Sequence
  Description of Artificial Sequence: Synthetic oligonucleotide
guagccagauaaauuggcu

SEQ ID NO: 2392358 - RNA, 19 nt, Artificial Sequence
  Description of Artificial Sequence: Synthetic oligonucleotide
guacagaauuagaaacgaa

SEQ ID NO: 2392359 - RNA, 19 nt, Artificial Sequence
  Description of Artificial Sequence: Synthetic oligonucleotide
auuggcugauugggaaacu

SEQ ID NO: 2392360 - RNA, 19 nt, Artificial Sequence
  Description of Artificial Sequence: Synthetic oligonucleotide
gccauaugacacaugauua

SEQ ID NO: 2392361 - RNA, 19 nt, Artificial Sequence
  Description of Artificial Sequence: Synthetic oligonucleotide
ccaguacaaucacuuaguc

SEQ ID NO: 2392362 - RNA, 19 nt, Artificial Sequence
  Description of Artificial Sequence: Synthetic oligonucleotide
gaagggugcuguguugaaa

SEQ ID NO: 2392363 - RNA, 19 nt, Artificial Sequence
  Description of Artificial Sequence: Synthetic oligonucleotide
gucuaauaauggguuacgu

SEQ ID NO: 2392364 - RNA, 19 nt, Artificial Sequence
  Description of Artificial Sequence: Synthetic oligonucleotide
cugcaagguaguuuuccua

SEQ ID NO: 2392365 - RNA, 19 nt, Artificial Sequence
  Description of Artificial Sequence: Synthetic oligonucleotide
cugggguauuccuccaaaa

SEQ ID NO: 2392366 - RNA, 19 nt, Artificial Sequence
  Description of Artificial Sequence: Synthetic oligonucleotide
gggaaccccaguacaauca

SEQ ID NO: 2392367 - RNA, 19 nt, Artificial Sequence
  Description of Artificial Sequence: Synthetic oligonucleotide
accccaguacaaucacuua

SEQ ID NO: 2392368 - RNA, 19 nt, Artificial Sequence
  Description of Artificial Sequence: Synthetic oligonucleotide
cauaugacacaugauuauu

SEQ ID NO: 2392369 - RNA, 19 nt, Artificial Sequence
  Description of Artificial Sequence: Synthetic oligonucleotide
gcuguguugaaaguucucu

SEQ ID NO: 2392370 - RNA, 19 nt, Artificial Sequence
  Description of Artificial Sequence: Synthetic oligonucleotide
ccaugacaaacaacagcuc

SEQ ID NO: 2392371 - RNA, 19 nt, Artificial Sequence
  Description of Artificial Sequence: Synthetic oligonucleotide
ggaacucauauaauuuggu

SEQ ID NO: 2392372 - RNA, 19 nt, Artificial Sequence
  Description of Artificial Sequence: Synthetic oligonucleotide
uccucaccagauugacauu

SEQ ID NO: 2392373 - RNA, 19 nt, Artificial Sequence
  Description of Artificial Sequence: Synthetic oligonucleotide
guuccucaccagauugaca

SEQ ID NO: 2392374 - RNA, 19 nt, Artificial Sequence
  Description of Artificial Sequence: Synthetic oligonucleotide
agacaccaggaaaaugcua

SEQ ID NO: 2392375 - RNA, 19 nt, Artificial Sequence
  Description of Artificial Sequence: Synthetic oligonucleotide
cgaauguaaacuuccuaaa

SEQ ID NO: 2392376 - RNA, 19 nt, Artificial Sequence
  Description of Artificial Sequence: Synthetic oligonucleotide
cugagguaacagguagcca

SEQ ID NO: 2392377 - RNA, 19 nt, Artificial Sequence
  Description of Artificial Sequence: Synthetic oligonucleotide
auaggaggccaaacuuuua

SEQ ID NO: 2392378 - RNA, 19 nt, Artificial Sequence
  Description of Artificial Sequence: Synthetic oligonucleotide
caccaggaaaaugcuaaua

SEQ ID NO: 2392379 - RNA, 19 nt, Artificial Sequence
  Description of Artificial Sequence: Synthetic oligonucleotide
cuuuuaugugaagggugcu

SEQ ID NO: 2392380 - RNA, 19 nt, Artificial Sequence
  Description of Artificial Sequence: Synthetic oligonucleotide
gguaacagguagccagaua

SEQ ID NO: 2392381 - RNA, 19 nt, Artificial Sequence
  Description of Artificial Sequence: Synthetic oligonucleotide
gccuuucugaacccuggaa

SEQ ID NO: 2392382 - RNA, 19 nt, Artificial Sequence
  Description of Artificial Sequence: Synthetic oligonucleotide
cccaguacaaucacuuagu

SEQ ID NO: 2392383 - RNA, 19 nt, Artificial Sequence
  Description of Artificial Sequence: Synthetic oligonucleotide
ccauaugacacaugauuau

SEQ ID NO: 2392384 - RNA, 19 nt, Artificial Sequence
  Description of Artificial Sequence: Synthetic oligonucleotide
gcauuucaugaguuugccu

SEQ ID NO: 2392385 - RNA, 19 nt, Artificial Sequence
  Description of Artificial Sequence: Synthetic oligonucleotide
guuugccuuucugaacccu

SEQ ID NO: 2392386 - RNA, 19 nt, Artificial Sequence
  Description of Artificial Sequence: Synthetic oligonucleotide
auuauucaucugagacaua

SEQ ID NO: 2392387 - RNA, 19 nt, Artificial Sequence
  Description of Artificial Sequence: Synthetic oligonucleotide
cacgacacuagagcaagau

SEQ ID NO: 2392388 - RNA, 19 nt, Artificial Sequence
  Description of Artificial Sequence: Synthetic oligonucleotide
cagggugccaaagccauau

SEQ ID NO: 2392389 - RNA, 19 nt, Artificial Sequence
  Description of Artificial Sequence: Synthetic oligonucleotide
gggaaacuuaucucuucuu

SEQ ID NO: 2392390 - RNA, 19 nt, Artificial Sequence
  Description of Artificial Sequence: Synthetic oligonucleotide
guacaaucacuuaguccau

SEQ ID NO: 2392391 - RNA, 19 nt, Artificial Sequence
  Description of Artificial Sequence: Synthetic oligonucleotide
acccuggaaacaagacauu

SEQ ID NO: 2392392 - RNA, 19 nt, Artificial Sequence
  Description of Artificial Sequence: Synthetic oligonucleotide
aggagagaacugggguauu

SEQ ID NO: 2392393 - RNA, 19 nt, Artificial Sequence
  Description of Artificial Sequence: Synthetic oligonucleotide
gggcauuacagugacuauu

SEQ ID NO: 2392394 - RNA, 19 nt, Artificial Sequence
  Description of Artificial Sequence: Synthetic oligonucleotide
gaugggcauuacagugacu

SEQ ID NO: 2392395 - RNA, 19 nt, Artificial Sequence
  Description of Artificial Sequence: Synthetic oligonucleotide
acagggugccaaagccaua

SEQ ID NO: 2392396 - RNA, 19 nt, Artificial Sequence
  Description of Artificial Sequence: Synthetic oligonucleotide
gccagauaaauuggcugau

SEQ ID NO: 2392397 - RNA, 19 nt, Artificial Sequence
  Description of Artificial Sequence: Synthetic oligonucleotide
gggugcuguguugaaaguu

SEQ ID NO: 2392398 - RNA, 19 nt, Artificial Sequence
  Description of Artificial Sequence: Synthetic oligonucleotide
ccaaagccauaugacacau

SEQ ID NO: 2392399 - RNA, 19 nt, Artificial Sequence
  Description of Artificial Sequence: Synthetic oligonucleotide
aaugccgaaaaccacagcc

SEQ ID NO: 2392400 - RNA, 19 nt, Artificial Sequence
  Description of Artificial Sequence: Synthetic oligonucleotide
ugaauuauagaccugauca

SEQ ID NO: 2392401 - RNA, 19 nt, Artificial Sequence
  Description of Artificial Sequence: Synthetic oligonucleotide
aaaacaaauacuucguagg

SEQ ID NO: 2392402 - RNA, 19 nt, Artificial Sequence
  Description of Artificial Sequence: Synthetic oligonucleotide
aaccuuuccaaauucaaac

SEQ ID NO: 2392403 - RNA, 19 nt, Artificial Sequence
  Description of Artificial Sequence: Synthetic oligonucleotide
auaguuuucggugagaccc

SEQ ID NO: 2392404 - RNA, 19 nt, Artificial Sequence
  Description of Artificial Sequence: Synthetic oligonucleotide
guuacuuucacucugguug

SEQ ID NO: 2392405 - RNA, 19 nt, Artificial Sequence
  Description of Artificial Sequence: Synthetic oligonucleotide
auucaaacuucccaggucc

SEQ ID NO: 2392406 - RNA, 19 nt, Artificial Sequence
  Description of Artificial Sequence: Synthetic oligonucleotide
agggaaaggaauuuagucc

SEQ ID NO: 2392407 - RNA, 19 nt, Artificial Sequence
  Description of Artificial Sequence: Synthetic oligonucleotide
aaacaaauacuucguaggg

SEQ ID NO: 2392408 - RNA, 19 nt, Artificial Sequence
  Description of Artificial Sequence: Synthetic oligonucleotide
ucuacaguggucaacaaug

SEQ ID NO: 2392409 - RNA, 19 nt, Artificial Sequence
  Description of Artificial Sequence: Synthetic oligonucleotide
aaguagauuagccauugag

SEQ ID NO: 2392410 - RNA, 19 nt, Artificial Sequence
  Description of Artificial Sequence: Synthetic oligonucleotide
aaagaauaacccuuccauc

SEQ ID NO: 2392411 - RNA, 19 nt, Artificial Sequence
  Description of Artificial Sequence: Synthetic oligonucleotide
aguccacugaauuauagac

SEQ ID NO: 2392412 - RNA, 19 nt, Artificial Sequence
  Description of Artificial Sequence: Synthetic oligonucleotide
aauuauagaccugaucaac

SEQ ID NO: 2392413 - RNA, 19 nt, Artificial Sequence
  Description of Artificial Sequence: Synthetic oligonucleotide
aauaguuuucggugagacc

SEQ ID NO: 2392414 - RNA, 19 nt, Artificial Sequence
  Description of Artificial Sequence: Synthetic oligonucleotide
guagauuagccauugagcc

SEQ ID NO: 2392415 - RNA, 19 nt, Artificial Sequence
  Description of Artificial Sequence: Synthetic oligonucleotide
uaguugugccaucagaugg

SEQ ID NO: 2392416 - RNA, 19 nt, Artificial Sequence
  Description of Artificial Sequence: Synthetic oligonucleotide
cuaauggcaaaacaaauac

SEQ ID NO: 2392417 - RNA, 19 nt, Artificial Sequence
  Description of Artificial Sequence: Synthetic oligonucleotide
aguagauuagccauugagc

SEQ ID NO: 2392418 - RNA, 19 nt, Artificial Sequence
  Description of Artificial Sequence: Synthetic oligonucleotide
aguucuacuaaguucuuag

SEQ ID NO: 2392419 - RNA, 19 nt, Artificial Sequence
  Description of Artificial Sequence: Synthetic oligonucleotide
acugcaauaguuuucggug

SEQ ID NO: 2392420 - RNA, 19 nt, Artificial Sequence
  Description of Artificial Sequence: Synthetic oligonucleotide
ugcacugacaucuaauggc

SEQ ID NO: 2392421 - RNA, 19 nt, Artificial Sequence
  Description of Artificial Sequence: Synthetic oligonucleotide
gaauguacucauuggaacc

SEQ ID NO: 2392422 - RNA, 19 nt, Artificial Sequence
  Description of Artificial Sequence: Synthetic oligonucleotide
aaauacuucguagggaaag

SEQ ID NO: 2392423 - RNA, 19 nt, Artificial Sequence
  Description of Artificial Sequence: Synthetic oligonucleotide
auuauagaccugaucaacc

SEQ ID NO: 2392424 - RNA, 19 nt, Artificial Sequence
  Description of Artificial Sequence: Synthetic oligonucleotide
ucaacaauggggcaaugca

SEQ ID NO: 2392425 - RNA, 19 nt, Artificial Sequence
  Description of Artificial Sequence: Synthetic oligonucleotide
agauuuucaggagagcacc

SEQ ID NO: 2392426 - RNA, 19 nt, Artificial Sequence
  Description of Artificial Sequence: Synthetic oligonucleotide
uacagaauguacucauugg

SEQ ID NO: 2392427 - RNA, 19 nt, Artificial Sequence
  Description of Artificial Sequence: Synthetic oligonucleotide
ugccguggaacccauaagg

SEQ ID NO: 2392428 - RNA, 19 nt, Artificial Sequence
  Description of Artificial Sequence: Synthetic oligonucleotide
aguucuuagcauccaagac

SEQ ID NO: 2392429 - RNA, 19 nt, Artificial Sequence
  Description of Artificial Sequence: Synthetic oligonucleotide
cuuagcauccaagacaagg

SEQ ID NO: 2392430 - RNA, 19 nt, Artificial Sequence
  Description of Artificial Sequence: Synthetic oligonucleotide
uccaacucgaaguagauua

SEQ ID NO: 2392431 - RNA, 19 nt, Artificial Sequence
  Description of Artificial Sequence: Synthetic oligonucleotide
uugggagugaucacaacag

SEQ ID NO: 2392432 - RNA, 19 nt, Artificial Sequence
  Description of Artificial Sequence: Synthetic oligonucleotide
acaaaauugggcucugaag

SEQ ID NO: 2392433 - RNA, 19 nt, Artificial Sequence
  Description of Artificial Sequence: Synthetic oligonucleotide
aauaggaggagugaacuga

SEQ ID NO: 2392434 - RNA, 19 nt, Artificial Sequence
  Description of Artificial Sequence: Synthetic oligonucleotide
uucuuagcauccaagacaa

SEQ ID NO: 2392435 - RNA, 19 nt, Artificial Sequence
  Description of Artificial Sequence: Synthetic oligonucleotide
ucuaauggcaaaacaaaua

SEQ ID NO: 2392436 - RNA, 19 nt, Artificial Sequence
  Description of Artificial Sequence: Synthetic oligonucleotide
aacccuuccaucuuccuca

SEQ ID NO: 2392437 - RNA, 19 nt, Artificial Sequence
  Description of Artificial Sequence: Synthetic oligonucleotide
gauggguacaaaugugccg

SEQ ID NO: 2392438 - RNA, 19 nt, Artificial Sequence
  Description of Artificial Sequence: Synthetic oligonucleotide
aacugcaauaguuuucggu

SEQ ID NO: 2392439 - RNA, 19 nt, Artificial Sequence
  Description of Artificial Sequence: Synthetic oligonucleotide
caaacugcaauaguuuucg

SEQ ID NO: 2392440 - RNA, 19 nt, Artificial Sequence
  Description of Artificial Sequence: Synthetic oligonucleotide
aauacuucguagggaaagg

SEQ ID NO: 2392441 - RNA, 19 nt, Artificial Sequence
  Description of Artificial Sequence: Synthetic oligonucleotide
aauuuaguccacugaauua

SEQ ID NO: 2392442 - RNA, 19 nt, Artificial Sequence
  Description of Artificial Sequence: Synthetic oligonucleotide
aauaacccuuccaucuucc

SEQ ID NO: 2392443 - RNA, 19 nt, Artificial Sequence
  Description of Artificial Sequence: Synthetic oligonucleotide
ucuucuguacagaauguac

SEQ ID NO: 2392444 - RNA, 19 nt, Artificial Sequence
  Description of Artificial Sequence: Synthetic oligonucleotide
uuaguccacugaauuauag

SEQ ID NO: 2392445 - RNA, 19 nt, Artificial Sequence
  Description of Artificial Sequence: Synthetic oligonucleotide
uuugccauugaaucggcca

SEQ ID NO: 2392446 - RNA, 19 nt, Artificial Sequence
  Description of Artificial Sequence: Synthetic oligonucleotide
aucagauggguacaaaugu

SEQ ID NO: 2392447 - RNA, 19 nt, Artificial Sequence
  Description of Artificial Sequence: Synthetic oligonucleotide
uuguucaccacaucaaccu

SEQ ID NO: 2392448 - RNA, 19 nt, Artificial Sequence
  Description of Artificial Sequence: Synthetic oligonucleotide
aagaauaggaggagugaac

SEQ ID NO: 2392449 - RNA, 19 nt, Artificial Sequence
  Description of Artificial Sequence: Synthetic oligonucleotide
uacuaaguucuuagcaucc

SEQ ID NO: 2392450 - RNA, 19 nt, Artificial Sequence
  Description of Artificial Sequence: Synthetic oligonucleotide
agugaacugagguuccuuc

SEQ ID NO: 2392451 - RNA, 19 nt, Artificial Sequence
  Description of Artificial Sequence: Synthetic oligonucleotide
auuggaaccugauucucag

SEQ ID NO: 2392452 - RNA, 19 nt, Artificial Sequence
  Description of Artificial Sequence: Synthetic oligonucleotide
aaaugccgaaaaccacagc

SEQ ID NO: 2392453 - RNA, 19 nt, Artificial Sequence
  Description of Artificial Sequence: Synthetic oligonucleotide
gaucacaacagaaagaaua

SEQ ID NO: 2392454 - RNA, 19 nt, Artificial Sequence
  Description of Artificial Sequence: Synthetic oligonucleotide
uuauagaccugaucaaccu

SEQ ID NO: 2392455 - RNA, 19 nt, Artificial Sequence
  Description of Artificial Sequence: Synthetic oligonucleotide
aaccuuaaucagagaaucc

SEQ ID NO: 2392456 - RNA, 19 nt, Artificial Sequence
  Description of Artificial Sequence: Synthetic oligonucleotide
ucuucuacaguggucaaca

SEQ ID NO: 2392457 - RNA, 19 nt, Artificial Sequence
  Description of Artificial Sequence: Synthetic oligonucleotide
guucuuagcauccaagaca

SEQ ID NO: 2392458 - RNA, 19 nt, Artificial Sequence
  Description of Artificial Sequence: Synthetic oligonucleotide
aaaaugccgaaaaccacag

SEQ ID NO: 2392459 - RNA, 19 nt, Artificial Sequence
  Description of Artificial Sequence: Synthetic oligonucleotide
cagauggguacaaaugugc

SEQ ID NO: 2392460 - RNA, 19 nt, Artificial Sequence
  Description of Artificial Sequence: Synthetic oligonucleotide
aguugaucugaggaaauuc

SEQ ID NO: 2392461 - RNA, 19 nt, Artificial Sequence
  Description of Artificial Sequence: Synthetic oligonucleotide
aggaauuuaguccacugaa

SEQ ID NO: 2392462 - RNA, 19 nt, Artificial Sequence
  Description of Artificial Sequence: Synthetic oligonucleotide
ugcaauaguuuucggugag

SEQ ID NO: 2392463 - RNA, 19 nt, Artificial Sequence
  Description of Artificial Sequence: Synthetic oligonucleotide
aauguacucauuggaaccu

SEQ ID NO: 2392464 - RNA, 19 nt, Artificial Sequence
  Description of Artificial Sequence: Synthetic oligonucleotide
agaaagaauaacccuucca

SEQ ID NO: 2392465 - RNA, 19 nt, Artificial Sequence
  Description of Artificial Sequence: Synthetic oligonucleotide
ucaaccuuaaucagagaau

SEQ ID NO: 2392466 - RNA, 19 nt, Artificial Sequence
  Description of Artificial Sequence: Synthetic oligonucleotide
gaaguuacuuucacucugg

SEQ ID NO: 2392467 - RNA, 19 nt, Artificial Sequence
  Description of Artificial Sequence: Synthetic oligonucleotide
auggcuuuugguauauccc

SEQ ID NO: 2392468 - RNA, 19 nt, Artificial Sequence
  Description of Artificial Sequence: Synthetic oligonucleotide
caucagauggguacaaaug

SEQ ID NO: 2392469 - RNA, 19 nt, Artificial Sequence
  Description of Artificial Sequence: Synthetic oligonucleotide
ugccggaacaaaauugggc

SEQ ID NO: 2392470 - RNA, 19 nt, Artificial Sequence
  Description of Artificial Sequence: Synthetic oligonucleotide
auugaaucggccauaguug

SEQ ID NO: 2392471 - RNA, 19 nt, Artificial Sequence
  Description of Artificial Sequence: Synthetic oligonucleotide
aggaaauucaaucccuccu

SEQ ID NO: 2392472 - RNA, 19 nt, Artificial Sequence
  Description of Artificial Sequence: Synthetic oligonucleotide
uagcauccaagacaaggag

SEQ ID NO: 2392473 - RNA, 19 nt, Artificial Sequence
  Description of Artificial Sequence: Synthetic oligonucleotide
uugcgcugucucaacaugg

SEQ ID NO: 2392474 - RNA, 19 nt, Artificial Sequence
  Description of Artificial Sequence: Synthetic oligonucleotide
gacccgagcagacacagug

SEQ ID NO: 2392475 - RNA, 19 nt, Artificial Sequence
  Description of Artificial Sequence: Synthetic oligonucleotide
ucuccaaaccgucaguguc

SEQ ID NO: 2392476 - RNA, 19 nt, Artificial Sequence
  Description of Artificial Sequence: Synthetic oligonucleotide
ucucagaccucguaguugu

SEQ ID NO: 2392477 - RNA, 19 nt, Artificial Sequence
  Description of Artificial Sequence: Synthetic oligonucleotide
acccauaaggcaucugcac

SEQ ID NO: 2392478 - RNA, 19 nt, Artificial Sequence
  Description of Artificial Sequence: Synthetic oligonucleotide
agauggguacaaaugugcc

SEQ ID NO: 2392479 - RNA, 19 nt, Artificial Sequence
  Description of Artificial Sequence: Synthetic oligonucleotide
uugaaucggccauaguuga

SEQ ID NO: 2392480 - RNA, 19 nt, Artificial Sequence
  Description of Artificial Sequence: Synthetic oligonucleotide
gaggaaauucaaucccucc

SEQ ID NO: 2392481 - RNA, 19 nt, Artificial Sequence
  Description of Artificial Sequence: Synthetic oligonucleotide
aaucggccauaguugaucu

SEQ ID NO: 2392482 - RNA, 19 nt, Artificial Sequence
  Description of Artificial Sequence: Synthetic oligonucleotide
aaacuucccagguccaacu

SEQ ID NO: 2392483 - RNA, 19 nt, Artificial Sequence
  Description of Artificial Sequence: Synthetic oligonucleotide
uuuucaggagagcaccaga

SEQ ID NO: 2392484 - RNA, 19 nt, Artificial Sequence
  Description of Artificial Sequence: Synthetic oligonucleotide
cuacuaaguucuuagcauc

SEQ ID NO: 2392485 - RNA, 19 nt, Artificial Sequence
  Description of Artificial Sequence: Synthetic oligonucleotide
uggugccggaacaaaauug

SEQ ID NO: 2392486 - RNA, 19 nt, Artificial Sequence
  Description of Artificial Sequence: Synthetic oligonucleotide
agaauaggaggagugaacu

SEQ ID NO: 2392487 - RNA, 19 nt, Artificial Sequence
  Description of Artificial Sequence: Synthetic oligonucleotide
auuuaguccacugaauuau

SEQ ID NO: 2392488 - RNA, 19 nt, Artificial Sequence
  Description of Artificial Sequence: Synthetic oligonucleotide
caccaaaaugccgaaaacc

SEQ ID NO: 2392489 - RNA, 19 nt, Artificial Sequence
  Description of Artificial Sequence: Synthetic oligonucleotide
ugagguuccuucccuucgg

SEQ ID NO: 2392490 - RNA, 19 nt, Artificial Sequence
  Description of Artificial Sequence: Synthetic oligonucleotide
augcacggcagacucuugc

SEQ ID NO: 2392491 - RNA, 19 nt, Artificial Sequence
  Description of Artificial Sequence: Synthetic oligonucleotide
aaacugcaauaguuuucgg

SEQ ID NO: 2392492 - RNA, 19 nt, Artificial Sequence
  Description of Artificial Sequence: Synthetic oligonucleotide
agacccacuguuuucucuc

SEQ ID NO: 2392493 - RNA, 19 nt, Artificial Sequence
  Description of Artificial Sequence: Synthetic oligonucleotide
uuagccauugagccauuca

SEQ ID NO: 2392494 - RNA, 19 nt, Artificial Sequence
  Description of Artificial Sequence: Synthetic oligonucleotide
ugaucugaggaaauucaau

SEQ ID NO: 2392495 - RNA, 19 nt, Artificial Sequence
  Description of Artificial Sequence: Synthetic oligonucleotide
cuccccaucacucuguuuc

SEQ ID NO: 2392496 - RNA, 19 nt, Artificial Sequence
  Description of Artificial Sequence: Synthetic oligonucleotide
acuucccagguccaacucg

SEQ ID NO: 2392497 - RNA, 19 nt, Artificial Sequence
  Description of Artificial Sequence: Synthetic oligonucleotide
ugaucaaccuuuccaaauu

SEQ ID NO: 2392498 - RNA, 19 nt, Artificial Sequence
  Description of Artificial Sequence: Synthetic oligonucleotide
guugggagugaucacaaca

SEQ ID NO: 2392499 - RNA, 19 nt, Artificial Sequence
  Description of Artificial Sequence: Synthetic oligonucleotide
uuucaggagagcaccagau

SEQ ID NO: 2392500 - RNA, 19 nt, Artificial Sequence
  Description of Artificial Sequence: Synthetic oligonucleotide
gaauaggaggagugaacug

SEQ ID NO: 2392501 - RNA, 19 nt, Artificial Sequence
  Description of Artificial Sequence: Synthetic oligonucleotide
acucgaaguagauuagcca

SEQ ID NO: 2392502 - RNA, 19 nt, Artificial Sequence
  Description of Artificial Sequence: Synthetic oligonucleotide
guagauuuucaggagagca

SEQ ID NO: 2392503 - RNA, 19 nt, Artificial Sequence
  Description of Artificial Sequence: Synthetic oligonucleotide
uccucauuggcuccuggug

SEQ ID NO: 2392504 - RNA, 19 nt, Artificial Sequence
  Description of Artificial Sequence: Synthetic oligonucleotide
uagauuagccauugagcca

SEQ ID NO: 2392505 - RNA, 19 nt, Artificial Sequence
  Description of Artificial Sequence: Synthetic oligonucleotide
ugaagaauaggaggaguga

SEQ ID NO: 2392506 - RNA, 19 nt, Artificial Sequence
  Description of Artificial Sequence: Synthetic oligonucleotide
gaauuauagaccugaucaa

SEQ ID NO: 2392507 - RNA, 19 nt, Artificial Sequence
  Description of Artificial Sequence: Synthetic oligonucleotide
ugugccguggaacccauaa

SEQ ID NO: 2392508 - RNA, 19 nt, Artificial Sequence
  Description of Artificial Sequence: Synthetic oligonucleotide
uuucacagcacuagcugaa

SEQ ID NO: 2392509 - RNA, 19 nt, Artificial Sequence
  Description of Artificial Sequence: Synthetic oligonucleotide
gaccugaucaaccuuucca

SEQ ID NO: 2392510 - RNA, 19 nt, Artificial Sequence
  Description of Artificial Sequence: Synthetic oligonucleotide
ugguguagauuuucaggag

SEQ ID NO: 2392511 - RNA, 19 nt, Artificial Sequence
  Description of Artificial Sequence: Synthetic oligonucleotide
accuuuccaaauucaaacu

SEQ ID NO: 2392512 - RNA, 19 nt, Artificial Sequence
  Description of Artificial Sequence: Synthetic oligonucleotide
aaccgucagugucuuguuc

SEQ ID NO: 2392513 - RNA, 19 nt, Artificial Sequence
  Description of Artificial Sequence: Synthetic oligonucleotide
uucaggaauguguccucgg

SEQ ID NO: 2392514 - RNA, 19 nt, Artificial Sequence
  Description of Artificial Sequence: Synthetic oligonucleotide
ugguauaucccaccuacuu

SEQ ID NO: 2392515 - RNA, 19 nt, Artificial Sequence
  Description of Artificial Sequence: Synthetic oligonucleotide
cugcacugacaucuaaugg

SEQ ID NO: 2392516 - RNA, 19 nt, Artificial Sequence
  Description of Artificial Sequence: Synthetic oligonucleotide
acagccauagaagaaauua

SEQ ID NO: 2392517 - RNA, 19 nt, Artificial Sequence
  Description of Artificial Sequence: Synthetic oligonucleotide
uaguccacugaauuauaga

SEQ ID NO: 2392518 - RNA, 19 nt, Artificial Sequence
  Description of Artificial Sequence: Synthetic oligonucleotide
agaccugaucaaccuuucc

SEQ ID NO: 2392519 - RNA, 19 nt, Artificial Sequence
  Description of Artificial Sequence: Synthetic oligonucleotide
gugaucacaacagaaagaa

SEQ ID NO: 2392520 - RNA, 19 nt, Artificial Sequence
  Description of Artificial Sequence: Synthetic oligonucleotide
uguacucauuggaaccuga

SEQ ID NO: 2392521 - RNA, 19 nt, Artificial Sequence
  Description of Artificial Sequence: Synthetic oligonucleotide
gaaccugauucucagaccu

SEQ ID NO: 2392522 - RNA, 19 nt, Artificial Sequence
  Description of Artificial Sequence: Synthetic oligonucleotide
uucggugagacccacuguu

SEQ ID NO: 2392523 - RNA, 19 nt, Artificial Sequence
  Description of Artificial Sequence: Synthetic oligonucleotide
auggguacaaaugugccgu

SEQ ID NO: 2392524 - RNA, 19 nt, Artificial Sequence
  Description of Artificial Sequence: Synthetic oligonucleotide
gggaaaggaauuuagucca

SEQ ID NO: 2392525 - RNA, 19 nt, Artificial Sequence
  Description of Artificial Sequence: Synthetic oligonucleotide
ugcacggcagacucuugcg

SEQ ID NO: 2392526 - RNA, 19 nt, Artificial Sequence
  Description of Artificial Sequence: Synthetic oligonucleotide
auggcaaaacaaauacuuc

SEQ ID NO: 2392527 - RNA, 19 nt, Artificial Sequence
  Description of Artificial Sequence: Synthetic oligonucleotide
accugauucucagaccucg

SEQ ID NO: 2392528 - RNA, 19 nt, Artificial Sequence
  Description of Artificial Sequence: Synthetic oligonucleotide
ggaaguuacuuucacucug

SEQ ID NO: 2392529 - RNA, 19 nt, Artificial Sequence
  Description of Artificial Sequence: Synthetic oligonucleotide
agauuagccauugagccau

SEQ ID NO: 2392530 - RNA, 19 nt, Artificial Sequence
  Description of Artificial Sequence: Synthetic oligonucleotide
uacuucguagggaaaggaa

SEQ ID NO: 2392531 - RNA, 19 nt, Artificial Sequence
  Description of Artificial Sequence: Synthetic oligonucleotide
cuucucuccaaaccgucag

SEQ ID NO: 2392532 - RNA, 19 nt, Artificial Sequence
  Description of Artificial Sequence: Synthetic oligonucleotide
guucuacuaaguucuuagc

SEQ ID NO: 2392533 - RNA, 19 nt, Artificial Sequence
  Description of Artificial Sequence: Synthetic oligonucleotide
gaauaacccuuccaucuuc

SEQ ID NO: 2392534 - RNA, 19 nt, Artificial Sequence
  Description of Artificial Sequence: Synthetic oligonucleotide
agcauccaagacaaggagg

SEQ ID NO: 2392535 - RNA, 19 nt, Artificial Sequence
  Description of Artificial Sequence: Synthetic oligonucleotide
aaaugugccguggaaccca

SEQ ID NO: 2392536 - RNA, 19 nt, Artificial Sequence
  Description of Artificial Sequence: Synthetic oligonucleotide
ucgugguguagauuuucag

SEQ ID NO: 2392537 - RNA, 19 nt, Artificial Sequence
  Description of Artificial Sequence: Synthetic oligonucleotide
acaaggaggaaguuacuuu

SEQ ID NO: 2392538 - RNA, 19 nt, Artificial Sequence
  Description of Artificial Sequence: Synthetic oligonucleotide
aggaaguuacuuucacucu

SEQ ID NO: 2392539 - RNA, 19 nt, Artificial Sequence
  Description of Artificial Sequence: Synthetic oligonucleotide
gaauuuaguccacugaauu

SEQ ID NO: 2392540 - RNA, 19 nt, Artificial Sequence
  Description of Artificial Sequence: Synthetic oligonucleotide
aaguuacuuucacucuggu

SEQ ID NO: 2392541 - RNA, 19 nt, Artificial Sequence
  Description of Artificial Sequence: Synthetic oligonucleotide
aguguccagagucucuucu

SEQ ID NO: 2392542 - RNA, 19 nt, Artificial Sequence
  Description of Artificial Sequence: Synthetic oligonucleotide
cucauuggcuccuggugcc

SEQ ID NO: 2392543 - RNA, 19 nt, Artificial Sequence
  Description of Artificial Sequence: Synthetic oligonucleotide
ggugccggaacaaaauugg

SEQ ID NO: 2392544 - RNA, 19 nt, Artificial Sequence
  Description of Artificial Sequence: Synthetic oligonucleotide
guugaucugaggaaauuca

SEQ ID NO: 2392545 - RNA, 19 nt, Artificial Sequence
  Description of Artificial Sequence: Synthetic oligonucleotide
ugcgcugucucaacauggc

SEQ ID NO: 2392546 - RNA, 19 nt, Artificial Sequence
  Description of Artificial Sequence: Synthetic oligonucleotide
uugccauugaaucggccau

SEQ ID NO: 2392547 - RNA, 19 nt, Artificial Sequence
  Description of Artificial Sequence: Synthetic oligonucleotide
gaagaauaggaggagugaa

SEQ ID NO: 2392548 - RNA, 19 nt, Artificial Sequence
  Description of Artificial Sequence: Synthetic oligonucleotide
cagaaagaauaacccuucc

SEQ ID NO: 2392549 - RNA, 19 nt, Artificial Sequence
  Description of Artificial Sequence: Synthetic oligonucleotide
agcacuagcugaagaauag

SEQ ID NO: 2392550 - RNA, 19 nt, Artificial Sequence
  Description of Artificial Sequence: Synthetic oligonucleotide
uuuugguauaucccaccua

SEQ ID NO: 2392551 - RNA, 19 nt, Artificial Sequence
  Description of Artificial Sequence: Synthetic oligonucleotide
uuuaguccacugaauuaua

SEQ ID NO: 2392552 - RNA, 19 nt, Artificial Sequence
  Description of Artificial Sequence: Synthetic oligonucleotide
ucagaccucguaguugugc

SEQ ID NO: 2392553 - RNA, 19 nt, Artificial Sequence
  Description of Artificial Sequence: Synthetic oligonucleotide
agccauucaggaauguguc

SEQ ID NO: 2392554 - RNA, 19 nt, Artificial Sequence
  Description of Artificial Sequence: Synthetic oligonucleotide
aaauugggcucugaaggau

SEQ ID NO: 2392555 - RNA, 19 nt, Artificial Sequence
  Description of Artificial Sequence: Synthetic oligonucleotide
aucacaacagaaagaauaa

SEQ ID NO: 2392556 - RNA, 19 nt, Artificial Sequence
  Description of Artificial Sequence: Synthetic oligonucleotide
cugagguuccuucccuucg

SEQ ID NO: 2392557 - RNA, 19 nt, Artificial Sequence
  Description of Artificial Sequence: Synthetic oligonucleotide
cacuagcugaagaauagga

SEQ ID NO: 2392558 - RNA, 19 nt, Artificial Sequence
  Description of Artificial Sequence: Synthetic oligonucleotide
ccuuaaucagagaaucccc

SEQ ID NO: 2392559 - RNA, 19 nt, Artificial Sequence
  Description of Artificial Sequence: Synthetic oligonucleotide
agugaucacaacagaaaga

SEQ ID NO: 2392560 - RNA, 19 nt, Artificial Sequence
  Description of Artificial Sequence: Synthetic oligonucleotide
ucagguccaaacugcaaua

SEQ ID NO: 2392561 - RNA, 19 nt, Artificial Sequence
  Description of Artificial Sequence: Synthetic oligonucleotide
caucacucuguuucacagc

SEQ ID NO: 2392562 - RNA, 19 nt, Artificial Sequence
  Description of Artificial Sequence: Synthetic oligonucleotide
ugagccauucaggaaugug

SEQ ID NO: 2392563 - RNA, 19 nt, Artificial Sequence
  Description of Artificial Sequence: Synthetic oligonucleotide
uacucauuggaaccugauu

SEQ ID NO: 2392564 - RNA, 19 nt, Artificial Sequence
  Description of Artificial Sequence: Synthetic oligonucleotide
aauguguccucggacccga

SEQ ID NO: 2392565 - RNA, 19 nt, Artificial Sequence
  Description of Artificial Sequence: Synthetic oligonucleotide
aacccauaaggcaucugca

SEQ ID NO: 2392566 - RNA, 19 nt, Artificial Sequence
  Description of Artificial Sequence: Synthetic oligonucleotide
gaauguguccucggacccg

SEQ ID NO: 2392567 - RNA, 19 nt, Artificial Sequence
  Description of Artificial Sequence: Synthetic oligonucleotide
gagguuccuucccuucggg

SEQ ID NO: 2392568 - RNA, 19 nt, Artificial Sequence
  Description of Artificial Sequence: Synthetic oligonucleotide
gauucucagaccucguagu

SEQ ID NO: 2392569 - RNA, 19 nt, Artificial Sequence
  Description of Artificial Sequence: Synthetic oligonucleotide
agaauaacccuuccaucuu

SEQ ID NO: 2392570 - RNA, 19 nt, Artificial Sequence
  Description of Artificial Sequence: Synthetic oligonucleotide
agccauugagccauucagg

SEQ ID NO: 2392571 - RNA, 19 nt, Artificial Sequence
  Description of Artificial Sequence: Synthetic oligonucleotide
cauugaaucggccauaguu

SEQ ID NO: 2392572 - RNA, 19 nt, Artificial Sequence
  Description of Artificial Sequence: Synthetic oligonucleotide
aucuaauggcaaaacaaau

SEQ ID NO: 2392573 - RNA, 19 nt, Artificial Sequence
  Description of Artificial Sequence: Synthetic oligonucleotide
agagucucuucuacagugg

SEQ ID NO: 2392574 - RNA, 19 nt, Artificial Sequence
  Description of Artificial Sequence: Synthetic oligonucleotide
ucgaaguagauuagccauu

SEQ ID NO: 2392575 - RNA, 19 nt, Artificial Sequence
  Description of Artificial Sequence: Synthetic oligonucleotide
uugguauaucccaccuacu

SEQ ID NO: 2392576 - RNA, 19 nt, Artificial Sequence
  Description of Artificial Sequence: Synthetic oligonucleotide
agguuccuucccuucgggg

SEQ ID NO: 2392577 - RNA, 19 nt, Artificial Sequence
  Description of Artificial Sequence: Synthetic oligonucleotide
uaguuuucggugagaccca

SEQ ID NO: 2392578 - RNA, 19 nt, Artificial Sequence
  Description of Artificial Sequence: Synthetic oligonucleotide
acuucguagggaaaggaau

SEQ ID NO: 2392579 - RNA, 19 nt, Artificial Sequence
  Description of Artificial Sequence: Synthetic oligonucleotide
gguguagauuuucaggaga

SEQ ID NO: 2392580 - RNA, 19 nt, Artificial Sequence
  Description of Artificial Sequence: Synthetic oligonucleotide
aaggaggaaguuacuuuca

SEQ ID NO: 2392581 - RNA, 19 nt, Artificial Sequence
  Description of Artificial Sequence: Synthetic oligonucleotide
gguauaucccaccuacuuc

SEQ ID NO: 2392582 - RNA, 19 nt, Artificial Sequence
  Description of Artificial Sequence: Synthetic oligonucleotide
ugguugggagugaucacaa

SEQ ID NO: 2392583 - RNA, 19 nt, Artificial Sequence
  Description of Artificial Sequence: Synthetic oligonucleotide
uguguccucggacccgagc

SEQ ID NO: 2392584 - RNA, 19 nt, Artificial Sequence
  Description of Artificial Sequence: Synthetic oligonucleotide
ucuugcgcugucucaacau

SEQ ID NO: 2392585 - RNA, 19 nt, Artificial Sequence
  Description of Artificial Sequence: Synthetic oligonucleotide
cuugcgcugucucaacaug

SEQ ID NO: 2392586 - RNA, 19 nt, Artificial Sequence
  Description of Artificial Sequence: Synthetic oligonucleotide
cauugagccauucaggaau

SEQ ID NO: 2392587 - RNA, 19 nt, Artificial Sequence
  Description of Artificial Sequence: Synthetic oligonucleotide
ucgucccaguucuacuaag

SEQ ID NO: 2392588 - RNA, 19 nt, Artificial Sequence
  Description of Artificial Sequence: Synthetic oligonucleotide
aguuacuuucacucugguu

SEQ ID NO: 2392589 - RNA, 19 nt, Artificial Sequence
  Description of Artificial Sequence: Synthetic oligonucleotide
caggaauguguccucggac

SEQ ID NO: 2392590 - RNA, 19 nt, Artificial Sequence
  Description of Artificial Sequence: Synthetic oligonucleotide
ggaauguguccucggaccc

SEQ ID NO: 2392591 - RNA, 19 nt, Artificial Sequence
  Description of Artificial Sequence: Synthetic oligonucleotide
cucugguugggagugauca

SEQ ID NO: 2392592 - RNA, 19 nt, Artificial Sequence
  Description of Artificial Sequence: Synthetic oligonucleotide
ccgaaaaccacagccauag

SEQ ID NO: 2392593 - RNA, 19 nt, Artificial Sequence
  Description of Artificial Sequence: Synthetic oligonucleotide
auagaccugaucaaccuuu

SEQ ID NO: 2392594 - RNA, 19 nt, Artificial Sequence
  Description of Artificial Sequence: Synthetic oligonucleotide
uguucaccacaucaaccuu

SEQ ID NO: 2392595 - RNA, 19 nt, Artificial Sequence
  Description of Artificial Sequence: Synthetic oligonucleotide
aguuuucggugagacccac

SEQ ID NO: 2392596 - RNA, 19 nt, Artificial Sequence
  Description of Artificial Sequence: Synthetic oligonucleotide
uagaccugaucaaccuuuc

SEQ ID NO: 2392597 - RNA, 19 nt, Artificial Sequence
  Description of Artificial Sequence: Synthetic oligonucleotide
cucgaaguagauuagccau

SEQ ID NO: 2392598 - RNA, 19 nt, Artificial Sequence
  Description of Artificial Sequence: Synthetic oligonucleotide
caacagaaagaauaacccu

SEQ ID NO: 2392599 - RNA, 19 nt, Artificial Sequence
  Description of Artificial Sequence: Synthetic oligonucleotide
caaucccuccuucuucuac

SEQ ID NO: 2392600 - RNA, 19 nt, Artificial Sequence
  Description of Artificial Sequence: Synthetic oligonucleotide
uccuggugccggaacaaaa

SEQ ID NO: 2392601 - RNA, 19 nt, Artificial Sequence
  Description of Artificial Sequence: Synthetic oligonucleotide
ggcaaugcacggcagacuc

SEQ ID NO: 2392602 - RNA, 19 nt, Artificial Sequence
  Description of Artificial Sequence: Synthetic oligonucleotide
aacauggcuuuugguauau

SEQ ID NO: 2392603 - RNA, 19 nt, Artificial Sequence
  Description of Artificial Sequence: Synthetic oligonucleotide
cauucaggaauguguccuc

SEQ ID NO: 2392604 - RNA, 19 nt, Artificial Sequence
  Description of Artificial Sequence: Synthetic oligonucleotide
acagguaccuccgcucguc

SEQ ID NO: 2392605 - RNA, 19 nt, Artificial Sequence
  Description of Artificial Sequence: Synthetic oligonucleotide
cugcaauaguuuucgguga

SEQ ID NO: 2392606 - RNA, 19 nt, Artificial Sequence
  Description of Artificial Sequence: Synthetic oligonucleotide
auuagccauugagccauuc

SEQ ID NO: 2392607 - RNA, 19 nt, Artificial Sequence
  Description of Artificial Sequence: Synthetic oligonucleotide
aucugcacagguaccuccg

SEQ ID NO: 2392608 - RNA, 19 nt, Artificial Sequence
  Description of Artificial Sequence: Synthetic oligonucleotide
aaccugauucucagaccuc

SEQ ID NO: 2392609 - RNA, 19 nt, Artificial Sequence
  Description of Artificial Sequence: Synthetic oligonucleotide
auacuucguagggaaagga

SEQ ID NO: 2392610 - RNA, 19 nt, Artificial Sequence
  Description of Artificial Sequence: Synthetic oligonucleotide
aucccaccuacuucuucag

SEQ ID NO: 2392611 - RNA, 19 nt, Artificial Sequence
  Description of Artificial Sequence: Synthetic oligonucleotide
aaaccgucagugucuuguu

SEQ ID NO: 2392612 - RNA, 19 nt, Artificial Sequence
  Description of Artificial Sequence: Synthetic oligonucleotide
cacagcacuagcugaagaa

SEQ ID NO: 2392613 - RNA, 19 nt, Artificial Sequence
  Description of Artificial Sequence: Synthetic oligonucleotide
guguccucggacccgagca

SEQ ID NO: 2392614 - RNA, 19 nt, Artificial Sequence
  Description of Artificial Sequence: Synthetic oligonucleotide
gccauugagccauucagga

SEQ ID NO: 2392615 - RNA, 19 nt, Artificial Sequence
  Description of Artificial Sequence: Synthetic oligonucleotide
gaaguagauuagccauuga

SEQ ID NO: 2392616 - RNA, 19 nt, Artificial Sequence
  Description of Artificial Sequence: Synthetic oligonucleotide
agccauagaagaaauuaua

SEQ ID NO: 2392617 - RNA, 19 nt, Artificial Sequence
  Description of Artificial Sequence: Synthetic oligonucleotide
aauugggcucugaaggaua

SEQ ID NO: 2392618 - RNA, 19 nt, Artificial Sequence
  Description of Artificial Sequence: Synthetic oligonucleotide
ugaaucggccauaguugau

SEQ ID NO: 2392619 - RNA, 19 nt, Artificial Sequence
  Description of Artificial Sequence: Synthetic oligonucleotide
gagccauucaggaaugugu

SEQ ID NO: 2392620 - RNA, 19 nt, Artificial Sequence
  Description of Artificial Sequence: Synthetic oligonucleotide
ucauuggcuccuggugccg

SEQ ID NO: 2392621 - RNA, 19 nt, Artificial Sequence
  Description of Artificial Sequence: Synthetic oligonucleotide
agacucuugcgcugucuca

SEQ ID NO: 2392622 - RNA, 19 nt, Artificial Sequence
  Description of Artificial Sequence: Synthetic oligonucleotide
gguacaaaugugccgugga

SEQ ID NO: 2392623 - RNA, 19 nt, Artificial Sequence
  Description of Artificial Sequence: Synthetic oligonucleotide
ccucauuggcuccuggugc

SEQ ID NO: 2392624 - RNA, 19 nt, Artificial Sequence
  Description of Artificial Sequence: Synthetic oligonucleotide
agguccaacucgaaguaga

SEQ ID NO: 2392625 - RNA, 19 nt, Artificial Sequence
  Description of Artificial Sequence: Synthetic oligonucleotide
uccccaucacucuguuuca

SEQ ID NO: 2392626 - RNA, 19 nt, Artificial Sequence
  Description of Artificial Sequence: Synthetic oligonucleotide
ccaaacugcaauaguuuuc

SEQ ID NO: 2392627 - RNA, 19 nt, Artificial Sequence
  Description of Artificial Sequence: Synthetic oligonucleotide
uggguacaaaugugccgug

SEQ ID NO: 2392628 - RNA, 19 nt, Artificial Sequence
  Description of Artificial Sequence: Synthetic oligonucleotide
gcacagguaccuccgcucg

SEQ ID NO: 2392629 - RNA, 19 nt, Artificial Sequence
  Description of Artificial Sequence: Synthetic oligonucleotide
cagacucuugcgcugucuc

SEQ ID NO: 2392630 - RNA, 19 nt, Artificial Sequence
  Description of Artificial Sequence: Synthetic oligonucleotide
cucguaguugugccaucag

SEQ ID NO: 2392631 - RNA, 19 nt, Artificial Sequence
  Description of Artificial Sequence: Synthetic oligonucleotide
ucccaccuacuucuucaga

SEQ ID NO: 2392632 - RNA, 19 nt, Artificial Sequence
  Description of Artificial Sequence: Synthetic oligonucleotide
acggcagacucuugcgcug

SEQ ID NO: 2392633 - RNA, 19 nt, Artificial Sequence
  Description of Artificial Sequence: Synthetic oligonucleotide
gccggaacaaaauugggcu

SEQ ID NO: 2392634 - RNA, 19 nt, Artificial Sequence
  Description of Artificial Sequence: Synthetic oligonucleotide
ccagaucuccccaucacuc

SEQ ID NO: 2392635 - RNA, 19 nt, Artificial Sequence
  Description of Artificial Sequence: Synthetic oligonucleotide
cuuuugguauaucccaccu

SEQ ID NO: 2392636 - RNA, 19 nt, Artificial Sequence
  Description of Artificial Sequence: Synthetic oligonucleotide
cucgugguguagauuuuca

SEQ ID NO: 2392637 - RNA, 19 nt, Artificial Sequence
  Description of Artificial Sequence: Synthetic oligonucleotide
uaguugaucugaggaaauu

SEQ ID NO: 2392638 - RNA, 19 nt, Artificial Sequence
  Description of Artificial Sequence: Synthetic oligonucleotide
agaccucguaguugugcca

SEQ ID NO: 2392639 - RNA, 19 nt, Artificial Sequence
  Description of Artificial Sequence: Synthetic oligonucleotide
caccagaucuccccaucac

SEQ ID NO: 2392640 - RNA, 19 nt, Artificial Sequence
  Description of Artificial Sequence: Synthetic oligonucleotide
uccucggacccgagcagac

SEQ ID NO: 2392641 - RNA, 19 nt, Artificial Sequence
  Description of Artificial Sequence: Synthetic oligonucleotide
caagacaaggaggaaguua

SEQ ID NO: 2392642 - RNA, 19 nt, Artificial Sequence
  Description of Artificial Sequence: Synthetic oligonucleotide
ccaacucgaaguagauuag

SEQ ID NO: 2392643 - RNA, 19 nt, Artificial Sequence
  Description of Artificial Sequence: Synthetic oligonucleotide
gacucuugcgcugucucaa

SEQ ID NO: 2392644 - RNA, 19 nt, Artificial Sequence
  Description of Artificial Sequence: Synthetic oligonucleotide
caaaccgucagugucuugu

SEQ ID NO: 2392645 - RNA, 19 nt, Artificial Sequence
  Description of Artificial Sequence: Synthetic oligonucleotide
gugccguggaacccauaag

SEQ ID NO: 2392646 - RNA, 19 nt, Artificial Sequence
  Description of Artificial Sequence: Synthetic oligonucleotide
ucggugagacccacuguuu

SEQ ID NO: 2392647 - RNA, 19 nt, Artificial Sequence
  Description of Artificial Sequence: Synthetic oligonucleotide
accucguaguugugccauc

SEQ ID NO: 2392648 - RNA, 19 nt, Artificial Sequence
  Description of Artificial Sequence: Synthetic oligonucleotide
gaucugcacugacaucuaa

SEQ ID NO: 2392649 - RNA, 19 nt, Artificial Sequence
  Description of Artificial Sequence: Synthetic oligonucleotide
acugaauuauagaccugau

SEQ ID NO: 2392650 - RNA, 19 nt, Artificial Sequence
  Description of Artificial Sequence: Synthetic oligonucleotide
cuguuucacagcacuagcu

SEQ ID NO: 2392651 - RNA, 19 nt, Artificial Sequence
  Description of Artificial Sequence: Synthetic oligonucleotide
gaacugagguuccuucccu

SEQ ID NO: 2392652 - RNA, 19 nt, Artificial Sequence
  Description of Artificial Sequence: Synthetic oligonucleotide
gcacuagcugaagaauagg

SEQ ID NO: 2392653 - RNA, 19 nt, Artificial Sequence
  Description of Artificial Sequence: Synthetic oligonucleotide
ggguacaaaugugccgugg

SEQ ID NO: 2392654 - RNA, 19 nt, Artificial Sequence
  Description of Artificial Sequence: Synthetic oligonucleotide
guggucaacaauggggcaa

SEQ ID NO: 2392655 - RNA, 19 nt, Artificial Sequence
  Description of Artificial Sequence: Synthetic oligonucleotide
gaaggauaaaagccuucuu

SEQ ID NO: 2392656 - RNA, 19 nt, Artificial Sequence
  Description of Artificial Sequence: Synthetic oligonucleotide
auugggcucugaaggauaa

SEQ ID NO: 2392657 - RNA, 19 nt, Artificial Sequence
  Description of Artificial Sequence: Synthetic oligonucleotide
gacacaguguccagagucu

SEQ ID NO: 2392658 - RNA, 19 nt, Artificial Sequence
  Description of Artificial Sequence: Synthetic oligonucleotide
cuucguagggaaaggaauu

SEQ ID NO: 2392659 - RNA, 19 nt, Artificial Sequence
  Description of Artificial Sequence: Synthetic oligonucleotide
auuggcuccuggugccgga

SEQ ID NO: 2392660 - RNA, 19 nt, Artificial Sequence
  Description of Artificial Sequence: Synthetic oligonucleotide
cagguccaacucgaaguag

SEQ ID NO: 2392661 - RNA, 19 nt, Artificial Sequence
  Description of Artificial Sequence: Synthetic oligonucleotide
ucaaucccuccuucuucua

SEQ ID NO: 2392662 - RNA, 19 nt, Artificial Sequence
  Description of Artificial Sequence: Synthetic oligonucleotide
cagguaccuccgcucgucc

SEQ ID NO: 2392663 - RNA, 19 nt, Artificial Sequence
  Description of Artificial Sequence: Synthetic oligonucleotide
ccaccuacuucuucagaac

SEQ ID NO: 2392664 - RNA, 19 nt, Artificial Sequence
  Description of Artificial Sequence: Synthetic oligonucleotide
gccauugaaucggccauag

SEQ ID NO: 2392665 - RNA, 19 nt, Artificial Sequence
  Description of Artificial Sequence: Synthetic oligonucleotide
aaugugccguggaacccau

SEQ ID NO: 2392666 - RNA, 19 nt, Artificial Sequence
  Description of Artificial Sequence: Synthetic oligonucleotide
uccaaaccgucagugucuu

SEQ ID NO: 2392667 - RNA, 19 nt, Artificial Sequence
  Description of Artificial Sequence: Synthetic oligonucleotide
ggaaauucaaucccuccuu

SEQ ID NO: 2392668 - RNA, 19 nt, Artificial Sequence
  Description of Artificial Sequence: Synthetic oligonucleotide
cagccauagaagaaauuau

SEQ ID NO: 2392669 - RNA, 19 nt, Artificial Sequence
  Description of Artificial Sequence: Synthetic oligonucleotide
cuccaaaccgucagugucu

SEQ ID NO: 2392670 - RNA, 19 nt, Artificial Sequence
  Description of Artificial Sequence: Synthetic oligonucleotide
gggagugaucacaacagaa

SEQ ID NO: 2392671 - RNA, 19 nt, Artificial Sequence
  Description of Artificial Sequence: Synthetic oligonucleotide
uugagccauucaggaaugu

SEQ ID NO: 2392672 - RNA, 19 nt, Artificial Sequence
  Description of Artificial Sequence: Synthetic oligonucleotide
gccguggaacccauaaggc

SEQ ID NO: 2392673 - RNA, 19 nt, Artificial Sequence
  Description of Artificial Sequence: Synthetic oligonucleotide
gguaccuccgcucguccca

SEQ ID NO: 2392674 - RNA, 19 nt, Artificial Sequence
  Description of Artificial Sequence: Synthetic oligonucleotide
cuaccagguccucguggug

SEQ ID NO: 2392675 - RNA, 19 nt, Artificial Sequence
  Description of Artificial Sequence: Synthetic oligonucleotide
gucgaucugcacugacauc

SEQ ID NO: 2392676 - RNA, 19 nt, Artificial Sequence
  Description of Artificial Sequence: Synthetic oligonucleotide
cugauucucagaccucgua

SEQ ID NO: 2392677 - RNA, 19 nt, Artificial Sequence
  Description of Artificial Sequence: Synthetic oligonucleotide
ggaacaaaauugggcucug

SEQ ID NO: 2392678 - RNA, 19 nt, Artificial Sequence
  Description of Artificial Sequence: Synthetic oligonucleotide
gcacggcagacucuugcgc

SEQ ID NO: 2392679 - RNA, 19 nt, Artificial Sequence
  Description of Artificial Sequence: Synthetic oligonucleotide
ggaaaggaauuuaguccac

SEQ ID NO: 2392680 - RNA, 19 nt, Artificial Sequence
  Description of Artificial Sequence: Synthetic oligonucleotide
guggaacccauaaggcauc

SEQ ID NO: 2392681 - RNA, 19 nt, Artificial Sequence
  Description of Artificial Sequence: Synthetic oligonucleotide
ugccauugaaucggccaua

SEQ ID NO: 2392682 - RNA, 19 nt, Artificial Sequence
  Description of Artificial Sequence: Synthetic oligonucleotide
uccucgugguguagauuuu

SEQ ID NO: 2392683 - RNA, 19 nt, Artificial Sequence
  Description of Artificial Sequence: Synthetic oligonucleotide
cucagaccucguaguugug

SEQ ID NO: 2392684 - RNA, 19 nt, Artificial Sequence
  Description of Artificial Sequence: Synthetic oligonucleotide
cccaccuacuucuucagaa

SEQ ID NO: 2392685 - RNA, 19 nt, Artificial Sequence
  Description of Artificial Sequence: Synthetic oligonucleotide
ccggaacaaaauugggcuc

SEQ ID NO: 2392686 - RNA, 19 nt, Artificial Sequence
  Description of Artificial Sequence: Synthetic oligonucleotide
gguccaaacugcaauaguu

SEQ ID NO: 2392687 - RNA, 19 nt, Artificial Sequence
  Description of Artificial Sequence: Synthetic oligonucleotide
guaccuccgcucgucccag

SEQ ID NO: 2392688 - RNA, 19 nt, Artificial Sequence
  Description of Artificial Sequence: Synthetic oligonucleotide
cuucuacaguggucaacaa

SEQ ID NO: 2392689 - RNA, 19 nt, Artificial Sequence
  Description of Artificial Sequence: Synthetic oligonucleotide
cacggcagacucuugcgcu

SEQ ID NO: 2392690 - RNA, 19 nt, Artificial Sequence
  Description of Artificial Sequence: Synthetic oligonucleotide
aucuccccaucacucuguu

SEQ ID NO: 2392691 - RNA, 19 nt, Artificial Sequence
  Description of Artificial Sequence: Synthetic oligonucleotide
acucuguuucacagcacua

SEQ ID NO: 2392692 - RNA, 19 nt, Artificial Sequence
  Description of Artificial Sequence: Synthetic oligonucleotide
ccauagaagaaauuauauu

SEQ ID NO: 2392693 - RNA, 19 nt, Artificial Sequence
  Description of Artificial Sequence: Synthetic oligonucleotide
ccguggaacccauaaggca

SEQ ID NO: 2392694 - RNA, 19 nt, Artificial Sequence
  Description of Artificial Sequence: Synthetic oligonucleotide
cucgucccaguucuacuaa

SEQ ID NO: 2392695 - RNA, 19 nt, Artificial Sequence
  Description of Artificial Sequence: Synthetic oligonucleotide
gacccacuguuuucucucu

SEQ ID NO: 2392696 - RNA, 19 nt, Artificial Sequence
  Description of Artificial Sequence: Synthetic oligonucleotide
gcaccagaucuccccauca

SEQ ID NO: 2392697 - RNA, 19 nt, Artificial Sequence
  Description of Artificial Sequence: Synthetic oligonucleotide
acccgagcagacacagugu

SEQ ID NO: 2392698 - RNA, 19 nt, Artificial Sequence
  Description of Artificial Sequence: Synthetic oligonucleotide
auggggcaaugcacggcag

SEQ ID NO: 2392699 - RNA, 19 nt, Artificial Sequence
  Description of Artificial Sequence: Synthetic oligonucleotide
accuccgcucgucccaguu

SEQ ID NO: 2392700 - RNA, 19 nt, Artificial Sequence
  Description of Artificial Sequence: Synthetic oligonucleotide
ggaggagugaacugagguu

SEQ ID NO: 2392701 - RNA, 19 nt, Artificial Sequence
  Description of Artificial Sequence: Synthetic oligonucleotide
ccgucagugucuuguucac

SEQ ID NO: 2392702 - RNA, 19 nt, Artificial Sequence
  Description of Artificial Sequence: Synthetic oligonucleotide
ccugaucaaccuuuccaaa

SEQ ID NO: 2392703 - RNA, 19 nt, Artificial Sequence
  Description of Artificial Sequence: Synthetic oligonucleotide
guugugccaucagaugggu

SEQ ID NO: 2392704 - RNA, 19 nt, Artificial Sequence
  Description of Artificial Sequence: Synthetic oligonucleotide
cguaguugugccaucagau

SEQ ID NO: 2392705 - RNA, 19 nt, Artificial Sequence
  Description of Artificial Sequence: Synthetic oligonucleotide
guccucggacccgagcaga

SEQ ID NO: 2392706 - RNA, 19 nt, Artificial Sequence
  Description of Artificial Sequence: Synthetic oligonucleotide
ggggucgaucugcacugac

SEQ ID NO: 2392707 - RNA, 19 nt, Artificial Sequence
  Description of Artificial Sequence: Synthetic oligonucleotide
ccaucagauggguacaaau

SEQ ID NO: 2392708 - RNA, 19 nt, Artificial Sequence
  Description of Artificial Sequence: Synthetic oligonucleotide
cauccaagacaaggaggaa

SEQ ID NO: 2392709 - RNA, 19 nt, Artificial Sequence
  Description of Artificial Sequence: Synthetic oligonucleotide
caaugcacggcagacucuu

SEQ ID NO: 2392710 - RNA, 19 nt, Artificial Sequence
  Description of Artificial Sequence: Synthetic oligonucleotide
uccgcucgucccaguucua

SEQ ID NO: 2392711 - RNA, 19 nt, Artificial Sequence
  Description of Artificial Sequence: Synthetic oligonucleotide
ccucgugguguagauuuuc

SEQ ID NO: 2392712 - RNA, 19 nt, Artificial Sequence
  Description of Artificial Sequence: Synthetic oligonucleotide
gagcaccagaucuccccau

SEQ ID NO: 2392713 - RNA, 19 nt, Artificial Sequence
  Description of Artificial Sequence: Synthetic oligonucleotide
uaccuccgcucgucccagu

SEQ ID NO: 2392714 - RNA, 19 nt, Artificial Sequence
  Description of Artificial Sequence: Synthetic oligonucleotide
cacagccauagaagaaauu

SEQ ID NO: 2392715 - RNA, 19 nt, Artificial Sequence
  Description of Artificial Sequence: Synthetic oligonucleotide
ccucguaguugugccauca

SEQ ID NO: 2392716 - RNA, 19 nt, Artificial Sequence
  Description of Artificial Sequence: Synthetic oligonucleotide
guuuucggugagacccacu

SEQ ID NO: 2392717 - RNA, 19 nt, Artificial Sequence
  Description of Artificial Sequence: Synthetic oligonucleotide
cggacccgagcagacacag

SEQ ID NO: 2392718 - RNA, 19 nt, Artificial Sequence
  Description of Artificial Sequence: Synthetic oligonucleotide
ccuggugccggaacaaaau

SEQ ID NO: 2392719 - RNA, 19 nt, Artificial Sequence
  Description of Artificial Sequence: Synthetic oligonucleotide
cuccuggugccggaacaaa

SEQ ID NO: 2392720 - RNA, 19 nt, Artificial Sequence
  Description of Artificial Sequence: Synthetic oligonucleotide
ccuccgcucgucccaguuc

SEQ ID NO: 2392721 - RNA, 19 nt, Artificial Sequence
  Description of Artificial Sequence: Synthetic oligonucleotide
ccaaaccgucagugucuug

SEQ ID NO: 2392722 - RNA, 19 nt, Artificial Sequence
  Description of Artificial Sequence: Synthetic oligonucleotide
cacagguaccuccgcucgu

SEQ ID NO: 2392723 - RNA, 19 nt, Artificial Sequence
  Description of Artificial Sequence: Synthetic oligonucleotide
cggaacaaaauugggcucu

SEQ ID NO: 2392724 - RNA, 19 nt, Artificial Sequence
  Description of Artificial Sequence: Synthetic oligonucleotide
ccagagucucuucuacagu

SEQ ID NO: 2392725 - RNA, 19 nt, Artificial Sequence
  Description of Artificial Sequence: Synthetic oligonucleotide
ccgcucgucccaguucuac

SEQ ID NO: 2392726 - RNA, 19 nt, Artificial Sequence
  Description of Artificial Sequence: Synthetic oligonucleotide
gccgaaaaccacagccaua

SEQ ID NO: 2392727 - RNA, 19 nt, Artificial Sequence
  Description of Artificial Sequence: Synthetic oligonucleotide
ggagugaacugagguuccu

SEQ ID NO: 2392728 - RNA, 19 nt, Artificial Sequence
  Description of Artificial Sequence: Synthetic oligonucleotide
gcgcugucucaacauggcu

SEQ ID NO: 2392729 - RNA, 19 nt, Artificial Sequence
  Description of Artificial Sequence: Synthetic oligonucleotide
gcuccuggugccggaacaa

SEQ ID NO: 2392730 - RNA, 19 nt, Artificial Sequence
  Description of Artificial Sequence: Synthetic oligonucleotide
cacucugguugggagugau

SEQ ID NO: 2392731 - RNA, 19 nt, Artificial Sequence
  Description of Artificial Sequence: Synthetic oligonucleotide
cgcugucucaacauggcuu

SEQ ID NO: 2392732 - RNA, 19 nt, Artificial Sequence
  Description of Artificial Sequence: Synthetic oligonucleotide
gauuagccauugagccauu

SEQ ID NO: 2392733 - RNA, 19 nt, Artificial Sequence
  Description of Artificial Sequence: Synthetic oligonucleotide
ccugauucucagaccucgu

SEQ ID NO: 2392734 - RNA, 19 nt, Artificial Sequence
  Description of Artificial Sequence: Synthetic oligonucleotide
cgucccaguucuacuaagu

SEQ ID NO: 2392735 - RNA, 19 nt, Artificial Sequence
  Description of Artificial Sequence: Synthetic oligonucleotide
augugccguggaacccaua

SEQ ID NO: 2392736 - RNA, 19 nt, Artificial Sequence
  Description of Artificial Sequence: Synthetic oligonucleotide
ccauugaaucggccauagu

SEQ ID NO: 2392737 - RNA, 19 nt, Artificial Sequence
  Description of Artificial Sequence: Synthetic oligonucleotide
cgcucgucccaguucuacu

SEQ ID NO: 2392738 - RNA, 19 nt, Artificial Sequence
  Description of Artificial Sequence: Synthetic oligonucleotide
cggugagacccacuguuuu

SEQ ID NO: 2392739 - RNA, 19 nt, Artificial Sequence
  Description of Artificial Sequence: Synthetic oligonucleotide
ggacccgagcagacacagu

SEQ ID NO: 2392740 - RNA, 19 nt, Artificial Sequence
  Description of Artificial Sequence: Synthetic oligonucleotide
aaguuuaccagcuucacgc

SEQ ID NO: 2392741 - RNA, 19 nt, Artificial Sequence
  Description of Artificial Sequence: Synthetic oligonucleotide
gaaaguuauagacaugggg

SEQ ID NO: 2392742 - RNA, 19 nt, Artificial Sequence
  Description of Artificial Sequence: Synthetic oligonucleotide
uugaaaguuauagacaugg

SEQ ID NO: 2392743 - RNA, 19 nt, Artificial Sequence
  Description of Artificial Sequence: Synthetic oligonucleotide
acaaucuuuauugugcucc

SEQ ID NO: 2392744 - RNA, 19 nt, Artificial Sequence
  Description of Artificial Sequence: Synthetic oligonucleotide
ucauauuuucaguagaguc

SEQ ID NO: 2392745 - RNA, 19 nt, Artificial Sequence
  Description of Artificial Sequence: Synthetic oligonucleotide
aaaucuccaagcccgagug

SEQ ID NO: 2392746 - RNA, 19 nt, Artificial Sequence
  Description of Artificial Sequence: Synthetic oligonucleotide
acugguccaaacuuuggcc

SEQ ID NO: 2392747 - RNA, 19 nt, Artificial Sequence
  Description of Artificial Sequence: Synthetic oligonucleotide
acgaauguauucuaccgcg

SEQ ID NO: 2392748 - RNA, 19 nt, Artificial Sequence
  Description of Artificial Sequence: Synthetic oligonucleotide
aauguauucuaccgcggag

SEQ ID NO: 2392749 - RNA, 19 nt, Artificial Sequence
  Description of Artificial Sequence: Synthetic oligonucleotide
uucaaguuaauucguaaaa

SEQ ID NO: 2392750 - RNA, 19 nt, Artificial Sequence
  Description of Artificial Sequence: Synthetic oligonucleotide
uguauucuaccgcggagcg

SEQ ID NO: 2392751 - RNA, 19 nt, Artificial Sequence
  Description of Artificial Sequence: Synthetic oligonucleotide
gauggaaggugucauuccg

SEQ ID NO: 2392752 - RNA, 19 nt, Artificial Sequence
  Description of Artificial Sequence: Synthetic oligonucleotide
gagacaaucuuuauugugc

SEQ ID NO: 2392753 - RNA, 19 nt, Artificial Sequence
  Description of Artificial Sequence: Synthetic oligonucleotide
ucuuuauugugcuccaggc

SEQ ID NO: 2392754 - RNA, 19 nt, Artificial Sequence
  Description of Artificial Sequence: Synthetic oligonucleotide
auauuuucaguagagucuc

SEQ ID NO: 2392755 - RNA, 19 nt, Artificial Sequence
  Description of Artificial Sequence: Synthetic oligonucleotide
ugaaaguuauagacauggg

SEQ ID NO: 2392756 - RNA, 19 nt, Artificial Sequence
  Description of Artificial Sequence: Synthetic oligonucleotide
cuucauauuuucaguagag

SEQ ID NO: 2392757 - RNA, 19 nt, Artificial Sequence
  Description of Artificial Sequence: Synthetic oligonucleotide
uuucaguagagucucucca

SEQ ID NO: 2392758 - RNA, 19 nt, Artificial Sequence
  Description of Artificial Sequence: Synthetic oligonucleotide
agauggaaggugucauucc

SEQ ID NO: 2392759 - RNA, 19 nt, Artificial Sequence
  Description of Artificial Sequence: Synthetic oligonucleotide
agagacaaucuuuauugug

SEQ ID NO: 2392760 - RNA, 19 nt, Artificial Sequence
  Description of Artificial Sequence: Synthetic oligonucleotide
auguauucuaccgcggagc

SEQ ID NO: 2392761 - RNA, 19 nt, Artificial Sequence
  Description of Artificial Sequence: Synthetic oligonucleotide
uauucuaccgcggagcgca

SEQ ID NO: 2392762 - RNA, 19 nt, Artificial Sequence
  Description of Artificial Sequence: Synthetic oligonucleotide
uucaguagagucucuccag

SEQ ID NO: 2392763 - RNA, 19 nt, Artificial Sequence
  Description of Artificial Sequence: Synthetic oligonucleotide
ugcuacgaguuucugggag

SEQ ID NO: 2392764 - RNA, 19 nt, Artificial Sequence
  Description of Artificial Sequence: Synthetic oligonucleotide
aaaauccuuuucuccugag

SEQ ID NO: 2392765 - RNA, 19 nt, Artificial Sequence
  Description of Artificial Sequence: Synthetic oligonucleotide
aaauccuuuucuccugaga

SEQ ID NO: 2392766 - RNA, 19 nt, Artificial Sequence
  Description of Artificial Sequence: Synthetic oligonucleotide
ucaguagagucucuccagc

SEQ ID NO: 2392767 - RNA, 19 nt, Artificial Sequence
  Description of Artificial Sequence: Synthetic oligonucleotide
uccaucaagcuccgcaucc

SEQ ID NO: 2392768 - RNA, 19 nt, Artificial Sequence
  Description of Artificial Sequence: Synthetic oligonucleotide
uuuaccagcuucacgcggu

SEQ ID NO: 2392769 - RNA, 19 nt, Artificial Sequence
  Description of Artificial Sequence: Synthetic oligonucleotide
ucuaccgcggagcgcagcg

SEQ ID NO: 2392770 - RNA, 19 nt, Artificial Sequence
  Description of Artificial Sequence: Synthetic oligonucleotide
cugagaaaucuccaagccc

SEQ ID NO: 2392771 - RNA, 19 nt, Artificial Sequence
  Description of Artificial Sequence: Synthetic oligonucleotide
gaguauccgauguuagcag

SEQ ID NO: 2392772 - RNA, 19 nt, Artificial Sequence
  Description of Artificial Sequence: Synthetic oligonucleotide
aauuaagucuucauauuuu

SEQ ID NO: 2392773 - RNA, 19 nt, Artificial Sequence
  Description of Artificial Sequence: Synthetic oligonucleotide
aagcccgagugccacacag

SEQ ID NO: 2392774 - RNA, 19 nt, Artificial Sequence
  Description of Artificial Sequence: Synthetic oligonucleotide
caaguuuaccagcuucacg

SEQ ID NO: 2392775 - RNA, 19 nt, Artificial Sequence
  Description of Artificial Sequence: Synthetic oligonucleotide
gacugguccaaacuuuggc

SEQ ID NO: 2392776 - RNA, 19 nt, Artificial Sequence
  Description of Artificial Sequence: Synthetic oligonucleotide
aguuuaccagcuucacgcg

SEQ ID NO: 2392777 - RNA, 19 nt, Artificial Sequence
  Description of Artificial Sequence: Synthetic oligonucleotide
ccugcuacgaguuucuggg

SEQ ID NO: 2392778 - RNA, 19 nt, Artificial Sequence
  Description of Artificial Sequence: Synthetic oligonucleotide
aagcgaacggucucaccuc

SEQ ID NO: 2392779 - RNA, 19 nt, Artificial Sequence
  Description of Artificial Sequence: Synthetic oligonucleotide
cacacagacugggagaugg

SEQ ID NO: 2392780 - RNA, 19 nt, Artificial Sequence
  Description of Artificial Sequence: Synthetic oligonucleotide
uggaagcccaaguuuacca

SEQ ID NO: 2392781 - RNA, 19 nt, Artificial Sequence
  Description of Artificial Sequence: Synthetic oligonucleotide
caaacuuuggccagguuga

SEQ ID NO: 2392782 - RNA, 19 nt, Artificial Sequence
  Description of Artificial Sequence: Synthetic oligonucleotide
agcgucuccaccuuacuca

SEQ ID NO: 2392783 - RNA, 19 nt, Artificial Sequence
  Description of Artificial Sequence: Synthetic oligonucleotide
ugacugguccaaacuuugg

SEQ ID NO: 2392784 - RNA, 19 nt, Artificial Sequence
  Description of Artificial Sequence: Synthetic oligonucleotide
agcgaacggucucaccucc

SEQ ID NO: 2392785 - RNA, 19 nt, Artificial Sequence
  Description of Artificial Sequence: Synthetic oligonucleotide
ucuccagcaguucaaguua

SEQ ID NO: 2392786 - RNA, 19 nt, Artificial Sequence
  Description of Artificial Sequence: Synthetic oligonucleotide
cacgaauguauucuaccgc

SEQ ID NO: 2392787 - RNA, 19 nt, Artificial Sequence
  Description of Artificial Sequence: Synthetic oligonucleotide
acgaguuucugggagcuac

SEQ ID NO: 2392788 - RNA, 19 nt, Artificial Sequence
  Description of Artificial Sequence: Synthetic oligonucleotide
  modified_base (2)..(2): a, c, u, g, unknown or other
unaggggcagagacaaucu

SEQ ID NO: 2392789 - RNA, 19 nt, Artificial Sequence
  Description of Artificial Sequence: Synthetic oligonucleotide
uccgcauccagcccuccgg

SEQ ID NO: 2392790 - RNA, 19 nt, Artificial Sequence
  Description of Artificial Sequence: Synthetic oligonucleotide
aaggugucauuccgcgggg

SEQ ID NO: 2392791 - RNA, 19 nt, Artificial Sequence
  Description of Artificial Sequence: Synthetic oligonucleotide
uucauauuuucaguagagu

SEQ ID NO: 2392792 - RNA, 19 nt, Artificial Sequence
  Description of Artificial Sequence: Synthetic oligonucleotide
guuuaccagcuucacgcgg

SEQ ID NO: 2392793 - RNA, 19 nt, Artificial Sequence
  Description of Artificial Sequence: Synthetic oligonucleotide
gaauguauucuaccgcgga

SEQ ID NO: 2392794 - RNA, 19 nt, Artificial Sequence
  Description of Artificial Sequence: Synthetic oligonucleotide
guugcguucgcgcucguug

SEQ ID NO: 2392795 - RNA, 19 nt, Artificial Sequence
  Description of Artificial Sequence: Synthetic oligonucleotide
ugcggugggaagcgaacgg

SEQ ID NO: 2392796 - RNA, 19 nt, Artificial Sequence
  Description of Artificial Sequence: Synthetic oligonucleotide
gcacgaauguauucuaccg

SEQ ID NO: 2392797 - RNA, 19 nt, Artificial Sequence
  Description of Artificial Sequence: Synthetic oligonucleotide
gaagcgaacggucucaccu

SEQ ID NO: 2392798 - RNA, 19 nt, Artificial Sequence
  Description of Artificial Sequence: Synthetic oligonucleotide
auccgauguuagcagcccc

SEQ ID NO: 2392799 - RNA, 19 nt, Artificial Sequence
  Description of Artificial Sequence: Synthetic oligonucleotide
uccuuuucuccugagaaau

SEQ ID NO: 2392800 - RNA, 19 nt, Artificial Sequence
  Description of Artificial Sequence: Synthetic oligonucleotide
accuccaccggucuccagg

SEQ ID NO: 2392801 - RNA, 19 nt, Artificial Sequence
  Description of Artificial Sequence: Synthetic oligonucleotide
ucagcuucuugcuggcgcc

SEQ ID NO: 2392802 - RNA, 19 nt, Artificial Sequence
  Description of Artificial Sequence: Synthetic oligonucleotide
cuuacucagcuucuugcug

SEQ ID NO: 2392803 - RNA, 19 nt, Artificial Sequence
  Description of Artificial Sequence: Synthetic oligonucleotide
cuccugagaaaucuccaag

SEQ ID NO: 2392804 - RNA, 19 nt, Artificial Sequence
  Description of Artificial Sequence: Synthetic oligonucleotide
ugguccaaacuuuggccag

SEQ ID NO: 2392805 - RNA, 19 nt, Artificial Sequence
  Description of Artificial Sequence: Synthetic oligonucleotide
ccaaacuuuggccagguug

SEQ ID NO: 2392806 - RNA, 19 nt, Artificial Sequence
  Description of Artificial Sequence: Synthetic oligonucleotide
gagauggaaggugucauuc

SEQ ID NO: 2392807 - RNA, 19 nt, Artificial Sequence
  Description of Artificial Sequence: Synthetic oligonucleotide
cugacugguccaaacuuug

SEQ ID NO: 2392808 - RNA, 19 nt, Artificial Sequence
  Description of Artificial Sequence: Synthetic oligonucleotide
  modified_base (3)..(3): a, c, u, g, unknown or other
gunaggggcagagacaauc

SEQ ID NO: 2392809 - RNA, 19 nt, Artificial Sequence
  Description of Artificial Sequence: Synthetic oligonucleotide
auggaaggugucauuccgc

SEQ ID NO: 2392810 - RNA, 19 nt, Artificial Sequence
  Description of Artificial Sequence: Synthetic oligonucleotide
cauuccgcgggguggaggc

SEQ ID NO: 2392811 - RNA, 19 nt, Artificial Sequence
  Description of Artificial Sequence: Synthetic oligonucleotide
ccucgguugugccagaucg

SEQ ID NO: 2392812 - RNA, 19 nt, Artificial Sequence
  Description of Artificial Sequence: Synthetic oligonucleotide
ccgagugccacacagacug

SEQ ID NO: 2392813 - RNA, 19 nt, Artificial Sequence
  Description of Artificial Sequence: Synthetic oligonucleotide
ucgugcucugcaagcagcc

SEQ ID NO: 2392814 - RNA, 19 nt, Artificial Sequence
  Description of Artificial Sequence: Synthetic oligonucleotide
uccaccuuacucagcuucu

SEQ ID NO: 2392815 - RNA, 19 nt, Artificial Sequence
  Description of Artificial Sequence: Synthetic oligonucleotide
ugccgcagcgccuggaagc

SEQ ID NO: 2392816 - RNA, 19 nt, Artificial Sequence
  Description of Artificial Sequence: Synthetic oligonucleotide
gagaagugccccgaggaac

SEQ ID NO: 2392817 - RNA, 19 nt, Artificial Sequence
  Description of Artificial Sequence: Synthetic oligonucleotide
ucgguugugccagaucgcc

SEQ ID NO: 2392818 - RNA, 19 nt, Artificial Sequence
  Description of Artificial Sequence: Synthetic oligonucleotide
gguugugccagaucgccgc

SEQ ID NO: 2392819 - RNA, 19 nt, Artificial Sequence
  Description of Artificial Sequence: Synthetic oligonucleotide
gagugccacacagacuggg

SEQ ID NO: 2392820 - RNA, 19 nt, Artificial Sequence
  Description of Artificial Sequence: Synthetic oligonucleotide
ccugagaaaucuccaagcc

SEQ ID NO: 2392821 - RNA, 19 nt, Artificial Sequence
  Description of Artificial Sequence: Synthetic oligonucleotide
uauccgauguuagcagccc

SEQ ID NO: 2392822 - RNA, 19 nt, Artificial Sequence
  Description of Artificial Sequence: Synthetic oligonucleotide
ugugccagaucgccgccug

SEQ ID NO: 2392823 - RNA, 19 nt, Artificial Sequence
  Description of Artificial Sequence: Synthetic oligonucleotide
ggagcuacuggagaagugc

SEQ ID NO: 2392824 - RNA, 19 nt, Artificial Sequence
  Description of Artificial Sequence: Synthetic oligonucleotide
aggccugacugguccaaac

SEQ ID NO: 2392825 - RNA, 19 nt, Artificial Sequence
  Description of Artificial Sequence: Synthetic oligonucleotide
cuacuggagaagugccccg

SEQ ID NO: 2392826 - RNA, 19 nt, Artificial Sequence
  Description of Artificial Sequence: Synthetic oligonucleotide
cugguccaaacuuuggcca

SEQ ID NO: 2392827 - RNA, 19 nt, Artificial Sequence
  Description of Artificial Sequence: Synthetic oligonucleotide
guauccgauguuagcagcc

SEQ ID NO: 2392828 - RNA, 19 nt, Artificial Sequence
  Description of Artificial Sequence: Synthetic oligonucleotide
uaaggauccuuuguacaaa

SEQ ID NO: 2392829 - RNA, 19 nt, Artificial Sequence
  Description of Artificial Sequence: Synthetic oligonucleotide
ugcagcgcagcaguuccgg

SEQ ID NO: 2392830 - RNA, 19 nt, Artificial Sequence
  Description of Artificial Sequence: Synthetic oligonucleotide
uugcguucgcgcucguugc

SEQ ID NO: 2392831 - RNA, 19 nt, Artificial Sequence
  Description of Artificial Sequence: Synthetic oligonucleotide
ggaagcccaaguuuaccag

SEQ ID NO: 2392832 - RNA, 19 nt, Artificial Sequence
  Description of Artificial Sequence: Synthetic oligonucleotide
ugccagaucgccgccugcg

SEQ ID NO: 2392833 - RNA, 19 nt, Artificial Sequence
  Description of Artificial Sequence: Synthetic oligonucleotide
cuucacgcgguugcguucg

SEQ ID NO: 2392834 - RNA, 19 nt, Artificial Sequence
  Description of Artificial Sequence: Synthetic oligonucleotide
aggccuaaggauccuuugu

SEQ ID NO: 2392835 - RNA, 19 nt, Artificial Sequence
  Description of Artificial Sequence: Synthetic oligonucleotide
ugcguucgcgcucguugcg

SEQ ID NO: 2392836 - RNA, 19 nt, Artificial Sequence
  Description of Artificial Sequence: Synthetic oligonucleotide
agggccgaguauccgaugu

SEQ ID NO: 2392837 - RNA, 19 nt, Artificial Sequence
  Description of Artificial Sequence: Synthetic oligonucleotide
uuauugugcuccaggccua

SEQ ID NO: 2392838 - RNA, 19 nt, Artificial Sequence
  Description of Artificial Sequence: Synthetic oligonucleotide
gagcuacuggagaagugcc

SEQ ID NO: 2392839 - RNA, 19 nt, Artificial Sequence
  Description of Artificial Sequence: Synthetic oligonucleotide
cuggagaagugccccgagg

SEQ ID NO: 2392840 - RNA, 19 nt, Artificial Sequence
  Description of Artificial Sequence: Synthetic oligonucleotide
gaacggucucaccuccacc

SEQ ID NO: 2392841 - RNA, 19 nt, Artificial Sequence
  Description of Artificial Sequence: Synthetic oligonucleotide
uccaccggucuccaggcaa

SEQ ID NO: 2392842 - RNA, 19 nt, Artificial Sequence
  Description of Artificial Sequence: Synthetic oligonucleotide
guugaaaguuauagacaug

SEQ ID NO: 2392843 - RNA, 19 nt, Artificial Sequence
  Description of Artificial Sequence: Synthetic oligonucleotide
gaggucagggccgaguauc

SEQ ID NO: 2392844 - RNA, 19 nt, Artificial Sequence
  Description of Artificial Sequence: Synthetic oligonucleotide
ucgcugggcuucuggagag

SEQ ID NO: 2392845 - RNA, 19 nt, Artificial Sequence
  Description of Artificial Sequence: Synthetic oligonucleotide
cacgcgguugcguucgcgc

SEQ ID NO: 2392846 - RNA, 19 nt, Artificial Sequence
  Description of Artificial Sequence: Synthetic oligonucleotide
agcgcagcaguuccgggga

SEQ ID NO: 2392847 - RNA, 19 nt, Artificial Sequence
  Description of Artificial Sequence: Synthetic oligonucleotide
accgggugcggugggaagc

SEQ ID NO: 2392848 - RNA, 19 nt, Artificial Sequence
  Description of Artificial Sequence: Synthetic oligonucleotide
cucguugcggcgugccacg

SEQ ID NO: 2392849 - RNA, 19 nt, Artificial Sequence
  Description of Artificial Sequence: Synthetic oligonucleotide
uggggcacgugucgcuggg

SEQ ID NO: 2392850 - RNA, 19 nt, Artificial Sequence
  Description of Artificial Sequence: Synthetic oligonucleotide
aaccgggugcggugggaag

SEQ ID NO: 2392851 - RNA, 19 nt, Artificial Sequence
  Description of Artificial Sequence: Synthetic oligonucleotide
ucauuccgcgggguggagg

SEQ ID NO: 2392852 - RNA, 19 nt, Artificial Sequence
  Description of Artificial Sequence: Synthetic oligonucleotide
ucagggccgaguauccgau

SEQ ID NO: 2392853 - RNA, 19 nt, Artificial Sequence
  Description of Artificial Sequence: Synthetic oligonucleotide
aggagaggcgggcaugagu

SEQ ID NO: 2392854 - RNA, 19 nt, Artificial Sequence
  Description of Artificial Sequence: Synthetic oligonucleotide
gaguuucugggagcuacug

SEQ ID NO: 2392855 - RNA, 19 nt, Artificial Sequence
  Description of Artificial Sequence: Synthetic oligonucleotide
gcgggcaugagucggggcg

SEQ ID NO: 2392856 - RNA, 19 nt, Artificial Sequence
  Description of Artificial Sequence: Synthetic oligonucleotide
caaucuuuauugugcucca

SEQ ID NO: 2392857 - RNA, 19 nt, Artificial Sequence
  Description of Artificial Sequence: Synthetic oligonucleotide
cuugcuggcgccgccgugc

SEQ ID NO: 2392858 - RNA, 19 nt, Artificial Sequence
  Description of Artificial Sequence: Synthetic oligonucleotide
aggucagggccgaguaucc

SEQ ID NO: 2392859 - RNA, 19 nt, Artificial Sequence
  Description of Artificial Sequence: Synthetic oligonucleotide
ggcacaugcugccgcagcg

SEQ ID NO: 2392860 - RNA, 19 nt, Artificial Sequence
  Description of Artificial Sequence: Synthetic oligonucleotide
cucgguugugccagaucgc

SEQ ID NO: 2392861 - RNA, 19 nt, Artificial Sequence
  Description of Artificial Sequence: Synthetic oligonucleotide
acggucucaccuccaccgg

SEQ ID NO: 2392862 - RNA, 19 nt, Artificial Sequence
  Description of Artificial Sequence: Synthetic oligonucleotide
ugggagcuacuggagaagu

SEQ ID NO: 2392863 - RNA, 19 nt, Artificial Sequence
  Description of Artificial Sequence: Synthetic oligonucleotide
agcgccuggaagcccaagu

SEQ ID NO: 2392864 - RNA, 19 nt, Artificial Sequence
  Description of Artificial Sequence: Synthetic oligonucleotide
ugggaagcgaacggucuca

SEQ ID NO: 2392865 - RNA, 19 nt, Artificial Sequence
  Description of Artificial Sequence: Synthetic oligonucleotide
ugucauuccgcggggugga

SEQ ID NO: 2392866 - RNA, 19 nt, Artificial Sequence
  Description of Artificial Sequence: Synthetic oligonucleotide
augagucggggcgagcgag

SEQ ID NO: 2392867 - RNA, 19 nt, Artificial Sequence
  Description of Artificial Sequence: Synthetic oligonucleotide
ccgccguccaucaagcucc

SEQ ID NO: 2392868 - RNA, 19 nt, Artificial Sequence
  Description of Artificial Sequence: Synthetic oligonucleotide
ugcagcgcacgaauguauu

SEQ ID NO: 2392869 - RNA, 19 nt, Artificial Sequence
  Description of Artificial Sequence: Synthetic oligonucleotide
ggaaggugucauuccgcgg

SEQ ID NO: 2392870 - RNA, 19 nt, Artificial Sequence
  Description of Artificial Sequence: Synthetic oligonucleotide
agugccccgaggaaccggg

SEQ ID NO: 2392871 - RNA, 19 nt, Artificial Sequence
  Description of Artificial Sequence: Synthetic oligonucleotide
caggccuaaggauccuuug

SEQ ID NO: 2392872 - RNA, 19 nt, Artificial Sequence
  Description of Artificial Sequence: Synthetic oligonucleotide
gcuacgaguuucugggagc

SEQ ID NO: 2392873 - RNA, 19 nt, Artificial Sequence
  Description of Artificial Sequence: Synthetic oligonucleotide
uccggcgccugcuacgagu

SEQ ID NO: 2392874 - RNA, 19 nt, Artificial Sequence
  Description of Artificial Sequence: Synthetic oligonucleotide
aagugccccgaggaaccgg

SEQ ID NO: 2392875 - RNA, 19 nt, Artificial Sequence
  Description of Artificial Sequence: Synthetic oligonucleotide
cucugcaagcagccgcugc

SEQ ID NO: 2392876 - RNA, 19 nt, Artificial Sequence
  Description of Artificial Sequence: Synthetic oligonucleotide
caccuuacucagcuucuug

SEQ ID NO: 2392877 - RNA, 19 nt, Artificial Sequence
  Description of Artificial Sequence: Synthetic oligonucleotide
caagcagccgcugcagcgc

SEQ ID NO: 2392878 - RNA, 19 nt, Artificial Sequence
  Description of Artificial Sequence: Synthetic oligonucleotide
guugcggcgugccacggca

SEQ ID NO: 2392879 - RNA, 19 nt, Artificial Sequence
  Description of Artificial Sequence: Synthetic oligonucleotide
gucgcugggcuucuggaga

SEQ ID NO: 2392880 - RNA, 19 nt, Artificial Sequence
  Description of Artificial Sequence: Synthetic oligonucleotide
gccugcuacgaguuucugg

SEQ ID NO: 2392881 - RNA, 19 nt, Artificial Sequence
  Description of Artificial Sequence: Synthetic oligonucleotide
agcgacuccaggagaggcg

SEQ ID NO: 2392882 - RNA, 19 nt, Artificial Sequence
  Description of Artificial Sequence: Synthetic oligonucleotide
uugcuggcgccgccgugcg

SEQ ID NO: 2392883 - RNA, 19 nt, Artificial Sequence
  Description of Artificial Sequence: Synthetic oligonucleotide
aacuuuggccagguugaaa

SEQ ID NO: 2392884 - RNA, 19 nt, Artificial Sequence
  Description of Artificial Sequence: Synthetic oligonucleotide
ggagaggcgggcaugaguc

SEQ ID NO: 2392885 - RNA, 19 nt, Artificial Sequence
  Description of Artificial Sequence: Synthetic oligonucleotide
gcaugagucggggcgagcg

SEQ ID NO: 2392886 - RNA, 19 nt, Artificial Sequence
  Description of Artificial Sequence: Synthetic oligonucleotide
caagcuccgcauccagccc

SEQ ID NO: 2392887 - RNA, 19 nt, Artificial Sequence
  Description of Artificial Sequence: Synthetic oligonucleotide
gaagugccccgaggaaccg

SEQ ID NO: 2392888 - RNA, 19 nt, Artificial Sequence
  Description of Artificial Sequence: Synthetic oligonucleotide
gccuaaggauccuuuguac

SEQ ID NO: 2392889 - RNA, 19 nt, Artificial Sequence
  Description of Artificial Sequence: Synthetic oligonucleotide
caugcugccgcagcgccug

SEQ ID NO: 2392890 - RNA, 19 nt, Artificial Sequence
  Description of Artificial Sequence: Synthetic oligonucleotide
ugcggcgugccacggcagc

SEQ ID NO: 2392891 - RNA, 19 nt, Artificial Sequence
  Description of Artificial Sequence: Synthetic oligonucleotide
cauccagcccuccggcgcc

SEQ ID NO: 2392892 - RNA, 19 nt, Artificial Sequence
  Description of Artificial Sequence: Synthetic oligonucleotide
gugcggugggaagcgaacg

SEQ ID NO: 2392893 - RNA, 19 nt, Artificial Sequence
  Description of Artificial Sequence: Synthetic oligonucleotide
agcuucacgcgguugcguu

SEQ ID NO: 2392894 - RNA, 19 nt, Artificial Sequence
  Description of Artificial Sequence: Synthetic oligonucleotide
ggggaugcgggucuccgcc

SEQ ID NO: 2392895 - RNA, 19 nt, Artificial Sequence
  Description of Artificial Sequence: Synthetic oligonucleotide
gucggggcgagcgagccgc

SEQ ID NO: 2392896 - RNA, 19 nt, Artificial Sequence
  Description of Artificial Sequence: Synthetic oligonucleotide
uucuugcuggcgccgccgu

SEQ ID NO: 2392897 - RNA, 19 nt, Artificial Sequence
  Description of Artificial Sequence: Synthetic oligonucleotide
cagcgcaggucccagcgac

SEQ ID NO: 2392898 - RNA, 19 nt, Artificial Sequence
  Description of Artificial Sequence: Synthetic oligonucleotide
aggcaaggcacugcugcag

SEQ ID NO: 2392899 - RNA, 19 nt, Artificial Sequence
  Description of Artificial Sequence: Synthetic oligonucleotide
ccuaaggauccuuuguaca

SEQ ID NO: 2392900 - RNA, 19 nt, Artificial Sequence
  Description of Artificial Sequence: Synthetic oligonucleotide
gucuccgccgagcagcgca

SEQ ID NO: 2392901 - RNA, 19 nt, Artificial Sequence
  Description of Artificial Sequence: Synthetic oligonucleotide
guucgcgcucguugcggcg

SEQ ID NO: 2392902 - RNA, 19 nt, Artificial Sequence
  Description of Artificial Sequence: Synthetic oligonucleotide
cgcacgaauguauucuacc

SEQ ID NO: 2392903 - RNA, 19 nt, Artificial Sequence
  Description of Artificial Sequence: Synthetic oligonucleotide
ugcggcacaugcugccgca

SEQ ID NO: 2392904 - RNA, 19 nt, Artificial Sequence
  Description of Artificial Sequence: Synthetic oligonucleotide
agcgcacgaauguauucua

SEQ ID NO: 2392905 - RNA, 19 nt, Artificial Sequence
  Description of Artificial Sequence: Synthetic oligonucleotide
aaacuuuggccagguugaa

SEQ ID NO: 2392906 - RNA, 19 nt, Artificial Sequence
  Description of Artificial Sequence: Synthetic oligonucleotide
ucuugcuggcgccgccgug

SEQ ID NO: 2392907 - RNA, 19 nt, Artificial Sequence
  Description of Artificial Sequence: Synthetic oligonucleotide
uaccgcggagcgcagcguc

SEQ ID NO: 2392908 - RNA, 19 nt, Artificial Sequence
  Description of Artificial Sequence: Synthetic oligonucleotide
gaugcgggucuccgccgag

SEQ ID NO: 2392909 - RNA, 19 nt, Artificial Sequence
  Description of Artificial Sequence: Synthetic oligonucleotide
cagcgacuccaggagaggc

SEQ ID NO: 2392910 - RNA, 19 nt, Artificial Sequence
  Description of Artificial Sequence: Synthetic oligonucleotide
cugggagcuacuggagaag

SEQ ID NO: 2392911 - RNA, 19 nt, Artificial Sequence
  Description of Artificial Sequence: Synthetic oligonucleotide
cagcgucuccaccuuacuc

SEQ ID NO: 2392912 - RNA, 19 nt, Artificial Sequence
  Description of Artificial Sequence: Synthetic oligonucleotide
ccgaguauccgauguuagc

SEQ ID NO: 2392913 - RNA, 19 nt, Artificial Sequence
  Description of Artificial Sequence: Synthetic oligonucleotide
gaggcgggcaugagucggg

SEQ ID NO: 2392914 - RNA, 19 nt, Artificial Sequence
  Description of Artificial Sequence: Synthetic oligonucleotide
gugggaagcgaacggucuc

SEQ ID NO: 2392915 - RNA, 19 nt, Artificial Sequence
  Description of Artificial Sequence: Synthetic oligonucleotide
cgaauguauucuaccgcgg

SEQ ID NO: 2392916 - RNA, 19 nt, Artificial Sequence
  Description of Artificial Sequence: Synthetic oligonucleotide
agucggggcgagcgagccg

SEQ ID NO: 2392917 - RNA, 19 nt, Artificial Sequence
  Description of Artificial Sequence: Synthetic oligonucleotide
ucacgcgguugcguucgcg

SEQ ID NO: 2392918 - RNA, 19 nt, Artificial Sequence
  Description of Artificial Sequence: Synthetic oligonucleotide
gagaaaucuccaagcccga

SEQ ID NO: 2392919 - RNA, 19 nt, Artificial Sequence
  Description of Artificial Sequence: Synthetic oligonucleotide
gagccgccguccaucaagc

SEQ ID NO: 2392920 - RNA, 19 nt, Artificial Sequence
  Description of Artificial Sequence: Synthetic oligonucleotide
gcaagcgcggcgcgcaccg

SEQ ID NO: 2392921 - RNA, 19 nt, Artificial Sequence
  Description of Artificial Sequence: Synthetic oligonucleotide
guuuccuggggcacguguc

SEQ ID NO: 2392922 - RNA, 19 nt, Artificial Sequence
  Description of Artificial Sequence: Synthetic oligonucleotide
augcgggucuccgccgagc

SEQ ID NO: 2392923 - RNA, 19 nt, Artificial Sequence
  Description of Artificial Sequence: Synthetic oligonucleotide
uuaccagcuucacgcgguu

SEQ ID NO: 2392924 - RNA, 19 nt, Artificial Sequence
  Description of Artificial Sequence: Synthetic oligonucleotide
agaggucagggccgaguau

SEQ ID NO: 2392925 - RNA, 19 nt, Artificial Sequence
  Description of Artificial Sequence: Synthetic oligonucleotide
guauucuaccgcggagcgc

SEQ ID NO: 2392926 - RNA, 19 nt, Artificial Sequence
  Description of Artificial Sequence: Synthetic oligonucleotide
gguccaaacuuuggccagg

SEQ ID NO: 2392927 - RNA, 19 nt, Artificial Sequence
  Description of Artificial Sequence: Synthetic oligonucleotide
  modified_base (5)..(5): a, c, u, g, unknown or other
gggunaggggcagagacaa

SEQ ID NO: 2392928 - RNA, 19 nt, Artificial Sequence
  Description of Artificial Sequence: Synthetic oligonucleotide
cuccgcauccagcccuccg

SEQ ID NO: 2392929 - RNA, 19 nt, Artificial Sequence
  Description of Artificial Sequence: Synthetic oligonucleotide
gcgacuccaggagaggcgg

SEQ ID NO: 2392930 - RNA, 19 nt, Artificial Sequence
  Description of Artificial Sequence: Synthetic oligonucleotide
ccagguugaaaguuauaga

SEQ ID NO: 2392931 - RNA, 19 nt, Artificial Sequence
  Description of Artificial Sequence: Synthetic oligonucleotide
uuccuggggcacgugucgc

SEQ ID NO: 2392932 - RNA, 19 nt, Artificial Sequence
  Description of Artificial Sequence: Synthetic oligonucleotide
agacugggagauggaaggu

SEQ ID NO: 2392933 - RNA, 19 nt, Artificial Sequence
  Description of Artificial Sequence: Synthetic oligonucleotide
uccuggggcacgugucgcu

SEQ ID NO: 2392934 - RNA, 19 nt, Artificial Sequence
  Description of Artificial Sequence: Synthetic oligonucleotide
uugcggcgugccacggcag

SEQ ID NO: 2392935 - RNA, 19 nt, Artificial Sequence
  Description of Artificial Sequence: Synthetic oligonucleotide
cccagcgacuccaggagag

SEQ ID NO: 2392936 - RNA, 19 nt, Artificial Sequence
  Description of Artificial Sequence: Synthetic oligonucleotide
uuccgcgggguggaggcug

SEQ ID NO: 2392937 - RNA, 19 nt, Artificial Sequence
  Description of Artificial Sequence: Synthetic oligonucleotide
gcccgagugccacacagac

SEQ ID NO: 2392938 - RNA, 19 nt, Artificial Sequence
  Description of Artificial Sequence: Synthetic oligonucleotide
acgcgguugcguucgcgcu

SEQ ID NO: 2392939 - RNA, 19 nt, Artificial Sequence
  Description of Artificial Sequence: Synthetic oligonucleotide
uucgcgcucguugcggcgu

SEQ ID NO: 2392940 - RNA, 19 nt, Artificial Sequence
  Description of Artificial Sequence: Synthetic oligonucleotide
gugucgcugggcuucugga

SEQ ID NO: 2392941 - RNA, 19 nt, Artificial Sequence
  Description of Artificial Sequence: Synthetic oligonucleotide
agcgagccgccguccauca

SEQ ID NO: 2392942 - RNA, 19 nt, Artificial Sequence
  Description of Artificial Sequence: Synthetic oligonucleotide
gccgccgugcggcacaugc

SEQ ID NO: 2392943 - RNA, 19 nt, Artificial Sequence
  Description of Artificial Sequence: Synthetic oligonucleotide
gugcggcacaugcugccgc

SEQ ID NO: 2392944 - RNA, 19 nt, Artificial Sequence
  Description of Artificial Sequence: Synthetic oligonucleotide
uccaaacuuuggccagguu

SEQ ID NO: 2392945 - RNA, 19 nt, Artificial Sequence
  Description of Artificial Sequence: Synthetic oligonucleotide
ggaagcgaacggucucacc

SEQ ID NO: 2392946 - RNA, 19 nt, Artificial Sequence
  Description of Artificial Sequence: Synthetic oligonucleotide
ggccuaaggauccuuugua

SEQ ID NO: 2392947 - RNA, 19 nt, Artificial Sequence
  Description of Artificial Sequence: Synthetic oligonucleotide
uucuaccgcggagcgcagc

SEQ ID NO: 2392948 - RNA, 19 nt, Artificial Sequence
  Description of Artificial Sequence: Synthetic oligonucleotide
gccgaguauccgauguuag

SEQ ID NO: 2392949 - RNA, 19 nt, Artificial Sequence
  Description of Artificial Sequence: Synthetic oligonucleotide
uugugccagaucgccgccu

SEQ ID NO: 2392950 - RNA, 19 nt, Artificial Sequence
  Description of Artificial Sequence: Synthetic oligonucleotide
gcagcaguuccggggaugc

SEQ ID NO: 2392951 - RNA, 19 nt, Artificial Sequence
  Description of Artificial Sequence: Synthetic oligonucleotide
gccccgaggaaccgggugc

SEQ ID NO: 2392952 - RNA, 19 nt, Artificial Sequence
  Description of Artificial Sequence: Synthetic oligonucleotide
uucacgcgguugcguucgc

SEQ ID NO: 2392953 - RNA, 19 nt, Artificial Sequence
  Description of Artificial Sequence: Synthetic oligonucleotide
caggcaaggcacugcugca

SEQ ID NO: 2392954 - RNA, 19 nt, Artificial Sequence
  Description of Artificial Sequence: Synthetic oligonucleotide
ccaggcaucuugccucagg

SEQ ID NO: 2392955 - RNA, 19 nt, Artificial Sequence
  Description of Artificial Sequence: Synthetic oligonucleotide
gggaugcgggucuccgccg

SEQ ID NO: 2392956 - RNA, 19 nt, Artificial Sequence
  Description of Artificial Sequence: Synthetic oligonucleotide
ccuccaccggucuccaggc

SEQ ID NO: 2392957 - RNA, 19 nt, Artificial Sequence
  Description of Artificial Sequence: Synthetic oligonucleotide
accgcgucgugcucugcaa

SEQ ID NO: 2392958 - RNA, 19 nt, Artificial Sequence
  Description of Artificial Sequence: Synthetic oligonucleotide
uccgcgggguggaggcuga

SEQ ID NO: 2392959 - RNA, 19 nt, Artificial Sequence
  Description of Artificial Sequence: Synthetic oligonucleotide
cgaguauccgauguuagca

SEQ ID NO: 2392960 - RNA, 19 nt, Artificial Sequence
  Description of Artificial Sequence: Synthetic oligonucleotide
ccaaguuuaccagcuucac

SEQ ID NO: 2392961 - RNA, 19 nt, Artificial Sequence
  Description of Artificial Sequence: Synthetic oligonucleotide
caugagucggggcgagcga

SEQ ID NO: 2392962 - RNA, 19 nt, Artificial Sequence
  Description of Artificial Sequence: Synthetic oligonucleotide
ggagaagugccccgaggaa

SEQ ID NO: 2392963 - RNA, 19 nt, Artificial Sequence
  Description of Artificial Sequence: Synthetic oligonucleotide
gccagaucgccgccugcgg

SEQ ID NO: 2392964 - RNA, 19 nt, Artificial Sequence
  Description of Artificial Sequence: Synthetic oligonucleotide
cacagacugggagauggaa

SEQ ID NO: 2392965 - RNA, 19 nt, Artificial Sequence
  Description of Artificial Sequence: Synthetic oligonucleotide
cagaggucagggccgagua

SEQ ID NO: 2392966 - RNA, 19 nt, Artificial Sequence
  Description of Artificial Sequence: Synthetic oligonucleotide
gagcgagccgccguccauc

SEQ ID NO: 2392967 - RNA, 19 nt, Artificial Sequence
  Description of Artificial Sequence: Synthetic oligonucleotide
ucgcgcucguugcggcgug

SEQ ID NO: 2392968 - RNA, 19 nt, Artificial Sequence
  Description of Artificial Sequence: Synthetic oligonucleotide
ggucagggccgaguauccg

SEQ ID NO: 2392969 - RNA, 19 nt, Artificial Sequence
  Description of Artificial Sequence: Synthetic oligonucleotide
ccagaucgccgccugcggc

SEQ ID NO: 2392970 - RNA, 19 nt, Artificial Sequence
  Description of Artificial Sequence: Synthetic oligonucleotide
gccgccguccaucaagcuc

SEQ ID NO: 2392971 - RNA, 19 nt, Artificial Sequence
  Description of Artificial Sequence: Synthetic oligonucleotide
agaucgccgccugcggcug

SEQ ID NO: 2392972 - RNA, 19 nt, Artificial Sequence
  Description of Artificial Sequence: Synthetic oligonucleotide
gugccacggcagccgagcc

SEQ ID NO: 2392973 - RNA, 19 nt, Artificial Sequence
  Description of Artificial Sequence: Synthetic oligonucleotide
gcgguugcguucgcgcucg

SEQ ID NO: 2392974 - RNA, 19 nt, Artificial Sequence
  Description of Artificial Sequence: Synthetic oligonucleotide
agcgcagcgucuccaccuu

SEQ ID NO: 2392975 - RNA, 19 nt, Artificial Sequence
  Description of Artificial Sequence: Synthetic oligonucleotide
gaaccgggugcggugggaa

SEQ ID NO: 2392976 - RNA, 19 nt, Artificial Sequence
  Description of Artificial Sequence: Synthetic oligonucleotide
cuacgaguuucugggagcu

SEQ ID NO: 2392977 - RNA, 19 nt, Artificial Sequence
  Description of Artificial Sequence: Synthetic oligonucleotide
ccguccaucaagcuccgca

SEQ ID NO: 2392978 - RNA, 19 nt, Artificial Sequence
  Description of Artificial Sequence: Synthetic oligonucleotide
cugcuacgaguuucuggga

SEQ ID NO: 2392979 - RNA, 19 nt, Artificial Sequence
  Description of Artificial Sequence: Synthetic oligonucleotide
guuccggggaugcgggucu

SEQ ID NO: 2392980 - RNA, 19 nt, Artificial Sequence
  Description of Artificial Sequence: Synthetic oligonucleotide
cagggccgaguauccgaug

SEQ ID NO: 2392981 - RNA, 19 nt, Artificial Sequence
  Description of Artificial Sequence: Synthetic oligonucleotide
gcuggcgccgccgugcggc

SEQ ID NO: 2392982 - RNA, 19 nt, Artificial Sequence
  Description of Artificial Sequence: Synthetic oligonucleotide
ccaccggucuccaggcaag

SEQ ID NO: 2392983 - RNA, 19 nt, Artificial Sequence
  Description of Artificial Sequence: Synthetic oligonucleotide
gugccagaucgccgccugc

SEQ ID NO: 2392984 - RNA, 19 nt, Artificial Sequence
  Description of Artificial Sequence: Synthetic oligonucleotide
ggugcggugggaagcgaac

SEQ ID NO: 2392985 - RNA, 19 nt, Artificial Sequence
  Description of Artificial Sequence: Synthetic oligonucleotide
uccaggccuaaggauccuu

SEQ ID NO: 2392986 - RNA, 19 nt, Artificial Sequence
  Description of Artificial Sequence: Synthetic oligonucleotide
gggagcuacuggagaagug

SEQ ID NO: 2392987 - RNA, 19 nt, Artificial Sequence
  Description of Artificial Sequence: Synthetic oligonucleotide
ggcgccugcuacgaguuuc

SEQ ID NO: 2392988 - RNA, 19 nt, Artificial Sequence
  Description of Artificial Sequence: Synthetic oligonucleotide
cagcgcacgaauguauucu

SEQ ID NO: 2392989 - RNA, 19 nt, Artificial Sequence
  Description of Artificial Sequence: Synthetic oligonucleotide
gguuuccuggggcacgugu

SEQ ID NO: 2392990 - RNA, 19 nt, Artificial Sequence
  Description of Artificial Sequence: Synthetic oligonucleotide
cgugucgcugggcuucugg

SEQ ID NO: 2392991 - RNA, 19 nt, Artificial Sequence
  Description of Artificial Sequence: Synthetic oligonucleotide
uacgaguuucugggagcua

SEQ ID NO: 2392992 - RNA, 19 nt, Artificial Sequence
  Description of Artificial Sequence: Synthetic oligonucleotide
gcucguugcggcgugccac

SEQ ID NO: 2392993 - RNA, 19 nt, Artificial Sequence
  Description of Artificial Sequence: Synthetic oligonucleotide
cgccgagcagcgcaggucc

SEQ ID NO: 2392994 - RNA, 19 nt, Artificial Sequence
  Description of Artificial Sequence: Synthetic oligonucleotide
caccgcgucgugcucugca

SEQ ID NO: 2392995 - RNA, 19 nt, Artificial Sequence
  Description of Artificial Sequence: Synthetic oligonucleotide
aggugucauuccgcggggu

SEQ ID NO: 2392996 - RNA, 19 nt, Artificial Sequence
  Description of Artificial Sequence: Synthetic oligonucleotide
gagcagaggucagggccga

SEQ ID NO: 2392997 - RNA, 19 nt, Artificial Sequence
  Description of Artificial Sequence: Synthetic oligonucleotide
gcuucacgcgguugcguuc

SEQ ID NO: 2392998 - RNA, 19 nt, Artificial Sequence
  Description of Artificial Sequence: Synthetic oligonucleotide
cagaucgccgccugcggcu

SEQ ID NO: 2392999 - RNA, 19 nt, Artificial Sequence
  Description of Artificial Sequence: Synthetic oligonucleotide
  modified_base (6)..(6): a, c, u, g, unknown or other
ggggunaggggcagagaca

SEQ ID NO: 2393000 - RNA, 19 nt, Artificial Sequence
  Description of Artificial Sequence: Synthetic oligonucleotide
cgcgucgugcucugcaagc

SEQ ID NO: 2393001 - RNA, 19 nt, Artificial Sequence
  Description of Artificial Sequence: Synthetic oligonucleotide
gccuggaagcccaaguuua

SEQ ID NO: 2393002 - RNA, 19 nt, Artificial Sequence
  Description of Artificial Sequence: Synthetic oligonucleotide
ccagcuucacgcgguugcg

SEQ ID NO: 2393003 - RNA, 19 nt, Artificial Sequence
  Description of Artificial Sequence: Synthetic oligonucleotide
gcguucgcgcucguugcgg

SEQ ID NO: 2393004 - RNA, 19 nt, Artificial Sequence
  Description of Artificial Sequence: Synthetic oligonucleotide
auucuaccgcggagcgcag

SEQ ID NO: 2393005 - RNA, 19 nt, Artificial Sequence
  Description of Artificial Sequence: Synthetic oligonucleotide
ccgugcggcacaugcugcc

SEQ ID NO: 2393006 - RNA, 19 nt, Artificial Sequence
  Description of Artificial Sequence: Synthetic oligonucleotide
gucauuccgcgggguggag

SEQ ID NO: 2393007 - RNA, 19 nt, Artificial Sequence
  Description of Artificial Sequence: Synthetic oligonucleotide
ucggggcgagcgagccgcc

SEQ ID NO: 2393008 - RNA, 19 nt, Artificial Sequence
  Description of Artificial Sequence: Synthetic oligonucleotide
ccggucuccaggcaaggca

SEQ ID NO: 2393009 - RNA, 19 nt, Artificial Sequence
  Description of Artificial Sequence: Synthetic oligonucleotide
ccuuacucagcuucuugcu

SEQ ID NO: 2393010 - RNA, 19 nt, Artificial Sequence
  Description of Artificial Sequence: Synthetic oligonucleotide
cgguugugccagaucgccg

SEQ ID NO: 2393011 - RNA, 19 nt, Artificial Sequence
  Description of Artificial Sequence: Synthetic oligonucleotide
gggucuccgccgagcagcg

SEQ ID NO: 2393012 - RNA, 19 nt, Artificial Sequence
  Description of Artificial Sequence: Synthetic oligonucleotide
gugcuccaggccuaaggau

SEQ ID NO: 2393013 - RNA, 19 nt, Artificial Sequence
  Description of Artificial Sequence: Synthetic oligonucleotide
ggaugcgggucuccgccga

SEQ ID NO: 2393014 - RNA, 19 nt, Artificial Sequence
  Description of Artificial Sequence: Synthetic oligonucleotide
cugcagcgcacgaauguau

SEQ ID NO: 2393015 - RNA, 19 nt, Artificial Sequence
  Description of Artificial Sequence: Synthetic oligonucleotide
cgaacggucucaccuccac

SEQ ID NO: 2393016 - RNA, 19 nt, Artificial Sequence
  Description of Artificial Sequence: Synthetic oligonucleotide
gcgcacgaauguauucuac

SEQ ID NO: 2393017 - RNA, 19 nt, Artificial Sequence
  Description of Artificial Sequence: Synthetic oligonucleotide
ggccugacugguccaaacu

SEQ ID NO: 2393018 - RNA, 19 nt, Artificial Sequence
  Description of Artificial Sequence: Synthetic oligonucleotide
ccgcauccagcccuccggc

SEQ ID NO: 2393019 - RNA, 19 nt, Artificial Sequence
  Description of Artificial Sequence: Synthetic oligonucleotide
agcgcaggucccagcgacu

SEQ ID NO: 2393020 - RNA, 19 nt, Artificial Sequence
  Description of Artificial Sequence: Synthetic oligonucleotide
cgcagcgucuccaccuuac

SEQ ID NO: 2393021 - RNA, 19 nt, Artificial Sequence
  Description of Artificial Sequence: Synthetic oligonucleotide
cgucgugcucugcaagcag

SEQ ID NO: 2393022 - RNA, 19 nt, Artificial Sequence
  Description of Artificial Sequence: Synthetic oligonucleotide
ggcgggcaugagucggggc

SEQ ID NO: 2393023 - RNA, 19 nt, Artificial Sequence
  Description of Artificial Sequence: Synthetic oligonucleotide
ggccgaguauccgauguua

SEQ ID NO: 2393024 - RNA, 19 nt, Artificial Sequence
  Description of Artificial Sequence: Synthetic oligonucleotide
cguucgcgcucguugcggc

SEQ ID NO: 2393025 - RNA, 19 nt, Artificial Sequence
  Description of Artificial Sequence: Synthetic oligonucleotide
gccugacugguccaaacuu

SEQ ID NO: 2393026 - RNA, 19 nt, Artificial Sequence
  Description of Artificial Sequence: Synthetic oligonucleotide
cgugccacggcagccgagc

SEQ ID NO: 2393027 - RNA, 19 nt, Artificial Sequence
  Description of Artificial Sequence: Synthetic oligonucleotide
cgccgugcggcacaugcug

SEQ ID NO: 2393028 - RNA, 19 nt, Artificial Sequence
  Description of Artificial Sequence: Synthetic oligonucleotide
ccgggugcggugggaagcg

SEQ ID NO: 2393029 - RNA, 19 nt, Artificial Sequence
  Description of Artificial Sequence: Synthetic oligonucleotide
ccccgaggaaccgggugcg

SEQ ID NO: 2393030 - RNA, 19 nt, Artificial Sequence
  Description of Artificial Sequence: Synthetic oligonucleotide
caagcccgagugccacaca

SEQ ID NO: 2393031 - RNA, 19 nt, Artificial Sequence
  Description of Artificial Sequence: Synthetic oligonucleotide
cgagugccacacagacugg

SEQ ID NO: 2393032 - RNA, 19 nt, Artificial Sequence
  Description of Artificial Sequence: Synthetic oligonucleotide
gcugcagcgcacgaaugua

SEQ ID NO: 2393033 - RNA, 19 nt, Artificial Sequence
  Description of Artificial Sequence: Synthetic oligonucleotide
gggcacgugucgcugggcu

SEQ ID NO: 2393034 - RNA, 19 nt, Artificial Sequence
  Description of Artificial Sequence: Synthetic oligonucleotide
agccgcugcagcgcacgaa

SEQ ID NO: 2393035 - RNA, 19 nt, Artificial Sequence
  Description of Artificial Sequence: Synthetic oligonucleotide
gccgugcggcacaugcugc

SEQ ID NO: 2393036 - RNA, 19 nt, Artificial Sequence
  Description of Artificial Sequence: Synthetic oligonucleotide
uccagcccuccggcgccug

SEQ ID NO: 2393037 - RNA, 19 nt, Artificial Sequence
  Description of Artificial Sequence: Synthetic oligonucleotide
agccucgguugugccagau

SEQ ID NO: 2393038 - RNA, 19 nt, Artificial Sequence
  Description of Artificial Sequence: Synthetic oligonucleotide
ccggggaugcgggucuccg

SEQ ID NO: 2393039 - RNA, 19 nt, Artificial Sequence
  Description of Artificial Sequence: Synthetic oligonucleotide
ccugacugguccaaacuuu

SEQ ID NO: 2393040 - RNA, 19 nt, Artificial Sequence
  Description of Artificial Sequence: Synthetic oligonucleotide
ggcaagcgcggcgcgcacc

SEQ ID NO: 2393041 - RNA, 19 nt, Artificial Sequence
  Description of Artificial Sequence: Synthetic oligonucleotide
gccucgguugugccagauc

SEQ ID NO: 2393042 - RNA, 19 nt, Artificial Sequence
  Description of Artificial Sequence: Synthetic oligonucleotide
gcgucgugcucugcaagca

SEQ ID NO: 2393043 - RNA, 19 nt, Artificial Sequence
  Description of Artificial Sequence: Synthetic oligonucleotide
uuccggggaugcgggucuc

SEQ ID NO: 2393044 - RNA, 19 nt, Artificial Sequence
  Description of Artificial Sequence: Synthetic oligonucleotide
cagcgccuggaagcccaag

SEQ ID NO: 2393045 - RNA, 19 nt, Artificial Sequence
  Description of Artificial Sequence: Synthetic oligonucleotide
agcccuccggcgccugcua

SEQ ID NO: 2393046 - RNA, 19 nt, Artificial Sequence
  Description of Artificial Sequence: Synthetic oligonucleotide
cuccaccggucuccaggca

SEQ ID NO: 2393047 - RNA, 19 nt, Artificial Sequence
  Description of Artificial Sequence: Synthetic oligonucleotide
cgugcggcacaugcugccg

SEQ ID NO: 2393048 - RNA, 19 nt, Artificial Sequence
  Description of Artificial Sequence: Synthetic oligonucleotide
gccgcugcagcgcacgaau

SEQ ID NO: 2393049 - RNA, 19 nt, Artificial Sequence
  Description of Artificial Sequence: Synthetic oligonucleotide
gcagcgcaggucccagcga

SEQ ID NO: 2393050 - RNA, 19 nt, Artificial Sequence
  Description of Artificial Sequence: Synthetic oligonucleotide
caagcgcggcgcgcaccgc

SEQ ID NO: 2393051 - RNA, 19 nt, Artificial Sequence
  Description of Artificial Sequence: Synthetic oligonucleotide
ggcgcgcaccgcgucgugc

SEQ ID NO: 2393052 - RNA, 19 nt, Artificial Sequence
  Description of Artificial Sequence: Synthetic oligonucleotide
ggcgugccacggcagccga

SEQ ID NO: 2393053 - RNA, 19 nt, Artificial Sequence
  Description of Artificial Sequence: Synthetic oligonucleotide
gcggcgugccacggcagcc

SEQ ID NO: 2393054 - RNA, 19 nt, Artificial Sequence
  Description of Artificial Sequence: Synthetic oligonucleotide
ggaaccgggugcgguggga

SEQ ID NO: 2393055 - RNA, 19 nt, Artificial Sequence
  Description of Artificial Sequence: Synthetic oligonucleotide
gggcagagacaaucuuuau

SEQ ID NO: 2393056 - RNA, 19 nt, Artificial Sequence
  Description of Artificial Sequence: Synthetic oligonucleotide
cugcggcugcagcgcagca

SEQ ID NO: 2393057 - RNA, 19 nt, Artificial Sequence
  Description of Artificial Sequence: Synthetic oligonucleotide
ccgccugcggcugcagcgc

SEQ ID NO: 2393058 - RNA, 19 nt, Artificial Sequence
  Description of Artificial Sequence: Synthetic oligonucleotide
cgcagcgccuggaagccca

SEQ ID NO: 2393059 - RNA, 19 nt, Artificial Sequence
  Description of Artificial Sequence: Synthetic oligonucleotide
acgugucgcugggcuucug

SEQ ID NO: 2393060 - RNA, 19 nt, Artificial Sequence
  Description of Artificial Sequence: Synthetic oligonucleotide
caggccugacugguccaaa

SEQ ID NO: 2393061 - RNA, 19 nt, Artificial Sequence
  Description of Artificial Sequence: Synthetic oligonucleotide
gggugcggugggaagcgaa

SEQ ID NO: 2393062 - RNA, 19 nt, Artificial Sequence
  Description of Artificial Sequence: Synthetic oligonucleotide
cggggaugcgggucuccgc

SEQ ID NO: 2393063 - RNA, 19 nt, Artificial Sequence
  Description of Artificial Sequence: Synthetic oligonucleotide
gcgcucguugcggcgugcc

SEQ ID NO: 2393064 - RNA, 19 nt, Artificial Sequence
  Description of Artificial Sequence: Synthetic oligonucleotide
cguugcggcgugccacggc

SEQ ID NO: 2393065 - RNA, 19 nt, Artificial Sequence
  Description of Artificial Sequence: Synthetic oligonucleotide
cgcaggucccagcgacucc

SEQ ID NO: 2393066 - RNA, 19 nt, Artificial Sequence
  Description of Artificial Sequence: Synthetic oligonucleotide
cgagcagcgcaggucccag

SEQ ID NO: 2393067 - RNA, 19 nt, Artificial Sequence
  Description of Artificial Sequence: Synthetic oligonucleotide
cuggcgccgccgugcggca

SEQ ID NO: 2393068 - RNA, 19 nt, Artificial Sequence
  Description of Artificial Sequence: Synthetic oligonucleotide
ggggcacgugucgcugggc

SEQ ID NO: 2393069 - RNA, 19 nt, Artificial Sequence
  Description of Artificial Sequence: Synthetic oligonucleotide
gcccuccggcgccugcuac

SEQ ID NO: 2393070 - RNA, 19 nt, Artificial Sequence
  Description of Artificial Sequence: Synthetic oligonucleotide
cgcgguugcguucgcgcuc

SEQ ID NO: 2393071 - RNA, 19 nt, Artificial Sequence
  Description of Artificial Sequence: Synthetic oligonucleotide
ccacacagacugggagaug

SEQ ID NO: 2393072 - RNA, 19 nt, Artificial Sequence
  Description of Artificial Sequence: Synthetic oligonucleotide
gcggugggaagcgaacggu

SEQ ID NO: 2393073 - RNA, 19 nt, Artificial Sequence
  Description of Artificial Sequence: Synthetic oligonucleotide
cccgaggaaccgggugcgg

SEQ ID NO: 2393074 - RNA, 19 nt, Artificial Sequence
  Description of Artificial Sequence: Synthetic oligonucleotide
cagccucgguugugccaga

SEQ ID NO: 2393075 - RNA, 19 nt, Artificial Sequence
  Description of Artificial Sequence: Synthetic oligonucleotide
ccagcccuccggcgccugc

SEQ ID NO: 2393076 - RNA, 19 nt, Artificial Sequence
  Description of Artificial Sequence: Synthetic oligonucleotide
cagcuucacgcgguugcgu

SEQ ID NO: 2393077 - RNA, 19 nt, Artificial Sequence
  Description of Artificial Sequence: Synthetic oligonucleotide
gcgaacggucucaccucca

SEQ ID NO: 2393078 - RNA, 19 nt, Artificial Sequence
  Description of Artificial Sequence: Synthetic oligonucleotide
ggggcgagcgagccgccgu

SEQ ID NO: 2393079 - RNA, 19 nt, Artificial Sequence
  Description of Artificial Sequence: Synthetic oligonucleotide
cggcgugccacggcagccg

SEQ ID NO: 2393080 - RNA, 19 nt, Artificial Sequence
  Description of Artificial Sequence: Synthetic oligonucleotide
cgccguccaucaagcuccg

SEQ ID NO: 2393081 - RNA, 19 nt, Artificial Sequence
  Description of Artificial Sequence: Synthetic oligonucleotide
gccugcggcugcagcgcag

SEQ ID NO: 2393082 - RNA, 19 nt, Artificial Sequence
  Description of Artificial Sequence: Synthetic oligonucleotide
caguuccggggaugcgggu

SEQ ID NO: 2393083 - RNA, 19 nt, Artificial Sequence
  Description of Artificial Sequence: Synthetic oligonucleotide
ggccagguugaaaguuaua

SEQ ID NO: 2393084 - RNA, 19 nt, Artificial Sequence
  Description of Artificial Sequence: Synthetic oligonucleotide
gccaggcaucuugccucag

SEQ ID NO: 2393085 - RNA, 19 nt, Artificial Sequence
  Description of Artificial Sequence: Synthetic oligonucleotide
gcgcgcaccgcgucgugcu

SEQ ID NO: 2393086 - RNA, 19 nt, Artificial Sequence
  Description of Artificial Sequence: Synthetic oligonucleotide
ccgccgagcagcgcagguc

SEQ ID NO: 2393087 - RNA, 19 nt, Artificial Sequence
  Description of Artificial Sequence: Synthetic oligonucleotide
ccaggccuaaggauccuuu

SEQ ID NO: 2393088 - RNA, 19 nt, Artificial Sequence
  Description of Artificial Sequence: Synthetic oligonucleotide
ggcacgugucgcugggcuu

SEQ ID NO: 2393089 - RNA, 19 nt, Artificial Sequence
  Description of Artificial Sequence: Synthetic oligonucleotide
cgcaccgcgucgugcucug

SEQ ID NO: 2393090 - RNA, 19 nt, Artificial Sequence
  Description of Artificial Sequence: Synthetic oligonucleotide
cccggcaagcgcggcgcgc

SEQ ID NO: 2393091 - RNA, 19 nt, Artificial Sequence
  Description of Artificial Sequence: Synthetic oligonucleotide
gcgugccacggcagccgag

SEQ ID NO: 2393092 - RNA, 19 nt, Artificial Sequence
  Description of Artificial Sequence: Synthetic oligonucleotide
  modified_base (4)..(4): a, c, u, g, unknown or other
ggunaggggcagagacaau

SEQ ID NO: 2393093 - RNA, 19 nt, Artificial Sequence
  Description of Artificial Sequence: Synthetic oligonucleotide
cgcggagcgcagcgucucc

SEQ ID NO: 2393094 - RNA, 19 nt, Artificial Sequence
  Description of Artificial Sequence: Synthetic oligonucleotide
ccccggcaagcgcggcgcg

SEQ ID NO: 2393095 - RNA, 19 nt, Artificial Sequence
  Description of Artificial Sequence: Synthetic oligonucleotide
ccggcaagcgcggcgcgca

SEQ ID NO: 2393096 - RNA, 19 nt, Artificial Sequence
  Description of Artificial Sequence: Synthetic oligonucleotide
cuaccgcggagcgcagcgu

SEQ ID NO: 2393097 - RNA, 19 nt, Artificial Sequence
  Description of Artificial Sequence: Synthetic oligonucleotide
gggccgaguauccgauguu

SEQ ID NO: 2393098 - RNA, 19 nt, Artificial Sequence
  Description of Artificial Sequence: Synthetic oligonucleotide
ccacggcagccgagccgcc

SEQ ID NO: 2393099 - RNA, 19 nt, Artificial Sequence
  Description of Artificial Sequence: Synthetic oligonucleotide
cgcgggguggaggcugagc

SEQ ID NO: 2393100 - RNA, 19 nt, Artificial Sequence
  Description of Artificial Sequence: Synthetic oligonucleotide
ccgagcagcgcagguccca

SEQ ID NO: 2393101 - RNA, 19 nt, Artificial Sequence
  Description of Artificial Sequence: Synthetic oligonucleotide
gcgccugcuacgaguuucu

SEQ ID NO: 2393102 - RNA, 19 nt, Artificial Sequence
  Description of Artificial Sequence: Synthetic oligonucleotide
cuccaggccuaaggauccu

SEQ ID NO: 2393103 - RNA, 19 nt, Artificial Sequence
  Description of Artificial Sequence: Synthetic oligonucleotide
ccgcggagcgcagcgucuc

SEQ ID NO: 2393104 - RNA, 19 nt, Artificial Sequence
  Description of Artificial Sequence: Synthetic oligonucleotide
gccguccaucaagcuccgc

SEQ ID NO: 2393105 - RNA, 19 nt, Artificial Sequence
  Description of Artificial Sequence: Synthetic oligonucleotide
gcgcagcgucuccaccuua

SEQ ID NO: 2393106 - RNA, 19 nt, Artificial Sequence
  Description of Artificial Sequence: Synthetic oligonucleotide
gcaccgcgucgugcucugc

SEQ ID NO: 2393107 - RNA, 19 nt, Artificial Sequence
  Description of Artificial Sequence: Synthetic oligonucleotide
gugccccgaggaaccgggu

SEQ ID NO: 2393108 - RNA, 19 nt, Artificial Sequence
  Description of Artificial Sequence: Synthetic oligonucleotide
gcgcaccgcgucgugcucu

SEQ ID NO: 2393109 - RNA, 19 nt, Artificial Sequence
  Description of Artificial Sequence: Synthetic oligonucleotide
cggggcgagcgagccgccg

SEQ ID NO: 2393110 - RNA, 19 nt, Artificial Sequence
  Description of Artificial Sequence: Synthetic oligonucleotide
gguugcguucgcgcucguu

SEQ ID NO: 2393111 - RNA, 19 nt, Artificial Sequence
  Description of Artificial Sequence: Synthetic oligonucleotide
cgcucguugcggcgugcca

SEQ ID NO: 2393112 - RNA, 19 nt, Artificial Sequence
  Description of Artificial Sequence: Synthetic oligonucleotide
ccggcgccugcuacgaguu

SEQ ID NO: 2393113 - RNA, 19 nt, Artificial Sequence
  Description of Artificial Sequence: Synthetic oligonucleotide
cggucucaccuccaccggu

SEQ ID NO: 2393114 - RNA, 19 nt, Artificial Sequence
  Description of Artificial Sequence: Synthetic oligonucleotide
cgcgcaccgcgucgugcuc

SEQ ID NO: 2393115 - RNA, 19 nt, Artificial Sequence
  Description of Artificial Sequence: Synthetic oligonucleotide
cgcgcucguugcggcgugc

SEQ ID NO: 2393116 - RNA, 19 nt, Artificial Sequence
  Description of Artificial Sequence: Synthetic oligonucleotide
ccgccgugcggcacaugcu

SEQ ID NO: 2393117 - RNA, 19 nt, Artificial Sequence
  Description of Artificial Sequence: Synthetic oligonucleotide
ccaccuuacucagcuucuu

SEQ ID NO: 2393118 - RNA, 19 nt, Artificial Sequence
  Description of Artificial Sequence: Synthetic oligonucleotide
gcgcagcaguuccggggau

SEQ ID NO: 2393119 - RNA, 19 nt, Artificial Sequence
  Description of Artificial Sequence: Synthetic oligonucleotide
cgccugcggcugcagcgca

SEQ ID NO: 2393120 - RNA, 19 nt, Artificial Sequence
  Description of Artificial Sequence: Synthetic oligonucleotide
cgagcgagccgccguccau

SEQ ID NO: 2393121 - RNA, 19 nt, Artificial Sequence
  Description of Artificial Sequence: Synthetic oligonucleotide
cggcgccugcuacgaguuu

SEQ ID NO: 2393122 - RNA, 19 nt, Artificial Sequence
  Description of Artificial Sequence: Synthetic oligonucleotide
cgguugcguucgcgcucgu

SEQ ID NO: 2393123 - RNA, 19 nt, Artificial Sequence
  Description of Artificial Sequence: Synthetic oligonucleotide
ucauguauuaaucuaaugg

SEQ ID NO: 2393124 - RNA, 19 nt, Artificial Sequence
  Description of Artificial Sequence: Synthetic oligonucleotide
auuaccauuauuuucaagg

SEQ ID NO: 2393125 - RNA, 19 nt, Artificial Sequence
  Description of Artificial Sequence: Synthetic oligonucleotide
aaagaauuguauuucacag

SEQ ID NO: 2393126 - RNA, 19 nt, Artificial Sequence
  Description of Artificial Sequence: Synthetic oligonucleotide
ucaauuaagacaaauuuca

SEQ ID NO: 2393127 - RNA, 19 nt, Artificial Sequence
  Description of Artificial Sequence: Synthetic oligonucleotide
uauugaguaccuauuaugg

SEQ ID NO: 2393128 - RNA, 19 nt, Artificial Sequence
  Description of Artificial Sequence: Synthetic oligonucleotide
aggaucaaaagcuaugugc

SEQ ID NO: 2393129 - RNA, 19 nt, Artificial Sequence
  Description of Artificial Sequence: Synthetic oligonucleotide
aaaucuuucaaaauaaaug

SEQ ID NO: 2393130 - RNA, 19 nt, Artificial Sequence
  Description of Artificial Sequence: Synthetic oligonucleotide
auuaagacaaauuucauaa

SEQ ID NO: 2393131 - RNA, 19 nt, Artificial Sequence
  Description of Artificial Sequence: Synthetic oligonucleotide
aacacuagaaaccauggca

SEQ ID NO: 2393132 - RNA, 19 nt, Artificial Sequence
  Description of Artificial Sequence: Synthetic oligonucleotide
accaagaaucuacagaacc

SEQ ID NO: 2393133 - RNA, 19 nt, Artificial Sequence
  Description of Artificial Sequence: Synthetic oligonucleotide
aaaagaauuguauuucaca

SEQ ID NO: 2393134 - RNA, 19 nt, Artificial Sequence
  Description of Artificial Sequence: Synthetic oligonucleotide
caaaguaucccuuagcacc

SEQ ID NO: 2393135 - RNA, 19 nt, Artificial Sequence
  Description of Artificial Sequence: Synthetic oligonucleotide
aauuguauuucacagguaa

SEQ ID NO: 2393136 - RNA, 19 nt, Artificial Sequence
  Description of Artificial Sequence: Synthetic oligonucleotide
aaagcuaugugcucaggac

SEQ ID NO: 2393137 - RNA, 19 nt, Artificial Sequence
  Description of Artificial Sequence: Synthetic oligonucleotide
uuuucuuuuagcaaauacu

SEQ ID NO: 2393138 - RNA, 19 nt, Artificial Sequence
  Description of Artificial Sequence: Synthetic oligonucleotide
ugugcuauuuaucugacac

SEQ ID NO: 2393139 - RNA, 19 nt, Artificial Sequence
  Description of Artificial Sequence: Synthetic oligonucleotide
uacuucaucaaaaugacaa

SEQ ID NO: 2393140 - RNA, 19 nt, Artificial Sequence
  Description of Artificial Sequence: Synthetic oligonucleotide
auuaaucuaauggagugcc

SEQ ID NO: 2393141 - RNA, 19 nt, Artificial Sequence
  Description of Artificial Sequence: Synthetic oligonucleotide
uuccaaguaucaauuaucg

SEQ ID NO: 2393142 - RNA, 19 nt, Artificial Sequence
  Description of Artificial Sequence: Synthetic oligonucleotide
uuucuuuuagcaaauacuc

SEQ ID NO: 2393143 - RNA, 19 nt, Artificial Sequence
  Description of Artificial Sequence: Synthetic oligonucleotide
aagaauuguauuucacagg

SEQ ID NO: 2393144 - RNA, 19 nt, Artificial Sequence
  Description of Artificial Sequence: Synthetic oligonucleotide
uuaucguuauuucuuacag

SEQ ID NO: 2393145 - RNA, 19 nt, Artificial Sequence
  Description of Artificial Sequence: Synthetic oligonucleotide
uuagcaaauacucaaaauu

SEQ ID NO: 2393146 - RNA, 19 nt, Artificial Sequence
  Description of Artificial Sequence: Synthetic oligonucleotide
uaaaacacuagaaaccaug

SEQ ID NO: 2393147 - RNA, 19 nt, Artificial Sequence
  Description of Artificial Sequence: Synthetic oligonucleotide
aagacaaauuucauaaaac

SEQ ID NO: 2393148 - RNA, 19 nt, Artificial Sequence
  Description of Artificial Sequence: Synthetic oligonucleotide
uuuugacuaauuuaaagaa

SEQ ID NO: 2393149 - RNA, 19 nt, Artificial Sequence
  Description of Artificial Sequence: Synthetic oligonucleotide
uuaucugacacuuaacacu

SEQ ID NO: 2393150 - RNA, 19 nt, Artificial Sequence
  Description of Artificial Sequence: Synthetic oligonucleotide
uuuucaaggagacaggauc

SEQ ID NO: 2393151 - RNA, 19 nt, Artificial Sequence
  Description of Artificial Sequence: Synthetic oligonucleotide
agaauuguauuucacaggu

SEQ ID NO: 2393152 - RNA, 19 nt, Artificial Sequence
  Description of Artificial Sequence: Synthetic oligonucleotide
uguauuaaucuaauggagu

SEQ ID NO: 2393153 - RNA, 19 nt, Artificial Sequence
  Description of Artificial Sequence: Synthetic oligonucleotide
auuuaucugacacuuaaca

SEQ ID NO: 2393154 - RNA, 19 nt, Artificial Sequence
  Description of Artificial Sequence: Synthetic oligonucleotide
aggaacuaacuguacaacc

SEQ ID NO: 2393155 - RNA, 19 nt, Artificial Sequence
  Description of Artificial Sequence: Synthetic oligonucleotide
aauuaucguuauuucuuac

SEQ ID NO: 2393156 - RNA, 19 nt, Artificial Sequence
  Description of Artificial Sequence: Synthetic oligonucleotide
aaaugugcaugucuaaaug

SEQ ID NO: 2393157 - RNA, 19 nt, Artificial Sequence
  Description of Artificial Sequence: Synthetic oligonucleotide
uuuguagagcaaaugaacu

SEQ ID NO: 2393158 - RNA, 19 nt, Artificial Sequence
  Description of Artificial Sequence: Synthetic oligonucleotide
uucuaagugacaacuagug

SEQ ID NO: 2393159 - RNA, 19 nt, Artificial Sequence
  Description of Artificial Sequence: Synthetic oligonucleotide
uucaauuaagacaaauuuc

SEQ ID NO: 2393160 - RNA, 19 nt, Artificial Sequence
  Description of Artificial Sequence: Synthetic oligonucleotide
aucguuauuucuuacaggu

SEQ ID NO: 2393161 - RNA, 19 nt, Artificial Sequence
  Description of Artificial Sequence: Synthetic oligonucleotide
uuaaagaacuauucugugc

SEQ ID NO: 2393162 - RNA, 19 nt, Artificial Sequence
  Description of Artificial Sequence: Synthetic oligonucleotide
uuguguagcacaugcaagg

SEQ ID NO: 2393163 - RNA, 19 nt, Artificial Sequence
  Description of Artificial Sequence: Synthetic oligonucleotide
uugaguaccuauuaugggc

SEQ ID NO: 2393164 - RNA, 19 nt, Artificial Sequence
  Description of Artificial Sequence: Synthetic oligonucleotide
aauaacuguuuauugagua

SEQ ID NO: 2393165 - RNA, 19 nt, Artificial Sequence
  Description of Artificial Sequence: Synthetic oligonucleotide
aauuaagacaaauuucaua

SEQ ID NO: 2393166 - RNA, 19 nt, Artificial Sequence
  Description of Artificial Sequence: Synthetic oligonucleotide
auggcaacagacuaugagg

SEQ ID NO: 2393167 - RNA, 19 nt, Artificial Sequence
  Description of Artificial Sequence: Synthetic oligonucleotide
uguacaacccuacagugac

SEQ ID NO: 2393168 - RNA, 19 nt, Artificial Sequence
  Description of Artificial Sequence: Synthetic oligonucleotide
ucuuuuagcaaauacucaa

SEQ ID NO: 2393169 - RNA, 19 nt, Artificial Sequence
  Description of Artificial Sequence: Synthetic oligonucleotide
ucaaaauuuccaaguauca

SEQ ID NO: 2393170 - RNA, 19 nt, Artificial Sequence
  Description of Artificial Sequence: Synthetic oligonucleotide
aacuguacaacccuacagu

SEQ ID NO: 2393171 - RNA, 19 nt, Artificial Sequence
  Description of Artificial Sequence: Synthetic oligonucleotide
aaugugcaugucuaaaugu

SEQ ID NO: 2393172 - RNA, 19 nt, Artificial Sequence
  Description of Artificial Sequence: Synthetic oligonucleotide
guauuaaucuaauggagug

SEQ ID NO: 2393173 - RNA, 19 nt, Artificial Sequence
  Description of Artificial Sequence: Synthetic oligonucleotide
uuugacuaauuuaaagaac

SEQ ID NO: 2393174 - RNA, 19 nt, Artificial Sequence
  Description of Artificial Sequence: Synthetic oligonucleotide
ucaauuaucguuauuucuu

SEQ ID NO: 2393175 - RNA, 19 nt, Artificial Sequence
  Description of Artificial Sequence: Synthetic oligonucleotide
acuuacuucaucaaaauga

SEQ ID NO: 2393176 - RNA, 19 nt, Artificial Sequence
  Description of Artificial Sequence: Synthetic oligonucleotide
auuuguagagcaaaugaac

SEQ ID NO: 2393177 - RNA, 19 nt, Artificial Sequence
  Description of Artificial Sequence: Synthetic oligonucleotide
uaugaucccaguaccaacc

SEQ ID NO: 2393178 - RNA, 19 nt, Artificial Sequence
  Description of Artificial Sequence: Synthetic oligonucleotide
uuauuuucaaggagacagg

SEQ ID NO: 2393179 - RNA, 19 nt, Artificial Sequence
  Description of Artificial Sequence: Synthetic oligonucleotide
uuuaucugacacuuaacac

SEQ ID NO: 2393180 - RNA, 19 nt, Artificial Sequence
  Description of Artificial Sequence: Synthetic oligonucleotide
cuaagugacaacuagugca

SEQ ID NO: 2393181 - RNA, 19 nt, Artificial Sequence
  Description of Artificial Sequence: Synthetic oligonucleotide
acaaauuucauaaaacacu

SEQ ID NO: 2393182 - RNA, 19 nt, Artificial Sequence
  Description of Artificial Sequence: Synthetic oligonucleotide
uauuuguagagcaaaugaa

SEQ ID NO: 2393183 - RNA, 19 nt, Artificial Sequence
  Description of Artificial Sequence: Synthetic oligonucleotide
uaacuguacaacccuacag

SEQ ID NO: 2393184 - RNA, 19 nt, Artificial Sequence
  Description of Artificial Sequence: Synthetic oligonucleotide
aaaagcuaugugcucagga

SEQ ID NO: 2393185 - RNA, 19 nt, Artificial Sequence
  Description of Artificial Sequence: Synthetic oligonucleotide
cuuacuucaucaaaaugac

SEQ ID NO: 2393186 - RNA, 19 nt, Artificial Sequence
  Description of Artificial Sequence: Synthetic oligonucleotide
aaccccauguuucuaagug

SEQ ID NO: 2393187 - RNA, 19 nt, Artificial Sequence
  Description of Artificial Sequence: Synthetic oligonucleotide
cucaaaauuuccaaguauc

SEQ ID NO: 2393188 - RNA, 19 nt, Artificial Sequence
  Description of Artificial Sequence: Synthetic oligonucleotide
auugaguaccuauuauggg

SEQ ID NO: 2393189 - RNA, 19 nt, Artificial Sequence
  Description of Artificial Sequence: Synthetic oligonucleotide
uuuucaauuaagacaaauu

SEQ ID NO: 2393190 - RNA, 19 nt, Artificial Sequence
  Description of Artificial Sequence: Synthetic oligonucleotide
guuucuaagugacaacuag

SEQ ID NO: 2393191 - RNA, 19 nt, Artificial Sequence
  Description of Artificial Sequence: Synthetic oligonucleotide
gacaaauuucauaaaacac

SEQ ID NO: 2393192 - RNA, 19 nt, Artificial Sequence
  Description of Artificial Sequence: Synthetic oligonucleotide
cauguauuaaucuaaugga

SEQ ID NO: 2393193 - RNA, 19 nt, Artificial Sequence
  Description of Artificial Sequence: Synthetic oligonucleotide
auacucaaaauuuccaagu

SEQ ID NO: 2393194 - RNA, 19 nt, Artificial Sequence
  Description of Artificial Sequence: Synthetic oligonucleotide
cauacaucauguauuaauc

SEQ ID NO: 2393195 - RNA, 19 nt, Artificial Sequence
  Description of Artificial Sequence: Synthetic oligonucleotide
ucuaagugacaacuagugc

SEQ ID NO: 2393196 - RNA, 19 nt, Artificial Sequence
  Description of Artificial Sequence: Synthetic oligonucleotide
uaagcuuuauuugaaauau

SEQ ID NO: 2393197 - RNA, 19 nt, Artificial Sequence
  Description of Artificial Sequence: Synthetic oligonucleotide
uuucaaggagacaggauca

SEQ ID NO: 2393198 - RNA, 19 nt, Artificial Sequence
  Description of Artificial Sequence: Synthetic oligonucleotide
cuuaacacuuacuucauca

SEQ ID NO: 2393199 - RNA, 19 nt, Artificial Sequence
  Description of Artificial Sequence: Synthetic oligonucleotide
uuuccaaguaucaauuauc

SEQ ID NO: 2393200 - RNA, 19 nt, Artificial Sequence
  Description of Artificial Sequence: Synthetic oligonucleotide
guauuuguagagcaaauga

SEQ ID NO: 2393201 - RNA, 19 nt, Artificial Sequence
  Description of Artificial Sequence: Synthetic oligonucleotide
ggaauaacuguuuauugag

SEQ ID NO: 2393202 - RNA, 19 nt, Artificial Sequence
  Description of Artificial Sequence: Synthetic oligonucleotide
ugaguaccuauuaugggca

SEQ ID NO: 2393203 - RNA, 19 nt, Artificial Sequence
  Description of Artificial Sequence: Synthetic oligonucleotide
uaucguuauuucuuacagg

SEQ ID NO: 2393204 - RNA, 19 nt, Artificial Sequence
  Description of Artificial Sequence: Synthetic oligonucleotide
aucaauuaucguuauuucu

SEQ ID NO: 2393205 - RNA, 19 nt, Artificial Sequence
  Description of Artificial Sequence: Synthetic oligonucleotide
ugacacuuaacacuuacuu

SEQ ID NO: 2393206 - RNA, 19 nt, Artificial Sequence
  Description of Artificial Sequence: Synthetic oligonucleotide
uaccauuauuuucaaggag

SEQ ID NO: 2393207 - RNA, 19 nt, Artificial Sequence
  Description of Artificial Sequence: Synthetic oligonucleotide
aaucuacagaaccccaugu

SEQ ID NO: 2393208 - RNA, 19 nt, Artificial Sequence
  Description of Artificial Sequence: Synthetic oligonucleotide
uuguagagcaaaugaacug

SEQ ID NO: 2393209 - RNA, 19 nt, Artificial Sequence
  Description of Artificial Sequence: Synthetic oligonucleotide
gugcaaauaacauccuagg

SEQ ID NO: 2393210 - RNA, 19 nt, Artificial Sequence
  Description of Artificial Sequence: Synthetic oligonucleotide
auuaucguuauuucuuaca

SEQ ID NO: 2393211 - RNA, 19 nt, Artificial Sequence
  Description of Artificial Sequence: Synthetic oligonucleotide
agugcaaauaacauccuag

SEQ ID NO: 2393212 - RNA, 19 nt, Artificial Sequence
  Description of Artificial Sequence: Synthetic oligonucleotide
ugcaaauaacauccuagga

SEQ ID NO: 2393213 - RNA, 19 nt, Artificial Sequence
  Description of Artificial Sequence: Synthetic oligonucleotide
acaacuagugcaaauaaca

SEQ ID NO: 2393214 - RNA, 19 nt, Artificial Sequence
  Description of Artificial Sequence: Synthetic oligonucleotide
uggcaacagacuaugagga

SEQ ID NO: 2393215 - RNA, 19 nt, Artificial Sequence
  Description of Artificial Sequence: Synthetic oligonucleotide
uuucaaaauaaaugauaac

SEQ ID NO: 2393216 - RNA, 19 nt, Artificial Sequence
  Description of Artificial Sequence: Synthetic oligonucleotide
uaaaugauaacugggguua

SEQ ID NO: 2393217 - RNA, 19 nt, Artificial Sequence
  Description of Artificial Sequence: Synthetic oligonucleotide
uguagagcaaaugaacugu

SEQ ID NO: 2393218 - RNA, 19 nt, Artificial Sequence
  Description of Artificial Sequence: Synthetic oligonucleotide
aagcuaugugcucaggaca

SEQ ID NO: 2393219 - RNA, 19 nt, Artificial Sequence
  Description of Artificial Sequence: Synthetic oligonucleotide
ugugcaugucuaaauguca

SEQ ID NO: 2393220 - RNA, 19 nt, Artificial Sequence
  Description of Artificial Sequence: Synthetic oligonucleotide
ccuauuaugggcaaggcac

SEQ ID NO: 2393221 - RNA, 19 nt, Artificial Sequence
  Description of Artificial Sequence: Synthetic oligonucleotide
uauuaaucuaauggagugc

SEQ ID NO: 2393222 - RNA, 19 nt, Artificial Sequence
  Description of Artificial Sequence: Synthetic oligonucleotide
aaaccauggcaacagacua

SEQ ID NO: 2393223 - RNA, 19 nt, Artificial Sequence
  Description of Artificial Sequence: Synthetic oligonucleotide
ucugacacuuaacacuuac

SEQ ID NO: 2393224 - RNA, 19 nt, Artificial Sequence
  Description of Artificial Sequence: Synthetic oligonucleotide
aaugacaaaguaucccuua

SEQ ID NO: 2393225 - RNA, 19 nt, Artificial Sequence
  Description of Artificial Sequence: Synthetic oligonucleotide
auaaaugauaacugggguu

SEQ ID NO: 2393226 - RNA, 19 nt, Artificial Sequence
  Description of Artificial Sequence: Synthetic oligonucleotide
acauccuaggaacuaacug

SEQ ID NO: 2393227 - RNA, 19 nt, Artificial Sequence
  Description of Artificial Sequence: Synthetic oligonucleotide
gauaacugggguuagacau

SEQ ID NO: 2393228 - RNA, 19 nt, Artificial Sequence
  Description of Artificial Sequence: Synthetic oligonucleotide
gagcaaaugaacuguuggc

SEQ ID NO: 2393229 - RNA, 19 nt, Artificial Sequence
  Description of Artificial Sequence: Synthetic oligonucleotide
auacaucauguauuaaucu

SEQ ID NO: 2393230 - RNA, 19 nt, Artificial Sequence
  Description of Artificial Sequence: Synthetic oligonucleotide
agugguaagccuuguguag

SEQ ID NO: 2393231 - RNA, 19 nt, Artificial Sequence
  Description of Artificial Sequence: Synthetic oligonucleotide
uaagugacaacuagugcaa

SEQ ID NO: 2393232 - RNA, 19 nt, Artificial Sequence
  Description of Artificial Sequence: Synthetic oligonucleotide
auaagcuuuauuugaaaua

SEQ ID NO: 2393233 - RNA, 19 nt, Artificial Sequence
  Description of Artificial Sequence: Synthetic oligonucleotide
acuguacaacccuacagug

SEQ ID NO: 2393234 - RNA, 19 nt, Artificial Sequence
  Description of Artificial Sequence: Synthetic oligonucleotide
aacacuuacuucaucaaaa

SEQ ID NO: 2393235 - RNA, 19 nt, Artificial Sequence
  Description of Artificial Sequence: Synthetic oligonucleotide
uggguaugaucccaguacc

SEQ ID NO: 2393236 - RNA, 19 nt, Artificial Sequence
  Description of Artificial Sequence: Synthetic oligonucleotide
ugcacaauuucuugauugc

SEQ ID NO: 2393237 - RNA, 19 nt, Artificial Sequence
  Description of Artificial Sequence: Synthetic oligonucleotide
acagugacuggacacagcu

SEQ ID NO: 2393238 - RNA, 19 nt, Artificial Sequence
  Description of Artificial Sequence: Synthetic oligonucleotide
agcaaauacucaaaauuuc

SEQ ID NO: 2393239 - RNA, 19 nt, Artificial Sequence
  Description of Artificial Sequence: Synthetic oligonucleotide
auguauuaaucuaauggag

SEQ ID NO: 2393240 - RNA, 19 nt, Artificial Sequence
  Description of Artificial Sequence: Synthetic oligonucleotide
uuggcauacaucauguauu

SEQ ID NO: 2393241 - RNA, 19 nt, Artificial Sequence
  Description of Artificial Sequence: Synthetic oligonucleotide
guaccaaccaaaacaaaag

SEQ ID NO: 2393242 - RNA, 19 nt, Artificial Sequence
  Description of Artificial Sequence: Synthetic oligonucleotide
acaaaagacaaaccaaauu

SEQ ID NO: 2393243 - RNA, 19 nt, Artificial Sequence
  Description of Artificial Sequence: Synthetic oligonucleotide
ugccuauaagcuuuauuug

SEQ ID NO: 2393244 - RNA, 19 nt, Artificial Sequence
  Description of Artificial Sequence: Synthetic oligonucleotide
cauggcaacagacuaugag

SEQ ID NO: 2393245 - RNA, 19 nt, Artificial Sequence
  Description of Artificial Sequence: Synthetic oligonucleotide
uguugaaaucacuuuacuu

SEQ ID NO: 2393246 - RNA, 19 nt, Artificial Sequence
  Description of Artificial Sequence: Synthetic oligonucleotide
uaucaauuaucguuauuuc

SEQ ID NO: 2393247 - RNA, 19 nt, Artificial Sequence
  Description of Artificial Sequence: Synthetic oligonucleotide
gugcacaauuucuugauug

SEQ ID NO: 2393248 - RNA, 19 nt, Artificial Sequence
  Description of Artificial Sequence: Synthetic oligonucleotide
cuuguguagcacaugcaag

SEQ ID NO: 2393249 - RNA, 19 nt, Artificial Sequence
  Description of Artificial Sequence: Synthetic oligonucleotide
gaaucuacagaaccccaug

SEQ ID NO: 2393250 - RNA, 19 nt, Artificial Sequence
  Description of Artificial Sequence: Synthetic oligonucleotide
agcaccaagaaucuacaga

SEQ ID NO: 2393251 - RNA, 19 nt, Artificial Sequence
  Description of Artificial Sequence: Synthetic oligonucleotide
uauuuucaaggagacagga

SEQ ID NO: 2393252 - RNA, 19 nt, Artificial Sequence
  Description of Artificial Sequence: Synthetic oligonucleotide
ucuacagaaccccauguuu

SEQ ID NO: 2393253 - RNA, 19 nt, Artificial Sequence
  Description of Artificial Sequence: Synthetic oligonucleotide
agugcacagguauuuguag

SEQ ID NO: 2393254 - RNA, 19 nt, Artificial Sequence
  Description of Artificial Sequence: Synthetic oligonucleotide
gacacuuaacacuuacuuc

SEQ ID NO: 2393255 - RNA, 19 nt, Artificial Sequence
  Description of Artificial Sequence: Synthetic oligonucleotide
ugacaaaguaucccuuagc

SEQ ID NO: 2393256 - RNA, 19 nt, Artificial Sequence
  Description of Artificial Sequence: Synthetic oligonucleotide
caagaaucuacagaacccc

SEQ ID NO: 2393257 - RNA, 19 nt, Artificial Sequence
  Description of Artificial Sequence: Synthetic oligonucleotide
ugacaacuagugcaaauaa

SEQ ID NO: 2393258 - RNA, 19 nt, Artificial Sequence
  Description of Artificial Sequence: Synthetic oligonucleotide
uuaugggcaaggcacugug

SEQ ID NO: 2393259 - RNA, 19 nt, Artificial Sequence
  Description of Artificial Sequence: Synthetic oligonucleotide
uugaaaucacuuuacuuuu

SEQ ID NO: 2393260 - RNA, 19 nt, Artificial Sequence
  Description of Artificial Sequence: Synthetic oligonucleotide
augacaaaguaucccuuag

SEQ ID NO: 2393261 - RNA, 19 nt, Artificial Sequence
  Description of Artificial Sequence: Synthetic oligonucleotide
ucaaaagcuaugugcucag

SEQ ID NO: 2393262 - RNA, 19 nt, Artificial Sequence
  Description of Artificial Sequence: Synthetic oligonucleotide
uuucuuacaggugaccaga

SEQ ID NO: 2393263 - RNA, 19 nt, Artificial Sequence
  Description of Artificial Sequence: Synthetic oligonucleotide
agaaaccauggcaacagac

SEQ ID NO: 2393264 - RNA, 19 nt, Artificial Sequence
  Description of Artificial Sequence: Synthetic oligonucleotide
ugggguuagacauguagcu

SEQ ID NO: 2393265 - RNA, 19 nt, Artificial Sequence
  Description of Artificial Sequence: Synthetic oligonucleotide
cuagaaaccauggcaacag

SEQ ID NO: 2393266 - RNA, 19 nt, Artificial Sequence
  Description of Artificial Sequence: Synthetic oligonucleotide
uguagcucagugguaagcc

SEQ ID NO: 2393267 - RNA, 19 nt, Artificial Sequence
  Description of Artificial Sequence: Synthetic oligonucleotide
uaacacuuacuucaucaaa

SEQ ID NO: 2393268 - RNA, 19 nt, Artificial Sequence
  Description of Artificial Sequence: Synthetic oligonucleotide
cagacuaugaggaauaacu

SEQ ID NO: 2393269 - RNA, 19 nt, Artificial Sequence
  Description of Artificial Sequence: Synthetic oligonucleotide
aauuuccaaguaucaauua

SEQ ID NO: 2393270 - RNA, 19 nt, Artificial Sequence
  Description of Artificial Sequence: Synthetic oligonucleotide
acuaauuuaaagaacuauu

SEQ ID NO: 2393271 - RNA, 19 nt, Artificial Sequence
  Description of Artificial Sequence: Synthetic oligonucleotide
uuaacacuuacuucaucaa

SEQ ID NO: 2393272 - RNA, 19 nt, Artificial Sequence
  Description of Artificial Sequence: Synthetic oligonucleotide
uuguugaaaucacuuuacu

SEQ ID NO: 2393273 - RNA, 19 nt, Artificial Sequence
  Description of Artificial Sequence: Synthetic oligonucleotide
cugggguuagacauguagc

SEQ ID NO: 2393274 - RNA, 19 nt, Artificial Sequence
  Description of Artificial Sequence: Synthetic oligonucleotide
augucuaaaugucaguuuu

SEQ ID NO: 2393275 - RNA, 19 nt, Artificial Sequence
  Description of Artificial Sequence: Synthetic oligonucleotide
aucauguauuaaucuaaug

SEQ ID NO: 2393276 - RNA, 19 nt, Artificial Sequence
  Description of Artificial Sequence: Synthetic oligonucleotide
aauaacauccuaggaacua

SEQ ID NO: 2393277 - RNA, 19 nt, Artificial Sequence
  Description of Artificial Sequence: Synthetic oligonucleotide
ugaggaauaacuguuuauu

SEQ ID NO: 2393278 - RNA, 19 nt, Artificial Sequence
  Description of Artificial Sequence: Synthetic oligonucleotide
cuggguaugaucccaguac

SEQ ID NO: 2393279 - RNA, 19 nt, Artificial Sequence
  Description of Artificial Sequence: Synthetic oligonucleotide
cuacagaaccccauguuuc

SEQ ID NO: 2393280 - RNA, 19 nt, Artificial Sequence
  Description of Artificial Sequence: Synthetic oligonucleotide
acucaaaauuuccaaguau

SEQ ID NO: 2393281 - RNA, 19 nt, Artificial Sequence
  Description of Artificial Sequence: Synthetic oligonucleotide
uuaagacaaauuucauaaa

SEQ ID NO: 2393282 - RNA, 19 nt, Artificial Sequence
  Description of Artificial Sequence: Synthetic oligonucleotide
uacucaaaauuuccaagua

SEQ ID NO: 2393283 - RNA, 19 nt, Artificial Sequence
  Description of Artificial Sequence: Synthetic oligonucleotide
uacaacccuacagugacug

SEQ ID NO: 2393284 - RNA, 19 nt, Artificial Sequence
  Description of Artificial Sequence: Synthetic oligonucleotide
guaccuauuaugggcaagg

SEQ ID NO: 2393285 - RNA, 19 nt, Artificial Sequence
  Description of Artificial Sequence: Synthetic oligonucleotide
cuuacaggugaccagagaa

SEQ ID NO: 2393286 - RNA, 19 nt, Artificial Sequence
  Description of Artificial Sequence: Synthetic oligonucleotide
uagagcaaaugaacuguug

SEQ ID NO: 2393287 - RNA, 19 nt, Artificial Sequence
  Description of Artificial Sequence: Synthetic oligonucleotide
ugauaacugggguuagaca

SEQ ID NO: 2393288 - RNA, 19 nt, Artificial Sequence
  Description of Artificial Sequence: Synthetic oligonucleotide
acuaacuguacaacccuac

SEQ ID NO: 2393289 - RNA, 19 nt, Artificial Sequence
  Description of Artificial Sequence: Synthetic oligonucleotide
aucaaaagcuaugugcuca

SEQ ID NO: 2393290 - RNA, 19 nt, Artificial Sequence
  Description of Artificial Sequence: Synthetic oligonucleotide
aaaguaucccuuagcacca

SEQ ID NO: 2393291 - RNA, 19 nt, Artificial Sequence
  Description of Artificial Sequence: Synthetic oligonucleotide
aguaccaaccaaaacaaaa

SEQ ID NO: 2393292 - RNA, 19 nt, Artificial Sequence
  Description of Artificial Sequence: Synthetic oligonucleotide
agcaaaugaacuguuggca

SEQ ID NO: 2393293 - RNA, 19 nt, Artificial Sequence
  Description of Artificial Sequence: Synthetic oligonucleotide
uaaucuaauggagugccaa

SEQ ID NO: 2393294 - RNA, 19 nt, Artificial Sequence
  Description of Artificial Sequence: Synthetic oligonucleotide
ugcuauuuaucugacacuu

SEQ ID NO: 2393295 - RNA, 19 nt, Artificial Sequence
  Description of Artificial Sequence: Synthetic oligonucleotide
acuuaacacuuacuucauc

SEQ ID NO: 2393296 - RNA, 19 nt, Artificial Sequence
  Description of Artificial Sequence: Synthetic oligonucleotide
aacuauucugugcuauuua

SEQ ID NO: 2393297 - RNA, 19 nt, Artificial Sequence
  Description of Artificial Sequence: Synthetic oligonucleotide
gcaaauaacauccuaggaa

SEQ ID NO: 2393298 - RNA, 19 nt, Artificial Sequence
  Description of Artificial Sequence: Synthetic oligonucleotide
uuacaggugaccagagaaa

SEQ ID NO: 2393299 - RNA, 19 nt, Artificial Sequence
  Description of Artificial Sequence: Synthetic oligonucleotide
agcuaugugcucaggacac

SEQ ID NO: 2393300 - RNA, 19 nt, Artificial Sequence
  Description of Artificial Sequence: Synthetic oligonucleotide
augugcaugucuaaauguc

SEQ ID NO: 2393301 - RNA, 19 nt, Artificial Sequence
  Description of Artificial Sequence: Synthetic oligonucleotide
aaauaacauccuaggaacu

SEQ ID NO: 2393302 - RNA, 19 nt, Artificial Sequence
  Description of Artificial Sequence: Synthetic oligonucleotide
uuaaucuaauggagugcca

SEQ ID NO: 2393303 - RNA, 19 nt, Artificial Sequence
  Description of Artificial Sequence: Synthetic oligonucleotide
acaauuucuugauugcauu

SEQ ID NO: 2393304 - RNA, 19 nt, Artificial Sequence
  Description of Artificial Sequence: Synthetic oligonucleotide
ugacuaauuuaaagaacua

SEQ ID NO: 2393305 - RNA, 19 nt, Artificial Sequence
  Description of Artificial Sequence: Synthetic oligonucleotide
uuauuucuuacaggugacc

SEQ ID NO: 2393306 - RNA, 19 nt, Artificial Sequence
  Description of Artificial Sequence: Synthetic oligonucleotide
ucguuauuucuuacaggug

SEQ ID NO: 2393307 - RNA, 19 nt, Artificial Sequence
  Description of Artificial Sequence: Synthetic oligonucleotide
aaaugauaacugggguuag

SEQ ID NO: 2393308 - RNA, 19 nt, Artificial Sequence
  Description of Artificial Sequence: Synthetic oligonucleotide
ucuaaaugucaguuuuaaa

SEQ ID NO: 2393309 - RNA, 19 nt, Artificial Sequence
  Description of Artificial Sequence: Synthetic oligonucleotide
auguagcucagugguaagc

SEQ ID NO: 2393310 - RNA, 19 nt, Artificial Sequence
  Description of Artificial Sequence: Synthetic oligonucleotide
uucuuacaggugaccagag

SEQ ID NO: 2393311 - RNA, 19 nt, Artificial Sequence
  Description of Artificial Sequence: Synthetic oligonucleotide
aacccuacagugacuggac

SEQ ID NO: 2393312 - RNA, 19 nt, Artificial Sequence
  Description of Artificial Sequence: Synthetic oligonucleotide
gcaaauacucaaaauuucc

SEQ ID NO: 2393313 - RNA, 19 nt, Artificial Sequence
  Description of Artificial Sequence: Synthetic oligonucleotide
auucugugcuauuuaucug

SEQ ID NO: 2393314 - RNA, 19 nt, Artificial Sequence
  Description of Artificial Sequence: Synthetic oligonucleotide
ggaacuaacuguacaaccc

SEQ ID NO: 2393315 - RNA, 19 nt, Artificial Sequence
  Description of Artificial Sequence: Synthetic oligonucleotide
aaguaucaauuaucguuau

SEQ ID NO: 2393316 - RNA, 19 nt, Artificial Sequence
  Description of Artificial Sequence: Synthetic oligonucleotide
acaugcaaggcucugggua

SEQ ID NO: 2393317 - RNA, 19 nt, Artificial Sequence
  Description of Artificial Sequence: Synthetic oligonucleotide
uaagccuuguguagcacau

SEQ ID NO: 2393318 - RNA, 19 nt, Artificial Sequence
  Description of Artificial Sequence: Synthetic oligonucleotide
ucugugcuauuuaucugac

SEQ ID NO: 2393319 - RNA, 19 nt, Artificial Sequence
  Description of Artificial Sequence: Synthetic oligonucleotide
acaggaucaaaagcuaugu

SEQ ID NO: 2393320 - RNA, 19 nt, Artificial Sequence
  Description of Artificial Sequence: Synthetic oligonucleotide
cuaggaacuaacuguacaa

SEQ ID NO: 2393321 - RNA, 19 nt, Artificial Sequence
  Description of Artificial Sequence: Synthetic oligonucleotide
agcuuuauuugaaauauuu

SEQ ID NO: 2393322 - RNA, 19 nt, Artificial Sequence
  Description of Artificial Sequence: Synthetic oligonucleotide
acagacuaugaggaauaac

SEQ ID NO: 2393323 - RNA, 19 nt, Artificial Sequence
  Description of Artificial Sequence: Synthetic oligonucleotide
accuauuaugggcaaggca

SEQ ID NO: 2393324 - RNA, 19 nt, Artificial Sequence
  Description of Artificial Sequence: Synthetic oligonucleotide
acuaugaggaauaacuguu

SEQ ID NO: 2393325 - RNA, 19 nt, Artificial Sequence
  Description of Artificial Sequence: Synthetic oligonucleotide
gacaacuagugcaaauaac

SEQ ID NO: 2393326 - RNA, 19 nt, Artificial Sequence
  Description of Artificial Sequence: Synthetic oligonucleotide
gaucaaaagcuaugugcuc

SEQ ID NO: 2393327 - RNA, 19 nt, Artificial Sequence
  Description of Artificial Sequence: Synthetic oligonucleotide
cacuuacuucaucaaaaug

SEQ ID NO: 2393328 - RNA, 19 nt, Artificial Sequence
  Description of Artificial Sequence: Synthetic oligonucleotide
uccaaguaucaauuaucgu

SEQ ID NO: 2393329 - RNA, 19 nt, Artificial Sequence
  Description of Artificial Sequence: Synthetic oligonucleotide
acacuuacuucaucaaaau

SEQ ID NO: 2393330 - RNA, 19 nt, Artificial Sequence
  Description of Artificial Sequence: Synthetic oligonucleotide
agaaccccauguuucuaag

SEQ ID NO: 2393331 - RNA, 19 nt, Artificial Sequence
  Description of Artificial Sequence: Synthetic oligonucleotide
ccaaccaaaacaaaagaca

SEQ ID NO: 2393332 - RNA, 19 nt, Artificial Sequence
  Description of Artificial Sequence: Synthetic oligonucleotide
augaggaauaacuguuuau

SEQ ID NO: 2393333 - RNA, 19 nt, Artificial Sequence
  Description of Artificial Sequence: Synthetic oligonucleotide
acuagaaaccauggcaaca

SEQ ID NO: 2393334 - RNA, 19 nt, Artificial Sequence
  Description of Artificial Sequence: Synthetic oligonucleotide
uaggaacuaacuguacaac

SEQ ID NO: 2393335 - RNA, 19 nt, Artificial Sequence
  Description of Artificial Sequence: Synthetic oligonucleotide
acaucauguauuaaucuaa

SEQ ID NO: 2393336 - RNA, 19 nt, Artificial Sequence
  Description of Artificial Sequence: Synthetic oligonucleotide
agugacaacuagugcaaau

SEQ ID NO: 2393337 - RNA, 19 nt, Artificial Sequence
  Description of Artificial Sequence: Synthetic oligonucleotide
aggcacugugcacaauuuc

SEQ ID NO: 2393338 - RNA, 19 nt, Artificial Sequence
  Description of Artificial Sequence: Synthetic oligonucleotide
uggcauacaucauguauua

SEQ ID NO: 2393339 - RNA, 19 nt, Artificial Sequence
  Description of Artificial Sequence: Synthetic oligonucleotide
guaugaucccaguaccaac

SEQ ID NO: 2393340 - RNA, 19 nt, Artificial Sequence
  Description of Artificial Sequence: Synthetic oligonucleotide
cauccuaggaacuaacugu

SEQ ID NO: 2393341 - RNA, 19 nt, Artificial Sequence
  Description of Artificial Sequence: Synthetic oligonucleotide
ugucuaaaugucaguuuua

SEQ ID NO: 2393342 - RNA, 19 nt, Artificial Sequence
  Description of Artificial Sequence: Synthetic oligonucleotide
aagaaucuacagaacccca

SEQ ID NO: 2393343 - RNA, 19 nt, Artificial Sequence
  Description of Artificial Sequence: Synthetic oligonucleotide
aacauccuaggaacuaacu

SEQ ID NO: 2393344 - RNA, 19 nt, Artificial Sequence
  Description of Artificial Sequence: Synthetic oligonucleotide
ucuggguaugaucccagua

SEQ ID NO: 2393345 - RNA, 19 nt, Artificial Sequence
  Description of Artificial Sequence: Synthetic oligonucleotide
uacaggugaccagagaaau

SEQ ID NO: 2393346 - RNA, 19 nt, Artificial Sequence
  Description of Artificial Sequence: Synthetic oligonucleotide
uauuaugggcaaggcacug

SEQ ID NO: 2393347 - RNA, 19 nt, Artificial Sequence
  Description of Artificial Sequence: Synthetic oligonucleotide
ugcaugucuaaaugucagu

SEQ ID NO: 2393348 - RNA, 19 nt, Artificial Sequence
  Description of Artificial Sequence: Synthetic oligonucleotide
uagugcaaauaacauccua

SEQ ID NO: 2393349 - RNA, 19 nt, Artificial Sequence
  Description of Artificial Sequence: Synthetic oligonucleotide
uaugggcaaggcacugugc

SEQ ID NO: 2393350 - RNA, 19 nt, Artificial Sequence
  Description of Artificial Sequence: Synthetic oligonucleotide
gaaaugugcaugucuaaau

SEQ ID NO: 2393351 - RNA, 19 nt, Artificial Sequence
  Description of Artificial Sequence: Synthetic oligonucleotide
gugcaugucuaaaugucag

SEQ ID NO: 2393352 - RNA, 19 nt, Artificial Sequence
  Description of Artificial Sequence: Synthetic oligonucleotide
agaaaugugcaugucuaaa

SEQ ID NO: 2393353 - RNA, 19 nt, Artificial Sequence
  Description of Artificial Sequence: Synthetic oligonucleotide
guuauuucuuacaggugac

SEQ ID NO: 2393354 - RNA, 19 nt, Artificial Sequence
  Description of Artificial Sequence: Synthetic oligonucleotide
cccaguaccaaccaaaaca

SEQ ID NO: 2393355 - RNA, 19 nt, Artificial Sequence
  Description of Artificial Sequence: Synthetic oligonucleotide
agagaaaugugcaugucua

SEQ ID NO: 2393356 - RNA, 19 nt, Artificial Sequence
  Description of Artificial Sequence: Synthetic oligonucleotide
acacuagaaaccauggcaa

SEQ ID NO: 2393357 - RNA, 19 nt, Artificial Sequence
  Description of Artificial Sequence: Synthetic oligonucleotide
gguauuuguagagcaaaug

SEQ ID NO: 2393358 - RNA, 19 nt, Artificial Sequence
  Description of Artificial Sequence: Synthetic oligonucleotide
gaacuaacuguacaacccu

SEQ ID NO: 2393359 - RNA, 19 nt, Artificial Sequence
  Description of Artificial Sequence: Synthetic oligonucleotide
ggguuagacauguagcuca

SEQ ID NO: 2393360 - RNA, 19 nt, Artificial Sequence
  Description of Artificial Sequence: Synthetic oligonucleotide
cugccuauaagcuuuauuu

SEQ ID NO: 2393361 - RNA, 19 nt, Artificial Sequence
  Description of Artificial Sequence: Synthetic oligonucleotide
cacugugcacaauuucuug

SEQ ID NO: 2393362 - RNA, 19 nt, Artificial Sequence
  Description of Artificial Sequence: Synthetic oligonucleotide
accauggcaacagacuaug

SEQ ID NO: 2393363 - RNA, 19 nt, Artificial Sequence
  Description of Artificial Sequence: Synthetic oligonucleotide
ugguaagccuuguguagca

SEQ ID NO: 2393364 - RNA, 19 nt, Artificial Sequence
  Description of Artificial Sequence: Synthetic oligonucleotide
uaacugggguuagacaugu

SEQ ID NO: 2393365 - RNA, 19 nt, Artificial Sequence
  Description of Artificial Sequence: Synthetic oligonucleotide
cacuagaaaccauggcaac

SEQ ID NO: 2393366 - RNA, 19 nt, Artificial Sequence
  Description of Artificial Sequence: Synthetic oligonucleotide
auaacauccuaggaacuaa

SEQ ID NO: 2393367 - RNA, 19 nt, Artificial Sequence
  Description of Artificial Sequence: Synthetic oligonucleotide
ugaccagagaaaugugcau

SEQ ID NO: 2393368 - RNA, 19 nt, Artificial Sequence
  Description of Artificial Sequence: Synthetic oligonucleotide
gccuauaagcuuuauuuga

SEQ ID NO: 2393369 - RNA, 19 nt, Artificial Sequence
  Description of Artificial Sequence: Synthetic oligonucleotide
agcacaugcaaggcucugg

SEQ ID NO: 2393370 - RNA, 19 nt, Artificial Sequence
  Description of Artificial Sequence: Synthetic oligonucleotide
cuauaagcuuuauuugaaa

SEQ ID NO: 2393371 - RNA, 19 nt, Artificial Sequence
  Description of Artificial Sequence: Synthetic oligonucleotide
gacuaauuuaaagaacuau

SEQ ID NO: 2393372 - RNA, 19 nt, Artificial Sequence
  Description of Artificial Sequence: Synthetic oligonucleotide
gaaaccauggcaacagacu

SEQ ID NO: 2393373 - RNA, 19 nt, Artificial Sequence
  Description of Artificial Sequence: Synthetic oligonucleotide
ugugcacaauuucuugauu

SEQ ID NO: 2393374 - RNA, 19 nt, Artificial Sequence
  Description of Artificial Sequence: Synthetic oligonucleotide
aucccuuagcaccaagaau

SEQ ID NO: 2393375 - RNA, 19 nt, Artificial Sequence
  Description of Artificial Sequence: Synthetic oligonucleotide
acaacccuacagugacugg

SEQ ID NO: 2393376 - RNA, 19 nt, Artificial Sequence
  Description of Artificial Sequence: Synthetic oligonucleotide
guuggcauacaucauguau

SEQ ID NO: 2393377 - RNA, 19 nt, Artificial Sequence
  Description of Artificial Sequence: Synthetic oligonucleotide
gaucccaguaccaaccaaa

SEQ ID NO: 2393378 - RNA, 19 nt, Artificial Sequence
  Description of Artificial Sequence: Synthetic oligonucleotide
ucccaguaccaaccaaaac

SEQ ID NO: 2393379 - RNA, 19 nt, Artificial Sequence
  Description of Artificial Sequence: Synthetic oligonucleotide
aguaccuauuaugggcaag

SEQ ID NO: 2393380 - RNA, 19 nt, Artificial Sequence
  Description of Artificial Sequence: Synthetic oligonucleotide
gugguaagccuuguguagc

SEQ ID NO: 2393381 - RNA, 19 nt, Artificial Sequence
  Description of Artificial Sequence: Synthetic oligonucleotide
agaacuauucugugcuauu

SEQ ID NO: 2393382 - RNA, 19 nt, Artificial Sequence
  Description of Artificial Sequence: Synthetic oligonucleotide
aucuacagaaccccauguu

SEQ ID NO: 2393383 - RNA, 19 nt, Artificial Sequence
  Description of Artificial Sequence: Synthetic oligonucleotide
caggaucaaaagcuaugug

SEQ ID NO: 2393384 - RNA, 19 nt, Artificial Sequence
  Description of Artificial Sequence: Synthetic oligonucleotide
cuaacuguacaacccuaca

SEQ ID NO: 2393385 - RNA, 19 nt, Artificial Sequence
  Description of Artificial Sequence: Synthetic oligonucleotide
caauuaucguuauuucuua

SEQ ID NO: 2393386 - RNA, 19 nt, Artificial Sequence
  Description of Artificial Sequence: Synthetic oligonucleotide
gagaaaugugcaugucuaa

SEQ ID NO: 2393387 - RNA, 19 nt, Artificial Sequence
  Description of Artificial Sequence: Synthetic oligonucleotide
caaaauuuccaaguaucaa

SEQ ID NO: 2393388 - RNA, 19 nt, Artificial Sequence
  Description of Artificial Sequence: Synthetic oligonucleotide
cuaugugcucaggacacug

SEQ ID NO: 2393389 - RNA, 19 nt, Artificial Sequence
  Description of Artificial Sequence: Synthetic oligonucleotide
acaaaccaaauuaccauua

SEQ ID NO: 2393390 - RNA, 19 nt, Artificial Sequence
  Description of Artificial Sequence: Synthetic oligonucleotide
aguaucaauuaucguuauu

SEQ ID NO: 2393391 - RNA, 19 nt, Artificial Sequence
  Description of Artificial Sequence: Synthetic oligonucleotide
auaacugggguuagacaug

SEQ ID NO: 2393392 - RNA, 19 nt, Artificial Sequence
  Description of Artificial Sequence: Synthetic oligonucleotide
gcacaugcaaggcucuggg

SEQ ID NO: 2393393 - RNA, 19 nt, Artificial Sequence
  Description of Artificial Sequence: Synthetic oligonucleotide
uaccuauuaugggcaaggc

SEQ ID NO: 2393394 - RNA, 19 nt, Artificial Sequence
  Description of Artificial Sequence: Synthetic oligonucleotide
cuacagugacuggacacag

SEQ ID NO: 2393395 - RNA, 19 nt, Artificial Sequence
  Description of Artificial Sequence: Synthetic oligonucleotide
ugaucccaguaccaaccaa

SEQ ID NO: 2393396 - RNA, 19 nt, Artificial Sequence
  Description of Artificial Sequence: Synthetic oligonucleotide
aagugcacagguauuugua

SEQ ID NO: 2393397 - RNA, 19 nt, Artificial Sequence
  Description of Artificial Sequence: Synthetic oligonucleotide
gucuaaaugucaguuuuaa

SEQ ID NO: 2393398 - RNA, 19 nt, Artificial Sequence
  Description of Artificial Sequence: Synthetic oligonucleotide
cuguacaacccuacaguga

SEQ ID NO: 2393399 - RNA, 19 nt, Artificial Sequence
  Description of Artificial Sequence: Synthetic oligonucleotide
ggacacugggcuucaagug

SEQ ID NO: 2393400 - RNA, 19 nt, Artificial Sequence
  Description of Artificial Sequence: Synthetic oligonucleotide
caccaagaaucuacagaac

SEQ ID NO: 2393401 - RNA, 19 nt, Artificial Sequence
  Description of Artificial Sequence: Synthetic oligonucleotide
cguuauuucuuacagguga

SEQ ID NO: 2393402 - RNA, 19 nt, Artificial Sequence
  Description of Artificial Sequence: Synthetic oligonucleotide
aacagacuaugaggaauaa

SEQ ID NO: 2393403 - RNA, 19 nt, Artificial Sequence
  Description of Artificial Sequence: Synthetic oligonucleotide
gaauaacuguuuauugagu

SEQ ID NO: 2393404 - RNA, 19 nt, Artificial Sequence
  Description of Artificial Sequence: Synthetic oligonucleotide
aacuaacuguacaacccua

SEQ ID NO: 2393405 - RNA, 19 nt, Artificial Sequence
  Description of Artificial Sequence: Synthetic oligonucleotide
caacagacuaugaggaaua

SEQ ID NO: 2393406 - RNA, 19 nt, Artificial Sequence
  Description of Artificial Sequence: Synthetic oligonucleotide
ucaaggagacaggaucaaa

SEQ ID NO: 2393407 - RNA, 19 nt, Artificial Sequence
  Description of Artificial Sequence: Synthetic oligonucleotide
ggaucaaaagcuaugugcu

SEQ ID NO: 2393408 - RNA, 19 nt, Artificial Sequence
  Description of Artificial Sequence: Synthetic oligonucleotide
caaaugaacuguuggcaua

SEQ ID NO: 2393409 - RNA, 19 nt, Artificial Sequence
  Description of Artificial Sequence: Synthetic oligonucleotide
auuaugggcaaggcacugu

SEQ ID NO: 2393410 - RNA, 19 nt, Artificial Sequence
  Description of Artificial Sequence: Synthetic oligonucleotide
uucaaggagacaggaucaa

SEQ ID NO: 2393411 - RNA, 19 nt, Artificial Sequence
  Description of Artificial Sequence: Synthetic oligonucleotide
agaaucuacagaaccccau

SEQ ID NO: 2393412 - RNA, 19 nt, Artificial Sequence
  Description of Artificial Sequence: Synthetic oligonucleotide
aaccauggcaacagacuau

SEQ ID NO: 2393413 - RNA, 19 nt, Artificial Sequence
  Description of Artificial Sequence: Synthetic oligonucleotide
auaaaacacuagaaaccau

SEQ ID NO: 2393414 - RNA, 19 nt, Artificial Sequence
  Description of Artificial Sequence: Synthetic oligonucleotide
ccaaguaucaauuaucguu

SEQ ID NO: 2393415 - RNA, 19 nt, Artificial Sequence
  Description of Artificial Sequence: Synthetic oligonucleotide
auuuucaaggagacaggau

SEQ ID NO: 2393416 - RNA, 19 nt, Artificial Sequence
  Description of Artificial Sequence: Synthetic oligonucleotide
gugacaacuagugcaaaua

SEQ ID NO: 2393417 - RNA, 19 nt, Artificial Sequence
  Description of Artificial Sequence: Synthetic oligonucleotide
gcauacaucauguauuaau

SEQ ID NO: 2393418 - RNA, 19 nt, Artificial Sequence
  Description of Artificial Sequence: Synthetic oligonucleotide
uggacacagcugccuauaa

SEQ ID NO: 2393419 - RNA, 19 nt, Artificial Sequence
  Description of Artificial Sequence: Synthetic oligonucleotide
ugacuggacacagcugccu

SEQ ID NO: 2393420 - RNA, 19 nt, Artificial Sequence
  Description of Artificial Sequence: Synthetic oligonucleotide
cucagugguaagccuugug

SEQ ID NO: 2393421 - RNA, 19 nt, Artificial Sequence
  Description of Artificial Sequence: Synthetic oligonucleotide
uguuggcauacaucaugua

SEQ ID NO: 2393422 - RNA, 19 nt, Artificial Sequence
  Description of Artificial Sequence: Synthetic oligonucleotide
caggugaccagagaaaugu

SEQ ID NO: 2393423 - RNA, 19 nt, Artificial Sequence
  Description of Artificial Sequence: Synthetic oligonucleotide
ccccauguuucuaagugac

SEQ ID NO: 2393424 - RNA, 19 nt, Artificial Sequence
  Description of Artificial Sequence: Synthetic oligonucleotide
guaucccuuagcaccaaga

SEQ ID NO: 2393425 - RNA, 19 nt, Artificial Sequence
  Description of Artificial Sequence: Synthetic oligonucleotide
caacccuacagugacugga

SEQ ID NO: 2393426 - RNA, 19 nt, Artificial Sequence
  Description of Artificial Sequence: Synthetic oligonucleotide
auccuaggaacuaacugua

SEQ ID NO: 2393427 - RNA, 19 nt, Artificial Sequence
  Description of Artificial Sequence: Synthetic oligonucleotide
ccaguaccaaccaaaacaa

SEQ ID NO: 2393428 - RNA, 19 nt, Artificial Sequence
  Description of Artificial Sequence: Synthetic oligonucleotide
agacaggaucaaaagcuau

SEQ ID NO: 2393429 - RNA, 19 nt, Artificial Sequence
  Description of Artificial Sequence: Synthetic oligonucleotide
cagguauuuguagagcaaa

SEQ ID NO: 2393430 - RNA, 19 nt, Artificial Sequence
  Description of Artificial Sequence: Synthetic oligonucleotide
cagugguaagccuugugua

SEQ ID NO: 2393431 - RNA, 19 nt, Artificial Sequence
  Description of Artificial Sequence: Synthetic oligonucleotide
cuguuggcauacaucaugu

SEQ ID NO: 2393432 - RNA, 19 nt, Artificial Sequence
  Description of Artificial Sequence: Synthetic oligonucleotide
aagugacaacuagugcaaa

SEQ ID NO: 2393433 - RNA, 19 nt, Artificial Sequence
  Description of Artificial Sequence: Synthetic oligonucleotide
caauuaagacaaauuucau

SEQ ID NO: 2393434 - RNA, 19 nt, Artificial Sequence
  Description of Artificial Sequence: Synthetic oligonucleotide
aagccuuguguagcacaug

SEQ ID NO: 2393435 - RNA, 19 nt, Artificial Sequence
  Description of Artificial Sequence: Synthetic oligonucleotide
ccuauaagcuuuauuugaa

SEQ ID NO: 2393436 - RNA, 19 nt, Artificial Sequence
  Description of Artificial Sequence: Synthetic oligonucleotide
cuauuaugggcaaggcacu

SEQ ID NO: 2393437 - RNA, 19 nt, Artificial Sequence
  Description of Artificial Sequence: Synthetic oligonucleotide
cagugacuggacacagcug

SEQ ID NO: 2393438 - RNA, 19 nt, Artificial Sequence
  Description of Artificial Sequence: Synthetic oligonucleotide
agguauuuguagagcaaau

SEQ ID NO: 2393439 - RNA, 19 nt, Artificial Sequence
  Description of Artificial Sequence: Synthetic oligonucleotide
aacuguuggcauacaucau

SEQ ID NO: 2393440 - RNA, 19 nt, Artificial Sequence
  Description of Artificial Sequence: Synthetic oligonucleotide
gguuagacauguagcucag

SEQ ID NO: 2393441 - RNA, 19 nt, Artificial Sequence
  Description of Artificial Sequence: Synthetic oligonucleotide
acagguauuuguagagcaa

SEQ ID NO: 2393442 - RNA, 19 nt, Artificial Sequence
  Description of Artificial Sequence: Synthetic oligonucleotide
caucauguauuaaucuaau

SEQ ID NO: 2393443 - RNA, 19 nt, Artificial Sequence
  Description of Artificial Sequence: Synthetic oligonucleotide
ccuaggaacuaacuguaca

SEQ ID NO: 2393444 - RNA, 19 nt, Artificial Sequence
  Description of Artificial Sequence: Synthetic oligonucleotide
gaguaccuauuaugggcaa

SEQ ID NO: 2393445 - RNA, 19 nt, Artificial Sequence
  Description of Artificial Sequence: Synthetic oligonucleotide
cagaaccccauguuucuaa

SEQ ID NO: 2393446 - RNA, 19 nt, Artificial Sequence
  Description of Artificial Sequence: Synthetic oligonucleotide
cccuacagugacuggacac

SEQ ID NO: 2393447 - RNA, 19 nt, Artificial Sequence
  Description of Artificial Sequence: Synthetic oligonucleotide
gaauuguauuucacaggua

SEQ ID NO: 2393448 - RNA, 19 nt, Artificial Sequence
  Description of Artificial Sequence: Synthetic oligonucleotide
caagugcacagguauuugu

SEQ ID NO: 2393449 - RNA, 19 nt, Artificial Sequence
  Description of Artificial Sequence: Synthetic oligonucleotide
gacuggacacagcugccua

SEQ ID NO: 2393450 - RNA, 19 nt, Artificial Sequence
  Description of Artificial Sequence: Synthetic oligonucleotide
gguaugaucccaguaccaa

SEQ ID NO: 2393451 - RNA, 19 nt, Artificial Sequence
  Description of Artificial Sequence: Synthetic oligonucleotide
gugcuauuuaucugacacu

SEQ ID NO: 2393452 - RNA, 19 nt, Artificial Sequence
  Description of Artificial Sequence: Synthetic oligonucleotide
uagcacaugcaaggcucug

SEQ ID NO: 2393453 - RNA, 19 nt, Artificial Sequence
  Description of Artificial Sequence: Synthetic oligonucleotide
gaaccccauguuucuaagu

SEQ ID NO: 2393454 - RNA, 19 nt, Artificial Sequence
  Description of Artificial Sequence: Synthetic oligonucleotide
ccuuguguagcacaugcaa

SEQ ID NO: 2393455 - RNA, 19 nt, Artificial Sequence
  Description of Artificial Sequence: Synthetic oligonucleotide
gugacuggacacagcugcc

SEQ ID NO: 2393456 - RNA, 19 nt, Artificial Sequence
  Description of Artificial Sequence: Synthetic oligonucleotide
ugcucaggacacugggcuu

SEQ ID NO: 2393457 - RNA, 19 nt, Artificial Sequence
  Description of Artificial Sequence: Synthetic oligonucleotide
caugucuaaaugucaguuu

SEQ ID NO: 2393458 - RNA, 19 nt, Artificial Sequence
  Description of Artificial Sequence: Synthetic oligonucleotide
cuaugaggaauaacuguuu

SEQ ID NO: 2393459 - RNA, 19 nt, Artificial Sequence
  Description of Artificial Sequence: Synthetic oligonucleotide
aucccaguaccaaccaaaa

SEQ ID NO: 2393460 - RNA, 19 nt, Artificial Sequence
  Description of Artificial Sequence: Synthetic oligonucleotide
guagcucagugguaagccu

SEQ ID NO: 2393461 - RNA, 19 nt, Artificial Sequence
  Description of Artificial Sequence: Synthetic oligonucleotide
caugcaaggcucuggguau

SEQ ID NO: 2393462 - RNA, 19 nt, Artificial Sequence
  Description of Artificial Sequence: Synthetic oligonucleotide
cugugcuauuuaucugaca

SEQ ID NO: 2393463 - RNA, 19 nt, Artificial Sequence
  Description of Artificial Sequence: Synthetic oligonucleotide
ccauguuucuaagugacaa

SEQ ID NO: 2393464 - RNA, 19 nt, Artificial Sequence
  Description of Artificial Sequence: Synthetic oligonucleotide
gcacagguauuuguagagc

SEQ ID NO: 2393465 - RNA, 19 nt, Artificial Sequence
  Description of Artificial Sequence: Synthetic oligonucleotide
cugacacuuaacacuuacu

SEQ ID NO: 2393466 - RNA, 19 nt, Artificial Sequence
  Description of Artificial Sequence: Synthetic oligonucleotide
aggugaccagagaaaugug

SEQ ID NO: 2393467 - RNA, 19 nt, Artificial Sequence
  Description of Artificial Sequence: Synthetic oligonucleotide
caaaccaaauuaccauuau

SEQ ID NO: 2393468 - RNA, 19 nt, Artificial Sequence
  Description of Artificial Sequence: Synthetic oligonucleotide
gcacaauuucuugauugca

SEQ ID NO: 2393469 - RNA, 19 nt, Artificial Sequence
  Description of Artificial Sequence: Synthetic oligonucleotide
cugugcacaauuucuugau

SEQ ID NO: 2393470 - RNA, 19 nt, Artificial Sequence
  Description of Artificial Sequence: Synthetic oligonucleotide
cuagugcaaauaacauccu

SEQ ID NO: 2393471 - RNA, 19 nt, Artificial Sequence
  Description of Artificial Sequence: Synthetic oligonucleotide
ggcacugugcacaauuucu

SEQ ID NO: 2393472 - RNA, 19 nt, Artificial Sequence
  Description of Artificial Sequence: Synthetic oligonucleotide
caguaccaaccaaaacaaa

SEQ ID NO: 2393473 - RNA, 19 nt, Artificial Sequence
  Description of Artificial Sequence: Synthetic oligonucleotide
augcaaggcucuggguaug

SEQ ID NO: 2393474 - RNA, 19 nt, Artificial Sequence
  Description of Artificial Sequence: Synthetic oligonucleotide
gacauguagcucaguggua

SEQ ID NO: 2393475 - RNA, 19 nt, Artificial Sequence
  Description of Artificial Sequence: Synthetic oligonucleotide
gggguuagacauguagcuc

SEQ ID NO: 2393476 - RNA, 19 nt, Artificial Sequence
  Description of Artificial Sequence: Synthetic oligonucleotide
acagaaccccauguuucua

SEQ ID NO: 2393477 - RNA, 19 nt, Artificial Sequence
  Description of Artificial Sequence: Synthetic oligonucleotide
cacuuaacacuuacuucau

SEQ ID NO: 2393478 - RNA, 19 nt, Artificial Sequence
  Description of Artificial Sequence: Synthetic oligonucleotide
ccuacagugacuggacaca

SEQ ID NO: 2393479 - RNA, 19 nt, Artificial Sequence
  Description of Artificial Sequence: Synthetic oligonucleotide
ggguaugaucccaguacca

SEQ ID NO: 2393480 - RNA, 19 nt, Artificial Sequence
  Description of Artificial Sequence: Synthetic oligonucleotide
gguaagccuuguguagcac

SEQ ID NO: 2393481 - RNA, 19 nt, Artificial Sequence
  Description of Artificial Sequence: Synthetic oligonucleotide
gcaugucuaaaugucaguu

SEQ ID NO: 2393482 - RNA, 19 nt, Artificial Sequence
  Description of Artificial Sequence: Synthetic oligonucleotide
guagcacaugcaaggcucu

SEQ ID NO: 2393483 - RNA, 19 nt, Artificial Sequence
  Description of Artificial Sequence: Synthetic oligonucleotide
ggcucuggguaugauccca

SEQ ID NO: 2393484 - RNA, 19 nt, Artificial Sequence
  Description of Artificial Sequence: Synthetic oligonucleotide
ggcaaggcacugugcacaa

SEQ ID NO: 2393485 - RNA, 19 nt, Artificial Sequence
  Description of Artificial Sequence: Synthetic oligonucleotide
cuggacacagcugccuaua

SEQ ID NO: 2393486 - RNA, 19 nt, Artificial Sequence
  Description of Artificial Sequence: Synthetic oligonucleotide
cacaugcaaggcucugggu

SEQ ID NO: 2393487 - RNA, 19 nt, Artificial Sequence
  Description of Artificial Sequence: Synthetic oligonucleotide
ccagagaaaugugcauguc

SEQ ID NO: 2393488 - RNA, 19 nt, Artificial Sequence
  Description of Artificial Sequence: Synthetic oligonucleotide
gggcuucaagugcacaggu

SEQ ID NO: 2393489 - RNA, 19 nt, Artificial Sequence
  Description of Artificial Sequence: Synthetic oligonucleotide
gcuauuuaucugacacuua

SEQ ID NO: 2393490 - RNA, 19 nt, Artificial Sequence
  Description of Artificial Sequence: Synthetic oligonucleotide
cucaggacacugggcuuca

SEQ ID NO: 2393491 - RNA, 19 nt, Artificial Sequence
  Description of Artificial Sequence: Synthetic oligonucleotide
aucugacacuuaacacuua

SEQ ID NO: 2393492 - RNA, 19 nt, Artificial Sequence
  Description of Artificial Sequence: Synthetic oligonucleotide
gcugccuauaagcuuuauu

SEQ ID NO: 2393493 - RNA, 19 nt, Artificial Sequence
  Description of Artificial Sequence: Synthetic oligonucleotide
aacugggguuagacaugua

SEQ ID NO: 2393494 - RNA, 19 nt, Artificial Sequence
  Description of Artificial Sequence: Synthetic oligonucleotide
agcugccuauaagcuuuau

SEQ ID NO: 2393495 - RNA, 19 nt, Artificial Sequence
  Description of Artificial Sequence: Synthetic oligonucleotide
gccuuguguagcacaugca

SEQ ID NO: 2393496 - RNA, 19 nt, Artificial Sequence
  Description of Artificial Sequence: Synthetic oligonucleotide
ccauggcaacagacuauga

SEQ ID NO: 2393497 - RNA, 19 nt, Artificial Sequence
  Description of Artificial Sequence: Synthetic oligonucleotide
gcacugugcacaauuucuu

SEQ ID NO: 2393498 - RNA, 19 nt, Artificial Sequence
  Description of Artificial Sequence: Synthetic oligonucleotide
gcuaugugcucaggacacu

SEQ ID NO: 2393499 - RNA, 19 nt, Artificial Sequence
  Description of Artificial Sequence: Synthetic oligonucleotide
gcucagugguaagccuugu

SEQ ID NO: 2393500 - RNA, 19 nt, Artificial Sequence
  Description of Artificial Sequence: Synthetic oligonucleotide
gcaaggcucuggguaugau

SEQ ID NO: 2393501 - RNA, 19 nt, Artificial Sequence
  Description of Artificial Sequence: Synthetic oligonucleotide
gcaaggcacugugcacaau

SEQ ID NO: 2393502 - RNA, 19 nt, Artificial Sequence
  Description of Artificial Sequence: Synthetic oligonucleotide
uauagaugaacacaaagca

SEQ ID NO: 2393503 - RNA, 19 nt, Artificial Sequence
  Description of Artificial Sequence: Synthetic oligonucleotide
uagaugaacacaaagcaag

SEQ ID NO: 2393504 - RNA, 19 nt, Artificial Sequence
  Description of Artificial Sequence: Synthetic oligonucleotide
uguagaaucagguuguucu

SEQ ID NO: 2393505 - RNA, 19 nt, Artificial Sequence
  Description of Artificial Sequence: Synthetic oligonucleotide
auuuugacuccauagacag

SEQ ID NO: 2393506 - RNA, 19 nt, Artificial Sequence
  Description of Artificial Sequence: Synthetic oligonucleotide
gaaagagugcaucuggugg

SEQ ID NO: 2393507 - RNA, 19 nt, Artificial Sequence
  Description of Artificial Sequence: Synthetic oligonucleotide
aaagagugcaucugguggg

SEQ ID NO: 2393508 - RNA, 19 nt, Artificial Sequence
  Description of Artificial Sequence: Synthetic oligonucleotide
uacucaaggagccauagca

SEQ ID NO: 2393509 - RNA, 19 nt, Artificial Sequence
  Description of Artificial Sequence: Synthetic oligonucleotide
uuccuaaacaccaggaggc

SEQ ID NO: 2393510 - RNA, 19 nt, Artificial Sequence
  Description of Artificial Sequence: Synthetic oligonucleotide
uauuguucuuccuaaacac

SEQ ID NO: 2393511 - RNA, 19 nt, Artificial Sequence
  Description of Artificial Sequence: Synthetic oligonucleotide
cuuccuaaacaccaggagg

SEQ ID NO: 2393512 - RNA, 19 nt, Artificial Sequence
  Description of Artificial Sequence: Synthetic oligonucleotide
ugagaugucaugccacacg

SEQ ID NO: 2393513 - RNA, 19 nt, Artificial Sequence
  Description of Artificial Sequence: Synthetic oligonucleotide
gaugucaugccacacguug

SEQ ID NO: 2393514 - RNA, 19 nt, Artificial Sequence
  Description of Artificial Sequence: Synthetic oligonucleotide
uccuuaagcaccuugggcu

SEQ ID NO: 2393515 - RNA, 19 nt, Artificial Sequence
  Description of Artificial Sequence: Synthetic oligonucleotide
gacuguagggcacagagac

SEQ ID NO: 2393516 - RNA, 19 nt, Artificial Sequence
  Description of Artificial Sequence: Synthetic oligonucleotide
ucuuccuaaacaccaggag

SEQ ID NO: 2393517 - RNA, 19 nt, Artificial Sequence
  Description of Artificial Sequence: Synthetic oligonucleotide
ugagcuuagggauguagcc

SEQ ID NO: 2393518 - RNA, 19 nt, Artificial Sequence
  Description of Artificial Sequence: Synthetic oligonucleotide
ugaccaaugcaugaggugc

SEQ ID NO: 2393519 - RNA, 19 nt, Artificial Sequence
  Description of Artificial Sequence: Synthetic oligonucleotide
uccucguagagguagguca

SEQ ID NO: 2393520 - RNA, 19 nt, Artificial Sequence
  Description of Artificial Sequence: Synthetic oligonucleotide
cuaaacaccaggaggcccc

SEQ ID NO: 2393521 - RNA, 19 nt, Artificial Sequence
  Description of Artificial Sequence: Synthetic oligonucleotide
aaggucaugaccaaugcau

SEQ ID NO: 2393522 - RNA, 19 nt, Artificial Sequence
  Description of Artificial Sequence: Synthetic oligonucleotide
aagaugaggaagucugaga

SEQ ID NO: 2393523 - RNA, 19 nt, Artificial Sequence
  Description of Artificial Sequence: Synthetic oligonucleotide
gacucuuauagaugaacac

SEQ ID NO: 2393524 - RNA, 19 nt, Artificial Sequence
  Description of Artificial Sequence: Synthetic oligonucleotide
aaaggucaugaccaaugca

SEQ ID NO: 2393525 - RNA, 19 nt, Artificial Sequence
  Description of Artificial Sequence: Synthetic oligonucleotide
aagcaagccagguuccgag

SEQ ID NO: 2393526 - RNA, 19 nt, Artificial Sequence
  Description of Artificial Sequence: Synthetic oligonucleotide
guuauuguucuuccuaaac

SEQ ID NO: 2393527 - RNA, 19 nt, Artificial Sequence
  Description of Artificial Sequence: Synthetic oligonucleotide
cuggcuauugauguuauug

SEQ ID NO: 2393528 - RNA, 19 nt, Artificial Sequence
  Description of Artificial Sequence: Synthetic oligonucleotide
uacauguugaucuggcuau

SEQ ID NO: 2393529 - RNA, 19 nt, Artificial Sequence
  Description of Artificial Sequence: Synthetic oligonucleotide
gaugaacacaaagcaagcc

SEQ ID NO: 2393530 - RNA, 19 nt, Artificial Sequence
  Description of Artificial Sequence: Synthetic oligonucleotide
cuucuccacacccaggcgg

SEQ ID NO: 2393531 - RNA, 19 nt, Artificial Sequence
  Description of Artificial Sequence: Synthetic oligonucleotide
cauggcaucggagaacucg

SEQ ID NO: 2393532 - RNA, 19 nt, Artificial Sequence
  Description of Artificial Sequence: Synthetic oligonucleotide
gagaagagccugcagcugc

SEQ ID NO: 2393533 - RNA, 19 nt, Artificial Sequence
  Description of Artificial Sequence: Synthetic oligonucleotide
agagguaggucauggagga

SEQ ID NO: 2393534 - RNA, 19 nt, Artificial Sequence
  Description of Artificial Sequence: Synthetic oligonucleotide
acucuuauagaugaacaca

SEQ ID NO: 2393535 - RNA, 19 nt, Artificial Sequence
  Description of Artificial Sequence: Synthetic oligonucleotide
aguuccuuaagcaccuugg

SEQ ID NO: 2393536 - RNA, 19 nt, Artificial Sequence
  Description of Artificial Sequence: Synthetic oligonucleotide
aacgggucccagcugagcu

SEQ ID NO: 2393537 - RNA, 19 nt, Artificial Sequence
  Description of Artificial Sequence: Synthetic oligonucleotide
uggcuauugauguuauugu

SEQ ID NO: 2393538 - RNA, 19 nt, Artificial Sequence
  Description of Artificial Sequence: Synthetic oligonucleotide
cugagcuuagggauguagc

SEQ ID NO: 2393539 - RNA, 19 nt, Artificial Sequence
  Description of Artificial Sequence: Synthetic oligonucleotide
cuccugaagagaaagguca

SEQ ID NO: 2393540 - RNA, 19 nt, Artificial Sequence
  Description of Artificial Sequence: Synthetic oligonucleotide
cuugggcuguguuacuugg

SEQ ID NO: 2393541 - RNA, 19 nt, Artificial Sequence
  Description of Artificial Sequence: Synthetic oligonucleotide
cucuuauagaugaacacaa

SEQ ID NO: 2393542 - RNA, 19 nt, Artificial Sequence
  Description of Artificial Sequence: Synthetic oligonucleotide
ggagccauagcacaagccc

SEQ ID NO: 2393543 - RNA, 19 nt, Artificial Sequence
  Description of Artificial Sequence: Synthetic oligonucleotide
gauuuugacuccauagaca

SEQ ID NO: 2393544 - RNA, 19 nt, Artificial Sequence
  Description of Artificial Sequence: Synthetic oligonucleotide
agaaaggucaugaccaaug

SEQ ID NO: 2393545 - RNA, 19 nt, Artificial Sequence
  Description of Artificial Sequence: Synthetic oligonucleotide
ucugagaugucaugccaca

SEQ ID NO: 2393546 - RNA, 19 nt, Artificial Sequence
  Description of Artificial Sequence: Synthetic oligonucleotide
guguacguggcuuucagga

SEQ ID NO: 2393547 - RNA, 19 nt, Artificial Sequence
  Description of Artificial Sequence: Synthetic oligonucleotide
ucuuauagaugaacacaaa

SEQ ID NO: 2393548 - RNA, 19 nt, Artificial Sequence
  Description of Artificial Sequence: Synthetic oligonucleotide
ugacuccauagacagcccc

SEQ ID NO: 2393549 - RNA, 19 nt, Artificial Sequence
  Description of Artificial Sequence: Synthetic oligonucleotide
ugugcaaggggaacggguc

SEQ ID NO: 2393550 - RNA, 19 nt, Artificial Sequence
  Description of Artificial Sequence: Synthetic oligonucleotide
aacucgguggaggaacccg

SEQ ID NO: 2393551 - RNA, 19 nt, Artificial Sequence
  Description of Artificial Sequence: Synthetic oligonucleotide
ggauuuugacuccauagac

SEQ ID NO: 2393552 - RNA, 19 nt, Artificial Sequence
  Description of Artificial Sequence: Synthetic oligonucleotide
caaugcaugaggugcccgg

SEQ ID NO: 2393553 - RNA, 19 nt, Artificial Sequence
  Description of Artificial Sequence: Synthetic oligonucleotide
ucguagagguaggucaugg

SEQ ID NO: 2393554 - RNA, 19 nt, Artificial Sequence
  Description of Artificial Sequence: Synthetic oligonucleotide
aaggcaaacaggacgcgug

SEQ ID NO: 2393555 - RNA, 19 nt, Artificial Sequence
  Description of Artificial Sequence: Synthetic oligonucleotide
gagacucuuauagaugaac

SEQ ID NO: 2393556 - RNA, 19 nt, Artificial Sequence
  Description of Artificial Sequence: Synthetic oligonucleotide
gacgcgugaugucagguac

SEQ ID NO: 2393557 - RNA, 19 nt, Artificial Sequence
  Description of Artificial Sequence: Synthetic oligonucleotide
agguacauguugaucuggc

SEQ ID NO: 2393558 - RNA, 19 nt, Artificial Sequence
  Description of Artificial Sequence: Synthetic oligonucleotide
ucaaggagccauagcacaa

SEQ ID NO: 2393559 - RNA, 19 nt, Artificial Sequence
  Description of Artificial Sequence: Synthetic oligonucleotide
acacccaggcggcacaagg

SEQ ID NO: 2393560 - RNA, 19 nt, Artificial Sequence
  Description of Artificial Sequence: Synthetic oligonucleotide
augaccaaugcaugaggug

SEQ ID NO: 2393561 - RNA, 19 nt, Artificial Sequence
  Description of Artificial Sequence: Synthetic oligonucleotide
ucaugccacacguugcugu

SEQ ID NO: 2393562 - RNA, 19 nt, Artificial Sequence
  Description of Artificial Sequence: Synthetic oligonucleotide
agucugagaugucaugcca

SEQ ID NO: 2393563 - RNA, 19 nt, Artificial Sequence
  Description of Artificial Sequence: Synthetic oligonucleotide
acucaaggagccauagcac

SEQ ID NO: 2393564 - RNA, 19 nt, Artificial Sequence
  Description of Artificial Sequence: Synthetic oligonucleotide
aagccagguuccgagagug

SEQ ID NO: 2393565 - RNA, 19 nt, Artificial Sequence
  Description of Artificial Sequence: Synthetic oligonucleotide
gacuccauagacagccccg

SEQ ID NO: 2393566 - RNA, 19 nt, Artificial Sequence
  Description of Artificial Sequence: Synthetic oligonucleotide
uguuauuguucuuccuaaa

SEQ ID NO: 2393567 - RNA, 19 nt, Artificial Sequence
  Description of Artificial Sequence: Synthetic oligonucleotide
auagacagccccguuccgg

SEQ ID NO: 2393568 - RNA, 19 nt, Artificial Sequence
  Description of Artificial Sequence: Synthetic oligonucleotide
acagccccguuccggaagc

SEQ ID NO: 2393569 - RNA, 19 nt, Artificial Sequence
  Description of Artificial Sequence: Synthetic oligonucleotide
agacucuuauagaugaaca

SEQ ID NO: 2393570 - RNA, 19 nt, Artificial Sequence
  Description of Artificial Sequence: Synthetic oligonucleotide
augucaugccacacguugc

SEQ ID NO: 2393571 - RNA, 19 nt, Artificial Sequence
  Description of Artificial Sequence: Synthetic oligonucleotide
cacguugcuguccucguag

SEQ ID NO: 2393572 - RNA, 19 nt, Artificial Sequence
  Description of Artificial Sequence: Synthetic oligonucleotide
auagaugaacacaaagcaa

SEQ ID NO: 2393573 - RNA, 19 nt, Artificial Sequence
  Description of Artificial Sequence: Synthetic oligonucleotide
uccccuugcacaugggacu

SEQ ID NO: 2393574 - RNA, 19 nt, Artificial Sequence
  Description of Artificial Sequence: Synthetic oligonucleotide
cucaaggagccauagcaca

SEQ ID NO: 2393575 - RNA, 19 nt, Artificial Sequence
  Description of Artificial Sequence: Synthetic oligonucleotide
uaagcagggccaacacagc

SEQ ID NO: 2393576 - RNA, 19 nt, Artificial Sequence
  Description of Artificial Sequence: Synthetic oligonucleotide
agguaggucauggaggacu

SEQ ID NO: 2393577 - RNA, 19 nt, Artificial Sequence
  Description of Artificial Sequence: Synthetic oligonucleotide
gagccauagcacaagcccc

SEQ ID NO: 2393578 - RNA, 19 nt, Artificial Sequence
  Description of Artificial Sequence: Synthetic oligonucleotide
gggccggugauacucaagg

SEQ ID NO: 2393579 - RNA, 19 nt, Artificial Sequence
  Description of Artificial Sequence: Synthetic oligonucleotide
ucuccccuugcacauggga

SEQ ID NO: 2393580 - RNA, 19 nt, Artificial Sequence
  Description of Artificial Sequence: Synthetic oligonucleotide
guacauguugaucuggcua

SEQ ID NO: 2393581 - RNA, 19 nt, Artificial Sequence
  Description of Artificial Sequence: Synthetic oligonucleotide
caaaucacugcugugugca

SEQ ID NO: 2393582 - RNA, 19 nt, Artificial Sequence
  Description of Artificial Sequence: Synthetic oligonucleotide
aaagcaagccagguuccga

SEQ ID NO: 2393583 - RNA, 19 nt, Artificial Sequence
  Description of Artificial Sequence: Synthetic oligonucleotide
agagccugcagcugcggug

SEQ ID NO: 2393584 - RNA, 19 nt, Artificial Sequence
  Description of Artificial Sequence: Synthetic oligonucleotide
auggcaucggagaacucgg

SEQ ID NO: 2393585 - RNA, 19 nt, Artificial Sequence
  Description of Artificial Sequence: Synthetic oligonucleotide
gguggaggaacccggcugg

SEQ ID NO: 2393586 - RNA, 19 nt, Artificial Sequence
  Description of Artificial Sequence: Synthetic oligonucleotide
aggggaacgggucccagcu

SEQ ID NO: 2393587 - RNA, 19 nt, Artificial Sequence
  Description of Artificial Sequence: Synthetic oligonucleotide
acagagacucuuauagaug

SEQ ID NO: 2393588 - RNA, 19 nt, Artificial Sequence
  Description of Artificial Sequence: Synthetic oligonucleotide
ucuuggagacugccacucc

SEQ ID NO: 2393589 - RNA, 19 nt, Artificial Sequence
  Description of Artificial Sequence: Synthetic oligonucleotide
gguagcggcgcuuucgcag

SEQ ID NO: 2393590 - RNA, 19 nt, Artificial Sequence
  Description of Artificial Sequence: Synthetic oligonucleotide
gaagcugucugggcagagg

SEQ ID NO: 2393591 - RNA, 19 nt, Artificial Sequence
  Description of Artificial Sequence: Synthetic oligonucleotide
ggaaagagugcaucuggug

SEQ ID NO: 2393592 - RNA, 19 nt, Artificial Sequence
  Description of Artificial Sequence: Synthetic oligonucleotide
uagacagccccguuccgga

SEQ ID NO: 2393593 - RNA, 19 nt, Artificial Sequence
  Description of Artificial Sequence: Synthetic oligonucleotide
aaugcaugaggugcccgga

SEQ ID NO: 2393594 - RNA, 19 nt, Artificial Sequence
  Description of Artificial Sequence: Synthetic oligonucleotide
ccggauuuugacuccauag

SEQ ID NO: 2393595 - RNA, 19 nt, Artificial Sequence
  Description of Artificial Sequence: Synthetic oligonucleotide
uggagacugccacuccuga

SEQ ID NO: 2393596 - RNA, 19 nt, Artificial Sequence
  Description of Artificial Sequence: Synthetic oligonucleotide
gccggugauacucaaggag

SEQ ID NO: 2393597 - RNA, 19 nt, Artificial Sequence
  Description of Artificial Sequence: Synthetic oligonucleotide
accaaugcaugaggugccc

SEQ ID NO: 2393598 - RNA, 19 nt, Artificial Sequence
  Description of Artificial Sequence: Synthetic oligonucleotide
ccggugauacucaaggagc

SEQ ID NO: 2393599 - RNA, 19 nt, Artificial Sequence
  Description of Artificial Sequence: Synthetic oligonucleotide
uguacguggcuuucaggau

SEQ ID NO: 2393600 - RNA, 19 nt, Artificial Sequence
  Description of Artificial Sequence: Synthetic oligonucleotide
uugacuccauagacagccc

SEQ ID NO: 2393601 - RNA, 19 nt, Artificial Sequence
  Description of Artificial Sequence: Synthetic oligonucleotide
ggugcccggauuuugacuc

SEQ ID NO: 2393602 - RNA, 19 nt, Artificial Sequence
  Description of Artificial Sequence: Synthetic oligonucleotide
ugauacucaaggagccaua

SEQ ID NO: 2393603 - RNA, 19 nt, Artificial Sequence
  Description of Artificial Sequence: Synthetic oligonucleotide
ugugugcaaggggaacggg

SEQ ID NO: 2393604 - RNA, 19 nt, Artificial Sequence
  Description of Artificial Sequence: Synthetic oligonucleotide
ugccacacguugcuguccu

SEQ ID NO: 2393605 - RNA, 19 nt, Artificial Sequence
  Description of Artificial Sequence: Synthetic oligonucleotide
uccuaaacaccaggaggcc

SEQ ID NO: 2393606 - RNA, 19 nt, Artificial Sequence
  Description of Artificial Sequence: Synthetic oligonucleotide
gaccaaugcaugaggugcc

SEQ ID NO: 2393607 - RNA, 19 nt, Artificial Sequence
  Description of Artificial Sequence: Synthetic oligonucleotide
agugcaucuggugggucuc

SEQ ID NO: 2393608 - RNA, 19 nt, Artificial Sequence
  Description of Artificial Sequence: Synthetic oligonucleotide
cuuaagcagggccaacaca

SEQ ID NO: 2393609 - RNA, 19 nt, Artificial Sequence
  Description of Artificial Sequence: Synthetic oligonucleotide
aagagugcaucuggugggu

SEQ ID NO: 2393610 - RNA, 19 nt, Artificial Sequence
  Description of Artificial Sequence: Synthetic oligonucleotide
ugcaaggggaacggguccc

SEQ ID NO: 2393611 - RNA, 19 nt, Artificial Sequence
  Description of Artificial Sequence: Synthetic oligonucleotide
guagcggcgcuuucgcagc

SEQ ID NO: 2393612 - RNA, 19 nt, Artificial Sequence
  Description of Artificial Sequence: Synthetic oligonucleotide
gaucuggcuauugauguua

SEQ ID NO: 2393613 - RNA, 19 nt, Artificial Sequence
  Description of Artificial Sequence: Synthetic oligonucleotide
uguagcccuucuccacacc

SEQ ID NO: 2393614 - RNA, 19 nt, Artificial Sequence
  Description of Artificial Sequence: Synthetic oligonucleotide
uguagggcacagagacucu

SEQ ID NO: 2393615 - RNA, 19 nt, Artificial Sequence
  Description of Artificial Sequence: Synthetic oligonucleotide
cugugugcaaggggaacgg

SEQ ID NO: 2393616 - RNA, 19 nt, Artificial Sequence
  Description of Artificial Sequence: Synthetic oligonucleotide
ugcgguggggaggccaugg

SEQ ID NO: 2393617 - RNA, 19 nt, Artificial Sequence
  Description of Artificial Sequence: Synthetic oligonucleotide
cagagugggccggugauac

SEQ ID NO: 2393618 - RNA, 19 nt, Artificial Sequence
  Description of Artificial Sequence: Synthetic oligonucleotide
agggcuucgcuguguaaca

SEQ ID NO: 2393619 - RNA, 19 nt, Artificial Sequence
  Description of Artificial Sequence: Synthetic oligonucleotide
cauagacagccccguuccg

SEQ ID NO: 2393620 - RNA, 19 nt, Artificial Sequence
  Description of Artificial Sequence: Synthetic oligonucleotide
uggggaggccauggcaucg

SEQ ID NO: 2393621 - RNA, 19 nt, Artificial Sequence
  Description of Artificial Sequence: Synthetic oligonucleotide
accaauacccggccacacu

SEQ ID NO: 2393622 - RNA, 19 nt, Artificial Sequence
  Description of Artificial Sequence: Synthetic oligonucleotide
cagcguguugacagccugg

SEQ ID NO: 2393623 - RNA, 19 nt, Artificial Sequence
  Description of Artificial Sequence: Synthetic oligonucleotide
gguguacguggcuuucagg

SEQ ID NO: 2393624 - RNA, 19 nt, Artificial Sequence
  Description of Artificial Sequence: Synthetic oligonucleotide
acaaggcaaacaggacgcg

SEQ ID NO: 2393625 - RNA, 19 nt, Artificial Sequence
  Description of Artificial Sequence: Synthetic oligonucleotide
cauguugaucuggcuauug

SEQ ID NO: 2393626 - RNA, 19 nt, Artificial Sequence
  Description of Artificial Sequence: Synthetic oligonucleotide
uccgagaguggguguacgu

SEQ ID NO: 2393627 - RNA, 19 nt, Artificial Sequence
  Description of Artificial Sequence: Synthetic oligonucleotide
cacccaggcggcacaaggc

SEQ ID NO: 2393628 - RNA, 19 nt, Artificial Sequence
  Description of Artificial Sequence: Synthetic oligonucleotide
acccaggcggcacaaggca

SEQ ID NO: 2393629 - RNA, 19 nt, Artificial Sequence
  Description of Artificial Sequence: Synthetic oligonucleotide
aggucaugaccaaugcaug

SEQ ID NO: 2393630 - RNA, 19 nt, Artificial Sequence
  Description of Artificial Sequence: Synthetic oligonucleotide
gagugggccggugauacuc

SEQ ID NO: 2393631 - RNA, 19 nt, Artificial Sequence
  Description of Artificial Sequence: Synthetic oligonucleotide
gugguagcggcgcuuucgc

SEQ ID NO: 2393632 - RNA, 19 nt, Artificial Sequence
  Description of Artificial Sequence: Synthetic oligonucleotide
cucuguagaaucagguugu

SEQ ID NO: 2393633 - RNA, 19 nt, Artificial Sequence
  Description of Artificial Sequence: Synthetic oligonucleotide
gcugugugcaaggggaacg

SEQ ID NO: 2393634 - RNA, 19 nt, Artificial Sequence
  Description of Artificial Sequence: Synthetic oligonucleotide
augccacacguugcugucc

SEQ ID NO: 2393635 - RNA, 19 nt, Artificial Sequence
  Description of Artificial Sequence: Synthetic oligonucleotide
acucgguggaggaacccgg

SEQ ID NO: 2393636 - RNA, 19 nt, Artificial Sequence
  Description of Artificial Sequence: Synthetic oligonucleotide
caugccacacguugcuguc

SEQ ID NO: 2393637 - RNA, 19 nt, Artificial Sequence
  Description of Artificial Sequence: Synthetic oligonucleotide
ugcaugaggugcccggauu

SEQ ID NO: 2393638 - RNA, 19 nt, Artificial Sequence
  Description of Artificial Sequence: Synthetic oligonucleotide
gucugagaugucaugccac

SEQ ID NO: 2393639 - RNA, 19 nt, Artificial Sequence
  Description of Artificial Sequence: Synthetic oligonucleotide
uucgcagcagcguguugac

SEQ ID NO: 2393640 - RNA, 19 nt, Artificial Sequence
  Description of Artificial Sequence: Synthetic oligonucleotide
gcaagccagguuccgagag

SEQ ID NO: 2393641 - RNA, 19 nt, Artificial Sequence
  Description of Artificial Sequence: Synthetic oligonucleotide
ggucaugaccaaugcauga

SEQ ID NO: 2393642 - RNA, 19 nt, Artificial Sequence
  Description of Artificial Sequence: Synthetic oligonucleotide
aggaaagagugcaucuggu

SEQ ID NO: 2393643 - RNA, 19 nt, Artificial Sequence
  Description of Artificial Sequence: Synthetic oligonucleotide
gcuguccucguagagguag

SEQ ID NO: 2393644 - RNA, 19 nt, Artificial Sequence
  Description of Artificial Sequence: Synthetic oligonucleotide
ugccaggaaagagugcauc

SEQ ID NO: 2393645 - RNA, 19 nt, Artificial Sequence
  Description of Artificial Sequence: Synthetic oligonucleotide
gaucugccugccuccugcc

SEQ ID NO: 2393646 - RNA, 19 nt, Artificial Sequence
  Description of Artificial Sequence: Synthetic oligonucleotide
gggcuguguuacuuggagg

SEQ ID NO: 2393647 - RNA, 19 nt, Artificial Sequence
  Description of Artificial Sequence: Synthetic oligonucleotide
caugaccaaugcaugaggu

SEQ ID NO: 2393648 - RNA, 19 nt, Artificial Sequence
  Description of Artificial Sequence: Synthetic oligonucleotide
agggccaacacagcguggu

SEQ ID NO: 2393649 - RNA, 19 nt, Artificial Sequence
  Description of Artificial Sequence: Synthetic oligonucleotide
agugagggcugcagagugg

SEQ ID NO: 2393650 - RNA, 19 nt, Artificial Sequence
  Description of Artificial Sequence: Synthetic oligonucleotide
auggccuguagcuucucuu

SEQ ID NO: 2393651 - RNA, 19 nt, Artificial Sequence
  Description of Artificial Sequence: Synthetic oligonucleotide
cagguuccgagagugggug

SEQ ID NO: 2393652 - RNA, 19 nt, Artificial Sequence
  Description of Artificial Sequence: Synthetic oligonucleotide
aggugcccggauuuugacu

SEQ ID NO: 2393653 - RNA, 19 nt, Artificial Sequence
  Description of Artificial Sequence: Synthetic oligonucleotide
ucgguggaggaacccggcu

SEQ ID NO: 2393654 - RNA, 19 nt, Artificial Sequence
  Description of Artificial Sequence: Synthetic oligonucleotide
caucggagaacucggugga

SEQ ID NO: 2393655 - RNA, 19 nt, Artificial Sequence
  Description of Artificial Sequence: Synthetic oligonucleotide
aguggguguacguggcuuu

SEQ ID NO: 2393656 - RNA, 19 nt, Artificial Sequence
  Description of Artificial Sequence: Synthetic oligonucleotide
cgagaguggguguacgugg

SEQ ID NO: 2393657 - RNA, 19 nt, Artificial Sequence
  Description of Artificial Sequence: Synthetic oligonucleotide
cucgguggaggaacccggc

SEQ ID NO: 2393658 - RNA, 19 nt, Artificial Sequence
  Description of Artificial Sequence: Synthetic oligonucleotide
agcaagccagguuccgaga

SEQ ID NO: 2393659 - RNA, 19 nt, Artificial Sequence
  Description of Artificial Sequence: Synthetic oligonucleotide
ugaggaagucugagauguc

SEQ ID NO: 2393660 - RNA, 19 nt, Artificial Sequence
  Description of Artificial Sequence: Synthetic oligonucleotide
gcugccaggaaagagugca

SEQ ID NO: 2393661 - RNA, 19 nt, Artificial Sequence
  Description of Artificial Sequence: Synthetic oligonucleotide
cugccugccuccugccucc

SEQ ID NO: 2393662 - RNA, 19 nt, Artificial Sequence
  Description of Artificial Sequence: Synthetic oligonucleotide
acuccauagacagccccgu

SEQ ID NO: 2393663 - RNA, 19 nt, Artificial Sequence
  Description of Artificial Sequence: Synthetic oligonucleotide
agccccguuccggaagccc

SEQ ID NO: 2393664 - RNA, 19 nt, Artificial Sequence
  Description of Artificial Sequence: Synthetic oligonucleotide
ggcaucggagaacucggug

SEQ ID NO: 2393665 - RNA, 19 nt, Artificial Sequence
  Description of Artificial Sequence: Synthetic oligonucleotide
agaguggguguacguggcu

SEQ ID NO: 2393666 - RNA, 19 nt, Artificial Sequence
  Description of Artificial Sequence: Synthetic oligonucleotide
ccaaaucacugcugugugc

SEQ ID NO: 2393667 - RNA, 19 nt, Artificial Sequence
  Description of Artificial Sequence: Synthetic oligonucleotide
agcguguugacagccugga

SEQ ID NO: 2393668 - RNA, 19 nt, Artificial Sequence
  Description of Artificial Sequence: Synthetic oligonucleotide
ccuuaagcaccuugggcug

SEQ ID NO: 2393669 - RNA, 19 nt, Artificial Sequence
  Description of Artificial Sequence: Synthetic oligonucleotide
cugagaugucaugccacac

SEQ ID NO: 2393670 - RNA, 19 nt, Artificial Sequence
  Description of Artificial Sequence: Synthetic oligonucleotide
caggacgcgugaugucagg

SEQ ID NO: 2393671 - RNA, 19 nt, Artificial Sequence
  Description of Artificial Sequence: Synthetic oligonucleotide
aggucauggaggacugcag

SEQ ID NO: 2393672 - RNA, 19 nt, Artificial Sequence
  Description of Artificial Sequence: Synthetic oligonucleotide
gaacucgguggaggaaccc

SEQ ID NO: 2393673 - RNA, 19 nt, Artificial Sequence
  Description of Artificial Sequence: Synthetic oligonucleotide
gagugcaucuggugggucu

SEQ ID NO: 2393674 - RNA, 19 nt, Artificial Sequence
  Description of Artificial Sequence: Synthetic oligonucleotide
ggcagaggaguuccuuaag

SEQ ID NO: 2393675 - RNA, 19 nt, Artificial Sequence
  Description of Artificial Sequence: Synthetic oligonucleotide
ggguguacguggcuuucag

SEQ ID NO: 2393676 - RNA, 19 nt, Artificial Sequence
  Description of Artificial Sequence: Synthetic oligonucleotide
aggaagucugagaugucau

SEQ ID NO: 2393677 - RNA, 19 nt, Artificial Sequence
  Description of Artificial Sequence: Synthetic oligonucleotide
uggcaucggagaacucggu

SEQ ID NO: 2393678 - RNA, 19 nt, Artificial Sequence
  Description of Artificial Sequence: Synthetic oligonucleotide
gcugagcuuagggauguag

SEQ ID NO: 2393679 - RNA, 19 nt, Artificial Sequence
  Description of Artificial Sequence: Synthetic oligonucleotide
ggccaacacagcgugguag

SEQ ID NO: 2393680 - RNA, 19 nt, Artificial Sequence
  Description of Artificial Sequence: Synthetic oligonucleotide
acaggacgcgugaugucag

SEQ ID NO: 2393681 - RNA, 19 nt, Artificial Sequence
  Description of Artificial Sequence: Synthetic oligonucleotide
gguaggucauggaggacug

SEQ ID NO: 2393682 - RNA, 19 nt, Artificial Sequence
  Description of Artificial Sequence: Synthetic oligonucleotide
gaacgggucccagcugagc

SEQ ID NO: 2393683 - RNA, 19 nt, Artificial Sequence
  Description of Artificial Sequence: Synthetic oligonucleotide
cuuagggauguagcccuuc

SEQ ID NO: 2393684 - RNA, 19 nt, Artificial Sequence
  Description of Artificial Sequence: Synthetic oligonucleotide
gccaccaauacccggccac

SEQ ID NO: 2393685 - RNA, 19 nt, Artificial Sequence
  Description of Artificial Sequence: Synthetic oligonucleotide
cguguugacagccuggaga

SEQ ID NO: 2393686 - RNA, 19 nt, Artificial Sequence
  Description of Artificial Sequence: Synthetic oligonucleotide
cccaaaucacugcugugug

SEQ ID NO: 2393687 - RNA, 19 nt, Artificial Sequence
  Description of Artificial Sequence: Synthetic oligonucleotide
gcuguguuacuuggagggg

SEQ ID NO: 2393688 - RNA, 19 nt, Artificial Sequence
  Description of Artificial Sequence: Synthetic oligonucleotide
ugguagcggcgcuuucgca

SEQ ID NO: 2393689 - RNA, 19 nt, Artificial Sequence
  Description of Artificial Sequence: Synthetic oligonucleotide
ccuaaacaccaggaggccc

SEQ ID NO: 2393690 - RNA, 19 nt, Artificial Sequence
  Description of Artificial Sequence: Synthetic oligonucleotide
cggugauacucaaggagcc

SEQ ID NO: 2393691 - RNA, 19 nt, Artificial Sequence
  Description of Artificial Sequence: Synthetic oligonucleotide
ucuggcuauugauguuauu

SEQ ID NO: 2393692 - RNA, 19 nt, Artificial Sequence
  Description of Artificial Sequence: Synthetic oligonucleotide
uggguguacguggcuuuca

SEQ ID NO: 2393693 - RNA, 19 nt, Artificial Sequence
  Description of Artificial Sequence: Synthetic oligonucleotide
ccuuaagcagggccaacac

SEQ ID NO: 2393694 - RNA, 19 nt, Artificial Sequence
  Description of Artificial Sequence: Synthetic oligonucleotide
augcaugaggugcccggau

SEQ ID NO: 2393695 - RNA, 19 nt, Artificial Sequence
  Description of Artificial Sequence: Synthetic oligonucleotide
ugucugggcagaggaguuc

SEQ ID NO: 2393696 - RNA, 19 nt, Artificial Sequence
  Description of Artificial Sequence: Synthetic oligonucleotide
gcagcguguugacagccug

SEQ ID NO: 2393697 - RNA, 19 nt, Artificial Sequence
  Description of Artificial Sequence: Synthetic oligonucleotide
aggacgcgugaugucaggu

SEQ ID NO: 2393698 - RNA, 19 nt, Artificial Sequence
  Description of Artificial Sequence: Synthetic oligonucleotide
ccacacguugcuguccucg

SEQ ID NO: 2393699 - RNA, 19 nt, Artificial Sequence
  Description of Artificial Sequence: Synthetic oligonucleotide
ugcccggauuuugacucca

SEQ ID NO: 2393700 - RNA, 19 nt, Artificial Sequence
  Description of Artificial Sequence: Synthetic oligonucleotide
guagaaucagguuguucuu

SEQ ID NO: 2393701 - RNA, 19 nt, Artificial Sequence
  Description of Artificial Sequence: Synthetic oligonucleotide
cagggccaacacagcgugg

SEQ ID NO: 2393702 - RNA, 19 nt, Artificial Sequence
  Description of Artificial Sequence: Synthetic oligonucleotide
cccgaugaaggcugccagg

SEQ ID NO: 2393703 - RNA, 19 nt, Artificial Sequence
  Description of Artificial Sequence: Synthetic oligonucleotide
agguuccgagagugggugu

SEQ ID NO: 2393704 - RNA, 19 nt, Artificial Sequence
  Description of Artificial Sequence: Synthetic oligonucleotide
gugcccggauuuugacucc

SEQ ID NO: 2393705 - RNA, 19 nt, Artificial Sequence
  Description of Artificial Sequence: Synthetic oligonucleotide
cucguagagguaggucaug

SEQ ID NO: 2393706 - RNA, 19 nt, Artificial Sequence
  Description of Artificial Sequence: Synthetic oligonucleotide
gucaugccacacguugcug

SEQ ID NO: 2393707 - RNA, 19 nt, Artificial Sequence
  Description of Artificial Sequence: Synthetic oligonucleotide
caccaauacccggccacac

SEQ ID NO: 2393708 - RNA, 19 nt, Artificial Sequence
  Description of Artificial Sequence: Synthetic oligonucleotide
agagugggccggugauacu

SEQ ID NO: 2393709 - RNA, 19 nt, Artificial Sequence
  Description of Artificial Sequence: Synthetic oligonucleotide
gugauacucaaggagccau

SEQ ID NO: 2393710 - RNA, 19 nt, Artificial Sequence
  Description of Artificial Sequence: Synthetic oligonucleotide
ucgcuguguaacagcccua

SEQ ID NO: 2393711 - RNA, 19 nt, Artificial Sequence
  Description of Artificial Sequence: Synthetic oligonucleotide
cuuucgcagcagcguguug

SEQ ID NO: 2393712 - RNA, 19 nt, Artificial Sequence
  Description of Artificial Sequence: Synthetic oligonucleotide
agagacucuuauagaugaa

SEQ ID NO: 2393713 - RNA, 19 nt, Artificial Sequence
  Description of Artificial Sequence: Synthetic oligonucleotide
cuuggaggggcggcucuug

SEQ ID NO: 2393714 - RNA, 19 nt, Artificial Sequence
  Description of Artificial Sequence: Synthetic oligonucleotide
gcggcacaaggcaaacagg

SEQ ID NO: 2393715 - RNA, 19 nt, Artificial Sequence
  Description of Artificial Sequence: Synthetic oligonucleotide
guuacuuggaggggcggcu

SEQ ID NO: 2393716 - RNA, 19 nt, Artificial Sequence
  Description of Artificial Sequence: Synthetic oligonucleotide
gcgcuuucgcagcagcgug

SEQ ID NO: 2393717 - RNA, 19 nt, Artificial Sequence
  Description of Artificial Sequence: Synthetic oligonucleotide
guaggucauggaggacugc

SEQ ID NO: 2393718 - RNA, 19 nt, Artificial Sequence
  Description of Artificial Sequence: Synthetic oligonucleotide
acacguugcuguccucgua

SEQ ID NO: 2393719 - RNA, 19 nt, Artificial Sequence
  Description of Artificial Sequence: Synthetic oligonucleotide
ggucauggaggacugcagu

SEQ ID NO: 2393720 - RNA, 19 nt, Artificial Sequence
  Description of Artificial Sequence: Synthetic oligonucleotide
ugggacuguagggcacaga

SEQ ID NO: 2393721 - RNA, 19 nt, Artificial Sequence
  Description of Artificial Sequence: Synthetic oligonucleotide
gguacauguugaucuggcu

SEQ ID NO: 2393722 - RNA, 19 nt, Artificial Sequence
  Description of Artificial Sequence: Synthetic oligonucleotide
ggugauacucaaggagcca

SEQ ID NO: 2393723 - RNA, 19 nt, Artificial Sequence
  Description of Artificial Sequence: Synthetic oligonucleotide
gagaaaggucaugaccaau

SEQ ID NO: 2393724 - RNA, 19 nt, Artificial Sequence
  Description of Artificial Sequence: Synthetic oligonucleotide
gagguaggucauggaggac

SEQ ID NO: 2393725 - RNA, 19 nt, Artificial Sequence
  Description of Artificial Sequence: Synthetic oligonucleotide
guccucguagagguagguc

SEQ ID NO: 2393726 - RNA, 19 nt, Artificial Sequence
  Description of Artificial Sequence: Synthetic oligonucleotide
ccaacacagcgugguagcg

SEQ ID NO: 2393727 - RNA, 19 nt, Artificial Sequence
  Description of Artificial Sequence: Synthetic oligonucleotide
uaagcaccuugggcugugu

SEQ ID NO: 2393728 - RNA, 19 nt, Artificial Sequence
  Description of Artificial Sequence: Synthetic oligonucleotide
ggcuauugauguuauuguu

SEQ ID NO: 2393729 - RNA, 19 nt, Artificial Sequence
  Description of Artificial Sequence: Synthetic oligonucleotide
acguggcuuucaggauggc

SEQ ID NO: 2393730 - RNA, 19 nt, Artificial Sequence
  Description of Artificial Sequence: Synthetic oligonucleotide
acgggucccagcugagcuu

SEQ ID NO: 2393731 - RNA, 19 nt, Artificial Sequence
  Description of Artificial Sequence: Synthetic oligonucleotide
acauguugaucuggcuauu

SEQ ID NO: 2393732 - RNA, 19 nt, Artificial Sequence
  Description of Artificial Sequence: Synthetic oligonucleotide
gggcagaggaguuccuuaa

SEQ ID NO: 2393733 - RNA, 19 nt, Artificial Sequence
  Description of Artificial Sequence: Synthetic oligonucleotide
agcagcguguugacagccu

SEQ ID NO: 2393734 - RNA, 19 nt, Artificial Sequence
  Description of Artificial Sequence: Synthetic oligonucleotide
ccaaugcaugaggugcccg

SEQ ID NO: 2393735 - RNA, 19 nt, Artificial Sequence
  Description of Artificial Sequence: Synthetic oligonucleotide
agacagccccguuccggaa

SEQ ID NO: 2393736 - RNA, 19 nt, Artificial Sequence
  Description of Artificial Sequence: Synthetic oligonucleotide
agcugcgguggggaggcca

SEQ ID NO: 2393737 - RNA, 19 nt, Artificial Sequence
  Description of Artificial Sequence: Synthetic oligonucleotide
gugugcaaggggaacgggu

SEQ ID NO: 2393738 - RNA, 19 nt, Artificial Sequence
  Description of Artificial Sequence: Synthetic oligonucleotide
cgugguagcggcgcuuucg

SEQ ID NO: 2393739 - RNA, 19 nt, Artificial Sequence
  Description of Artificial Sequence: Synthetic oligonucleotide
caggcggcacaaggcaaac

SEQ ID NO: 2393740 - RNA, 19 nt, Artificial Sequence
  Description of Artificial Sequence: Synthetic oligonucleotide
gccuggaagcugucugggc

SEQ ID NO: 2393741 - RNA, 19 nt, Artificial Sequence
  Description of Artificial Sequence: Synthetic oligonucleotide
auacccggccacacugccu

SEQ ID NO: 2393742 - RNA, 19 nt, Artificial Sequence
  Description of Artificial Sequence: Synthetic oligonucleotide
ccgagaguggguguacgug

SEQ ID NO: 2393743 - RNA, 19 nt, Artificial Sequence
  Description of Artificial Sequence: Synthetic oligonucleotide
guggguguacguggcuuuc

SEQ ID NO: 2393744 - RNA, 19 nt, Artificial Sequence
  Description of Artificial Sequence: Synthetic oligonucleotide
gggcuucgcuguguaacag

SEQ ID NO: 2393745 - RNA, 19 nt, Artificial Sequence
  Description of Artificial Sequence: Synthetic oligonucleotide
guagcuucucuuggagacu

SEQ ID NO: 2393746 - RNA, 19 nt, Artificial Sequence
  Description of Artificial Sequence: Synthetic oligonucleotide
gcguguugacagccuggag

SEQ ID NO: 2393747 - RNA, 19 nt, Artificial Sequence
  Description of Artificial Sequence: Synthetic oligonucleotide
agaugucaugccacacguu

SEQ ID NO: 2393748 - RNA, 19 nt, Artificial Sequence
  Description of Artificial Sequence: Synthetic oligonucleotide
cguuccggaagcccuuaag

SEQ ID NO: 2393749 - RNA, 19 nt, Artificial Sequence
  Description of Artificial Sequence: Synthetic oligonucleotide
ggccggugauacucaagga

SEQ ID NO: 2393750 - RNA, 19 nt, Artificial Sequence
  Description of Artificial Sequence: Synthetic oligonucleotide
ggaacgggucccagcugag

SEQ ID NO: 2393751 - RNA, 19 nt, Artificial Sequence
  Description of Artificial Sequence: Synthetic oligonucleotide
cgcuguguaacagcccuag

SEQ ID NO: 2393752 - RNA, 19 nt, Artificial Sequence
  Description of Artificial Sequence: Synthetic oligonucleotide
cuagcuguccuggaacuuu

SEQ ID NO: 2393753 - RNA, 19 nt, Artificial Sequence
  Description of Artificial Sequence: Synthetic oligonucleotide
agcggcgcuuucgcagcag

SEQ ID NO: 2393754 - RNA, 19 nt, Artificial Sequence
  Description of Artificial Sequence: Synthetic oligonucleotide
ggacgcgugaugucaggua

SEQ ID NO: 2393755 - RNA, 19 nt, Artificial Sequence
  Description of Artificial Sequence: Synthetic oligonucleotide
ccgaugaaggcugccagga

SEQ ID NO: 2393756 - RNA, 19 nt, Artificial Sequence
  Description of Artificial Sequence: Synthetic oligonucleotide
gaguggguguacguggcuu

SEQ ID NO: 2393757 - RNA, 19 nt, Artificial Sequence
  Description of Artificial Sequence: Synthetic oligonucleotide
aggcggcacaaggcaaaca

SEQ ID NO: 2393758 - RNA, 19 nt, Artificial Sequence
  Description of Artificial Sequence: Synthetic oligonucleotide
cguggcuuucaggauggcc

SEQ ID NO: 2393759 - RNA, 19 nt, Artificial Sequence
  Description of Artificial Sequence: Synthetic oligonucleotide
caagccagguuccgagagu

SEQ ID NO: 2393760 - RNA, 19 nt, Artificial Sequence
  Description of Artificial Sequence: Synthetic oligonucleotide
ggccauggcaucggagaac

SEQ ID NO: 2393761 - RNA, 19 nt, Artificial Sequence
  Description of Artificial Sequence: Synthetic oligonucleotide
gcggcgcuuucgcagcagc

SEQ ID NO: 2393762 - RNA, 19 nt, Artificial Sequence
  Description of Artificial Sequence: Synthetic oligonucleotide
cacacguugcuguccucgu

SEQ ID NO: 2393763 - RNA, 19 nt, Artificial Sequence
  Description of Artificial Sequence: Synthetic oligonucleotide
gguuccgagagugggugua

SEQ ID NO: 2393764 - RNA, 19 nt, Artificial Sequence
  Description of Artificial Sequence: Synthetic oligonucleotide
cccuuaagcagggccaaca

SEQ ID NO: 2393765 - RNA, 19 nt, Artificial Sequence
  Description of Artificial Sequence: Synthetic oligonucleotide
gugggccggugauacucaa

SEQ ID NO: 2393766 - RNA, 19 nt, Artificial Sequence
  Description of Artificial Sequence: Synthetic oligonucleotide
gggcacagagacucuuaua

SEQ ID NO: 2393767 - RNA, 19 nt, Artificial Sequence
  Description of Artificial Sequence: Synthetic oligonucleotide
gugaugucagguacauguu

SEQ ID NO: 2393768 - RNA, 19 nt, Artificial Sequence
  Description of Artificial Sequence: Synthetic oligonucleotide
ggagaacucgguggaggaa

SEQ ID NO: 2393769 - RNA, 19 nt, Artificial Sequence
  Description of Artificial Sequence: Synthetic oligonucleotide
ggaagcccuuaagcagggc

SEQ ID NO: 2393770 - RNA, 19 nt, Artificial Sequence
  Description of Artificial Sequence: Synthetic oligonucleotide
gcaugaggugcccggauuu

SEQ ID NO: 2393771 - RNA, 19 nt, Artificial Sequence
  Description of Artificial Sequence: Synthetic oligonucleotide
ccccuugcacaugggacug

SEQ ID NO: 2393772 - RNA, 19 nt, Artificial Sequence
  Description of Artificial Sequence: Synthetic oligonucleotide
cggcgcuuucgcagcagcg

SEQ ID NO: 2393773 - RNA, 19 nt, Artificial Sequence
  Description of Artificial Sequence: Synthetic oligonucleotide
ccccaaaucacugcugugu

SEQ ID NO: 2393774 - RNA, 19 nt, Artificial Sequence
  Description of Artificial Sequence: Synthetic oligonucleotide
ccaggcggcacaaggcaaa

SEQ ID NO: 2393775 - RNA, 19 nt, Artificial Sequence
  Description of Artificial Sequence: Synthetic oligonucleotide
ggcgcuuucgcagcagcgu

SEQ ID NO: 2393776 - RNA, 19 nt, Artificial Sequence
  Description of Artificial Sequence: Synthetic oligonucleotide
ugccugccuccugccuccc

SEQ ID NO: 2393777 - RNA, 19 nt, Artificial Sequence
  Description of Artificial Sequence: Synthetic oligonucleotide
cagccccguuccggaagcc

SEQ ID NO: 2393778 - RNA, 19 nt, Artificial Sequence
  Description of Artificial Sequence: Synthetic oligonucleotide
gcgugaugucagguacaug

SEQ ID NO: 2393779 - RNA, 19 nt, Artificial Sequence
  Description of Artificial Sequence: Synthetic oligonucleotide
ggcggcucuuguugaagau

SEQ ID NO: 2393780 - RNA, 19 nt, Artificial Sequence
  Description of Artificial Sequence: Synthetic oligonucleotide
gggucuccccuugcacaug

SEQ ID NO: 2393781 - RNA, 19 nt, Artificial Sequence
  Description of Artificial Sequence: Synthetic oligonucleotide
ccaccaauacccggccaca

SEQ ID NO: 2393782 - RNA, 19 nt, Artificial Sequence
  Description of Artificial Sequence: Synthetic oligonucleotide
caugaggugcccggauuuu

SEQ ID NO: 2393783 - RNA, 19 nt, Artificial Sequence
  Description of Artificial Sequence: Synthetic oligonucleotide
ccucguagagguaggucau

SEQ ID NO: 2393784 - RNA, 19 nt, Artificial Sequence
  Description of Artificial Sequence: Synthetic oligonucleotide
agcugagcuuagggaugua

SEQ ID NO: 2393785 - RNA, 19 nt, Artificial Sequence
  Description of Artificial Sequence: Synthetic oligonucleotide
cccggauuuugacuccaua

SEQ ID NO: 2393786 - RNA, 19 nt, Artificial Sequence
  Description of Artificial Sequence: Synthetic oligonucleotide
ccauggcaucggagaacuc

SEQ ID NO: 2393787 - RNA, 19 nt, Artificial Sequence
  Description of Artificial Sequence: Synthetic oligonucleotide
gggccaacacagcguggua

SEQ ID NO: 2393788 - RNA, 19 nt, Artificial Sequence
  Description of Artificial Sequence: Synthetic oligonucleotide
cuccauagacagccccguu

SEQ ID NO: 2393789 - RNA, 19 nt, Artificial Sequence
  Description of Artificial Sequence: Synthetic oligonucleotide
gcccuuaagcagggccaac

SEQ ID NO: 2393790 - RNA, 19 nt, Artificial Sequence
  Description of Artificial Sequence: Synthetic oligonucleotide
gggucccagcugagcuuag

SEQ ID NO: 2393791 - RNA, 19 nt, Artificial Sequence
  Description of Artificial Sequence: Synthetic oligonucleotide
gccacacguugcuguccuc

SEQ ID NO: 2393792 - RNA, 19 nt, Artificial Sequence
  Description of Artificial Sequence: Synthetic oligonucleotide
ccuugcacaugggacugua

SEQ ID NO: 2393793 - RNA, 19 nt, Artificial Sequence
  Description of Artificial Sequence: Synthetic oligonucleotide
gcgugguagcggcgcuuuc

SEQ ID NO: 2393794 - RNA, 19 nt, Artificial Sequence
  Description of Artificial Sequence: Synthetic oligonucleotide
gcuuucgcagcagcguguu

SEQ ID NO: 2393795 - RNA, 19 nt, Artificial Sequence
  Description of Artificial Sequence: Synthetic oligonucleotide
gccccguuccggaagcccu

SEQ ID NO: 2393796 - RNA, 19 nt, Artificial Sequence
  Description of Artificial Sequence: Synthetic oligonucleotide
ccggccacacugccuggaa

SEQ ID NO: 2393797 - RNA, 19 nt, Artificial Sequence
  Description of Artificial Sequence: Synthetic oligonucleotide
gcugcgguggggaggccau

SEQ ID NO: 2393798 - RNA, 19 nt, Artificial Sequence
  Description of Artificial Sequence: Synthetic oligonucleotide
cgcuuucgcagcagcgugu

SEQ ID NO: 2393799 - RNA, 19 nt, Artificial Sequence
  Description of Artificial Sequence: Synthetic oligonucleotide
cgggucccagcugagcuua

SEQ ID NO: 2393800 - RNA, 19 nt, Artificial Sequence
  Description of Artificial Sequence: Synthetic oligonucleotide
cccggccacacugccugga

SEQ ID NO: 2393801 - RNA, 19 nt, Artificial Sequence
  Description of Artificial Sequence: Synthetic oligonucleotide
cgcgugaugucagguacau

SEQ ID NO: 2393802 - RNA, 19 nt, Artificial Sequence
  Description of Artificial Sequence: Synthetic oligonucleotide
gcccggauuuugacuccau

SEQ ID NO: 2393803 - RNA, 19 nt, Artificial Sequence
  Description of Artificial Sequence: Synthetic oligonucleotide
cccuugcacaugggacugu

SEQ ID NO: 2393804 - RNA, 19 nt, Artificial Sequence
  Description of Artificial Sequence: Synthetic oligonucleotide
aauauuuuauggaagaucg

SEQ ID NO: 2393805 - RNA, 19 nt, Artificial Sequence
  Description of Artificial Sequence: Synthetic oligonucleotide
gauuccaauguuuagaagg

SEQ ID NO: 2393806 - RNA, 19 nt, Artificial Sequence
  Description of Artificial Sequence: Synthetic oligonucleotide
aauaacaaaguagaagccc

SEQ ID NO: 2393807 - RNA, 19 nt, Artificial Sequence
  Description of Artificial Sequence: Synthetic oligonucleotide
uuaaauguaaauuuugaga

SEQ ID NO: 2393808 - RNA, 19 nt, Artificial Sequence
  Description of Artificial Sequence: Synthetic oligonucleotide
ucuaacucaaauuucauca

SEQ ID NO: 2393809 - RNA, 19 nt, Artificial Sequence
  Description of Artificial Sequence: Synthetic oligonucleotide
aaaauauugggguaaucuc

SEQ ID NO: 2393810 - RNA, 19 nt, Artificial Sequence
  Description of Artificial Sequence: Synthetic oligonucleotide
caaggauaaauuuugagcc

SEQ ID NO: 2393811 - RNA, 19 nt, Artificial Sequence
  Description of Artificial Sequence: Synthetic oligonucleotide
aaauauugggguaaucucc

SEQ ID NO: 2393812 - RNA, 19 nt, Artificial Sequence
  Description of Artificial Sequence: Synthetic oligonucleotide
ugaacuuuguauuaguagc

SEQ ID NO: 2393813 - RNA, 19 nt, Artificial Sequence
  Description of Artificial Sequence: Synthetic oligonucleotide
ugauuuauguaucugugag

SEQ ID NO: 2393814 - RNA, 19 nt, Artificial Sequence
  Description of Artificial Sequence: Synthetic oligonucleotide
uuuguugucauucugaguu

SEQ ID NO: 2393815 - RNA, 19 nt, Artificial Sequence
  Description of Artificial Sequence: Synthetic oligonucleotide
aucaaagugaaaugggagc

SEQ ID NO: 2393816 - RNA, 19 nt, Artificial Sequence
  Description of Artificial Sequence: Synthetic oligonucleotide
aagauggugucaaagacgc

SEQ ID NO: 2393817 - RNA, 19 nt, Artificial Sequence
  Description of Artificial Sequence: Synthetic oligonucleotide
ucaagcaaugaauugacag

SEQ ID NO: 2393818 - RNA, 19 nt, Artificial Sequence
  Description of Artificial Sequence: Synthetic oligonucleotide
uucuagaacacacagacaa

SEQ ID NO: 2393819 - RNA, 19 nt, Artificial Sequence
  Description of Artificial Sequence: Synthetic oligonucleotide
uagcauacaaaauauuggg

SEQ ID NO: 2393820 - RNA, 19 nt, Artificial Sequence
  Description of Artificial Sequence: Synthetic oligonucleotide
uuagaugcaguauagauau

SEQ ID NO: 2393821 - RNA, 19 nt, Artificial Sequence
  Description of Artificial Sequence: Synthetic oligonucleotide
uuauaagucagcauuaaau

SEQ ID NO: 2393822 - RNA, 19 nt, Artificial Sequence
  Description of Artificial Sequence: Synthetic oligonucleotide
cauuaaauuucucacagag

SEQ ID NO: 2393823 - RNA, 19 nt, Artificial Sequence
  Description of Artificial Sequence: Synthetic oligonucleotide
auuaguagcaauuucugug

SEQ ID NO: 2393824 - RNA, 19 nt, Artificial Sequence
  Description of Artificial Sequence: Synthetic oligonucleotide
uuuuauggaagaucgcugg

SEQ ID NO: 2393825 - RNA, 19 nt, Artificial Sequence
  Description of Artificial Sequence: Synthetic oligonucleotide
aaauuuugagccauucacc

SEQ ID NO: 2393826 - RNA, 19 nt, Artificial Sequence
  Description of Artificial Sequence: Synthetic oligonucleotide
uuauuaacaguuugaaacc

SEQ ID NO: 2393827 - RNA, 19 nt, Artificial Sequence
  Description of Artificial Sequence: Synthetic oligonucleotide
aaauaacaaaguagaagcc

SEQ ID NO: 2393828 - RNA, 19 nt, Artificial Sequence
  Description of Artificial Sequence: Synthetic oligonucleotide
uuuucguugaauuuccuca

SEQ ID NO: 2393829 - RNA, 19 nt, Artificial Sequence
  Description of Artificial Sequence: Synthetic oligonucleotide
uaaauuuugagacccucag

SEQ ID NO: 2393830 - RNA, 19 nt, Artificial Sequence
  Description of Artificial Sequence: Synthetic oligonucleotide
uuucaucaaagugaaaugg

SEQ ID NO: 2393831 - RNA, 19 nt, Artificial Sequence
  Description of Artificial Sequence: Synthetic oligonucleotide
uucaucaaagugaaauggg

SEQ ID NO: 2393832 - RNA, 19 nt, Artificial Sequence
  Description of Artificial Sequence: Synthetic oligonucleotide
uauagauauuucuggaucc

SEQ ID NO: 2393833 - RNA, 19 nt, Artificial Sequence
  Description of Artificial Sequence: Synthetic oligonucleotide
uaucaauugaauuucuaga

SEQ ID NO: 2393834 - RNA, 19 nt, Artificial Sequence
  Description of Artificial Sequence: Synthetic oligonucleotide
cuuaaauguaaauuuugag

SEQ ID NO: 2393835 - RNA, 19 nt, Artificial Sequence
  Description of Artificial Sequence: Synthetic oligonucleotide
gacgcagaauauuuuaugg

SEQ ID NO: 2393836 - RNA, 19 nt, Artificial Sequence
  Description of Artificial Sequence: Synthetic oligonucleotide
aaaguucuaucacggauag

SEQ ID NO: 2393837 - RNA, 19 nt, Artificial Sequence
  Description of Artificial Sequence: Synthetic oligonucleotide
gauaguuauuaacaguuug

SEQ ID NO: 2393838 - RNA, 19 nt, Artificial Sequence
  Description of Artificial Sequence: Synthetic oligonucleotide
ugguauauauugauuauca

SEQ ID NO: 2393839 - RNA, 19 nt, Artificial Sequence
  Description of Artificial Sequence: Synthetic oligonucleotide
aauugaauuucuagaacac

SEQ ID NO: 2393840 - RNA, 19 nt, Artificial Sequence
  Description of Artificial Sequence: Synthetic oligonucleotide
uaucuguuagggauggugg

SEQ ID NO: 2393841 - RNA, 19 nt, Artificial Sequence
  Description of Artificial Sequence: Synthetic oligonucleotide
uauauugauuaucaauuga

SEQ ID NO: 2393842 - RNA, 19 nt, Artificial Sequence
  Description of Artificial Sequence: Synthetic oligonucleotide
uguuauuuauacuuucuga

SEQ ID NO: 2393843 - RNA, 19 nt, Artificial Sequence
  Description of Artificial Sequence: Synthetic oligonucleotide
ugggguaaucuccacaugg

SEQ ID NO: 2393844 - RNA, 19 nt, Artificial Sequence
  Description of Artificial Sequence: Synthetic oligonucleotide
ugcaguauagauauuucug

SEQ ID NO: 2393845 - RNA, 19 nt, Artificial Sequence
  Description of Artificial Sequence: Synthetic oligonucleotide
ugaguuaucuguuagggau

SEQ ID NO: 2393846 - RNA, 19 nt, Artificial Sequence
  Description of Artificial Sequence: Synthetic oligonucleotide
ugugaguuaucuguuaggg

SEQ ID NO: 2393847 - RNA, 19 nt, Artificial Sequence
  Description of Artificial Sequence: Synthetic oligonucleotide
uuuggaguguuauuuauac

SEQ ID NO: 2393848 - RNA, 19 nt, Artificial Sequence
  Description of Artificial Sequence: Synthetic oligonucleotide
auguuuagaagguaccgac

SEQ ID NO: 2393849 - RNA, 19 nt, Artificial Sequence
  Description of Artificial Sequence: Synthetic oligonucleotide
ucagcauuaaauuucucac

SEQ ID NO: 2393850 - RNA, 19 nt, Artificial Sequence
  Description of Artificial Sequence: Synthetic oligonucleotide
ucaaacuugaacuuccuuc

SEQ ID NO: 2393851 - RNA, 19 nt, Artificial Sequence
  Description of Artificial Sequence: Synthetic oligonucleotide
aggagaauacuuucuauuc

SEQ ID NO: 2393852 - RNA, 19 nt, Artificial Sequence
  Description of Artificial Sequence: Synthetic oligonucleotide
uuaguagcaauuucugugc

SEQ ID NO: 2393853 - RNA, 19 nt, Artificial Sequence
  Description of Artificial Sequence: Synthetic oligonucleotide
uuuugagccauucaccugu

SEQ ID NO: 2393854 - RNA, 19 nt, Artificial Sequence
  Description of Artificial Sequence: Synthetic oligonucleotide
ugacgaacugacaagauuc

SEQ ID NO: 2393855 - RNA, 19 nt, Artificial Sequence
  Description of Artificial Sequence: Synthetic oligonucleotide
ucacggauaguuauuaaca

SEQ ID NO: 2393856 - RNA, 19 nt, Artificial Sequence
  Description of Artificial Sequence: Synthetic oligonucleotide
acaaaguagaagcccgugc

SEQ ID NO: 2393857 - RNA, 19 nt, Artificial Sequence
  Description of Artificial Sequence: Synthetic oligonucleotide
ugcuuuauaagucagcauu

SEQ ID NO: 2393858 - RNA, 19 nt, Artificial Sequence
  Description of Artificial Sequence: Synthetic oligonucleotide
aucacggauaguuauuaac

SEQ ID NO: 2393859 - RNA, 19 nt, Artificial Sequence
  Description of Artificial Sequence: Synthetic oligonucleotide
uuauuuauacuuucugacu

SEQ ID NO: 2393860 - RNA, 19 nt, Artificial Sequence
  Description of Artificial Sequence: Synthetic oligonucleotide
uauuaacaguuugaaaccg

SEQ ID NO: 2393861 - RNA, 19 nt, Artificial Sequence
  Description of Artificial Sequence: Synthetic oligonucleotide
uauuuuauggaagaucgcu

SEQ ID NO: 2393862 - RNA, 19 nt, Artificial Sequence
  Description of Artificial Sequence: Synthetic oligonucleotide
acugacaagauuccaaugu

SEQ ID NO: 2393863 - RNA, 19 nt, Artificial Sequence
  Description of Artificial Sequence: Synthetic oligonucleotide
cucaaauuucaucaaagug

SEQ ID NO: 2393864 - RNA, 19 nt, Artificial Sequence
  Description of Artificial Sequence: Synthetic oligonucleotide
auaacaaaguagaagcccg

SEQ ID NO: 2393865 - RNA, 19 nt, Artificial Sequence
  Description of Artificial Sequence: Synthetic oligonucleotide
ucaucaaagugaaauggga

SEQ ID NO: 2393866 - RNA, 19 nt, Artificial Sequence
  Description of Artificial Sequence: Synthetic oligonucleotide
auuucaucaaagugaaaug

SEQ ID NO: 2393867 - RNA, 19 nt, Artificial Sequence
  Description of Artificial Sequence: Synthetic oligonucleotide
ucugugaguuaucuguuag

SEQ ID NO: 2393868 - RNA, 19 nt, Artificial Sequence
  Description of Artificial Sequence: Synthetic oligonucleotide
aguugaugaguacugaacu

SEQ ID NO: 2393869 - RNA, 19 nt, Artificial Sequence
  Description of Artificial Sequence: Synthetic oligonucleotide
uggaguguuauuuauacuu

SEQ ID NO: 2393870 - RNA, 19 nt, Artificial Sequence
  Description of Artificial Sequence: Synthetic oligonucleotide
aacuugaacuuccuucaag

SEQ ID NO: 2393871 - RNA, 19 nt, Artificial Sequence
  Description of Artificial Sequence: Synthetic oligonucleotide
ucucacagagaaaucaaga

SEQ ID NO: 2393872 - RNA, 19 nt, Artificial Sequence
  Description of Artificial Sequence: Synthetic oligonucleotide
uuauccucaagcaaugaau

SEQ ID NO: 2393873 - RNA, 19 nt, Artificial Sequence
  Description of Artificial Sequence: Synthetic oligonucleotide
cugaacuuuguauuaguag

SEQ ID NO: 2393874 - RNA, 19 nt, Artificial Sequence
  Description of Artificial Sequence: Synthetic oligonucleotide
cauucugaguucuaucugc

SEQ ID NO: 2393875 - RNA, 19 nt, Artificial Sequence
  Description of Artificial Sequence: Synthetic oligonucleotide
ugaauugacaguuuccuuu

SEQ ID NO: 2393876 - RNA, 19 nt, Artificial Sequence
  Description of Artificial Sequence: Synthetic oligonucleotide
aaaguuucauuucccauua

SEQ ID NO: 2393877 - RNA, 19 nt, Artificial Sequence
  Description of Artificial Sequence: Synthetic oligonucleotide
caucaaagugaaaugggag

SEQ ID NO: 2393878 - RNA, 19 nt, Artificial Sequence
  Description of Artificial Sequence: Synthetic oligonucleotide
uauggaagaucgcugguga

SEQ ID NO: 2393879 - RNA, 19 nt, Artificial Sequence
  Description of Artificial Sequence: Synthetic oligonucleotide
ucaaagacgcagaauauuu

SEQ ID NO: 2393880 - RNA, 19 nt, Artificial Sequence
  Description of Artificial Sequence: Synthetic oligonucleotide
guuuagaagguaccgacug

SEQ ID NO: 2393881 - RNA, 19 nt, Artificial Sequence
  Description of Artificial Sequence: Synthetic oligonucleotide
aaggauaaauuuugagcca

SEQ ID NO: 2393882 - RNA, 19 nt, Artificial Sequence
  Description of Artificial Sequence: Synthetic oligonucleotide
uauugauuaucaauugaau

SEQ ID NO: 2393883 - RNA, 19 nt, Artificial Sequence
  Description of Artificial Sequence: Synthetic oligonucleotide
ucugaguucuaucugcuaa

SEQ ID NO: 2393884 - RNA, 19 nt, Artificial Sequence
  Description of Artificial Sequence: Synthetic oligonucleotide
uacugguauauauugauua

SEQ ID NO: 2393885 - RNA, 19 nt, Artificial Sequence
  Description of Artificial Sequence: Synthetic oligonucleotide
aaagacgcagaauauuuua

SEQ ID NO: 2393886 - RNA, 19 nt, Artificial Sequence
  Description of Artificial Sequence: Synthetic oligonucleotide
uguacugguauauauugau

SEQ ID NO: 2393887 - RNA, 19 nt, Artificial Sequence
  Description of Artificial Sequence: Synthetic oligonucleotide
aacacugauuuauuaaaua

SEQ ID NO: 2393888 - RNA, 19 nt, Artificial Sequence
  Description of Artificial Sequence: Synthetic oligonucleotide
aauuuccucaggagaauac

SEQ ID NO: 2393889 - RNA, 19 nt, Artificial Sequence
  Description of Artificial Sequence: Synthetic oligonucleotide
ccauacaucuccaagaaag

SEQ ID NO: 2393890 - RNA, 19 nt, Artificial Sequence
  Description of Artificial Sequence: Synthetic oligonucleotide
uuauguaucugugaguuau

SEQ ID NO: 2393891 - RNA, 19 nt, Artificial Sequence
  Description of Artificial Sequence: Synthetic oligonucleotide
guauagauauuucuggauc

SEQ ID NO: 2393892 - RNA, 19 nt, Artificial Sequence
  Description of Artificial Sequence: Synthetic oligonucleotide
aucuguuagggaugguggc

SEQ ID NO: 2393893 - RNA, 19 nt, Artificial Sequence
  Description of Artificial Sequence: Synthetic oligonucleotide
ugauuauccucaagcaaug

SEQ ID NO: 2393894 - RNA, 19 nt, Artificial Sequence
  Description of Artificial Sequence: Synthetic oligonucleotide
gcaguauagauauuucugg

SEQ ID NO: 2393895 - RNA, 19 nt, Artificial Sequence
  Description of Artificial Sequence: Synthetic oligonucleotide
uuucguugaauuuccucag

SEQ ID NO: 2393896 - RNA, 19 nt, Artificial Sequence
  Description of Artificial Sequence: Synthetic oligonucleotide
aguucuaucacggauaguu

SEQ ID NO: 2393897 - RNA, 19 nt, Artificial Sequence
  Description of Artificial Sequence: Synthetic oligonucleotide
uuaacaguuugaaaccguc

SEQ ID NO: 2393898 - RNA, 19 nt, Artificial Sequence
  Description of Artificial Sequence: Synthetic oligonucleotide
aauguuuagaagguaccga

SEQ ID NO: 2393899 - RNA, 19 nt, Artificial Sequence
  Description of Artificial Sequence: Synthetic oligonucleotide
uuaucuguuagggauggug

SEQ ID NO: 2393900 - RNA, 19 nt, Artificial Sequence
  Description of Artificial Sequence: Synthetic oligonucleotide
aagcccgugcuuuauaagu

SEQ ID NO: 2393901 - RNA, 19 nt, Artificial Sequence
  Description of Artificial Sequence: Synthetic oligonucleotide
uauuaguagcaauuucugu

SEQ ID NO: 2393902 - RNA, 19 nt, Artificial Sequence
  Description of Artificial Sequence: Synthetic oligonucleotide
uuuauaagucagcauuaaa

SEQ ID NO: 2393903 - RNA, 19 nt, Artificial Sequence
  Description of Artificial Sequence: Synthetic oligonucleotide
auuucucacagagaaauca

SEQ ID NO: 2393904 - RNA, 19 nt, Artificial Sequence
  Description of Artificial Sequence: Synthetic oligonucleotide
caaugaauugacaguuucc

SEQ ID NO: 2393905 - RNA, 19 nt, Artificial Sequence
  Description of Artificial Sequence: Synthetic oligonucleotide
ugaugaguacugaacuuug

SEQ ID NO: 2393906 - RNA, 19 nt, Artificial Sequence
  Description of Artificial Sequence: Synthetic oligonucleotide
ugaguacugaacuuuguau

SEQ ID NO: 2393907 - RNA, 19 nt, Artificial Sequence
  Description of Artificial Sequence: Synthetic oligonucleotide
aaacuaucauucaaacuug

SEQ ID NO: 2393908 - RNA, 19 nt, Artificial Sequence
  Description of Artificial Sequence: Synthetic oligonucleotide
gagccauucaccuguacug

SEQ ID NO: 2393909 - RNA, 19 nt, Artificial Sequence
  Description of Artificial Sequence: Synthetic oligonucleotide
acucaaauuucaucaaagu

SEQ ID NO: 2393910 - RNA, 19 nt, Artificial Sequence
  Description of Artificial Sequence: Synthetic oligonucleotide
aacugacaagauuccaaug

SEQ ID NO: 2393911 - RNA, 19 nt, Artificial Sequence
  Description of Artificial Sequence: Synthetic oligonucleotide
ugagccauucaccuguacu

SEQ ID NO: 2393912 - RNA, 19 nt, Artificial Sequence
  Description of Artificial Sequence: Synthetic oligonucleotide
ucgacccaaacuaucauuc

SEQ ID NO: 2393913 - RNA, 19 nt, Artificial Sequence
  Description of Artificial Sequence: Synthetic oligonucleotide
acaagauuccaauguuuag

SEQ ID NO: 2393914 - RNA, 19 nt, Artificial Sequence
  Description of Artificial Sequence: Synthetic oligonucleotide
uacaucuccaagaaaguuu

SEQ ID NO: 2393915 - RNA, 19 nt, Artificial Sequence
  Description of Artificial Sequence: Synthetic oligonucleotide
ugcucauucgacccaaacu

SEQ ID NO: 2393916 - RNA, 19 nt, Artificial Sequence
  Description of Artificial Sequence: Synthetic oligonucleotide
uucuauuccucucuucuuc

SEQ ID NO: 2393917 - RNA, 19 nt, Artificial Sequence
  Description of Artificial Sequence: Synthetic oligonucleotide
acuuuucacugauuuaugu

SEQ ID NO: 2393918 - RNA, 19 nt, Artificial Sequence
  Description of Artificial Sequence: Synthetic oligonucleotide
auuucugugcucauucgac

SEQ ID NO: 2393919 - RNA, 19 nt, Artificial Sequence
  Description of Artificial Sequence: Synthetic oligonucleotide
uuuugugggauaguugaug

SEQ ID NO: 2393920 - RNA, 19 nt, Artificial Sequence
  Description of Artificial Sequence: Synthetic oligonucleotide
cagacaaauuuguuguagc

SEQ ID NO: 2393921 - RNA, 19 nt, Artificial Sequence
  Description of Artificial Sequence: Synthetic oligonucleotide
caauguuuagaagguaccg

SEQ ID NO: 2393922 - RNA, 19 nt, Artificial Sequence
  Description of Artificial Sequence: Synthetic oligonucleotide
guuugaaaccgucuaacuc

SEQ ID NO: 2393923 - RNA, 19 nt, Artificial Sequence
  Description of Artificial Sequence: Synthetic oligonucleotide
caaauuuguuguagcauac

SEQ ID NO: 2393924 - RNA, 19 nt, Artificial Sequence
  Description of Artificial Sequence: Synthetic oligonucleotide
guguuauuuauacuuucug

SEQ ID NO: 2393925 - RNA, 19 nt, Artificial Sequence
  Description of Artificial Sequence: Synthetic oligonucleotide
uccucaagcaaugaauuga

SEQ ID NO: 2393926 - RNA, 19 nt, Artificial Sequence
  Description of Artificial Sequence: Synthetic oligonucleotide
cacggauaguuauuaacag

SEQ ID NO: 2393927 - RNA, 19 nt, Artificial Sequence
  Description of Artificial Sequence: Synthetic oligonucleotide
uaacucaaauuucaucaaa

SEQ ID NO: 2393928 - RNA, 19 nt, Artificial Sequence
  Description of Artificial Sequence: Synthetic oligonucleotide
ugugggauaguugaugagu

SEQ ID NO: 2393929 - RNA, 19 nt, Artificial Sequence
  Description of Artificial Sequence: Synthetic oligonucleotide
agcauacaaaauauugggg

SEQ ID NO: 2393930 - RNA, 19 nt, Artificial Sequence
  Description of Artificial Sequence: Synthetic oligonucleotide
uucugugcucauucgaccc

SEQ ID NO: 2393931 - RNA, 19 nt, Artificial Sequence
  Description of Artificial Sequence: Synthetic oligonucleotide
uauccucaagcaaugaauu

SEQ ID NO: 2393932 - RNA, 19 nt, Artificial Sequence
  Description of Artificial Sequence: Synthetic oligonucleotide
uauugggguaaucuccaca

SEQ ID NO: 2393933 - RNA, 19 nt, Artificial Sequence
  Description of Artificial Sequence: Synthetic oligonucleotide
auauugauuaucaauugaa

SEQ ID NO: 2393934 - RNA, 19 nt, Artificial Sequence
  Description of Artificial Sequence: Synthetic oligonucleotide
aucgcuggugauuauccuc

SEQ ID NO: 2393935 - RNA, 19 nt, Artificial Sequence
  Description of Artificial Sequence: Synthetic oligonucleotide
caaacuugaacuuccuuca

SEQ ID NO: 2393936 - RNA, 19 nt, Artificial Sequence
  Description of Artificial Sequence: Synthetic oligonucleotide
uuguauuaguagcaauuuc

SEQ ID NO: 2393937 - RNA, 19 nt, Artificial Sequence
  Description of Artificial Sequence: Synthetic oligonucleotide
gaagguaccgacuggcuuc

SEQ ID NO: 2393938 - RNA, 19 nt, Artificial Sequence
  Description of Artificial Sequence: Synthetic oligonucleotide
aguuaucuguuagggaugg

SEQ ID NO: 2393939 - RNA, 19 nt, Artificial Sequence
  Description of Artificial Sequence: Synthetic oligonucleotide
guaucugugaguuaucugu

SEQ ID NO: 2393940 - RNA, 19 nt, Artificial Sequence
  Description of Artificial Sequence: Synthetic oligonucleotide
uuucugugcucauucgacc

SEQ ID NO: 2393941 - RNA, 19 nt, Artificial Sequence
  Description of Artificial Sequence: Synthetic oligonucleotide
agacgcagaauauuuuaug

SEQ ID NO: 2393942 - RNA, 19 nt, Artificial Sequence
  Description of Artificial Sequence: Synthetic oligonucleotide
uuccauacaucuccaagaa

SEQ ID NO: 2393943 - RNA, 19 nt, Artificial Sequence
  Description of Artificial Sequence: Synthetic oligonucleotide
auaguuauuaacaguuuga

SEQ ID NO: 2393944 - RNA, 19 nt, Artificial Sequence
  Description of Artificial Sequence: Synthetic oligonucleotide
uuucacugauuuauguauc

SEQ ID NO: 2393945 - RNA, 19 nt, Artificial Sequence
  Description of Artificial Sequence: Synthetic oligonucleotide
gugucaaagacgcagaaua

SEQ ID NO: 2393946 - RNA, 19 nt, Artificial Sequence
  Description of Artificial Sequence: Synthetic oligonucleotide
aguagcaauuucugugcuc

SEQ ID NO: 2393947 - RNA, 19 nt, Artificial Sequence
  Description of Artificial Sequence: Synthetic oligonucleotide
uuuggucuuaaauguaaau

SEQ ID NO: 2393948 - RNA, 19 nt, Artificial Sequence
  Description of Artificial Sequence: Synthetic oligonucleotide
aagcaaugaauugacaguu

SEQ ID NO: 2393949 - RNA, 19 nt, Artificial Sequence
  Description of Artificial Sequence: Synthetic oligonucleotide
aguuauuaacaguuugaaa

SEQ ID NO: 2393950 - RNA, 19 nt, Artificial Sequence
  Description of Artificial Sequence: Synthetic oligonucleotide
auacauaauuccauacauc

SEQ ID NO: 2393951 - RNA, 19 nt, Artificial Sequence
  Description of Artificial Sequence: Synthetic oligonucleotide
uucuaucacggauaguuau

SEQ ID NO: 2393952 - RNA, 19 nt, Artificial Sequence
  Description of Artificial Sequence: Synthetic oligonucleotide
uuauaaacacugauuuauu

SEQ ID NO: 2393953 - RNA, 19 nt, Artificial Sequence
  Description of Artificial Sequence: Synthetic oligonucleotide
aguuugaaaccgucuaacu

SEQ ID NO: 2393954 - RNA, 19 nt, Artificial Sequence
  Description of Artificial Sequence: Synthetic oligonucleotide
uguaucugugaguuaucug

SEQ ID NO: 2393955 - RNA, 19 nt, Artificial Sequence
  Description of Artificial Sequence: Synthetic oligonucleotide
uuugagacccucaguauuu

SEQ ID NO: 2393956 - RNA, 19 nt, Artificial Sequence
  Description of Artificial Sequence: Synthetic oligonucleotide
uuuuggucuuaaauguaaa

SEQ ID NO: 2393957 - RNA, 19 nt, Artificial Sequence
  Description of Artificial Sequence: Synthetic oligonucleotide
uuuguauuaguagcaauuu

SEQ ID NO: 2393958 - RNA, 19 nt, Artificial Sequence
  Description of Artificial Sequence: Synthetic oligonucleotide
auauuuuauggaagaucgc

SEQ ID NO: 2393959 - RNA, 19 nt, Artificial Sequence
  Description of Artificial Sequence: Synthetic oligonucleotide
uuuauggaagaucgcuggu

SEQ ID NO: 2393960 - RNA, 19 nt, Artificial Sequence
  Description of Artificial Sequence: Synthetic oligonucleotide
auuauccucaagcaaugaa

SEQ ID NO: 2393961 - RNA, 19 nt, Artificial Sequence
  Description of Artificial Sequence: Synthetic oligonucleotide
guauuaguagcaauuucug

SEQ ID NO: 2393962 - RNA, 19 nt, Artificial Sequence
  Description of Artificial Sequence: Synthetic oligonucleotide
aguacugaacuuuguauua

SEQ ID NO: 2393963 - RNA, 19 nt, Artificial Sequence
  Description of Artificial Sequence: Synthetic oligonucleotide
ucccauuauaaacacugau

SEQ ID NO: 2393964 - RNA, 19 nt, Artificial Sequence
  Description of Artificial Sequence: Synthetic oligonucleotide
uuauggaagaucgcuggug

SEQ ID NO: 2393965 - RNA, 19 nt, Artificial Sequence
  Description of Artificial Sequence: Synthetic oligonucleotide
auuuuauggaagaucgcug

SEQ ID NO: 2393966 - RNA, 19 nt, Artificial Sequence
  Description of Artificial Sequence: Synthetic oligonucleotide
ggagaauacuuucuauucc

SEQ ID NO: 2393967 - RNA, 19 nt, Artificial Sequence
  Description of Artificial Sequence: Synthetic oligonucleotide
uguuuggaguguuauuuau

SEQ ID NO: 2393968 - RNA, 19 nt, Artificial Sequence
  Description of Artificial Sequence: Synthetic oligonucleotide
caauuucugugcucauucg

SEQ ID NO: 2393969 - RNA, 19 nt, Artificial Sequence
  Description of Artificial Sequence: Synthetic oligonucleotide
gaguguuauuuauacuuuc

SEQ ID NO: 2393970 - RNA, 19 nt, Artificial Sequence
  Description of Artificial Sequence: Synthetic oligonucleotide
uuucuagaacacacagaca

SEQ ID NO: 2393971 - RNA, 19 nt, Artificial Sequence
  Description of Artificial Sequence: Synthetic oligonucleotide
cugugaguuaucuguuagg

SEQ ID NO: 2393972 - RNA, 19 nt, Artificial Sequence
  Description of Artificial Sequence: Synthetic oligonucleotide
acccucaguauuuuguugu

SEQ ID NO: 2393973 - RNA, 19 nt, Artificial Sequence
  Description of Artificial Sequence: Synthetic oligonucleotide
auaguugaugaguacugaa

SEQ ID NO: 2393974 - RNA, 19 nt, Artificial Sequence
  Description of Artificial Sequence: Synthetic oligonucleotide
acggauaguuauuaacagu

SEQ ID NO: 2393975 - RNA, 19 nt, Artificial Sequence
  Description of Artificial Sequence: Synthetic oligonucleotide
auugaauuucuagaacaca

SEQ ID NO: 2393976 - RNA, 19 nt, Artificial Sequence
  Description of Artificial Sequence: Synthetic oligonucleotide
cuaagguuuugugggauag

SEQ ID NO: 2393977 - RNA, 19 nt, Artificial Sequence
  Description of Artificial Sequence: Synthetic oligonucleotide
uaucugcuaagguuuugug

SEQ ID NO: 2393978 - RNA, 19 nt, Artificial Sequence
  Description of Artificial Sequence: Synthetic oligonucleotide
agauuccaauguuuagaag

SEQ ID NO: 2393979 - RNA, 19 nt, Artificial Sequence
  Description of Artificial Sequence: Synthetic oligonucleotide
ugucaaagacgcagaauau

SEQ ID NO: 2393980 - RNA, 19 nt, Artificial Sequence
  Description of Artificial Sequence: Synthetic oligonucleotide
acgcagaauauuuuaugga

SEQ ID NO: 2393981 - RNA, 19 nt, Artificial Sequence
  Description of Artificial Sequence: Synthetic oligonucleotide
uuuuguugucauucugagu

SEQ ID NO: 2393982 - RNA, 19 nt, Artificial Sequence
  Description of Artificial Sequence: Synthetic oligonucleotide
uaacaaaguagaagcccgu

SEQ ID NO: 2393983 - RNA, 19 nt, Artificial Sequence
  Description of Artificial Sequence: Synthetic oligonucleotide
ucauucgacccaaacuauc

SEQ ID NO: 2393984 - RNA, 19 nt, Artificial Sequence
  Description of Artificial Sequence: Synthetic oligonucleotide
ucauucaaacuugaacuuc

SEQ ID NO: 2393985 - RNA, 19 nt, Artificial Sequence
  Description of Artificial Sequence: Synthetic oligonucleotide
auauugggguaaucuccac

SEQ ID NO: 2393986 - RNA, 19 nt, Artificial Sequence
  Description of Artificial Sequence: Synthetic oligonucleotide
uugaaaccgucuaacucaa

SEQ ID NO: 2393987 - RNA, 19 nt, Artificial Sequence
  Description of Artificial Sequence: Synthetic oligonucleotide
ucaggagaauacuuucuau

SEQ ID NO: 2393988 - RNA, 19 nt, Artificial Sequence
  Description of Artificial Sequence: Synthetic oligonucleotide
acauaauuccauacaucuc

SEQ ID NO: 2393989 - RNA, 19 nt, Artificial Sequence
  Description of Artificial Sequence: Synthetic oligonucleotide
ucuaucacggauaguuauu

SEQ ID NO: 2393990 - RNA, 19 nt, Artificial Sequence
  Description of Artificial Sequence: Synthetic oligonucleotide
aagguuuugugggauaguu

SEQ ID NO: 2393991 - RNA, 19 nt, Artificial Sequence
  Description of Artificial Sequence: Synthetic oligonucleotide
gucuaacucaaauuucauc

SEQ ID NO: 2393992 - RNA, 19 nt, Artificial Sequence
  Description of Artificial Sequence: Synthetic oligonucleotide
agaugcaguauagauauuu

SEQ ID NO: 2393993 - RNA, 19 nt, Artificial Sequence
  Description of Artificial Sequence: Synthetic oligonucleotide
auacaaaauauugggguaa

SEQ ID NO: 2393994 - RNA, 19 nt, Artificial Sequence
  Description of Artificial Sequence: Synthetic oligonucleotide
ucuuuagaagaugguguca

SEQ ID NO: 2393995 - RNA, 19 nt, Artificial Sequence
  Description of Artificial Sequence: Synthetic oligonucleotide
auccucaagcaaugaauug

SEQ ID NO: 2393996 - RNA, 19 nt, Artificial Sequence
  Description of Artificial Sequence: Synthetic oligonucleotide
ugucauucugaguucuauc

SEQ ID NO: 2393997 - RNA, 19 nt, Artificial Sequence
  Description of Artificial Sequence: Synthetic oligonucleotide
uugaugaguacugaacuuu

SEQ ID NO: 2393998 - RNA, 19 nt, Artificial Sequence
  Description of Artificial Sequence: Synthetic oligonucleotide
auuuugagacccucaguau

SEQ ID NO: 2393999 - RNA, 19 nt, Artificial Sequence
  Description of Artificial Sequence: Synthetic oligonucleotide
ucuucgaaccagugcuucc

SEQ ID NO: 2394000 - RNA, 19 nt, Artificial Sequence
  Description of Artificial Sequence: Synthetic oligonucleotide
cauucgacccaaacuauca

SEQ ID NO: 2394001 - RNA, 19 nt, Artificial Sequence
  Description of Artificial Sequence: Synthetic oligonucleotide
uuguuguagcauacaaaau

SEQ ID NO: 2394002 - RNA, 19 nt, Artificial Sequence
  Description of Artificial Sequence: Synthetic oligonucleotide
cauacaaaauauuggggua

SEQ ID NO: 2394003 - RNA, 19 nt, Artificial Sequence
  Description of Artificial Sequence: Synthetic oligonucleotide
gaagcccgugcuuuauaag

SEQ ID NO: 2394004 - RNA, 19 nt, Artificial Sequence
  Description of Artificial Sequence: Synthetic oligonucleotide
caucuuuagaagauggugu

SEQ ID NO: 2394005 - RNA, 19 nt, Artificial Sequence
  Description of Artificial Sequence: Synthetic oligonucleotide
guaccgacuggcuucuuug

SEQ ID NO: 2394006 - RNA, 19 nt, Artificial Sequence
  Description of Artificial Sequence: Synthetic oligonucleotide
acaguuugaaaccgucuaa

SEQ ID NO: 2394007 - RNA, 19 nt, Artificial Sequence
  Description of Artificial Sequence: Synthetic oligonucleotide
augaguacugaacuuugua

SEQ ID NO: 2394008 - RNA, 19 nt, Artificial Sequence
  Description of Artificial Sequence: Synthetic oligonucleotide
uguugucauucugaguucu

SEQ ID NO: 2394009 - RNA, 19 nt, Artificial Sequence
  Description of Artificial Sequence: Synthetic oligonucleotide
caaaauauugggguaaucu

SEQ ID NO: 2394010 - RNA, 19 nt, Artificial Sequence
  Description of Artificial Sequence: Synthetic oligonucleotide
ucuguuagggaugguggca

SEQ ID NO: 2394011 - RNA, 19 nt, Artificial Sequence
  Description of Artificial Sequence: Synthetic oligonucleotide
gaaaccgucuaacucaaau

SEQ ID NO: 2394012 - RNA, 19 nt, Artificial Sequence
  Description of Artificial Sequence: Synthetic oligonucleotide
aacuaucauucaaacuuga

SEQ ID NO: 2394013 - RNA, 19 nt, Artificial Sequence
  Description of Artificial Sequence: Synthetic oligonucleotide
uaguagcaauuucugugcu

SEQ ID NO: 2394014 - RNA, 19 nt, Artificial Sequence
  Description of Artificial Sequence: Synthetic oligonucleotide
acaaaauauugggguaauc

SEQ ID NO: 2394015 - RNA, 19 nt, Artificial Sequence
  Description of Artificial Sequence: Synthetic oligonucleotide
uugugggauaguugaugag

SEQ ID NO: 2394016 - RNA, 19 nt, Artificial Sequence
  Description of Artificial Sequence: Synthetic oligonucleotide
caguauagauauuucugga

SEQ ID NO: 2394017 - RNA, 19 nt, Artificial Sequence
  Description of Artificial Sequence: Synthetic oligonucleotide
cugauuuauguaucuguga

SEQ ID NO: 2394018 - RNA, 19 nt, Artificial Sequence
  Description of Artificial Sequence: Synthetic oligonucleotide
gacccucaguauuuuguug

SEQ ID NO: 2394019 - RNA, 19 nt, Artificial Sequence
  Description of Artificial Sequence: Synthetic oligonucleotide
gacgaacugacaagauucc

SEQ ID NO: 2394020 - RNA, 19 nt, Artificial Sequence
  Description of Artificial Sequence: Synthetic oligonucleotide
gauaguugaugaguacuga

SEQ ID NO: 2394021 - RNA, 19 nt, Artificial Sequence
  Description of Artificial Sequence: Synthetic oligonucleotide
uggaucccuguuuggagug

SEQ ID NO: 2394022 - RNA, 19 nt, Artificial Sequence
  Description of Artificial Sequence: Synthetic oligonucleotide
gauuuauguaucugugagu

SEQ ID NO: 2394023 - RNA, 19 nt, Artificial Sequence
  Description of Artificial Sequence: Synthetic oligonucleotide
uuuagaagauggugucaaa

SEQ ID NO: 2394024 - RNA, 19 nt, Artificial Sequence
  Description of Artificial Sequence: Synthetic oligonucleotide
ccaauguuuagaagguacc

SEQ ID NO: 2394025 - RNA, 19 nt, Artificial Sequence
  Description of Artificial Sequence: Synthetic oligonucleotide
aagacgcagaauauuuuau

SEQ ID NO: 2394026 - RNA, 19 nt, Artificial Sequence
  Description of Artificial Sequence: Synthetic oligonucleotide
gaguuaucuguuagggaug

SEQ ID NO: 2394027 - RNA, 19 nt, Artificial Sequence
  Description of Artificial Sequence: Synthetic oligonucleotide
guaaauuuugagacccuca

SEQ ID NO: 2394028 - RNA, 19 nt, Artificial Sequence
  Description of Artificial Sequence: Synthetic oligonucleotide
gcauacaaaauauuggggu

SEQ ID NO: 2394029 - RNA, 19 nt, Artificial Sequence
  Description of Artificial Sequence: Synthetic oligonucleotide
caguuugaaaccgucuaac

SEQ ID NO: 2394030 - RNA, 19 nt, Artificial Sequence
  Description of Artificial Sequence: Synthetic oligonucleotide
uauguaucugugaguuauc

SEQ ID NO: 2394031 - RNA, 19 nt, Artificial Sequence
  Description of Artificial Sequence: Synthetic oligonucleotide
uagaagguaccgacuggcu

SEQ ID NO: 2394032 - RNA, 19 nt, Artificial Sequence
  Description of Artificial Sequence: Synthetic oligonucleotide
agaagcccgugcuuuauaa

SEQ ID NO: 2394033 - RNA, 19 nt, Artificial Sequence
  Description of Artificial Sequence: Synthetic oligonucleotide
aggauaaauuuugagccau

SEQ ID NO: 2394034 - RNA, 19 nt, Artificial Sequence
  Description of Artificial Sequence: Synthetic oligonucleotide
auuaacaguuugaaaccgu

SEQ ID NO: 2394035 - RNA, 19 nt, Artificial Sequence
  Description of Artificial Sequence: Synthetic oligonucleotide
auguaucugugaguuaucu

SEQ ID NO: 2394036 - RNA, 19 nt, Artificial Sequence
  Description of Artificial Sequence: Synthetic oligonucleotide
accgucuaacucaaauuuc

SEQ ID NO: 2394037 - RNA, 19 nt, Artificial Sequence
  Description of Artificial Sequence: Synthetic oligonucleotide
gacccaaacuaucauucaa

SEQ ID NO: 2394038 - RNA, 19 nt, Artificial Sequence
  Description of Artificial Sequence: Synthetic oligonucleotide
uucgacccaaacuaucauu

SEQ ID NO: 2394039 - RNA, 19 nt, Artificial Sequence
  Description of Artificial Sequence: Synthetic oligonucleotide
uucaccuguacugguauau

SEQ ID NO: 2394040 - RNA, 19 nt, Artificial Sequence
  Description of Artificial Sequence: Synthetic oligonucleotide
uccauacaucuccaagaaa

SEQ ID NO: 2394041 - RNA, 19 nt, Artificial Sequence
  Description of Artificial Sequence: Synthetic oligonucleotide
uuuauguaucugugaguua

SEQ ID NO: 2394042 - RNA, 19 nt, Artificial Sequence
  Description of Artificial Sequence: Synthetic oligonucleotide
ugggauaguugaugaguac

SEQ ID NO: 2394043 - RNA, 19 nt, Artificial Sequence
  Description of Artificial Sequence: Synthetic oligonucleotide
cuuuguauuaguagcaauu

SEQ ID NO: 2394044 - RNA, 19 nt, Artificial Sequence
  Description of Artificial Sequence: Synthetic oligonucleotide
uucgaaccagugcuuccug

SEQ ID NO: 2394045 - RNA, 19 nt, Artificial Sequence
  Description of Artificial Sequence: Synthetic oligonucleotide
gcaaugaauugacaguuuc

SEQ ID NO: 2394046 - RNA, 19 nt, Artificial Sequence
  Description of Artificial Sequence: Synthetic oligonucleotide
cuaacucaaauuucaucaa

SEQ ID NO: 2394047 - RNA, 19 nt, Artificial Sequence
  Description of Artificial Sequence: Synthetic oligonucleotide
ugagacccucaguauuuug

SEQ ID NO: 2394048 - RNA, 19 nt, Artificial Sequence
  Description of Artificial Sequence: Synthetic oligonucleotide
agaagguaccgacuggcuu

SEQ ID NO: 2394049 - RNA, 19 nt, Artificial Sequence
  Description of Artificial Sequence: Synthetic oligonucleotide
ucgaaccagugcuuccugc

SEQ ID NO: 2394050 - RNA, 19 nt, Artificial Sequence
  Description of Artificial Sequence: Synthetic oligonucleotide
gcucauucgacccaaacua

SEQ ID NO: 2394051 - RNA, 19 nt, Artificial Sequence
  Description of Artificial Sequence: Synthetic oligonucleotide
gaguacugaacuuuguauu

SEQ ID NO: 2394052 - RNA, 19 nt, Artificial Sequence
  Description of Artificial Sequence: Synthetic oligonucleotide
caaugccagugcuuuggcc

SEQ ID NO: 2394053 - RNA, 19 nt, Artificial Sequence
  Description of Artificial Sequence: Synthetic oligonucleotide
gaacugacaagauuccaau

SEQ ID NO: 2394054 - RNA, 19 nt, Artificial Sequence
  Description of Artificial Sequence: Synthetic oligonucleotide
uacaaaauauugggguaau

SEQ ID NO: 2394055 - RNA, 19 nt, Artificial Sequence
  Description of Artificial Sequence: Synthetic oligonucleotide
uaucacggauaguuauuaa

SEQ ID NO: 2394056 - RNA, 19 nt, Artificial Sequence
  Description of Artificial Sequence: Synthetic oligonucleotide
auaauuccauacaucucca

SEQ ID NO: 2394057 - RNA, 19 nt, Artificial Sequence
  Description of Artificial Sequence: Synthetic oligonucleotide
uugggguaaucuccacaug

SEQ ID NO: 2394058 - RNA, 19 nt, Artificial Sequence
  Description of Artificial Sequence: Synthetic oligonucleotide
ggauaguugaugaguacug

SEQ ID NO: 2394059 - RNA, 19 nt, Artificial Sequence
  Description of Artificial Sequence: Synthetic oligonucleotide
agugaaaugggagcuggau

SEQ ID NO: 2394060 - RNA, 19 nt, Artificial Sequence
  Description of Artificial Sequence: Synthetic oligonucleotide
augaauugacaguuuccuu

SEQ ID NO: 2394061 - RNA, 19 nt, Artificial Sequence
  Description of Artificial Sequence: Synthetic oligonucleotide
uuguugucauucugaguuc

SEQ ID NO: 2394062 - RNA, 19 nt, Artificial Sequence
  Description of Artificial Sequence: Synthetic oligonucleotide
ggcaaugccagugcuuugg

SEQ ID NO: 2394063 - RNA, 19 nt, Artificial Sequence
  Description of Artificial Sequence: Synthetic oligonucleotide
agugggcaaugccagugcu

SEQ ID NO: 2394064 - RNA, 19 nt, Artificial Sequence
  Description of Artificial Sequence: Synthetic oligonucleotide
auucgacccaaacuaucau

SEQ ID NO: 2394065 - RNA, 19 nt, Artificial Sequence
  Description of Artificial Sequence: Synthetic oligonucleotide
ucuaucugcuaagguuuug

SEQ ID NO: 2394066 - RNA, 19 nt, Artificial Sequence
  Description of Artificial Sequence: Synthetic oligonucleotide
caaaguagaagcccgugcu

SEQ ID NO: 2394067 - RNA, 19 nt, Artificial Sequence
  Description of Artificial Sequence: Synthetic oligonucleotide
ugaauuuccucaggagaau

SEQ ID NO: 2394068 - RNA, 19 nt, Artificial Sequence
  Description of Artificial Sequence: Synthetic oligonucleotide
gugauuauccucaagcaau

SEQ ID NO: 2394069 - RNA, 19 nt, Artificial Sequence
  Description of Artificial Sequence: Synthetic oligonucleotide
gugaguuaucuguuaggga

SEQ ID NO: 2394070 - RNA, 19 nt, Artificial Sequence
  Description of Artificial Sequence: Synthetic oligonucleotide
ggugauuauccucaagcaa

SEQ ID NO: 2394071 - RNA, 19 nt, Artificial Sequence
  Description of Artificial Sequence: Synthetic oligonucleotide
cccaaacuaucauucaaac

SEQ ID NO: 2394072 - RNA, 19 nt, Artificial Sequence
  Description of Artificial Sequence: Synthetic oligonucleotide
aaccagugcuuccugccuu

SEQ ID NO: 2394073 - RNA, 19 nt, Artificial Sequence
  Description of Artificial Sequence: Synthetic oligonucleotide
ugcuuuggccuuucuucga

SEQ ID NO: 2394074 - RNA, 19 nt, Artificial Sequence
  Description of Artificial Sequence: Synthetic oligonucleotide
cacugauuuauguaucugu

SEQ ID NO: 2394075 - RNA, 19 nt, Artificial Sequence
  Description of Artificial Sequence: Synthetic oligonucleotide
agcccgugcuuuauaaguc

SEQ ID NO: 2394076 - RNA, 19 nt, Artificial Sequence
  Description of Artificial Sequence: Synthetic oligonucleotide
ugggcaaugccagugcuuu

SEQ ID NO: 2394077 - RNA, 19 nt, Artificial Sequence
  Description of Artificial Sequence: Synthetic oligonucleotide
agacccucaguauuuuguu

SEQ ID NO: 2394078 - RNA, 19 nt, Artificial Sequence
  Description of Artificial Sequence: Synthetic oligonucleotide
cuguuagggaugguggcac

SEQ ID NO: 2394079 - RNA, 19 nt, Artificial Sequence
  Description of Artificial Sequence: Synthetic oligonucleotide
ccucaagcaaugaauugac

SEQ ID NO: 2394080 - RNA, 19 nt, Artificial Sequence
  Description of Artificial Sequence: Synthetic oligonucleotide
cuguacugguauauauuga

SEQ ID NO: 2394081 - RNA, 19 nt, Artificial Sequence
  Description of Artificial Sequence: Synthetic oligonucleotide
gauuauccucaagcaauga

SEQ ID NO: 2394082 - RNA, 19 nt, Artificial Sequence
  Description of Artificial Sequence: Synthetic oligonucleotide
cuuuggccuuucuucgaac

SEQ ID NO: 2394083 - RNA, 19 nt, Artificial Sequence
  Description of Artificial Sequence: Synthetic oligonucleotide
auucugaguucuaucugcu

SEQ ID NO: 2394084 - RNA, 19 nt, Artificial Sequence
  Description of Artificial Sequence: Synthetic oligonucleotide
aagguaccgacuggcuucu

SEQ ID NO: 2394085 - RNA, 19 nt, Artificial Sequence
  Description of Artificial Sequence: Synthetic oligonucleotide
gggguaaucuccacauggg

SEQ ID NO: 2394086 - RNA, 19 nt, Artificial Sequence
  Description of Artificial Sequence: Synthetic oligonucleotide
uguuagggaugguggcacu

SEQ ID NO: 2394087 - RNA, 19 nt, Artificial Sequence
  Description of Artificial Sequence: Synthetic oligonucleotide
cuuuauaagucagcauuaa

SEQ ID NO: 2394088 - RNA, 19 nt, Artificial Sequence
  Description of Artificial Sequence: Synthetic oligonucleotide
uaagguuuugugggauagu

SEQ ID NO: 2394089 - RNA, 19 nt, Artificial Sequence
  Description of Artificial Sequence: Synthetic oligonucleotide
uggaagaucgcuggugauu

SEQ ID NO: 2394090 - RNA, 19 nt, Artificial Sequence
  Description of Artificial Sequence: Synthetic oligonucleotide
acugaacuuuguauuagua

SEQ ID NO: 2394091 - RNA, 19 nt, Artificial Sequence
  Description of Artificial Sequence: Synthetic oligonucleotide
agguuuugugggauaguug

SEQ ID NO: 2394092 - RNA, 19 nt, Artificial Sequence
  Description of Artificial Sequence: Synthetic oligonucleotide
acccaaacuaucauucaaa

SEQ ID NO: 2394093 - RNA, 19 nt, Artificial Sequence
  Description of Artificial Sequence: Synthetic oligonucleotide
guuagggaugguggcacug

SEQ ID NO: 2394094 - RNA, 19 nt, Artificial Sequence
  Description of Artificial Sequence: Synthetic oligonucleotide
uaccgacuggcuucuuugu

SEQ ID NO: 2394095 - RNA, 19 nt, Artificial Sequence
  Description of Artificial Sequence: Synthetic oligonucleotide
gaauuuccucaggagaaua

SEQ ID NO: 2394096 - RNA, 19 nt, Artificial Sequence
  Description of Artificial Sequence: Synthetic oligonucleotide
ugcuaagguuuugugggau

SEQ ID NO: 2394097 - RNA, 19 nt, Artificial Sequence
  Description of Artificial Sequence: Synthetic oligonucleotide
guucuaucugcuaagguuu

SEQ ID NO: 2394098 - RNA, 19 nt, Artificial Sequence
  Description of Artificial Sequence: Synthetic oligonucleotide
cuagaacacacagacaaau

SEQ ID NO: 2394099 - RNA, 19 nt, Artificial Sequence
  Description of Artificial Sequence: Synthetic oligonucleotide
gugcucauucgacccaaac

SEQ ID NO: 2394100 - RNA, 19 nt, Artificial Sequence
  Description of Artificial Sequence: Synthetic oligonucleotide
uuugagccauucaccugua

SEQ ID NO: 2394101 - RNA, 19 nt, Artificial Sequence
  Description of Artificial Sequence: Synthetic oligonucleotide
acgaacugacaagauucca

SEQ ID NO: 2394102 - RNA, 19 nt, Artificial Sequence
  Description of Artificial Sequence: Synthetic oligonucleotide
cuaucacggauaguuauua

SEQ ID NO: 2394103 - RNA, 19 nt, Artificial Sequence
  Description of Artificial Sequence: Synthetic oligonucleotide
uagaagcccgugcuuuaua

SEQ ID NO: 2394104 - RNA, 19 nt, Artificial Sequence
  Description of Artificial Sequence: Synthetic oligonucleotide
aagugaaaugggagcugga

SEQ ID NO: 2394105 - RNA, 19 nt, Artificial Sequence
  Description of Artificial Sequence: Synthetic oligonucleotide
ccgucuaacucaaauuuca

SEQ ID NO: 2394106 - RNA, 19 nt, Artificial Sequence
  Description of Artificial Sequence: Synthetic oligonucleotide
auggaagaucgcuggugau

SEQ ID NO: 2394107 - RNA, 19 nt, Artificial Sequence
  Description of Artificial Sequence: Synthetic oligonucleotide
guugaugaguacugaacuu

SEQ ID NO: 2394108 - RNA, 19 nt, Artificial Sequence
  Description of Artificial Sequence: Synthetic oligonucleotide
ucccuguuuggaguguuau

SEQ ID NO: 2394109 - RNA, 19 nt, Artificial Sequence
  Description of Artificial Sequence: Synthetic oligonucleotide
aaucuccacaugggucucu

SEQ ID NO: 2394110 - RNA, 19 nt, Artificial Sequence
  Description of Artificial Sequence: Synthetic oligonucleotide
gaacuuccuucaaggauaa

SEQ ID NO: 2394111 - RNA, 19 nt, Artificial Sequence
  Description of Artificial Sequence: Synthetic oligonucleotide
ugaaaccgucuaacucaaa

SEQ ID NO: 2394112 - RNA, 19 nt, Artificial Sequence
  Description of Artificial Sequence: Synthetic oligonucleotide
gugggauaguugaugagua

SEQ ID NO: 2394113 - RNA, 19 nt, Artificial Sequence
  Description of Artificial Sequence: Synthetic oligonucleotide
caggagaauacuuucuauu

SEQ ID NO: 2394114 - RNA, 19 nt, Artificial Sequence
  Description of Artificial Sequence: Synthetic oligonucleotide
gaugaguacugaacuuugu

SEQ ID NO: 2394115 - RNA, 19 nt, Artificial Sequence
  Description of Artificial Sequence: Synthetic oligonucleotide
uaaucuccacaugggucuc

SEQ ID NO: 2394116 - RNA, 19 nt, Artificial Sequence
  Description of Artificial Sequence: Synthetic oligonucleotide
ucaccuguacugguauaua

SEQ ID NO: 2394117 - RNA, 19 nt, Artificial Sequence
  Description of Artificial Sequence: Synthetic oligonucleotide
ggaagaucgcuggugauua

SEQ ID NO: 2394118 - RNA, 19 nt, Artificial Sequence
  Description of Artificial Sequence: Synthetic oligonucleotide
gaucgcuggugauuauccu

SEQ ID NO: 2394119 - RNA, 19 nt, Artificial Sequence
  Description of Artificial Sequence: Synthetic oligonucleotide
cgcagaauauuuuauggaa

SEQ ID NO: 2394120 - RNA, 19 nt, Artificial Sequence
  Description of Artificial Sequence: Synthetic oligonucleotide
accgacuggcuucuuuguu

SEQ ID NO: 2394121 - RNA, 19 nt, Artificial Sequence
  Description of Artificial Sequence: Synthetic oligonucleotide
acugacgaacugacaagau

SEQ ID NO: 2394122 - RNA, 19 nt, Artificial Sequence
  Description of Artificial Sequence: Synthetic oligonucleotide
uagaugcaguauagauauu

SEQ ID NO: 2394123 - RNA, 19 nt, Artificial Sequence
  Description of Artificial Sequence: Synthetic oligonucleotide
augccagugcuuuggccuu

SEQ ID NO: 2394124 - RNA, 19 nt, Artificial Sequence
  Description of Artificial Sequence: Synthetic oligonucleotide
gcaaugccagugcuuuggc

SEQ ID NO: 2394125 - RNA, 19 nt, Artificial Sequence
  Description of Artificial Sequence: Synthetic oligonucleotide
cuggaucccuguuuggagu

SEQ ID NO: 2394126 - RNA, 19 nt, Artificial Sequence
  Description of Artificial Sequence: Synthetic oligonucleotide
cccgugcuuuauaagucag

SEQ ID NO: 2394127 - RNA, 19 nt, Artificial Sequence
  Description of Artificial Sequence: Synthetic oligonucleotide
cugacaagauuccaauguu

SEQ ID NO: 2394128 - RNA, 19 nt, Artificial Sequence
  Description of Artificial Sequence: Synthetic oligonucleotide
ccgugcuuuauaagucagc

SEQ ID NO: 2394129 - RNA, 19 nt, Artificial Sequence
  Description of Artificial Sequence: Synthetic oligonucleotide
cauucaccuguacugguau

SEQ ID NO: 2394130 - RNA, 19 nt, Artificial Sequence
  Description of Artificial Sequence: Synthetic oligonucleotide
cgugcuuuauaagucagca

SEQ ID NO: 2394131 - RNA, 19 nt, Artificial Sequence
  Description of Artificial Sequence: Synthetic oligonucleotide
caccuguacugguauauau

SEQ ID NO: 2394132 - RNA, 19 nt, Artificial Sequence
  Description of Artificial Sequence: Synthetic oligonucleotide
cugacgaacugacaagauu

SEQ ID NO: 2394133 - RNA, 19 nt, Artificial Sequence
  Description of Artificial Sequence: Synthetic oligonucleotide
cucauucgacccaaacuau

SEQ ID NO: 2394134 - RNA, 19 nt, Artificial Sequence
  Description of Artificial Sequence: Synthetic oligonucleotide
ggucuuaaauguaaauuuu

SEQ ID NO: 2394135 - RNA, 19 nt, Artificial Sequence
  Description of Artificial Sequence: Synthetic oligonucleotide
cgaacugacaagauuccaa

SEQ ID NO: 2394136 - RNA, 19 nt, Artificial Sequence
  Description of Artificial Sequence: Synthetic oligonucleotide
gcccgugcuuuauaaguca

SEQ ID NO: 2394137 - RNA, 19 nt, Artificial Sequence
  Description of Artificial Sequence: Synthetic oligonucleotide
cccauuauaaacacugauu

SEQ ID NO: 2394138 - RNA, 19 nt, Artificial Sequence
  Description of Artificial Sequence: Synthetic oligonucleotide
ggguaaucuccacaugggu

SEQ ID NO: 2394139 - RNA, 19 nt, Artificial Sequence
  Description of Artificial Sequence: Synthetic oligonucleotide
ccaaacuaucauucaaacu

SEQ ID NO: 2394140 - RNA, 19 nt, Artificial Sequence
  Description of Artificial Sequence: Synthetic oligonucleotide
gugcuuuauaagucagcau

SEQ ID NO: 2394141 - RNA, 19 nt, Artificial Sequence
  Description of Artificial Sequence: Synthetic oligonucleotide
cggauaguuauuaacaguu

SEQ ID NO: 2394142 - RNA, 19 nt, Artificial Sequence
  Description of Artificial Sequence: Synthetic oligonucleotide
cuucgaaccagugcuuccu

SEQ ID NO: 2394143 - RNA, 19 nt, Artificial Sequence
  Description of Artificial Sequence: Synthetic oligonucleotide
gcuuuggccuuucuucgaa

SEQ ID NO: 2394144 - RNA, 19 nt, Artificial Sequence
  Description of Artificial Sequence: Synthetic oligonucleotide
gcuaagguuuugugggaua

SEQ ID NO: 2394145 - RNA, 19 nt, Artificial Sequence
  Description of Artificial Sequence: Synthetic oligonucleotide
guacugguauauauugauu

SEQ ID NO: 2394146 - RNA, 19 nt, Artificial Sequence
  Description of Artificial Sequence: Synthetic oligonucleotide
aacuuccuucaaggauaaa

SEQ ID NO: 2394147 - RNA, 19 nt, Artificial Sequence
  Description of Artificial Sequence: Synthetic oligonucleotide
cccucaguauuuuguuguc

SEQ ID NO: 2394148 - RNA, 19 nt, Artificial Sequence
  Description of Artificial Sequence: Synthetic oligonucleotide
aucuccacaugggucucuu

SEQ ID NO: 2394149 - RNA, 19 nt, Artificial Sequence
  Description of Artificial Sequence: Synthetic oligonucleotide
ggaguguuauuuauacuuu

SEQ ID NO: 2394150 - RNA, 19 nt, Artificial Sequence
  Description of Artificial Sequence: Synthetic oligonucleotide
gaagaucgcuggugauuau

SEQ ID NO: 2394151 - RNA, 19 nt, Artificial Sequence
  Description of Artificial Sequence: Synthetic oligonucleotide
cuauuccucucuucuucau

SEQ ID NO: 2394152 - RNA, 19 nt, Artificial Sequence
  Description of Artificial Sequence: Synthetic oligonucleotide
ccuguuuggaguguuauuu

SEQ ID NO: 2394153 - RNA, 19 nt, Artificial Sequence
  Description of Artificial Sequence: Synthetic oligonucleotide
cugugcucauucgacccaa

SEQ ID NO: 2394154 - RNA, 19 nt, Artificial Sequence
  Description of Artificial Sequence: Synthetic oligonucleotide
gggcaaugccagugcuuug

SEQ ID NO: 2394155 - RNA, 19 nt, Artificial Sequence
  Description of Artificial Sequence: Synthetic oligonucleotide
ccucaguauuuuguuguca

SEQ ID NO: 2394156 - RNA, 19 nt, Artificial Sequence
  Description of Artificial Sequence: Synthetic oligonucleotide
ggauaguuauuaacaguuu

SEQ ID NO: 2394157 - RNA, 19 nt, Artificial Sequence
  Description of Artificial Sequence: Synthetic oligonucleotide
guagaagcccgugcuuuau

SEQ ID NO: 2394158 - RNA, 19 nt, Artificial Sequence
  Description of Artificial Sequence: Synthetic oligonucleotide
ccauucaccuguacuggua

SEQ ID NO: 2394159 - RNA, 19 nt, Artificial Sequence
  Description of Artificial Sequence: Synthetic oligonucleotide
ggugucaaagacgcagaau

SEQ ID NO: 2394160 - RNA, 19 nt, Artificial Sequence
  Description of Artificial Sequence: Synthetic oligonucleotide
gaucccuguuuggaguguu

SEQ ID NO: 2394161 - RNA, 19 nt, Artificial Sequence
  Description of Artificial Sequence: Synthetic oligonucleotide
aucccuguuuggaguguua

SEQ ID NO: 2394162 - RNA, 19 nt, Artificial Sequence
  Description of Artificial Sequence: Synthetic oligonucleotide
gguaccgacuggcuucuuu

SEQ ID NO: 2394163 - RNA, 19 nt, Artificial Sequence
  Description of Artificial Sequence: Synthetic oligonucleotide
guuaucuguuagggauggu

SEQ ID NO: 2394164 - RNA, 19 nt, Artificial Sequence
  Description of Artificial Sequence: Synthetic oligonucleotide
ccgacuggcuucuuuguuu

SEQ ID NO: 2394165 - RNA, 19 nt, Artificial Sequence
  Description of Artificial Sequence: Synthetic oligonucleotide
cgucuaacucaaauuucau

SEQ ID NO: 2394166 - RNA, 19 nt, Artificial Sequence
  Description of Artificial Sequence: Synthetic oligonucleotide
ggaucccuguuuggagugu

SEQ ID NO: 2394167 - RNA, 19 nt, Artificial Sequence
  Description of Artificial Sequence: Synthetic oligonucleotide
cccuguuuggaguguuauu

SEQ ID NO: 2394168 - RNA, 19 nt, Artificial Sequence
  Description of Artificial Sequence: Synthetic oligonucleotide
agguaccgacuggcuucuu

SEQ ID NO: 2394169 - RNA, 19 nt, Artificial Sequence
  Description of Artificial Sequence: Synthetic oligonucleotide
gaaucagcuacccagaagc

SEQ ID NO: 2394170 - RNA, 19 nt, Artificial Sequence
  Description of Artificial Sequence: Synthetic oligonucleotide
aggacaacuucacugaagc

SEQ ID NO: 2394171 - RNA, 19 nt, Artificial Sequence
  Description of Artificial Sequence: Synthetic oligonucleotide
aacauauugguucaccugu

SEQ ID NO: 2394172 - RNA, 19 nt, Artificial Sequence
  Description of Artificial Sequence: Synthetic oligonucleotide
agaaaggacaacuucacug

SEQ ID NO: 2394173 - RNA, 19 nt, Artificial Sequence
  Description of Artificial Sequence: Synthetic oligonucleotide
aacaguuugucuuauacuu

SEQ ID NO: 2394174 - RNA, 19 nt, Artificial Sequence
  Description of Artificial Sequence: Synthetic oligonucleotide
uacuugaaguuuaugagug

SEQ ID NO: 2394175 - RNA, 19 nt, Artificial Sequence
  Description of Artificial Sequence: Synthetic oligonucleotide
aggguuaguguuuugcacc

SEQ ID NO: 2394176 - RNA, 19 nt, Artificial Sequence
  Description of Artificial Sequence: Synthetic oligonucleotide
acacaugggagauagauca

SEQ ID NO: 2394177 - RNA, 19 nt, Artificial Sequence
  Description of Artificial Sequence: Synthetic oligonucleotide
cuuagucuggagauaaugg

SEQ ID NO: 2394178 - RNA, 19 nt, Artificial Sequence
  Description of Artificial Sequence: Synthetic oligonucleotide
aauacugguagaaaggaca

SEQ ID NO: 2394179 - RNA, 19 nt, Artificial Sequence
  Description of Artificial Sequence: Synthetic oligonucleotide
aaagaguggccauugccuc

SEQ ID NO: 2394180 - RNA, 19 nt, Artificial Sequence
  Description of Artificial Sequence: Synthetic oligonucleotide
aguaugguaaguggaaacc

SEQ ID NO: 2394181 - RNA, 19 nt, Artificial Sequence
  Description of Artificial Sequence: Synthetic oligonucleotide
aaacauauugguucaccug

SEQ ID NO: 2394182 - RNA, 19 nt, Artificial Sequence
  Description of Artificial Sequence: Synthetic oligonucleotide
ugugaggcaauacuugaag

SEQ ID NO: 2394183 - RNA, 19 nt, Artificial Sequence
  Description of Artificial Sequence: Synthetic oligonucleotide
aguaaggcuggacagagug

SEQ ID NO: 2394184 - RNA, 19 nt, Artificial Sequence
  Description of Artificial Sequence: Synthetic oligonucleotide
gacaacuucacugaagccc

SEQ ID NO: 2394185 - RNA, 19 nt, Artificial Sequence
  Description of Artificial Sequence: Synthetic oligonucleotide
cuuguuacuucuacagugg

SEQ ID NO: 2394186 - RNA, 19 nt, Artificial Sequence
  Description of Artificial Sequence: Synthetic oligonucleotide
aagcguguauagcaaagag

SEQ ID NO: 2394187 - RNA, 19 nt, Artificial Sequence
  Description of Artificial Sequence: Synthetic oligonucleotide
ugugcaaacaguuugucuu

SEQ ID NO: 2394188 - RNA, 19 nt, Artificial Sequence
  Description of Artificial Sequence: Synthetic oligonucleotide
gucacgagagcucagguag

SEQ ID NO: 2394189 - RNA, 19 nt, Artificial Sequence
  Description of Artificial Sequence: Synthetic oligonucleotide
uguauagcaaagaguggcc

SEQ ID NO: 2394190 - RNA, 19 nt, Artificial Sequence
  Description of Artificial Sequence: Synthetic oligonucleotide
guggcuagcauccaggagc

SEQ ID NO: 2394191 - RNA, 19 nt, Artificial Sequence
  Description of Artificial Sequence: Synthetic oligonucleotide
uggagauuuccuuagucug

SEQ ID NO: 2394192 - RNA, 19 nt, Artificial Sequence
  Description of Artificial Sequence: Synthetic oligonucleotide
auacuugaaguuuaugagu

SEQ ID NO: 2394193 - RNA, 19 nt, Artificial Sequence
  Description of Artificial Sequence: Synthetic oligonucleotide
gcaaaauacugguagaaag

SEQ ID NO: 2394194 - RNA, 19 nt, Artificial Sequence
  Description of Artificial Sequence: Synthetic oligonucleotide
agagaguaaggcuggacag

SEQ ID NO: 2394195 - RNA, 19 nt, Artificial Sequence
  Description of Artificial Sequence: Synthetic oligonucleotide
acaaacauauugguucacc

SEQ ID NO: 2394196 - RNA, 19 nt, Artificial Sequence
  Description of Artificial Sequence: Synthetic oligonucleotide
uuuugcaaggagccgcagg

SEQ ID NO: 2394197 - RNA, 19 nt, Artificial Sequence
  Description of Artificial Sequence: Synthetic oligonucleotide
aguggagauuuccuuaguc

SEQ ID NO: 2394198 - RNA, 19 nt, Artificial Sequence
  Description of Artificial Sequence: Synthetic oligonucleotide
uaugguaaguggaaaccca

SEQ ID NO: 2394199 - RNA, 19 nt, Artificial Sequence
  Description of Artificial Sequence: Synthetic oligonucleotide
aaguagcuggguuugcuug

SEQ ID NO: 2394200 - RNA, 19 nt, Artificial Sequence
  Description of Artificial Sequence: Synthetic oligonucleotide
aaugguguagaaggacucg

SEQ ID NO: 2394201 - RNA, 19 nt, Artificial Sequence
  Description of Artificial Sequence: Synthetic oligonucleotide
uguuuugcaccugaaguag

SEQ ID NO: 2394202 - RNA, 19 nt, Artificial Sequence
  Description of Artificial Sequence: Synthetic oligonucleotide
uugaaguuuaugaguggag

SEQ ID NO: 2394203 - RNA, 19 nt, Artificial Sequence
  Description of Artificial Sequence: Synthetic oligonucleotide
ucagcuaugucugugugca

SEQ ID NO: 2394204 - RNA, 19 nt, Artificial Sequence
  Description of Artificial Sequence: Synthetic oligonucleotide
auuuccuuagucuggagau

SEQ ID NO: 2394205 - RNA, 19 nt, Artificial Sequence
  Description of Artificial Sequence: Synthetic oligonucleotide
ugaguggagauuuccuuag

SEQ ID NO: 2394206 - RNA, 19 nt, Artificial Sequence
  Description of Artificial Sequence: Synthetic oligonucleotide
ugaaguuuaugaguggaga

SEQ ID NO: 2394207 - RNA, 19 nt, Artificial Sequence
  Description of Artificial Sequence: Synthetic oligonucleotide
guguauagcaaagaguggc

SEQ ID NO: 2394208 - RNA, 19 nt, Artificial Sequence
  Description of Artificial Sequence: Synthetic oligonucleotide
ccuagaaucagcuacccag

SEQ ID NO: 2394209 - RNA, 19 nt, Artificial Sequence
  Description of Artificial Sequence: Synthetic oligonucleotide
uuaugaguggagauuuccu

SEQ ID NO: 2394210 - RNA, 19 nt, Artificial Sequence
  Description of Artificial Sequence: Synthetic oligonucleotide
uuugcuuguuacuucuaca

SEQ ID NO: 2394211 - RNA, 19 nt, Artificial Sequence
  Description of Artificial Sequence: Synthetic oligonucleotide
caaucucaccccuagaauc

SEQ ID NO: 2394212 - RNA, 19 nt, Artificial Sequence
  Description of Artificial Sequence: Synthetic oligonucleotide
ugguguucagcuccugacg

SEQ ID NO: 2394213 - RNA, 19 nt, Artificial Sequence
  Description of Artificial Sequence: Synthetic oligonucleotide
uguagaaggacucgccagu

SEQ ID NO: 2394214 - RNA, 19 nt, Artificial Sequence
  Description of Artificial Sequence: Synthetic oligonucleotide
ugguagagagccagggccg

SEQ ID NO: 2394215 - RNA, 19 nt, Artificial Sequence
  Description of Artificial Sequence: Synthetic oligonucleotide
uugaacgugaggguuagug

SEQ ID NO: 2394216 - RNA, 19 nt, Artificial Sequence
  Description of Artificial Sequence: Synthetic oligonucleotide
acugguagaaaggacaacu

SEQ ID NO: 2394217 - RNA, 19 nt, Artificial Sequence
  Description of Artificial Sequence: Synthetic oligonucleotide
gaagcaggagucacgagag

SEQ ID NO: 2394218 - RNA, 19 nt, Artificial Sequence
  Description of Artificial Sequence: Synthetic oligonucleotide
gauaaugguguagaaggac

SEQ ID NO: 2394219 - RNA, 19 nt, Artificial Sequence
  Description of Artificial Sequence: Synthetic oligonucleotide
uuuugcaccugaaguagcu

SEQ ID NO: 2394220 - RNA, 19 nt, Artificial Sequence
  Description of Artificial Sequence: Synthetic oligonucleotide
ucccuauccccucucuucg

SEQ ID NO: 2394221 - RNA, 19 nt, Artificial Sequence
  Description of Artificial Sequence: Synthetic oligonucleotide
gacagaguggcuagcaucc

SEQ ID NO: 2394222 - RNA, 19 nt, Artificial Sequence
  Description of Artificial Sequence: Synthetic oligonucleotide
gaugugaggcaauacuuga

SEQ ID NO: 2394223 - RNA, 19 nt, Artificial Sequence
  Description of Artificial Sequence: Synthetic oligonucleotide
ucaaccucucccacaaaca

SEQ ID NO: 2394224 - RNA, 19 nt, Artificial Sequence
  Description of Artificial Sequence: Synthetic oligonucleotide
ugguagaaaggacaacuuc

SEQ ID NO: 2394225 - RNA, 19 nt, Artificial Sequence
  Description of Artificial Sequence: Synthetic oligonucleotide
uaaugguguagaaggacuc

SEQ ID NO: 2394226 - RNA, 19 nt, Artificial Sequence
  Description of Artificial Sequence: Synthetic oligonucleotide
gaaagcguguauagcaaag

SEQ ID NO: 2394227 - RNA, 19 nt, Artificial Sequence
  Description of Artificial Sequence: Synthetic oligonucleotide
ugaggguuaguguuuugca

SEQ ID NO: 2394228 - RNA, 19 nt, Artificial Sequence
  Description of Artificial Sequence: Synthetic oligonucleotide
aguggccauugccucaacc

SEQ ID NO: 2394229 - RNA, 19 nt, Artificial Sequence
  Description of Artificial Sequence: Synthetic oligonucleotide
caugggagauagaucacag

SEQ ID NO: 2394230 - RNA, 19 nt, Artificial Sequence
  Description of Artificial Sequence: Synthetic oligonucleotide
uccugagcagaugugaggc

SEQ ID NO: 2394231 - RNA, 19 nt, Artificial Sequence
  Description of Artificial Sequence: Synthetic oligonucleotide
ugguaaguggaaacccaag

SEQ ID NO: 2394232 - RNA, 19 nt, Artificial Sequence
  Description of Artificial Sequence: Synthetic oligonucleotide
agaaucagcuacccagaag

SEQ ID NO: 2394233 - RNA, 19 nt, Artificial Sequence
  Description of Artificial Sequence: Synthetic oligonucleotide
cuaggagcagagaguaagg

SEQ ID NO: 2394234 - RNA, 19 nt, Artificial Sequence
  Description of Artificial Sequence: Synthetic oligonucleotide
uguguuuugcaaggagccg

SEQ ID NO: 2394235 - RNA, 19 nt, Artificial Sequence
  Description of Artificial Sequence: Synthetic oligonucleotide
auauugguucaccugugcu

SEQ ID NO: 2394236 - RNA, 19 nt, Artificial Sequence
  Description of Artificial Sequence: Synthetic oligonucleotide
ugaacgugaggguuagugu

SEQ ID NO: 2394237 - RNA, 19 nt, Artificial Sequence
  Description of Artificial Sequence: Synthetic oligonucleotide
acacacacaugggagauag

SEQ ID NO: 2394238 - RNA, 19 nt, Artificial Sequence
  Description of Artificial Sequence: Synthetic oligonucleotide
auugccucaaccucuccca

SEQ ID NO: 2394239 - RNA, 19 nt, Artificial Sequence
  Description of Artificial Sequence: Synthetic oligonucleotide
gcguguauagcaaagagug

SEQ ID NO: 2394240 - RNA, 19 nt, Artificial Sequence
  Description of Artificial Sequence: Synthetic oligonucleotide
aaucucaccccuagaauca

SEQ ID NO: 2394241 - RNA, 19 nt, Artificial Sequence
  Description of Artificial Sequence: Synthetic oligonucleotide
ucuucggugcgccaaggac

SEQ ID NO: 2394242 - RNA, 19 nt, Artificial Sequence
  Description of Artificial Sequence: Synthetic oligonucleotide
aaagcguguauagcaaaga

SEQ ID NO: 2394243 - RNA, 19 nt, Artificial Sequence
  Description of Artificial Sequence: Synthetic oligonucleotide
uguuuugcaaggagccgca

SEQ ID NO: 2394244 - RNA, 19 nt, Artificial Sequence
  Description of Artificial Sequence: Synthetic oligonucleotide
auaaugguguagaaggacu

SEQ ID NO: 2394245 - RNA, 19 nt, Artificial Sequence
  Description of Artificial Sequence: Synthetic oligonucleotide
uccugacggacacacacac

SEQ ID NO: 2394246 - RNA, 19 nt, Artificial Sequence
  Description of Artificial Sequence: Synthetic oligonucleotide
cucaaccucucccacaaac

SEQ ID NO: 2394247 - RNA, 19 nt, Artificial Sequence
  Description of Artificial Sequence: Synthetic oligonucleotide
uaugaguggagauuuccuu

SEQ ID NO: 2394248 - RNA, 19 nt, Artificial Sequence
  Description of Artificial Sequence: Synthetic oligonucleotide
uagaaaggacaacuucacu

SEQ ID NO: 2394249 - RNA, 19 nt, Artificial Sequence
  Description of Artificial Sequence: Synthetic oligonucleotide
caaggacacagagaggugc

SEQ ID NO: 2394250 - RNA, 19 nt, Artificial Sequence
  Description of Artificial Sequence: Synthetic oligonucleotide
caccccuagaaucagcuac

SEQ ID NO: 2394251 - RNA, 19 nt, Artificial Sequence
  Description of Artificial Sequence: Synthetic oligonucleotide
gaggguuaguguuuugcac

SEQ ID NO: 2394252 - RNA, 19 nt, Artificial Sequence
  Description of Artificial Sequence: Synthetic oligonucleotide
augggagauagaucacagg

SEQ ID NO: 2394253 - RNA, 19 nt, Artificial Sequence
  Description of Artificial Sequence: Synthetic oligonucleotide
guaugguaaguggaaaccc

SEQ ID NO: 2394254 - RNA, 19 nt, Artificial Sequence
  Description of Artificial Sequence: Synthetic oligonucleotide
cauauugguucaccugugc

SEQ ID NO: 2394255 - RNA, 19 nt, Artificial Sequence
  Description of Artificial Sequence: Synthetic oligonucleotide
ugucugugugcaaacaguu

SEQ ID NO: 2394256 - RNA, 19 nt, Artificial Sequence
  Description of Artificial Sequence: Synthetic oligonucleotide
cagggcuaggagcagagag

SEQ ID NO: 2394257 - RNA, 19 nt, Artificial Sequence
  Description of Artificial Sequence: Synthetic oligonucleotide
uuguuacuucuacaguggu

SEQ ID NO: 2394258 - RNA, 19 nt, Artificial Sequence
  Description of Artificial Sequence: Synthetic oligonucleotide
ugucagcuaugucugugug

SEQ ID NO: 2394259 - RNA, 19 nt, Artificial Sequence
  Description of Artificial Sequence: Synthetic oligonucleotide
cauugccucaaccucuccc

SEQ ID NO: 2394260 - RNA, 19 nt, Artificial Sequence
  Description of Artificial Sequence: Synthetic oligonucleotide
ugcuuguuacuucuacagu

SEQ ID NO: 2394261 - RNA, 19 nt, Artificial Sequence
  Description of Artificial Sequence: Synthetic oligonucleotide
aaguuuaugaguggagauu

SEQ ID NO: 2394262 - RNA, 19 nt, Artificial Sequence
  Description of Artificial Sequence: Synthetic oligonucleotide
guuugcuuguuacuucuac

SEQ ID NO: 2394263 - RNA, 19 nt, Artificial Sequence
  Description of Artificial Sequence: Synthetic oligonucleotide
agagaggugcuguagccgu

SEQ ID NO: 2394264 - RNA, 19 nt, Artificial Sequence
  Description of Artificial Sequence: Synthetic oligonucleotide
uucaccugugcuugaacgu

SEQ ID NO: 2394265 - RNA, 19 nt, Artificial Sequence
  Description of Artificial Sequence: Synthetic oligonucleotide
agguuuuggugaugucagc

SEQ ID NO: 2394266 - RNA, 19 nt, Artificial Sequence
  Description of Artificial Sequence: Synthetic oligonucleotide
uggcuagcauccaggagcc

SEQ ID NO: 2394267 - RNA, 19 nt, Artificial Sequence
  Description of Artificial Sequence: Synthetic oligonucleotide
guagguuuuggugauguca

SEQ ID NO: 2394268 - RNA, 19 nt, Artificial Sequence
  Description of Artificial Sequence: Synthetic oligonucleotide
ucacgagagcucagguagg

SEQ ID NO: 2394269 - RNA, 19 nt, Artificial Sequence
  Description of Artificial Sequence: Synthetic oligonucleotide
guuaguguuuugcaccuga

SEQ ID NO: 2394270 - RNA, 19 nt, Artificial Sequence
  Description of Artificial Sequence: Synthetic oligonucleotide
aagaguggccauugccuca

SEQ ID NO: 2394271 - RNA, 19 nt, Artificial Sequence
  Description of Artificial Sequence: Synthetic oligonucleotide
uauccccucucuucggugc

SEQ ID NO: 2394272 - RNA, 19 nt, Artificial Sequence
  Description of Artificial Sequence: Synthetic oligonucleotide
uguaggaggggauccucca

SEQ ID NO: 2394273 - RNA, 19 nt, Artificial Sequence
  Description of Artificial Sequence: Synthetic oligonucleotide
acaaucucaccccuagaau

SEQ ID NO: 2394274 - RNA, 19 nt, Artificial Sequence
  Description of Artificial Sequence: Synthetic oligonucleotide
ggagauaaugguguagaag

SEQ ID NO: 2394275 - RNA, 19 nt, Artificial Sequence
  Description of Artificial Sequence: Synthetic oligonucleotide
uucggugcgccaaggacac

SEQ ID NO: 2394276 - RNA, 19 nt, Artificial Sequence
  Description of Artificial Sequence: Synthetic oligonucleotide
gcauacugcaaaauacugg

SEQ ID NO: 2394277 - RNA, 19 nt, Artificial Sequence
  Description of Artificial Sequence: Synthetic oligonucleotide
guguuuugcaaggagccgc

SEQ ID NO: 2394278 - RNA, 19 nt, Artificial Sequence
  Description of Artificial Sequence: Synthetic oligonucleotide
uuccuuagucuggagauaa

SEQ ID NO: 2394279 - RNA, 19 nt, Artificial Sequence
  Description of Artificial Sequence: Synthetic oligonucleotide
cuugaaguuuaugagugga

SEQ ID NO: 2394280 - RNA, 19 nt, Artificial Sequence
  Description of Artificial Sequence: Synthetic oligonucleotide
uucccuauccccucucuuc

SEQ ID NO: 2394281 - RNA, 19 nt, Artificial Sequence
  Description of Artificial Sequence: Synthetic oligonucleotide
uagaaucagcuacccagaa

SEQ ID NO: 2394282 - RNA, 19 nt, Artificial Sequence
  Description of Artificial Sequence: Synthetic oligonucleotide
accccuagaaucagcuacc

SEQ ID NO: 2394283 - RNA, 19 nt, Artificial Sequence
  Description of Artificial Sequence: Synthetic oligonucleotide
aguggcuagcauccaggag

SEQ ID NO: 2394284 - RNA, 19 nt, Artificial Sequence
  Description of Artificial Sequence: Synthetic oligonucleotide
gaaguuuaugaguggagau

SEQ ID NO: 2394285 - RNA, 19 nt, Artificial Sequence
  Description of Artificial Sequence: Synthetic oligonucleotide
gcuaggagcagagaguaag

SEQ ID NO: 2394286 - RNA, 19 nt, Artificial Sequence
  Description of Artificial Sequence: Synthetic oligonucleotide
gguaaguggaaacccaaga

SEQ ID NO: 2394287 - RNA, 19 nt, Artificial Sequence
  Description of Artificial Sequence: Synthetic oligonucleotide
cuagaaucagcuacccaga

SEQ ID NO: 2394288 - RNA, 19 nt, Artificial Sequence
  Description of Artificial Sequence: Synthetic oligonucleotide
gcaaagaguggccauugcc

SEQ ID NO: 2394289 - RNA, 19 nt, Artificial Sequence
  Description of Artificial Sequence: Synthetic oligonucleotide
ggagauuuccuuagucugg

SEQ ID NO: 2394290 - RNA, 19 nt, Artificial Sequence
  Description of Artificial Sequence: Synthetic oligonucleotide
aucagcuacccagaagcag

SEQ ID NO: 2394291 - RNA, 19 nt, Artificial Sequence
  Description of Artificial Sequence: Synthetic oligonucleotide
cucgccagucuucuggaag

SEQ ID NO: 2394292 - RNA, 19 nt, Artificial Sequence
  Description of Artificial Sequence: Synthetic oligonucleotide
uguucagcuccugacggac

SEQ ID NO: 2394293 - RNA, 19 nt, Artificial Sequence
  Description of Artificial Sequence: Synthetic oligonucleotide
cacacaugggagauagauc

SEQ ID NO: 2394294 - RNA, 19 nt, Artificial Sequence
  Description of Artificial Sequence: Synthetic oligonucleotide
gguguguuuugcaaggagc

SEQ ID NO: 2394295 - RNA, 19 nt, Artificial Sequence
  Description of Artificial Sequence: Synthetic oligonucleotide
cuucuguaggaggggaucc

SEQ ID NO: 2394296 - RNA, 19 nt, Artificial Sequence
  Description of Artificial Sequence: Synthetic oligonucleotide
cuucggugcgccaaggaca

SEQ ID NO: 2394297 - RNA, 19 nt, Artificial Sequence
  Description of Artificial Sequence: Synthetic oligonucleotide
gugaggguuaguguuuugc

SEQ ID NO: 2394298 - RNA, 19 nt, Artificial Sequence
  Description of Artificial Sequence: Synthetic oligonucleotide
agugguguucagcuccuga

SEQ ID NO: 2394299 - RNA, 19 nt, Artificial Sequence
  Description of Artificial Sequence: Synthetic oligonucleotide
uggccauugccucaaccuc

SEQ ID NO: 2394300 - RNA, 19 nt, Artificial Sequence
  Description of Artificial Sequence: Synthetic oligonucleotide
uagaaggacucgccagucu

SEQ ID NO: 2394301 - RNA, 19 nt, Artificial Sequence
  Description of Artificial Sequence: Synthetic oligonucleotide
uuccagguguguuuugcaa

SEQ ID NO: 2394302 - RNA, 19 nt, Artificial Sequence
  Description of Artificial Sequence: Synthetic oligonucleotide
cacaaucucaccccuagaa

SEQ ID NO: 2394303 - RNA, 19 nt, Artificial Sequence
  Description of Artificial Sequence: Synthetic oligonucleotide
uggagauaaugguguagaa

SEQ ID NO: 2394304 - RNA, 19 nt, Artificial Sequence
  Description of Artificial Sequence: Synthetic oligonucleotide
ccaggaguaugguaagugg

SEQ ID NO: 2394305 - RNA, 19 nt, Artificial Sequence
  Description of Artificial Sequence: Synthetic oligonucleotide
gugguguucagcuccugac

SEQ ID NO: 2394306 - RNA, 19 nt, Artificial Sequence
  Description of Artificial Sequence: Synthetic oligonucleotide
ggugcuguagccguaguug

SEQ ID NO: 2394307 - RNA, 19 nt, Artificial Sequence
  Description of Artificial Sequence: Synthetic oligonucleotide
ugcuugaacgugaggguua

SEQ ID NO: 2394308 - RNA, 19 nt, Artificial Sequence
  Description of Artificial Sequence: Synthetic oligonucleotide
acaugggagauagaucaca

SEQ ID NO: 2394309 - RNA, 19 nt, Artificial Sequence
  Description of Artificial Sequence: Synthetic oligonucleotide
ucugaccauggcuuucccu

SEQ ID NO: 2394310 - RNA, 19 nt, Artificial Sequence
  Description of Artificial Sequence: Synthetic oligonucleotide
agcguguauagcaaagagu

SEQ ID NO: 2394311 - RNA, 19 nt, Artificial Sequence
  Description of Artificial Sequence: Synthetic oligonucleotide
aaucagcuacccagaagca

SEQ ID NO: 2394312 - RNA, 19 nt, Artificial Sequence
  Description of Artificial Sequence: Synthetic oligonucleotide
ucucaccccuagaaucagc

SEQ ID NO: 2394313 - RNA, 19 nt, Artificial Sequence
  Description of Artificial Sequence: Synthetic oligonucleotide
agauaaugguguagaagga

SEQ ID NO: 2394314 - RNA, 19 nt, Artificial Sequence
  Description of Artificial Sequence: Synthetic oligonucleotide
caaacauauugguucaccu

SEQ ID NO: 2394315 - RNA, 19 nt, Artificial Sequence
  Description of Artificial Sequence: Synthetic oligonucleotide
agauuuccuuagucuggag

SEQ ID NO: 2394316 - RNA, 19 nt, Artificial Sequence
  Description of Artificial Sequence: Synthetic oligonucleotide
cugaccauggcuuucccua

SEQ ID NO: 2394317 - RNA, 19 nt, Artificial Sequence
  Description of Artificial Sequence: Synthetic oligonucleotide
gagauagaucacaggcccc

SEQ ID NO: 2394318 - RNA, 19 nt, Artificial Sequence
  Description of Artificial Sequence: Synthetic oligonucleotide
auggcuuucccuauccccu

SEQ ID NO: 2394319 - RNA, 19 nt, Artificial Sequence
  Description of Artificial Sequence: Synthetic oligonucleotide
aacuucacugaagccccug

SEQ ID NO: 2394320 - RNA, 19 nt, Artificial Sequence
  Description of Artificial Sequence: Synthetic oligonucleotide
uguagccguaguugcuucu

SEQ ID NO: 2394321 - RNA, 19 nt, Artificial Sequence
  Description of Artificial Sequence: Synthetic oligonucleotide
agccguaguugcuucuucu

SEQ ID NO: 2394322 - RNA, 19 nt, Artificial Sequence
  Description of Artificial Sequence: Synthetic oligonucleotide
uacuucuacagugguguuc

SEQ ID NO: 2394323 - RNA, 19 nt, Artificial Sequence
  Description of Artificial Sequence: Synthetic oligonucleotide
uucuucuguaggaggggau

SEQ ID NO: 2394324 - RNA, 19 nt, Artificial Sequence
  Description of Artificial Sequence: Synthetic oligonucleotide
gcuccugacggacacacac

SEQ ID NO: 2394325 - RNA, 19 nt, Artificial Sequence
  Description of Artificial Sequence: Synthetic oligonucleotide
gaacgugaggguuaguguu

SEQ ID NO: 2394326 - RNA, 19 nt, Artificial Sequence
  Description of Artificial Sequence: Synthetic oligonucleotide
guuuugcaccugaaguagc

SEQ ID NO: 2394327 - RNA, 19 nt, Artificial Sequence
  Description of Artificial Sequence: Synthetic oligonucleotide
auacugguagaaaggacaa

SEQ ID NO: 2394328 - RNA, 19 nt, Artificial Sequence
  Description of Artificial Sequence: Synthetic oligonucleotide
uggacagaguggcuagcau

SEQ ID NO: 2394329 - RNA, 19 nt, Artificial Sequence
  Description of Artificial Sequence: Synthetic oligonucleotide
agcuaugucugugugcaaa

SEQ ID NO: 2394330 - RNA, 19 nt, Artificial Sequence
  Description of Artificial Sequence: Synthetic oligonucleotide
gaguggcuagcauccagga

SEQ ID NO: 2394331 - RNA, 19 nt, Artificial Sequence
  Description of Artificial Sequence: Synthetic oligonucleotide
uucugaccauggcuuuccc

SEQ ID NO: 2394332 - RNA, 19 nt, Artificial Sequence
  Description of Artificial Sequence: Synthetic oligonucleotide
agucacgagagcucaggua

SEQ ID NO: 2394333 - RNA, 19 nt, Artificial Sequence
  Description of Artificial Sequence: Synthetic oligonucleotide
gggagauagaucacaggcc

SEQ ID NO: 2394334 - RNA, 19 nt, Artificial Sequence
  Description of Artificial Sequence: Synthetic oligonucleotide
gagaguaaggcuggacaga

SEQ ID NO: 2394335 - RNA, 19 nt, Artificial Sequence
  Description of Artificial Sequence: Synthetic oligonucleotide
acauauugguucaccugug

SEQ ID NO: 2394336 - RNA, 19 nt, Artificial Sequence
  Description of Artificial Sequence: Synthetic oligonucleotide
gguguagaaggacucgcca

SEQ ID NO: 2394337 - RNA, 19 nt, Artificial Sequence
  Description of Artificial Sequence: Synthetic oligonucleotide
aggaguaugguaaguggaa

SEQ ID NO: 2394338 - RNA, 19 nt, Artificial Sequence
  Description of Artificial Sequence: Synthetic oligonucleotide
auagcaaagaguggccauu

SEQ ID NO: 2394339 - RNA, 19 nt, Artificial Sequence
  Description of Artificial Sequence: Synthetic oligonucleotide
ucucuucggugcgccaagg

SEQ ID NO: 2394340 - RNA, 19 nt, Artificial Sequence
  Description of Artificial Sequence: Synthetic oligonucleotide
ggagucacgagagcucagg

SEQ ID NO: 2394341 - RNA, 19 nt, Artificial Sequence
  Description of Artificial Sequence: Synthetic oligonucleotide
gccgcauacugcaaaauac

SEQ ID NO: 2394342 - RNA, 19 nt, Artificial Sequence
  Description of Artificial Sequence: Synthetic oligonucleotide
guggccauugccucaaccu

SEQ ID NO: 2394343 - RNA, 19 nt, Artificial Sequence
  Description of Artificial Sequence: Synthetic oligonucleotide
ugaccauggcuuucccuau

SEQ ID NO: 2394344 - RNA, 19 nt, Artificial Sequence
  Description of Artificial Sequence: Synthetic oligonucleotide
acggacacacacacauggg

SEQ ID NO: 2394345 - RNA, 19 nt, Artificial Sequence
  Description of Artificial Sequence: Synthetic oligonucleotide
ugcaaacaguuugucuuau

SEQ ID NO: 2394346 - RNA, 19 nt, Artificial Sequence
  Description of Artificial Sequence: Synthetic oligonucleotide
ggacaacuucacugaagcc

SEQ ID NO: 2394347 - RNA, 19 nt, Artificial Sequence
  Description of Artificial Sequence: Synthetic oligonucleotide
gcuaugucugugugcaaac

SEQ ID NO: 2394348 - RNA, 19 nt, Artificial Sequence
  Description of Artificial Sequence: Synthetic oligonucleotide
uuuccuuagucuggagaua

SEQ ID NO: 2394349 - RNA, 19 nt, Artificial Sequence
  Description of Artificial Sequence: Synthetic oligonucleotide
cuacagugguguucagcuc

SEQ ID NO: 2394350 - RNA, 19 nt, Artificial Sequence
  Description of Artificial Sequence: Synthetic oligonucleotide
augguaaguggaaacccaa

SEQ ID NO: 2394351 - RNA, 19 nt, Artificial Sequence
  Description of Artificial Sequence: Synthetic oligonucleotide
uucuguaggaggggauccu

SEQ ID NO: 2394352 - RNA, 19 nt, Artificial Sequence
  Description of Artificial Sequence: Synthetic oligonucleotide
guaggaggggauccuccac

SEQ ID NO: 2394353 - RNA, 19 nt, Artificial Sequence
  Description of Artificial Sequence: Synthetic oligonucleotide
uagccguaguugcuucuuc

SEQ ID NO: 2394354 - RNA, 19 nt, Artificial Sequence
  Description of Artificial Sequence: Synthetic oligonucleotide
gcuagcauccaggagccug

SEQ ID NO: 2394355 - RNA, 19 nt, Artificial Sequence
  Description of Artificial Sequence: Synthetic oligonucleotide
cucucuucggugcgccaag

SEQ ID NO: 2394356 - RNA, 19 nt, Artificial Sequence
  Description of Artificial Sequence: Synthetic oligonucleotide
uacccagaagcaggaguca

SEQ ID NO: 2394357 - RNA, 19 nt, Artificial Sequence
  Description of Artificial Sequence: Synthetic oligonucleotide
aucucaccccuagaaucag

SEQ ID NO: 2394358 - RNA, 19 nt, Artificial Sequence
  Description of Artificial Sequence: Synthetic oligonucleotide
agggcuaggagcagagagu

SEQ ID NO: 2394359 - RNA, 19 nt, Artificial Sequence
  Description of Artificial Sequence: Synthetic oligonucleotide
cguguauagcaaagagugg

SEQ ID NO: 2394360 - RNA, 19 nt, Artificial Sequence
  Description of Artificial Sequence: Synthetic oligonucleotide
uugcaaggagccgcagggc

SEQ ID NO: 2394361 - RNA, 19 nt, Artificial Sequence
  Description of Artificial Sequence: Synthetic oligonucleotide
cccacaaucucaccccuag

SEQ ID NO: 2394362 - RNA, 19 nt, Artificial Sequence
  Description of Artificial Sequence: Synthetic oligonucleotide
uuacuucuacagugguguu

SEQ ID NO: 2394363 - RNA, 19 nt, Artificial Sequence
  Description of Artificial Sequence: Synthetic oligonucleotide
cuguagccguaguugcuuc

SEQ ID NO: 2394364 - RNA, 19 nt, Artificial Sequence
  Description of Artificial Sequence: Synthetic oligonucleotide
guagaaggacucgccaguc

SEQ ID NO: 2394365 - RNA, 19 nt, Artificial Sequence
  Description of Artificial Sequence: Synthetic oligonucleotide
uugguucaccugugcuuga

SEQ ID NO: 2394366 - RNA, 19 nt, Artificial Sequence
  Description of Artificial Sequence: Synthetic oligonucleotide
cacaaacauauugguucac

SEQ ID NO: 2394367 - RNA, 19 nt, Artificial Sequence
  Description of Artificial Sequence: Synthetic oligonucleotide
gugugcaaacaguuugucu

SEQ ID NO: 2394368 - RNA, 19 nt, Artificial Sequence
  Description of Artificial Sequence: Synthetic oligonucleotide
guuuaugaguggagauuuc

SEQ ID NO: 2394369 - RNA, 19 nt, Artificial Sequence
  Description of Artificial Sequence: Synthetic oligonucleotide
cucaccccuagaaucagcu

SEQ ID NO: 2394370 - RNA, 19 nt, Artificial Sequence
  Description of Artificial Sequence: Synthetic oligonucleotide
cccagaagcaggagucacg

SEQ ID NO: 2394371 - RNA, 19 nt, Artificial Sequence
  Description of Artificial Sequence: Synthetic oligonucleotide
cagaugugaggcaauacuu

SEQ ID NO: 2394372 - RNA, 19 nt, Artificial Sequence
  Description of Artificial Sequence: Synthetic oligonucleotide
agggccgcauacugcaaaa

SEQ ID NO: 2394373 - RNA, 19 nt, Artificial Sequence
  Description of Artificial Sequence: Synthetic oligonucleotide
aggcaauacuugaaguuua

SEQ ID NO: 2394374 - RNA, 19 nt, Artificial Sequence
  Description of Artificial Sequence: Synthetic oligonucleotide
acguggccgaagguggcgg

SEQ ID NO: 2394375 - RNA, 19 nt, Artificial Sequence
  Description of Artificial Sequence: Synthetic oligonucleotide
gaaguagcuggguuugcuu

SEQ ID NO: 2394376 - RNA, 19 nt, Artificial Sequence
  Description of Artificial Sequence: Synthetic oligonucleotide
caguuugucuuauacuuuu

SEQ ID NO: 2394377 - RNA, 19 nt, Artificial Sequence
  Description of Artificial Sequence: Synthetic oligonucleotide
gcaauacuugaaguuuaug

SEQ ID NO: 2394378 - RNA, 19 nt, Artificial Sequence
  Description of Artificial Sequence: Synthetic oligonucleotide
cuaugucugugugcaaaca

SEQ ID NO: 2394379 - RNA, 19 nt, Artificial Sequence
  Description of Artificial Sequence: Synthetic oligonucleotide
uggcuuucccuauccccuc

SEQ ID NO: 2394380 - RNA, 19 nt, Artificial Sequence
  Description of Artificial Sequence: Synthetic oligonucleotide
ucaccccuagaaucagcua

SEQ ID NO: 2394381 - RNA, 19 nt, Artificial Sequence
  Description of Artificial Sequence: Synthetic oligonucleotide
aggugcuguagccguaguu

SEQ ID NO: 2394382 - RNA, 19 nt, Artificial Sequence
  Description of Artificial Sequence: Synthetic oligonucleotide
gccguaguugcuucuucug

SEQ ID NO: 2394383 - RNA, 19 nt, Artificial Sequence
  Description of Artificial Sequence: Synthetic oligonucleotide
agcccauguucugguagag

SEQ ID NO: 2394384 - RNA, 19 nt, Artificial Sequence
  Description of Artificial Sequence: Synthetic oligonucleotide
cuucuacagugguguucag

SEQ ID NO: 2394385 - RNA, 19 nt, Artificial Sequence
  Description of Artificial Sequence: Synthetic oligonucleotide
guuuugcaaggagccgcag

SEQ ID NO: 2394386 - RNA, 19 nt, Artificial Sequence
  Description of Artificial Sequence: Synthetic oligonucleotide
agaguggccauugccucaa

SEQ ID NO: 2394387 - RNA, 19 nt, Artificial Sequence
  Description of Artificial Sequence: Synthetic oligonucleotide
gcuugaacgugaggguuag

SEQ ID NO: 2394388 - RNA, 19 nt, Artificial Sequence
  Description of Artificial Sequence: Synthetic oligonucleotide
guguucagcuccugacgga

SEQ ID NO: 2394389 - RNA, 19 nt, Artificial Sequence
  Description of Artificial Sequence: Synthetic oligonucleotide
cuccugacggacacacaca

SEQ ID NO: 2394390 - RNA, 19 nt, Artificial Sequence
  Description of Artificial Sequence: Synthetic oligonucleotide
aaggcuggacagaguggcu

SEQ ID NO: 2394391 - RNA, 19 nt, Artificial Sequence
  Description of Artificial Sequence: Synthetic oligonucleotide
gagucacgagagcucaggu

SEQ ID NO: 2394392 - RNA, 19 nt, Artificial Sequence
  Description of Artificial Sequence: Synthetic oligonucleotide
aggacacagagaggugcug

SEQ ID NO: 2394393 - RNA, 19 nt, Artificial Sequence
  Description of Artificial Sequence: Synthetic oligonucleotide
cacguggccgaagguggcg

SEQ ID NO: 2394394 - RNA, 19 nt, Artificial Sequence
  Description of Artificial Sequence: Synthetic oligonucleotide
ugguucaccugugcuugaa

SEQ ID NO: 2394395 - RNA, 19 nt, Artificial Sequence
  Description of Artificial Sequence: Synthetic oligonucleotide
aggacucgccagucuucug

SEQ ID NO: 2394396 - RNA, 19 nt, Artificial Sequence
  Description of Artificial Sequence: Synthetic oligonucleotide
ggaguaugguaaguggaaa

SEQ ID NO: 2394397 - RNA, 19 nt, Artificial Sequence
  Description of Artificial Sequence: Synthetic oligonucleotide
caaccucucccacaaacau

SEQ ID NO: 2394398 - RNA, 19 nt, Artificial Sequence
  Description of Artificial Sequence: Synthetic oligonucleotide
cuggacagaguggcuagca

SEQ ID NO: 2394399 - RNA, 19 nt, Artificial Sequence
  Description of Artificial Sequence: Synthetic oligonucleotide
gcuacccagaagcaggagu

SEQ ID NO: 2394400 - RNA, 19 nt, Artificial Sequence
  Description of Artificial Sequence: Synthetic oligonucleotide
agcuacccagaagcaggag

SEQ ID NO: 2394401 - RNA, 19 nt, Artificial Sequence
  Description of Artificial Sequence: Synthetic oligonucleotide
gguagagagccagggccgc

SEQ ID NO: 2394402 - RNA, 19 nt, Artificial Sequence
  Description of Artificial Sequence: Synthetic oligonucleotide
ggguuaguguuuugcaccu

SEQ ID NO: 2394403 - RNA, 19 nt, Artificial Sequence
  Description of Artificial Sequence: Synthetic oligonucleotide
cugguagaaaggacaacuu

SEQ ID NO: 2394404 - RNA, 19 nt, Artificial Sequence
  Description of Artificial Sequence: Synthetic oligonucleotide
gagcagaugugaggcaaua

SEQ ID NO: 2394405 - RNA, 19 nt, Artificial Sequence
  Description of Artificial Sequence: Synthetic oligonucleotide
ggccgcauacugcaaaaua

SEQ ID NO: 2394406 - RNA, 19 nt, Artificial Sequence
  Description of Artificial Sequence: Synthetic oligonucleotide
cucuucggugcgccaagga

SEQ ID NO: 2394407 - RNA, 19 nt, Artificial Sequence
  Description of Artificial Sequence: Synthetic oligonucleotide
aggagucacgagagcucag

SEQ ID NO: 2394408 - RNA, 19 nt, Artificial Sequence
  Description of Artificial Sequence: Synthetic oligonucleotide
acgugaggguuaguguuuu

SEQ ID NO: 2394409 - RNA, 19 nt, Artificial Sequence
  Description of Artificial Sequence: Synthetic oligonucleotide
uccccucucuucggugcgc

SEQ ID NO: 2394410 - RNA, 19 nt, Artificial Sequence
  Description of Artificial Sequence: Synthetic oligonucleotide
gguuaguguuuugcaccug

SEQ ID NO: 2394411 - RNA, 19 nt, Artificial Sequence
  Description of Artificial Sequence: Synthetic oligonucleotide
cccuauccccucucuucgg

SEQ ID NO: 2394412 - RNA, 19 nt, Artificial Sequence
  Description of Artificial Sequence: Synthetic oligonucleotide
gggcuaggagcagagagua

SEQ ID NO: 2394413 - RNA, 19 nt, Artificial Sequence
  Description of Artificial Sequence: Synthetic oligonucleotide
cuuucccuauccccucucu

SEQ ID NO: 2394414 - RNA, 19 nt, Artificial Sequence
  Description of Artificial Sequence: Synthetic oligonucleotide
auguucugguagagagcca

SEQ ID NO: 2394415 - RNA, 19 nt, Artificial Sequence
  Description of Artificial Sequence: Synthetic oligonucleotide
cacacacaugggagauaga

SEQ ID NO: 2394416 - RNA, 19 nt, Artificial Sequence
  Description of Artificial Sequence: Synthetic oligonucleotide
ccgcauacugcaaaauacu

SEQ ID NO: 2394417 - RNA, 19 nt, Artificial Sequence
  Description of Artificial Sequence: Synthetic oligonucleotide
agccccuggccugugcaaa

SEQ ID NO: 2394418 - RNA, 19 nt, Artificial Sequence
  Description of Artificial Sequence: Synthetic oligonucleotide
ccccuagaaucagcuaccc

SEQ ID NO: 2394419 - RNA, 19 nt, Artificial Sequence
  Description of Artificial Sequence: Synthetic oligonucleotide
cguaguugcuucuucugua

SEQ ID NO: 2394420 - RNA, 19 nt, Artificial Sequence
  Description of Artificial Sequence: Synthetic oligonucleotide
acgagagcucagguagguu

SEQ ID NO: 2394421 - RNA, 19 nt, Artificial Sequence
  Description of Artificial Sequence: Synthetic oligonucleotide
cccuuccugagcagaugug

SEQ ID NO: 2394422 - RNA, 19 nt, Artificial Sequence
  Description of Artificial Sequence: Synthetic oligonucleotide
cggugcgccaaggacacag

SEQ ID NO: 2394423 - RNA, 19 nt, Artificial Sequence
  Description of Artificial Sequence: Synthetic oligonucleotide
ggacacagagaggugcugu

SEQ ID NO: 2394424 - RNA, 19 nt, Artificial Sequence
  Description of Artificial Sequence: Synthetic oligonucleotide
gaguaaggcuggacagagu

SEQ ID NO: 2394425 - RNA, 19 nt, Artificial Sequence
  Description of Artificial Sequence: Synthetic oligonucleotide
gaggugcuguagccguagu

SEQ ID NO: 2394426 - RNA, 19 nt, Artificial Sequence
  Description of Artificial Sequence: Synthetic oligonucleotide
gagaggugcuguagccgua

SEQ ID NO: 2394427 - RNA, 19 nt, Artificial Sequence
  Description of Artificial Sequence: Synthetic oligonucleotide
ggccauugccucaaccucu

SEQ ID NO: 2394428 - RNA, 19 nt, Artificial Sequence
  Description of Artificial Sequence: Synthetic oligonucleotide
gucugugugcaaacaguuu

SEQ ID NO: 2394429 - RNA, 19 nt, Artificial Sequence
  Description of Artificial Sequence: Synthetic oligonucleotide
cacgagagcucagguaggu

SEQ ID NO: 2394430 - RNA, 19 nt, Artificial Sequence
  Description of Artificial Sequence: Synthetic oligonucleotide
ccauugccucaaccucucc

SEQ ID NO: 2394431 - RNA, 19 nt, Artificial Sequence
  Description of Artificial Sequence: Synthetic oligonucleotide
ggcaauacuugaaguuuau

SEQ ID NO: 2394432 - RNA, 19 nt, Artificial Sequence
  Description of Artificial Sequence: Synthetic oligonucleotide
guagccguaguugcuucuu

SEQ ID NO: 2394433 - RNA, 19 nt, Artificial Sequence
  Description of Artificial Sequence: Synthetic oligonucleotide
cccuagaaucagcuaccca

SEQ ID NO: 2394434 - RNA, 19 nt, Artificial Sequence
  Description of Artificial Sequence: Synthetic oligonucleotide
gccccuggccugugcaaac

SEQ ID NO: 2394435 - RNA, 19 nt, Artificial Sequence
  Description of Artificial Sequence: Synthetic oligonucleotide
cagcuaugucugugugcaa

SEQ ID NO: 2394436 - RNA, 19 nt, Artificial Sequence
  Description of Artificial Sequence: Synthetic oligonucleotide
gguuugcuuguuacuucua

SEQ ID NO: 2394437 - RNA, 19 nt, Artificial Sequence
  Description of Artificial Sequence: Synthetic oligonucleotide
ccguaguugcuucuucugu

SEQ ID NO: 2394438 - RNA, 19 nt, Artificial Sequence
  Description of Artificial Sequence: Synthetic oligonucleotide
cgagagcucagguagguuu

SEQ ID NO: 2394439 - RNA, 19 nt, Artificial Sequence
  Description of Artificial Sequence: Synthetic oligonucleotide
ucggugcgccaaggacaca

SEQ ID NO: 2394440 - RNA, 19 nt, Artificial Sequence
  Description of Artificial Sequence: Synthetic oligonucleotide
gcccauguucugguagaga

SEQ ID NO: 2394441 - RNA, 19 nt, Artificial Sequence
  Description of Artificial Sequence: Synthetic oligonucleotide
cgugaggguuaguguuuug

SEQ ID NO: 2394442 - RNA, 19 nt, Artificial Sequence
  Description of Artificial Sequence: Synthetic oligonucleotide
ggugcgccaaggacacaga

SEQ ID NO: 2394443 - RNA, 19 nt, Artificial Sequence
  Description of Artificial Sequence: Synthetic oligonucleotide
ccacaaucucaccccuaga

SEQ ID NO: 2394444 - RNA, 19 nt, Artificial Sequence
  Description of Artificial Sequence: Synthetic oligonucleotide
guagcuggguuugcuuguu

SEQ ID NO: 2394445 - RNA, 19 nt, Artificial Sequence
  Description of Artificial Sequence: Synthetic oligonucleotide
ggcuuucccuauccccucu

SEQ ID NO: 2394446 - RNA, 19 nt, Artificial Sequence
  Description of Artificial Sequence: Synthetic oligonucleotide
ccccuuccugagcagaugu

SEQ ID NO: 2394447 - RNA, 19 nt, Artificial Sequence
  Description of Artificial Sequence: Synthetic oligonucleotide
ccuauccccucucuucggu

SEQ ID NO: 2394448 - RNA, 19 nt, Artificial Sequence
  Description of Artificial Sequence: Synthetic oligonucleotide
cugaggccaggaguauggu

SEQ ID NO: 2394449 - RNA, 19 nt, Artificial Sequence
  Description of Artificial Sequence: Synthetic oligonucleotide
gcaccugaaguagcugggu

SEQ ID NO: 2394450 - RNA, 19 nt, Artificial Sequence
  Description of Artificial Sequence: Synthetic oligonucleotide
ggcuaggagcagagaguaa

SEQ ID NO: 2394451 - RNA, 19 nt, Artificial Sequence
  Description of Artificial Sequence: Synthetic oligonucleotide
ccucucuucggugcgccaa

SEQ ID NO: 2394452 - RNA, 19 nt, Artificial Sequence
  Description of Artificial Sequence: Synthetic oligonucleotide
ggccaggaguaugguaagu

SEQ ID NO: 2394453 - RNA, 19 nt, Artificial Sequence
  Description of Artificial Sequence: Synthetic oligonucleotide
ccuccacuggcagggcaga

SEQ ID NO: 2394454 - RNA, 19 nt, Artificial Sequence
  Description of Artificial Sequence: Synthetic oligonucleotide
ccagggccgcauacugcaa

SEQ ID NO: 2394455 - RNA, 19 nt, Artificial Sequence
  Description of Artificial Sequence: Synthetic oligonucleotide
gcccacaaucucaccccua

SEQ ID NO: 2394456 - RNA, 19 nt, Artificial Sequence
  Description of Artificial Sequence: Synthetic oligonucleotide
ggcuagcauccaggagccu

SEQ ID NO: 2394457 - RNA, 19 nt, Artificial Sequence
  Description of Artificial Sequence: Synthetic oligonucleotide
ccucucccacaaacauauu

SEQ ID NO: 2394458 - RNA, 19 nt, Artificial Sequence
  Description of Artificial Sequence: Synthetic oligonucleotide
acugaagcaaauuaaaacc

SEQ ID NO: 2394459 - RNA, 19 nt, Artificial Sequence
  Description of Artificial Sequence: Synthetic oligonucleotide
aauuaaaaccaccaggcac

SEQ ID NO: 2394460 - RNA, 19 nt, Artificial Sequence
  Description of Artificial Sequence: Synthetic oligonucleotide
agacaaauaagacagcagc

SEQ ID NO: 2394461 - RNA, 19 nt, Artificial Sequence
  Description of Artificial Sequence: Synthetic oligonucleotide
ucuacaaggacaacaaugg

SEQ ID NO: 2394462 - RNA, 19 nt, Artificial Sequence
  Description of Artificial Sequence: Synthetic oligonucleotide
agcaaauauacccaguacc

SEQ ID NO: 2394463 - RNA, 19 nt, Artificial Sequence
  Description of Artificial Sequence: Synthetic oligonucleotide
aagaagucaguccauggcc

SEQ ID NO: 2394464 - RNA, 19 nt, Artificial Sequence
  Description of Artificial Sequence: Synthetic oligonucleotide
caaauuaaaaccaccaggc

SEQ ID NO: 2394465 - RNA, 19 nt, Artificial Sequence
  Description of Artificial Sequence: Synthetic oligonucleotide
uacauaagcacuuucagug

SEQ ID NO: 2394466 - RNA, 19 nt, Artificial Sequence
  Description of Artificial Sequence: Synthetic oligonucleotide
uguggaaauagaaagaggu

SEQ ID NO: 2394467 - RNA, 19 nt, Artificial Sequence
  Description of Artificial Sequence: Synthetic oligonucleotide
aacaauggagguuaucagg

SEQ ID NO: 2394468 - RNA, 19 nt, Artificial Sequence
  Description of Artificial Sequence: Synthetic oligonucleotide
uugccuaguaugcagaugg

SEQ ID NO: 2394469 - RNA, 19 nt, Artificial Sequence
  Description of Artificial Sequence: Synthetic oligonucleotide
augaaugaggaucaagggc

SEQ ID NO: 2394470 - RNA, 19 nt, Artificial Sequence
  Description of Artificial Sequence: Synthetic oligonucleotide
gagguuaucagguagagga

SEQ ID NO: 2394471 - RNA, 19 nt, Artificial Sequence
  Description of Artificial Sequence: Synthetic oligonucleotide
ugaaugauaucuuggagug

SEQ ID NO: 2394472 - RNA, 19 nt, Artificial Sequence
  Description of Artificial Sequence: Synthetic oligonucleotide
uauaaucucagcacacagg

SEQ ID NO: 2394473 - RNA, 19 nt, Artificial Sequence
  Description of Artificial Sequence: Synthetic oligonucleotide
aauggagguuaucagguag

SEQ ID NO: 2394474 - RNA, 19 nt, Artificial Sequence
  Description of Artificial Sequence: Synthetic oligonucleotide
aagaucaucucgaucaccg

SEQ ID NO: 2394475 - RNA, 19 nt, Artificial Sequence
  Description of Artificial Sequence: Synthetic oligonucleotide
cuaaccagcagccaggggc

SEQ ID NO: 2394476 - RNA, 19 nt, Artificial Sequence
  Description of Artificial Sequence: Synthetic oligonucleotide
uuugaaacugccuuuucca

SEQ ID NO: 2394477 - RNA, 19 nt, Artificial Sequence
  Description of Artificial Sequence: Synthetic oligonucleotide
agaugaaugaggaucaagg

SEQ ID NO: 2394478 - RNA, 19 nt, Artificial Sequence
  Description of Artificial Sequence: Synthetic oligonucleotide
ugcuuuaaagggaagguga

SEQ ID NO: 2394479 - RNA, 19 nt, Artificial Sequence
  Description of Artificial Sequence: Synthetic oligonucleotide
ugcuguaugucuuugcugc

SEQ ID NO: 2394480 - RNA, 19 nt, Artificial Sequence
  Description of Artificial Sequence: Synthetic oligonucleotide
uuuuauaggagguguagcu

SEQ ID NO: 2394481 - RNA, 19 nt, Artificial Sequence
  Description of Artificial Sequence: Synthetic oligonucleotide
agcagcaaagaucaucucg

SEQ ID NO: 2394482 - RNA, 19 nt, Artificial Sequence
  Description of Artificial Sequence: Synthetic oligonucleotide
aaauaagacagcagcaaag

SEQ ID NO: 2394483 - RNA, 19 nt, Artificial Sequence
  Description of Artificial Sequence: Synthetic oligonucleotide
acaaggacaacaauggagg

SEQ ID NO: 2394484 - RNA, 19 nt, Artificial Sequence
  Description of Artificial Sequence: Synthetic oligonucleotide
uuuaaagggaaggugaagu

SEQ ID NO: 2394485 - RNA, 19 nt, Artificial Sequence
  Description of Artificial Sequence: Synthetic oligonucleotide
gaugaaugauaucuuggag

SEQ ID NO: 2394486 - RNA, 19 nt, Artificial Sequence
  Description of Artificial Sequence: Synthetic oligonucleotide
ugcguaagaagccagugca

SEQ ID NO: 2394487 - RNA, 19 nt, Artificial Sequence
  Description of Artificial Sequence: Synthetic oligonucleotide
gaaacaaggucucacugug

SEQ ID NO: 2394488 - RNA, 19 nt, Artificial Sequence
  Description of Artificial Sequence: Synthetic oligonucleotide
aaauuaaaaccaccaggca

SEQ ID NO: 2394489 - RNA, 19 nt, Artificial Sequence
  Description of Artificial Sequence: Synthetic oligonucleotide
cagagauagaugaaugagg

SEQ ID NO: 2394490 - RNA, 19 nt, Artificial Sequence
  Description of Artificial Sequence: Synthetic oligonucleotide
aauaagacagcagcaaaga

SEQ ID NO: 2394491 - RNA, 19 nt, Artificial Sequence
  Description of Artificial Sequence: Synthetic oligonucleotide
ugaugaaugauaucuugga

SEQ ID NO: 2394492 - RNA, 19 nt, Artificial Sequence
  Description of Artificial Sequence: Synthetic oligonucleotide
ugucuuugcugcuuuaaag

SEQ ID NO: 2394493 - RNA, 19 nt, Artificial Sequence
  Description of Artificial Sequence: Synthetic oligonucleotide
cacugaagcaaauuaaaac

SEQ ID NO: 2394494 - RNA, 19 nt, Artificial Sequence
  Description of Artificial Sequence: Synthetic oligonucleotide
ugaagaagucaguccaugg

SEQ ID NO: 2394495 - RNA, 19 nt, Artificial Sequence
  Description of Artificial Sequence: Synthetic oligonucleotide
uguuguggaaauagaaaga

SEQ ID NO: 2394496 - RNA, 19 nt, Artificial Sequence
  Description of Artificial Sequence: Synthetic oligonucleotide
aaacucccaacaaaggcac

SEQ ID NO: 2394497 - RNA, 19 nt, Artificial Sequence
  Description of Artificial Sequence: Synthetic oligonucleotide
ucuccuguaccauacauaa

SEQ ID NO: 2394498 - RNA, 19 nt, Artificial Sequence
  Description of Artificial Sequence: Synthetic oligonucleotide
agcaaauuaaaaccaccag

SEQ ID NO: 2394499 - RNA, 19 nt, Artificial Sequence
  Description of Artificial Sequence: Synthetic oligonucleotide
gaagaagucaguccauggc

SEQ ID NO: 2394500 - RNA, 19 nt, Artificial Sequence
  Description of Artificial Sequence: Synthetic oligonucleotide
aaagaucaucucgaucacc

SEQ ID NO: 2394501 - RNA, 19 nt, Artificial Sequence
  Description of Artificial Sequence: Synthetic oligonucleotide
ugaagcaaauuaaaaccac

SEQ ID NO: 2394502 - RNA, 19 nt, Artificial Sequence
  Description of Artificial Sequence: Synthetic oligonucleotide
gaugguucuagguucaauc

SEQ ID NO: 2394503 - RNA, 19 nt, Artificial Sequence
  Description of Artificial Sequence: Synthetic oligonucleotide
agauccacgugucucugcc

SEQ ID NO: 2394504 - RNA, 19 nt, Artificial Sequence
  Description of Artificial Sequence: Synthetic oligonucleotide
acaaaggcacuuuuauagg

SEQ ID NO: 2394505 - RNA, 19 nt, Artificial Sequence
  Description of Artificial Sequence: Synthetic oligonucleotide
cacaguauaaucucagcac

SEQ ID NO: 2394506 - RNA, 19 nt, Artificial Sequence
  Description of Artificial Sequence: Synthetic oligonucleotide
guuguggaaauagaaagag

SEQ ID NO: 2394507 - RNA, 19 nt, Artificial Sequence
  Description of Artificial Sequence: Synthetic oligonucleotide
agagcaauguagcaaauau

SEQ ID NO: 2394508 - RNA, 19 nt, Artificial Sequence
  Description of Artificial Sequence: Synthetic oligonucleotide
cauacauaagcacuuucag

SEQ ID NO: 2394509 - RNA, 19 nt, Artificial Sequence
  Description of Artificial Sequence: Synthetic oligonucleotide
uugcagguagcagagauag

SEQ ID NO: 2394510 - RNA, 19 nt, Artificial Sequence
  Description of Artificial Sequence: Synthetic oligonucleotide
uggaaauagaaagagguau

SEQ ID NO: 2394511 - RNA, 19 nt, Artificial Sequence
  Description of Artificial Sequence: Synthetic oligonucleotide
ucgaucaccgacagggagg

SEQ ID NO: 2394512 - RNA, 19 nt, Artificial Sequence
  Description of Artificial Sequence: Synthetic oligonucleotide
acaacaauggagguuauca

SEQ ID NO: 2394513 - RNA, 19 nt, Artificial Sequence
  Description of Artificial Sequence: Synthetic oligonucleotide
cagccaaagagcaauguag

SEQ ID NO: 2394514 - RNA, 19 nt, Artificial Sequence
  Description of Artificial Sequence: Synthetic oligonucleotide
guauaaucucagcacacag

SEQ ID NO: 2394515 - RNA, 19 nt, Artificial Sequence
  Description of Artificial Sequence: Synthetic oligonucleotide
acauaagcacuuucagugg

SEQ ID NO: 2394516 - RNA, 19 nt, Artificial Sequence
  Description of Artificial Sequence: Synthetic oligonucleotide
ucagagaauuggcugggag

SEQ ID NO: 2394517 - RNA, 19 nt, Artificial Sequence
  Description of Artificial Sequence: Synthetic oligonucleotide
ucaaucuccuguaccauac

SEQ ID NO: 2394518 - RNA, 19 nt, Artificial Sequence
  Description of Artificial Sequence: Synthetic oligonucleotide
agguagcagagauagauga

SEQ ID NO: 2394519 - RNA, 19 nt, Artificial Sequence
  Description of Artificial Sequence: Synthetic oligonucleotide
ugaaacaaggucucacugu

SEQ ID NO: 2394520 - RNA, 19 nt, Artificial Sequence
  Description of Artificial Sequence: Synthetic oligonucleotide
auacauaagcacuuucagu

SEQ ID NO: 2394521 - RNA, 19 nt, Artificial Sequence
  Description of Artificial Sequence: Synthetic oligonucleotide
aucuacaaggacaacaaug

SEQ ID NO: 2394522 - RNA, 19 nt, Artificial Sequence
  Description of Artificial Sequence: Synthetic oligonucleotide
aagacaaauaagacagcag

SEQ ID NO: 2394523 - RNA, 19 nt, Artificial Sequence
  Description of Artificial Sequence: Synthetic oligonucleotide
uaugaaggcucugaagaag

SEQ ID NO: 2394524 - RNA, 19 nt, Artificial Sequence
  Description of Artificial Sequence: Synthetic oligonucleotide
agagauagaugaaugagga

SEQ ID NO: 2394525 - RNA, 19 nt, Artificial Sequence
  Description of Artificial Sequence: Synthetic oligonucleotide
aaaggcacuuuuauaggag

SEQ ID NO: 2394526 - RNA, 19 nt, Artificial Sequence
  Description of Artificial Sequence: Synthetic oligonucleotide
gaggaguaugcugaugucg

SEQ ID NO: 2394527 - RNA, 19 nt, Artificial Sequence
  Description of Artificial Sequence: Synthetic oligonucleotide
guuaucagguagaggaugg

SEQ ID NO: 2394528 - RNA, 19 nt, Artificial Sequence
  Description of Artificial Sequence: Synthetic oligonucleotide
uagcagagauagaugaaug

SEQ ID NO: 2394529 - RNA, 19 nt, Artificial Sequence
  Description of Artificial Sequence: Synthetic oligonucleotide
aggcaucacagccaaagag

SEQ ID NO: 2394530 - RNA, 19 nt, Artificial Sequence
  Description of Artificial Sequence: Synthetic oligonucleotide
aguggggucagagaauugg

SEQ ID NO: 2394531 - RNA, 19 nt, Artificial Sequence
  Description of Artificial Sequence: Synthetic oligonucleotide
agcaaagaucaucucgauc

SEQ ID NO: 2394532 - RNA, 19 nt, Artificial Sequence
  Description of Artificial Sequence: Synthetic oligonucleotide
agagaauuggcugggagug

SEQ ID NO: 2394533 - RNA, 19 nt, Artificial Sequence
  Description of Artificial Sequence: Synthetic oligonucleotide
ugcugcuuuaaagggaagg

SEQ ID NO: 2394534 - RNA, 19 nt, Artificial Sequence
  Description of Artificial Sequence: Synthetic oligonucleotide
agccaaagagcaauguagc

SEQ ID NO: 2394535 - RNA, 19 nt, Artificial Sequence
  Description of Artificial Sequence: Synthetic oligonucleotide
ugcagaugguucuagguuc

SEQ ID NO: 2394536 - RNA, 19 nt, Artificial Sequence
  Description of Artificial Sequence: Synthetic oligonucleotide
aagggaaggugaaguaggc

SEQ ID NO: 2394537 - RNA, 19 nt, Artificial Sequence
  Description of Artificial Sequence: Synthetic oligonucleotide
uggagugcaggucacacau

SEQ ID NO: 2394538 - RNA, 19 nt, Artificial Sequence
  Description of Artificial Sequence: Synthetic oligonucleotide
auuugcagguagcagagau

SEQ ID NO: 2394539 - RNA, 19 nt, Artificial Sequence
  Description of Artificial Sequence: Synthetic oligonucleotide
guaggcaucacagccaaag

SEQ ID NO: 2394540 - RNA, 19 nt, Artificial Sequence
  Description of Artificial Sequence: Synthetic oligonucleotide
aauauacccaguaccccag

SEQ ID NO: 2394541 - RNA, 19 nt, Artificial Sequence
  Description of Artificial Sequence: Synthetic oligonucleotide
cagcacacaggaaaagucc

SEQ ID NO: 2394542 - RNA, 19 nt, Artificial Sequence
  Description of Artificial Sequence: Synthetic oligonucleotide
gaagcacugaagcaaauua

SEQ ID NO: 2394543 - RNA, 19 nt, Artificial Sequence
  Description of Artificial Sequence: Synthetic oligonucleotide
acuuuuauaggagguguag

SEQ ID NO: 2394544 - RNA, 19 nt, Artificial Sequence
  Description of Artificial Sequence: Synthetic oligonucleotide
uaaccagcagccaggggcc

SEQ ID NO: 2394545 - RNA, 19 nt, Artificial Sequence
  Description of Artificial Sequence: Synthetic oligonucleotide
caacaauggagguuaucag

SEQ ID NO: 2394546 - RNA, 19 nt, Artificial Sequence
  Description of Artificial Sequence: Synthetic oligonucleotide
augguucuagguucaaucu

SEQ ID NO: 2394547 - RNA, 19 nt, Artificial Sequence
  Description of Artificial Sequence: Synthetic oligonucleotide
auaucuuggagugcagguc

SEQ ID NO: 2394548 - RNA, 19 nt, Artificial Sequence
  Description of Artificial Sequence: Synthetic oligonucleotide
acaaaacucccaacaaagg

SEQ ID NO: 2394549 - RNA, 19 nt, Artificial Sequence
  Description of Artificial Sequence: Synthetic oligonucleotide
ugaugucgaagcacugaag

SEQ ID NO: 2394550 - RNA, 19 nt, Artificial Sequence
  Description of Artificial Sequence: Synthetic oligonucleotide
aaguaggcaucacagccaa

SEQ ID NO: 2394551 - RNA, 19 nt, Artificial Sequence
  Description of Artificial Sequence: Synthetic oligonucleotide
aggagcuauuugcagguag

SEQ ID NO: 2394552 - RNA, 19 nt, Artificial Sequence
  Description of Artificial Sequence: Synthetic oligonucleotide
guaagaagccagugcaggc

SEQ ID NO: 2394553 - RNA, 19 nt, Artificial Sequence
  Description of Artificial Sequence: Synthetic oligonucleotide
ugcaggucacacauguaga

SEQ ID NO: 2394554 - RNA, 19 nt, Artificial Sequence
  Description of Artificial Sequence: Synthetic oligonucleotide
ugaaacugccuuuuccauc

SEQ ID NO: 2394555 - RNA, 19 nt, Artificial Sequence
  Description of Artificial Sequence: Synthetic oligonucleotide
caaauauacccaguacccc

SEQ ID NO: 2394556 - RNA, 19 nt, Artificial Sequence
  Description of Artificial Sequence: Synthetic oligonucleotide
ugucgaagcacugaagcaa

SEQ ID NO: 2394557 - RNA, 19 nt, Artificial Sequence
  Description of Artificial Sequence: Synthetic oligonucleotide
acaauggagguuaucaggu

SEQ ID NO: 2394558 - RNA, 19 nt, Artificial Sequence
  Description of Artificial Sequence: Synthetic oligonucleotide
auauacccaguaccccagc

SEQ ID NO: 2394559 - RNA, 19 nt, Artificial Sequence
  Description of Artificial Sequence: Synthetic oligonucleotide
gacagggaggaguaugcug

SEQ ID NO: 2394560 - RNA, 19 nt, Artificial Sequence
  Description of Artificial Sequence: Synthetic oligonucleotide
auggcugcuaugaaggcuc

SEQ ID NO: 2394561 - RNA, 19 nt, Artificial Sequence
  Description of Artificial Sequence: Synthetic oligonucleotide
ucaagggccaucuguggga

SEQ ID NO: 2394562 - RNA, 19 nt, Artificial Sequence
  Description of Artificial Sequence: Synthetic oligonucleotide
aggagguguagcugggagg

SEQ ID NO: 2394563 - RNA, 19 nt, Artificial Sequence
  Description of Artificial Sequence: Synthetic oligonucleotide
uuuggugcguaagaagcca

SEQ ID NO: 2394564 - RNA, 19 nt, Artificial Sequence
  Description of Artificial Sequence: Synthetic oligonucleotide
aagccagugcaggcuaacc

SEQ ID NO: 2394565 - RNA, 19 nt, Artificial Sequence
  Description of Artificial Sequence: Synthetic oligonucleotide
gaggagacugcuugccuag

SEQ ID NO: 2394566 - RNA, 19 nt, Artificial Sequence
  Description of Artificial Sequence: Synthetic oligonucleotide
acacauguagaagacaaau

SEQ ID NO: 2394567 - RNA, 19 nt, Artificial Sequence
  Description of Artificial Sequence: Synthetic oligonucleotide
caguauaaucucagcacac

SEQ ID NO: 2394568 - RNA, 19 nt, Artificial Sequence
  Description of Artificial Sequence: Synthetic oligonucleotide
auacccaguaccccagcag

SEQ ID NO: 2394569 - RNA, 19 nt, Artificial Sequence
  Description of Artificial Sequence: Synthetic oligonucleotide
agacugcuugccuaguaug

SEQ ID NO: 2394570 - RNA, 19 nt, Artificial Sequence
  Description of Artificial Sequence: Synthetic oligonucleotide
gaguaugcugaugucgaag

SEQ ID NO: 2394571 - RNA, 19 nt, Artificial Sequence
  Description of Artificial Sequence: Synthetic oligonucleotide
cuguaccauacauaagcac

SEQ ID NO: 2394572 - RNA, 19 nt, Artificial Sequence
  Description of Artificial Sequence: Synthetic oligonucleotide
gcuauuugcagguagcaga

SEQ ID NO: 2394573 - RNA, 19 nt, Artificial Sequence
  Description of Artificial Sequence: Synthetic oligonucleotide
uuggugcguaagaagccag

SEQ ID NO: 2394574 - RNA, 19 nt, Artificial Sequence
  Description of Artificial Sequence: Synthetic oligonucleotide
auaaaggugaccacaccca

SEQ ID NO: 2394575 - RNA, 19 nt, Artificial Sequence
  Description of Artificial Sequence: Synthetic oligonucleotide
caggcuaaccagcagccag

SEQ ID NO: 2394576 - RNA, 19 nt, Artificial Sequence
  Description of Artificial Sequence: Synthetic oligonucleotide
gggucagagaauuggcugg

SEQ ID NO: 2394577 - RNA, 19 nt, Artificial Sequence
  Description of Artificial Sequence: Synthetic oligonucleotide
caaaggcacuuuuauagga

SEQ ID NO: 2394578 - RNA, 19 nt, Artificial Sequence
  Description of Artificial Sequence: Synthetic oligonucleotide
ucugugggaucaguagggg

SEQ ID NO: 2394579 - RNA, 19 nt, Artificial Sequence
  Description of Artificial Sequence: Synthetic oligonucleotide
gguucuagguucaaucucc

SEQ ID NO: 2394580 - RNA, 19 nt, Artificial Sequence
  Description of Artificial Sequence: Synthetic oligonucleotide
ccuaguaugcagaugguuc

SEQ ID NO: 2394581 - RNA, 19 nt, Artificial Sequence
  Description of Artificial Sequence: Synthetic oligonucleotide
aguguuguggaaauagaaa

SEQ ID NO: 2394582 - RNA, 19 nt, Artificial Sequence
  Description of Artificial Sequence: Synthetic oligonucleotide
auaagcacuuucagugggg

SEQ ID NO: 2394583 - RNA, 19 nt, Artificial Sequence
  Description of Artificial Sequence: Synthetic oligonucleotide
acuuucaguggggucagag

SEQ ID NO: 2394584 - RNA, 19 nt, Artificial Sequence
  Description of Artificial Sequence: Synthetic oligonucleotide
ucugaagaagucaguccau

SEQ ID NO: 2394585 - RNA, 19 nt, Artificial Sequence
  Description of Artificial Sequence: Synthetic oligonucleotide
aagcacugaagcaaauuaa

SEQ ID NO: 2394586 - RNA, 19 nt, Artificial Sequence
  Description of Artificial Sequence: Synthetic oligonucleotide
aucagguagaggauggcug

SEQ ID NO: 2394587 - RNA, 19 nt, Artificial Sequence
  Description of Artificial Sequence: Synthetic oligonucleotide
uggagguuaucagguagag

SEQ ID NO: 2394588 - RNA, 19 nt, Artificial Sequence
  Description of Artificial Sequence: Synthetic oligonucleotide
cacccaggaggguugauug

SEQ ID NO: 2394589 - RNA, 19 nt, Artificial Sequence
  Description of Artificial Sequence: Synthetic oligonucleotide
gauggaggagcuauuugca

SEQ ID NO: 2394590 - RNA, 19 nt, Artificial Sequence
  Description of Artificial Sequence: Synthetic oligonucleotide
uuugcagguagcagagaua

SEQ ID NO: 2394591 - RNA, 19 nt, Artificial Sequence
  Description of Artificial Sequence: Synthetic oligonucleotide
aguaggggcugcuguaugu

SEQ ID NO: 2394592 - RNA, 19 nt, Artificial Sequence
  Description of Artificial Sequence: Synthetic oligonucleotide
uggcuggccucacagagau

SEQ ID NO: 2394593 - RNA, 19 nt, Artificial Sequence
  Description of Artificial Sequence: Synthetic oligonucleotide
gaaggugaaguaggcauca

SEQ ID NO: 2394594 - RNA, 19 nt, Artificial Sequence
  Description of Artificial Sequence: Synthetic oligonucleotide
gaaguaggcaucacagcca

SEQ ID NO: 2394595 - RNA, 19 nt, Artificial Sequence
  Description of Artificial Sequence: Synthetic oligonucleotide
gugcguaagaagccagugc

SEQ ID NO: 2394596 - RNA, 19 nt, Artificial Sequence
  Description of Artificial Sequence: Synthetic oligonucleotide
aggguugauuggcaggcug

SEQ ID NO: 2394597 - RNA, 19 nt, Artificial Sequence
  Description of Artificial Sequence: Synthetic oligonucleotide
cacaccaggcaagaggaag

SEQ ID NO: 2394598 - RNA, 19 nt, Artificial Sequence
  Description of Artificial Sequence: Synthetic oligonucleotide
agcuauuugcagguagcag

SEQ ID NO: 2394599 - RNA, 19 nt, Artificial Sequence
  Description of Artificial Sequence: Synthetic oligonucleotide
uaugucuuugcugcuuuaa

SEQ ID NO: 2394600 - RNA, 19 nt, Artificial Sequence
  Description of Artificial Sequence: Synthetic oligonucleotide
aaggugaaguaggcaucac

SEQ ID NO: 2394601 - RNA, 19 nt, Artificial Sequence
  Description of Artificial Sequence: Synthetic oligonucleotide
gaaugauaucuuggagugc

SEQ ID NO: 2394602 - RNA, 19 nt, Artificial Sequence
  Description of Artificial Sequence: Synthetic oligonucleotide
acagccaaagagcaaugua

SEQ ID NO: 2394603 - RNA, 19 nt, Artificial Sequence
  Description of Artificial Sequence: Synthetic oligonucleotide
aucaccgacagggaggagu

SEQ ID NO: 2394604 - RNA, 19 nt, Artificial Sequence
  Description of Artificial Sequence: Synthetic oligonucleotide
agccagugcaggcuaacca

SEQ ID NO: 2394605 - RNA, 19 nt, Artificial Sequence
  Description of Artificial Sequence: Synthetic oligonucleotide
uaagcacuuucaguggggu

SEQ ID NO: 2394606 - RNA, 19 nt, Artificial Sequence
  Description of Artificial Sequence: Synthetic oligonucleotide
cagguagcagagauagaug

SEQ ID NO: 2394607 - RNA, 19 nt, Artificial Sequence
  Description of Artificial Sequence: Synthetic oligonucleotide
gaguguuguggaaauagaa

SEQ ID NO: 2394608 - RNA, 19 nt, Artificial Sequence
  Description of Artificial Sequence: Synthetic oligonucleotide
gcacaguauaaucucagca

SEQ ID NO: 2394609 - RNA, 19 nt, Artificial Sequence
  Description of Artificial Sequence: Synthetic oligonucleotide
aagagcaauguagcaaaua

SEQ ID NO: 2394610 - RNA, 19 nt, Artificial Sequence
  Description of Artificial Sequence: Synthetic oligonucleotide
aggaguaugcugaugucga

SEQ ID NO: 2394611 - RNA, 19 nt, Artificial Sequence
  Description of Artificial Sequence: Synthetic oligonucleotide
cuuggagugcaggucacac

SEQ ID NO: 2394612 - RNA, 19 nt, Artificial Sequence
  Description of Artificial Sequence: Synthetic oligonucleotide
uuaucagguagaggauggc

SEQ ID NO: 2394613 - RNA, 19 nt, Artificial Sequence
  Description of Artificial Sequence: Synthetic oligonucleotide
augaggaucaagggccauc

SEQ ID NO: 2394614 - RNA, 19 nt, Artificial Sequence
  Description of Artificial Sequence: Synthetic oligonucleotide
agcacugaagcaaauuaaa

SEQ ID NO: 2394615 - RNA, 19 nt, Artificial Sequence
  Description of Artificial Sequence: Synthetic oligonucleotide
ucaccgacagggaggagua

SEQ ID NO: 2394616 - RNA, 19 nt, Artificial Sequence
  Description of Artificial Sequence: Synthetic oligonucleotide
cugcuguaugucuuugcug

SEQ ID NO: 2394617 - RNA, 19 nt, Artificial Sequence
  Description of Artificial Sequence: Synthetic oligonucleotide
ucaguggggucagagaauu

SEQ ID NO: 2394618 - RNA, 19 nt, Artificial Sequence
  Description of Artificial Sequence: Synthetic oligonucleotide
cugaagaagucaguccaug

SEQ ID NO: 2394619 - RNA, 19 nt, Artificial Sequence
  Description of Artificial Sequence: Synthetic oligonucleotide
gcuggagucacugggacgc

SEQ ID NO: 2394620 - RNA, 19 nt, Artificial Sequence
  Description of Artificial Sequence: Synthetic oligonucleotide
cuggaagacaaaacuccca

SEQ ID NO: 2394621 - RNA, 19 nt, Artificial Sequence
  Description of Artificial Sequence: Synthetic oligonucleotide
gaaauagaaagagguauuu

SEQ ID NO: 2394622 - RNA, 19 nt, Artificial Sequence
  Description of Artificial Sequence: Synthetic oligonucleotide
uggugcguaagaagccagu

SEQ ID NO: 2394623 - RNA, 19 nt, Artificial Sequence
  Description of Artificial Sequence: Synthetic oligonucleotide
gaguccgccauggugugug

SEQ ID NO: 2394624 - RNA, 19 nt, Artificial Sequence
  Description of Artificial Sequence: Synthetic oligonucleotide
acugggacgcagaagcucu

SEQ ID NO: 2394625 - RNA, 19 nt, Artificial Sequence
  Description of Artificial Sequence: Synthetic oligonucleotide
caggucacacauguagaag

SEQ ID NO: 2394626 - RNA, 19 nt, Artificial Sequence
  Description of Artificial Sequence: Synthetic oligonucleotide
aggcacaguauaaucucag

SEQ ID NO: 2394627 - RNA, 19 nt, Artificial Sequence
  Description of Artificial Sequence: Synthetic oligonucleotide
agcgauuuugaaacugccu

SEQ ID NO: 2394628 - RNA, 19 nt, Artificial Sequence
  Description of Artificial Sequence: Synthetic oligonucleotide
cacauguagaagacaaaua

SEQ ID NO: 2394629 - RNA, 19 nt, Artificial Sequence
  Description of Artificial Sequence: Synthetic oligonucleotide
acugccuuuuccaucuaca

SEQ ID NO: 2394630 - RNA, 19 nt, Artificial Sequence
  Description of Artificial Sequence: Synthetic oligonucleotide
uugcugcuuuaaagggaag

SEQ ID NO: 2394631 - RNA, 19 nt, Artificial Sequence
  Description of Artificial Sequence: Synthetic oligonucleotide
ccauacauaagcacuuuca

SEQ ID NO: 2394632 - RNA, 19 nt, Artificial Sequence
  Description of Artificial Sequence: Synthetic oligonucleotide
aggcuaaccagcagccagg

SEQ ID NO: 2394633 - RNA, 19 nt, Artificial Sequence
  Description of Artificial Sequence: Synthetic oligonucleotide
ggcacaguauaaucucagc

SEQ ID NO: 2394634 - RNA, 19 nt, Artificial Sequence
  Description of Artificial Sequence: Synthetic oligonucleotide
cugaugucgaagcacugaa

SEQ ID NO: 2394635 - RNA, 19 nt, Artificial Sequence
  Description of Artificial Sequence: Synthetic oligonucleotide
ggaagacaaaacucccaac

SEQ ID NO: 2394636 - RNA, 19 nt, Artificial Sequence
  Description of Artificial Sequence: Synthetic oligonucleotide
ggagcuauuugcagguagc

SEQ ID NO: 2394637 - RNA, 19 nt, Artificial Sequence
  Description of Artificial Sequence: Synthetic oligonucleotide
aagggccaucugugggauc

SEQ ID NO: 2394638 - RNA, 19 nt, Artificial Sequence
  Description of Artificial Sequence: Synthetic oligonucleotide
aguugaugaaugauaucuu

SEQ ID NO: 2394639 - RNA, 19 nt, Artificial Sequence
  Description of Artificial Sequence: Synthetic oligonucleotide
auggagguuaucagguaga

SEQ ID NO: 2394640 - RNA, 19 nt, Artificial Sequence
  Description of Artificial Sequence: Synthetic oligonucleotide
aguccgccauggugugugc

SEQ ID NO: 2394641 - RNA, 19 nt, Artificial Sequence
  Description of Artificial Sequence: Synthetic oligonucleotide
ugccuaguaugcagauggu

SEQ ID NO: 2394642 - RNA, 19 nt, Artificial Sequence
  Description of Artificial Sequence: Synthetic oligonucleotide
ggcacuuuuauaggaggug

SEQ ID NO: 2394643 - RNA, 19 nt, Artificial Sequence
  Description of Artificial Sequence: Synthetic oligonucleotide
ccgagaggcgcucagaguc

SEQ ID NO: 2394644 - RNA, 19 nt, Artificial Sequence
  Description of Artificial Sequence: Synthetic oligonucleotide
acaccaggcaagaggaagu

SEQ ID NO: 2394645 - RNA, 19 nt, Artificial Sequence
  Description of Artificial Sequence: Synthetic oligonucleotide
gauuggcaggcuggaagac

SEQ ID NO: 2394646 - RNA, 19 nt, Artificial Sequence
  Description of Artificial Sequence: Synthetic oligonucleotide
ccaggcacaguauaaucuc

SEQ ID NO: 2394647 - RNA, 19 nt, Artificial Sequence
  Description of Artificial Sequence: Synthetic oligonucleotide
aucuuggagugcaggucac

SEQ ID NO: 2394648 - RNA, 19 nt, Artificial Sequence
  Description of Artificial Sequence: Synthetic oligonucleotide
guggggucagagaauuggc

SEQ ID NO: 2394649 - RNA, 19 nt, Artificial Sequence
  Description of Artificial Sequence: Synthetic oligonucleotide
cguaagaagccagugcagg

SEQ ID NO: 2394650 - RNA, 19 nt, Artificial Sequence
  Description of Artificial Sequence: Synthetic oligonucleotide
ggagguuaucagguagagg

SEQ ID NO: 2394651 - RNA, 19 nt, Artificial Sequence
  Description of Artificial Sequence: Synthetic oligonucleotide
caggcacaguauaaucuca

SEQ ID NO: 2394652 - RNA, 19 nt, Artificial Sequence
  Description of Artificial Sequence: Synthetic oligonucleotide
acccaguaccccagcagcg

SEQ ID NO: 2394653 - RNA, 19 nt, Artificial Sequence
  Description of Artificial Sequence: Synthetic oligonucleotide
guagcagagauagaugaau

SEQ ID NO: 2394654 - RNA, 19 nt, Artificial Sequence
  Description of Artificial Sequence: Synthetic oligonucleotide
gacaacaauggagguuauc

SEQ ID NO: 2394655 - RNA, 19 nt, Artificial Sequence
  Description of Artificial Sequence: Synthetic oligonucleotide
uggccaguugaugaaugau

SEQ ID NO: 2394656 - RNA, 19 nt, Artificial Sequence
  Description of Artificial Sequence: Synthetic oligonucleotide
gggaggaguaugcugaugu

SEQ ID NO: 2394657 - RNA, 19 nt, Artificial Sequence
  Description of Artificial Sequence: Synthetic oligonucleotide
acucccaacaaaggcacuu

SEQ ID NO: 2394658 - RNA, 19 nt, Artificial Sequence
  Description of Artificial Sequence: Synthetic oligonucleotide
ggugcguaagaagccagug

SEQ ID NO: 2394659 - RNA, 19 nt, Artificial Sequence
  Description of Artificial Sequence: Synthetic oligonucleotide
gagacugcuugccuaguau

SEQ ID NO: 2394660 - RNA, 19 nt, Artificial Sequence
  Description of Artificial Sequence: Synthetic oligonucleotide
caucucgaucaccgacagg

SEQ ID NO: 2394661 - RNA, 19 nt, Artificial Sequence
  Description of Artificial Sequence: Synthetic oligonucleotide
ccaucuacaaggacaacaa

SEQ ID NO: 2394662 - RNA, 19 nt, Artificial Sequence
  Description of Artificial Sequence: Synthetic oligonucleotide
augauaucuuggagugcag

SEQ ID NO: 2394663 - RNA, 19 nt, Artificial Sequence
  Description of Artificial Sequence: Synthetic oligonucleotide
gagauagaugaaugaggau

SEQ ID NO: 2394664 - RNA, 19 nt, Artificial Sequence
  Description of Artificial Sequence: Synthetic oligonucleotide
ggcucugaagaagucaguc

SEQ ID NO: 2394665 - RNA, 19 nt, Artificial Sequence
  Description of Artificial Sequence: Synthetic oligonucleotide
gccaaagagcaauguagca

SEQ ID NO: 2394666 - RNA, 19 nt, Artificial Sequence
  Description of Artificial Sequence: Synthetic oligonucleotide
ggccgagaggcgcucagag

SEQ ID NO: 2394667 - RNA, 19 nt, Artificial Sequence
  Description of Artificial Sequence: Synthetic oligonucleotide
gaagccagugcaggcuaac

SEQ ID NO: 2394668 - RNA, 19 nt, Artificial Sequence
  Description of Artificial Sequence: Synthetic oligonucleotide
ggucacacauguagaagac

SEQ ID NO: 2394669 - RNA, 19 nt, Artificial Sequence
  Description of Artificial Sequence: Synthetic oligonucleotide
ccagugcaggcuaaccagc

SEQ ID NO: 2394670 - RNA, 19 nt, Artificial Sequence
  Description of Artificial Sequence: Synthetic oligonucleotide
cacuuuuauaggaggugua

SEQ ID NO: 2394671 - RNA, 19 nt, Artificial Sequence
  Description of Artificial Sequence: Synthetic oligonucleotide
uaccauacauaagcacuuu

SEQ ID NO: 2394672 - RNA, 19 nt, Artificial Sequence
  Description of Artificial Sequence: Synthetic oligonucleotide
uaguaugcagaugguucua

SEQ ID NO: 2394673 - RNA, 19 nt, Artificial Sequence
  Description of Artificial Sequence: Synthetic oligonucleotide
cagaguccgccauggugug

SEQ ID NO: 2394674 - RNA, 19 nt, Artificial Sequence
  Description of Artificial Sequence: Synthetic oligonucleotide
cagugcaggcuaaccagca

SEQ ID NO: 2394675 - RNA, 19 nt, Artificial Sequence
  Description of Artificial Sequence: Synthetic oligonucleotide
gcgauuuugaaacugccuu

SEQ ID NO: 2394676 - RNA, 19 nt, Artificial Sequence
  Description of Artificial Sequence: Synthetic oligonucleotide
aucuccuguaccauacaua

SEQ ID NO: 2394677 - RNA, 19 nt, Artificial Sequence
  Description of Artificial Sequence: Synthetic oligonucleotide
agaugguucuagguucaau

SEQ ID NO: 2394678 - RNA, 19 nt, Artificial Sequence
  Description of Artificial Sequence: Synthetic oligonucleotide
gugggaucaguaggggcug

SEQ ID NO: 2394679 - RNA, 19 nt, Artificial Sequence
  Description of Artificial Sequence: Synthetic oligonucleotide
ggaggagcuauuugcaggu

SEQ ID NO: 2394680 - RNA, 19 nt, Artificial Sequence
  Description of Artificial Sequence: Synthetic oligonucleotide
gucgaagcacugaagcaaa

SEQ ID NO: 2394681 - RNA, 19 nt, Artificial Sequence
  Description of Artificial Sequence: Synthetic oligonucleotide
uggcugcuaugaaggcucu

SEQ ID NO: 2394682 - RNA, 19 nt, Artificial Sequence
  Description of Artificial Sequence: Synthetic oligonucleotide
ggcuaaccagcagccaggg

SEQ ID NO: 2394683 - RNA, 19 nt, Artificial Sequence
  Description of Artificial Sequence: Synthetic oligonucleotide
aacucccaacaaaggcacu

SEQ ID NO: 2394684 - RNA, 19 nt, Artificial Sequence
  Description of Artificial Sequence: Synthetic oligonucleotide
guaggggcugcuguauguc

SEQ ID NO: 2394685 - RNA, 19 nt, Artificial Sequence
  Description of Artificial Sequence: Synthetic oligonucleotide
caauggagguuaucaggua

SEQ ID NO: 2394686 - RNA, 19 nt, Artificial Sequence
  Description of Artificial Sequence: Synthetic oligonucleotide
uaaaaccaccaggcacagu

SEQ ID NO: 2394687 - RNA, 19 nt, Artificial Sequence
  Description of Artificial Sequence: Synthetic oligonucleotide
ggaggaguaugcugauguc

SEQ ID NO: 2394688 - RNA, 19 nt, Artificial Sequence
  Description of Artificial Sequence: Synthetic oligonucleotide
caaggacaacaauggaggu

SEQ ID NO: 2394689 - RNA, 19 nt, Artificial Sequence
  Description of Artificial Sequence: Synthetic oligonucleotide
ggaggagacugcuugccua

SEQ ID NO: 2394690 - RNA, 19 nt, Artificial Sequence
  Description of Artificial Sequence: Synthetic oligonucleotide
cugcuaugaaggcucugaa

SEQ ID NO: 2394691 - RNA, 19 nt, Artificial Sequence
  Description of Artificial Sequence: Synthetic oligonucleotide
gcugcuguaugucuuugcu

SEQ ID NO: 2394692 - RNA, 19 nt, Artificial Sequence
  Description of Artificial Sequence: Synthetic oligonucleotide
caguggggucagagaauug

SEQ ID NO: 2394693 - RNA, 19 nt, Artificial Sequence
  Description of Artificial Sequence: Synthetic oligonucleotide
gcuuuaaagggaaggugaa

SEQ ID NO: 2394694 - RNA, 19 nt, Artificial Sequence
  Description of Artificial Sequence: Synthetic oligonucleotide
gcuaaccagcagccagggg

SEQ ID NO: 2394695 - RNA, 19 nt, Artificial Sequence
  Description of Artificial Sequence: Synthetic oligonucleotide
cugggacgcagaagcucug

SEQ ID NO: 2394696 - RNA, 19 nt, Artificial Sequence
  Description of Artificial Sequence: Synthetic oligonucleotide
ccuuuuccaucuacaagga

SEQ ID NO: 2394697 - RNA, 19 nt, Artificial Sequence
  Description of Artificial Sequence: Synthetic oligonucleotide
gcaggcuggaagacaaaac

SEQ ID NO: 2394698 - RNA, 19 nt, Artificial Sequence
  Description of Artificial Sequence: Synthetic oligonucleotide
gcguaagaagccagugcag

SEQ ID NO: 2394699 - RNA, 19 nt, Artificial Sequence
  Description of Artificial Sequence: Synthetic oligonucleotide
ccaacaaaggcacuuuuau

SEQ ID NO: 2394700 - RNA, 19 nt, Artificial Sequence
  Description of Artificial Sequence: Synthetic oligonucleotide
guaugucuuugcugcuuua

SEQ ID NO: 2394701 - RNA, 19 nt, Artificial Sequence
  Description of Artificial Sequence: Synthetic oligonucleotide
ggaucaguaggggcugcug

SEQ ID NO: 2394702 - RNA, 19 nt, Artificial Sequence
  Description of Artificial Sequence: Synthetic oligonucleotide
ggccaguugaugaaugaua

SEQ ID NO: 2394703 - RNA, 19 nt, Artificial Sequence
  Description of Artificial Sequence: Synthetic oligonucleotide
gccaguugaugaaugauau

SEQ ID NO: 2394704 - RNA, 19 nt, Artificial Sequence
  Description of Artificial Sequence: Synthetic oligonucleotide
gcacuuucaguggggucag

SEQ ID NO: 2394705 - RNA, 19 nt, Artificial Sequence
  Description of Artificial Sequence: Synthetic oligonucleotide
ggaguaugcugaugucgaa

SEQ ID NO: 2394706 - RNA, 19 nt, Artificial Sequence
  Description of Artificial Sequence: Synthetic oligonucleotide
gucagagaauuggcuggga

SEQ ID NO: 2394707 - RNA, 19 nt, Artificial Sequence
  Description of Artificial Sequence: Synthetic oligonucleotide
accaggcaagaggaaguuu

SEQ ID NO: 2394708 - RNA, 19 nt, Artificial Sequence
  Description of Artificial Sequence: Synthetic oligonucleotide
gccauggugugugcuggag

SEQ ID NO: 2394709 - RNA, 19 nt, Artificial Sequence
  Description of Artificial Sequence: Synthetic oligonucleotide
ggagacugcuugccuagua

SEQ ID NO: 2394710 - RNA, 19 nt, Artificial Sequence
  Description of Artificial Sequence: Synthetic oligonucleotide
gaucaccgacagggaggag

SEQ ID NO: 2394711 - RNA, 19 nt, Artificial Sequence
  Description of Artificial Sequence: Synthetic oligonucleotide
cacgugucucugccuccug

SEQ ID NO: 2394712 - RNA, 19 nt, Artificial Sequence
  Description of Artificial Sequence: Synthetic oligonucleotide
agaguccgccauggugugu

SEQ ID NO: 2394713 - RNA, 19 nt, Artificial Sequence
  Description of Artificial Sequence: Synthetic oligonucleotide
ggggccgagaggcgcucag

SEQ ID NO: 2394714 - RNA, 19 nt, Artificial Sequence
  Description of Artificial Sequence: Synthetic oligonucleotide
cagcaaagaucaucucgau

SEQ ID NO: 2394715 - RNA, 19 nt, Artificial Sequence
  Description of Artificial Sequence: Synthetic oligonucleotide
gaggagcuauuugcaggua

SEQ ID NO: 2394716 - RNA, 19 nt, Artificial Sequence
  Description of Artificial Sequence: Synthetic oligonucleotide
ccaggaggguugauuggca

SEQ ID NO: 2394717 - RNA, 19 nt, Artificial Sequence
  Description of Artificial Sequence: Synthetic oligonucleotide
agccaggggccgagaggcg

SEQ ID NO: 2394718 - RNA, 19 nt, Artificial Sequence
  Description of Artificial Sequence: Synthetic oligonucleotide
gcuguaugucuuugcugcu

SEQ ID NO: 2394719 - RNA, 19 nt, Artificial Sequence
  Description of Artificial Sequence: Synthetic oligonucleotide
aguaggcaucacagccaaa

SEQ ID NO: 2394720 - RNA, 19 nt, Artificial Sequence
  Description of Artificial Sequence: Synthetic oligonucleotide
gggcugcuguaugucuuug

SEQ ID NO: 2394721 - RNA, 19 nt, Artificial Sequence
  Description of Artificial Sequence: Synthetic oligonucleotide
cuguaugucuuugcugcuu

SEQ ID NO: 2394722 - RNA, 19 nt, Artificial Sequence
  Description of Artificial Sequence: Synthetic oligonucleotide
caagggccaucugugggau

SEQ ID NO: 2394723 - RNA, 19 nt, Artificial Sequence
  Description of Artificial Sequence: Synthetic oligonucleotide
cagguagaggauggcugcu

SEQ ID NO: 2394724 - RNA, 19 nt, Artificial Sequence
  Description of Artificial Sequence: Synthetic oligonucleotide
cuggagucacugggacgca

SEQ ID NO: 2394725 - RNA, 19 nt, Artificial Sequence
  Description of Artificial Sequence: Synthetic oligonucleotide
cucccaacaaaggcacuuu

SEQ ID NO: 2394726 - RNA, 19 nt, Artificial Sequence
  Description of Artificial Sequence: Synthetic oligonucleotide
aggggccgagaggcgcuca

SEQ ID NO: 2394727 - RNA, 19 nt, Artificial Sequence
  Description of Artificial Sequence: Synthetic oligonucleotide
gccuaguaugcagaugguu

SEQ ID NO: 2394728 - RNA, 19 nt, Artificial Sequence
  Description of Artificial Sequence: Synthetic oligonucleotide
caguaccccagcagcgauu

SEQ ID NO: 2394729 - RNA, 19 nt, Artificial Sequence
  Description of Artificial Sequence: Synthetic oligonucleotide
caggggccgagaggcgcuc

SEQ ID NO: 2394730 - RNA, 19 nt, Artificial Sequence
  Description of Artificial Sequence: Synthetic oligonucleotide
ccauggugugugcuggagu

SEQ ID NO: 2394731 - RNA, 19 nt, Artificial Sequence
  Description of Artificial Sequence: Synthetic oligonucleotide
gccgagaggcgcucagagu

SEQ ID NO: 2394732 - RNA, 19 nt, Artificial Sequence
  Description of Artificial Sequence: Synthetic oligonucleotide
caccaggcaagaggaaguu

SEQ ID NO: 2394733 - RNA, 19 nt, Artificial Sequence
  Description of Artificial Sequence: Synthetic oligonucleotide
gggaucaguaggggcugcu

SEQ ID NO: 2394734 - RNA, 19 nt, Artificial Sequence
  Description of Artificial Sequence: Synthetic oligonucleotide
gggccgagaggcgcucaga

SEQ ID NO: 2394735 - RNA, 19 nt, Artificial Sequence
  Description of Artificial Sequence: Synthetic oligonucleotide
ccaguaccccagcagcgau

SEQ ID NO: 2394736 - RNA, 19 nt, Artificial Sequence
  Description of Artificial Sequence: Synthetic oligonucleotide
ggacaacaauggagguuau

SEQ ID NO: 2394737 - RNA, 19 nt, Artificial Sequence
  Description of Artificial Sequence: Synthetic oligonucleotide
cgaagcacugaagcaaauu

SEQ ID NO: 2394738 - RNA, 19 nt, Artificial Sequence
  Description of Artificial Sequence: Synthetic oligonucleotide
cacacccaggaggguugau

SEQ ID NO: 2394739 - RNA, 19 nt, Artificial Sequence
  Description of Artificial Sequence: Synthetic oligonucleotide
caccgacagggaggaguau

SEQ ID NO: 2394740 - RNA, 19 nt, Artificial Sequence
  Description of Artificial Sequence: Synthetic oligonucleotide
cgacagggaggaguaugcu

SEQ ID NO: 2394741 - RNA, 19 nt, Artificial Sequence
  Description of Artificial Sequence: Synthetic oligonucleotide
uuuaauuaaauacaaaagg

SEQ ID NO: 2394742 - RNA, 19 nt, Artificial Sequence
  Description of Artificial Sequence: Synthetic oligonucleotide
uuaauuaaauacaaaagga

SEQ ID NO: 2394743 - RNA, 19 nt, Artificial Sequence
  Description of Artificial Sequence: Synthetic oligonucleotide
cauuguuuuaauuaaauac

SEQ ID NO: 2394744 - RNA, 19 nt, Artificial Sequence
  Description of Artificial Sequence: Synthetic oligonucleotide
aaaacauugucaguaaagg

SEQ ID NO: 2394745 - RNA, 19 nt, Artificial Sequence
  Description of Artificial Sequence: Synthetic oligonucleotide
aauuucauuguuuuaauua

SEQ ID NO: 2394746 - RNA, 19 nt, Artificial Sequence
  Description of Artificial Sequence: Synthetic oligonucleotide
uugacguucacauacaaca

SEQ ID NO: 2394747 - RNA, 19 nt, Artificial Sequence
  Description of Artificial Sequence: Synthetic oligonucleotide
uuuaaguguacauacgacc

SEQ ID NO: 2394748 - RNA, 19 nt, Artificial Sequence
  Description of Artificial Sequence: Synthetic oligonucleotide
uuuucuagaaacuaauuuc

SEQ ID NO: 2394749 - RNA, 19 nt, Artificial Sequence
  Description of Artificial Sequence: Synthetic oligonucleotide
aaauacaaaaggaaaucac

SEQ ID NO: 2394750 - RNA, 19 nt, Artificial Sequence
  Description of Artificial Sequence: Synthetic oligonucleotide
uuucuagaaacuaauuuca

SEQ ID NO: 2394751 - RNA, 19 nt, Artificial Sequence
  Description of Artificial Sequence: Synthetic oligonucleotide
uucacauacaacaugcaca

SEQ ID NO: 2394752 - RNA, 19 nt, Artificial Sequence
  Description of Artificial Sequence: Synthetic oligonucleotide
uuaaguguacauacgaccu

SEQ ID NO: 2394753 - RNA, 19 nt, Artificial Sequence
  Description of Artificial Sequence: Synthetic oligonucleotide
uacaaaaggaaaucacagg

SEQ ID NO: 2394754 - RNA, 19 nt, Artificial Sequence
  Description of Artificial Sequence: Synthetic oligonucleotide
aauacaaaaggaaaucaca

SEQ ID NO: 2394755 - RNA, 19 nt, Artificial Sequence
  Description of Artificial Sequence: Synthetic oligonucleotide
gucaguaaagguuuucugg

SEQ ID NO: 2394756 - RNA, 19 nt, Artificial Sequence
  Description of Artificial Sequence: Synthetic oligonucleotide
guacauacgaccuuguaug

SEQ ID NO: 2394757 - RNA, 19 nt, Artificial Sequence
  Description of Artificial Sequence: Synthetic oligonucleotide
ucaguaaagguuuucuggc

SEQ ID NO: 2394758 - RNA, 19 nt, Artificial Sequence
  Description of Artificial Sequence: Synthetic oligonucleotide
aguaaagguuuucuggcac

SEQ ID NO: 2394759 - RNA, 19 nt, Artificial Sequence
  Description of Artificial Sequence: Synthetic oligonucleotide
uacaacaugcacaauacau

SEQ ID NO: 2394760 - RNA, 19 nt, Artificial Sequence
  Description of Artificial Sequence: Synthetic oligonucleotide
aaacauugucaguaaaggu

SEQ ID NO: 2394761 - RNA, 19 nt, Artificial Sequence
  Description of Artificial Sequence: Synthetic oligonucleotide
gucauugacguucacauac

SEQ ID NO: 2394762 - RNA, 19 nt, Artificial Sequence
  Description of Artificial Sequence: Synthetic oligonucleotide
gaaaucacagggcaagagc

SEQ ID NO: 2394763 - RNA, 19 nt, Artificial Sequence
  Description of Artificial Sequence: Synthetic oligonucleotide
uguacauacgaccuuguau

SEQ ID NO: 2394764 - RNA, 19 nt, Artificial Sequence
  Description of Artificial Sequence: Synthetic oligonucleotide
auuucauuguuuuaauuaa

SEQ ID NO: 2394765 - RNA, 19 nt, Artificial Sequence
  Description of Artificial Sequence: Synthetic oligonucleotide
cauacaacaugcacaauac

SEQ ID NO: 2394766 - RNA, 19 nt, Artificial Sequence
  Description of Artificial Sequence: Synthetic oligonucleotide
auacaaaaggaaaucacag

SEQ ID NO: 2394767 - RNA, 19 nt, Artificial Sequence
  Description of Artificial Sequence: Synthetic oligonucleotide
acguucacauacaacaugc

SEQ ID NO: 2394768 - RNA, 19 nt, Artificial Sequence
  Description of Artificial Sequence: Synthetic oligonucleotide
agggcaagagcuuuaagug

SEQ ID NO: 2394769 - RNA, 19 nt, Artificial Sequence
  Description of Artificial Sequence: Synthetic oligonucleotide
ucacauacaacaugcacaa

SEQ ID NO: 2394770 - RNA, 19 nt, Artificial Sequence
  Description of Artificial Sequence: Synthetic oligonucleotide
acuaauuucauuguuuuaa

SEQ ID NO: 2394771 - RNA, 19 nt, Artificial Sequence
  Description of Artificial Sequence: Synthetic oligonucleotide
gagcuuuaaguguacauac

SEQ ID NO: 2394772 - RNA, 19 nt, Artificial Sequence
  Description of Artificial Sequence: Synthetic oligonucleotide
aacauugucaguaaagguu

SEQ ID NO: 2394773 - RNA, 19 nt, Artificial Sequence
  Description of Artificial Sequence: Synthetic oligonucleotide
aaaucacagggcaagagcu

SEQ ID NO: 2394774 - RNA, 19 nt, Artificial Sequence
  Description of Artificial Sequence: Synthetic oligonucleotide
acaugcacaauacauuuga

SEQ ID NO: 2394775 - RNA, 19 nt, Artificial Sequence
  Description of Artificial Sequence: Synthetic oligonucleotide
acauacaacaugcacaaua

SEQ ID NO: 2394776 - RNA, 19 nt, Artificial Sequence
  Description of Artificial Sequence: Synthetic oligonucleotide
uuguaugucauugacguuc

SEQ ID NO: 2394777 - RNA, 19 nt, Artificial Sequence
  Description of Artificial Sequence: Synthetic oligonucleotide
cuuuaaguguacauacgac

SEQ ID NO: 2394778 - RNA, 19 nt, Artificial Sequence
  Description of Artificial Sequence: Synthetic oligonucleotide
uagaaacuaauuucauugu

SEQ ID NO: 2394779 - RNA, 19 nt, Artificial Sequence
  Description of Artificial Sequence: Synthetic oligonucleotide
aagagcuuuaaguguacau

SEQ ID NO: 2394780 - RNA, 19 nt, Artificial Sequence
  Description of Artificial Sequence: Synthetic oligonucleotide
aaguguacauacgaccuug

SEQ ID NO: 2394781 - RNA, 19 nt, Artificial Sequence
  Description of Artificial Sequence: Synthetic oligonucleotide
ugucaguaaagguuuucug

SEQ ID NO: 2394782 - RNA, 19 nt, Artificial Sequence
  Description of Artificial Sequence: Synthetic oligonucleotide
ucuagaaacuaauuucauu

SEQ ID NO: 2394783 - RNA, 19 nt, Artificial Sequence
  Description of Artificial Sequence: Synthetic oligonucleotide
uguaugucauugacguuca

SEQ ID NO: 2394784 - RNA, 19 nt, Artificial Sequence
  Description of Artificial Sequence: Synthetic oligonucleotide
uaugucauugacguucaca

SEQ ID NO: 2394785 - RNA, 19 nt, Artificial Sequence
  Description of Artificial Sequence: Synthetic oligonucleotide
guucacauacaacaugcac

SEQ ID NO: 2394786 - RNA, 19 nt, Artificial Sequence
  Description of Artificial Sequence: Synthetic oligonucleotide
agaaacuaauuucauuguu

SEQ ID NO: 2394787 - RNA, 19 nt, Artificial Sequence
  Description of Artificial Sequence: Synthetic oligonucleotide
cauacgaccuuguauguca

SEQ ID NO: 2394788 - RNA, 19 nt, Artificial Sequence
  Description of Artificial Sequence: Synthetic oligonucleotide
uucuagaaacuaauuucau

SEQ ID NO: 2394789 - RNA, 19 nt, Artificial Sequence
  Description of Artificial Sequence: Synthetic oligonucleotide
auugacguucacauacaac

SEQ ID NO: 2394790 - RNA, 19 nt, Artificial Sequence
  Description of Artificial Sequence: Synthetic oligonucleotide
augcacaauacauuugaaa

SEQ ID NO: 2394791 - RNA, 19 nt, Artificial Sequence
  Description of Artificial Sequence: Synthetic oligonucleotide
ucauugacguucacauaca

SEQ ID NO: 2394792 - RNA, 19 nt, Artificial Sequence
  Description of Artificial Sequence: Synthetic oligonucleotide
aacuaauuucauuguuuua

SEQ ID NO: 2394793 - RNA, 19 nt, Artificial Sequence
  Description of Artificial Sequence: Synthetic oligonucleotide
uaauuucauuguuuuaauu

SEQ ID NO: 2394794 - RNA, 19 nt, Artificial Sequence
  Description of Artificial Sequence: Synthetic oligonucleotide
uugucaguaaagguuuucu

SEQ ID NO: 2394795 - RNA, 19 nt, Artificial Sequence
  Description of Artificial Sequence: Synthetic oligonucleotide
gaccuuguaugucauugac

SEQ ID NO: 2394796 - RNA, 19 nt, Artificial Sequence
  Description of Artificial Sequence: Synthetic oligonucleotide
acgaccuuguaugucauug

SEQ ID NO: 2394797 - RNA, 19 nt, Artificial Sequence
  Description of Artificial Sequence: Synthetic oligonucleotide
aacaugcacaauacauuug

SEQ ID NO: 2394798 - RNA, 19 nt, Artificial Sequence
  Description of Artificial Sequence: Synthetic oligonucleotide
ugacguucacauacaacau

SEQ ID NO: 2394799 - RNA, 19 nt, Artificial Sequence
  Description of Artificial Sequence: Synthetic oligonucleotide
auacaacaugcacaauaca

SEQ ID NO: 2394800 - RNA, 19 nt, Artificial Sequence
  Description of Artificial Sequence: Synthetic oligonucleotide
gcuuuaaguguacauacga

SEQ ID NO: 2394801 - RNA, 19 nt, Artificial Sequence
  Description of Artificial Sequence: Synthetic oligonucleotide
agcuuuaaguguacauacg

SEQ ID NO: 2394802 - RNA, 19 nt, Artificial Sequence
  Description of Artificial Sequence: Synthetic oligonucleotide
uacauacgaccuuguaugu

SEQ ID NO: 2394803 - RNA, 19 nt, Artificial Sequence
  Description of Artificial Sequence: Synthetic oligonucleotide
agagcuuuaaguguacaua

SEQ ID NO: 2394804 - RNA, 19 nt, Artificial Sequence
  Description of Artificial Sequence: Synthetic oligonucleotide
accuuguaugucauugacg

SEQ ID NO: 2394805 - RNA, 19 nt, Artificial Sequence
  Description of Artificial Sequence: Synthetic oligonucleotide
uaaguguacauacgaccuu

SEQ ID NO: 2394806 - RNA, 19 nt, Artificial Sequence
  Description of Artificial Sequence: Synthetic oligonucleotide
acauugucaguaaagguuu

SEQ ID NO: 2394807 - RNA, 19 nt, Artificial Sequence
  Description of Artificial Sequence: Synthetic oligonucleotide
acauacgaccuuguauguc

SEQ ID NO: 2394808 - RNA, 19 nt, Artificial Sequence
  Description of Artificial Sequence: Synthetic oligonucleotide
gaaacuaauuucauuguuu

SEQ ID NO: 2394809 - RNA, 19 nt, Artificial Sequence
  Description of Artificial Sequence: Synthetic oligonucleotide
acaacaugcacaauacauu

SEQ ID NO: 2394810 - RNA, 19 nt, Artificial Sequence
  Description of Artificial Sequence: Synthetic oligonucleotide
cagggcaagagcuuuaagu

SEQ ID NO: 2394811 - RNA, 19 nt, Artificial Sequence
  Description of Artificial Sequence: Synthetic oligonucleotide
ggaaaucacagggcaagag

SEQ ID NO: 2394812 - RNA, 19 nt, Artificial Sequence
  Description of Artificial Sequence: Synthetic oligonucleotide
caguaaagguuuucuggca

SEQ ID NO: 2394813 - RNA, 19 nt, Artificial Sequence
  Description of Artificial Sequence: Synthetic oligonucleotide
ccuuguaugucauugacgu

SEQ ID NO: 2394814 - RNA, 19 nt, Artificial Sequence
  Description of Artificial Sequence: Synthetic oligonucleotide
acagggcaagagcuuuaag

SEQ ID NO: 2394815 - RNA, 19 nt, Artificial Sequence
  Description of Artificial Sequence: Synthetic oligonucleotide
ugucauugacguucacaua

SEQ ID NO: 2394816 - RNA, 19 nt, Artificial Sequence
  Description of Artificial Sequence: Synthetic oligonucleotide
cuaauuucauuguuuuaau

SEQ ID NO: 2394817 - RNA, 19 nt, Artificial Sequence
  Description of Artificial Sequence: Synthetic oligonucleotide
caacaugcacaauacauuu

SEQ ID NO: 2394818 - RNA, 19 nt, Artificial Sequence
  Description of Artificial Sequence: Synthetic oligonucleotide
aaucacagggcaagagcuu

SEQ ID NO: 2394819 - RNA, 19 nt, Artificial Sequence
  Description of Artificial Sequence: Synthetic oligonucleotide
caugcacaauacauuugaa

SEQ ID NO: 2394820 - RNA, 19 nt, Artificial Sequence
  Description of Artificial Sequence: Synthetic oligonucleotide
aucacagggcaagagcuuu

SEQ ID NO: 2394821 - RNA, 19 nt, Artificial Sequence
  Description of Artificial Sequence: Synthetic oligonucleotide
ucacagggcaagagcuuua

SEQ ID NO: 2394822 - RNA, 19 nt, Artificial Sequence
  Description of Artificial Sequence: Synthetic oligonucleotide
aggaaaucacagggcaaga

SEQ ID NO: 2394823 - RNA, 19 nt, Artificial Sequence
  Description of Artificial Sequence: Synthetic oligonucleotide
cauugacguucacauacaa

SEQ ID NO: 2394824 - RNA, 19 nt, Artificial Sequence
  Description of Artificial Sequence: Synthetic oligonucleotide
aguguacauacgaccuugu

SEQ ID NO: 2394825 - RNA, 19 nt, Artificial Sequence
  Description of Artificial Sequence: Synthetic oligonucleotide
ggcaagagcuuuaagugua

SEQ ID NO: 2394826 - RNA, 19 nt, Artificial Sequence
  Description of Artificial Sequence: Synthetic oligonucleotide
caagagcuuuaaguguaca

SEQ ID NO: 2394827 - RNA, 19 nt, Artificial Sequence
  Description of Artificial Sequence: Synthetic oligonucleotide
guguacauacgaccuugua

SEQ ID NO: 2394828 - RNA, 19 nt, Artificial Sequence
  Description of Artificial Sequence: Synthetic oligonucleotide
guaugucauugacguucac

SEQ ID NO: 2394829 - RNA, 19 nt, Artificial Sequence
  Description of Artificial Sequence: Synthetic oligonucleotide
uacgaccuuguaugucauu

SEQ ID NO: 2394830 - RNA, 19 nt, Artificial Sequence
  Description of Artificial Sequence: Synthetic oligonucleotide
gggcaagagcuuuaagugu

SEQ ID NO: 2394831 - RNA, 19 nt, Artificial Sequence
  Description of Artificial Sequence: Synthetic oligonucleotide
auacgaccuuguaugucau

SEQ ID NO: 2394832 - RNA, 19 nt, Artificial Sequence
  Description of Artificial Sequence: Synthetic oligonucleotide
gcaagagcuuuaaguguac

SEQ ID NO: 2394833 - RNA, 19 nt, Artificial Sequence
  Description of Artificial Sequence: Synthetic oligonucleotide
cacagggcaagagcuuuaa

SEQ ID NO: 2394834 - RNA, 19 nt, Artificial Sequence
  Description of Artificial Sequence: Synthetic oligonucleotide
cuuguaugucauugacguu

SEQ ID NO: 2394835 - RNA, 19 nt, Artificial Sequence
  Description of Artificial Sequence: Synthetic oligonucleotide
cauugucaguaaagguuuu

SEQ ID NO: 2394836 - RNA, 19 nt, Artificial Sequence
  Description of Artificial Sequence: Synthetic oligonucleotide
cgaccuuguaugucauuga

SEQ ID NO: 2394837 - RNA, 19 nt, Artificial Sequence
  Description of Artificial Sequence: Synthetic oligonucleotide
cacauacaacaugcacaau

SEQ ID NO: 2394838 - RNA, 19 nt, Artificial Sequence
  Description of Artificial Sequence: Synthetic oligonucleotide
aacaguugcauucuuaugc

SEQ ID NO: 2394839 - RNA, 19 nt, Artificial Sequence
  Description of Artificial Sequence: Synthetic oligonucleotide
auaaaguucaguuucuggc

SEQ ID NO: 2394840 - RNA, 19 nt, Artificial Sequence
  Description of Artificial Sequence: Synthetic oligonucleotide
uuucccuagagaaagaagg

SEQ ID NO: 2394841 - RNA, 19 nt, Artificial Sequence
  Description of Artificial Sequence: Synthetic oligonucleotide
uauucaaacacuucuagag

SEQ ID NO: 2394842 - RNA, 19 nt, Artificial Sequence
  Description of Artificial Sequence: Synthetic oligonucleotide
ucacauuucagcaaggcug

SEQ ID NO: 2394843 - RNA, 19 nt, Artificial Sequence
  Description of Artificial Sequence: Synthetic oligonucleotide
aaacuuaagacuuuauuau

SEQ ID NO: 2394844 - RNA, 19 nt, Artificial Sequence
  Description of Artificial Sequence: Synthetic oligonucleotide
uauauucaaacacuucuag

SEQ ID NO: 2394845 - RNA, 19 nt, Artificial Sequence
  Description of Artificial Sequence: Synthetic oligonucleotide
aagaucaaacaaugggagc

SEQ ID NO: 2394846 - RNA, 19 nt, Artificial Sequence
  Description of Artificial Sequence: Synthetic oligonucleotide
aaagaaaauaucaaguaga

SEQ ID NO: 2394847 - RNA, 19 nt, Artificial Sequence
  Description of Artificial Sequence: Synthetic oligonucleotide
uauuaugucuaguugagac

SEQ ID NO: 2394848 - RNA, 19 nt, Artificial Sequence
  Description of Artificial Sequence: Synthetic oligonucleotide
aaacaaugggagcaggagg

SEQ ID NO: 2394849 - RNA, 19 nt, Artificial Sequence
  Description of Artificial Sequence: Synthetic oligonucleotide
ucuauguccuguaagcccg

SEQ ID NO: 2394850 - RNA, 19 nt, Artificial Sequence
  Description of Artificial Sequence: Synthetic oligonucleotide
ucaaguagaaucccaaucu

SEQ ID NO: 2394851 - RNA, 19 nt, Artificial Sequence
  Description of Artificial Sequence: Synthetic oligonucleotide
aguccgaguaguuaaaggg

SEQ ID NO: 2394852 - RNA, 19 nt, Artificial Sequence
  Description of Artificial Sequence: Synthetic oligonucleotide
uugaucaauauauucaaac

SEQ ID NO: 2394853 - RNA, 19 nt, Artificial Sequence
  Description of Artificial Sequence: Synthetic oligonucleotide
uuaucuauguccuguaagc

SEQ ID NO: 2394854 - RNA, 19 nt, Artificial Sequence
  Description of Artificial Sequence: Synthetic oligonucleotide
cacaagaucaaacaauggg

SEQ ID NO: 2394855 - RNA, 19 nt, Artificial Sequence
  Description of Artificial Sequence: Synthetic oligonucleotide
aaauaucaaguagaauccc

SEQ ID NO: 2394856 - RNA, 19 nt, Artificial Sequence
  Description of Artificial Sequence: Synthetic oligonucleotide
uucaguuucuggcugagcc

SEQ ID NO: 2394857 - RNA, 19 nt, Artificial Sequence
  Description of Artificial Sequence: Synthetic oligonucleotide
uugagacucaugaaaacag

SEQ ID NO: 2394858 - RNA, 19 nt, Artificial Sequence
  Description of Artificial Sequence: Synthetic oligonucleotide
ucgaccuugaucaauauau

SEQ ID NO: 2394859 - RNA, 19 nt, Artificial Sequence
  Description of Artificial Sequence: Synthetic oligonucleotide
aaaacaguugcauucuuau

SEQ ID NO: 2394860 - RNA, 19 nt, Artificial Sequence
  Description of Artificial Sequence: Synthetic oligonucleotide
aucaaguagaaucccaauc

SEQ ID NO: 2394861 - RNA, 19 nt, Artificial Sequence
  Description of Artificial Sequence: Synthetic oligonucleotide
uucauugugucaaucuucc

SEQ ID NO: 2394862 - RNA, 19 nt, Artificial Sequence
  Description of Artificial Sequence: Synthetic oligonucleotide
uucuuaugcaccaugucug

SEQ ID NO: 2394863 - RNA, 19 nt, Artificial Sequence
  Description of Artificial Sequence: Synthetic oligonucleotide
aagacuuuauuaugucuag

SEQ ID NO: 2394864 - RNA, 19 nt, Artificial Sequence
  Description of Artificial Sequence: Synthetic oligonucleotide
agcauuggcaggcacagcg

SEQ ID NO: 2394865 - RNA, 19 nt, Artificial Sequence
  Description of Artificial Sequence: Synthetic oligonucleotide
gauaucaugcagcugcugc

SEQ ID NO: 2394866 - RNA, 19 nt, Artificial Sequence
  Description of Artificial Sequence: Synthetic oligonucleotide
aguaguuaaagggaugugg

SEQ ID NO: 2394867 - RNA, 19 nt, Artificial Sequence
  Description of Artificial Sequence: Synthetic oligonucleotide
agcucuacuccucuagucc

SEQ ID NO: 2394868 - RNA, 19 nt, Artificial Sequence
  Description of Artificial Sequence: Synthetic oligonucleotide
caagaucaaacaaugggag

SEQ ID NO: 2394869 - RNA, 19 nt, Artificial Sequence
  Description of Artificial Sequence: Synthetic oligonucleotide
gaggucuucacacacuuag

SEQ ID NO: 2394870 - RNA, 19 nt, Artificial Sequence
  Description of Artificial Sequence: Synthetic oligonucleotide
auaucaugcagcugcugcc

SEQ ID NO: 2394871 - RNA, 19 nt, Artificial Sequence
  Description of Artificial Sequence: Synthetic oligonucleotide
uaagacuuuauuaugucua

SEQ ID NO: 2394872 - RNA, 19 nt, Artificial Sequence
  Description of Artificial Sequence: Synthetic oligonucleotide
aguuaaagggauguggagg

SEQ ID NO: 2394873 - RNA, 19 nt, Artificial Sequence
  Description of Artificial Sequence: Synthetic oligonucleotide
uaagcccguaacaauaaag

SEQ ID NO: 2394874 - RNA, 19 nt, Artificial Sequence
  Description of Artificial Sequence: Synthetic oligonucleotide
uagaaucccaaucucacgu

SEQ ID NO: 2394875 - RNA, 19 nt, Artificial Sequence
  Description of Artificial Sequence: Synthetic oligonucleotide
uuugguguagagcugggga

SEQ ID NO: 2394876 - RNA, 19 nt, Artificial Sequence
  Description of Artificial Sequence: Synthetic oligonucleotide
acuuuauuaugucuaguug

SEQ ID NO: 2394877 - RNA, 19 nt, Artificial Sequence
  Description of Artificial Sequence: Synthetic oligonucleotide
ucuucuggaaacacuuuag

SEQ ID NO: 2394878 - RNA, 19 nt, Artificial Sequence
  Description of Artificial Sequence: Synthetic oligonucleotide
aaucucacgucacauuuca

SEQ ID NO: 2394879 - RNA, 19 nt, Artificial Sequence
  Description of Artificial Sequence: Synthetic oligonucleotide
gaugaugccgagcugccgg

SEQ ID NO: 2394880 - RNA, 19 nt, Artificial Sequence
  Description of Artificial Sequence: Synthetic oligonucleotide
aacacuucuagaggcaccg

SEQ ID NO: 2394881 - RNA, 19 nt, Artificial Sequence
  Description of Artificial Sequence: Synthetic oligonucleotide
ucggacacagcucacagac

SEQ ID NO: 2394882 - RNA, 19 nt, Artificial Sequence
  Description of Artificial Sequence: Synthetic oligonucleotide
aaaccuaguucuguaacag

SEQ ID NO: 2394883 - RNA, 19 nt, Artificial Sequence
  Description of Artificial Sequence: Synthetic oligonucleotide
acuaaccuguaacagaaca

SEQ ID NO: 2394884 - RNA, 19 nt, Artificial Sequence
  Description of Artificial Sequence: Synthetic oligonucleotide
aguugagacucaugaaaac

SEQ ID NO: 2394885 - RNA, 19 nt, Artificial Sequence
  Description of Artificial Sequence: Synthetic oligonucleotide
gggauuucgaccuugauca

SEQ ID NO: 2394886 - RNA, 19 nt, Artificial Sequence
  Description of Artificial Sequence: Synthetic oligonucleotide
ucacagacgacucaagguc

SEQ ID NO: 2394887 - RNA, 19 nt, Artificial Sequence
  Description of Artificial Sequence: Synthetic oligonucleotide
aguugcauucuuaugcacc

SEQ ID NO: 2394888 - RNA, 19 nt, Artificial Sequence
  Description of Artificial Sequence: Synthetic oligonucleotide
aguagaaucccaaucucac

SEQ ID NO: 2394889 - RNA, 19 nt, Artificial Sequence
  Description of Artificial Sequence: Synthetic oligonucleotide
agcaaggcugucuuccugc

SEQ ID NO: 2394890 - RNA, 19 nt, Artificial Sequence
  Description of Artificial Sequence: Synthetic oligonucleotide
ucuagaggcaccgugauau

SEQ ID NO: 2394891 - RNA, 19 nt, Artificial Sequence
  Description of Artificial Sequence: Synthetic oligonucleotide
agaacuaaccuguaacaga

SEQ ID NO: 2394892 - RNA, 19 nt, Artificial Sequence
  Description of Artificial Sequence: Synthetic oligonucleotide
ugucaaucuucccuuaacu

SEQ ID NO: 2394893 - RNA, 19 nt, Artificial Sequence
  Description of Artificial Sequence: Synthetic oligonucleotide
ucuucccuuaacuugcuca

SEQ ID NO: 2394894 - RNA, 19 nt, Artificial Sequence
  Description of Artificial Sequence: Synthetic oligonucleotide
agaaaguuccugaaucagc

SEQ ID NO: 2394895 - RNA, 19 nt, Artificial Sequence
  Description of Artificial Sequence: Synthetic oligonucleotide
agaucaaacaaugggagca

SEQ ID NO: 2394896 - RNA, 19 nt, Artificial Sequence
  Description of Artificial Sequence: Synthetic oligonucleotide
cuaaccuguaacagaacag

SEQ ID NO: 2394897 - RNA, 19 nt, Artificial Sequence
  Description of Artificial Sequence: Synthetic oligonucleotide
aaucagcaggcuuuuaaau

SEQ ID NO: 2394898 - RNA, 19 nt, Artificial Sequence
  Description of Artificial Sequence: Synthetic oligonucleotide
ugaaucagcaggcuuuuaa

SEQ ID NO: 2394899 - RNA, 19 nt, Artificial Sequence
  Description of Artificial Sequence: Synthetic oligonucleotide
acagaacuaaccuguaaca

SEQ ID NO: 2394900 - RNA, 19 nt, Artificial Sequence
  Description of Artificial Sequence: Synthetic oligonucleotide
aaacaguugcauucuuaug

SEQ ID NO: 2394901 - RNA, 19 nt, Artificial Sequence
  Description of Artificial Sequence: Synthetic oligonucleotide
aacaaugggagcaggaggu

SEQ ID NO: 2394902 - RNA, 19 nt, Artificial Sequence
  Description of Artificial Sequence: Synthetic oligonucleotide
aguuccugaaucagcaggc

SEQ ID NO: 2394903 - RNA, 19 nt, Artificial Sequence
  Description of Artificial Sequence: Synthetic oligonucleotide
auuaugucuaguugagacu

SEQ ID NO: 2394904 - RNA, 19 nt, Artificial Sequence
  Description of Artificial Sequence: Synthetic oligonucleotide
auauucaaacacuucuaga

SEQ ID NO: 2394905 - RNA, 19 nt, Artificial Sequence
  Description of Artificial Sequence: Synthetic oligonucleotide
acaagaucaaacaauggga

SEQ ID NO: 2394906 - RNA, 19 nt, Artificial Sequence
  Description of Artificial Sequence: Synthetic oligonucleotide
gucuaguugagacucauga

SEQ ID NO: 2394907 - RNA, 19 nt, Artificial Sequence
  Description of Artificial Sequence: Synthetic oligonucleotide
ucaaacaaugggagcagga

SEQ ID NO: 2394908 - RNA, 19 nt, Artificial Sequence
  Description of Artificial Sequence: Synthetic oligonucleotide
uaguuaaagggauguggag

SEQ ID NO: 2394909 - RNA, 19 nt, Artificial Sequence
  Description of Artificial Sequence: Synthetic oligonucleotide
uaugcaccaugucugaaaa

SEQ ID NO: 2394910 - RNA, 19 nt, Artificial Sequence
  Description of Artificial Sequence: Synthetic oligonucleotide
agucccacaagaucaaaca

SEQ ID NO: 2394911 - RNA, 19 nt, Artificial Sequence
  Description of Artificial Sequence: Synthetic oligonucleotide
aaacacuucuagaggcacc

SEQ ID NO: 2394912 - RNA, 19 nt, Artificial Sequence
  Description of Artificial Sequence: Synthetic oligonucleotide
caggcuuuuaaauuucuuc

SEQ ID NO: 2394913 - RNA, 19 nt, Artificial Sequence
  Description of Artificial Sequence: Synthetic oligonucleotide
uguccuguaagcccguaac

SEQ ID NO: 2394914 - RNA, 19 nt, Artificial Sequence
  Description of Artificial Sequence: Synthetic oligonucleotide
uaaccuguaacagaacagu

SEQ ID NO: 2394915 - RNA, 19 nt, Artificial Sequence
  Description of Artificial Sequence: Synthetic oligonucleotide
guagaaucccaaucucacg

SEQ ID NO: 2394916 - RNA, 19 nt, Artificial Sequence
  Description of Artificial Sequence: Synthetic oligonucleotide
acuuaagacuuuauuaugu

SEQ ID NO: 2394917 - RNA, 19 nt, Artificial Sequence
  Description of Artificial Sequence: Synthetic oligonucleotide
uagaaaguuccugaaucag

SEQ ID NO: 2394918 - RNA, 19 nt, Artificial Sequence
  Description of Artificial Sequence: Synthetic oligonucleotide
guaacagaacaguacauaa

SEQ ID NO: 2394919 - RNA, 19 nt, Artificial Sequence
  Description of Artificial Sequence: Synthetic oligonucleotide
aguucuguaacagaacuaa

SEQ ID NO: 2394920 - RNA, 19 nt, Artificial Sequence
  Description of Artificial Sequence: Synthetic oligonucleotide
ugagacucaugaaaacagu

SEQ ID NO: 2394921 - RNA, 19 nt, Artificial Sequence
  Description of Artificial Sequence: Synthetic oligonucleotide
cgugauaucaugcagcugc

SEQ ID NO: 2394922 - RNA, 19 nt, Artificial Sequence
  Description of Artificial Sequence: Synthetic oligonucleotide
accuguaacagaacaguac

SEQ ID NO: 2394923 - RNA, 19 nt, Artificial Sequence
  Description of Artificial Sequence: Synthetic oligonucleotide
ucccacaagaucaaacaau

SEQ ID NO: 2394924 - RNA, 19 nt, Artificial Sequence
  Description of Artificial Sequence: Synthetic oligonucleotide
gacgaugaugccgagcugc

SEQ ID NO: 2394925 - RNA, 19 nt, Artificial Sequence
  Description of Artificial Sequence: Synthetic oligonucleotide
uguaagcccguaacaauaa

SEQ ID NO: 2394926 - RNA, 19 nt, Artificial Sequence
  Description of Artificial Sequence: Synthetic oligonucleotide
agaaucccaaucucacguc

SEQ ID NO: 2394927 - RNA, 19 nt, Artificial Sequence
  Description of Artificial Sequence: Synthetic oligonucleotide
accuugaucaauauauuca

SEQ ID NO: 2394928 - RNA, 19 nt, Artificial Sequence
  Description of Artificial Sequence: Synthetic oligonucleotide
aaguagaaucccaaucuca

SEQ ID NO: 2394929 - RNA, 19 nt, Artificial Sequence
  Description of Artificial Sequence: Synthetic oligonucleotide
auugugucaaucuucccuu

SEQ ID NO: 2394930 - RNA, 19 nt, Artificial Sequence
  Description of Artificial Sequence: Synthetic oligonucleotide
cuuucccuagagaaagaag

SEQ ID NO: 2394931 - RNA, 19 nt, Artificial Sequence
  Description of Artificial Sequence: Synthetic oligonucleotide
aaucccaaucucacgucac

SEQ ID NO: 2394932 - RNA, 19 nt, Artificial Sequence
  Description of Artificial Sequence: Synthetic oligonucleotide
gaacuaaccuguaacagaa

SEQ ID NO: 2394933 - RNA, 19 nt, Artificial Sequence
  Description of Artificial Sequence: Synthetic oligonucleotide
auaaaaccuaguucuguaa

SEQ ID NO: 2394934 - RNA, 19 nt, Artificial Sequence
  Description of Artificial Sequence: Synthetic oligonucleotide
uuaugcaccaugucugaaa

SEQ ID NO: 2394935 - RNA, 19 nt, Artificial Sequence
  Description of Artificial Sequence: Synthetic oligonucleotide
auauaaaaccuaguucugu

SEQ ID NO: 2394936 - RNA, 19 nt, Artificial Sequence
  Description of Artificial Sequence: Synthetic oligonucleotide
ucuaguugagacucaugaa

SEQ ID NO: 2394937 - RNA, 19 nt, Artificial Sequence
  Description of Artificial Sequence: Synthetic oligonucleotide
uccgaguaguuaaagggau

SEQ ID NO: 2394938 - RNA, 19 nt, Artificial Sequence
  Description of Artificial Sequence: Synthetic oligonucleotide
gaucaguccgaguaguuaa

SEQ ID NO: 2394939 - RNA, 19 nt, Artificial Sequence
  Description of Artificial Sequence: Synthetic oligonucleotide
caccgugauaucaugcagc

SEQ ID NO: 2394940 - RNA, 19 nt, Artificial Sequence
  Description of Artificial Sequence: Synthetic oligonucleotide
ucuuccugcccacuuuccc

SEQ ID NO: 2394941 - RNA, 19 nt, Artificial Sequence
  Description of Artificial Sequence: Synthetic oligonucleotide
agcuagagcccucuccagg

SEQ ID NO: 2394942 - RNA, 19 nt, Artificial Sequence
  Description of Artificial Sequence: Synthetic oligonucleotide
ucuuaugcaccaugucuga

SEQ ID NO: 2394943 - RNA, 19 nt, Artificial Sequence
  Description of Artificial Sequence: Synthetic oligonucleotide
cacagacgacucaaggucc

SEQ ID NO: 2394944 - RNA, 19 nt, Artificial Sequence
  Description of Artificial Sequence: Synthetic oligonucleotide
aaccuaguucuguaacaga

SEQ ID NO: 2394945 - RNA, 19 nt, Artificial Sequence
  Description of Artificial Sequence: Synthetic oligonucleotide
cagaacuaaccuguaacag

SEQ ID NO: 2394946 - RNA, 19 nt, Artificial Sequence
  Description of Artificial Sequence: Synthetic oligonucleotide
caguccgaguaguuaaagg

SEQ ID NO: 2394947 - RNA, 19 nt, Artificial Sequence
  Description of Artificial Sequence: Synthetic oligonucleotide
gucgcugacgaugaugccg

SEQ ID NO: 2394948 - RNA, 19 nt, Artificial Sequence
  Description of Artificial Sequence: Synthetic oligonucleotide
cacuuuagaaaguuccuga

SEQ ID NO: 2394949 - RNA, 19 nt, Artificial Sequence
  Description of Artificial Sequence: Synthetic oligonucleotide
guugagacucaugaaaaca

SEQ ID NO: 2394950 - RNA, 19 nt, Artificial Sequence
  Description of Artificial Sequence: Synthetic oligonucleotide
gaaucagcaggcuuuuaaa

SEQ ID NO: 2394951 - RNA, 19 nt, Artificial Sequence
  Description of Artificial Sequence: Synthetic oligonucleotide
accgugauaucaugcagcu

SEQ ID NO: 2394952 - RNA, 19 nt, Artificial Sequence
  Description of Artificial Sequence: Synthetic oligonucleotide
aucagcaggcuuuuaaauu

SEQ ID NO: 2394953 - RNA, 19 nt, Artificial Sequence
  Description of Artificial Sequence: Synthetic oligonucleotide
cucacgucacauuucagca

SEQ ID NO: 2394954 - RNA, 19 nt, Artificial Sequence
  Description of Artificial Sequence: Synthetic oligonucleotide
cacucuuugguguagagcu

SEQ ID NO: 2394955 - RNA, 19 nt, Artificial Sequence
  Description of Artificial Sequence: Synthetic oligonucleotide
guaguuaaagggaugugga

SEQ ID NO: 2394956 - RNA, 19 nt, Artificial Sequence
  Description of Artificial Sequence: Synthetic oligonucleotide
cacgaacuucuccaggugc

SEQ ID NO: 2394957 - RNA, 19 nt, Artificial Sequence
  Description of Artificial Sequence: Synthetic oligonucleotide
ucgcugacgaugaugccga

SEQ ID NO: 2394958 - RNA, 19 nt, Artificial Sequence
  Description of Artificial Sequence: Synthetic oligonucleotide
uaucaaguagaaucccaau

SEQ ID NO: 2394959 - RNA, 19 nt, Artificial Sequence
  Description of Artificial Sequence: Synthetic oligonucleotide
guuaaagggauguggaggu

SEQ ID NO: 2394960 - RNA, 19 nt, Artificial Sequence
  Description of Artificial Sequence: Synthetic oligonucleotide
caaguagaaucccaaucuc

SEQ ID NO: 2394961 - RNA, 19 nt, Artificial Sequence
  Description of Artificial Sequence: Synthetic oligonucleotide
acagcgucucacuggauca

SEQ ID NO: 2394962 - RNA, 19 nt, Artificial Sequence
  Description of Artificial Sequence: Synthetic oligonucleotide
aagggaccacccaaggguc

SEQ ID NO: 2394963 - RNA, 19 nt, Artificial Sequence
  Description of Artificial Sequence: Synthetic oligonucleotide
gaaucccaaucucacguca

SEQ ID NO: 2394964 - RNA, 19 nt, Artificial Sequence
  Description of Artificial Sequence: Synthetic oligonucleotide
uggucaaacuucuccgcca

SEQ ID NO: 2394965 - RNA, 19 nt, Artificial Sequence
  Description of Artificial Sequence: Synthetic oligonucleotide
cuccucuagucccagaguc

SEQ ID NO: 2394966 - RNA, 19 nt, Artificial Sequence
  Description of Artificial Sequence: Synthetic oligonucleotide
uaugucuaguugagacuca

SEQ ID NO: 2394967 - RNA, 19 nt, Artificial Sequence
  Description of Artificial Sequence: Synthetic oligonucleotide
aacuaaccuguaacagaac

SEQ ID NO: 2394968 - RNA, 19 nt, Artificial Sequence
  Description of Artificial Sequence: Synthetic oligonucleotide
gaaacacuuuagaaaguuc

SEQ ID NO: 2394969 - RNA, 19 nt, Artificial Sequence
  Description of Artificial Sequence: Synthetic oligonucleotide
ugugucaaucuucccuuaa

SEQ ID NO: 2394970 - RNA, 19 nt, Artificial Sequence
  Description of Artificial Sequence: Synthetic oligonucleotide
ugucuaguugagacucaug

SEQ ID NO: 2394971 - RNA, 19 nt, Artificial Sequence
  Description of Artificial Sequence: Synthetic oligonucleotide
uugguguagagcuggggau

SEQ ID NO: 2394972 - RNA, 19 nt, Artificial Sequence
  Description of Artificial Sequence: Synthetic oligonucleotide
ucccuagagaaagaaggga

SEQ ID NO: 2394973 - RNA, 19 nt, Artificial Sequence
  Description of Artificial Sequence: Synthetic oligonucleotide
uccaggcacucuuuggugu

SEQ ID NO: 2394974 - RNA, 19 nt, Artificial Sequence
  Description of Artificial Sequence: Synthetic oligonucleotide
ucaguccgaguaguuaaag

SEQ ID NO: 2394975 - RNA, 19 nt, Artificial Sequence
  Description of Artificial Sequence: Synthetic oligonucleotide
guggucaaacuucuccgcc

SEQ ID NO: 2394976 - RNA, 19 nt, Artificial Sequence
  Description of Artificial Sequence: Synthetic oligonucleotide
ccuagagaaagaagggacc

SEQ ID NO: 2394977 - RNA, 19 nt, Artificial Sequence
  Description of Artificial Sequence: Synthetic oligonucleotide
uaguucuguaacagaacua

SEQ ID NO: 2394978 - RNA, 19 nt, Artificial Sequence
  Description of Artificial Sequence: Synthetic oligonucleotide
cccacaagaucaaacaaug

SEQ ID NO: 2394979 - RNA, 19 nt, Artificial Sequence
  Description of Artificial Sequence: Synthetic oligonucleotide
ucugcgagcugcuggggca

SEQ ID NO: 2394980 - RNA, 19 nt, Artificial Sequence
  Description of Artificial Sequence: Synthetic oligonucleotide
aucaaacaaugggagcagg

SEQ ID NO: 2394981 - RNA, 19 nt, Artificial Sequence
  Description of Artificial Sequence: Synthetic oligonucleotide
ucucacuggaucaguccga

SEQ ID NO: 2394982 - RNA, 19 nt, Artificial Sequence
  Description of Artificial Sequence: Synthetic oligonucleotide
ggccauaucuucuggaaac

SEQ ID NO: 2394983 - RNA, 19 nt, Artificial Sequence
  Description of Artificial Sequence: Synthetic oligonucleotide
aguccccauggcuggaagg

SEQ ID NO: 2394984 - RNA, 19 nt, Artificial Sequence
  Description of Artificial Sequence: Synthetic oligonucleotide
uagagcuggggauuucgac

SEQ ID NO: 2394985 - RNA, 19 nt, Artificial Sequence
  Description of Artificial Sequence: Synthetic oligonucleotide
cacagcucuacuccucuag

SEQ ID NO: 2394986 - RNA, 19 nt, Artificial Sequence
  Description of Artificial Sequence: Synthetic oligonucleotide
caguuucuggcugagcccc

SEQ ID NO: 2394987 - RNA, 19 nt, Artificial Sequence
  Description of Artificial Sequence: Synthetic oligonucleotide
ugcacuuaucuauguccug

SEQ ID NO: 2394988 - RNA, 19 nt, Artificial Sequence
  Description of Artificial Sequence: Synthetic oligonucleotide
auaucaaguagaaucccaa

SEQ ID NO: 2394989 - RNA, 19 nt, Artificial Sequence
  Description of Artificial Sequence: Synthetic oligonucleotide
cccguaacaauaaaguuca

SEQ ID NO: 2394990 - RNA, 19 nt, Artificial Sequence
  Description of Artificial Sequence: Synthetic oligonucleotide
cauucuuaugcaccauguc

SEQ ID NO: 2394991 - RNA, 19 nt, Artificial Sequence
  Description of Artificial Sequence: Synthetic oligonucleotide
cuagagaaagaagggacca

SEQ ID NO: 2394992 - RNA, 19 nt, Artificial Sequence
  Description of Artificial Sequence: Synthetic oligonucleotide
caaacacuucuagaggcac

SEQ ID NO: 2394993 - RNA, 19 nt, Artificial Sequence
  Description of Artificial Sequence: Synthetic oligonucleotide
cauugugucaaucuucccu

SEQ ID NO: 2394994 - RNA, 19 nt, Artificial Sequence
  Description of Artificial Sequence: Synthetic oligonucleotide
gcucacagacgacucaagg

SEQ ID NO: 2394995 - RNA, 19 nt, Artificial Sequence
  Description of Artificial Sequence: Synthetic oligonucleotide
accuaguucuguaacagaa

SEQ ID NO: 2394996 - RNA, 19 nt, Artificial Sequence
  Description of Artificial Sequence: Synthetic oligonucleotide
cacuucuagaggcaccgug

SEQ ID NO: 2394997 - RNA, 19 nt, Artificial Sequence
  Description of Artificial Sequence: Synthetic oligonucleotide
agucgcugacgaugaugcc

SEQ ID NO: 2394998 - RNA, 19 nt, Artificial Sequence
  Description of Artificial Sequence: Synthetic oligonucleotide
uucgaccuugaucaauaua

SEQ ID NO: 2394999 - RNA, 19 nt, Artificial Sequence
  Description of Artificial Sequence: Synthetic oligonucleotide
ucuagucccagagucccac

SEQ ID NO: 2395000 - RNA, 19 nt, Artificial Sequence
  Description of Artificial Sequence: Synthetic oligonucleotide
acuuaucuauguccuguaa

SEQ ID NO: 2395001 - RNA, 19 nt, Artificial Sequence
  Description of Artificial Sequence: Synthetic oligonucleotide
cacagcgucucacuggauc

SEQ ID NO: 2395002 - RNA, 19 nt, Artificial Sequence
  Description of Artificial Sequence: Synthetic oligonucleotide
agucccagagucccacaag

SEQ ID NO: 2395003 - RNA, 19 nt, Artificial Sequence
  Description of Artificial Sequence: Synthetic oligonucleotide
gugucaaucuucccuuaac

SEQ ID NO: 2395004 - RNA, 19 nt, Artificial Sequence
  Description of Artificial Sequence: Synthetic oligonucleotide
agcccguaacaauaaaguu

SEQ ID NO: 2395005 - RNA, 19 nt, Artificial Sequence
  Description of Artificial Sequence: Synthetic oligonucleotide
ccagagucccacaagauca

SEQ ID NO: 2395006 - RNA, 19 nt, Artificial Sequence
  Description of Artificial Sequence: Synthetic oligonucleotide
acuucuagaggcaccguga

SEQ ID NO: 2395007 - RNA, 19 nt, Artificial Sequence
  Description of Artificial Sequence: Synthetic oligonucleotide
cacuggaucaguccgagua

SEQ ID NO: 2395008 - RNA, 19 nt, Artificial Sequence
  Description of Artificial Sequence: Synthetic oligonucleotide
ggggauuucgaccuugauc

SEQ ID NO: 2395009 - RNA, 19 nt, Artificial Sequence
  Description of Artificial Sequence: Synthetic oligonucleotide
gaaaacaguugcauucuua

SEQ ID NO: 2395010 - RNA, 19 nt, Artificial Sequence
  Description of Artificial Sequence: Synthetic oligonucleotide
aggcaccgugauaucaugc

SEQ ID NO: 2395011 - RNA, 19 nt, Artificial Sequence
  Description of Artificial Sequence: Synthetic oligonucleotide
caaucucacgucacauuuc

SEQ ID NO: 2395012 - RNA, 19 nt, Artificial Sequence
  Description of Artificial Sequence: Synthetic oligonucleotide
cuuugguguagagcugggg

SEQ ID NO: 2395013 - RNA, 19 nt, Artificial Sequence
  Description of Artificial Sequence: Synthetic oligonucleotide
gaggcaccgugauaucaug

SEQ ID NO: 2395014 - RNA, 19 nt, Artificial Sequence
  Description of Artificial Sequence: Synthetic oligonucleotide
ucuacuccucuagucccag

SEQ ID NO: 2395015 - RNA, 19 nt, Artificial Sequence
  Description of Artificial Sequence: Synthetic oligonucleotide
uagucccagagucccacaa

SEQ ID NO: 2395016 - RNA, 19 nt, Artificial Sequence
  Description of Artificial Sequence: Synthetic oligonucleotide
acucaugaaaacaguugca

SEQ ID NO: 2395017 - RNA, 19 nt, Artificial Sequence
  Description of Artificial Sequence: Synthetic oligonucleotide
cuguaagcccguaacaaua

SEQ ID NO: 2395018 - RNA, 19 nt, Artificial Sequence
  Description of Artificial Sequence: Synthetic oligonucleotide
gaugccgagcugccggaug

SEQ ID NO: 2395019 - RNA, 19 nt, Artificial Sequence
  Description of Artificial Sequence: Synthetic oligonucleotide
uuccugaaucagcaggcuu

SEQ ID NO: 2395020 - RNA, 19 nt, Artificial Sequence
  Description of Artificial Sequence: Synthetic oligonucleotide
uuuuagcuagagcccucuc

SEQ ID NO: 2395021 - RNA, 19 nt, Artificial Sequence
  Description of Artificial Sequence: Synthetic oligonucleotide
uaggggcgaggccaguccc

SEQ ID NO: 2395022 - RNA, 19 nt, Artificial Sequence
  Description of Artificial Sequence: Synthetic oligonucleotide
aucccaaucucacgucaca

SEQ ID NO: 2395023 - RNA, 19 nt, Artificial Sequence
  Description of Artificial Sequence: Synthetic oligonucleotide
acuuucccuagagaaagaa

SEQ ID NO: 2395024 - RNA, 19 nt, Artificial Sequence
  Description of Artificial Sequence: Synthetic oligonucleotide
ugauaucaugcagcugcug

SEQ ID NO: 2395025 - RNA, 19 nt, Artificial Sequence
  Description of Artificial Sequence: Synthetic oligonucleotide
ugcuccgauacuuggccau

SEQ ID NO: 2395026 - RNA, 19 nt, Artificial Sequence
  Description of Artificial Sequence: Synthetic oligonucleotide
caguugcauucuuaugcac

SEQ ID NO: 2395027 - RNA, 19 nt, Artificial Sequence
  Description of Artificial Sequence: Synthetic oligonucleotide
ccacaagaucaaacaaugg

SEQ ID NO: 2395028 - RNA, 19 nt, Artificial Sequence
  Description of Artificial Sequence: Synthetic oligonucleotide
gcucuacuccucuaguccc

SEQ ID NO: 2395029 - RNA, 19 nt, Artificial Sequence
  Description of Artificial Sequence: Synthetic oligonucleotide
guaggggcgaggccagucc

SEQ ID NO: 2395030 - RNA, 19 nt, Artificial Sequence
  Description of Artificial Sequence: Synthetic oligonucleotide
cacccaagggucugcgagc

SEQ ID NO: 2395031 - RNA, 19 nt, Artificial Sequence
  Description of Artificial Sequence: Synthetic oligonucleotide
cucacuggaucaguccgag

SEQ ID NO: 2395032 - RNA, 19 nt, Artificial Sequence
  Description of Artificial Sequence: Synthetic oligonucleotide
ugacgaugaugccgagcug

SEQ ID NO: 2395033 - RNA, 19 nt, Artificial Sequence
  Description of Artificial Sequence: Synthetic oligonucleotide
cuuggccauaucuucugga

SEQ ID NO: 2395034 - RNA, 19 nt, Artificial Sequence
  Description of Artificial Sequence: Synthetic oligonucleotide
gcccguaacaauaaaguuc

SEQ ID NO: 2395035 - RNA, 19 nt, Artificial Sequence
  Description of Artificial Sequence: Synthetic oligonucleotide
guccgaguaguuaaaggga

SEQ ID NO: 2395036 - RNA, 19 nt, Artificial Sequence
  Description of Artificial Sequence: Synthetic oligonucleotide
augccgagcugccggaugu

SEQ ID NO: 2395037 - RNA, 19 nt, Artificial Sequence
  Description of Artificial Sequence: Synthetic oligonucleotide
uuucgaccuugaucaauau

SEQ ID NO: 2395038 - RNA, 19 nt, Artificial Sequence
  Description of Artificial Sequence: Synthetic oligonucleotide
ugcccacuuucccuagaga

SEQ ID NO: 2395039 - RNA, 19 nt, Artificial Sequence
  Description of Artificial Sequence: Synthetic oligonucleotide
uucuggcugagccccgccu

SEQ ID NO: 2395040 - RNA, 19 nt, Artificial Sequence
  Description of Artificial Sequence: Synthetic oligonucleotide
cagcucuacuccucuaguc

SEQ ID NO: 2395041 - RNA, 19 nt, Artificial Sequence
  Description of Artificial Sequence: Synthetic oligonucleotide
cucacagacgacucaaggu

SEQ ID NO: 2395042 - RNA, 19 nt, Artificial Sequence
  Description of Artificial Sequence: Synthetic oligonucleotide
gucacauuucagcaaggcu

SEQ ID NO: 2395043 - RNA, 19 nt, Artificial Sequence
  Description of Artificial Sequence: Synthetic oligonucleotide
gucccacaagaucaaacaa

SEQ ID NO: 2395044 - RNA, 19 nt, Artificial Sequence
  Description of Artificial Sequence: Synthetic oligonucleotide
ccuugaucaauauauucaa

SEQ ID NO: 2395045 - RNA, 19 nt, Artificial Sequence
  Description of Artificial Sequence: Synthetic oligonucleotide
guucuguaacagaacuaac

SEQ ID NO: 2395046 - RNA, 19 nt, Artificial Sequence
  Description of Artificial Sequence: Synthetic oligonucleotide
ccuaguucuguaacagaac

SEQ ID NO: 2395047 - RNA, 19 nt, Artificial Sequence
  Description of Artificial Sequence: Synthetic oligonucleotide
aaucuucccuuaacuugcu

SEQ ID NO: 2395048 - RNA, 19 nt, Artificial Sequence
  Description of Artificial Sequence: Synthetic oligonucleotide
uucuagaggcaccgugaua

SEQ ID NO: 2395049 - RNA, 19 nt, Artificial Sequence
  Description of Artificial Sequence: Synthetic oligonucleotide
aggcagcauuggcaggcac

SEQ ID NO: 2395050 - RNA, 19 nt, Artificial Sequence
  Description of Artificial Sequence: Synthetic oligonucleotide
gcugggaagucgcugacga

SEQ ID NO: 2395051 - RNA, 19 nt, Artificial Sequence
  Description of Artificial Sequence: Synthetic oligonucleotide
agccccgccuggcugcugg

SEQ ID NO: 2395052 - RNA, 19 nt, Artificial Sequence
  Description of Artificial Sequence: Synthetic oligonucleotide
uuccugcccacuuucccua

SEQ ID NO: 2395053 - RNA, 19 nt, Artificial Sequence
  Description of Artificial Sequence: Synthetic oligonucleotide
gucugcgagcugcuggggc

SEQ ID NO: 2395054 - RNA, 19 nt, Artificial Sequence
  Description of Artificial Sequence: Synthetic oligonucleotide
caggcacagcgucucacug

SEQ ID NO: 2395055 - RNA, 19 nt, Artificial Sequence
  Description of Artificial Sequence: Synthetic oligonucleotide
ugccugcacuuaucuaugu

SEQ ID NO: 2395056 - RNA, 19 nt, Artificial Sequence
  Description of Artificial Sequence: Synthetic oligonucleotide
aggccaguccccauggcug

SEQ ID NO: 2395057 - RNA, 19 nt, Artificial Sequence
  Description of Artificial Sequence: Synthetic oligonucleotide
ucccaaucucacgucacau

SEQ ID NO: 2395058 - RNA, 19 nt, Artificial Sequence
  Description of Artificial Sequence: Synthetic oligonucleotide
ggcaccgugauaucaugca

SEQ ID NO: 2395059 - RNA, 19 nt, Artificial Sequence
  Description of Artificial Sequence: Synthetic oligonucleotide
gcaccgugauaucaugcag

SEQ ID NO: 2395060 - RNA, 19 nt, Artificial Sequence
  Description of Artificial Sequence: Synthetic oligonucleotide
uugugucaaucuucccuua

SEQ ID NO: 2395061 - RNA, 19 nt, Artificial Sequence
  Description of Artificial Sequence: Synthetic oligonucleotide
augcuccgauacuuggcca

SEQ ID NO: 2395062 - RNA, 19 nt, Artificial Sequence
  Description of Artificial Sequence: Synthetic oligonucleotide
ggagguaggggcgaggcca

SEQ ID NO: 2395063 - RNA, 19 nt, Artificial Sequence
  Description of Artificial Sequence: Synthetic oligonucleotide
cugcacuuaucuauguccu

SEQ ID NO: 2395064 - RNA, 19 nt, Artificial Sequence
  Description of Artificial Sequence: Synthetic oligonucleotide
augaugccgagcugccgga

SEQ ID NO: 2395065 - RNA, 19 nt, Artificial Sequence
  Description of Artificial Sequence: Synthetic oligonucleotide
ggauguggaggucuucaca

SEQ ID NO: 2395066 - RNA, 19 nt, Artificial Sequence
  Description of Artificial Sequence: Synthetic oligonucleotide
gaccacccaagggucugcg

SEQ ID NO: 2395067 - RNA, 19 nt, Artificial Sequence
  Description of Artificial Sequence: Synthetic oligonucleotide
gcccacuuucccuagagaa

SEQ ID NO: 2395068 - RNA, 19 nt, Artificial Sequence
  Description of Artificial Sequence: Synthetic oligonucleotide
ugguguagagcuggggauu

SEQ ID NO: 2395069 - RNA, 19 nt, Artificial Sequence
  Description of Artificial Sequence: Synthetic oligonucleotide
gagacucaugaaaacaguu

SEQ ID NO: 2395070 - RNA, 19 nt, Artificial Sequence
  Description of Artificial Sequence: Synthetic oligonucleotide
uggggauuucgaccuugau

SEQ ID NO: 2395071 - RNA, 19 nt, Artificial Sequence
  Description of Artificial Sequence: Synthetic oligonucleotide
guaagcccguaacaauaaa

SEQ ID NO: 2395072 - RNA, 19 nt, Artificial Sequence
  Description of Artificial Sequence: Synthetic oligonucleotide
cuagaggcaccgugauauc

SEQ ID NO: 2395073 - RNA, 19 nt, Artificial Sequence
  Description of Artificial Sequence: Synthetic oligonucleotide
ggcacagcgucucacugga

SEQ ID NO: 2395074 - RNA, 19 nt, Artificial Sequence
  Description of Artificial Sequence: Synthetic oligonucleotide
agaggcaccgugauaucau

SEQ ID NO: 2395075 - RNA, 19 nt, Artificial Sequence
  Description of Artificial Sequence: Synthetic oligonucleotide
ccucuagucccagaguccc

SEQ ID NO: 2395076 - RNA, 19 nt, Artificial Sequence
  Description of Artificial Sequence: Synthetic oligonucleotide
gacacagcucacagacgac

SEQ ID NO: 2395077 - RNA, 19 nt, Artificial Sequence
  Description of Artificial Sequence: Synthetic oligonucleotide
cagcaaggcugucuuccug

SEQ ID NO: 2395078 - RNA, 19 nt, Artificial Sequence
  Description of Artificial Sequence: Synthetic oligonucleotide
gcugccugcacuuaucuau

SEQ ID NO: 2395079 - RNA, 19 nt, Artificial Sequence
  Description of Artificial Sequence: Synthetic oligonucleotide
ucccgccucucggacacag

SEQ ID NO: 2395080 - RNA, 19 nt, Artificial Sequence
  Description of Artificial Sequence: Synthetic oligonucleotide
ucacuggaucaguccgagu

SEQ ID NO: 2395081 - RNA, 19 nt, Artificial Sequence
  Description of Artificial Sequence: Synthetic oligonucleotide
gauuucgaccuugaucaau

SEQ ID NO: 2395082 - RNA, 19 nt, Artificial Sequence
  Description of Artificial Sequence: Synthetic oligonucleotide
aguuucuggcugagccccg

SEQ ID NO: 2395083 - RNA, 19 nt, Artificial Sequence
  Description of Artificial Sequence: Synthetic oligonucleotide
aggggcgaggccagucccc

SEQ ID NO: 2395084 - RNA, 19 nt, Artificial Sequence
  Description of Artificial Sequence: Synthetic oligonucleotide
augcaccaugucugaaaau

SEQ ID NO: 2395085 - RNA, 19 nt, Artificial Sequence
  Description of Artificial Sequence: Synthetic oligonucleotide
uccccauggcuggaaggca

SEQ ID NO: 2395086 - RNA, 19 nt, Artificial Sequence
  Description of Artificial Sequence: Synthetic oligonucleotide
aucucacgucacauuucag

SEQ ID NO: 2395087 - RNA, 19 nt, Artificial Sequence
  Description of Artificial Sequence: Synthetic oligonucleotide
cacuuaucuauguccugua

SEQ ID NO: 2395088 - RNA, 19 nt, Artificial Sequence
  Description of Artificial Sequence: Synthetic oligonucleotide
gcgaggccaguccccaugg

SEQ ID NO: 2395089 - RNA, 19 nt, Artificial Sequence
  Description of Artificial Sequence: Synthetic oligonucleotide
ccgaguaguuaaagggaug

SEQ ID NO: 2395090 - RNA, 19 nt, Artificial Sequence
  Description of Artificial Sequence: Synthetic oligonucleotide
ucgccagcgccucccgccu

SEQ ID NO: 2395091 - RNA, 19 nt, Artificial Sequence
  Description of Artificial Sequence: Synthetic oligonucleotide
ggaaacacuuuagaaaguu

SEQ ID NO: 2395092 - RNA, 19 nt, Artificial Sequence
  Description of Artificial Sequence: Synthetic oligonucleotide
uugcauucuuaugcaccau

SEQ ID NO: 2395093 - RNA, 19 nt, Artificial Sequence
  Description of Artificial Sequence: Synthetic oligonucleotide
aucaguccgaguaguuaaa

SEQ ID NO: 2395094 - RNA, 19 nt, Artificial Sequence
  Description of Artificial Sequence: Synthetic oligonucleotide
agcgucucacuggaucagu

SEQ ID NO: 2395095 - RNA, 19 nt, Artificial Sequence
  Description of Artificial Sequence: Synthetic oligonucleotide
caggcacucuuugguguag

SEQ ID NO: 2395096 - RNA, 19 nt, Artificial Sequence
  Description of Artificial Sequence: Synthetic oligonucleotide
gucaaacuucuccgccauc

SEQ ID NO: 2395097 - RNA, 19 nt, Artificial Sequence
  Description of Artificial Sequence: Synthetic oligonucleotide
cagagucccacaagaucaa

SEQ ID NO: 2395098 - RNA, 19 nt, Artificial Sequence
  Description of Artificial Sequence: Synthetic oligonucleotide
cauuucagcaaggcugucu

SEQ ID NO: 2395099 - RNA, 19 nt, Artificial Sequence
  Description of Artificial Sequence: Synthetic oligonucleotide
cuagagcccucuccaggca

SEQ ID NO: 2395100 - RNA, 19 nt, Artificial Sequence
  Description of Artificial Sequence: Synthetic oligonucleotide
gggaagucgcugacgauga

SEQ ID NO: 2395101 - RNA, 19 nt, Artificial Sequence
  Description of Artificial Sequence: Synthetic oligonucleotide
ggcgaggccaguccccaug

SEQ ID NO: 2395102 - RNA, 19 nt, Artificial Sequence
  Description of Artificial Sequence: Synthetic oligonucleotide
cagcgucucacuggaucag

SEQ ID NO: 2395103 - RNA, 19 nt, Artificial Sequence
  Description of Artificial Sequence: Synthetic oligonucleotide
uggcaggcacagcgucuca

SEQ ID NO: 2395104 - RNA, 19 nt, Artificial Sequence
  Description of Artificial Sequence: Synthetic oligonucleotide
uucccuuaacuugcucauu

SEQ ID NO: 2395105 - RNA, 19 nt, Artificial Sequence
  Description of Artificial Sequence: Synthetic oligonucleotide
caucgccagcgccucccgc

SEQ ID NO: 2395106 - RNA, 19 nt, Artificial Sequence
  Description of Artificial Sequence: Synthetic oligonucleotide
cuagucccagagucccaca

SEQ ID NO: 2395107 - RNA, 19 nt, Artificial Sequence
  Description of Artificial Sequence: Synthetic oligonucleotide
uauguccuguaagcccgua

SEQ ID NO: 2395108 - RNA, 19 nt, Artificial Sequence
  Description of Artificial Sequence: Synthetic oligonucleotide
cucucggacacagcucaca

SEQ ID NO: 2395109 - RNA, 19 nt, Artificial Sequence
  Description of Artificial Sequence: Synthetic oligonucleotide
ggcugggaagucgcugacg

SEQ ID NO: 2395110 - RNA, 19 nt, Artificial Sequence
  Description of Artificial Sequence: Synthetic oligonucleotide
cuucuagaggcaccgugau

SEQ ID NO: 2395111 - RNA, 19 nt, Artificial Sequence
  Description of Artificial Sequence: Synthetic oligonucleotide
gcacuuaucuauguccugu

SEQ ID NO: 2395112 - RNA, 19 nt, Artificial Sequence
  Description of Artificial Sequence: Synthetic oligonucleotide
gcugacgaugaugccgagc

SEQ ID NO: 2395113 - RNA, 19 nt, Artificial Sequence
  Description of Artificial Sequence: Synthetic oligonucleotide
gccugcacuuaucuauguc

SEQ ID NO: 2395114 - RNA, 19 nt, Artificial Sequence
  Description of Artificial Sequence: Synthetic oligonucleotide
aggcacucuuugguguaga

SEQ ID NO: 2395115 - RNA, 19 nt, Artificial Sequence
  Description of Artificial Sequence: Synthetic oligonucleotide
ggcagcauuggcaggcaca

SEQ ID NO: 2395116 - RNA, 19 nt, Artificial Sequence
  Description of Artificial Sequence: Synthetic oligonucleotide
ggaucaguccgaguaguua

SEQ ID NO: 2395117 - RNA, 19 nt, Artificial Sequence
  Description of Artificial Sequence: Synthetic oligonucleotide
cucuagucccagaguccca

SEQ ID NO: 2395118 - RNA, 19 nt, Artificial Sequence
  Description of Artificial Sequence: Synthetic oligonucleotide
gcauucuuaugcaccaugu

SEQ ID NO: 2395119 - RNA, 19 nt, Artificial Sequence
  Description of Artificial Sequence: Synthetic oligonucleotide
ccggaugcuccgauacuug

SEQ ID NO: 2395120 - RNA, 19 nt, Artificial Sequence
  Description of Artificial Sequence: Synthetic oligonucleotide
acacuucuagaggcaccgu

SEQ ID NO: 2395121 - RNA, 19 nt, Artificial Sequence
  Description of Artificial Sequence: Synthetic oligonucleotide
ccgauacuuggccauaucu

SEQ ID NO: 2395122 - RNA, 19 nt, Artificial Sequence
  Description of Artificial Sequence: Synthetic oligonucleotide
cugcgagcugcuggggcac

SEQ ID NO: 2395123 - RNA, 19 nt, Artificial Sequence
  Description of Artificial Sequence: Synthetic oligonucleotide
cuggaucaguccgaguagu

SEQ ID NO: 2395124 - RNA, 19 nt, Artificial Sequence
  Description of Artificial Sequence: Synthetic oligonucleotide
gcugccggauguucuccac

SEQ ID NO: 2395125 - RNA, 19 nt, Artificial Sequence
  Description of Artificial Sequence: Synthetic oligonucleotide
ggcacagcucuacuccucu

SEQ ID NO: 2395126 - RNA, 19 nt, Artificial Sequence
  Description of Artificial Sequence: Synthetic oligonucleotide
ccguaacaauaaaguucag

SEQ ID NO: 2395127 - RNA, 19 nt, Artificial Sequence
  Description of Artificial Sequence: Synthetic oligonucleotide
ggauuucgaccuugaucaa

SEQ ID NO: 2395128 - RNA, 19 nt, Artificial Sequence
  Description of Artificial Sequence: Synthetic oligonucleotide
ggucugcgagcugcugggg

SEQ ID NO: 2395129 - RNA, 19 nt, Artificial Sequence
  Description of Artificial Sequence: Synthetic oligonucleotide
ugcgagcugcuggggcaca

SEQ ID NO: 2395130 - RNA, 19 nt, Artificial Sequence
  Description of Artificial Sequence: Synthetic oligonucleotide
gccaucgccagcgccuccc

SEQ ID NO: 2395131 - RNA, 19 nt, Artificial Sequence
  Description of Artificial Sequence: Synthetic oligonucleotide
cggacacagcucacagacg

SEQ ID NO: 2395132 - RNA, 19 nt, Artificial Sequence
  Description of Artificial Sequence: Synthetic oligonucleotide
cuauguccuguaagcccgu

SEQ ID NO: 2395133 - RNA, 19 nt, Artificial Sequence
  Description of Artificial Sequence: Synthetic oligonucleotide
cgaugaugccgagcugccg

SEQ ID NO: 2395134 - RNA, 19 nt, Artificial Sequence
  Description of Artificial Sequence: Synthetic oligonucleotide
cgauacuuggccauaucuu

SEQ ID NO: 2395135 - RNA, 19 nt, Artificial Sequence
  Description of Artificial Sequence: Synthetic oligonucleotide
ugccgagcugccggauguu

SEQ ID NO: 2395136 - RNA, 19 nt, Artificial Sequence
  Description of Artificial Sequence: Synthetic oligonucleotide
ccucucggacacagcucac

SEQ ID NO: 2395137 - RNA, 19 nt, Artificial Sequence
  Description of Artificial Sequence: Synthetic oligonucleotide
cugaaucagcaggcuuuua

SEQ ID NO: 2395138 - RNA, 19 nt, Artificial Sequence
  Description of Artificial Sequence: Synthetic oligonucleotide
gguguagagcuggggauuu

SEQ ID NO: 2395139 - RNA, 19 nt, Artificial Sequence
  Description of Artificial Sequence: Synthetic oligonucleotide
ccgugauaucaugcagcug

SEQ ID NO: 2395140 - RNA, 19 nt, Artificial Sequence
  Description of Artificial Sequence: Synthetic oligonucleotide
gcgagcugcuggggcacag

SEQ ID NO: 2395141 - RNA, 19 nt, Artificial Sequence
  Description of Artificial Sequence: Synthetic oligonucleotide
cugggaagucgcugacgau

SEQ ID NO: 2395142 - RNA, 19 nt, Artificial Sequence
  Description of Artificial Sequence: Synthetic oligonucleotide
gccgagcugccggauguuc

SEQ ID NO: 2395143 - RNA, 19 nt, Artificial Sequence
  Description of Artificial Sequence: Synthetic oligonucleotide
cuccgauacuuggccauau

SEQ ID NO: 2395144 - RNA, 19 nt, Artificial Sequence
  Description of Artificial Sequence: Synthetic oligonucleotide
ccgccucucggacacagcu

SEQ ID NO: 2395145 - RNA, 19 nt, Artificial Sequence
  Description of Artificial Sequence: Synthetic oligonucleotide
gccggauguucuccacgaa

SEQ ID NO: 2395146 - RNA, 19 nt, Artificial Sequence
  Description of Artificial Sequence: Synthetic oligonucleotide
cccgccucucggacacagc

SEQ ID NO: 2395147 - RNA, 19 nt, Artificial Sequence
  Description of Artificial Sequence: Synthetic oligonucleotide
gcauuggcaggcacagcgu

SEQ ID NO: 2395148 - RNA, 19 nt, Artificial Sequence
  Description of Artificial Sequence: Synthetic oligonucleotide
cccaaucucacgucacauu

SEQ ID NO: 2395149 - RNA, 19 nt, Artificial Sequence
  Description of Artificial Sequence: Synthetic oligonucleotide
gcuccgauacuuggccaua

SEQ ID NO: 2395150 - RNA, 19 nt, Artificial Sequence
  Description of Artificial Sequence: Synthetic oligonucleotide
ggaagucgcugacgaugau

SEQ ID NO: 2395151 - RNA, 19 nt, Artificial Sequence
  Description of Artificial Sequence: Synthetic oligonucleotide
gagccccgccuggcugcug

SEQ ID NO: 2395152 - RNA, 19 nt, Artificial Sequence
  Description of Artificial Sequence: Synthetic oligonucleotide
gccaguccccauggcugga

SEQ ID NO: 2395153 - RNA, 19 nt, Artificial Sequence
  Description of Artificial Sequence: Synthetic oligonucleotide
cccggaugcuccgauacuu

SEQ ID NO: 2395154 - RNA, 19 nt, Artificial Sequence
  Description of Artificial Sequence: Synthetic oligonucleotide
cccgccuggcugcugggcu

SEQ ID NO: 2395155 - RNA, 19 nt, Artificial Sequence
  Description of Artificial Sequence: Synthetic oligonucleotide
cgccagcgccucccgccuc

SEQ ID NO: 2395156 - RNA, 19 nt, Artificial Sequence
  Description of Artificial Sequence: Synthetic oligonucleotide
gcacagcgucucacuggau

SEQ ID NO: 2395157 - RNA, 19 nt, Artificial Sequence
  Description of Artificial Sequence: Synthetic oligonucleotide
uuugacaugugauagaggg

SEQ ID NO: 2395158 - RNA, 19 nt, Artificial Sequence
  Description of Artificial Sequence: Synthetic oligonucleotide
agaauauuuucuuccaucc

SEQ ID NO: 2395159 - RNA, 19 nt, Artificial Sequence
  Description of Artificial Sequence: Synthetic oligonucleotide
aaucuuagcagcaaggugg

SEQ ID NO: 2395160 - RNA, 19 nt, Artificial Sequence
  Description of Artificial Sequence: Synthetic oligonucleotide
uuacuuacgagaaaggcag

SEQ ID NO: 2395161 - RNA, 19 nt, Artificial Sequence
  Description of Artificial Sequence: Synthetic oligonucleotide
uuuugaggcacagagaucg

SEQ ID NO: 2395162 - RNA, 19 nt, Artificial Sequence
  Description of Artificial Sequence: Synthetic oligonucleotide
uccaaagucaaucuuagca

SEQ ID NO: 2395163 - RNA, 19 nt, Artificial Sequence
  Description of Artificial Sequence: Synthetic oligonucleotide
aaugacagcaaagaggaag

SEQ ID NO: 2395164 - RNA, 19 nt, Artificial Sequence
  Description of Artificial Sequence: Synthetic oligonucleotide
uguaagauggccaagucaa

SEQ ID NO: 2395165 - RNA, 19 nt, Artificial Sequence
  Description of Artificial Sequence: Synthetic oligonucleotide
aagauuuugguuuugcaaa

SEQ ID NO: 2395166 - RNA, 19 nt, Artificial Sequence
  Description of Artificial Sequence: Synthetic oligonucleotide
aggauuuugaggcacagag

SEQ ID NO: 2395167 - RNA, 19 nt, Artificial Sequence
  Description of Artificial Sequence: Synthetic oligonucleotide
uguucaacaguccagggga

SEQ ID NO: 2395168 - RNA, 19 nt, Artificial Sequence
  Description of Artificial Sequence: Synthetic oligonucleotide
cauacauccgcuuaacugc

SEQ ID NO: 2395169 - RNA, 19 nt, Artificial Sequence
  Description of Artificial Sequence: Synthetic oligonucleotide
agagcauuuggccaccucc

SEQ ID NO: 2395170 - RNA, 19 nt, Artificial Sequence
  Description of Artificial Sequence: Synthetic oligonucleotide
uaaucaacaagcccacagg

SEQ ID NO: 2395171 - RNA, 19 nt, Artificial Sequence
  Description of Artificial Sequence: Synthetic oligonucleotide
uuacgagaaaggcagagug

SEQ ID NO: 2395172 - RNA, 19 nt, Artificial Sequence
  Description of Artificial Sequence: Synthetic oligonucleotide
agagcacaaaaucaauggc

SEQ ID NO: 2395173 - RNA, 19 nt, Artificial Sequence
  Description of Artificial Sequence: Synthetic oligonucleotide
aagaaaaugacagcaaaga

SEQ ID NO: 2395174 - RNA, 19 nt, Artificial Sequence
  Description of Artificial Sequence: Synthetic oligonucleotide
uuuucuuccauccaagcau

SEQ ID NO: 2395175 - RNA, 19 nt, Artificial Sequence
  Description of Artificial Sequence: Synthetic oligonucleotide
ucaacaagcccacaggaca

SEQ ID NO: 2395176 - RNA, 19 nt, Artificial Sequence
  Description of Artificial Sequence: Synthetic oligonucleotide
aguuacuuacgagaaaggc

SEQ ID NO: 2395177 - RNA, 19 nt, Artificial Sequence
  Description of Artificial Sequence: Synthetic oligonucleotide
auugcccgaucauacaucc

SEQ ID NO: 2395178 - RNA, 19 nt, Artificial Sequence
  Description of Artificial Sequence: Synthetic oligonucleotide
cuuuaugacaaagaaaaug

SEQ ID NO: 2395179 - RNA, 19 nt, Artificial Sequence
  Description of Artificial Sequence: Synthetic oligonucleotide
ucuaagaggcucuugcuug

SEQ ID NO: 2395180 - RNA, 19 nt, Artificial Sequence
  Description of Artificial Sequence: Synthetic oligonucleotide
ugcuggacuucuaagaggc

SEQ ID NO: 2395181 - RNA, 19 nt, Artificial Sequence
  Description of Artificial Sequence: Synthetic oligonucleotide
aaagaaguuucuccugcag

SEQ ID NO: 2395182 - RNA, 19 nt, Artificial Sequence
  Description of Artificial Sequence: Synthetic oligonucleotide
aaugguuugggccggggug

SEQ ID NO: 2395183 - RNA, 19 nt, Artificial Sequence
  Description of Artificial Sequence: Synthetic oligonucleotide
ucuuugacaugugauagag

SEQ ID NO: 2395184 - RNA, 19 nt, Artificial Sequence
  Description of Artificial Sequence: Synthetic oligonucleotide
guggcaaugcccaacaucg

SEQ ID NO: 2395185 - RNA, 19 nt, Artificial Sequence
  Description of Artificial Sequence: Synthetic oligonucleotide
cuaaucaacaagcccacag

SEQ ID NO: 2395186 - RNA, 19 nt, Artificial Sequence
  Description of Artificial Sequence: Synthetic oligonucleotide
guaucugugucaaagguag

SEQ ID NO: 2395187 - RNA, 19 nt, Artificial Sequence
  Description of Artificial Sequence: Synthetic oligonucleotide
uuuggcucuucccagcucc

SEQ ID NO: 2395188 - RNA, 19 nt, Artificial Sequence
  Description of Artificial Sequence: Synthetic oligonucleotide
auauccuuguucaacaguc

SEQ ID NO: 2395189 - RNA, 19 nt, Artificial Sequence
  Description of Artificial Sequence: Synthetic oligonucleotide
ugacaugugauagagggga

SEQ ID NO: 2395190 - RNA, 19 nt, Artificial Sequence
  Description of Artificial Sequence: Synthetic oligonucleotide
uaagcgugcugucaggcag

SEQ ID NO: 2395191 - RNA, 19 nt, Artificial Sequence
  Description of Artificial Sequence: Synthetic oligonucleotide
aagucuaccuggccccucc

SEQ ID NO: 2395192 - RNA, 19 nt, Artificial Sequence
  Description of Artificial Sequence: Synthetic oligonucleotide
uuaugacaaagaaaaugac

SEQ ID NO: 2395193 - RNA, 19 nt, Artificial Sequence
  Description of Artificial Sequence: Synthetic oligonucleotide
agagucugcaaagaccugc

SEQ ID NO: 2395194 - RNA, 19 nt, Artificial Sequence
  Description of Artificial Sequence: Synthetic oligonucleotide
uugguuuugcaaagcacag

SEQ ID NO: 2395195 - RNA, 19 nt, Artificial Sequence
  Description of Artificial Sequence: Synthetic oligonucleotide
aguaagaaagaaguuucuc

SEQ ID NO: 2395196 - RNA, 19 nt, Artificial Sequence
  Description of Artificial Sequence: Synthetic oligonucleotide
agauuuugguuuugcaaag

SEQ ID NO: 2395197 - RNA, 19 nt, Artificial Sequence
  Description of Artificial Sequence: Synthetic oligonucleotide
uuggagagcacaaaaucaa

SEQ ID NO: 2395198 - RNA, 19 nt, Artificial Sequence
  Description of Artificial Sequence: Synthetic oligonucleotide
uugacaugugauagagggg

SEQ ID NO: 2395199 - RNA, 19 nt, Artificial Sequence
  Description of Artificial Sequence: Synthetic oligonucleotide
ugcccgaucauacauccgc

SEQ ID NO: 2395200 - RNA, 19 nt, Artificial Sequence
  Description of Artificial Sequence: Synthetic oligonucleotide
uacccagcuaaucaacaag

SEQ ID NO: 2395201 - RNA, 19 nt, Artificial Sequence
  Description of Artificial Sequence: Synthetic oligonucleotide
cuugcuggacuucuaagag

SEQ ID NO: 2395202 - RNA, 19 nt, Artificial Sequence
  Description of Artificial Sequence: Synthetic oligonucleotide
acugauugcccgaucauac

SEQ ID NO: 2395203 - RNA, 19 nt, Artificial Sequence
  Description of Artificial Sequence: Synthetic oligonucleotide
guaguaagaaagaaguuuc

SEQ ID NO: 2395204 - RNA, 19 nt, Artificial Sequence
  Description of Artificial Sequence: Synthetic oligonucleotide
cuggccaaugguuugggcc

SEQ ID NO: 2395205 - RNA, 19 nt, Artificial Sequence
  Description of Artificial Sequence: Synthetic oligonucleotide
ucaagauuuugguuuugca

SEQ ID NO: 2395206 - RNA, 19 nt, Artificial Sequence
  Description of Artificial Sequence: Synthetic oligonucleotide
cagcuaaucaacaagccca

SEQ ID NO: 2395207 - RNA, 19 nt, Artificial Sequence
  Description of Artificial Sequence: Synthetic oligonucleotide
uguaucugugucaaaggua

SEQ ID NO: 2395208 - RNA, 19 nt, Artificial Sequence
  Description of Artificial Sequence: Synthetic oligonucleotide
acccagcuaaucaacaagc

SEQ ID NO: 2395209 - RNA, 19 nt, Artificial Sequence
  Description of Artificial Sequence: Synthetic oligonucleotide
auguaucugugucaaaggu

SEQ ID NO: 2395210 - RNA, 19 nt, Artificial Sequence
  Description of Artificial Sequence: Synthetic oligonucleotide
cugguaggagcacugauug

SEQ ID NO: 2395211 - RNA, 19 nt, Artificial Sequence
  Description of Artificial Sequence: Synthetic oligonucleotide
ugcacagauguccacugca

SEQ ID NO: 2395212 - RNA, 19 nt, Artificial Sequence
  Description of Artificial Sequence: Synthetic oligonucleotide
ucaaucuuagcagcaaggu

SEQ ID NO: 2395213 - RNA, 19 nt, Artificial Sequence
  Description of Artificial Sequence: Synthetic oligonucleotide
uaguaagaaagaaguuucu

SEQ ID NO: 2395214 - RNA, 19 nt, Artificial Sequence
  Description of Artificial Sequence: Synthetic oligonucleotide
agucaaucuuagcagcaag

SEQ ID NO: 2395215 - RNA, 19 nt, Artificial Sequence
  Description of Artificial Sequence: Synthetic oligonucleotide
acagauguccacugcagcu

SEQ ID NO: 2395216 - RNA, 19 nt, Artificial Sequence
  Description of Artificial Sequence: Synthetic oligonucleotide
agaaaggcagaguggcggg

SEQ ID NO: 2395217 - RNA, 19 nt, Artificial Sequence
  Description of Artificial Sequence: Synthetic oligonucleotide
ucauauccuuguucaacag

SEQ ID NO: 2395218 - RNA, 19 nt, Artificial Sequence
  Description of Artificial Sequence: Synthetic oligonucleotide
aguccaggggagcccaucc

SEQ ID NO: 2395219 - RNA, 19 nt, Artificial Sequence
  Description of Artificial Sequence: Synthetic oligonucleotide
uuaacugccaggguggcaa

SEQ ID NO: 2395220 - RNA, 19 nt, Artificial Sequence
  Description of Artificial Sequence: Synthetic oligonucleotide
ucuugcuuguaagauggcc

SEQ ID NO: 2395221 - RNA, 19 nt, Artificial Sequence
  Description of Artificial Sequence: Synthetic oligonucleotide
ugucaggcaguuuggcccg

SEQ ID NO: 2395222 - RNA, 19 nt, Artificial Sequence
  Description of Artificial Sequence: Synthetic oligonucleotide
gucaaucuuagcagcaagg

SEQ ID NO: 2395223 - RNA, 19 nt, Artificial Sequence
  Description of Artificial Sequence: Synthetic oligonucleotide
uggacuucuaagaggcucu

SEQ ID NO: 2395224 - RNA, 19 nt, Artificial Sequence
  Description of Artificial Sequence: Synthetic oligonucleotide
gguuuugcaaagcacaguc

SEQ ID NO: 2395225 - RNA, 19 nt, Artificial Sequence
  Description of Artificial Sequence: Synthetic oligonucleotide
ucuucaagucuaccuggcc

SEQ ID NO: 2395226 - RNA, 19 nt, Artificial Sequence
  Description of Artificial Sequence: Synthetic oligonucleotide
ugauugcccgaucauacau

SEQ ID NO: 2395227 - RNA, 19 nt, Artificial Sequence
  Description of Artificial Sequence: Synthetic oligonucleotide
cccagaauggcucaggcgg

SEQ ID NO: 2395228 - RNA, 19 nt, Artificial Sequence
  Description of Artificial Sequence: Synthetic oligonucleotide
gguuccgguaguaagaaag

SEQ ID NO: 2395229 - RNA, 19 nt, Artificial Sequence
  Description of Artificial Sequence: Synthetic oligonucleotide
aucugugucaaagguagag

SEQ ID NO: 2395230 - RNA, 19 nt, Artificial Sequence
  Description of Artificial Sequence: Synthetic oligonucleotide
auuuggccaccucccauac

SEQ ID NO: 2395231 - RNA, 19 nt, Artificial Sequence
  Description of Artificial Sequence: Synthetic oligonucleotide
cuuguucaacaguccaggg

SEQ ID NO: 2395232 - RNA, 19 nt, Artificial Sequence
  Description of Artificial Sequence: Synthetic oligonucleotide
accucccauacuuuaugac

SEQ ID NO: 2395233 - RNA, 19 nt, Artificial Sequence
  Description of Artificial Sequence: Synthetic oligonucleotide
agaguggcggggcagccac

SEQ ID NO: 2395234 - RNA, 19 nt, Artificial Sequence
  Description of Artificial Sequence: Synthetic oligonucleotide
cauccaagcaucccagagc

SEQ ID NO: 2395235 - RNA, 19 nt, Artificial Sequence
  Description of Artificial Sequence: Synthetic oligonucleotide
caagauuuugguuuugcaa

SEQ ID NO: 2395236 - RNA, 19 nt, Artificial Sequence
  Description of Artificial Sequence: Synthetic oligonucleotide
ugcccaacaucgcugcucc

SEQ ID NO: 2395237 - RNA, 19 nt, Artificial Sequence
  Description of Artificial Sequence: Synthetic oligonucleotide
aggaacagaauauuuucuu

SEQ ID NO: 2395238 - RNA, 19 nt, Artificial Sequence
  Description of Artificial Sequence: Synthetic oligonucleotide
cuuugacaugugauagagg

SEQ ID NO: 2395239 - RNA, 19 nt, Artificial Sequence
  Description of Artificial Sequence: Synthetic oligonucleotide
uucuaagaggcucuugcuu

SEQ ID NO: 2395240 - RNA, 19 nt, Artificial Sequence
  Description of Artificial Sequence: Synthetic oligonucleotide
auacauccgcuuaacugcc

SEQ ID NO: 2395241 - RNA, 19 nt, Artificial Sequence
  Description of Artificial Sequence: Synthetic oligonucleotide
ucaacaguccaggggagcc

SEQ ID NO: 2395242 - RNA, 19 nt, Artificial Sequence
  Description of Artificial Sequence: Synthetic oligonucleotide
aauggcucaggcggguggg

SEQ ID NO: 2395243 - RNA, 19 nt, Artificial Sequence
  Description of Artificial Sequence: Synthetic oligonucleotide
caacaagcccacaggacag

SEQ ID NO: 2395244 - RNA, 19 nt, Artificial Sequence
  Description of Artificial Sequence: Synthetic oligonucleotide
acuuacgagaaaggcagag

SEQ ID NO: 2395245 - RNA, 19 nt, Artificial Sequence
  Description of Artificial Sequence: Synthetic oligonucleotide
gauagaggggaggaggaac

SEQ ID NO: 2395246 - RNA, 19 nt, Artificial Sequence
  Description of Artificial Sequence: Synthetic oligonucleotide
ugggucuuugacaugugau

SEQ ID NO: 2395247 - RNA, 19 nt, Artificial Sequence
  Description of Artificial Sequence: Synthetic oligonucleotide
auccgcuuaacugccaggg

SEQ ID NO: 2395248 - RNA, 19 nt, Artificial Sequence
  Description of Artificial Sequence: Synthetic oligonucleotide
aguuuggcccgcaggaagc

SEQ ID NO: 2395249 - RNA, 19 nt, Artificial Sequence
  Description of Artificial Sequence: Synthetic oligonucleotide
ucccagaauggcucaggcg

SEQ ID NO: 2395250 - RNA, 19 nt, Artificial Sequence
  Description of Artificial Sequence: Synthetic oligonucleotide
caggccugucuucauaucc

SEQ ID NO: 2395251 - RNA, 19 nt, Artificial Sequence
  Description of Artificial Sequence: Synthetic oligonucleotide
cugugucaaagguagagga

SEQ ID NO: 2395252 - RNA, 19 nt, Artificial Sequence
  Description of Artificial Sequence: Synthetic oligonucleotide
aucgcugcuccacccacac

SEQ ID NO: 2395253 - RNA, 19 nt, Artificial Sequence
  Description of Artificial Sequence: Synthetic oligonucleotide
agcaucccagagcauuugg

SEQ ID NO: 2395254 - RNA, 19 nt, Artificial Sequence
  Description of Artificial Sequence: Synthetic oligonucleotide
ugggcagaauguaucugug

SEQ ID NO: 2395255 - RNA, 19 nt, Artificial Sequence
  Description of Artificial Sequence: Synthetic oligonucleotide
ggucuuugacaugugauag

SEQ ID NO: 2395256 - RNA, 19 nt, Artificial Sequence
  Description of Artificial Sequence: Synthetic oligonucleotide
acaugugauagaggggagg

SEQ ID NO: 2395257 - RNA, 19 nt, Artificial Sequence
  Description of Artificial Sequence: Synthetic oligonucleotide
uugcuuguaagauggccaa

SEQ ID NO: 2395258 - RNA, 19 nt, Artificial Sequence
  Description of Artificial Sequence: Synthetic oligonucleotide
agcuaaucaacaagcccac

SEQ ID NO: 2395259 - RNA, 19 nt, Artificial Sequence
  Description of Artificial Sequence: Synthetic oligonucleotide
caagucaagauuuugguuu

SEQ ID NO: 2395260 - RNA, 19 nt, Artificial Sequence
  Description of Artificial Sequence: Synthetic oligonucleotide
aagcccguaagcgugcugu

SEQ ID NO: 2395261 - RNA, 19 nt, Artificial Sequence
  Description of Artificial Sequence: Synthetic oligonucleotide
aacaucgcugcuccaccca

SEQ ID NO: 2395262 - RNA, 19 nt, Artificial Sequence
  Description of Artificial Sequence: Synthetic oligonucleotide
acauccgcuuaacugccag

SEQ ID NO: 2395263 - RNA, 19 nt, Artificial Sequence
  Description of Artificial Sequence: Synthetic oligonucleotide
ugcagggacaugcggaguc

SEQ ID NO: 2395264 - RNA, 19 nt, Artificial Sequence
  Description of Artificial Sequence: Synthetic oligonucleotide
uggagagcacaaaaucaau

SEQ ID NO: 2395265 - RNA, 19 nt, Artificial Sequence
  Description of Artificial Sequence: Synthetic oligonucleotide
ucgugacuucuucaagucu

SEQ ID NO: 2395266 - RNA, 19 nt, Artificial Sequence
  Description of Artificial Sequence: Synthetic oligonucleotide
aucauacauccgcuuaacu

SEQ ID NO: 2395267 - RNA, 19 nt, Artificial Sequence
  Description of Artificial Sequence: Synthetic oligonucleotide
cacagauguccacugcagc

SEQ ID NO: 2395268 - RNA, 19 nt, Artificial Sequence
  Description of Artificial Sequence: Synthetic oligonucleotide
ggcagaauguaucuguguc

SEQ ID NO: 2395269 - RNA, 19 nt, Artificial Sequence
  Description of Artificial Sequence: Synthetic oligonucleotide
augguuugggccggggugg

SEQ ID NO: 2395270 - RNA, 19 nt, Artificial Sequence
  Description of Artificial Sequence: Synthetic oligonucleotide
cacagagaucggcagcccg

SEQ ID NO: 2395271 - RNA, 19 nt, Artificial Sequence
  Description of Artificial Sequence: Synthetic oligonucleotide
gaucauacauccgcuuaac

SEQ ID NO: 2395272 - RNA, 19 nt, Artificial Sequence
  Description of Artificial Sequence: Synthetic oligonucleotide
agcaaagaggaaggccuac

SEQ ID NO: 2395273 - RNA, 19 nt, Artificial Sequence
  Description of Artificial Sequence: Synthetic oligonucleotide
caguuuggcccgcaggaag

SEQ ID NO: 2395274 - RNA, 19 nt, Artificial Sequence
  Description of Artificial Sequence: Synthetic oligonucleotide
cauccaguuuggcucuucc

SEQ ID NO: 2395275 - RNA, 19 nt, Artificial Sequence
  Description of Artificial Sequence: Synthetic oligonucleotide
ggccaagucaagauuuugg

SEQ ID NO: 2395276 - RNA, 19 nt, Artificial Sequence
  Description of Artificial Sequence: Synthetic oligonucleotide
auuuugaggcacagagauc

SEQ ID NO: 2395277 - RNA, 19 nt, Artificial Sequence
  Description of Artificial Sequence: Synthetic oligonucleotide
aagaggcucuugcuuguaa

SEQ ID NO: 2395278 - RNA, 19 nt, Artificial Sequence
  Description of Artificial Sequence: Synthetic oligonucleotide
agucugcaaagaccugcuc

SEQ ID NO: 2395279 - RNA, 19 nt, Artificial Sequence
  Description of Artificial Sequence: Synthetic oligonucleotide
uucaacaguccaggggagc

SEQ ID NO: 2395280 - RNA, 19 nt, Artificial Sequence
  Description of Artificial Sequence: Synthetic oligonucleotide
uaucugugucaaagguaga

SEQ ID NO: 2395281 - RNA, 19 nt, Artificial Sequence
  Description of Artificial Sequence: Synthetic oligonucleotide
agcuccggagcucugcaca

SEQ ID NO: 2395282 - RNA, 19 nt, Artificial Sequence
  Description of Artificial Sequence: Synthetic oligonucleotide
caacaucgcugcuccaccc

SEQ ID NO: 2395283 - RNA, 19 nt, Artificial Sequence
  Description of Artificial Sequence: Synthetic oligonucleotide
uugcccgaucauacauccg

SEQ ID NO: 2395284 - RNA, 19 nt, Artificial Sequence
  Description of Artificial Sequence: Synthetic oligonucleotide
agucugugggaagagucug

SEQ ID NO: 2395285 - RNA, 19 nt, Artificial Sequence
  Description of Artificial Sequence: Synthetic oligonucleotide
auagaggggaggaggaaca

SEQ ID NO: 2395286 - RNA, 19 nt, Artificial Sequence
  Description of Artificial Sequence: Synthetic oligonucleotide
gcaaagaccugcucaggcc

SEQ ID NO: 2395287 - RNA, 19 nt, Artificial Sequence
  Description of Artificial Sequence: Synthetic oligonucleotide
uacuuacgagaaaggcaga

SEQ ID NO: 2395288 - RNA, 19 nt, Artificial Sequence
  Description of Artificial Sequence: Synthetic oligonucleotide
cauccgcuuaacugccagg

SEQ ID NO: 2395289 - RNA, 19 nt, Artificial Sequence
  Description of Artificial Sequence: Synthetic oligonucleotide
agaucggcagcccgaguca

SEQ ID NO: 2395290 - RNA, 19 nt, Artificial Sequence
  Description of Artificial Sequence: Synthetic oligonucleotide
ccuuguucaacaguccagg

SEQ ID NO: 2395291 - RNA, 19 nt, Artificial Sequence
  Description of Artificial Sequence: Synthetic oligonucleotide
ugguaggagcacugauugc

SEQ ID NO: 2395292 - RNA, 19 nt, Artificial Sequence
  Description of Artificial Sequence: Synthetic oligonucleotide
caugugauagaggggagga

SEQ ID NO: 2395293 - RNA, 19 nt, Artificial Sequence
  Description of Artificial Sequence: Synthetic oligonucleotide
uuccgguaguaagaaagaa

SEQ ID NO: 2395294 - RNA, 19 nt, Artificial Sequence
  Description of Artificial Sequence: Synthetic oligonucleotide
augcccaacaucgcugcuc

SEQ ID NO: 2395295 - RNA, 19 nt, Artificial Sequence
  Description of Artificial Sequence: Synthetic oligonucleotide
gauugcccgaucauacauc

SEQ ID NO: 2395296 - RNA, 19 nt, Artificial Sequence
  Description of Artificial Sequence: Synthetic oligonucleotide
ucggcagcccgagucagcc

SEQ ID NO: 2395297 - RNA, 19 nt, Artificial Sequence
  Description of Artificial Sequence: Synthetic oligonucleotide
gucuuugacaugugauaga

SEQ ID NO: 2395298 - RNA, 19 nt, Artificial Sequence
  Description of Artificial Sequence: Synthetic oligonucleotide
uccggagcucugcacagau

SEQ ID NO: 2395299 - RNA, 19 nt, Artificial Sequence
  Description of Artificial Sequence: Synthetic oligonucleotide
aaagaccugcucaggccug

SEQ ID NO: 2395300 - RNA, 19 nt, Artificial Sequence
  Description of Artificial Sequence: Synthetic oligonucleotide
cgugcugucaggcaguuug

SEQ ID NO: 2395301 - RNA, 19 nt, Artificial Sequence
  Description of Artificial Sequence: Synthetic oligonucleotide
guaagauggccaagucaag

SEQ ID NO: 2395302 - RNA, 19 nt, Artificial Sequence
  Description of Artificial Sequence: Synthetic oligonucleotide
guaggagcacugauugccc

SEQ ID NO: 2395303 - RNA, 19 nt, Artificial Sequence
  Description of Artificial Sequence: Synthetic oligonucleotide
agcauuuggccaccuccca

SEQ ID NO: 2395304 - RNA, 19 nt, Artificial Sequence
  Description of Artificial Sequence: Synthetic oligonucleotide
gaagcuccggagcucugca

SEQ ID NO: 2395305 - RNA, 19 nt, Artificial Sequence
  Description of Artificial Sequence: Synthetic oligonucleotide
uccgcuuaacugccagggu

SEQ ID NO: 2395306 - RNA, 19 nt, Artificial Sequence
  Description of Artificial Sequence: Synthetic oligonucleotide
ugcuuguaagauggccaag

SEQ ID NO: 2395307 - RNA, 19 nt, Artificial Sequence
  Description of Artificial Sequence: Synthetic oligonucleotide
uggccaagucaagauuuug

SEQ ID NO: 2395308 - RNA, 19 nt, Artificial Sequence
  Description of Artificial Sequence: Synthetic oligonucleotide
cagaauguaucugugucaa

SEQ ID NO: 2395309 - RNA, 19 nt, Artificial Sequence
  Description of Artificial Sequence: Synthetic oligonucleotide
gguggcaaugcccaacauc

SEQ ID NO: 2395310 - RNA, 19 nt, Artificial Sequence
  Description of Artificial Sequence: Synthetic oligonucleotide
cuccucuucccagaauggc

SEQ ID NO: 2395311 - RNA, 19 nt, Artificial Sequence
  Description of Artificial Sequence: Synthetic oligonucleotide
cuaccuggccccuccuggc

SEQ ID NO: 2395312 - RNA, 19 nt, Artificial Sequence
  Description of Artificial Sequence: Synthetic oligonucleotide
gguaguaagaaagaaguuu

SEQ ID NO: 2395313 - RNA, 19 nt, Artificial Sequence
  Description of Artificial Sequence: Synthetic oligonucleotide
aggagcacugauugcccga

SEQ ID NO: 2395314 - RNA, 19 nt, Artificial Sequence
  Description of Artificial Sequence: Synthetic oligonucleotide
uccauccaagcaucccaga

SEQ ID NO: 2395315 - RNA, 19 nt, Artificial Sequence
  Description of Artificial Sequence: Synthetic oligonucleotide
gauggccaagucaagauuu

SEQ ID NO: 2395316 - RNA, 19 nt, Artificial Sequence
  Description of Artificial Sequence: Synthetic oligonucleotide
uuugggccggggugggcag

SEQ ID NO: 2395317 - RNA, 19 nt, Artificial Sequence
  Description of Artificial Sequence: Synthetic oligonucleotide
uacauccgcuuaacugcca

SEQ ID NO: 2395318 - RNA, 19 nt, Artificial Sequence
  Description of Artificial Sequence: Synthetic oligonucleotide
aacaagcccacaggacaga

SEQ ID NO: 2395319 - RNA, 19 nt, Artificial Sequence
  Description of Artificial Sequence: Synthetic oligonucleotide
acuuuaugacaaagaaaau

SEQ ID NO: 2395320 - RNA, 19 nt, Artificial Sequence
  Description of Artificial Sequence: Synthetic oligonucleotide
ggcauuggagagcacaaaa

SEQ ID NO: 2395321 - RNA, 19 nt, Artificial Sequence
  Description of Artificial Sequence: Synthetic oligonucleotide
ucccauacuuuaugacaaa

SEQ ID NO: 2395322 - RNA, 19 nt, Artificial Sequence
  Description of Artificial Sequence: Synthetic oligonucleotide
gcugucaggcaguuuggcc

SEQ ID NO: 2395323 - RNA, 19 nt, Artificial Sequence
  Description of Artificial Sequence: Synthetic oligonucleotide
uaccuggccccuccuggcc

SEQ ID NO: 2395324 - RNA, 19 nt, Artificial Sequence
  Description of Artificial Sequence: Synthetic oligonucleotide
guaagcgugcugucaggca

SEQ ID NO: 2395325 - RNA, 19 nt, Artificial Sequence
  Description of Artificial Sequence: Synthetic oligonucleotide
cccagcuaaucaacaagcc

SEQ ID NO: 2395326 - RNA, 19 nt, Artificial Sequence
  Description of Artificial Sequence: Synthetic oligonucleotide
ccgguaguaagaaagaagu

SEQ ID NO: 2395327 - RNA, 19 nt, Artificial Sequence
  Description of Artificial Sequence: Synthetic oligonucleotide
guuccgguaguaagaaaga

SEQ ID NO: 2395328 - RNA, 19 nt, Artificial Sequence
  Description of Artificial Sequence: Synthetic oligonucleotide
uuuggccaccucccauacu

SEQ ID NO: 2395329 - RNA, 19 nt, Artificial Sequence
  Description of Artificial Sequence: Synthetic oligonucleotide
cucuugcuuguaagauggc

SEQ ID NO: 2395330 - RNA, 19 nt, Artificial Sequence
  Description of Artificial Sequence: Synthetic oligonucleotide
gacuucuaagaggcucuug

SEQ ID NO: 2395331 - RNA, 19 nt, Artificial Sequence
  Description of Artificial Sequence: Synthetic oligonucleotide
acugguaggagcacugauu

SEQ ID NO: 2395332 - RNA, 19 nt, Artificial Sequence
  Description of Artificial Sequence: Synthetic oligonucleotide
caagcccacaggacagaac

SEQ ID NO: 2395333 - RNA, 19 nt, Artificial Sequence
  Description of Artificial Sequence: Synthetic oligonucleotide
aucuuagcagcaagguggu

SEQ ID NO: 2395334 - RNA, 19 nt, Artificial Sequence
  Description of Artificial Sequence: Synthetic oligonucleotide
gaucggcagcccgagucag

SEQ ID NO: 2395335 - RNA, 19 nt, Artificial Sequence
  Description of Artificial Sequence: Synthetic oligonucleotide
acaugcggagucgugacuu

SEQ ID NO: 2395336 - RNA, 19 nt, Artificial Sequence
  Description of Artificial Sequence: Synthetic oligonucleotide
ugauagaggggaggaggaa

SEQ ID NO: 2395337 - RNA, 19 nt, Artificial Sequence
  Description of Artificial Sequence: Synthetic oligonucleotide
caaagaccugcucaggccu

SEQ ID NO: 2395338 - RNA, 19 nt, Artificial Sequence
  Description of Artificial Sequence: Synthetic oligonucleotide
ccucccauacuuuaugaca

SEQ ID NO: 2395339 - RNA, 19 nt, Artificial Sequence
  Description of Artificial Sequence: Synthetic oligonucleotide
acagagaucggcagcccga

SEQ ID NO: 2395340 - RNA, 19 nt, Artificial Sequence
  Description of Artificial Sequence: Synthetic oligonucleotide
cugcaaagaccugcucagg

SEQ ID NO: 2395341 - RNA, 19 nt, Artificial Sequence
  Description of Artificial Sequence: Synthetic oligonucleotide
cugauugcccgaucauaca

SEQ ID NO: 2395342 - RNA, 19 nt, Artificial Sequence
  Description of Artificial Sequence: Synthetic oligonucleotide
agcccguaagcgugcuguc

SEQ ID NO: 2395343 - RNA, 19 nt, Artificial Sequence
  Description of Artificial Sequence: Synthetic oligonucleotide
aacugccaggguggcaaug

SEQ ID NO: 2395344 - RNA, 19 nt, Artificial Sequence
  Description of Artificial Sequence: Synthetic oligonucleotide
ggaaggccuacccagcuaa

SEQ ID NO: 2395345 - RNA, 19 nt, Artificial Sequence
  Description of Artificial Sequence: Synthetic oligonucleotide
cagcccgggcauuggagag

SEQ ID NO: 2395346 - RNA, 19 nt, Artificial Sequence
  Description of Artificial Sequence: Synthetic oligonucleotide
cauuuggccaccucccaua

SEQ ID NO: 2395347 - RNA, 19 nt, Artificial Sequence
  Description of Artificial Sequence: Synthetic oligonucleotide
aagaccugcucaggccugu

SEQ ID NO: 2395348 - RNA, 19 nt, Artificial Sequence
  Description of Artificial Sequence: Synthetic oligonucleotide
gcacaguccaaagucaauc

SEQ ID NO: 2395349 - RNA, 19 nt, Artificial Sequence
  Description of Artificial Sequence: Synthetic oligonucleotide
ggcagcccgagucagccug

SEQ ID NO: 2395350 - RNA, 19 nt, Artificial Sequence
  Description of Artificial Sequence: Synthetic oligonucleotide
ccgcuuaacugccagggug

SEQ ID NO: 2395351 - RNA, 19 nt, Artificial Sequence
  Description of Artificial Sequence: Synthetic oligonucleotide
gggucuuugacaugugaua

SEQ ID NO: 2395352 - RNA, 19 nt, Artificial Sequence
  Description of Artificial Sequence: Synthetic oligonucleotide
caccucccauacuuuauga

SEQ ID NO: 2395353 - RNA, 19 nt, Artificial Sequence
  Description of Artificial Sequence: Synthetic oligonucleotide
ccaacaucgcugcuccacc

SEQ ID NO: 2395354 - RNA, 19 nt, Artificial Sequence
  Description of Artificial Sequence: Synthetic oligonucleotide
cagagaucggcagcccgag

SEQ ID NO: 2395355 - RNA, 19 nt, Artificial Sequence
  Description of Artificial Sequence: Synthetic oligonucleotide
gugcugucaggcaguuugg

SEQ ID NO: 2395356 - RNA, 19 nt, Artificial Sequence
  Description of Artificial Sequence: Synthetic oligonucleotide
ggacaugcggagucgugac

SEQ ID NO: 2395357 - RNA, 19 nt, Artificial Sequence
  Description of Artificial Sequence: Synthetic oligonucleotide
uguccacugcagcuugcuu

SEQ ID NO: 2395358 - RNA, 19 nt, Artificial Sequence
  Description of Artificial Sequence: Synthetic oligonucleotide
cugggucuuugacauguga

SEQ ID NO: 2395359 - RNA, 19 nt, Artificial Sequence
  Description of Artificial Sequence: Synthetic oligonucleotide
caugcggagucgugacuuc

SEQ ID NO: 2395360 - RNA, 19 nt, Artificial Sequence
  Description of Artificial Sequence: Synthetic oligonucleotide
aagcgugcugucaggcagu

SEQ ID NO: 2395361 - RNA, 19 nt, Artificial Sequence
  Description of Artificial Sequence: Synthetic oligonucleotide
aguggcggggcagccacug

SEQ ID NO: 2395362 - RNA, 19 nt, Artificial Sequence
  Description of Artificial Sequence: Synthetic oligonucleotide
cccguaagcgugcugucag

SEQ ID NO: 2395363 - RNA, 19 nt, Artificial Sequence
  Description of Artificial Sequence: Synthetic oligonucleotide
gccaagucaagauuuuggu

SEQ ID NO: 2395364 - RNA, 19 nt, Artificial Sequence
  Description of Artificial Sequence: Synthetic oligonucleotide
guccaaagcccguaagcgu

SEQ ID NO: 2395365 - RNA, 19 nt, Artificial Sequence
  Description of Artificial Sequence: Synthetic oligonucleotide
ucuuagcagcaagguggug

SEQ ID NO: 2395366 - RNA, 19 nt, Artificial Sequence
  Description of Artificial Sequence: Synthetic oligonucleotide
aucggcagcccgagucagc

SEQ ID NO: 2395367 - RNA, 19 nt, Artificial Sequence
  Description of Artificial Sequence: Synthetic oligonucleotide
gagucugugggaagagucu

SEQ ID NO: 2395368 - RNA, 19 nt, Artificial Sequence
  Description of Artificial Sequence: Synthetic oligonucleotide
caaagguagaggagucugu

SEQ ID NO: 2395369 - RNA, 19 nt, Artificial Sequence
  Description of Artificial Sequence: Synthetic oligonucleotide
guuugggccggggugggca

SEQ ID NO: 2395370 - RNA, 19 nt, Artificial Sequence
  Description of Artificial Sequence: Synthetic oligonucleotide
cuaagaggcucuugcuugu

SEQ ID NO: 2395371 - RNA, 19 nt, Artificial Sequence
  Description of Artificial Sequence: Synthetic oligonucleotide
ccaaagcccguaagcgugc

SEQ ID NO: 2395372 - RNA, 19 nt, Artificial Sequence
  Description of Artificial Sequence: Synthetic oligonucleotide
agagaucggcagcccgagu

SEQ ID NO: 2395373 - RNA, 19 nt, Artificial Sequence
  Description of Artificial Sequence: Synthetic oligonucleotide
gcccgguuccgguaguaag

SEQ ID NO: 2395374 - RNA, 19 nt, Artificial Sequence
  Description of Artificial Sequence: Synthetic oligonucleotide
ggcaaugcccaacaucgcu

SEQ ID NO: 2395375 - RNA, 19 nt, Artificial Sequence
  Description of Artificial Sequence: Synthetic oligonucleotide
cuuacgagaaaggcagagu

SEQ ID NO: 2395376 - RNA, 19 nt, Artificial Sequence
  Description of Artificial Sequence: Synthetic oligonucleotide
agucuaccuggccccuccu

SEQ ID NO: 2395377 - RNA, 19 nt, Artificial Sequence
  Description of Artificial Sequence: Synthetic oligonucleotide
cacugggucuuugacaugu

SEQ ID NO: 2395378 - RNA, 19 nt, Artificial Sequence
  Description of Artificial Sequence: Synthetic oligonucleotide
ccuacccagcuaaucaaca

SEQ ID NO: 2395379 - RNA, 19 nt, Artificial Sequence
  Description of Artificial Sequence: Synthetic oligonucleotide
augcggagucgugacuucu

SEQ ID NO: 2395380 - RNA, 19 nt, Artificial Sequence
  Description of Artificial Sequence: Synthetic oligonucleotide
uaacugccaggguggcaau

SEQ ID NO: 2395381 - RNA, 19 nt, Artificial Sequence
  Description of Artificial Sequence: Synthetic oligonucleotide
cucaggccugucuucauau

SEQ ID NO: 2395382 - RNA, 19 nt, Artificial Sequence
  Description of Artificial Sequence: Synthetic oligonucleotide
gcuuguaagauggccaagu

SEQ ID NO: 2395383 - RNA, 19 nt, Artificial Sequence
  Description of Artificial Sequence: Synthetic oligonucleotide
ugcucaggccugucuucau

SEQ ID NO: 2395384 - RNA, 19 nt, Artificial Sequence
  Description of Artificial Sequence: Synthetic oligonucleotide
gacaugcggagucgugacu

SEQ ID NO: 2395385 - RNA, 19 nt, Artificial Sequence
  Description of Artificial Sequence: Synthetic oligonucleotide
ggggugggcagaauguauc

SEQ ID NO: 2395386 - RNA, 19 nt, Artificial Sequence
  Description of Artificial Sequence: Synthetic oligonucleotide
gagcacugauugcccgauc

SEQ ID NO: 2395387 - RNA, 19 nt, Artificial Sequence
  Description of Artificial Sequence: Synthetic oligonucleotide
cuuaacugccaggguggca

SEQ ID NO: 2395388 - RNA, 19 nt, Artificial Sequence
  Description of Artificial Sequence: Synthetic oligonucleotide
cacugauugcccgaucaua

SEQ ID NO: 2395389 - RNA, 19 nt, Artificial Sequence
  Description of Artificial Sequence: Synthetic oligonucleotide
ggccggggugggcagaaug

SEQ ID NO: 2395390 - RNA, 19 nt, Artificial Sequence
  Description of Artificial Sequence: Synthetic oligonucleotide
gucaaagguagaggagucu

SEQ ID NO: 2395391 - RNA, 19 nt, Artificial Sequence
  Description of Artificial Sequence: Synthetic oligonucleotide
cccaacaucgcugcuccac

SEQ ID NO: 2395392 - RNA, 19 nt, Artificial Sequence
  Description of Artificial Sequence: Synthetic oligonucleotide
caucgcugcuccacccaca

SEQ ID NO: 2395393 - RNA, 19 nt, Artificial Sequence
  Description of Artificial Sequence: Synthetic oligonucleotide
gguggccuugaggauuuug

SEQ ID NO: 2395394 - RNA, 19 nt, Artificial Sequence
  Description of Artificial Sequence: Synthetic oligonucleotide
ggccuacccagcuaaucaa

SEQ ID NO: 2395395 - RNA, 19 nt, Artificial Sequence
  Description of Artificial Sequence: Synthetic oligonucleotide
gggaguuacuuacgagaaa

SEQ ID NO: 2395396 - RNA, 19 nt, Artificial Sequence
  Description of Artificial Sequence: Synthetic oligonucleotide
guccaggggagcccaucca

SEQ ID NO: 2395397 - RNA, 19 nt, Artificial Sequence
  Description of Artificial Sequence: Synthetic oligonucleotide
cguaagcgugcugucaggc

SEQ ID NO: 2395398 - RNA, 19 nt, Artificial Sequence
  Description of Artificial Sequence: Synthetic oligonucleotide
ccguaagcgugcugucagg

SEQ ID NO: 2395399 - RNA, 19 nt, Artificial Sequence
  Description of Artificial Sequence: Synthetic oligonucleotide
auggccaagucaagauuuu

SEQ ID NO: 2395400 - RNA, 19 nt, Artificial Sequence
  Description of Artificial Sequence: Synthetic oligonucleotide
caagcaucccagagcauuu

SEQ ID NO: 2395401 - RNA, 19 nt, Artificial Sequence
  Description of Artificial Sequence: Synthetic oligonucleotide
ugcccgguuccgguaguaa

SEQ ID NO: 2395402 - RNA, 19 nt, Artificial Sequence
  Description of Artificial Sequence: Synthetic oligonucleotide
gcuuaacugccaggguggc

SEQ ID NO: 2395403 - RNA, 19 nt, Artificial Sequence
  Description of Artificial Sequence: Synthetic oligonucleotide
ccuggccaaugguuugggc

SEQ ID NO: 2395404 - RNA, 19 nt, Artificial Sequence
  Description of Artificial Sequence: Synthetic oligonucleotide
ggccaaugguuugggccgg

SEQ ID NO: 2395405 - RNA, 19 nt, Artificial Sequence
  Description of Artificial Sequence: Synthetic oligonucleotide
cccgguuccgguaguaaga

SEQ ID NO: 2395406 - RNA, 19 nt, Artificial Sequence
  Description of Artificial Sequence: Synthetic oligonucleotide
gccuacccagcuaaucaac

SEQ ID NO: 2395407 - RNA, 19 nt, Artificial Sequence
  Description of Artificial Sequence: Synthetic oligonucleotide
ccgaucauacauccgcuua

SEQ ID NO: 2395408 - RNA, 19 nt, Artificial Sequence
  Description of Artificial Sequence: Synthetic oligonucleotide
gggagcccauccaguuugg

SEQ ID NO: 2395409 - RNA, 19 nt, Artificial Sequence
  Description of Artificial Sequence: Synthetic oligonucleotide
cgaucauacauccgcuuaa

SEQ ID NO: 2395410 - RNA, 19 nt, Artificial Sequence
  Description of Artificial Sequence: Synthetic oligonucleotide
uggccccuccuggccaaug

SEQ ID NO: 2395411 - RNA, 19 nt, Artificial Sequence
  Description of Artificial Sequence: Synthetic oligonucleotide
gcuaaucaacaagcccaca

SEQ ID NO: 2395412 - RNA, 19 nt, Artificial Sequence
  Description of Artificial Sequence: Synthetic oligonucleotide
ggagcccauccaguuuggc

SEQ ID NO: 2395413 - RNA, 19 nt, Artificial Sequence
  Description of Artificial Sequence: Synthetic oligonucleotide
cagcaaggugguggccuug

SEQ ID NO: 2395414 - RNA, 19 nt, Artificial Sequence
  Description of Artificial Sequence: Synthetic oligonucleotide
ugggccggggugggcagaa

SEQ ID NO: 2395415 - RNA, 19 nt, Artificial Sequence
  Description of Artificial Sequence: Synthetic oligonucleotide
ccagcccgggcauuggaga

SEQ ID NO: 2395416 - RNA, 19 nt, Artificial Sequence
  Description of Artificial Sequence: Synthetic oligonucleotide
cucaggcgggugggacugg

SEQ ID NO: 2395417 - RNA, 19 nt, Artificial Sequence
  Description of Artificial Sequence: Synthetic oligonucleotide
guuuggcccgcaggaagcu

SEQ ID NO: 2395418 - RNA, 19 nt, Artificial Sequence
  Description of Artificial Sequence: Synthetic oligonucleotide
uugggccggggugggcaga

SEQ ID NO: 2395419 - RNA, 19 nt, Artificial Sequence
  Description of Artificial Sequence: Synthetic oligonucleotide
caccagcccgggcauugga

SEQ ID NO: 2395420 - RNA, 19 nt, Artificial Sequence
  Description of Artificial Sequence: Synthetic oligonucleotide
agcgugcugucaggcaguu

SEQ ID NO: 2395421 - RNA, 19 nt, Artificial Sequence
  Description of Artificial Sequence: Synthetic oligonucleotide
gcauuuggccaccucccau

SEQ ID NO: 2395422 - RNA, 19 nt, Artificial Sequence
  Description of Artificial Sequence: Synthetic oligonucleotide
cccagagcauuuggccacc

SEQ ID NO: 2395423 - RNA, 19 nt, Artificial Sequence
  Description of Artificial Sequence: Synthetic oligonucleotide
ccggagcucugcacagaug

SEQ ID NO: 2395424 - RNA, 19 nt, Artificial Sequence
  Description of Artificial Sequence: Synthetic oligonucleotide
cuccacccacacccagcca

SEQ ID NO: 2395425 - RNA, 19 nt, Artificial Sequence
  Description of Artificial Sequence: Synthetic oligonucleotide
gaaggccuacccagcuaau

SEQ ID NO: 2395426 - RNA, 19 nt, Artificial Sequence
  Description of Artificial Sequence: Synthetic oligonucleotide
ggcccgagccugcucucca

SEQ ID NO: 2395427 - RNA, 19 nt, Artificial Sequence
  Description of Artificial Sequence: Synthetic oligonucleotide
gggcauuggagagcacaaa

SEQ ID NO: 2395428 - RNA, 19 nt, Artificial Sequence
  Description of Artificial Sequence: Synthetic oligonucleotide
cuccggagcucugcacaga

SEQ ID NO: 2395429 - RNA, 19 nt, Artificial Sequence
  Description of Artificial Sequence: Synthetic oligonucleotide
gcccguaagcgugcuguca

SEQ ID NO: 2395430 - RNA, 19 nt, Artificial Sequence
  Description of Artificial Sequence: Synthetic oligonucleotide
cggagucgugacuucuuca

SEQ ID NO: 2395431 - RNA, 19 nt, Artificial Sequence
  Description of Artificial Sequence: Synthetic oligonucleotide
gcccauccaguuuggcucu

SEQ ID NO: 2395432 - RNA, 19 nt, Artificial Sequence
  Description of Artificial Sequence: Synthetic oligonucleotide
gcacugauugcccgaucau

SEQ ID NO: 2395433 - RNA, 19 nt, Artificial Sequence
  Description of Artificial Sequence: Synthetic oligonucleotide
ccgguuccgguaguaagaa

SEQ ID NO: 2395434 - RNA, 19 nt, Artificial Sequence
  Description of Artificial Sequence: Synthetic oligonucleotide
caggcgggugggacuggua

SEQ ID NO: 2395435 - RNA, 19 nt, Artificial Sequence
  Description of Artificial Sequence: Synthetic oligonucleotide
gcccgaucauacauccgcu

SEQ ID NO: 2395436 - RNA, 19 nt, Artificial Sequence
  Description of Artificial Sequence: Synthetic oligonucleotide
gcccaacaucgcugcucca

SEQ ID NO: 2395437 - RNA, 19 nt, Artificial Sequence
  Description of Artificial Sequence: Synthetic oligonucleotide
cugcccgguuccgguagua

SEQ ID NO: 2395438 - RNA, 19 nt, Artificial Sequence
  Description of Artificial Sequence: Synthetic oligonucleotide
cccgaucauacauccgcuu

SEQ ID NO: 2395439 - RNA, 19 nt, Artificial Sequence
  Description of Artificial Sequence: Synthetic oligonucleotide
gaguggcggggcagccacu

SEQ ID NO: 2395440 - RNA, 19 nt, Artificial Sequence
  Description of Artificial Sequence: Synthetic oligonucleotide
gcugcccgguuccgguagu

SEQ ID NO: 2395441 - RNA, 19 nt, Artificial Sequence
  Description of Artificial Sequence: Synthetic oligonucleotide
ccggggugggcagaaugua

SEQ ID NO: 2395442 - RNA, 19 nt, Artificial Sequence
  Description of Artificial Sequence: Synthetic oligonucleotide
cgguuccgguaguaagaaa

SEQ ID NO: 2395443 - RNA, 19 nt, Artificial Sequence
  Description of Artificial Sequence: Synthetic oligonucleotide
cgagucagccugguccaaa

SEQ ID NO: 2395444 - RNA, 19 nt, Artificial Sequence
  Description of Artificial Sequence: Synthetic oligonucleotide
ccagagcauuuggccaccu

SEQ ID NO: 2395445 - RNA, 19 nt, Artificial Sequence
  Description of Artificial Sequence: Synthetic oligonucleotide
ccgagucagccugguccaa

SEQ ID NO: 2395446 - RNA, 19 nt, Artificial Sequence
  Description of Artificial Sequence: Synthetic oligonucleotide
cuggccccuccuggccaau

SEQ ID NO: 2395447 - RNA, 19 nt, Artificial Sequence
  Description of Artificial Sequence: Synthetic oligonucleotide
gcgugcugucaggcaguuu

SEQ ID NO: 2395448 - RNA, 19 nt, Artificial Sequence
  Description of Artificial Sequence: Synthetic oligonucleotide
cggcagcccgagucagccu

SEQ ID NO: 2395449 - RNA, 19 nt, Artificial Sequence
  Description of Artificial Sequence: Synthetic oligonucleotide
gggccggggugggcagaau

SEQ ID NO: 2395450 - RNA, 19 nt, Artificial Sequence
  Description of Artificial Sequence: Synthetic oligonucleotide
cccauccaguuuggcucuu

SEQ ID NO: 2395451 - RNA, 19 nt, Artificial Sequence
  Description of Artificial Sequence: Synthetic oligonucleotide
aauaauacucccuacauuc

SEQ ID NO: 2395452 - RNA, 19 nt, Artificial Sequence
  Description of Artificial Sequence: Synthetic oligonucleotide
uuuuaaaccaauaauacuc

SEQ ID NO: 2395453 - RNA, 19 nt, Artificial Sequence
  Description of Artificial Sequence: Synthetic oligonucleotide
uguucuuacuaaaagacca

SEQ ID NO: 2395454 - RNA, 19 nt, Artificial Sequence
  Description of Artificial Sequence: Synthetic oligonucleotide
aacaucacagcuaaaugcc

SEQ ID NO: 2395455 - RNA, 19 nt, Artificial Sequence
  Description of Artificial Sequence: Synthetic oligonucleotide
auuuacuggaccuaaaugu

SEQ ID NO: 2395456 - RNA, 19 nt, Artificial Sequence
  Description of Artificial Sequence: Synthetic oligonucleotide
aauaaauccuggugcgacc

SEQ ID NO: 2395457 - RNA, 19 nt, Artificial Sequence
  Description of Artificial Sequence: Synthetic oligonucleotide
uuuaaaccaauaauacucc

SEQ ID NO: 2395458 - RNA, 19 nt, Artificial Sequence
  Description of Artificial Sequence: Synthetic oligonucleotide
aauuuacuggaccuaaaug

SEQ ID NO: 2395459 - RNA, 19 nt, Artificial Sequence
  Description of Artificial Sequence: Synthetic oligonucleotide
auuuugaacauccuguucu

SEQ ID NO: 2395460 - RNA, 19 nt, Artificial Sequence
  Description of Artificial Sequence: Synthetic oligonucleotide
ucuguuaauaccagcugcg

SEQ ID NO: 2395461 - RNA, 19 nt, Artificial Sequence
  Description of Artificial Sequence: Synthetic oligonucleotide
aaccgcaccgacuuugucc

SEQ ID NO: 2395462 - RNA, 19 nt, Artificial Sequence
  Description of Artificial Sequence: Synthetic oligonucleotide
aaaugucacucauagauau

SEQ ID NO: 2395463 - RNA, 19 nt, Artificial Sequence
  Description of Artificial Sequence: Synthetic oligonucleotide
gauaugauggccuaauuaa

SEQ ID NO: 2395464 - RNA, 19 nt, Artificial Sequence
  Description of Artificial Sequence: Synthetic oligonucleotide
uauggugacucuaaaagaa

SEQ ID NO: 2395465 - RNA, 19 nt, Artificial Sequence
  Description of Artificial Sequence: Synthetic oligonucleotide
aauaccagcugcguuuacc

SEQ ID NO: 2395466 - RNA, 19 nt, Artificial Sequence
  Description of Artificial Sequence: Synthetic oligonucleotide
aaacacaaccgcaugugcc

SEQ ID NO: 2395467 - RNA, 19 nt, Artificial Sequence
  Description of Artificial Sequence: Synthetic oligonucleotide
accacauuuacucugauuu

SEQ ID NO: 2395468 - RNA, 19 nt, Artificial Sequence
  Description of Artificial Sequence: Synthetic oligonucleotide
aucgugaaaacccaaugag

SEQ ID NO: 2395469 - RNA, 19 nt, Artificial Sequence
  Description of Artificial Sequence: Synthetic oligonucleotide
uuaacagaaaacuguguac

SEQ ID NO: 2395470 - RNA, 19 nt, Artificial Sequence
  Description of Artificial Sequence: Synthetic oligonucleotide
ucuuacuaaaagaccaucu

SEQ ID NO: 2395471 - RNA, 19 nt, Artificial Sequence
  Description of Artificial Sequence: Synthetic oligonucleotide
uauccgugugaauaaaucc

SEQ ID NO: 2395472 - RNA, 19 nt, Artificial Sequence
  Description of Artificial Sequence: Synthetic oligonucleotide
caaguguuuugucauaucc

SEQ ID NO: 2395473 - RNA, 19 nt, Artificial Sequence
  Description of Artificial Sequence: Synthetic oligonucleotide
ucucuaauuagauggugag

SEQ ID NO: 2395474 - RNA, 19 nt, Artificial Sequence
  Description of Artificial Sequence: Synthetic oligonucleotide
aaauuuacuggaccuaaau

SEQ ID NO: 2395475 - RNA, 19 nt, Artificial Sequence
  Description of Artificial Sequence: Synthetic oligonucleotide
uguuuugucauauccgugu

SEQ ID NO: 2395476 - RNA, 19 nt, Artificial Sequence
  Description of Artificial Sequence: Synthetic oligonucleotide
aucacaacagaucaucucu

SEQ ID NO: 2395477 - RNA, 19 nt, Artificial Sequence
  Description of Artificial Sequence: Synthetic oligonucleotide
aaaccaauaauacucccua

SEQ ID NO: 2395478 - RNA, 19 nt, Artificial Sequence
  Description of Artificial Sequence: Synthetic oligonucleotide
gugaauaaauccuggugcg

SEQ ID NO: 2395479 - RNA, 19 nt, Artificial Sequence
  Description of Artificial Sequence: Synthetic oligonucleotide
aaucauuguccucauggca

SEQ ID NO: 2395480 - RNA, 19 nt, Artificial Sequence
  Description of Artificial Sequence: Synthetic oligonucleotide
ucuaauuagauggugaguu

SEQ ID NO: 2395481 - RNA, 19 nt, Artificial Sequence
  Description of Artificial Sequence: Synthetic oligonucleotide
uuguucuuacuaaaagacc

SEQ ID NO: 2395482 - RNA, 19 nt, Artificial Sequence
  Description of Artificial Sequence: Synthetic oligonucleotide
aaccaauaauacucccuac

SEQ ID NO: 2395483 - RNA, 19 nt, Artificial Sequence
  Description of Artificial Sequence: Synthetic oligonucleotide
uaaaagaccaucucuguua

SEQ ID NO: 2395484 - RNA, 19 nt, Artificial Sequence
  Description of Artificial Sequence: Synthetic oligonucleotide
ucuccaaaccucccgagag

SEQ ID NO: 2395485 - RNA, 19 nt, Artificial Sequence
  Description of Artificial Sequence: Synthetic oligonucleotide
accuuauucaccaagcauc

SEQ ID NO: 2395486 - RNA, 19 nt, Artificial Sequence
  Description of Artificial Sequence: Synthetic oligonucleotide
ugaguuguaauccuccauc

SEQ ID NO: 2395487 - RNA, 19 nt, Artificial Sequence
  Description of Artificial Sequence: Synthetic oligonucleotide
aagaaacacaaccgcaugu

SEQ ID NO: 2395488 - RNA, 19 nt, Artificial Sequence
  Description of Artificial Sequence: Synthetic oligonucleotide
cauuagcugggcuacagcc

SEQ ID NO: 2395489 - RNA, 19 nt, Artificial Sequence
  Description of Artificial Sequence: Synthetic oligonucleotide
acaaccagaacaugucccg

SEQ ID NO: 2395490 - RNA, 19 nt, Artificial Sequence
  Description of Artificial Sequence: Synthetic oligonucleotide
guuguaauccuccaucuac

SEQ ID NO: 2395491 - RNA, 19 nt, Artificial Sequence
  Description of Artificial Sequence: Synthetic oligonucleotide
agucagaacuucuaauaag

SEQ ID NO: 2395492 - RNA, 19 nt, Artificial Sequence
  Description of Artificial Sequence: Synthetic oligonucleotide
uuucgugcaaccucuuuag

SEQ ID NO: 2395493 - RNA, 19 nt, Artificial Sequence
  Description of Artificial Sequence: Synthetic oligonucleotide
uugaccuuauucaccaagc

SEQ ID NO: 2395494 - RNA, 19 nt, Artificial Sequence
  Description of Artificial Sequence: Synthetic oligonucleotide
aacacaaccgcaugugcca

SEQ ID NO: 2395495 - RNA, 19 nt, Artificial Sequence
  Description of Artificial Sequence: Synthetic oligonucleotide
uucacgauggauccgcccc

SEQ ID NO: 2395496 - RNA, 19 nt, Artificial Sequence
  Description of Artificial Sequence: Synthetic oligonucleotide
ucuacaaccagaacauguc

SEQ ID NO: 2395497 - RNA, 19 nt, Artificial Sequence
  Description of Artificial Sequence: Synthetic oligonucleotide
ucgugaaaacccaaugagc

SEQ ID NO: 2395498 - RNA, 19 nt, Artificial Sequence
  Description of Artificial Sequence: Synthetic oligonucleotide
accuaaauguuucuccauc

SEQ ID NO: 2395499 - RNA, 19 nt, Artificial Sequence
  Description of Artificial Sequence: Synthetic oligonucleotide
uuaaaccaauaauacuccc

SEQ ID NO: 2395500 - RNA, 19 nt, Artificial Sequence
  Description of Artificial Sequence: Synthetic oligonucleotide
agaccaucucuguuaauac

SEQ ID NO: 2395501 - RNA, 19 nt, Artificial Sequence
  Description of Artificial Sequence: Synthetic oligonucleotide
cuaauuaacagaaaacugu

SEQ ID NO: 2395502 - RNA, 19 nt, Artificial Sequence
  Description of Artificial Sequence: Synthetic oligonucleotide
cucccuacauucacgaugg

SEQ ID NO: 2395503 - RNA, 19 nt, Artificial Sequence
  Description of Artificial Sequence: Synthetic oligonucleotide
ucuuuagcaacaucacagc

SEQ ID NO: 2395504 - RNA, 19 nt, Artificial Sequence
  Description of Artificial Sequence: Synthetic oligonucleotide
uggaccuaaauguuucucc

SEQ ID NO: 2395505 - RNA, 19 nt, Artificial Sequence
  Description of Artificial Sequence: Synthetic oligonucleotide
uuuagcaacaucacagcua

SEQ ID NO: 2395506 - RNA, 19 nt, Artificial Sequence
  Description of Artificial Sequence: Synthetic oligonucleotide
gacucuaaaagaaacacaa

SEQ ID NO: 2395507 - RNA, 19 nt, Artificial Sequence
  Description of Artificial Sequence: Synthetic oligonucleotide
uguucuuuagcaacaucac

SEQ ID NO: 2395508 - RNA, 19 nt, Artificial Sequence
  Description of Artificial Sequence: Synthetic oligonucleotide
augauggccuaauuaacag

SEQ ID NO: 2395509 - RNA, 19 nt, Artificial Sequence
  Description of Artificial Sequence: Synthetic oligonucleotide
uguguacuugaccuuauuc

SEQ ID NO: 2395510 - RNA, 19 nt, Artificial Sequence
  Description of Artificial Sequence: Synthetic oligonucleotide
aaaagaccaucucuguuaa

SEQ ID NO: 2395511 - RNA, 19 nt, Artificial Sequence
  Description of Artificial Sequence: Synthetic oligonucleotide
uggcgcaguacacagacug

SEQ ID NO: 2395512 - RNA, 19 nt, Artificial Sequence
  Description of Artificial Sequence: Synthetic oligonucleotide
aagagguuagugugaagcu

SEQ ID NO: 2395513 - RNA, 19 nt, Artificial Sequence
  Description of Artificial Sequence: Synthetic oligonucleotide
uuugcaugucagcauggag

SEQ ID NO: 2395514 - RNA, 19 nt, Artificial Sequence
  Description of Artificial Sequence: Synthetic oligonucleotide
cuuacuaaaagaccaucuc

SEQ ID NO: 2395515 - RNA, 19 nt, Artificial Sequence
  Description of Artificial Sequence: Synthetic oligonucleotide
uggccuaauuaacagaaaa

SEQ ID NO: 2395516 - RNA, 19 nt, Artificial Sequence
  Description of Artificial Sequence: Synthetic oligonucleotide
ugccuuuuaaaccaauaau

SEQ ID NO: 2395517 - RNA, 19 nt, Artificial Sequence
  Description of Artificial Sequence: Synthetic oligonucleotide
uugccuuuuaaaccaauaa

SEQ ID NO: 2395518 - RNA, 19 nt, Artificial Sequence
  Description of Artificial Sequence: Synthetic oligonucleotide
aagagcuucuccaaaccuc

SEQ ID NO: 2395519 - RNA, 19 nt, Artificial Sequence
  Description of Artificial Sequence: Synthetic oligonucleotide
acucccuacauucacgaug

SEQ ID NO: 2395520 - RNA, 19 nt, Artificial Sequence
  Description of Artificial Sequence: Synthetic oligonucleotide
agcaucacaacagaucauc

SEQ ID NO: 2395521 - RNA, 19 nt, Artificial Sequence
  Description of Artificial Sequence: Synthetic oligonucleotide
acuucuaauaagacacagc

SEQ ID NO: 2395522 - RNA, 19 nt, Artificial Sequence
  Description of Artificial Sequence: Synthetic oligonucleotide
ugaaaacccaaugagcccu

SEQ ID NO: 2395523 - RNA, 19 nt, Artificial Sequence
  Description of Artificial Sequence: Synthetic oligonucleotide
augccaagugguuuccgcc

SEQ ID NO: 2395524 - RNA, 19 nt, Artificial Sequence
  Description of Artificial Sequence: Synthetic oligonucleotide
uaauacucccuacauucac

SEQ ID NO: 2395525 - RNA, 19 nt, Artificial Sequence
  Description of Artificial Sequence: Synthetic oligonucleotide
gaucgugaaaacccaauga

SEQ ID NO: 2395526 - RNA, 19 nt, Artificial Sequence
  Description of Artificial Sequence: Synthetic oligonucleotide
caagcaucacaacagauca

SEQ ID NO: 2395527 - RNA, 19 nt, Artificial Sequence
  Description of Artificial Sequence: Synthetic oligonucleotide
aaugagcccuccuuugcug

SEQ ID NO: 2395528 - RNA, 19 nt, Artificial Sequence
  Description of Artificial Sequence: Synthetic oligonucleotide
ugucauauccgugugaaua

SEQ ID NO: 2395529 - RNA, 19 nt, Artificial Sequence
  Description of Artificial Sequence: Synthetic oligonucleotide
cuucuaauaagacacagcu

SEQ ID NO: 2395530 - RNA, 19 nt, Artificial Sequence
  Description of Artificial Sequence: Synthetic oligonucleotide
uccgugugaauaaauccug

SEQ ID NO: 2395531 - RNA, 19 nt, Artificial Sequence
  Description of Artificial Sequence: Synthetic oligonucleotide
ucuuuagcaagcgaucgug

SEQ ID NO: 2395532 - RNA, 19 nt, Artificial Sequence
  Description of Artificial Sequence: Synthetic oligonucleotide
uaauuagauggugaguugu

SEQ ID NO: 2395533 - RNA, 19 nt, Artificial Sequence
  Description of Artificial Sequence: Synthetic oligonucleotide
uagugugaagcugagauau

SEQ ID NO: 2395534 - RNA, 19 nt, Artificial Sequence
  Description of Artificial Sequence: Synthetic oligonucleotide
uuacucugauuuucuuucg

SEQ ID NO: 2395535 - RNA, 19 nt, Artificial Sequence
  Description of Artificial Sequence: Synthetic oligonucleotide
uagauggugaguuguaauc

SEQ ID NO: 2395536 - RNA, 19 nt, Artificial Sequence
  Description of Artificial Sequence: Synthetic oligonucleotide
gugugaauaaauccuggug

SEQ ID NO: 2395537 - RNA, 19 nt, Artificial Sequence
  Description of Artificial Sequence: Synthetic oligonucleotide
gaaacacaaccgcaugugc

SEQ ID NO: 2395538 - RNA, 19 nt, Artificial Sequence
  Description of Artificial Sequence: Synthetic oligonucleotide
ugggcuacagcccugccga

SEQ ID NO: 2395539 - RNA, 19 nt, Artificial Sequence
  Description of Artificial Sequence: Synthetic oligonucleotide
acuaaaagaccaucucugu

SEQ ID NO: 2395540 - RNA, 19 nt, Artificial Sequence
  Description of Artificial Sequence: Synthetic oligonucleotide
ucgugcaaccucuuuagca

SEQ ID NO: 2395541 - RNA, 19 nt, Artificial Sequence
  Description of Artificial Sequence: Synthetic oligonucleotide
aagaccaucucuguuaaua

SEQ ID NO: 2395542 - RNA, 19 nt, Artificial Sequence
  Description of Artificial Sequence: Synthetic oligonucleotide
uuugucauauccgugugaa

SEQ ID NO: 2395543 - RNA, 19 nt, Artificial Sequence
  Description of Artificial Sequence: Synthetic oligonucleotide
acagaucaucucuaauuag

SEQ ID NO: 2395544 - RNA, 19 nt, Artificial Sequence
  Description of Artificial Sequence: Synthetic oligonucleotide
agauggacucccuaggagu

SEQ ID NO: 2395545 - RNA, 19 nt, Artificial Sequence
  Description of Artificial Sequence: Synthetic oligonucleotide
uggugaguuguaauccucc

SEQ ID NO: 2395546 - RNA, 19 nt, Artificial Sequence
  Description of Artificial Sequence: Synthetic oligonucleotide
auauccgugugaauaaauc

SEQ ID NO: 2395547 - RNA, 19 nt, Artificial Sequence
  Description of Artificial Sequence: Synthetic oligonucleotide
gaauaaauccuggugcgac

SEQ ID NO: 2395548 - RNA, 19 nt, Artificial Sequence
  Description of Artificial Sequence: Synthetic oligonucleotide
auucacgauggauccgccc

SEQ ID NO: 2395549 - RNA, 19 nt, Artificial Sequence
  Description of Artificial Sequence: Synthetic oligonucleotide
gugguuuccgccgagcucg

SEQ ID NO: 2395550 - RNA, 19 nt, Artificial Sequence
  Description of Artificial Sequence: Synthetic oligonucleotide
gaagcugagauaucauauc

SEQ ID NO: 2395551 - RNA, 19 nt, Artificial Sequence
  Description of Artificial Sequence: Synthetic oligonucleotide
gucacucauagauaugaug

SEQ ID NO: 2395552 - RNA, 19 nt, Artificial Sequence
  Description of Artificial Sequence: Synthetic oligonucleotide
guuagugugaagcugagau

SEQ ID NO: 2395553 - RNA, 19 nt, Artificial Sequence
  Description of Artificial Sequence: Synthetic oligonucleotide
aaccagaacaugucccgug

SEQ ID NO: 2395554 - RNA, 19 nt, Artificial Sequence
  Description of Artificial Sequence: Synthetic oligonucleotide
ggugcgaccacauuuacuc

SEQ ID NO: 2395555 - RNA, 19 nt, Artificial Sequence
  Description of Artificial Sequence: Synthetic oligonucleotide
uuucuggcgacgaucgcca

SEQ ID NO: 2395556 - RNA, 19 nt, Artificial Sequence
  Description of Artificial Sequence: Synthetic oligonucleotide
auuagcugggcuacagccc

SEQ ID NO: 2395557 - RNA, 19 nt, Artificial Sequence
  Description of Artificial Sequence: Synthetic oligonucleotide
cgugaaaacccaaugagcc

SEQ ID NO: 2395558 - RNA, 19 nt, Artificial Sequence
  Description of Artificial Sequence: Synthetic oligonucleotide
ugaccuuauucaccaagca

SEQ ID NO: 2395559 - RNA, 19 nt, Artificial Sequence
  Description of Artificial Sequence: Synthetic oligonucleotide
cuacaaccagaacaugucc

SEQ ID NO: 2395560 - RNA, 19 nt, Artificial Sequence
  Description of Artificial Sequence: Synthetic oligonucleotide
ugccaagugguuuccgccg

SEQ ID NO: 2395561 - RNA, 19 nt, Artificial Sequence
  Description of Artificial Sequence: Synthetic oligonucleotide
acgaucgccagacgguagc

SEQ ID NO: 2395562 - RNA, 19 nt, Artificial Sequence
  Description of Artificial Sequence: Synthetic oligonucleotide
ccuaauuaacagaaaacug

SEQ ID NO: 2395563 - RNA, 19 nt, Artificial Sequence
  Description of Artificial Sequence: Synthetic oligonucleotide
gugacucuaaaagaaacac

SEQ ID NO: 2395564 - RNA, 19 nt, Artificial Sequence
  Description of Artificial Sequence: Synthetic oligonucleotide
uacuggaccuaaauguuuc

SEQ ID NO: 2395565 - RNA, 19 nt, Artificial Sequence
  Description of Artificial Sequence: Synthetic oligonucleotide
cagacgguagcccuucugg

SEQ ID NO: 2395566 - RNA, 19 nt, Artificial Sequence
  Description of Artificial Sequence: Synthetic oligonucleotide
uuagauggugaguuguaau

SEQ ID NO: 2395567 - RNA, 19 nt, Artificial Sequence
  Description of Artificial Sequence: Synthetic oligonucleotide
agcuuugcaugucagcaug

SEQ ID NO: 2395568 - RNA, 19 nt, Artificial Sequence
  Description of Artificial Sequence: Synthetic oligonucleotide
uuagcaagcgaucgugaaa

SEQ ID NO: 2395569 - RNA, 19 nt, Artificial Sequence
  Description of Artificial Sequence: Synthetic oligonucleotide
uuuagcaagcgaucgugaa

SEQ ID NO: 2395570 - RNA, 19 nt, Artificial Sequence
  Description of Artificial Sequence: Synthetic oligonucleotide
aacagaaaacuguguacuu

SEQ ID NO: 2395571 - RNA, 19 nt, Artificial Sequence
  Description of Artificial Sequence: Synthetic oligonucleotide
accgacuuuguccaucuug

SEQ ID NO: 2395572 - RNA, 19 nt, Artificial Sequence
  Description of Artificial Sequence: Synthetic oligonucleotide
cucaagagcuucuccaaac

SEQ ID NO: 2395573 - RNA, 19 nt, Artificial Sequence
  Description of Artificial Sequence: Synthetic oligonucleotide
accagcugcguuuaccaag

SEQ ID NO: 2395574 - RNA, 19 nt, Artificial Sequence
  Description of Artificial Sequence: Synthetic oligonucleotide
ccuacauucacgauggauc

SEQ ID NO: 2395575 - RNA, 19 nt, Artificial Sequence
  Description of Artificial Sequence: Synthetic oligonucleotide
aucacagcuaaaugccaag

SEQ ID NO: 2395576 - RNA, 19 nt, Artificial Sequence
  Description of Artificial Sequence: Synthetic oligonucleotide
ugcgaccacauuuacucug

SEQ ID NO: 2395577 - RNA, 19 nt, Artificial Sequence
  Description of Artificial Sequence: Synthetic oligonucleotide
cacucauagauaugauggc

SEQ ID NO: 2395578 - RNA, 19 nt, Artificial Sequence
  Description of Artificial Sequence: Synthetic oligonucleotide
agaaacacaaccgcaugug

SEQ ID NO: 2395579 - RNA, 19 nt, Artificial Sequence
  Description of Artificial Sequence: Synthetic oligonucleotide
cagaucaucucuaauuaga

SEQ ID NO: 2395580 - RNA, 19 nt, Artificial Sequence
  Description of Artificial Sequence: Synthetic oligonucleotide
cagaacaugucccgugacg

SEQ ID NO: 2395581 - RNA, 19 nt, Artificial Sequence
  Description of Artificial Sequence: Synthetic oligonucleotide
gucagaacuucuaauaaga

SEQ ID NO: 2395582 - RNA, 19 nt, Artificial Sequence
  Description of Artificial Sequence: Synthetic oligonucleotide
ugauggccuaauuaacaga

SEQ ID NO: 2395583 - RNA, 19 nt, Artificial Sequence
  Description of Artificial Sequence: Synthetic oligonucleotide
uguuaauaccagcugcguu

SEQ ID NO: 2395584 - RNA, 19 nt, Artificial Sequence
  Description of Artificial Sequence: Synthetic oligonucleotide
uagcaagcgaucgugaaaa

SEQ ID NO: 2395585 - RNA, 19 nt, Artificial Sequence
  Description of Artificial Sequence: Synthetic oligonucleotide
acagaaaacuguguacuug

SEQ ID NO: 2395586 - RNA, 19 nt, Artificial Sequence
  Description of Artificial Sequence: Synthetic oligonucleotide
auacucccuacauucacga

SEQ ID NO: 2395587 - RNA, 19 nt, Artificial Sequence
  Description of Artificial Sequence: Synthetic oligonucleotide
aagugguuuccgccgagcu

SEQ ID NO: 2395588 - RNA, 19 nt, Artificial Sequence
  Description of Artificial Sequence: Synthetic oligonucleotide
ucacgauggauccgccccg

SEQ ID NO: 2395589 - RNA, 19 nt, Artificial Sequence
  Description of Artificial Sequence: Synthetic oligonucleotide
cguauggugacucuaaaag

SEQ ID NO: 2395590 - RNA, 19 nt, Artificial Sequence
  Description of Artificial Sequence: Synthetic oligonucleotide
ucuuggaccccggacaggc

SEQ ID NO: 2395591 - RNA, 19 nt, Artificial Sequence
  Description of Artificial Sequence: Synthetic oligonucleotide
uaggagucagaacuucuaa

SEQ ID NO: 2395592 - RNA, 19 nt, Artificial Sequence
  Description of Artificial Sequence: Synthetic oligonucleotide
gcaugugccaccucaagag

SEQ ID NO: 2395593 - RNA, 19 nt, Artificial Sequence
  Description of Artificial Sequence: Synthetic oligonucleotide
aaccucuuuagcaagcgau

SEQ ID NO: 2395594 - RNA, 19 nt, Artificial Sequence
  Description of Artificial Sequence: Synthetic oligonucleotide
agaacaugucccgugacgu

SEQ ID NO: 2395595 - RNA, 19 nt, Artificial Sequence
  Description of Artificial Sequence: Synthetic oligonucleotide
agugguuuccgccgagcuc

SEQ ID NO: 2395596 - RNA, 19 nt, Artificial Sequence
  Description of Artificial Sequence: Synthetic oligonucleotide
aucuacaaccagaacaugu

SEQ ID NO: 2395597 - RNA, 19 nt, Artificial Sequence
  Description of Artificial Sequence: Synthetic oligonucleotide
agacgguagcccuucuggg

SEQ ID NO: 2395598 - RNA, 19 nt, Artificial Sequence
  Description of Artificial Sequence: Synthetic oligonucleotide
agaaauuuacuggaccuaa

SEQ ID NO: 2395599 - RNA, 19 nt, Artificial Sequence
  Description of Artificial Sequence: Synthetic oligonucleotide
augagcccuccuuugcugg

SEQ ID NO: 2395600 - RNA, 19 nt, Artificial Sequence
  Description of Artificial Sequence: Synthetic oligonucleotide
gauaucauaucuucaguuu

SEQ ID NO: 2395601 - RNA, 19 nt, Artificial Sequence
  Description of Artificial Sequence: Synthetic oligonucleotide
uccaucuuggaccccggac

SEQ ID NO: 2395602 - RNA, 19 nt, Artificial Sequence
  Description of Artificial Sequence: Synthetic oligonucleotide
gacgguagcccuucugggc

SEQ ID NO: 2395603 - RNA, 19 nt, Artificial Sequence
  Description of Artificial Sequence: Synthetic oligonucleotide
caucacaacagaucaucuc

SEQ ID NO: 2395604 - RNA, 19 nt, Artificial Sequence
  Description of Artificial Sequence: Synthetic oligonucleotide
ucauagauaugauggccua

SEQ ID NO: 2395605 - RNA, 19 nt, Artificial Sequence
  Description of Artificial Sequence: Synthetic oligonucleotide
ugacguauggugacucuaa

SEQ ID NO: 2395606 - RNA, 19 nt, Artificial Sequence
  Description of Artificial Sequence: Synthetic oligonucleotide
uucuccaaaccucccgaga

SEQ ID NO: 2395607 - RNA, 19 nt, Artificial Sequence
  Description of Artificial Sequence: Synthetic oligonucleotide
gcugagauaucauaucuuc

SEQ ID NO: 2395608 - RNA, 19 nt, Artificial Sequence
  Description of Artificial Sequence: Synthetic oligonucleotide
uuacuggaccuaaauguuu

SEQ ID NO: 2395609 - RNA, 19 nt, Artificial Sequence
  Description of Artificial Sequence: Synthetic oligonucleotide
aagaaauuuacuggaccua

SEQ ID NO: 2395610 - RNA, 19 nt, Artificial Sequence
  Description of Artificial Sequence: Synthetic oligonucleotide
aacccaaugagcccuccuu

SEQ ID NO: 2395611 - RNA, 19 nt, Artificial Sequence
  Description of Artificial Sequence: Synthetic oligonucleotide
caucucuguuaauaccagc

SEQ ID NO: 2395612 - RNA, 19 nt, Artificial Sequence
  Description of Artificial Sequence: Synthetic oligonucleotide
aaaccgcaccgacuuuguc

SEQ ID NO: 2395613 - RNA, 19 nt, Artificial Sequence
  Description of Artificial Sequence: Synthetic oligonucleotide
cacagcuaaaugccaagug

SEQ ID NO: 2395614 - RNA, 19 nt, Artificial Sequence
  Description of Artificial Sequence: Synthetic oligonucleotide
uuuccgccgagcucgccgg

SEQ ID NO: 2395615 - RNA, 19 nt, Artificial Sequence
  Description of Artificial Sequence: Synthetic oligonucleotide
ugaauaaauccuggugcga

SEQ ID NO: 2395616 - RNA, 19 nt, Artificial Sequence
  Description of Artificial Sequence: Synthetic oligonucleotide
agguuucuggcgacgaucg

SEQ ID NO: 2395617 - RNA, 19 nt, Artificial Sequence
  Description of Artificial Sequence: Synthetic oligonucleotide
ugcguuuaccaagaaauuu

SEQ ID NO: 2395618 - RNA, 19 nt, Artificial Sequence
  Description of Artificial Sequence: Synthetic oligonucleotide
aacaugucccgugacguau

SEQ ID NO: 2395619 - RNA, 19 nt, Artificial Sequence
  Description of Artificial Sequence: Synthetic oligonucleotide
guuaauaccagcugcguuu

SEQ ID NO: 2395620 - RNA, 19 nt, Artificial Sequence
  Description of Artificial Sequence: Synthetic oligonucleotide
uucuuacuaaaagaccauc

SEQ ID NO: 2395621 - RNA, 19 nt, Artificial Sequence
  Description of Artificial Sequence: Synthetic oligonucleotide
uuagugugaagcugagaua

SEQ ID NO: 2395622 - RNA, 19 nt, Artificial Sequence
  Description of Artificial Sequence: Synthetic oligonucleotide
agagguuagugugaagcug

SEQ ID NO: 2395623 - RNA, 19 nt, Artificial Sequence
  Description of Artificial Sequence: Synthetic oligonucleotide
guuucuggcgacgaucgcc

SEQ ID NO: 2395624 - RNA, 19 nt, Artificial Sequence
  Description of Artificial Sequence: Synthetic oligonucleotide
accgcaccgacuuugucca

SEQ ID NO: 2395625 - RNA, 19 nt, Artificial Sequence
  Description of Artificial Sequence: Synthetic oligonucleotide
aucucuaauuagaugguga

SEQ ID NO: 2395626 - RNA, 19 nt, Artificial Sequence
  Description of Artificial Sequence: Synthetic oligonucleotide
uuggaccccggacaggcca

SEQ ID NO: 2395627 - RNA, 19 nt, Artificial Sequence
  Description of Artificial Sequence: Synthetic oligonucleotide
auccgugugaauaaauccu

SEQ ID NO: 2395628 - RNA, 19 nt, Artificial Sequence
  Description of Artificial Sequence: Synthetic oligonucleotide
acagacuggcccacguugc

SEQ ID NO: 2395629 - RNA, 19 nt, Artificial Sequence
  Description of Artificial Sequence: Synthetic oligonucleotide
ccgacuuuguccaucuugg

SEQ ID NO: 2395630 - RNA, 19 nt, Artificial Sequence
  Description of Artificial Sequence: Synthetic oligonucleotide
cucccuaggagucagaacu

SEQ ID NO: 2395631 - RNA, 19 nt, Artificial Sequence
  Description of Artificial Sequence: Synthetic oligonucleotide
ucacaacagaucaucucua

SEQ ID NO: 2395632 - RNA, 19 nt, Artificial Sequence
  Description of Artificial Sequence: Synthetic oligonucleotide
aaauccuggugcgaccaca

SEQ ID NO: 2395633 - RNA, 19 nt, Artificial Sequence
  Description of Artificial Sequence: Synthetic oligonucleotide
aaacccaaugagcccuccu

SEQ ID NO: 2395634 - RNA, 19 nt, Artificial Sequence
  Description of Artificial Sequence: Synthetic oligonucleotide
uacauucacgauggauccg

SEQ ID NO: 2395635 - RNA, 19 nt, Artificial Sequence
  Description of Artificial Sequence: Synthetic oligonucleotide
aaacuguguacuugaccuu

SEQ ID NO: 2395636 - RNA, 19 nt, Artificial Sequence
  Description of Artificial Sequence: Synthetic oligonucleotide
aacuguguacuugaccuua

SEQ ID NO: 2395637 - RNA, 19 nt, Artificial Sequence
  Description of Artificial Sequence: Synthetic oligonucleotide
aggagucagaacuucuaau

SEQ ID NO: 2395638 - RNA, 19 nt, Artificial Sequence
  Description of Artificial Sequence: Synthetic oligonucleotide
guaauccuccaucuacaac

SEQ ID NO: 2395639 - RNA, 19 nt, Artificial Sequence
  Description of Artificial Sequence: Synthetic oligonucleotide
uucgugcaaccucuuuagc

SEQ ID NO: 2395640 - RNA, 19 nt, Artificial Sequence
  Description of Artificial Sequence: Synthetic oligonucleotide
ucaaguguuuugucauauc

SEQ ID NO: 2395641 - RNA, 19 nt, Artificial Sequence
  Description of Artificial Sequence: Synthetic oligonucleotide
ggcgacgaucgccagacgg

SEQ ID NO: 2395642 - RNA, 19 nt, Artificial Sequence
  Description of Artificial Sequence: Synthetic oligonucleotide
auuuucuuucgugcaaccu

SEQ ID NO: 2395643 - RNA, 19 nt, Artificial Sequence
  Description of Artificial Sequence: Synthetic oligonucleotide
gucauauccgugugaauaa

SEQ ID NO: 2395644 - RNA, 19 nt, Artificial Sequence
  Description of Artificial Sequence: Synthetic oligonucleotide
aauuagauggugaguugua

SEQ ID NO: 2395645 - RNA, 19 nt, Artificial Sequence
  Description of Artificial Sequence: Synthetic oligonucleotide
agaucaucucuaauuagau

SEQ ID NO: 2395646 - RNA, 19 nt, Artificial Sequence
  Description of Artificial Sequence: Synthetic oligonucleotide
ugggccauuagcugggcua

SEQ ID NO: 2395647 - RNA, 19 nt, Artificial Sequence
  Description of Artificial Sequence: Synthetic oligonucleotide
agcaagcgaucgugaaaac

SEQ ID NO: 2395648 - RNA, 19 nt, Artificial Sequence
  Description of Artificial Sequence: Synthetic oligonucleotide
gccaagauggacucccuag

SEQ ID NO: 2395649 - RNA, 19 nt, Artificial Sequence
  Description of Artificial Sequence: Synthetic oligonucleotide
cugggcuacagcccugccg

SEQ ID NO: 2395650 - RNA, 19 nt, Artificial Sequence
  Description of Artificial Sequence: Synthetic oligonucleotide
cccggacaggccaagaugg

SEQ ID NO: 2395651 - RNA, 19 nt, Artificial Sequence
  Description of Artificial Sequence: Synthetic oligonucleotide
aucgccagacgguagcccu

SEQ ID NO: 2395652 - RNA, 19 nt, Artificial Sequence
  Description of Artificial Sequence: Synthetic oligonucleotide
cuucuccaaaccucccgag

SEQ ID NO: 2395653 - RNA, 19 nt, Artificial Sequence
  Description of Artificial Sequence: Synthetic oligonucleotide
auuagauggugaguuguaa

SEQ ID NO: 2395654 - RNA, 19 nt, Artificial Sequence
  Description of Artificial Sequence: Synthetic oligonucleotide
gauggugaguuguaauccu

SEQ ID NO: 2395655 - RNA, 19 nt, Artificial Sequence
  Description of Artificial Sequence: Synthetic oligonucleotide
cucauagauaugauggccu

SEQ ID NO: 2395656 - RNA, 19 nt, Artificial Sequence
  Description of Artificial Sequence: Synthetic oligonucleotide
acguauggugacucuaaaa

SEQ ID NO: 2395657 - RNA, 19 nt, Artificial Sequence
  Description of Artificial Sequence: Synthetic oligonucleotide
caggccaagauggacuccc

SEQ ID NO: 2395658 - RNA, 19 nt, Artificial Sequence
  Description of Artificial Sequence: Synthetic oligonucleotide
ccacguugccuuuuaaacc

SEQ ID NO: 2395659 - RNA, 19 nt, Artificial Sequence
  Description of Artificial Sequence: Synthetic oligonucleotide
cccacguugccuuuuaaac

SEQ ID NO: 2395660 - RNA, 19 nt, Artificial Sequence
  Description of Artificial Sequence: Synthetic oligonucleotide
auaauacucccuacauuca

SEQ ID NO: 2395661 - RNA, 19 nt, Artificial Sequence
  Description of Artificial Sequence: Synthetic oligonucleotide
ggagucagaacuucuaaua

SEQ ID NO: 2395662 - RNA, 19 nt, Artificial Sequence
  Description of Artificial Sequence: Synthetic oligonucleotide
uagauaugauggccuaauu

SEQ ID NO: 2395663 - RNA, 19 nt, Artificial Sequence
  Description of Artificial Sequence: Synthetic oligonucleotide
uccucauggcagcuuugca

SEQ ID NO: 2395664 - RNA, 19 nt, Artificial Sequence
  Description of Artificial Sequence: Synthetic oligonucleotide
acuggaccuaaauguuucu

SEQ ID NO: 2395665 - RNA, 19 nt, Artificial Sequence
  Description of Artificial Sequence: Synthetic oligonucleotide
auggugaguuguaauccuc

SEQ ID NO: 2395666 - RNA, 19 nt, Artificial Sequence
  Description of Artificial Sequence: Synthetic oligonucleotide
gcuacagcccugccgaucc

SEQ ID NO: 2395667 - RNA, 19 nt, Artificial Sequence
  Description of Artificial Sequence: Synthetic oligonucleotide
uggugcgaccacauuuacu

SEQ ID NO: 2395668 - RNA, 19 nt, Artificial Sequence
  Description of Artificial Sequence: Synthetic oligonucleotide
caugucccgugacguaugg

SEQ ID NO: 2395669 - RNA, 19 nt, Artificial Sequence
  Description of Artificial Sequence: Synthetic oligonucleotide
cuuuagcaagcgaucguga

SEQ ID NO: 2395670 - RNA, 19 nt, Artificial Sequence
  Description of Artificial Sequence: Synthetic oligonucleotide
aguuguaauccuccaucua

SEQ ID NO: 2395671 - RNA, 19 nt, Artificial Sequence
  Description of Artificial Sequence: Synthetic oligonucleotide
cuugcagguuucuggcgac

SEQ ID NO: 2395672 - RNA, 19 nt, Artificial Sequence
  Description of Artificial Sequence: Synthetic oligonucleotide
ucuggcgacgaucgccaga

SEQ ID NO: 2395673 - RNA, 19 nt, Artificial Sequence
  Description of Artificial Sequence: Synthetic oligonucleotide
cuuucgugcaaccucuuua

SEQ ID NO: 2395674 - RNA, 19 nt, Artificial Sequence
  Description of Artificial Sequence: Synthetic oligonucleotide
ucauggcagcuuugcaugu

SEQ ID NO: 2395675 - RNA, 19 nt, Artificial Sequence
  Description of Artificial Sequence: Synthetic oligonucleotide
aaaaccgcaccgacuuugu

SEQ ID NO: 2395676 - RNA, 19 nt, Artificial Sequence
  Description of Artificial Sequence: Synthetic oligonucleotide
ggaccuaaauguuucucca

SEQ ID NO: 2395677 - RNA, 19 nt, Artificial Sequence
  Description of Artificial Sequence: Synthetic oligonucleotide
cuggcgacgaucgccagac

SEQ ID NO: 2395678 - RNA, 19 nt, Artificial Sequence
  Description of Artificial Sequence: Synthetic oligonucleotide
ucuuucgugcaaccucuuu

SEQ ID NO: 2395679 - RNA, 19 nt, Artificial Sequence
  Description of Artificial Sequence: Synthetic oligonucleotide
cauucacgauggauccgcc

SEQ ID NO: 2395680 - RNA, 19 nt, Artificial Sequence
  Description of Artificial Sequence: Synthetic oligonucleotide
ucauauccgugugaauaaa

SEQ ID NO: 2395681 - RNA, 19 nt, Artificial Sequence
  Description of Artificial Sequence: Synthetic oligonucleotide
caagauggacucccuagga

SEQ ID NO: 2395682 - RNA, 19 nt, Artificial Sequence
  Description of Artificial Sequence: Synthetic oligonucleotide
acacaaccgcaugugccac

SEQ ID NO: 2395683 - RNA, 19 nt, Artificial Sequence
  Description of Artificial Sequence: Synthetic oligonucleotide
ggccuaauuaacagaaaac

SEQ ID NO: 2395684 - RNA, 19 nt, Artificial Sequence
  Description of Artificial Sequence: Synthetic oligonucleotide
gccuaauuaacagaaaacu

SEQ ID NO: 2395685 - RNA, 19 nt, Artificial Sequence
  Description of Artificial Sequence: Synthetic oligonucleotide
gaccuuauucaccaagcau

SEQ ID NO: 2395686 - RNA, 19 nt, Artificial Sequence
  Description of Artificial Sequence: Synthetic oligonucleotide
gcuggcgcaguacacagac

SEQ ID NO: 2395687 - RNA, 19 nt, Artificial Sequence
  Description of Artificial Sequence: Synthetic oligonucleotide
gagcccaagagguuagugu

SEQ ID NO: 2395688 - RNA, 19 nt, Artificial Sequence
  Description of Artificial Sequence: Synthetic oligonucleotide
agcugcguuuaccaagaaa

SEQ ID NO: 2395689 - RNA, 19 nt, Artificial Sequence
  Description of Artificial Sequence: Synthetic oligonucleotide
gaaauuuacuggaccuaaa

SEQ ID NO: 2395690 - RNA, 19 nt, Artificial Sequence
  Description of Artificial Sequence: Synthetic oligonucleotide
ucccgugacguauggugac

SEQ ID NO: 2395691 - RNA, 19 nt, Artificial Sequence
  Description of Artificial Sequence: Synthetic oligonucleotide
ccucuuuagcaagcgaucg

SEQ ID NO: 2395692 - RNA, 19 nt, Artificial Sequence
  Description of Artificial Sequence: Synthetic oligonucleotide
guguuuugucauauccgug

SEQ ID NO: 2395693 - RNA, 19 nt, Artificial Sequence
  Description of Artificial Sequence: Synthetic oligonucleotide
cuuuagcaacaucacagcu

SEQ ID NO: 2395694 - RNA, 19 nt, Artificial Sequence
  Description of Artificial Sequence: Synthetic oligonucleotide
cuaggagucagaacuucua

SEQ ID NO: 2395695 - RNA, 19 nt, Artificial Sequence
  Description of Artificial Sequence: Synthetic oligonucleotide
ugcagguuucuggcgacga

SEQ ID NO: 2395696 - RNA, 19 nt, Artificial Sequence
  Description of Artificial Sequence: Synthetic oligonucleotide
aauccuggugcgaccacau

SEQ ID NO: 2395697 - RNA, 19 nt, Artificial Sequence
  Description of Artificial Sequence: Synthetic oligonucleotide
ccacuugcagguuucuggc

SEQ ID NO: 2395698 - RNA, 19 nt, Artificial Sequence
  Description of Artificial Sequence: Synthetic oligonucleotide
cguuuaccaagaaauuuac

SEQ ID NO: 2395699 - RNA, 19 nt, Artificial Sequence
  Description of Artificial Sequence: Synthetic oligonucleotide
acaggccaagauggacucc

SEQ ID NO: 2395700 - RNA, 19 nt, Artificial Sequence
  Description of Artificial Sequence: Synthetic oligonucleotide
ccgugugaauaaauccugg

SEQ ID NO: 2395701 - RNA, 19 nt, Artificial Sequence
  Description of Artificial Sequence: Synthetic oligonucleotide
gacguauggugacucuaaa

SEQ ID NO: 2395702 - RNA, 19 nt, Artificial Sequence
  Description of Artificial Sequence: Synthetic oligonucleotide
ccuuauucaccaagcauca

SEQ ID NO: 2395703 - RNA, 19 nt, Artificial Sequence
  Description of Artificial Sequence: Synthetic oligonucleotide
gcaaccucuuuagcaagcg

SEQ ID NO: 2395704 - RNA, 19 nt, Artificial Sequence
  Description of Artificial Sequence: Synthetic oligonucleotide
ggcggcuuuggccacuugc

SEQ ID NO: 2395705 - RNA, 19 nt, Artificial Sequence
  Description of Artificial Sequence: Synthetic oligonucleotide
gcaagcgaucgugaaaacc

SEQ ID NO: 2395706 - RNA, 19 nt, Artificial Sequence
  Description of Artificial Sequence: Synthetic oligonucleotide
cagguuucuggcgacgauc

SEQ ID NO: 2395707 - RNA, 19 nt, Artificial Sequence
  Description of Artificial Sequence: Synthetic oligonucleotide
gaucgccagacgguagccc

SEQ ID NO: 2395708 - RNA, 19 nt, Artificial Sequence
  Description of Artificial Sequence: Synthetic oligonucleotide
uaauaccagcugcguuuac

SEQ ID NO: 2395709 - RNA, 19 nt, Artificial Sequence
  Description of Artificial Sequence: Synthetic oligonucleotide
acaaccgcaugugccaccu

SEQ ID NO: 2395710 - RNA, 19 nt, Artificial Sequence
  Description of Artificial Sequence: Synthetic oligonucleotide
acccaaugagcccuccuuu

SEQ ID NO: 2395711 - RNA, 19 nt, Artificial Sequence
  Description of Artificial Sequence: Synthetic oligonucleotide
cacaacagaucaucucuaa

SEQ ID NO: 2395712 - RNA, 19 nt, Artificial Sequence
  Description of Artificial Sequence: Synthetic oligonucleotide
uugucauauccgugugaau

SEQ ID NO: 2395713 - RNA, 19 nt, Artificial Sequence
  Description of Artificial Sequence: Synthetic oligonucleotide
cacaaccgcaugugccacc

SEQ ID NO: 2395714 - RNA, 19 nt, Artificial Sequence
  Description of Artificial Sequence: Synthetic oligonucleotide
cagacuggcccacguugcc

SEQ ID NO: 2395715 - RNA, 19 nt, Artificial Sequence
  Description of Artificial Sequence: Synthetic oligonucleotide
guccucauggcagcuuugc

SEQ ID NO: 2395716 - RNA, 19 nt, Artificial Sequence
  Description of Artificial Sequence: Synthetic oligonucleotide
gacgaucgccagacgguag

SEQ ID NO: 2395717 - RNA, 19 nt, Artificial Sequence
  Description of Artificial Sequence: Synthetic oligonucleotide
ucccuaggagucagaacuu

SEQ ID NO: 2395718 - RNA, 19 nt, Artificial Sequence
  Description of Artificial Sequence: Synthetic oligonucleotide
aaccucccgagagggauau

SEQ ID NO: 2395719 - RNA, 19 nt, Artificial Sequence
  Description of Artificial Sequence: Synthetic oligonucleotide
caagugguuuccgccgagc

SEQ ID NO: 2395720 - RNA, 19 nt, Artificial Sequence
  Description of Artificial Sequence: Synthetic oligonucleotide
uccuuugcuggcgcaguac

SEQ ID NO: 2395721 - RNA, 19 nt, Artificial Sequence
  Description of Artificial Sequence: Synthetic oligonucleotide
cugaaucauuguccucaug

SEQ ID NO: 2395722 - RNA, 19 nt, Artificial Sequence
  Description of Artificial Sequence: Synthetic oligonucleotide
ccaaugagcccuccuuugc

SEQ ID NO: 2395723 - RNA, 19 nt, Artificial Sequence
  Description of Artificial Sequence: Synthetic oligonucleotide
ggauccgccccgcugaauc

SEQ ID NO: 2395724 - RNA, 19 nt, Artificial Sequence
  Description of Artificial Sequence: Synthetic oligonucleotide
ggcagcuuugcaugucagc

SEQ ID NO: 2395725 - RNA, 19 nt, Artificial Sequence
  Description of Artificial Sequence: Synthetic oligonucleotide
gaaaacccaaugagcccuc

SEQ ID NO: 2395726 - RNA, 19 nt, Artificial Sequence
  Description of Artificial Sequence: Synthetic oligonucleotide
ccccgcugaaucauugucc

SEQ ID NO: 2395727 - RNA, 19 nt, Artificial Sequence
  Description of Artificial Sequence: Synthetic oligonucleotide
cuuggaccccggacaggcc

SEQ ID NO: 2395728 - RNA, 19 nt, Artificial Sequence
  Description of Artificial Sequence: Synthetic oligonucleotide
uccuguucuuuagcaacau

SEQ ID NO: 2395729 - RNA, 19 nt, Artificial Sequence
  Description of Artificial Sequence: Synthetic oligonucleotide
ugcuggcgcaguacacaga

SEQ ID NO: 2395730 - RNA, 19 nt, Artificial Sequence
  Description of Artificial Sequence: Synthetic oligonucleotide
gaacaugucccgugacgua

SEQ ID NO: 2395731 - RNA, 19 nt, Artificial Sequence
  Description of Artificial Sequence: Synthetic oligonucleotide
caccaagcaucacaacaga

SEQ ID NO: 2395732 - RNA, 19 nt, Artificial Sequence
  Description of Artificial Sequence: Synthetic oligonucleotide
accaagcaucacaacagau

SEQ ID NO: 2395733 - RNA, 19 nt, Artificial Sequence
  Description of Artificial Sequence: Synthetic oligonucleotide
cuggugcgaccacauuuac

SEQ ID NO: 2395734 - RNA, 19 nt, Artificial Sequence
  Description of Artificial Sequence: Synthetic oligonucleotide
agguuagugugaagcugag

SEQ ID NO: 2395735 - RNA, 19 nt, Artificial Sequence
  Description of Artificial Sequence: Synthetic oligonucleotide
auggagcccaagagguuag

SEQ ID NO: 2395736 - RNA, 19 nt, Artificial Sequence
  Description of Artificial Sequence: Synthetic oligonucleotide
uucuggcgacgaucgccag

SEQ ID NO: 2395737 - RNA, 19 nt, Artificial Sequence
  Description of Artificial Sequence: Synthetic oligonucleotide
gacucccuaggagucagaa

SEQ ID NO: 2395738 - RNA, 19 nt, Artificial Sequence
  Description of Artificial Sequence: Synthetic oligonucleotide
cauggagcccaagagguua

SEQ ID NO: 2395739 - RNA, 19 nt, Artificial Sequence
  Description of Artificial Sequence: Synthetic oligonucleotide
uacucccuacauucacgau

SEQ ID NO: 2395740 - RNA, 19 nt, Artificial Sequence
  Description of Artificial Sequence: Synthetic oligonucleotide
gaccuaaauguuucuccau

SEQ ID NO: 2395741 - RNA, 19 nt, Artificial Sequence
  Description of Artificial Sequence: Synthetic oligonucleotide
aucuuggaccccggacagg

SEQ ID NO: 2395742 - RNA, 19 nt, Artificial Sequence
  Description of Artificial Sequence: Synthetic oligonucleotide
guacacagacuggcccacg

SEQ ID NO: 2395743 - RNA, 19 nt, Artificial Sequence
  Description of Artificial Sequence: Synthetic oligonucleotide
caauaauacucccuacauu

SEQ ID NO: 2395744 - RNA, 19 nt, Artificial Sequence
  Description of Artificial Sequence: Synthetic oligonucleotide
gcguuuaccaagaaauuua

SEQ ID NO: 2395745 - RNA, 19 nt, Artificial Sequence
  Description of Artificial Sequence: Synthetic oligonucleotide
cauagauaugauggccuaa

SEQ ID NO: 2395746 - RNA, 19 nt, Artificial Sequence
  Description of Artificial Sequence: Synthetic oligonucleotide
cauauccgugugaauaaau

SEQ ID NO: 2395747 - RNA, 19 nt, Artificial Sequence
  Description of Artificial Sequence: Synthetic oligonucleotide
uucuuucgugcaaccucuu

SEQ ID NO: 2395748 - RNA, 19 nt, Artificial Sequence
  Description of Artificial Sequence: Synthetic oligonucleotide
cgaucgugaaaacccaaug

SEQ ID NO: 2395749 - RNA, 19 nt, Artificial Sequence
  Description of Artificial Sequence: Synthetic oligonucleotide
uggaccccggacaggccaa

SEQ ID NO: 2395750 - RNA, 19 nt, Artificial Sequence
  Description of Artificial Sequence: Synthetic oligonucleotide
cccaaugagcccuccuuug

SEQ ID NO: 2395751 - RNA, 19 nt, Artificial Sequence
  Description of Artificial Sequence: Synthetic oligonucleotide
ggcgcaguacacagacugg

SEQ ID NO: 2395752 - RNA, 19 nt, Artificial Sequence
  Description of Artificial Sequence: Synthetic oligonucleotide
accccggacaggccaagau

SEQ ID NO: 2395753 - RNA, 19 nt, Artificial Sequence
  Description of Artificial Sequence: Synthetic oligonucleotide
uggcgacgaucgccagacg

SEQ ID NO: 2395754 - RNA, 19 nt, Artificial Sequence
  Description of Artificial Sequence: Synthetic oligonucleotide
acaugucccgugacguaug

SEQ ID NO: 2395755 - RNA, 19 nt, Artificial Sequence
  Description of Artificial Sequence: Synthetic oligonucleotide
agacuggcccacguugccu

SEQ ID NO: 2395756 - RNA, 19 nt, Artificial Sequence
  Description of Artificial Sequence: Synthetic oligonucleotide
ccauuagcugggcuacagc

SEQ ID NO: 2395757 - RNA, 19 nt, Artificial Sequence
  Description of Artificial Sequence: Synthetic oligonucleotide
gccauuagcugggcuacag

SEQ ID NO: 2395758 - RNA, 19 nt, Artificial Sequence
  Description of Artificial Sequence: Synthetic oligonucleotide
gucccgugacguaugguga

SEQ ID NO: 2395759 - RNA, 19 nt, Artificial Sequence
  Description of Artificial Sequence: Synthetic oligonucleotide
gcccuucugggccauuagc

SEQ ID NO: 2395760 - RNA, 19 nt, Artificial Sequence
  Description of Artificial Sequence: Synthetic oligonucleotide
ggagcccaagagguuagug

SEQ ID NO: 2395761 - RNA, 19 nt, Artificial Sequence
  Description of Artificial Sequence: Synthetic oligonucleotide
caaugagcccuccuuugcu

SEQ ID NO: 2395762 - RNA, 19 nt, Artificial Sequence
  Description of Artificial Sequence: Synthetic oligonucleotide
gaccacauuuacucugauu

SEQ ID NO: 2395763 - RNA, 19 nt, Artificial Sequence
  Description of Artificial Sequence: Synthetic oligonucleotide
cacgauggauccgccccgc

SEQ ID NO: 2395764 - RNA, 19 nt, Artificial Sequence
  Description of Artificial Sequence: Synthetic oligonucleotide
cucuaauuagauggugagu

SEQ ID NO: 2395765 - RNA, 19 nt, Artificial Sequence
  Description of Artificial Sequence: Synthetic oligonucleotide
cucuuuagcaagcgaucgu

SEQ ID NO: 2395766 - RNA, 19 nt, Artificial Sequence
  Description of Artificial Sequence: Synthetic oligonucleotide
acuguguacuugaccuuau

SEQ ID NO: 2395767 - RNA, 19 nt, Artificial Sequence
  Description of Artificial Sequence: Synthetic oligonucleotide
gugacguauggugacucua

SEQ ID NO: 2395768 - RNA, 19 nt, Artificial Sequence
  Description of Artificial Sequence: Synthetic oligonucleotide
auggccuaauuaacagaaa

SEQ ID NO: 2395769 - RNA, 19 nt, Artificial Sequence
  Description of Artificial Sequence: Synthetic oligonucleotide
cgugcaaccucuuuagcaa

SEQ ID NO: 2395770 - RNA, 19 nt, Artificial Sequence
  Description of Artificial Sequence: Synthetic oligonucleotide
ccaccucaagagcuucucc

SEQ ID NO: 2395771 - RNA, 19 nt, Artificial Sequence
  Description of Artificial Sequence: Synthetic oligonucleotide
ccaauaauacucccuacau

SEQ ID NO: 2395772 - RNA, 19 nt, Artificial Sequence
  Description of Artificial Sequence: Synthetic oligonucleotide
gguuucuggcgacgaucgc

SEQ ID NO: 2395773 - RNA, 19 nt, Artificial Sequence
  Description of Artificial Sequence: Synthetic oligonucleotide
agcgaucgugaaaacccaa

SEQ ID NO: 2395774 - RNA, 19 nt, Artificial Sequence
  Description of Artificial Sequence: Synthetic oligonucleotide
caaaccucccgagagggau

SEQ ID NO: 2395775 - RNA, 19 nt, Artificial Sequence
  Description of Artificial Sequence: Synthetic oligonucleotide
uggcccacguugccuuuua

SEQ ID NO: 2395776 - RNA, 19 nt, Artificial Sequence
  Description of Artificial Sequence: Synthetic oligonucleotide
acgauggauccgccccgcu

SEQ ID NO: 2395777 - RNA, 19 nt, Artificial Sequence
  Description of Artificial Sequence: Synthetic oligonucleotide
ucgccagacgguagcccuu

SEQ ID NO: 2395778 - RNA, 19 nt, Artificial Sequence
  Description of Artificial Sequence: Synthetic oligonucleotide
uuccgccgagcucgccggc

SEQ ID NO: 2395779 - RNA, 19 nt, Artificial Sequence
  Description of Artificial Sequence: Synthetic oligonucleotide
ucgccggcggcggcuuugg

SEQ ID NO: 2395780 - RNA, 19 nt, Artificial Sequence
  Description of Artificial Sequence: Synthetic oligonucleotide
gggccauuagcugggcuac

SEQ ID NO: 2395781 - RNA, 19 nt, Artificial Sequence
  Description of Artificial Sequence: Synthetic oligonucleotide
uggagcccaagagguuagu

SEQ ID NO: 2395782 - RNA, 19 nt, Artificial Sequence
  Description of Artificial Sequence: Synthetic oligonucleotide
ccagaacaugucccgugac

SEQ ID NO: 2395783 - RNA, 19 nt, Artificial Sequence
  Description of Artificial Sequence: Synthetic oligonucleotide
auggauccgccccgcugaa

SEQ ID NO: 2395784 - RNA, 19 nt, Artificial Sequence
  Description of Artificial Sequence: Synthetic oligonucleotide
cuguuaauaccagcugcgu

SEQ ID NO: 2395785 - RNA, 19 nt, Artificial Sequence
  Description of Artificial Sequence: Synthetic oligonucleotide
ccuuugcuggcgcaguaca

SEQ ID NO: 2395786 - RNA, 19 nt, Artificial Sequence
  Description of Artificial Sequence: Synthetic oligonucleotide
gccccgcugaaucauuguc

SEQ ID NO: 2395787 - RNA, 19 nt, Artificial Sequence
  Description of Artificial Sequence: Synthetic oligonucleotide
ccccggacaggccaagaug

SEQ ID NO: 2395788 - RNA, 19 nt, Artificial Sequence
  Description of Artificial Sequence: Synthetic oligonucleotide
uccgccccgcugaaucauu

SEQ ID NO: 2395789 - RNA, 19 nt, Artificial Sequence
  Description of Artificial Sequence: Synthetic oligonucleotide
gcuaaaugccaagugguuu

SEQ ID NO: 2395790 - RNA, 19 nt, Artificial Sequence
  Description of Artificial Sequence: Synthetic oligonucleotide
ccuggugcgaccacauuua

SEQ ID NO: 2395791 - RNA, 19 nt, Artificial Sequence
  Description of Artificial Sequence: Synthetic oligonucleotide
gcggcuuuggccacuugca

SEQ ID NO: 2395792 - RNA, 19 nt, Artificial Sequence
  Description of Artificial Sequence: Synthetic oligonucleotide
gccaagugguuuccgccga

SEQ ID NO: 2395793 - RNA, 19 nt, Artificial Sequence
  Description of Artificial Sequence: Synthetic oligonucleotide
augucccgugacguauggu

SEQ ID NO: 2395794 - RNA, 19 nt, Artificial Sequence
  Description of Artificial Sequence: Synthetic oligonucleotide
auccuggugcgaccacauu

SEQ ID NO: 2395795 - RNA, 19 nt, Artificial Sequence
  Description of Artificial Sequence: Synthetic oligonucleotide
gcccacguugccuuuuaaa

SEQ ID NO: 2395796 - RNA, 19 nt, Artificial Sequence
  Description of Artificial Sequence: Synthetic oligonucleotide
ccaagugguuuccgccgag

SEQ ID NO: 2395797 - RNA, 19 nt, Artificial Sequence
  Description of Artificial Sequence: Synthetic oligonucleotide
gcgaccacauuuacucuga

SEQ ID NO: 2395798 - RNA, 19 nt, Artificial Sequence
  Description of Artificial Sequence: Synthetic oligonucleotide
ccagacgguagcccuucug

SEQ ID NO: 2395799 - RNA, 19 nt, Artificial Sequence
  Description of Artificial Sequence: Synthetic oligonucleotide
gugcgaccacauuuacucu

SEQ ID NO: 2395800 - RNA, 19 nt, Artificial Sequence
  Description of Artificial Sequence: Synthetic oligonucleotide
acguugccuuuuaaaccaa

SEQ ID NO: 2395801 - RNA, 19 nt, Artificial Sequence
  Description of Artificial Sequence: Synthetic oligonucleotide
ccucauggcagcuuugcau

SEQ ID NO: 2395802 - RNA, 19 nt, Artificial Sequence
  Description of Artificial Sequence: Synthetic oligonucleotide
ccgcaugugccaccucaag

SEQ ID NO: 2395803 - RNA, 19 nt, Artificial Sequence
  Description of Artificial Sequence: Synthetic oligonucleotide
gcaucacaacagaucaucu

SEQ ID NO: 2395804 - RNA, 19 nt, Artificial Sequence
  Description of Artificial Sequence: Synthetic oligonucleotide
auccgccccgcugaaucau

SEQ ID NO: 2395805 - RNA, 19 nt, Artificial Sequence
  Description of Artificial Sequence: Synthetic oligonucleotide
cccuaggagucagaacuuc

SEQ ID NO: 2395806 - RNA, 19 nt, Artificial Sequence
  Description of Artificial Sequence: Synthetic oligonucleotide
gcaccgacuuuguccaucu

SEQ ID NO: 2395807 - RNA, 19 nt, Artificial Sequence
  Description of Artificial Sequence: Synthetic oligonucleotide
aggccaagauggacucccu

SEQ ID NO: 2395808 - RNA, 19 nt, Artificial Sequence
  Description of Artificial Sequence: Synthetic oligonucleotide
cgcaugugccaccucaaga

SEQ ID NO: 2395809 - RNA, 19 nt, Artificial Sequence
  Description of Artificial Sequence: Synthetic oligonucleotide
caaccagaacaugucccgu

SEQ ID NO: 2395810 - RNA, 19 nt, Artificial Sequence
  Description of Artificial Sequence: Synthetic oligonucleotide
cgugugaauaaauccuggu

SEQ ID NO: 2395811 - RNA, 19 nt, Artificial Sequence
  Description of Artificial Sequence: Synthetic oligonucleotide
uggauccgccccgcugaau

SEQ ID NO: 2395812 - RNA, 19 nt, Artificial Sequence
  Description of Artificial Sequence: Synthetic oligonucleotide
ggccaagauggacucccua

SEQ ID NO: 2395813 - RNA, 19 nt, Artificial Sequence
  Description of Artificial Sequence: Synthetic oligonucleotide
gaccccggacaggccaaga

SEQ ID NO: 2395814 - RNA, 19 nt, Artificial Sequence
  Description of Artificial Sequence: Synthetic oligonucleotide
cucccgagagggauauuuu

SEQ ID NO: 2395815 - RNA, 19 nt, Artificial Sequence
  Description of Artificial Sequence: Synthetic oligonucleotide
caaccgcaugugccaccuc

SEQ ID NO: 2395816 - RNA, 19 nt, Artificial Sequence
  Description of Artificial Sequence: Synthetic oligonucleotide
ccgugacguauggugacuc

SEQ ID NO: 2395817 - RNA, 19 nt, Artificial Sequence
  Description of Artificial Sequence: Synthetic oligonucleotide
cccaagagguuagugugaa

SEQ ID NO: 2395818 - RNA, 19 nt, Artificial Sequence
  Description of Artificial Sequence: Synthetic oligonucleotide
ccgccccgcugaaucauug

SEQ ID NO: 2395819 - RNA, 19 nt, Artificial Sequence
  Description of Artificial Sequence: Synthetic oligonucleotide
cgaucgccagacgguagcc

SEQ ID NO: 2395820 - RNA, 19 nt, Artificial Sequence
  Description of Artificial Sequence: Synthetic oligonucleotide
ccgccgagcucgccggcgg

SEQ ID NO: 2395821 - RNA, 19 nt, Artificial Sequence
  Description of Artificial Sequence: Synthetic oligonucleotide
ccgcugaaucauuguccuc

SEQ ID NO: 2395822 - RNA, 19 nt, Artificial Sequence
  Description of Artificial Sequence: Synthetic oligonucleotide
gcgacgaucgccagacggu

SEQ ID NO: 2395823 - RNA, 19 nt, Artificial Sequence
  Description of Artificial Sequence: Synthetic oligonucleotide
gcgaucgugaaaacccaau

SEQ ID NO: 2395824 - RNA, 19 nt, Artificial Sequence
  Description of Artificial Sequence: Synthetic oligonucleotide
ggaccccggacaggccaag

SEQ ID NO: 2395825 - RNA, 19 nt, Artificial Sequence
  Description of Artificial Sequence: Synthetic oligonucleotide
ccgagcucgccggcggcgg

SEQ ID NO: 2395826 - RNA, 19 nt, Artificial Sequence
  Description of Artificial Sequence: Synthetic oligonucleotide
cgacuuuguccaucuugga

SEQ ID NO: 2395827 - RNA, 19 nt, Artificial Sequence
  Description of Artificial Sequence: Synthetic oligonucleotide
cgcaccgacuuuguccauc

SEQ ID NO: 2395828 - RNA, 19 nt, Artificial Sequence
  Description of Artificial Sequence: Synthetic oligonucleotide
gcagguuucuggcgacgau

SEQ ID NO: 2395829 - RNA, 19 nt, Artificial Sequence
  Description of Artificial Sequence: Synthetic oligonucleotide
ggccauuagcugggcuaca

SEQ ID NO: 2395830 - RNA, 19 nt, Artificial Sequence
  Description of Artificial Sequence: Synthetic oligonucleotide
cccuacauucacgauggau

SEQ ID NO: 2395831 - RNA, 19 nt, Artificial Sequence
  Description of Artificial Sequence: Synthetic oligonucleotide
ggcccacguugccuuuuaa

SEQ ID NO: 2395832 - RNA, 19 nt, Artificial Sequence
  Description of Artificial Sequence: Synthetic oligonucleotide
agcucgccggcggcggcuu

SEQ ID NO: 2395833 - RNA, 19 nt, Artificial Sequence
  Description of Artificial Sequence: Synthetic oligonucleotide
ggacucccuaggagucaga

SEQ ID NO: 2395834 - RNA, 19 nt, Artificial Sequence
  Description of Artificial Sequence: Synthetic oligonucleotide
cgugacguauggugacucu

SEQ ID NO: 2395835 - RNA, 19 nt, Artificial Sequence
  Description of Artificial Sequence: Synthetic oligonucleotide
cgccagacgguagcccuuc

SEQ ID NO: 2395836 - RNA, 19 nt, Artificial Sequence
  Description of Artificial Sequence: Synthetic oligonucleotide
accucccgagagggauauu

SEQ ID NO: 2395837 - RNA, 19 nt, Artificial Sequence
  Description of Artificial Sequence: Synthetic oligonucleotide
cguugccuuuuaaaccaau

SEQ ID NO: 2395838 - RNA, 19 nt, Artificial Sequence
  Description of Artificial Sequence: Synthetic oligonucleotide
cgacgaucgccagacggua

SEQ ID NO: 2395839 - RNA, 19 nt, Artificial Sequence
  Description of Artificial Sequence: Synthetic oligonucleotide
ccuccuuugcuggcgcagu

SEQ ID NO: 2395840 - RNA, 19 nt, Artificial Sequence
  Description of Artificial Sequence: Synthetic oligonucleotide
cgccgagcucgccggcggc

SEQ ID NO: 2395841 - RNA, 19 nt, Artificial Sequence
  Description of Artificial Sequence: Synthetic oligonucleotide
gccagacgguagcccuucu

SEQ ID NO: 2395842 - RNA, 19 nt, Artificial Sequence
  Description of Artificial Sequence: Synthetic oligonucleotide
caccgacuuuguccaucuu

SEQ ID NO: 2395843 - RNA, 19 nt, Artificial Sequence
  Description of Artificial Sequence: Synthetic oligonucleotide
cccgugacguauggugacu

SEQ ID NO: 2395844 - RNA, 19 nt, Artificial Sequence
  Description of Artificial Sequence: Synthetic oligonucleotide
gggcuacagcccugccgau

SEQ ID NO: 2395845 - RNA, 19 nt, Artificial Sequence
  Description of Artificial Sequence: Synthetic oligonucleotide
cgaccacauuuacucugau

SEQ ID NO: 2395846 - RNA, 19 nt, Artificial Sequence
  Description of Artificial Sequence: Synthetic oligonucleotide
cggcggcuuuggccacuug

SEQ ID NO: 2395847 - RNA, 19 nt, Artificial Sequence
  Description of Artificial Sequence: Synthetic oligonucleotide
gcggcggcuuuggccacuu

SEQ ID NO: 2395848 - RNA, 19 nt, Artificial Sequence
  Description of Artificial Sequence: Synthetic oligonucleotide
ccgcaccgacuuuguccau

SEQ ID NO: 2395849 - RNA, 19 nt, Artificial Sequence
  Description of Artificial Sequence: Synthetic oligonucleotide
agaaguguagaauuccacc

SEQ ID NO: 2395850 - RNA, 19 nt, Artificial Sequence
  Description of Artificial Sequence: Synthetic oligonucleotide
aacguuacuucuuccaggg

SEQ ID NO: 2395851 - RNA, 19 nt, Artificial Sequence
  Description of Artificial Sequence: Synthetic oligonucleotide
agugccgccaccuaggugg

SEQ ID NO: 2395852 - RNA, 19 nt, Artificial Sequence
  Description of Artificial Sequence: Synthetic oligonucleotide
aauaauauguuggcggcgg

SEQ ID NO: 2395853 - RNA, 19 nt, Artificial Sequence
  Description of Artificial Sequence: Synthetic oligonucleotide
ucuguguuuaccaaguggu

SEQ ID NO: 2395854 - RNA, 19 nt, Artificial Sequence
  Description of Artificial Sequence: Synthetic oligonucleotide
ucguugaagaggaagaaga

SEQ ID NO: 2395855 - RNA, 19 nt, Artificial Sequence
  Description of Artificial Sequence: Synthetic oligonucleotide
uugcuaagcacaaugcugc

SEQ ID NO: 2395856 - RNA, 19 nt, Artificial Sequence
  Description of Artificial Sequence: Synthetic oligonucleotide
aggggaauaauauguuggc

SEQ ID NO: 2395857 - RNA, 19 nt, Artificial Sequence
  Description of Artificial Sequence: Synthetic oligonucleotide
acuaggaugucguugaaga

SEQ ID NO: 2395858 - RNA, 19 nt, Artificial Sequence
  Description of Artificial Sequence: Synthetic oligonucleotide
gggaauaauauguuggcgg

SEQ ID NO: 2395859 - RNA, 19 nt, Artificial Sequence
  Description of Artificial Sequence: Synthetic oligonucleotide
caggggaauaauauguugg

SEQ ID NO: 2395860 - RNA, 19 nt, Artificial Sequence
  Description of Artificial Sequence: Synthetic oligonucleotide
uuccaggggaauaauaugu

SEQ ID NO: 2395861 - RNA, 19 nt, Artificial Sequence
  Description of Artificial Sequence: Synthetic oligonucleotide
cuugcuaagcacaaugcug

SEQ ID NO: 2395862 - RNA, 19 nt, Artificial Sequence
  Description of Artificial Sequence: Synthetic oligonucleotide
gaacacucagcacagacca

SEQ ID NO: 2395863 - RNA, 19 nt, Artificial Sequence
  Description of Artificial Sequence: Synthetic oligonucleotide
ucugucgucgucagagucg

SEQ ID NO: 2395864 - RNA, 19 nt, Artificial Sequence
  Description of Artificial Sequence: Synthetic oligonucleotide
aaaacagcucuccaccgcu

SEQ ID NO: 2395865 - RNA, 19 nt, Artificial Sequence
  Description of Artificial Sequence: Synthetic oligonucleotide
uacacuaggaugucguuga

SEQ ID NO: 2395866 - RNA, 19 nt, Artificial Sequence
  Description of Artificial Sequence: Synthetic oligonucleotide
acaaagccgcauuugcggc

SEQ ID NO: 2395867 - RNA, 19 nt, Artificial Sequence
  Description of Artificial Sequence: Synthetic oligonucleotide
guagaauuccaccuggcug

SEQ ID NO: 2395868 - RNA, 19 nt, Artificial Sequence
  Description of Artificial Sequence: Synthetic oligonucleotide
cacaaagccgcauuugcgg

SEQ ID NO: 2395869 - RNA, 19 nt, Artificial Sequence
  Description of Artificial Sequence: Synthetic oligonucleotide
guugaagaggaagaagacg

SEQ ID NO: 2395870 - RNA, 19 nt, Artificial Sequence
  Description of Artificial Sequence: Synthetic oligonucleotide
gaugucguugaagaggaag

SEQ ID NO: 2395871 - RNA, 19 nt, Artificial Sequence
  Description of Artificial Sequence: Synthetic oligonucleotide
cuggaugcaccguagacag

SEQ ID NO: 2395872 - RNA, 19 nt, Artificial Sequence
  Description of Artificial Sequence: Synthetic oligonucleotide
uuuaccaagugguccacca

SEQ ID NO: 2395873 - RNA, 19 nt, Artificial Sequence
  Description of Artificial Sequence: Synthetic oligonucleotide
gaauaauauguuggcggcg

SEQ ID NO: 2395874 - RNA, 19 nt, Artificial Sequence
  Description of Artificial Sequence: Synthetic oligonucleotide
uccaccaucuucucacuag

SEQ ID NO: 2395875 - RNA, 19 nt, Artificial Sequence
  Description of Artificial Sequence: Synthetic oligonucleotide
uggaacacucagcacagac

SEQ ID NO: 2395876 - RNA, 19 nt, Artificial Sequence
  Description of Artificial Sequence: Synthetic oligonucleotide
cugucuugaucauccagcg

SEQ ID NO: 2395877 - RNA, 19 nt, Artificial Sequence
  Description of Artificial Sequence: Synthetic oligonucleotide
auguccguggccuugucag

SEQ ID NO: 2395878 - RNA, 19 nt, Artificial Sequence
  Description of Artificial Sequence: Synthetic oligonucleotide
ugcaccguagacagugccg

SEQ ID NO: 2395879 - RNA, 19 nt, Artificial Sequence
  Description of Artificial Sequence: Synthetic oligonucleotide
caacguuacuucuuccagg

SEQ ID NO: 2395880 - RNA, 19 nt, Artificial Sequence
  Description of Artificial Sequence: Synthetic oligonucleotide
uccaacguuacuucuucca

SEQ ID NO: 2395881 - RNA, 19 nt, Artificial Sequence
  Description of Artificial Sequence: Synthetic oligonucleotide
accuaggugggcuggcugc

SEQ ID NO: 2395882 - RNA, 19 nt, Artificial Sequence
  Description of Artificial Sequence: Synthetic oligonucleotide
gacucgaaggggcuugggg

SEQ ID NO: 2395883 - RNA, 19 nt, Artificial Sequence
  Description of Artificial Sequence: Synthetic oligonucleotide
aauauguuggcggcgguau

SEQ ID NO: 2395884 - RNA, 19 nt, Artificial Sequence
  Description of Artificial Sequence: Synthetic oligonucleotide
aggaaacgcucccuggaac

SEQ ID NO: 2395885 - RNA, 19 nt, Artificial Sequence
  Description of Artificial Sequence: Synthetic oligonucleotide
aagcgugucugugugcaac

SEQ ID NO: 2395886 - RNA, 19 nt, Artificial Sequence
  Description of Artificial Sequence: Synthetic oligonucleotide
caucuucucacuagcuagg

SEQ ID NO: 2395887 - RNA, 19 nt, Artificial Sequence
  Description of Artificial Sequence: Synthetic oligonucleotide
uuugcggcaguggugacgc

SEQ ID NO: 2395888 - RNA, 19 nt, Artificial Sequence
  Description of Artificial Sequence: Synthetic oligonucleotide
caacgcaugcagauguccg

SEQ ID NO: 2395889 - RNA, 19 nt, Artificial Sequence
  Description of Artificial Sequence: Synthetic oligonucleotide
uagcaaaggcugcagacuc

SEQ ID NO: 2395890 - RNA, 19 nt, Artificial Sequence
  Description of Artificial Sequence: Synthetic oligonucleotide
augcaccguagacagugcc

SEQ ID NO: 2395891 - RNA, 19 nt, Artificial Sequence
  Description of Artificial Sequence: Synthetic oligonucleotide
uugaucauccagcgguucu

SEQ ID NO: 2395892 - RNA, 19 nt, Artificial Sequence
  Description of Artificial Sequence: Synthetic oligonucleotide
aacgcaugcagauguccgu

SEQ ID NO: 2395893 - RNA, 19 nt, Artificial Sequence
  Description of Artificial Sequence: Synthetic oligonucleotide
agcacagaccacaaagccg

SEQ ID NO: 2395894 - RNA, 19 nt, Artificial Sequence
  Description of Artificial Sequence: Synthetic oligonucleotide
cuuccaggggaauaauaug

SEQ ID NO: 2395895 - RNA, 19 nt, Artificial Sequence
  Description of Artificial Sequence: Synthetic oligonucleotide
cucuccaccgcugcgaucc

SEQ ID NO: 2395896 - RNA, 19 nt, Artificial Sequence
  Description of Artificial Sequence: Synthetic oligonucleotide
cauccagcgguucuuggcc

SEQ ID NO: 2395897 - RNA, 19 nt, Artificial Sequence
  Description of Artificial Sequence: Synthetic oligonucleotide
uauuugcgcuugcuaagca

SEQ ID NO: 2395898 - RNA, 19 nt, Artificial Sequence
  Description of Artificial Sequence: Synthetic oligonucleotide
gucuugaucauccagcggu

SEQ ID NO: 2395899 - RNA, 19 nt, Artificial Sequence
  Description of Artificial Sequence: Synthetic oligonucleotide
accgcugcgauccgcuggc

SEQ ID NO: 2395900 - RNA, 19 nt, Artificial Sequence
  Description of Artificial Sequence: Synthetic oligonucleotide
agcaggaaacgcucccugg

SEQ ID NO: 2395901 - RNA, 19 nt, Artificial Sequence
  Description of Artificial Sequence: Synthetic oligonucleotide
cagaaguguagaauuccac

SEQ ID NO: 2395902 - RNA, 19 nt, Artificial Sequence
  Description of Artificial Sequence: Synthetic oligonucleotide
acaaugcugccauacacua

SEQ ID NO: 2395903 - RNA, 19 nt, Artificial Sequence
  Description of Artificial Sequence: Synthetic oligonucleotide
cucccgguagcaaaggcug

SEQ ID NO: 2395904 - RNA, 19 nt, Artificial Sequence
  Description of Artificial Sequence: Synthetic oligonucleotide
aaagccgcauuugcggcag

SEQ ID NO: 2395905 - RNA, 19 nt, Artificial Sequence
  Description of Artificial Sequence: Synthetic oligonucleotide
auacacuaggaugucguug

SEQ ID NO: 2395906 - RNA, 19 nt, Artificial Sequence
  Description of Artificial Sequence: Synthetic oligonucleotide
aagaagacgcgcggcuugg

SEQ ID NO: 2395907 - RNA, 19 nt, Artificial Sequence
  Description of Artificial Sequence: Synthetic oligonucleotide
uuggcggcgguauuugcgc

SEQ ID NO: 2395908 - RNA, 19 nt, Artificial Sequence
  Description of Artificial Sequence: Synthetic oligonucleotide
gucgucaucaucgccacug

SEQ ID NO: 2395909 - RNA, 19 nt, Artificial Sequence
  Description of Artificial Sequence: Synthetic oligonucleotide
agcgugucugugugcaacg

SEQ ID NO: 2395910 - RNA, 19 nt, Artificial Sequence
  Description of Artificial Sequence: Synthetic oligonucleotide
ucuucucacuagcuaggcu

SEQ ID NO: 2395911 - RNA, 19 nt, Artificial Sequence
  Description of Artificial Sequence: Synthetic oligonucleotide
acacucuucgauguggcug

SEQ ID NO: 2395912 - RNA, 19 nt, Artificial Sequence
  Description of Artificial Sequence: Synthetic oligonucleotide
ugaccaggagacaccagaa

SEQ ID NO: 2395913 - RNA, 19 nt, Artificial Sequence
  Description of Artificial Sequence: Synthetic oligonucleotide
ugguggaggcugcugacac

SEQ ID NO: 2395914 - RNA, 19 nt, Artificial Sequence
  Description of Artificial Sequence: Synthetic oligonucleotide
aggaagaagacgcgcggcu

SEQ ID NO: 2395915 - RNA, 19 nt, Artificial Sequence
  Description of Artificial Sequence: Synthetic oligonucleotide
acacacucuucgauguggc

SEQ ID NO: 2395916 - RNA, 19 nt, Artificial Sequence
  Description of Artificial Sequence: Synthetic oligonucleotide
guauuugcgcuugcuaagc

SEQ ID NO: 2395917 - RNA, 19 nt, Artificial Sequence
  Description of Artificial Sequence: Synthetic oligonucleotide
ugugcaacgcaugcagaug

SEQ ID NO: 2395918 - RNA, 19 nt, Artificial Sequence
  Description of Artificial Sequence: Synthetic oligonucleotide
ggcugauccacuccuggcg

SEQ ID NO: 2395919 - RNA, 19 nt, Artificial Sequence
  Description of Artificial Sequence: Synthetic oligonucleotide
agaagcgugucugugugca

SEQ ID NO: 2395920 - RNA, 19 nt, Artificial Sequence
  Description of Artificial Sequence: Synthetic oligonucleotide
gaagacgcgcggcuuggcc

SEQ ID NO: 2395921 - RNA, 19 nt, Artificial Sequence
  Description of Artificial Sequence: Synthetic oligonucleotide
cccaaaacagcucuccacc

SEQ ID NO: 2395922 - RNA, 19 nt, Artificial Sequence
  Description of Artificial Sequence: Synthetic oligonucleotide
guuggcggcgguauuugcg

SEQ ID NO: 2395923 - RNA, 19 nt, Artificial Sequence
  Description of Artificial Sequence: Synthetic oligonucleotide
augucguugaagaggaaga

SEQ ID NO: 2395924 - RNA, 19 nt, Artificial Sequence
  Description of Artificial Sequence: Synthetic oligonucleotide
ucaacuguggaaggcugac

SEQ ID NO: 2395925 - RNA, 19 nt, Artificial Sequence
  Description of Artificial Sequence: Synthetic oligonucleotide
uccaggggaauaauauguu

SEQ ID NO: 2395926 - RNA, 19 nt, Artificial Sequence
  Description of Artificial Sequence: Synthetic oligonucleotide
ugcuaagcacaaugcugcc

SEQ ID NO: 2395927 - RNA, 19 nt, Artificial Sequence
  Description of Artificial Sequence: Synthetic oligonucleotide
caccacaaaggacuucuug

SEQ ID NO: 2395928 - RNA, 19 nt, Artificial Sequence
  Description of Artificial Sequence: Synthetic oligonucleotide
uccgcacacacucuucgau

SEQ ID NO: 2395929 - RNA, 19 nt, Artificial Sequence
  Description of Artificial Sequence: Synthetic oligonucleotide
auccgcuggcuguugaucu

SEQ ID NO: 2395930 - RNA, 19 nt, Artificial Sequence
  Description of Artificial Sequence: Synthetic oligonucleotide
aucuccgcugccuucucug

SEQ ID NO: 2395931 - RNA, 19 nt, Artificial Sequence
  Description of Artificial Sequence: Synthetic oligonucleotide
gugagugccgagaagcgug

SEQ ID NO: 2395932 - RNA, 19 nt, Artificial Sequence
  Description of Artificial Sequence: Synthetic oligonucleotide
agcacaaugcugccauaca

SEQ ID NO: 2395933 - RNA, 19 nt, Artificial Sequence
  Description of Artificial Sequence: Synthetic oligonucleotide
acacucagcacagaccaca

SEQ ID NO: 2395934 - RNA, 19 nt, Artificial Sequence
  Description of Artificial Sequence: Synthetic oligonucleotide
agugccgagaagcgugucu

SEQ ID NO: 2395935 - RNA, 19 nt, Artificial Sequence
  Description of Artificial Sequence: Synthetic oligonucleotide
aacacucagcacagaccac

SEQ ID NO: 2395936 - RNA, 19 nt, Artificial Sequence
  Description of Artificial Sequence: Synthetic oligonucleotide
ggagacaccagaaguguag

SEQ ID NO: 2395937 - RNA, 19 nt, Artificial Sequence
  Description of Artificial Sequence: Synthetic oligonucleotide
accaucuucucacuagcua

SEQ ID NO: 2395938 - RNA, 19 nt, Artificial Sequence
  Description of Artificial Sequence: Synthetic oligonucleotide
uguccguggccuugucagg

SEQ ID NO: 2395939 - RNA, 19 nt, Artificial Sequence
  Description of Artificial Sequence: Synthetic oligonucleotide
ggggaauaauauguuggcg

SEQ ID NO: 2395940 - RNA, 19 nt, Artificial Sequence
  Description of Artificial Sequence: Synthetic oligonucleotide
cugaccaggagacaccaga

SEQ ID NO: 2395941 - RNA, 19 nt, Artificial Sequence
  Description of Artificial Sequence: Synthetic oligonucleotide
agugguccaccaucuucuc

SEQ ID NO: 2395942 - RNA, 19 nt, Artificial Sequence
  Description of Artificial Sequence: Synthetic oligonucleotide
auaauauguuggcggcggu

SEQ ID NO: 2395943 - RNA, 19 nt, Artificial Sequence
  Description of Artificial Sequence: Synthetic oligonucleotide
ugucguugaagaggaagaa

SEQ ID NO: 2395944 - RNA, 19 nt, Artificial Sequence
  Description of Artificial Sequence: Synthetic oligonucleotide
aggcguggcagcaggaaac

SEQ ID NO: 2395945 - RNA, 19 nt, Artificial Sequence
  Description of Artificial Sequence: Synthetic oligonucleotide
ugcggcacuccuuggucag

SEQ ID NO: 2395946 - RNA, 19 nt, Artificial Sequence
  Description of Artificial Sequence: Synthetic oligonucleotide
ucuugaucauccagcgguu

SEQ ID NO: 2395947 - RNA, 19 nt, Artificial Sequence
  Description of Artificial Sequence: Synthetic oligonucleotide
gaggaagaagacgcgcggc

SEQ ID NO: 2395948 - RNA, 19 nt, Artificial Sequence
  Description of Artificial Sequence: Synthetic oligonucleotide
cuguguuuaccaagugguc

SEQ ID NO: 2395949 - RNA, 19 nt, Artificial Sequence
  Description of Artificial Sequence: Synthetic oligonucleotide
uguugaucucuguguuuac

SEQ ID NO: 2395950 - RNA, 19 nt, Artificial Sequence
  Description of Artificial Sequence: Synthetic oligonucleotide
cacuggaugcaccguagac

SEQ ID NO: 2395951 - RNA, 19 nt, Artificial Sequence
  Description of Artificial Sequence: Synthetic oligonucleotide
ugagugccgagaagcgugu

SEQ ID NO: 2395952 - RNA, 19 nt, Artificial Sequence
  Description of Artificial Sequence: Synthetic oligonucleotide
uuaccaagugguccaccau

SEQ ID NO: 2395953 - RNA, 19 nt, Artificial Sequence
  Description of Artificial Sequence: Synthetic oligonucleotide
aguggugacgccgggugag

SEQ ID NO: 2395954 - RNA, 19 nt, Artificial Sequence
  Description of Artificial Sequence: Synthetic oligonucleotide
acguuacuucuuccagggg

SEQ ID NO: 2395955 - RNA, 19 nt, Artificial Sequence
  Description of Artificial Sequence: Synthetic oligonucleotide
uugcggcacuccuugguca

SEQ ID NO: 2395956 - RNA, 19 nt, Artificial Sequence
  Description of Artificial Sequence: Synthetic oligonucleotide
ccaaaacagcucuccaccg

SEQ ID NO: 2395957 - RNA, 19 nt, Artificial Sequence
  Description of Artificial Sequence: Synthetic oligonucleotide
aaaggacuucuuggcuguc

SEQ ID NO: 2395958 - RNA, 19 nt, Artificial Sequence
  Description of Artificial Sequence: Synthetic oligonucleotide
ucagggauccagggugcgg

SEQ ID NO: 2395959 - RNA, 19 nt, Artificial Sequence
  Description of Artificial Sequence: Synthetic oligonucleotide
gacagcucccgguagcaaa

SEQ ID NO: 2395960 - RNA, 19 nt, Artificial Sequence
  Description of Artificial Sequence: Synthetic oligonucleotide
ggagaggcguggcagcagg

SEQ ID NO: 2395961 - RNA, 19 nt, Artificial Sequence
  Description of Artificial Sequence: Synthetic oligonucleotide
cucugucgucgucagaguc

SEQ ID NO: 2395962 - RNA, 19 nt, Artificial Sequence
  Description of Artificial Sequence: Synthetic oligonucleotide
gauguccguggccuuguca

SEQ ID NO: 2395963 - RNA, 19 nt, Artificial Sequence
  Description of Artificial Sequence: Synthetic oligonucleotide
ugccccgacgccccaaaac

SEQ ID NO: 2395964 - RNA, 19 nt, Artificial Sequence
  Description of Artificial Sequence: Synthetic oligonucleotide
uguuggcggcgguauuugc

SEQ ID NO: 2395965 - RNA, 19 nt, Artificial Sequence
  Description of Artificial Sequence: Synthetic oligonucleotide
uaauauguuggcggcggua

SEQ ID NO: 2395966 - RNA, 19 nt, Artificial Sequence
  Description of Artificial Sequence: Synthetic oligonucleotide
cuccaacguuacuucuucc

SEQ ID NO: 2395967 - RNA, 19 nt, Artificial Sequence
  Description of Artificial Sequence: Synthetic oligonucleotide
ccaacguuacuucuuccag

SEQ ID NO: 2395968 - RNA, 19 nt, Artificial Sequence
  Description of Artificial Sequence: Synthetic oligonucleotide
gaaacgcucccuggaacac

SEQ ID NO: 2395969 - RNA, 19 nt, Artificial Sequence
  Description of Artificial Sequence: Synthetic oligonucleotide
agaauuccaccuggcuggg

SEQ ID NO: 2395970 - RNA, 19 nt, Artificial Sequence
  Description of Artificial Sequence: Synthetic oligonucleotide
cagggauccagggugcggc

SEQ ID NO: 2395971 - RNA, 19 nt, Artificial Sequence
  Description of Artificial Sequence: Synthetic oligonucleotide
ugcugccauacacuaggau

SEQ ID NO: 2395972 - RNA, 19 nt, Artificial Sequence
  Description of Artificial Sequence: Synthetic oligonucleotide
ggaaacgcucccuggaaca

SEQ ID NO: 2395973 - RNA, 19 nt, Artificial Sequence
  Description of Artificial Sequence: Synthetic oligonucleotide
cagagucgucaucaucgcc

SEQ ID NO: 2395974 - RNA, 19 nt, Artificial Sequence
  Description of Artificial Sequence: Synthetic oligonucleotide
guuacuucuuccaggggaa

SEQ ID NO: 2395975 - RNA, 19 nt, Artificial Sequence
  Description of Artificial Sequence: Synthetic oligonucleotide
gacgccccaaaacagcucu

SEQ ID NO: 2395976 - RNA, 19 nt, Artificial Sequence
  Description of Artificial Sequence: Synthetic oligonucleotide
aaacgcucccuggaacacu

SEQ ID NO: 2395977 - RNA, 19 nt, Artificial Sequence
  Description of Artificial Sequence: Synthetic oligonucleotide
cacuaggaugucguugaag

SEQ ID NO: 2395978 - RNA, 19 nt, Artificial Sequence
  Description of Artificial Sequence: Synthetic oligonucleotide
uugcgcuugcuaagcacaa

SEQ ID NO: 2395979 - RNA, 19 nt, Artificial Sequence
  Description of Artificial Sequence: Synthetic oligonucleotide
guccguggccuugucaggg

SEQ ID NO: 2395980 - RNA, 19 nt, Artificial Sequence
  Description of Artificial Sequence: Synthetic oligonucleotide
agcaaaggcugcagacucg

SEQ ID NO: 2395981 - RNA, 19 nt, Artificial Sequence
  Description of Artificial Sequence: Synthetic oligonucleotide
agacaccagaaguguagaa

SEQ ID NO: 2395982 - RNA, 19 nt, Artificial Sequence
  Description of Artificial Sequence: Synthetic oligonucleotide
ggaaggcugaccaggagac

SEQ ID NO: 2395983 - RNA, 19 nt, Artificial Sequence
  Description of Artificial Sequence: Synthetic oligonucleotide
acagcucccgguagcaaag

SEQ ID NO: 2395984 - RNA, 19 nt, Artificial Sequence
  Description of Artificial Sequence: Synthetic oligonucleotide
cacccggccugguagggcc

SEQ ID NO: 2395985 - RNA, 19 nt, Artificial Sequence
  Description of Artificial Sequence: Synthetic oligonucleotide
agggauccagggugcggcg

SEQ ID NO: 2395986 - RNA, 19 nt, Artificial Sequence
  Description of Artificial Sequence: Synthetic oligonucleotide
uggcgcuccgugguggagg

SEQ ID NO: 2395987 - RNA, 19 nt, Artificial Sequence
  Description of Artificial Sequence: Synthetic oligonucleotide
gcgcuugcuaagcacaaug

SEQ ID NO: 2395988 - RNA, 19 nt, Artificial Sequence
  Description of Artificial Sequence: Synthetic oligonucleotide
ucccgguagcaaaggcugc

SEQ ID NO: 2395989 - RNA, 19 nt, Artificial Sequence
  Description of Artificial Sequence: Synthetic oligonucleotide
ucucugucgucgucagagu

SEQ ID NO: 2395990 - RNA, 19 nt, Artificial Sequence
  Description of Artificial Sequence: Synthetic oligonucleotide
gcugauccacuccuggcgc

SEQ ID NO: 2395991 - RNA, 19 nt, Artificial Sequence
  Description of Artificial Sequence: Synthetic oligonucleotide
aggcugaccaggagacacc

SEQ ID NO: 2395992 - RNA, 19 nt, Artificial Sequence
  Description of Artificial Sequence: Synthetic oligonucleotide
ccaggggaauaauauguug

SEQ ID NO: 2395993 - RNA, 19 nt, Artificial Sequence
  Description of Artificial Sequence: Synthetic oligonucleotide
gcugcagacucgaaggggc

SEQ ID NO: 2395994 - RNA, 19 nt, Artificial Sequence
  Description of Artificial Sequence: Synthetic oligonucleotide
ugcaacgcaugcagauguc

SEQ ID NO: 2395995 - RNA, 19 nt, Artificial Sequence
  Description of Artificial Sequence: Synthetic oligonucleotide
ggugcggcgugcucagugg

SEQ ID NO: 2395996 - RNA, 19 nt, Artificial Sequence
  Description of Artificial Sequence: Synthetic oligonucleotide
ugcggcgugcucaguggug

SEQ ID NO: 2395997 - RNA, 19 nt, Artificial Sequence
  Description of Artificial Sequence: Synthetic oligonucleotide
gaugcaccguagacagugc

SEQ ID NO: 2395998 - RNA, 19 nt, Artificial Sequence
  Description of Artificial Sequence: Synthetic oligonucleotide
ugggcggacagcucccggu

SEQ ID NO: 2395999 - RNA, 19 nt, Artificial Sequence
  Description of Artificial Sequence: Synthetic oligonucleotide
gugccgagaagcgugucug

SEQ ID NO: 2396000 - RNA, 19 nt, Artificial Sequence
  Description of Artificial Sequence: Synthetic oligonucleotide
agaagacgcgcggcuuggc

SEQ ID NO: 2396001 - RNA, 19 nt, Artificial Sequence
  Description of Artificial Sequence: Synthetic oligonucleotide
gugcaacgcaugcagaugu

SEQ ID NO: 2396002 - RNA, 19 nt, Artificial Sequence
  Description of Artificial Sequence: Synthetic oligonucleotide
gacaccagaaguguagaau

SEQ ID NO: 2396003 - RNA, 19 nt, Artificial Sequence
  Description of Artificial Sequence: Synthetic oligonucleotide
caccgcugcgauccgcugg

SEQ ID NO: 2396004 - RNA, 19 nt, Artificial Sequence
  Description of Artificial Sequence: Synthetic oligonucleotide
guguagaauuccaccuggc

SEQ ID NO: 2396005 - RNA, 19 nt, Artificial Sequence
  Description of Artificial Sequence: Synthetic oligonucleotide
guuuaccaagugguccacc

SEQ ID NO: 2396006 - RNA, 19 nt, Artificial Sequence
  Description of Artificial Sequence: Synthetic oligonucleotide
caucgccacuggaugcacc

SEQ ID NO: 2396007 - RNA, 19 nt, Artificial Sequence
  Description of Artificial Sequence: Synthetic oligonucleotide
ucugggcggacagcucccg

SEQ ID NO: 2396008 - RNA, 19 nt, Artificial Sequence
  Description of Artificial Sequence: Synthetic oligonucleotide
uagacagugccgccaccua

SEQ ID NO: 2396009 - RNA, 19 nt, Artificial Sequence
  Description of Artificial Sequence: Synthetic oligonucleotide
gauccgcuggcuguugauc

SEQ ID NO: 2396010 - RNA, 19 nt, Artificial Sequence
  Description of Artificial Sequence: Synthetic oligonucleotide
acgcaugcagauguccgug

SEQ ID NO: 2396011 - RNA, 19 nt, Artificial Sequence
  Description of Artificial Sequence: Synthetic oligonucleotide
ucgucgucagagucgucau

SEQ ID NO: 2396012 - RNA, 19 nt, Artificial Sequence
  Description of Artificial Sequence: Synthetic oligonucleotide
agauguccguggccuuguc

SEQ ID NO: 2396013 - RNA, 19 nt, Artificial Sequence
  Description of Artificial Sequence: Synthetic oligonucleotide
caaagccgcauuugcggca

SEQ ID NO: 2396014 - RNA, 19 nt, Artificial Sequence
  Description of Artificial Sequence: Synthetic oligonucleotide
caaaggacuucuuggcugu

SEQ ID NO: 2396015 - RNA, 19 nt, Artificial Sequence
  Description of Artificial Sequence: Synthetic oligonucleotide
gugacgccgggugagugcc

SEQ ID NO: 2396016 - RNA, 19 nt, Artificial Sequence
  Description of Artificial Sequence: Synthetic oligonucleotide
gcauuugcggcagugguga

SEQ ID NO: 2396017 - RNA, 19 nt, Artificial Sequence
  Description of Artificial Sequence: Synthetic oligonucleotide
acagugccgccaccuaggu

SEQ ID NO: 2396018 - RNA, 19 nt, Artificial Sequence
  Description of Artificial Sequence: Synthetic oligonucleotide
accguagacagugccgcca

SEQ ID NO: 2396019 - RNA, 19 nt, Artificial Sequence
  Description of Artificial Sequence: Synthetic oligonucleotide
ucuccaccgcugcgauccg

SEQ ID NO: 2396020 - RNA, 19 nt, Artificial Sequence
  Description of Artificial Sequence: Synthetic oligonucleotide
ccaccaucuucucacuagc

SEQ ID NO: 2396021 - RNA, 19 nt, Artificial Sequence
  Description of Artificial Sequence: Synthetic oligonucleotide
gcuccaacguuacuucuuc

SEQ ID NO: 2396022 - RNA, 19 nt, Artificial Sequence
  Description of Artificial Sequence: Synthetic oligonucleotide
agucgccaucuccgcugcc

SEQ ID NO: 2396023 - RNA, 19 nt, Artificial Sequence
  Description of Artificial Sequence: Synthetic oligonucleotide
gauccacuccuggcgcucc

SEQ ID NO: 2396024 - RNA, 19 nt, Artificial Sequence
  Description of Artificial Sequence: Synthetic oligonucleotide
ggcugcagacucgaagggg

SEQ ID NO: 2396025 - RNA, 19 nt, Artificial Sequence
  Description of Artificial Sequence: Synthetic oligonucleotide
ccuccgcacacacucuucg

SEQ ID NO: 2396026 - RNA, 19 nt, Artificial Sequence
  Description of Artificial Sequence: Synthetic oligonucleotide
gcacuccuuggucagcacc

SEQ ID NO: 2396027 - RNA, 19 nt, Artificial Sequence
  Description of Artificial Sequence: Synthetic oligonucleotide
gcaccguagacagugccgc

SEQ ID NO: 2396028 - RNA, 19 nt, Artificial Sequence
  Description of Artificial Sequence: Synthetic oligonucleotide
gccauacacuaggaugucg

SEQ ID NO: 2396029 - RNA, 19 nt, Artificial Sequence
  Description of Artificial Sequence: Synthetic oligonucleotide
ggugacgccgggugagugc

SEQ ID NO: 2396030 - RNA, 19 nt, Artificial Sequence
  Description of Artificial Sequence: Synthetic oligonucleotide
ugccgagaagcgugucugu

SEQ ID NO: 2396031 - RNA, 19 nt, Artificial Sequence
  Description of Artificial Sequence: Synthetic oligonucleotide
gcaacgcaugcagaugucc

SEQ ID NO: 2396032 - RNA, 19 nt, Artificial Sequence
  Description of Artificial Sequence: Synthetic oligonucleotide
ucccuccgcuucugggcgg

SEQ ID NO: 2396033 - RNA, 19 nt, Artificial Sequence
  Description of Artificial Sequence: Synthetic oligonucleotide
ggucaacuguggaaggcug

SEQ ID NO: 2396034 - RNA, 19 nt, Artificial Sequence
  Description of Artificial Sequence: Synthetic oligonucleotide
caccguagacagugccgcc

SEQ ID NO: 2396035 - RNA, 19 nt, Artificial Sequence
  Description of Artificial Sequence: Synthetic oligonucleotide
ccccaaaacagcucuccac

SEQ ID NO: 2396036 - RNA, 19 nt, Artificial Sequence
  Description of Artificial Sequence: Synthetic oligonucleotide
ugacgccgggugagugccg

SEQ ID NO: 2396037 - RNA, 19 nt, Artificial Sequence
  Description of Artificial Sequence: Synthetic oligonucleotide
cacaaaggacuucuuggcu

SEQ ID NO: 2396038 - RNA, 19 nt, Artificial Sequence
  Description of Artificial Sequence: Synthetic oligonucleotide
cagcacccggccugguagg

SEQ ID NO: 2396039 - RNA, 19 nt, Artificial Sequence
  Description of Artificial Sequence: Synthetic oligonucleotide
auauguuggcggcgguauu

SEQ ID NO: 2396040 - RNA, 19 nt, Artificial Sequence
  Description of Artificial Sequence: Synthetic oligonucleotide
gucagggauccagggugcg

SEQ ID NO: 2396041 - RNA, 19 nt, Artificial Sequence
  Description of Artificial Sequence: Synthetic oligonucleotide
gcaggaaacgcucccugga

SEQ ID NO: 2396042 - RNA, 19 nt, Artificial Sequence
  Description of Artificial Sequence: Synthetic oligonucleotide
cgcuugcuaagcacaaugc

SEQ ID NO: 2396043 - RNA, 19 nt, Artificial Sequence
  Description of Artificial Sequence: Synthetic oligonucleotide
caccuaggugggcuggcug

SEQ ID NO: 2396044 - RNA, 19 nt, Artificial Sequence
  Description of Artificial Sequence: Synthetic oligonucleotide
uuacuucuuccaggggaau

SEQ ID NO: 2396045 - RNA, 19 nt, Artificial Sequence
  Description of Artificial Sequence: Synthetic oligonucleotide
uggaugcaccguagacagu

SEQ ID NO: 2396046 - RNA, 19 nt, Artificial Sequence
  Description of Artificial Sequence: Synthetic oligonucleotide
uccgcuggcuguugaucuc

SEQ ID NO: 2396047 - RNA, 19 nt, Artificial Sequence
  Description of Artificial Sequence: Synthetic oligonucleotide
uggugacgccgggugagug

SEQ ID NO: 2396048 - RNA, 19 nt, Artificial Sequence
  Description of Artificial Sequence: Synthetic oligonucleotide
ugccuccgcacacacucuu

SEQ ID NO: 2396049 - RNA, 19 nt, Artificial Sequence
  Description of Artificial Sequence: Synthetic oligonucleotide
ucgucagagucgucaucau

SEQ ID NO: 2396050 - RNA, 19 nt, Artificial Sequence
  Description of Artificial Sequence: Synthetic oligonucleotide
cuugucagggauccagggu

SEQ ID NO: 2396051 - RNA, 19 nt, Artificial Sequence
  Description of Artificial Sequence: Synthetic oligonucleotide
gugugcaacgcaugcagau

SEQ ID NO: 2396052 - RNA, 19 nt, Artificial Sequence
  Description of Artificial Sequence: Synthetic oligonucleotide
gggugagugccgagaagcg

SEQ ID NO: 2396053 - RNA, 19 nt, Artificial Sequence
  Description of Artificial Sequence: Synthetic oligonucleotide
ccagucgccaucuccgcug

SEQ ID NO: 2396054 - RNA, 19 nt, Artificial Sequence
  Description of Artificial Sequence: Synthetic oligonucleotide
ucaucgccacuggaugcac

SEQ ID NO: 2396055 - RNA, 19 nt, Artificial Sequence
  Description of Artificial Sequence: Synthetic oligonucleotide
cuggcaguggcuccaacgu

SEQ ID NO: 2396056 - RNA, 19 nt, Artificial Sequence
  Description of Artificial Sequence: Synthetic oligonucleotide
ggcguggcagcaggaaacg

SEQ ID NO: 2396057 - RNA, 19 nt, Artificial Sequence
  Description of Artificial Sequence: Synthetic oligonucleotide
gugguccaccaucuucuca

SEQ ID NO: 2396058 - RNA, 19 nt, Artificial Sequence
  Description of Artificial Sequence: Synthetic oligonucleotide
gcuugcuaagcacaaugcu

SEQ ID NO: 2396059 - RNA, 19 nt, Artificial Sequence
  Description of Artificial Sequence: Synthetic oligonucleotide
ggauccagggugcggcgug

SEQ ID NO: 2396060 - RNA, 19 nt, Artificial Sequence
  Description of Artificial Sequence: Synthetic oligonucleotide
cauuugcggcaguggugac

SEQ ID NO: 2396061 - RNA, 19 nt, Artificial Sequence
  Description of Artificial Sequence: Synthetic oligonucleotide
guagacagugccgccaccu

SEQ ID NO: 2396062 - RNA, 19 nt, Artificial Sequence
  Description of Artificial Sequence: Synthetic oligonucleotide
agcacccggccugguaggg

SEQ ID NO: 2396063 - RNA, 19 nt, Artificial Sequence
  Description of Artificial Sequence: Synthetic oligonucleotide
gguggaggcugcugacacc

SEQ ID NO: 2396064 - RNA, 19 nt, Artificial Sequence
  Description of Artificial Sequence: Synthetic oligonucleotide
caggaaacgcucccuggaa

SEQ ID NO: 2396065 - RNA, 19 nt, Artificial Sequence
  Description of Artificial Sequence: Synthetic oligonucleotide
uggcggcgguauuugcgcu

SEQ ID NO: 2396066 - RNA, 19 nt, Artificial Sequence
  Description of Artificial Sequence: Synthetic oligonucleotide
caccuggcugggccagucg

SEQ ID NO: 2396067 - RNA, 19 nt, Artificial Sequence
  Description of Artificial Sequence: Synthetic oligonucleotide
gccccgacgccccaaaaca

SEQ ID NO: 2396068 - RNA, 19 nt, Artificial Sequence
  Description of Artificial Sequence: Synthetic oligonucleotide
cgggugagugccgagaagc

SEQ ID NO: 2396069 - RNA, 19 nt, Artificial Sequence
  Description of Artificial Sequence: Synthetic oligonucleotide
gcggcgugcucaguggugg

SEQ ID NO: 2396070 - RNA, 19 nt, Artificial Sequence
  Description of Artificial Sequence: Synthetic oligonucleotide
ggccugguagggccagugg

SEQ ID NO: 2396071 - RNA, 19 nt, Artificial Sequence
  Description of Artificial Sequence: Synthetic oligonucleotide
gaagcgugucugugugcaa

SEQ ID NO: 2396072 - RNA, 19 nt, Artificial Sequence
  Description of Artificial Sequence: Synthetic oligonucleotide
acagaccacaaagccgcau

SEQ ID NO: 2396073 - RNA, 19 nt, Artificial Sequence
  Description of Artificial Sequence: Synthetic oligonucleotide
agccgcauuugcggcagug

SEQ ID NO: 2396074 - RNA, 19 nt, Artificial Sequence
  Description of Artificial Sequence: Synthetic oligonucleotide
agucgucaucaucgccacu

SEQ ID NO: 2396075 - RNA, 19 nt, Artificial Sequence
  Description of Artificial Sequence: Synthetic oligonucleotide
ugcagacucgaaggggcuu

SEQ ID NO: 2396076 - RNA, 19 nt, Artificial Sequence
  Description of Artificial Sequence: Synthetic oligonucleotide
ugcgcuugcuaagcacaau

SEQ ID NO: 2396077 - RNA, 19 nt, Artificial Sequence
  Description of Artificial Sequence: Synthetic oligonucleotide
guggcugccccgacgcccc

SEQ ID NO: 2396078 - RNA, 19 nt, Artificial Sequence
  Description of Artificial Sequence: Synthetic oligonucleotide
gugucugugugcaacgcau

SEQ ID NO: 2396079 - RNA, 19 nt, Artificial Sequence
  Description of Artificial Sequence: Synthetic oligonucleotide
caggagacaccagaagugu

SEQ ID NO: 2396080 - RNA, 19 nt, Artificial Sequence
  Description of Artificial Sequence: Synthetic oligonucleotide
ccauacacuaggaugucgu

SEQ ID NO: 2396081 - RNA, 19 nt, Artificial Sequence
  Description of Artificial Sequence: Synthetic oligonucleotide
ugcgauccgcuggcuguug

SEQ ID NO: 2396082 - RNA, 19 nt, Artificial Sequence
  Description of Artificial Sequence: Synthetic oligonucleotide
cuccgcacacacucuucga

SEQ ID NO: 2396083 - RNA, 19 nt, Artificial Sequence
  Description of Artificial Sequence: Synthetic oligonucleotide
cagcugccuccgcacacac

SEQ ID NO: 2396084 - RNA, 19 nt, Artificial Sequence
  Description of Artificial Sequence: Synthetic oligonucleotide
gcagauguccguggccuug

SEQ ID NO: 2396085 - RNA, 19 nt, Artificial Sequence
  Description of Artificial Sequence: Synthetic oligonucleotide
aggagacaccagaagugua

SEQ ID NO: 2396086 - RNA, 19 nt, Artificial Sequence
  Description of Artificial Sequence: Synthetic oligonucleotide
ggcgcuccgugguggaggc

SEQ ID NO: 2396087 - RNA, 19 nt, Artificial Sequence
  Description of Artificial Sequence: Synthetic oligonucleotide
cgguauuugcgcuugcuaa

SEQ ID NO: 2396088 - RNA, 19 nt, Artificial Sequence
  Description of Artificial Sequence: Synthetic oligonucleotide
cagugccgccaccuaggug

SEQ ID NO: 2396089 - RNA, 19 nt, Artificial Sequence
  Description of Artificial Sequence: Synthetic oligonucleotide
caccaucuucucacuagcu

SEQ ID NO: 2396090 - RNA, 19 nt, Artificial Sequence
  Description of Artificial Sequence: Synthetic oligonucleotide
cauacacuaggaugucguu

SEQ ID NO: 2396091 - RNA, 19 nt, Artificial Sequence
  Description of Artificial Sequence: Synthetic oligonucleotide
guccaccaucuucucacua

SEQ ID NO: 2396092 - RNA, 19 nt, Artificial Sequence
  Description of Artificial Sequence: Synthetic oligonucleotide
cgcauuugcggcaguggug

SEQ ID NO: 2396093 - RNA, 19 nt, Artificial Sequence
  Description of Artificial Sequence: Synthetic oligonucleotide
augcugccauacacuagga

SEQ ID NO: 2396094 - RNA, 19 nt, Artificial Sequence
  Description of Artificial Sequence: Synthetic oligonucleotide
gcugcgauccgcuggcugu

SEQ ID NO: 2396095 - RNA, 19 nt, Artificial Sequence
  Description of Artificial Sequence: Synthetic oligonucleotide
cagaccacaaagccgcauu

SEQ ID NO: 2396096 - RNA, 19 nt, Artificial Sequence
  Description of Artificial Sequence: Synthetic oligonucleotide
acgccccaaaacagcucuc

SEQ ID NO: 2396097 - RNA, 19 nt, Artificial Sequence
  Description of Artificial Sequence: Synthetic oligonucleotide
caguggcugccccgacgcc

SEQ ID NO: 2396098 - RNA, 19 nt, Artificial Sequence
  Description of Artificial Sequence: Synthetic oligonucleotide
cacagaccacaaagccgca

SEQ ID NO: 2396099 - RNA, 19 nt, Artificial Sequence
  Description of Artificial Sequence: Synthetic oligonucleotide
cucuucgauguggcugauc

SEQ ID NO: 2396100 - RNA, 19 nt, Artificial Sequence
  Description of Artificial Sequence: Synthetic oligonucleotide
gagaggcguggcagcagga

SEQ ID NO: 2396101 - RNA, 19 nt, Artificial Sequence
  Description of Artificial Sequence: Synthetic oligonucleotide
gcgguauuugcgcuugcua

SEQ ID NO: 2396102 - RNA, 19 nt, Artificial Sequence
  Description of Artificial Sequence: Synthetic oligonucleotide
cgauguggcugauccacuc

SEQ ID NO: 2396103 - RNA, 19 nt, Artificial Sequence
  Description of Artificial Sequence: Synthetic oligonucleotide
ccguagacagugccgccac

SEQ ID NO: 2396104 - RNA, 19 nt, Artificial Sequence
  Description of Artificial Sequence: Synthetic oligonucleotide
caaaggcugcagacucgaa

SEQ ID NO: 2396105 - RNA, 19 nt, Artificial Sequence
  Description of Artificial Sequence: Synthetic oligonucleotide
gugccgccaccuagguggg

SEQ ID NO: 2396106 - RNA, 19 nt, Artificial Sequence
  Description of Artificial Sequence: Synthetic oligonucleotide
cugucgucgucagagucgu

SEQ ID NO: 2396107 - RNA, 19 nt, Artificial Sequence
  Description of Artificial Sequence: Synthetic oligonucleotide
cuccaccgcugcgauccgc

SEQ ID NO: 2396108 - RNA, 19 nt, Artificial Sequence
  Description of Artificial Sequence: Synthetic oligonucleotide
acgccgggugagugccgag

SEQ ID NO: 2396109 - RNA, 19 nt, Artificial Sequence
  Description of Artificial Sequence: Synthetic oligonucleotide
ggcuguugaucucuguguu

SEQ ID NO: 2396110 - RNA, 19 nt, Artificial Sequence
  Description of Artificial Sequence: Synthetic oligonucleotide
cacacucuucgauguggcu

SEQ ID NO: 2396111 - RNA, 19 nt, Artificial Sequence
  Description of Artificial Sequence: Synthetic oligonucleotide
ggcgugcucaguggugggc

SEQ ID NO: 2396112 - RNA, 19 nt, Artificial Sequence
  Description of Artificial Sequence: Synthetic oligonucleotide
gagugccgagaagcguguc

SEQ ID NO: 2396113 - RNA, 19 nt, Artificial Sequence
  Description of Artificial Sequence: Synthetic oligonucleotide
gcgugucugugugcaacgc

SEQ ID NO: 2396114 - RNA, 19 nt, Artificial Sequence
  Description of Artificial Sequence: Synthetic oligonucleotide
gcggcgguauuugcgcuug

SEQ ID NO: 2396115 - RNA, 19 nt, Artificial Sequence
  Description of Artificial Sequence: Synthetic oligonucleotide
cuggcgcuccgugguggag

SEQ ID NO: 2396116 - RNA, 19 nt, Artificial Sequence
  Description of Artificial Sequence: Synthetic oligonucleotide
ccgguagcaaaggcugcag

SEQ ID NO: 2396117 - RNA, 19 nt, Artificial Sequence
  Description of Artificial Sequence: Synthetic oligonucleotide
cgcucccuggaacacucag

SEQ ID NO: 2396118 - RNA, 19 nt, Artificial Sequence
  Description of Artificial Sequence: Synthetic oligonucleotide
cgccccaaaacagcucucc

SEQ ID NO: 2396119 - RNA, 19 nt, Artificial Sequence
  Description of Artificial Sequence: Synthetic oligonucleotide
ggugagugccgagaagcgu

SEQ ID NO: 2396120 - RNA, 19 nt, Artificial Sequence
  Description of Artificial Sequence: Synthetic oligonucleotide
cuggaacacucagcacaga

SEQ ID NO: 2396121 - RNA, 19 nt, Artificial Sequence
  Description of Artificial Sequence: Synthetic oligonucleotide
gccgggugagugccgagaa

SEQ ID NO: 2396122 - RNA, 19 nt, Artificial Sequence
  Description of Artificial Sequence: Synthetic oligonucleotide
ccgggugagugccgagaag

SEQ ID NO: 2396123 - RNA, 19 nt, Artificial Sequence
  Description of Artificial Sequence: Synthetic oligonucleotide
gcucccgguagcaaaggcu

SEQ ID NO: 2396124 - RNA, 19 nt, Artificial Sequence
  Description of Artificial Sequence: Synthetic oligonucleotide
cuccgcuucugggcggaca

SEQ ID NO: 2396125 - RNA, 19 nt, Artificial Sequence
  Description of Artificial Sequence: Synthetic oligonucleotide
gugcggcgugcucaguggu

SEQ ID NO: 2396126 - RNA, 19 nt, Artificial Sequence
  Description of Artificial Sequence: Synthetic oligonucleotide
cgugucugugugcaacgca

SEQ ID NO: 2396127 - RNA, 19 nt, Artificial Sequence
  Description of Artificial Sequence: Synthetic oligonucleotide
gcguggcagcaggaaacgc

SEQ ID NO: 2396128 - RNA, 19 nt, Artificial Sequence
  Description of Artificial Sequence: Synthetic oligonucleotide
ccagggugcggcgugcuca

SEQ ID NO: 2396129 - RNA, 19 nt, Artificial Sequence
  Description of Artificial Sequence: Synthetic oligonucleotide
cgcuccgugguggaggcug

SEQ ID NO: 2396130 - RNA, 19 nt, Artificial Sequence
  Description of Artificial Sequence: Synthetic oligonucleotide
gcgauccgcuggcuguuga

SEQ ID NO: 2396131 - RNA, 19 nt, Artificial Sequence
  Description of Artificial Sequence: Synthetic oligonucleotide
gcgcggcuuggccuucuug

SEQ ID NO: 2396132 - RNA, 19 nt, Artificial Sequence
  Description of Artificial Sequence: Synthetic oligonucleotide
gguccaccaucuucucacu

SEQ ID NO: 2396133 - RNA, 19 nt, Artificial Sequence
  Description of Artificial Sequence: Synthetic oligonucleotide
ugccgccaccuaggugggc

SEQ ID NO: 2396134 - RNA, 19 nt, Artificial Sequence
  Description of Artificial Sequence: Synthetic oligonucleotide
cgugcucaguggugggcug

SEQ ID NO: 2396135 - RNA, 19 nt, Artificial Sequence
  Description of Artificial Sequence: Synthetic oligonucleotide
ggcagcccguggccagcag

SEQ ID NO: 2396136 - RNA, 19 nt, Artificial Sequence
  Description of Artificial Sequence: Synthetic oligonucleotide
ccgacgccccaaaacagcu

SEQ ID NO: 2396137 - RNA, 19 nt, Artificial Sequence
  Description of Artificial Sequence: Synthetic oligonucleotide
gggcggacagcucccggua

SEQ ID NO: 2396138 - RNA, 19 nt, Artificial Sequence
  Description of Artificial Sequence: Synthetic oligonucleotide
ggaagaagacgcgcggcuu

SEQ ID NO: 2396139 - RNA, 19 nt, Artificial Sequence
  Description of Artificial Sequence: Synthetic oligonucleotide
cccgguagcaaaggcugca

SEQ ID NO: 2396140 - RNA, 19 nt, Artificial Sequence
  Description of Artificial Sequence: Synthetic oligonucleotide
ggcgguauuugcgcuugcu

SEQ ID NO: 2396141 - RNA, 19 nt, Artificial Sequence
  Description of Artificial Sequence: Synthetic oligonucleotide
ccgcauuugcggcaguggu

SEQ ID NO: 2396142 - RNA, 19 nt, Artificial Sequence
  Description of Artificial Sequence: Synthetic oligonucleotide
gcacccggccugguagggc

SEQ ID NO: 2396143 - RNA, 19 nt, Artificial Sequence
  Description of Artificial Sequence: Synthetic oligonucleotide
gacgcgcggcuuggccuuc

SEQ ID NO: 2396144 - RNA, 19 nt, Artificial Sequence
  Description of Artificial Sequence: Synthetic oligonucleotide
cgacgccccaaaacagcuc

SEQ ID NO: 2396145 - RNA, 19 nt, Artificial Sequence
  Description of Artificial Sequence: Synthetic oligonucleotide
cgcugcgauccgcuggcug

SEQ ID NO: 2396146 - RNA, 19 nt, Artificial Sequence
  Description of Artificial Sequence: Synthetic oligonucleotide
gccuccgcacacacucuuc

SEQ ID NO: 2396147 - RNA, 19 nt, Artificial Sequence
  Description of Artificial Sequence: Synthetic oligonucleotide
gccagucgccaucuccgcu

SEQ ID NO: 2396148 - RNA, 19 nt, Artificial Sequence
  Description of Artificial Sequence: Synthetic oligonucleotide
cgucaucaucgccacugga

SEQ ID NO: 2396149 - RNA, 19 nt, Artificial Sequence
  Description of Artificial Sequence: Synthetic oligonucleotide
cggcgugcucagugguggg

SEQ ID NO: 2396150 - RNA, 19 nt, Artificial Sequence
  Description of Artificial Sequence: Synthetic oligonucleotide
gcggcacuccuuggucagc

SEQ ID NO: 2396151 - RNA, 19 nt, Artificial Sequence
  Description of Artificial Sequence: Synthetic oligonucleotide
cagcgguucuuggccucca

SEQ ID NO: 2396152 - RNA, 19 nt, Artificial Sequence
  Description of Artificial Sequence: Synthetic oligonucleotide
gcgugcucaguggugggcu

SEQ ID NO: 2396153 - RNA, 19 nt, Artificial Sequence
  Description of Artificial Sequence: Synthetic oligonucleotide
ccaucuccgcugccuucuc

SEQ ID NO: 2396154 - RNA, 19 nt, Artificial Sequence
  Description of Artificial Sequence: Synthetic oligonucleotide
ggccaguggcugccccgac

SEQ ID NO: 2396155 - RNA, 19 nt, Artificial Sequence
  Description of Artificial Sequence: Synthetic oligonucleotide
guggugacgccgggugagu

SEQ ID NO: 2396156 - RNA, 19 nt, Artificial Sequence
  Description of Artificial Sequence: Synthetic oligonucleotide
cgcuggcuguugaucucug

SEQ ID NO: 2396157 - RNA, 19 nt, Artificial Sequence
  Description of Artificial Sequence: Synthetic oligonucleotide
cugccccgacgccccaaaa

SEQ ID NO: 2396158 - RNA, 19 nt, Artificial Sequence
  Description of Artificial Sequence: Synthetic oligonucleotide
ccuggcgcuccguggugga

SEQ ID NO: 2396159 - RNA, 19 nt, Artificial Sequence
  Description of Artificial Sequence: Synthetic oligonucleotide
acgcgcggcuuggccuucu

SEQ ID NO: 2396160 - RNA, 19 nt, Artificial Sequence
  Description of Artificial Sequence: Synthetic oligonucleotide
caguggcuccaacguuacu

SEQ ID NO: 2396161 - RNA, 19 nt, Artificial Sequence
  Description of Artificial Sequence: Synthetic oligonucleotide
ggcaguggugacgccgggu

SEQ ID NO: 2396162 - RNA, 19 nt, Artificial Sequence
  Description of Artificial Sequence: Synthetic oligonucleotide
ggcggcgguauuugcgcuu

SEQ ID NO: 2396163 - RNA, 19 nt, Artificial Sequence
  Description of Artificial Sequence: Synthetic oligonucleotide
gggauccagggugcggcgu

SEQ ID NO: 2396164 - RNA, 19 nt, Artificial Sequence
  Description of Artificial Sequence: Synthetic oligonucleotide
cggccugguagggccagug

SEQ ID NO: 2396165 - RNA, 19 nt, Artificial Sequence
  Description of Artificial Sequence: Synthetic oligonucleotide
cggacagcucccgguagca

SEQ ID NO: 2396166 - RNA, 19 nt, Artificial Sequence
  Description of Artificial Sequence: Synthetic oligonucleotide
cugcgauccgcuggcuguu

SEQ ID NO: 2396167 - RNA, 19 nt, Artificial Sequence
  Description of Artificial Sequence: Synthetic oligonucleotide
ccgcuggcuguugaucucu

SEQ ID NO: 2396168 - RNA, 19 nt, Artificial Sequence
  Description of Artificial Sequence: Synthetic oligonucleotide
ccaagugguccaccaucuu

SEQ ID NO: 2396169 - RNA, 19 nt, Artificial Sequence
  Description of Artificial Sequence: Synthetic oligonucleotide
cgccgggugagugccgaga

SEQ ID NO: 2396170 - RNA, 19 nt, Artificial Sequence
  Description of Artificial Sequence: Synthetic oligonucleotide
ccuccgcuucugggcggac

SEQ ID NO: 2396171 - RNA, 19 nt, Artificial Sequence
  Description of Artificial Sequence: Synthetic oligonucleotide
ggcugccccgacgccccaa

SEQ ID NO: 2396172 - RNA, 19 nt, Artificial Sequence
  Description of Artificial Sequence: Synthetic oligonucleotide
ccaccuaggugggcuggcu

SEQ ID NO: 2396173 - RNA, 19 nt, Artificial Sequence
  Description of Artificial Sequence: Synthetic oligonucleotide
ccgcugccuucucugucgu

SEQ ID NO: 2396174 - RNA, 19 nt, Artificial Sequence
  Description of Artificial Sequence: Synthetic oligonucleotide
gcgcuccgugguggaggcu

SEQ ID NO: 2396175 - RNA, 19 nt, Artificial Sequence
  Description of Artificial Sequence: Synthetic oligonucleotide
cgcgcggcuuggccuucuu

SEQ ID NO: 2396176 - RNA, 19 nt, Artificial Sequence
  Description of Artificial Sequence: Synthetic oligonucleotide
aacuuaauuagacacaucu

SEQ ID NO: 2396177 - RNA, 19 nt, Artificial Sequence
  Description of Artificial Sequence: Synthetic oligonucleotide
guaaggauugcucaaaugg

SEQ ID NO: 2396178 - RNA, 19 nt, Artificial Sequence
  Description of Artificial Sequence: Synthetic oligonucleotide
uuaauuagacacaucugag

SEQ ID NO: 2396179 - RNA, 19 nt, Artificial Sequence
  Description of Artificial Sequence: Synthetic oligonucleotide
aguugaagcuuccagaguc

SEQ ID NO: 2396180 - RNA, 19 nt, Artificial Sequence
  Description of Artificial Sequence: Synthetic oligonucleotide
uaauuggcaggacacaggg

SEQ ID NO: 2396181 - RNA, 19 nt, Artificial Sequence
  Description of Artificial Sequence: Synthetic oligonucleotide
uaaggauugcucaaauggg

SEQ ID NO: 2396182 - RNA, 19 nt, Artificial Sequence
  Description of Artificial Sequence: Synthetic oligonucleotide
aagguagguacguaagugg

SEQ ID NO: 2396183 - RNA, 19 nt, Artificial Sequence
  Description of Artificial Sequence: Synthetic oligonucleotide
aauuagacacaucugaguu

SEQ ID NO: 2396184 - RNA, 19 nt, Artificial Sequence
  Description of Artificial Sequence: Synthetic oligonucleotide
aaccaugucaccuccacug

SEQ ID NO: 2396185 - RNA, 19 nt, Artificial Sequence
  Description of Artificial Sequence: Synthetic oligonucleotide
acuucucuagcucagagug

SEQ ID NO: 2396186 - RNA, 19 nt, Artificial Sequence
  Description of Artificial Sequence: Synthetic oligonucleotide
aucacuccaagguagguac

SEQ ID NO: 2396187 - RNA, 19 nt, Artificial Sequence
  Description of Artificial Sequence: Synthetic oligonucleotide
auggcacucaaccagguac

SEQ ID NO: 2396188 - RNA, 19 nt, Artificial Sequence
  Description of Artificial Sequence: Synthetic oligonucleotide
aagggugagaaccauguca

SEQ ID NO: 2396189 - RNA, 19 nt, Artificial Sequence
  Description of Artificial Sequence: Synthetic oligonucleotide
ugccgaaccaguuagagac

SEQ ID NO: 2396190 - RNA, 19 nt, Artificial Sequence
  Description of Artificial Sequence: Synthetic oligonucleotide
ugaguugaagcuuccagag

SEQ ID NO: 2396191 - RNA, 19 nt, Artificial Sequence
  Description of Artificial Sequence: Synthetic oligonucleotide
aucugggacagcuuggccc

SEQ ID NO: 2396192 - RNA, 19 nt, Artificial Sequence
  Description of Artificial Sequence: Synthetic oligonucleotide
cuuaauuagacacaucuga

SEQ ID NO: 2396193 - RNA, 19 nt, Artificial Sequence
  Description of Artificial Sequence: Synthetic oligonucleotide
agaaauacucguucagcac

SEQ ID NO: 2396194 - RNA, 19 nt, Artificial Sequence
  Description of Artificial Sequence: Synthetic oligonucleotide
ucugaguugaagcuuccag

SEQ ID NO: 2396195 - RNA, 19 nt, Artificial Sequence
  Description of Artificial Sequence: Synthetic oligonucleotide
ugguaaaucugucggaucu

SEQ ID NO: 2396196 - RNA, 19 nt, Artificial Sequence
  Description of Artificial Sequence: Synthetic oligonucleotide
aaaucugucggaucuggga

SEQ ID NO: 2396197 - RNA, 19 nt, Artificial Sequence
  Description of Artificial Sequence: Synthetic oligonucleotide
ucguucagcacuucagugg

SEQ ID NO: 2396198 - RNA, 19 nt, Artificial Sequence
  Description of Artificial Sequence: Synthetic oligonucleotide
uuucugagguaauuggcag

SEQ ID NO: 2396199 - RNA, 19 nt, Artificial Sequence
  Description of Artificial Sequence: Synthetic oligonucleotide
auagcagugaacuugccau

SEQ ID NO: 2396200 - RNA, 19 nt, Artificial Sequence
  Description of Artificial Sequence: Synthetic oligonucleotide
uuagacacaucugaguuga

SEQ ID NO: 2396201 - RNA, 19 nt, Artificial Sequence
  Description of Artificial Sequence: Synthetic oligonucleotide
uuuguaucggauucucuug

SEQ ID NO: 2396202 - RNA, 19 nt, Artificial Sequence
  Description of Artificial Sequence: Synthetic oligonucleotide
uaauuagacacaucugagu

SEQ ID NO: 2396203 - RNA, 19 nt, Artificial Sequence
  Description of Artificial Sequence: Synthetic oligonucleotide
uaucggauucucuuguugc

SEQ ID NO: 2396204 - RNA, 19 nt, Artificial Sequence
  Description of Artificial Sequence: Synthetic oligonucleotide
uuguugccgaaccaguuag

SEQ ID NO: 2396205 - RNA, 19 nt, Artificial Sequence
  Description of Artificial Sequence: Synthetic oligonucleotide
ucuuuggucucuucacugg

SEQ ID NO: 2396206 - RNA, 19 nt, Artificial Sequence
  Description of Artificial Sequence: Synthetic oligonucleotide
gaaccccggacuuuggugg

SEQ ID NO: 2396207 - RNA, 19 nt, Artificial Sequence
  Description of Artificial Sequence: Synthetic oligonucleotide
uguucauacuucucuagcu

SEQ ID NO: 2396208 - RNA, 19 nt, Artificial Sequence
  Description of Artificial Sequence: Synthetic oligonucleotide
uuuuguaucggauucucuu

SEQ ID NO: 2396209 - RNA, 19 nt, Artificial Sequence
  Description of Artificial Sequence: Synthetic oligonucleotide
aaauuccgccgcuuccgcc

SEQ ID NO: 2396210 - RNA, 19 nt, Artificial Sequence
  Description of Artificial Sequence: Synthetic oligonucleotide
aaaaucacuccaagguagg

SEQ ID NO: 2396211 - RNA, 19 nt, Artificial Sequence
  Description of Artificial Sequence: Synthetic oligonucleotide
aucggauucucuuguugcc

SEQ ID NO: 2396212 - RNA, 19 nt, Artificial Sequence
  Description of Artificial Sequence: Synthetic oligonucleotide
acuucaguggccugcuuac

SEQ ID NO: 2396213 - RNA, 19 nt, Artificial Sequence
  Description of Artificial Sequence: Synthetic oligonucleotide
aaggccaggguccgaaggg

SEQ ID NO: 2396214 - RNA, 19 nt, Artificial Sequence
  Description of Artificial Sequence: Synthetic oligonucleotide
agaaccaugucaccuccac

SEQ ID NO: 2396215 - RNA, 19 nt, Artificial Sequence
  Description of Artificial Sequence: Synthetic oligonucleotide
uggauagcagugaacuugc

SEQ ID NO: 2396216 - RNA, 19 nt, Artificial Sequence
  Description of Artificial Sequence: Synthetic oligonucleotide
uccaagguagguacguaag

SEQ ID NO: 2396217 - RNA, 19 nt, Artificial Sequence
  Description of Artificial Sequence: Synthetic oligonucleotide
ugcucaaaugggaauagaa

SEQ ID NO: 2396218 - RNA, 19 nt, Artificial Sequence
  Description of Artificial Sequence: Synthetic oligonucleotide
uuuggucucuucacugggg

SEQ ID NO: 2396219 - RNA, 19 nt, Artificial Sequence
  Description of Artificial Sequence: Synthetic oligonucleotide
uuagagaccugggacacag

SEQ ID NO: 2396220 - RNA, 19 nt, Artificial Sequence
  Description of Artificial Sequence: Synthetic oligonucleotide
acugaaauuccgccgcuuc

SEQ ID NO: 2396221 - RNA, 19 nt, Artificial Sequence
  Description of Artificial Sequence: Synthetic oligonucleotide
auuagacacaucugaguug

SEQ ID NO: 2396222 - RNA, 19 nt, Artificial Sequence
  Description of Artificial Sequence: Synthetic oligonucleotide
uaaguggccaggaaagggu

SEQ ID NO: 2396223 - RNA, 19 nt, Artificial Sequence
  Description of Artificial Sequence: Synthetic oligonucleotide
uguguggugaacucacggc

SEQ ID NO: 2396224 - RNA, 19 nt, Artificial Sequence
  Description of Artificial Sequence: Synthetic oligonucleotide
ugcuuacugaaauuccgcc

SEQ ID NO: 2396225 - RNA, 19 nt, Artificial Sequence
  Description of Artificial Sequence: Synthetic oligonucleotide
uucugagguaauuggcagg

SEQ ID NO: 2396226 - RNA, 19 nt, Artificial Sequence
  Description of Artificial Sequence: Synthetic oligonucleotide
uacucguucagcacuucag

SEQ ID NO: 2396227 - RNA, 19 nt, Artificial Sequence
  Description of Artificial Sequence: Synthetic oligonucleotide
uccauggcacucaaccagg

SEQ ID NO: 2396228 - RNA, 19 nt, Artificial Sequence
  Description of Artificial Sequence: Synthetic oligonucleotide
gguacccaaacuuaauuag

SEQ ID NO: 2396229 - RNA, 19 nt, Artificial Sequence
  Description of Artificial Sequence: Synthetic oligonucleotide
augaggguggcuguggggc

SEQ ID NO: 2396230 - RNA, 19 nt, Artificial Sequence
  Description of Artificial Sequence: Synthetic oligonucleotide
uacguaaguggccaggaaa

SEQ ID NO: 2396231 - RNA, 19 nt, Artificial Sequence
  Description of Artificial Sequence: Synthetic oligonucleotide
uguggugaacucacggcag

SEQ ID NO: 2396232 - RNA, 19 nt, Artificial Sequence
  Description of Artificial Sequence: Synthetic oligonucleotide
aggguauugccacagccag

SEQ ID NO: 2396233 - RNA, 19 nt, Artificial Sequence
  Description of Artificial Sequence: Synthetic oligonucleotide
uugccauggaucaugccca

SEQ ID NO: 2396234 - RNA, 19 nt, Artificial Sequence
  Description of Artificial Sequence: Synthetic oligonucleotide
ugagaaccaugucaccucc

SEQ ID NO: 2396235 - RNA, 19 nt, Artificial Sequence
  Description of Artificial Sequence: Synthetic oligonucleotide
cagagugguaaaucugucg

SEQ ID NO: 2396236 - RNA, 19 nt, Artificial Sequence
  Description of Artificial Sequence: Synthetic oligonucleotide
aauuccgccgcuuccgccu

SEQ ID NO: 2396237 - RNA, 19 nt, Artificial Sequence
  Description of Artificial Sequence: Synthetic oligonucleotide
ggucaugacagccucacag

SEQ ID NO: 2396238 - RNA, 19 nt, Artificial Sequence
  Description of Artificial Sequence: Synthetic oligonucleotide
agagaccugggacacagug

SEQ ID NO: 2396239 - RNA, 19 nt, Artificial Sequence
  Description of Artificial Sequence: Synthetic oligonucleotide
gucaugacagccucacagg

SEQ ID NO: 2396240 - RNA, 19 nt, Artificial Sequence
  Description of Artificial Sequence: Synthetic oligonucleotide
cccaaacuuaauuagacac

SEQ ID NO: 2396241 - RNA, 19 nt, Artificial Sequence
  Description of Artificial Sequence: Synthetic oligonucleotide
agguagguacguaaguggc

SEQ ID NO: 2396242 - RNA, 19 nt, Artificial Sequence
  Description of Artificial Sequence: Synthetic oligonucleotide
agggugagaaccaugucac

SEQ ID NO: 2396243 - RNA, 19 nt, Artificial Sequence
  Description of Artificial Sequence: Synthetic oligonucleotide
ucaugacagccucacaggu

SEQ ID NO: 2396244 - RNA, 19 nt, Artificial Sequence
  Description of Artificial Sequence: Synthetic oligonucleotide
ucugagguaauuggcagga

SEQ ID NO: 2396245 - RNA, 19 nt, Artificial Sequence
  Description of Artificial Sequence: Synthetic oligonucleotide
uuguaucggauucucuugu

SEQ ID NO: 2396246 - RNA, 19 nt, Artificial Sequence
  Description of Artificial Sequence: Synthetic oligonucleotide
gauagcagugaacuugcca

SEQ ID NO: 2396247 - RNA, 19 nt, Artificial Sequence
  Description of Artificial Sequence: Synthetic oligonucleotide
uucaguggccugcuuacug

SEQ ID NO: 2396248 - RNA, 19 nt, Artificial Sequence
  Description of Artificial Sequence: Synthetic oligonucleotide
augugcuccaucucccugg

SEQ ID NO: 2396249 - RNA, 19 nt, Artificial Sequence
  Description of Artificial Sequence: Synthetic oligonucleotide
ugaugaggguggcuguggg

SEQ ID NO: 2396250 - RNA, 19 nt, Artificial Sequence
  Description of Artificial Sequence: Synthetic oligonucleotide
aacuugccauggaucaugc

SEQ ID NO: 2396251 - RNA, 19 nt, Artificial Sequence
  Description of Artificial Sequence: Synthetic oligonucleotide
guaaguggccaggaaaggg

SEQ ID NO: 2396252 - RNA, 19 nt, Artificial Sequence
  Description of Artificial Sequence: Synthetic oligonucleotide
gguauugccacagccaggg

SEQ ID NO: 2396253 - RNA, 19 nt, Artificial Sequence
  Description of Artificial Sequence: Synthetic oligonucleotide
acacaucugaguugaagcu

SEQ ID NO: 2396254 - RNA, 19 nt, Artificial Sequence
  Description of Artificial Sequence: Synthetic oligonucleotide
aaggauugcucaaauggga

SEQ ID NO: 2396255 - RNA, 19 nt, Artificial Sequence
  Description of Artificial Sequence: Synthetic oligonucleotide
cauccaggagccgugagcg

SEQ ID NO: 2396256 - RNA, 19 nt, Artificial Sequence
  Description of Artificial Sequence: Synthetic oligonucleotide
guaaaucugucggaucugg

SEQ ID NO: 2396257 - RNA, 19 nt, Artificial Sequence
  Description of Artificial Sequence: Synthetic oligonucleotide
cuggauagcagugaacuug

SEQ ID NO: 2396258 - RNA, 19 nt, Artificial Sequence
  Description of Artificial Sequence: Synthetic oligonucleotide
agcucagagugguaaaucu

SEQ ID NO: 2396259 - RNA, 19 nt, Artificial Sequence
  Description of Artificial Sequence: Synthetic oligonucleotide
caugguggccucuuccugg

SEQ ID NO: 2396260 - RNA, 19 nt, Artificial Sequence
  Description of Artificial Sequence: Synthetic oligonucleotide
cuguucauacuucucuagc

SEQ ID NO: 2396261 - RNA, 19 nt, Artificial Sequence
  Description of Artificial Sequence: Synthetic oligonucleotide
cuuuggucucuucacuggg

SEQ ID NO: 2396262 - RNA, 19 nt, Artificial Sequence
  Description of Artificial Sequence: Synthetic oligonucleotide
guguguggugaacucacgg

SEQ ID NO: 2396263 - RNA, 19 nt, Artificial Sequence
  Description of Artificial Sequence: Synthetic oligonucleotide
aauuggcaggacacagggc

SEQ ID NO: 2396264 - RNA, 19 nt, Artificial Sequence
  Description of Artificial Sequence: Synthetic oligonucleotide
acaucugaguugaagcuuc

SEQ ID NO: 2396265 - RNA, 19 nt, Artificial Sequence
  Description of Artificial Sequence: Synthetic oligonucleotide
uagaugucuucucagugua

SEQ ID NO: 2396266 - RNA, 19 nt, Artificial Sequence
  Description of Artificial Sequence: Synthetic oligonucleotide
acggcaggccuguucauac

SEQ ID NO: 2396267 - RNA, 19 nt, Artificial Sequence
  Description of Artificial Sequence: Synthetic oligonucleotide
aaccccggacuuugguggc

SEQ ID NO: 2396268 - RNA, 19 nt, Artificial Sequence
  Description of Artificial Sequence: Synthetic oligonucleotide
uauugccacagccaggguu

SEQ ID NO: 2396269 - RNA, 19 nt, Artificial Sequence
  Description of Artificial Sequence: Synthetic oligonucleotide
gaugccacccuuccuggcc

SEQ ID NO: 2396270 - RNA, 19 nt, Artificial Sequence
  Description of Artificial Sequence: Synthetic oligonucleotide
ugaaccccggacuuuggug

SEQ ID NO: 2396271 - RNA, 19 nt, Artificial Sequence
  Description of Artificial Sequence: Synthetic oligonucleotide
ucaguguacaugguggccu

SEQ ID NO: 2396272 - RNA, 19 nt, Artificial Sequence
  Description of Artificial Sequence: Synthetic oligonucleotide
uucucuagcucagaguggu

SEQ ID NO: 2396273 - RNA, 19 nt, Artificial Sequence
  Description of Artificial Sequence: Synthetic oligonucleotide
agaccugggacacagugau

SEQ ID NO: 2396274 - RNA, 19 nt, Artificial Sequence
  Description of Artificial Sequence: Synthetic oligonucleotide
aaacuuaauuagacacauc

SEQ ID NO: 2396275 - RNA, 19 nt, Artificial Sequence
  Description of Artificial Sequence: Synthetic oligonucleotide
ugggacacagugaugccac

SEQ ID NO: 2396276 - RNA, 19 nt, Artificial Sequence
  Description of Artificial Sequence: Synthetic oligonucleotide
gcuuacugaaauuccgccg

SEQ ID NO: 2396277 - RNA, 19 nt, Artificial Sequence
  Description of Artificial Sequence: Synthetic oligonucleotide
uggcacucaaccagguacc

SEQ ID NO: 2396278 - RNA, 19 nt, Artificial Sequence
  Description of Artificial Sequence: Synthetic oligonucleotide
gaugaggguggcugugggg

SEQ ID NO: 2396279 - RNA, 19 nt, Artificial Sequence
  Description of Artificial Sequence: Synthetic oligonucleotide
uggaacuuccccguguucu

SEQ ID NO: 2396280 - RNA, 19 nt, Artificial Sequence
  Description of Artificial Sequence: Synthetic oligonucleotide
guaauuggcaggacacagg

SEQ ID NO: 2396281 - RNA, 19 nt, Artificial Sequence
  Description of Artificial Sequence: Synthetic oligonucleotide
caagguagguacguaagug

SEQ ID NO: 2396282 - RNA, 19 nt, Artificial Sequence
  Description of Artificial Sequence: Synthetic oligonucleotide
gagcgcagggucaugacag

SEQ ID NO: 2396283 - RNA, 19 nt, Artificial Sequence
  Description of Artificial Sequence: Synthetic oligonucleotide
ugaacucacggcaggccug

SEQ ID NO: 2396284 - RNA, 19 nt, Artificial Sequence
  Description of Artificial Sequence: Synthetic oligonucleotide
agcagugaacuugccaugg

SEQ ID NO: 2396285 - RNA, 19 nt, Artificial Sequence
  Description of Artificial Sequence: Synthetic oligonucleotide
auugcucaaaugggaauag

SEQ ID NO: 2396286 - RNA, 19 nt, Artificial Sequence
  Description of Artificial Sequence: Synthetic oligonucleotide
gaagcuuccagagucucca

SEQ ID NO: 2396287 - RNA, 19 nt, Artificial Sequence
  Description of Artificial Sequence: Synthetic oligonucleotide
aaggguauugccacagcca

SEQ ID NO: 2396288 - RNA, 19 nt, Artificial Sequence
  Description of Artificial Sequence: Synthetic oligonucleotide
acguaaguggccaggaaag

SEQ ID NO: 2396289 - RNA, 19 nt, Artificial Sequence
  Description of Artificial Sequence: Synthetic oligonucleotide
accaguuagagaccuggga

SEQ ID NO: 2396290 - RNA, 19 nt, Artificial Sequence
  Description of Artificial Sequence: Synthetic oligonucleotide
cuucucuagcucagagugg

SEQ ID NO: 2396291 - RNA, 19 nt, Artificial Sequence
  Description of Artificial Sequence: Synthetic oligonucleotide
agguacccaaacuuaauua

SEQ ID NO: 2396292 - RNA, 19 nt, Artificial Sequence
  Description of Artificial Sequence: Synthetic oligonucleotide
uguucccggaggagguugg

SEQ ID NO: 2396293 - RNA, 19 nt, Artificial Sequence
  Description of Artificial Sequence: Synthetic oligonucleotide
acccaaacuuaauuagaca

SEQ ID NO: 2396294 - RNA, 19 nt, Artificial Sequence
  Description of Artificial Sequence: Synthetic oligonucleotide
agacacaucugaguugaag

SEQ ID NO: 2396295 - RNA, 19 nt, Artificial Sequence
  Description of Artificial Sequence: Synthetic oligonucleotide
cucguucagcacuucagug

SEQ ID NO: 2396296 - RNA, 19 nt, Artificial Sequence
  Description of Artificial Sequence: Synthetic oligonucleotide
ucagagugguaaaucuguc

SEQ ID NO: 2396297 - RNA, 19 nt, Artificial Sequence
  Description of Artificial Sequence: Synthetic oligonucleotide
ucacuccaagguagguacg

SEQ ID NO: 2396298 - RNA, 19 nt, Artificial Sequence
  Description of Artificial Sequence: Synthetic oligonucleotide
uuggugacgugugugguga

SEQ ID NO: 2396299 - RNA, 19 nt, Artificial Sequence
  Description of Artificial Sequence: Synthetic oligonucleotide
aaaugggaauagaaauacu

SEQ ID NO: 2396300 - RNA, 19 nt, Artificial Sequence
  Description of Artificial Sequence: Synthetic oligonucleotide
uucucuuguugccgaacca

SEQ ID NO: 2396301 - RNA, 19 nt, Artificial Sequence
  Description of Artificial Sequence: Synthetic oligonucleotide
guugccgaaccaguuagag

SEQ ID NO: 2396302 - RNA, 19 nt, Artificial Sequence
  Description of Artificial Sequence: Synthetic oligonucleotide
acucguucagcacuucagu

SEQ ID NO: 2396303 - RNA, 19 nt, Artificial Sequence
  Description of Artificial Sequence: Synthetic oligonucleotide
cugaguugaagcuuccaga

SEQ ID NO: 2396304 - RNA, 19 nt, Artificial Sequence
  Description of Artificial Sequence: Synthetic oligonucleotide
aauacucguucagcacuuc

SEQ ID NO: 2396305 - RNA, 19 nt, Artificial Sequence
  Description of Artificial Sequence: Synthetic oligonucleotide
gguccgaagggugagaacc

SEQ ID NO: 2396306 - RNA, 19 nt, Artificial Sequence
  Description of Artificial Sequence: Synthetic oligonucleotide
cagcaggugaugagggugg

SEQ ID NO: 2396307 - RNA, 19 nt, Artificial Sequence
  Description of Artificial Sequence: Synthetic oligonucleotide
guacaugguggccucuucc

SEQ ID NO: 2396308 - RNA, 19 nt, Artificial Sequence
  Description of Artificial Sequence: Synthetic oligonucleotide
ucacccuacucuguucccg

SEQ ID NO: 2396309 - RNA, 19 nt, Artificial Sequence
  Description of Artificial Sequence: Synthetic oligonucleotide
ucccggaggagguugguga

SEQ ID NO: 2396310 - RNA, 19 nt, Artificial Sequence
  Description of Artificial Sequence: Synthetic oligonucleotide
agggucaugacagccucac

SEQ ID NO: 2396311 - RNA, 19 nt, Artificial Sequence
  Description of Artificial Sequence: Synthetic oligonucleotide
cuggguguggacuggcagc

SEQ ID NO: 2396312 - RNA, 19 nt, Artificial Sequence
  Description of Artificial Sequence: Synthetic oligonucleotide
auggaucaugcccaccaug

SEQ ID NO: 2396313 - RNA, 19 nt, Artificial Sequence
  Description of Artificial Sequence: Synthetic oligonucleotide
aaucacuccaagguaggua

SEQ ID NO: 2396314 - RNA, 19 nt, Artificial Sequence
  Description of Artificial Sequence: Synthetic oligonucleotide
aaccaguuagagaccuggg

SEQ ID NO: 2396315 - RNA, 19 nt, Artificial Sequence
  Description of Artificial Sequence: Synthetic oligonucleotide
ucugucggaucugggacag

SEQ ID NO: 2396316 - RNA, 19 nt, Artificial Sequence
  Description of Artificial Sequence: Synthetic oligonucleotide
gaaaggguauugccacagc

SEQ ID NO: 2396317 - RNA, 19 nt, Artificial Sequence
  Description of Artificial Sequence: Synthetic oligonucleotide
acuuugguggccguagaug

SEQ ID NO: 2396318 - RNA, 19 nt, Artificial Sequence
  Description of Artificial Sequence: Synthetic oligonucleotide
aaaucacuccaagguaggu

SEQ ID NO: 2396319 - RNA, 19 nt, Artificial Sequence
  Description of Artificial Sequence: Synthetic oligonucleotide
agugguaaaucugucggau

SEQ ID NO: 2396320 - RNA, 19 nt, Artificial Sequence
  Description of Artificial Sequence: Synthetic oligonucleotide
uuacugaaauuccgccgcu

SEQ ID NO: 2396321 - RNA, 19 nt, Artificial Sequence
  Description of Artificial Sequence: Synthetic oligonucleotide
uggacuggcagcugcucug

SEQ ID NO: 2396322 - RNA, 19 nt, Artificial Sequence
  Description of Artificial Sequence: Synthetic oligonucleotide
ucuagcucagagugguaaa

SEQ ID NO: 2396323 - RNA, 19 nt, Artificial Sequence
  Description of Artificial Sequence: Synthetic oligonucleotide
gauugcucaaaugggaaua

SEQ ID NO: 2396324 - RNA, 19 nt, Artificial Sequence
  Description of Artificial Sequence: Synthetic oligonucleotide
guguggugaacucacggca

SEQ ID NO: 2396325 - RNA, 19 nt, Artificial Sequence
  Description of Artificial Sequence: Synthetic oligonucleotide
guggugaacucacggcagg

SEQ ID NO: 2396326 - RNA, 19 nt, Artificial Sequence
  Description of Artificial Sequence: Synthetic oligonucleotide
guggcucucugccagcugc

SEQ ID NO: 2396327 - RNA, 19 nt, Artificial Sequence
  Description of Artificial Sequence: Synthetic oligonucleotide
caugucaccuccacugguc

SEQ ID NO: 2396328 - RNA, 19 nt, Artificial Sequence
  Description of Artificial Sequence: Synthetic oligonucleotide
ucuuguugccgaaccaguu

SEQ ID NO: 2396329 - RNA, 19 nt, Artificial Sequence
  Description of Artificial Sequence: Synthetic oligonucleotide
uagcagugaacuugccaug

SEQ ID NO: 2396330 - RNA, 19 nt, Artificial Sequence
  Description of Artificial Sequence: Synthetic oligonucleotide
gguaaggauugcucaaaug

SEQ ID NO: 2396331 - RNA, 19 nt, Artificial Sequence
  Description of Artificial Sequence: Synthetic oligonucleotide
acguguguggugaacucac

SEQ ID NO: 2396332 - RNA, 19 nt, Artificial Sequence
  Description of Artificial Sequence: Synthetic oligonucleotide
guagguacguaaguggcca

SEQ ID NO: 2396333 - RNA, 19 nt, Artificial Sequence
  Description of Artificial Sequence: Synthetic oligonucleotide
ccaguuagagaccugggac

SEQ ID NO: 2396334 - RNA, 19 nt, Artificial Sequence
  Description of Artificial Sequence: Synthetic oligonucleotide
auacucguucagcacuuca

SEQ ID NO: 2396335 - RNA, 19 nt, Artificial Sequence
  Description of Artificial Sequence: Synthetic oligonucleotide
caguuagagaccugggaca

SEQ ID NO: 2396336 - RNA, 19 nt, Artificial Sequence
  Description of Artificial Sequence: Synthetic oligonucleotide
uugccgaaccaguuagaga

SEQ ID NO: 2396337 - RNA, 19 nt, Artificial Sequence
  Description of Artificial Sequence: Synthetic oligonucleotide
agcgcagggucaugacagc

SEQ ID NO: 2396338 - RNA, 19 nt, Artificial Sequence
  Description of Artificial Sequence: Synthetic oligonucleotide
agggccagucauccauggc

SEQ ID NO: 2396339 - RNA, 19 nt, Artificial Sequence
  Description of Artificial Sequence: Synthetic oligonucleotide
caggugaugaggguggcug

SEQ ID NO: 2396340 - RNA, 19 nt, Artificial Sequence
  Description of Artificial Sequence: Synthetic oligonucleotide
acucacggcaggccuguuc

SEQ ID NO: 2396341 - RNA, 19 nt, Artificial Sequence
  Description of Artificial Sequence: Synthetic oligonucleotide
ugggguaaggauugcucaa

SEQ ID NO: 2396342 - RNA, 19 nt, Artificial Sequence
  Description of Artificial Sequence: Synthetic oligonucleotide
gagugguaaaucugucgga

SEQ ID NO: 2396343 - RNA, 19 nt, Artificial Sequence
  Description of Artificial Sequence: Synthetic oligonucleotide
aucugucggaucugggaca

SEQ ID NO: 2396344 - RNA, 19 nt, Artificial Sequence
  Description of Artificial Sequence: Synthetic oligonucleotide
gucaccuccacuggucagg

SEQ ID NO: 2396345 - RNA, 19 nt, Artificial Sequence
  Description of Artificial Sequence: Synthetic oligonucleotide
guagaugucuucucagugu

SEQ ID NO: 2396346 - RNA, 19 nt, Artificial Sequence
  Description of Artificial Sequence: Synthetic oligonucleotide
gagguuggugacgugugug

SEQ ID NO: 2396347 - RNA, 19 nt, Artificial Sequence
  Description of Artificial Sequence: Synthetic oligonucleotide
cacccuacucuguucccgg

SEQ ID NO: 2396348 - RNA, 19 nt, Artificial Sequence
  Description of Artificial Sequence: Synthetic oligonucleotide
ucaccuccacuggucaggg

SEQ ID NO: 2396349 - RNA, 19 nt, Artificial Sequence
  Description of Artificial Sequence: Synthetic oligonucleotide
cacucaaccagguacccaa

SEQ ID NO: 2396350 - RNA, 19 nt, Artificial Sequence
  Description of Artificial Sequence: Synthetic oligonucleotide
uccaggagccgugagcgca

SEQ ID NO: 2396351 - RNA, 19 nt, Artificial Sequence
  Description of Artificial Sequence: Synthetic oligonucleotide
ugugcuccaucucccugga

SEQ ID NO: 2396352 - RNA, 19 nt, Artificial Sequence
  Description of Artificial Sequence: Synthetic oligonucleotide
uguugccgaaccaguuaga

SEQ ID NO: 2396353 - RNA, 19 nt, Artificial Sequence
  Description of Artificial Sequence: Synthetic oligonucleotide
cucagagugguaaaucugu

SEQ ID NO: 2396354 - RNA, 19 nt, Artificial Sequence
  Description of Artificial Sequence: Synthetic oligonucleotide
agguacguaaguggccagg

SEQ ID NO: 2396355 - RNA, 19 nt, Artificial Sequence
  Description of Artificial Sequence: Synthetic oligonucleotide
ggaaaggguauugccacag

SEQ ID NO: 2396356 - RNA, 19 nt, Artificial Sequence
  Description of Artificial Sequence: Synthetic oligonucleotide
aggaaccugggcugggugu

SEQ ID NO: 2396357 - RNA, 19 nt, Artificial Sequence
  Description of Artificial Sequence: Synthetic oligonucleotide
cucaaccagguacccaaac

SEQ ID NO: 2396358 - RNA, 19 nt, Artificial Sequence
  Description of Artificial Sequence: Synthetic oligonucleotide
uuugguggccguagauguc

SEQ ID NO: 2396359 - RNA, 19 nt, Artificial Sequence
  Description of Artificial Sequence: Synthetic oligonucleotide
ucuggauagcagugaacuu

SEQ ID NO: 2396360 - RNA, 19 nt, Artificial Sequence
  Description of Artificial Sequence: Synthetic oligonucleotide
uagguacguaaguggccag

SEQ ID NO: 2396361 - RNA, 19 nt, Artificial Sequence
  Description of Artificial Sequence: Synthetic oligonucleotide
aggacacagggccagucau

SEQ ID NO: 2396362 - RNA, 19 nt, Artificial Sequence
  Description of Artificial Sequence: Synthetic oligonucleotide
caucugaguugaagcuucc

SEQ ID NO: 2396363 - RNA, 19 nt, Artificial Sequence
  Description of Artificial Sequence: Synthetic oligonucleotide
agaugucuucucaguguac

SEQ ID NO: 2396364 - RNA, 19 nt, Artificial Sequence
  Description of Artificial Sequence: Synthetic oligonucleotide
auccaggagccgugagcgc

SEQ ID NO: 2396365 - RNA, 19 nt, Artificial Sequence
  Description of Artificial Sequence: Synthetic oligonucleotide
ugacguguguggugaacuc

SEQ ID NO: 2396366 - RNA, 19 nt, Artificial Sequence
  Description of Artificial Sequence: Synthetic oligonucleotide
cucacggcaggccuguuca

SEQ ID NO: 2396367 - RNA, 19 nt, Artificial Sequence
  Description of Artificial Sequence: Synthetic oligonucleotide
gguguggacuggcagcugc

SEQ ID NO: 2396368 - RNA, 19 nt, Artificial Sequence
  Description of Artificial Sequence: Synthetic oligonucleotide
gaagggugagaaccauguc

SEQ ID NO: 2396369 - RNA, 19 nt, Artificial Sequence
  Description of Artificial Sequence: Synthetic oligonucleotide
uguaucggauucucuuguu

SEQ ID NO: 2396370 - RNA, 19 nt, Artificial Sequence
  Description of Artificial Sequence: Synthetic oligonucleotide
uggguguggacuggcagcu

SEQ ID NO: 2396371 - RNA, 19 nt, Artificial Sequence
  Description of Artificial Sequence: Synthetic oligonucleotide
auugccacagccaggguuu

SEQ ID NO: 2396372 - RNA, 19 nt, Artificial Sequence
  Description of Artificial Sequence: Synthetic oligonucleotide
caugcccaccaugugcucc

SEQ ID NO: 2396373 - RNA, 19 nt, Artificial Sequence
  Description of Artificial Sequence: Synthetic oligonucleotide
gugaugaggguggcugugg

SEQ ID NO: 2396374 - RNA, 19 nt, Artificial Sequence
  Description of Artificial Sequence: Synthetic oligonucleotide
cucuggauagcagugaacu

SEQ ID NO: 2396375 - RNA, 19 nt, Artificial Sequence
  Description of Artificial Sequence: Synthetic oligonucleotide
gugguaaaucugucggauc

SEQ ID NO: 2396376 - RNA, 19 nt, Artificial Sequence
  Description of Artificial Sequence: Synthetic oligonucleotide
ccaaacuuaauuagacaca

SEQ ID NO: 2396377 - RNA, 19 nt, Artificial Sequence
  Description of Artificial Sequence: Synthetic oligonucleotide
gggccagucauccauggca

SEQ ID NO: 2396378 - RNA, 19 nt, Artificial Sequence
  Description of Artificial Sequence: Synthetic oligonucleotide
aggauugcucaaaugggaa

SEQ ID NO: 2396379 - RNA, 19 nt, Artificial Sequence
  Description of Artificial Sequence: Synthetic oligonucleotide
uugcucaaaugggaauaga

SEQ ID NO: 2396380 - RNA, 19 nt, Artificial Sequence
  Description of Artificial Sequence: Synthetic oligonucleotide
acccuuccuggccagcucu

SEQ ID NO: 2396381 - RNA, 19 nt, Artificial Sequence
  Description of Artificial Sequence: Synthetic oligonucleotide
cucacccuacucuguuccc

SEQ ID NO: 2396382 - RNA, 19 nt, Artificial Sequence
  Description of Artificial Sequence: Synthetic oligonucleotide
ucagcacuucaguggccug

SEQ ID NO: 2396383 - RNA, 19 nt, Artificial Sequence
  Description of Artificial Sequence: Synthetic oligonucleotide
gccguagaugucuucucag

SEQ ID NO: 2396384 - RNA, 19 nt, Artificial Sequence
  Description of Artificial Sequence: Synthetic oligonucleotide
gacguguguggugaacuca

SEQ ID NO: 2396385 - RNA, 19 nt, Artificial Sequence
  Description of Artificial Sequence: Synthetic oligonucleotide
gguagguacguaaguggcc

SEQ ID NO: 2396386 - RNA, 19 nt, Artificial Sequence
  Description of Artificial Sequence: Synthetic oligonucleotide
aggacacaggccucacccu

SEQ ID NO: 2396387 - RNA, 19 nt, Artificial Sequence
  Description of Artificial Sequence: Synthetic oligonucleotide
cuccaagguagguacguaa

SEQ ID NO: 2396388 - RNA, 19 nt, Artificial Sequence
  Description of Artificial Sequence: Synthetic oligonucleotide
agguaauuggcaggacaca

SEQ ID NO: 2396389 - RNA, 19 nt, Artificial Sequence
  Description of Artificial Sequence: Synthetic oligonucleotide
gagaccugggacacaguga

SEQ ID NO: 2396390 - RNA, 19 nt, Artificial Sequence
  Description of Artificial Sequence: Synthetic oligonucleotide
ugaacuugccauggaucau

SEQ ID NO: 2396391 - RNA, 19 nt, Artificial Sequence
  Description of Artificial Sequence: Synthetic oligonucleotide
acagccucacaggugcucu

SEQ ID NO: 2396392 - RNA, 19 nt, Artificial Sequence
  Description of Artificial Sequence: Synthetic oligonucleotide
ccaggaaaggguauugcca

SEQ ID NO: 2396393 - RNA, 19 nt, Artificial Sequence
  Description of Artificial Sequence: Synthetic oligonucleotide
gggaaggggccacaggaac

SEQ ID NO: 2396394 - RNA, 19 nt, Artificial Sequence
  Description of Artificial Sequence: Synthetic oligonucleotide
aggagguuggugacgugug

SEQ ID NO: 2396395 - RNA, 19 nt, Artificial Sequence
  Description of Artificial Sequence: Synthetic oligonucleotide
gacacaggccucacccuac

SEQ ID NO: 2396396 - RNA, 19 nt, Artificial Sequence
  Description of Artificial Sequence: Synthetic oligonucleotide
gcauccaggagccgugagc

SEQ ID NO: 2396397 - RNA, 19 nt, Artificial Sequence
  Description of Artificial Sequence: Synthetic oligonucleotide
ugccucuggauagcaguga

SEQ ID NO: 2396398 - RNA, 19 nt, Artificial Sequence
  Description of Artificial Sequence: Synthetic oligonucleotide
ggcgguggcucucugccag

SEQ ID NO: 2396399 - RNA, 19 nt, Artificial Sequence
  Description of Artificial Sequence: Synthetic oligonucleotide
cguagaugucuucucagug

SEQ ID NO: 2396400 - RNA, 19 nt, Artificial Sequence
  Description of Artificial Sequence: Synthetic oligonucleotide
cucuagcucagagugguaa

SEQ ID NO: 2396401 - RNA, 19 nt, Artificial Sequence
  Description of Artificial Sequence: Synthetic oligonucleotide
acacagugaugccacccuu

SEQ ID NO: 2396402 - RNA, 19 nt, Artificial Sequence
  Description of Artificial Sequence: Synthetic oligonucleotide
gaguugaagcuuccagagu

SEQ ID NO: 2396403 - RNA, 19 nt, Artificial Sequence
  Description of Artificial Sequence: Synthetic oligonucleotide
uggccguagaugucuucuc

SEQ ID NO: 2396404 - RNA, 19 nt, Artificial Sequence
  Description of Artificial Sequence: Synthetic oligonucleotide
ugccauggaucaugcccac

SEQ ID NO: 2396405 - RNA, 19 nt, Artificial Sequence
  Description of Artificial Sequence: Synthetic oligonucleotide
ggaucugggacagcuuggc

SEQ ID NO: 2396406 - RNA, 19 nt, Artificial Sequence
  Description of Artificial Sequence: Synthetic oligonucleotide
uucccggaggagguuggug

SEQ ID NO: 2396407 - RNA, 19 nt, Artificial Sequence
  Description of Artificial Sequence: Synthetic oligonucleotide
ggugaacucacggcaggcc

SEQ ID NO: 2396408 - RNA, 19 nt, Artificial Sequence
  Description of Artificial Sequence: Synthetic oligonucleotide
gaggagguuggugacgugu

SEQ ID NO: 2396409 - RNA, 19 nt, Artificial Sequence
  Description of Artificial Sequence: Synthetic oligonucleotide
ggaucaugcccaccaugug

SEQ ID NO: 2396410 - RNA, 19 nt, Artificial Sequence
  Description of Artificial Sequence: Synthetic oligonucleotide
acacaggccucacccuacu

SEQ ID NO: 2396411 - RNA, 19 nt, Artificial Sequence
  Description of Artificial Sequence: Synthetic oligonucleotide
aucugaguugaagcuucca

SEQ ID NO: 2396412 - RNA, 19 nt, Artificial Sequence
  Description of Artificial Sequence: Synthetic oligonucleotide
gcucagagugguaaaucug

SEQ ID NO: 2396413 - RNA, 19 nt, Artificial Sequence
  Description of Artificial Sequence: Synthetic oligonucleotide
uggcucucugccagcugcu

SEQ ID NO: 2396414 - RNA, 19 nt, Artificial Sequence
  Description of Artificial Sequence: Synthetic oligonucleotide
agcacuucaguggccugcu

SEQ ID NO: 2396415 - RNA, 19 nt, Artificial Sequence
  Description of Artificial Sequence: Synthetic oligonucleotide
gaaccaugucaccuccacu

SEQ ID NO: 2396416 - RNA, 19 nt, Artificial Sequence
  Description of Artificial Sequence: Synthetic oligonucleotide
gucucuucacugggguaag

SEQ ID NO: 2396417 - RNA, 19 nt, Artificial Sequence
  Description of Artificial Sequence: Synthetic oligonucleotide
cuguucccggaggagguug

SEQ ID NO: 2396418 - RNA, 19 nt, Artificial Sequence
  Description of Artificial Sequence: Synthetic oligonucleotide
caaccagguacccaaacuu

SEQ ID NO: 2396419 - RNA, 19 nt, Artificial Sequence
  Description of Artificial Sequence: Synthetic oligonucleotide
gaaggggccacaggaaccu

SEQ ID NO: 2396420 - RNA, 19 nt, Artificial Sequence
  Description of Artificial Sequence: Synthetic oligonucleotide
ggugagaaccaugucaccu

SEQ ID NO: 2396421 - RNA, 19 nt, Artificial Sequence
  Description of Artificial Sequence: Synthetic oligonucleotide
ugacagccucacaggugcu

SEQ ID NO: 2396422 - RNA, 19 nt, Artificial Sequence
  Description of Artificial Sequence: Synthetic oligonucleotide
uggccugcuuacugaaauu

SEQ ID NO: 2396423 - RNA, 19 nt, Artificial Sequence
  Description of Artificial Sequence: Synthetic oligonucleotide
uguggacuggcagcugcuc

SEQ ID NO: 2396424 - RNA, 19 nt, Artificial Sequence
  Description of Artificial Sequence: Synthetic oligonucleotide
cuuccuggaacuuccccgu

SEQ ID NO: 2396425 - RNA, 19 nt, Artificial Sequence
  Description of Artificial Sequence: Synthetic oligonucleotide
uggggcgguggcucucugc

SEQ ID NO: 2396426 - RNA, 19 nt, Artificial Sequence
  Description of Artificial Sequence: Synthetic oligonucleotide
ggaggaaggccaggguccg

SEQ ID NO: 2396427 - RNA, 19 nt, Artificial Sequence
  Description of Artificial Sequence: Synthetic oligonucleotide
uagagaccugggacacagu

SEQ ID NO: 2396428 - RNA, 19 nt, Artificial Sequence
  Description of Artificial Sequence: Synthetic oligonucleotide
cugggacacagugaugcca

SEQ ID NO: 2396429 - RNA, 19 nt, Artificial Sequence
  Description of Artificial Sequence: Synthetic oligonucleotide
ggucucuucacugggguaa

SEQ ID NO: 2396430 - RNA, 19 nt, Artificial Sequence
  Description of Artificial Sequence: Synthetic oligonucleotide
auuccgccgcuuccgccug

SEQ ID NO: 2396431 - RNA, 19 nt, Artificial Sequence
  Description of Artificial Sequence: Synthetic oligonucleotide
ucucuagcucagaguggua

SEQ ID NO: 2396432 - RNA, 19 nt, Artificial Sequence
  Description of Artificial Sequence: Synthetic oligonucleotide
guggccugcuuacugaaau

SEQ ID NO: 2396433 - RNA, 19 nt, Artificial Sequence
  Description of Artificial Sequence: Synthetic oligonucleotide
ggccugcuuacugaaauuc

SEQ ID NO: 2396434 - RNA, 19 nt, Artificial Sequence
  Description of Artificial Sequence: Synthetic oligonucleotide
gagucuccagcaggugaug

SEQ ID NO: 2396435 - RNA, 19 nt, Artificial Sequence
  Description of Artificial Sequence: Synthetic oligonucleotide
uccgaagggugagaaccau

SEQ ID NO: 2396436 - RNA, 19 nt, Artificial Sequence
  Description of Artificial Sequence: Synthetic oligonucleotide
gacagccucacaggugcuc

SEQ ID NO: 2396437 - RNA, 19 nt, Artificial Sequence
  Description of Artificial Sequence: Synthetic oligonucleotide
accccggacuuugguggcc

SEQ ID NO: 2396438 - RNA, 19 nt, Artificial Sequence
  Description of Artificial Sequence: Synthetic oligonucleotide
uacugaaauuccgccgcuu

SEQ ID NO: 2396439 - RNA, 19 nt, Artificial Sequence
  Description of Artificial Sequence: Synthetic oligonucleotide
gccugcuuacugaaauucc

SEQ ID NO: 2396440 - RNA, 19 nt, Artificial Sequence
  Description of Artificial Sequence: Synthetic oligonucleotide
gguacguaaguggccagga

SEQ ID NO: 2396441 - RNA, 19 nt, Artificial Sequence
  Description of Artificial Sequence: Synthetic oligonucleotide
guacguaaguggccaggaa

SEQ ID NO: 2396442 - RNA, 19 nt, Artificial Sequence
  Description of Artificial Sequence: Synthetic oligonucleotide
gugagcgcagggucaugac

SEQ ID NO: 2396443 - RNA, 19 nt, Artificial Sequence
  Description of Artificial Sequence: Synthetic oligonucleotide
uagacacaucugaguugaa

SEQ ID NO: 2396444 - RNA, 19 nt, Artificial Sequence
  Description of Artificial Sequence: Synthetic oligonucleotide
gcagggucaugacagccuc

SEQ ID NO: 2396445 - RNA, 19 nt, Artificial Sequence
  Description of Artificial Sequence: Synthetic oligonucleotide
cuggaacuuccccguguuc

SEQ ID NO: 2396446 - RNA, 19 nt, Artificial Sequence
  Description of Artificial Sequence: Synthetic oligonucleotide
aaccugggcugggugugga

SEQ ID NO: 2396447 - RNA, 19 nt, Artificial Sequence
  Description of Artificial Sequence: Synthetic oligonucleotide
ugccacccuuccuggccag

SEQ ID NO: 2396448 - RNA, 19 nt, Artificial Sequence
  Description of Artificial Sequence: Synthetic oligonucleotide
ggguauugccacagccagg

SEQ ID NO: 2396449 - RNA, 19 nt, Artificial Sequence
  Description of Artificial Sequence: Synthetic oligonucleotide
gggugagaaccaugucacc

SEQ ID NO: 2396450 - RNA, 19 nt, Artificial Sequence
  Description of Artificial Sequence: Synthetic oligonucleotide
gugacguguguggugaacu

SEQ ID NO: 2396451 - RNA, 19 nt, Artificial Sequence
  Description of Artificial Sequence: Synthetic oligonucleotide
aguguacaugguggccucu

SEQ ID NO: 2396452 - RNA, 19 nt, Artificial Sequence
  Description of Artificial Sequence: Synthetic oligonucleotide
uuccgccgcuuccgccugg

SEQ ID NO: 2396453 - RNA, 19 nt, Artificial Sequence
  Description of Artificial Sequence: Synthetic oligonucleotide
acccuacucuguucccgga

SEQ ID NO: 2396454 - RNA, 19 nt, Artificial Sequence
  Description of Artificial Sequence: Synthetic oligonucleotide
guugaagcuuccagagucu

SEQ ID NO: 2396455 - RNA, 19 nt, Artificial Sequence
  Description of Artificial Sequence: Synthetic oligonucleotide
gagaaccaugucaccucca

SEQ ID NO: 2396456 - RNA, 19 nt, Artificial Sequence
  Description of Artificial Sequence: Synthetic oligonucleotide
cugagguaauuggcaggac

SEQ ID NO: 2396457 - RNA, 19 nt, Artificial Sequence
  Description of Artificial Sequence: Synthetic oligonucleotide
ggaggacacaggccucacc

SEQ ID NO: 2396458 - RNA, 19 nt, Artificial Sequence
  Description of Artificial Sequence: Synthetic oligonucleotide
uguggggcgguggcucucu

SEQ ID NO: 2396459 - RNA, 19 nt, Artificial Sequence
  Description of Artificial Sequence: Synthetic oligonucleotide
ggccagucauccauggcac

SEQ ID NO: 2396460 - RNA, 19 nt, Artificial Sequence
  Description of Artificial Sequence: Synthetic oligonucleotide
gcugccucuggauagcagu

SEQ ID NO: 2396461 - RNA, 19 nt, Artificial Sequence
  Description of Artificial Sequence: Synthetic oligonucleotide
cagucauccauggcacuca

SEQ ID NO: 2396462 - RNA, 19 nt, Artificial Sequence
  Description of Artificial Sequence: Synthetic oligonucleotide
cagguacccaaacuuaauu

SEQ ID NO: 2396463 - RNA, 19 nt, Artificial Sequence
  Description of Artificial Sequence: Synthetic oligonucleotide
caggccuguucauacuucu

SEQ ID NO: 2396464 - RNA, 19 nt, Artificial Sequence
  Description of Artificial Sequence: Synthetic oligonucleotide
guccgaagggugagaacca

SEQ ID NO: 2396465 - RNA, 19 nt, Artificial Sequence
  Description of Artificial Sequence: Synthetic oligonucleotide
cacagggccagucauccau

SEQ ID NO: 2396466 - RNA, 19 nt, Artificial Sequence
  Description of Artificial Sequence: Synthetic oligonucleotide
uggaggacacaggccucac

SEQ ID NO: 2396467 - RNA, 19 nt, Artificial Sequence
  Description of Artificial Sequence: Synthetic oligonucleotide
ggccaggaaaggguauugc

SEQ ID NO: 2396468 - RNA, 19 nt, Artificial Sequence
  Description of Artificial Sequence: Synthetic oligonucleotide
guggccguagaugucuucu

SEQ ID NO: 2396469 - RNA, 19 nt, Artificial Sequence
  Description of Artificial Sequence: Synthetic oligonucleotide
ggauugcucaaaugggaau

SEQ ID NO: 2396470 - RNA, 19 nt, Artificial Sequence
  Description of Artificial Sequence: Synthetic oligonucleotide
ccucuggauagcagugaac

SEQ ID NO: 2396471 - RNA, 19 nt, Artificial Sequence
  Description of Artificial Sequence: Synthetic oligonucleotide
cguaaguggccaggaaagg

SEQ ID NO: 2396472 - RNA, 19 nt, Artificial Sequence
  Description of Artificial Sequence: Synthetic oligonucleotide
ggcauccaggagccgugag

SEQ ID NO: 2396473 - RNA, 19 nt, Artificial Sequence
  Description of Artificial Sequence: Synthetic oligonucleotide
gccgcuuccgccuggcauc

SEQ ID NO: 2396474 - RNA, 19 nt, Artificial Sequence
  Description of Artificial Sequence: Synthetic oligonucleotide
caccuccacuggucagggg

SEQ ID NO: 2396475 - RNA, 19 nt, Artificial Sequence
  Description of Artificial Sequence: Synthetic oligonucleotide
ggcacucaaccagguaccc

SEQ ID NO: 2396476 - RNA, 19 nt, Artificial Sequence
  Description of Artificial Sequence: Synthetic oligonucleotide
cagugaacuugccauggau

SEQ ID NO: 2396477 - RNA, 19 nt, Artificial Sequence
  Description of Artificial Sequence: Synthetic oligonucleotide
ccagucauccauggcacuc

SEQ ID NO: 2396478 - RNA, 19 nt, Artificial Sequence
  Description of Artificial Sequence: Synthetic oligonucleotide
cacaggccucacccuacuc

SEQ ID NO: 2396479 - RNA, 19 nt, Artificial Sequence
  Description of Artificial Sequence: Synthetic oligonucleotide
caguggccugcuuacugaa

SEQ ID NO: 2396480 - RNA, 19 nt, Artificial Sequence
  Description of Artificial Sequence: Synthetic oligonucleotide
ccgaagggugagaaccaug

SEQ ID NO: 2396481 - RNA, 19 nt, Artificial Sequence
  Description of Artificial Sequence: Synthetic oligonucleotide
ccugaaccccggacuuugg

SEQ ID NO: 2396482 - RNA, 19 nt, Artificial Sequence
  Description of Artificial Sequence: Synthetic oligonucleotide
ucacggcaggccuguucau

SEQ ID NO: 2396483 - RNA, 19 nt, Artificial Sequence
  Description of Artificial Sequence: Synthetic oligonucleotide
cauggcacucaaccaggua

SEQ ID NO: 2396484 - RNA, 19 nt, Artificial Sequence
  Description of Artificial Sequence: Synthetic oligonucleotide
ccaucucccuggaggacac

SEQ ID NO: 2396485 - RNA, 19 nt, Artificial Sequence
  Description of Artificial Sequence: Synthetic oligonucleotide
uggugacguguguggugaa

SEQ ID NO: 2396486 - RNA, 19 nt, Artificial Sequence
  Description of Artificial Sequence: Synthetic oligonucleotide
cccuacucuguucccggag

SEQ ID NO: 2396487 - RNA, 19 nt, Artificial Sequence
  Description of Artificial Sequence: Synthetic oligonucleotide
cggaucugggacagcuugg

SEQ ID NO: 2396488 - RNA, 19 nt, Artificial Sequence
  Description of Artificial Sequence: Synthetic oligonucleotide
gaacucacggcaggccugu

SEQ ID NO: 2396489 - RNA, 19 nt, Artificial Sequence
  Description of Artificial Sequence: Synthetic oligonucleotide
gccaggguuucugagguaa

SEQ ID NO: 2396490 - RNA, 19 nt, Artificial Sequence
  Description of Artificial Sequence: Synthetic oligonucleotide
ggugacguguguggugaac

SEQ ID NO: 2396491 - RNA, 19 nt, Artificial Sequence
  Description of Artificial Sequence: Synthetic oligonucleotide
cguguguggugaacucacg

SEQ ID NO: 2396492 - RNA, 19 nt, Artificial Sequence
  Description of Artificial Sequence: Synthetic oligonucleotide
gcagugaacuugccaugga

SEQ ID NO: 2396493 - RNA, 19 nt, Artificial Sequence
  Description of Artificial Sequence: Synthetic oligonucleotide
cagggucaugacagccuca

SEQ ID NO: 2396494 - RNA, 19 nt, Artificial Sequence
  Description of Artificial Sequence: Synthetic oligonucleotide
cuagcucagagugguaaau

SEQ ID NO: 2396495 - RNA, 19 nt, Artificial Sequence
  Description of Artificial Sequence: Synthetic oligonucleotide
cacccuuccuggccagcuc

SEQ ID NO: 2396496 - RNA, 19 nt, Artificial Sequence
  Description of Artificial Sequence: Synthetic oligonucleotide
ggauagcagugaacuugcc

SEQ ID NO: 2396497 - RNA, 19 nt, Artificial Sequence
  Description of Artificial Sequence: Synthetic oligonucleotide
gccucuggauagcagugaa

SEQ ID NO: 2396498 - RNA, 19 nt, Artificial Sequence
  Description of Artificial Sequence: Synthetic oligonucleotide
uccgccgcuuccgccuggc

SEQ ID NO: 2396499 - RNA, 19 nt, Artificial Sequence
  Description of Artificial Sequence: Synthetic oligonucleotide
ccaggagccgugagcgcag

SEQ ID NO: 2396500 - RNA, 19 nt, Artificial Sequence
  Description of Artificial Sequence: Synthetic oligonucleotide
cgaagggugagaaccaugu

SEQ ID NO: 2396501 - RNA, 19 nt, Artificial Sequence
  Description of Artificial Sequence: Synthetic oligonucleotide
acucaaccagguacccaaa

SEQ ID NO: 2396502 - RNA, 19 nt, Artificial Sequence
  Description of Artificial Sequence: Synthetic oligonucleotide
ggauucucuuguugccgaa

SEQ ID NO: 2396503 - RNA, 19 nt, Artificial Sequence
  Description of Artificial Sequence: Synthetic oligonucleotide
gguggcucucugccagcug

SEQ ID NO: 2396504 - RNA, 19 nt, Artificial Sequence
  Description of Artificial Sequence: Synthetic oligonucleotide
ggggcuggaggcagacucc

SEQ ID NO: 2396505 - RNA, 19 nt, Artificial Sequence
  Description of Artificial Sequence: Synthetic oligonucleotide
cacaucugaguugaagcuu

SEQ ID NO: 2396506 - RNA, 19 nt, Artificial Sequence
  Description of Artificial Sequence: Synthetic oligonucleotide
gcgcagggucaugacagcc

SEQ ID NO: 2396507 - RNA, 19 nt, Artificial Sequence
  Description of Artificial Sequence: Synthetic oligonucleotide
cacuccaagguagguacgu

SEQ ID NO: 2396508 - RNA, 19 nt, Artificial Sequence
  Description of Artificial Sequence: Synthetic oligonucleotide
cugaaccccggacuuuggu

SEQ ID NO: 2396509 - RNA, 19 nt, Artificial Sequence
  Description of Artificial Sequence: Synthetic oligonucleotide
gccgaaccaguuagagacc

SEQ ID NO: 2396510 - RNA, 19 nt, Artificial Sequence
  Description of Artificial Sequence: Synthetic oligonucleotide
ggguccgaagggugagaac

SEQ ID NO: 2396511 - RNA, 19 nt, Artificial Sequence
  Description of Artificial Sequence: Synthetic oligonucleotide
cccugaaccccggacuuug

SEQ ID NO: 2396512 - RNA, 19 nt, Artificial Sequence
  Description of Artificial Sequence: Synthetic oligonucleotide
ggguaaggauugcucaaau

SEQ ID NO: 2396513 - RNA, 19 nt, Artificial Sequence
  Description of Artificial Sequence: Synthetic oligonucleotide
ggacacagggccagucauc

SEQ ID NO: 2396514 - RNA, 19 nt, Artificial Sequence
  Description of Artificial Sequence: Synthetic oligonucleotide
gguggccguagaugucuuc

SEQ ID NO: 2396515 - RNA, 19 nt, Artificial Sequence
  Description of Artificial Sequence: Synthetic oligonucleotide
cggacuuugguggccguag

SEQ ID NO: 2396516 - RNA, 19 nt, Artificial Sequence
  Description of Artificial Sequence: Synthetic oligonucleotide
ccuggaggacacaggccuc

SEQ ID NO: 2396517 - RNA, 19 nt, Artificial Sequence
  Description of Artificial Sequence: Synthetic oligonucleotide
ccaggguccgaagggugag

SEQ ID NO: 2396518 - RNA, 19 nt, Artificial Sequence
  Description of Artificial Sequence: Synthetic oligonucleotide
ggccaggguccgaagggug

SEQ ID NO: 2396519 - RNA, 19 nt, Artificial Sequence
  Description of Artificial Sequence: Synthetic oligonucleotide
aggccucacccuacucugu

SEQ ID NO: 2396520 - RNA, 19 nt, Artificial Sequence
  Description of Artificial Sequence: Synthetic oligonucleotide
ccggaggagguuggugacg

SEQ ID NO: 2396521 - RNA, 19 nt, Artificial Sequence
  Description of Artificial Sequence: Synthetic oligonucleotide
ggagguuggugacgugugu

SEQ ID NO: 2396522 - RNA, 19 nt, Artificial Sequence
  Description of Artificial Sequence: Synthetic oligonucleotide
ccaagguagguacguaagu

SEQ ID NO: 2396523 - RNA, 19 nt, Artificial Sequence
  Description of Artificial Sequence: Synthetic oligonucleotide
gaacuuccccguguucuuu

SEQ ID NO: 2396524 - RNA, 19 nt, Artificial Sequence
  Description of Artificial Sequence: Synthetic oligonucleotide
cggauucucuuguugccga

SEQ ID NO: 2396525 - RNA, 19 nt, Artificial Sequence
  Description of Artificial Sequence: Synthetic oligonucleotide
gggucaugacagccucaca

SEQ ID NO: 2396526 - RNA, 19 nt, Artificial Sequence
  Description of Artificial Sequence: Synthetic oligonucleotide
gcacucaaccagguaccca

SEQ ID NO: 2396527 - RNA, 19 nt, Artificial Sequence
  Description of Artificial Sequence: Synthetic oligonucleotide
ggcaggccuguucauacuu

SEQ ID NO: 2396528 - RNA, 19 nt, Artificial Sequence
  Description of Artificial Sequence: Synthetic oligonucleotide
ggaacuuccccguguucuu

SEQ ID NO: 2396529 - RNA, 19 nt, Artificial Sequence
  Description of Artificial Sequence: Synthetic oligonucleotide
guauugccacagccagggu

SEQ ID NO: 2396530 - RNA, 19 nt, Artificial Sequence
  Description of Artificial Sequence: Synthetic oligonucleotide
ccccggacuuugguggccg

SEQ ID NO: 2396531 - RNA, 19 nt, Artificial Sequence
  Description of Artificial Sequence: Synthetic oligonucleotide
guggggcgguggcucucug

SEQ ID NO: 2396532 - RNA, 19 nt, Artificial Sequence
  Description of Artificial Sequence: Synthetic oligonucleotide
gccaggguccgaaggguga

SEQ ID NO: 2396533 - RNA, 19 nt, Artificial Sequence
  Description of Artificial Sequence: Synthetic oligonucleotide
ggagccgugagcgcagggu

SEQ ID NO: 2396534 - RNA, 19 nt, Artificial Sequence
  Description of Artificial Sequence: Synthetic oligonucleotide
ccguagaugucuucucagu

SEQ ID NO: 2396535 - RNA, 19 nt, Artificial Sequence
  Description of Artificial Sequence: Synthetic oligonucleotide
aacucacggcaggccuguu

SEQ ID NO: 2396536 - RNA, 19 nt, Artificial Sequence
  Description of Artificial Sequence: Synthetic oligonucleotide
gcgguggcucucugccagc

SEQ ID NO: 2396537 - RNA, 19 nt, Artificial Sequence
  Description of Artificial Sequence: Synthetic oligonucleotide
cuucaguggccugcuuacu

SEQ ID NO: 2396538 - RNA, 19 nt, Artificial Sequence
  Description of Artificial Sequence: Synthetic oligonucleotide
caggguuucugagguaauu

SEQ ID NO: 2396539 - RNA, 19 nt, Artificial Sequence
  Description of Artificial Sequence: Synthetic oligonucleotide
caggguccgaagggugaga

SEQ ID NO: 2396540 - RNA, 19 nt, Artificial Sequence
  Description of Artificial Sequence: Synthetic oligonucleotide
guguacaugguggccucuu

SEQ ID NO: 2396541 - RNA, 19 nt, Artificial Sequence
  Description of Artificial Sequence: Synthetic oligonucleotide
gggcuggguguggacuggc

SEQ ID NO: 2396542 - RNA, 19 nt, Artificial Sequence
  Description of Artificial Sequence: Synthetic oligonucleotide
ccgaaccaguuagagaccu

SEQ ID NO: 2396543 - RNA, 19 nt, Artificial Sequence
  Description of Artificial Sequence: Synthetic oligonucleotide
cgugagcgcagggucauga

SEQ ID NO: 2396544 - RNA, 19 nt, Artificial Sequence
  Description of Artificial Sequence: Synthetic oligonucleotide
ccgcuuccgccuggcaucc

SEQ ID NO: 2396545 - RNA, 19 nt, Artificial Sequence
  Description of Artificial Sequence: Synthetic oligonucleotide
ggcuggguguggacuggca

SEQ ID NO: 2396546 - RNA, 19 nt, Artificial Sequence
  Description of Artificial Sequence: Synthetic oligonucleotide
ccaugucaccuccacuggu

SEQ ID NO: 2396547 - RNA, 19 nt, Artificial Sequence
  Description of Artificial Sequence: Synthetic oligonucleotide
gccagucauccauggcacu

SEQ ID NO: 2396548 - RNA, 19 nt, Artificial Sequence
  Description of Artificial Sequence: Synthetic oligonucleotide
caucucccuggaggacaca

SEQ ID NO: 2396549 - RNA, 19 nt, Artificial Sequence
  Description of Artificial Sequence: Synthetic oligonucleotide
ccaugugcuccaucucccu

SEQ ID NO: 2396550 - RNA, 19 nt, Artificial Sequence
  Description of Artificial Sequence: Synthetic oligonucleotide
ccauggcacucaaccaggu

SEQ ID NO: 2396551 - RNA, 19 nt, Artificial Sequence
  Description of Artificial Sequence: Synthetic oligonucleotide
gccacccuuccuggccagc

SEQ ID NO: 2396552 - RNA, 19 nt, Artificial Sequence
  Description of Artificial Sequence: Synthetic oligonucleotide
ccaggguuucugagguaau

SEQ ID NO: 2396553 - RNA, 19 nt, Artificial Sequence
  Description of Artificial Sequence: Synthetic oligonucleotide
cggaggagguuggugacgu

SEQ ID NO: 2396554 - RNA, 19 nt, Artificial Sequence
  Description of Artificial Sequence: Synthetic oligonucleotide
gccgugagcgcagggucau

SEQ ID NO: 2396555 - RNA, 19 nt, Artificial Sequence
  Description of Artificial Sequence: Synthetic oligonucleotide
ccacccuuccuggccagcu

SEQ ID NO: 2396556 - RNA, 19 nt, Artificial Sequence
  Description of Artificial Sequence: Synthetic oligonucleotide
ccgugagcgcagggucaug

SEQ ID NO: 2396557 - RNA, 19 nt, Artificial Sequence
  Description of Artificial Sequence: Synthetic oligonucleotide
ccggacuuugguggccgua

SEQ ID NO: 2396558 - RNA, 19 nt, Artificial Sequence
  Description of Artificial Sequence: Synthetic oligonucleotide
cgccgcuuccgccuggcau

SEQ ID NO: 2396559 - RNA, 19 nt, Artificial Sequence
  Description of Artificial Sequence: Synthetic oligonucleotide
cggcaggccuguucauacu

SEQ ID NO: 2396560 - RNA, 19 nt, Artificial Sequence
  Description of Artificial Sequence: Synthetic oligonucleotide
cccuuccuggccagcucuu

SEQ ID NO: 2396561 - RNA, 19 nt, Artificial Sequence
  Description of Artificial Sequence: Synthetic oligonucleotide
cccggacuuugguggccgu

SEQ ID NO: 2396562 - RNA, 19 nt, Artificial Sequence
  Description of Artificial Sequence: Synthetic oligonucleotide
ccgccgcuuccgccuggca

SEQ ID NO: 2396563 - RNA, 19 nt, Artificial Sequence
  Description of Artificial Sequence: Synthetic oligonucleotide
ccccugaaccccggacuuu

SEQ ID NO: 2396564 - RNA, 19 nt, Artificial Sequence
  Description of Artificial Sequence: Synthetic oligonucleotide
cgcuuccgccuggcaucca

SEQ ID NO: 2396565 - RNA, 19 nt, Artificial Sequence
  Description of Artificial Sequence: Synthetic oligonucleotide
aaagagagaacuggaagcc

SEQ ID NO: 2396566 - RNA, 19 nt, Artificial Sequence
  Description of Artificial Sequence: Synthetic oligonucleotide
aguaucaauguccucaaac

SEQ ID NO: 2396567 - RNA, 19 nt, Artificial Sequence
  Description of Artificial Sequence: Synthetic oligonucleotide
uucaaugugguugagaucu

SEQ ID NO: 2396568 - RNA, 19 nt, Artificial Sequence
  Description of Artificial Sequence: Synthetic oligonucleotide
cauggaaguaucaaugucc

SEQ ID NO: 2396569 - RNA, 19 nt, Artificial Sequence
  Description of Artificial Sequence: Synthetic oligonucleotide
caaagagagaacuggaagc

SEQ ID NO: 2396570 - RNA, 19 nt, Artificial Sequence
  Description of Artificial Sequence: Synthetic oligonucleotide
aaucagaacgaagagggag

SEQ ID NO: 2396571 - RNA, 19 nt, Artificial Sequence
  Description of Artificial Sequence: Synthetic oligonucleotide
ugaucuaaccaccaggagu

SEQ ID NO: 2396572 - RNA, 19 nt, Artificial Sequence
  Description of Artificial Sequence: Synthetic oligonucleotide
agguuugagacccucagag

SEQ ID NO: 2396573 - RNA, 19 nt, Artificial Sequence
  Description of Artificial Sequence: Synthetic oligonucleotide
ucaaacaagcccuccagcc

SEQ ID NO: 2396574 - RNA, 19 nt, Artificial Sequence
  Description of Artificial Sequence: Synthetic oligonucleotide
guuugagacccucagaggc

SEQ ID NO: 2396575 - RNA, 19 nt, Artificial Sequence
  Description of Artificial Sequence: Synthetic oligonucleotide
ucuucaaugugguugagau

SEQ ID NO: 2396576 - RNA, 19 nt, Artificial Sequence
  Description of Artificial Sequence: Synthetic oligonucleotide
ucguccagcagacagccgg

SEQ ID NO: 2396577 - RNA, 19 nt, Artificial Sequence
  Description of Artificial Sequence: Synthetic oligonucleotide
gagguaguccaauucagcc

SEQ ID NO: 2396578 - RNA, 19 nt, Artificial Sequence
  Description of Artificial Sequence: Synthetic oligonucleotide
gacaccaccaacugagcgg

SEQ ID NO: 2396579 - RNA, 19 nt, Artificial Sequence
  Description of Artificial Sequence: Synthetic oligonucleotide
agaacgaagagggagccac

SEQ ID NO: 2396580 - RNA, 19 nt, Artificial Sequence
  Description of Artificial Sequence: Synthetic oligonucleotide
gugguugagaucuuccagg

SEQ ID NO: 2396581 - RNA, 19 nt, Artificial Sequence
  Description of Artificial Sequence: Synthetic oligonucleotide
acauggaaguaucaauguc

SEQ ID NO: 2396582 - RNA, 19 nt, Artificial Sequence
  Description of Artificial Sequence: Synthetic oligonucleotide
acuaguacguccaugaggu

SEQ ID NO: 2396583 - RNA, 19 nt, Artificial Sequence
  Description of Artificial Sequence: Synthetic oligonucleotide
aauucagccucguccaacu

SEQ ID NO: 2396584 - RNA, 19 nt, Artificial Sequence
  Description of Artificial Sequence: Synthetic oligonucleotide
ugugccuacuaguacgucc

SEQ ID NO: 2396585 - RNA, 19 nt, Artificial Sequence
  Description of Artificial Sequence: Synthetic oligonucleotide
guaucaauguccucaaaca

SEQ ID NO: 2396586 - RNA, 19 nt, Artificial Sequence
  Description of Artificial Sequence: Synthetic oligonucleotide
aggucaaagagagaacugg

SEQ ID NO: 2396587 - RNA, 19 nt, Artificial Sequence
  Description of Artificial Sequence: Synthetic oligonucleotide
cugugugccuacuaguacg

SEQ ID NO: 2396588 - RNA, 19 nt, Artificial Sequence
  Description of Artificial Sequence: Synthetic oligonucleotide
gaucuaaccaccaggaguc

SEQ ID NO: 2396589 - RNA, 19 nt, Artificial Sequence
  Description of Artificial Sequence: Synthetic oligonucleotide
cacgcagccaaucaggaag

SEQ ID NO: 2396590 - RNA, 19 nt, Artificial Sequence
  Description of Artificial Sequence: Synthetic oligonucleotide
cagccaaucaggaagcggc

SEQ ID NO: 2396591 - RNA, 19 nt, Artificial Sequence
  Description of Artificial Sequence: Synthetic oligonucleotide
ugucauacauggaaguauc

SEQ ID NO: 2396592 - RNA, 19 nt, Artificial Sequence
  Description of Artificial Sequence: Synthetic oligonucleotide
guccaauucagccucgucc

SEQ ID NO: 2396593 - RNA, 19 nt, Artificial Sequence
  Description of Artificial Sequence: Synthetic oligonucleotide
aucagaacgaagagggagc

SEQ ID NO: 2396594 - RNA, 19 nt, Artificial Sequence
  Description of Artificial Sequence: Synthetic oligonucleotide
uuguccagaucacucgcgg

SEQ ID NO: 2396595 - RNA, 19 nt, Artificial Sequence
  Description of Artificial Sequence: Synthetic oligonucleotide
uacauggaaguaucaaugu

SEQ ID NO: 2396596 - RNA, 19 nt, Artificial Sequence
  Description of Artificial Sequence: Synthetic oligonucleotide
uaguacguccaugagguag

SEQ ID NO: 2396597 - RNA, 19 nt, Artificial Sequence
  Description of Artificial Sequence: Synthetic oligonucleotide
ugagguaguccaauucagc

SEQ ID NO: 2396598 - RNA, 19 nt, Artificial Sequence
  Description of Artificial Sequence: Synthetic oligonucleotide
uuuagacccuugcucagca

SEQ ID NO: 2396599 - RNA, 19 nt, Artificial Sequence
  Description of Artificial Sequence: Synthetic oligonucleotide
aacuggaagccacgggcgg

SEQ ID NO: 2396600 - RNA, 19 nt, Artificial Sequence
  Description of Artificial Sequence: Synthetic oligonucleotide
uggaguuuccuccuuggcu

SEQ ID NO: 2396601 - RNA, 19 nt, Artificial Sequence
  Description of Artificial Sequence: Synthetic oligonucleotide
aacgaagagggagccacac

SEQ ID NO: 2396602 - RNA, 19 nt, Artificial Sequence
  Description of Artificial Sequence: Synthetic oligonucleotide
uggacuccuggauacggcg

SEQ ID NO: 2396603 - RNA, 19 nt, Artificial Sequence
  Description of Artificial Sequence: Synthetic oligonucleotide
caacucuggaguuuccucc

SEQ ID NO: 2396604 - RNA, 19 nt, Artificial Sequence
  Description of Artificial Sequence: Synthetic oligonucleotide
agcuugagcaccgagaggu

SEQ ID NO: 2396605 - RNA, 19 nt, Artificial Sequence
  Description of Artificial Sequence: Synthetic oligonucleotide
uuucuagugccugugugcc

SEQ ID NO: 2396606 - RNA, 19 nt, Artificial Sequence
  Description of Artificial Sequence: Synthetic oligonucleotide
ugauggagcuugagcaccg

SEQ ID NO: 2396607 - RNA, 19 nt, Artificial Sequence
  Description of Artificial Sequence: Synthetic oligonucleotide
uuucgcuuuagacccuugc

SEQ ID NO: 2396608 - RNA, 19 nt, Artificial Sequence
  Description of Artificial Sequence: Synthetic oligonucleotide
agaggucaaagagagaacu

SEQ ID NO: 2396609 - RNA, 19 nt, Artificial Sequence
  Description of Artificial Sequence: Synthetic oligonucleotide
uugaucuaaccaccaggag

SEQ ID NO: 2396610 - RNA, 19 nt, Artificial Sequence
  Description of Artificial Sequence: Synthetic oligonucleotide
acaccaccaacugagcggc

SEQ ID NO: 2396611 - RNA, 19 nt, Artificial Sequence
  Description of Artificial Sequence: Synthetic oligonucleotide
agagagaacuggaagccac

SEQ ID NO: 2396612 - RNA, 19 nt, Artificial Sequence
  Description of Artificial Sequence: Synthetic oligonucleotide
uucgcuuuagacccuugcu

SEQ ID NO: 2396613 - RNA, 19 nt, Artificial Sequence
  Description of Artificial Sequence: Synthetic oligonucleotide
uuugagacccucagaggcu

SEQ ID NO: 2396614 - RNA, 19 nt, Artificial Sequence
  Description of Artificial Sequence: Synthetic oligonucleotide
uccauggacuccuggauac

SEQ ID NO: 2396615 - RNA, 19 nt, Artificial Sequence
  Description of Artificial Sequence: Synthetic oligonucleotide
guggccuugaucuaaccac

SEQ ID NO: 2396616 - RNA, 19 nt, Artificial Sequence
  Description of Artificial Sequence: Synthetic oligonucleotide
ggcugguccauucucaggg

SEQ ID NO: 2396617 - RNA, 19 nt, Artificial Sequence
  Description of Artificial Sequence: Synthetic oligonucleotide
guccgagcuagccaggagg

SEQ ID NO: 2396618 - RNA, 19 nt, Artificial Sequence
  Description of Artificial Sequence: Synthetic oligonucleotide
cuggauacggcgcagcgug

SEQ ID NO: 2396619 - RNA, 19 nt, Artificial Sequence
  Description of Artificial Sequence: Synthetic oligonucleotide
aacucuggaguuuccuccu

SEQ ID NO: 2396620 - RNA, 19 nt, Artificial Sequence
  Description of Artificial Sequence: Synthetic oligonucleotide
ggaaguaucaauguccuca

SEQ ID NO: 2396621 - RNA, 19 nt, Artificial Sequence
  Description of Artificial Sequence: Synthetic oligonucleotide
uggagcuugagcaccgaga

SEQ ID NO: 2396622 - RNA, 19 nt, Artificial Sequence
  Description of Artificial Sequence: Synthetic oligonucleotide
ugguacccaaaguucacug

SEQ ID NO: 2396623 - RNA, 19 nt, Artificial Sequence
  Description of Artificial Sequence: Synthetic oligonucleotide
uggccuugaucuaaccacc

SEQ ID NO: 2396624 - RNA, 19 nt, Artificial Sequence
  Description of Artificial Sequence: Synthetic oligonucleotide
agaucuuccaggaggcugg

SEQ ID NO: 2396625 - RNA, 19 nt, Artificial Sequence
  Description of Artificial Sequence: Synthetic oligonucleotide
ucauacauggaaguaucaa

SEQ ID NO: 2396626 - RNA, 19 nt, Artificial Sequence
  Description of Artificial Sequence: Synthetic oligonucleotide
ccguuuucgcuuuagaccc

SEQ ID NO: 2396627 - RNA, 19 nt, Artificial Sequence
  Description of Artificial Sequence: Synthetic oligonucleotide
uccucaaacaagcccucca

SEQ ID NO: 2396628 - RNA, 19 nt, Artificial Sequence
  Description of Artificial Sequence: Synthetic oligonucleotide
uccagcagacagccggugg

SEQ ID NO: 2396629 - RNA, 19 nt, Artificial Sequence
  Description of Artificial Sequence: Synthetic oligonucleotide
caugagguaguccaauuca

SEQ ID NO: 2396630 - RNA, 19 nt, Artificial Sequence
  Description of Artificial Sequence: Synthetic oligonucleotide
ugguugagaucuuccagga

SEQ ID NO: 2396631 - RNA, 19 nt, Artificial Sequence
  Description of Artificial Sequence: Synthetic oligonucleotide
uccuggauacggcgcagcg

SEQ ID NO: 2396632 - RNA, 19 nt, Artificial Sequence
  Description of Artificial Sequence: Synthetic oligonucleotide
ggagcuugagcaccgagag

SEQ ID NO: 2396633 - RNA, 19 nt, Artificial Sequence
  Description of Artificial Sequence: Synthetic oligonucleotide
agguaguccaauucagccu

SEQ ID NO: 2396634 - RNA, 19 nt, Artificial Sequence
  Description of Artificial Sequence: Synthetic oligonucleotide
ucacucgcggccaaucaga

SEQ ID NO: 2396635 - RNA, 19 nt, Artificial Sequence
  Description of Artificial Sequence: Synthetic oligonucleotide
ugugugccuacuaguacgu

SEQ ID NO: 2396636 - RNA, 19 nt, Artificial Sequence
  Description of Artificial Sequence: Synthetic oligonucleotide
ucagaacgaagagggagcc

SEQ ID NO: 2396637 - RNA, 19 nt, Artificial Sequence
  Description of Artificial Sequence: Synthetic oligonucleotide
agcggcagcaggcgcaucg

SEQ ID NO: 2396638 - RNA, 19 nt, Artificial Sequence
  Description of Artificial Sequence: Synthetic oligonucleotide
agacgcagccaaccauucc

SEQ ID NO: 2396639 - RNA, 19 nt, Artificial Sequence
  Description of Artificial Sequence: Synthetic oligonucleotide
acccucagaggcugguacc

SEQ ID NO: 2396640 - RNA, 19 nt, Artificial Sequence
  Description of Artificial Sequence: Synthetic oligonucleotide
guccagaucacucgcggcc

SEQ ID NO: 2396641 - RNA, 19 nt, Artificial Sequence
  Description of Artificial Sequence: Synthetic oligonucleotide
cuaaccaccaggaguccac

SEQ ID NO: 2396642 - RNA, 19 nt, Artificial Sequence
  Description of Artificial Sequence: Synthetic oligonucleotide
agagaacuggaagccacgg

SEQ ID NO: 2396643 - RNA, 19 nt, Artificial Sequence
  Description of Artificial Sequence: Synthetic oligonucleotide
ggcugucugccacagaggg

SEQ ID NO: 2396644 - RNA, 19 nt, Artificial Sequence
  Description of Artificial Sequence: Synthetic oligonucleotide
aucacucgcggccaaucag

SEQ ID NO: 2396645 - RNA, 19 nt, Artificial Sequence
  Description of Artificial Sequence: Synthetic oligonucleotide
aggcgcaucgcucggcucg

SEQ ID NO: 2396646 - RNA, 19 nt, Artificial Sequence
  Description of Artificial Sequence: Synthetic oligonucleotide
cccguuuucgcuuuagacc

SEQ ID NO: 2396647 - RNA, 19 nt, Artificial Sequence
  Description of Artificial Sequence: Synthetic oligonucleotide
ucagacgcagccaaccauu

SEQ ID NO: 2396648 - RNA, 19 nt, Artificial Sequence
  Description of Artificial Sequence: Synthetic oligonucleotide
agcaccgagaggucaaaga

SEQ ID NO: 2396649 - RNA, 19 nt, Artificial Sequence
  Description of Artificial Sequence: Synthetic oligonucleotide
gagagaacuggaagccacg

SEQ ID NO: 2396650 - RNA, 19 nt, Artificial Sequence
  Description of Artificial Sequence: Synthetic oligonucleotide
caauguccucaaacaagcc

SEQ ID NO: 2396651 - RNA, 19 nt, Artificial Sequence
  Description of Artificial Sequence: Synthetic oligonucleotide
uguagguuccauggacucc

SEQ ID NO: 2396652 - RNA, 19 nt, Artificial Sequence
  Description of Artificial Sequence: Synthetic oligonucleotide
aguccaauucagccucguc

SEQ ID NO: 2396653 - RNA, 19 nt, Artificial Sequence
  Description of Artificial Sequence: Synthetic oligonucleotide
cauggacuccuggauacgg

SEQ ID NO: 2396654 - RNA, 19 nt, Artificial Sequence
  Description of Artificial Sequence: Synthetic oligonucleotide
gguuugagacccucagagg

SEQ ID NO: 2396655 - RNA, 19 nt, Artificial Sequence
  Description of Artificial Sequence: Synthetic oligonucleotide
aggucuggcucacccugcc

SEQ ID NO: 2396656 - RNA, 19 nt, Artificial Sequence
  Description of Artificial Sequence: Synthetic oligonucleotide
agcguguucaccaccagca

SEQ ID NO: 2396657 - RNA, 19 nt, Artificial Sequence
  Description of Artificial Sequence: Synthetic oligonucleotide
acgaagagggagccacacg

SEQ ID NO: 2396658 - RNA, 19 nt, Artificial Sequence
  Description of Artificial Sequence: Synthetic oligonucleotide
augagguaguccaauucag

SEQ ID NO: 2396659 - RNA, 19 nt, Artificial Sequence
  Description of Artificial Sequence: Synthetic oligonucleotide
agccaaccauuccuggguc

SEQ ID NO: 2396660 - RNA, 19 nt, Artificial Sequence
  Description of Artificial Sequence: Synthetic oligonucleotide
auuguccagaucacucgcg

SEQ ID NO: 2396661 - RNA, 19 nt, Artificial Sequence
  Description of Artificial Sequence: Synthetic oligonucleotide
gacccucagaggcugguac

SEQ ID NO: 2396662 - RNA, 19 nt, Artificial Sequence
  Description of Artificial Sequence: Synthetic oligonucleotide
aaucaggaagcggcagcag

SEQ ID NO: 2396663 - RNA, 19 nt, Artificial Sequence
  Description of Artificial Sequence: Synthetic oligonucleotide
agagggagccacacgcagc

SEQ ID NO: 2396664 - RNA, 19 nt, Artificial Sequence
  Description of Artificial Sequence: Synthetic oligonucleotide
uugucagcgcccaggcccc

SEQ ID NO: 2396665 - RNA, 19 nt, Artificial Sequence
  Description of Artificial Sequence: Synthetic oligonucleotide
gacgcagccaaccauuccu

SEQ ID NO: 2396666 - RNA, 19 nt, Artificial Sequence
  Description of Artificial Sequence: Synthetic oligonucleotide
cagcguccgagcuagccag

SEQ ID NO: 2396667 - RNA, 19 nt, Artificial Sequence
  Description of Artificial Sequence: Synthetic oligonucleotide
cuuuagacccuugcucagc

SEQ ID NO: 2396668 - RNA, 19 nt, Artificial Sequence
  Description of Artificial Sequence: Synthetic oligonucleotide
gagcuugagcaccgagagg

SEQ ID NO: 2396669 - RNA, 19 nt, Artificial Sequence
  Description of Artificial Sequence: Synthetic oligonucleotide
aagcccuccagcccaucgu

SEQ ID NO: 2396670 - RNA, 19 nt, Artificial Sequence
  Description of Artificial Sequence: Synthetic oligonucleotide
ucuagugccugugugccua

SEQ ID NO: 2396671 - RNA, 19 nt, Artificial Sequence
  Description of Artificial Sequence: Synthetic oligonucleotide
agaucacucgcggccaauc

SEQ ID NO: 2396672 - RNA, 19 nt, Artificial Sequence
  Description of Artificial Sequence: Synthetic oligonucleotide
ccuacuaguacguccauga

SEQ ID NO: 2396673 - RNA, 19 nt, Artificial Sequence
  Description of Artificial Sequence: Synthetic oligonucleotide
auggagcuugagcaccgag

SEQ ID NO: 2396674 - RNA, 19 nt, Artificial Sequence
  Description of Artificial Sequence: Synthetic oligonucleotide
uccauucucagggccaggu

SEQ ID NO: 2396675 - RNA, 19 nt, Artificial Sequence
  Description of Artificial Sequence: Synthetic oligonucleotide
aguacguccaugagguagu

SEQ ID NO: 2396676 - RNA, 19 nt, Artificial Sequence
  Description of Artificial Sequence: Synthetic oligonucleotide
agggcagcguccgagcuag

SEQ ID NO: 2396677 - RNA, 19 nt, Artificial Sequence
  Description of Artificial Sequence: Synthetic oligonucleotide
gaucacucgcggccaauca

SEQ ID NO: 2396678 - RNA, 19 nt, Artificial Sequence
  Description of Artificial Sequence: Synthetic oligonucleotide
ggagguuguagguuccaug

SEQ ID NO: 2396679 - RNA, 19 nt, Artificial Sequence
  Description of Artificial Sequence: Synthetic oligonucleotide
cugccgcaggcugugaugg

SEQ ID NO: 2396680 - RNA, 19 nt, Artificial Sequence
  Description of Artificial Sequence: Synthetic oligonucleotide
uguccucaaacaagcccuc

SEQ ID NO: 2396681 - RNA, 19 nt, Artificial Sequence
  Description of Artificial Sequence: Synthetic oligonucleotide
cuuggcugguccauucuca

SEQ ID NO: 2396682 - RNA, 19 nt, Artificial Sequence
  Description of Artificial Sequence: Synthetic oligonucleotide
cuggaguuuccuccuuggc

SEQ ID NO: 2396683 - RNA, 19 nt, Artificial Sequence
  Description of Artificial Sequence: Synthetic oligonucleotide
acccuugcucagcauuguc

SEQ ID NO: 2396684 - RNA, 19 nt, Artificial Sequence
  Description of Artificial Sequence: Synthetic oligonucleotide
gcagccaaccauuccuggg

SEQ ID NO: 2396685 - RNA, 19 nt, Artificial Sequence
  Description of Artificial Sequence: Synthetic oligonucleotide
uccaugagguaguccaauu

SEQ ID NO: 2396686 - RNA, 19 nt, Artificial Sequence
  Description of Artificial Sequence: Synthetic oligonucleotide
ucagaggcugguacccaaa

SEQ ID NO: 2396687 - RNA, 19 nt, Artificial Sequence
  Description of Artificial Sequence: Synthetic oligonucleotide
gguucaggucuucaaugug

SEQ ID NO: 2396688 - RNA, 19 nt, Artificial Sequence
  Description of Artificial Sequence: Synthetic oligonucleotide
aggcucaacucagacgcag

SEQ ID NO: 2396689 - RNA, 19 nt, Artificial Sequence
  Description of Artificial Sequence: Synthetic oligonucleotide
agguuguagguuccaugga

SEQ ID NO: 2396690 - RNA, 19 nt, Artificial Sequence
  Description of Artificial Sequence: Synthetic oligonucleotide
agcgcccaggccccggugg

SEQ ID NO: 2396691 - RNA, 19 nt, Artificial Sequence
  Description of Artificial Sequence: Synthetic oligonucleotide
uccagaucacucgcggcca

SEQ ID NO: 2396692 - RNA, 19 nt, Artificial Sequence
  Description of Artificial Sequence: Synthetic oligonucleotide
cagcguguucaccaccagc

SEQ ID NO: 2396693 - RNA, 19 nt, Artificial Sequence
  Description of Artificial Sequence: Synthetic oligonucleotide
ggaggucuggcucacccug

SEQ ID NO: 2396694 - RNA, 19 nt, Artificial Sequence
  Description of Artificial Sequence: Synthetic oligonucleotide
acugucauacauggaagua

SEQ ID NO: 2396695 - RNA, 19 nt, Artificial Sequence
  Description of Artificial Sequence: Synthetic oligonucleotide
caauucagccucguccaac

SEQ ID NO: 2396696 - RNA, 19 nt, Artificial Sequence
  Description of Artificial Sequence: Synthetic oligonucleotide
agccacacgcagccaauca

SEQ ID NO: 2396697 - RNA, 19 nt, Artificial Sequence
  Description of Artificial Sequence: Synthetic oligonucleotide
agacccuugcucagcauug

SEQ ID NO: 2396698 - RNA, 19 nt, Artificial Sequence
  Description of Artificial Sequence: Synthetic oligonucleotide
agcccaucguccagcagac

SEQ ID NO: 2396699 - RNA, 19 nt, Artificial Sequence
  Description of Artificial Sequence: Synthetic oligonucleotide
gucaaagagagaacuggaa

SEQ ID NO: 2396700 - RNA, 19 nt, Artificial Sequence
  Description of Artificial Sequence: Synthetic oligonucleotide
cucacccugccgcaggcug

SEQ ID NO: 2396701 - RNA, 19 nt, Artificial Sequence
  Description of Artificial Sequence: Synthetic oligonucleotide
caaggcacccagguugggc

SEQ ID NO: 2396702 - RNA, 19 nt, Artificial Sequence
  Description of Artificial Sequence: Synthetic oligonucleotide
uggguggcauggacacggg

SEQ ID NO: 2396703 - RNA, 19 nt, Artificial Sequence
  Description of Artificial Sequence: Synthetic oligonucleotide
uggguggccuugaucuaac

SEQ ID NO: 2396704 - RNA, 19 nt, Artificial Sequence
  Description of Artificial Sequence: Synthetic oligonucleotide
cccuugcucagcauugucc

SEQ ID NO: 2396705 - RNA, 19 nt, Artificial Sequence
  Description of Artificial Sequence: Synthetic oligonucleotide
gauacggcgcagcguguuc

SEQ ID NO: 2396706 - RNA, 19 nt, Artificial Sequence
  Description of Artificial Sequence: Synthetic oligonucleotide
agagggcagcguccgagcu

SEQ ID NO: 2396707 - RNA, 19 nt, Artificial Sequence
  Description of Artificial Sequence: Synthetic oligonucleotide
uggaaguaucaauguccuc

SEQ ID NO: 2396708 - RNA, 19 nt, Artificial Sequence
  Description of Artificial Sequence: Synthetic oligonucleotide
ugggcgggacaccaccaac

SEQ ID NO: 2396709 - RNA, 19 nt, Artificial Sequence
  Description of Artificial Sequence: Synthetic oligonucleotide
gguugagaucuuccaggag

SEQ ID NO: 2396710 - RNA, 19 nt, Artificial Sequence
  Description of Artificial Sequence: Synthetic oligonucleotide
ccagguuugagacccucag

SEQ ID NO: 2396711 - RNA, 19 nt, Artificial Sequence
  Description of Artificial Sequence: Synthetic oligonucleotide
uucuagugccugugugccu

SEQ ID NO: 2396712 - RNA, 19 nt, Artificial Sequence
  Description of Artificial Sequence: Synthetic oligonucleotide
gugccuacuaguacgucca

SEQ ID NO: 2396713 - RNA, 19 nt, Artificial Sequence
  Description of Artificial Sequence: Synthetic oligonucleotide
uggccuuucuagugccugu

SEQ ID NO: 2396714 - RNA, 19 nt, Artificial Sequence
  Description of Artificial Sequence: Synthetic oligonucleotide
guaguccaauucagccucg

SEQ ID NO: 2396715 - RNA, 19 nt, Artificial Sequence
  Description of Artificial Sequence: Synthetic oligonucleotide
gggucugguugucagcgcc

SEQ ID NO: 2396716 - RNA, 19 nt, Artificial Sequence
  Description of Artificial Sequence: Synthetic oligonucleotide
accgagaggccuuccuccu

SEQ ID NO: 2396717 - RNA, 19 nt, Artificial Sequence
  Description of Artificial Sequence: Synthetic oligonucleotide
aggcacccagguugggcgg

SEQ ID NO: 2396718 - RNA, 19 nt, Artificial Sequence
  Description of Artificial Sequence: Synthetic oligonucleotide
ucgcggccaaucagaacga

SEQ ID NO: 2396719 - RNA, 19 nt, Artificial Sequence
  Description of Artificial Sequence: Synthetic oligonucleotide
caaucaggaagcggcagca

SEQ ID NO: 2396720 - RNA, 19 nt, Artificial Sequence
  Description of Artificial Sequence: Synthetic oligonucleotide
accugguucaggucuucaa

SEQ ID NO: 2396721 - RNA, 19 nt, Artificial Sequence
  Description of Artificial Sequence: Synthetic oligonucleotide
gaagagggagccacacgca

SEQ ID NO: 2396722 - RNA, 19 nt, Artificial Sequence
  Description of Artificial Sequence: Synthetic oligonucleotide
caucgcucggcucgcccgg

SEQ ID NO: 2396723 - RNA, 19 nt, Artificial Sequence
  Description of Artificial Sequence: Synthetic oligonucleotide
caaugugguugagaucuuc

SEQ ID NO: 2396724 - RNA, 19 nt, Artificial Sequence
  Description of Artificial Sequence: Synthetic oligonucleotide
uacguccaugagguagucc

SEQ ID NO: 2396725 - RNA, 19 nt, Artificial Sequence
  Description of Artificial Sequence: Synthetic oligonucleotide
ucacccugccgcaggcugu

SEQ ID NO: 2396726 - RNA, 19 nt, Artificial Sequence
  Description of Artificial Sequence: Synthetic oligonucleotide
guagguuccauggacuccu

SEQ ID NO: 2396727 - RNA, 19 nt, Artificial Sequence
  Description of Artificial Sequence: Synthetic oligonucleotide
caaccauuccugggucugg

SEQ ID NO: 2396728 - RNA, 19 nt, Artificial Sequence
  Description of Artificial Sequence: Synthetic oligonucleotide
cagacgcagccaaccauuc

SEQ ID NO: 2396729 - RNA, 19 nt, Artificial Sequence
  Description of Artificial Sequence: Synthetic oligonucleotide
cuugagcaccgagagguca

SEQ ID NO: 2396730 - RNA, 19 nt, Artificial Sequence
  Description of Artificial Sequence: Synthetic oligonucleotide
guuguagguuccauggacu

SEQ ID NO: 2396731 - RNA, 19 nt, Artificial Sequence
  Description of Artificial Sequence: Synthetic oligonucleotide
ggucaaagagagaacugga

SEQ ID NO: 2396732 - RNA, 19 nt, Artificial Sequence
  Description of Artificial Sequence: Synthetic oligonucleotide
cuccuuggcugguccauuc

SEQ ID NO: 2396733 - RNA, 19 nt, Artificial Sequence
  Description of Artificial Sequence: Synthetic oligonucleotide
ucaaugugguugagaucuu

SEQ ID NO: 2396734 - RNA, 19 nt, Artificial Sequence
  Description of Artificial Sequence: Synthetic oligonucleotide
gcugagagggcagcguccg

SEQ ID NO: 2396735 - RNA, 19 nt, Artificial Sequence
  Description of Artificial Sequence: Synthetic oligonucleotide
gguggcagggagguuguag

SEQ ID NO: 2396736 - RNA, 19 nt, Artificial Sequence
  Description of Artificial Sequence: Synthetic oligonucleotide
agugccugugugccuacua

SEQ ID NO: 2396737 - RNA, 19 nt, Artificial Sequence
  Description of Artificial Sequence: Synthetic oligonucleotide
accaccaacugagcggccu

SEQ ID NO: 2396738 - RNA, 19 nt, Artificial Sequence
  Description of Artificial Sequence: Synthetic oligonucleotide
ggcugggccuagcaggucc

SEQ ID NO: 2396739 - RNA, 19 nt, Artificial Sequence
  Description of Artificial Sequence: Synthetic oligonucleotide
agcaggcgcaucgcucggc

SEQ ID NO: 2396740 - RNA, 19 nt, Artificial Sequence
  Description of Artificial Sequence: Synthetic oligonucleotide
uagguuccauggacuccug

SEQ ID NO: 2396741 - RNA, 19 nt, Artificial Sequence
  Description of Artificial Sequence: Synthetic oligonucleotide
auacggcgcagcguguuca

SEQ ID NO: 2396742 - RNA, 19 nt, Artificial Sequence
  Description of Artificial Sequence: Synthetic oligonucleotide
gcaucgcucggcucgcccg

SEQ ID NO: 2396743 - RNA, 19 nt, Artificial Sequence
  Description of Artificial Sequence: Synthetic oligonucleotide
uuagacccuugcucagcau

SEQ ID NO: 2396744 - RNA, 19 nt, Artificial Sequence
  Description of Artificial Sequence: Synthetic oligonucleotide
acacggguggcagggaggu

SEQ ID NO: 2396745 - RNA, 19 nt, Artificial Sequence
  Description of Artificial Sequence: Synthetic oligonucleotide
ccaugagguaguccaauuc

SEQ ID NO: 2396746 - RNA, 19 nt, Artificial Sequence
  Description of Artificial Sequence: Synthetic oligonucleotide
cugagcggccuggaggccc

SEQ ID NO: 2396747 - RNA, 19 nt, Artificial Sequence
  Description of Artificial Sequence: Synthetic oligonucleotide
ucgcccggcucccgcaacc

SEQ ID NO: 2396748 - RNA, 19 nt, Artificial Sequence
  Description of Artificial Sequence: Synthetic oligonucleotide
gcagccaaucaggaagcgg

SEQ ID NO: 2396749 - RNA, 19 nt, Artificial Sequence
  Description of Artificial Sequence: Synthetic oligonucleotide
acugagcggccuggaggcc

SEQ ID NO: 2396750 - RNA, 19 nt, Artificial Sequence
  Description of Artificial Sequence: Synthetic oligonucleotide
gccuugaucuaaccaccag

SEQ ID NO: 2396751 - RNA, 19 nt, Artificial Sequence
  Description of Artificial Sequence: Synthetic oligonucleotide
uggauacggcgcagcgugu

SEQ ID NO: 2396752 - RNA, 19 nt, Artificial Sequence
  Description of Artificial Sequence: Synthetic oligonucleotide
ugggccuagcagguccaag

SEQ ID NO: 2396753 - RNA, 19 nt, Artificial Sequence
  Description of Artificial Sequence: Synthetic oligonucleotide
acacgcagccaaucaggaa

SEQ ID NO: 2396754 - RNA, 19 nt, Artificial Sequence
  Description of Artificial Sequence: Synthetic oligonucleotide
gccccgguggccuuucuag

SEQ ID NO: 2396755 - RNA, 19 nt, Artificial Sequence
  Description of Artificial Sequence: Synthetic oligonucleotide
aggaguccaccgagaggcc

SEQ ID NO: 2396756 - RNA, 19 nt, Artificial Sequence
  Description of Artificial Sequence: Synthetic oligonucleotide
aggcugucugccacagagg

SEQ ID NO: 2396757 - RNA, 19 nt, Artificial Sequence
  Description of Artificial Sequence: Synthetic oligonucleotide
ccaacucuggaguuuccuc

SEQ ID NO: 2396758 - RNA, 19 nt, Artificial Sequence
  Description of Artificial Sequence: Synthetic oligonucleotide
aguccaccgagaggccuuc

SEQ ID NO: 2396759 - RNA, 19 nt, Artificial Sequence
  Description of Artificial Sequence: Synthetic oligonucleotide
cauucucagggccagguuu

SEQ ID NO: 2396760 - RNA, 19 nt, Artificial Sequence
  Description of Artificial Sequence: Synthetic oligonucleotide
ggcgggacaccaccaacug

SEQ ID NO: 2396761 - RNA, 19 nt, Artificial Sequence
  Description of Artificial Sequence: Synthetic oligonucleotide
ccugugugccuacuaguac

SEQ ID NO: 2396762 - RNA, 19 nt, Artificial Sequence
  Description of Artificial Sequence: Synthetic oligonucleotide
cauuccugggucugguugu

SEQ ID NO: 2396763 - RNA, 19 nt, Artificial Sequence
  Description of Artificial Sequence: Synthetic oligonucleotide
cagguuugagacccucaga

SEQ ID NO: 2396764 - RNA, 19 nt, Artificial Sequence
  Description of Artificial Sequence: Synthetic oligonucleotide
acggcgcagcguguucacc

SEQ ID NO: 2396765 - RNA, 19 nt, Artificial Sequence
  Description of Artificial Sequence: Synthetic oligonucleotide
cuagugccugugugccuac

SEQ ID NO: 2396766 - RNA, 19 nt, Artificial Sequence
  Description of Artificial Sequence: Synthetic oligonucleotide
ucagcgcccaggccccggu

SEQ ID NO: 2396767 - RNA, 19 nt, Artificial Sequence
  Description of Artificial Sequence: Synthetic oligonucleotide
cugucauacauggaaguau

SEQ ID NO: 2396768 - RNA, 19 nt, Artificial Sequence
  Description of Artificial Sequence: Synthetic oligonucleotide
gaacgaagagggagccaca

SEQ ID NO: 2396769 - RNA, 19 nt, Artificial Sequence
  Description of Artificial Sequence: Synthetic oligonucleotide
uggcauggacacggguggc

SEQ ID NO: 2396770 - RNA, 19 nt, Artificial Sequence
  Description of Artificial Sequence: Synthetic oligonucleotide
ugccuacuaguacguccau

SEQ ID NO: 2396771 - RNA, 19 nt, Artificial Sequence
  Description of Artificial Sequence: Synthetic oligonucleotide
cucagaggcugguacccaa

SEQ ID NO: 2396772 - RNA, 19 nt, Artificial Sequence
  Description of Artificial Sequence: Synthetic oligonucleotide
ucguccaacucuggaguuu

SEQ ID NO: 2396773 - RNA, 19 nt, Artificial Sequence
  Description of Artificial Sequence: Synthetic oligonucleotide
agccaaucaggaagcggca

SEQ ID NO: 2396774 - RNA, 19 nt, Artificial Sequence
  Description of Artificial Sequence: Synthetic oligonucleotide
acgcagccaaccauuccug

SEQ ID NO: 2396775 - RNA, 19 nt, Artificial Sequence
  Description of Artificial Sequence: Synthetic oligonucleotide
acccagguugggcgggaca

SEQ ID NO: 2396776 - RNA, 19 nt, Artificial Sequence
  Description of Artificial Sequence: Synthetic oligonucleotide
cagccaaccauuccugggu

SEQ ID NO: 2396777 - RNA, 19 nt, Artificial Sequence
  Description of Artificial Sequence: Synthetic oligonucleotide
ggggaccugguucaggucu

SEQ ID NO: 2396778 - RNA, 19 nt, Artificial Sequence
  Description of Artificial Sequence: Synthetic oligonucleotide
ccgguggccuuucuagugc

SEQ ID NO: 2396779 - RNA, 19 nt, Artificial Sequence
  Description of Artificial Sequence: Synthetic oligonucleotide
gccaaucaggaagcggcag

SEQ ID NO: 2396780 - RNA, 19 nt, Artificial Sequence
  Description of Artificial Sequence: Synthetic oligonucleotide
gcagcguccgagcuagcca

SEQ ID NO: 2396781 - RNA, 19 nt, Artificial Sequence
  Description of Artificial Sequence: Synthetic oligonucleotide
gcggccaaucagaacgaag

SEQ ID NO: 2396782 - RNA, 19 nt, Artificial Sequence
  Description of Artificial Sequence: Synthetic oligonucleotide
gagccacacgcagccaauc

SEQ ID NO: 2396783 - RNA, 19 nt, Artificial Sequence
  Description of Artificial Sequence: Synthetic oligonucleotide
ggcagcguccgagcuagcc

SEQ ID NO: 2396784 - RNA, 19 nt, Artificial Sequence
  Description of Artificial Sequence: Synthetic oligonucleotide
ggcuguggguggcauggac

SEQ ID NO: 2396785 - RNA, 19 nt, Artificial Sequence
  Description of Artificial Sequence: Synthetic oligonucleotide
ccaaccauuccugggucug

SEQ ID NO: 2396786 - RNA, 19 nt, Artificial Sequence
  Description of Artificial Sequence: Synthetic oligonucleotide
ggucugguugucagcgccc

SEQ ID NO: 2396787 - RNA, 19 nt, Artificial Sequence
  Description of Artificial Sequence: Synthetic oligonucleotide
guugggcgggacaccacca

SEQ ID NO: 2396788 - RNA, 19 nt, Artificial Sequence
  Description of Artificial Sequence: Synthetic oligonucleotide
gagggcagcguccgagcua

SEQ ID NO: 2396789 - RNA, 19 nt, Artificial Sequence
  Description of Artificial Sequence: Synthetic oligonucleotide
aucguccagcagacagccg

SEQ ID NO: 2396790 - RNA, 19 nt, Artificial Sequence
  Description of Artificial Sequence: Synthetic oligonucleotide
cccgguggccuuucuagug

SEQ ID NO: 2396791 - RNA, 19 nt, Artificial Sequence
  Description of Artificial Sequence: Synthetic oligonucleotide
ggcucaacucagacgcagc

SEQ ID NO: 2396792 - RNA, 19 nt, Artificial Sequence
  Description of Artificial Sequence: Synthetic oligonucleotide
guccauucucagggccagg

SEQ ID NO: 2396793 - RNA, 19 nt, Artificial Sequence
  Description of Artificial Sequence: Synthetic oligonucleotide
cacucgcggccaaucagaa

SEQ ID NO: 2396794 - RNA, 19 nt, Artificial Sequence
  Description of Artificial Sequence: Synthetic oligonucleotide
cccucagaggcugguaccc

SEQ ID NO: 2396795 - RNA, 19 nt, Artificial Sequence
  Description of Artificial Sequence: Synthetic oligonucleotide
agcguccgagcuagccagg

SEQ ID NO: 2396796 - RNA, 19 nt, Artificial Sequence
  Description of Artificial Sequence: Synthetic oligonucleotide
cuggcucacccugccgcag

SEQ ID NO: 2396797 - RNA, 19 nt, Artificial Sequence
  Description of Artificial Sequence: Synthetic oligonucleotide
acaagcccuccagcccauc

SEQ ID NO: 2396798 - RNA, 19 nt, Artificial Sequence
  Description of Artificial Sequence: Synthetic oligonucleotide
ugucagcgcccaggccccg

SEQ ID NO: 2396799 - RNA, 19 nt, Artificial Sequence
  Description of Artificial Sequence: Synthetic oligonucleotide
guccaacucuggaguuucc

SEQ ID NO: 2396800 - RNA, 19 nt, Artificial Sequence
  Description of Artificial Sequence: Synthetic oligonucleotide
gccuacuaguacguccaug

SEQ ID NO: 2396801 - RNA, 19 nt, Artificial Sequence
  Description of Artificial Sequence: Synthetic oligonucleotide
gcagcguguucaccaccag

SEQ ID NO: 2396802 - RNA, 19 nt, Artificial Sequence
  Description of Artificial Sequence: Synthetic oligonucleotide
caccaccaacugagcggcc

SEQ ID NO: 2396803 - RNA, 19 nt, Artificial Sequence
  Description of Artificial Sequence: Synthetic oligonucleotide
agcuagccaggaggcuguc

SEQ ID NO: 2396804 - RNA, 19 nt, Artificial Sequence
  Description of Artificial Sequence: Synthetic oligonucleotide
cgagcuagccaggaggcug

SEQ ID NO: 2396805 - RNA, 19 nt, Artificial Sequence
  Description of Artificial Sequence: Synthetic oligonucleotide
ggguggccuugaucuaacc

SEQ ID NO: 2396806 - RNA, 19 nt, Artificial Sequence
  Description of Artificial Sequence: Synthetic oligonucleotide
gcguguucaccaccagcac

SEQ ID NO: 2396807 - RNA, 19 nt, Artificial Sequence
  Description of Artificial Sequence: Synthetic oligonucleotide
cucagacgcagccaaccau

SEQ ID NO: 2396808 - RNA, 19 nt, Artificial Sequence
  Description of Artificial Sequence: Synthetic oligonucleotide
cccagguugggcgggacac

SEQ ID NO: 2396809 - RNA, 19 nt, Artificial Sequence
  Description of Artificial Sequence: Synthetic oligonucleotide
ggcucacccugccgcaggc

SEQ ID NO: 2396810 - RNA, 19 nt, Artificial Sequence
  Description of Artificial Sequence: Synthetic oligonucleotide
ggcugugauggagcuugag

SEQ ID NO: 2396811 - RNA, 19 nt, Artificial Sequence
  Description of Artificial Sequence: Synthetic oligonucleotide
guacguccaugagguaguc

SEQ ID NO: 2396812 - RNA, 19 nt, Artificial Sequence
  Description of Artificial Sequence: Synthetic oligonucleotide
caggcucaacucagacgca

SEQ ID NO: 2396813 - RNA, 19 nt, Artificial Sequence
  Description of Artificial Sequence: Synthetic oligonucleotide
gcucggcucgcccggcucc

SEQ ID NO: 2396814 - RNA, 19 nt, Artificial Sequence
  Description of Artificial Sequence: Synthetic oligonucleotide
cagaacgaagagggagcca

SEQ ID NO: 2396815 - RNA, 19 nt, Artificial Sequence
  Description of Artificial Sequence: Synthetic oligonucleotide
caggcgcaucgcucggcuc

SEQ ID NO: 2396816 - RNA, 19 nt, Artificial Sequence
  Description of Artificial Sequence: Synthetic oligonucleotide
ggucuucaaugugguugag

SEQ ID NO: 2396817 - RNA, 19 nt, Artificial Sequence
  Description of Artificial Sequence: Synthetic oligonucleotide
cugguacccaaaguucacu

SEQ ID NO: 2396818 - RNA, 19 nt, Artificial Sequence
  Description of Artificial Sequence: Synthetic oligonucleotide
ggcagcaggcgcaucgcuc

SEQ ID NO: 2396819 - RNA, 19 nt, Artificial Sequence
  Description of Artificial Sequence: Synthetic oligonucleotide
cuaguacguccaugaggua

SEQ ID NO: 2396820 - RNA, 19 nt, Artificial Sequence
  Description of Artificial Sequence: Synthetic oligonucleotide
ucggcucgcccggcucccg

SEQ ID NO: 2396821 - RNA, 19 nt, Artificial Sequence
  Description of Artificial Sequence: Synthetic oligonucleotide
cucggcucgcccggcuccc

SEQ ID NO: 2396822 - RNA, 19 nt, Artificial Sequence
  Description of Artificial Sequence: Synthetic oligonucleotide
gugugccuacuaguacguc

SEQ ID NO: 2396823 - RNA, 19 nt, Artificial Sequence
  Description of Artificial Sequence: Synthetic oligonucleotide
uccucccguuuucgcuuua

SEQ ID NO: 2396824 - RNA, 19 nt, Artificial Sequence
  Description of Artificial Sequence: Synthetic oligonucleotide
ggcauggacacggguggca

SEQ ID NO: 2396825 - RNA, 19 nt, Artificial Sequence
  Description of Artificial Sequence: Synthetic oligonucleotide
agacccucagaggcuggua

SEQ ID NO: 2396826 - RNA, 19 nt, Artificial Sequence
  Description of Artificial Sequence: Synthetic oligonucleotide
gacccuugcucagcauugu

SEQ ID NO: 2396827 - RNA, 19 nt, Artificial Sequence
  Description of Artificial Sequence: Synthetic oligonucleotide
gucugugccgcugcugggu

SEQ ID NO: 2396828 - RNA, 19 nt, Artificial Sequence
  Description of Artificial Sequence: Synthetic oligonucleotide
guccaugagguaguccaau

SEQ ID NO: 2396829 - RNA, 19 nt, Artificial Sequence
  Description of Artificial Sequence: Synthetic oligonucleotide
gccugugugccuacuagua

SEQ ID NO: 2396830 - RNA, 19 nt, Artificial Sequence
  Description of Artificial Sequence: Synthetic oligonucleotide
uggcggaggucuggcucac

SEQ ID NO: 2396831 - RNA, 19 nt, Artificial Sequence
  Description of Artificial Sequence: Synthetic oligonucleotide
guuuucgcuuuagacccuu

SEQ ID NO: 2396832 - RNA, 19 nt, Artificial Sequence
  Description of Artificial Sequence: Synthetic oligonucleotide
cguccaacucuggaguuuc

SEQ ID NO: 2396833 - RNA, 19 nt, Artificial Sequence
  Description of Artificial Sequence: Synthetic oligonucleotide
cucguccaacucuggaguu

SEQ ID NO: 2396834 - RNA, 19 nt, Artificial Sequence
  Description of Artificial Sequence: Synthetic oligonucleotide
gccagguuugagacccuca

SEQ ID NO: 2396835 - RNA, 19 nt, Artificial Sequence
  Description of Artificial Sequence: Synthetic oligonucleotide
cugagagggcagcguccga

SEQ ID NO: 2396836 - RNA, 19 nt, Artificial Sequence
  Description of Artificial Sequence: Synthetic oligonucleotide
cgcagcguguucaccacca

SEQ ID NO: 2396837 - RNA, 19 nt, Artificial Sequence
  Description of Artificial Sequence: Synthetic oligonucleotide
gaguccaccgagaggccuu

SEQ ID NO: 2396838 - RNA, 19 nt, Artificial Sequence
  Description of Artificial Sequence: Synthetic oligonucleotide
ccucccguuuucgcuuuag

SEQ ID NO: 2396839 - RNA, 19 nt, Artificial Sequence
  Description of Artificial Sequence: Synthetic oligonucleotide
uggcugggccuagcagguc

SEQ ID NO: 2396840 - RNA, 19 nt, Artificial Sequence
  Description of Artificial Sequence: Synthetic oligonucleotide
ggcgcaucgcucggcucgc

SEQ ID NO: 2396841 - RNA, 19 nt, Artificial Sequence
  Description of Artificial Sequence: Synthetic oligonucleotide
gccaaccauuccugggucu

SEQ ID NO: 2396842 - RNA, 19 nt, Artificial Sequence
  Description of Artificial Sequence: Synthetic oligonucleotide
ggccagguuugagacccuc

SEQ ID NO: 2396843 - RNA, 19 nt, Artificial Sequence
  Description of Artificial Sequence: Synthetic oligonucleotide
cccaaaguucacugucaua

SEQ ID NO: 2396844 - RNA, 19 nt, Artificial Sequence
  Description of Artificial Sequence: Synthetic oligonucleotide
gcgcccaggccccgguggc

SEQ ID NO: 2396845 - RNA, 19 nt, Artificial Sequence
  Description of Artificial Sequence: Synthetic oligonucleotide
gccuuucuagugccugugu

SEQ ID NO: 2396846 - RNA, 19 nt, Artificial Sequence
  Description of Artificial Sequence: Synthetic oligonucleotide
aggcugugauggagcuuga

SEQ ID NO: 2396847 - RNA, 19 nt, Artificial Sequence
  Description of Artificial Sequence: Synthetic oligonucleotide
gggcgggacaccaccaacu

SEQ ID NO: 2396848 - RNA, 19 nt, Artificial Sequence
  Description of Artificial Sequence: Synthetic oligonucleotide
gcggcagcaggcgcaucgc

SEQ ID NO: 2396849 - RNA, 19 nt, Artificial Sequence
  Description of Artificial Sequence: Synthetic oligonucleotide
cgcaucgcucggcucgccc

SEQ ID NO: 2396850 - RNA, 19 nt, Artificial Sequence
  Description of Artificial Sequence: Synthetic oligonucleotide
gcggccuggaggccccuca

SEQ ID NO: 2396851 - RNA, 19 nt, Artificial Sequence
  Description of Artificial Sequence: Synthetic oligonucleotide
gcaggcgcaucgcucggcu

SEQ ID NO: 2396852 - RNA, 19 nt, Artificial Sequence
  Description of Artificial Sequence: Synthetic oligonucleotide
gcuggguggccuugaucua

SEQ ID NO: 2396853 - RNA, 19 nt, Artificial Sequence
  Description of Artificial Sequence: Synthetic oligonucleotide
gcugggccuagcaggucca

SEQ ID NO: 2396854 - RNA, 19 nt, Artificial Sequence
  Description of Artificial Sequence: Synthetic oligonucleotide
ggaccugguucaggucuuc

SEQ ID NO: 2396855 - RNA, 19 nt, Artificial Sequence
  Description of Artificial Sequence: Synthetic oligonucleotide
ccaauucagccucguccaa

SEQ ID NO: 2396856 - RNA, 19 nt, Artificial Sequence
  Description of Artificial Sequence: Synthetic oligonucleotide
ccgagaggccuuccuccuc

SEQ ID NO: 2396857 - RNA, 19 nt, Artificial Sequence
  Description of Artificial Sequence: Synthetic oligonucleotide
aggccccgguggccuuucu

SEQ ID NO: 2396858 - RNA, 19 nt, Artificial Sequence
  Description of Artificial Sequence: Synthetic oligonucleotide
gcguccgagcuagccagga

SEQ ID NO: 2396859 - RNA, 19 nt, Artificial Sequence
  Description of Artificial Sequence: Synthetic oligonucleotide
gugccgcugcuggguggcc

SEQ ID NO: 2396860 - RNA, 19 nt, Artificial Sequence
  Description of Artificial Sequence: Synthetic oligonucleotide
cccucaucggcuugggguu

SEQ ID NO: 2396861 - RNA, 19 nt, Artificial Sequence
  Description of Artificial Sequence: Synthetic oligonucleotide
ggauacggcgcagcguguu

SEQ ID NO: 2396862 - RNA, 19 nt, Artificial Sequence
  Description of Artificial Sequence: Synthetic oligonucleotide
gggagguuguagguuccau

SEQ ID NO: 2396863 - RNA, 19 nt, Artificial Sequence
  Description of Artificial Sequence: Synthetic oligonucleotide
ccagaucacucgcggccaa

SEQ ID NO: 2396864 - RNA, 19 nt, Artificial Sequence
  Description of Artificial Sequence: Synthetic oligonucleotide
cugggccuagcagguccaa

SEQ ID NO: 2396865 - RNA, 19 nt, Artificial Sequence
  Description of Artificial Sequence: Synthetic oligonucleotide
ggcggaggucuggcucacc

SEQ ID NO: 2396866 - RNA, 19 nt, Artificial Sequence
  Description of Artificial Sequence: Synthetic oligonucleotide
ccgguggcugggccuagca

SEQ ID NO: 2396867 - RNA, 19 nt, Artificial Sequence
  Description of Artificial Sequence: Synthetic oligonucleotide
acccugccgcaggcuguga

SEQ ID NO: 2396868 - RNA, 19 nt, Artificial Sequence
  Description of Artificial Sequence: Synthetic oligonucleotide
ggccccgguggccuuucua

SEQ ID NO: 2396869 - RNA, 19 nt, Artificial Sequence
  Description of Artificial Sequence: Synthetic oligonucleotide
gcaccagguggcggagguc

SEQ ID NO: 2396870 - RNA, 19 nt, Artificial Sequence
  Description of Artificial Sequence: Synthetic oligonucleotide
cagaucacucgcggccaau

SEQ ID NO: 2396871 - RNA, 19 nt, Artificial Sequence
  Description of Artificial Sequence: Synthetic oligonucleotide
gccgguggcugggccuagc

SEQ ID NO: 2396872 - RNA, 19 nt, Artificial Sequence
  Description of Artificial Sequence: Synthetic oligonucleotide
gggaccugguucaggucuu

SEQ ID NO: 2396873 - RNA, 19 nt, Artificial Sequence
  Description of Artificial Sequence: Synthetic oligonucleotide
cguuuucgcuuuagacccu

SEQ ID NO: 2396874 - RNA, 19 nt, Artificial Sequence
  Description of Artificial Sequence: Synthetic oligonucleotide
ccccgguggccuuucuagu

SEQ ID NO: 2396875 - RNA, 19 nt, Artificial Sequence
  Description of Artificial Sequence: Synthetic oligonucleotide
gcccaucguccagcagaca

SEQ ID NO: 2396876 - RNA, 19 nt, Artificial Sequence
  Description of Artificial Sequence: Synthetic oligonucleotide
cggaggucuggcucacccu

SEQ ID NO: 2396877 - RNA, 19 nt, Artificial Sequence
  Description of Artificial Sequence: Synthetic oligonucleotide
gggcagcguccgagcuagc

SEQ ID NO: 2396878 - RNA, 19 nt, Artificial Sequence
  Description of Artificial Sequence: Synthetic oligonucleotide
ccgagcuagccaggaggcu

SEQ ID NO: 2396879 - RNA, 19 nt, Artificial Sequence
  Description of Artificial Sequence: Synthetic oligonucleotide
cgcggccaaucagaacgaa

SEQ ID NO: 2396880 - RNA, 19 nt, Artificial Sequence
  Description of Artificial Sequence: Synthetic oligonucleotide
gggccagguuugagacccu

SEQ ID NO: 2396881 - RNA, 19 nt, Artificial Sequence
  Description of Artificial Sequence: Synthetic oligonucleotide
ccuccuuggcugguccauu

SEQ ID NO: 2396882 - RNA, 19 nt, Artificial Sequence
  Description of Artificial Sequence: Synthetic oligonucleotide
cacggguggcagggagguu

SEQ ID NO: 2396883 - RNA, 19 nt, Artificial Sequence
  Description of Artificial Sequence: Synthetic oligonucleotide
uuugaaauugcucucagcg

SEQ ID NO: 2396884 - RNA, 19 nt, Artificial Sequence
  Description of Artificial Sequence: Synthetic oligonucleotide
aauguaaagggguaaacug

SEQ ID NO: 2396885 - RNA, 19 nt, Artificial Sequence
  Description of Artificial Sequence: Synthetic oligonucleotide
uaaagggguaaacugaugg

SEQ ID NO: 2396886 - RNA, 19 nt, Artificial Sequence
  Description of Artificial Sequence: Synthetic oligonucleotide
auauucauccaguugacac

SEQ ID NO: 2396887 - RNA, 19 nt, Artificial Sequence
  Description of Artificial Sequence: Synthetic oligonucleotide
aauuguuucaauuccacaa

SEQ ID NO: 2396888 - RNA, 19 nt, Artificial Sequence
  Description of Artificial Sequence: Synthetic oligonucleotide
aucugcucgauauucaucc

SEQ ID NO: 2396889 - RNA, 19 nt, Artificial Sequence
  Description of Artificial Sequence: Synthetic oligonucleotide
ucgauauucauccaguuga

SEQ ID NO: 2396890 - RNA, 19 nt, Artificial Sequence
  Description of Artificial Sequence: Synthetic oligonucleotide
aaucucaucccagaguagc

SEQ ID NO: 2396891 - RNA, 19 nt, Artificial Sequence
  Description of Artificial Sequence: Synthetic oligonucleotide
cuuuauaugacugucauca

SEQ ID NO: 2396892 - RNA, 19 nt, Artificial Sequence
  Description of Artificial Sequence: Synthetic oligonucleotide
uucggagucgcucauaagc

SEQ ID NO: 2396893 - RNA, 19 nt, Artificial Sequence
  Description of Artificial Sequence: Synthetic oligonucleotide
ucuauuaucccacccaagu

SEQ ID NO: 2396894 - RNA, 19 nt, Artificial Sequence
  Description of Artificial Sequence: Synthetic oligonucleotide
ucuuugauggucuucucag

SEQ ID NO: 2396895 - RNA, 19 nt, Artificial Sequence
  Description of Artificial Sequence: Synthetic oligonucleotide
uucauuaagacugacucca

SEQ ID NO: 2396896 - RNA, 19 nt, Artificial Sequence
  Description of Artificial Sequence: Synthetic oligonucleotide
ucuucaccgauucuucucg

SEQ ID NO: 2396897 - RNA, 19 nt, Artificial Sequence
  Description of Artificial Sequence: Synthetic oligonucleotide
cacuauuucugaaagcugc

SEQ ID NO: 2396898 - RNA, 19 nt, Artificial Sequence
  Description of Artificial Sequence: Synthetic oligonucleotide
cuaacuuuucucuucggag

SEQ ID NO: 2396899 - RNA, 19 nt, Artificial Sequence
  Description of Artificial Sequence: Synthetic oligonucleotide
aacuuuauaugacugucau

SEQ ID NO: 2396900 - RNA, 19 nt, Artificial Sequence
  Description of Artificial Sequence: Synthetic oligonucleotide
uauaugacugucaucaauu

SEQ ID NO: 2396901 - RNA, 19 nt, Artificial Sequence
  Description of Artificial Sequence: Synthetic oligonucleotide
acauaagucauccuuggca

SEQ ID NO: 2396902 - RNA, 19 nt, Artificial Sequence
  Description of Artificial Sequence: Synthetic oligonucleotide
ugaaauugcucucagcgau

SEQ ID NO: 2396903 - RNA, 19 nt, Artificial Sequence
  Description of Artificial Sequence: Synthetic oligonucleotide
cagaaauuguuucaauucc

SEQ ID NO: 2396904 - RNA, 19 nt, Artificial Sequence
  Description of Artificial Sequence: Synthetic oligonucleotide
uuucaauuccacaauuuuc

SEQ ID NO: 2396905 - RNA, 19 nt, Artificial Sequence
  Description of Artificial Sequence: Synthetic oligonucleotide
ucuagcauuuccuugaguu

SEQ ID NO: 2396906 - RNA, 19 nt, Artificial Sequence
  Description of Artificial Sequence: Synthetic oligonucleotide
aaaugugggcugcucugcc

SEQ ID NO: 2396907 - RNA, 19 nt, Artificial Sequence
  Description of Artificial Sequence: Synthetic oligonucleotide
aagacugacuccacguucc

SEQ ID NO: 2396908 - RNA, 19 nt, Artificial Sequence
  Description of Artificial Sequence: Synthetic oligonucleotide
agugaagacacuccaaacu

SEQ ID NO: 2396909 - RNA, 19 nt, Artificial Sequence
  Description of Artificial Sequence: Synthetic oligonucleotide
aaauuguuucaauuccaca

SEQ ID NO: 2396910 - RNA, 19 nt, Artificial Sequence
  Description of Artificial Sequence: Synthetic oligonucleotide
auuaagacugacuccacgu

SEQ ID NO: 2396911 - RNA, 19 nt, Artificial Sequence
  Description of Artificial Sequence: Synthetic oligonucleotide
ucuaacuuuucucuucgga

SEQ ID NO: 2396912 - RNA, 19 nt, Artificial Sequence
  Description of Artificial Sequence: Synthetic oligonucleotide
aguugauccauaucugcuc

SEQ ID NO: 2396913 - RNA, 19 nt, Artificial Sequence
  Description of Artificial Sequence: Synthetic oligonucleotide
ucagacauaagucauccuu

SEQ ID NO: 2396914 - RNA, 19 nt, Artificial Sequence
  Description of Artificial Sequence: Synthetic oligonucleotide
acucagacauaagucaucc

SEQ ID NO: 2396915 - RNA, 19 nt, Artificial Sequence
  Description of Artificial Sequence: Synthetic oligonucleotide
auccaguugacacucuaac

SEQ ID NO: 2396916 - RNA, 19 nt, Artificial Sequence
  Description of Artificial Sequence: Synthetic oligonucleotide
uauuugaaauugcucucag

SEQ ID NO: 2396917 - RNA, 19 nt, Artificial Sequence
  Description of Artificial Sequence: Synthetic oligonucleotide
aacaucaacuucauuaaga

SEQ ID NO: 2396918 - RNA, 19 nt, Artificial Sequence
  Description of Artificial Sequence: Synthetic oligonucleotide
aaagccgccguccucaccu

SEQ ID NO: 2396919 - RNA, 19 nt, Artificial Sequence
  Description of Artificial Sequence: Synthetic oligonucleotide
ugaguugauccauaucugc

SEQ ID NO: 2396920 - RNA, 19 nt, Artificial Sequence
  Description of Artificial Sequence: Synthetic oligonucleotide
acucuaacuuuucucuucg

SEQ ID NO: 2396921 - RNA, 19 nt, Artificial Sequence
  Description of Artificial Sequence: Synthetic oligonucleotide
guugauccauaucugcucg

SEQ ID NO: 2396922 - RNA, 19 nt, Artificial Sequence
  Description of Artificial Sequence: Synthetic oligonucleotide
uggucauuugcuuugucug

SEQ ID NO: 2396923 - RNA, 19 nt, Artificial Sequence
  Description of Artificial Sequence: Synthetic oligonucleotide
cauguaugcuaccaaaaug

SEQ ID NO: 2396924 - RNA, 19 nt, Artificial Sequence
  Description of Artificial Sequence: Synthetic oligonucleotide
uaacuuuucucuucggagu

SEQ ID NO: 2396925 - RNA, 19 nt, Artificial Sequence
  Description of Artificial Sequence: Synthetic oligonucleotide
uuauaugacugucaucaau

SEQ ID NO: 2396926 - RNA, 19 nt, Artificial Sequence
  Description of Artificial Sequence: Synthetic oligonucleotide
auguaugcuaccaaaaugu

SEQ ID NO: 2396927 - RNA, 19 nt, Artificial Sequence
  Description of Artificial Sequence: Synthetic oligonucleotide
ucaauuccaaucucauccc

SEQ ID NO: 2396928 - RNA, 19 nt, Artificial Sequence
  Description of Artificial Sequence: Synthetic oligonucleotide
uguagauccucuucuauua

SEQ ID NO: 2396929 - RNA, 19 nt, Artificial Sequence
  Description of Artificial Sequence: Synthetic oligonucleotide
uauucauccaguugacacu

SEQ ID NO: 2396930 - RNA, 19 nt, Artificial Sequence
  Description of Artificial Sequence: Synthetic oligonucleotide
uugaguugauccauaucug

SEQ ID NO: 2396931 - RNA, 19 nt, Artificial Sequence
  Description of Artificial Sequence: Synthetic oligonucleotide
caaguauuugaaauugcuc

SEQ ID NO: 2396932 - RNA, 19 nt, Artificial Sequence
  Description of Artificial Sequence: Synthetic oligonucleotide
ucggagucgcucauaagcc

SEQ ID NO: 2396933 - RNA, 19 nt, Artificial Sequence
  Description of Artificial Sequence: Synthetic oligonucleotide
cugcuugacaucuccagcc

SEQ ID NO: 2396934 - RNA, 19 nt, Artificial Sequence
  Description of Artificial Sequence: Synthetic oligonucleotide
cauuaagacugacuccacg

SEQ ID NO: 2396935 - RNA, 19 nt, Artificial Sequence
  Description of Artificial Sequence: Synthetic oligonucleotide
ucaccuacuuuucccgagg

SEQ ID NO: 2396936 - RNA, 19 nt, Artificial Sequence
  Description of Artificial Sequence: Synthetic oligonucleotide
aauuccaaucucaucccag

SEQ ID NO: 2396937 - RNA, 19 nt, Artificial Sequence
  Description of Artificial Sequence: Synthetic oligonucleotide
ugcuuugucugcaucacuc

SEQ ID NO: 2396938 - RNA, 19 nt, Artificial Sequence
  Description of Artificial Sequence: Synthetic oligonucleotide
uugaaauugcucucagcga

SEQ ID NO: 2396939 - RNA, 19 nt, Artificial Sequence
  Description of Artificial Sequence: Synthetic oligonucleotide
acuuuauaugacugucauc

SEQ ID NO: 2396940 - RNA, 19 nt, Artificial Sequence
  Description of Artificial Sequence: Synthetic oligonucleotide
uccucaccuacuuuucccg

SEQ ID NO: 2396941 - RNA, 19 nt, Artificial Sequence
  Description of Artificial Sequence: Synthetic oligonucleotide
caucacucagacauaaguc

SEQ ID NO: 2396942 - RNA, 19 nt, Artificial Sequence
  Description of Artificial Sequence: Synthetic oligonucleotide
guaugcuaccaaaaugugg

SEQ ID NO: 2396943 - RNA, 19 nt, Artificial Sequence
  Description of Artificial Sequence: Synthetic oligonucleotide
accgauucuucucgagucc

SEQ ID NO: 2396944 - RNA, 19 nt, Artificial Sequence
  Description of Artificial Sequence: Synthetic oligonucleotide
accacccucucccuggacc

SEQ ID NO: 2396945 - RNA, 19 nt, Artificial Sequence
  Description of Artificial Sequence: Synthetic oligonucleotide
cagacauaagucauccuug

SEQ ID NO: 2396946 - RNA, 19 nt, Artificial Sequence
  Description of Artificial Sequence: Synthetic oligonucleotide
ccuugcagcucuuugaugg

SEQ ID NO: 2396947 - RNA, 19 nt, Artificial Sequence
  Description of Artificial Sequence: Synthetic oligonucleotide
ucaucuuccauagccacga

SEQ ID NO: 2396948 - RNA, 19 nt, Artificial Sequence
  Description of Artificial Sequence: Synthetic oligonucleotide
uaagacugacuccacguuc

SEQ ID NO: 2396949 - RNA, 19 nt, Artificial Sequence
  Description of Artificial Sequence: Synthetic oligonucleotide
uccugagagacacugcggu

SEQ ID NO: 2396950 - RNA, 19 nt, Artificial Sequence
  Description of Artificial Sequence: Synthetic oligonucleotide
uguuucaauuccacaauuu

SEQ ID NO: 2396951 - RNA, 19 nt, Artificial Sequence
  Description of Artificial Sequence: Synthetic oligonucleotide
ucugggguugagccgacag

SEQ ID NO: 2396952 - RNA, 19 nt, Artificial Sequence
  Description of Artificial Sequence: Synthetic oligonucleotide
gauggagaacaucaacuuc

SEQ ID NO: 2396953 - RNA, 19 nt, Artificial Sequence
  Description of Artificial Sequence: Synthetic oligonucleotide
acugacuccacguuccacu

SEQ ID NO: 2396954 - RNA, 19 nt, Artificial Sequence
  Description of Artificial Sequence: Synthetic oligonucleotide
uccagaaauuguuucaauu

SEQ ID NO: 2396955 - RNA, 19 nt, Artificial Sequence
  Description of Artificial Sequence: Synthetic oligonucleotide
cuacuuuucccgaggagac

SEQ ID NO: 2396956 - RNA, 19 nt, Artificial Sequence
  Description of Artificial Sequence: Synthetic oligonucleotide
cugaauuuucuuucuagca

SEQ ID NO: 2396957 - RNA, 19 nt, Artificial Sequence
  Description of Artificial Sequence: Synthetic oligonucleotide
ucugccgauguccaucgug

SEQ ID NO: 2396958 - RNA, 19 nt, Artificial Sequence
  Description of Artificial Sequence: Synthetic oligonucleotide
ugaagacacuccaaacuuc

SEQ ID NO: 2396959 - RNA, 19 nt, Artificial Sequence
  Description of Artificial Sequence: Synthetic oligonucleotide
aaaagccgccguccucacc

SEQ ID NO: 2396960 - RNA, 19 nt, Artificial Sequence
  Description of Artificial Sequence: Synthetic oligonucleotide
caaacuuccagaaugugcu

SEQ ID NO: 2396961 - RNA, 19 nt, Artificial Sequence
  Description of Artificial Sequence: Synthetic oligonucleotide
agucccugcgggaaaagcc

SEQ ID NO: 2396962 - RNA, 19 nt, Artificial Sequence
  Description of Artificial Sequence: Synthetic oligonucleotide
uaacucucuccugagagac

SEQ ID NO: 2396963 - RNA, 19 nt, Artificial Sequence
  Description of Artificial Sequence: Synthetic oligonucleotide
ugcucgauauucauccagu

SEQ ID NO: 2396964 - RNA, 19 nt, Artificial Sequence
  Description of Artificial Sequence: Synthetic oligonucleotide
uccccuaacucucuccuga

SEQ ID NO: 2396965 - RNA, 19 nt, Artificial Sequence
  Description of Artificial Sequence: Synthetic oligonucleotide
cuagcauuuccuugaguug

SEQ ID NO: 2396966 - RNA, 19 nt, Artificial Sequence
  Description of Artificial Sequence: Synthetic oligonucleotide
ucuucggagucgcucauaa

SEQ ID NO: 2396967 - RNA, 19 nt, Artificial Sequence
  Description of Artificial Sequence: Synthetic oligonucleotide
uccaguugacacucuaacu

SEQ ID NO: 2396968 - RNA, 19 nt, Artificial Sequence
  Description of Artificial Sequence: Synthetic oligonucleotide
ucuucucgagucccugcgg

SEQ ID NO: 2396969 - RNA, 19 nt, Artificial Sequence
  Description of Artificial Sequence: Synthetic oligonucleotide
uccaucguguccccuaacu

SEQ ID NO: 2396970 - RNA, 19 nt, Artificial Sequence
  Description of Artificial Sequence: Synthetic oligonucleotide
aauugcucucagcgauuuc

SEQ ID NO: 2396971 - RNA, 19 nt, Artificial Sequence
  Description of Artificial Sequence: Synthetic oligonucleotide
uugugggcucucauucugg

SEQ ID NO: 2396972 - RNA, 19 nt, Artificial Sequence
  Description of Artificial Sequence: Synthetic oligonucleotide
ugagccgacaggaucccug

SEQ ID NO: 2396973 - RNA, 19 nt, Artificial Sequence
  Description of Artificial Sequence: Synthetic oligonucleotide
cucgauauucauccaguug

SEQ ID NO: 2396974 - RNA, 19 nt, Artificial Sequence
  Description of Artificial Sequence: Synthetic oligonucleotide
cuuugucugcaucacucag

SEQ ID NO: 2396975 - RNA, 19 nt, Artificial Sequence
  Description of Artificial Sequence: Synthetic oligonucleotide
ucaccgauucuucucgagu

SEQ ID NO: 2396976 - RNA, 19 nt, Artificial Sequence
  Description of Artificial Sequence: Synthetic oligonucleotide
gacauaagucauccuuggc

SEQ ID NO: 2396977 - RNA, 19 nt, Artificial Sequence
  Description of Artificial Sequence: Synthetic oligonucleotide
uuguuucaauuccacaauu

SEQ ID NO: 2396978 - RNA, 19 nt, Artificial Sequence
  Description of Artificial Sequence: Synthetic oligonucleotide
agaaauuguuucaauucca

SEQ ID NO: 2396979 - RNA, 19 nt, Artificial Sequence
  Description of Artificial Sequence: Synthetic oligonucleotide
ucccagaguagccagugaa

SEQ ID NO: 2396980 - RNA, 19 nt, Artificial Sequence
  Description of Artificial Sequence: Synthetic oligonucleotide
uuaagacugacuccacguu

SEQ ID NO: 2396981 - RNA, 19 nt, Artificial Sequence
  Description of Artificial Sequence: Synthetic oligonucleotide
ugcuugacaucuccagccc

SEQ ID NO: 2396982 - RNA, 19 nt, Artificial Sequence
  Description of Artificial Sequence: Synthetic oligonucleotide
gguaaacugauggagaaca

SEQ ID NO: 2396983 - RNA, 19 nt, Artificial Sequence
  Description of Artificial Sequence: Synthetic oligonucleotide
ccagaaauuguuucaauuc

SEQ ID NO: 2396984 - RNA, 19 nt, Artificial Sequence
  Description of Artificial Sequence: Synthetic oligonucleotide
uguccccuaacucucuccu

SEQ ID NO: 2396985 - RNA, 19 nt, Artificial Sequence
  Description of Artificial Sequence: Synthetic oligonucleotide
agagacacugcggugcggg

SEQ ID NO: 2396986 - RNA, 19 nt, Artificial Sequence
  Description of Artificial Sequence: Synthetic oligonucleotide
cuucucgagucccugcggg

SEQ ID NO: 2396987 - RNA, 19 nt, Artificial Sequence
  Description of Artificial Sequence: Synthetic oligonucleotide
ccaaacuuccagaaugugc

SEQ ID NO: 2396988 - RNA, 19 nt, Artificial Sequence
  Description of Artificial Sequence: Synthetic oligonucleotide
auguaaagggguaaacuga

SEQ ID NO: 2396989 - RNA, 19 nt, Artificial Sequence
  Description of Artificial Sequence: Synthetic oligonucleotide
ucgagcaguucuuucuucu

SEQ ID NO: 2396990 - RNA, 19 nt, Artificial Sequence
  Description of Artificial Sequence: Synthetic oligonucleotide
ucagauucgagcaguucuu

SEQ ID NO: 2396991 - RNA, 19 nt, Artificial Sequence
  Description of Artificial Sequence: Synthetic oligonucleotide
ucagcgauuuccagaaauu

SEQ ID NO: 2396992 - RNA, 19 nt, Artificial Sequence
  Description of Artificial Sequence: Synthetic oligonucleotide
ugggguugagccgacagga

SEQ ID NO: 2396993 - RNA, 19 nt, Artificial Sequence
  Description of Artificial Sequence: Synthetic oligonucleotide
uuuauaugacugucaucaa

SEQ ID NO: 2396994 - RNA, 19 nt, Artificial Sequence
  Description of Artificial Sequence: Synthetic oligonucleotide
uucaccgauucuucucgag

SEQ ID NO: 2396995 - RNA, 19 nt, Artificial Sequence
  Description of Artificial Sequence: Synthetic oligonucleotide
cacucuaacuuuucucuuc

SEQ ID NO: 2396996 - RNA, 19 nt, Artificial Sequence
  Description of Artificial Sequence: Synthetic oligonucleotide
augagucaucuuccauagc

SEQ ID NO: 2396997 - RNA, 19 nt, Artificial Sequence
  Description of Artificial Sequence: Synthetic oligonucleotide
cauagccacgacacugggg

SEQ ID NO: 2396998 - RNA, 19 nt, Artificial Sequence
  Description of Artificial Sequence: Synthetic oligonucleotide
ucaacaccaugcuguauaa

SEQ ID NO: 2396999 - RNA, 19 nt, Artificial Sequence
  Description of Artificial Sequence: Synthetic oligonucleotide
augggcggcggcuggagcg

SEQ ID NO: 2397000 - RNA, 19 nt, Artificial Sequence
  Description of Artificial Sequence: Synthetic oligonucleotide
ucucccuggacccggcgcc

SEQ ID NO: 2397001 - RNA, 19 nt, Artificial Sequence
  Description of Artificial Sequence: Synthetic oligonucleotide
cucaucccagaguagccag

SEQ ID NO: 2397002 - RNA, 19 nt, Artificial Sequence
  Description of Artificial Sequence: Synthetic oligonucleotide
ucauuaagacugacuccac

SEQ ID NO: 2397003 - RNA, 19 nt, Artificial Sequence
  Description of Artificial Sequence: Synthetic oligonucleotide
cagugaagacacuccaaac

SEQ ID NO: 2397004 - RNA, 19 nt, Artificial Sequence
  Description of Artificial Sequence: Synthetic oligonucleotide
cugauggagaacaucaacu

SEQ ID NO: 2397005 - RNA, 19 nt, Artificial Sequence
  Description of Artificial Sequence: Synthetic oligonucleotide
caccgauucuucucgaguc

SEQ ID NO: 2397006 - RNA, 19 nt, Artificial Sequence
  Description of Artificial Sequence: Synthetic oligonucleotide
uucuuucuagcauuuccuu

SEQ ID NO: 2397007 - RNA, 19 nt, Artificial Sequence
  Description of Artificial Sequence: Synthetic oligonucleotide
uuggcaucggugcuucccu

SEQ ID NO: 2397008 - RNA, 19 nt, Artificial Sequence
  Description of Artificial Sequence: Synthetic oligonucleotide
cuugugggcucucauucug

SEQ ID NO: 2397009 - RNA, 19 nt, Artificial Sequence
  Description of Artificial Sequence: Synthetic oligonucleotide
uuuccuugaguugauccau

SEQ ID NO: 2397010 - RNA, 19 nt, Artificial Sequence
  Description of Artificial Sequence: Synthetic oligonucleotide
cugcucgauauucauccag

SEQ ID NO: 2397011 - RNA, 19 nt, Artificial Sequence
  Description of Artificial Sequence: Synthetic oligonucleotide
caucaauuccaaucucauc

SEQ ID NO: 2397012 - RNA, 19 nt, Artificial Sequence
  Description of Artificial Sequence: Synthetic oligonucleotide
gagguagccgugcgggccg

SEQ ID NO: 2397013 - RNA, 19 nt, Artificial Sequence
  Description of Artificial Sequence: Synthetic oligonucleotide
aauuuucuugugggcucuc

SEQ ID NO: 2397014 - RNA, 19 nt, Artificial Sequence
  Description of Artificial Sequence: Synthetic oligonucleotide
agacacugcggugcgggcc

SEQ ID NO: 2397015 - RNA, 19 nt, Artificial Sequence
  Description of Artificial Sequence: Synthetic oligonucleotide
aaauugcucucagcgauuu

SEQ ID NO: 2397016 - RNA, 19 nt, Artificial Sequence
  Description of Artificial Sequence: Synthetic oligonucleotide
uuucugaaagcugcuugac

SEQ ID NO: 2397017 - RNA, 19 nt, Artificial Sequence
  Description of Artificial Sequence: Synthetic oligonucleotide
cagaaugugcugcccaaug

SEQ ID NO: 2397018 - RNA, 19 nt, Artificial Sequence
  Description of Artificial Sequence: Synthetic oligonucleotide
guccucaccuacuuuuccc

SEQ ID NO: 2397019 - RNA, 19 nt, Artificial Sequence
  Description of Artificial Sequence: Synthetic oligonucleotide
gaguagccagugaagacac

SEQ ID NO: 2397020 - RNA, 19 nt, Artificial Sequence
  Description of Artificial Sequence: Synthetic oligonucleotide
gccugaauuuucuuucuag

SEQ ID NO: 2397021 - RNA, 19 nt, Artificial Sequence
  Description of Artificial Sequence: Synthetic oligonucleotide
cucuaacuuuucucuucgg

SEQ ID NO: 2397022 - RNA, 19 nt, Artificial Sequence
  Description of Artificial Sequence: Synthetic oligonucleotide
gauucuucucgagucccug

SEQ ID NO: 2397023 - RNA, 19 nt, Artificial Sequence
  Description of Artificial Sequence: Synthetic oligonucleotide
uuucuugugggcucucauu

SEQ ID NO: 2397024 - RNA, 19 nt, Artificial Sequence
  Description of Artificial Sequence: Synthetic oligonucleotide
agcgauuuccagaaauugu

SEQ ID NO: 2397025 - RNA, 19 nt, Artificial Sequence
  Description of Artificial Sequence: Synthetic oligonucleotide
gucaucuuccauagccacg

SEQ ID NO: 2397026 - RNA, 19 nt, Artificial Sequence
  Description of Artificial Sequence: Synthetic oligonucleotide
ggucauuugcuuugucugc

SEQ ID NO: 2397027 - RNA, 19 nt, Artificial Sequence
  Description of Artificial Sequence: Synthetic oligonucleotide
uuucucuucggagucgcuc

SEQ ID NO: 2397028 - RNA, 19 nt, Artificial Sequence
  Description of Artificial Sequence: Synthetic oligonucleotide
aucguguccccuaacucuc

SEQ ID NO: 2397029 - RNA, 19 nt, Artificial Sequence
  Description of Artificial Sequence: Synthetic oligonucleotide
cucucagcgauuuccagaa

SEQ ID NO: 2397030 - RNA, 19 nt, Artificial Sequence
  Description of Artificial Sequence: Synthetic oligonucleotide
gcagcgguccccuucuucg

SEQ ID NO: 2397031 - RNA, 19 nt, Artificial Sequence
  Description of Artificial Sequence: Synthetic oligonucleotide
gucccugcgggaaaagccg

SEQ ID NO: 2397032 - RNA, 19 nt, Artificial Sequence
  Description of Artificial Sequence: Synthetic oligonucleotide
gauauucauccaguugaca

SEQ ID NO: 2397033 - RNA, 19 nt, Artificial Sequence
  Description of Artificial Sequence: Synthetic oligonucleotide
cuaccaaaaugugggcugc

SEQ ID NO: 2397034 - RNA, 19 nt, Artificial Sequence
  Description of Artificial Sequence: Synthetic oligonucleotide
uccaaacuuccagaaugug

SEQ ID NO: 2397035 - RNA, 19 nt, Artificial Sequence
  Description of Artificial Sequence: Synthetic oligonucleotide
cucaacaccaugcuguaua

SEQ ID NO: 2397036 - RNA, 19 nt, Artificial Sequence
  Description of Artificial Sequence: Synthetic oligonucleotide
aagucauccuuggcaucgg

SEQ ID NO: 2397037 - RNA, 19 nt, Artificial Sequence
  Description of Artificial Sequence: Synthetic oligonucleotide
gauggcacaugggcggcgg

SEQ ID NO: 2397038 - RNA, 19 nt, Artificial Sequence
  Description of Artificial Sequence: Synthetic oligonucleotide
ugcccaauguaaaggggua

SEQ ID NO: 2397039 - RNA, 19 nt, Artificial Sequence
  Description of Artificial Sequence: Synthetic oligonucleotide
cagcgauuuccagaaauug

SEQ ID NO: 2397040 - RNA, 19 nt, Artificial Sequence
  Description of Artificial Sequence: Synthetic oligonucleotide
cauaagucauccuuggcau

SEQ ID NO: 2397041 - RNA, 19 nt, Artificial Sequence
  Description of Artificial Sequence: Synthetic oligonucleotide
uucuagcauuuccuugagu

SEQ ID NO: 2397042 - RNA, 19 nt, Artificial Sequence
  Description of Artificial Sequence: Synthetic oligonucleotide
cugggguugagccgacagg

SEQ ID NO: 2397043 - RNA, 19 nt, Artificial Sequence
  Description of Artificial Sequence: Synthetic oligonucleotide
acuauuucugaaagcugcu

SEQ ID NO: 2397044 - RNA, 19 nt, Artificial Sequence
  Description of Artificial Sequence: Synthetic oligonucleotide
cugucaucaauuccaaucu

SEQ ID NO: 2397045 - RNA, 19 nt, Artificial Sequence
  Description of Artificial Sequence: Synthetic oligonucleotide
caaucucaucccagaguag

SEQ ID NO: 2397046 - RNA, 19 nt, Artificial Sequence
  Description of Artificial Sequence: Synthetic oligonucleotide
uugauccauaucugcucga

SEQ ID NO: 2397047 - RNA, 19 nt, Artificial Sequence
  Description of Artificial Sequence: Synthetic oligonucleotide
ucugcucgauauucaucca

SEQ ID NO: 2397048 - RNA, 19 nt, Artificial Sequence
  Description of Artificial Sequence: Synthetic oligonucleotide
agcagcgguccccuucuuc

SEQ ID NO: 2397049 - RNA, 19 nt, Artificial Sequence
  Description of Artificial Sequence: Synthetic oligonucleotide
cguacugcaucauguaugc

SEQ ID NO: 2397050 - RNA, 19 nt, Artificial Sequence
  Description of Artificial Sequence: Synthetic oligonucleotide
uuaucccacccaaguauuu

SEQ ID NO: 2397051 - RNA, 19 nt, Artificial Sequence
  Description of Artificial Sequence: Synthetic oligonucleotide
gcggauggcacaugggcgg

SEQ ID NO: 2397052 - RNA, 19 nt, Artificial Sequence
  Description of Artificial Sequence: Synthetic oligonucleotide
ugcggugcgggccuagguc

SEQ ID NO: 2397053 - RNA, 19 nt, Artificial Sequence
  Description of Artificial Sequence: Synthetic oligonucleotide
uucccgaggagacccugga

SEQ ID NO: 2397054 - RNA, 19 nt, Artificial Sequence
  Description of Artificial Sequence: Synthetic oligonucleotide
gucuucaccgauucuucuc

SEQ ID NO: 2397055 - RNA, 19 nt, Artificial Sequence
  Description of Artificial Sequence: Synthetic oligonucleotide
ccacguuccacuauuucug

SEQ ID NO: 2397056 - RNA, 19 nt, Artificial Sequence
  Description of Artificial Sequence: Synthetic oligonucleotide
augugggcugcucugccga

SEQ ID NO: 2397057 - RNA, 19 nt, Artificial Sequence
  Description of Artificial Sequence: Synthetic oligonucleotide
ugauccauaucugcucgau

SEQ ID NO: 2397058 - RNA, 19 nt, Artificial Sequence
  Description of Artificial Sequence: Synthetic oligonucleotide
gucgcucauaagccaacug

SEQ ID NO: 2397059 - RNA, 19 nt, Artificial Sequence
  Description of Artificial Sequence: Synthetic oligonucleotide
ucccugcgggaaaagccgc

SEQ ID NO: 2397060 - RNA, 19 nt, Artificial Sequence
  Description of Artificial Sequence: Synthetic oligonucleotide
guaaagggguaaacugaug

SEQ ID NO: 2397061 - RNA, 19 nt, Artificial Sequence
  Description of Artificial Sequence: Synthetic oligonucleotide
cuauuaucccacccaagua

SEQ ID NO: 2397062 - RNA, 19 nt, Artificial Sequence
  Description of Artificial Sequence: Synthetic oligonucleotide
ugcuguagauccucuucua

SEQ ID NO: 2397063 - RNA, 19 nt, Artificial Sequence
  Description of Artificial Sequence: Synthetic oligonucleotide
gcuugacaucuccagcccg

SEQ ID NO: 2397064 - RNA, 19 nt, Artificial Sequence
  Description of Artificial Sequence: Synthetic oligonucleotide
uccagcccguacugcauca

SEQ ID NO: 2397065 - RNA, 19 nt, Artificial Sequence
  Description of Artificial Sequence: Synthetic oligonucleotide
uucucgagucccugcggga

SEQ ID NO: 2397066 - RNA, 19 nt, Artificial Sequence
  Description of Artificial Sequence: Synthetic oligonucleotide
aagacacuccaaacuucca

SEQ ID NO: 2397067 - RNA, 19 nt, Artificial Sequence
  Description of Artificial Sequence: Synthetic oligonucleotide
caucguguccccuaacucu

SEQ ID NO: 2397068 - RNA, 19 nt, Artificial Sequence
  Description of Artificial Sequence: Synthetic oligonucleotide
cccaaguauuugaaauugc

SEQ ID NO: 2397069 - RNA, 19 nt, Artificial Sequence
  Description of Artificial Sequence: Synthetic oligonucleotide
agcgguccccuucuucgag

SEQ ID NO: 2397070 - RNA, 19 nt, Artificial Sequence
  Description of Artificial Sequence: Synthetic oligonucleotide
uucucagauucgagcaguu

SEQ ID NO: 2397071 - RNA, 19 nt, Artificial Sequence
  Description of Artificial Sequence: Synthetic oligonucleotide
caauguaaagggguaaacu

SEQ ID NO: 2397072 - RNA, 19 nt, Artificial Sequence
  Description of Artificial Sequence: Synthetic oligonucleotide
auggcacaugggcggcggc

SEQ ID NO: 2397073 - RNA, 19 nt, Artificial Sequence
  Description of Artificial Sequence: Synthetic oligonucleotide
auaagccaacuggccuugc

SEQ ID NO: 2397074 - RNA, 19 nt, Artificial Sequence
  Description of Artificial Sequence: Synthetic oligonucleotide
ggggccugaauuuucuuuc

SEQ ID NO: 2397075 - RNA, 19 nt, Artificial Sequence
  Description of Artificial Sequence: Synthetic oligonucleotide
auuaucccacccaaguauu

SEQ ID NO: 2397076 - RNA, 19 nt, Artificial Sequence
  Description of Artificial Sequence: Synthetic oligonucleotide
ugcucugccgauguccauc

SEQ ID NO: 2397077 - RNA, 19 nt, Artificial Sequence
  Description of Artificial Sequence: Synthetic oligonucleotide
gcucugccgauguccaucg

SEQ ID NO: 2397078 - RNA, 19 nt, Artificial Sequence
  Description of Artificial Sequence: Synthetic oligonucleotide
guguccccuaacucucucc

SEQ ID NO: 2397079 - RNA, 19 nt, Artificial Sequence
  Description of Artificial Sequence: Synthetic oligonucleotide
cuucggagucgcucauaag

SEQ ID NO: 2397080 - RNA, 19 nt, Artificial Sequence
  Description of Artificial Sequence: Synthetic oligonucleotide
cuggucauuugcuuugucu

SEQ ID NO: 2397081 - RNA, 19 nt, Artificial Sequence
  Description of Artificial Sequence: Synthetic oligonucleotide
caauuccaaucucauccca

SEQ ID NO: 2397082 - RNA, 19 nt, Artificial Sequence
  Description of Artificial Sequence: Synthetic oligonucleotide
ucggugcuucccucaacac

SEQ ID NO: 2397083 - RNA, 19 nt, Artificial Sequence
  Description of Artificial Sequence: Synthetic oligonucleotide
gaaaagccgccguccucac

SEQ ID NO: 2397084 - RNA, 19 nt, Artificial Sequence
  Description of Artificial Sequence: Synthetic oligonucleotide
gauccauaucugcucgaua

SEQ ID NO: 2397085 - RNA, 19 nt, Artificial Sequence
  Description of Artificial Sequence: Synthetic oligonucleotide
gggguaaacugauggagaa

SEQ ID NO: 2397086 - RNA, 19 nt, Artificial Sequence
  Description of Artificial Sequence: Synthetic oligonucleotide
ucucgagucccugcgggaa

SEQ ID NO: 2397087 - RNA, 19 nt, Artificial Sequence
  Description of Artificial Sequence: Synthetic oligonucleotide
cgggccuaggucuucaccg

SEQ ID NO: 2397088 - RNA, 19 nt, Artificial Sequence
  Description of Artificial Sequence: Synthetic oligonucleotide
ccaaucucaucccagagua

SEQ ID NO: 2397089 - RNA, 19 nt, Artificial Sequence
  Description of Artificial Sequence: Synthetic oligonucleotide
cuccacguuccacuauuuc

SEQ ID NO: 2397090 - RNA, 19 nt, Artificial Sequence
  Description of Artificial Sequence: Synthetic oligonucleotide
agcccguacugcaucaugu

SEQ ID NO: 2397091 - RNA, 19 nt, Artificial Sequence
  Description of Artificial Sequence: Synthetic oligonucleotide
auguccaucguguccccua

SEQ ID NO: 2397092 - RNA, 19 nt, Artificial Sequence
  Description of Artificial Sequence: Synthetic oligonucleotide
cugcccaauguaaaggggu

SEQ ID NO: 2397093 - RNA, 19 nt, Artificial Sequence
  Description of Artificial Sequence: Synthetic oligonucleotide
aguugacacucuaacuuuu

SEQ ID NO: 2397094 - RNA, 19 nt, Artificial Sequence
  Description of Artificial Sequence: Synthetic oligonucleotide
ugucugcaucacucagaca

SEQ ID NO: 2397095 - RNA, 19 nt, Artificial Sequence
  Description of Artificial Sequence: Synthetic oligonucleotide
ccuacuuuucccgaggaga

SEQ ID NO: 2397096 - RNA, 19 nt, Artificial Sequence
  Description of Artificial Sequence: Synthetic oligonucleotide
ucucuucggagucgcucau

SEQ ID NO: 2397097 - RNA, 19 nt, Artificial Sequence
  Description of Artificial Sequence: Synthetic oligonucleotide
gccgauguccaucgugucc

SEQ ID NO: 2397098 - RNA, 19 nt, Artificial Sequence
  Description of Artificial Sequence: Synthetic oligonucleotide
ccuaggucuucaccgauuc

SEQ ID NO: 2397099 - RNA, 19 nt, Artificial Sequence
  Description of Artificial Sequence: Synthetic oligonucleotide
cacguuccacuauuucuga

SEQ ID NO: 2397100 - RNA, 19 nt, Artificial Sequence
  Description of Artificial Sequence: Synthetic oligonucleotide
ugacuccacguuccacuau

SEQ ID NO: 2397101 - RNA, 19 nt, Artificial Sequence
  Description of Artificial Sequence: Synthetic oligonucleotide
ucguguccccuaacucucu

SEQ ID NO: 2397102 - RNA, 19 nt, Artificial Sequence
  Description of Artificial Sequence: Synthetic oligonucleotide
cccagaguagccagugaag

SEQ ID NO: 2397103 - RNA, 19 nt, Artificial Sequence
  Description of Artificial Sequence: Synthetic oligonucleotide
agucgcucauaagccaacu

SEQ ID NO: 2397104 - RNA, 19 nt, Artificial Sequence
  Description of Artificial Sequence: Synthetic oligonucleotide
gcugcccaauguaaagggg

SEQ ID NO: 2397105 - RNA, 19 nt, Artificial Sequence
  Description of Artificial Sequence: Synthetic oligonucleotide
gcucucagcgauuuccaga

SEQ ID NO: 2397106 - RNA, 19 nt, Artificial Sequence
  Description of Artificial Sequence: Synthetic oligonucleotide
ggguugagccgacaggauc

SEQ ID NO: 2397107 - RNA, 19 nt, Artificial Sequence
  Description of Artificial Sequence: Synthetic oligonucleotide
acguuccacuauuucugaa

SEQ ID NO: 2397108 - RNA, 19 nt, Artificial Sequence
  Description of Artificial Sequence: Synthetic oligonucleotide
ccaaguauuugaaauugcu

SEQ ID NO: 2397109 - RNA, 19 nt, Artificial Sequence
  Description of Artificial Sequence: Synthetic oligonucleotide
cuccaaacuuccagaaugu

SEQ ID NO: 2397110 - RNA, 19 nt, Artificial Sequence
  Description of Artificial Sequence: Synthetic oligonucleotide
ggacccggcgccgagguag

SEQ ID NO: 2397111 - RNA, 19 nt, Artificial Sequence
  Description of Artificial Sequence: Synthetic oligonucleotide
guugagccgacaggauccc

SEQ ID NO: 2397112 - RNA, 19 nt, Artificial Sequence
  Description of Artificial Sequence: Synthetic oligonucleotide
gagacccuggagcagcggu

SEQ ID NO: 2397113 - RNA, 19 nt, Artificial Sequence
  Description of Artificial Sequence: Synthetic oligonucleotide
agccgccguccucaccuac

SEQ ID NO: 2397114 - RNA, 19 nt, Artificial Sequence
  Description of Artificial Sequence: Synthetic oligonucleotide
gagucgcucauaagccaac

SEQ ID NO: 2397115 - RNA, 19 nt, Artificial Sequence
  Description of Artificial Sequence: Synthetic oligonucleotide
uaccaaaaugugggcugcu

SEQ ID NO: 2397116 - RNA, 19 nt, Artificial Sequence
  Description of Artificial Sequence: Synthetic oligonucleotide
cauucuggucauuugcuuu

SEQ ID NO: 2397117 - RNA, 19 nt, Artificial Sequence
  Description of Artificial Sequence: Synthetic oligonucleotide
uccuuggcaucggugcuuc

SEQ ID NO: 2397118 - RNA, 19 nt, Artificial Sequence
  Description of Artificial Sequence: Synthetic oligonucleotide
ccaauguaaagggguaaac

SEQ ID NO: 2397119 - RNA, 19 nt, Artificial Sequence
  Description of Artificial Sequence: Synthetic oligonucleotide
gacacugcggugcgggccu

SEQ ID NO: 2397120 - RNA, 19 nt, Artificial Sequence
  Description of Artificial Sequence: Synthetic oligonucleotide
gacuccacguuccacuauu

SEQ ID NO: 2397121 - RNA, 19 nt, Artificial Sequence
  Description of Artificial Sequence: Synthetic oligonucleotide
ccgcggauggcacaugggc

SEQ ID NO: 2397122 - RNA, 19 nt, Artificial Sequence
  Description of Artificial Sequence: Synthetic oligonucleotide
ggccgcggauggcacaugg

SEQ ID NO: 2397123 - RNA, 19 nt, Artificial Sequence
  Description of Artificial Sequence: Synthetic oligonucleotide
ugccgauguccaucguguc

SEQ ID NO: 2397124 - RNA, 19 nt, Artificial Sequence
  Description of Artificial Sequence: Synthetic oligonucleotide
cagcccguacugcaucaug

SEQ ID NO: 2397125 - RNA, 19 nt, Artificial Sequence
  Description of Artificial Sequence: Synthetic oligonucleotide
augugcugcccaauguaaa

SEQ ID NO: 2397126 - RNA, 19 nt, Artificial Sequence
  Description of Artificial Sequence: Synthetic oligonucleotide
caugggcggcggcuggagc

SEQ ID NO: 2397127 - RNA, 19 nt, Artificial Sequence
  Description of Artificial Sequence: Synthetic oligonucleotide
cuucaccgauucuucucga

SEQ ID NO: 2397128 - RNA, 19 nt, Artificial Sequence
  Description of Artificial Sequence: Synthetic oligonucleotide
cuccagcccguacugcauc

SEQ ID NO: 2397129 - RNA, 19 nt, Artificial Sequence
  Description of Artificial Sequence: Synthetic oligonucleotide
cgcggauggcacaugggcg

SEQ ID NO: 2397130 - RNA, 19 nt, Artificial Sequence
  Description of Artificial Sequence: Synthetic oligonucleotide
cgauauucauccaguugac

SEQ ID NO: 2397131 - RNA, 19 nt, Artificial Sequence
  Description of Artificial Sequence: Synthetic oligonucleotide
caucggugcuucccucaac

SEQ ID NO: 2397132 - RNA, 19 nt, Artificial Sequence
  Description of Artificial Sequence: Synthetic oligonucleotide
caccuacuuuucccgagga

SEQ ID NO: 2397133 - RNA, 19 nt, Artificial Sequence
  Description of Artificial Sequence: Synthetic oligonucleotide
caguugacacucuaacuuu

SEQ ID NO: 2397134 - RNA, 19 nt, Artificial Sequence
  Description of Artificial Sequence: Synthetic oligonucleotide
acugcggugcgggccuagg

SEQ ID NO: 2397135 - RNA, 19 nt, Artificial Sequence
  Description of Artificial Sequence: Synthetic oligonucleotide
gcaucauguaugcuaccaa

SEQ ID NO: 2397136 - RNA, 19 nt, Artificial Sequence
  Description of Artificial Sequence: Synthetic oligonucleotide
acccucucccuggacccgg

SEQ ID NO: 2397137 - RNA, 19 nt, Artificial Sequence
  Description of Artificial Sequence: Synthetic oligonucleotide
ccaguugacacucuaacuu

SEQ ID NO: 2397138 - RNA, 19 nt, Artificial Sequence
  Description of Artificial Sequence: Synthetic oligonucleotide
cugacuccacguuccacua

SEQ ID NO: 2397139 - RNA, 19 nt, Artificial Sequence
  Description of Artificial Sequence: Synthetic oligonucleotide
acaugggcggcggcuggag

SEQ ID NO: 2397140 - RNA, 19 nt, Artificial Sequence
  Description of Artificial Sequence: Synthetic oligonucleotide
ccaucguguccccuaacuc

SEQ ID NO: 2397141 - RNA, 19 nt, Artificial Sequence
  Description of Artificial Sequence: Synthetic oligonucleotide
ggguaaacugauggagaac

SEQ ID NO: 2397142 - RNA, 19 nt, Artificial Sequence
  Description of Artificial Sequence: Synthetic oligonucleotide
uggcaucggugcuucccuc

SEQ ID NO: 2397143 - RNA, 19 nt, Artificial Sequence
  Description of Artificial Sequence: Synthetic oligonucleotide
cacccaaguauuugaaauu

SEQ ID NO: 2397144 - RNA, 19 nt, Artificial Sequence
  Description of Artificial Sequence: Synthetic oligonucleotide
ugugggcugcucugccgau

SEQ ID NO: 2397145 - RNA, 19 nt, Artificial Sequence
  Description of Artificial Sequence: Synthetic oligonucleotide
gcgggaaaagccgccgucc

SEQ ID NO: 2397146 - RNA, 19 nt, Artificial Sequence
  Description of Artificial Sequence: Synthetic oligonucleotide
gccgacaggaucccugcuc

SEQ ID NO: 2397147 - RNA, 19 nt, Artificial Sequence
  Description of Artificial Sequence: Synthetic oligonucleotide
cggugcuucccucaacacc

SEQ ID NO: 2397148 - RNA, 19 nt, Artificial Sequence
  Description of Artificial Sequence: Synthetic oligonucleotide
ggcaucggugcuucccuca

SEQ ID NO: 2397149 - RNA, 19 nt, Artificial Sequence
  Description of Artificial Sequence: Synthetic oligonucleotide
ccacccaaguauuugaaau

SEQ ID NO: 2397150 - RNA, 19 nt, Artificial Sequence
  Description of Artificial Sequence: Synthetic oligonucleotide
caacuggccuugcagcucu

SEQ ID NO: 2397151 - RNA, 19 nt, Artificial Sequence
  Description of Artificial Sequence: Synthetic oligonucleotide
ggagucgcucauaagccaa

SEQ ID NO: 2397152 - RNA, 19 nt, Artificial Sequence
  Description of Artificial Sequence: Synthetic oligonucleotide
uugagccgacaggaucccu

SEQ ID NO: 2397153 - RNA, 19 nt, Artificial Sequence
  Description of Artificial Sequence: Synthetic oligonucleotide
ugcgggccuaggucuucac

SEQ ID NO: 2397154 - RNA, 19 nt, Artificial Sequence
  Description of Artificial Sequence: Synthetic oligonucleotide
ccugcgggaaaagccgccg

SEQ ID NO: 2397155 - RNA, 19 nt, Artificial Sequence
  Description of Artificial Sequence: Synthetic oligonucleotide
ccgaggagacccuggagca

SEQ ID NO: 2397156 - RNA, 19 nt, Artificial Sequence
  Description of Artificial Sequence: Synthetic oligonucleotide
gcgauuuccagaaauuguu

SEQ ID NO: 2397157 - RNA, 19 nt, Artificial Sequence
  Description of Artificial Sequence: Synthetic oligonucleotide
cucccuggacccggcgccg

SEQ ID NO: 2397158 - RNA, 19 nt, Artificial Sequence
  Description of Artificial Sequence: Synthetic oligonucleotide
aguagccagugaagacacu

SEQ ID NO: 2397159 - RNA, 19 nt, Artificial Sequence
  Description of Artificial Sequence: Synthetic oligonucleotide
cucagacauaagucauccu

SEQ ID NO: 2397160 - RNA, 19 nt, Artificial Sequence
  Description of Artificial Sequence: Synthetic oligonucleotide
gcgggccuaggucuucacc

SEQ ID NO: 2397161 - RNA, 19 nt, Artificial Sequence
  Description of Artificial Sequence: Synthetic oligonucleotide
ggauggcacaugggcggcg

SEQ ID NO: 2397162 - RNA, 19 nt, Artificial Sequence
  Description of Artificial Sequence: Synthetic oligonucleotide
cauccuuggcaucggugcu

SEQ ID NO: 2397163 - RNA, 19 nt, Artificial Sequence
  Description of Artificial Sequence: Synthetic oligonucleotide
ccccuaacucucuccugag

SEQ ID NO: 2397164 - RNA, 19 nt, Artificial Sequence
  Description of Artificial Sequence: Synthetic oligonucleotide
ggucuucaccgauucuucu

SEQ ID NO: 2397165 - RNA, 19 nt, Artificial Sequence
  Description of Artificial Sequence: Synthetic oligonucleotide
aagccgccguccucaccua

SEQ ID NO: 2397166 - RNA, 19 nt, Artificial Sequence
  Description of Artificial Sequence: Synthetic oligonucleotide
gggccuaggucuucaccga

SEQ ID NO: 2397167 - RNA, 19 nt, Artificial Sequence
  Description of Artificial Sequence: Synthetic oligonucleotide
agccgugcgggccgcggau

SEQ ID NO: 2397168 - RNA, 19 nt, Artificial Sequence
  Description of Artificial Sequence: Synthetic oligonucleotide
gacccggcgccgagguagc

SEQ ID NO: 2397169 - RNA, 19 nt, Artificial Sequence
  Description of Artificial Sequence: Synthetic oligonucleotide
cucgagucccugcgggaaa

SEQ ID NO: 2397170 - RNA, 19 nt, Artificial Sequence
  Description of Artificial Sequence: Synthetic oligonucleotide
ggagcagcgguccccuucu

SEQ ID NO: 2397171 - RNA, 19 nt, Artificial Sequence
  Description of Artificial Sequence: Synthetic oligonucleotide
cagcgguccccuucuucga

SEQ ID NO: 2397172 - RNA, 19 nt, Artificial Sequence
  Description of Artificial Sequence: Synthetic oligonucleotide
caacaccaugcuguauaaa

SEQ ID NO: 2397173 - RNA, 19 nt, Artificial Sequence
  Description of Artificial Sequence: Synthetic oligonucleotide
gcgccgagguagccgugcg

SEQ ID NO: 2397174 - RNA, 19 nt, Artificial Sequence
  Description of Artificial Sequence: Synthetic oligonucleotide
ccguccucaccuacuuuuc

SEQ ID NO: 2397175 - RNA, 19 nt, Artificial Sequence
  Description of Artificial Sequence: Synthetic oligonucleotide
gauguccaucguguccccu

SEQ ID NO: 2397176 - RNA, 19 nt, Artificial Sequence
  Description of Artificial Sequence: Synthetic oligonucleotide
cgagguagccgugcgggcc

SEQ ID NO: 2397177 - RNA, 19 nt, Artificial Sequence
  Description of Artificial Sequence: Synthetic oligonucleotide
cuuuucccgaggagacccu

SEQ ID NO: 2397178 - RNA, 19 nt, Artificial Sequence
  Description of Artificial Sequence: Synthetic oligonucleotide
acccggcgccgagguagcc

SEQ ID NO: 2397179 - RNA, 19 nt, Artificial Sequence
  Description of Artificial Sequence: Synthetic oligonucleotide
gccguccucaccuacuuuu

SEQ ID NO: 2397180 - RNA, 19 nt, Artificial Sequence
  Description of Artificial Sequence: Synthetic oligonucleotide
cccaauguaaagggguaaa

SEQ ID NO: 2397181 - RNA, 19 nt, Artificial Sequence
  Description of Artificial Sequence: Synthetic oligonucleotide
ggccuugcagcucuuugau

SEQ ID NO: 2397182 - RNA, 19 nt, Artificial Sequence
  Description of Artificial Sequence: Synthetic oligonucleotide
ggcgccgagguagccgugc

SEQ ID NO: 2397183 - RNA, 19 nt, Artificial Sequence
  Description of Artificial Sequence: Synthetic oligonucleotide
ccucaccuacuuuucccga

SEQ ID NO: 2397184 - RNA, 19 nt, Artificial Sequence
  Description of Artificial Sequence: Synthetic oligonucleotide
acuggccuugcagcucuuu

SEQ ID NO: 2397185 - RNA, 19 nt, Artificial Sequence
  Description of Artificial Sequence: Synthetic oligonucleotide
gccgcggauggcacauggg

SEQ ID NO: 2397186 - RNA, 19 nt, Artificial Sequence
  Description of Artificial Sequence: Synthetic oligonucleotide
gugcgggccgcggauggca

SEQ ID NO: 2397187 - RNA, 19 nt, Artificial Sequence
  Description of Artificial Sequence: Synthetic oligonucleotide
ccgagguagccgugcgggc

SEQ ID NO: 2397188 - RNA, 19 nt, Artificial Sequence
  Description of Artificial Sequence: Synthetic oligonucleotide
ucccuggacccggcgccga

SEQ ID NO: 2397189 - RNA, 19 nt, Artificial Sequence
  Description of Artificial Sequence: Synthetic oligonucleotide
cccacccaaguauuugaaa

SEQ ID NO: 2397190 - RNA, 19 nt, Artificial Sequence
  Description of Artificial Sequence: Synthetic oligonucleotide
uggacccggcgccgaggua

SEQ ID NO: 2397191 - RNA, 19 nt, Artificial Sequence
  Description of Artificial Sequence: Synthetic oligonucleotide
caccacccucucccuggac

SEQ ID NO: 2397192 - RNA, 19 nt, Artificial Sequence
  Description of Artificial Sequence: Synthetic oligonucleotide
gcggugcgggccuaggucu

SEQ ID NO: 2397193 - RNA, 19 nt, Artificial Sequence
  Description of Artificial Sequence: Synthetic oligonucleotide
gcucgauauucauccaguu

SEQ ID NO: 2397194 - RNA, 19 nt, Artificial Sequence
  Description of Artificial Sequence: Synthetic oligonucleotide
gcccaauguaaagggguaa

SEQ ID NO: 2397195 - RNA, 19 nt, Artificial Sequence
  Description of Artificial Sequence: Synthetic oligonucleotide
gcccguacugcaucaugua

SEQ ID NO: 2397196 - RNA, 19 nt, Artificial Sequence
  Description of Artificial Sequence: Synthetic oligonucleotide
cuggacccggcgccgaggu

SEQ ID NO: 2397197 - RNA, 19 nt, Artificial Sequence
  Description of Artificial Sequence: Synthetic oligonucleotide
cacugcggugcgggccuag

SEQ ID NO: 2397198 - RNA, 19 nt, Artificial Sequence
  Description of Artificial Sequence: Synthetic oligonucleotide
cccuaacucucuccugaga

SEQ ID NO: 2397199 - RNA, 19 nt, Artificial Sequence
  Description of Artificial Sequence: Synthetic oligonucleotide
cggagucgcucauaagcca

SEQ ID NO: 2397200 - RNA, 19 nt, Artificial Sequence
  Description of Artificial Sequence: Synthetic oligonucleotide
gugcgggccuaggucuuca

SEQ ID NO: 2397201 - RNA, 19 nt, Artificial Sequence
  Description of Artificial Sequence: Synthetic oligonucleotide
guacugcaucauguaugcu

SEQ ID NO: 2397202 - RNA, 19 nt, Artificial Sequence
  Description of Artificial Sequence: Synthetic oligonucleotide
cgauguccaucgugucccc

SEQ ID NO: 2397203 - RNA, 19 nt, Artificial Sequence
  Description of Artificial Sequence: Synthetic oligonucleotide
cacaugggcggcggcugga

SEQ ID NO: 2397204 - RNA, 19 nt, Artificial Sequence
  Description of Artificial Sequence: Synthetic oligonucleotide
cagauucgagcaguucuuu

SEQ ID NO: 2397205 - RNA, 19 nt, Artificial Sequence
  Description of Artificial Sequence: Synthetic oligonucleotide
cugcgggaaaagccgccgu

SEQ ID NO: 2397206 - RNA, 19 nt, Artificial Sequence
  Description of Artificial Sequence: Synthetic oligonucleotide
ccuuggcaucggugcuucc

SEQ ID NO: 2397207 - RNA, 19 nt, Artificial Sequence
  Description of Artificial Sequence: Synthetic oligonucleotide
cccucaacaccaugcugua

SEQ ID NO: 2397208 - RNA, 19 nt, Artificial Sequence
  Description of Artificial Sequence: Synthetic oligonucleotide
cguguccccuaacucucuc

SEQ ID NO: 2397209 - RNA, 19 nt, Artificial Sequence
  Description of Artificial Sequence: Synthetic oligonucleotide
ggugcgggccuaggucuuc

SEQ ID NO: 2397210 - RNA, 19 nt, Artificial Sequence
  Description of Artificial Sequence: Synthetic oligonucleotide
cgccgagguagccgugcgg

SEQ ID NO: 2397211 - RNA, 19 nt, Artificial Sequence
  Description of Artificial Sequence: Synthetic oligonucleotide
cucugggguugagccgaca

SEQ ID NO: 2397212 - RNA, 19 nt, Artificial Sequence
  Description of Artificial Sequence: Synthetic oligonucleotide
cccguacugcaucauguau

SEQ ID NO: 2397213 - RNA, 19 nt, Artificial Sequence
  Description of Artificial Sequence: Synthetic oligonucleotide
cggauggcacaugggcggc

SEQ ID NO: 2397214 - RNA, 19 nt, Artificial Sequence
  Description of Artificial Sequence: Synthetic oligonucleotide
gccgugcgggccgcggaug

SEQ ID NO: 2397215 - RNA, 19 nt, Artificial Sequence
  Description of Artificial Sequence: Synthetic oligonucleotide
cgagucccugcgggaaaag

SEQ ID NO: 2397216 - RNA, 19 nt, Artificial Sequence
  Description of Artificial Sequence: Synthetic oligonucleotide
cgauucuucucgagucccu

SEQ ID NO: 2397217 - RNA, 19 nt, Artificial Sequence
  Description of Artificial Sequence: Synthetic oligonucleotide
cucugccgauguccaucgu

SEQ ID NO: 2397218 - RNA, 19 nt, Artificial Sequence
  Description of Artificial Sequence: Synthetic oligonucleotide
acacugcggugcgggccua

SEQ ID NO: 2397219 - RNA, 19 nt, Artificial Sequence
  Description of Artificial Sequence: Synthetic oligonucleotide
gggguugagccgacaggau

SEQ ID NO: 2397220 - RNA, 19 nt, Artificial Sequence
  Description of Artificial Sequence: Synthetic oligonucleotide
gagcagcgguccccuucuu

SEQ ID NO: 2397221 - RNA, 19 nt, Artificial Sequence
  Description of Artificial Sequence: Synthetic oligonucleotide
gguccccuucuucgaguuu

SEQ ID NO: 2397222 - RNA, 19 nt, Artificial Sequence
  Description of Artificial Sequence: Synthetic oligonucleotide
gccgccguccucaccuacu

SEQ ID NO: 2397223 - RNA, 19 nt, Artificial Sequence
  Description of Artificial Sequence: Synthetic oligonucleotide
gggccgcggauggcacaug

SEQ ID NO: 2397224 - RNA, 19 nt, Artificial Sequence
  Description of Artificial Sequence: Synthetic oligonucleotide
cgugcgggccgcggauggc

SEQ ID NO: 2397225 - RNA, 19 nt, Artificial Sequence
  Description of Artificial Sequence: Synthetic oligonucleotide
ccucaacaccaugcuguau

SEQ ID NO: 2397226 - RNA, 19 nt, Artificial Sequence
  Description of Artificial Sequence: Synthetic oligonucleotide
ccgccguccucaccuacuu

SEQ ID NO: 2397227 - RNA, 19 nt, Artificial Sequence
  Description of Artificial Sequence: Synthetic oligonucleotide
cggcgccgagguagccgug

SEQ ID NO: 2397228 - RNA, 19 nt, Artificial Sequence
  Description of Artificial Sequence: Synthetic oligonucleotide
cgggccgcggauggcacau

SEQ ID NO: 2397229 - RNA, 19 nt, Artificial Sequence
  Description of Artificial Sequence: Synthetic oligonucleotide
cggugcgggccuaggucuu

SEQ ID NO: 2397230 - RNA, 19 nt, Artificial Sequence
  Description of Artificial Sequence: Synthetic oligonucleotide
cgccguccucaccuacuuu

SEQ ID NO: 2397231 - RNA, 19 nt, Artificial Sequence
  Description of Artificial Sequence: Synthetic oligonucleotide
  modified_base (15)..(15): a, c, u, g, unknown or other
aacaugauguccuunaggg

SEQ ID NO: 2397232 - RNA, 19 nt, Artificial Sequence
  Description of Artificial Sequence: Synthetic oligonucleotide
ucuagcaagauucugaaag

SEQ ID NO: 2397233 - RNA, 19 nt, Artificial Sequence
  Description of Artificial Sequence: Synthetic oligonucleotide
uuaacuaacaugauguccu

SEQ ID NO: 2397234 - RNA, 19 nt, Artificial Sequence
  Description of Artificial Sequence: Synthetic oligonucleotide
uugauguuaaguuagaguc

SEQ ID NO: 2397235 - RNA, 19 nt, Artificial Sequence
  Description of Artificial Sequence: Synthetic oligonucleotide
cuaaaugcuaacaauuucc

SEQ ID NO: 2397236 - RNA, 19 nt, Artificial Sequence
  Description of Artificial Sequence: Synthetic oligonucleotide
aaugcuaacaauuuccguu

SEQ ID NO: 2397237 - RNA, 19 nt, Artificial Sequence
  Description of Artificial Sequence: Synthetic oligonucleotide
auuaacuaacaugaugucc

SEQ ID NO: 2397238 - RNA, 19 nt, Artificial Sequence
  Description of Artificial Sequence: Synthetic oligonucleotide
aauaccuuugguucuagca

SEQ ID NO: 2397239 - RNA, 19 nt, Artificial Sequence
  Description of Artificial Sequence: Synthetic oligonucleotide
uaagggaagugucugaugc

SEQ ID NO: 2397240 - RNA, 19 nt, Artificial Sequence
  Description of Artificial Sequence: Synthetic oligonucleotide
agagacuuccuccugaggg

SEQ ID NO: 2397241 - RNA, 19 nt, Artificial Sequence
  Description of Artificial Sequence: Synthetic oligonucleotide
auaagcuugcagcugagac

SEQ ID NO: 2397242 - RNA, 19 nt, Artificial Sequence
  Description of Artificial Sequence: Synthetic oligonucleotide
uguucauagagcaauugca

SEQ ID NO: 2397243 - RNA, 19 nt, Artificial Sequence
  Description of Artificial Sequence: Synthetic oligonucleotide
uuaaguuagagucugccuc

SEQ ID NO: 2397244 - RNA, 19 nt, Artificial Sequence
  Description of Artificial Sequence: Synthetic oligonucleotide
agcaauugcacuuuguuca

SEQ ID NO: 2397245 - RNA, 19 nt, Artificial Sequence
  Description of Artificial Sequence: Synthetic oligonucleotide
uucucggaagcucacaggg

SEQ ID NO: 2397246 - RNA, 19 nt, Artificial Sequence
  Description of Artificial Sequence: Synthetic oligonucleotide
caauauauuggacacuggg

SEQ ID NO: 2397247 - RNA, 19 nt, Artificial Sequence
  Description of Artificial Sequence: Synthetic oligonucleotide
uggauuaacuaacaugaug

SEQ ID NO: 2397248 - RNA, 19 nt, Artificial Sequence
  Description of Artificial Sequence: Synthetic oligonucleotide
gaugcaugcuagcagagag

SEQ ID NO: 2397249 - RNA, 19 nt, Artificial Sequence
  Description of Artificial Sequence: Synthetic oligonucleotide
aauugcaucugcucagaag

SEQ ID NO: 2397250 - RNA, 19 nt, Artificial Sequence
  Description of Artificial Sequence: Synthetic oligonucleotide
augaaaggagaugucaugc

SEQ ID NO: 2397251 - RNA, 19 nt, Artificial Sequence
  Description of Artificial Sequence: Synthetic oligonucleotide
guucuuuacaauauauugg

SEQ ID NO: 2397252 - RNA, 19 nt, Artificial Sequence
  Description of Artificial Sequence: Synthetic oligonucleotide
uagagucugccucugaucc

SEQ ID NO: 2397253 - RNA, 19 nt, Artificial Sequence
  Description of Artificial Sequence: Synthetic oligonucleotide
auccuauuuguucauagag

SEQ ID NO: 2397254 - RNA, 19 nt, Artificial Sequence
  Description of Artificial Sequence: Synthetic oligonucleotide
uacaauauauuggacacug

SEQ ID NO: 2397255 - RNA, 19 nt, Artificial Sequence
  Description of Artificial Sequence: Synthetic oligonucleotide
aauugcacuuuguucaacu

SEQ ID NO: 2397256 - RNA, 19 nt, Artificial Sequence
  Description of Artificial Sequence: Synthetic oligonucleotide
cugauuaaaauaagcuugc

SEQ ID NO: 2397257 - RNA, 19 nt, Artificial Sequence
  Description of Artificial Sequence: Synthetic oligonucleotide
uuguucauagagcaauugc

SEQ ID NO: 2397258 - RNA, 19 nt, Artificial Sequence
  Description of Artificial Sequence: Synthetic oligonucleotide
gaagagucgcuucugcugg

SEQ ID NO: 2397259 - RNA, 19 nt, Artificial Sequence
  Description of Artificial Sequence: Synthetic oligonucleotide
aaagggcuaaauugcaucu

SEQ ID NO: 2397260 - RNA, 19 nt, Artificial Sequence
  Description of Artificial Sequence: Synthetic oligonucleotide
ucuuccagaaaguucaggu

SEQ ID NO: 2397261 - RNA, 19 nt, Artificial Sequence
  Description of Artificial Sequence: Synthetic oligonucleotide
uccagaauaccuuugguuc

SEQ ID NO: 2397262 - RNA, 19 nt, Artificial Sequence
  Description of Artificial Sequence: Synthetic oligonucleotide
uccuauuuguucauagagc

SEQ ID NO: 2397263 - RNA, 19 nt, Artificial Sequence
  Description of Artificial Sequence: Synthetic oligonucleotide
ugucuaaaugcuaacaauu

SEQ ID NO: 2397264 - RNA, 19 nt, Artificial Sequence
  Description of Artificial Sequence: Synthetic oligonucleotide
agggcuaaauugcaucugc

SEQ ID NO: 2397265 - RNA, 19 nt, Artificial Sequence
  Description of Artificial Sequence: Synthetic oligonucleotide
uuuccuguuguugagagac

SEQ ID NO: 2397266 - RNA, 19 nt, Artificial Sequence
  Description of Artificial Sequence: Synthetic oligonucleotide
  modified_base (8)..(8): a, c, u, g, unknown or other
uguccuunagggaaggcug

SEQ ID NO: 2397267 - RNA, 19 nt, Artificial Sequence
  Description of Artificial Sequence: Synthetic oligonucleotide
ucuaaaugcuaacaauuuc

SEQ ID NO: 2397268 - RNA, 19 nt, Artificial Sequence
  Description of Artificial Sequence: Synthetic oligonucleotide
ugaaaggagaugucaugcg

SEQ ID NO: 2397269 - RNA, 19 nt, Artificial Sequence
  Description of Artificial Sequence: Synthetic oligonucleotide
aaaggagaugucaugcggg

SEQ ID NO: 2397270 - RNA, 19 nt, Artificial Sequence
  Description of Artificial Sequence: Synthetic oligonucleotide
uuucugcgagcucagagcc

SEQ ID NO: 2397271 - RNA, 19 nt, Artificial Sequence
  Description of Artificial Sequence: Synthetic oligonucleotide
auauauuggacacuggguu

SEQ ID NO: 2397272 - RNA, 19 nt, Artificial Sequence
  Description of Artificial Sequence: Synthetic oligonucleotide
aauauauuggacacugggu

SEQ ID NO: 2397273 - RNA, 19 nt, Artificial Sequence
  Description of Artificial Sequence: Synthetic oligonucleotide
ugauccuauuuguucauag

SEQ ID NO: 2397274 - RNA, 19 nt, Artificial Sequence
  Description of Artificial Sequence: Synthetic oligonucleotide
ugaggcuuaugaaaggaga

SEQ ID NO: 2397275 - RNA, 19 nt, Artificial Sequence
  Description of Artificial Sequence: Synthetic oligonucleotide
uuuccguuggguaagggaa

SEQ ID NO: 2397276 - RNA, 19 nt, Artificial Sequence
  Description of Artificial Sequence: Synthetic oligonucleotide
uaugaaaggagaugucaug

SEQ ID NO: 2397277 - RNA, 19 nt, Artificial Sequence
  Description of Artificial Sequence: Synthetic oligonucleotide
aagcuugcagcugagacug

SEQ ID NO: 2397278 - RNA, 19 nt, Artificial Sequence
  Description of Artificial Sequence: Synthetic oligonucleotide
uauuuguucauagagcaau

SEQ ID NO: 2397279 - RNA, 19 nt, Artificial Sequence
  Description of Artificial Sequence: Synthetic oligonucleotide
uuaugaaaggagaugucau

SEQ ID NO: 2397280 - RNA, 19 nt, Artificial Sequence
  Description of Artificial Sequence: Synthetic oligonucleotide
acuuuguucaacuccagaa

SEQ ID NO: 2397281 - RNA, 19 nt, Artificial Sequence
  Description of Artificial Sequence: Synthetic oligonucleotide
gaaugguggggacugcugg

SEQ ID NO: 2397282 - RNA, 19 nt, Artificial Sequence
  Description of Artificial Sequence: Synthetic oligonucleotide
uguuaaguuagagucugcc

SEQ ID NO: 2397283 - RNA, 19 nt, Artificial Sequence
  Description of Artificial Sequence: Synthetic oligonucleotide
aaaugcuaacaauuuccgu

SEQ ID NO: 2397284 - RNA, 19 nt, Artificial Sequence
  Description of Artificial Sequence: Synthetic oligonucleotide
aucugauuaaaauaagcuu

SEQ ID NO: 2397285 - RNA, 19 nt, Artificial Sequence
  Description of Artificial Sequence: Synthetic oligonucleotide
ugauguuaaguuagagucu

SEQ ID NO: 2397286 - RNA, 19 nt, Artificial Sequence
  Description of Artificial Sequence: Synthetic oligonucleotide
gaaagggcuaaauugcauc

SEQ ID NO: 2397287 - RNA, 19 nt, Artificial Sequence
  Description of Artificial Sequence: Synthetic oligonucleotide
ugcaucugauuaaaauaag

SEQ ID NO: 2397288 - RNA, 19 nt, Artificial Sequence
  Description of Artificial Sequence: Synthetic oligonucleotide
  modified_base (18)..(18): a, c, u, g, unknown or other
acuaacaugauguccuuna

SEQ ID NO: 2397289 - RNA, 19 nt, Artificial Sequence
  Description of Artificial Sequence: Synthetic oligonucleotide
uugcggagaaaguugagga

SEQ ID NO: 2397290 - RNA, 19 nt, Artificial Sequence
  Description of Artificial Sequence: Synthetic oligonucleotide
uucauagagcaauugcacu

SEQ ID NO: 2397291 - RNA, 19 nt, Artificial Sequence
  Description of Artificial Sequence: Synthetic oligonucleotide
ugcuucuggaggaagaguc

SEQ ID NO: 2397292 - RNA, 19 nt, Artificial Sequence
  Description of Artificial Sequence: Synthetic oligonucleotide
gacacuuuccuguuguuga

SEQ ID NO: 2397293 - RNA, 19 nt, Artificial Sequence
  Description of Artificial Sequence: Synthetic oligonucleotide
ucgaggacugggcucaggg

SEQ ID NO: 2397294 - RNA, 19 nt, Artificial Sequence
  Description of Artificial Sequence: Synthetic oligonucleotide
uaaaauaagcuugcagcug

SEQ ID NO: 2397295 - RNA, 19 nt, Artificial Sequence
  Description of Artificial Sequence: Synthetic oligonucleotide
acuuuccuguuguugagag

SEQ ID NO: 2397296 - RNA, 19 nt, Artificial Sequence
  Description of Artificial Sequence: Synthetic oligonucleotide
ugaaagauguugucuaaau

SEQ ID NO: 2397297 - RNA, 19 nt, Artificial Sequence
  Description of Artificial Sequence: Synthetic oligonucleotide
uuuccaagcucuguugcgg

SEQ ID NO: 2397298 - RNA, 19 nt, Artificial Sequence
  Description of Artificial Sequence: Synthetic oligonucleotide
uaaguuagagucugccucu

SEQ ID NO: 2397299 - RNA, 19 nt, Artificial Sequence
  Description of Artificial Sequence: Synthetic oligonucleotide
  modified_base (2)..(2): a, c, u, g, unknown or other
unagggaaggcugucuucc

SEQ ID NO: 2397300 - RNA, 19 nt, Artificial Sequence
  Description of Artificial Sequence: Synthetic oligonucleotide
  modified_base (13)..(13): a, c, u, g, unknown or other
caugauguccuunagggaa

SEQ ID NO: 2397301 - RNA, 19 nt, Artificial Sequence
  Description of Artificial Sequence: Synthetic oligonucleotide
gaagcugaggagcaguuga

SEQ ID NO: 2397302 - RNA, 19 nt, Artificial Sequence
  Description of Artificial Sequence: Synthetic oligonucleotide
ucuuuacaauauauuggac

SEQ ID NO: 2397303 - RNA, 19 nt, Artificial Sequence
  Description of Artificial Sequence: Synthetic oligonucleotide
ugcuaucugcaucugauua

SEQ ID NO: 2397304 - RNA, 19 nt, Artificial Sequence
  Description of Artificial Sequence: Synthetic oligonucleotide
ucauagagcaauugcacuu

SEQ ID NO: 2397305 - RNA, 19 nt, Artificial Sequence
  Description of Artificial Sequence: Synthetic oligonucleotide
guuucugcgagcucagagc

SEQ ID NO: 2397306 - RNA, 19 nt, Artificial Sequence
  Description of Artificial Sequence: Synthetic oligonucleotide
uguagcugcuguuccaggc

SEQ ID NO: 2397307 - RNA, 19 nt, Artificial Sequence
  Description of Artificial Sequence: Synthetic oligonucleotide
uguugagagacuuccuccu

SEQ ID NO: 2397308 - RNA, 19 nt, Artificial Sequence
  Description of Artificial Sequence: Synthetic oligonucleotide
uccagaaaguucagguccc

SEQ ID NO: 2397309 - RNA, 19 nt, Artificial Sequence
  Description of Artificial Sequence: Synthetic oligonucleotide
uguucaacuccagaauacc

SEQ ID NO: 2397310 - RNA, 19 nt, Artificial Sequence
  Description of Artificial Sequence: Synthetic oligonucleotide
cuccuggugggguagagcc

SEQ ID NO: 2397311 - RNA, 19 nt, Artificial Sequence
  Description of Artificial Sequence: Synthetic oligonucleotide
ugcuaacaauuuccguugg

SEQ ID NO: 2397312 - RNA, 19 nt, Artificial Sequence
  Description of Artificial Sequence: Synthetic oligonucleotide
gcaauugugaggguaaggg

SEQ ID NO: 2397313 - RNA, 19 nt, Artificial Sequence
  Description of Artificial Sequence: Synthetic oligonucleotide
aucugcaucugauuaaaau

SEQ ID NO: 2397314 - RNA, 19 nt, Artificial Sequence
  Description of Artificial Sequence: Synthetic oligonucleotide
cucgagaggucuuggaagc

SEQ ID NO: 2397315 - RNA, 19 nt, Artificial Sequence
  Description of Artificial Sequence: Synthetic oligonucleotide
auauuggacacuggguuuc

SEQ ID NO: 2397316 - RNA, 19 nt, Artificial Sequence
  Description of Artificial Sequence: Synthetic oligonucleotide
auguugucuaaaugcuaac

SEQ ID NO: 2397317 - RNA, 19 nt, Artificial Sequence
  Description of Artificial Sequence: Synthetic oligonucleotide
aguguggagacacuuuccu

SEQ ID NO: 2397318 - RNA, 19 nt, Artificial Sequence
  Description of Artificial Sequence: Synthetic oligonucleotide
aaguugaggaugcaugcua

SEQ ID NO: 2397319 - RNA, 19 nt, Artificial Sequence
  Description of Artificial Sequence: Synthetic oligonucleotide
ugaaggcuggauuaacuaa

SEQ ID NO: 2397320 - RNA, 19 nt, Artificial Sequence
  Description of Artificial Sequence: Synthetic oligonucleotide
ugcauggcuggguugguag

SEQ ID NO: 2397321 - RNA, 19 nt, Artificial Sequence
  Description of Artificial Sequence: Synthetic oligonucleotide
gaggguaggagcucucugc

SEQ ID NO: 2397322 - RNA, 19 nt, Artificial Sequence
  Description of Artificial Sequence: Synthetic oligonucleotide
guugcggagaaaguugagg

SEQ ID NO: 2397323 - RNA, 19 nt, Artificial Sequence
  Description of Artificial Sequence: Synthetic oligonucleotide
cuguuguugagagacuucc

SEQ ID NO: 2397324 - RNA, 19 nt, Artificial Sequence
  Description of Artificial Sequence: Synthetic oligonucleotide
guuuccaagcucuguugcg

SEQ ID NO: 2397325 - RNA, 19 nt, Artificial Sequence
  Description of Artificial Sequence: Synthetic oligonucleotide
  modified_base (14)..(14): a, c, u, g, unknown or other
acaugauguccuunaggga

SEQ ID NO: 2397326 - RNA, 19 nt, Artificial Sequence
  Description of Artificial Sequence: Synthetic oligonucleotide
auuuccguuggguaaggga

SEQ ID NO: 2397327 - RNA, 19 nt, Artificial Sequence
  Description of Artificial Sequence: Synthetic oligonucleotide
guugucuaaaugcuaacaa

SEQ ID NO: 2397328 - RNA, 19 nt, Artificial Sequence
  Description of Artificial Sequence: Synthetic oligonucleotide
ugcaucuccggguauuggc

SEQ ID NO: 2397329 - RNA, 19 nt, Artificial Sequence
  Description of Artificial Sequence: Synthetic oligonucleotide
cuuaugaaaggagauguca

SEQ ID NO: 2397330 - RNA, 19 nt, Artificial Sequence
  Description of Artificial Sequence: Synthetic oligonucleotide
uaacaauuuccguugggua

SEQ ID NO: 2397331 - RNA, 19 nt, Artificial Sequence
  Description of Artificial Sequence: Synthetic oligonucleotide
uaagggaguguggagcccg

SEQ ID NO: 2397332 - RNA, 19 nt, Artificial Sequence
  Description of Artificial Sequence: Synthetic oligonucleotide
caucugauuaaaauaagcu

SEQ ID NO: 2397333 - RNA, 19 nt, Artificial Sequence
  Description of Artificial Sequence: Synthetic oligonucleotide
uccgaggugguucuuuaca

SEQ ID NO: 2397334 - RNA, 19 nt, Artificial Sequence
  Description of Artificial Sequence: Synthetic oligonucleotide
uuggguaagggaagugucu

SEQ ID NO: 2397335 - RNA, 19 nt, Artificial Sequence
  Description of Artificial Sequence: Synthetic oligonucleotide
guuguugagagacuuccuc

SEQ ID NO: 2397336 - RNA, 19 nt, Artificial Sequence
  Description of Artificial Sequence: Synthetic oligonucleotide
gaggaugcaugcuagcaga

SEQ ID NO: 2397337 - RNA, 19 nt, Artificial Sequence
  Description of Artificial Sequence: Synthetic oligonucleotide
ucaugcggggugaaggcug

SEQ ID NO: 2397338 - RNA, 19 nt, Artificial Sequence
  Description of Artificial Sequence: Synthetic oligonucleotide
agagcaauugcacuuuguu

SEQ ID NO: 2397339 - RNA, 19 nt, Artificial Sequence
  Description of Artificial Sequence: Synthetic oligonucleotide
uauauuggacacuggguuu

SEQ ID NO: 2397340 - RNA, 19 nt, Artificial Sequence
  Description of Artificial Sequence: Synthetic oligonucleotide
ucacguuucugcgagcuca

SEQ ID NO: 2397341 - RNA, 19 nt, Artificial Sequence
  Description of Artificial Sequence: Synthetic oligonucleotide
gaccucacguuucugcgag

SEQ ID NO: 2397342 - RNA, 19 nt, Artificial Sequence
  Description of Artificial Sequence: Synthetic oligonucleotide
cuuggucgaggguaggagc

SEQ ID NO: 2397343 - RNA, 19 nt, Artificial Sequence
  Description of Artificial Sequence: Synthetic oligonucleotide
aaaguugaggaugcaugcu

SEQ ID NO: 2397344 - RNA, 19 nt, Artificial Sequence
  Description of Artificial Sequence: Synthetic oligonucleotide
aggucugaggcuuaugaaa

SEQ ID NO: 2397345 - RNA, 19 nt, Artificial Sequence
  Description of Artificial Sequence: Synthetic oligonucleotide
uuggucgaggguaggagcu

SEQ ID NO: 2397346 - RNA, 19 nt, Artificial Sequence
  Description of Artificial Sequence: Synthetic oligonucleotide
gcuaaauugcaucugcuca

SEQ ID NO: 2397347 - RNA, 19 nt, Artificial Sequence
  Description of Artificial Sequence: Synthetic oligonucleotide
guaggucugaggcuuauga

SEQ ID NO: 2397348 - RNA, 19 nt, Artificial Sequence
  Description of Artificial Sequence: Synthetic oligonucleotide
ugguucuuuacaauauauu

SEQ ID NO: 2397349 - RNA, 19 nt, Artificial Sequence
  Description of Artificial Sequence: Synthetic oligonucleotide
ugaaugguggggacugcug

SEQ ID NO: 2397350 - RNA, 19 nt, Artificial Sequence
  Description of Artificial Sequence: Synthetic oligonucleotide
guugauguuaaguuagagu

SEQ ID NO: 2397351 - RNA, 19 nt, Artificial Sequence
  Description of Artificial Sequence: Synthetic oligonucleotide
ugcaauugugaggguaagg

SEQ ID NO: 2397352 - RNA, 19 nt, Artificial Sequence
  Description of Artificial Sequence: Synthetic oligonucleotide
ugcaacugcaucuccgggu

SEQ ID NO: 2397353 - RNA, 19 nt, Artificial Sequence
  Description of Artificial Sequence: Synthetic oligonucleotide
gauccuauuuguucauaga

SEQ ID NO: 2397354 - RNA, 19 nt, Artificial Sequence
  Description of Artificial Sequence: Synthetic oligonucleotide
  modified_base (17)..(17): a, c, u, g, unknown or other
cuaacaugauguccuunag

SEQ ID NO: 2397355 - RNA, 19 nt, Artificial Sequence
  Description of Artificial Sequence: Synthetic oligonucleotide
ugucaugcggggugaaggc

SEQ ID NO: 2397356 - RNA, 19 nt, Artificial Sequence
  Description of Artificial Sequence: Synthetic oligonucleotide
ucugcggccuucucggaag

SEQ ID NO: 2397357 - RNA, 19 nt, Artificial Sequence
  Description of Artificial Sequence: Synthetic oligonucleotide
gugucugaugcucugcggc

SEQ ID NO: 2397358 - RNA, 19 nt, Artificial Sequence
  Description of Artificial Sequence: Synthetic oligonucleotide
ggauuaacuaacaugaugu

SEQ ID NO: 2397359 - RNA, 19 nt, Artificial Sequence
  Description of Artificial Sequence: Synthetic oligonucleotide
aggggaccgauuguggacc

SEQ ID NO: 2397360 - RNA, 19 nt, Artificial Sequence
  Description of Artificial Sequence: Synthetic oligonucleotide
uggcgguggagucuccugg

SEQ ID NO: 2397361 - RNA, 19 nt, Artificial Sequence
  Description of Artificial Sequence: Synthetic oligonucleotide
ccuauguuccuguagcugc

SEQ ID NO: 2397362 - RNA, 19 nt, Artificial Sequence
  Description of Artificial Sequence: Synthetic oligonucleotide
uuccguuggguaagggaag

SEQ ID NO: 2397363 - RNA, 19 nt, Artificial Sequence
  Description of Artificial Sequence: Synthetic oligonucleotide
ccuauuuguucauagagca

SEQ ID NO: 2397364 - RNA, 19 nt, Artificial Sequence
  Description of Artificial Sequence: Synthetic oligonucleotide
uccugagggcagcugcucg

SEQ ID NO: 2397365 - RNA, 19 nt, Artificial Sequence
  Description of Artificial Sequence: Synthetic oligonucleotide
agcaguugauguuaaguua

SEQ ID NO: 2397366 - RNA, 19 nt, Artificial Sequence
  Description of Artificial Sequence: Synthetic oligonucleotide
cugaggcuuaugaaaggag

SEQ ID NO: 2397367 - RNA, 19 nt, Artificial Sequence
  Description of Artificial Sequence: Synthetic oligonucleotide
uugcaucugcucagaagag

SEQ ID NO: 2397368 - RNA, 19 nt, Artificial Sequence
  Description of Artificial Sequence: Synthetic oligonucleotide
uuagagucugccucugauc

SEQ ID NO: 2397369 - RNA, 19 nt, Artificial Sequence
  Description of Artificial Sequence: Synthetic oligonucleotide
agggaagugucugaugcuc

SEQ ID NO: 2397370 - RNA, 19 nt, Artificial Sequence
  Description of Artificial Sequence: Synthetic oligonucleotide
agauucugaaagauguugu

SEQ ID NO: 2397371 - RNA, 19 nt, Artificial Sequence
  Description of Artificial Sequence: Synthetic oligonucleotide
aauuuccguuggguaaggg

SEQ ID NO: 2397372 - RNA, 19 nt, Artificial Sequence
  Description of Artificial Sequence: Synthetic oligonucleotide
gcaguugauguuaaguuag

SEQ ID NO: 2397373 - RNA, 19 nt, Artificial Sequence
  Description of Artificial Sequence: Synthetic oligonucleotide
cucugauccuauuuguuca

SEQ ID NO: 2397374 - RNA, 19 nt, Artificial Sequence
  Description of Artificial Sequence: Synthetic oligonucleotide
ggguugguaggucugaggc

SEQ ID NO: 2397375 - RNA, 19 nt, Artificial Sequence
  Description of Artificial Sequence: Synthetic oligonucleotide
uaaauugcaucugcucaga

SEQ ID NO: 2397376 - RNA, 19 nt, Artificial Sequence
  Description of Artificial Sequence: Synthetic oligonucleotide
cuagcaagauucugaaaga

SEQ ID NO: 2397377 - RNA, 19 nt, Artificial Sequence
  Description of Artificial Sequence: Synthetic oligonucleotide
  modified_base (3)..(3): a, c, u, g, unknown or other
uunagggaaggcugucuuc

SEQ ID NO: 2397378 - RNA, 19 nt, Artificial Sequence
  Description of Artificial Sequence: Synthetic oligonucleotide
  modified_base (11)..(11): a, c, u, g, unknown or other
ugauguccuunagggaagg

SEQ ID NO: 2397379 - RNA, 19 nt, Artificial Sequence
  Description of Artificial Sequence: Synthetic oligonucleotide
uguugcggagaaaguugag

SEQ ID NO: 2397380 - RNA, 19 nt, Artificial Sequence
  Description of Artificial Sequence: Synthetic oligonucleotide
ugcucgagaggucuuggaa

SEQ ID NO: 2397381 - RNA, 19 nt, Artificial Sequence
  Description of Artificial Sequence: Synthetic oligonucleotide
uuacaauauauuggacacu

SEQ ID NO: 2397382 - RNA, 19 nt, Artificial Sequence
  Description of Artificial Sequence: Synthetic oligonucleotide
gaauaccuuugguucuagc

SEQ ID NO: 2397383 - RNA, 19 nt, Artificial Sequence
  Description of Artificial Sequence: Synthetic oligonucleotide
ggaagagucgcuucugcug

SEQ ID NO: 2397384 - RNA, 19 nt, Artificial Sequence
  Description of Artificial Sequence: Synthetic oligonucleotide
auagagcaauugcacuuug

SEQ ID NO: 2397385 - RNA, 19 nt, Artificial Sequence
  Description of Artificial Sequence: Synthetic oligonucleotide
gguaagggaguguggagcc

SEQ ID NO: 2397386 - RNA, 19 nt, Artificial Sequence
  Description of Artificial Sequence: Synthetic oligonucleotide
uccggguauuggcugagga

SEQ ID NO: 2397387 - RNA, 19 nt, Artificial Sequence
  Description of Artificial Sequence: Synthetic oligonucleotide
agcaagauucugaaagaug

SEQ ID NO: 2397388 - RNA, 19 nt, Artificial Sequence
  Description of Artificial Sequence: Synthetic oligonucleotide
  modified_base (9)..(9): a, c, u, g, unknown or other
auguccuunagggaaggcu

SEQ ID NO: 2397389 - RNA, 19 nt, Artificial Sequence
  Description of Artificial Sequence: Synthetic oligonucleotide
gaggugguucuuuacaaua

SEQ ID NO: 2397390 - RNA, 19 nt, Artificial Sequence
  Description of Artificial Sequence: Synthetic oligonucleotide
aagggcuaaauugcaucug

SEQ ID NO: 2397391 - RNA, 19 nt, Artificial Sequence
  Description of Artificial Sequence: Synthetic oligonucleotide
guucuagcaagauucugaa

SEQ ID NO: 2397392 - RNA, 19 nt, Artificial Sequence
  Description of Artificial Sequence: Synthetic oligonucleotide
cuucuggaggaagagucgc

SEQ ID NO: 2397393 - RNA, 19 nt, Artificial Sequence
  Description of Artificial Sequence: Synthetic oligonucleotide
ggucugaggcuuaugaaag

SEQ ID NO: 2397394 - RNA, 19 nt, Artificial Sequence
  Description of Artificial Sequence: Synthetic oligonucleotide
ugucuuccagaaaguucag

SEQ ID NO: 2397395 - RNA, 19 nt, Artificial Sequence
  Description of Artificial Sequence: Synthetic oligonucleotide
gcaucugcucagaagaggg

SEQ ID NO: 2397396 - RNA, 19 nt, Artificial Sequence
  Description of Artificial Sequence: Synthetic oligonucleotide
gcaucugauuaaaauaagc

SEQ ID NO: 2397397 - RNA, 19 nt, Artificial Sequence
  Description of Artificial Sequence: Synthetic oligonucleotide
auuguggaccucacguuuc

SEQ ID NO: 2397398 - RNA, 19 nt, Artificial Sequence
  Description of Artificial Sequence: Synthetic oligonucleotide
gagccagcugcugacuugg

SEQ ID NO: 2397399 - RNA, 19 nt, Artificial Sequence
  Description of Artificial Sequence: Synthetic oligonucleotide
accgauuguggaccucacg

SEQ ID NO: 2397400 - RNA, 19 nt, Artificial Sequence
  Description of Artificial Sequence: Synthetic oligonucleotide
ucugcucagaagagggcuc

SEQ ID NO: 2397401 - RNA, 19 nt, Artificial Sequence
  Description of Artificial Sequence: Synthetic oligonucleotide
gguggagucuccugguggg

SEQ ID NO: 2397402 - RNA, 19 nt, Artificial Sequence
  Description of Artificial Sequence: Synthetic oligonucleotide
acaauauauuggacacugg

SEQ ID NO: 2397403 - RNA, 19 nt, Artificial Sequence
  Description of Artificial Sequence: Synthetic oligonucleotide
gguuuccaagcucuguugc

SEQ ID NO: 2397404 - RNA, 19 nt, Artificial Sequence
  Description of Artificial Sequence: Synthetic oligonucleotide
guaagggaagugucugaug

SEQ ID NO: 2397405 - RNA, 19 nt, Artificial Sequence
  Description of Artificial Sequence: Synthetic oligonucleotide
aggggcgugcaacugcauc

SEQ ID NO: 2397406 - RNA, 19 nt, Artificial Sequence
  Description of Artificial Sequence: Synthetic oligonucleotide
cugcugacuuggucgaggg

SEQ ID NO: 2397407 - RNA, 19 nt, Artificial Sequence
  Description of Artificial Sequence: Synthetic oligonucleotide
  modified_base (10)..(10): a, c, u, g, unknown or other
gauguccuunagggaaggc

SEQ ID NO: 2397408 - RNA, 19 nt, Artificial Sequence
  Description of Artificial Sequence: Synthetic oligonucleotide
aaggcuggauuaacuaaca

SEQ ID NO: 2397409 - RNA, 19 nt, Artificial Sequence
  Description of Artificial Sequence: Synthetic oligonucleotide
acuccagaauaccuuuggu

SEQ ID NO: 2397410 - RNA, 19 nt, Artificial Sequence
  Description of Artificial Sequence: Synthetic oligonucleotide
ugccucugauccuauuugu

SEQ ID NO: 2397411 - RNA, 19 nt, Artificial Sequence
  Description of Artificial Sequence: Synthetic oligonucleotide
ucugauccuauuuguucau

SEQ ID NO: 2397412 - RNA, 19 nt, Artificial Sequence
  Description of Artificial Sequence: Synthetic oligonucleotide
ggagcucucugcuaucugc

SEQ ID NO: 2397413 - RNA, 19 nt, Artificial Sequence
  Description of Artificial Sequence: Synthetic oligonucleotide
agacacuuuccuguuguug

SEQ ID NO: 2397414 - RNA, 19 nt, Artificial Sequence
  Description of Artificial Sequence: Synthetic oligonucleotide
uaggucugaggcuuaugaa

SEQ ID NO: 2397415 - RNA, 19 nt, Artificial Sequence
  Description of Artificial Sequence: Synthetic oligonucleotide
cacaggggaccgauugugg

SEQ ID NO: 2397416 - RNA, 19 nt, Artificial Sequence
  Description of Artificial Sequence: Synthetic oligonucleotide
gugaggguaagggagugug

SEQ ID NO: 2397417 - RNA, 19 nt, Artificial Sequence
  Description of Artificial Sequence: Synthetic oligonucleotide
cugccucugauccuauuug

SEQ ID NO: 2397418 - RNA, 19 nt, Artificial Sequence
  Description of Artificial Sequence: Synthetic oligonucleotide
gcucgagaggucuuggaag

SEQ ID NO: 2397419 - RNA, 19 nt, Artificial Sequence
  Description of Artificial Sequence: Synthetic oligonucleotide
uggagacacuuuccuguug

SEQ ID NO: 2397420 - RNA, 19 nt, Artificial Sequence
  Description of Artificial Sequence: Synthetic oligonucleotide
guugagagacuuccuccug

SEQ ID NO: 2397421 - RNA, 19 nt, Artificial Sequence
  Description of Artificial Sequence: Synthetic oligonucleotide
caauugugaggguaaggga

SEQ ID NO: 2397422 - RNA, 19 nt, Artificial Sequence
  Description of Artificial Sequence: Synthetic oligonucleotide
aggguaggagcucucugcu

SEQ ID NO: 2397423 - RNA, 19 nt, Artificial Sequence
  Description of Artificial Sequence: Synthetic oligonucleotide
guuaaguuagagucugccu

SEQ ID NO: 2397424 - RNA, 19 nt, Artificial Sequence
  Description of Artificial Sequence: Synthetic oligonucleotide
aggcuuaugaaaggagaug

SEQ ID NO: 2397425 - RNA, 19 nt, Artificial Sequence
  Description of Artificial Sequence: Synthetic oligonucleotide
gcuaacaauuuccguuggg

SEQ ID NO: 2397426 - RNA, 19 nt, Artificial Sequence
  Description of Artificial Sequence: Synthetic oligonucleotide
caucugcucagaagagggc

SEQ ID NO: 2397427 - RNA, 19 nt, Artificial Sequence
  Description of Artificial Sequence: Synthetic oligonucleotide
uuccaagcucuguugcgga

SEQ ID NO: 2397428 - RNA, 19 nt, Artificial Sequence
  Description of Artificial Sequence: Synthetic oligonucleotide
auguuaaguuagagucugc

SEQ ID NO: 2397429 - RNA, 19 nt, Artificial Sequence
  Description of Artificial Sequence: Synthetic oligonucleotide
  modified_base (12)..(12): a, c, u, g, unknown or other
augauguccuunagggaag

SEQ ID NO: 2397430 - RNA, 19 nt, Artificial Sequence
  Description of Artificial Sequence: Synthetic oligonucleotide
ugcggagaaaguugaggau

SEQ ID NO: 2397431 - RNA, 19 nt, Artificial Sequence
  Description of Artificial Sequence: Synthetic oligonucleotide
gguucuagcaagauucuga

SEQ ID NO: 2397432 - RNA, 19 nt, Artificial Sequence
  Description of Artificial Sequence: Synthetic oligonucleotide
caugcggggugaaggcugg

SEQ ID NO: 2397433 - RNA, 19 nt, Artificial Sequence
  Description of Artificial Sequence: Synthetic oligonucleotide
aaguuagagucugccucug

SEQ ID NO: 2397434 - RNA, 19 nt, Artificial Sequence
  Description of Artificial Sequence: Synthetic oligonucleotide
ggacacuggguuuccaagc

SEQ ID NO: 2397435 - RNA, 19 nt, Artificial Sequence
  Description of Artificial Sequence: Synthetic oligonucleotide
ugguucuagcaagauucug

SEQ ID NO: 2397436 - RNA, 19 nt, Artificial Sequence
  Description of Artificial Sequence: Synthetic oligonucleotide
uucuagcaagauucugaaa

SEQ ID NO: 2397437 - RNA, 19 nt, Artificial Sequence
  Description of Artificial Sequence: Synthetic oligonucleotide
guguggagacacuuuccug

SEQ ID NO: 2397438 - RNA, 19 nt, Artificial Sequence
  Description of Artificial Sequence: Synthetic oligonucleotide
gugaaggcuggauuaacua

SEQ ID NO: 2397439 - RNA, 19 nt, Artificial Sequence
  Description of Artificial Sequence: Synthetic oligonucleotide
ucggaagcucacaggggac

SEQ ID NO: 2397440 - RNA, 19 nt, Artificial Sequence
  Description of Artificial Sequence: Synthetic oligonucleotide
caucuccggguauuggcug

SEQ ID NO: 2397441 - RNA, 19 nt, Artificial Sequence
  Description of Artificial Sequence: Synthetic oligonucleotide
ggcuaaauugcaucugcuc

SEQ ID NO: 2397442 - RNA, 19 nt, Artificial Sequence
  Description of Artificial Sequence: Synthetic oligonucleotide
uauuggacacuggguuucc

SEQ ID NO: 2397443 - RNA, 19 nt, Artificial Sequence
  Description of Artificial Sequence: Synthetic oligonucleotide
  modified_base (19)..(19): a, c, u, g, unknown or other
aacuaacaugauguccuun

SEQ ID NO: 2397444 - RNA, 19 nt, Artificial Sequence
  Description of Artificial Sequence: Synthetic oligonucleotide
agccuauguuccuguagcu

SEQ ID NO: 2397445 - RNA, 19 nt, Artificial Sequence
  Description of Artificial Sequence: Synthetic oligonucleotide
uaacuaacaugauguccuu

SEQ ID NO: 2397446 - RNA, 19 nt, Artificial Sequence
  Description of Artificial Sequence: Synthetic oligonucleotide
gcucacaggggaccgauug

SEQ ID NO: 2397447 - RNA, 19 nt, Artificial Sequence
  Description of Artificial Sequence: Synthetic oligonucleotide
gguagagccagcugcugac

SEQ ID NO: 2397448 - RNA, 19 nt, Artificial Sequence
  Description of Artificial Sequence: Synthetic oligonucleotide
aggaaagggcuaaauugca

SEQ ID NO: 2397449 - RNA, 19 nt, Artificial Sequence
  Description of Artificial Sequence: Synthetic oligonucleotide
cuaacaauuuccguugggu

SEQ ID NO: 2397450 - RNA, 19 nt, Artificial Sequence
  Description of Artificial Sequence: Synthetic oligonucleotide
gacacuggguuuccaagcu

SEQ ID NO: 2397451 - RNA, 19 nt, Artificial Sequence
  Description of Artificial Sequence: Synthetic oligonucleotide
aggagcaguugauguuaag

SEQ ID NO: 2397452 - RNA, 19 nt, Artificial Sequence
  Description of Artificial Sequence: Synthetic oligonucleotide
aguuagagucugccucuga

SEQ ID NO: 2397453 - RNA, 19 nt, Artificial Sequence
  Description of Artificial Sequence: Synthetic oligonucleotide
agaauaccuuugguucuag

SEQ ID NO: 2397454 - RNA, 19 nt, Artificial Sequence
  Description of Artificial Sequence: Synthetic oligonucleotide
ugcugcaauugugagggua

SEQ ID NO: 2397455 - RNA, 19 nt, Artificial Sequence
  Description of Artificial Sequence: Synthetic oligonucleotide
gcggagaaaguugaggaug

SEQ ID NO: 2397456 - RNA, 19 nt, Artificial Sequence
  Description of Artificial Sequence: Synthetic oligonucleotide
uuccuguuguugagagacu

SEQ ID NO: 2397457 - RNA, 19 nt, Artificial Sequence
  Description of Artificial Sequence: Synthetic oligonucleotide
ggguaagggaguguggagc

SEQ ID NO: 2397458 - RNA, 19 nt, Artificial Sequence
  Description of Artificial Sequence: Synthetic oligonucleotide
accucacguuucugcgagc

SEQ ID NO: 2397459 - RNA, 19 nt, Artificial Sequence
  Description of Artificial Sequence: Synthetic oligonucleotide
ccucugauccuauuuguuc

SEQ ID NO: 2397460 - RNA, 19 nt, Artificial Sequence
  Description of Artificial Sequence: Synthetic oligonucleotide
cuuuguucaacuccagaau

SEQ ID NO: 2397461 - RNA, 19 nt, Artificial Sequence
  Description of Artificial Sequence: Synthetic oligonucleotide
cacguuucugcgagcucag

SEQ ID NO: 2397462 - RNA, 19 nt, Artificial Sequence
  Description of Artificial Sequence: Synthetic oligonucleotide
caauuuccguuggguaagg

SEQ ID NO: 2397463 - RNA, 19 nt, Artificial Sequence
  Description of Artificial Sequence: Synthetic oligonucleotide
uccguuggguaagggaagu

SEQ ID NO: 2397464 - RNA, 19 nt, Artificial Sequence
  Description of Artificial Sequence: Synthetic oligonucleotide
ugacuuggucgaggguagg

SEQ ID NO: 2397465 - RNA, 19 nt, Artificial Sequence
  Description of Artificial Sequence: Synthetic oligonucleotide
ccuucucggaagcucacag

SEQ ID NO: 2397466 - RNA, 19 nt, Artificial Sequence
  Description of Artificial Sequence: Synthetic oligonucleotide
auggcgguggagucuccug

SEQ ID NO: 2397467 - RNA, 19 nt, Artificial Sequence
  Description of Artificial Sequence: Synthetic oligonucleotide
guuagagucugccucugau

SEQ ID NO: 2397468 - RNA, 19 nt, Artificial Sequence
  Description of Artificial Sequence: Synthetic oligonucleotide
ggaagcucacaggggaccg

SEQ ID NO: 2397469 - RNA, 19 nt, Artificial Sequence
  Description of Artificial Sequence: Synthetic oligonucleotide
cacuuuguucaacuccaga

SEQ ID NO: 2397470 - RNA, 19 nt, Artificial Sequence
  Description of Artificial Sequence: Synthetic oligonucleotide
aggagcucucugcuaucug

SEQ ID NO: 2397471 - RNA, 19 nt, Artificial Sequence
  Description of Artificial Sequence: Synthetic oligonucleotide
ggcuuaugaaaggagaugu

SEQ ID NO: 2397472 - RNA, 19 nt, Artificial Sequence
  Description of Artificial Sequence: Synthetic oligonucleotide
aggcuggauuaacuaacau

SEQ ID NO: 2397473 - RNA, 19 nt, Artificial Sequence
  Description of Artificial Sequence: Synthetic oligonucleotide
aagcucacaggggaccgau

SEQ ID NO: 2397474 - RNA, 19 nt, Artificial Sequence
  Description of Artificial Sequence: Synthetic oligonucleotide
cggagaaaguugaggaugc

SEQ ID NO: 2397475 - RNA, 19 nt, Artificial Sequence
  Description of Artificial Sequence: Synthetic oligonucleotide
aggaugcaugcuagcagag

SEQ ID NO: 2397476 - RNA, 19 nt, Artificial Sequence
  Description of Artificial Sequence: Synthetic oligonucleotide
gagucuccuggugggguag

SEQ ID NO: 2397477 - RNA, 19 nt, Artificial Sequence
  Description of Artificial Sequence: Synthetic oligonucleotide
caguugauguuaaguuaga

SEQ ID NO: 2397478 - RNA, 19 nt, Artificial Sequence
  Description of Artificial Sequence: Synthetic oligonucleotide
ugcugacuuggucgagggu

SEQ ID NO: 2397479 - RNA, 19 nt, Artificial Sequence
  Description of Artificial Sequence: Synthetic oligonucleotide
gcuaucugcaucugauuaa

SEQ ID NO: 2397480 - RNA, 19 nt, Artificial Sequence
  Description of Artificial Sequence: Synthetic oligonucleotide
agagucgcuucugcuggag

SEQ ID NO: 2397481 - RNA, 19 nt, Artificial Sequence
  Description of Artificial Sequence: Synthetic oligonucleotide
cugcaauugugaggguaag

SEQ ID NO: 2397482 - RNA, 19 nt, Artificial Sequence
  Description of Artificial Sequence: Synthetic oligonucleotide
cgugcaacugcaucuccgg

SEQ ID NO: 2397483 - RNA, 19 nt, Artificial Sequence
  Description of Artificial Sequence: Synthetic oligonucleotide
gagaaaguugaggaugcau

SEQ ID NO: 2397484 - RNA, 19 nt, Artificial Sequence
  Description of Artificial Sequence: Synthetic oligonucleotide
cuuuccuguuguugagaga

SEQ ID NO: 2397485 - RNA, 19 nt, Artificial Sequence
  Description of Artificial Sequence: Synthetic oligonucleotide
ugggauggcgguggagucu

SEQ ID NO: 2397486 - RNA, 19 nt, Artificial Sequence
  Description of Artificial Sequence: Synthetic oligonucleotide
  modified_base (6)..(6): a, c, u, g, unknown or other
uccuunagggaaggcuguc

SEQ ID NO: 2397487 - RNA, 19 nt, Artificial Sequence
  Description of Artificial Sequence: Synthetic oligonucleotide
gucuaaaugcuaacaauuu

SEQ ID NO: 2397488 - RNA, 19 nt, Artificial Sequence
  Description of Artificial Sequence: Synthetic oligonucleotide
ucgaggguaggagcucucu

SEQ ID NO: 2397489 - RNA, 19 nt, Artificial Sequence
  Description of Artificial Sequence: Synthetic oligonucleotide
gacuuggucgaggguagga

SEQ ID NO: 2397490 - RNA, 19 nt, Artificial Sequence
  Description of Artificial Sequence: Synthetic oligonucleotide
ggguauuggcugaggaaag

SEQ ID NO: 2397491 - RNA, 19 nt, Artificial Sequence
  Description of Artificial Sequence: Synthetic oligonucleotide
gcugcugacuuggucgagg

SEQ ID NO: 2397492 - RNA, 19 nt, Artificial Sequence
  Description of Artificial Sequence: Synthetic oligonucleotide
guucaacuccagaauaccu

SEQ ID NO: 2397493 - RNA, 19 nt, Artificial Sequence
  Description of Artificial Sequence: Synthetic oligonucleotide
guaagggaguguggagccc

SEQ ID NO: 2397494 - RNA, 19 nt, Artificial Sequence
  Description of Artificial Sequence: Synthetic oligonucleotide
  modified_base (4)..(4): a, c, u, g, unknown or other
cuunagggaaggcugucuu

SEQ ID NO: 2397495 - RNA, 19 nt, Artificial Sequence
  Description of Artificial Sequence: Synthetic oligonucleotide
cuccgaggugguucuuuac

SEQ ID NO: 2397496 - RNA, 19 nt, Artificial Sequence
  Description of Artificial Sequence: Synthetic oligonucleotide
guugguaggucugaggcuu

SEQ ID NO: 2397497 - RNA, 19 nt, Artificial Sequence
  Description of Artificial Sequence: Synthetic oligonucleotide
gcugaggagcaguugaugu

SEQ ID NO: 2397498 - RNA, 19 nt, Artificial Sequence
  Description of Artificial Sequence: Synthetic oligonucleotide
ggugguucuuuacaauaua

SEQ ID NO: 2397499 - RNA, 19 nt, Artificial Sequence
  Description of Artificial Sequence: Synthetic oligonucleotide
gguaggagcucucugcuau

SEQ ID NO: 2397500 - RNA, 19 nt, Artificial Sequence
  Description of Artificial Sequence: Synthetic oligonucleotide
augcaugcuagcagagagu

SEQ ID NO: 2397501 - RNA, 19 nt, Artificial Sequence
  Description of Artificial Sequence: Synthetic oligonucleotide
gagucugccucugauccua

SEQ ID NO: 2397502 - RNA, 19 nt, Artificial Sequence
  Description of Artificial Sequence: Synthetic oligonucleotide
gugguucuuuacaauauau

SEQ ID NO: 2397503 - RNA, 19 nt, Artificial Sequence
  Description of Artificial Sequence: Synthetic oligonucleotide
uugguaggucugaggcuua

SEQ ID NO: 2397504 - RNA, 19 nt, Artificial Sequence
  Description of Artificial Sequence: Synthetic oligonucleotide
guaggagcucucugcuauc

SEQ ID NO: 2397505 - RNA, 19 nt, Artificial Sequence
  Description of Artificial Sequence: Synthetic oligonucleotide
gacuuccuccugagggcag

SEQ ID NO: 2397506 - RNA, 19 nt, Artificial Sequence
  Description of Artificial Sequence: Synthetic oligonucleotide
ggcaggggcgugcaacugc

SEQ ID NO: 2397507 - RNA, 19 nt, Artificial Sequence
  Description of Artificial Sequence: Synthetic oligonucleotide
caagcucuguugcggagaa

SEQ ID NO: 2397508 - RNA, 19 nt, Artificial Sequence
  Description of Artificial Sequence: Synthetic oligonucleotide
ggaaggcugucuuccagaa

SEQ ID NO: 2397509 - RNA, 19 nt, Artificial Sequence
  Description of Artificial Sequence: Synthetic oligonucleotide
agcugcucgagaggucuug

SEQ ID NO: 2397510 - RNA, 19 nt, Artificial Sequence
  Description of Artificial Sequence: Synthetic oligonucleotide
cucugcuaucugcaucuga

SEQ ID NO: 2397511 - RNA, 19 nt, Artificial Sequence
  Description of Artificial Sequence: Synthetic oligonucleotide
gccuauguuccuguagcug

SEQ ID NO: 2397512 - RNA, 19 nt, Artificial Sequence
  Description of Artificial Sequence: Synthetic oligonucleotide
ggugggguagagccagcug

SEQ ID NO: 2397513 - RNA, 19 nt, Artificial Sequence
  Description of Artificial Sequence: Synthetic oligonucleotide
cucacguuucugcgagcuc

SEQ ID NO: 2397514 - RNA, 19 nt, Artificial Sequence
  Description of Artificial Sequence: Synthetic oligonucleotide
uuccaggcuccgagguggu

SEQ ID NO: 2397515 - RNA, 19 nt, Artificial Sequence
  Description of Artificial Sequence: Synthetic oligonucleotide
cugaggaaagggcuaaauu

SEQ ID NO: 2397516 - RNA, 19 nt, Artificial Sequence
  Description of Artificial Sequence: Synthetic oligonucleotide
uggagccuauguuccugua

SEQ ID NO: 2397517 - RNA, 19 nt, Artificial Sequence
  Description of Artificial Sequence: Synthetic oligonucleotide
ggguagagccagcugcuga

SEQ ID NO: 2397518 - RNA, 19 nt, Artificial Sequence
  Description of Artificial Sequence: Synthetic oligonucleotide
gcuuaugaaaggagauguc

SEQ ID NO: 2397519 - RNA, 19 nt, Artificial Sequence
  Description of Artificial Sequence: Synthetic oligonucleotide
  modified_base (7)..(7): a, c, u, g, unknown or other
guccuunagggaaggcugu

SEQ ID NO: 2397520 - RNA, 19 nt, Artificial Sequence
  Description of Artificial Sequence: Synthetic oligonucleotide
cugcggccuucucggaagc

SEQ ID NO: 2397521 - RNA, 19 nt, Artificial Sequence
  Description of Artificial Sequence: Synthetic oligonucleotide
gaggagcaguugauguuaa

SEQ ID NO: 2397522 - RNA, 19 nt, Artificial Sequence
  Description of Artificial Sequence: Synthetic oligonucleotide
ggaccgauuguggaccuca

SEQ ID NO: 2397523 - RNA, 19 nt, Artificial Sequence
  Description of Artificial Sequence: Synthetic oligonucleotide
gaagcucacaggggaccga

SEQ ID NO: 2397524 - RNA, 19 nt, Artificial Sequence
  Description of Artificial Sequence: Synthetic oligonucleotide
gcugcucgagaggucuugg

SEQ ID NO: 2397525 - RNA, 19 nt, Artificial Sequence
  Description of Artificial Sequence: Synthetic oligonucleotide
ugcggggugaaggcuggau

SEQ ID NO: 2397526 - RNA, 19 nt, Artificial Sequence
  Description of Artificial Sequence: Synthetic oligonucleotide
cacuuuccuguuguugaga

SEQ ID NO: 2397527 - RNA, 19 nt, Artificial Sequence
  Description of Artificial Sequence: Synthetic oligonucleotide
gaccgauuguggaccucac

SEQ ID NO: 2397528 - RNA, 19 nt, Artificial Sequence
  Description of Artificial Sequence: Synthetic oligonucleotide
caagauucugaaagauguu

SEQ ID NO: 2397529 - RNA, 19 nt, Artificial Sequence
  Description of Artificial Sequence: Synthetic oligonucleotide
gcugcuguuccaggcuccg

SEQ ID NO: 2397530 - RNA, 19 nt, Artificial Sequence
  Description of Artificial Sequence: Synthetic oligonucleotide
uggucgaggguaggagcuc

SEQ ID NO: 2397531 - RNA, 19 nt, Artificial Sequence
  Description of Artificial Sequence: Synthetic oligonucleotide
ggggcgugcaacugcaucu

SEQ ID NO: 2397532 - RNA, 19 nt, Artificial Sequence
  Description of Artificial Sequence: Synthetic oligonucleotide
ggaccucacguuucugcga

SEQ ID NO: 2397533 - RNA, 19 nt, Artificial Sequence
  Description of Artificial Sequence: Synthetic oligonucleotide
ccgauuguggaccucacgu

SEQ ID NO: 2397534 - RNA, 19 nt, Artificial Sequence
  Description of Artificial Sequence: Synthetic oligonucleotide
cuggauuaacuaacaugau

SEQ ID NO: 2397535 - RNA, 19 nt, Artificial Sequence
  Description of Artificial Sequence: Synthetic oligonucleotide
ggcgugcaacugcaucucc

SEQ ID NO: 2397536 - RNA, 19 nt, Artificial Sequence
  Description of Artificial Sequence: Synthetic oligonucleotide
ugguaggucugaggcuuau

SEQ ID NO: 2397537 - RNA, 19 nt, Artificial Sequence
  Description of Artificial Sequence: Synthetic oligonucleotide
cucgaggacugggcucagg

SEQ ID NO: 2397538 - RNA, 19 nt, Artificial Sequence
  Description of Artificial Sequence: Synthetic oligonucleotide
cugcucgagaggucuugga

SEQ ID NO: 2397539 - RNA, 19 nt, Artificial Sequence
  Description of Artificial Sequence: Synthetic oligonucleotide
cgguggagucuccuggugg

SEQ ID NO: 2397540 - RNA, 19 nt, Artificial Sequence
  Description of Artificial Sequence: Synthetic oligonucleotide
cauagagcaauugcacuuu

SEQ ID NO: 2397541 - RNA, 19 nt, Artificial Sequence
  Description of Artificial Sequence: Synthetic oligonucleotide
aggcugucuuccagaaagu

SEQ ID NO: 2397542 - RNA, 19 nt, Artificial Sequence
  Description of Artificial Sequence: Synthetic oligonucleotide
cugcgagcucagagccugc

SEQ ID NO: 2397543 - RNA, 19 nt, Artificial Sequence
  Description of Artificial Sequence: Synthetic oligonucleotide
ggcucgaggacugggcuca

SEQ ID NO: 2397544 - RNA, 19 nt, Artificial Sequence
  Description of Artificial Sequence: Synthetic oligonucleotide
gguugguaggucugaggcu

SEQ ID NO: 2397545 - RNA, 19 nt, Artificial Sequence
  Description of Artificial Sequence: Synthetic oligonucleotide
cuccggguauuggcugagg

SEQ ID NO: 2397546 - RNA, 19 nt, Artificial Sequence
  Description of Artificial Sequence: Synthetic oligonucleotide
cucuguugcggagaaaguu

SEQ ID NO: 2397547 - RNA, 19 nt, Artificial Sequence
  Description of Artificial Sequence: Synthetic oligonucleotide
cuguuccaggcuccgaggu

SEQ ID NO: 2397548 - RNA, 19 nt, Artificial Sequence
  Description of Artificial Sequence: Synthetic oligonucleotide
ggaugcaugcuagcagaga

SEQ ID NO: 2397549 - RNA, 19 nt, Artificial Sequence
  Description of Artificial Sequence: Synthetic oligonucleotide
gguaggucugaggcuuaug

SEQ ID NO: 2397550 - RNA, 19 nt, Artificial Sequence
  Description of Artificial Sequence: Synthetic oligonucleotide
ccagaauaccuuugguucu

SEQ ID NO: 2397551 - RNA, 19 nt, Artificial Sequence
  Description of Artificial Sequence: Synthetic oligonucleotide
gguaagggaagugucugau

SEQ ID NO: 2397552 - RNA, 19 nt, Artificial Sequence
  Description of Artificial Sequence: Synthetic oligonucleotide
gagaguguggagacacuuu

SEQ ID NO: 2397553 - RNA, 19 nt, Artificial Sequence
  Description of Artificial Sequence: Synthetic oligonucleotide
gggauggcgguggagucuc

SEQ ID NO: 2397554 - RNA, 19 nt, Artificial Sequence
  Description of Artificial Sequence: Synthetic oligonucleotide
ccgaggugguucuuuacaa

SEQ ID NO: 2397555 - RNA, 19 nt, Artificial Sequence
  Description of Artificial Sequence: Synthetic oligonucleotide
cucacaggggaccgauugu

SEQ ID NO: 2397556 - RNA, 19 nt, Artificial Sequence
  Description of Artificial Sequence: Synthetic oligonucleotide
gauggcgguggagucuccu

SEQ ID NO: 2397557 - RNA, 19 nt, Artificial Sequence
  Description of Artificial Sequence: Synthetic oligonucleotide
ccaggcuccgaggugguuc

SEQ ID NO: 2397558 - RNA, 19 nt, Artificial Sequence
  Description of Artificial Sequence: Synthetic oligonucleotide
ggagaaaguugaggaugca

SEQ ID NO: 2397559 - RNA, 19 nt, Artificial Sequence
  Description of Artificial Sequence: Synthetic oligonucleotide
cugauccuauuuguucaua

SEQ ID NO: 2397560 - RNA, 19 nt, Artificial Sequence
  Description of Artificial Sequence: Synthetic oligonucleotide
acguuucugcgagcucaga

SEQ ID NO: 2397561 - RNA, 19 nt, Artificial Sequence
  Description of Artificial Sequence: Synthetic oligonucleotide
ggaaagggcuaaauugcau

SEQ ID NO: 2397562 - RNA, 19 nt, Artificial Sequence
  Description of Artificial Sequence: Synthetic oligonucleotide
gggcucgaggacugggcuc

SEQ ID NO: 2397563 - RNA, 19 nt, Artificial Sequence
  Description of Artificial Sequence: Synthetic oligonucleotide
ggagucuccugguggggua

SEQ ID NO: 2397564 - RNA, 19 nt, Artificial Sequence
  Description of Artificial Sequence: Synthetic oligonucleotide
cggguauuggcugaggaaa

SEQ ID NO: 2397565 - RNA, 19 nt, Artificial Sequence
  Description of Artificial Sequence: Synthetic oligonucleotide
gucgcuucugcuggagccu

SEQ ID NO: 2397566 - RNA, 19 nt, Artificial Sequence
  Description of Artificial Sequence: Synthetic oligonucleotide
guagagccagcugcugacu

SEQ ID NO: 2397567 - RNA, 19 nt, Artificial Sequence
  Description of Artificial Sequence: Synthetic oligonucleotide
cugggucaggcugaauggu

SEQ ID NO: 2397568 - RNA, 19 nt, Artificial Sequence
  Description of Artificial Sequence: Synthetic oligonucleotide
ccggguauuggcugaggaa

SEQ ID NO: 2397569 - RNA, 19 nt, Artificial Sequence
  Description of Artificial Sequence: Synthetic oligonucleotide
gucgaggguaggagcucuc

SEQ ID NO: 2397570 - RNA, 19 nt, Artificial Sequence
  Description of Artificial Sequence: Synthetic oligonucleotide
gcaucuccggguauuggcu

SEQ ID NO: 2397571 - RNA, 19 nt, Artificial Sequence
  Description of Artificial Sequence: Synthetic oligonucleotide
gcuccgaggugguucuuua

SEQ ID NO: 2397572 - RNA, 19 nt, Artificial Sequence
  Description of Artificial Sequence: Synthetic oligonucleotide
gggaagugucugaugcucu

SEQ ID NO: 2397573 - RNA, 19 nt, Artificial Sequence
  Description of Artificial Sequence: Synthetic oligonucleotide
gggcgugcaacugcaucuc

SEQ ID NO: 2397574 - RNA, 19 nt, Artificial Sequence
  Description of Artificial Sequence: Synthetic oligonucleotide
gcggccuucucggaagcuc

SEQ ID NO: 2397575 - RNA, 19 nt, Artificial Sequence
  Description of Artificial Sequence: Synthetic oligonucleotide
agucugccucugauccuau

SEQ ID NO: 2397576 - RNA, 19 nt, Artificial Sequence
  Description of Artificial Sequence: Synthetic oligonucleotide
agguccccugcugggcagu

SEQ ID NO: 2397577 - RNA, 19 nt, Artificial Sequence
  Description of Artificial Sequence: Synthetic oligonucleotide
gggcuaaauugcaucugcu

SEQ ID NO: 2397578 - RNA, 19 nt, Artificial Sequence
  Description of Artificial Sequence: Synthetic oligonucleotide
ggguaggagcucucugcua

SEQ ID NO: 2397579 - RNA, 19 nt, Artificial Sequence
  Description of Artificial Sequence: Synthetic oligonucleotide
gcugaggaaagggcuaaau

SEQ ID NO: 2397580 - RNA, 19 nt, Artificial Sequence
  Description of Artificial Sequence: Synthetic oligonucleotide
ggcgguggagucuccuggu

SEQ ID NO: 2397581 - RNA, 19 nt, Artificial Sequence
  Description of Artificial Sequence: Synthetic oligonucleotide
ccguuggguaagggaagug

SEQ ID NO: 2397582 - RNA, 19 nt, Artificial Sequence
  Description of Artificial Sequence: Synthetic oligonucleotide
ggccuucucggaagcucac

SEQ ID NO: 2397583 - RNA, 19 nt, Artificial Sequence
  Description of Artificial Sequence: Synthetic oligonucleotide
gccuucucggaagcucaca

SEQ ID NO: 2397584 - RNA, 19 nt, Artificial Sequence
  Description of Artificial Sequence: Synthetic oligonucleotide
agcucacaggggaccgauu

SEQ ID NO: 2397585 - RNA, 19 nt, Artificial Sequence
  Description of Artificial Sequence: Synthetic oligonucleotide
  modified_base (5)..(5): a, c, u, g, unknown or other
ccuunagggaaggcugucu

SEQ ID NO: 2397586 - RNA, 19 nt, Artificial Sequence
  Description of Artificial Sequence: Synthetic oligonucleotide
cugcauggcuggguuggua

SEQ ID NO: 2397587 - RNA, 19 nt, Artificial Sequence
  Description of Artificial Sequence: Synthetic oligonucleotide
ggacugcugggauggcggu

SEQ ID NO: 2397588 - RNA, 19 nt, Artificial Sequence
  Description of Artificial Sequence: Synthetic oligonucleotide
ggcgugggugguggagggc

SEQ ID NO: 2397589 - RNA, 19 nt, Artificial Sequence
  Description of Artificial Sequence: Synthetic oligonucleotide
augcggggugaaggcugga

SEQ ID NO: 2397590 - RNA, 19 nt, Artificial Sequence
  Description of Artificial Sequence: Synthetic oligonucleotide
ccucacguuucugcgagcu

SEQ ID NO: 2397591 - RNA, 19 nt, Artificial Sequence
  Description of Artificial Sequence: Synthetic oligonucleotide
ggggaccgauuguggaccu

SEQ ID NO: 2397592 - RNA, 19 nt, Artificial Sequence
  Description of Artificial Sequence: Synthetic oligonucleotide
gcggggugaaggcuggauu

SEQ ID NO: 2397593 - RNA, 19 nt, Artificial Sequence
  Description of Artificial Sequence: Synthetic oligonucleotide
gcucuguugcggagaaagu

SEQ ID NO: 2397594 - RNA, 19 nt, Artificial Sequence
  Description of Artificial Sequence: Synthetic oligonucleotide
ggauggcgguggagucucc

SEQ ID NO: 2397595 - RNA, 19 nt, Artificial Sequence
  Description of Artificial Sequence: Synthetic oligonucleotide
gcucugcggccuucucgga

SEQ ID NO: 2397596 - RNA, 19 nt, Artificial Sequence
  Description of Artificial Sequence: Synthetic oligonucleotide
gggaccgauuguggaccuc

SEQ ID NO: 2397597 - RNA, 19 nt, Artificial Sequence
  Description of Artificial Sequence: Synthetic oligonucleotide
gccucugauccuauuuguu

SEQ ID NO: 2397598 - RNA, 19 nt, Artificial Sequence
  Description of Artificial Sequence: Synthetic oligonucleotide
gcucgaggacugggcucag

SEQ ID NO: 2397599 - RNA, 19 nt, Artificial Sequence
  Description of Artificial Sequence: Synthetic oligonucleotide
cgaggugguucuuuacaau

SEQ ID NO: 2397600 - RNA, 19 nt, Artificial Sequence
  Description of Artificial Sequence: Synthetic oligonucleotide
cgauuguggaccucacguu

SEQ ID NO: 2397601 - RNA, 19 nt, Artificial Sequence
  Description of Artificial Sequence: Synthetic oligonucleotide
gcgagcucagagccugcau

SEQ ID NO: 2397602 - RNA, 19 nt, Artificial Sequence
  Description of Artificial Sequence: Synthetic oligonucleotide
ggagggcaggggcgugcaa

SEQ ID NO: 2397603 - RNA, 19 nt, Artificial Sequence
  Description of Artificial Sequence: Synthetic oligonucleotide
ggcuccgaggugguucuuu

SEQ ID NO: 2397604 - RNA, 19 nt, Artificial Sequence
  Description of Artificial Sequence: Synthetic oligonucleotide
aggcuccgaggugguucuu

SEQ ID NO: 2397605 - RNA, 19 nt, Artificial Sequence
  Description of Artificial Sequence: Synthetic oligonucleotide
ccugcauggcuggguuggu

SEQ ID NO: 2397606 - RNA, 19 nt, Artificial Sequence
  Description of Artificial Sequence: Synthetic oligonucleotide
gggcugggucaggcugaau

SEQ ID NO: 2397607 - RNA, 19 nt, Artificial Sequence
  Description of Artificial Sequence: Synthetic oligonucleotide
ugacuuaagagaaagaucc

SEQ ID NO: 2397608 - RNA, 19 nt, Artificial Sequence
  Description of Artificial Sequence: Synthetic oligonucleotide
ugauaaaaugacuuaagag

SEQ ID NO: 2397609 - RNA, 19 nt, Artificial Sequence
  Description of Artificial Sequence: Synthetic oligonucleotide
aaaagcgucuaccaacacc

SEQ ID NO: 2397610 - RNA, 19 nt, Artificial Sequence
  Description of Artificial Sequence: Synthetic oligonucleotide
aaaaugacuuaagagaaag

SEQ ID NO: 2397611 - RNA, 19 nt, Artificial Sequence
  Description of Artificial Sequence: Synthetic oligonucleotide
aaauacauggguccuauga

SEQ ID NO: 2397612 - RNA, 19 nt, Artificial Sequence
  Description of Artificial Sequence: Synthetic oligonucleotide
aaugcuugacacgaguuac

SEQ ID NO: 2397613 - RNA, 19 nt, Artificial Sequence
  Description of Artificial Sequence: Synthetic oligonucleotide
aaugacuuaagagaaagau

SEQ ID NO: 2397614 - RNA, 19 nt, Artificial Sequence
  Description of Artificial Sequence: Synthetic oligonucleotide
cuugacacgaguuacagca

SEQ ID NO: 2397615 - RNA, 19 nt, Artificial Sequence
  Description of Artificial Sequence: Synthetic oligonucleotide
ucggcagguacacugaggg

SEQ ID NO: 2397616 - RNA, 19 nt, Artificial Sequence
  Description of Artificial Sequence: Synthetic oligonucleotide
uuaaccaaugcuugacacg

SEQ ID NO: 2397617 - RNA, 19 nt, Artificial Sequence
  Description of Artificial Sequence: Synthetic oligonucleotide
aauccagccggccuguggg

SEQ ID NO: 2397618 - RNA, 19 nt, Artificial Sequence
  Description of Artificial Sequence: Synthetic oligonucleotide
uugcucuuguuguagacgg

SEQ ID NO: 2397619 - RNA, 19 nt, Artificial Sequence
  Description of Artificial Sequence: Synthetic oligonucleotide
ggaaagauccuuuuauugg

SEQ ID NO: 2397620 - RNA, 19 nt, Artificial Sequence
  Description of Artificial Sequence: Synthetic oligonucleotide
aaagcgucuaccaacaccu

SEQ ID NO: 2397621 - RNA, 19 nt, Artificial Sequence
  Description of Artificial Sequence: Synthetic oligonucleotide
uuuaaccaaugcuugacac

SEQ ID NO: 2397622 - RNA, 19 nt, Artificial Sequence
  Description of Artificial Sequence: Synthetic oligonucleotide
gaaagauccagaagggccg

SEQ ID NO: 2397623 - RNA, 19 nt, Artificial Sequence
  Description of Artificial Sequence: Synthetic oligonucleotide
aggaaaauaaauacauggg

SEQ ID NO: 2397624 - RNA, 19 nt, Artificial Sequence
  Description of Artificial Sequence: Synthetic oligonucleotide
augauaaaaugacuuaaga

SEQ ID NO: 2397625 - RNA, 19 nt, Artificial Sequence
  Description of Artificial Sequence: Synthetic oligonucleotide
auacauggguccuaugagg

SEQ ID NO: 2397626 - RNA, 19 nt, Artificial Sequence
  Description of Artificial Sequence: Synthetic oligonucleotide
agggcugucaguccgggcc

SEQ ID NO: 2397627 - RNA, 19 nt, Artificial Sequence
  Description of Artificial Sequence: Synthetic oligonucleotide
gauccuuuuauuggggugg

SEQ ID NO: 2397628 - RNA, 19 nt, Artificial Sequence
  Description of Artificial Sequence: Synthetic oligonucleotide
ugucacaaugaucuguucu

SEQ ID NO: 2397629 - RNA, 19 nt, Artificial Sequence
  Description of Artificial Sequence: Synthetic oligonucleotide
gguccuaugagguuggagg

SEQ ID NO: 2397630 - RNA, 19 nt, Artificial Sequence
  Description of Artificial Sequence: Synthetic oligonucleotide
auaaaaugacuuaagagaa

SEQ ID NO: 2397631 - RNA, 19 nt, Artificial Sequence
  Description of Artificial Sequence: Synthetic oligonucleotide
ugagcucucacccucugcc

SEQ ID NO: 2397632 - RNA, 19 nt, Artificial Sequence
  Description of Artificial Sequence: Synthetic oligonucleotide
ugucccuuuaaccaaugcu

SEQ ID NO: 2397633 - RNA, 19 nt, Artificial Sequence
  Description of Artificial Sequence: Synthetic oligonucleotide
agagcgaaaaggccgcucg

SEQ ID NO: 2397634 - RNA, 19 nt, Artificial Sequence
  Description of Artificial Sequence: Synthetic oligonucleotide
acaggugugaccccggaag

SEQ ID NO: 2397635 - RNA, 19 nt, Artificial Sequence
  Description of Artificial Sequence: Synthetic oligonucleotide
uaaccaaugcuugacacga

SEQ ID NO: 2397636 - RNA, 19 nt, Artificial Sequence
  Description of Artificial Sequence: Synthetic oligonucleotide
aaagucugccaucguccgc

SEQ ID NO: 2397637 - RNA, 19 nt, Artificial Sequence
  Description of Artificial Sequence: Synthetic oligonucleotide
acuuaagagaaagauccag

SEQ ID NO: 2397638 - RNA, 19 nt, Artificial Sequence
  Description of Artificial Sequence: Synthetic oligonucleotide
ugucagggcugucaguccg

SEQ ID NO: 2397639 - RNA, 19 nt, Artificial Sequence
  Description of Artificial Sequence: Synthetic oligonucleotide
acggaguccgaguggaacc

SEQ ID NO: 2397640 - RNA, 19 nt, Artificial Sequence
  Description of Artificial Sequence: Synthetic oligonucleotide
uacauggguccuaugaggu

SEQ ID NO: 2397641 - RNA, 19 nt, Artificial Sequence
  Description of Artificial Sequence: Synthetic oligonucleotide
uuggucucucuucuuggcg

SEQ ID NO: 2397642 - RNA, 19 nt, Artificial Sequence
  Description of Artificial Sequence: Synthetic oligonucleotide
ucccuuuaaccaaugcuug

SEQ ID NO: 2397643 - RNA, 19 nt, Artificial Sequence
  Description of Artificial Sequence: Synthetic oligonucleotide
agggacggcgguucgaggc

SEQ ID NO: 2397644 - RNA, 19 nt, Artificial Sequence
  Description of Artificial Sequence: Synthetic oligonucleotide
agaagggccggcucucucc

SEQ ID NO: 2397645 - RNA, 19 nt, Artificial Sequence
  Description of Artificial Sequence: Synthetic oligonucleotide
uccgaguggaaccugcuga

SEQ ID NO: 2397646 - RNA, 19 nt, Artificial Sequence
  Description of Artificial Sequence: Synthetic oligonucleotide
uaaaaugacuuaagagaaa

SEQ ID NO: 2397647 - RNA, 19 nt, Artificial Sequence
  Description of Artificial Sequence: Synthetic oligonucleotide
aggauguuugucuuuucug

SEQ ID NO: 2397648 - RNA, 19 nt, Artificial Sequence
  Description of Artificial Sequence: Synthetic oligonucleotide
uccaugauaaaaugacuua

SEQ ID NO: 2397649 - RNA, 19 nt, Artificial Sequence
  Description of Artificial Sequence: Synthetic oligonucleotide
ugcgcuuacacacgcgagc

SEQ ID NO: 2397650 - RNA, 19 nt, Artificial Sequence
  Description of Artificial Sequence: Synthetic oligonucleotide
guccuaugagguuggaggg

SEQ ID NO: 2397651 - RNA, 19 nt, Artificial Sequence
  Description of Artificial Sequence: Synthetic oligonucleotide
ugcacacggaguccgagug

SEQ ID NO: 2397652 - RNA, 19 nt, Artificial Sequence
  Description of Artificial Sequence: Synthetic oligonucleotide
accggggcaauccagccgg

SEQ ID NO: 2397653 - RNA, 19 nt, Artificial Sequence
  Description of Artificial Sequence: Synthetic oligonucleotide
uuugucccauugcuggugc

SEQ ID NO: 2397654 - RNA, 19 nt, Artificial Sequence
  Description of Artificial Sequence: Synthetic oligonucleotide
uguguugggagaccaggcu

SEQ ID NO: 2397655 - RNA, 19 nt, Artificial Sequence
  Description of Artificial Sequence: Synthetic oligonucleotide
ucuuuucugucacaaugau

SEQ ID NO: 2397656 - RNA, 19 nt, Artificial Sequence
  Description of Artificial Sequence: Synthetic oligonucleotide
uuguagacgggcaagccuu

SEQ ID NO: 2397657 - RNA, 19 nt, Artificial Sequence
  Description of Artificial Sequence: Synthetic oligonucleotide
cuggcgugggcucagagug

SEQ ID NO: 2397658 - RNA, 19 nt, Artificial Sequence
  Description of Artificial Sequence: Synthetic oligonucleotide
ccuggugucgucuugcugg

SEQ ID NO: 2397659 - RNA, 19 nt, Artificial Sequence
  Description of Artificial Sequence: Synthetic oligonucleotide
uguucugacggguacucuc

SEQ ID NO: 2397660 - RNA, 19 nt, Artificial Sequence
  Description of Artificial Sequence: Synthetic oligonucleotide
gacggguacucucgggucg

SEQ ID NO: 2397661 - RNA, 19 nt, Artificial Sequence
  Description of Artificial Sequence: Synthetic oligonucleotide
ugggagaccaggcugcccu

SEQ ID NO: 2397662 - RNA, 19 nt, Artificial Sequence
  Description of Artificial Sequence: Synthetic oligonucleotide
ggaaaauaaauacaugggu

SEQ ID NO: 2397663 - RNA, 19 nt, Artificial Sequence
  Description of Artificial Sequence: Synthetic oligonucleotide
ugcgggguggcgcugagcu

SEQ ID NO: 2397664 - RNA, 19 nt, Artificial Sequence
  Description of Artificial Sequence: Synthetic oligonucleotide
agaccggggcaauccagcc

SEQ ID NO: 2397665 - RNA, 19 nt, Artificial Sequence
  Description of Artificial Sequence: Synthetic oligonucleotide
aauaaauacauggguccua

SEQ ID NO: 2397666 - RNA, 19 nt, Artificial Sequence
  Description of Artificial Sequence: Synthetic oligonucleotide
ucacggcugggccugaugu

SEQ ID NO: 2397667 - RNA, 19 nt, Artificial Sequence
  Description of Artificial Sequence: Synthetic oligonucleotide
cugggcacaggugugaccc

SEQ ID NO: 2397668 - RNA, 19 nt, Artificial Sequence
  Description of Artificial Sequence: Synthetic oligonucleotide
ucugacggguacucucggg

SEQ ID NO: 2397669 - RNA, 19 nt, Artificial Sequence
  Description of Artificial Sequence: Synthetic oligonucleotide
uggcgcugagcucucaccc

SEQ ID NO: 2397670 - RNA, 19 nt, Artificial Sequence
  Description of Artificial Sequence: Synthetic oligonucleotide
acagagcagacagacgcgg

SEQ ID NO: 2397671 - RNA, 19 nt, Artificial Sequence
  Description of Artificial Sequence: Synthetic oligonucleotide
aguaggaaagauccuuuua

SEQ ID NO: 2397672 - RNA, 19 nt, Artificial Sequence
  Description of Artificial Sequence: Synthetic oligonucleotide
gucuaccaacaccucacgg

SEQ ID NO: 2397673 - RNA, 19 nt, Artificial Sequence
  Description of Artificial Sequence: Synthetic oligonucleotide
uucugacggguacucucgg

SEQ ID NO: 2397674 - RNA, 19 nt, Artificial Sequence
  Description of Artificial Sequence: Synthetic oligonucleotide
cauggguccuaugagguug

SEQ ID NO: 2397675 - RNA, 19 nt, Artificial Sequence
  Description of Artificial Sequence: Synthetic oligonucleotide
ugggcugcgcuuacacacg

SEQ ID NO: 2397676 - RNA, 19 nt, Artificial Sequence
  Description of Artificial Sequence: Synthetic oligonucleotide
auaaauacauggguccuau

SEQ ID NO: 2397677 - RNA, 19 nt, Artificial Sequence
  Description of Artificial Sequence: Synthetic oligonucleotide
acgaguuacagcauaaaua

SEQ ID NO: 2397678 - RNA, 19 nt, Artificial Sequence
  Description of Artificial Sequence: Synthetic oligonucleotide
cagaaagucugccaucguc

SEQ ID NO: 2397679 - RNA, 19 nt, Artificial Sequence
  Description of Artificial Sequence: Synthetic oligonucleotide
aggugggcugcgcuuacac

SEQ ID NO: 2397680 - RNA, 19 nt, Artificial Sequence
  Description of Artificial Sequence: Synthetic oligonucleotide
agacgggcaagccuuucag

SEQ ID NO: 2397681 - RNA, 19 nt, Artificial Sequence
  Description of Artificial Sequence: Synthetic oligonucleotide
ucgucuugcuggcgggugg

SEQ ID NO: 2397682 - RNA, 19 nt, Artificial Sequence
  Description of Artificial Sequence: Synthetic oligonucleotide
aagagcgaaaaggccgcuc

SEQ ID NO: 2397683 - RNA, 19 nt, Artificial Sequence
  Description of Artificial Sequence: Synthetic oligonucleotide
guucugacggguacucucg

SEQ ID NO: 2397684 - RNA, 19 nt, Artificial Sequence
  Description of Artificial Sequence: Synthetic oligonucleotide
gacagagcagacagacgcg

SEQ ID NO: 2397685 - RNA, 19 nt, Artificial Sequence
  Description of Artificial Sequence: Synthetic oligonucleotide
cacaaugaucuguucugac

SEQ ID NO: 2397686 - RNA, 19 nt, Artificial Sequence
  Description of Artificial Sequence: Synthetic oligonucleotide
ugacacgaguuacagcaua

SEQ ID NO: 2397687 - RNA, 19 nt, Artificial Sequence
  Description of Artificial Sequence: Synthetic oligonucleotide
guguugggagaccaggcug

SEQ ID NO: 2397688 - RNA, 19 nt, Artificial Sequence
  Description of Artificial Sequence: Synthetic oligonucleotide
ggugucgucuugcuggcgg

SEQ ID NO: 2397689 - RNA, 19 nt, Artificial Sequence
  Description of Artificial Sequence: Synthetic oligonucleotide
aguggaaccugcugaaguu

SEQ ID NO: 2397690 - RNA, 19 nt, Artificial Sequence
  Description of Artificial Sequence: Synthetic oligonucleotide
cuuuaaccaaugcuugaca

SEQ ID NO: 2397691 - RNA, 19 nt, Artificial Sequence
  Description of Artificial Sequence: Synthetic oligonucleotide
guggaugcggagcacgggc

SEQ ID NO: 2397692 - RNA, 19 nt, Artificial Sequence
  Description of Artificial Sequence: Synthetic oligonucleotide
agcgucuaccaacaccuca

SEQ ID NO: 2397693 - RNA, 19 nt, Artificial Sequence
  Description of Artificial Sequence: Synthetic oligonucleotide
uagacgggcaagccuuuca

SEQ ID NO: 2397694 - RNA, 19 nt, Artificial Sequence
  Description of Artificial Sequence: Synthetic oligonucleotide
aagauccagaagggccggc

SEQ ID NO: 2397695 - RNA, 19 nt, Artificial Sequence
  Description of Artificial Sequence: Synthetic oligonucleotide
cuuacacacgcgagccggg

SEQ ID NO: 2397696 - RNA, 19 nt, Artificial Sequence
  Description of Artificial Sequence: Synthetic oligonucleotide
gagcgaaaaggccgcucgg

SEQ ID NO: 2397697 - RNA, 19 nt, Artificial Sequence
  Description of Artificial Sequence: Synthetic oligonucleotide
ccugaugucccuuuaacca

SEQ ID NO: 2397698 - RNA, 19 nt, Artificial Sequence
  Description of Artificial Sequence: Synthetic oligonucleotide
guacucucgggucggcagg

SEQ ID NO: 2397699 - RNA, 19 nt, Artificial Sequence
  Description of Artificial Sequence: Synthetic oligonucleotide
gacagacgcgggcaccgcg

SEQ ID NO: 2397700 - RNA, 19 nt, Artificial Sequence
  Description of Artificial Sequence: Synthetic oligonucleotide
ugagggacggcgguucgag

SEQ ID NO: 2397701 - RNA, 19 nt, Artificial Sequence
  Description of Artificial Sequence: Synthetic oligonucleotide
ucucgggucggcagguaca

SEQ ID NO: 2397702 - RNA, 19 nt, Artificial Sequence
  Description of Artificial Sequence: Synthetic oligonucleotide
ccugugggugggaagagcg

SEQ ID NO: 2397703 - RNA, 19 nt, Artificial Sequence
  Description of Artificial Sequence: Synthetic oligonucleotide
aguccgggccaccuugcgg

SEQ ID NO: 2397704 - RNA, 19 nt, Artificial Sequence
  Description of Artificial Sequence: Synthetic oligonucleotide
gguguguugggagaccagg

SEQ ID NO: 2397705 - RNA, 19 nt, Artificial Sequence
  Description of Artificial Sequence: Synthetic oligonucleotide
gaccggggcaauccagccg

SEQ ID NO: 2397706 - RNA, 19 nt, Artificial Sequence
  Description of Artificial Sequence: Synthetic oligonucleotide
cugcccugggcucuggacc

SEQ ID NO: 2397707 - RNA, 19 nt, Artificial Sequence
  Description of Artificial Sequence: Synthetic oligonucleotide
gguacucucgggucggcag

SEQ ID NO: 2397708 - RNA, 19 nt, Artificial Sequence
  Description of Artificial Sequence: Synthetic oligonucleotide
uccuaugagguuggagggc

SEQ ID NO: 2397709 - RNA, 19 nt, Artificial Sequence
  Description of Artificial Sequence: Synthetic oligonucleotide
gcuuacacacgcgagccgg

SEQ ID NO: 2397710 - RNA, 19 nt, Artificial Sequence
  Description of Artificial Sequence: Synthetic oligonucleotide
gucaguccgggccaccuug

SEQ ID NO: 2397711 - RNA, 19 nt, Artificial Sequence
  Description of Artificial Sequence: Synthetic oligonucleotide
uggaugcggagcacgggcu

SEQ ID NO: 2397712 - RNA, 19 nt, Artificial Sequence
  Description of Artificial Sequence: Synthetic oligonucleotide
uggugcagguaccgcagga

SEQ ID NO: 2397713 - RNA, 19 nt, Artificial Sequence
  Description of Artificial Sequence: Synthetic oligonucleotide
cuaugagguuggagggcgg

SEQ ID NO: 2397714 - RNA, 19 nt, Artificial Sequence
  Description of Artificial Sequence: Synthetic oligonucleotide
uacacacgcgagccgggug

SEQ ID NO: 2397715 - RNA, 19 nt, Artificial Sequence
  Description of Artificial Sequence: Synthetic oligonucleotide
caauccagccggccugugg

SEQ ID NO: 2397716 - RNA, 19 nt, Artificial Sequence
  Description of Artificial Sequence: Synthetic oligonucleotide
gacgcgggcaccgcgugcg

SEQ ID NO: 2397717 - RNA, 19 nt, Artificial Sequence
  Description of Artificial Sequence: Synthetic oligonucleotide
uccucgggcaugucagggc

SEQ ID NO: 2397718 - RNA, 19 nt, Artificial Sequence
  Description of Artificial Sequence: Synthetic oligonucleotide
aggugugaccccggaagac

SEQ ID NO: 2397719 - RNA, 19 nt, Artificial Sequence
  Description of Artificial Sequence: Synthetic oligonucleotide
ucaguccgggccaccuugc

SEQ ID NO: 2397720 - RNA, 19 nt, Artificial Sequence
  Description of Artificial Sequence: Synthetic oligonucleotide
uugacacgaguuacagcau

SEQ ID NO: 2397721 - RNA, 19 nt, Artificial Sequence
  Description of Artificial Sequence: Synthetic oligonucleotide
cugaugucccuuuaaccaa

SEQ ID NO: 2397722 - RNA, 19 nt, Artificial Sequence
  Description of Artificial Sequence: Synthetic oligonucleotide
gacuuaagagaaagaucca

SEQ ID NO: 2397723 - RNA, 19 nt, Artificial Sequence
  Description of Artificial Sequence: Synthetic oligonucleotide
augaucuguucugacgggu

SEQ ID NO: 2397724 - RNA, 19 nt, Artificial Sequence
  Description of Artificial Sequence: Synthetic oligonucleotide
gaccccggaagaccggggc

SEQ ID NO: 2397725 - RNA, 19 nt, Artificial Sequence
  Description of Artificial Sequence: Synthetic oligonucleotide
ugacggguacucucggguc

SEQ ID NO: 2397726 - RNA, 19 nt, Artificial Sequence
  Description of Artificial Sequence: Synthetic oligonucleotide
uugcacacggaguccgagu

SEQ ID NO: 2397727 - RNA, 19 nt, Artificial Sequence
  Description of Artificial Sequence: Synthetic oligonucleotide
cagacagacgcgggcaccg

SEQ ID NO: 2397728 - RNA, 19 nt, Artificial Sequence
  Description of Artificial Sequence: Synthetic oligonucleotide
ccuaugagguuggagggcg

SEQ ID NO: 2397729 - RNA, 19 nt, Artificial Sequence
  Description of Artificial Sequence: Synthetic oligonucleotide
gaugcggagcacgggcuag

SEQ ID NO: 2397730 - RNA, 19 nt, Artificial Sequence
  Description of Artificial Sequence: Synthetic oligonucleotide
acgcgagccgggugggagc

SEQ ID NO: 2397731 - RNA, 19 nt, Artificial Sequence
  Description of Artificial Sequence: Synthetic oligonucleotide
gaugucccuuuaaccaaug

SEQ ID NO: 2397732 - RNA, 19 nt, Artificial Sequence
  Description of Artificial Sequence: Synthetic oligonucleotide
agcacgggcuaguccauga

SEQ ID NO: 2397733 - RNA, 19 nt, Artificial Sequence
  Description of Artificial Sequence: Synthetic oligonucleotide
uggguguaggaggugggcu

SEQ ID NO: 2397734 - RNA, 19 nt, Artificial Sequence
  Description of Artificial Sequence: Synthetic oligonucleotide
ucgguguguugggagacca

SEQ ID NO: 2397735 - RNA, 19 nt, Artificial Sequence
  Description of Artificial Sequence: Synthetic oligonucleotide
gugucgucuugcuggcggg

SEQ ID NO: 2397736 - RNA, 19 nt, Artificial Sequence
  Description of Artificial Sequence: Synthetic oligonucleotide
cuggugucgucuugcuggc

SEQ ID NO: 2397737 - RNA, 19 nt, Artificial Sequence
  Description of Artificial Sequence: Synthetic oligonucleotide
gucccauugcuggugcagg

SEQ ID NO: 2397738 - RNA, 19 nt, Artificial Sequence
  Description of Artificial Sequence: Synthetic oligonucleotide
guuguagacgggcaagccu

SEQ ID NO: 2397739 - RNA, 19 nt, Artificial Sequence
  Description of Artificial Sequence: Synthetic oligonucleotide
acgggcuaguccaugauaa

SEQ ID NO: 2397740 - RNA, 19 nt, Artificial Sequence
  Description of Artificial Sequence: Synthetic oligonucleotide
guacacugagggacggcgg

SEQ ID NO: 2397741 - RNA, 19 nt, Artificial Sequence
  Description of Artificial Sequence: Synthetic oligonucleotide
cugcgcuuacacacgcgag

SEQ ID NO: 2397742 - RNA, 19 nt, Artificial Sequence
  Description of Artificial Sequence: Synthetic oligonucleotide
guggaaccugcugaaguug

SEQ ID NO: 2397743 - RNA, 19 nt, Artificial Sequence
  Description of Artificial Sequence: Synthetic oligonucleotide
gguucgaggccuugcacac

SEQ ID NO: 2397744 - RNA, 19 nt, Artificial Sequence
  Description of Artificial Sequence: Synthetic oligonucleotide
ugggagcggacagagcaga

SEQ ID NO: 2397745 - RNA, 19 nt, Artificial Sequence
  Description of Artificial Sequence: Synthetic oligonucleotide
aaccaaugcuugacacgag

SEQ ID NO: 2397746 - RNA, 19 nt, Artificial Sequence
  Description of Artificial Sequence: Synthetic oligonucleotide
guguguugggagaccaggc

SEQ ID NO: 2397747 - RNA, 19 nt, Artificial Sequence
  Description of Artificial Sequence: Synthetic oligonucleotide
gacacgaguuacagcauaa

SEQ ID NO: 2397748 - RNA, 19 nt, Artificial Sequence
  Description of Artificial Sequence: Synthetic oligonucleotide
aaggccgcucgguguguug

SEQ ID NO: 2397749 - RNA, 19 nt, Artificial Sequence
  Description of Artificial Sequence: Synthetic oligonucleotide
ccuuuaaccaaugcuugac

SEQ ID NO: 2397750 - RNA, 19 nt, Artificial Sequence
  Description of Artificial Sequence: Synthetic oligonucleotide
acaccucacggcugggccu

SEQ ID NO: 2397751 - RNA, 19 nt, Artificial Sequence
  Description of Artificial Sequence: Synthetic oligonucleotide
gcucuuguuguagacgggc

SEQ ID NO: 2397752 - RNA, 19 nt, Artificial Sequence
  Description of Artificial Sequence: Synthetic oligonucleotide
gacccuggugucgucuugc

SEQ ID NO: 2397753 - RNA, 19 nt, Artificial Sequence
  Description of Artificial Sequence: Synthetic oligonucleotide
guggcgcugagcucucacc

SEQ ID NO: 2397754 - RNA, 19 nt, Artificial Sequence
  Description of Artificial Sequence: Synthetic oligonucleotide
cacggaguccgaguggaac

SEQ ID NO: 2397755 - RNA, 19 nt, Artificial Sequence
  Description of Artificial Sequence: Synthetic oligonucleotide
gacgggcaagccuuucaga

SEQ ID NO: 2397756 - RNA, 19 nt, Artificial Sequence
  Description of Artificial Sequence: Synthetic oligonucleotide
agcgaaaaggccgcucggu

SEQ ID NO: 2397757 - RNA, 19 nt, Artificial Sequence
  Description of Artificial Sequence: Synthetic oligonucleotide
guccucgggcaugucaggg

SEQ ID NO: 2397758 - RNA, 19 nt, Artificial Sequence
  Description of Artificial Sequence: Synthetic oligonucleotide
aggaggauguuugucuuuu

SEQ ID NO: 2397759 - RNA, 19 nt, Artificial Sequence
  Description of Artificial Sequence: Synthetic oligonucleotide
auggguccuaugagguugg

SEQ ID NO: 2397760 - RNA, 19 nt, Artificial Sequence
  Description of Artificial Sequence: Synthetic oligonucleotide
gucggcagguacacugagg

SEQ ID NO: 2397761 - RNA, 19 nt, Artificial Sequence
  Description of Artificial Sequence: Synthetic oligonucleotide
uguagacgggcaagccuuu

SEQ ID NO: 2397762 - RNA, 19 nt, Artificial Sequence
  Description of Artificial Sequence: Synthetic oligonucleotide
aagcgucuaccaacaccuc

SEQ ID NO: 2397763 - RNA, 19 nt, Artificial Sequence
  Description of Artificial Sequence: Synthetic oligonucleotide
aggccgcucgguguguugg

SEQ ID NO: 2397764 - RNA, 19 nt, Artificial Sequence
  Description of Artificial Sequence: Synthetic oligonucleotide
aucuguucugacggguacu

SEQ ID NO: 2397765 - RNA, 19 nt, Artificial Sequence
  Description of Artificial Sequence: Synthetic oligonucleotide
accgcaggaggauguuugu

SEQ ID NO: 2397766 - RNA, 19 nt, Artificial Sequence
  Description of Artificial Sequence: Synthetic oligonucleotide
cucucgggucggcagguac

SEQ ID NO: 2397767 - RNA, 19 nt, Artificial Sequence
  Description of Artificial Sequence: Synthetic oligonucleotide
uuacacacgcgagccgggu

SEQ ID NO: 2397768 - RNA, 19 nt, Artificial Sequence
  Description of Artificial Sequence: Synthetic oligonucleotide
gucccuuuaaccaaugcuu

SEQ ID NO: 2397769 - RNA, 19 nt, Artificial Sequence
  Description of Artificial Sequence: Synthetic oligonucleotide
acggguacucucgggucgg

SEQ ID NO: 2397770 - RNA, 19 nt, Artificial Sequence
  Description of Artificial Sequence: Synthetic oligonucleotide
aaaaggccgcucggugugu

SEQ ID NO: 2397771 - RNA, 19 nt, Artificial Sequence
  Description of Artificial Sequence: Synthetic oligonucleotide
agacagacgcgggcaccgc

SEQ ID NO: 2397772 - RNA, 19 nt, Artificial Sequence
  Description of Artificial Sequence: Synthetic oligonucleotide
gcuugacacgaguuacagc

SEQ ID NO: 2397773 - RNA, 19 nt, Artificial Sequence
  Description of Artificial Sequence: Synthetic oligonucleotide
gcgaaaaggccgcucggug

SEQ ID NO: 2397774 - RNA, 19 nt, Artificial Sequence
  Description of Artificial Sequence: Synthetic oligonucleotide
ucgggcaugucagggcugu

SEQ ID NO: 2397775 - RNA, 19 nt, Artificial Sequence
  Description of Artificial Sequence: Synthetic oligonucleotide
ggccugaugucccuuuaac

SEQ ID NO: 2397776 - RNA, 19 nt, Artificial Sequence
  Description of Artificial Sequence: Synthetic oligonucleotide
gcggacagagcagacagac

SEQ ID NO: 2397777 - RNA, 19 nt, Artificial Sequence
  Description of Artificial Sequence: Synthetic oligonucleotide
acauggguccuaugagguu

SEQ ID NO: 2397778 - RNA, 19 nt, Artificial Sequence
  Description of Artificial Sequence: Synthetic oligonucleotide
uagguguccucgggcaugu

SEQ ID NO: 2397779 - RNA, 19 nt, Artificial Sequence
  Description of Artificial Sequence: Synthetic oligonucleotide
cugccaucguccgcguccg

SEQ ID NO: 2397780 - RNA, 19 nt, Artificial Sequence
  Description of Artificial Sequence: Synthetic oligonucleotide
gaguaggaaagauccuuuu

SEQ ID NO: 2397781 - RNA, 19 nt, Artificial Sequence
  Description of Artificial Sequence: Synthetic oligonucleotide
gguguccucgggcauguca

SEQ ID NO: 2397782 - RNA, 19 nt, Artificial Sequence
  Description of Artificial Sequence: Synthetic oligonucleotide
caacaccucacggcugggc

SEQ ID NO: 2397783 - RNA, 19 nt, Artificial Sequence
  Description of Artificial Sequence: Synthetic oligonucleotide
gcugcgcuuacacacgcga

SEQ ID NO: 2397784 - RNA, 19 nt, Artificial Sequence
  Description of Artificial Sequence: Synthetic oligonucleotide
cacgaguuacagcauaaau

SEQ ID NO: 2397785 - RNA, 19 nt, Artificial Sequence
  Description of Artificial Sequence: Synthetic oligonucleotide
cacacggaguccgagugga

SEQ ID NO: 2397786 - RNA, 19 nt, Artificial Sequence
  Description of Artificial Sequence: Synthetic oligonucleotide
augcuugacacgaguuaca

SEQ ID NO: 2397787 - RNA, 19 nt, Artificial Sequence
  Description of Artificial Sequence: Synthetic oligonucleotide
acacgaguuacagcauaaa

SEQ ID NO: 2397788 - RNA, 19 nt, Artificial Sequence
  Description of Artificial Sequence: Synthetic oligonucleotide
gugggagcggacagagcag

SEQ ID NO: 2397789 - RNA, 19 nt, Artificial Sequence
  Description of Artificial Sequence: Synthetic oligonucleotide
uacucucgggucggcaggu

SEQ ID NO: 2397790 - RNA, 19 nt, Artificial Sequence
  Description of Artificial Sequence: Synthetic oligonucleotide
aagggccggcucucuccug

SEQ ID NO: 2397791 - RNA, 19 nt, Artificial Sequence
  Description of Artificial Sequence: Synthetic oligonucleotide
ccaucguccgcguccgccg

SEQ ID NO: 2397792 - RNA, 19 nt, Artificial Sequence
  Description of Artificial Sequence: Synthetic oligonucleotide
gcacacggaguccgagugg

SEQ ID NO: 2397793 - RNA, 19 nt, Artificial Sequence
  Description of Artificial Sequence: Synthetic oligonucleotide
uugggagaccaggcugccc

SEQ ID NO: 2397794 - RNA, 19 nt, Artificial Sequence
  Description of Artificial Sequence: Synthetic oligonucleotide
caggugugaccccggaaga

SEQ ID NO: 2397795 - RNA, 19 nt, Artificial Sequence
  Description of Artificial Sequence: Synthetic oligonucleotide
cucgggucggcagguacac

SEQ ID NO: 2397796 - RNA, 19 nt, Artificial Sequence
  Description of Artificial Sequence: Synthetic oligonucleotide
gcgcuuacacacgcgagcc

SEQ ID NO: 2397797 - RNA, 19 nt, Artificial Sequence
  Description of Artificial Sequence: Synthetic oligonucleotide
caguccgggccaccuugcg

SEQ ID NO: 2397798 - RNA, 19 nt, Artificial Sequence
  Description of Artificial Sequence: Synthetic oligonucleotide
gcucucacccucugccucc

SEQ ID NO: 2397799 - RNA, 19 nt, Artificial Sequence
  Description of Artificial Sequence: Synthetic oligonucleotide
cucgguguguugggagacc

SEQ ID NO: 2397800 - RNA, 19 nt, Artificial Sequence
  Description of Artificial Sequence: Synthetic oligonucleotide
uggugucgucuugcuggcg

SEQ ID NO: 2397801 - RNA, 19 nt, Artificial Sequence
  Description of Artificial Sequence: Synthetic oligonucleotide
cacgcgagccgggugggag

SEQ ID NO: 2397802 - RNA, 19 nt, Artificial Sequence
  Description of Artificial Sequence: Synthetic oligonucleotide
ugucaguccgggccaccuu

SEQ ID NO: 2397803 - RNA, 19 nt, Artificial Sequence
  Description of Artificial Sequence: Synthetic oligonucleotide
cacugagggacggcgguuc

SEQ ID NO: 2397804 - RNA, 19 nt, Artificial Sequence
  Description of Artificial Sequence: Synthetic oligonucleotide
caucguccgcguccgccgc

SEQ ID NO: 2397805 - RNA, 19 nt, Artificial Sequence
  Description of Artificial Sequence: Synthetic oligonucleotide
ugucgucuugcuggcgggu

SEQ ID NO: 2397806 - RNA, 19 nt, Artificial Sequence
  Description of Artificial Sequence: Synthetic oligonucleotide
agguaccgcaggaggaugu

SEQ ID NO: 2397807 - RNA, 19 nt, Artificial Sequence
  Description of Artificial Sequence: Synthetic oligonucleotide
gguggaugcggagcacggg

SEQ ID NO: 2397808 - RNA, 19 nt, Artificial Sequence
  Description of Artificial Sequence: Synthetic oligonucleotide
cugacggguacucucgggu

SEQ ID NO: 2397809 - RNA, 19 nt, Artificial Sequence
  Description of Artificial Sequence: Synthetic oligonucleotide
ugcgcggggccuagguguc

SEQ ID NO: 2397810 - RNA, 19 nt, Artificial Sequence
  Description of Artificial Sequence: Synthetic oligonucleotide
ggggccuagguguccucgg

SEQ ID NO: 2397811 - RNA, 19 nt, Artificial Sequence
  Description of Artificial Sequence: Synthetic oligonucleotide
gucgucuugcuggcgggug

SEQ ID NO: 2397812 - RNA, 19 nt, Artificial Sequence
  Description of Artificial Sequence: Synthetic oligonucleotide
cucacggcugggccugaug

SEQ ID NO: 2397813 - RNA, 19 nt, Artificial Sequence
  Description of Artificial Sequence: Synthetic oligonucleotide
gaagggccggcucucuccu

SEQ ID NO: 2397814 - RNA, 19 nt, Artificial Sequence
  Description of Artificial Sequence: Synthetic oligonucleotide
cucgggcaugucagggcug

SEQ ID NO: 2397815 - RNA, 19 nt, Artificial Sequence
  Description of Artificial Sequence: Synthetic oligonucleotide
acccuggugucgucuugcu

SEQ ID NO: 2397816 - RNA, 19 nt, Artificial Sequence
  Description of Artificial Sequence: Synthetic oligonucleotide
cacggcugggccugauguc

SEQ ID NO: 2397817 - RNA, 19 nt, Artificial Sequence
  Description of Artificial Sequence: Synthetic oligonucleotide
gcaagccuuucagaaaguc

SEQ ID NO: 2397818 - RNA, 19 nt, Artificial Sequence
  Description of Artificial Sequence: Synthetic oligonucleotide
gggacggcgguucgaggcc

SEQ ID NO: 2397819 - RNA, 19 nt, Artificial Sequence
  Description of Artificial Sequence: Synthetic oligonucleotide
cagguaccgcaggaggaug

SEQ ID NO: 2397820 - RNA, 19 nt, Artificial Sequence
  Description of Artificial Sequence: Synthetic oligonucleotide
gccuagguguccucgggca

SEQ ID NO: 2397821 - RNA, 19 nt, Artificial Sequence
  Description of Artificial Sequence: Synthetic oligonucleotide
gugcgcggggccuaggugu

SEQ ID NO: 2397822 - RNA, 19 nt, Artificial Sequence
  Description of Artificial Sequence: Synthetic oligonucleotide
ggcgugggcucagagugag

SEQ ID NO: 2397823 - RNA, 19 nt, Artificial Sequence
  Description of Artificial Sequence: Synthetic oligonucleotide
acagacgcgggcaccgcgu

SEQ ID NO: 2397824 - RNA, 19 nt, Artificial Sequence
  Description of Artificial Sequence: Synthetic oligonucleotide
gggcuaguccaugauaaaa

SEQ ID NO: 2397825 - RNA, 19 nt, Artificial Sequence
  Description of Artificial Sequence: Synthetic oligonucleotide
aaaggccgcucgguguguu

SEQ ID NO: 2397826 - RNA, 19 nt, Artificial Sequence
  Description of Artificial Sequence: Synthetic oligonucleotide
gaggccuugcacacggagu

SEQ ID NO: 2397827 - RNA, 19 nt, Artificial Sequence
  Description of Artificial Sequence: Synthetic oligonucleotide
ucgaggccuugcacacgga

SEQ ID NO: 2397828 - RNA, 19 nt, Artificial Sequence
  Description of Artificial Sequence: Synthetic oligonucleotide
ggguccuaugagguuggag

SEQ ID NO: 2397829 - RNA, 19 nt, Artificial Sequence
  Description of Artificial Sequence: Synthetic oligonucleotide
caccucacggcugggccug

SEQ ID NO: 2397830 - RNA, 19 nt, Artificial Sequence
  Description of Artificial Sequence: Synthetic oligonucleotide
cacacgcgagccggguggg

SEQ ID NO: 2397831 - RNA, 19 nt, Artificial Sequence
  Description of Artificial Sequence: Synthetic oligonucleotide
agucugccaucguccgcgu

SEQ ID NO: 2397832 - RNA, 19 nt, Artificial Sequence
  Description of Artificial Sequence: Synthetic oligonucleotide
gagcacgggcuaguccaug

SEQ ID NO: 2397833 - RNA, 19 nt, Artificial Sequence
  Description of Artificial Sequence: Synthetic oligonucleotide
acgcgggcaccgcgugcgc

SEQ ID NO: 2397834 - RNA, 19 nt, Artificial Sequence
  Description of Artificial Sequence: Synthetic oligonucleotide
ggcuaguccaugauaaaau

SEQ ID NO: 2397835 - RNA, 19 nt, Artificial Sequence
  Description of Artificial Sequence: Synthetic oligonucleotide
cuugcgggguggcgcugag

SEQ ID NO: 2397836 - RNA, 19 nt, Artificial Sequence
  Description of Artificial Sequence: Synthetic oligonucleotide
cgggucggcagguacacug

SEQ ID NO: 2397837 - RNA, 19 nt, Artificial Sequence
  Description of Artificial Sequence: Synthetic oligonucleotide
uccuuuuauugggguggau

SEQ ID NO: 2397838 - RNA, 19 nt, Artificial Sequence
  Description of Artificial Sequence: Synthetic oligonucleotide
cagacgcgggcaccgcgug

SEQ ID NO: 2397839 - RNA, 19 nt, Artificial Sequence
  Description of Artificial Sequence: Synthetic oligonucleotide
gguggcgcugagcucucac

SEQ ID NO: 2397840 - RNA, 19 nt, Artificial Sequence
  Description of Artificial Sequence: Synthetic oligonucleotide
cacgggcuaguccaugaua

SEQ ID NO: 2397841 - RNA, 19 nt, Artificial Sequence
  Description of Artificial Sequence: Synthetic oligonucleotide
cccuuuaaccaaugcuuga

SEQ ID NO: 2397842 - RNA, 19 nt, Artificial Sequence
  Description of Artificial Sequence: Synthetic oligonucleotide
ggcgguucgaggccuugca

SEQ ID NO: 2397843 - RNA, 19 nt, Artificial Sequence
  Description of Artificial Sequence: Synthetic oligonucleotide
ccagccggccugugggugg

SEQ ID NO: 2397844 - RNA, 19 nt, Artificial Sequence
  Description of Artificial Sequence: Synthetic oligonucleotide
guagacgggcaagccuuuc

SEQ ID NO: 2397845 - RNA, 19 nt, Artificial Sequence
  Description of Artificial Sequence: Synthetic oligonucleotide
gcgggcaccgcgugcgcgg

SEQ ID NO: 2397846 - RNA, 19 nt, Artificial Sequence
  Description of Artificial Sequence: Synthetic oligonucleotide
gccgggugggagcggacag

SEQ ID NO: 2397847 - RNA, 19 nt, Artificial Sequence
  Description of Artificial Sequence: Synthetic oligonucleotide
cggaagaccggggcaaucc

SEQ ID NO: 2397848 - RNA, 19 nt, Artificial Sequence
  Description of Artificial Sequence: Synthetic oligonucleotide
cggacagagcagacagacg

SEQ ID NO: 2397849 - RNA, 19 nt, Artificial Sequence
  Description of Artificial Sequence: Synthetic oligonucleotide
ccaccuugcgggguggcgc

SEQ ID NO: 2397850 - RNA, 19 nt, Artificial Sequence
  Description of Artificial Sequence: Synthetic oligonucleotide
gcggagcacgggcuagucc

SEQ ID NO: 2397851 - RNA, 19 nt, Artificial Sequence
  Description of Artificial Sequence: Synthetic oligonucleotide
agccgggugggagcggaca

SEQ ID NO: 2397852 - RNA, 19 nt, Artificial Sequence
  Description of Artificial Sequence: Synthetic oligonucleotide
agcggacagagcagacaga

SEQ ID NO: 2397853 - RNA, 19 nt, Artificial Sequence
  Description of Artificial Sequence: Synthetic oligonucleotide
gccaucguccgcguccgcc

SEQ ID NO: 2397854 - RNA, 19 nt, Artificial Sequence
  Description of Artificial Sequence: Synthetic oligonucleotide
ggccgcucgguguguuggg

SEQ ID NO: 2397855 - RNA, 19 nt, Artificial Sequence
  Description of Artificial Sequence: Synthetic oligonucleotide
cgaggccuugcacacggag

SEQ ID NO: 2397856 - RNA, 19 nt, Artificial Sequence
  Description of Artificial Sequence: Synthetic oligonucleotide
cacaggugugaccccggaa

SEQ ID NO: 2397857 - RNA, 19 nt, Artificial Sequence
  Description of Artificial Sequence: Synthetic oligonucleotide
gggcaugucagggcuguca

SEQ ID NO: 2397858 - RNA, 19 nt, Artificial Sequence
  Description of Artificial Sequence: Synthetic oligonucleotide
gcgguucgaggccuugcac

SEQ ID NO: 2397859 - RNA, 19 nt, Artificial Sequence
  Description of Artificial Sequence: Synthetic oligonucleotide
uggguccuaugagguugga

SEQ ID NO: 2397860 - RNA, 19 nt, Artificial Sequence
  Description of Artificial Sequence: Synthetic oligonucleotide
gaagagcgaaaaggccgcu

SEQ ID NO: 2397861 - RNA, 19 nt, Artificial Sequence
  Description of Artificial Sequence: Synthetic oligonucleotide
ggcugcgcuuacacacgcg

SEQ ID NO: 2397862 - RNA, 19 nt, Artificial Sequence
  Description of Artificial Sequence: Synthetic oligonucleotide
cagccggccuguggguggg

SEQ ID NO: 2397863 - RNA, 19 nt, Artificial Sequence
  Description of Artificial Sequence: Synthetic oligonucleotide
ccgcucgguguguugggag

SEQ ID NO: 2397864 - RNA, 19 nt, Artificial Sequence
  Description of Artificial Sequence: Synthetic oligonucleotide
gcucgguguguugggagac

SEQ ID NO: 2397865 - RNA, 19 nt, Artificial Sequence
  Description of Artificial Sequence: Synthetic oligonucleotide
gggcugucaguccgggcca

SEQ ID NO: 2397866 - RNA, 19 nt, Artificial Sequence
  Description of Artificial Sequence: Synthetic oligonucleotide
ggaguaggaaagauccuuu

SEQ ID NO: 2397867 - RNA, 19 nt, Artificial Sequence
  Description of Artificial Sequence: Synthetic oligonucleotide
ggggcaauccagccggccu

SEQ ID NO: 2397868 - RNA, 19 nt, Artificial Sequence
  Description of Artificial Sequence: Synthetic oligonucleotide
ggaguccgaguggaaccug

SEQ ID NO: 2397869 - RNA, 19 nt, Artificial Sequence
  Description of Artificial Sequence: Synthetic oligonucleotide
cgguucgaggccuugcaca

SEQ ID NO: 2397870 - RNA, 19 nt, Artificial Sequence
  Description of Artificial Sequence: Synthetic oligonucleotide
ucgggucggcagguacacu

SEQ ID NO: 2397871 - RNA, 19 nt, Artificial Sequence
  Description of Artificial Sequence: Synthetic oligonucleotide
gccaccuugcgggguggcg

SEQ ID NO: 2397872 - RNA, 19 nt, Artificial Sequence
  Description of Artificial Sequence: Synthetic oligonucleotide
cgcuuacacacgcgagccg

SEQ ID NO: 2397873 - RNA, 19 nt, Artificial Sequence
  Description of Artificial Sequence: Synthetic oligonucleotide
ggcaccgcgugcgcggggc

SEQ ID NO: 2397874 - RNA, 19 nt, Artificial Sequence
  Description of Artificial Sequence: Synthetic oligonucleotide
ggaugcggagcacgggcua

SEQ ID NO: 2397875 - RNA, 19 nt, Artificial Sequence
  Description of Artificial Sequence: Synthetic oligonucleotide
acggcgguucgaggccuug

SEQ ID NO: 2397876 - RNA, 19 nt, Artificial Sequence
  Description of Artificial Sequence: Synthetic oligonucleotide
gggccugaugucccuuuaa

SEQ ID NO: 2397877 - RNA, 19 nt, Artificial Sequence
  Description of Artificial Sequence: Synthetic oligonucleotide
cugagggacggcgguucga

SEQ ID NO: 2397878 - RNA, 19 nt, Artificial Sequence
  Description of Artificial Sequence: Synthetic oligonucleotide
gcacaggugugaccccgga

SEQ ID NO: 2397879 - RNA, 19 nt, Artificial Sequence
  Description of Artificial Sequence: Synthetic oligonucleotide
ggggacaccacugcgcuuu

SEQ ID NO: 2397880 - RNA, 19 nt, Artificial Sequence
  Description of Artificial Sequence: Synthetic oligonucleotide
gggucggcagguacacuga

SEQ ID NO: 2397881 - RNA, 19 nt, Artificial Sequence
  Description of Artificial Sequence: Synthetic oligonucleotide
ccggccugugggugggaag

SEQ ID NO: 2397882 - RNA, 19 nt, Artificial Sequence
  Description of Artificial Sequence: Synthetic oligonucleotide
caccuugcgggguggcgcu

SEQ ID NO: 2397883 - RNA, 19 nt, Artificial Sequence
  Description of Artificial Sequence: Synthetic oligonucleotide
gggagcggacagagcagac

SEQ ID NO: 2397884 - RNA, 19 nt, Artificial Sequence
  Description of Artificial Sequence: Synthetic oligonucleotide
ccaacaccucacggcuggg

SEQ ID NO: 2397885 - RNA, 19 nt, Artificial Sequence
  Description of Artificial Sequence: Synthetic oligonucleotide
accuugcgggguggcgcug

SEQ ID NO: 2397886 - RNA, 19 nt, Artificial Sequence
  Description of Artificial Sequence: Synthetic oligonucleotide
acacggaguccgaguggaa

SEQ ID NO: 2397887 - RNA, 19 nt, Artificial Sequence
  Description of Artificial Sequence: Synthetic oligonucleotide
acacgcgagccggguggga

SEQ ID NO: 2397888 - RNA, 19 nt, Artificial Sequence
  Description of Artificial Sequence: Synthetic oligonucleotide
cgguguguugggagaccag

SEQ ID NO: 2397889 - RNA, 19 nt, Artificial Sequence
  Description of Artificial Sequence: Synthetic oligonucleotide
gcugucaguccgggccacc

SEQ ID NO: 2397890 - RNA, 19 nt, Artificial Sequence
  Description of Artificial Sequence: Synthetic oligonucleotide
ggguacucucgggucggca

SEQ ID NO: 2397891 - RNA, 19 nt, Artificial Sequence
  Description of Artificial Sequence: Synthetic oligonucleotide
cgucuugcuggcggguggc

SEQ ID NO: 2397892 - RNA, 19 nt, Artificial Sequence
  Description of Artificial Sequence: Synthetic oligonucleotide
cggggccuagguguccucg

SEQ ID NO: 2397893 - RNA, 19 nt, Artificial Sequence
  Description of Artificial Sequence: Synthetic oligonucleotide
ccuugcacacggaguccga

SEQ ID NO: 2397894 - RNA, 19 nt, Artificial Sequence
  Description of Artificial Sequence: Synthetic oligonucleotide
cgcgagccgggugggagcg

SEQ ID NO: 2397895 - RNA, 19 nt, Artificial Sequence
  Description of Artificial Sequence: Synthetic oligonucleotide
acucucgggucggcaggua

SEQ ID NO: 2397896 - RNA, 19 nt, Artificial Sequence
  Description of Artificial Sequence: Synthetic oligonucleotide
cgugcgcggggccuaggug

SEQ ID NO: 2397897 - RNA, 19 nt, Artificial Sequence
  Description of Artificial Sequence: Synthetic oligonucleotide
guaccgcaggaggauguuu

SEQ ID NO: 2397898 - RNA, 19 nt, Artificial Sequence
  Description of Artificial Sequence: Synthetic oligonucleotide
ccuggcgugggcucagagu

SEQ ID NO: 2397899 - RNA, 19 nt, Artificial Sequence
  Description of Artificial Sequence: Synthetic oligonucleotide
gggcgggcuggguguagga

SEQ ID NO: 2397900 - RNA, 19 nt, Artificial Sequence
  Description of Artificial Sequence: Synthetic oligonucleotide
gcgugggcucagagugagg

SEQ ID NO: 2397901 - RNA, 19 nt, Artificial Sequence
  Description of Artificial Sequence: Synthetic oligonucleotide
gccgccgccgccgccgcag

SEQ ID NO: 2397902 - RNA, 19 nt, Artificial Sequence
  Description of Artificial Sequence: Synthetic oligonucleotide
accgcgugcgcggggccua

SEQ ID NO: 2397903 - RNA, 19 nt, Artificial Sequence
  Description of Artificial Sequence: Synthetic oligonucleotide
ggcggguggccgggugggg

SEQ ID NO: 2397904 - RNA, 19 nt, Artificial Sequence
  Description of Artificial Sequence: Synthetic oligonucleotide
gcaccgcgugcgcggggcc

SEQ ID NO: 2397905 - RNA, 19 nt, Artificial Sequence
  Description of Artificial Sequence: Synthetic oligonucleotide
ggcaauccagccggccugu

SEQ ID NO: 2397906 - RNA, 19 nt, Artificial Sequence
  Description of Artificial Sequence: Synthetic oligonucleotide
ccggggcaauccagccggc

SEQ ID NO: 2397907 - RNA, 19 nt, Artificial Sequence
  Description of Artificial Sequence: Synthetic oligonucleotide
gccgcucgguguguuggga

SEQ ID NO: 2397908 - RNA, 19 nt, Artificial Sequence
  Description of Artificial Sequence: Synthetic oligonucleotide
ggccaccuugcgggguggc

SEQ ID NO: 2397909 - RNA, 19 nt, Artificial Sequence
  Description of Artificial Sequence: Synthetic oligonucleotide
ccggaagaccggggcaauc

SEQ ID NO: 2397910 - RNA, 19 nt, Artificial Sequence
  Description of Artificial Sequence: Synthetic oligonucleotide
gcacgggcuaguccaugau

SEQ ID NO: 2397911 - RNA, 19 nt, Artificial Sequence
  Description of Artificial Sequence: Synthetic oligonucleotide
cggggcaauccagccggcc

SEQ ID NO: 2397912 - RNA, 19 nt, Artificial Sequence
  Description of Artificial Sequence: Synthetic oligonucleotide
gggacaccacugcgcuuua

SEQ ID NO: 2397913 - RNA, 19 nt, Artificial Sequence
  Description of Artificial Sequence: Synthetic oligonucleotide
cgggcuaguccaugauaaa

SEQ ID NO: 2397914 - RNA, 19 nt, Artificial Sequence
  Description of Artificial Sequence: Synthetic oligonucleotide
ggacggcgguucgaggccu

SEQ ID NO: 2397915 - RNA, 19 nt, Artificial Sequence
  Description of Artificial Sequence: Synthetic oligonucleotide
ccuagguguccucgggcau

SEQ ID NO: 2397916 - RNA, 19 nt, Artificial Sequence
  Description of Artificial Sequence: Synthetic oligonucleotide
gcgagccgggugggagcgg

SEQ ID NO: 2397917 - RNA, 19 nt, Artificial Sequence
  Description of Artificial Sequence: Synthetic oligonucleotide
ccuugcgggguggcgcuga

SEQ ID NO: 2397918 - RNA, 19 nt, Artificial Sequence
  Description of Artificial Sequence: Synthetic oligonucleotide
cggcgguucgaggccuugc

SEQ ID NO: 2397919 - RNA, 19 nt, Artificial Sequence
  Description of Artificial Sequence: Synthetic oligonucleotide
agccggccuguggguggga

SEQ ID NO: 2397920 - RNA, 19 nt, Artificial Sequence
  Description of Artificial Sequence: Synthetic oligonucleotide
ggagcacgggcuaguccau

SEQ ID NO: 2397921 - RNA, 19 nt, Artificial Sequence
  Description of Artificial Sequence: Synthetic oligonucleotide
gcgcggggccuaggugucc

SEQ ID NO: 2397922 - RNA, 19 nt, Artificial Sequence
  Description of Artificial Sequence: Synthetic oligonucleotide
gacggcgguucgaggccuu

SEQ ID NO: 2397923 - RNA, 19 nt, Artificial Sequence
  Description of Artificial Sequence: Synthetic oligonucleotide
ccgggugggagcggacaga

SEQ ID NO: 2397924 - RNA, 19 nt, Artificial Sequence
  Description of Artificial Sequence: Synthetic oligonucleotide
gccggccugugggugggaa

SEQ ID NO: 2397925 - RNA, 19 nt, Artificial Sequence
  Description of Artificial Sequence: Synthetic oligonucleotide
caccgcgugcgcggggccu

SEQ ID NO: 2397926 - RNA, 19 nt, Artificial Sequence
  Description of Artificial Sequence: Synthetic oligonucleotide
cgagccgggugggagcgga

SEQ ID NO: 2397927 - RNA, 19 nt, Artificial Sequence
  Description of Artificial Sequence: Synthetic oligonucleotide
cggguacucucgggucggc

SEQ ID NO: 2397928 - RNA, 19 nt, Artificial Sequence
  Description of Artificial Sequence: Synthetic oligonucleotide
cggaguccgaguggaaccu

SEQ ID NO: 2397929 - RNA, 19 nt, Artificial Sequence
  Description of Artificial Sequence: Synthetic oligonucleotide
ccagaagggccggcucucu

SEQ ID NO: 2397930 - RNA, 19 nt, Artificial Sequence
  Description of Artificial Sequence: Synthetic oligonucleotide
ccaccugcucuuggucucu

SEQ ID NO: 2397931 - RNA, 19 nt, Artificial Sequence
  Description of Artificial Sequence: Synthetic oligonucleotide
cguccgccgccgccccggc

SEQ ID NO: 2397932 - RNA, 19 nt, Artificial Sequence
  Description of Artificial Sequence: Synthetic oligonucleotide
cgggcaugucagggcuguc

SEQ ID NO: 2397933 - RNA, 19 nt, Artificial Sequence
  Description of Artificial Sequence: Synthetic oligonucleotide
ggccgccgccgccgccgca

SEQ ID NO: 2397934 - RNA, 19 nt, Artificial Sequence
  Description of Artificial Sequence: Synthetic oligonucleotide
cggccgccgccgccgccgc

SEQ ID NO: 2397935 - RNA, 19 nt, Artificial Sequence
  Description of Artificial Sequence: Synthetic oligonucleotide
cgcggggccuagguguccu

SEQ ID NO: 2397936 - RNA, 19 nt, Artificial Sequence
  Description of Artificial Sequence: Synthetic oligonucleotide
ccucacggcugggccugau

SEQ ID NO: 2397937 - RNA, 19 nt, Artificial Sequence
  Description of Artificial Sequence: Synthetic oligonucleotide
auuauauucaccucagggc

SEQ ID NO: 2397938 - RNA, 19 nt, Artificial Sequence
  Description of Artificial Sequence: Synthetic oligonucleotide
aaaauauuccugaacaacc

SEQ ID NO: 2397939 - RNA, 19 nt, Artificial Sequence
  Description of Artificial Sequence: Synthetic oligonucleotide
gauuauauucaccucaggg

SEQ ID NO: 2397940 - RNA, 19 nt, Artificial Sequence
  Description of Artificial Sequence: Synthetic oligonucleotide
ugguaaguaaaccugaaag

SEQ ID NO: 2397941 - RNA, 19 nt, Artificial Sequence
  Description of Artificial Sequence: Synthetic oligonucleotide
uuaagauacuccaaaauaa

SEQ ID NO: 2397942 - RNA, 19 nt, Artificial Sequence
  Description of Artificial Sequence: Synthetic oligonucleotide
aacauuuccuccguuauac

SEQ ID NO: 2397943 - RNA, 19 nt, Artificial Sequence
  Description of Artificial Sequence: Synthetic oligonucleotide
acaaccaucacauacaaau

SEQ ID NO: 2397944 - RNA, 19 nt, Artificial Sequence
  Description of Artificial Sequence: Synthetic oligonucleotide
aaauggaagaaaaucucgc

SEQ ID NO: 2397945 - RNA, 19 nt, Artificial Sequence
  Description of Artificial Sequence: Synthetic oligonucleotide
aaugucuuugacaaguuuc

SEQ ID NO: 2397946 - RNA, 19 nt, Artificial Sequence
  Description of Artificial Sequence: Synthetic oligonucleotide
ucuaagacuggcuagagaa

SEQ ID NO: 2397947 - RNA, 19 nt, Artificial Sequence
  Description of Artificial Sequence: Synthetic oligonucleotide
ugaaaguaaauucuuucug

SEQ ID NO: 2397948 - RNA, 19 nt, Artificial Sequence
  Description of Artificial Sequence: Synthetic oligonucleotide
uuucucgcaaauaagaguc

SEQ ID NO: 2397949 - RNA, 19 nt, Artificial Sequence
  Description of Artificial Sequence: Synthetic oligonucleotide
uccuccguuauacaaaggg

SEQ ID NO: 2397950 - RNA, 19 nt, Artificial Sequence
  Description of Artificial Sequence: Synthetic oligonucleotide
ucacaauaaggacauauca

SEQ ID NO: 2397951 - RNA, 19 nt, Artificial Sequence
  Description of Artificial Sequence: Synthetic oligonucleotide
ucgauaaugucuuugacaa

SEQ ID NO: 2397952 - RNA, 19 nt, Artificial Sequence
  Description of Artificial Sequence: Synthetic oligonucleotide
acaauaaggacauaucacu

SEQ ID NO: 2397953 - RNA, 19 nt, Artificial Sequence
  Description of Artificial Sequence: Synthetic oligonucleotide
ucagcaugcaucuuuagcu

SEQ ID NO: 2397954 - RNA, 19 nt, Artificial Sequence
  Description of Artificial Sequence: Synthetic oligonucleotide
caaauggaagaaaaucucg

SEQ ID NO: 2397955 - RNA, 19 nt, Artificial Sequence
  Description of Artificial Sequence: Synthetic oligonucleotide
ucuuugacaaguuucugug

SEQ ID NO: 2397956 - RNA, 19 nt, Artificial Sequence
  Description of Artificial Sequence: Synthetic oligonucleotide
uguucaaggcaaaauauuc

SEQ ID NO: 2397957 - RNA, 19 nt, Artificial Sequence
  Description of Artificial Sequence: Synthetic oligonucleotide
uccguuauacaaagggugg

SEQ ID NO: 2397958 - RNA, 19 nt, Artificial Sequence
  Description of Artificial Sequence: Synthetic oligonucleotide
aucagagccaccuuugcgg

SEQ ID NO: 2397959 - RNA, 19 nt, Artificial Sequence
  Description of Artificial Sequence: Synthetic oligonucleotide
gaagggaugugacacagcc

SEQ ID NO: 2397960 - RNA, 19 nt, Artificial Sequence
  Description of Artificial Sequence: Synthetic oligonucleotide
aagauuuguguucaucugu

SEQ ID NO: 2397961 - RNA, 19 nt, Artificial Sequence
  Description of Artificial Sequence: Synthetic oligonucleotide
aaguucuucucacaauaag

SEQ ID NO: 2397962 - RNA, 19 nt, Artificial Sequence
  Description of Artificial Sequence: Synthetic oligonucleotide
ucaucguuaagauacucca

SEQ ID NO: 2397963 - RNA, 19 nt, Artificial Sequence
  Description of Artificial Sequence: Synthetic oligonucleotide
uugauuauauucaccucag

SEQ ID NO: 2397964 - RNA, 19 nt, Artificial Sequence
  Description of Artificial Sequence: Synthetic oligonucleotide
acgaguaagauuuguguuc

SEQ ID NO: 2397965 - RNA, 19 nt, Artificial Sequence
  Description of Artificial Sequence: Synthetic oligonucleotide
aaaauaacauuuccuccgu

SEQ ID NO: 2397966 - RNA, 19 nt, Artificial Sequence
  Description of Artificial Sequence: Synthetic oligonucleotide
aauaacauuuccuccguua

SEQ ID NO: 2397967 - RNA, 19 nt, Artificial Sequence
  Description of Artificial Sequence: Synthetic oligonucleotide
caaagugugguccaagggc

SEQ ID NO: 2397968 - RNA, 19 nt, Artificial Sequence
  Description of Artificial Sequence: Synthetic oligonucleotide
ugucuuaggcaaaaguucu

SEQ ID NO: 2397969 - RNA, 19 nt, Artificial Sequence
  Description of Artificial Sequence: Synthetic oligonucleotide
caugaucugacugaugacg

SEQ ID NO: 2397970 - RNA, 19 nt, Artificial Sequence
  Description of Artificial Sequence: Synthetic oligonucleotide
ugacuuaucgccgucagca

SEQ ID NO: 2397971 - RNA, 19 nt, Artificial Sequence
  Description of Artificial Sequence: Synthetic oligonucleotide
cacaauaaggacauaucac

SEQ ID NO: 2397972 - RNA, 19 nt, Artificial Sequence
  Description of Artificial Sequence: Synthetic oligonucleotide
cuugauuauauucaccuca

SEQ ID NO: 2397973 - RNA, 19 nt, Artificial Sequence
  Description of Artificial Sequence: Synthetic oligonucleotide
uuuccuccguuauacaaag

SEQ ID NO: 2397974 - RNA, 19 nt, Artificial Sequence
  Description of Artificial Sequence: Synthetic oligonucleotide
uucgccgucaacuuguugu

SEQ ID NO: 2397975 - RNA, 19 nt, Artificial Sequence
  Description of Artificial Sequence: Synthetic oligonucleotide
uuccugaacaaccaucaca

SEQ ID NO: 2397976 - RNA, 19 nt, Artificial Sequence
  Description of Artificial Sequence: Synthetic oligonucleotide
acaaauggaagaaaaucuc

SEQ ID NO: 2397977 - RNA, 19 nt, Artificial Sequence
  Description of Artificial Sequence: Synthetic oligonucleotide
augaacacgaguaagauuu

SEQ ID NO: 2397978 - RNA, 19 nt, Artificial Sequence
  Description of Artificial Sequence: Synthetic oligonucleotide
uuauuuacugccccuccug

SEQ ID NO: 2397979 - RNA, 19 nt, Artificial Sequence
  Description of Artificial Sequence: Synthetic oligonucleotide
ucgcaaauaagagucaaca

SEQ ID NO: 2397980 - RNA, 19 nt, Artificial Sequence
  Description of Artificial Sequence: Synthetic oligonucleotide
caaaauauuccugaacaac

SEQ ID NO: 2397981 - RNA, 19 nt, Artificial Sequence
  Description of Artificial Sequence: Synthetic oligonucleotide
uccaaagugugguccaagg

SEQ ID NO: 2397982 - RNA, 19 nt, Artificial Sequence
  Description of Artificial Sequence: Synthetic oligonucleotide
aaaaucucgcugccggcag

SEQ ID NO: 2397983 - RNA, 19 nt, Artificial Sequence
  Description of Artificial Sequence: Synthetic oligonucleotide
cuuaucgccgucagcaugc

SEQ ID NO: 2397984 - RNA, 19 nt, Artificial Sequence
  Description of Artificial Sequence: Synthetic oligonucleotide
ugauuauauucaccucagg

SEQ ID NO: 2397985 - RNA, 19 nt, Artificial Sequence
  Description of Artificial Sequence: Synthetic oligonucleotide
uccacgaccuuuccaaugc

SEQ ID NO: 2397986 - RNA, 19 nt, Artificial Sequence
  Description of Artificial Sequence: Synthetic oligonucleotide
cuccguuauacaaagggug

SEQ ID NO: 2397987 - RNA, 19 nt, Artificial Sequence
  Description of Artificial Sequence: Synthetic oligonucleotide
uguguggcagccauucgag

SEQ ID NO: 2397988 - RNA, 19 nt, Artificial Sequence
  Description of Artificial Sequence: Synthetic oligonucleotide
uuuauuuacugccccuccu

SEQ ID NO: 2397989 - RNA, 19 nt, Artificial Sequence
  Description of Artificial Sequence: Synthetic oligonucleotide
aagauacuccaaaauaaca

SEQ ID NO: 2397990 - RNA, 19 nt, Artificial Sequence
  Description of Artificial Sequence: Synthetic oligonucleotide
uccaaugcuccaucggagg

SEQ ID NO: 2397991 - RNA, 19 nt, Artificial Sequence
  Description of Artificial Sequence: Synthetic oligonucleotide
acacgaguaagauuugugu

SEQ ID NO: 2397992 - RNA, 19 nt, Artificial Sequence
  Description of Artificial Sequence: Synthetic oligonucleotide
agucgauaaugucuuugac

SEQ ID NO: 2397993 - RNA, 19 nt, Artificial Sequence
  Description of Artificial Sequence: Synthetic oligonucleotide
gauaaugucuuugacaagu

SEQ ID NO: 2397994 - RNA, 19 nt, Artificial Sequence
  Description of Artificial Sequence: Synthetic oligonucleotide
uuugcggcugucccgcugg

SEQ ID NO: 2397995 - RNA, 19 nt, Artificial Sequence
  Description of Artificial Sequence: Synthetic oligonucleotide
aucguuaagauacuccaaa

SEQ ID NO: 2397996 - RNA, 19 nt, Artificial Sequence
  Description of Artificial Sequence: Synthetic oligonucleotide
auacaaagggugguccucc

SEQ ID NO: 2397997 - RNA, 19 nt, Artificial Sequence
  Description of Artificial Sequence: Synthetic oligonucleotide
ugucuuggagucgauaaug

SEQ ID NO: 2397998 - RNA, 19 nt, Artificial Sequence
  Description of Artificial Sequence: Synthetic oligonucleotide
aaguuucuguguggcagcc

SEQ ID NO: 2397999 - RNA, 19 nt, Artificial Sequence
  Description of Artificial Sequence: Synthetic oligonucleotide
uuccaaugcuccaucggag

SEQ ID NO: 2398000 - RNA, 19 nt, Artificial Sequence
  Description of Artificial Sequence: Synthetic oligonucleotide
uccuccuuauugauccacg

SEQ ID NO: 2398001 - RNA, 19 nt, Artificial Sequence
  Description of Artificial Sequence: Synthetic oligonucleotide
ucugucuuuggucucuccu

SEQ ID NO: 2398002 - RNA, 19 nt, Artificial Sequence
  Description of Artificial Sequence: Synthetic oligonucleotide
auaacauuuccuccguuau

SEQ ID NO: 2398003 - RNA, 19 nt, Artificial Sequence
  Description of Artificial Sequence: Synthetic oligonucleotide
uacuccaaaauaacauuuc

SEQ ID NO: 2398004 - RNA, 19 nt, Artificial Sequence
  Description of Artificial Sequence: Synthetic oligonucleotide
uugauccacgcuuccaaag

SEQ ID NO: 2398005 - RNA, 19 nt, Artificial Sequence
  Description of Artificial Sequence: Synthetic oligonucleotide
cucuacuucaggacagucc

SEQ ID NO: 2398006 - RNA, 19 nt, Artificial Sequence
  Description of Artificial Sequence: Synthetic oligonucleotide
cuuuauuuacugccccucc

SEQ ID NO: 2398007 - RNA, 19 nt, Artificial Sequence
  Description of Artificial Sequence: Synthetic oligonucleotide
ucucacaauaaggacauau

SEQ ID NO: 2398008 - RNA, 19 nt, Artificial Sequence
  Description of Artificial Sequence: Synthetic oligonucleotide
gucgauaaugucuuugaca

SEQ ID NO: 2398009 - RNA, 19 nt, Artificial Sequence
  Description of Artificial Sequence: Synthetic oligonucleotide
uuauacaaagggugguccu

SEQ ID NO: 2398010 - RNA, 19 nt, Artificial Sequence
  Description of Artificial Sequence: Synthetic oligonucleotide
acgaccuuuccaaugcucc

SEQ ID NO: 2398011 - RNA, 19 nt, Artificial Sequence
  Description of Artificial Sequence: Synthetic oligonucleotide
uuugguaaguaaaccugaa

SEQ ID NO: 2398012 - RNA, 19 nt, Artificial Sequence
  Description of Artificial Sequence: Synthetic oligonucleotide
caguccuugaaugaacacg

SEQ ID NO: 2398013 - RNA, 19 nt, Artificial Sequence
  Description of Artificial Sequence: Synthetic oligonucleotide
guucaaggcaaaauauucc

SEQ ID NO: 2398014 - RNA, 19 nt, Artificial Sequence
  Description of Artificial Sequence: Synthetic oligonucleotide
uucuucgccgucaacuugu

SEQ ID NO: 2398015 - RNA, 19 nt, Artificial Sequence
  Description of Artificial Sequence: Synthetic oligonucleotide
augacggugucuuaggcaa

SEQ ID NO: 2398016 - RNA, 19 nt, Artificial Sequence
  Description of Artificial Sequence: Synthetic oligonucleotide
gaagcugcgaaguccacga

SEQ ID NO: 2398017 - RNA, 19 nt, Artificial Sequence
  Description of Artificial Sequence: Synthetic oligonucleotide
agauacuccaaaauaacau

SEQ ID NO: 2398018 - RNA, 19 nt, Artificial Sequence
  Description of Artificial Sequence: Synthetic oligonucleotide
uauuuacugccccuccugu

SEQ ID NO: 2398019 - RNA, 19 nt, Artificial Sequence
  Description of Artificial Sequence: Synthetic oligonucleotide
agccauucgaggcuuuggg

SEQ ID NO: 2398020 - RNA, 19 nt, Artificial Sequence
  Description of Artificial Sequence: Synthetic oligonucleotide
aaugcuccaucggaggcag

SEQ ID NO: 2398021 - RNA, 19 nt, Artificial Sequence
  Description of Artificial Sequence: Synthetic oligonucleotide
aacacgaguaagauuugug

SEQ ID NO: 2398022 - RNA, 19 nt, Artificial Sequence
  Description of Artificial Sequence: Synthetic oligonucleotide
agauuuguguucaucuguc

SEQ ID NO: 2398023 - RNA, 19 nt, Artificial Sequence
  Description of Artificial Sequence: Synthetic oligonucleotide
cucacaauaaggacauauc

SEQ ID NO: 2398024 - RNA, 19 nt, Artificial Sequence
  Description of Artificial Sequence: Synthetic oligonucleotide
acaguccuugaaugaacac

SEQ ID NO: 2398025 - RNA, 19 nt, Artificial Sequence
  Description of Artificial Sequence: Synthetic oligonucleotide
ugaugacggugucuuaggc

SEQ ID NO: 2398026 - RNA, 19 nt, Artificial Sequence
  Description of Artificial Sequence: Synthetic oligonucleotide
acugaugacggugucuuag

SEQ ID NO: 2398027 - RNA, 19 nt, Artificial Sequence
  Description of Artificial Sequence: Synthetic oligonucleotide
guaaguaaaccugaaagua

SEQ ID NO: 2398028 - RNA, 19 nt, Artificial Sequence
  Description of Artificial Sequence: Synthetic oligonucleotide
ucuuuagcuucaucagagc

SEQ ID NO: 2398029 - RNA, 19 nt, Artificial Sequence
  Description of Artificial Sequence: Synthetic oligonucleotide
agaagaacauggcuuugcu

SEQ ID NO: 2398030 - RNA, 19 nt, Artificial Sequence
  Description of Artificial Sequence: Synthetic oligonucleotide
uugguaaguaaaccugaaa

SEQ ID NO: 2398031 - RNA, 19 nt, Artificial Sequence
  Description of Artificial Sequence: Synthetic oligonucleotide
agugacuuaucgccgucag

SEQ ID NO: 2398032 - RNA, 19 nt, Artificial Sequence
  Description of Artificial Sequence: Synthetic oligonucleotide
uccccuuugguaaguaaac

SEQ ID NO: 2398033 - RNA, 19 nt, Artificial Sequence
  Description of Artificial Sequence: Synthetic oligonucleotide
cuuauugauccacgcuucc

SEQ ID NO: 2398034 - RNA, 19 nt, Artificial Sequence
  Description of Artificial Sequence: Synthetic oligonucleotide
cuaagacuggcuagagaag

SEQ ID NO: 2398035 - RNA, 19 nt, Artificial Sequence
  Description of Artificial Sequence: Synthetic oligonucleotide
aguccuugaaugaacacga

SEQ ID NO: 2398036 - RNA, 19 nt, Artificial Sequence
  Description of Artificial Sequence: Synthetic oligonucleotide
gauccacgcuuccaaagug

SEQ ID NO: 2398037 - RNA, 19 nt, Artificial Sequence
  Description of Artificial Sequence: Synthetic oligonucleotide
uggcagugacuuaucgccg

SEQ ID NO: 2398038 - RNA, 19 nt, Artificial Sequence
  Description of Artificial Sequence: Synthetic oligonucleotide
gagucgauaaugucuuuga

SEQ ID NO: 2398039 - RNA, 19 nt, Artificial Sequence
  Description of Artificial Sequence: Synthetic oligonucleotide
uuugcuccccuuugguaag

SEQ ID NO: 2398040 - RNA, 19 nt, Artificial Sequence
  Description of Artificial Sequence: Synthetic oligonucleotide
uucacacccaugaucugac

SEQ ID NO: 2398041 - RNA, 19 nt, Artificial Sequence
  Description of Artificial Sequence: Synthetic oligonucleotide
augugacacagccucagcu

SEQ ID NO: 2398042 - RNA, 19 nt, Artificial Sequence
  Description of Artificial Sequence: Synthetic oligonucleotide
gaucugacugaugacggug

SEQ ID NO: 2398043 - RNA, 19 nt, Artificial Sequence
  Description of Artificial Sequence: Synthetic oligonucleotide
uaaggacauaucacugcca

SEQ ID NO: 2398044 - RNA, 19 nt, Artificial Sequence
  Description of Artificial Sequence: Synthetic oligonucleotide
agggcaaccaugagagucc

SEQ ID NO: 2398045 - RNA, 19 nt, Artificial Sequence
  Description of Artificial Sequence: Synthetic oligonucleotide
uauauucaccucagggcaa

SEQ ID NO: 2398046 - RNA, 19 nt, Artificial Sequence
  Description of Artificial Sequence: Synthetic oligonucleotide
gaugacggugucuuaggca

SEQ ID NO: 2398047 - RNA, 19 nt, Artificial Sequence
  Description of Artificial Sequence: Synthetic oligonucleotide
uucuaagacuggcuagaga

SEQ ID NO: 2398048 - RNA, 19 nt, Artificial Sequence
  Description of Artificial Sequence: Synthetic oligonucleotide
cauucgaggcuuugggagc

SEQ ID NO: 2398049 - RNA, 19 nt, Artificial Sequence
  Description of Artificial Sequence: Synthetic oligonucleotide
caucagagccaccuuugcg

SEQ ID NO: 2398050 - RNA, 19 nt, Artificial Sequence
  Description of Artificial Sequence: Synthetic oligonucleotide
aucgccgucagcaugcauc

SEQ ID NO: 2398051 - RNA, 19 nt, Artificial Sequence
  Description of Artificial Sequence: Synthetic oligonucleotide
acacccaugaucugacuga

SEQ ID NO: 2398052 - RNA, 19 nt, Artificial Sequence
  Description of Artificial Sequence: Synthetic oligonucleotide
ucguuaagauacuccaaaa

SEQ ID NO: 2398053 - RNA, 19 nt, Artificial Sequence
  Description of Artificial Sequence: Synthetic oligonucleotide
uuuugcacccuuccuuccu

SEQ ID NO: 2398054 - RNA, 19 nt, Artificial Sequence
  Description of Artificial Sequence: Synthetic oligonucleotide
cugaugacggugucuuagg

SEQ ID NO: 2398055 - RNA, 19 nt, Artificial Sequence
  Description of Artificial Sequence: Synthetic oligonucleotide
auauucaccucagggcaac

SEQ ID NO: 2398056 - RNA, 19 nt, Artificial Sequence
  Description of Artificial Sequence: Synthetic oligonucleotide
ucuucaucguuaagauacu

SEQ ID NO: 2398057 - RNA, 19 nt, Artificial Sequence
  Description of Artificial Sequence: Synthetic oligonucleotide
uuguguucaucugucuuug

SEQ ID NO: 2398058 - RNA, 19 nt, Artificial Sequence
  Description of Artificial Sequence: Synthetic oligonucleotide
ucuguguggcagccauucg

SEQ ID NO: 2398059 - RNA, 19 nt, Artificial Sequence
  Description of Artificial Sequence: Synthetic oligonucleotide
ugaacacgaguaagauuug

SEQ ID NO: 2398060 - RNA, 19 nt, Artificial Sequence
  Description of Artificial Sequence: Synthetic oligonucleotide
uguguucaucugucuuugg

SEQ ID NO: 2398061 - RNA, 19 nt, Artificial Sequence
  Description of Artificial Sequence: Synthetic oligonucleotide
gauacuccaaaauaacauu

SEQ ID NO: 2398062 - RNA, 19 nt, Artificial Sequence
  Description of Artificial Sequence: Synthetic oligonucleotide
uugcuucuguguucaaggc

SEQ ID NO: 2398063 - RNA, 19 nt, Artificial Sequence
  Description of Artificial Sequence: Synthetic oligonucleotide
auaucacugccaccagcuc

SEQ ID NO: 2398064 - RNA, 19 nt, Artificial Sequence
  Description of Artificial Sequence: Synthetic oligonucleotide
uucucgcaaauaagaguca

SEQ ID NO: 2398065 - RNA, 19 nt, Artificial Sequence
  Description of Artificial Sequence: Synthetic oligonucleotide
uuauugauccacgcuucca

SEQ ID NO: 2398066 - RNA, 19 nt, Artificial Sequence
  Description of Artificial Sequence: Synthetic oligonucleotide
accuuuccaaugcuccauc

SEQ ID NO: 2398067 - RNA, 19 nt, Artificial Sequence
  Description of Artificial Sequence: Synthetic oligonucleotide
ucuuggagucgauaauguc

SEQ ID NO: 2398068 - RNA, 19 nt, Artificial Sequence
  Description of Artificial Sequence: Synthetic oligonucleotide
aaacuguucuucaucguua

SEQ ID NO: 2398069 - RNA, 19 nt, Artificial Sequence
  Description of Artificial Sequence: Synthetic oligonucleotide
cacacccaugaucugacug

SEQ ID NO: 2398070 - RNA, 19 nt, Artificial Sequence
  Description of Artificial Sequence: Synthetic oligonucleotide
augucuuugacaaguuucu

SEQ ID NO: 2398071 - RNA, 19 nt, Artificial Sequence
  Description of Artificial Sequence: Synthetic oligonucleotide
uucuccugaagggauguga

SEQ ID NO: 2398072 - RNA, 19 nt, Artificial Sequence
  Description of Artificial Sequence: Synthetic oligonucleotide
ccuuugguaaguaaaccug

SEQ ID NO: 2398073 - RNA, 19 nt, Artificial Sequence
  Description of Artificial Sequence: Synthetic oligonucleotide
uucugucuguggcagugac

SEQ ID NO: 2398074 - RNA, 19 nt, Artificial Sequence
  Description of Artificial Sequence: Synthetic oligonucleotide
gaugugacacagccucagc

SEQ ID NO: 2398075 - RNA, 19 nt, Artificial Sequence
  Description of Artificial Sequence: Synthetic oligonucleotide
gacauaucacugccaccag

SEQ ID NO: 2398076 - RNA, 19 nt, Artificial Sequence
  Description of Artificial Sequence: Synthetic oligonucleotide
aagcugcgaaguccacgac

SEQ ID NO: 2398077 - RNA, 19 nt, Artificial Sequence
  Description of Artificial Sequence: Synthetic oligonucleotide
ggacauaucacugccacca

SEQ ID NO: 2398078 - RNA, 19 nt, Artificial Sequence
  Description of Artificial Sequence: Synthetic oligonucleotide
gguaaguaaaccugaaagu

SEQ ID NO: 2398079 - RNA, 19 nt, Artificial Sequence
  Description of Artificial Sequence: Synthetic oligonucleotide
ugaagggaugugacacagc

SEQ ID NO: 2398080 - RNA, 19 nt, Artificial Sequence
  Description of Artificial Sequence: Synthetic oligonucleotide
gaaaaucucgcugccggca

SEQ ID NO: 2398081 - RNA, 19 nt, Artificial Sequence
  Description of Artificial Sequence: Synthetic oligonucleotide
cucgcaaauaagagucaac

SEQ ID NO: 2398082 - RNA, 19 nt, Artificial Sequence
  Description of Artificial Sequence: Synthetic oligonucleotide
caucggaggcagaagaaca

SEQ ID NO: 2398083 - RNA, 19 nt, Artificial Sequence
  Description of Artificial Sequence: Synthetic oligonucleotide
ccauucgaggcuuugggag

SEQ ID NO: 2398084 - RNA, 19 nt, Artificial Sequence
  Description of Artificial Sequence: Synthetic oligonucleotide
uuuucacacccaugaucug

SEQ ID NO: 2398085 - RNA, 19 nt, Artificial Sequence
  Description of Artificial Sequence: Synthetic oligonucleotide
ugucuuugacaaguuucug

SEQ ID NO: 2398086 - RNA, 19 nt, Artificial Sequence
  Description of Artificial Sequence: Synthetic oligonucleotide
ucucgcaaauaagagucaa

SEQ ID NO: 2398087 - RNA, 19 nt, Artificial Sequence
  Description of Artificial Sequence: Synthetic oligonucleotide
caucuuuagcuucaucaga

SEQ ID NO: 2398088 - RNA, 19 nt, Artificial Sequence
  Description of Artificial Sequence: Synthetic oligonucleotide
ugacugaugacggugucuu

SEQ ID NO: 2398089 - RNA, 19 nt, Artificial Sequence
  Description of Artificial Sequence: Synthetic oligonucleotide
gcaaccaugagaguccuug

SEQ ID NO: 2398090 - RNA, 19 nt, Artificial Sequence
  Description of Artificial Sequence: Synthetic oligonucleotide
uuccuccguuauacaaagg

SEQ ID NO: 2398091 - RNA, 19 nt, Artificial Sequence
  Description of Artificial Sequence: Synthetic oligonucleotide
caaccaugagaguccuugc

SEQ ID NO: 2398092 - RNA, 19 nt, Artificial Sequence
  Description of Artificial Sequence: Synthetic oligonucleotide
gacuggcuagagaagcugc

SEQ ID NO: 2398093 - RNA, 19 nt, Artificial Sequence
  Description of Artificial Sequence: Synthetic oligonucleotide
auugauccacgcuuccaaa

SEQ ID NO: 2398094 - RNA, 19 nt, Artificial Sequence
  Description of Artificial Sequence: Synthetic oligonucleotide
gacaguccuugaaugaaca

SEQ ID NO: 2398095 - RNA, 19 nt, Artificial Sequence
  Description of Artificial Sequence: Synthetic oligonucleotide
aaaucucgcugccggcagu

SEQ ID NO: 2398096 - RNA, 19 nt, Artificial Sequence
  Description of Artificial Sequence: Synthetic oligonucleotide
uccaucggaggcagaagaa

SEQ ID NO: 2398097 - RNA, 19 nt, Artificial Sequence
  Description of Artificial Sequence: Synthetic oligonucleotide
aaucucgcugccggcagug

SEQ ID NO: 2398098 - RNA, 19 nt, Artificial Sequence
  Description of Artificial Sequence: Synthetic oligonucleotide
aagacuggcuagagaagcu

SEQ ID NO: 2398099 - RNA, 19 nt, Artificial Sequence
  Description of Artificial Sequence: Synthetic oligonucleotide
accaugagaguccuugcuu

SEQ ID NO: 2398100 - RNA, 19 nt, Artificial Sequence
  Description of Artificial Sequence: Synthetic oligonucleotide
ccuugaaugaacacgagua

SEQ ID NO: 2398101 - RNA, 19 nt, Artificial Sequence
  Description of Artificial Sequence: Synthetic oligonucleotide
gagaguccuugcuucugug

SEQ ID NO: 2398102 - RNA, 19 nt, Artificial Sequence
  Description of Artificial Sequence: Synthetic oligonucleotide
gucuuugacaaguuucugu

SEQ ID NO: 2398103 - RNA, 19 nt, Artificial Sequence
  Description of Artificial Sequence: Synthetic oligonucleotide
auuuccuccguuauacaaa

SEQ ID NO: 2398104 - RNA, 19 nt, Artificial Sequence
  Description of Artificial Sequence: Synthetic oligonucleotide
gcaaaaguucuucucacaa

SEQ ID NO: 2398105 - RNA, 19 nt, Artificial Sequence
  Description of Artificial Sequence: Synthetic oligonucleotide
ucgccgucagcaugcaucu

SEQ ID NO: 2398106 - RNA, 19 nt, Artificial Sequence
  Description of Artificial Sequence: Synthetic oligonucleotide
ggcuagagaagcugcgaag

SEQ ID NO: 2398107 - RNA, 19 nt, Artificial Sequence
  Description of Artificial Sequence: Synthetic oligonucleotide
agugugguccaagggcagg

SEQ ID NO: 2398108 - RNA, 19 nt, Artificial Sequence
  Description of Artificial Sequence: Synthetic oligonucleotide
ccaaagugugguccaaggg

SEQ ID NO: 2398109 - RNA, 19 nt, Artificial Sequence
  Description of Artificial Sequence: Synthetic oligonucleotide
acauuuccuccguuauaca

SEQ ID NO: 2398110 - RNA, 19 nt, Artificial Sequence
  Description of Artificial Sequence: Synthetic oligonucleotide
cuucuucgccgucaacuug

SEQ ID NO: 2398111 - RNA, 19 nt, Artificial Sequence
  Description of Artificial Sequence: Synthetic oligonucleotide
uuugcacccuuccuuccuu

SEQ ID NO: 2398112 - RNA, 19 nt, Artificial Sequence
  Description of Artificial Sequence: Synthetic oligonucleotide
caccuuugcggcugucccg

SEQ ID NO: 2398113 - RNA, 19 nt, Artificial Sequence
  Description of Artificial Sequence: Synthetic oligonucleotide
cccaugaucugacugauga

SEQ ID NO: 2398114 - RNA, 19 nt, Artificial Sequence
  Description of Artificial Sequence: Synthetic oligonucleotide
cuccaucggaggcagaaga

SEQ ID NO: 2398115 - RNA, 19 nt, Artificial Sequence
  Description of Artificial Sequence: Synthetic oligonucleotide
ggagucgauaaugucuuug

SEQ ID NO: 2398116 - RNA, 19 nt, Artificial Sequence
  Description of Artificial Sequence: Synthetic oligonucleotide
cuguguggcagccauucga

SEQ ID NO: 2398117 - RNA, 19 nt, Artificial Sequence
  Description of Artificial Sequence: Synthetic oligonucleotide
acuucaggacaguccuuga

SEQ ID NO: 2398118 - RNA, 19 nt, Artificial Sequence
  Description of Artificial Sequence: Synthetic oligonucleotide
acgcuuccaaagugugguc

SEQ ID NO: 2398119 - RNA, 19 nt, Artificial Sequence
  Description of Artificial Sequence: Synthetic oligonucleotide
cacgaccuuuccaaugcuc

SEQ ID NO: 2398120 - RNA, 19 nt, Artificial Sequence
  Description of Artificial Sequence: Synthetic oligonucleotide
cuucaucguuaagauacuc

SEQ ID NO: 2398121 - RNA, 19 nt, Artificial Sequence
  Description of Artificial Sequence: Synthetic oligonucleotide
agaacauggcuuugcucuu

SEQ ID NO: 2398122 - RNA, 19 nt, Artificial Sequence
  Description of Artificial Sequence: Synthetic oligonucleotide
gugacuuaucgccgucagc

SEQ ID NO: 2398123 - RNA, 19 nt, Artificial Sequence
  Description of Artificial Sequence: Synthetic oligonucleotide
ucuuucugucuguggcagu

SEQ ID NO: 2398124 - RNA, 19 nt, Artificial Sequence
  Description of Artificial Sequence: Synthetic oligonucleotide
ugcgaaguccacgaccuuu

SEQ ID NO: 2398125 - RNA, 19 nt, Artificial Sequence
  Description of Artificial Sequence: Synthetic oligonucleotide
ugcugcccgauguccaacu

SEQ ID NO: 2398126 - RNA, 19 nt, Artificial Sequence
  Description of Artificial Sequence: Synthetic oligonucleotide
ccuuauugauccacgcuuc

SEQ ID NO: 2398127 - RNA, 19 nt, Artificial Sequence
  Description of Artificial Sequence: Synthetic oligonucleotide
ccuuuccaaugcuccaucg

SEQ ID NO: 2398128 - RNA, 19 nt, Artificial Sequence
  Description of Artificial Sequence: Synthetic oligonucleotide
caucguuaagauacuccaa

SEQ ID NO: 2398129 - RNA, 19 nt, Artificial Sequence
  Description of Artificial Sequence: Synthetic oligonucleotide
aucugacugaugacggugu

SEQ ID NO: 2398130 - RNA, 19 nt, Artificial Sequence
  Description of Artificial Sequence: Synthetic oligonucleotide
uuggucucuccuugauuau

SEQ ID NO: 2398131 - RNA, 19 nt, Artificial Sequence
  Description of Artificial Sequence: Synthetic oligonucleotide
ggaugugacacagccucag

SEQ ID NO: 2398132 - RNA, 19 nt, Artificial Sequence
  Description of Artificial Sequence: Synthetic oligonucleotide
aacaaccaucacauacaaa

SEQ ID NO: 2398133 - RNA, 19 nt, Artificial Sequence
  Description of Artificial Sequence: Synthetic oligonucleotide
uauucaccucagggcaacc

SEQ ID NO: 2398134 - RNA, 19 nt, Artificial Sequence
  Description of Artificial Sequence: Synthetic oligonucleotide
ggcaaaaguucuucucaca

SEQ ID NO: 2398135 - RNA, 19 nt, Artificial Sequence
  Description of Artificial Sequence: Synthetic oligonucleotide
caccagcucuacuucagga

SEQ ID NO: 2398136 - RNA, 19 nt, Artificial Sequence
  Description of Artificial Sequence: Synthetic oligonucleotide
auaaugucuuugacaaguu

SEQ ID NO: 2398137 - RNA, 19 nt, Artificial Sequence
  Description of Artificial Sequence: Synthetic oligonucleotide
uuacugccccuccugucuu

SEQ ID NO: 2398138 - RNA, 19 nt, Artificial Sequence
  Description of Artificial Sequence: Synthetic oligonucleotide
agugcugcccgauguccaa

SEQ ID NO: 2398139 - RNA, 19 nt, Artificial Sequence
  Description of Artificial Sequence: Synthetic oligonucleotide
auccacgcuuccaaagugu

SEQ ID NO: 2398140 - RNA, 19 nt, Artificial Sequence
  Description of Artificial Sequence: Synthetic oligonucleotide
accugaaaguaaauucuuu

SEQ ID NO: 2398141 - RNA, 19 nt, Artificial Sequence
  Description of Artificial Sequence: Synthetic oligonucleotide
ccuugauuauauucaccuc

SEQ ID NO: 2398142 - RNA, 19 nt, Artificial Sequence
  Description of Artificial Sequence: Synthetic oligonucleotide
cuuugacaaguuucugugu

SEQ ID NO: 2398143 - RNA, 19 nt, Artificial Sequence
  Description of Artificial Sequence: Synthetic oligonucleotide
ucgccgucaacuuguuguu

SEQ ID NO: 2398144 - RNA, 19 nt, Artificial Sequence
  Description of Artificial Sequence: Synthetic oligonucleotide
uggucucuccuugauuaua

SEQ ID NO: 2398145 - RNA, 19 nt, Artificial Sequence
  Description of Artificial Sequence: Synthetic oligonucleotide
ugacggugucuuaggcaaa

SEQ ID NO: 2398146 - RNA, 19 nt, Artificial Sequence
  Description of Artificial Sequence: Synthetic oligonucleotide
cacgaguaagauuuguguu

SEQ ID NO: 2398147 - RNA, 19 nt, Artificial Sequence
  Description of Artificial Sequence: Synthetic oligonucleotide
gaacacgaguaagauuugu

SEQ ID NO: 2398148 - RNA, 19 nt, Artificial Sequence
  Description of Artificial Sequence: Synthetic oligonucleotide
aucggaggcagaagaacau

SEQ ID NO: 2398149 - RNA, 19 nt, Artificial Sequence
  Description of Artificial Sequence: Synthetic oligonucleotide
cuuugcggcugucccgcug

SEQ ID NO: 2398150 - RNA, 19 nt, Artificial Sequence
  Description of Artificial Sequence: Synthetic oligonucleotide
ggugucuuaggcaaaaguu

SEQ ID NO: 2398151 - RNA, 19 nt, Artificial Sequence
  Description of Artificial Sequence: Synthetic oligonucleotide
gacggugucuuaggcaaaa

SEQ ID NO: 2398152 - RNA, 19 nt, Artificial Sequence
  Description of Artificial Sequence: Synthetic oligonucleotide
aucucgcugccggcagugc

SEQ ID NO: 2398153 - RNA, 19 nt, Artificial Sequence
  Description of Artificial Sequence: Synthetic oligonucleotide
acaaagggugguccuccuu

SEQ ID NO: 2398154 - RNA, 19 nt, Artificial Sequence
  Description of Artificial Sequence: Synthetic oligonucleotide
cacgcuuccaaaguguggu

SEQ ID NO: 2398155 - RNA, 19 nt, Artificial Sequence
  Description of Artificial Sequence: Synthetic oligonucleotide
ccaccuuugcggcuguccc

SEQ ID NO: 2398156 - RNA, 19 nt, Artificial Sequence
  Description of Artificial Sequence: Synthetic oligonucleotide
caaugcuccaucggaggca

SEQ ID NO: 2398157 - RNA, 19 nt, Artificial Sequence
  Description of Artificial Sequence: Synthetic oligonucleotide
ccagcucuacuucaggaca

SEQ ID NO: 2398158 - RNA, 19 nt, Artificial Sequence
  Description of Artificial Sequence: Synthetic oligonucleotide
ccacgcuuccaaagugugg

SEQ ID NO: 2398159 - RNA, 19 nt, Artificial Sequence
  Description of Artificial Sequence: Synthetic oligonucleotide
acggugucuuaggcaaaag

SEQ ID NO: 2398160 - RNA, 19 nt, Artificial Sequence
  Description of Artificial Sequence: Synthetic oligonucleotide
ccaagggcagggcuucucc

SEQ ID NO: 2398161 - RNA, 19 nt, Artificial Sequence
  Description of Artificial Sequence: Synthetic oligonucleotide
ggacaguccuugaaugaac

SEQ ID NO: 2398162 - RNA, 19 nt, Artificial Sequence
  Description of Artificial Sequence: Synthetic oligonucleotide
uuaucgccgucagcaugca

SEQ ID NO: 2398163 - RNA, 19 nt, Artificial Sequence
  Description of Artificial Sequence: Synthetic oligonucleotide
cuucgccgucaacuuguug

SEQ ID NO: 2398164 - RNA, 19 nt, Artificial Sequence
  Description of Artificial Sequence: Synthetic oligonucleotide
ucuucgccgucaacuuguu

SEQ ID NO: 2398165 - RNA, 19 nt, Artificial Sequence
  Description of Artificial Sequence: Synthetic oligonucleotide
aguuucuguguggcagcca

SEQ ID NO: 2398166 - RNA, 19 nt, Artificial Sequence
  Description of Artificial Sequence: Synthetic oligonucleotide
guggcagccauucgaggcu

SEQ ID NO: 2398167 - RNA, 19 nt, Artificial Sequence
  Description of Artificial Sequence: Synthetic oligonucleotide
ccuugcuucuguguucaag

SEQ ID NO: 2398168 - RNA, 19 nt, Artificial Sequence
  Description of Artificial Sequence: Synthetic oligonucleotide
uccugucuuggagucgaua

SEQ ID NO: 2398169 - RNA, 19 nt, Artificial Sequence
  Description of Artificial Sequence: Synthetic oligonucleotide
gcuagagaagcugcgaagu

SEQ ID NO: 2398170 - RNA, 19 nt, Artificial Sequence
  Description of Artificial Sequence: Synthetic oligonucleotide
gugguccuccuuauugauc

SEQ ID NO: 2398171 - RNA, 19 nt, Artificial Sequence
  Description of Artificial Sequence: Synthetic oligonucleotide
ccggcagugcugcaccugg

SEQ ID NO: 2398172 - RNA, 19 nt, Artificial Sequence
  Description of Artificial Sequence: Synthetic oligonucleotide
ccccuuugguaaguaaacc

SEQ ID NO: 2398173 - RNA, 19 nt, Artificial Sequence
  Description of Artificial Sequence: Synthetic oligonucleotide
gccauucgaggcuuuggga

SEQ ID NO: 2398174 - RNA, 19 nt, Artificial Sequence
  Description of Artificial Sequence: Synthetic oligonucleotide
uaucgccgucagcaugcau

SEQ ID NO: 2398175 - RNA, 19 nt, Artificial Sequence
  Description of Artificial Sequence: Synthetic oligonucleotide
gucuguggcagugacuuau

SEQ ID NO: 2398176 - RNA, 19 nt, Artificial Sequence
  Description of Artificial Sequence: Synthetic oligonucleotide
ccaccagcucuacuucagg

SEQ ID NO: 2398177 - RNA, 19 nt, Artificial Sequence
  Description of Artificial Sequence: Synthetic oligonucleotide
gacuuaucgccgucagcau

SEQ ID NO: 2398178 - RNA, 19 nt, Artificial Sequence
  Description of Artificial Sequence: Synthetic oligonucleotide
cccuuugguaaguaaaccu

SEQ ID NO: 2398179 - RNA, 19 nt, Artificial Sequence
  Description of Artificial Sequence: Synthetic oligonucleotide
ggcagugcugcaccuggca

SEQ ID NO: 2398180 - RNA, 19 nt, Artificial Sequence
  Description of Artificial Sequence: Synthetic oligonucleotide
cgauaaugucuuugacaag

SEQ ID NO: 2398181 - RNA, 19 nt, Artificial Sequence
  Description of Artificial Sequence: Synthetic oligonucleotide
ccgauguccaacuccgcca

SEQ ID NO: 2398182 - RNA, 19 nt, Artificial Sequence
  Description of Artificial Sequence: Synthetic oligonucleotide
gacugaugacggugucuua

SEQ ID NO: 2398183 - RNA, 19 nt, Artificial Sequence
  Description of Artificial Sequence: Synthetic oligonucleotide
cagugacuuaucgccguca

SEQ ID NO: 2398184 - RNA, 19 nt, Artificial Sequence
  Description of Artificial Sequence: Synthetic oligonucleotide
cgaguaagauuuguguuca

SEQ ID NO: 2398185 - RNA, 19 nt, Artificial Sequence
  Description of Artificial Sequence: Synthetic oligonucleotide
cgcuuccaaaguguggucc

SEQ ID NO: 2398186 - RNA, 19 nt, Artificial Sequence
  Description of Artificial Sequence: Synthetic oligonucleotide
uugcuccccuuugguaagu

SEQ ID NO: 2398187 - RNA, 19 nt, Artificial Sequence
  Description of Artificial Sequence: Synthetic oligonucleotide
cagcaugcaucuuuagcuu

SEQ ID NO: 2398188 - RNA, 19 nt, Artificial Sequence
  Description of Artificial Sequence: Synthetic oligonucleotide
acccaugaucugacugaug

SEQ ID NO: 2398189 - RNA, 19 nt, Artificial Sequence
  Description of Artificial Sequence: Synthetic oligonucleotide
gccaccuuugcggcugucc

SEQ ID NO: 2398190 - RNA, 19 nt, Artificial Sequence
  Description of Artificial Sequence: Synthetic oligonucleotide
gcgaaguccacgaccuuuc

SEQ ID NO: 2398191 - RNA, 19 nt, Artificial Sequence
  Description of Artificial Sequence: Synthetic oligonucleotide
ccgucaacuuguuguuuuc

SEQ ID NO: 2398192 - RNA, 19 nt, Artificial Sequence
  Description of Artificial Sequence: Synthetic oligonucleotide
ccugaagggaugugacaca

SEQ ID NO: 2398193 - RNA, 19 nt, Artificial Sequence
  Description of Artificial Sequence: Synthetic oligonucleotide
gaguaagauuuguguucau

SEQ ID NO: 2398194 - RNA, 19 nt, Artificial Sequence
  Description of Artificial Sequence: Synthetic oligonucleotide
ggcagugacuuaucgccgu

SEQ ID NO: 2398195 - RNA, 19 nt, Artificial Sequence
  Description of Artificial Sequence: Synthetic oligonucleotide
cuuccaaagugugguccaa

SEQ ID NO: 2398196 - RNA, 19 nt, Artificial Sequence
  Description of Artificial Sequence: Synthetic oligonucleotide
ggcuuugggagcuccaguu

SEQ ID NO: 2398197 - RNA, 19 nt, Artificial Sequence
  Description of Artificial Sequence: Synthetic oligonucleotide
cugucuuggagucgauaau

SEQ ID NO: 2398198 - RNA, 19 nt, Artificial Sequence
  Description of Artificial Sequence: Synthetic oligonucleotide
ccuccguuauacaaagggu

SEQ ID NO: 2398199 - RNA, 19 nt, Artificial Sequence
  Description of Artificial Sequence: Synthetic oligonucleotide
uucucacaauaaggacaua

SEQ ID NO: 2398200 - RNA, 19 nt, Artificial Sequence
  Description of Artificial Sequence: Synthetic oligonucleotide
gcuccaucggaggcagaag

SEQ ID NO: 2398201 - RNA, 19 nt, Artificial Sequence
  Description of Artificial Sequence: Synthetic oligonucleotide
ggugguccuccuuauugau

SEQ ID NO: 2398202 - RNA, 19 nt, Artificial Sequence
  Description of Artificial Sequence: Synthetic oligonucleotide
cagcuucuucgccgucaac

SEQ ID NO: 2398203 - RNA, 19 nt, Artificial Sequence
  Description of Artificial Sequence: Synthetic oligonucleotide
ggucucuccuugauuauau

SEQ ID NO: 2398204 - RNA, 19 nt, Artificial Sequence
  Description of Artificial Sequence: Synthetic oligonucleotide
ccccuccugucuuggaguc

SEQ ID NO: 2398205 - RNA, 19 nt, Artificial Sequence
  Description of Artificial Sequence: Synthetic oligonucleotide
ccuccugucuuggagucga

SEQ ID NO: 2398206 - RNA, 19 nt, Artificial Sequence
  Description of Artificial Sequence: Synthetic oligonucleotide
gucucuccuugauuauauu

SEQ ID NO: 2398207 - RNA, 19 nt, Artificial Sequence
  Description of Artificial Sequence: Synthetic oligonucleotide
gucuuaggcaaaaguucuu

SEQ ID NO: 2398208 - RNA, 19 nt, Artificial Sequence
  Description of Artificial Sequence: Synthetic oligonucleotide
gggaugugacacagccuca

SEQ ID NO: 2398209 - RNA, 19 nt, Artificial Sequence
  Description of Artificial Sequence: Synthetic oligonucleotide
cgaccuuuccaaugcucca

SEQ ID NO: 2398210 - RNA, 19 nt, Artificial Sequence
  Description of Artificial Sequence: Synthetic oligonucleotide
cccuccugucuuggagucg

SEQ ID NO: 2398211 - RNA, 19 nt, Artificial Sequence
  Description of Artificial Sequence: Synthetic oligonucleotide
ugcggcugucccgcugguu

SEQ ID NO: 2398212 - RNA, 19 nt, Artificial Sequence
  Description of Artificial Sequence: Synthetic oligonucleotide
ccgucagcaugcaucuuua

SEQ ID NO: 2398213 - RNA, 19 nt, Artificial Sequence
  Description of Artificial Sequence: Synthetic oligonucleotide
gcuuugggagcuccaguuu

SEQ ID NO: 2398214 - RNA, 19 nt, Artificial Sequence
  Description of Artificial Sequence: Synthetic oligonucleotide
cacccaugaucugacugau

SEQ ID NO: 2398215 - RNA, 19 nt, Artificial Sequence
  Description of Artificial Sequence: Synthetic oligonucleotide
caugcaucuuuagcuucau

SEQ ID NO: 2398216 - RNA, 19 nt, Artificial Sequence
  Description of Artificial Sequence: Synthetic oligonucleotide
gcggcugucccgcugguuu

SEQ ID NO: 2398217 - RNA, 19 nt, Artificial Sequence
  Description of Artificial Sequence: Synthetic oligonucleotide
gugcugcaccuggcagugc

SEQ ID NO: 2398218 - RNA, 19 nt, Artificial Sequence
  Description of Artificial Sequence: Synthetic oligonucleotide
ccugaacaaccaucacaua

SEQ ID NO: 2398219 - RNA, 19 nt, Artificial Sequence
  Description of Artificial Sequence: Synthetic oligonucleotide
gcacccuuccuuccuuuau

SEQ ID NO: 2398220 - RNA, 19 nt, Artificial Sequence
  Description of Artificial Sequence: Synthetic oligonucleotide
gccggcagugcugcaccug

SEQ ID NO: 2398221 - RNA, 19 nt, Artificial Sequence
  Description of Artificial Sequence: Synthetic oligonucleotide
ccguuauacaaaggguggu

SEQ ID NO: 2398222 - RNA, 19 nt, Artificial Sequence
  Description of Artificial Sequence: Synthetic oligonucleotide
gggcaaccaugagaguccu

SEQ ID NO: 2398223 - RNA, 19 nt, Artificial Sequence
  Description of Artificial Sequence: Synthetic oligonucleotide
cuccugucuuggagucgau

SEQ ID NO: 2398224 - RNA, 19 nt, Artificial Sequence
  Description of Artificial Sequence: Synthetic oligonucleotide
ccacgaccuuuccaaugcu

SEQ ID NO: 2398225 - RNA, 19 nt, Artificial Sequence
  Description of Artificial Sequence: Synthetic oligonucleotide
ggcaaccaugagaguccuu

SEQ ID NO: 2398226 - RNA, 19 nt, Artificial Sequence
  Description of Artificial Sequence: Synthetic oligonucleotide
cgccgucaacuuguuguuu

SEQ ID NO: 2398227 - RNA, 19 nt, Artificial Sequence
  Description of Artificial Sequence: Synthetic oligonucleotide
cgccgucagcaugcaucuu

SEQ ID NO: 2398228 - RNA, 19 nt, Artificial Sequence
  Description of Artificial Sequence: Synthetic oligonucleotide
ucuugaaggcucuugagcg

SEQ ID NO: 2398229 - RNA, 19 nt, Artificial Sequence
  Description of Artificial Sequence: Synthetic oligonucleotide
ucuuuugccuccuggaugg

SEQ ID NO: 2398230 - RNA, 19 nt, Artificial Sequence
  Description of Artificial Sequence: Synthetic oligonucleotide
uccaagacagcucgaaggg

SEQ ID NO: 2398231 - RNA, 19 nt, Artificial Sequence
  Description of Artificial Sequence: Synthetic oligonucleotide
aauccauugggaauggguc

SEQ ID NO: 2398232 - RNA, 19 nt, Artificial Sequence
  Description of Artificial Sequence: Synthetic oligonucleotide
cuagagacagucuuguccc

SEQ ID NO: 2398233 - RNA, 19 nt, Artificial Sequence
  Description of Artificial Sequence: Synthetic oligonucleotide
aauuugagggcuccccggg

SEQ ID NO: 2398234 - RNA, 19 nt, Artificial Sequence
  Description of Artificial Sequence: Synthetic oligonucleotide
ugugcagauacuccucugg

SEQ ID NO: 2398235 - RNA, 19 nt, Artificial Sequence
  Description of Artificial Sequence: Synthetic oligonucleotide
uuuguugauuuccugcggc

SEQ ID NO: 2398236 - RNA, 19 nt, Artificial Sequence
  Description of Artificial Sequence: Synthetic oligonucleotide
aagcguccaagacagcucg

SEQ ID NO: 2398237 - RNA, 19 nt, Artificial Sequence
  Description of Artificial Sequence: Synthetic oligonucleotide
acgucgaccagguuucucc

SEQ ID NO: 2398238 - RNA, 19 nt, Artificial Sequence
  Description of Artificial Sequence: Synthetic oligonucleotide
gaaggaauccuuucuuuug

SEQ ID NO: 2398239 - RNA, 19 nt, Artificial Sequence
  Description of Artificial Sequence: Synthetic oligonucleotide
cugacagccagcaccagcg

SEQ ID NO: 2398240 - RNA, 19 nt, Artificial Sequence
  Description of Artificial Sequence: Synthetic oligonucleotide
uaauuugagggcuccccgg

SEQ ID NO: 2398241 - RNA, 19 nt, Artificial Sequence
  Description of Artificial Sequence: Synthetic oligonucleotide
ucugacgucgaccagguuu

SEQ ID NO: 2398242 - RNA, 19 nt, Artificial Sequence
  Description of Artificial Sequence: Synthetic oligonucleotide
aaacacagcagcccgugca

SEQ ID NO: 2398243 - RNA, 19 nt, Artificial Sequence
  Description of Artificial Sequence: Synthetic oligonucleotide
aaaugcagggugugugcgg

SEQ ID NO: 2398244 - RNA, 19 nt, Artificial Sequence
  Description of Artificial Sequence: Synthetic oligonucleotide
ucuugagcgcuagagacag

SEQ ID NO: 2398245 - RNA, 19 nt, Artificial Sequence
  Description of Artificial Sequence: Synthetic oligonucleotide
guaauuugagggcuccccg

SEQ ID NO: 2398246 - RNA, 19 nt, Artificial Sequence
  Description of Artificial Sequence: Synthetic oligonucleotide
aggaauccuuucuuuugcc

SEQ ID NO: 2398247 - RNA, 19 nt, Artificial Sequence
  Description of Artificial Sequence: Synthetic oligonucleotide
agcgcagcaauuucugacg

SEQ ID NO: 2398248 - RNA, 19 nt, Artificial Sequence
  Description of Artificial Sequence: Synthetic oligonucleotide
ucucccauugucuccgggg

SEQ ID NO: 2398249 - RNA, 19 nt, Artificial Sequence
  Description of Artificial Sequence: Synthetic oligonucleotide
agcaauuucugacgucgac

SEQ ID NO: 2398250 - RNA, 19 nt, Artificial Sequence
  Description of Artificial Sequence: Synthetic oligonucleotide
uccaauacggcuucugguc

SEQ ID NO: 2398251 - RNA, 19 nt, Artificial Sequence
  Description of Artificial Sequence: Synthetic oligonucleotide
ugugcggugagcaggcuca

SEQ ID NO: 2398252 - RNA, 19 nt, Artificial Sequence
  Description of Artificial Sequence: Synthetic oligonucleotide
aauggguccuccagucucc

SEQ ID NO: 2398253 - RNA, 19 nt, Artificial Sequence
  Description of Artificial Sequence: Synthetic oligonucleotide
cucagcacagcguggagcc

SEQ ID NO: 2398254 - RNA, 19 nt, Artificial Sequence
  Description of Artificial Sequence: Synthetic oligonucleotide
cuucgcgccaccugaaucc

SEQ ID NO: 2398255 - RNA, 19 nt, Artificial Sequence
  Description of Artificial Sequence: Synthetic oligonucleotide
gaaaugcagggugugugcg

SEQ ID NO: 2398256 - RNA, 19 nt, Artificial Sequence
  Description of Artificial Sequence: Synthetic oligonucleotide
uuucccugcauccuugguc

SEQ ID NO: 2398257 - RNA, 19 nt, Artificial Sequence
  Description of Artificial Sequence: Synthetic oligonucleotide
aaagcguccaagacagcuc

SEQ ID NO: 2398258 - RNA, 19 nt, Artificial Sequence
  Description of Artificial Sequence: Synthetic oligonucleotide
uucccugcauccuuggucu

SEQ ID NO: 2398259 - RNA, 19 nt, Artificial Sequence
  Description of Artificial Sequence: Synthetic oligonucleotide
aauuucugacgucgaccag

SEQ ID NO: 2398260 - RNA, 19 nt, Artificial Sequence
  Description of Artificial Sequence: Synthetic oligonucleotide
cuuuguugauuuccugcgg

SEQ ID NO: 2398261 - RNA, 19 nt, Artificial Sequence
  Description of Artificial Sequence: Synthetic oligonucleotide
aagacagcucgaaggggcc

SEQ ID NO: 2398262 - RNA, 19 nt, Artificial Sequence
  Description of Artificial Sequence: Synthetic oligonucleotide
caauuucugacgucgacca

SEQ ID NO: 2398263 - RNA, 19 nt, Artificial Sequence
  Description of Artificial Sequence: Synthetic oligonucleotide
uuguugauuuccugcggcc

SEQ ID NO: 2398264 - RNA, 19 nt, Artificial Sequence
  Description of Artificial Sequence: Synthetic oligonucleotide
gcauccuuggucuugggag

SEQ ID NO: 2398265 - RNA, 19 nt, Artificial Sequence
  Description of Artificial Sequence: Synthetic oligonucleotide
gacagucuugucccucucg

SEQ ID NO: 2398266 - RNA, 19 nt, Artificial Sequence
  Description of Artificial Sequence: Synthetic oligonucleotide
agucuugaaggcucuugag

SEQ ID NO: 2398267 - RNA, 19 nt, Artificial Sequence
  Description of Artificial Sequence: Synthetic oligonucleotide
gaauggguccuccagucuc

SEQ ID NO: 2398268 - RNA, 19 nt, Artificial Sequence
  Description of Artificial Sequence: Synthetic oligonucleotide
aggcaggcgaaaugcaggg

SEQ ID NO: 2398269 - RNA, 19 nt, Artificial Sequence
  Description of Artificial Sequence: Synthetic oligonucleotide
gcagcaauuucugacgucg

SEQ ID NO: 2398270 - RNA, 19 nt, Artificial Sequence
  Description of Artificial Sequence: Synthetic oligonucleotide
agauacuccucuggguccc

SEQ ID NO: 2398271 - RNA, 19 nt, Artificial Sequence
  Description of Artificial Sequence: Synthetic oligonucleotide
cccgcagguaauuugaggg

SEQ ID NO: 2398272 - RNA, 19 nt, Artificial Sequence
  Description of Artificial Sequence: Synthetic oligonucleotide
cccaaagcguccaagacag

SEQ ID NO: 2398273 - RNA, 19 nt, Artificial Sequence
  Description of Artificial Sequence: Synthetic oligonucleotide
ccuuuguugauuuccugcg

SEQ ID NO: 2398274 - RNA, 19 nt, Artificial Sequence
  Description of Artificial Sequence: Synthetic oligonucleotide
gagguagccagcugccaag

SEQ ID NO: 2398275 - RNA, 19 nt, Artificial Sequence
  Description of Artificial Sequence: Synthetic oligonucleotide
aauacggcuucugguccgg

SEQ ID NO: 2398276 - RNA, 19 nt, Artificial Sequence
  Description of Artificial Sequence: Synthetic oligonucleotide
caauacggcuucugguccg

SEQ ID NO: 2398277 - RNA, 19 nt, Artificial Sequence
  Description of Artificial Sequence: Synthetic oligonucleotide
ucccuguucguccccgggg

SEQ ID NO: 2398278 - RNA, 19 nt, Artificial Sequence
  Description of Artificial Sequence: Synthetic oligonucleotide
cagguuucuccaauacggc

SEQ ID NO: 2398279 - RNA, 19 nt, Artificial Sequence
  Description of Artificial Sequence: Synthetic oligonucleotide
acagucuugucccucucga

SEQ ID NO: 2398280 - RNA, 19 nt, Artificial Sequence
  Description of Artificial Sequence: Synthetic oligonucleotide
cugacgucgaccagguuuc

SEQ ID NO: 2398281 - RNA, 19 nt, Artificial Sequence
  Description of Artificial Sequence: Synthetic oligonucleotide
ugcagauacuccucugggu

SEQ ID NO: 2398282 - RNA, 19 nt, Artificial Sequence
  Description of Artificial Sequence: Synthetic oligonucleotide
aauucagccuuuguugauu

SEQ ID NO: 2398283 - RNA, 19 nt, Artificial Sequence
  Description of Artificial Sequence: Synthetic oligonucleotide
uugagcgcuagagacaguc

SEQ ID NO: 2398284 - RNA, 19 nt, Artificial Sequence
  Description of Artificial Sequence: Synthetic oligonucleotide
cacccaucugguuucuggg

SEQ ID NO: 2398285 - RNA, 19 nt, Artificial Sequence
  Description of Artificial Sequence: Synthetic oligonucleotide
gccaccugaauccauuggg

SEQ ID NO: 2398286 - RNA, 19 nt, Artificial Sequence
  Description of Artificial Sequence: Synthetic oligonucleotide
gcucuugagcgcuagagac

SEQ ID NO: 2398287 - RNA, 19 nt, Artificial Sequence
  Description of Artificial Sequence: Synthetic oligonucleotide
ucuucgcgccaccugaauc

SEQ ID NO: 2398288 - RNA, 19 nt, Artificial Sequence
  Description of Artificial Sequence: Synthetic oligonucleotide
uacggcuucugguccggcg

SEQ ID NO: 2398289 - RNA, 19 nt, Artificial Sequence
  Description of Artificial Sequence: Synthetic oligonucleotide
gaccagguuucuccaauac

SEQ ID NO: 2398290 - RNA, 19 nt, Artificial Sequence
  Description of Artificial Sequence: Synthetic oligonucleotide
accugaauccauugggaau

SEQ ID NO: 2398291 - RNA, 19 nt, Artificial Sequence
  Description of Artificial Sequence: Synthetic oligonucleotide
cucgaaggcccaaagcguc

SEQ ID NO: 2398292 - RNA, 19 nt, Artificial Sequence
  Description of Artificial Sequence: Synthetic oligonucleotide
ucgaaggcccaaagcgucc

SEQ ID NO: 2398293 - RNA, 19 nt, Artificial Sequence
  Description of Artificial Sequence: Synthetic oligonucleotide
ggucccuggaggcugacag

SEQ ID NO: 2398294 - RNA, 19 nt, Artificial Sequence
  Description of Artificial Sequence: Synthetic oligonucleotide
cacagcguggagcccaugc

SEQ ID NO: 2398295 - RNA, 19 nt, Artificial Sequence
  Description of Artificial Sequence: Synthetic oligonucleotide
auccuuggucuugggaggc

SEQ ID NO: 2398296 - RNA, 19 nt, Artificial Sequence
  Description of Artificial Sequence: Synthetic oligonucleotide
uccauugggaauggguccu

SEQ ID NO: 2398297 - RNA, 19 nt, Artificial Sequence
  Description of Artificial Sequence: Synthetic oligonucleotide
ccaaggucgagguagccag

SEQ ID NO: 2398298 - RNA, 19 nt, Artificial Sequence
  Description of Artificial Sequence: Synthetic oligonucleotide
cucucgaaggaauccuuuc

SEQ ID NO: 2398299 - RNA, 19 nt, Artificial Sequence
  Description of Artificial Sequence: Synthetic oligonucleotide
uugguggagaugugcagau

SEQ ID NO: 2398300 - RNA, 19 nt, Artificial Sequence
  Description of Artificial Sequence: Synthetic oligonucleotide
gguaauuugagggcucccc

SEQ ID NO: 2398301 - RNA, 19 nt, Artificial Sequence
  Description of Artificial Sequence: Synthetic oligonucleotide
uguccacccaucugguuuc

SEQ ID NO: 2398302 - RNA, 19 nt, Artificial Sequence
  Description of Artificial Sequence: Synthetic oligonucleotide
ucacugggucccuggaggc

SEQ ID NO: 2398303 - RNA, 19 nt, Artificial Sequence
  Description of Artificial Sequence: Synthetic oligonucleotide
uuccuggaccuucccuagg

SEQ ID NO: 2398304 - RNA, 19 nt, Artificial Sequence
  Description of Artificial Sequence: Synthetic oligonucleotide
ucagcggucuccucauccu

SEQ ID NO: 2398305 - RNA, 19 nt, Artificial Sequence
  Description of Artificial Sequence: Synthetic oligonucleotide
ugaauccauugggaauggg

SEQ ID NO: 2398306 - RNA, 19 nt, Artificial Sequence
  Description of Artificial Sequence: Synthetic oligonucleotide
ucgaccagguuucuccaau

SEQ ID NO: 2398307 - RNA, 19 nt, Artificial Sequence
  Description of Artificial Sequence: Synthetic oligonucleotide
ggucgagguagccagcugc

SEQ ID NO: 2398308 - RNA, 19 nt, Artificial Sequence
  Description of Artificial Sequence: Synthetic oligonucleotide
agguaauuugagggcuccc

SEQ ID NO: 2398309 - RNA, 19 nt, Artificial Sequence
  Description of Artificial Sequence: Synthetic oligonucleotide
uugucccucucgaaggaau

SEQ ID NO: 2398310 - RNA, 19 nt, Artificial Sequence
  Description of Artificial Sequence: Synthetic oligonucleotide
agagacagucuugucccuc

SEQ ID NO: 2398311 - RNA, 19 nt, Artificial Sequence
  Description of Artificial Sequence: Synthetic oligonucleotide
gucgcugcccgaauucucg

SEQ ID NO: 2398312 - RNA, 19 nt, Artificial Sequence
  Description of Artificial Sequence: Synthetic oligonucleotide
uccucgguuucccugcauc

SEQ ID NO: 2398313 - RNA, 19 nt, Artificial Sequence
  Description of Artificial Sequence: Synthetic oligonucleotide
agcugccaagucuucgcag

SEQ ID NO: 2398314 - RNA, 19 nt, Artificial Sequence
  Description of Artificial Sequence: Synthetic oligonucleotide
ugagcgcuagagacagucu

SEQ ID NO: 2398315 - RNA, 19 nt, Artificial Sequence
  Description of Artificial Sequence: Synthetic oligonucleotide
aggcucuugagcgcuagag

SEQ ID NO: 2398316 - RNA, 19 nt, Artificial Sequence
  Description of Artificial Sequence: Synthetic oligonucleotide
cucgaaggggccuggagca

SEQ ID NO: 2398317 - RNA, 19 nt, Artificial Sequence
  Description of Artificial Sequence: Synthetic oligonucleotide
ugucccucucgaaggaauc

SEQ ID NO: 2398318 - RNA, 19 nt, Artificial Sequence
  Description of Artificial Sequence: Synthetic oligonucleotide
ugguucuucgcgccaccug

SEQ ID NO: 2398319 - RNA, 19 nt, Artificial Sequence
  Description of Artificial Sequence: Synthetic oligonucleotide
gaauccauugggaaugggu

SEQ ID NO: 2398320 - RNA, 19 nt, Artificial Sequence
  Description of Artificial Sequence: Synthetic oligonucleotide
gcaggcgaaaugcagggug

SEQ ID NO: 2398321 - RNA, 19 nt, Artificial Sequence
  Description of Artificial Sequence: Synthetic oligonucleotide
auucagccuuuguugauuu

SEQ ID NO: 2398322 - RNA, 19 nt, Artificial Sequence
  Description of Artificial Sequence: Synthetic oligonucleotide
ccugaauccauugggaaug

SEQ ID NO: 2398323 - RNA, 19 nt, Artificial Sequence
  Description of Artificial Sequence: Synthetic oligonucleotide
cuggaccuucccuaggcuc

SEQ ID NO: 2398324 - RNA, 19 nt, Artificial Sequence
  Description of Artificial Sequence: Synthetic oligonucleotide
aggcccaaagcguccaaga

SEQ ID NO: 2398325 - RNA, 19 nt, Artificial Sequence
  Description of Artificial Sequence: Synthetic oligonucleotide
acagcguggagcccaugca

SEQ ID NO: 2398326 - RNA, 19 nt, Artificial Sequence
  Description of Artificial Sequence: Synthetic oligonucleotide
uuggucuugggaggccccg

SEQ ID NO: 2398327 - RNA, 19 nt, Artificial Sequence
  Description of Artificial Sequence: Synthetic oligonucleotide
agacagucuugucccucuc

SEQ ID NO: 2398328 - RNA, 19 nt, Artificial Sequence
  Description of Artificial Sequence: Synthetic oligonucleotide
aucucccauugucuccggg

SEQ ID NO: 2398329 - RNA, 19 nt, Artificial Sequence
  Description of Artificial Sequence: Synthetic oligonucleotide
cagcguggagcccaugcag

SEQ ID NO: 2398330 - RNA, 19 nt, Artificial Sequence
  Description of Artificial Sequence: Synthetic oligonucleotide
agcucgaaggggccuggag

SEQ ID NO: 2398331 - RNA, 19 nt, Artificial Sequence
  Description of Artificial Sequence: Synthetic oligonucleotide
ucgcugcccgaauucucgg

SEQ ID NO: 2398332 - RNA, 19 nt, Artificial Sequence
  Description of Artificial Sequence: Synthetic oligonucleotide
cugaauccauugggaaugg

SEQ ID NO: 2398333 - RNA, 19 nt, Artificial Sequence
  Description of Artificial Sequence: Synthetic oligonucleotide
agcguggagcccaugcagg

SEQ ID NO: 2398334 - RNA, 19 nt, Artificial Sequence
  Description of Artificial Sequence: Synthetic oligonucleotide
gccgccaggaaacacagca

SEQ ID NO: 2398335 - RNA, 19 nt, Artificial Sequence
  Description of Artificial Sequence: Synthetic oligonucleotide
gcaggcucagcacagcgug

SEQ ID NO: 2398336 - RNA, 19 nt, Artificial Sequence
  Description of Artificial Sequence: Synthetic oligonucleotide
ucccauugucuccggggca

SEQ ID NO: 2398337 - RNA, 19 nt, Artificial Sequence
  Description of Artificial Sequence: Synthetic oligonucleotide
gaaggcucuugagcgcuag

SEQ ID NO: 2398338 - RNA, 19 nt, Artificial Sequence
  Description of Artificial Sequence: Synthetic oligonucleotide
gcugcccgaauucucgggg

SEQ ID NO: 2398339 - RNA, 19 nt, Artificial Sequence
  Description of Artificial Sequence: Synthetic oligonucleotide
gcucgaaggggccuggagc

SEQ ID NO: 2398340 - RNA, 19 nt, Artificial Sequence
  Description of Artificial Sequence: Synthetic oligonucleotide
gguucuucgcgccaccuga

SEQ ID NO: 2398341 - RNA, 19 nt, Artificial Sequence
  Description of Artificial Sequence: Synthetic oligonucleotide
ugucuccggggcacugucc

SEQ ID NO: 2398342 - RNA, 19 nt, Artificial Sequence
  Description of Artificial Sequence: Synthetic oligonucleotide
ucgguuucccugcauccuu

SEQ ID NO: 2398343 - RNA, 19 nt, Artificial Sequence
  Description of Artificial Sequence: Synthetic oligonucleotide
gcaucucccauugucuccg

SEQ ID NO: 2398344 - RNA, 19 nt, Artificial Sequence
  Description of Artificial Sequence: Synthetic oligonucleotide
ccaauacggcuucuggucc

SEQ ID NO: 2398345 - RNA, 19 nt, Artificial Sequence
  Description of Artificial Sequence: Synthetic oligonucleotide
ugcagggugugugcgguga

SEQ ID NO: 2398346 - RNA, 19 nt, Artificial Sequence
  Description of Artificial Sequence: Synthetic oligonucleotide
uugucuccggggcacuguc

SEQ ID NO: 2398347 - RNA, 19 nt, Artificial Sequence
  Description of Artificial Sequence: Synthetic oligonucleotide
cucuugagcgcuagagaca

SEQ ID NO: 2398348 - RNA, 19 nt, Artificial Sequence
  Description of Artificial Sequence: Synthetic oligonucleotide
aaggcucuugagcgcuaga

SEQ ID NO: 2398349 - RNA, 19 nt, Artificial Sequence
  Description of Artificial Sequence: Synthetic oligonucleotide
caugguucuucgcgccacc

SEQ ID NO: 2398350 - RNA, 19 nt, Artificial Sequence
  Description of Artificial Sequence: Synthetic oligonucleotide
agcgcuagagacagucuug

SEQ ID NO: 2398351 - RNA, 19 nt, Artificial Sequence
  Description of Artificial Sequence: Synthetic oligonucleotide
ucccucucgaaggaauccu

SEQ ID NO: 2398352 - RNA, 19 nt, Artificial Sequence
  Description of Artificial Sequence: Synthetic oligonucleotide
gacagcucgaaggggccug

SEQ ID NO: 2398353 - RNA, 19 nt, Artificial Sequence
  Description of Artificial Sequence: Synthetic oligonucleotide
caaggucgagguagccagc

SEQ ID NO: 2398354 - RNA, 19 nt, Artificial Sequence
  Description of Artificial Sequence: Synthetic oligonucleotide
cauugggaauggguccucc

SEQ ID NO: 2398355 - RNA, 19 nt, Artificial Sequence
  Description of Artificial Sequence: Synthetic oligonucleotide
cucccagucagcggucucc

SEQ ID NO: 2398356 - RNA, 19 nt, Artificial Sequence
  Description of Artificial Sequence: Synthetic oligonucleotide
auacuccucugggucccgc

SEQ ID NO: 2398357 - RNA, 19 nt, Artificial Sequence
  Description of Artificial Sequence: Synthetic oligonucleotide
gggaauggguccuccaguc

SEQ ID NO: 2398358 - RNA, 19 nt, Artificial Sequence
  Description of Artificial Sequence: Synthetic oligonucleotide
cacugucccagucgcugcc

SEQ ID NO: 2398359 - RNA, 19 nt, Artificial Sequence
  Description of Artificial Sequence: Synthetic oligonucleotide
caccugaauccauugggaa

SEQ ID NO: 2398360 - RNA, 19 nt, Artificial Sequence
  Description of Artificial Sequence: Synthetic oligonucleotide
uucuucgcgccaccugaau

SEQ ID NO: 2398361 - RNA, 19 nt, Artificial Sequence
  Description of Artificial Sequence: Synthetic oligonucleotide
cacccuuccuggaccuucc

SEQ ID NO: 2398362 - RNA, 19 nt, Artificial Sequence
  Description of Artificial Sequence: Synthetic oligonucleotide
gucgagguagccagcugcc

SEQ ID NO: 2398363 - RNA, 19 nt, Artificial Sequence
  Description of Artificial Sequence: Synthetic oligonucleotide
caaagcguccaagacagcu

SEQ ID NO: 2398364 - RNA, 19 nt, Artificial Sequence
  Description of Artificial Sequence: Synthetic oligonucleotide
cuucugguccggcggugcc

SEQ ID NO: 2398365 - RNA, 19 nt, Artificial Sequence
  Description of Artificial Sequence: Synthetic oligonucleotide
cccaucugguuucuggggc

SEQ ID NO: 2398366 - RNA, 19 nt, Artificial Sequence
  Description of Artificial Sequence: Synthetic oligonucleotide
cugucccagucgcugcccg

SEQ ID NO: 2398367 - RNA, 19 nt, Artificial Sequence
  Description of Artificial Sequence: Synthetic oligonucleotide
cacuugguccucccuguuc

SEQ ID NO: 2398368 - RNA, 19 nt, Artificial Sequence
  Description of Artificial Sequence: Synthetic oligonucleotide
agucagcggucuccucauc

SEQ ID NO: 2398369 - RNA, 19 nt, Artificial Sequence
  Description of Artificial Sequence: Synthetic oligonucleotide
gugugugcggugagcaggc

SEQ ID NO: 2398370 - RNA, 19 nt, Artificial Sequence
  Description of Artificial Sequence: Synthetic oligonucleotide
gcccaaagcguccaagaca

SEQ ID NO: 2398371 - RNA, 19 nt, Artificial Sequence
  Description of Artificial Sequence: Synthetic oligonucleotide
uguucguccccggggcagc

SEQ ID NO: 2398372 - RNA, 19 nt, Artificial Sequence
  Description of Artificial Sequence: Synthetic oligonucleotide
cucugggucccgcagguaa

SEQ ID NO: 2398373 - RNA, 19 nt, Artificial Sequence
  Description of Artificial Sequence: Synthetic oligonucleotide
uucgcgccaccugaaucca

SEQ ID NO: 2398374 - RNA, 19 nt, Artificial Sequence
  Description of Artificial Sequence: Synthetic oligonucleotide
gcguggagcccaugcaggg

SEQ ID NO: 2398375 - RNA, 19 nt, Artificial Sequence
  Description of Artificial Sequence: Synthetic oligonucleotide
ggguccucgguuucccugc

SEQ ID NO: 2398376 - RNA, 19 nt, Artificial Sequence
  Description of Artificial Sequence: Synthetic oligonucleotide
aggucgagguagccagcug

SEQ ID NO: 2398377 - RNA, 19 nt, Artificial Sequence
  Description of Artificial Sequence: Synthetic oligonucleotide
auacggcuucugguccggc

SEQ ID NO: 2398378 - RNA, 19 nt, Artificial Sequence
  Description of Artificial Sequence: Synthetic oligonucleotide
ccgcagguaauuugagggc

SEQ ID NO: 2398379 - RNA, 19 nt, Artificial Sequence
  Description of Artificial Sequence: Synthetic oligonucleotide
ggcccaaagcguccaagac

SEQ ID NO: 2398380 - RNA, 19 nt, Artificial Sequence
  Description of Artificial Sequence: Synthetic oligonucleotide
ucgagguagccagcugcca

SEQ ID NO: 2398381 - RNA, 19 nt, Artificial Sequence
  Description of Artificial Sequence: Synthetic oligonucleotide
agggccgccaggaaacaca

SEQ ID NO: 2398382 - RNA, 19 nt, Artificial Sequence
  Description of Artificial Sequence: Synthetic oligonucleotide
gagcgcuagagacagucuu

SEQ ID NO: 2398383 - RNA, 19 nt, Artificial Sequence
  Description of Artificial Sequence: Synthetic oligonucleotide
cuguucguccccggggcag

SEQ ID NO: 2398384 - RNA, 19 nt, Artificial Sequence
  Description of Artificial Sequence: Synthetic oligonucleotide
ggcucuugagcgcuagaga

SEQ ID NO: 2398385 - RNA, 19 nt, Artificial Sequence
  Description of Artificial Sequence: Synthetic oligonucleotide
gugugcggugagcaggcuc

SEQ ID NO: 2398386 - RNA, 19 nt, Artificial Sequence
  Description of Artificial Sequence: Synthetic oligonucleotide
ugaaggcucuugagcgcua

SEQ ID NO: 2398387 - RNA, 19 nt, Artificial Sequence
  Description of Artificial Sequence: Synthetic oligonucleotide
ggcucccugaccuccugcc

SEQ ID NO: 2398388 - RNA, 19 nt, Artificial Sequence
  Description of Artificial Sequence: Synthetic oligonucleotide
uuccugcggccccaagguc

SEQ ID NO: 2398389 - RNA, 19 nt, Artificial Sequence
  Description of Artificial Sequence: Synthetic oligonucleotide
aggcgaaaugcagggugug

SEQ ID NO: 2398390 - RNA, 19 nt, Artificial Sequence
  Description of Artificial Sequence: Synthetic oligonucleotide
uccuuggucuugggaggcc

SEQ ID NO: 2398391 - RNA, 19 nt, Artificial Sequence
  Description of Artificial Sequence: Synthetic oligonucleotide
agcggucuccucauccuca

SEQ ID NO: 2398392 - RNA, 19 nt, Artificial Sequence
  Description of Artificial Sequence: Synthetic oligonucleotide
ggaauccuuucuuuugccu

SEQ ID NO: 2398393 - RNA, 19 nt, Artificial Sequence
  Description of Artificial Sequence: Synthetic oligonucleotide
ucuccggggcacuguccca

SEQ ID NO: 2398394 - RNA, 19 nt, Artificial Sequence
  Description of Artificial Sequence: Synthetic oligonucleotide
aggaaacacagcagcccgu

SEQ ID NO: 2398395 - RNA, 19 nt, Artificial Sequence
  Description of Artificial Sequence: Synthetic oligonucleotide
ucccagucagcggucuccu

SEQ ID NO: 2398396 - RNA, 19 nt, Artificial Sequence
  Description of Artificial Sequence: Synthetic oligonucleotide
gggucccgcagguaauuug

SEQ ID NO: 2398397 - RNA, 19 nt, Artificial Sequence
  Description of Artificial Sequence: Synthetic oligonucleotide
cuccggggcacugucccag

SEQ ID NO: 2398398 - RNA, 19 nt, Artificial Sequence
  Description of Artificial Sequence: Synthetic oligonucleotide
ggccucgaaggcccaaagc

SEQ ID NO: 2398399 - RNA, 19 nt, Artificial Sequence
  Description of Artificial Sequence: Synthetic oligonucleotide
cuccuggaugguccacuug

SEQ ID NO: 2398400 - RNA, 19 nt, Artificial Sequence
  Description of Artificial Sequence: Synthetic oligonucleotide
ugccccucacucucccagu

SEQ ID NO: 2398401 - RNA, 19 nt, Artificial Sequence
  Description of Artificial Sequence: Synthetic oligonucleotide
cagcaauuucugacgucga

SEQ ID NO: 2398402 - RNA, 19 nt, Artificial Sequence
  Description of Artificial Sequence: Synthetic oligonucleotide
uggucuugggaggccccgc

SEQ ID NO: 2398403 - RNA, 19 nt, Artificial Sequence
  Description of Artificial Sequence: Synthetic oligonucleotide
ggucccgcagguaauuuga

SEQ ID NO: 2398404 - RNA, 19 nt, Artificial Sequence
  Description of Artificial Sequence: Synthetic oligonucleotide
augguucuucgcgccaccu

SEQ ID NO: 2398405 - RNA, 19 nt, Artificial Sequence
  Description of Artificial Sequence: Synthetic oligonucleotide
gucccgcagguaauuugag

SEQ ID NO: 2398406 - RNA, 19 nt, Artificial Sequence
  Description of Artificial Sequence: Synthetic oligonucleotide
cugccaagucuucgcagga

SEQ ID NO: 2398407 - RNA, 19 nt, Artificial Sequence
  Description of Artificial Sequence: Synthetic oligonucleotide
cauugucuccggggcacug

SEQ ID NO: 2398408 - RNA, 19 nt, Artificial Sequence
  Description of Artificial Sequence: Synthetic oligonucleotide
cuugggaggccccgcaucu

SEQ ID NO: 2398409 - RNA, 19 nt, Artificial Sequence
  Description of Artificial Sequence: Synthetic oligonucleotide
ccuaggcucccugaccucc

SEQ ID NO: 2398410 - RNA, 19 nt, Artificial Sequence
  Description of Artificial Sequence: Synthetic oligonucleotide
guccggcggugccagcucc

SEQ ID NO: 2398411 - RNA, 19 nt, Artificial Sequence
  Description of Artificial Sequence: Synthetic oligonucleotide
cagcggucuccucauccuc

SEQ ID NO: 2398412 - RNA, 19 nt, Artificial Sequence
  Description of Artificial Sequence: Synthetic oligonucleotide
ccaccugaauccauuggga

SEQ ID NO: 2398413 - RNA, 19 nt, Artificial Sequence
  Description of Artificial Sequence: Synthetic oligonucleotide
ccaagucuucgcaggaaca

SEQ ID NO: 2398414 - RNA, 19 nt, Artificial Sequence
  Description of Artificial Sequence: Synthetic oligonucleotide
cccuguucguccccggggc

SEQ ID NO: 2398415 - RNA, 19 nt, Artificial Sequence
  Description of Artificial Sequence: Synthetic oligonucleotide
gacgucgaccagguuucuc

SEQ ID NO: 2398416 - RNA, 19 nt, Artificial Sequence
  Description of Artificial Sequence: Synthetic oligonucleotide
ccagucagcggucuccuca

SEQ ID NO: 2398417 - RNA, 19 nt, Artificial Sequence
  Description of Artificial Sequence: Synthetic oligonucleotide
ucgaaggggccuggagcac

SEQ ID NO: 2398418 - RNA, 19 nt, Artificial Sequence
  Description of Artificial Sequence: Synthetic oligonucleotide
gggugugugcggugagcag

SEQ ID NO: 2398419 - RNA, 19 nt, Artificial Sequence
  Description of Artificial Sequence: Synthetic oligonucleotide
cagcugccaagucuucgca

SEQ ID NO: 2398420 - RNA, 19 nt, Artificial Sequence
  Description of Artificial Sequence: Synthetic oligonucleotide
ccgccaugguucuucgcgc

SEQ ID NO: 2398421 - RNA, 19 nt, Artificial Sequence
  Description of Artificial Sequence: Synthetic oligonucleotide
gaugguccacuugguccuc

SEQ ID NO: 2398422 - RNA, 19 nt, Artificial Sequence
  Description of Artificial Sequence: Synthetic oligonucleotide
ccagucgcugcccgaauuc

SEQ ID NO: 2398423 - RNA, 19 nt, Artificial Sequence
  Description of Artificial Sequence: Synthetic oligonucleotide
cagcccgugcagccacagg

SEQ ID NO: 2398424 - RNA, 19 nt, Artificial Sequence
  Description of Artificial Sequence: Synthetic oligonucleotide
ucccagucgcugcccgaau

SEQ ID NO: 2398425 - RNA, 19 nt, Artificial Sequence
  Description of Artificial Sequence: Synthetic oligonucleotide
gggccucgaaggcccaaag

SEQ ID NO: 2398426 - RNA, 19 nt, Artificial Sequence
  Description of Artificial Sequence: Synthetic oligonucleotide
gucgaccagguuucuccaa

SEQ ID NO: 2398427 - RNA, 19 nt, Artificial Sequence
  Description of Artificial Sequence: Synthetic oligonucleotide
gggccgccaggaaacacag

SEQ ID NO: 2398428 - RNA, 19 nt, Artificial Sequence
  Description of Artificial Sequence: Synthetic oligonucleotide
ugguggagaugugcagaua

SEQ ID NO: 2398429 - RNA, 19 nt, Artificial Sequence
  Description of Artificial Sequence: Synthetic oligonucleotide
ugugugcggugagcaggcu

SEQ ID NO: 2398430 - RNA, 19 nt, Artificial Sequence
  Description of Artificial Sequence: Synthetic oligonucleotide
ccgcaucucccauugucuc

SEQ ID NO: 2398431 - RNA, 19 nt, Artificial Sequence
  Description of Artificial Sequence: Synthetic oligonucleotide
ccccgcaucucccauuguc

SEQ ID NO: 2398432 - RNA, 19 nt, Artificial Sequence
  Description of Artificial Sequence: Synthetic oligonucleotide
cccauugucuccggggcac

SEQ ID NO: 2398433 - RNA, 19 nt, Artificial Sequence
  Description of Artificial Sequence: Synthetic oligonucleotide
cauccucacugggucccug

SEQ ID NO: 2398434 - RNA, 19 nt, Artificial Sequence
  Description of Artificial Sequence: Synthetic oligonucleotide
ugacgucgaccagguuucu

SEQ ID NO: 2398435 - RNA, 19 nt, Artificial Sequence
  Description of Artificial Sequence: Synthetic oligonucleotide
ccucacucucccagucagc

SEQ ID NO: 2398436 - RNA, 19 nt, Artificial Sequence
  Description of Artificial Sequence: Synthetic oligonucleotide
ugggucccgcagguaauuu

SEQ ID NO: 2398437 - RNA, 19 nt, Artificial Sequence
  Description of Artificial Sequence: Synthetic oligonucleotide
uucguccccggggcagccc

SEQ ID NO: 2398438 - RNA, 19 nt, Artificial Sequence
  Description of Artificial Sequence: Synthetic oligonucleotide
gcaggcaauucagccuuug

SEQ ID NO: 2398439 - RNA, 19 nt, Artificial Sequence
  Description of Artificial Sequence: Synthetic oligonucleotide
uucugacgucgaccagguu

SEQ ID NO: 2398440 - RNA, 19 nt, Artificial Sequence
  Description of Artificial Sequence: Synthetic oligonucleotide
cuugucccucucgaaggaa

SEQ ID NO: 2398441 - RNA, 19 nt, Artificial Sequence
  Description of Artificial Sequence: Synthetic oligonucleotide
ccaucugguuucuggggca

SEQ ID NO: 2398442 - RNA, 19 nt, Artificial Sequence
  Description of Artificial Sequence: Synthetic oligonucleotide
gggccgccaugguucuucg

SEQ ID NO: 2398443 - RNA, 19 nt, Artificial Sequence
  Description of Artificial Sequence: Synthetic oligonucleotide
ucgcgccaccugaauccau

SEQ ID NO: 2398444 - RNA, 19 nt, Artificial Sequence
  Description of Artificial Sequence: Synthetic oligonucleotide
uugggaggccccgcaucuc

SEQ ID NO: 2398445 - RNA, 19 nt, Artificial Sequence
  Description of Artificial Sequence: Synthetic oligonucleotide
caggcaauucagccuuugu

SEQ ID NO: 2398446 - RNA, 19 nt, Artificial Sequence
  Description of Artificial Sequence: Synthetic oligonucleotide
guucguccccggggcagcc

SEQ ID NO: 2398447 - RNA, 19 nt, Artificial Sequence
  Description of Artificial Sequence: Synthetic oligonucleotide
ggaauggguccuccagucu

SEQ ID NO: 2398448 - RNA, 19 nt, Artificial Sequence
  Description of Artificial Sequence: Synthetic oligonucleotide
ccacagggccucgaaggcc

SEQ ID NO: 2398449 - RNA, 19 nt, Artificial Sequence
  Description of Artificial Sequence: Synthetic oligonucleotide
cgccaccugaauccauugg

SEQ ID NO: 2398450 - RNA, 19 nt, Artificial Sequence
  Description of Artificial Sequence: Synthetic oligonucleotide
cagggccgccaggaaacac

SEQ ID NO: 2398451 - RNA, 19 nt, Artificial Sequence
  Description of Artificial Sequence: Synthetic oligonucleotide
guucuucgcgccaccugaa

SEQ ID NO: 2398452 - RNA, 19 nt, Artificial Sequence
  Description of Artificial Sequence: Synthetic oligonucleotide
gcggucuccucauccucac

SEQ ID NO: 2398453 - RNA, 19 nt, Artificial Sequence
  Description of Artificial Sequence: Synthetic oligonucleotide
cggggcacugucccagucg

SEQ ID NO: 2398454 - RNA, 19 nt, Artificial Sequence
  Description of Artificial Sequence: Synthetic oligonucleotide
gggcaggcaauucagccuu

SEQ ID NO: 2398455 - RNA, 19 nt, Artificial Sequence
  Description of Artificial Sequence: Synthetic oligonucleotide
agggccucgaaggcccaaa

SEQ ID NO: 2398456 - RNA, 19 nt, Artificial Sequence
  Description of Artificial Sequence: Synthetic oligonucleotide
ccaaagcguccaagacagc

SEQ ID NO: 2398457 - RNA, 19 nt, Artificial Sequence
  Description of Artificial Sequence: Synthetic oligonucleotide
cgccaugguucuucgcgcc

SEQ ID NO: 2398458 - RNA, 19 nt, Artificial Sequence
  Description of Artificial Sequence: Synthetic oligonucleotide
gucccagucgcugcccgaa

SEQ ID NO: 2398459 - RNA, 19 nt, Artificial Sequence
  Description of Artificial Sequence: Synthetic oligonucleotide
gccaugguucuucgcgcca

SEQ ID NO: 2398460 - RNA, 19 nt, Artificial Sequence
  Description of Artificial Sequence: Synthetic oligonucleotide
ucccugcauccuuggucuu

SEQ ID NO: 2398461 - RNA, 19 nt, Artificial Sequence
  Description of Artificial Sequence: Synthetic oligonucleotide
cucgguuucccugcauccu

SEQ ID NO: 2398462 - RNA, 19 nt, Artificial Sequence
  Description of Artificial Sequence: Synthetic oligonucleotide
agcguccaagacagcucga

SEQ ID NO: 2398463 - RNA, 19 nt, Artificial Sequence
  Description of Artificial Sequence: Synthetic oligonucleotide
cgcugcccgaauucucggg

SEQ ID NO: 2398464 - RNA, 19 nt, Artificial Sequence
  Description of Artificial Sequence: Synthetic oligonucleotide
gcacccuuccuggaccuuc

SEQ ID NO: 2398465 - RNA, 19 nt, Artificial Sequence
  Description of Artificial Sequence: Synthetic oligonucleotide
cgguuucccugcauccuug

SEQ ID NO: 2398466 - RNA, 19 nt, Artificial Sequence
  Description of Artificial Sequence: Synthetic oligonucleotide
ccucccuguucguccccgg

SEQ ID NO: 2398467 - RNA, 19 nt, Artificial Sequence
  Description of Artificial Sequence: Synthetic oligonucleotide
cccaaggucgagguagcca

SEQ ID NO: 2398468 - RNA, 19 nt, Artificial Sequence
  Description of Artificial Sequence: Synthetic oligonucleotide
ggcggugccagcuccccgu

SEQ ID NO: 2398469 - RNA, 19 nt, Artificial Sequence
  Description of Artificial Sequence: Synthetic oligonucleotide
cugguccggcggugccagc

SEQ ID NO: 2398470 - RNA, 19 nt, Artificial Sequence
  Description of Artificial Sequence: Synthetic oligonucleotide
gcgcagcaauuucugacgu

SEQ ID NO: 2398471 - RNA, 19 nt, Artificial Sequence
  Description of Artificial Sequence: Synthetic oligonucleotide
gcguccaagacagcucgaa

SEQ ID NO: 2398472 - RNA, 19 nt, Artificial Sequence
  Description of Artificial Sequence: Synthetic oligonucleotide
cccgcaucucccauugucu

SEQ ID NO: 2398473 - RNA, 19 nt, Artificial Sequence
  Description of Artificial Sequence: Synthetic oligonucleotide
gguccggcggugccagcuc

SEQ ID NO: 2398474 - RNA, 19 nt, Artificial Sequence
  Description of Artificial Sequence: Synthetic oligonucleotide
gcgcuagagacagucuugu

SEQ ID NO: 2398475 - RNA, 19 nt, Artificial Sequence
  Description of Artificial Sequence: Synthetic oligonucleotide
ggcuucugguccggcggug

SEQ ID NO: 2398476 - RNA, 19 nt, Artificial Sequence
  Description of Artificial Sequence: Synthetic oligonucleotide
cagucgcugcccgaauucu

SEQ ID NO: 2398477 - RNA, 19 nt, Artificial Sequence
  Description of Artificial Sequence: Synthetic oligonucleotide
gucuugggaggccccgcau

SEQ ID NO: 2398478 - RNA, 19 nt, Artificial Sequence
  Description of Artificial Sequence: Synthetic oligonucleotide
ggccgccaugguucuucgc

SEQ ID NO: 2398479 - RNA, 19 nt, Artificial Sequence
  Description of Artificial Sequence: Synthetic oligonucleotide
ggcgaaaugcagggugugu

SEQ ID NO: 2398480 - RNA, 19 nt, Artificial Sequence
  Description of Artificial Sequence: Synthetic oligonucleotide
ccugcggccccaaggucga

SEQ ID NO: 2398481 - RNA, 19 nt, Artificial Sequence
  Description of Artificial Sequence: Synthetic oligonucleotide
cgcuagagacagucuuguc

SEQ ID NO: 2398482 - RNA, 19 nt, Artificial Sequence
  Description of Artificial Sequence: Synthetic oligonucleotide
agcagcccgugcagccaca

SEQ ID NO: 2398483 - RNA, 19 nt, Artificial Sequence
  Description of Artificial Sequence: Synthetic oligonucleotide
cuugagcgcuagagacagu

SEQ ID NO: 2398484 - RNA, 19 nt, Artificial Sequence
  Description of Artificial Sequence: Synthetic oligonucleotide
cgucgaccagguuucucca

SEQ ID NO: 2398485 - RNA, 19 nt, Artificial Sequence
  Description of Artificial Sequence: Synthetic oligonucleotide
gcggccccaaggucgaggu

SEQ ID NO: 2398486 - RNA, 19 nt, Artificial Sequence
  Description of Artificial Sequence: Synthetic oligonucleotide
agcacccuuccuggaccuu

SEQ ID NO: 2398487 - RNA, 19 nt, Artificial Sequence
  Description of Artificial Sequence: Synthetic oligonucleotide
ccauugggaauggguccuc

SEQ ID NO: 2398488 - RNA, 19 nt, Artificial Sequence
  Description of Artificial Sequence: Synthetic oligonucleotide
ccccaaggucgagguagcc

SEQ ID NO: 2398489 - RNA, 19 nt, Artificial Sequence
  Description of Artificial Sequence: Synthetic oligonucleotide
ccuguucguccccggggca

SEQ ID NO: 2398490 - RNA, 19 nt, Artificial Sequence
  Description of Artificial Sequence: Synthetic oligonucleotide
cgcagguaauuugagggcu

SEQ ID NO: 2398491 - RNA, 19 nt, Artificial Sequence
  Description of Artificial Sequence: Synthetic oligonucleotide
cacugggucccuggaggcu

SEQ ID NO: 2398492 - RNA, 19 nt, Artificial Sequence
  Description of Artificial Sequence: Synthetic oligonucleotide
ggccgccaggaaacacagc

SEQ ID NO: 2398493 - RNA, 19 nt, Artificial Sequence
  Description of Artificial Sequence: Synthetic oligonucleotide
cagcucgaaggggccugga

SEQ ID NO: 2398494 - RNA, 19 nt, Artificial Sequence
  Description of Artificial Sequence: Synthetic oligonucleotide
gccuccuggaugguccacu

SEQ ID NO: 2398495 - RNA, 19 nt, Artificial Sequence
  Description of Artificial Sequence: Synthetic oligonucleotide
guccucgguuucccugcau

SEQ ID NO: 2398496 - RNA, 19 nt, Artificial Sequence
  Description of Artificial Sequence: Synthetic oligonucleotide
ccuggaccuucccuaggcu

SEQ ID NO: 2398497 - RNA, 19 nt, Artificial Sequence
  Description of Artificial Sequence: Synthetic oligonucleotide
cgaaggcccaaagcgucca

SEQ ID NO: 2398498 - RNA, 19 nt, Artificial Sequence
  Description of Artificial Sequence: Synthetic oligonucleotide
cgaaggggccuggagcaca

SEQ ID NO: 2398499 - RNA, 19 nt, Artificial Sequence
  Description of Artificial Sequence: Synthetic oligonucleotide
cugggucccgcagguaauu

SEQ ID NO: 2398500 - RNA, 19 nt, Artificial Sequence
  Description of Artificial Sequence: Synthetic oligonucleotide
guccacccaucugguuucu

SEQ ID NO: 2398501 - RNA, 19 nt, Artificial Sequence
  Description of Artificial Sequence: Synthetic oligonucleotide
ccgaggccagcagcuccag

SEQ ID NO: 2398502 - RNA, 19 nt, Artificial Sequence
  Description of Artificial Sequence: Synthetic oligonucleotide
ccgaagccagcgcagcaau

SEQ ID NO: 2398503 - RNA, 19 nt, Artificial Sequence
  Description of Artificial Sequence: Synthetic oligonucleotide
cagggccucgaaggcccaa

SEQ ID NO: 2398504 - RNA, 19 nt, Artificial Sequence
  Description of Artificial Sequence: Synthetic oligonucleotide
cccucucgaaggaauccuu

SEQ ID NO: 2398505 - RNA, 19 nt, Artificial Sequence
  Description of Artificial Sequence: Synthetic oligonucleotide
gcacagcguggagcccaug

SEQ ID NO: 2398506 - RNA, 19 nt, Artificial Sequence
  Description of Artificial Sequence: Synthetic oligonucleotide
cccagucgcugcccgaauu

SEQ ID NO: 2398507 - RNA, 19 nt, Artificial Sequence
  Description of Artificial Sequence: Synthetic oligonucleotide
gcgccugcaggaggccaaa

SEQ ID NO: 2398508 - RNA, 19 nt, Artificial Sequence
  Description of Artificial Sequence: Synthetic oligonucleotide
cgcgccaccugaauccauu

SEQ ID NO: 2398509 - RNA, 19 nt, Artificial Sequence
  Description of Artificial Sequence: Synthetic oligonucleotide
ggcaggcaauucagccuuu

SEQ ID NO: 2398510 - RNA, 19 nt, Artificial Sequence
  Description of Artificial Sequence: Synthetic oligonucleotide
gccccgcaucucccauugu

SEQ ID NO: 2398511 - RNA, 19 nt, Artificial Sequence
  Description of Artificial Sequence: Synthetic oligonucleotide
cggccccaaggucgaggua

SEQ ID NO: 2398512 - RNA, 19 nt, Artificial Sequence
  Description of Artificial Sequence: Synthetic oligonucleotide
aaugguacaaauuaaaaga

SEQ ID NO: 2398513 - RNA, 19 nt, Artificial Sequence
  Description of Artificial Sequence: Synthetic oligonucleotide
auuaaaagaacuuaagcag

SEQ ID NO: 2398514 - RNA, 19 nt, Artificial Sequence
  Description of Artificial Sequence: Synthetic oligonucleotide
aguagcaagacauagacag

SEQ ID NO: 2398515 - RNA, 19 nt, Artificial Sequence
  Description of Artificial Sequence: Synthetic oligonucleotide
aaaugguacaaauuaaaag

SEQ ID NO: 2398516 - RNA, 19 nt, Artificial Sequence
  Description of Artificial Sequence: Synthetic oligonucleotide
aagacauagacagauagac

SEQ ID NO: 2398517 - RNA, 19 nt, Artificial Sequence
  Description of Artificial Sequence: Synthetic oligonucleotide
uauagaaaagguaacggca

SEQ ID NO: 2398518 - RNA, 19 nt, Artificial Sequence
  Description of Artificial Sequence: Synthetic oligonucleotide
gacagauagacguaggagg

SEQ ID NO: 2398519 - RNA, 19 nt, Artificial Sequence
  Description of Artificial Sequence: Synthetic oligonucleotide
ugacuuauagaaaagguaa

SEQ ID NO: 2398520 - RNA, 19 nt, Artificial Sequence
  Description of Artificial Sequence: Synthetic oligonucleotide
aaaguauuuggcaaaguuc

SEQ ID NO: 2398521 - RNA, 19 nt, Artificial Sequence
  Description of Artificial Sequence: Synthetic oligonucleotide
uuagcucucacuauguccc

SEQ ID NO: 2398522 - RNA, 19 nt, Artificial Sequence
  Description of Artificial Sequence: Synthetic oligonucleotide
uuugucaguagccaguuug

SEQ ID NO: 2398523 - RNA, 19 nt, Artificial Sequence
  Description of Artificial Sequence: Synthetic oligonucleotide
uuauagaaaagguaacggc

SEQ ID NO: 2398524 - RNA, 19 nt, Artificial Sequence
  Description of Artificial Sequence: Synthetic oligonucleotide
uuuauuugaagaaauggua

SEQ ID NO: 2398525 - RNA, 19 nt, Artificial Sequence
  Description of Artificial Sequence: Synthetic oligonucleotide
uacaguuccagguugaucu

SEQ ID NO: 2398526 - RNA, 19 nt, Artificial Sequence
  Description of Artificial Sequence: Synthetic oligonucleotide
aaauccuuuauuugaagaa

SEQ ID NO: 2398527 - RNA, 19 nt, Artificial Sequence
  Description of Artificial Sequence: Synthetic oligonucleotide
ugcucauucagguaauggg

SEQ ID NO: 2398528 - RNA, 19 nt, Artificial Sequence
  Description of Artificial Sequence: Synthetic oligonucleotide
aaguauuuggcaaaguucu

SEQ ID NO: 2398529 - RNA, 19 nt, Artificial Sequence
  Description of Artificial Sequence: Synthetic oligonucleotide
ugacugaugacaucacugg

SEQ ID NO: 2398530 - RNA, 19 nt, Artificial Sequence
  Description of Artificial Sequence: Synthetic oligonucleotide
ugccaugccagcuucaggg

SEQ ID NO: 2398531 - RNA, 19 nt, Artificial Sequence
  Description of Artificial Sequence: Synthetic oligonucleotide
gauucggccaccucguugg

SEQ ID NO: 2398532 - RNA, 19 nt, Artificial Sequence
  Description of Artificial Sequence: Synthetic oligonucleotide
ucaaugaagucacacaaau

SEQ ID NO: 2398533 - RNA, 19 nt, Artificial Sequence
  Description of Artificial Sequence: Synthetic oligonucleotide
acuuauagaaaagguaacg

SEQ ID NO: 2398534 - RNA, 19 nt, Artificial Sequence
  Description of Artificial Sequence: Synthetic oligonucleotide
uaagcagauguuuugguga

SEQ ID NO: 2398535 - RNA, 19 nt, Artificial Sequence
  Description of Artificial Sequence: Synthetic oligonucleotide
aagagauauucugccaugc

SEQ ID NO: 2398536 - RNA, 19 nt, Artificial Sequence
  Description of Artificial Sequence: Synthetic oligonucleotide
guuuuggugacuuauagaa

SEQ ID NO: 2398537 - RNA, 19 nt, Artificial Sequence
  Description of Artificial Sequence: Synthetic oligonucleotide
aacuuaagcagauguuuug

SEQ ID NO: 2398538 - RNA, 19 nt, Artificial Sequence
  Description of Artificial Sequence: Synthetic oligonucleotide
cucacuaugucccagggug

SEQ ID NO: 2398539 - RNA, 19 nt, Artificial Sequence
  Description of Artificial Sequence: Synthetic oligonucleotide
aaagagauauucugccaug

SEQ ID NO: 2398540 - RNA, 19 nt, Artificial Sequence
  Description of Artificial Sequence: Synthetic oligonucleotide
gacauagacagauagacgu

SEQ ID NO: 2398541 - RNA, 19 nt, Artificial Sequence
  Description of Artificial Sequence: Synthetic oligonucleotide
ugguggagaaaguauuugg

SEQ ID NO: 2398542 - RNA, 19 nt, Artificial Sequence
  Description of Artificial Sequence: Synthetic oligonucleotide
uuaagcagauguuuuggug

SEQ ID NO: 2398543 - RNA, 19 nt, Artificial Sequence
  Description of Artificial Sequence: Synthetic oligonucleotide
accucguugguucugcagc

SEQ ID NO: 2398544 - RNA, 19 nt, Artificial Sequence
  Description of Artificial Sequence: Synthetic oligonucleotide
cuuagcucucacuaugucc

SEQ ID NO: 2398545 - RNA, 19 nt, Artificial Sequence
  Description of Artificial Sequence: Synthetic oligonucleotide
agagauauucugccaugcc

SEQ ID NO: 2398546 - RNA, 19 nt, Artificial Sequence
  Description of Artificial Sequence: Synthetic oligonucleotide
uaaaagaacuuaagcagau

SEQ ID NO: 2398547 - RNA, 19 nt, Artificial Sequence
  Description of Artificial Sequence: Synthetic oligonucleotide
uugcaaaggguucuguccc

SEQ ID NO: 2398548 - RNA, 19 nt, Artificial Sequence
  Description of Artificial Sequence: Synthetic oligonucleotide
guugcaaaggguucugucc

SEQ ID NO: 2398549 - RNA, 19 nt, Artificial Sequence
  Description of Artificial Sequence: Synthetic oligonucleotide
guaacggcagccaacaugc

SEQ ID NO: 2398550 - RNA, 19 nt, Artificial Sequence
  Description of Artificial Sequence: Synthetic oligonucleotide
caugcauacacuuccucag

SEQ ID NO: 2398551 - RNA, 19 nt, Artificial Sequence
  Description of Artificial Sequence: Synthetic oligonucleotide
cugauucacacucuuuucc

SEQ ID NO: 2398552 - RNA, 19 nt, Artificial Sequence
  Description of Artificial Sequence: Synthetic oligonucleotide
uagugacugauucacacuc

SEQ ID NO: 2398553 - RNA, 19 nt, Artificial Sequence
  Description of Artificial Sequence: Synthetic oligonucleotide
cagguaaugggucucaaug

SEQ ID NO: 2398554 - RNA, 19 nt, Artificial Sequence
  Description of Artificial Sequence: Synthetic oligonucleotide
cacuccauugcguucagcc

SEQ ID NO: 2398555 - RNA, 19 nt, Artificial Sequence
  Description of Artificial Sequence: Synthetic oligonucleotide
aaagguaacggcagccaac

SEQ ID NO: 2398556 - RNA, 19 nt, Artificial Sequence
  Description of Artificial Sequence: Synthetic oligonucleotide
uggugacuuauagaaaagg

SEQ ID NO: 2398557 - RNA, 19 nt, Artificial Sequence
  Description of Artificial Sequence: Synthetic oligonucleotide
acuuaagcagauguuuugg

SEQ ID NO: 2398558 - RNA, 19 nt, Artificial Sequence
  Description of Artificial Sequence: Synthetic oligonucleotide
aaaggguucugucccggag

SEQ ID NO: 2398559 - RNA, 19 nt, Artificial Sequence
  Description of Artificial Sequence: Synthetic oligonucleotide
acuccauugcguucagccc

SEQ ID NO: 2398560 - RNA, 19 nt, Artificial Sequence
  Description of Artificial Sequence: Synthetic oligonucleotide
guucaagcacuguugaagc

SEQ ID NO: 2398561 - RNA, 19 nt, Artificial Sequence
  Description of Artificial Sequence: Synthetic oligonucleotide
gaagcaggaaaccgcggcg

SEQ ID NO: 2398562 - RNA, 19 nt, Artificial Sequence
  Description of Artificial Sequence: Synthetic oligonucleotide
aauccuuuauuugaagaaa

SEQ ID NO: 2398563 - RNA, 19 nt, Artificial Sequence
  Description of Artificial Sequence: Synthetic oligonucleotide
uagacagauagacguagga

SEQ ID NO: 2398564 - RNA, 19 nt, Artificial Sequence
  Description of Artificial Sequence: Synthetic oligonucleotide
acaaauuaaaagaacuuaa

SEQ ID NO: 2398565 - RNA, 19 nt, Artificial Sequence
  Description of Artificial Sequence: Synthetic oligonucleotide
guugaagcaggaaaccgcg

SEQ ID NO: 2398566 - RNA, 19 nt, Artificial Sequence
  Description of Artificial Sequence: Synthetic oligonucleotide
uuggugacuuauagaaaag

SEQ ID NO: 2398567 - RNA, 19 nt, Artificial Sequence
  Description of Artificial Sequence: Synthetic oligonucleotide
gcaagacauagacagauag

SEQ ID NO: 2398568 - RNA, 19 nt, Artificial Sequence
  Description of Artificial Sequence: Synthetic oligonucleotide
guaggaggcguacaguucc

SEQ ID NO: 2398569 - RNA, 19 nt, Artificial Sequence
  Description of Artificial Sequence: Synthetic oligonucleotide
aaaagguaacggcagccaa

SEQ ID NO: 2398570 - RNA, 19 nt, Artificial Sequence
  Description of Artificial Sequence: Synthetic oligonucleotide
gacgcgguggucauggugg

SEQ ID NO: 2398571 - RNA, 19 nt, Artificial Sequence
  Description of Artificial Sequence: Synthetic oligonucleotide
acaugcauacacuuccuca

SEQ ID NO: 2398572 - RNA, 19 nt, Artificial Sequence
  Description of Artificial Sequence: Synthetic oligonucleotide
caaaauccuuuauuugaag

SEQ ID NO: 2398573 - RNA, 19 nt, Artificial Sequence
  Description of Artificial Sequence: Synthetic oligonucleotide
uuccguucaagcacuguug

SEQ ID NO: 2398574 - RNA, 19 nt, Artificial Sequence
  Description of Artificial Sequence: Synthetic oligonucleotide
auugcguucagcccacucu

SEQ ID NO: 2398575 - RNA, 19 nt, Artificial Sequence
  Description of Artificial Sequence: Synthetic oligonucleotide
guuugugcaguuccaguag

SEQ ID NO: 2398576 - RNA, 19 nt, Artificial Sequence
  Description of Artificial Sequence: Synthetic oligonucleotide
ugcagugcacacuccauug

SEQ ID NO: 2398577 - RNA, 19 nt, Artificial Sequence
  Description of Artificial Sequence: Synthetic oligonucleotide
cauacacuuccucagugac

SEQ ID NO: 2398578 - RNA, 19 nt, Artificial Sequence
  Description of Artificial Sequence: Synthetic oligonucleotide
cuuugauggauuucaccug

SEQ ID NO: 2398579 - RNA, 19 nt, Artificial Sequence
  Description of Artificial Sequence: Synthetic oligonucleotide
uuuuggugacuuauagaaa

SEQ ID NO: 2398580 - RNA, 19 nt, Artificial Sequence
  Description of Artificial Sequence: Synthetic oligonucleotide
aagaaaugguacaaauuaa

SEQ ID NO: 2398581 - RNA, 19 nt, Artificial Sequence
  Description of Artificial Sequence: Synthetic oligonucleotide
uccguucaagcacuguuga

SEQ ID NO: 2398582 - RNA, 19 nt, Artificial Sequence
  Description of Artificial Sequence: Synthetic oligonucleotide
cuggugguaguucuggcgc

SEQ ID NO: 2398583 - RNA, 19 nt, Artificial Sequence
  Description of Artificial Sequence: Synthetic oligonucleotide
aagguaacggcagccaaca

SEQ ID NO: 2398584 - RNA, 19 nt, Artificial Sequence
  Description of Artificial Sequence: Synthetic oligonucleotide
agaacuuaagcagauguuu

SEQ ID NO: 2398585 - RNA, 19 nt, Artificial Sequence
  Description of Artificial Sequence: Synthetic oligonucleotide
ccaacaugcauacacuucc

SEQ ID NO: 2398586 - RNA, 19 nt, Artificial Sequence
  Description of Artificial Sequence: Synthetic oligonucleotide
cacucucccagucaucacg

SEQ ID NO: 2398587 - RNA, 19 nt, Artificial Sequence
  Description of Artificial Sequence: Synthetic oligonucleotide
uuuuccaagugcagugcac

SEQ ID NO: 2398588 - RNA, 19 nt, Artificial Sequence
  Description of Artificial Sequence: Synthetic oligonucleotide
uccagguugaucuggcggu

SEQ ID NO: 2398589 - RNA, 19 nt, Artificial Sequence
  Description of Artificial Sequence: Synthetic oligonucleotide
aguuugugcaguuccagua

SEQ ID NO: 2398590 - RNA, 19 nt, Artificial Sequence
  Description of Artificial Sequence: Synthetic oligonucleotide
aggguucugucccggagcg

SEQ ID NO: 2398591 - RNA, 19 nt, Artificial Sequence
  Description of Artificial Sequence: Synthetic oligonucleotide
agacguaggaggcguacag

SEQ ID NO: 2398592 - RNA, 19 nt, Artificial Sequence
  Description of Artificial Sequence: Synthetic oligonucleotide
uagcaagacauagacagau

SEQ ID NO: 2398593 - RNA, 19 nt, Artificial Sequence
  Description of Artificial Sequence: Synthetic oligonucleotide
gugacugaugacaucacug

SEQ ID NO: 2398594 - RNA, 19 nt, Artificial Sequence
  Description of Artificial Sequence: Synthetic oligonucleotide
gacuuauagaaaagguaac

SEQ ID NO: 2398595 - RNA, 19 nt, Artificial Sequence
  Description of Artificial Sequence: Synthetic oligonucleotide
uugucaguagccaguuugu

SEQ ID NO: 2398596 - RNA, 19 nt, Artificial Sequence
  Description of Artificial Sequence: Synthetic oligonucleotide
agacauagacagauagacg

SEQ ID NO: 2398597 - RNA, 19 nt, Artificial Sequence
  Description of Artificial Sequence: Synthetic oligonucleotide
guaguucuggcgcaccugc

SEQ ID NO: 2398598 - RNA, 19 nt, Artificial Sequence
  Description of Artificial Sequence: Synthetic oligonucleotide
uccaguagugacugauuca

SEQ ID NO: 2398599 - RNA, 19 nt, Artificial Sequence
  Description of Artificial Sequence: Synthetic oligonucleotide
aggggcucccaucuugcgc

SEQ ID NO: 2398600 - RNA, 19 nt, Artificial Sequence
  Description of Artificial Sequence: Synthetic oligonucleotide
ucaucccggucaaaguagc

SEQ ID NO: 2398601 - RNA, 19 nt, Artificial Sequence
  Description of Artificial Sequence: Synthetic oligonucleotide
ugagauugguggagaaagu

SEQ ID NO: 2398602 - RNA, 19 nt, Artificial Sequence
  Description of Artificial Sequence: Synthetic oligonucleotide
ucuugcgcaaguuggucac

SEQ ID NO: 2398603 - RNA, 19 nt, Artificial Sequence
  Description of Artificial Sequence: Synthetic oligonucleotide
ugcaaaggguucugucccg

SEQ ID NO: 2398604 - RNA, 19 nt, Artificial Sequence
  Description of Artificial Sequence: Synthetic oligonucleotide
aaguucuucagagccacau

SEQ ID NO: 2398605 - RNA, 19 nt, Artificial Sequence
  Description of Artificial Sequence: Synthetic oligonucleotide
uugguggagaaaguauuug

SEQ ID NO: 2398606 - RNA, 19 nt, Artificial Sequence
  Description of Artificial Sequence: Synthetic oligonucleotide
cagugcacacuccauugcg

SEQ ID NO: 2398607 - RNA, 19 nt, Artificial Sequence
  Description of Artificial Sequence: Synthetic oligonucleotide
ucuggcgcaccugcgaggg

SEQ ID NO: 2398608 - RNA, 19 nt, Artificial Sequence
  Description of Artificial Sequence: Synthetic oligonucleotide
aucacugguggcuucggga

SEQ ID NO: 2398609 - RNA, 19 nt, Artificial Sequence
  Description of Artificial Sequence: Synthetic oligonucleotide
auagacguaggaggcguac

SEQ ID NO: 2398610 - RNA, 19 nt, Artificial Sequence
  Description of Artificial Sequence: Synthetic oligonucleotide
aacggcagccaacaugcau

SEQ ID NO: 2398611 - RNA, 19 nt, Artificial Sequence
  Description of Artificial Sequence: Synthetic oligonucleotide
augguacaaauuaaaagaa

SEQ ID NO: 2398612 - RNA, 19 nt, Artificial Sequence
  Description of Artificial Sequence: Synthetic oligonucleotide
aucacggucugguuucuug

SEQ ID NO: 2398613 - RNA, 19 nt, Artificial Sequence
  Description of Artificial Sequence: Synthetic oligonucleotide
gguaacggcagccaacaug

SEQ ID NO: 2398614 - RNA, 19 nt, Artificial Sequence
  Description of Artificial Sequence: Synthetic oligonucleotide
ucccaucuugcgcaaguug

SEQ ID NO: 2398615 - RNA, 19 nt, Artificial Sequence
  Description of Artificial Sequence: Synthetic oligonucleotide
uucaagcacuguugaagca

SEQ ID NO: 2398616 - RNA, 19 nt, Artificial Sequence
  Description of Artificial Sequence: Synthetic oligonucleotide
aucuugcgcaaguugguca

SEQ ID NO: 2398617 - RNA, 19 nt, Artificial Sequence
  Description of Artificial Sequence: Synthetic oligonucleotide
cagagccacaucaucccgg

SEQ ID NO: 2398618 - RNA, 19 nt, Artificial Sequence
  Description of Artificial Sequence: Synthetic oligonucleotide
uugcguucagcccacucuc

SEQ ID NO: 2398619 - RNA, 19 nt, Artificial Sequence
  Description of Artificial Sequence: Synthetic oligonucleotide
gacaucacugguggcuucg

SEQ ID NO: 2398620 - RNA, 19 nt, Artificial Sequence
  Description of Artificial Sequence: Synthetic oligonucleotide
agauucggccaccucguug

SEQ ID NO: 2398621 - RNA, 19 nt, Artificial Sequence
  Description of Artificial Sequence: Synthetic oligonucleotide
ucacugguggcuucgggaa

SEQ ID NO: 2398622 - RNA, 19 nt, Artificial Sequence
  Description of Artificial Sequence: Synthetic oligonucleotide
gaaaccgcggcgacucugg

SEQ ID NO: 2398623 - RNA, 19 nt, Artificial Sequence
  Description of Artificial Sequence: Synthetic oligonucleotide
gucagcuuagcucucacua

SEQ ID NO: 2398624 - RNA, 19 nt, Artificial Sequence
  Description of Artificial Sequence: Synthetic oligonucleotide
uguucccucuccucaugag

SEQ ID NO: 2398625 - RNA, 19 nt, Artificial Sequence
  Description of Artificial Sequence: Synthetic oligonucleotide
agcguguucccucuccuca

SEQ ID NO: 2398626 - RNA, 19 nt, Artificial Sequence
  Description of Artificial Sequence: Synthetic oligonucleotide
gucaucacggucugguuuc

SEQ ID NO: 2398627 - RNA, 19 nt, Artificial Sequence
  Description of Artificial Sequence: Synthetic oligonucleotide
ucagcuuagcucucacuau

SEQ ID NO: 2398628 - RNA, 19 nt, Artificial Sequence
  Description of Artificial Sequence: Synthetic oligonucleotide
aagaacuuaagcagauguu

SEQ ID NO: 2398629 - RNA, 19 nt, Artificial Sequence
  Description of Artificial Sequence: Synthetic oligonucleotide
agauagacguaggaggcgu

SEQ ID NO: 2398630 - RNA, 19 nt, Artificial Sequence
  Description of Artificial Sequence: Synthetic oligonucleotide
guucagcccacucucccag

SEQ ID NO: 2398631 - RNA, 19 nt, Artificial Sequence
  Description of Artificial Sequence: Synthetic oligonucleotide
cugcucauucagguaaugg

SEQ ID NO: 2398632 - RNA, 19 nt, Artificial Sequence
  Description of Artificial Sequence: Synthetic oligonucleotide
gguggagaaaguauuuggc

SEQ ID NO: 2398633 - RNA, 19 nt, Artificial Sequence
  Description of Artificial Sequence: Synthetic oligonucleotide
agcaggaaaccgcggcgac

SEQ ID NO: 2398634 - RNA, 19 nt, Artificial Sequence
  Description of Artificial Sequence: Synthetic oligonucleotide
acuaugucccagggugugc

SEQ ID NO: 2398635 - RNA, 19 nt, Artificial Sequence
  Description of Artificial Sequence: Synthetic oligonucleotide
ucucacuaugucccagggu

SEQ ID NO: 2398636 - RNA, 19 nt, Artificial Sequence
  Description of Artificial Sequence: Synthetic oligonucleotide
gaugacaucacugguggcu

SEQ ID NO: 2398637 - RNA, 19 nt, Artificial Sequence
  Description of Artificial Sequence: Synthetic oligonucleotide
ucacuaugucccagggugu

SEQ ID NO: 2398638 - RNA, 19 nt, Artificial Sequence
  Description of Artificial Sequence: Synthetic oligonucleotide
acucuuuuccaagugcagu

SEQ ID NO: 2398639 - RNA, 19 nt, Artificial Sequence
  Description of Artificial Sequence: Synthetic oligonucleotide
ucaugagauugguggagaa

SEQ ID NO: 2398640 - RNA, 19 nt, Artificial Sequence
  Description of Artificial Sequence: Synthetic oligonucleotide
aaguagcaagacauagaca

SEQ ID NO: 2398641 - RNA, 19 nt, Artificial Sequence
  Description of Artificial Sequence: Synthetic oligonucleotide
agcgacgagguugcaaagg

SEQ ID NO: 2398642 - RNA, 19 nt, Artificial Sequence
  Description of Artificial Sequence: Synthetic oligonucleotide
gugacuuauagaaaaggua

SEQ ID NO: 2398643 - RNA, 19 nt, Artificial Sequence
  Description of Artificial Sequence: Synthetic oligonucleotide
agcuucaggggcucccauc

SEQ ID NO: 2398644 - RNA, 19 nt, Artificial Sequence
  Description of Artificial Sequence: Synthetic oligonucleotide
gcgacucugggcgagaacg

SEQ ID NO: 2398645 - RNA, 19 nt, Artificial Sequence
  Description of Artificial Sequence: Synthetic oligonucleotide
aguucuggcgcaccugcga

SEQ ID NO: 2398646 - RNA, 19 nt, Artificial Sequence
  Description of Artificial Sequence: Synthetic oligonucleotide
guucuggcgcaccugcgag

SEQ ID NO: 2398647 - RNA, 19 nt, Artificial Sequence
  Description of Artificial Sequence: Synthetic oligonucleotide
uucuggcgcaccugcgagg

SEQ ID NO: 2398648 - RNA, 19 nt, Artificial Sequence
  Description of Artificial Sequence: Synthetic oligonucleotide
ucguugguucugcagcuuc

SEQ ID NO: 2398649 - RNA, 19 nt, Artificial Sequence
  Description of Artificial Sequence: Synthetic oligonucleotide
gcgacgagguugcaaaggg

SEQ ID NO: 2398650 - RNA, 19 nt, Artificial Sequence
  Description of Artificial Sequence: Synthetic oligonucleotide
uuccaagugcagugcacac

SEQ ID NO: 2398651 - RNA, 19 nt, Artificial Sequence
  Description of Artificial Sequence: Synthetic oligonucleotide
cuccauugcguucagccca

SEQ ID NO: 2398652 - RNA, 19 nt, Artificial Sequence
  Description of Artificial Sequence: Synthetic oligonucleotide
aagcaggaaaccgcggcga

SEQ ID NO: 2398653 - RNA, 19 nt, Artificial Sequence
  Description of Artificial Sequence: Synthetic oligonucleotide
agccuccgaguccuggugg

SEQ ID NO: 2398654 - RNA, 19 nt, Artificial Sequence
  Description of Artificial Sequence: Synthetic oligonucleotide
gugcuugucaaagagauau

SEQ ID NO: 2398655 - RNA, 19 nt, Artificial Sequence
  Description of Artificial Sequence: Synthetic oligonucleotide
agauugguggagaaaguau

SEQ ID NO: 2398656 - RNA, 19 nt, Artificial Sequence
  Description of Artificial Sequence: Synthetic oligonucleotide
gaggcguacaguuccaggu

SEQ ID NO: 2398657 - RNA, 19 nt, Artificial Sequence
  Description of Artificial Sequence: Synthetic oligonucleotide
aggaagauucggccaccuc

SEQ ID NO: 2398658 - RNA, 19 nt, Artificial Sequence
  Description of Artificial Sequence: Synthetic oligonucleotide
uucucagcguguucccucu

SEQ ID NO: 2398659 - RNA, 19 nt, Artificial Sequence
  Description of Artificial Sequence: Synthetic oligonucleotide
ugcgagggagacgcggugg

SEQ ID NO: 2398660 - RNA, 19 nt, Artificial Sequence
  Description of Artificial Sequence: Synthetic oligonucleotide
ugguaguucuggcgcaccu

SEQ ID NO: 2398661 - RNA, 19 nt, Artificial Sequence
  Description of Artificial Sequence: Synthetic oligonucleotide
ucagguaaugggucucaau

SEQ ID NO: 2398662 - RNA, 19 nt, Artificial Sequence
  Description of Artificial Sequence: Synthetic oligonucleotide
gcgcaaguuggucacgugg

SEQ ID NO: 2398663 - RNA, 19 nt, Artificial Sequence
  Description of Artificial Sequence: Synthetic oligonucleotide
augcauacacuuccucagu

SEQ ID NO: 2398664 - RNA, 19 nt, Artificial Sequence
  Description of Artificial Sequence: Synthetic oligonucleotide
uggucacguggucacccag

SEQ ID NO: 2398665 - RNA, 19 nt, Artificial Sequence
  Description of Artificial Sequence: Synthetic oligonucleotide
cagauagacguaggaggcg

SEQ ID NO: 2398666 - RNA, 19 nt, Artificial Sequence
  Description of Artificial Sequence: Synthetic oligonucleotide
guuggucacguggucaccc

SEQ ID NO: 2398667 - RNA, 19 nt, Artificial Sequence
  Description of Artificial Sequence: Synthetic oligonucleotide
uccauugcguucagcccac

SEQ ID NO: 2398668 - RNA, 19 nt, Artificial Sequence
  Description of Artificial Sequence: Synthetic oligonucleotide
cuucgggaagucagcuuag

SEQ ID NO: 2398669 - RNA, 19 nt, Artificial Sequence
  Description of Artificial Sequence: Synthetic oligonucleotide
ugcguucagcccacucucc

SEQ ID NO: 2398670 - RNA, 19 nt, Artificial Sequence
  Description of Artificial Sequence: Synthetic oligonucleotide
gagauugguggagaaagua

SEQ ID NO: 2398671 - RNA, 19 nt, Artificial Sequence
  Description of Artificial Sequence: Synthetic oligonucleotide
ggagacgcgguggucaugg

SEQ ID NO: 2398672 - RNA, 19 nt, Artificial Sequence
  Description of Artificial Sequence: Synthetic oligonucleotide
gguggcuucgggaagucag

SEQ ID NO: 2398673 - RNA, 19 nt, Artificial Sequence
  Description of Artificial Sequence: Synthetic oligonucleotide
ugacugauucacacucuuu

SEQ ID NO: 2398674 - RNA, 19 nt, Artificial Sequence
  Description of Artificial Sequence: Synthetic oligonucleotide
gggaagucagcuuagcucu

SEQ ID NO: 2398675 - RNA, 19 nt, Artificial Sequence
  Description of Artificial Sequence: Synthetic oligonucleotide
ucccggagcggccggcugg

SEQ ID NO: 2398676 - RNA, 19 nt, Artificial Sequence
  Description of Artificial Sequence: Synthetic oligonucleotide
agacgcgguggucauggug

SEQ ID NO: 2398677 - RNA, 19 nt, Artificial Sequence
  Description of Artificial Sequence: Synthetic oligonucleotide
acgagguugcaaaggguuc

SEQ ID NO: 2398678 - RNA, 19 nt, Artificial Sequence
  Description of Artificial Sequence: Synthetic oligonucleotide
ugugcuugucaaagagaua

SEQ ID NO: 2398679 - RNA, 19 nt, Artificial Sequence
  Description of Artificial Sequence: Synthetic oligonucleotide
agucagcuuagcucucacu

SEQ ID NO: 2398680 - RNA, 19 nt, Artificial Sequence
  Description of Artificial Sequence: Synthetic oligonucleotide
caaagagauauucugccau

SEQ ID NO: 2398681 - RNA, 19 nt, Artificial Sequence
  Description of Artificial Sequence: Synthetic oligonucleotide
caucacugguggcuucggg

SEQ ID NO: 2398682 - RNA, 19 nt, Artificial Sequence
  Description of Artificial Sequence: Synthetic oligonucleotide
ggaggcguacaguuccagg

SEQ ID NO: 2398683 - RNA, 19 nt, Artificial Sequence
  Description of Artificial Sequence: Synthetic oligonucleotide
uccaagugcagugcacacu

SEQ ID NO: 2398684 - RNA, 19 nt, Artificial Sequence
  Description of Artificial Sequence: Synthetic oligonucleotide
uucugucccggagcggccg

SEQ ID NO: 2398685 - RNA, 19 nt, Artificial Sequence
  Description of Artificial Sequence: Synthetic oligonucleotide
ucagcccacucucccaguc

SEQ ID NO: 2398686 - RNA, 19 nt, Artificial Sequence
  Description of Artificial Sequence: Synthetic oligonucleotide
agguugaucuggcgguuga

SEQ ID NO: 2398687 - RNA, 19 nt, Artificial Sequence
  Description of Artificial Sequence: Synthetic oligonucleotide
ucccagucaucacggucug

SEQ ID NO: 2398688 - RNA, 19 nt, Artificial Sequence
  Description of Artificial Sequence: Synthetic oligonucleotide
ggucaaaguagcaagacau

SEQ ID NO: 2398689 - RNA, 19 nt, Artificial Sequence
  Description of Artificial Sequence: Synthetic oligonucleotide
auugguggagaaaguauuu

SEQ ID NO: 2398690 - RNA, 19 nt, Artificial Sequence
  Description of Artificial Sequence: Synthetic oligonucleotide
caggaaaccgcggcgacuc

SEQ ID NO: 2398691 - RNA, 19 nt, Artificial Sequence
  Description of Artificial Sequence: Synthetic oligonucleotide
acgcgguggucaugguggc

SEQ ID NO: 2398692 - RNA, 19 nt, Artificial Sequence
  Description of Artificial Sequence: Synthetic oligonucleotide
gagcgacgagguugcaaag

SEQ ID NO: 2398693 - RNA, 19 nt, Artificial Sequence
  Description of Artificial Sequence: Synthetic oligonucleotide
gguucugucccggagcggc

SEQ ID NO: 2398694 - RNA, 19 nt, Artificial Sequence
  Description of Artificial Sequence: Synthetic oligonucleotide
cuuaagcagauguuuuggu

SEQ ID NO: 2398695 - RNA, 19 nt, Artificial Sequence
  Description of Artificial Sequence: Synthetic oligonucleotide
gauugguggagaaaguauu

SEQ ID NO: 2398696 - RNA, 19 nt, Artificial Sequence
  Description of Artificial Sequence: Synthetic oligonucleotide
gggucggaggggucgagcg

SEQ ID NO: 2398697 - RNA, 19 nt, Artificial Sequence
  Description of Artificial Sequence: Synthetic oligonucleotide
cguucaagcacuguugaag

SEQ ID NO: 2398698 - RNA, 19 nt, Artificial Sequence
  Description of Artificial Sequence: Synthetic oligonucleotide
ggagcgacgagguugcaaa

SEQ ID NO: 2398699 - RNA, 19 nt, Artificial Sequence
  Description of Artificial Sequence: Synthetic oligonucleotide
uuggucacguggucaccca

SEQ ID NO: 2398700 - RNA, 19 nt, Artificial Sequence
  Description of Artificial Sequence: Synthetic oligonucleotide
gcaccugcgagggagacgc

SEQ ID NO: 2398701 - RNA, 19 nt, Artificial Sequence
  Description of Artificial Sequence: Synthetic oligonucleotide
cauucagguaaugggucuc

SEQ ID NO: 2398702 - RNA, 19 nt, Artificial Sequence
  Description of Artificial Sequence: Synthetic oligonucleotide
uuuugucaguagccaguuu

SEQ ID NO: 2398703 - RNA, 19 nt, Artificial Sequence
  Description of Artificial Sequence: Synthetic oligonucleotide
caccucguugguucugcag

SEQ ID NO: 2398704 - RNA, 19 nt, Artificial Sequence
  Description of Artificial Sequence: Synthetic oligonucleotide
uucgggaagucagcuuagc

SEQ ID NO: 2398705 - RNA, 19 nt, Artificial Sequence
  Description of Artificial Sequence: Synthetic oligonucleotide
gacugaugacaucacuggu

SEQ ID NO: 2398706 - RNA, 19 nt, Artificial Sequence
  Description of Artificial Sequence: Synthetic oligonucleotide
gguaccaaaauccuuuauu

SEQ ID NO: 2398707 - RNA, 19 nt, Artificial Sequence
  Description of Artificial Sequence: Synthetic oligonucleotide
ggauuucaccugcucauuc

SEQ ID NO: 2398708 - RNA, 19 nt, Artificial Sequence
  Description of Artificial Sequence: Synthetic oligonucleotide
gucggaggggucgagcgcc

SEQ ID NO: 2398709 - RNA, 19 nt, Artificial Sequence
  Description of Artificial Sequence: Synthetic oligonucleotide
guagugacugauucacacu

SEQ ID NO: 2398710 - RNA, 19 nt, Artificial Sequence
  Description of Artificial Sequence: Synthetic oligonucleotide
cuggcgguugauggcagcc

SEQ ID NO: 2398711 - RNA, 19 nt, Artificial Sequence
  Description of Artificial Sequence: Synthetic oligonucleotide
ugcgcaaguuggucacgug

SEQ ID NO: 2398712 - RNA, 19 nt, Artificial Sequence
  Description of Artificial Sequence: Synthetic oligonucleotide
uugcgcaaguuggucacgu

SEQ ID NO: 2398713 - RNA, 19 nt, Artificial Sequence
  Description of Artificial Sequence: Synthetic oligonucleotide
aguagccaguuugugcagu

SEQ ID NO: 2398714 - RNA, 19 nt, Artificial Sequence
  Description of Artificial Sequence: Synthetic oligonucleotide
cugccaugccagcuucagg

SEQ ID NO: 2398715 - RNA, 19 nt, Artificial Sequence
  Description of Artificial Sequence: Synthetic oligonucleotide
cagugacugaugacaucac

SEQ ID NO: 2398716 - RNA, 19 nt, Artificial Sequence
  Description of Artificial Sequence: Synthetic oligonucleotide
ggugacuuauagaaaaggu

SEQ ID NO: 2398717 - RNA, 19 nt, Artificial Sequence
  Description of Artificial Sequence: Synthetic oligonucleotide
cuccgaguccuggugguag

SEQ ID NO: 2398718 - RNA, 19 nt, Artificial Sequence
  Description of Artificial Sequence: Synthetic oligonucleotide
gaacuuaagcagauguuuu

SEQ ID NO: 2398719 - RNA, 19 nt, Artificial Sequence
  Description of Artificial Sequence: Synthetic oligonucleotide
cacuaugucccagggugug

SEQ ID NO: 2398720 - RNA, 19 nt, Artificial Sequence
  Description of Artificial Sequence: Synthetic oligonucleotide
cugcaggaagauucggcca

SEQ ID NO: 2398721 - RNA, 19 nt, Artificial Sequence
  Description of Artificial Sequence: Synthetic oligonucleotide
aaaguucuucagagccaca

SEQ ID NO: 2398722 - RNA, 19 nt, Artificial Sequence
  Description of Artificial Sequence: Synthetic oligonucleotide
aucccggucaaaguagcaa

SEQ ID NO: 2398723 - RNA, 19 nt, Artificial Sequence
  Description of Artificial Sequence: Synthetic oligonucleotide
acggcagccaacaugcaua

SEQ ID NO: 2398724 - RNA, 19 nt, Artificial Sequence
  Description of Artificial Sequence: Synthetic oligonucleotide
uggagcggcggagcgacga

SEQ ID NO: 2398725 - RNA, 19 nt, Artificial Sequence
  Description of Artificial Sequence: Synthetic oligonucleotide
aagauucggccaccucguu

SEQ ID NO: 2398726 - RNA, 19 nt, Artificial Sequence
  Description of Artificial Sequence: Synthetic oligonucleotide
uagcucucacuauguccca

SEQ ID NO: 2398727 - RNA, 19 nt, Artificial Sequence
  Description of Artificial Sequence: Synthetic oligonucleotide
agcucucacuaugucccag

SEQ ID NO: 2398728 - RNA, 19 nt, Artificial Sequence
  Description of Artificial Sequence: Synthetic oligonucleotide
guagcaagacauagacaga

SEQ ID NO: 2398729 - RNA, 19 nt, Artificial Sequence
  Description of Artificial Sequence: Synthetic oligonucleotide
cuugcgcaaguuggucacg

SEQ ID NO: 2398730 - RNA, 19 nt, Artificial Sequence
  Description of Artificial Sequence: Synthetic oligonucleotide
cucaugagauugguggaga

SEQ ID NO: 2398731 - RNA, 19 nt, Artificial Sequence
  Description of Artificial Sequence: Synthetic oligonucleotide
gcuucgggaagucagcuua

SEQ ID NO: 2398732 - RNA, 19 nt, Artificial Sequence
  Description of Artificial Sequence: Synthetic oligonucleotide
augacaucacugguggcuu

SEQ ID NO: 2398733 - RNA, 19 nt, Artificial Sequence
  Description of Artificial Sequence: Synthetic oligonucleotide
gcgguggucaugguggcgg

SEQ ID NO: 2398734 - RNA, 19 nt, Artificial Sequence
  Description of Artificial Sequence: Synthetic oligonucleotide
acacuccauugcguucagc

SEQ ID NO: 2398735 - RNA, 19 nt, Artificial Sequence
  Description of Artificial Sequence: Synthetic oligonucleotide
gacgagguugcaaaggguu

SEQ ID NO: 2398736 - RNA, 19 nt, Artificial Sequence
  Description of Artificial Sequence: Synthetic oligonucleotide
acauagacagauagacgua

SEQ ID NO: 2398737 - RNA, 19 nt, Artificial Sequence
  Description of Artificial Sequence: Synthetic oligonucleotide
gcagugcacacuccauugc

SEQ ID NO: 2398738 - RNA, 19 nt, Artificial Sequence
  Description of Artificial Sequence: Synthetic oligonucleotide
cacugguggcuucgggaag

SEQ ID NO: 2398739 - RNA, 19 nt, Artificial Sequence
  Description of Artificial Sequence: Synthetic oligonucleotide
guuccguucaagcacuguu

SEQ ID NO: 2398740 - RNA, 19 nt, Artificial Sequence
  Description of Artificial Sequence: Synthetic oligonucleotide
guacaguuccagguugauc

SEQ ID NO: 2398741 - RNA, 19 nt, Artificial Sequence
  Description of Artificial Sequence: Synthetic oligonucleotide
caggggcucccaucuugcg

SEQ ID NO: 2398742 - RNA, 19 nt, Artificial Sequence
  Description of Artificial Sequence: Synthetic oligonucleotide
acggucugguuucuugaua

SEQ ID NO: 2398743 - RNA, 19 nt, Artificial Sequence
  Description of Artificial Sequence: Synthetic oligonucleotide
gagcggcggagcgacgagg

SEQ ID NO: 2398744 - RNA, 19 nt, Artificial Sequence
  Description of Artificial Sequence: Synthetic oligonucleotide
gccaugccagcuucagggg

SEQ ID NO: 2398745 - RNA, 19 nt, Artificial Sequence
  Description of Artificial Sequence: Synthetic oligonucleotide
gucaaaguagcaagacaua

SEQ ID NO: 2398746 - RNA, 19 nt, Artificial Sequence
  Description of Artificial Sequence: Synthetic oligonucleotide
gacucugggcgagaacguc

SEQ ID NO: 2398747 - RNA, 19 nt, Artificial Sequence
  Description of Artificial Sequence: Synthetic oligonucleotide
caugagauugguggagaaa

SEQ ID NO: 2398748 - RNA, 19 nt, Artificial Sequence
  Description of Artificial Sequence: Synthetic oligonucleotide
aggaggcguacaguuccag

SEQ ID NO: 2398749 - RNA, 19 nt, Artificial Sequence
  Description of Artificial Sequence: Synthetic oligonucleotide
agugcagugcacacuccau

SEQ ID NO: 2398750 - RNA, 19 nt, Artificial Sequence
  Description of Artificial Sequence: Synthetic oligonucleotide
ccucaugagauugguggag

SEQ ID NO: 2398751 - RNA, 19 nt, Artificial Sequence
  Description of Artificial Sequence: Synthetic oligonucleotide
caugccagcuucaggggcu

SEQ ID NO: 2398752 - RNA, 19 nt, Artificial Sequence
  Description of Artificial Sequence: Synthetic oligonucleotide
gguaguucuggcgcaccug

SEQ ID NO: 2398753 - RNA, 19 nt, Artificial Sequence
  Description of Artificial Sequence: Synthetic oligonucleotide
ucaucacggucugguuucu

SEQ ID NO: 2398754 - RNA, 19 nt, Artificial Sequence
  Description of Artificial Sequence: Synthetic oligonucleotide
caaaggguucugucccgga

SEQ ID NO: 2398755 - RNA, 19 nt, Artificial Sequence
  Description of Artificial Sequence: Synthetic oligonucleotide
cagccuccgaguccuggug

SEQ ID NO: 2398756 - RNA, 19 nt, Artificial Sequence
  Description of Artificial Sequence: Synthetic oligonucleotide
gcuuagcucucacuauguc

SEQ ID NO: 2398757 - RNA, 19 nt, Artificial Sequence
  Description of Artificial Sequence: Synthetic oligonucleotide
cacacuccauugcguucag

SEQ ID NO: 2398758 - RNA, 19 nt, Artificial Sequence
  Description of Artificial Sequence: Synthetic oligonucleotide
agggagacgcgguggucau

SEQ ID NO: 2398759 - RNA, 19 nt, Artificial Sequence
  Description of Artificial Sequence: Synthetic oligonucleotide
gucacguggucacccagcu

SEQ ID NO: 2398760 - RNA, 19 nt, Artificial Sequence
  Description of Artificial Sequence: Synthetic oligonucleotide
gugguaguucuggcgcacc

SEQ ID NO: 2398761 - RNA, 19 nt, Artificial Sequence
  Description of Artificial Sequence: Synthetic oligonucleotide
agguugcaaaggguucugu

SEQ ID NO: 2398762 - RNA, 19 nt, Artificial Sequence
  Description of Artificial Sequence: Synthetic oligonucleotide
caucccggucaaaguagca

SEQ ID NO: 2398763 - RNA, 19 nt, Artificial Sequence
  Description of Artificial Sequence: Synthetic oligonucleotide
uggcgguugauggcagccu

SEQ ID NO: 2398764 - RNA, 19 nt, Artificial Sequence
  Description of Artificial Sequence: Synthetic oligonucleotide
ggaggggucgagcgccggg

SEQ ID NO: 2398765 - RNA, 19 nt, Artificial Sequence
  Description of Artificial Sequence: Synthetic oligonucleotide
gccaacaugcauacacuuc

SEQ ID NO: 2398766 - RNA, 19 nt, Artificial Sequence
  Description of Artificial Sequence: Synthetic oligonucleotide
caguuugugcaguuccagu

SEQ ID NO: 2398767 - RNA, 19 nt, Artificial Sequence
  Description of Artificial Sequence: Synthetic oligonucleotide
ucucagcguguucccucuc

SEQ ID NO: 2398768 - RNA, 19 nt, Artificial Sequence
  Description of Artificial Sequence: Synthetic oligonucleotide
agcaagacauagacagaua

SEQ ID NO: 2398769 - RNA, 19 nt, Artificial Sequence
  Description of Artificial Sequence: Synthetic oligonucleotide
ggucacguggucacccagc

SEQ ID NO: 2398770 - RNA, 19 nt, Artificial Sequence
  Description of Artificial Sequence: Synthetic oligonucleotide
gcaaguuggucacgugguc

SEQ ID NO: 2398771 - RNA, 19 nt, Artificial Sequence
  Description of Artificial Sequence: Synthetic oligonucleotide
cagcguguucccucuccuc

SEQ ID NO: 2398772 - RNA, 19 nt, Artificial Sequence
  Description of Artificial Sequence: Synthetic oligonucleotide
caacaugcauacacuuccu

SEQ ID NO: 2398773 - RNA, 19 nt, Artificial Sequence
  Description of Artificial Sequence: Synthetic oligonucleotide
cugcgagggagacgcggug

SEQ ID NO: 2398774 - RNA, 19 nt, Artificial Sequence
  Description of Artificial Sequence: Synthetic oligonucleotide
gccggguuccguucaagca

SEQ ID NO: 2398775 - RNA, 19 nt, Artificial Sequence
  Description of Artificial Sequence: Synthetic oligonucleotide
aucuggcgguugauggcag

SEQ ID NO: 2398776 - RNA, 19 nt, Artificial Sequence
  Description of Artificial Sequence: Synthetic oligonucleotide
gauagacguaggaggcgua

SEQ ID NO: 2398777 - RNA, 19 nt, Artificial Sequence
  Description of Artificial Sequence: Synthetic oligonucleotide
ggaaaccgcggcgacucug

SEQ ID NO: 2398778 - RNA, 19 nt, Artificial Sequence
  Description of Artificial Sequence: Synthetic oligonucleotide
ggcgguugauggcagccuc

SEQ ID NO: 2398779 - RNA, 19 nt, Artificial Sequence
  Description of Artificial Sequence: Synthetic oligonucleotide
agcggcggagcgacgaggu

SEQ ID NO: 2398780 - RNA, 19 nt, Artificial Sequence
  Description of Artificial Sequence: Synthetic oligonucleotide
auucggccaccucguuggu

SEQ ID NO: 2398781 - RNA, 19 nt, Artificial Sequence
  Description of Artificial Sequence: Synthetic oligonucleotide
ggagcggccggcugggguc

SEQ ID NO: 2398782 - RNA, 19 nt, Artificial Sequence
  Description of Artificial Sequence: Synthetic oligonucleotide
ccggucaaaguagcaagac

SEQ ID NO: 2398783 - RNA, 19 nt, Artificial Sequence
  Description of Artificial Sequence: Synthetic oligonucleotide
gcuggagcggcggagcgac

SEQ ID NO: 2398784 - RNA, 19 nt, Artificial Sequence
  Description of Artificial Sequence: Synthetic oligonucleotide
gacguaggaggcguacagu

SEQ ID NO: 2398785 - RNA, 19 nt, Artificial Sequence
  Description of Artificial Sequence: Synthetic oligonucleotide
gguggucaugguggcggcg

SEQ ID NO: 2398786 - RNA, 19 nt, Artificial Sequence
  Description of Artificial Sequence: Synthetic oligonucleotide
gauauccugcaggaagauu

SEQ ID NO: 2398787 - RNA, 19 nt, Artificial Sequence
  Description of Artificial Sequence: Synthetic oligonucleotide
uggcgacgcuggagcggcg

SEQ ID NO: 2398788 - RNA, 19 nt, Artificial Sequence
  Description of Artificial Sequence: Synthetic oligonucleotide
cuaugucccagggugugcu

SEQ ID NO: 2398789 - RNA, 19 nt, Artificial Sequence
  Description of Artificial Sequence: Synthetic oligonucleotide
ggugguaguucuggcgcac

SEQ ID NO: 2398790 - RNA, 19 nt, Artificial Sequence
  Description of Artificial Sequence: Synthetic oligonucleotide
gggucgagcgccggguucc

SEQ ID NO: 2398791 - RNA, 19 nt, Artificial Sequence
  Description of Artificial Sequence: Synthetic oligonucleotide
gagcgccggguuccguuca

SEQ ID NO: 2398792 - RNA, 19 nt, Artificial Sequence
  Description of Artificial Sequence: Synthetic oligonucleotide
guagccaguuugugcaguu

SEQ ID NO: 2398793 - RNA, 19 nt, Artificial Sequence
  Description of Artificial Sequence: Synthetic oligonucleotide
cuggagcggcggagcgacg

SEQ ID NO: 2398794 - RNA, 19 nt, Artificial Sequence
  Description of Artificial Sequence: Synthetic oligonucleotide
gugcagugcacacuccauu

SEQ ID NO: 2398795 - RNA, 19 nt, Artificial Sequence
  Description of Artificial Sequence: Synthetic oligonucleotide
cagcccacucucccaguca

SEQ ID NO: 2398796 - RNA, 19 nt, Artificial Sequence
  Description of Artificial Sequence: Synthetic oligonucleotide
caccugcgagggagacgcg

SEQ ID NO: 2398797 - RNA, 19 nt, Artificial Sequence
  Description of Artificial Sequence: Synthetic oligonucleotide
gcgguugauggcagccucc

SEQ ID NO: 2398798 - RNA, 19 nt, Artificial Sequence
  Description of Artificial Sequence: Synthetic oligonucleotide
gccaguuugugcaguucca

SEQ ID NO: 2398799 - RNA, 19 nt, Artificial Sequence
  Description of Artificial Sequence: Synthetic oligonucleotide
aggggucgagcgccggguu

SEQ ID NO: 2398800 - RNA, 19 nt, Artificial Sequence
  Description of Artificial Sequence: Synthetic oligonucleotide
agcgccggguuccguucaa

SEQ ID NO: 2398801 - RNA, 19 nt, Artificial Sequence
  Description of Artificial Sequence: Synthetic oligonucleotide
ggaagucagcuuagcucuc

SEQ ID NO: 2398802 - RNA, 19 nt, Artificial Sequence
  Description of Artificial Sequence: Synthetic oligonucleotide
gaggggucgagcgccgggu

SEQ ID NO: 2398803 - RNA, 19 nt, Artificial Sequence
  Description of Artificial Sequence: Synthetic oligonucleotide
cacggucugguuucuugau

SEQ ID NO: 2398804 - RNA, 19 nt, Artificial Sequence
  Description of Artificial Sequence: Synthetic oligonucleotide
ggcgacucugggcgagaac

SEQ ID NO: 2398805 - RNA, 19 nt, Artificial Sequence
  Description of Artificial Sequence: Synthetic oligonucleotide
cgccggguuccguucaagc

SEQ ID NO: 2398806 - RNA, 19 nt, Artificial Sequence
  Description of Artificial Sequence: Synthetic oligonucleotide
gcguacaguuccagguuga

SEQ ID NO: 2398807 - RNA, 19 nt, Artificial Sequence
  Description of Artificial Sequence: Synthetic oligonucleotide
ggggucgagcgccggguuc

SEQ ID NO: 2398808 - RNA, 19 nt, Artificial Sequence
  Description of Artificial Sequence: Synthetic oligonucleotide
ccagucaucacggucuggu

SEQ ID NO: 2398809 - RNA, 19 nt, Artificial Sequence
  Description of Artificial Sequence: Synthetic oligonucleotide
ggucgagcgccggguuccg

SEQ ID NO: 2398810 - RNA, 19 nt, Artificial Sequence
  Description of Artificial Sequence: Synthetic oligonucleotide
cguguucccucuccucaug

SEQ ID NO: 2398811 - RNA, 19 nt, Artificial Sequence
  Description of Artificial Sequence: Synthetic oligonucleotide
cggcggagcgacgagguug

SEQ ID NO: 2398812 - RNA, 19 nt, Artificial Sequence
  Description of Artificial Sequence: Synthetic oligonucleotide
cgcaaguuggucacguggu

SEQ ID NO: 2398813 - RNA, 19 nt, Artificial Sequence
  Description of Artificial Sequence: Synthetic oligonucleotide
caggaagauucggccaccu

SEQ ID NO: 2398814 - RNA, 19 nt, Artificial Sequence
  Description of Artificial Sequence: Synthetic oligonucleotide
cggucugguuucuugauau

SEQ ID NO: 2398815 - RNA, 19 nt, Artificial Sequence
  Description of Artificial Sequence: Synthetic oligonucleotide
gagacgcgguggucauggu

SEQ ID NO: 2398816 - RNA, 19 nt, Artificial Sequence
  Description of Artificial Sequence: Synthetic oligonucleotide
cagucaucacggucugguu

SEQ ID NO: 2398817 - RNA, 19 nt, Artificial Sequence
  Description of Artificial Sequence: Synthetic oligonucleotide
ccguucaagcacuguugaa

SEQ ID NO: 2398818 - RNA, 19 nt, Artificial Sequence
  Description of Artificial Sequence: Synthetic oligonucleotide
cccagucaucacggucugg

SEQ ID NO: 2398819 - RNA, 19 nt, Artificial Sequence
  Description of Artificial Sequence: Synthetic oligonucleotide
acguggucacccagcucuu

SEQ ID NO: 2398820 - RNA, 19 nt, Artificial Sequence
  Description of Artificial Sequence: Synthetic oligonucleotide
ccagcucuuugauggauuu

SEQ ID NO: 2398821 - RNA, 19 nt, Artificial Sequence
  Description of Artificial Sequence: Synthetic oligonucleotide
gguuccguucaagcacugu

SEQ ID NO: 2398822 - RNA, 19 nt, Artificial Sequence
  Description of Artificial Sequence: Synthetic oligonucleotide
cgaguccuggugguaguuc

SEQ ID NO: 2398823 - RNA, 19 nt, Artificial Sequence
  Description of Artificial Sequence: Synthetic oligonucleotide
ggccaccucguugguucug

SEQ ID NO: 2398824 - RNA, 19 nt, Artificial Sequence
  Description of Artificial Sequence: Synthetic oligonucleotide
agcggccggcuggggucgg

SEQ ID NO: 2398825 - RNA, 19 nt, Artificial Sequence
  Description of Artificial Sequence: Synthetic oligonucleotide
gggagacgcgguggucaug

SEQ ID NO: 2398826 - RNA, 19 nt, Artificial Sequence
  Description of Artificial Sequence: Synthetic oligonucleotide
gccuccgaguccugguggu

SEQ ID NO: 2398827 - RNA, 19 nt, Artificial Sequence
  Description of Artificial Sequence: Synthetic oligonucleotide
cgcaccugcgagggagacg

SEQ ID NO: 2398828 - RNA, 19 nt, Artificial Sequence
  Description of Artificial Sequence: Synthetic oligonucleotide
ggcuucgggaagucagcuu

SEQ ID NO: 2398829 - RNA, 19 nt, Artificial Sequence
  Description of Artificial Sequence: Synthetic oligonucleotide
gcaggaaaccgcggcgacu

SEQ ID NO: 2398830 - RNA, 19 nt, Artificial Sequence
  Description of Artificial Sequence: Synthetic oligonucleotide
cuggcgcaccugcgaggga

SEQ ID NO: 2398831 - RNA, 19 nt, Artificial Sequence
  Description of Artificial Sequence: Synthetic oligonucleotide
gcgccggguuccguucaag

SEQ ID NO: 2398832 - RNA, 19 nt, Artificial Sequence
  Description of Artificial Sequence: Synthetic oligonucleotide
gcguguucccucuccucau

SEQ ID NO: 2398833 - RNA, 19 nt, Artificial Sequence
  Description of Artificial Sequence: Synthetic oligonucleotide
cuucaggggcucccaucuu

SEQ ID NO: 2398834 - RNA, 19 nt, Artificial Sequence
  Description of Artificial Sequence: Synthetic oligonucleotide
gcgcaccugcgagggagac

SEQ ID NO: 2398835 - RNA, 19 nt, Artificial Sequence
  Description of Artificial Sequence: Synthetic oligonucleotide
ccaccucguugguucugca

SEQ ID NO: 2398836 - RNA, 19 nt, Artificial Sequence
  Description of Artificial Sequence: Synthetic oligonucleotide
cucccaucuugcgcaaguu

SEQ ID NO: 2398837 - RNA, 19 nt, Artificial Sequence
  Description of Artificial Sequence: Synthetic oligonucleotide
cgacgcuggagcggcggag

SEQ ID NO: 2398838 - RNA, 19 nt, Artificial Sequence
  Description of Artificial Sequence: Synthetic oligonucleotide
cccagcucuuugauggauu

SEQ ID NO: 2398839 - RNA, 19 nt, Artificial Sequence
  Description of Artificial Sequence: Synthetic oligonucleotide
cgacgagguugcaaagggu

SEQ ID NO: 2398840 - RNA, 19 nt, Artificial Sequence
  Description of Artificial Sequence: Synthetic oligonucleotide
cgcggcgacucugggcgag

SEQ ID NO: 2398841 - RNA, 19 nt, Artificial Sequence
  Description of Artificial Sequence: Synthetic oligonucleotide
cggaggggucgagcgccgg

SEQ ID NO: 2398842 - RNA, 19 nt, Artificial Sequence
  Description of Artificial Sequence: Synthetic oligonucleotide
gucgagcgccggguuccgu

SEQ ID NO: 2398843 - RNA, 19 nt, Artificial Sequence
  Description of Artificial Sequence: Synthetic oligonucleotide
gcggcgacucugggcgaga

SEQ ID NO: 2398844 - RNA, 19 nt, Artificial Sequence
  Description of Artificial Sequence: Synthetic oligonucleotide
cggagcgacgagguugcaa

SEQ ID NO: 2398845 - RNA, 19 nt, Artificial Sequence
  Description of Artificial Sequence: Synthetic oligonucleotide
cggccggcuggggucggag

SEQ ID NO: 2398846 - RNA, 19 nt, Artificial Sequence
  Description of Artificial Sequence: Synthetic oligonucleotide
cguacaguuccagguugau

SEQ ID NO: 2398847 - RNA, 19 nt, Artificial Sequence
  Description of Artificial Sequence: Synthetic oligonucleotide
ccuccgaguccugguggua

SEQ ID NO: 2398848 - RNA, 19 nt, Artificial Sequence
  Description of Artificial Sequence: Synthetic oligonucleotide
ccacaucaucccggucaaa

SEQ ID NO: 2398849 - RNA, 19 nt, Artificial Sequence
  Description of Artificial Sequence: Synthetic oligonucleotide
gcggcggagcgacgagguu

SEQ ID NO: 2398850 - RNA, 19 nt, Artificial Sequence
  Description of Artificial Sequence: Synthetic oligonucleotide
ccgaguccuggugguaguu

SEQ ID NO: 2398851 - RNA, 19 nt, Artificial Sequence
  Description of Artificial Sequence: Synthetic oligonucleotide
cggcgacucugggcgagaa

SEQ ID NO: 2398852 - RNA, 19 nt, Artificial Sequence
  Description of Artificial Sequence: Synthetic oligonucleotide
cggccaccucguugguucu

SEQ ID NO: 2398853 - RNA, 19 nt, Artificial Sequence
  Description of Artificial Sequence: Synthetic oligonucleotide
cguggucacccagcucuuu

SEQ ID NO: 2398854 - RNA, 19 nt, Artificial Sequence
  Description of Artificial Sequence: Synthetic oligonucleotide
auauuguugauauaaaucg

SEQ ID NO: 2398855 - RNA, 19 nt, Artificial Sequence
  Description of Artificial Sequence: Synthetic oligonucleotide
auaaauaauaccaaagucc

SEQ ID NO: 2398856 - RNA, 19 nt, Artificial Sequence
  Description of Artificial Sequence: Synthetic oligonucleotide
gauaacaucaucucauucg

SEQ ID NO: 2398857 - RNA, 19 nt, Artificial Sequence
  Description of Artificial Sequence: Synthetic oligonucleotide
gaaaacagggcauacaggg

SEQ ID NO: 2398858 - RNA, 19 nt, Artificial Sequence
  Description of Artificial Sequence: Synthetic oligonucleotide
uugguuuaccauaaaaugg

SEQ ID NO: 2398859 - RNA, 19 nt, Artificial Sequence
  Description of Artificial Sequence: Synthetic oligonucleotide
gauggugugaucuuaaacc

SEQ ID NO: 2398860 - RNA, 19 nt, Artificial Sequence
  Description of Artificial Sequence: Synthetic oligonucleotide
uuaucauucauauuguuga

SEQ ID NO: 2398861 - RNA, 19 nt, Artificial Sequence
  Description of Artificial Sequence: Synthetic oligonucleotide
auuuaaaaugacuugacca

SEQ ID NO: 2398862 - RNA, 19 nt, Artificial Sequence
  Description of Artificial Sequence: Synthetic oligonucleotide
aauauaacgaaagccugcc

SEQ ID NO: 2398863 - RNA, 19 nt, Artificial Sequence
  Description of Artificial Sequence: Synthetic oligonucleotide
uucugguaaauuauuaagg

SEQ ID NO: 2398864 - RNA, 19 nt, Artificial Sequence
  Description of Artificial Sequence: Synthetic oligonucleotide
uuucaaacugccuuaaucc

SEQ ID NO: 2398865 - RNA, 19 nt, Artificial Sequence
  Description of Artificial Sequence: Synthetic oligonucleotide
uuauuaaggaauaggaugu

SEQ ID NO: 2398866 - RNA, 19 nt, Artificial Sequence
  Description of Artificial Sequence: Synthetic oligonucleotide
aauguuaucaaaacaaaca

SEQ ID NO: 2398867 - RNA, 19 nt, Artificial Sequence
  Description of Artificial Sequence: Synthetic oligonucleotide
uuuaucauucauauuguug

SEQ ID NO: 2398868 - RNA, 19 nt, Artificial Sequence
  Description of Artificial Sequence: Synthetic oligonucleotide
aauaggauguaguuuggag

SEQ ID NO: 2398869 - RNA, 19 nt, Artificial Sequence
  Description of Artificial Sequence: Synthetic oligonucleotide
auagccugaagccagcucc

SEQ ID NO: 2398870 - RNA, 19 nt, Artificial Sequence
  Description of Artificial Sequence: Synthetic oligonucleotide
aaacaaacacuauaaauaa

SEQ ID NO: 2398871 - RNA, 19 nt, Artificial Sequence
  Description of Artificial Sequence: Synthetic oligonucleotide
uuuaccauaaaauggaaau

SEQ ID NO: 2398872 - RNA, 19 nt, Artificial Sequence
  Description of Artificial Sequence: Synthetic oligonucleotide
aaauuauuaaggaauagga

SEQ ID NO: 2398873 - RNA, 19 nt, Artificial Sequence
  Description of Artificial Sequence: Synthetic oligonucleotide
aagcgaacuuccuugaaac

SEQ ID NO: 2398874 - RNA, 19 nt, Artificial Sequence
  Description of Artificial Sequence: Synthetic oligonucleotide
aaauucuacaaaugcaaug

SEQ ID NO: 2398875 - RNA, 19 nt, Artificial Sequence
  Description of Artificial Sequence: Synthetic oligonucleotide
auugguuuaccauaaaaug

SEQ ID NO: 2398876 - RNA, 19 nt, Artificial Sequence
  Description of Artificial Sequence: Synthetic oligonucleotide
aauaauuaggugccuuuuc

SEQ ID NO: 2398877 - RNA, 19 nt, Artificial Sequence
  Description of Artificial Sequence: Synthetic oligonucleotide
aaacugagaaaacagggca

SEQ ID NO: 2398878 - RNA, 19 nt, Artificial Sequence
  Description of Artificial Sequence: Synthetic oligonucleotide
gaaaccagggaacugauug

SEQ ID NO: 2398879 - RNA, 19 nt, Artificial Sequence
  Description of Artificial Sequence: Synthetic oligonucleotide
uauaacgaaagccugcccc

SEQ ID NO: 2398880 - RNA, 19 nt, Artificial Sequence
  Description of Artificial Sequence: Synthetic oligonucleotide
uuuggaauagccugaagcc

SEQ ID NO: 2398881 - RNA, 19 nt, Artificial Sequence
  Description of Artificial Sequence: Synthetic oligonucleotide
uguaaagcaucucuggcag

SEQ ID NO: 2398882 - RNA, 19 nt, Artificial Sequence
  Description of Artificial Sequence: Synthetic oligonucleotide
auaggauguaguuuggagg

SEQ ID NO: 2398883 - RNA, 19 nt, Artificial Sequence
  Description of Artificial Sequence: Synthetic oligonucleotide
ugguaaauuauuaaggaau

SEQ ID NO: 2398884 - RNA, 19 nt, Artificial Sequence
  Description of Artificial Sequence: Synthetic oligonucleotide
aaauccuuguaacugccuc

SEQ ID NO: 2398885 - RNA, 19 nt, Artificial Sequence
  Description of Artificial Sequence: Synthetic oligonucleotide
uuuaaaaugacuugaccaa

SEQ ID NO: 2398886 - RNA, 19 nt, Artificial Sequence
  Description of Artificial Sequence: Synthetic oligonucleotide
uauuucuuggcauagguaa

SEQ ID NO: 2398887 - RNA, 19 nt, Artificial Sequence
  Description of Artificial Sequence: Synthetic oligonucleotide
aaaauggaaauccuuguaa

SEQ ID NO: 2398888 - RNA, 19 nt, Artificial Sequence
  Description of Artificial Sequence: Synthetic oligonucleotide
aggaauaggauguaguuug

SEQ ID NO: 2398889 - RNA, 19 nt, Artificial Sequence
  Description of Artificial Sequence: Synthetic oligonucleotide
cuuuggaauagccugaagc

SEQ ID NO: 2398890 - RNA, 19 nt, Artificial Sequence
  Description of Artificial Sequence: Synthetic oligonucleotide
uuagauauuauaucggaau

SEQ ID NO: 2398891 - RNA, 19 nt, Artificial Sequence
  Description of Artificial Sequence: Synthetic oligonucleotide
aagcauuuguggaugaacc

SEQ ID NO: 2398892 - RNA, 19 nt, Artificial Sequence
  Description of Artificial Sequence: Synthetic oligonucleotide
ucugguaaauuauuaagga

SEQ ID NO: 2398893 - RNA, 19 nt, Artificial Sequence
  Description of Artificial Sequence: Synthetic oligonucleotide
uucauuuccaaccauuuaa

SEQ ID NO: 2398894 - RNA, 19 nt, Artificial Sequence
  Description of Artificial Sequence: Synthetic oligonucleotide
uauaaaucgugugauuugg

SEQ ID NO: 2398895 - RNA, 19 nt, Artificial Sequence
  Description of Artificial Sequence: Synthetic oligonucleotide
aaaugacuugaccaaaugu

SEQ ID NO: 2398896 - RNA, 19 nt, Artificial Sequence
  Description of Artificial Sequence: Synthetic oligonucleotide
cauauuguugauauaaauc

SEQ ID NO: 2398897 - RNA, 19 nt, Artificial Sequence
  Description of Artificial Sequence: Synthetic oligonucleotide
aaaucgugugauuuggucu

SEQ ID NO: 2398898 - RNA, 19 nt, Artificial Sequence
  Description of Artificial Sequence: Synthetic oligonucleotide
uccaaacugagaaaacagg

SEQ ID NO: 2398899 - RNA, 19 nt, Artificial Sequence
  Description of Artificial Sequence: Synthetic oligonucleotide
uuugaguaaaaccuuugga

SEQ ID NO: 2398900 - RNA, 19 nt, Artificial Sequence
  Description of Artificial Sequence: Synthetic oligonucleotide
aacugauugaacagcaugg

SEQ ID NO: 2398901 - RNA, 19 nt, Artificial Sequence
  Description of Artificial Sequence: Synthetic oligonucleotide
ugguuuaccauaaaaugga

SEQ ID NO: 2398902 - RNA, 19 nt, Artificial Sequence
  Description of Artificial Sequence: Synthetic oligonucleotide
uaccauaaaauggaaaucc

SEQ ID NO: 2398903 - RNA, 19 nt, Artificial Sequence
  Description of Artificial Sequence: Synthetic oligonucleotide
aauaauaccaaaguccuuu

SEQ ID NO: 2398904 - RNA, 19 nt, Artificial Sequence
  Description of Artificial Sequence: Synthetic oligonucleotide
aaagcauuuguggaugaac

SEQ ID NO: 2398905 - RNA, 19 nt, Artificial Sequence
  Description of Artificial Sequence: Synthetic oligonucleotide
aaucgugugauuuggucug

SEQ ID NO: 2398906 - RNA, 19 nt, Artificial Sequence
  Description of Artificial Sequence: Synthetic oligonucleotide
auagguaaucuucauagca

SEQ ID NO: 2398907 - RNA, 19 nt, Artificial Sequence
  Description of Artificial Sequence: Synthetic oligonucleotide
acuauaaauaauaccaaag

SEQ ID NO: 2398908 - RNA, 19 nt, Artificial Sequence
  Description of Artificial Sequence: Synthetic oligonucleotide
ucucauucgucucuucugg

SEQ ID NO: 2398909 - RNA, 19 nt, Artificial Sequence
  Description of Artificial Sequence: Synthetic oligonucleotide
aaaaugacuugaccaaaug

SEQ ID NO: 2398910 - RNA, 19 nt, Artificial Sequence
  Description of Artificial Sequence: Synthetic oligonucleotide
uguuaucaaaacaaacacu

SEQ ID NO: 2398911 - RNA, 19 nt, Artificial Sequence
  Description of Artificial Sequence: Synthetic oligonucleotide
auuaggugccuuuucuccc

SEQ ID NO: 2398912 - RNA, 19 nt, Artificial Sequence
  Description of Artificial Sequence: Synthetic oligonucleotide
uuaaggaauaggauguagu

SEQ ID NO: 2398913 - RNA, 19 nt, Artificial Sequence
  Description of Artificial Sequence: Synthetic oligonucleotide
aaauguuauuucuuggcau

SEQ ID NO: 2398914 - RNA, 19 nt, Artificial Sequence
  Description of Artificial Sequence: Synthetic oligonucleotide
uauuauaucggaaucuguu

SEQ ID NO: 2398915 - RNA, 19 nt, Artificial Sequence
  Description of Artificial Sequence: Synthetic oligonucleotide
aaaagugccacgcauuuua

SEQ ID NO: 2398916 - RNA, 19 nt, Artificial Sequence
  Description of Artificial Sequence: Synthetic oligonucleotide
ucuuaaacccuuguaaagc

SEQ ID NO: 2398917 - RNA, 19 nt, Artificial Sequence
  Description of Artificial Sequence: Synthetic oligonucleotide
ugauugaacagcauggaua

SEQ ID NO: 2398918 - RNA, 19 nt, Artificial Sequence
  Description of Artificial Sequence: Synthetic oligonucleotide
uaauccaaauguuauuucu

SEQ ID NO: 2398919 - RNA, 19 nt, Artificial Sequence
  Description of Artificial Sequence: Synthetic oligonucleotide
uccaaauguuauuucuugg

SEQ ID NO: 2398920 - RNA, 19 nt, Artificial Sequence
  Description of Artificial Sequence: Synthetic oligonucleotide
uauuagccgaauuuggugu

SEQ ID NO: 2398921 - RNA, 19 nt, Artificial Sequence
  Description of Artificial Sequence: Synthetic oligonucleotide
gauauuauaucggaaucug

SEQ ID NO: 2398922 - RNA, 19 nt, Artificial Sequence
  Description of Artificial Sequence: Synthetic oligonucleotide
caguuccuuaaauauaacg

SEQ ID NO: 2398923 - RNA, 19 nt, Artificial Sequence
  Description of Artificial Sequence: Synthetic oligonucleotide
agcauuuguggaugaaccc

SEQ ID NO: 2398924 - RNA, 19 nt, Artificial Sequence
  Description of Artificial Sequence: Synthetic oligonucleotide
aaaauaauuaggugccuuu

SEQ ID NO: 2398925 - RNA, 19 nt, Artificial Sequence
  Description of Artificial Sequence: Synthetic oligonucleotide
cuucauggucuuuaaagcc

SEQ ID NO: 2398926 - RNA, 19 nt, Artificial Sequence
  Description of Artificial Sequence: Synthetic oligonucleotide
ugaguaaaaccuuuggaau

SEQ ID NO: 2398927 - RNA, 19 nt, Artificial Sequence
  Description of Artificial Sequence: Synthetic oligonucleotide
uggaauagccugaagccag

SEQ ID NO: 2398928 - RNA, 19 nt, Artificial Sequence
  Description of Artificial Sequence: Synthetic oligonucleotide
uuugcauacugaauucuca

SEQ ID NO: 2398929 - RNA, 19 nt, Artificial Sequence
  Description of Artificial Sequence: Synthetic oligonucleotide
uaaagccacaauaucuacc

SEQ ID NO: 2398930 - RNA, 19 nt, Artificial Sequence
  Description of Artificial Sequence: Synthetic oligonucleotide
caaacugagaaaacagggc

SEQ ID NO: 2398931 - RNA, 19 nt, Artificial Sequence
  Description of Artificial Sequence: Synthetic oligonucleotide
agccacaauaucuaccacg

SEQ ID NO: 2398932 - RNA, 19 nt, Artificial Sequence
  Description of Artificial Sequence: Synthetic oligonucleotide
uuuagauauuauaucggaa

SEQ ID NO: 2398933 - RNA, 19 nt, Artificial Sequence
  Description of Artificial Sequence: Synthetic oligonucleotide
augguuuuagcuuucuucu

SEQ ID NO: 2398934 - RNA, 19 nt, Artificial Sequence
  Description of Artificial Sequence: Synthetic oligonucleotide
cauuuaaaaugacuugacc

SEQ ID NO: 2398935 - RNA, 19 nt, Artificial Sequence
  Description of Artificial Sequence: Synthetic oligonucleotide
uuuggucugauauccaugu

SEQ ID NO: 2398936 - RNA, 19 nt, Artificial Sequence
  Description of Artificial Sequence: Synthetic oligonucleotide
ugccucaaagcauuugugg

SEQ ID NO: 2398937 - RNA, 19 nt, Artificial Sequence
  Description of Artificial Sequence: Synthetic oligonucleotide
uagauauuauaucggaauc

SEQ ID NO: 2398938 - RNA, 19 nt, Artificial Sequence
  Description of Artificial Sequence: Synthetic oligonucleotide
aucuuaaacccuuguaaag

SEQ ID NO: 2398939 - RNA, 19 nt, Artificial Sequence
  Description of Artificial Sequence: Synthetic oligonucleotide
ugaguauuagccgaauuug

SEQ ID NO: 2398940 - RNA, 19 nt, Artificial Sequence
  Description of Artificial Sequence: Synthetic oligonucleotide
uauuguugauauaaaucgu

SEQ ID NO: 2398941 - RNA, 19 nt, Artificial Sequence
  Description of Artificial Sequence: Synthetic oligonucleotide
auaauuaggugccuuuucu

SEQ ID NO: 2398942 - RNA, 19 nt, Artificial Sequence
  Description of Artificial Sequence: Synthetic oligonucleotide
auauaaaucgugugauuug

SEQ ID NO: 2398943 - RNA, 19 nt, Artificial Sequence
  Description of Artificial Sequence: Synthetic oligonucleotide
aacccaguuccuuaaauau

SEQ ID NO: 2398944 - RNA, 19 nt, Artificial Sequence
  Description of Artificial Sequence: Synthetic oligonucleotide
aaacagggcauacagggau

SEQ ID NO: 2398945 - RNA, 19 nt, Artificial Sequence
  Description of Artificial Sequence: Synthetic oligonucleotide
uuguaacugccucaaagca

SEQ ID NO: 2398946 - RNA, 19 nt, Artificial Sequence
  Description of Artificial Sequence: Synthetic oligonucleotide
aguuccuuaaauauaacga

SEQ ID NO: 2398947 - RNA, 19 nt, Artificial Sequence
  Description of Artificial Sequence: Synthetic oligonucleotide
ugucaugccucccagguac

SEQ ID NO: 2398948 - RNA, 19 nt, Artificial Sequence
  Description of Artificial Sequence: Synthetic oligonucleotide
aaugacuugaccaaauguu

SEQ ID NO: 2398949 - RNA, 19 nt, Artificial Sequence
  Description of Artificial Sequence: Synthetic oligonucleotide
cauacugaauucucauugg

SEQ ID NO: 2398950 - RNA, 19 nt, Artificial Sequence
  Description of Artificial Sequence: Synthetic oligonucleotide
uuguaaagcaucucuggca

SEQ ID NO: 2398951 - RNA, 19 nt, Artificial Sequence
  Description of Artificial Sequence: Synthetic oligonucleotide
caugguuuuagcuuucuuc

SEQ ID NO: 2398952 - RNA, 19 nt, Artificial Sequence
  Description of Artificial Sequence: Synthetic oligonucleotide
aguaaaaccuuuggaauag

SEQ ID NO: 2398953 - RNA, 19 nt, Artificial Sequence
  Description of Artificial Sequence: Synthetic oligonucleotide
uugaguauuagccgaauuu

SEQ ID NO: 2398954 - RNA, 19 nt, Artificial Sequence
  Description of Artificial Sequence: Synthetic oligonucleotide
uguaguuuggaggauaauc

SEQ ID NO: 2398955 - RNA, 19 nt, Artificial Sequence
  Description of Artificial Sequence: Synthetic oligonucleotide
cuuggcauagguaaucuuc

SEQ ID NO: 2398956 - RNA, 19 nt, Artificial Sequence
  Description of Artificial Sequence: Synthetic oligonucleotide
ucauauuguugauauaaau

SEQ ID NO: 2398957 - RNA, 19 nt, Artificial Sequence
  Description of Artificial Sequence: Synthetic oligonucleotide
aauagccugaagccagcuc

SEQ ID NO: 2398958 - RNA, 19 nt, Artificial Sequence
  Description of Artificial Sequence: Synthetic oligonucleotide
cuuguaaagcaucucuggc

SEQ ID NO: 2398959 - RNA, 19 nt, Artificial Sequence
  Description of Artificial Sequence: Synthetic oligonucleotide
uguuugaguaaaaccuuug

SEQ ID NO: 2398960 - RNA, 19 nt, Artificial Sequence
  Description of Artificial Sequence: Synthetic oligonucleotide
aauucucauugguuuacca

SEQ ID NO: 2398961 - RNA, 19 nt, Artificial Sequence
  Description of Artificial Sequence: Synthetic oligonucleotide
gauaaucagggaccugagg

SEQ ID NO: 2398962 - RNA, 19 nt, Artificial Sequence
  Description of Artificial Sequence: Synthetic oligonucleotide
aucucuggcagcuccggcc

SEQ ID NO: 2398963 - RNA, 19 nt, Artificial Sequence
  Description of Artificial Sequence: Synthetic oligonucleotide
aauaucuaccacgugucca

SEQ ID NO: 2398964 - RNA, 19 nt, Artificial Sequence
  Description of Artificial Sequence: Synthetic oligonucleotide
auaauaccaaaguccuuuc

SEQ ID NO: 2398965 - RNA, 19 nt, Artificial Sequence
  Description of Artificial Sequence: Synthetic oligonucleotide
aauccuuguaacugccuca

SEQ ID NO: 2398966 - RNA, 19 nt, Artificial Sequence
  Description of Artificial Sequence: Synthetic oligonucleotide
auccaaauguuauuucuug

SEQ ID NO: 2398967 - RNA, 19 nt, Artificial Sequence
  Description of Artificial Sequence: Synthetic oligonucleotide
uuggcauagguaaucuuca

SEQ ID NO: 2398968 - RNA, 19 nt, Artificial Sequence
  Description of Artificial Sequence: Synthetic oligonucleotide
auauaacgaaagccugccc

SEQ ID NO: 2398969 - RNA, 19 nt, Artificial Sequence
  Description of Artificial Sequence: Synthetic oligonucleotide
ucuaccacguguccaaacu

SEQ ID NO: 2398970 - RNA, 19 nt, Artificial Sequence
  Description of Artificial Sequence: Synthetic oligonucleotide
gaguauuagccgaauuugg

SEQ ID NO: 2398971 - RNA, 19 nt, Artificial Sequence
  Description of Artificial Sequence: Synthetic oligonucleotide
uuccaaccauuuaaaauga

SEQ ID NO: 2398972 - RNA, 19 nt, Artificial Sequence
  Description of Artificial Sequence: Synthetic oligonucleotide
uuuugcauacugaauucuc

SEQ ID NO: 2398973 - RNA, 19 nt, Artificial Sequence
  Description of Artificial Sequence: Synthetic oligonucleotide
acaauaucuaccacguguc

SEQ ID NO: 2398974 - RNA, 19 nt, Artificial Sequence
  Description of Artificial Sequence: Synthetic oligonucleotide
uaccaagcgaacuuccuug

SEQ ID NO: 2398975 - RNA, 19 nt, Artificial Sequence
  Description of Artificial Sequence: Synthetic oligonucleotide
ugauauccauguuugagua

SEQ ID NO: 2398976 - RNA, 19 nt, Artificial Sequence
  Description of Artificial Sequence: Synthetic oligonucleotide
ucacuuucauuuccaacca

SEQ ID NO: 2398977 - RNA, 19 nt, Artificial Sequence
  Description of Artificial Sequence: Synthetic oligonucleotide
uaaggaauaggauguaguu

SEQ ID NO: 2398978 - RNA, 19 nt, Artificial Sequence
  Description of Artificial Sequence: Synthetic oligonucleotide
uucucauugguuuaccaua

SEQ ID NO: 2398979 - RNA, 19 nt, Artificial Sequence
  Description of Artificial Sequence: Synthetic oligonucleotide
agauauuauaucggaaucu

SEQ ID NO: 2398980 - RNA, 19 nt, Artificial Sequence
  Description of Artificial Sequence: Synthetic oligonucleotide
agcgaacuuccuugaaacc

SEQ ID NO: 2398981 - RNA, 19 nt, Artificial Sequence
  Description of Artificial Sequence: Synthetic oligonucleotide
uuaauccaaauguuauuuc

SEQ ID NO: 2398982 - RNA, 19 nt, Artificial Sequence
  Description of Artificial Sequence: Synthetic oligonucleotide
uguaacugccucaaagcau

SEQ ID NO: 2398983 - RNA, 19 nt, Artificial Sequence
  Description of Artificial Sequence: Synthetic oligonucleotide
agugccacgcauuuuagau

SEQ ID NO: 2398984 - RNA, 19 nt, Artificial Sequence
  Description of Artificial Sequence: Synthetic oligonucleotide
auuaaggaauaggauguag

SEQ ID NO: 2398985 - RNA, 19 nt, Artificial Sequence
  Description of Artificial Sequence: Synthetic oligonucleotide
aaaccagggaacugauuga

SEQ ID NO: 2398986 - RNA, 19 nt, Artificial Sequence
  Description of Artificial Sequence: Synthetic oligonucleotide
auuauaucggaaucuguuu

SEQ ID NO: 2398987 - RNA, 19 nt, Artificial Sequence
  Description of Artificial Sequence: Synthetic oligonucleotide
gcauacugaauucucauug

SEQ ID NO: 2398988 - RNA, 19 nt, Artificial Sequence
  Description of Artificial Sequence: Synthetic oligonucleotide
uuguggaugaacccaguuc

SEQ ID NO: 2398989 - RNA, 19 nt, Artificial Sequence
  Description of Artificial Sequence: Synthetic oligonucleotide
ucucauugguuuaccauaa

SEQ ID NO: 2398990 - RNA, 19 nt, Artificial Sequence
  Description of Artificial Sequence: Synthetic oligonucleotide
uaauaccaaaguccuuuca

SEQ ID NO: 2398991 - RNA, 19 nt, Artificial Sequence
  Description of Artificial Sequence: Synthetic oligonucleotide
uguuauuucuuggcauagg

SEQ ID NO: 2398992 - RNA, 19 nt, Artificial Sequence
  Description of Artificial Sequence: Synthetic oligonucleotide
guaguuuggaggauaauca

SEQ ID NO: 2398993 - RNA, 19 nt, Artificial Sequence
  Description of Artificial Sequence: Synthetic oligonucleotide
uaaagcaucucuggcagcu

SEQ ID NO: 2398994 - RNA, 19 nt, Artificial Sequence
  Description of Artificial Sequence: Synthetic oligonucleotide
ucauggucuuuaaagccac

SEQ ID NO: 2398995 - RNA, 19 nt, Artificial Sequence
  Description of Artificial Sequence: Synthetic oligonucleotide
uggucugauauccauguuu

SEQ ID NO: 2398996 - RNA, 19 nt, Artificial Sequence
  Description of Artificial Sequence: Synthetic oligonucleotide
cuuaaacccuuguaaagca

SEQ ID NO: 2398997 - RNA, 19 nt, Artificial Sequence
  Description of Artificial Sequence: Synthetic oligonucleotide
ugccacgcauuuuagauau

SEQ ID NO: 2398998 - RNA, 19 nt, Artificial Sequence
  Description of Artificial Sequence: Synthetic oligonucleotide
ugacuugaccaaauguuau

SEQ ID NO: 2398999 - RNA, 19 nt, Artificial Sequence
  Description of Artificial Sequence: Synthetic oligonucleotide
uuauuucuuggcauaggua

SEQ ID NO: 2399000 - RNA, 19 nt, Artificial Sequence
  Description of Artificial Sequence: Synthetic oligonucleotide
aggauaaucagggaccuga

SEQ ID NO: 2399001 - RNA, 19 nt, Artificial Sequence
  Description of Artificial Sequence: Synthetic oligonucleotide
agcauggauaacaucaucu

SEQ ID NO: 2399002 - RNA, 19 nt, Artificial Sequence
  Description of Artificial Sequence: Synthetic oligonucleotide
uaauuaggugccuuuucuc

SEQ ID NO: 2399003 - RNA, 19 nt, Artificial Sequence
  Description of Artificial Sequence: Synthetic oligonucleotide
uuaccauaaaauggaaauc

SEQ ID NO: 2399004 - RNA, 19 nt, Artificial Sequence
  Description of Artificial Sequence: Synthetic oligonucleotide
acuugaccaaauguuauca

SEQ ID NO: 2399005 - RNA, 19 nt, Artificial Sequence
  Description of Artificial Sequence: Synthetic oligonucleotide
uaccacguguccaaacuga

SEQ ID NO: 2399006 - RNA, 19 nt, Artificial Sequence
  Description of Artificial Sequence: Synthetic oligonucleotide
auaucuaccacguguccaa

SEQ ID NO: 2399007 - RNA, 19 nt, Artificial Sequence
  Description of Artificial Sequence: Synthetic oligonucleotide
ugccuuaauccaaauguua

SEQ ID NO: 2399008 - RNA, 19 nt, Artificial Sequence
  Description of Artificial Sequence: Synthetic oligonucleotide
ugaauucucauugguuuac

SEQ ID NO: 2399009 - RNA, 19 nt, Artificial Sequence
  Description of Artificial Sequence: Synthetic oligonucleotide
aaggaauaggauguaguuu

SEQ ID NO: 2399010 - RNA, 19 nt, Artificial Sequence
  Description of Artificial Sequence: Synthetic oligonucleotide
uuaaacccuuguaaagcau

SEQ ID NO: 2399011 - RNA, 19 nt, Artificial Sequence
  Description of Artificial Sequence: Synthetic oligonucleotide
aaacccuuguaaagcaucu

SEQ ID NO: 2399012 - RNA, 19 nt, Artificial Sequence
  Description of Artificial Sequence: Synthetic oligonucleotide
ugaacccaguuccuuaaau

SEQ ID NO: 2399013 - RNA, 19 nt, Artificial Sequence
  Description of Artificial Sequence: Synthetic oligonucleotide
gcauuuuagauauuauauc

SEQ ID NO: 2399014 - RNA, 19 nt, Artificial Sequence
  Description of Artificial Sequence: Synthetic oligonucleotide
ccuuaaauauaacgaaagc

SEQ ID NO: 2399015 - RNA, 19 nt, Artificial Sequence
  Description of Artificial Sequence: Synthetic oligonucleotide
uugcauacugaauucucau

SEQ ID NO: 2399016 - RNA, 19 nt, Artificial Sequence
  Description of Artificial Sequence: Synthetic oligonucleotide
gacuugaccaaauguuauc

SEQ ID NO: 2399017 - RNA, 19 nt, Artificial Sequence
  Description of Artificial Sequence: Synthetic oligonucleotide
acgcauuuuagauauuaua

SEQ ID NO: 2399018 - RNA, 19 nt, Artificial Sequence
  Description of Artificial Sequence: Synthetic oligonucleotide
cuugaaaccagggaacuga

SEQ ID NO: 2399019 - RNA, 19 nt, Artificial Sequence
  Description of Artificial Sequence: Synthetic oligonucleotide
uagccugaagccagcuccg

SEQ ID NO: 2399020 - RNA, 19 nt, Artificial Sequence
  Description of Artificial Sequence: Synthetic oligonucleotide
aguauuagccgaauuuggu

SEQ ID NO: 2399021 - RNA, 19 nt, Artificial Sequence
  Description of Artificial Sequence: Synthetic oligonucleotide
ccuuguaaagcaucucugg

SEQ ID NO: 2399022 - RNA, 19 nt, Artificial Sequence
  Description of Artificial Sequence: Synthetic oligonucleotide
cacaauaucuaccacgugu

SEQ ID NO: 2399023 - RNA, 19 nt, Artificial Sequence
  Description of Artificial Sequence: Synthetic oligonucleotide
cauggauaacaucaucuca

SEQ ID NO: 2399024 - RNA, 19 nt, Artificial Sequence
  Description of Artificial Sequence: Synthetic oligonucleotide
ugcugcguuuccuugagua

SEQ ID NO: 2399025 - RNA, 19 nt, Artificial Sequence
  Description of Artificial Sequence: Synthetic oligonucleotide
ucauagcaugggauggugu

SEQ ID NO: 2399026 - RNA, 19 nt, Artificial Sequence
  Description of Artificial Sequence: Synthetic oligonucleotide
uggugugaucuuaaacccu

SEQ ID NO: 2399027 - RNA, 19 nt, Artificial Sequence
  Description of Artificial Sequence: Synthetic oligonucleotide
gguaaucuucauagcaugg

SEQ ID NO: 2399028 - RNA, 19 nt, Artificial Sequence
  Description of Artificial Sequence: Synthetic oligonucleotide
uuuguggaugaacccaguu

SEQ ID NO: 2399029 - RNA, 19 nt, Artificial Sequence
  Description of Artificial Sequence: Synthetic oligonucleotide
aacaaacacuauaaauaau

SEQ ID NO: 2399030 - RNA, 19 nt, Artificial Sequence
  Description of Artificial Sequence: Synthetic oligonucleotide
ccuuguaacugccucaaag

SEQ ID NO: 2399031 - RNA, 19 nt, Artificial Sequence
  Description of Artificial Sequence: Synthetic oligonucleotide
aagugccacgcauuuuaga

SEQ ID NO: 2399032 - RNA, 19 nt, Artificial Sequence
  Description of Artificial Sequence: Synthetic oligonucleotide
uggucuuuaaagccacaau

SEQ ID NO: 2399033 - RNA, 19 nt, Artificial Sequence
  Description of Artificial Sequence: Synthetic oligonucleotide
cacguguccaaacugagaa

SEQ ID NO: 2399034 - RNA, 19 nt, Artificial Sequence
  Description of Artificial Sequence: Synthetic oligonucleotide
cauugguuuaccauaaaau

SEQ ID NO: 2399035 - RNA, 19 nt, Artificial Sequence
  Description of Artificial Sequence: Synthetic oligonucleotide
cugguaaauuauuaaggaa

SEQ ID NO: 2399036 - RNA, 19 nt, Artificial Sequence
  Description of Artificial Sequence: Synthetic oligonucleotide
gaugaacccaguuccuuaa

SEQ ID NO: 2399037 - RNA, 19 nt, Artificial Sequence
  Description of Artificial Sequence: Synthetic oligonucleotide
aacagggcauacagggauc

SEQ ID NO: 2399038 - RNA, 19 nt, Artificial Sequence
  Description of Artificial Sequence: Synthetic oligonucleotide
aacccuuguaaagcaucuc

SEQ ID NO: 2399039 - RNA, 19 nt, Artificial Sequence
  Description of Artificial Sequence: Synthetic oligonucleotide
aaagugccacgcauuuuag

SEQ ID NO: 2399040 - RNA, 19 nt, Artificial Sequence
  Description of Artificial Sequence: Synthetic oligonucleotide
aacugagaaaacagggcau

SEQ ID NO: 2399041 - RNA, 19 nt, Artificial Sequence
  Description of Artificial Sequence: Synthetic oligonucleotide
gauuuggugcugcguuucc

SEQ ID NO: 2399042 - RNA, 19 nt, Artificial Sequence
  Description of Artificial Sequence: Synthetic oligonucleotide
uccaaccauuuaaaaugac

SEQ ID NO: 2399043 - RNA, 19 nt, Artificial Sequence
  Description of Artificial Sequence: Synthetic oligonucleotide
gaacccaguuccuuaaaua

SEQ ID NO: 2399044 - RNA, 19 nt, Artificial Sequence
  Description of Artificial Sequence: Synthetic oligonucleotide
ggucugauauccauguuug

SEQ ID NO: 2399045 - RNA, 19 nt, Artificial Sequence
  Description of Artificial Sequence: Synthetic oligonucleotide
uugaaaccagggaacugau

SEQ ID NO: 2399046 - RNA, 19 nt, Artificial Sequence
  Description of Artificial Sequence: Synthetic oligonucleotide
ucauucgucucuucuggua

SEQ ID NO: 2399047 - RNA, 19 nt, Artificial Sequence
  Description of Artificial Sequence: Synthetic oligonucleotide
agccgaauuugguguuccc

SEQ ID NO: 2399048 - RNA, 19 nt, Artificial Sequence
  Description of Artificial Sequence: Synthetic oligonucleotide
agguaccaagcgaacuucc

SEQ ID NO: 2399049 - RNA, 19 nt, Artificial Sequence
  Description of Artificial Sequence: Synthetic oligonucleotide
acugauugaacagcaugga

SEQ ID NO: 2399050 - RNA, 19 nt, Artificial Sequence
  Description of Artificial Sequence: Synthetic oligonucleotide
aaccuuuggaauagccuga

SEQ ID NO: 2399051 - RNA, 19 nt, Artificial Sequence
  Description of Artificial Sequence: Synthetic oligonucleotide
auauuauaucggaaucugu

SEQ ID NO: 2399052 - RNA, 19 nt, Artificial Sequence
  Description of Artificial Sequence: Synthetic oligonucleotide
ugcauacugaauucucauu

SEQ ID NO: 2399053 - RNA, 19 nt, Artificial Sequence
  Description of Artificial Sequence: Synthetic oligonucleotide
aaccagggaacugauugaa

SEQ ID NO: 2399054 - RNA, 19 nt, Artificial Sequence
  Description of Artificial Sequence: Synthetic oligonucleotide
uggauaacaucaucucauu

SEQ ID NO: 2399055 - RNA, 19 nt, Artificial Sequence
  Description of Artificial Sequence: Synthetic oligonucleotide
augccucccagguaccaag

SEQ ID NO: 2399056 - RNA, 19 nt, Artificial Sequence
  Description of Artificial Sequence: Synthetic oligonucleotide
ugcguuuccuugaguauua

SEQ ID NO: 2399057 - RNA, 19 nt, Artificial Sequence
  Description of Artificial Sequence: Synthetic oligonucleotide
accauaaaauggaaauccu

SEQ ID NO: 2399058 - RNA, 19 nt, Artificial Sequence
  Description of Artificial Sequence: Synthetic oligonucleotide
cuaccacguguccaaacug

SEQ ID NO: 2399059 - RNA, 19 nt, Artificial Sequence
  Description of Artificial Sequence: Synthetic oligonucleotide
ccauguuugaguaaaaccu

SEQ ID NO: 2399060 - RNA, 19 nt, Artificial Sequence
  Description of Artificial Sequence: Synthetic oligonucleotide
gauguaguuuggaggauaa

SEQ ID NO: 2399061 - RNA, 19 nt, Artificial Sequence
  Description of Artificial Sequence: Synthetic oligonucleotide
ggauggugugaucuuaaac

SEQ ID NO: 2399062 - RNA, 19 nt, Artificial Sequence
  Description of Artificial Sequence: Synthetic oligonucleotide
ugggauggugugaucuuaa

SEQ ID NO: 2399063 - RNA, 19 nt, Artificial Sequence
  Description of Artificial Sequence: Synthetic oligonucleotide
gauauccauguuugaguaa

SEQ ID NO: 2399064 - RNA, 19 nt, Artificial Sequence
  Description of Artificial Sequence: Synthetic oligonucleotide
cugcccaucauuuucaaau

SEQ ID NO: 2399065 - RNA, 19 nt, Artificial Sequence
  Description of Artificial Sequence: Synthetic oligonucleotide
cauacagggaucucuucaa

SEQ ID NO: 2399066 - RNA, 19 nt, Artificial Sequence
  Description of Artificial Sequence: Synthetic oligonucleotide
gaauaggauguaguuugga

SEQ ID NO: 2399067 - RNA, 19 nt, Artificial Sequence
  Description of Artificial Sequence: Synthetic oligonucleotide
uauuaaggaauaggaugua

SEQ ID NO: 2399068 - RNA, 19 nt, Artificial Sequence
  Description of Artificial Sequence: Synthetic oligonucleotide
auuagccgaauuugguguu

SEQ ID NO: 2399069 - RNA, 19 nt, Artificial Sequence
  Description of Artificial Sequence: Synthetic oligonucleotide
agggcauacagggaucucu

SEQ ID NO: 2399070 - RNA, 19 nt, Artificial Sequence
  Description of Artificial Sequence: Synthetic oligonucleotide
aaauaauaccaaaguccuu

SEQ ID NO: 2399071 - RNA, 19 nt, Artificial Sequence
  Description of Artificial Sequence: Synthetic oligonucleotide
accaagcgaacuuccuuga

SEQ ID NO: 2399072 - RNA, 19 nt, Artificial Sequence
  Description of Artificial Sequence: Synthetic oligonucleotide
ugaagccagcuccgucccg

SEQ ID NO: 2399073 - RNA, 19 nt, Artificial Sequence
  Description of Artificial Sequence: Synthetic oligonucleotide
gaacagcauggauaacauc

SEQ ID NO: 2399074 - RNA, 19 nt, Artificial Sequence
  Description of Artificial Sequence: Synthetic oligonucleotide
augacuugaccaaauguua

SEQ ID NO: 2399075 - RNA, 19 nt, Artificial Sequence
  Description of Artificial Sequence: Synthetic oligonucleotide
acuuucauuuccaaccauu

SEQ ID NO: 2399076 - RNA, 19 nt, Artificial Sequence
  Description of Artificial Sequence: Synthetic oligonucleotide
ugaggauuuggugcugcgu

SEQ ID NO: 2399077 - RNA, 19 nt, Artificial Sequence
  Description of Artificial Sequence: Synthetic oligonucleotide
ggauaacaucaucucauuc

SEQ ID NO: 2399078 - RNA, 19 nt, Artificial Sequence
  Description of Artificial Sequence: Synthetic oligonucleotide
cauucgucucuucugguaa

SEQ ID NO: 2399079 - RNA, 19 nt, Artificial Sequence
  Description of Artificial Sequence: Synthetic oligonucleotide
acugagaaaacagggcaua

SEQ ID NO: 2399080 - RNA, 19 nt, Artificial Sequence
  Description of Artificial Sequence: Synthetic oligonucleotide
cugagaaaacagggcauac

SEQ ID NO: 2399081 - RNA, 19 nt, Artificial Sequence
  Description of Artificial Sequence: Synthetic oligonucleotide
uagccgaauuugguguucc

SEQ ID NO: 2399082 - RNA, 19 nt, Artificial Sequence
  Description of Artificial Sequence: Synthetic oligonucleotide
ugcccaucauuuucaaauu

SEQ ID NO: 2399083 - RNA, 19 nt, Artificial Sequence
  Description of Artificial Sequence: Synthetic oligonucleotide
uggugcugcguuuccuuga

SEQ ID NO: 2399084 - RNA, 19 nt, Artificial Sequence
  Description of Artificial Sequence: Synthetic oligonucleotide
ugcugcagccuguuccaug

SEQ ID NO: 2399085 - RNA, 19 nt, Artificial Sequence
  Description of Artificial Sequence: Synthetic oligonucleotide
ggugccuuuucucccaaac

SEQ ID NO: 2399086 - RNA, 19 nt, Artificial Sequence
  Description of Artificial Sequence: Synthetic oligonucleotide
guaaaaccuuuggaauagc

SEQ ID NO: 2399087 - RNA, 19 nt, Artificial Sequence
  Description of Artificial Sequence: Synthetic oligonucleotide
auacagggaucucuucaau

SEQ ID NO: 2399088 - RNA, 19 nt, Artificial Sequence
  Description of Artificial Sequence: Synthetic oligonucleotide
ggaaauccuuguaacugcc

SEQ ID NO: 2399089 - RNA, 19 nt, Artificial Sequence
  Description of Artificial Sequence: Synthetic oligonucleotide
caagcgaacuuccuugaaa

SEQ ID NO: 2399090 - RNA, 19 nt, Artificial Sequence
  Description of Artificial Sequence: Synthetic oligonucleotide
ggaauaggauguaguuugg

SEQ ID NO: 2399091 - RNA, 19 nt, Artificial Sequence
  Description of Artificial Sequence: Synthetic oligonucleotide
ugaaaccagggaacugauu

SEQ ID NO: 2399092 - RNA, 19 nt, Artificial Sequence
  Description of Artificial Sequence: Synthetic oligonucleotide
auaaaucgugugauuuggu

SEQ ID NO: 2399093 - RNA, 19 nt, Artificial Sequence
  Description of Artificial Sequence: Synthetic oligonucleotide
gccucaaagcauuugugga

SEQ ID NO: 2399094 - RNA, 19 nt, Artificial Sequence
  Description of Artificial Sequence: Synthetic oligonucleotide
auucgucucuucugguaaa

SEQ ID NO: 2399095 - RNA, 19 nt, Artificial Sequence
  Description of Artificial Sequence: Synthetic oligonucleotide
cucccagguaccaagcgaa

SEQ ID NO: 2399096 - RNA, 19 nt, Artificial Sequence
  Description of Artificial Sequence: Synthetic oligonucleotide
agcaugggauggugugauc

SEQ ID NO: 2399097 - RNA, 19 nt, Artificial Sequence
  Description of Artificial Sequence: Synthetic oligonucleotide
gaggauuuggugcugcguu

SEQ ID NO: 2399098 - RNA, 19 nt, Artificial Sequence
  Description of Artificial Sequence: Synthetic oligonucleotide
uccggccugcccaucauuu

SEQ ID NO: 2399099 - RNA, 19 nt, Artificial Sequence
  Description of Artificial Sequence: Synthetic oligonucleotide
auuucuuggcauagguaau

SEQ ID NO: 2399100 - RNA, 19 nt, Artificial Sequence
  Description of Artificial Sequence: Synthetic oligonucleotide
auguuugaguaaaaccuuu

SEQ ID NO: 2399101 - RNA, 19 nt, Artificial Sequence
  Description of Artificial Sequence: Synthetic oligonucleotide
ggugcugcguuuccuugag

SEQ ID NO: 2399102 - RNA, 19 nt, Artificial Sequence
  Description of Artificial Sequence: Synthetic oligonucleotide
uuccaugguuuuagcuuuc

SEQ ID NO: 2399103 - RNA, 19 nt, Artificial Sequence
  Description of Artificial Sequence: Synthetic oligonucleotide
acagggcauacagggaucu

SEQ ID NO: 2399104 - RNA, 19 nt, Artificial Sequence
  Description of Artificial Sequence: Synthetic oligonucleotide
uggcauagguaaucuucau

SEQ ID NO: 2399105 - RNA, 19 nt, Artificial Sequence
  Description of Artificial Sequence: Synthetic oligonucleotide
uuagccgaauuugguguuc

SEQ ID NO: 2399106 - RNA, 19 nt, Artificial Sequence
  Description of Artificial Sequence: Synthetic oligonucleotide
cccaguuccuuaaauauaa

SEQ ID NO: 2399107 - RNA, 19 nt, Artificial Sequence
  Description of Artificial Sequence: Synthetic oligonucleotide
cauguuugaguaaaaccuu

SEQ ID NO: 2399108 - RNA, 19 nt, Artificial Sequence
  Description of Artificial Sequence: Synthetic oligonucleotide
guaacugccucaaagcauu

SEQ ID NO: 2399109 - RNA, 19 nt, Artificial Sequence
  Description of Artificial Sequence: Synthetic oligonucleotide
uggaugaacccaguuccuu

SEQ ID NO: 2399110 - RNA, 19 nt, Artificial Sequence
  Description of Artificial Sequence: Synthetic oligonucleotide
acguguccaaacugagaaa

SEQ ID NO: 2399111 - RNA, 19 nt, Artificial Sequence
  Description of Artificial Sequence: Synthetic oligonucleotide
gucugauauccauguuuga

SEQ ID NO: 2399112 - RNA, 19 nt, Artificial Sequence
  Description of Artificial Sequence: Synthetic oligonucleotide
augaacccaguuccuuaaa

SEQ ID NO: 2399113 - RNA, 19 nt, Artificial Sequence
  Description of Artificial Sequence: Synthetic oligonucleotide
uucgucucuucugguaaau

SEQ ID NO: 2399114 - RNA, 19 nt, Artificial Sequence
  Description of Artificial Sequence: Synthetic oligonucleotide
guguccaaacugagaaaac

SEQ ID NO: 2399115 - RNA, 19 nt, Artificial Sequence
  Description of Artificial Sequence: Synthetic oligonucleotide
gggaacugauugaacagca

SEQ ID NO: 2399116 - RNA, 19 nt, Artificial Sequence
  Description of Artificial Sequence: Synthetic oligonucleotide
gaggauaaucagggaccug

SEQ ID NO: 2399117 - RNA, 19 nt, Artificial Sequence
  Description of Artificial Sequence: Synthetic oligonucleotide
uccuuguaacugccucaaa

SEQ ID NO: 2399118 - RNA, 19 nt, Artificial Sequence
  Description of Artificial Sequence: Synthetic oligonucleotide
cauucauauuguugauaua

SEQ ID NO: 2399119 - RNA, 19 nt, Artificial Sequence
  Description of Artificial Sequence: Synthetic oligonucleotide
ggcauagguaaucuucaua

SEQ ID NO: 2399120 - RNA, 19 nt, Artificial Sequence
  Description of Artificial Sequence: Synthetic oligonucleotide
gcccaucauuuucaaauuc

SEQ ID NO: 2399121 - RNA, 19 nt, Artificial Sequence
  Description of Artificial Sequence: Synthetic oligonucleotide
uaucuaccacguguccaaa

SEQ ID NO: 2399122 - RNA, 19 nt, Artificial Sequence
  Description of Artificial Sequence: Synthetic oligonucleotide
augucaugccucccaggua

SEQ ID NO: 2399123 - RNA, 19 nt, Artificial Sequence
  Description of Artificial Sequence: Synthetic oligonucleotide
ccuguuccaugguuuuagc

SEQ ID NO: 2399124 - RNA, 19 nt, Artificial Sequence
  Description of Artificial Sequence: Synthetic oligonucleotide
accuuuggaauagccugaa

SEQ ID NO: 2399125 - RNA, 19 nt, Artificial Sequence
  Description of Artificial Sequence: Synthetic oligonucleotide
ggaauagccugaagccagc

SEQ ID NO: 2399126 - RNA, 19 nt, Artificial Sequence
  Description of Artificial Sequence: Synthetic oligonucleotide
gugccacgcauuuuagaua

SEQ ID NO: 2399127 - RNA, 19 nt, Artificial Sequence
  Description of Artificial Sequence: Synthetic oligonucleotide
agggaucucuucaauucuu

SEQ ID NO: 2399128 - RNA, 19 nt, Artificial Sequence
  Description of Artificial Sequence: Synthetic oligonucleotide
acccaguuccuuaaauaua

SEQ ID NO: 2399129 - RNA, 19 nt, Artificial Sequence
  Description of Artificial Sequence: Synthetic oligonucleotide
augggauggugugaucuua

SEQ ID NO: 2399130 - RNA, 19 nt, Artificial Sequence
  Description of Artificial Sequence: Synthetic oligonucleotide
ccaguuccuuaaauauaac

SEQ ID NO: 2399131 - RNA, 19 nt, Artificial Sequence
  Description of Artificial Sequence: Synthetic oligonucleotide
guaccaagcgaacuuccuu

SEQ ID NO: 2399132 - RNA, 19 nt, Artificial Sequence
  Description of Artificial Sequence: Synthetic oligonucleotide
ggaucucuucaauucuucu

SEQ ID NO: 2399133 - RNA, 19 nt, Artificial Sequence
  Description of Artificial Sequence: Synthetic oligonucleotide
ucgucucuucugguaaauu

SEQ ID NO: 2399134 - RNA, 19 nt, Artificial Sequence
  Description of Artificial Sequence: Synthetic oligonucleotide
gccacaauaucuaccacgu

SEQ ID NO: 2399135 - RNA, 19 nt, Artificial Sequence
  Description of Artificial Sequence: Synthetic oligonucleotide
cagggaucucuucaauucu

SEQ ID NO: 2399136 - RNA, 19 nt, Artificial Sequence
  Description of Artificial Sequence: Synthetic oligonucleotide
aggauguaguuuggaggau

SEQ ID NO: 2399137 - RNA, 19 nt, Artificial Sequence
  Description of Artificial Sequence: Synthetic oligonucleotide
auguaguuuggaggauaau

SEQ ID NO: 2399138 - RNA, 19 nt, Artificial Sequence
  Description of Artificial Sequence: Synthetic oligonucleotide
cacgcauuuuagauauuau

SEQ ID NO: 2399139 - RNA, 19 nt, Artificial Sequence
  Description of Artificial Sequence: Synthetic oligonucleotide
gcaucucuggcagcuccgg

SEQ ID NO: 2399140 - RNA, 19 nt, Artificial Sequence
  Description of Artificial Sequence: Synthetic oligonucleotide
caaagcauuuguggaugaa

SEQ ID NO: 2399141 - RNA, 19 nt, Artificial Sequence
  Description of Artificial Sequence: Synthetic oligonucleotide
ucgugugauuuggucugau

SEQ ID NO: 2399142 - RNA, 19 nt, Artificial Sequence
  Description of Artificial Sequence: Synthetic oligonucleotide
ggauguaguuuggaggaua

SEQ ID NO: 2399143 - RNA, 19 nt, Artificial Sequence
  Description of Artificial Sequence: Synthetic oligonucleotide
gucaugccucccagguacc

SEQ ID NO: 2399144 - RNA, 19 nt, Artificial Sequence
  Description of Artificial Sequence: Synthetic oligonucleotide
gccuuaauccaaauguuau

SEQ ID NO: 2399145 - RNA, 19 nt, Artificial Sequence
  Description of Artificial Sequence: Synthetic oligonucleotide
ccuuuggaauagccugaag

SEQ ID NO: 2399146 - RNA, 19 nt, Artificial Sequence
  Description of Artificial Sequence: Synthetic oligonucleotide
gcaugggauggugugaucu

SEQ ID NO: 2399147 - RNA, 19 nt, Artificial Sequence
  Description of Artificial Sequence: Synthetic oligonucleotide
ggaggauaaucagggaccu

SEQ ID NO: 2399148 - RNA, 19 nt, Artificial Sequence
  Description of Artificial Sequence: Synthetic oligonucleotide
ggugugaucuuaaacccuu

SEQ ID NO: 2399149 - RNA, 19 nt, Artificial Sequence
  Description of Artificial Sequence: Synthetic oligonucleotide
cgucucuucugguaaauua

SEQ ID NO: 2399150 - RNA, 19 nt, Artificial Sequence
  Description of Artificial Sequence: Synthetic oligonucleotide
aggugccuuuucucccaaa

SEQ ID NO: 2399151 - RNA, 19 nt, Artificial Sequence
  Description of Artificial Sequence: Synthetic oligonucleotide
caugggauggugugaucuu

SEQ ID NO: 2399152 - RNA, 19 nt, Artificial Sequence
  Description of Artificial Sequence: Synthetic oligonucleotide
ccucaaagcauuuguggau

SEQ ID NO: 2399153 - RNA, 19 nt, Artificial Sequence
  Description of Artificial Sequence: Synthetic oligonucleotide
gcccaggcuucuuguuugc

SEQ ID NO: 2399154 - RNA, 19 nt, Artificial Sequence
  Description of Artificial Sequence: Synthetic oligonucleotide
caugccucccagguaccaa

SEQ ID NO: 2399155 - RNA, 19 nt, Artificial Sequence
  Description of Artificial Sequence: Synthetic oligonucleotide
gguaccaagcgaacuuccu

SEQ ID NO: 2399156 - RNA, 19 nt, Artificial Sequence
  Description of Artificial Sequence: Synthetic oligonucleotide
gcguuuccuugaguauuag

SEQ ID NO: 2399157 - RNA, 19 nt, Artificial Sequence
  Description of Artificial Sequence: Synthetic oligonucleotide
cugcguuuccuugaguauu

SEQ ID NO: 2399158 - RNA, 19 nt, Artificial Sequence
  Description of Artificial Sequence: Synthetic oligonucleotide
gccugaagccagcuccguc

SEQ ID NO: 2399159 - RNA, 19 nt, Artificial Sequence
  Description of Artificial Sequence: Synthetic oligonucleotide
guguucccugcccaggcuu

SEQ ID NO: 2399160 - RNA, 19 nt, Artificial Sequence
  Description of Artificial Sequence: Synthetic oligonucleotide
ccacguguccaaacugaga

SEQ ID NO: 2399161 - RNA, 19 nt, Artificial Sequence
  Description of Artificial Sequence: Synthetic oligonucleotide
cagggcauacagggaucuc

SEQ ID NO: 2399162 - RNA, 19 nt, Artificial Sequence
  Description of Artificial Sequence: Synthetic oligonucleotide
cacuuucauuuccaaccau

SEQ ID NO: 2399163 - RNA, 19 nt, Artificial Sequence
  Description of Artificial Sequence: Synthetic oligonucleotide
gcugcguuuccuugaguau

SEQ ID NO: 2399164 - RNA, 19 nt, Artificial Sequence
  Description of Artificial Sequence: Synthetic oligonucleotide
gccgaauuugguguucccu

SEQ ID NO: 2399165 - RNA, 19 nt, Artificial Sequence
  Description of Artificial Sequence: Synthetic oligonucleotide
ggaacugauugaacagcau

SEQ ID NO: 2399166 - RNA, 19 nt, Artificial Sequence
  Description of Artificial Sequence: Synthetic oligonucleotide
uucccugcccaggcuucuu

SEQ ID NO: 2399167 - RNA, 19 nt, Artificial Sequence
  Description of Artificial Sequence: Synthetic oligonucleotide
caaaagugccacgcauuuu

SEQ ID NO: 2399168 - RNA, 19 nt, Artificial Sequence
  Description of Artificial Sequence: Synthetic oligonucleotide
ccaagcgaacuuccuugaa

SEQ ID NO: 2399169 - RNA, 19 nt, Artificial Sequence
  Description of Artificial Sequence: Synthetic oligonucleotide
guucccugcccaggcuucu

SEQ ID NO: 2399170 - RNA, 19 nt, Artificial Sequence
  Description of Artificial Sequence: Synthetic oligonucleotide
cgugugauuuggucugaua

SEQ ID NO: 2399171 - RNA, 19 nt, Artificial Sequence
  Description of Artificial Sequence: Synthetic oligonucleotide
ccagcuccgucccgcuuga

SEQ ID NO: 2399172 - RNA, 19 nt, Artificial Sequence
  Description of Artificial Sequence: Synthetic oligonucleotide
ccuuucaaacugccuuaau

SEQ ID NO: 2399173 - RNA, 19 nt, Artificial Sequence
  Description of Artificial Sequence: Synthetic oligonucleotide
cccaggcuucuuguuugca

SEQ ID NO: 2399174 - RNA, 19 nt, Artificial Sequence
  Description of Artificial Sequence: Synthetic oligonucleotide
ccuugaguauuagccgaau

SEQ ID NO: 2399175 - RNA, 19 nt, Artificial Sequence
  Description of Artificial Sequence: Synthetic oligonucleotide
ccggccugcccaucauuuu

SEQ ID NO: 2399176 - RNA, 19 nt, Artificial Sequence
  Description of Artificial Sequence: Synthetic oligonucleotide
cagcuccgucccgcuugaa

SEQ ID NO: 2399177 - RNA, 19 nt, Artificial Sequence
  Description of Artificial Sequence: Synthetic oligonucleotide
gccacgcauuuuagauauu

SEQ ID NO: 2399178 - RNA, 19 nt, Artificial Sequence
  Description of Artificial Sequence: Synthetic oligonucleotide
uacaaaucaaacaagaugc

SEQ ID NO: 2399179 - RNA, 19 nt, Artificial Sequence
  Description of Artificial Sequence: Synthetic oligonucleotide
uaaaauauugucuauagca

SEQ ID NO: 2399180 - RNA, 19 nt, Artificial Sequence
  Description of Artificial Sequence: Synthetic oligonucleotide
uuuaguguaagccaaauga

SEQ ID NO: 2399181 - RNA, 19 nt, Artificial Sequence
  Description of Artificial Sequence: Synthetic oligonucleotide
aauauaagacuuuaaaaca

SEQ ID NO: 2399182 - RNA, 19 nt, Artificial Sequence
  Description of Artificial Sequence: Synthetic oligonucleotide
auuuaugacacagagaugg

SEQ ID NO: 2399183 - RNA, 19 nt, Artificial Sequence
  Description of Artificial Sequence: Synthetic oligonucleotide
uauacuaaauucuuuagug

SEQ ID NO: 2399184 - RNA, 19 nt, Artificial Sequence
  Description of Artificial Sequence: Synthetic oligonucleotide
uuacaaaucaaacaagaug

SEQ ID NO: 2399185 - RNA, 19 nt, Artificial Sequence
  Description of Artificial Sequence: Synthetic oligonucleotide
aauauacuaaauucuuuag

SEQ ID NO: 2399186 - RNA, 19 nt, Artificial Sequence
  Description of Artificial Sequence: Synthetic oligonucleotide
auaguuucgaaguaguuuc

SEQ ID NO: 2399187 - RNA, 19 nt, Artificial Sequence
  Description of Artificial Sequence: Synthetic oligonucleotide
uguauuuacaaaucaaaca

SEQ ID NO: 2399188 - RNA, 19 nt, Artificial Sequence
  Description of Artificial Sequence: Synthetic oligonucleotide
uuuucuaaaauacucaaua

SEQ ID NO: 2399189 - RNA, 19 nt, Artificial Sequence
  Description of Artificial Sequence: Synthetic oligonucleotide
ucuacaaaacauaugccag

SEQ ID NO: 2399190 - RNA, 19 nt, Artificial Sequence
  Description of Artificial Sequence: Synthetic oligonucleotide
aaauacucaauaucaaaca

SEQ ID NO: 2399191 - RNA, 19 nt, Artificial Sequence
  Description of Artificial Sequence: Synthetic oligonucleotide
uucaauuuaaaauauuguc

SEQ ID NO: 2399192 - RNA, 19 nt, Artificial Sequence
  Description of Artificial Sequence: Synthetic oligonucleotide
uugucuauagcacaaacac

SEQ ID NO: 2399193 - RNA, 19 nt, Artificial Sequence
  Description of Artificial Sequence: Synthetic oligonucleotide
aagguaucuauauuuuggg

SEQ ID NO: 2399194 - RNA, 19 nt, Artificial Sequence
  Description of Artificial Sequence: Synthetic oligonucleotide
aaauauacuaaauucuuua

SEQ ID NO: 2399195 - RNA, 19 nt, Artificial Sequence
  Description of Artificial Sequence: Synthetic oligonucleotide
aaaugagccacuuuaauuu

SEQ ID NO: 2399196 - RNA, 19 nt, Artificial Sequence
  Description of Artificial Sequence: Synthetic oligonucleotide
augaauuuaugacacagag

SEQ ID NO: 2399197 - RNA, 19 nt, Artificial Sequence
  Description of Artificial Sequence: Synthetic oligonucleotide
acaguuuuaauauaagacu

SEQ ID NO: 2399198 - RNA, 19 nt, Artificial Sequence
  Description of Artificial Sequence: Synthetic oligonucleotide
cagucuacaaaacauaugc

SEQ ID NO: 2399199 - RNA, 19 nt, Artificial Sequence
  Description of Artificial Sequence: Synthetic oligonucleotide
gacccaauaacaaugagag

SEQ ID NO: 2399200 - RNA, 19 nt, Artificial Sequence
  Description of Artificial Sequence: Synthetic oligonucleotide
uucacaaucaacuuuguau

SEQ ID NO: 2399201 - RNA, 19 nt, Artificial Sequence
  Description of Artificial Sequence: Synthetic oligonucleotide
uauaagacuuuaaaacaag

SEQ ID NO: 2399202 - RNA, 19 nt, Artificial Sequence
  Description of Artificial Sequence: Synthetic oligonucleotide
aaauauugucuauagcaca

SEQ ID NO: 2399203 - RNA, 19 nt, Artificial Sequence
  Description of Artificial Sequence: Synthetic oligonucleotide
uccuuugcaaacuugaaga

SEQ ID NO: 2399204 - RNA, 19 nt, Artificial Sequence
  Description of Artificial Sequence: Synthetic oligonucleotide
ugcaaaugaaccaugacau

SEQ ID NO: 2399205 - RNA, 19 nt, Artificial Sequence
  Description of Artificial Sequence: Synthetic oligonucleotide
caagguaucuauauuuugg

SEQ ID NO: 2399206 - RNA, 19 nt, Artificial Sequence
  Description of Artificial Sequence: Synthetic oligonucleotide
ugaagaauggucuuggauc

SEQ ID NO: 2399207 - RNA, 19 nt, Artificial Sequence
  Description of Artificial Sequence: Synthetic oligonucleotide
uucaccaaagaaaacaauc

SEQ ID NO: 2399208 - RNA, 19 nt, Artificial Sequence
  Description of Artificial Sequence: Synthetic oligonucleotide
ucaauaucaaacauggcuu

SEQ ID NO: 2399209 - RNA, 19 nt, Artificial Sequence
  Description of Artificial Sequence: Synthetic oligonucleotide
uauuuuaugggguauggaa

SEQ ID NO: 2399210 - RNA, 19 nt, Artificial Sequence
  Description of Artificial Sequence: Synthetic oligonucleotide
uggaucuuuucuaaaauac

SEQ ID NO: 2399211 - RNA, 19 nt, Artificial Sequence
  Description of Artificial Sequence: Synthetic oligonucleotide
aaauuuucaccaaagaaaa

SEQ ID NO: 2399212 - RNA, 19 nt, Artificial Sequence
  Description of Artificial Sequence: Synthetic oligonucleotide
uuggaauuagugcuacugg

SEQ ID NO: 2399213 - RNA, 19 nt, Artificial Sequence
  Description of Artificial Sequence: Synthetic oligonucleotide
uuggguauaguuucgaagu

SEQ ID NO: 2399214 - RNA, 19 nt, Artificial Sequence
  Description of Artificial Sequence: Synthetic oligonucleotide
ugccagauuacauaaaagu

SEQ ID NO: 2399215 - RNA, 19 nt, Artificial Sequence
  Description of Artificial Sequence: Synthetic oligonucleotide
gauuccugcaaccugcucc

SEQ ID NO: 2399216 - RNA, 19 nt, Artificial Sequence
  Description of Artificial Sequence: Synthetic oligonucleotide
acaaugagaggucaacuuc

SEQ ID NO: 2399217 - RNA, 19 nt, Artificial Sequence
  Description of Artificial Sequence: Synthetic oligonucleotide
uuucaaaagucagaggaag

SEQ ID NO: 2399218 - RNA, 19 nt, Artificial Sequence
  Description of Artificial Sequence: Synthetic oligonucleotide
auuuucaccaaagaaaaca

SEQ ID NO: 2399219 - RNA, 19 nt, Artificial Sequence
  Description of Artificial Sequence: Synthetic oligonucleotide
uaucaaacauggcuugagg

SEQ ID NO: 2399220 - RNA, 19 nt, Artificial Sequence
  Description of Artificial Sequence: Synthetic oligonucleotide
aagucagaggaagauaauc

SEQ ID NO: 2399221 - RNA, 19 nt, Artificial Sequence
  Description of Artificial Sequence: Synthetic oligonucleotide
ugguaaauuuucaccaaag

SEQ ID NO: 2399222 - RNA, 19 nt, Artificial Sequence
  Description of Artificial Sequence: Synthetic oligonucleotide
aaaacauaugccagauuac

SEQ ID NO: 2399223 - RNA, 19 nt, Artificial Sequence
  Description of Artificial Sequence: Synthetic oligonucleotide
aggaagauaauccagucau

SEQ ID NO: 2399224 - RNA, 19 nt, Artificial Sequence
  Description of Artificial Sequence: Synthetic oligonucleotide
aaaagucagaggaagauaa

SEQ ID NO: 2399225 - RNA, 19 nt, Artificial Sequence
  Description of Artificial Sequence: Synthetic oligonucleotide
cauuaaacagucuacaaaa

SEQ ID NO: 2399226 - RNA, 19 nt, Artificial Sequence
  Description of Artificial Sequence: Synthetic oligonucleotide
uuuacaaaucaaacaagau

SEQ ID NO: 2399227 - RNA, 19 nt, Artificial Sequence
  Description of Artificial Sequence: Synthetic oligonucleotide
auuuuaugggguauggaac

SEQ ID NO: 2399228 - RNA, 19 nt, Artificial Sequence
  Description of Artificial Sequence: Synthetic oligonucleotide
acaccgaggaacuaccugg

SEQ ID NO: 2399229 - RNA, 19 nt, Artificial Sequence
  Description of Artificial Sequence: Synthetic oligonucleotide
uauuuuggguauaguuucg

SEQ ID NO: 2399230 - RNA, 19 nt, Artificial Sequence
  Description of Artificial Sequence: Synthetic oligonucleotide
uaugccagauuacauaaaa

SEQ ID NO: 2399231 - RNA, 19 nt, Artificial Sequence
  Description of Artificial Sequence: Synthetic oligonucleotide
aacuuuguauuuacaaauc

SEQ ID NO: 2399232 - RNA, 19 nt, Artificial Sequence
  Description of Artificial Sequence: Synthetic oligonucleotide
aauccagucauuaaacagu

SEQ ID NO: 2399233 - RNA, 19 nt, Artificial Sequence
  Description of Artificial Sequence: Synthetic oligonucleotide
auaacaaugagaggucaac

SEQ ID NO: 2399234 - RNA, 19 nt, Artificial Sequence
  Description of Artificial Sequence: Synthetic oligonucleotide
uaugggguauggaacuugg

SEQ ID NO: 2399235 - RNA, 19 nt, Artificial Sequence
  Description of Artificial Sequence: Synthetic oligonucleotide
aaacauaugccagauuaca

SEQ ID NO: 2399236 - RNA, 19 nt, Artificial Sequence
  Description of Artificial Sequence: Synthetic oligonucleotide
gauaauccagucauuaaac

SEQ ID NO: 2399237 - RNA, 19 nt, Artificial Sequence
  Description of Artificial Sequence: Synthetic oligonucleotide
uuaguguaagccaaaugaa

SEQ ID NO: 2399238 - RNA, 19 nt, Artificial Sequence
  Description of Artificial Sequence: Synthetic oligonucleotide
uacuaaauucuuuagugua

SEQ ID NO: 2399239 - RNA, 19 nt, Artificial Sequence
  Description of Artificial Sequence: Synthetic oligonucleotide
gccacuuuaauuuucuccg

SEQ ID NO: 2399240 - RNA, 19 nt, Artificial Sequence
  Description of Artificial Sequence: Synthetic oligonucleotide
acuuuguauuuacaaauca

SEQ ID NO: 2399241 - RNA, 19 nt, Artificial Sequence
  Description of Artificial Sequence: Synthetic oligonucleotide
acaaucucuggcuucauga

SEQ ID NO: 2399242 - RNA, 19 nt, Artificial Sequence
  Description of Artificial Sequence: Synthetic oligonucleotide
uuggauuccugcaaccugc

SEQ ID NO: 2399243 - RNA, 19 nt, Artificial Sequence
  Description of Artificial Sequence: Synthetic oligonucleotide
aucuaggacaccgaggaac

SEQ ID NO: 2399244 - RNA, 19 nt, Artificial Sequence
  Description of Artificial Sequence: Synthetic oligonucleotide
auacuaaauucuuuagugu

SEQ ID NO: 2399245 - RNA, 19 nt, Artificial Sequence
  Description of Artificial Sequence: Synthetic oligonucleotide
caaaugaaccaugacauug

SEQ ID NO: 2399246 - RNA, 19 nt, Artificial Sequence
  Description of Artificial Sequence: Synthetic oligonucleotide
cuuuuguauuucaaaaguc

SEQ ID NO: 2399247 - RNA, 19 nt, Artificial Sequence
  Description of Artificial Sequence: Synthetic oligonucleotide
uugcaaacuugaagaaugg

SEQ ID NO: 2399248 - RNA, 19 nt, Artificial Sequence
  Description of Artificial Sequence: Synthetic oligonucleotide
aacaaugagaggucaacuu

SEQ ID NO: 2399249 - RNA, 19 nt, Artificial Sequence
  Description of Artificial Sequence: Synthetic oligonucleotide
ucacaaucaacuuuguauu

SEQ ID NO: 2399250 - RNA, 19 nt, Artificial Sequence
  Description of Artificial Sequence: Synthetic oligonucleotide
aaaacaaucucuggcuuca

SEQ ID NO: 2399251 - RNA, 19 nt, Artificial Sequence
  Description of Artificial Sequence: Synthetic oligonucleotide
cucuaugaaacuguucugg

SEQ ID NO: 2399252 - RNA, 19 nt, Artificial Sequence
  Description of Artificial Sequence: Synthetic oligonucleotide
uguugcaaaugaaccauga

SEQ ID NO: 2399253 - RNA, 19 nt, Artificial Sequence
  Description of Artificial Sequence: Synthetic oligonucleotide
acauugaaugauccuuugg

SEQ ID NO: 2399254 - RNA, 19 nt, Artificial Sequence
  Description of Artificial Sequence: Synthetic oligonucleotide
ugauccuuuggauuccugc

SEQ ID NO: 2399255 - RNA, 19 nt, Artificial Sequence
  Description of Artificial Sequence: Synthetic oligonucleotide
uguucugguaaauuuucac

SEQ ID NO: 2399256 - RNA, 19 nt, Artificial Sequence
  Description of Artificial Sequence: Synthetic oligonucleotide
aucaaacauggcuugagga

SEQ ID NO: 2399257 - RNA, 19 nt, Artificial Sequence
  Description of Artificial Sequence: Synthetic oligonucleotide
aauauugucuauagcacaa

SEQ ID NO: 2399258 - RNA, 19 nt, Artificial Sequence
  Description of Artificial Sequence: Synthetic oligonucleotide
auagcacaaacacaucaug

SEQ ID NO: 2399259 - RNA, 19 nt, Artificial Sequence
  Description of Artificial Sequence: Synthetic oligonucleotide
agcuggguauuuuaugggg

SEQ ID NO: 2399260 - RNA, 19 nt, Artificial Sequence
  Description of Artificial Sequence: Synthetic oligonucleotide
gauagcaaguggcucauca

SEQ ID NO: 2399261 - RNA, 19 nt, Artificial Sequence
  Description of Artificial Sequence: Synthetic oligonucleotide
aacuuggaauuagugcuac

SEQ ID NO: 2399262 - RNA, 19 nt, Artificial Sequence
  Description of Artificial Sequence: Synthetic oligonucleotide
guaagccaaaugaagauug

SEQ ID NO: 2399263 - RNA, 19 nt, Artificial Sequence
  Description of Artificial Sequence: Synthetic oligonucleotide
ucuuggaucuuuucuaaaa

SEQ ID NO: 2399264 - RNA, 19 nt, Artificial Sequence
  Description of Artificial Sequence: Synthetic oligonucleotide
agaagacccaauaacaaug

SEQ ID NO: 2399265 - RNA, 19 nt, Artificial Sequence
  Description of Artificial Sequence: Synthetic oligonucleotide
auaauccagucauuaaaca

SEQ ID NO: 2399266 - RNA, 19 nt, Artificial Sequence
  Description of Artificial Sequence: Synthetic oligonucleotide
uucaaaagucagaggaaga

SEQ ID NO: 2399267 - RNA, 19 nt, Artificial Sequence
  Description of Artificial Sequence: Synthetic oligonucleotide
aaucaaacaagaugcuguu

SEQ ID NO: 2399268 - RNA, 19 nt, Artificial Sequence
  Description of Artificial Sequence: Synthetic oligonucleotide
uggaauuagugcuacuggu

SEQ ID NO: 2399269 - RNA, 19 nt, Artificial Sequence
  Description of Artificial Sequence: Synthetic oligonucleotide
aagauaauccagucauuaa

SEQ ID NO: 2399270 - RNA, 19 nt, Artificial Sequence
  Description of Artificial Sequence: Synthetic oligonucleotide
auacaaguauaaaacacug

SEQ ID NO: 2399271 - RNA, 19 nt, Artificial Sequence
  Description of Artificial Sequence: Synthetic oligonucleotide
uacuggucuuacuucagag

SEQ ID NO: 2399272 - RNA, 19 nt, Artificial Sequence
  Description of Artificial Sequence: Synthetic oligonucleotide
caaagcuaugaauuuauga

SEQ ID NO: 2399273 - RNA, 19 nt, Artificial Sequence
  Description of Artificial Sequence: Synthetic oligonucleotide
cauugaaugauccuuugga

SEQ ID NO: 2399274 - RNA, 19 nt, Artificial Sequence
  Description of Artificial Sequence: Synthetic oligonucleotide
aaagucuauguacaauaua

SEQ ID NO: 2399275 - RNA, 19 nt, Artificial Sequence
  Description of Artificial Sequence: Synthetic oligonucleotide
agucuacaaaacauaugcc

SEQ ID NO: 2399276 - RNA, 19 nt, Artificial Sequence
  Description of Artificial Sequence: Synthetic oligonucleotide
uugaagaauggucuuggau

SEQ ID NO: 2399277 - RNA, 19 nt, Artificial Sequence
  Description of Artificial Sequence: Synthetic oligonucleotide
auugaaugauccuuuggau

SEQ ID NO: 2399278 - RNA, 19 nt, Artificial Sequence
  Description of Artificial Sequence: Synthetic oligonucleotide
ucuaugaaacuguucuggu

SEQ ID NO: 2399279 - RNA, 19 nt, Artificial Sequence
  Description of Artificial Sequence: Synthetic oligonucleotide
uugucauacuucauggcuc

SEQ ID NO: 2399280 - RNA, 19 nt, Artificial Sequence
  Description of Artificial Sequence: Synthetic oligonucleotide
ucuaggacaccgaggaacu

SEQ ID NO: 2399281 - RNA, 19 nt, Artificial Sequence
  Description of Artificial Sequence: Synthetic oligonucleotide
ugcuguugcaaaugaacca

SEQ ID NO: 2399282 - RNA, 19 nt, Artificial Sequence
  Description of Artificial Sequence: Synthetic oligonucleotide
cuuggaauuagugcuacug

SEQ ID NO: 2399283 - RNA, 19 nt, Artificial Sequence
  Description of Artificial Sequence: Synthetic oligonucleotide
uaucugacaaagcuaugaa

SEQ ID NO: 2399284 - RNA, 19 nt, Artificial Sequence
  Description of Artificial Sequence: Synthetic oligonucleotide
uuuaugacacagagauggc

SEQ ID NO: 2399285 - RNA, 19 nt, Artificial Sequence
  Description of Artificial Sequence: Synthetic oligonucleotide
augacacagagauggcugg

SEQ ID NO: 2399286 - RNA, 19 nt, Artificial Sequence
  Description of Artificial Sequence: Synthetic oligonucleotide
agugcuacuggucuuacuu

SEQ ID NO: 2399287 - RNA, 19 nt, Artificial Sequence
  Description of Artificial Sequence: Synthetic oligonucleotide
aguguaagccaaaugaaga

SEQ ID NO: 2399288 - RNA, 19 nt, Artificial Sequence
  Description of Artificial Sequence: Synthetic oligonucleotide
cuauagcacaaacacauca

SEQ ID NO: 2399289 - RNA, 19 nt, Artificial Sequence
  Description of Artificial Sequence: Synthetic oligonucleotide
aaaugaaccaugacauuga

SEQ ID NO: 2399290 - RNA, 19 nt, Artificial Sequence
  Description of Artificial Sequence: Synthetic oligonucleotide
aauaucuccucgaacaguu

SEQ ID NO: 2399291 - RNA, 19 nt, Artificial Sequence
  Description of Artificial Sequence: Synthetic oligonucleotide
ugagccacuuuaauuuucu

SEQ ID NO: 2399292 - RNA, 19 nt, Artificial Sequence
  Description of Artificial Sequence: Synthetic oligonucleotide
caaacuugaagaauggucu

SEQ ID NO: 2399293 - RNA, 19 nt, Artificial Sequence
  Description of Artificial Sequence: Synthetic oligonucleotide
aacaaucucuggcuucaug

SEQ ID NO: 2399294 - RNA, 19 nt, Artificial Sequence
  Description of Artificial Sequence: Synthetic oligonucleotide
caggauauauuuccuuugc

SEQ ID NO: 2399295 - RNA, 19 nt, Artificial Sequence
  Description of Artificial Sequence: Synthetic oligonucleotide
ucaaaagucagaggaagau

SEQ ID NO: 2399296 - RNA, 19 nt, Artificial Sequence
  Description of Artificial Sequence: Synthetic oligonucleotide
ucuccgucuggcaguaacg

SEQ ID NO: 2399297 - RNA, 19 nt, Artificial Sequence
  Description of Artificial Sequence: Synthetic oligonucleotide
aaacaagauacaaguauaa

SEQ ID NO: 2399298 - RNA, 19 nt, Artificial Sequence
  Description of Artificial Sequence: Synthetic oligonucleotide
aguaguuucccuuccuuau

SEQ ID NO: 2399299 - RNA, 19 nt, Artificial Sequence
  Description of Artificial Sequence: Synthetic oligonucleotide
aaugaaccaugacauugaa

SEQ ID NO: 2399300 - RNA, 19 nt, Artificial Sequence
  Description of Artificial Sequence: Synthetic oligonucleotide
aauaucaaacauggcuuga

SEQ ID NO: 2399301 - RNA, 19 nt, Artificial Sequence
  Description of Artificial Sequence: Synthetic oligonucleotide
cagagaagacccaauaaca

SEQ ID NO: 2399302 - RNA, 19 nt, Artificial Sequence
  Description of Artificial Sequence: Synthetic oligonucleotide
acauaugccagauuacaua

SEQ ID NO: 2399303 - RNA, 19 nt, Artificial Sequence
  Description of Artificial Sequence: Synthetic oligonucleotide
uuggaucuuuucuaaaaua

SEQ ID NO: 2399304 - RNA, 19 nt, Artificial Sequence
  Description of Artificial Sequence: Synthetic oligonucleotide
cagucauuaaacagucuac

SEQ ID NO: 2399305 - RNA, 19 nt, Artificial Sequence
  Description of Artificial Sequence: Synthetic oligonucleotide
aaccaugacauugaaugau

SEQ ID NO: 2399306 - RNA, 19 nt, Artificial Sequence
  Description of Artificial Sequence: Synthetic oligonucleotide
agucauuaaacagucuaca

SEQ ID NO: 2399307 - RNA, 19 nt, Artificial Sequence
  Description of Artificial Sequence: Synthetic oligonucleotide
aacaagauacaaguauaaa

SEQ ID NO: 2399308 - RNA, 19 nt, Artificial Sequence
  Description of Artificial Sequence: Synthetic oligonucleotide
gaauuagugcuacuggucu

SEQ ID NO: 2399309 - RNA, 19 nt, Artificial Sequence
  Description of Artificial Sequence: Synthetic oligonucleotide
aaaagucuauguacaauau

SEQ ID NO: 2399310 - RNA, 19 nt, Artificial Sequence
  Description of Artificial Sequence: Synthetic oligonucleotide
auaucaaacauggcuugag

SEQ ID NO: 2399311 - RNA, 19 nt, Artificial Sequence
  Description of Artificial Sequence: Synthetic oligonucleotide
cauaugccagauuacauaa

SEQ ID NO: 2399312 - RNA, 19 nt, Artificial Sequence
  Description of Artificial Sequence: Synthetic oligonucleotide
caaaucaaacaagaugcug

SEQ ID NO: 2399313 - RNA, 19 nt, Artificial Sequence
  Description of Artificial Sequence: Synthetic oligonucleotide
uaagccaaaugaagauuga

SEQ ID NO: 2399314 - RNA, 19 nt, Artificial Sequence
  Description of Artificial Sequence: Synthetic oligonucleotide
gauggcuggaacuguccag

SEQ ID NO: 2399315 - RNA, 19 nt, Artificial Sequence
  Description of Artificial Sequence: Synthetic oligonucleotide
ucgaaguaguuucccuucc

SEQ ID NO: 2399316 - RNA, 19 nt, Artificial Sequence
  Description of Artificial Sequence: Synthetic oligonucleotide
ucugguaaauuuucaccaa

SEQ ID NO: 2399317 - RNA, 19 nt, Artificial Sequence
  Description of Artificial Sequence: Synthetic oligonucleotide
uucgaaguaguuucccuuc

SEQ ID NO: 2399318 - RNA, 19 nt, Artificial Sequence
  Description of Artificial Sequence: Synthetic oligonucleotide
uuaugacacagagauggcu

SEQ ID NO: 2399319 - RNA, 19 nt, Artificial Sequence
  Description of Artificial Sequence: Synthetic oligonucleotide
uccuuaucugacaaagcua

SEQ ID NO: 2399320 - RNA, 19 nt, Artificial Sequence
  Description of Artificial Sequence: Synthetic oligonucleotide
aucuauauuuuggguauag

SEQ ID NO: 2399321 - RNA, 19 nt, Artificial Sequence
  Description of Artificial Sequence: Synthetic oligonucleotide
uccaagguaucuauauuuu

SEQ ID NO: 2399322 - RNA, 19 nt, Artificial Sequence
  Description of Artificial Sequence: Synthetic oligonucleotide
ugcuccaagguaucuauau

SEQ ID NO: 2399323 - RNA, 19 nt, Artificial Sequence
  Description of Artificial Sequence: Synthetic oligonucleotide
auaagacuuuaaaacaaga

SEQ ID NO: 2399324 - RNA, 19 nt, Artificial Sequence
  Description of Artificial Sequence: Synthetic oligonucleotide
auugucuauagcacaaaca

SEQ ID NO: 2399325 - RNA, 19 nt, Artificial Sequence
  Description of Artificial Sequence: Synthetic oligonucleotide
uuucgaaguaguuucccuu

SEQ ID NO: 2399326 - RNA, 19 nt, Artificial Sequence
  Description of Artificial Sequence: Synthetic oligonucleotide
uccaggauauauuuccuuu

SEQ ID NO: 2399327 - RNA, 19 nt, Artificial Sequence
  Description of Artificial Sequence: Synthetic oligonucleotide
ucagcugggcaucuaggac

SEQ ID NO: 2399328 - RNA, 19 nt, Artificial Sequence
  Description of Artificial Sequence: Synthetic oligonucleotide
uacaaaacauaugccagau

SEQ ID NO: 2399329 - RNA, 19 nt, Artificial Sequence
  Description of Artificial Sequence: Synthetic oligonucleotide
agguaucuauauuuugggu

SEQ ID NO: 2399330 - RNA, 19 nt, Artificial Sequence
  Description of Artificial Sequence: Synthetic oligonucleotide
aauuagugcuacuggucuu

SEQ ID NO: 2399331 - RNA, 19 nt, Artificial Sequence
  Description of Artificial Sequence: Synthetic oligonucleotide
uuuccuuugcaaacuugaa

SEQ ID NO: 2399332 - RNA, 19 nt, Artificial Sequence
  Description of Artificial Sequence: Synthetic oligonucleotide
auccagucauuaaacaguc

SEQ ID NO: 2399333 - RNA, 19 nt, Artificial Sequence
  Description of Artificial Sequence: Synthetic oligonucleotide
caaugagaggucaacuuca

SEQ ID NO: 2399334 - RNA, 19 nt, Artificial Sequence
  Description of Artificial Sequence: Synthetic oligonucleotide
gguaucuauauuuugggua

SEQ ID NO: 2399335 - RNA, 19 nt, Artificial Sequence
  Description of Artificial Sequence: Synthetic oligonucleotide
agaaaacaaucucuggcuu

SEQ ID NO: 2399336 - RNA, 19 nt, Artificial Sequence
  Description of Artificial Sequence: Synthetic oligonucleotide
uccuuuggauuccugcaac

SEQ ID NO: 2399337 - RNA, 19 nt, Artificial Sequence
  Description of Artificial Sequence: Synthetic oligonucleotide
gguauuuuaugggguaugg

SEQ ID NO: 2399338 - RNA, 19 nt, Artificial Sequence
  Description of Artificial Sequence: Synthetic oligonucleotide
gaaccaugacauugaauga

SEQ ID NO: 2399339 - RNA, 19 nt, Artificial Sequence
  Description of Artificial Sequence: Synthetic oligonucleotide
aacauaugccagauuacau

SEQ ID NO: 2399340 - RNA, 19 nt, Artificial Sequence
  Description of Artificial Sequence: Synthetic oligonucleotide
agcugaaaacagucuucac

SEQ ID NO: 2399341 - RNA, 19 nt, Artificial Sequence
  Description of Artificial Sequence: Synthetic oligonucleotide
ucuauagcacaaacacauc

SEQ ID NO: 2399342 - RNA, 19 nt, Artificial Sequence
  Description of Artificial Sequence: Synthetic oligonucleotide
uuuuggguauaguuucgaa

SEQ ID NO: 2399343 - RNA, 19 nt, Artificial Sequence
  Description of Artificial Sequence: Synthetic oligonucleotide
agacccaauaacaaugaga

SEQ ID NO: 2399344 - RNA, 19 nt, Artificial Sequence
  Description of Artificial Sequence: Synthetic oligonucleotide
cugggcaucuaggacaccg

SEQ ID NO: 2399345 - RNA, 19 nt, Artificial Sequence
  Description of Artificial Sequence: Synthetic oligonucleotide
gguaaauuuucaccaaaga

SEQ ID NO: 2399346 - RNA, 19 nt, Artificial Sequence
  Description of Artificial Sequence: Synthetic oligonucleotide
cagauuacauaaaagucua

SEQ ID NO: 2399347 - RNA, 19 nt, Artificial Sequence
  Description of Artificial Sequence: Synthetic oligonucleotide
cuacaaaacauaugccaga

SEQ ID NO: 2399348 - RNA, 19 nt, Artificial Sequence
  Description of Artificial Sequence: Synthetic oligonucleotide
ggauauauuuccuuugcaa

SEQ ID NO: 2399349 - RNA, 19 nt, Artificial Sequence
  Description of Artificial Sequence: Synthetic oligonucleotide
gaggucaacuucaucuuug

SEQ ID NO: 2399350 - RNA, 19 nt, Artificial Sequence
  Description of Artificial Sequence: Synthetic oligonucleotide
aacggucccagcuggguau

SEQ ID NO: 2399351 - RNA, 19 nt, Artificial Sequence
  Description of Artificial Sequence: Synthetic oligonucleotide
accaugacauugaaugauc

SEQ ID NO: 2399352 - RNA, 19 nt, Artificial Sequence
  Description of Artificial Sequence: Synthetic oligonucleotide
ucuauauuuuggguauagu

SEQ ID NO: 2399353 - RNA, 19 nt, Artificial Sequence
  Description of Artificial Sequence: Synthetic oligonucleotide
acccaauaacaaugagagg

SEQ ID NO: 2399354 - RNA, 19 nt, Artificial Sequence
  Description of Artificial Sequence: Synthetic oligonucleotide
uguaagccaaaugaagauu

SEQ ID NO: 2399355 - RNA, 19 nt, Artificial Sequence
  Description of Artificial Sequence: Synthetic oligonucleotide
guaucuauauuuuggguau

SEQ ID NO: 2399356 - RNA, 19 nt, Artificial Sequence
  Description of Artificial Sequence: Synthetic oligonucleotide
aggacaccgaggaacuacc

SEQ ID NO: 2399357 - RNA, 19 nt, Artificial Sequence
  Description of Artificial Sequence: Synthetic oligonucleotide
gaagacccaauaacaauga

SEQ ID NO: 2399358 - RNA, 19 nt, Artificial Sequence
  Description of Artificial Sequence: Synthetic oligonucleotide
caucagcugggcaucuagg

SEQ ID NO: 2399359 - RNA, 19 nt, Artificial Sequence
  Description of Artificial Sequence: Synthetic oligonucleotide
gcaucuaggacaccgagga

SEQ ID NO: 2399360 - RNA, 19 nt, Artificial Sequence
  Description of Artificial Sequence: Synthetic oligonucleotide
gucuauagcacaaacacau

SEQ ID NO: 2399361 - RNA, 19 nt, Artificial Sequence
  Description of Artificial Sequence: Synthetic oligonucleotide
auaaaacacugcuuuugua

SEQ ID NO: 2399362 - RNA, 19 nt, Artificial Sequence
  Description of Artificial Sequence: Synthetic oligonucleotide
agccaaaugaagauugagu

SEQ ID NO: 2399363 - RNA, 19 nt, Artificial Sequence
  Description of Artificial Sequence: Synthetic oligonucleotide
gucauuaaacagucuacaa

SEQ ID NO: 2399364 - RNA, 19 nt, Artificial Sequence
  Description of Artificial Sequence: Synthetic oligonucleotide
cauaaaagucuauguacaa

SEQ ID NO: 2399365 - RNA, 19 nt, Artificial Sequence
  Description of Artificial Sequence: Synthetic oligonucleotide
cuauauuuuggguauaguu

SEQ ID NO: 2399366 - RNA, 19 nt, Artificial Sequence
  Description of Artificial Sequence: Synthetic oligonucleotide
aacuguucugguaaauuuu

SEQ ID NO: 2399367 - RNA, 19 nt, Artificial Sequence
  Description of Artificial Sequence: Synthetic oligonucleotide
cacuuuaauuuucuccguc

SEQ ID NO: 2399368 - RNA, 19 nt, Artificial Sequence
  Description of Artificial Sequence: Synthetic oligonucleotide
caguaacggucccagcugg

SEQ ID NO: 2399369 - RNA, 19 nt, Artificial Sequence
  Description of Artificial Sequence: Synthetic oligonucleotide
gccaaaugaagauugagua

SEQ ID NO: 2399370 - RNA, 19 nt, Artificial Sequence
  Description of Artificial Sequence: Synthetic oligonucleotide
acucaauaucaaacauggc

SEQ ID NO: 2399371 - RNA, 19 nt, Artificial Sequence
  Description of Artificial Sequence: Synthetic oligonucleotide
uucuuuaguguaagccaaa

SEQ ID NO: 2399372 - RNA, 19 nt, Artificial Sequence
  Description of Artificial Sequence: Synthetic oligonucleotide
agagaagacccaauaacaa

SEQ ID NO: 2399373 - RNA, 19 nt, Artificial Sequence
  Description of Artificial Sequence: Synthetic oligonucleotide
ugacaaagcuaugaauuua

SEQ ID NO: 2399374 - RNA, 19 nt, Artificial Sequence
  Description of Artificial Sequence: Synthetic oligonucleotide
uggcucaucagcugggcau

SEQ ID NO: 2399375 - RNA, 19 nt, Artificial Sequence
  Description of Artificial Sequence: Synthetic oligonucleotide
uggguauaguuucgaagua

SEQ ID NO: 2399376 - RNA, 19 nt, Artificial Sequence
  Description of Artificial Sequence: Synthetic oligonucleotide
uaggacaccgaggaacuac

SEQ ID NO: 2399377 - RNA, 19 nt, Artificial Sequence
  Description of Artificial Sequence: Synthetic oligonucleotide
ugcaaacuugaagaauggu

SEQ ID NO: 2399378 - RNA, 19 nt, Artificial Sequence
  Description of Artificial Sequence: Synthetic oligonucleotide
gcaaacuugaagaaugguc

SEQ ID NO: 2399379 - RNA, 19 nt, Artificial Sequence
  Description of Artificial Sequence: Synthetic oligonucleotide
acuguccaggauauauuuc

SEQ ID NO: 2399380 - RNA, 19 nt, Artificial Sequence
  Description of Artificial Sequence: Synthetic oligonucleotide
aggucaacuucaucuuugu

SEQ ID NO: 2399381 - RNA, 19 nt, Artificial Sequence
  Description of Artificial Sequence: Synthetic oligonucleotide
acaaaucaaacaagaugcu

SEQ ID NO: 2399382 - RNA, 19 nt, Artificial Sequence
  Description of Artificial Sequence: Synthetic oligonucleotide
cuguugcaaaugaaccaug

SEQ ID NO: 2399383 - RNA, 19 nt, Artificial Sequence
  Description of Artificial Sequence: Synthetic oligonucleotide
auuuuggguauaguuucga

SEQ ID NO: 2399384 - RNA, 19 nt, Artificial Sequence
  Description of Artificial Sequence: Synthetic oligonucleotide
ugcaaccugcuccaaggua

SEQ ID NO: 2399385 - RNA, 19 nt, Artificial Sequence
  Description of Artificial Sequence: Synthetic oligonucleotide
aucaaacaagaugcuguug

SEQ ID NO: 2399386 - RNA, 19 nt, Artificial Sequence
  Description of Artificial Sequence: Synthetic oligonucleotide
uccagucauuaaacagucu

SEQ ID NO: 2399387 - RNA, 19 nt, Artificial Sequence
  Description of Artificial Sequence: Synthetic oligonucleotide
ccagauuacauaaaagucu

SEQ ID NO: 2399388 - RNA, 19 nt, Artificial Sequence
  Description of Artificial Sequence: Synthetic oligonucleotide
cagcugggcaucuaggaca

SEQ ID NO: 2399389 - RNA, 19 nt, Artificial Sequence
  Description of Artificial Sequence: Synthetic oligonucleotide
cuccgucuggcaguaacgg

SEQ ID NO: 2399390 - RNA, 19 nt, Artificial Sequence
  Description of Artificial Sequence: Synthetic oligonucleotide
ggguauaguuucgaaguag

SEQ ID NO: 2399391 - RNA, 19 nt, Artificial Sequence
  Description of Artificial Sequence: Synthetic oligonucleotide
ugaaacuguucugguaaau

SEQ ID NO: 2399392 - RNA, 19 nt, Artificial Sequence
  Description of Artificial Sequence: Synthetic oligonucleotide
cccaauaacaaugagaggu

SEQ ID NO: 2399393 - RNA, 19 nt, Artificial Sequence
  Description of Artificial Sequence: Synthetic oligonucleotide
acaaagcuaugaauuuaug

SEQ ID NO: 2399394 - RNA, 19 nt, Artificial Sequence
  Description of Artificial Sequence: Synthetic oligonucleotide
caaaugaagauugaguauu

SEQ ID NO: 2399395 - RNA, 19 nt, Artificial Sequence
  Description of Artificial Sequence: Synthetic oligonucleotide
ugggcaucuaggacaccga

SEQ ID NO: 2399396 - RNA, 19 nt, Artificial Sequence
  Description of Artificial Sequence: Synthetic oligonucleotide
uggauuccugcaaccugcu

SEQ ID NO: 2399397 - RNA, 19 nt, Artificial Sequence
  Description of Artificial Sequence: Synthetic oligonucleotide
auuagugcuacuggucuua

SEQ ID NO: 2399398 - RNA, 19 nt, Artificial Sequence
  Description of Artificial Sequence: Synthetic oligonucleotide
cuaugaaacuguucuggua

SEQ ID NO: 2399399 - RNA, 19 nt, Artificial Sequence
  Description of Artificial Sequence: Synthetic oligonucleotide
uaacggucccagcugggua

SEQ ID NO: 2399400 - RNA, 19 nt, Artificial Sequence
  Description of Artificial Sequence: Synthetic oligonucleotide
ccaagguaucuauauuuug

SEQ ID NO: 2399401 - RNA, 19 nt, Artificial Sequence
  Description of Artificial Sequence: Synthetic oligonucleotide
ccaggauauauuuccuuug

SEQ ID NO: 2399402 - RNA, 19 nt, Artificial Sequence
  Description of Artificial Sequence: Synthetic oligonucleotide
acacugcuuuuguauuuca

SEQ ID NO: 2399403 - RNA, 19 nt, Artificial Sequence
  Description of Artificial Sequence: Synthetic oligonucleotide
acaaaacauaugccagauu

SEQ ID NO: 2399404 - RNA, 19 nt, Artificial Sequence
  Description of Artificial Sequence: Synthetic oligonucleotide
cuguucugguaaauuuuca

SEQ ID NO: 2399405 - RNA, 19 nt, Artificial Sequence
  Description of Artificial Sequence: Synthetic oligonucleotide
acuuggaauuagugcuacu

SEQ ID NO: 2399406 - RNA, 19 nt, Artificial Sequence
  Description of Artificial Sequence: Synthetic oligonucleotide
uggcucuaugaaacuguuc

SEQ ID NO: 2399407 - RNA, 19 nt, Artificial Sequence
  Description of Artificial Sequence: Synthetic oligonucleotide
guauuuuaugggguaugga

SEQ ID NO: 2399408 - RNA, 19 nt, Artificial Sequence
  Description of Artificial Sequence: Synthetic oligonucleotide
guuucgaaguaguuucccu

SEQ ID NO: 2399409 - RNA, 19 nt, Artificial Sequence
  Description of Artificial Sequence: Synthetic oligonucleotide
uggguauuuuaugggguau

SEQ ID NO: 2399410 - RNA, 19 nt, Artificial Sequence
  Description of Artificial Sequence: Synthetic oligonucleotide
ucccagcuggguauuuuau

SEQ ID NO: 2399411 - RNA, 19 nt, Artificial Sequence
  Description of Artificial Sequence: Synthetic oligonucleotide
gcaguaacggucccagcug

SEQ ID NO: 2399412 - RNA, 19 nt, Artificial Sequence
  Description of Artificial Sequence: Synthetic oligonucleotide
aggaacuaccugguuaaaa

SEQ ID NO: 2399413 - RNA, 19 nt, Artificial Sequence
  Description of Artificial Sequence: Synthetic oligonucleotide
uagggaaaugagccacuuu

SEQ ID NO: 2399414 - RNA, 19 nt, Artificial Sequence
  Description of Artificial Sequence: Synthetic oligonucleotide
uuagugcuacuggucuuac

SEQ ID NO: 2399415 - RNA, 19 nt, Artificial Sequence
  Description of Artificial Sequence: Synthetic oligonucleotide
auauugucuauagcacaaa

SEQ ID NO: 2399416 - RNA, 19 nt, Artificial Sequence
  Description of Artificial Sequence: Synthetic oligonucleotide
aguaacggucccagcuggg

SEQ ID NO: 2399417 - RNA, 19 nt, Artificial Sequence
  Description of Artificial Sequence: Synthetic oligonucleotide
ggcaucuaggacaccgagg

SEQ ID NO: 2399418 - RNA, 19 nt, Artificial Sequence
  Description of Artificial Sequence: Synthetic oligonucleotide
ugacacagagauggcugga

SEQ ID NO: 2399419 - RNA, 19 nt, Artificial Sequence
  Description of Artificial Sequence: Synthetic oligonucleotide
uaucuauauuuuggguaua

SEQ ID NO: 2399420 - RNA, 19 nt, Artificial Sequence
  Description of Artificial Sequence: Synthetic oligonucleotide
ccuuuggauuccugcaacc

SEQ ID NO: 2399421 - RNA, 19 nt, Artificial Sequence
  Description of Artificial Sequence: Synthetic oligonucleotide
uuuucuccgucuggcagua

SEQ ID NO: 2399422 - RNA, 19 nt, Artificial Sequence
  Description of Artificial Sequence: Synthetic oligonucleotide
gaaacuguucugguaaauu

SEQ ID NO: 2399423 - RNA, 19 nt, Artificial Sequence
  Description of Artificial Sequence: Synthetic oligonucleotide
gaacuuggaauuagugcua

SEQ ID NO: 2399424 - RNA, 19 nt, Artificial Sequence
  Description of Artificial Sequence: Synthetic oligonucleotide
cuacuggucuuacuucaga

SEQ ID NO: 2399425 - RNA, 19 nt, Artificial Sequence
  Description of Artificial Sequence: Synthetic oligonucleotide
ccagucauuaaacagucua

SEQ ID NO: 2399426 - RNA, 19 nt, Artificial Sequence
  Description of Artificial Sequence: Synthetic oligonucleotide
cuggguauuuuauggggua

SEQ ID NO: 2399427 - RNA, 19 nt, Artificial Sequence
  Description of Artificial Sequence: Synthetic oligonucleotide
uagugcuacuggucuuacu

SEQ ID NO: 2399428 - RNA, 19 nt, Artificial Sequence
  Description of Artificial Sequence: Synthetic oligonucleotide
caaccugcuccaagguauc

SEQ ID NO: 2399429 - RNA, 19 nt, Artificial Sequence
  Description of Artificial Sequence: Synthetic oligonucleotide
gggcaucuaggacaccgag

SEQ ID NO: 2399430 - RNA, 19 nt, Artificial Sequence
  Description of Artificial Sequence: Synthetic oligonucleotide
ggucuuggaucuuuucuaa

SEQ ID NO: 2399431 - RNA, 19 nt, Artificial Sequence
  Description of Artificial Sequence: Synthetic oligonucleotide
augauagcaaguggcucau

SEQ ID NO: 2399432 - RNA, 19 nt, Artificial Sequence
  Description of Artificial Sequence: Synthetic oligonucleotide
ccgucuggcaguaacgguc

SEQ ID NO: 2399433 - RNA, 19 nt, Artificial Sequence
  Description of Artificial Sequence: Synthetic oligonucleotide
ggguauuuuaugggguaug

SEQ ID NO: 2399434 - RNA, 19 nt, Artificial Sequence
  Description of Artificial Sequence: Synthetic oligonucleotide
cugacaaagcuaugaauuu

SEQ ID NO: 2399435 - RNA, 19 nt, Artificial Sequence
  Description of Artificial Sequence: Synthetic oligonucleotide
ggcaguaacggucccagcu

SEQ ID NO: 2399436 - RNA, 19 nt, Artificial Sequence
  Description of Artificial Sequence: Synthetic oligonucleotide
gguauaguuucgaaguagu

SEQ ID NO: 2399437 - RNA, 19 nt, Artificial Sequence
  Description of Artificial Sequence: Synthetic oligonucleotide
agauuacauaaaagucuau

SEQ ID NO: 2399438 - RNA, 19 nt, Artificial Sequence
  Description of Artificial Sequence: Synthetic oligonucleotide
gggguauggaacuuggaau

SEQ ID NO: 2399439 - RNA, 19 nt, Artificial Sequence
  Description of Artificial Sequence: Synthetic oligonucleotide
aaacaaucucuggcuucau

SEQ ID NO: 2399440 - RNA, 19 nt, Artificial Sequence
  Description of Artificial Sequence: Synthetic oligonucleotide
ggaacuguccaggauauau

SEQ ID NO: 2399441 - RNA, 19 nt, Artificial Sequence
  Description of Artificial Sequence: Synthetic oligonucleotide
auaugccagauuacauaaa

SEQ ID NO: 2399442 - RNA, 19 nt, Artificial Sequence
  Description of Artificial Sequence: Synthetic oligonucleotide
ggaaaugagccacuuuaau

SEQ ID NO: 2399443 - RNA, 19 nt, Artificial Sequence
  Description of Artificial Sequence: Synthetic oligonucleotide
cuuuggauuccugcaaccu

SEQ ID NO: 2399444 - RNA, 19 nt, Artificial Sequence
  Description of Artificial Sequence: Synthetic oligonucleotide
ggucaacuucaucuuuguc

SEQ ID NO: 2399445 - RNA, 19 nt, Artificial Sequence
  Description of Artificial Sequence: Synthetic oligonucleotide
gcuacuggucuuacuucag

SEQ ID NO: 2399446 - RNA, 19 nt, Artificial Sequence
  Description of Artificial Sequence: Synthetic oligonucleotide
gucccagcuggguauuuua

SEQ ID NO: 2399447 - RNA, 19 nt, Artificial Sequence
  Description of Artificial Sequence: Synthetic oligonucleotide
gaacuguccaggauauauu

SEQ ID NO: 2399448 - RNA, 19 nt, Artificial Sequence
  Description of Artificial Sequence: Synthetic oligonucleotide
accgaggaacuaccugguu

SEQ ID NO: 2399449 - RNA, 19 nt, Artificial Sequence
  Description of Artificial Sequence: Synthetic oligonucleotide
gcuguugcaaaugaaccau

SEQ ID NO: 2399450 - RNA, 19 nt, Artificial Sequence
  Description of Artificial Sequence: Synthetic oligonucleotide
gguauggaacuuggaauua

SEQ ID NO: 2399451 - RNA, 19 nt, Artificial Sequence
  Description of Artificial Sequence: Synthetic oligonucleotide
ccaaaugaagauugaguau

SEQ ID NO: 2399452 - RNA, 19 nt, Artificial Sequence
  Description of Artificial Sequence: Synthetic oligonucleotide
cgaggaacuaccugguuaa

SEQ ID NO: 2399453 - RNA, 19 nt, Artificial Sequence
  Description of Artificial Sequence: Synthetic oligonucleotide
guauaguuucgaaguaguu

SEQ ID NO: 2399454 - RNA, 19 nt, Artificial Sequence
  Description of Artificial Sequence: Synthetic oligonucleotide
gcaaccugcuccaagguau

SEQ ID NO: 2399455 - RNA, 19 nt, Artificial Sequence
  Description of Artificial Sequence: Synthetic oligonucleotide
guaacggucccagcugggu

SEQ ID NO: 2399456 - RNA, 19 nt, Artificial Sequence
  Description of Artificial Sequence: Synthetic oligonucleotide
caucuaggacaccgaggaa

SEQ ID NO: 2399457 - RNA, 19 nt, Artificial Sequence
  Description of Artificial Sequence: Synthetic oligonucleotide
ccgaggaacuaccugguua

SEQ ID NO: 2399458 - RNA, 19 nt, Artificial Sequence
  Description of Artificial Sequence: Synthetic oligonucleotide
ggauuccugcaaccugcuc

SEQ ID NO: 2399459 - RNA, 19 nt, Artificial Sequence
  Description of Artificial Sequence: Synthetic oligonucleotide
gcuggguauuuuauggggu

SEQ ID NO: 2399460 - RNA, 19 nt, Artificial Sequence
  Description of Artificial Sequence: Synthetic oligonucleotide
caccgaggaacuaccuggu

SEQ ID NO: 2399461 - RNA, 19 nt, Artificial Sequence
  Description of Artificial Sequence: Synthetic oligonucleotide
cugcuccaagguaucuaua

SEQ ID NO: 2399462 - RNA, 19 nt, Artificial Sequence
  Description of Artificial Sequence: Synthetic oligonucleotide
guagggaaaugagccacuu

SEQ ID NO: 2399463 - RNA, 19 nt, Artificial Sequence
  Description of Artificial Sequence: Synthetic oligonucleotide
gcuccaagguaucuauauu

SEQ ID NO: 2399464 - RNA, 19 nt, Artificial Sequence
  Description of Artificial Sequence: Synthetic oligonucleotide
ccacuuuaauuuucuccgu

SEQ ID NO: 2399465 - RNA, 19 nt, Artificial Sequence
  Description of Artificial Sequence: Synthetic oligonucleotide
cuaggacaccgaggaacua

SEQ ID NO: 2399466 - RNA, 19 nt, Artificial Sequence
  Description of Artificial Sequence: Synthetic oligonucleotide
ggaagauaauccagucauu

SEQ ID NO: 2399467 - RNA, 19 nt, Artificial Sequence
  Description of Artificial Sequence: Synthetic oligonucleotide
gucauacuucauggcucua

SEQ ID NO: 2399468 - RNA, 19 nt, Artificial Sequence
  Description of Artificial Sequence: Synthetic oligonucleotide
acggucccagcuggguauu

SEQ ID NO: 2399469 - RNA, 19 nt, Artificial Sequence
  Description of Artificial Sequence: Synthetic oligonucleotide
cccuuccuuaucugacaaa

SEQ ID NO: 2399470 - RNA, 19 nt, Artificial Sequence
  Description of Artificial Sequence: Synthetic oligonucleotide
ggacaccgaggaacuaccu

SEQ ID NO: 2399471 - RNA, 19 nt, Artificial Sequence
  Description of Artificial Sequence: Synthetic oligonucleotide
aagaaaucaacccauuggc

SEQ ID NO: 2399472 - RNA, 19 nt, Artificial Sequence
  Description of Artificial Sequence: Synthetic oligonucleotide
uuuaucagcaacaagcagg

SEQ ID NO: 2399473 - RNA, 19 nt, Artificial Sequence
  Description of Artificial Sequence: Synthetic oligonucleotide
acagauauagaacagaguc

SEQ ID NO: 2399474 - RNA, 19 nt, Artificial Sequence
  Description of Artificial Sequence: Synthetic oligonucleotide
aaagaaaucaacccauugg

SEQ ID NO: 2399475 - RNA, 19 nt, Artificial Sequence
  Description of Artificial Sequence: Synthetic oligonucleotide
aauugaaaccaccaacgac

SEQ ID NO: 2399476 - RNA, 19 nt, Artificial Sequence
  Description of Artificial Sequence: Synthetic oligonucleotide
agauauagaacagaguccc

SEQ ID NO: 2399477 - RNA, 19 nt, Artificial Sequence
  Description of Artificial Sequence: Synthetic oligonucleotide
uuaaacaggaguucgcugg

SEQ ID NO: 2399478 - RNA, 19 nt, Artificial Sequence
  Description of Artificial Sequence: Synthetic oligonucleotide
ucauuuacuaaaucgagga

SEQ ID NO: 2399479 - RNA, 19 nt, Artificial Sequence
  Description of Artificial Sequence: Synthetic oligonucleotide
ugggauaaagaaaucaacc

SEQ ID NO: 2399480 - RNA, 19 nt, Artificial Sequence
  Description of Artificial Sequence: Synthetic oligonucleotide
aaaaguccgucauuggagg

SEQ ID NO: 2399481 - RNA, 19 nt, Artificial Sequence
  Description of Artificial Sequence: Synthetic oligonucleotide
uucauuuacuaaaucgagg

SEQ ID NO: 2399482 - RNA, 19 nt, Artificial Sequence
  Description of Artificial Sequence: Synthetic oligonucleotide
uuuccuaucucauagcuac

SEQ ID NO: 2399483 - RNA, 19 nt, Artificial Sequence
  Description of Artificial Sequence: Synthetic oligonucleotide
aaauguguuccuugggaac

SEQ ID NO: 2399484 - RNA, 19 nt, Artificial Sequence
  Description of Artificial Sequence: Synthetic oligonucleotide
aauucauuuacuaaaucga

SEQ ID NO: 2399485 - RNA, 19 nt, Artificial Sequence
  Description of Artificial Sequence: Synthetic oligonucleotide
auuucacacaccuuagccg

SEQ ID NO: 2399486 - RNA, 19 nt, Artificial Sequence
  Description of Artificial Sequence: Synthetic oligonucleotide
ugagggucaaagaagaacu

SEQ ID NO: 2399487 - RNA, 19 nt, Artificial Sequence
  Description of Artificial Sequence: Synthetic oligonucleotide
uuuacuaaaucgaggauau

SEQ ID NO: 2399488 - RNA, 19 nt, Artificial Sequence
  Description of Artificial Sequence: Synthetic oligonucleotide
uuaucagcaacaagcaggc

SEQ ID NO: 2399489 - RNA, 19 nt, Artificial Sequence
  Description of Artificial Sequence: Synthetic oligonucleotide
uuugugacaugcaaacugc

SEQ ID NO: 2399490 - RNA, 19 nt, Artificial Sequence
  Description of Artificial Sequence: Synthetic oligonucleotide
uaaagaaaucaacccauug

SEQ ID NO: 2399491 - RNA, 19 nt, Artificial Sequence
  Description of Artificial Sequence: Synthetic oligonucleotide
aauguguuccuugggaacg

SEQ ID NO: 2399492 - RNA, 19 nt, Artificial Sequence
  Description of Artificial Sequence: Synthetic oligonucleotide
ugaggugacgcaaaagugc

SEQ ID NO: 2399493 - RNA, 19 nt, Artificial Sequence
  Description of Artificial Sequence: Synthetic oligonucleotide
uuucuuaaacaggaguucg

SEQ ID NO: 2399494 - RNA, 19 nt, Artificial Sequence
  Description of Artificial Sequence: Synthetic oligonucleotide
uuauuucuuguucuagcag

SEQ ID NO: 2399495 - RNA, 19 nt, Artificial Sequence
  Description of Artificial Sequence: Synthetic oligonucleotide
gaaaccaccaacgacugag

SEQ ID NO: 2399496 - RNA, 19 nt, Artificial Sequence
  Description of Artificial Sequence: Synthetic oligonucleotide
auugaaaccaccaacgacu

SEQ ID NO: 2399497 - RNA, 19 nt, Artificial Sequence
  Description of Artificial Sequence: Synthetic oligonucleotide
aaauugaaaccaccaacga

SEQ ID NO: 2399498 - RNA, 19 nt, Artificial Sequence
  Description of Artificial Sequence: Synthetic oligonucleotide
uucauuaugcugguuagag

SEQ ID NO: 2399499 - RNA, 19 nt, Artificial Sequence
  Description of Artificial Sequence: Synthetic oligonucleotide
ucagcaacaagcaggcgag

SEQ ID NO: 2399500 - RNA, 19 nt, Artificial Sequence
  Description of Artificial Sequence: Synthetic oligonucleotide
uuuuaucagcaacaagcag

SEQ ID NO: 2399501 - RNA, 19 nt, Artificial Sequence
  Description of Artificial Sequence: Synthetic oligonucleotide
ugucaaucuccacaaagca

SEQ ID NO: 2399502 - RNA, 19 nt, Artificial Sequence
  Description of Artificial Sequence: Synthetic oligonucleotide
uuucacacaccuuagccga

SEQ ID NO: 2399503 - RNA, 19 nt, Artificial Sequence
  Description of Artificial Sequence: Synthetic oligonucleotide
guuugcuuggucucggugg

SEQ ID NO: 2399504 - RNA, 19 nt, Artificial Sequence
  Description of Artificial Sequence: Synthetic oligonucleotide
ugugauguauggcuuaagu

SEQ ID NO: 2399505 - RNA, 19 nt, Artificial Sequence
  Description of Artificial Sequence: Synthetic oligonucleotide
aaguaaucuucucaggaaa

SEQ ID NO: 2399506 - RNA, 19 nt, Artificial Sequence
  Description of Artificial Sequence: Synthetic oligonucleotide
ugugcugucuguuuuguga

SEQ ID NO: 2399507 - RNA, 19 nt, Artificial Sequence
  Description of Artificial Sequence: Synthetic oligonucleotide
cuaucucauagcuacuucc

SEQ ID NO: 2399508 - RNA, 19 nt, Artificial Sequence
  Description of Artificial Sequence: Synthetic oligonucleotide
ucuuguucuagcaguuggg

SEQ ID NO: 2399509 - RNA, 19 nt, Artificial Sequence
  Description of Artificial Sequence: Synthetic oligonucleotide
aagaacucuccucccacuc

SEQ ID NO: 2399510 - RNA, 19 nt, Artificial Sequence
  Description of Artificial Sequence: Synthetic oligonucleotide
ugggcaauuucacacaccu

SEQ ID NO: 2399511 - RNA, 19 nt, Artificial Sequence
  Description of Artificial Sequence: Synthetic oligonucleotide
aucaacacgagguuucgag

SEQ ID NO: 2399512 - RNA, 19 nt, Artificial Sequence
  Description of Artificial Sequence: Synthetic oligonucleotide
uguuauucuuccuucugug

SEQ ID NO: 2399513 - RNA, 19 nt, Artificial Sequence
  Description of Artificial Sequence: Synthetic oligonucleotide
uauagaacagagucccugc

SEQ ID NO: 2399514 - RNA, 19 nt, Artificial Sequence
  Description of Artificial Sequence: Synthetic oligonucleotide
cagauauagaacagagucc

SEQ ID NO: 2399515 - RNA, 19 nt, Artificial Sequence
  Description of Artificial Sequence: Synthetic oligonucleotide
acugcaaguaaucuucuca

SEQ ID NO: 2399516 - RNA, 19 nt, Artificial Sequence
  Description of Artificial Sequence: Synthetic oligonucleotide
ucuguuuugugacaugcaa

SEQ ID NO: 2399517 - RNA, 19 nt, Artificial Sequence
  Description of Artificial Sequence: Synthetic oligonucleotide
aucagcaacaagcaggcga

SEQ ID NO: 2399518 - RNA, 19 nt, Artificial Sequence
  Description of Artificial Sequence: Synthetic oligonucleotide
ucaacacgagguuucgagg

SEQ ID NO: 2399519 - RNA, 19 nt, Artificial Sequence
  Description of Artificial Sequence: Synthetic oligonucleotide
accaccaacgacugagacc

SEQ ID NO: 2399520 - RNA, 19 nt, Artificial Sequence
  Description of Artificial Sequence: Synthetic oligonucleotide
gggauaaagaaaucaaccc

SEQ ID NO: 2399521 - RNA, 19 nt, Artificial Sequence
  Description of Artificial Sequence: Synthetic oligonucleotide
uuagccgaagccacgaccu

SEQ ID NO: 2399522 - RNA, 19 nt, Artificial Sequence
  Description of Artificial Sequence: Synthetic oligonucleotide
ucaaagaagaacucuccuc

SEQ ID NO: 2399523 - RNA, 19 nt, Artificial Sequence
  Description of Artificial Sequence: Synthetic oligonucleotide
uguuggagacucaugggca

SEQ ID NO: 2399524 - RNA, 19 nt, Artificial Sequence
  Description of Artificial Sequence: Synthetic oligonucleotide
caacacgagguuucgaggg

SEQ ID NO: 2399525 - RNA, 19 nt, Artificial Sequence
  Description of Artificial Sequence: Synthetic oligonucleotide
ugacaugcaaacugcaagu

SEQ ID NO: 2399526 - RNA, 19 nt, Artificial Sequence
  Description of Artificial Sequence: Synthetic oligonucleotide
agcuacuuccuuuguuugc

SEQ ID NO: 2399527 - RNA, 19 nt, Artificial Sequence
  Description of Artificial Sequence: Synthetic oligonucleotide
ugcaaguaaucuucucagg

SEQ ID NO: 2399528 - RNA, 19 nt, Artificial Sequence
  Description of Artificial Sequence: Synthetic oligonucleotide
gaaggcuuuuaucagcaac

SEQ ID NO: 2399529 - RNA, 19 nt, Artificial Sequence
  Description of Artificial Sequence: Synthetic oligonucleotide
acuuccuuuguuugcuugg

SEQ ID NO: 2399530 - RNA, 19 nt, Artificial Sequence
  Description of Artificial Sequence: Synthetic oligonucleotide
uguucuuugcacuguagaa

SEQ ID NO: 2399531 - RNA, 19 nt, Artificial Sequence
  Description of Artificial Sequence: Synthetic oligonucleotide
uaucucauagcuacuuccu

SEQ ID NO: 2399532 - RNA, 19 nt, Artificial Sequence
  Description of Artificial Sequence: Synthetic oligonucleotide
cugcaaguaaucuucucag

SEQ ID NO: 2399533 - RNA, 19 nt, Artificial Sequence
  Description of Artificial Sequence: Synthetic oligonucleotide
gacgcaaaagugcuggcug

SEQ ID NO: 2399534 - RNA, 19 nt, Artificial Sequence
  Description of Artificial Sequence: Synthetic oligonucleotide
acgacugagaccuccuggg

SEQ ID NO: 2399535 - RNA, 19 nt, Artificial Sequence
  Description of Artificial Sequence: Synthetic oligonucleotide
cuuccaguugcuuagagaa

SEQ ID NO: 2399536 - RNA, 19 nt, Artificial Sequence
  Description of Artificial Sequence: Synthetic oligonucleotide
uacuaaaucgaggauauuu

SEQ ID NO: 2399537 - RNA, 19 nt, Artificial Sequence
  Description of Artificial Sequence: Synthetic oligonucleotide
uucuuaaacaggaguucgc

SEQ ID NO: 2399538 - RNA, 19 nt, Artificial Sequence
  Description of Artificial Sequence: Synthetic oligonucleotide
agaacagagucccugcuga

SEQ ID NO: 2399539 - RNA, 19 nt, Artificial Sequence
  Description of Artificial Sequence: Synthetic oligonucleotide
cuguuggagacucaugggc

SEQ ID NO: 2399540 - RNA, 19 nt, Artificial Sequence
  Description of Artificial Sequence: Synthetic oligonucleotide
cugggauaaagaaaucaac

SEQ ID NO: 2399541 - RNA, 19 nt, Artificial Sequence
  Description of Artificial Sequence: Synthetic oligonucleotide
auuuacuaaaucgaggaua

SEQ ID NO: 2399542 - RNA, 19 nt, Artificial Sequence
  Description of Artificial Sequence: Synthetic oligonucleotide
acuguuggagacucauggg

SEQ ID NO: 2399543 - RNA, 19 nt, Artificial Sequence
  Description of Artificial Sequence: Synthetic oligonucleotide
cacgugguugcuuaucucc

SEQ ID NO: 2399544 - RNA, 19 nt, Artificial Sequence
  Description of Artificial Sequence: Synthetic oligonucleotide
aacaggaguucgcuggugu

SEQ ID NO: 2399545 - RNA, 19 nt, Artificial Sequence
  Description of Artificial Sequence: Synthetic oligonucleotide
auagcuacuuccuuuguuu

SEQ ID NO: 2399546 - RNA, 19 nt, Artificial Sequence
  Description of Artificial Sequence: Synthetic oligonucleotide
ucuccaagugaucaguuuu

SEQ ID NO: 2399547 - RNA, 19 nt, Artificial Sequence
  Description of Artificial Sequence: Synthetic oligonucleotide
acacaccuuagccgaagcc

SEQ ID NO: 2399548 - RNA, 19 nt, Artificial Sequence
  Description of Artificial Sequence: Synthetic oligonucleotide
uuucgaggggccucugugg

SEQ ID NO: 2399549 - RNA, 19 nt, Artificial Sequence
  Description of Artificial Sequence: Synthetic oligonucleotide
uucgaggggccucuguggg

SEQ ID NO: 2399550 - RNA, 19 nt, Artificial Sequence
  Description of Artificial Sequence: Synthetic oligonucleotide
auauagaacagagucccug

SEQ ID NO: 2399551 - RNA, 19 nt, Artificial Sequence
  Description of Artificial Sequence: Synthetic oligonucleotide
ugggccacagauauagaac

SEQ ID NO: 2399552 - RNA, 19 nt, Artificial Sequence
  Description of Artificial Sequence: Synthetic oligonucleotide
gcaaauugaaaccaccaac

SEQ ID NO: 2399553 - RNA, 19 nt, Artificial Sequence
  Description of Artificial Sequence: Synthetic oligonucleotide
aaucccgaccccuccagca

SEQ ID NO: 2399554 - RNA, 19 nt, Artificial Sequence
  Description of Artificial Sequence: Synthetic oligonucleotide
cuuaaacaggaguucgcug

SEQ ID NO: 2399555 - RNA, 19 nt, Artificial Sequence
  Description of Artificial Sequence: Synthetic oligonucleotide
cuuguucuagcaguugggg

SEQ ID NO: 2399556 - RNA, 19 nt, Artificial Sequence
  Description of Artificial Sequence: Synthetic oligonucleotide
aguggcgcaggauggaaag

SEQ ID NO: 2399557 - RNA, 19 nt, Artificial Sequence
  Description of Artificial Sequence: Synthetic oligonucleotide
ugugccuucucccuaccac

SEQ ID NO: 2399558 - RNA, 19 nt, Artificial Sequence
  Description of Artificial Sequence: Synthetic oligonucleotide
uuaugcugguuagagugag

SEQ ID NO: 2399559 - RNA, 19 nt, Artificial Sequence
  Description of Artificial Sequence: Synthetic oligonucleotide
uggagaucugcugaguggc

SEQ ID NO: 2399560 - RNA, 19 nt, Artificial Sequence
  Description of Artificial Sequence: Synthetic oligonucleotide
cuuagccgaagccacgacc

SEQ ID NO: 2399561 - RNA, 19 nt, Artificial Sequence
  Description of Artificial Sequence: Synthetic oligonucleotide
ucuuccaguugcuuagaga

SEQ ID NO: 2399562 - RNA, 19 nt, Artificial Sequence
  Description of Artificial Sequence: Synthetic oligonucleotide
guggagaucugcugagugg

SEQ ID NO: 2399563 - RNA, 19 nt, Artificial Sequence
  Description of Artificial Sequence: Synthetic oligonucleotide
uguuugcuuggucucggug

SEQ ID NO: 2399564 - RNA, 19 nt, Artificial Sequence
  Description of Artificial Sequence: Synthetic oligonucleotide
uuggucucgguggagaucu

SEQ ID NO: 2399565 - RNA, 19 nt, Artificial Sequence
  Description of Artificial Sequence: Synthetic oligonucleotide
uuaucuccuucucuguuau

SEQ ID NO: 2399566 - RNA, 19 nt, Artificial Sequence
  Description of Artificial Sequence: Synthetic oligonucleotide
gauaaagaaaucaacccau

SEQ ID NO: 2399567 - RNA, 19 nt, Artificial Sequence
  Description of Artificial Sequence: Synthetic oligonucleotide
aaaagugcuggcugucaau

SEQ ID NO: 2399568 - RNA, 19 nt, Artificial Sequence
  Description of Artificial Sequence: Synthetic oligonucleotide
uaugcugguuagagugagg

SEQ ID NO: 2399569 - RNA, 19 nt, Artificial Sequence
  Description of Artificial Sequence: Synthetic oligonucleotide
uuguucuagcaguugggga

SEQ ID NO: 2399570 - RNA, 19 nt, Artificial Sequence
  Description of Artificial Sequence: Synthetic oligonucleotide
uggagcaaauugaaaccac

SEQ ID NO: 2399571 - RNA, 19 nt, Artificial Sequence
  Description of Artificial Sequence: Synthetic oligonucleotide
accaacgacugagaccucc

SEQ ID NO: 2399572 - RNA, 19 nt, Artificial Sequence
  Description of Artificial Sequence: Synthetic oligonucleotide
gaagccacgaccucccguc

SEQ ID NO: 2399573 - RNA, 19 nt, Artificial Sequence
  Description of Artificial Sequence: Synthetic oligonucleotide
aaaguccgucauuggaggu

SEQ ID NO: 2399574 - RNA, 19 nt, Artificial Sequence
  Description of Artificial Sequence: Synthetic oligonucleotide
ggugacgcaaaagugcugg

SEQ ID NO: 2399575 - RNA, 19 nt, Artificial Sequence
  Description of Artificial Sequence: Synthetic oligonucleotide
gaacucuccucccacucug

SEQ ID NO: 2399576 - RNA, 19 nt, Artificial Sequence
  Description of Artificial Sequence: Synthetic oligonucleotide
acgaccucccgucggaggg

SEQ ID NO: 2399577 - RNA, 19 nt, Artificial Sequence
  Description of Artificial Sequence: Synthetic oligonucleotide
cagccuuaaaggagaaggc

SEQ ID NO: 2399578 - RNA, 19 nt, Artificial Sequence
  Description of Artificial Sequence: Synthetic oligonucleotide
uugugacaugcaaacugca

SEQ ID NO: 2399579 - RNA, 19 nt, Artificial Sequence
  Description of Artificial Sequence: Synthetic oligonucleotide
ucuuccuucugugauguau

SEQ ID NO: 2399580 - RNA, 19 nt, Artificial Sequence
  Description of Artificial Sequence: Synthetic oligonucleotide
cugagggucaaagaagaac

SEQ ID NO: 2399581 - RNA, 19 nt, Artificial Sequence
  Description of Artificial Sequence: Synthetic oligonucleotide
ggcaauuucacacaccuua

SEQ ID NO: 2399582 - RNA, 19 nt, Artificial Sequence
  Description of Artificial Sequence: Synthetic oligonucleotide
agacucaugggcaauuuca

SEQ ID NO: 2399583 - RNA, 19 nt, Artificial Sequence
  Description of Artificial Sequence: Synthetic oligonucleotide
ugugggcugagggucaaag

SEQ ID NO: 2399584 - RNA, 19 nt, Artificial Sequence
  Description of Artificial Sequence: Synthetic oligonucleotide
acaccuuagccgaagccac

SEQ ID NO: 2399585 - RNA, 19 nt, Artificial Sequence
  Description of Artificial Sequence: Synthetic oligonucleotide
guuucgaggggccucugug

SEQ ID NO: 2399586 - RNA, 19 nt, Artificial Sequence
  Description of Artificial Sequence: Synthetic oligonucleotide
ccacagauauagaacagag

SEQ ID NO: 2399587 - RNA, 19 nt, Artificial Sequence
  Description of Artificial Sequence: Synthetic oligonucleotide
gauguauggcuuaaguucu

SEQ ID NO: 2399588 - RNA, 19 nt, Artificial Sequence
  Description of Artificial Sequence: Synthetic oligonucleotide
aguccgucauuggaggugg

SEQ ID NO: 2399589 - RNA, 19 nt, Artificial Sequence
  Description of Artificial Sequence: Synthetic oligonucleotide
aaguccgucauuggaggug

SEQ ID NO: 2399590 - RNA, 19 nt, Artificial Sequence
  Description of Artificial Sequence: Synthetic oligonucleotide
ggagaaggcuuuuaucagc

SEQ ID NO: 2399591 - RNA, 19 nt, Artificial Sequence
  Description of Artificial Sequence: Synthetic oligonucleotide
uuagagugaggugacgcaa

SEQ ID NO: 2399592 - RNA, 19 nt, Artificial Sequence
  Description of Artificial Sequence: Synthetic oligonucleotide
caagugugcacuuauuucu

SEQ ID NO: 2399593 - RNA, 19 nt, Artificial Sequence
  Description of Artificial Sequence: Synthetic oligonucleotide
gcaaguaaucuucucagga

SEQ ID NO: 2399594 - RNA, 19 nt, Artificial Sequence
  Description of Artificial Sequence: Synthetic oligonucleotide
aguucgcugguguucuuug

SEQ ID NO: 2399595 - RNA, 19 nt, Artificial Sequence
  Description of Artificial Sequence: Synthetic oligonucleotide
cuggcugucaaucuccaca

SEQ ID NO: 2399596 - RNA, 19 nt, Artificial Sequence
  Description of Artificial Sequence: Synthetic oligonucleotide
uggauuucauuaugcuggu

SEQ ID NO: 2399597 - RNA, 19 nt, Artificial Sequence
  Description of Artificial Sequence: Synthetic oligonucleotide
guuagagugaggugacgca

SEQ ID NO: 2399598 - RNA, 19 nt, Artificial Sequence
  Description of Artificial Sequence: Synthetic oligonucleotide
aacagagucccugcugaca

SEQ ID NO: 2399599 - RNA, 19 nt, Artificial Sequence
  Description of Artificial Sequence: Synthetic oligonucleotide
uggcugucaaucuccacaa

SEQ ID NO: 2399600 - RNA, 19 nt, Artificial Sequence
  Description of Artificial Sequence: Synthetic oligonucleotide
ucaaagcaaauguguuccu

SEQ ID NO: 2399601 - RNA, 19 nt, Artificial Sequence
  Description of Artificial Sequence: Synthetic oligonucleotide
guucucuccaagugaucag

SEQ ID NO: 2399602 - RNA, 19 nt, Artificial Sequence
  Description of Artificial Sequence: Synthetic oligonucleotide
guguucuuugcacuguaga

SEQ ID NO: 2399603 - RNA, 19 nt, Artificial Sequence
  Description of Artificial Sequence: Synthetic oligonucleotide
caggcgaggcucuucacug

SEQ ID NO: 2399604 - RNA, 19 nt, Artificial Sequence
  Description of Artificial Sequence: Synthetic oligonucleotide
augcugguuagagugaggu

SEQ ID NO: 2399605 - RNA, 19 nt, Artificial Sequence
  Description of Artificial Sequence: Synthetic oligonucleotide
uagagugaggugacgcaaa

SEQ ID NO: 2399606 - RNA, 19 nt, Artificial Sequence
  Description of Artificial Sequence: Synthetic oligonucleotide
caaauguguuccuugggaa

SEQ ID NO: 2399607 - RNA, 19 nt, Artificial Sequence
  Description of Artificial Sequence: Synthetic oligonucleotide
cucccuaccaccacuucuc

SEQ ID NO: 2399608 - RNA, 19 nt, Artificial Sequence
  Description of Artificial Sequence: Synthetic oligonucleotide
caaucaacacgagguuucg

SEQ ID NO: 2399609 - RNA, 19 nt, Artificial Sequence
  Description of Artificial Sequence: Synthetic oligonucleotide
agccuuaaaggagaaggcu

SEQ ID NO: 2399610 - RNA, 19 nt, Artificial Sequence
  Description of Artificial Sequence: Synthetic oligonucleotide
agaacucuccucccacucu

SEQ ID NO: 2399611 - RNA, 19 nt, Artificial Sequence
  Description of Artificial Sequence: Synthetic oligonucleotide
cugguuagagugaggugac

SEQ ID NO: 2399612 - RNA, 19 nt, Artificial Sequence
  Description of Artificial Sequence: Synthetic oligonucleotide
ucauagcuacuuccuuugu

SEQ ID NO: 2399613 - RNA, 19 nt, Artificial Sequence
  Description of Artificial Sequence: Synthetic oligonucleotide
acacgugguugcuuaucuc

SEQ ID NO: 2399614 - RNA, 19 nt, Artificial Sequence
  Description of Artificial Sequence: Synthetic oligonucleotide
ugugcacuuauuucuuguu

SEQ ID NO: 2399615 - RNA, 19 nt, Artificial Sequence
  Description of Artificial Sequence: Synthetic oligonucleotide
aaacugcaaguaaucuucu

SEQ ID NO: 2399616 - RNA, 19 nt, Artificial Sequence
  Description of Artificial Sequence: Synthetic oligonucleotide
ugcuuaucuccuucucugu

SEQ ID NO: 2399617 - RNA, 19 nt, Artificial Sequence
  Description of Artificial Sequence: Synthetic oligonucleotide
gagaucugcugaguggcgc

SEQ ID NO: 2399618 - RNA, 19 nt, Artificial Sequence
  Description of Artificial Sequence: Synthetic oligonucleotide
aagccacgaccucccgucg

SEQ ID NO: 2399619 - RNA, 19 nt, Artificial Sequence
  Description of Artificial Sequence: Synthetic oligonucleotide
gguuagagugaggugacgc

SEQ ID NO: 2399620 - RNA, 19 nt, Artificial Sequence
  Description of Artificial Sequence: Synthetic oligonucleotide
acugagaccuccugggaua

SEQ ID NO: 2399621 - RNA, 19 nt, Artificial Sequence
  Description of Artificial Sequence: Synthetic oligonucleotide
gcugguuagagugagguga

SEQ ID NO: 2399622 - RNA, 19 nt, Artificial Sequence
  Description of Artificial Sequence: Synthetic oligonucleotide
gcaaauguguuccuuggga

SEQ ID NO: 2399623 - RNA, 19 nt, Artificial Sequence
  Description of Artificial Sequence: Synthetic oligonucleotide
uuaaaggagaaggcuuuua

SEQ ID NO: 2399624 - RNA, 19 nt, Artificial Sequence
  Description of Artificial Sequence: Synthetic oligonucleotide
uucugugccuucucccuac

SEQ ID NO: 2399625 - RNA, 19 nt, Artificial Sequence
  Description of Artificial Sequence: Synthetic oligonucleotide
gugcacuuauuucuuguuc

SEQ ID NO: 2399626 - RNA, 19 nt, Artificial Sequence
  Description of Artificial Sequence: Synthetic oligonucleotide
agaucugcugaguggcgca

SEQ ID NO: 2399627 - RNA, 19 nt, Artificial Sequence
  Description of Artificial Sequence: Synthetic oligonucleotide
cccuccagcaaucaacacg

SEQ ID NO: 2399628 - RNA, 19 nt, Artificial Sequence
  Description of Artificial Sequence: Synthetic oligonucleotide
gguggagaucugcugagug

SEQ ID NO: 2399629 - RNA, 19 nt, Artificial Sequence
  Description of Artificial Sequence: Synthetic oligonucleotide
ugaaaccaccaacgacuga

SEQ ID NO: 2399630 - RNA, 19 nt, Artificial Sequence
  Description of Artificial Sequence: Synthetic oligonucleotide
cacuucucaaagcaaaugu

SEQ ID NO: 2399631 - RNA, 19 nt, Artificial Sequence
  Description of Artificial Sequence: Synthetic oligonucleotide
ugguugcuuaucuccuucu

SEQ ID NO: 2399632 - RNA, 19 nt, Artificial Sequence
  Description of Artificial Sequence: Synthetic oligonucleotide
cacuuccgagucaagugug

SEQ ID NO: 2399633 - RNA, 19 nt, Artificial Sequence
  Description of Artificial Sequence: Synthetic oligonucleotide
gagacucaugggcaauuuc

SEQ ID NO: 2399634 - RNA, 19 nt, Artificial Sequence
  Description of Artificial Sequence: Synthetic oligonucleotide
augggcaauuucacacacc

SEQ ID NO: 2399635 - RNA, 19 nt, Artificial Sequence
  Description of Artificial Sequence: Synthetic oligonucleotide
ucgcugguguucuuugcac

SEQ ID NO: 2399636 - RNA, 19 nt, Artificial Sequence
  Description of Artificial Sequence: Synthetic oligonucleotide
ccugcugacacgugguugc

SEQ ID NO: 2399637 - RNA, 19 nt, Artificial Sequence
  Description of Artificial Sequence: Synthetic oligonucleotide
acgcaaaagugcuggcugu

SEQ ID NO: 2399638 - RNA, 19 nt, Artificial Sequence
  Description of Artificial Sequence: Synthetic oligonucleotide
aaacaggaguucgcuggug

SEQ ID NO: 2399639 - RNA, 19 nt, Artificial Sequence
  Description of Artificial Sequence: Synthetic oligonucleotide
aggucuucugugccuucuc

SEQ ID NO: 2399640 - RNA, 19 nt, Artificial Sequence
  Description of Artificial Sequence: Synthetic oligonucleotide
auuaugcugguuagaguga

SEQ ID NO: 2399641 - RNA, 19 nt, Artificial Sequence
  Description of Artificial Sequence: Synthetic oligonucleotide
uccuucugugauguauggc

SEQ ID NO: 2399642 - RNA, 19 nt, Artificial Sequence
  Description of Artificial Sequence: Synthetic oligonucleotide
ucggagggcacuugcaguu

SEQ ID NO: 2399643 - RNA, 19 nt, Artificial Sequence
  Description of Artificial Sequence: Synthetic oligonucleotide
gugggccacagauauagaa

SEQ ID NO: 2399644 - RNA, 19 nt, Artificial Sequence
  Description of Artificial Sequence: Synthetic oligonucleotide
guuaaucccgaccccucca

SEQ ID NO: 2399645 - RNA, 19 nt, Artificial Sequence
  Description of Artificial Sequence: Synthetic oligonucleotide
uuccuuuguuugcuugguc

SEQ ID NO: 2399646 - RNA, 19 nt, Artificial Sequence
  Description of Artificial Sequence: Synthetic oligonucleotide
uugggaacguggcugucuu

SEQ ID NO: 2399647 - RNA, 19 nt, Artificial Sequence
  Description of Artificial Sequence: Synthetic oligonucleotide
gucaaagaagaacucuccu

SEQ ID NO: 2399648 - RNA, 19 nt, Artificial Sequence
  Description of Artificial Sequence: Synthetic oligonucleotide
gacacgugguugcuuaucu

SEQ ID NO: 2399649 - RNA, 19 nt, Artificial Sequence
  Description of Artificial Sequence: Synthetic oligonucleotide
uccuaucucauagcuacuu

SEQ ID NO: 2399650 - RNA, 19 nt, Artificial Sequence
  Description of Artificial Sequence: Synthetic oligonucleotide
uccucccacucugagggcc

SEQ ID NO: 2399651 - RNA, 19 nt, Artificial Sequence
  Description of Artificial Sequence: Synthetic oligonucleotide
gccacuuccgagucaagug

SEQ ID NO: 2399652 - RNA, 19 nt, Artificial Sequence
  Description of Artificial Sequence: Synthetic oligonucleotide
cucgguggagaucugcuga

SEQ ID NO: 2399653 - RNA, 19 nt, Artificial Sequence
  Description of Artificial Sequence: Synthetic oligonucleotide
ugguuagagugaggugacg

SEQ ID NO: 2399654 - RNA, 19 nt, Artificial Sequence
  Description of Artificial Sequence: Synthetic oligonucleotide
uuccuaucucauagcuacu

SEQ ID NO: 2399655 - RNA, 19 nt, Artificial Sequence
  Description of Artificial Sequence: Synthetic oligonucleotide
ccuccagcaaucaacacga

SEQ ID NO: 2399656 - RNA, 19 nt, Artificial Sequence
  Description of Artificial Sequence: Synthetic oligonucleotide
gaacagagucccugcugac

SEQ ID NO: 2399657 - RNA, 19 nt, Artificial Sequence
  Description of Artificial Sequence: Synthetic oligonucleotide
caccacuucucaaagcaaa

SEQ ID NO: 2399658 - RNA, 19 nt, Artificial Sequence
  Description of Artificial Sequence: Synthetic oligonucleotide
aucucauagcuacuuccuu

SEQ ID NO: 2399659 - RNA, 19 nt, Artificial Sequence
  Description of Artificial Sequence: Synthetic oligonucleotide
gguuaaucccgaccccucc

SEQ ID NO: 2399660 - RNA, 19 nt, Artificial Sequence
  Description of Artificial Sequence: Synthetic oligonucleotide
cacgagguuucgaggggcc

SEQ ID NO: 2399661 - RNA, 19 nt, Artificial Sequence
  Description of Artificial Sequence: Synthetic oligonucleotide
uaucagcaacaagcaggcg

SEQ ID NO: 2399662 - RNA, 19 nt, Artificial Sequence
  Description of Artificial Sequence: Synthetic oligonucleotide
aaaccaccaacgacugaga

SEQ ID NO: 2399663 - RNA, 19 nt, Artificial Sequence
  Description of Artificial Sequence: Synthetic oligonucleotide
ucuagcaguuggggacugg

SEQ ID NO: 2399664 - RNA, 19 nt, Artificial Sequence
  Description of Artificial Sequence: Synthetic oligonucleotide
cacacaccuuagccgaagc

SEQ ID NO: 2399665 - RNA, 19 nt, Artificial Sequence
  Description of Artificial Sequence: Synthetic oligonucleotide
caccuuagccgaagccacg

SEQ ID NO: 2399666 - RNA, 19 nt, Artificial Sequence
  Description of Artificial Sequence: Synthetic oligonucleotide
agagucccugcugacacgu

SEQ ID NO: 2399667 - RNA, 19 nt, Artificial Sequence
  Description of Artificial Sequence: Synthetic oligonucleotide
ugguguucuuugcacugua

SEQ ID NO: 2399668 - RNA, 19 nt, Artificial Sequence
  Description of Artificial Sequence: Synthetic oligonucleotide
ucugugccuucucccuacc

SEQ ID NO: 2399669 - RNA, 19 nt, Artificial Sequence
  Description of Artificial Sequence: Synthetic oligonucleotide
uucacugauuugugcuguc

SEQ ID NO: 2399670 - RNA, 19 nt, Artificial Sequence
  Description of Artificial Sequence: Synthetic oligonucleotide
guuggagacucaugggcaa

SEQ ID NO: 2399671 - RNA, 19 nt, Artificial Sequence
  Description of Artificial Sequence: Synthetic oligonucleotide
ucccuaccaccacuucuca

SEQ ID NO: 2399672 - RNA, 19 nt, Artificial Sequence
  Description of Artificial Sequence: Synthetic oligonucleotide
aggaguucgcugguguucu

SEQ ID NO: 2399673 - RNA, 19 nt, Artificial Sequence
  Description of Artificial Sequence: Synthetic oligonucleotide
gggaacguggcugucuucc

SEQ ID NO: 2399674 - RNA, 19 nt, Artificial Sequence
  Description of Artificial Sequence: Synthetic oligonucleotide
auuucuuguucuagcaguu

SEQ ID NO: 2399675 - RNA, 19 nt, Artificial Sequence
  Description of Artificial Sequence: Synthetic oligonucleotide
agccacgaccucccgucgg

SEQ ID NO: 2399676 - RNA, 19 nt, Artificial Sequence
  Description of Artificial Sequence: Synthetic oligonucleotide
gcaguuggggacuggagca

SEQ ID NO: 2399677 - RNA, 19 nt, Artificial Sequence
  Description of Artificial Sequence: Synthetic oligonucleotide
uccgucauuggaggugggc

SEQ ID NO: 2399678 - RNA, 19 nt, Artificial Sequence
  Description of Artificial Sequence: Synthetic oligonucleotide
cacgaccucccgucggagg

SEQ ID NO: 2399679 - RNA, 19 nt, Artificial Sequence
  Description of Artificial Sequence: Synthetic oligonucleotide
uucacacaccuuagccgaa

SEQ ID NO: 2399680 - RNA, 19 nt, Artificial Sequence
  Description of Artificial Sequence: Synthetic oligonucleotide
cuugcaguucucuccaagu

SEQ ID NO: 2399681 - RNA, 19 nt, Artificial Sequence
  Description of Artificial Sequence: Synthetic oligonucleotide
gaagaacucuccucccacu

SEQ ID NO: 2399682 - RNA, 19 nt, Artificial Sequence
  Description of Artificial Sequence: Synthetic oligonucleotide
uuguuugcuuggucucggu

SEQ ID NO: 2399683 - RNA, 19 nt, Artificial Sequence
  Description of Artificial Sequence: Synthetic oligonucleotide
uguguuccuugggaacgug

SEQ ID NO: 2399684 - RNA, 19 nt, Artificial Sequence
  Description of Artificial Sequence: Synthetic oligonucleotide
gacaugcaaacugcaagua

SEQ ID NO: 2399685 - RNA, 19 nt, Artificial Sequence
  Description of Artificial Sequence: Synthetic oligonucleotide
gugacgcaaaagugcuggc

SEQ ID NO: 2399686 - RNA, 19 nt, Artificial Sequence
  Description of Artificial Sequence: Synthetic oligonucleotide
ggcucuucacuguuggaga

SEQ ID NO: 2399687 - RNA, 19 nt, Artificial Sequence
  Description of Artificial Sequence: Synthetic oligonucleotide
cuguuauucuuccuucugu

SEQ ID NO: 2399688 - RNA, 19 nt, Artificial Sequence
  Description of Artificial Sequence: Synthetic oligonucleotide
gcucucaggucuucugugc

SEQ ID NO: 2399689 - RNA, 19 nt, Artificial Sequence
  Description of Artificial Sequence: Synthetic oligonucleotide
cuuaaguucuucacugauu

SEQ ID NO: 2399690 - RNA, 19 nt, Artificial Sequence
  Description of Artificial Sequence: Synthetic oligonucleotide
accuuagccgaagccacga

SEQ ID NO: 2399691 - RNA, 19 nt, Artificial Sequence
  Description of Artificial Sequence: Synthetic oligonucleotide
caacgacugagaccuccug

SEQ ID NO: 2399692 - RNA, 19 nt, Artificial Sequence
  Description of Artificial Sequence: Synthetic oligonucleotide
uucucccuaccaccacuuc

SEQ ID NO: 2399693 - RNA, 19 nt, Artificial Sequence
  Description of Artificial Sequence: Synthetic oligonucleotide
cacagauauagaacagagu

SEQ ID NO: 2399694 - RNA, 19 nt, Artificial Sequence
  Description of Artificial Sequence: Synthetic oligonucleotide
ugucuuccaguugcuuaga

SEQ ID NO: 2399695 - RNA, 19 nt, Artificial Sequence
  Description of Artificial Sequence: Synthetic oligonucleotide
ugaguggcgcaggauggaa

SEQ ID NO: 2399696 - RNA, 19 nt, Artificial Sequence
  Description of Artificial Sequence: Synthetic oligonucleotide
ugacacgugguugcuuauc

SEQ ID NO: 2399697 - RNA, 19 nt, Artificial Sequence
  Description of Artificial Sequence: Synthetic oligonucleotide
ggcucucaggucuucugug

SEQ ID NO: 2399698 - RNA, 19 nt, Artificial Sequence
  Description of Artificial Sequence: Synthetic oligonucleotide
ccuucugugauguauggcu

SEQ ID NO: 2399699 - RNA, 19 nt, Artificial Sequence
  Description of Artificial Sequence: Synthetic oligonucleotide
cauuggaggugggccacag

SEQ ID NO: 2399700 - RNA, 19 nt, Artificial Sequence
  Description of Artificial Sequence: Synthetic oligonucleotide
auuggaggugggccacaga

SEQ ID NO: 2399701 - RNA, 19 nt, Artificial Sequence
  Description of Artificial Sequence: Synthetic oligonucleotide
uucuagcaguuggggacug

SEQ ID NO: 2399702 - RNA, 19 nt, Artificial Sequence
  Description of Artificial Sequence: Synthetic oligonucleotide
ccuaccaccacuucucaaa

SEQ ID NO: 2399703 - RNA, 19 nt, Artificial Sequence
  Description of Artificial Sequence: Synthetic oligonucleotide
ggaggugggccacagauau

SEQ ID NO: 2399704 - RNA, 19 nt, Artificial Sequence
  Description of Artificial Sequence: Synthetic oligonucleotide
gguguucuuugcacuguag

SEQ ID NO: 2399705 - RNA, 19 nt, Artificial Sequence
  Description of Artificial Sequence: Synthetic oligonucleotide
cuggguggcucucaggucu

SEQ ID NO: 2399706 - RNA, 19 nt, Artificial Sequence
  Description of Artificial Sequence: Synthetic oligonucleotide
gguugcuuaucuccuucuc

SEQ ID NO: 2399707 - RNA, 19 nt, Artificial Sequence
  Description of Artificial Sequence: Synthetic oligonucleotide
cuccugggauaaagaaauc

SEQ ID NO: 2399708 - RNA, 19 nt, Artificial Sequence
  Description of Artificial Sequence: Synthetic oligonucleotide
acgugguugcuuaucuccu

SEQ ID NO: 2399709 - RNA, 19 nt, Artificial Sequence
  Description of Artificial Sequence: Synthetic oligonucleotide
gucauuggaggugggccac

SEQ ID NO: 2399710 - RNA, 19 nt, Artificial Sequence
  Description of Artificial Sequence: Synthetic oligonucleotide
cugugauguauggcuuaag

SEQ ID NO: 2399711 - RNA, 19 nt, Artificial Sequence
  Description of Artificial Sequence: Synthetic oligonucleotide
ggcuuaaguucuucacuga

SEQ ID NO: 2399712 - RNA, 19 nt, Artificial Sequence
  Description of Artificial Sequence: Synthetic oligonucleotide
agggccacuuccgagucaa

SEQ ID NO: 2399713 - RNA, 19 nt, Artificial Sequence
  Description of Artificial Sequence: Synthetic oligonucleotide
ccuaucucauagcuacuuc

SEQ ID NO: 2399714 - RNA, 19 nt, Artificial Sequence
  Description of Artificial Sequence: Synthetic oligonucleotide
agggcacuugcaguucucu

SEQ ID NO: 2399715 - RNA, 19 nt, Artificial Sequence
  Description of Artificial Sequence: Synthetic oligonucleotide
cauuuacuaaaucgaggau

SEQ ID NO: 2399716 - RNA, 19 nt, Artificial Sequence
  Description of Artificial Sequence: Synthetic oligonucleotide
ucccgaccccuccagcaau

SEQ ID NO: 2399717 - RNA, 19 nt, Artificial Sequence
  Description of Artificial Sequence: Synthetic oligonucleotide
uuggagacucaugggcaau

SEQ ID NO: 2399718 - RNA, 19 nt, Artificial Sequence
  Description of Artificial Sequence: Synthetic oligonucleotide
uggagacucaugggcaauu

SEQ ID NO: 2399719 - RNA, 19 nt, Artificial Sequence
  Description of Artificial Sequence: Synthetic oligonucleotide
gugggcugagggucaaaga

SEQ ID NO: 2399720 - RNA, 19 nt, Artificial Sequence
  Description of Artificial Sequence: Synthetic oligonucleotide
ccaccaacgacugagaccu

SEQ ID NO: 2399721 - RNA, 19 nt, Artificial Sequence
  Description of Artificial Sequence: Synthetic oligonucleotide
cuuggucucgguggagauc

SEQ ID NO: 2399722 - RNA, 19 nt, Artificial Sequence
  Description of Artificial Sequence: Synthetic oligonucleotide
ccgucauuggaggugggcc

SEQ ID NO: 2399723 - RNA, 19 nt, Artificial Sequence
  Description of Artificial Sequence: Synthetic oligonucleotide
cucuguuauucuuccuucu

SEQ ID NO: 2399724 - RNA, 19 nt, Artificial Sequence
  Description of Artificial Sequence: Synthetic oligonucleotide
ggagaucugcugaguggcg

SEQ ID NO: 2399725 - RNA, 19 nt, Artificial Sequence
  Description of Artificial Sequence: Synthetic oligonucleotide
aucccgaccccuccagcaa

SEQ ID NO: 2399726 - RNA, 19 nt, Artificial Sequence
  Description of Artificial Sequence: Synthetic oligonucleotide
cuccagcaaucaacacgag

SEQ ID NO: 2399727 - RNA, 19 nt, Artificial Sequence
  Description of Artificial Sequence: Synthetic oligonucleotide
aggcgaggcucuucacugu

SEQ ID NO: 2399728 - RNA, 19 nt, Artificial Sequence
  Description of Artificial Sequence: Synthetic oligonucleotide
uagccgaagccacgaccuc

SEQ ID NO: 2399729 - RNA, 19 nt, Artificial Sequence
  Description of Artificial Sequence: Synthetic oligonucleotide
gccacagauauagaacaga

SEQ ID NO: 2399730 - RNA, 19 nt, Artificial Sequence
  Description of Artificial Sequence: Synthetic oligonucleotide
guuuugugacaugcaaacu

SEQ ID NO: 2399731 - RNA, 19 nt, Artificial Sequence
  Description of Artificial Sequence: Synthetic oligonucleotide
cuuccgagucaagugugca

SEQ ID NO: 2399732 - RNA, 19 nt, Artificial Sequence
  Description of Artificial Sequence: Synthetic oligonucleotide
gcugacacgugguugcuua

SEQ ID NO: 2399733 - RNA, 19 nt, Artificial Sequence
  Description of Artificial Sequence: Synthetic oligonucleotide
cacuguagaacaguuuuau

SEQ ID NO: 2399734 - RNA, 19 nt, Artificial Sequence
  Description of Artificial Sequence: Synthetic oligonucleotide
acguggcugucuuccaguu

SEQ ID NO: 2399735 - RNA, 19 nt, Artificial Sequence
  Description of Artificial Sequence: Synthetic oligonucleotide
ccacuucucaaagcaaaug

SEQ ID NO: 2399736 - RNA, 19 nt, Artificial Sequence
  Description of Artificial Sequence: Synthetic oligonucleotide
ucccugcugacacgugguu

SEQ ID NO: 2399737 - RNA, 19 nt, Artificial Sequence
  Description of Artificial Sequence: Synthetic oligonucleotide
gcuuaaguucuucacugau

SEQ ID NO: 2399738 - RNA, 19 nt, Artificial Sequence
  Description of Artificial Sequence: Synthetic oligonucleotide
ugggaacguggcugucuuc

SEQ ID NO: 2399739 - RNA, 19 nt, Artificial Sequence
  Description of Artificial Sequence: Synthetic oligonucleotide
agucaagugugcacuuauu

SEQ ID NO: 2399740 - RNA, 19 nt, Artificial Sequence
  Description of Artificial Sequence: Synthetic oligonucleotide
gucggagggcacuugcagu

SEQ ID NO: 2399741 - RNA, 19 nt, Artificial Sequence
  Description of Artificial Sequence: Synthetic oligonucleotide
guggcgcaggauggaaagc

SEQ ID NO: 2399742 - RNA, 19 nt, Artificial Sequence
  Description of Artificial Sequence: Synthetic oligonucleotide
cucugagggccacuuccga

SEQ ID NO: 2399743 - RNA, 19 nt, Artificial Sequence
  Description of Artificial Sequence: Synthetic oligonucleotide
aggugacgcaaaagugcug

SEQ ID NO: 2399744 - RNA, 19 nt, Artificial Sequence
  Description of Artificial Sequence: Synthetic oligonucleotide
ggucucgguggagaucugc

SEQ ID NO: 2399745 - RNA, 19 nt, Artificial Sequence
  Description of Artificial Sequence: Synthetic oligonucleotide
guucuagcaguuggggacu

SEQ ID NO: 2399746 - RNA, 19 nt, Artificial Sequence
  Description of Artificial Sequence: Synthetic oligonucleotide
gaguggcgcaggauggaaa

SEQ ID NO: 2399747 - RNA, 19 nt, Artificial Sequence
  Description of Artificial Sequence: Synthetic oligonucleotide
acgagguuucgaggggccu

SEQ ID NO: 2399748 - RNA, 19 nt, Artificial Sequence
  Description of Artificial Sequence: Synthetic oligonucleotide
uggucucgguggagaucug

SEQ ID NO: 2399749 - RNA, 19 nt, Artificial Sequence
  Description of Artificial Sequence: Synthetic oligonucleotide
uggguggcucucaggucuu

SEQ ID NO: 2399750 - RNA, 19 nt, Artificial Sequence
  Description of Artificial Sequence: Synthetic oligonucleotide
cuucugugccuucucccua

SEQ ID NO: 2399751 - RNA, 19 nt, Artificial Sequence
  Description of Artificial Sequence: Synthetic oligonucleotide
gagggccacuuccgaguca

SEQ ID NO: 2399752 - RNA, 19 nt, Artificial Sequence
  Description of Artificial Sequence: Synthetic oligonucleotide
ccucugugggcugaggguc

SEQ ID NO: 2399753 - RNA, 19 nt, Artificial Sequence
  Description of Artificial Sequence: Synthetic oligonucleotide
ggaacguggcugucuucca

SEQ ID NO: 2399754 - RNA, 19 nt, Artificial Sequence
  Description of Artificial Sequence: Synthetic oligonucleotide
gagguuucgaggggccucu

SEQ ID NO: 2399755 - RNA, 19 nt, Artificial Sequence
  Description of Artificial Sequence: Synthetic oligonucleotide
cuuccuuuguuugcuuggu

SEQ ID NO: 2399756 - RNA, 19 nt, Artificial Sequence
  Description of Artificial Sequence: Synthetic oligonucleotide
gccgaagccacgaccuccc

SEQ ID NO: 2399757 - RNA, 19 nt, Artificial Sequence
  Description of Artificial Sequence: Synthetic oligonucleotide
ugcugacacgugguugcuu

SEQ ID NO: 2399758 - RNA, 19 nt, Artificial Sequence
  Description of Artificial Sequence: Synthetic oligonucleotide
cuugggaacguggcugucu

SEQ ID NO: 2399759 - RNA, 19 nt, Artificial Sequence
  Description of Artificial Sequence: Synthetic oligonucleotide
auguauggcuuaaguucuu

SEQ ID NO: 2399760 - RNA, 19 nt, Artificial Sequence
  Description of Artificial Sequence: Synthetic oligonucleotide
gucucgguggagaucugcu

SEQ ID NO: 2399761 - RNA, 19 nt, Artificial Sequence
  Description of Artificial Sequence: Synthetic oligonucleotide
ugagaccuccugggauaaa

SEQ ID NO: 2399762 - RNA, 19 nt, Artificial Sequence
  Description of Artificial Sequence: Synthetic oligonucleotide
cugagaccuccugggauaa

SEQ ID NO: 2399763 - RNA, 19 nt, Artificial Sequence
  Description of Artificial Sequence: Synthetic oligonucleotide
cccgucggagggcacuugc

SEQ ID NO: 2399764 - RNA, 19 nt, Artificial Sequence
  Description of Artificial Sequence: Synthetic oligonucleotide
cugaguggcgcaggaugga

SEQ ID NO: 2399765 - RNA, 19 nt, Artificial Sequence
  Description of Artificial Sequence: Synthetic oligonucleotide
ggguuaaucccgaccccuc

SEQ ID NO: 2399766 - RNA, 19 nt, Artificial Sequence
  Description of Artificial Sequence: Synthetic oligonucleotide
guccgucauuggagguggg

SEQ ID NO: 2399767 - RNA, 19 nt, Artificial Sequence
  Description of Artificial Sequence: Synthetic oligonucleotide
cuuaaaggagaaggcuuuu

SEQ ID NO: 2399768 - RNA, 19 nt, Artificial Sequence
  Description of Artificial Sequence: Synthetic oligonucleotide
gccuuaaaggagaaggcuu

SEQ ID NO: 2399769 - RNA, 19 nt, Artificial Sequence
  Description of Artificial Sequence: Synthetic oligonucleotide
gccagccuuaaaggagaag

SEQ ID NO: 2399770 - RNA, 19 nt, Artificial Sequence
  Description of Artificial Sequence: Synthetic oligonucleotide
gcaggcgaggcucuucacu

SEQ ID NO: 2399771 - RNA, 19 nt, Artificial Sequence
  Description of Artificial Sequence: Synthetic oligonucleotide
ucccgucggagggcacuug

SEQ ID NO: 2399772 - RNA, 19 nt, Artificial Sequence
  Description of Artificial Sequence: Synthetic oligonucleotide
cagcaaucaacacgagguu

SEQ ID NO: 2399773 - RNA, 19 nt, Artificial Sequence
  Description of Artificial Sequence: Synthetic oligonucleotide
ccuuagccgaagccacgac

SEQ ID NO: 2399774 - RNA, 19 nt, Artificial Sequence
  Description of Artificial Sequence: Synthetic oligonucleotide
ccacuuccgagucaagugu

SEQ ID NO: 2399775 - RNA, 19 nt, Artificial Sequence
  Description of Artificial Sequence: Synthetic oligonucleotide
ggagggcacuugcaguucu

SEQ ID NO: 2399776 - RNA, 19 nt, Artificial Sequence
  Description of Artificial Sequence: Synthetic oligonucleotide
gggguuaaucccgaccccu

SEQ ID NO: 2399777 - RNA, 19 nt, Artificial Sequence
  Description of Artificial Sequence: Synthetic oligonucleotide
cccugcugacacgugguug

SEQ ID NO: 2399778 - RNA, 19 nt, Artificial Sequence
  Description of Artificial Sequence: Synthetic oligonucleotide
ucccacucugagggccacu

SEQ ID NO: 2399779 - RNA, 19 nt, Artificial Sequence
  Description of Artificial Sequence: Synthetic oligonucleotide
gccacgaccucccgucgga

SEQ ID NO: 2399780 - RNA, 19 nt, Artificial Sequence
  Description of Artificial Sequence: Synthetic oligonucleotide
gaguucgcugguguucuuu

SEQ ID NO: 2399781 - RNA, 19 nt, Artificial Sequence
  Description of Artificial Sequence: Synthetic oligonucleotide
cucccacucugagggccac

SEQ ID NO: 2399782 - RNA, 19 nt, Artificial Sequence
  Description of Artificial Sequence: Synthetic oligonucleotide
gcgaggcucuucacuguug

SEQ ID NO: 2399783 - RNA, 19 nt, Artificial Sequence
  Description of Artificial Sequence: Synthetic oligonucleotide
gucccugcugacacguggu

SEQ ID NO: 2399784 - RNA, 19 nt, Artificial Sequence
  Description of Artificial Sequence: Synthetic oligonucleotide
ggccacuuccgagucaagu

SEQ ID NO: 2399785 - RNA, 19 nt, Artificial Sequence
  Description of Artificial Sequence: Synthetic oligonucleotide
gguuucgaggggccucugu

SEQ ID NO: 2399786 - RNA, 19 nt, Artificial Sequence
  Description of Artificial Sequence: Synthetic oligonucleotide
caccaacgacugagaccuc

SEQ ID NO: 2399787 - RNA, 19 nt, Artificial Sequence
  Description of Artificial Sequence: Synthetic oligonucleotide
ggcugucaaucuccacaaa

SEQ ID NO: 2399788 - RNA, 19 nt, Artificial Sequence
  Description of Artificial Sequence: Synthetic oligonucleotide
cacucuccuggguggcucu

SEQ ID NO: 2399789 - RNA, 19 nt, Artificial Sequence
  Description of Artificial Sequence: Synthetic oligonucleotide
accucccgucggagggcac

SEQ ID NO: 2399790 - RNA, 19 nt, Artificial Sequence
  Description of Artificial Sequence: Synthetic oligonucleotide
ccgaagccacgaccucccg

SEQ ID NO: 2399791 - RNA, 19 nt, Artificial Sequence
  Description of Artificial Sequence: Synthetic oligonucleotide
ccccuccagcaaucaacac

SEQ ID NO: 2399792 - RNA, 19 nt, Artificial Sequence
  Description of Artificial Sequence: Synthetic oligonucleotide
cugacacgugguugcuuau

SEQ ID NO: 2399793 - RNA, 19 nt, Artificial Sequence
  Description of Artificial Sequence: Synthetic oligonucleotide
cccgaccccuccagcaauc

SEQ ID NO: 2399794 - RNA, 19 nt, Artificial Sequence
  Description of Artificial Sequence: Synthetic oligonucleotide
cgcaaaagugcuggcuguc

SEQ ID NO: 2399795 - RNA, 19 nt, Artificial Sequence
  Description of Artificial Sequence: Synthetic oligonucleotide
ccaacgacugagaccuccu

SEQ ID NO: 2399796 - RNA, 19 nt, Artificial Sequence
  Description of Artificial Sequence: Synthetic oligonucleotide
ccucccacucugagggcca

SEQ ID NO: 2399797 - RNA, 19 nt, Artificial Sequence
  Description of Artificial Sequence: Synthetic oligonucleotide
ggcgaggcucuucacuguu

SEQ ID NO: 2399798 - RNA, 19 nt, Artificial Sequence
  Description of Artificial Sequence: Synthetic oligonucleotide
ccacgaccucccgucggag

SEQ ID NO: 2399799 - RNA, 19 nt, Artificial Sequence
  Description of Artificial Sequence: Synthetic oligonucleotide
cgacugagaccuccuggga

SEQ ID NO: 2399800 - RNA, 19 nt, Artificial Sequence
  Description of Artificial Sequence: Synthetic oligonucleotide
ggccagccuuaaaggagaa

SEQ ID NO: 2399801 - RNA, 19 nt, Artificial Sequence
  Description of Artificial Sequence: Synthetic oligonucleotide
cugcugacacgugguugcu

SEQ ID NO: 2399802 - RNA, 19 nt, Artificial Sequence
  Description of Artificial Sequence: Synthetic oligonucleotide
gggccacuuccgagucaag

SEQ ID NO: 2399803 - RNA, 19 nt, Artificial Sequence
  Description of Artificial Sequence: Synthetic oligonucleotide
ccuugggaacguggcuguc

SEQ ID NO: 2399804 - RNA, 19 nt, Artificial Sequence
  Description of Artificial Sequence: Synthetic oligonucleotide
cccauuggccagccuuaaa

SEQ ID NO: 2399805 - RNA, 19 nt, Artificial Sequence
  Description of Artificial Sequence: Synthetic oligonucleotide
cgcugguguucuuugcacu

SEQ ID NO: 2399806 - RNA, 19 nt, Artificial Sequence
  Description of Artificial Sequence: Synthetic oligonucleotide
cgaccucccgucggagggc

SEQ ID NO: 2399807 - RNA, 19 nt, Artificial Sequence
  Description of Artificial Sequence: Synthetic oligonucleotide
cgagucaagugugcacuua

SEQ ID NO: 2399808 - RNA, 19 nt, Artificial Sequence
  Description of Artificial Sequence: Synthetic oligonucleotide
cgaagccacgaccucccgu

SEQ ID NO: 2399809 - RNA, 19 nt, Artificial Sequence
  Description of Artificial Sequence: Synthetic oligonucleotide
cucccgucggagggcacuu

SEQ ID NO: 2399810 - RNA, 19 nt, Artificial Sequence
  Description of Artificial Sequence: Synthetic oligonucleotide
cccacucugagggccacuu

SEQ ID NO: 2399811 - RNA, 19 nt, Artificial Sequence
  Description of Artificial Sequence: Synthetic oligonucleotide
ccucccgucggagggcacu

SEQ ID NO: 2399812 - RNA, 19 nt, Artificial Sequence
  Description of Artificial Sequence: Synthetic oligonucleotide
aacauuaacaaacugaguc

SEQ ID NO: 2399813 - RNA, 19 nt, Artificial Sequence
  Description of Artificial Sequence: Synthetic oligonucleotide
aauauggucaacaacaagc

SEQ ID NO: 2399814 - RNA, 19 nt, Artificial Sequence
  Description of Artificial Sequence: Synthetic oligonucleotide
aagaugauaaaguauugcc

SEQ ID NO: 2399815 - RNA, 19 nt, Artificial Sequence
  Description of Artificial Sequence: Synthetic oligonucleotide
aauauuuagaacaauguuc

SEQ ID NO: 2399816 - RNA, 19 nt, Artificial Sequence
  Description of Artificial Sequence: Synthetic oligonucleotide
aaauaaagucauuuguagc

SEQ ID NO: 2399817 - RNA, 19 nt, Artificial Sequence
  Description of Artificial Sequence: Synthetic oligonucleotide
uccaaauuaugaaagaagg

SEQ ID NO: 2399818 - RNA, 19 nt, Artificial Sequence
  Description of Artificial Sequence: Synthetic oligonucleotide
aauaaagucauuuguagca

SEQ ID NO: 2399819 - RNA, 19 nt, Artificial Sequence
  Description of Artificial Sequence: Synthetic oligonucleotide
auuaacucaccauacauac

SEQ ID NO: 2399820 - RNA, 19 nt, Artificial Sequence
  Description of Artificial Sequence: Synthetic oligonucleotide
auuuguagcaauuuagcac

SEQ ID NO: 2399821 - RNA, 19 nt, Artificial Sequence
  Description of Artificial Sequence: Synthetic oligonucleotide
aguaaagcacgauagacac

SEQ ID NO: 2399822 - RNA, 19 nt, Artificial Sequence
  Description of Artificial Sequence: Synthetic oligonucleotide
auuauaccuauucauaaac

SEQ ID NO: 2399823 - RNA, 19 nt, Artificial Sequence
  Description of Artificial Sequence: Synthetic oligonucleotide
ugaaauguaacauuaacaa

SEQ ID NO: 2399824 - RNA, 19 nt, Artificial Sequence
  Description of Artificial Sequence: Synthetic oligonucleotide
uaaauaaagucauuuguag

SEQ ID NO: 2399825 - RNA, 19 nt, Artificial Sequence
  Description of Artificial Sequence: Synthetic oligonucleotide
aguauugccauucucaaag

SEQ ID NO: 2399826 - RNA, 19 nt, Artificial Sequence
  Description of Artificial Sequence: Synthetic oligonucleotide
auuauuacuucucucagag

SEQ ID NO: 2399827 - RNA, 19 nt, Artificial Sequence
  Description of Artificial Sequence: Synthetic oligonucleotide
gaggaaaauauuuagaaca

SEQ ID NO: 2399828 - RNA, 19 nt, Artificial Sequence
  Description of Artificial Sequence: Synthetic oligonucleotide
acauuaacaaacugagucc

SEQ ID NO: 2399829 - RNA, 19 nt, Artificial Sequence
  Description of Artificial Sequence: Synthetic oligonucleotide
uguuuuauuccccaaaaca

SEQ ID NO: 2399830 - RNA, 19 nt, Artificial Sequence
  Description of Artificial Sequence: Synthetic oligonucleotide
aaauuaugaaagaaggcac

SEQ ID NO: 2399831 - RNA, 19 nt, Artificial Sequence
  Description of Artificial Sequence: Synthetic oligonucleotide
uuaagaggaguaaagcacg

SEQ ID NO: 2399832 - RNA, 19 nt, Artificial Sequence
  Description of Artificial Sequence: Synthetic oligonucleotide
aaauucagcagcuugcucu

SEQ ID NO: 2399833 - RNA, 19 nt, Artificial Sequence
  Description of Artificial Sequence: Synthetic oligonucleotide
agaacaauguucaaagucc

SEQ ID NO: 2399834 - RNA, 19 nt, Artificial Sequence
  Description of Artificial Sequence: Synthetic oligonucleotide
uaaaguauugccauucuca

SEQ ID NO: 2399835 - RNA, 19 nt, Artificial Sequence
  Description of Artificial Sequence: Synthetic oligonucleotide
uauuacuucucucagaguc

SEQ ID NO: 2399836 - RNA, 19 nt, Artificial Sequence
  Description of Artificial Sequence: Synthetic oligonucleotide
  modified_base (14)..(14): a, c, u, g, unknown or other
acaaacaucauucnccaug

SEQ ID NO: 2399837 - RNA, 19 nt, Artificial Sequence
  Description of Artificial Sequence: Synthetic oligonucleotide
caauuuagcacaaggaacc

SEQ ID NO: 2399838 - RNA, 19 nt, Artificial Sequence
  Description of Artificial Sequence: Synthetic oligonucleotide
uuuucuuccauuuggggag

SEQ ID NO: 2399839 - RNA, 19 nt, Artificial Sequence
  Description of Artificial Sequence: Synthetic oligonucleotide
uuaaaguaucuccaaaucu

SEQ ID NO: 2399840 - RNA, 19 nt, Artificial Sequence
  Description of Artificial Sequence: Synthetic oligonucleotide
uauauuagccacaggagug

SEQ ID NO: 2399841 - RNA, 19 nt, Artificial Sequence
  Description of Artificial Sequence: Synthetic oligonucleotide
  modified_base (11)..(11): a, c, u, g, unknown or other
aacaucauucnccauguug

SEQ ID NO: 2399842 - RNA, 19 nt, Artificial Sequence
  Description of Artificial Sequence: Synthetic oligonucleotide
aaaacauuuuauagugugc

SEQ ID NO: 2399843 - RNA, 19 nt, Artificial Sequence
  Description of Artificial Sequence: Synthetic oligonucleotide
ugauggucaaaccaaaaca

SEQ ID NO: 2399844 - RNA, 19 nt, Artificial Sequence
  Description of Artificial Sequence: Synthetic oligonucleotide
ugggauguauuuaaaauca

SEQ ID NO: 2399845 - RNA, 19 nt, Artificial Sequence
  Description of Artificial Sequence: Synthetic oligonucleotide
aaauauuuagaacaauguu

SEQ ID NO: 2399846 - RNA, 19 nt, Artificial Sequence
  Description of Artificial Sequence: Synthetic oligonucleotide
uaacucaccauacauacac

SEQ ID NO: 2399847 - RNA, 19 nt, Artificial Sequence
  Description of Artificial Sequence: Synthetic oligonucleotide
aaccaaaacauuuuauagu

SEQ ID NO: 2399848 - RNA, 19 nt, Artificial Sequence
  Description of Artificial Sequence: Synthetic oligonucleotide
auacccaaaauuuaaauaa

SEQ ID NO: 2399849 - RNA, 19 nt, Artificial Sequence
  Description of Artificial Sequence: Synthetic oligonucleotide
acaugaucagaauuucugc

SEQ ID NO: 2399850 - RNA, 19 nt, Artificial Sequence
  Description of Artificial Sequence: Synthetic oligonucleotide
ucuuaaauucagcagcuug

SEQ ID NO: 2399851 - RNA, 19 nt, Artificial Sequence
  Description of Artificial Sequence: Synthetic oligonucleotide
augggauguauuuaaaauc

SEQ ID NO: 2399852 - RNA, 19 nt, Artificial Sequence
  Description of Artificial Sequence: Synthetic oligonucleotide
gaaucuaagcucuucaaac

SEQ ID NO: 2399853 - RNA, 19 nt, Artificial Sequence
  Description of Artificial Sequence: Synthetic oligonucleotide
aauacccaaaauuuaaaua

SEQ ID NO: 2399854 - RNA, 19 nt, Artificial Sequence
  Description of Artificial Sequence: Synthetic oligonucleotide
guagcaauuuagcacaagg

SEQ ID NO: 2399855 - RNA, 19 nt, Artificial Sequence
  Description of Artificial Sequence: Synthetic oligonucleotide
ucauuuguagcaauuuagc

SEQ ID NO: 2399856 - RNA, 19 nt, Artificial Sequence
  Description of Artificial Sequence: Synthetic oligonucleotide
uuccauaugaaauguaaca

SEQ ID NO: 2399857 - RNA, 19 nt, Artificial Sequence
  Description of Artificial Sequence: Synthetic oligonucleotide
uuuauuccccaaaacaaga

SEQ ID NO: 2399858 - RNA, 19 nt, Artificial Sequence
  Description of Artificial Sequence: Synthetic oligonucleotide
augauggucaaaccaaaac

SEQ ID NO: 2399859 - RNA, 19 nt, Artificial Sequence
  Description of Artificial Sequence: Synthetic oligonucleotide
aacaagcagaguuugagaa

SEQ ID NO: 2399860 - RNA, 19 nt, Artificial Sequence
  Description of Artificial Sequence: Synthetic oligonucleotide
uagaacaauguucaaaguc

SEQ ID NO: 2399861 - RNA, 19 nt, Artificial Sequence
  Description of Artificial Sequence: Synthetic oligonucleotide
ucaaagucccacaugguug

SEQ ID NO: 2399862 - RNA, 19 nt, Artificial Sequence
  Description of Artificial Sequence: Synthetic oligonucleotide
aaucuaagcucuucaaacu

SEQ ID NO: 2399863 - RNA, 19 nt, Artificial Sequence
  Description of Artificial Sequence: Synthetic oligonucleotide
uguggauuccauaugaaau

SEQ ID NO: 2399864 - RNA, 19 nt, Artificial Sequence
  Description of Artificial Sequence: Synthetic oligonucleotide
aaacauuuuauagugugca

SEQ ID NO: 2399865 - RNA, 19 nt, Artificial Sequence
  Description of Artificial Sequence: Synthetic oligonucleotide
agaauaagcagacacugcu

SEQ ID NO: 2399866 - RNA, 19 nt, Artificial Sequence
  Description of Artificial Sequence: Synthetic oligonucleotide
  modified_base (16)..(16): a, c, u, g, unknown or other
ucacaaacaucauucncca

SEQ ID NO: 2399867 - RNA, 19 nt, Artificial Sequence
  Description of Artificial Sequence: Synthetic oligonucleotide
uuuaucuguaccucuagac

SEQ ID NO: 2399868 - RNA, 19 nt, Artificial Sequence
  Description of Artificial Sequence: Synthetic oligonucleotide
ucaaagugagcaaacuuca

SEQ ID NO: 2399869 - RNA, 19 nt, Artificial Sequence
  Description of Artificial Sequence: Synthetic oligonucleotide
aaaacacauaagcaauucu

SEQ ID NO: 2399870 - RNA, 19 nt, Artificial Sequence
  Description of Artificial Sequence: Synthetic oligonucleotide
caucauggcaccauuauac

SEQ ID NO: 2399871 - RNA, 19 nt, Artificial Sequence
  Description of Artificial Sequence: Synthetic oligonucleotide
uggucaacaacaagcagag

SEQ ID NO: 2399872 - RNA, 19 nt, Artificial Sequence
  Description of Artificial Sequence: Synthetic oligonucleotide
gaagaauaagcagacacug

SEQ ID NO: 2399873 - RNA, 19 nt, Artificial Sequence
  Description of Artificial Sequence: Synthetic oligonucleotide
uaucaaguuuaucuguacc

SEQ ID NO: 2399874 - RNA, 19 nt, Artificial Sequence
  Description of Artificial Sequence: Synthetic oligonucleotide
uaucuguaccucuagacga

SEQ ID NO: 2399875 - RNA, 19 nt, Artificial Sequence
  Description of Artificial Sequence: Synthetic oligonucleotide
aagugagcaaacuucauua

SEQ ID NO: 2399876 - RNA, 19 nt, Artificial Sequence
  Description of Artificial Sequence: Synthetic oligonucleotide
uuuuauagugugcauccca

SEQ ID NO: 2399877 - RNA, 19 nt, Artificial Sequence
  Description of Artificial Sequence: Synthetic oligonucleotide
gaauuuaagaggaguaaag

SEQ ID NO: 2399878 - RNA, 19 nt, Artificial Sequence
  Description of Artificial Sequence: Synthetic oligonucleotide
ugagcaaacuucauuauua

SEQ ID NO: 2399879 - RNA, 19 nt, Artificial Sequence
  Description of Artificial Sequence: Synthetic oligonucleotide
ugaagaauaagcagacacu

SEQ ID NO: 2399880 - RNA, 19 nt, Artificial Sequence
  Description of Artificial Sequence: Synthetic oligonucleotide
aaaucaauauccaaauuau

SEQ ID NO: 2399881 - RNA, 19 nt, Artificial Sequence
  Description of Artificial Sequence: Synthetic oligonucleotide
uaugggauguauuuaaaau

SEQ ID NO: 2399882 - RNA, 19 nt, Artificial Sequence
  Description of Artificial Sequence: Synthetic oligonucleotide
  modified_base (15)..(15): a, c, u, g, unknown or other
ugcaucaccagccunuuca

SEQ ID NO: 2399883 - RNA, 19 nt, Artificial Sequence
  Description of Artificial Sequence: Synthetic oligonucleotide
uugccauucucaaagugag

SEQ ID NO: 2399884 - RNA, 19 nt, Artificial Sequence
  Description of Artificial Sequence: Synthetic oligonucleotide
acauaagcaauucuuguga

SEQ ID NO: 2399885 - RNA, 19 nt, Artificial Sequence
  Description of Artificial Sequence: Synthetic oligonucleotide
ucauaaaccuguaugggau

SEQ ID NO: 2399886 - RNA, 19 nt, Artificial Sequence
  Description of Artificial Sequence: Synthetic oligonucleotide
cucaaagugagcaaacuuc

SEQ ID NO: 2399887 - RNA, 19 nt, Artificial Sequence
  Description of Artificial Sequence: Synthetic oligonucleotide
uuagucucauugcugaaga

SEQ ID NO: 2399888 - RNA, 19 nt, Artificial Sequence
  Description of Artificial Sequence: Synthetic oligonucleotide
ugauuaacucaccauacau

SEQ ID NO: 2399889 - RNA, 19 nt, Artificial Sequence
  Description of Artificial Sequence: Synthetic oligonucleotide
uuuauagugugcaucccac

SEQ ID NO: 2399890 - RNA, 19 nt, Artificial Sequence
  Description of Artificial Sequence: Synthetic oligonucleotide
aagaauaagcagacacugc

SEQ ID NO: 2399891 - RNA, 19 nt, Artificial Sequence
  Description of Artificial Sequence: Synthetic oligonucleotide
uuucuuaaauucagcagcu

SEQ ID NO: 2399892 - RNA, 19 nt, Artificial Sequence
  Description of Artificial Sequence: Synthetic oligonucleotide
guaaugacuucccagcugc

SEQ ID NO: 2399893 - RNA, 19 nt, Artificial Sequence
  Description of Artificial Sequence: Synthetic oligonucleotide
caaauuaugaaagaaggca

SEQ ID NO: 2399894 - RNA, 19 nt, Artificial Sequence
  Description of Artificial Sequence: Synthetic oligonucleotide
cuguauauuagccacagga

SEQ ID NO: 2399895 - RNA, 19 nt, Artificial Sequence
  Description of Artificial Sequence: Synthetic oligonucleotide
cacacauccaucauggcac

SEQ ID NO: 2399896 - RNA, 19 nt, Artificial Sequence
  Description of Artificial Sequence: Synthetic oligonucleotide
uccaccuuuucuuaaauuc

SEQ ID NO: 2399897 - RNA, 19 nt, Artificial Sequence
  Description of Artificial Sequence: Synthetic oligonucleotide
aucuaagcucuucaaacuc

SEQ ID NO: 2399898 - RNA, 19 nt, Artificial Sequence
  Description of Artificial Sequence: Synthetic oligonucleotide
auaagcagacacugcuucc

SEQ ID NO: 2399899 - RNA, 19 nt, Artificial Sequence
  Description of Artificial Sequence: Synthetic oligonucleotide
aucauggcaccauuauacc

SEQ ID NO: 2399900 - RNA, 19 nt, Artificial Sequence
  Description of Artificial Sequence: Synthetic oligonucleotide
ugagaauuuaagaggagua

SEQ ID NO: 2399901 - RNA, 19 nt, Artificial Sequence
  Description of Artificial Sequence: Synthetic oligonucleotide
aucaaguuuaucuguaccu

SEQ ID NO: 2399902 - RNA, 19 nt, Artificial Sequence
  Description of Artificial Sequence: Synthetic oligonucleotide
  modified_base (7)..(7): a, c, u, g, unknown or other
ucauucnccauguugugaa

SEQ ID NO: 2399903 - RNA, 19 nt, Artificial Sequence
  Description of Artificial Sequence: Synthetic oligonucleotide
ugaagcaguaaugacuucc

SEQ ID NO: 2399904 - RNA, 19 nt, Artificial Sequence
  Description of Artificial Sequence: Synthetic oligonucleotide
aacacauaagcaauucuug

SEQ ID NO: 2399905 - RNA, 19 nt, Artificial Sequence
  Description of Artificial Sequence: Synthetic oligonucleotide
uccccacucacaaacauca

SEQ ID NO: 2399906 - RNA, 19 nt, Artificial Sequence
  Description of Artificial Sequence: Synthetic oligonucleotide
uuuaucaaguuuaucugua

SEQ ID NO: 2399907 - RNA, 19 nt, Artificial Sequence
  Description of Artificial Sequence: Synthetic oligonucleotide
uguaccucuagacgaaucu

SEQ ID NO: 2399908 - RNA, 19 nt, Artificial Sequence
  Description of Artificial Sequence: Synthetic oligonucleotide
  modified_base (10)..(10): a, c, u, g, unknown or other
acaucauucnccauguugu

SEQ ID NO: 2399909 - RNA, 19 nt, Artificial Sequence
  Description of Artificial Sequence: Synthetic oligonucleotide
agugauuaacucaccauac

SEQ ID NO: 2399910 - RNA, 19 nt, Artificial Sequence
  Description of Artificial Sequence: Synthetic oligonucleotide
uauuggggaaguuuccugc

SEQ ID NO: 2399911 - RNA, 19 nt, Artificial Sequence
  Description of Artificial Sequence: Synthetic oligonucleotide
ucaccauacauacacguau

SEQ ID NO: 2399912 - RNA, 19 nt, Artificial Sequence
  Description of Artificial Sequence: Synthetic oligonucleotide
cuuccuguauauuagccac

SEQ ID NO: 2399913 - RNA, 19 nt, Artificial Sequence
  Description of Artificial Sequence: Synthetic oligonucleotide
aauuaugaaagaaggcacu

SEQ ID NO: 2399914 - RNA, 19 nt, Artificial Sequence
  Description of Artificial Sequence: Synthetic oligonucleotide
aaagugagcaaacuucauu

SEQ ID NO: 2399915 - RNA, 19 nt, Artificial Sequence
  Description of Artificial Sequence: Synthetic oligonucleotide
cugacagaauuuauugggg

SEQ ID NO: 2399916 - RNA, 19 nt, Artificial Sequence
  Description of Artificial Sequence: Synthetic oligonucleotide
uuugagaauuuaagaggag

SEQ ID NO: 2399917 - RNA, 19 nt, Artificial Sequence
  Description of Artificial Sequence: Synthetic oligonucleotide
agcaguaaugacuucccag

SEQ ID NO: 2399918 - RNA, 19 nt, Artificial Sequence
  Description of Artificial Sequence: Synthetic oligonucleotide
gauguauuuaaaaucaaua

SEQ ID NO: 2399919 - RNA, 19 nt, Artificial Sequence
  Description of Artificial Sequence: Synthetic oligonucleotide
auucauaaaccuguauggg

SEQ ID NO: 2399920 - RNA, 19 nt, Artificial Sequence
  Description of Artificial Sequence: Synthetic oligonucleotide
uuagcacaaggaaccaucc

SEQ ID NO: 2399921 - RNA, 19 nt, Artificial Sequence
  Description of Artificial Sequence: Synthetic oligonucleotide
uuaacaaacugaguccacc

SEQ ID NO: 2399922 - RNA, 19 nt, Artificial Sequence
  Description of Artificial Sequence: Synthetic oligonucleotide
ucuaagcucuucaaacucu

SEQ ID NO: 2399923 - RNA, 19 nt, Artificial Sequence
  Description of Artificial Sequence: Synthetic oligonucleotide
uaaagcacgauagacacuu

SEQ ID NO: 2399924 - RNA, 19 nt, Artificial Sequence
  Description of Artificial Sequence: Synthetic oligonucleotide
uuuagucucauugcugaag

SEQ ID NO: 2399925 - RNA, 19 nt, Artificial Sequence
  Description of Artificial Sequence: Synthetic oligonucleotide
  modified_base (5)..(5): a, c, u, g, unknown or other
auucnccauguugugaagc

SEQ ID NO: 2399926 - RNA, 19 nt, Artificial Sequence
  Description of Artificial Sequence: Synthetic oligonucleotide
gucauuuguagcaauuuag

SEQ ID NO: 2399927 - RNA, 19 nt, Artificial Sequence
  Description of Artificial Sequence: Synthetic oligonucleotide
ugacagaauuuauugggga

SEQ ID NO: 2399928 - RNA, 19 nt, Artificial Sequence
  Description of Artificial Sequence: Synthetic oligonucleotide
aacugaguccaccuuuucu

SEQ ID NO: 2399929 - RNA, 19 nt, Artificial Sequence
  Description of Artificial Sequence: Synthetic oligonucleotide
auuuauuggggaaguuucc

SEQ ID NO: 2399930 - RNA, 19 nt, Artificial Sequence
  Description of Artificial Sequence: Synthetic oligonucleotide
ugcugaagaauaagcagac

SEQ ID NO: 2399931 - RNA, 19 nt, Artificial Sequence
  Description of Artificial Sequence: Synthetic oligonucleotide
ugauaaaguauugccauuc

SEQ ID NO: 2399932 - RNA, 19 nt, Artificial Sequence
  Description of Artificial Sequence: Synthetic oligonucleotide
auuccauaugaaauguaac

SEQ ID NO: 2399933 - RNA, 19 nt, Artificial Sequence
  Description of Artificial Sequence: Synthetic oligonucleotide
aguaucuccaaaucuuccu

SEQ ID NO: 2399934 - RNA, 19 nt, Artificial Sequence
  Description of Artificial Sequence: Synthetic oligonucleotide
aaucaauauccaaauuaug

SEQ ID NO: 2399935 - RNA, 19 nt, Artificial Sequence
  Description of Artificial Sequence: Synthetic oligonucleotide
aauucuugugauuguggau

SEQ ID NO: 2399936 - RNA, 19 nt, Artificial Sequence
  Description of Artificial Sequence: Synthetic oligonucleotide
uuagccacaggaguguugc

SEQ ID NO: 2399937 - RNA, 19 nt, Artificial Sequence
  Description of Artificial Sequence: Synthetic oligonucleotide
caagaugauaaaguauugc

SEQ ID NO: 2399938 - RNA, 19 nt, Artificial Sequence
  Description of Artificial Sequence: Synthetic oligonucleotide
auauccaaauuaugaaaga

SEQ ID NO: 2399939 - RNA, 19 nt, Artificial Sequence
  Description of Artificial Sequence: Synthetic oligonucleotide
ucuagacgaaucuaagcuc

SEQ ID NO: 2399940 - RNA, 19 nt, Artificial Sequence
  Description of Artificial Sequence: Synthetic oligonucleotide
  modified_base (4)..(4): a, c, u, g, unknown or other
uucnccauguugugaagca

SEQ ID NO: 2399941 - RNA, 19 nt, Artificial Sequence
  Description of Artificial Sequence: Synthetic oligonucleotide
uuagugauuaacucaccau

SEQ ID NO: 2399942 - RNA, 19 nt, Artificial Sequence
  Description of Artificial Sequence: Synthetic oligonucleotide
cacugacagaauuuauugg

SEQ ID NO: 2399943 - RNA, 19 nt, Artificial Sequence
  Description of Artificial Sequence: Synthetic oligonucleotide
agucuuaugcaccaggguu

SEQ ID NO: 2399944 - RNA, 19 nt, Artificial Sequence
  Description of Artificial Sequence: Synthetic oligonucleotide
acacauaagcaauucuugu

SEQ ID NO: 2399945 - RNA, 19 nt, Artificial Sequence
  Description of Artificial Sequence: Synthetic oligonucleotide
uuauuggggaaguuuccug

SEQ ID NO: 2399946 - RNA, 19 nt, Artificial Sequence
  Description of Artificial Sequence: Synthetic oligonucleotide
uuccugccuuucaauaugg

SEQ ID NO: 2399947 - RNA, 19 nt, Artificial Sequence
  Description of Artificial Sequence: Synthetic oligonucleotide
augacuucccagcugcauc

SEQ ID NO: 2399948 - RNA, 19 nt, Artificial Sequence
  Description of Artificial Sequence: Synthetic oligonucleotide
ugauuguggauuccauaug

SEQ ID NO: 2399949 - RNA, 19 nt, Artificial Sequence
  Description of Artificial Sequence: Synthetic oligonucleotide
auuuuauagugugcauccc

SEQ ID NO: 2399950 - RNA, 19 nt, Artificial Sequence
  Description of Artificial Sequence: Synthetic oligonucleotide
auuaugaaagaaggcacug

SEQ ID NO: 2399951 - RNA, 19 nt, Artificial Sequence
  Description of Artificial Sequence: Synthetic oligonucleotide
aguaaugacuucccagcug

SEQ ID NO: 2399952 - RNA, 19 nt, Artificial Sequence
  Description of Artificial Sequence: Synthetic oligonucleotide
aguuuaucuguaccucuag

SEQ ID NO: 2399953 - RNA, 19 nt, Artificial Sequence
  Description of Artificial Sequence: Synthetic oligonucleotide
aaaauacccaaaauuuaaa

SEQ ID NO: 2399954 - RNA, 19 nt, Artificial Sequence
  Description of Artificial Sequence: Synthetic oligonucleotide
aaacugaguccaccuuuuc

SEQ ID NO: 2399955 - RNA, 19 nt, Artificial Sequence
  Description of Artificial Sequence: Synthetic oligonucleotide
uacccaaaauuuaaauaaa

SEQ ID NO: 2399956 - RNA, 19 nt, Artificial Sequence
  Description of Artificial Sequence: Synthetic oligonucleotide
cauccuuagugauuaacuc

SEQ ID NO: 2399957 - RNA, 19 nt, Artificial Sequence
  Description of Artificial Sequence: Synthetic oligonucleotide
aguguugccaugaugguca

SEQ ID NO: 2399958 - RNA, 19 nt, Artificial Sequence
  Description of Artificial Sequence: Synthetic oligonucleotide
acucaccauacauacacgu

SEQ ID NO: 2399959 - RNA, 19 nt, Artificial Sequence
  Description of Artificial Sequence: Synthetic oligonucleotide
caccuuuucuuaaauucag

SEQ ID NO: 2399960 - RNA, 19 nt, Artificial Sequence
  Description of Artificial Sequence: Synthetic oligonucleotide
uuagaacaauguucaaagu

SEQ ID NO: 2399961 - RNA, 19 nt, Artificial Sequence
  Description of Artificial Sequence: Synthetic oligonucleotide
gauuccauaugaaauguaa

SEQ ID NO: 2399962 - RNA, 19 nt, Artificial Sequence
  Description of Artificial Sequence: Synthetic oligonucleotide
cauuuguagcaauuuagca

SEQ ID NO: 2399963 - RNA, 19 nt, Artificial Sequence
  Description of Artificial Sequence: Synthetic oligonucleotide
uaagaggaguaaagcacga

SEQ ID NO: 2399964 - RNA, 19 nt, Artificial Sequence
  Description of Artificial Sequence: Synthetic oligonucleotide
uuauuccccaaaacaagau

SEQ ID NO: 2399965 - RNA, 19 nt, Artificial Sequence
  Description of Artificial Sequence: Synthetic oligonucleotide
uagugugcaucccacacau

SEQ ID NO: 2399966 - RNA, 19 nt, Artificial Sequence
  Description of Artificial Sequence: Synthetic oligonucleotide
uuaacucaccauacauaca

SEQ ID NO: 2399967 - RNA, 19 nt, Artificial Sequence
  Description of Artificial Sequence: Synthetic oligonucleotide
uuguggauuccauaugaaa

SEQ ID NO: 2399968 - RNA, 19 nt, Artificial Sequence
  Description of Artificial Sequence: Synthetic oligonucleotide
uuccauuuggggaggaaaa

SEQ ID NO: 2399969 - RNA, 19 nt, Artificial Sequence
  Description of Artificial Sequence: Synthetic oligonucleotide
ucauggcaccauuauaccu

SEQ ID NO: 2399970 - RNA, 19 nt, Artificial Sequence
  Description of Artificial Sequence: Synthetic oligonucleotide
gaagcaguaaugacuuccc

SEQ ID NO: 2399971 - RNA, 19 nt, Artificial Sequence
  Description of Artificial Sequence: Synthetic oligonucleotide
agaauuuaagaggaguaaa

SEQ ID NO: 2399972 - RNA, 19 nt, Artificial Sequence
  Description of Artificial Sequence: Synthetic oligonucleotide
uaagcagacacugcuuccc

SEQ ID NO: 2399973 - RNA, 19 nt, Artificial Sequence
  Description of Artificial Sequence: Synthetic oligonucleotide
uuaugaaagaaggcacuga

SEQ ID NO: 2399974 - RNA, 19 nt, Artificial Sequence
  Description of Artificial Sequence: Synthetic oligonucleotide
cuuagugauuaacucacca

SEQ ID NO: 2399975 - RNA, 19 nt, Artificial Sequence
  Description of Artificial Sequence: Synthetic oligonucleotide
ucaaguuuaucuguaccuc

SEQ ID NO: 2399976 - RNA, 19 nt, Artificial Sequence
  Description of Artificial Sequence: Synthetic oligonucleotide
auaccuauucauaaaccug

SEQ ID NO: 2399977 - RNA, 19 nt, Artificial Sequence
  Description of Artificial Sequence: Synthetic oligonucleotide
acugcuuccccacucacaa

SEQ ID NO: 2399978 - RNA, 19 nt, Artificial Sequence
  Description of Artificial Sequence: Synthetic oligonucleotide
guugugaagcaguaaugac

SEQ ID NO: 2399979 - RNA, 19 nt, Artificial Sequence
  Description of Artificial Sequence: Synthetic oligonucleotide
aauuuagcacaaggaacca

SEQ ID NO: 2399980 - RNA, 19 nt, Artificial Sequence
  Description of Artificial Sequence: Synthetic oligonucleotide
gacgaaucuaagcucuuca

SEQ ID NO: 2399981 - RNA, 19 nt, Artificial Sequence
  Description of Artificial Sequence: Synthetic oligonucleotide
uaccucuagacgaaucuaa

SEQ ID NO: 2399982 - RNA, 19 nt, Artificial Sequence
  Description of Artificial Sequence: Synthetic oligonucleotide
agcacaaggaaccauccuu

SEQ ID NO: 2399983 - RNA, 19 nt, Artificial Sequence
  Description of Artificial Sequence: Synthetic oligonucleotide
gaguaaagcacgauagaca

SEQ ID NO: 2399984 - RNA, 19 nt, Artificial Sequence
  Description of Artificial Sequence: Synthetic oligonucleotide
agagucuuaugcaccaggg

SEQ ID NO: 2399985 - RNA, 19 nt, Artificial Sequence
  Description of Artificial Sequence: Synthetic oligonucleotide
acacguauguuucuguuuu

SEQ ID NO: 2399986 - RNA, 19 nt, Artificial Sequence
  Description of Artificial Sequence: Synthetic oligonucleotide
agaggaguaaagcacgaua

SEQ ID NO: 2399987 - RNA, 19 nt, Artificial Sequence
  Description of Artificial Sequence: Synthetic oligonucleotide
uguaugggauguauuuaaa

SEQ ID NO: 2399988 - RNA, 19 nt, Artificial Sequence
  Description of Artificial Sequence: Synthetic oligonucleotide
ccaaauuaugaaagaaggc

SEQ ID NO: 2399989 - RNA, 19 nt, Artificial Sequence
  Description of Artificial Sequence: Synthetic oligonucleotide
ucucauugcugaagaauaa

SEQ ID NO: 2399990 - RNA, 19 nt, Artificial Sequence
  Description of Artificial Sequence: Synthetic oligonucleotide
caauauggucaacaacaag

SEQ ID NO: 2399991 - RNA, 19 nt, Artificial Sequence
  Description of Artificial Sequence: Synthetic oligonucleotide
auauggucaacaacaagca

SEQ ID NO: 2399992 - RNA, 19 nt, Artificial Sequence
  Description of Artificial Sequence: Synthetic oligonucleotide
ugaucagaauuucugccuu

SEQ ID NO: 2399993 - RNA, 19 nt, Artificial Sequence
  Description of Artificial Sequence: Synthetic oligonucleotide
gcacugacagaauuuauug

SEQ ID NO: 2399994 - RNA, 19 nt, Artificial Sequence
  Description of Artificial Sequence: Synthetic oligonucleotide
aaacaugaucagaauuucu

SEQ ID NO: 2399995 - RNA, 19 nt, Artificial Sequence
  Description of Artificial Sequence: Synthetic oligonucleotide
guauauuagccacaggagu

SEQ ID NO: 2399996 - RNA, 19 nt, Artificial Sequence
  Description of Artificial Sequence: Synthetic oligonucleotide
ggaggaaaauauuuagaac

SEQ ID NO: 2399997 - RNA, 19 nt, Artificial Sequence
  Description of Artificial Sequence: Synthetic oligonucleotide
gucaacaacaagcagaguu

SEQ ID NO: 2399998 - RNA, 19 nt, Artificial Sequence
  Description of Artificial Sequence: Synthetic oligonucleotide
aaguauugccauucucaaa

SEQ ID NO: 2399999 - RNA, 19 nt, Artificial Sequence
  Description of Artificial Sequence: Synthetic oligonucleotide
ugugauuguggauuccaua

SEQ ID NO: 2400000 - RNA, 19 nt, Artificial Sequence
  Description of Artificial Sequence: Synthetic oligonucleotide
caauucuugugauugugga

SEQ ID NO: 2400001 - RNA, 19 nt, Artificial Sequence
  Description of Artificial Sequence: Synthetic oligonucleotide
aacucaccauacauacacg

SEQ ID NO: 2400002 - RNA, 19 nt, Artificial Sequence
  Description of Artificial Sequence: Synthetic oligonucleotide
agucccacaugguugacaa

SEQ ID NO: 2400003 - RNA, 19 nt, Artificial Sequence
  Description of Artificial Sequence: Synthetic oligonucleotide
cauaaaccuguaugggaug

SEQ ID NO: 2400004 - RNA, 19 nt, Artificial Sequence
  Description of Artificial Sequence: Synthetic oligonucleotide
agucauuuguagcaauuua

SEQ ID NO: 2400005 - RNA, 19 nt, Artificial Sequence
  Description of Artificial Sequence: Synthetic oligonucleotide
ugccuucacuucaaacucc

SEQ ID NO: 2400006 - RNA, 19 nt, Artificial Sequence
  Description of Artificial Sequence: Synthetic oligonucleotide
gggaggaaaauauuuagaa

SEQ ID NO: 2400007 - RNA, 19 nt, Artificial Sequence
  Description of Artificial Sequence: Synthetic oligonucleotide
cauuaacaaacugagucca

SEQ ID NO: 2400008 - RNA, 19 nt, Artificial Sequence
  Description of Artificial Sequence: Synthetic oligonucleotide
auagugugcaucccacaca

SEQ ID NO: 2400009 - RNA, 19 nt, Artificial Sequence
  Description of Artificial Sequence: Synthetic oligonucleotide
aagcacgauagacacuuuu

SEQ ID NO: 2400010 - RNA, 19 nt, Artificial Sequence
  Description of Artificial Sequence: Synthetic oligonucleotide
ccuuuuaucaaguuuaucu

SEQ ID NO: 2400011 - RNA, 19 nt, Artificial Sequence
  Description of Artificial Sequence: Synthetic oligonucleotide
aagcaguaaugacuuccca

SEQ ID NO: 2400012 - RNA, 19 nt, Artificial Sequence
  Description of Artificial Sequence: Synthetic oligonucleotide
cucuagacgaaucuaagcu

SEQ ID NO: 2400013 - RNA, 19 nt, Artificial Sequence
  Description of Artificial Sequence: Synthetic oligonucleotide
gagaauuuaagaggaguaa

SEQ ID NO: 2400014 - RNA, 19 nt, Artificial Sequence
  Description of Artificial Sequence: Synthetic oligonucleotide
gauuaacucaccauacaua

SEQ ID NO: 2400015 - RNA, 19 nt, Artificial Sequence
  Description of Artificial Sequence: Synthetic oligonucleotide
aaaccuguaugggauguau

SEQ ID NO: 2400016 - RNA, 19 nt, Artificial Sequence
  Description of Artificial Sequence: Synthetic oligonucleotide
aaagucauuuguagcaauu

SEQ ID NO: 2400017 - RNA, 19 nt, Artificial Sequence
  Description of Artificial Sequence: Synthetic oligonucleotide
gcaauuuagcacaaggaac

SEQ ID NO: 2400018 - RNA, 19 nt, Artificial Sequence
  Description of Artificial Sequence: Synthetic oligonucleotide
aggaguaaagcacgauaga

SEQ ID NO: 2400019 - RNA, 19 nt, Artificial Sequence
  Description of Artificial Sequence: Synthetic oligonucleotide
gaaguuuccugccuuucaa

SEQ ID NO: 2400020 - RNA, 19 nt, Artificial Sequence
  Description of Artificial Sequence: Synthetic oligonucleotide
aguuuccugccuuucaaua

SEQ ID NO: 2400021 - RNA, 19 nt, Artificial Sequence
  Description of Artificial Sequence: Synthetic oligonucleotide
auaaaccuguaugggaugu

SEQ ID NO: 2400022 - RNA, 19 nt, Artificial Sequence
  Description of Artificial Sequence: Synthetic oligonucleotide
ggaguaaagcacgauagac

SEQ ID NO: 2400023 - RNA, 19 nt, Artificial Sequence
  Description of Artificial Sequence: Synthetic oligonucleotide
acaagaugauaaaguauug

SEQ ID NO: 2400024 - RNA, 19 nt, Artificial Sequence
  Description of Artificial Sequence: Synthetic oligonucleotide
ucuuaugcaccaggguuug

SEQ ID NO: 2400025 - RNA, 19 nt, Artificial Sequence
  Description of Artificial Sequence: Synthetic oligonucleotide
uaugcaccaggguuuguaa

SEQ ID NO: 2400026 - RNA, 19 nt, Artificial Sequence
  Description of Artificial Sequence: Synthetic oligonucleotide
guaugggauguauuuaaaa

SEQ ID NO: 2400027 - RNA, 19 nt, Artificial Sequence
  Description of Artificial Sequence: Synthetic oligonucleotide
cauuauaccuauucauaaa

SEQ ID NO: 2400028 - RNA, 19 nt, Artificial Sequence
  Description of Artificial Sequence: Synthetic oligonucleotide
uucuugugauuguggauuc

SEQ ID NO: 2400029 - RNA, 19 nt, Artificial Sequence
  Description of Artificial Sequence: Synthetic oligonucleotide
auauuagccacaggagugu

SEQ ID NO: 2400030 - RNA, 19 nt, Artificial Sequence
  Description of Artificial Sequence: Synthetic oligonucleotide
auaaagucauuuguagcaa

SEQ ID NO: 2400031 - RNA, 19 nt, Artificial Sequence
  Description of Artificial Sequence: Synthetic oligonucleotide
uguagcaauuuagcacaag

SEQ ID NO: 2400032 - RNA, 19 nt, Artificial Sequence
  Description of Artificial Sequence: Synthetic oligonucleotide
  modified_base (9)..(9): a, c, u, g, unknown or other
caucauucnccauguugug

SEQ ID NO: 2400033 - RNA, 19 nt, Artificial Sequence
  Description of Artificial Sequence: Synthetic oligonucleotide
  modified_base (3)..(3): a, c, u, g, unknown or other
ucnccauguugugaagcag

SEQ ID NO: 2400034 - RNA, 19 nt, Artificial Sequence
  Description of Artificial Sequence: Synthetic oligonucleotide
acauacacguauguuucug

SEQ ID NO: 2400035 - RNA, 19 nt, Artificial Sequence
  Description of Artificial Sequence: Synthetic oligonucleotide
guuuaucuguaccucuaga

SEQ ID NO: 2400036 - RNA, 19 nt, Artificial Sequence
  Description of Artificial Sequence: Synthetic oligonucleotide
caaagucccacaugguuga

SEQ ID NO: 2400037 - RNA, 19 nt, Artificial Sequence
  Description of Artificial Sequence: Synthetic oligonucleotide
cuagacgaaucuaagcucu

SEQ ID NO: 2400038 - RNA, 19 nt, Artificial Sequence
  Description of Artificial Sequence: Synthetic oligonucleotide
cacaaggaaccauccuuag

SEQ ID NO: 2400039 - RNA, 19 nt, Artificial Sequence
  Description of Artificial Sequence: Synthetic oligonucleotide
aacucuagguguuccucuu

SEQ ID NO: 2400040 - RNA, 19 nt, Artificial Sequence
  Description of Artificial Sequence: Synthetic oligonucleotide
auaagcaauucuugugauu

SEQ ID NO: 2400041 - RNA, 19 nt, Artificial Sequence
  Description of Artificial Sequence: Synthetic oligonucleotide
uuuuagucucauugcugaa

SEQ ID NO: 2400042 - RNA, 19 nt, Artificial Sequence
  Description of Artificial Sequence: Synthetic oligonucleotide
gugauuaacucaccauaca

SEQ ID NO: 2400043 - RNA, 19 nt, Artificial Sequence
  Description of Artificial Sequence: Synthetic oligonucleotide
guugacaaacaugaucaga

SEQ ID NO: 2400044 - RNA, 19 nt, Artificial Sequence
  Description of Artificial Sequence: Synthetic oligonucleotide
gaaccauccuuagugauua

SEQ ID NO: 2400045 - RNA, 19 nt, Artificial Sequence
  Description of Artificial Sequence: Synthetic oligonucleotide
cuguaugggauguauuuaa

SEQ ID NO: 2400046 - RNA, 19 nt, Artificial Sequence
  Description of Artificial Sequence: Synthetic oligonucleotide
uacacguauguuucuguuu

SEQ ID NO: 2400047 - RNA, 19 nt, Artificial Sequence
  Description of Artificial Sequence: Synthetic oligonucleotide
agacgaaucuaagcucuuc

SEQ ID NO: 2400048 - RNA, 19 nt, Artificial Sequence
  Description of Artificial Sequence: Synthetic oligonucleotide
auuacuucucucagagucu

SEQ ID NO: 2400049 - RNA, 19 nt, Artificial Sequence
  Description of Artificial Sequence: Synthetic oligonucleotide
gaucagaauuucugccuuc

SEQ ID NO: 2400050 - RNA, 19 nt, Artificial Sequence
  Description of Artificial Sequence: Synthetic oligonucleotide
acgaaucuaagcucuucaa

SEQ ID NO: 2400051 - RNA, 19 nt, Artificial Sequence
  Description of Artificial Sequence: Synthetic oligonucleotide
  modified_base (13)..(13): a, c, u, g, unknown or other
caucaccagccunuucacc

SEQ ID NO: 2400052 - RNA, 19 nt, Artificial Sequence
  Description of Artificial Sequence: Synthetic oligonucleotide
caauguucaaagucccaca

SEQ ID NO: 2400053 - RNA, 19 nt, Artificial Sequence
  Description of Artificial Sequence: Synthetic oligonucleotide
ccuuuucuuaaauucagca

SEQ ID NO: 2400054 - RNA, 19 nt, Artificial Sequence
  Description of Artificial Sequence: Synthetic oligonucleotide
uugugauuguggauuccau

SEQ ID NO: 2400055 - RNA, 19 nt, Artificial Sequence
  Description of Artificial Sequence: Synthetic oligonucleotide
accauuauaccuauucaua

SEQ ID NO: 2400056 - RNA, 19 nt, Artificial Sequence
  Description of Artificial Sequence: Synthetic oligonucleotide
auacacguauguuucuguu

SEQ ID NO: 2400057 - RNA, 19 nt, Artificial Sequence
  Description of Artificial Sequence: Synthetic oligonucleotide
uagcacaaggaaccauccu

SEQ ID NO: 2400058 - RNA, 19 nt, Artificial Sequence
  Description of Artificial Sequence: Synthetic oligonucleotide
cauguugugaagcaguaau

SEQ ID NO: 2400059 - RNA, 19 nt, Artificial Sequence
  Description of Artificial Sequence: Synthetic oligonucleotide
gcaauucuugugauugugg

SEQ ID NO: 2400060 - RNA, 19 nt, Artificial Sequence
  Description of Artificial Sequence: Synthetic oligonucleotide
ugccauucucaaagugagc

SEQ ID NO: 2400061 - RNA, 19 nt, Artificial Sequence
  Description of Artificial Sequence: Synthetic oligonucleotide
aacaacaagcagaguuuga

SEQ ID NO: 2400062 - RNA, 19 nt, Artificial Sequence
  Description of Artificial Sequence: Synthetic oligonucleotide
ugaguccaccuuuucuuaa

SEQ ID NO: 2400063 - RNA, 19 nt, Artificial Sequence
  Description of Artificial Sequence: Synthetic oligonucleotide
  modified_base (6)..(6): a, c, u, g, unknown or other
cauucnccauguugugaag

SEQ ID NO: 2400064 - RNA, 19 nt, Artificial Sequence
  Description of Artificial Sequence: Synthetic oligonucleotide
aaguuuaucuguaccucua

SEQ ID NO: 2400065 - RNA, 19 nt, Artificial Sequence
  Description of Artificial Sequence: Synthetic oligonucleotide
ccaaaucuuccuuuuauca

SEQ ID NO: 2400066 - RNA, 19 nt, Artificial Sequence
  Description of Artificial Sequence: Synthetic oligonucleotide
auguugugaagcaguaaug

SEQ ID NO: 2400067 - RNA, 19 nt, Artificial Sequence
  Description of Artificial Sequence: Synthetic oligonucleotide
  modified_base (7)..(7): a, c, u, g, unknown or other
cagccunuucaccagucca

SEQ ID NO: 2400068 - RNA, 19 nt, Artificial Sequence
  Description of Artificial Sequence: Synthetic oligonucleotide
aaagucccacaugguugac

SEQ ID NO: 2400069 - RNA, 19 nt, Artificial Sequence
  Description of Artificial Sequence: Synthetic oligonucleotide
  modified_base (8)..(8): a, c, u, g, unknown or other
aucauucnccauguuguga

SEQ ID NO: 2400070 - RNA, 19 nt, Artificial Sequence
  Description of Artificial Sequence: Synthetic oligonucleotide
caccaggguuuguaaauug

SEQ ID NO: 2400071 - RNA, 19 nt, Artificial Sequence
  Description of Artificial Sequence: Synthetic oligonucleotide
caaacucuagguguuccuc

SEQ ID NO: 2400072 - RNA, 19 nt, Artificial Sequence
  Description of Artificial Sequence: Synthetic oligonucleotide
ucuugugauuguggauucc

SEQ ID NO: 2400073 - RNA, 19 nt, Artificial Sequence
  Description of Artificial Sequence: Synthetic oligonucleotide
augaaagaaggcacugaca

SEQ ID NO: 2400074 - RNA, 19 nt, Artificial Sequence
  Description of Artificial Sequence: Synthetic oligonucleotide
uuguagcaauuuagcacaa

SEQ ID NO: 2400075 - RNA, 19 nt, Artificial Sequence
  Description of Artificial Sequence: Synthetic oligonucleotide
ccucuagacgaaucuaagc

SEQ ID NO: 2400076 - RNA, 19 nt, Artificial Sequence
  Description of Artificial Sequence: Synthetic oligonucleotide
cuucucucagagucuuaug

SEQ ID NO: 2400077 - RNA, 19 nt, Artificial Sequence
  Description of Artificial Sequence: Synthetic oligonucleotide
cuugugauuguggauucca

SEQ ID NO: 2400078 - RNA, 19 nt, Artificial Sequence
  Description of Artificial Sequence: Synthetic oligonucleotide
gguugacaaacaugaucag

SEQ ID NO: 2400079 - RNA, 19 nt, Artificial Sequence
  Description of Artificial Sequence: Synthetic oligonucleotide
cauuuggggaggaaaauau

SEQ ID NO: 2400080 - RNA, 19 nt, Artificial Sequence
  Description of Artificial Sequence: Synthetic oligonucleotide
aguccaccuuuucuuaaau

SEQ ID NO: 2400081 - RNA, 19 nt, Artificial Sequence
  Description of Artificial Sequence: Synthetic oligonucleotide
ucuagguguuccucuucaa

SEQ ID NO: 2400082 - RNA, 19 nt, Artificial Sequence
  Description of Artificial Sequence: Synthetic oligonucleotide
aagaggaguaaagcacgau

SEQ ID NO: 2400083 - RNA, 19 nt, Artificial Sequence
  Description of Artificial Sequence: Synthetic oligonucleotide
  modified_base (12)..(12): a, c, u, g, unknown or other
aaacaucauucnccauguu

SEQ ID NO: 2400084 - RNA, 19 nt, Artificial Sequence
  Description of Artificial Sequence: Synthetic oligonucleotide
caugauggucaaaccaaaa

SEQ ID NO: 2400085 - RNA, 19 nt, Artificial Sequence
  Description of Artificial Sequence: Synthetic oligonucleotide
caaguuuaucuguaccucu

SEQ ID NO: 2400086 - RNA, 19 nt, Artificial Sequence
  Description of Artificial Sequence: Synthetic oligonucleotide
cuaagcucuucaaacucua

SEQ ID NO: 2400087 - RNA, 19 nt, Artificial Sequence
  Description of Artificial Sequence: Synthetic oligonucleotide
auuuagcacaaggaaccau

SEQ ID NO: 2400088 - RNA, 19 nt, Artificial Sequence
  Description of Artificial Sequence: Synthetic oligonucleotide
gaguccaccuuuucuuaaa

SEQ ID NO: 2400089 - RNA, 19 nt, Artificial Sequence
  Description of Artificial Sequence: Synthetic oligonucleotide
uagucucauugcugaagaa

SEQ ID NO: 2400090 - RNA, 19 nt, Artificial Sequence
  Description of Artificial Sequence: Synthetic oligonucleotide
acguauguuucuguuuuau

SEQ ID NO: 2400091 - RNA, 19 nt, Artificial Sequence
  Description of Artificial Sequence: Synthetic oligonucleotide
uccccaaaacaagaugaua

SEQ ID NO: 2400092 - RNA, 19 nt, Artificial Sequence
  Description of Artificial Sequence: Synthetic oligonucleotide
accaggguuuguaaauugu

SEQ ID NO: 2400093 - RNA, 19 nt, Artificial Sequence
  Description of Artificial Sequence: Synthetic oligonucleotide
  modified_base (9)..(9): a, c, u, g, unknown or other
accagccunuucaccaguc

SEQ ID NO: 2400094 - RNA, 19 nt, Artificial Sequence
  Description of Artificial Sequence: Synthetic oligonucleotide
caccauuauaccuauucau

SEQ ID NO: 2400095 - RNA, 19 nt, Artificial Sequence
  Description of Artificial Sequence: Synthetic oligonucleotide
gcaccauuauaccuauuca

SEQ ID NO: 2400096 - RNA, 19 nt, Artificial Sequence
  Description of Artificial Sequence: Synthetic oligonucleotide
auuagccacaggaguguug

SEQ ID NO: 2400097 - RNA, 19 nt, Artificial Sequence
  Description of Artificial Sequence: Synthetic oligonucleotide
auuguggauuccauaugaa

SEQ ID NO: 2400098 - RNA, 19 nt, Artificial Sequence
  Description of Artificial Sequence: Synthetic oligonucleotide
augcaccaggguuuguaaa

SEQ ID NO: 2400099 - RNA, 19 nt, Artificial Sequence
  Description of Artificial Sequence: Synthetic oligonucleotide
ggaaguuuccugccuuuca

SEQ ID NO: 2400100 - RNA, 19 nt, Artificial Sequence
  Description of Artificial Sequence: Synthetic oligonucleotide
uagacgaaucuaagcucuu

SEQ ID NO: 2400101 - RNA, 19 nt, Artificial Sequence
  Description of Artificial Sequence: Synthetic oligonucleotide
gcaucccacacauccauca

SEQ ID NO: 2400102 - RNA, 19 nt, Artificial Sequence
  Description of Artificial Sequence: Synthetic oligonucleotide
uucuuaaauucagcagcuu

SEQ ID NO: 2400103 - RNA, 19 nt, Artificial Sequence
  Description of Artificial Sequence: Synthetic oligonucleotide
gagucuuaugcaccagggu

SEQ ID NO: 2400104 - RNA, 19 nt, Artificial Sequence
  Description of Artificial Sequence: Synthetic oligonucleotide
auggucaaaccaaaacauu

SEQ ID NO: 2400105 - RNA, 19 nt, Artificial Sequence
  Description of Artificial Sequence: Synthetic oligonucleotide
cucaccauacauacacgua

SEQ ID NO: 2400106 - RNA, 19 nt, Artificial Sequence
  Description of Artificial Sequence: Synthetic oligonucleotide
agaauuuauuggggaaguu

SEQ ID NO: 2400107 - RNA, 19 nt, Artificial Sequence
  Description of Artificial Sequence: Synthetic oligonucleotide
ccaccuuuucuuaaauuca

SEQ ID NO: 2400108 - RNA, 19 nt, Artificial Sequence
  Description of Artificial Sequence: Synthetic oligonucleotide
cauacacguauguuucugu

SEQ ID NO: 2400109 - RNA, 19 nt, Artificial Sequence
  Description of Artificial Sequence: Synthetic oligonucleotide
ucuguaccucuagacgaau

SEQ ID NO: 2400110 - RNA, 19 nt, Artificial Sequence
  Description of Artificial Sequence: Synthetic oligonucleotide
cauaagcaauucuugugau

SEQ ID NO: 2400111 - RNA, 19 nt, Artificial Sequence
  Description of Artificial Sequence: Synthetic oligonucleotide
  modified_base (2)..(2): a, c, u, g, unknown or other
cnccauguugugaagcagu

SEQ ID NO: 2400112 - RNA, 19 nt, Artificial Sequence
  Description of Artificial Sequence: Synthetic oligonucleotide
auuuggggaggaaaauauu

SEQ ID NO: 2400113 - RNA, 19 nt, Artificial Sequence
  Description of Artificial Sequence: Synthetic oligonucleotide
uaaaccuguaugggaugua

SEQ ID NO: 2400114 - RNA, 19 nt, Artificial Sequence
  Description of Artificial Sequence: Synthetic oligonucleotide
ccuuagugauuaacucacc

SEQ ID NO: 2400115 - RNA, 19 nt, Artificial Sequence
  Description of Artificial Sequence: Synthetic oligonucleotide
aaccuguaugggauguauu

SEQ ID NO: 2400116 - RNA, 19 nt, Artificial Sequence
  Description of Artificial Sequence: Synthetic oligonucleotide
  modified_base (6)..(6): a, c, u, g, unknown or other
agccunuucaccaguccaa

SEQ ID NO: 2400117 - RNA, 19 nt, Artificial Sequence
  Description of Artificial Sequence: Synthetic oligonucleotide
aagaaggcacugacagaau

SEQ ID NO: 2400118 - RNA, 19 nt, Artificial Sequence
  Description of Artificial Sequence: Synthetic oligonucleotide
aaccauccuuagugauuaa

SEQ ID NO: 2400119 - RNA, 19 nt, Artificial Sequence
  Description of Artificial Sequence: Synthetic oligonucleotide
ucuuccauuuggggaggaa

SEQ ID NO: 2400120 - RNA, 19 nt, Artificial Sequence
  Description of Artificial Sequence: Synthetic oligonucleotide
cacaggaguguugccauga

SEQ ID NO: 2400121 - RNA, 19 nt, Artificial Sequence
  Description of Artificial Sequence: Synthetic oligonucleotide
  modified_base (16)..(16): a, c, u, g, unknown or other
cugcaucaccagccunuuc

SEQ ID NO: 2400122 - RNA, 19 nt, Artificial Sequence
  Description of Artificial Sequence: Synthetic oligonucleotide
  modified_base (8)..(8): a, c, u, g, unknown or other
ccagccunuucaccagucc

SEQ ID NO: 2400123 - RNA, 19 nt, Artificial Sequence
  Description of Artificial Sequence: Synthetic oligonucleotide
caggguuuguaaauuguuu

SEQ ID NO: 2400124 - RNA, 19 nt, Artificial Sequence
  Description of Artificial Sequence: Synthetic oligonucleotide
ccuguauauuagccacagg

SEQ ID NO: 2400125 - RNA, 19 nt, Artificial Sequence
  Description of Artificial Sequence: Synthetic oligonucleotide
gugaagcaguaaugacuuc

SEQ ID NO: 2400126 - RNA, 19 nt, Artificial Sequence
  Description of Artificial Sequence: Synthetic oligonucleotide
ggauguauuuaaaaucaau

SEQ ID NO: 2400127 - RNA, 19 nt, Artificial Sequence
  Description of Artificial Sequence: Synthetic oligonucleotide
uucuuccauuuggggagga

SEQ ID NO: 2400128 - RNA, 19 nt, Artificial Sequence
  Description of Artificial Sequence: Synthetic oligonucleotide
gcagaguuugagaauuuaa

SEQ ID NO: 2400129 - RNA, 19 nt, Artificial Sequence
  Description of Artificial Sequence: Synthetic oligonucleotide
agugugcaucccacacauc

SEQ ID NO: 2400130 - RNA, 19 nt, Artificial Sequence
  Description of Artificial Sequence: Synthetic oligonucleotide
accuauucauaaaccugua

SEQ ID NO: 2400131 - RNA, 19 nt, Artificial Sequence
  Description of Artificial Sequence: Synthetic oligonucleotide
aaagcacgauagacacuuu

SEQ ID NO: 2400132 - RNA, 19 nt, Artificial Sequence
  Description of Artificial Sequence: Synthetic oligonucleotide
ccauaugaaauguaacauu

SEQ ID NO: 2400133 - RNA, 19 nt, Artificial Sequence
  Description of Artificial Sequence: Synthetic oligonucleotide
auccaucauggcaccauua

SEQ ID NO: 2400134 - RNA, 19 nt, Artificial Sequence
  Description of Artificial Sequence: Synthetic oligonucleotide
gcacaaggaaccauccuua

SEQ ID NO: 2400135 - RNA, 19 nt, Artificial Sequence
  Description of Artificial Sequence: Synthetic oligonucleotide
guaaagcacgauagacacu

SEQ ID NO: 2400136 - RNA, 19 nt, Artificial Sequence
  Description of Artificial Sequence: Synthetic oligonucleotide
caugguugacaaacaugau

SEQ ID NO: 2400137 - RNA, 19 nt, Artificial Sequence
  Description of Artificial Sequence: Synthetic oligonucleotide
ccaugauggucaaaccaaa

SEQ ID NO: 2400138 - RNA, 19 nt, Artificial Sequence
  Description of Artificial Sequence: Synthetic oligonucleotide
aggcacugacagaauuuau

SEQ ID NO: 2400139 - RNA, 19 nt, Artificial Sequence
  Description of Artificial Sequence: Synthetic oligonucleotide
guucaaagucccacauggu

SEQ ID NO: 2400140 - RNA, 19 nt, Artificial Sequence
  Description of Artificial Sequence: Synthetic oligonucleotide
cacguauguuucuguuuua

SEQ ID NO: 2400141 - RNA, 19 nt, Artificial Sequence
  Description of Artificial Sequence: Synthetic oligonucleotide
  modified_base (4)..(4): a, c, u, g, unknown or other
ccunuucaccaguccaaaa

SEQ ID NO: 2400142 - RNA, 19 nt, Artificial Sequence
  Description of Artificial Sequence: Synthetic oligonucleotide
guccaccuuuucuuaaauu

SEQ ID NO: 2400143 - RNA, 19 nt, Artificial Sequence
  Description of Artificial Sequence: Synthetic oligonucleotide
ggcacugacagaauuuauu

SEQ ID NO: 2400144 - RNA, 19 nt, Artificial Sequence
  Description of Artificial Sequence: Synthetic oligonucleotide
ggauuccauaugaaaugua

SEQ ID NO: 2400145 - RNA, 19 nt, Artificial Sequence
  Description of Artificial Sequence: Synthetic oligonucleotide
  modified_base (5)..(5): a, c, u, g, unknown or other
gccunuucaccaguccaaa

SEQ ID NO: 2400146 - RNA, 19 nt, Artificial Sequence
  Description of Artificial Sequence: Synthetic oligonucleotide
ccauuuggggaggaaaaua

SEQ ID NO: 2400147 - RNA, 19 nt, Artificial Sequence
  Description of Artificial Sequence: Synthetic oligonucleotide
ccaucauggcaccauuaua

SEQ ID NO: 2400148 - RNA, 19 nt, Artificial Sequence
  Description of Artificial Sequence: Synthetic oligonucleotide
ggaaccauccuuagugauu

SEQ ID NO: 2400149 - RNA, 19 nt, Artificial Sequence
  Description of Artificial Sequence: Synthetic oligonucleotide
ccuguaugggauguauuua

SEQ ID NO: 2400150 - RNA, 19 nt, Artificial Sequence
  Description of Artificial Sequence: Synthetic oligonucleotide
  modified_base (15)..(15): a, c, u, g, unknown or other
cacaaacaucauucnccau

SEQ ID NO: 2400151 - RNA, 19 nt, Artificial Sequence
  Description of Artificial Sequence: Synthetic oligonucleotide
ccuauucauaaaccuguau

SEQ ID NO: 2400152 - RNA, 19 nt, Artificial Sequence
  Description of Artificial Sequence: Synthetic oligonucleotide
cagacacugcuuccccacu

SEQ ID NO: 2400153 - RNA, 19 nt, Artificial Sequence
  Description of Artificial Sequence: Synthetic oligonucleotide
ccaggguuuguaaauuguu

SEQ ID NO: 2400154 - RNA, 19 nt, Artificial Sequence
  Description of Artificial Sequence: Synthetic oligonucleotide
ccauguugugaagcaguaa

SEQ ID NO: 2400155 - RNA, 19 nt, Artificial Sequence
  Description of Artificial Sequence: Synthetic oligonucleotide
gccuuucaauauggucaac

SEQ ID NO: 2400156 - RNA, 19 nt, Artificial Sequence
  Description of Artificial Sequence: Synthetic oligonucleotide
cuuaugcaccaggguuugu

SEQ ID NO: 2400157 - RNA, 19 nt, Artificial Sequence
  Description of Artificial Sequence: Synthetic oligonucleotide
ggucaacaacaagcagagu

SEQ ID NO: 2400158 - RNA, 19 nt, Artificial Sequence
  Description of Artificial Sequence: Synthetic oligonucleotide
  modified_base (17)..(17): a, c, u, g, unknown or other
gcugcaucaccagccunuu

SEQ ID NO: 2400159 - RNA, 19 nt, Artificial Sequence
  Description of Artificial Sequence: Synthetic oligonucleotide
  modified_base (1)..(1): a, c, u, g, unknown or other
nccauguugugaagcagua

SEQ ID NO: 2400160 - RNA, 19 nt, Artificial Sequence
  Description of Artificial Sequence: Synthetic oligonucleotide
uuuaauuuauuuauaagug

SEQ ID NO: 2400161 - RNA, 19 nt, Artificial Sequence
  Description of Artificial Sequence: Synthetic oligonucleotide
aagugguaaauucacaagc

SEQ ID NO: 2400162 - RNA, 19 nt, Artificial Sequence
  Description of Artificial Sequence: Synthetic oligonucleotide
uugauuuauaagcugaccg

SEQ ID NO: 2400163 - RNA, 19 nt, Artificial Sequence
  Description of Artificial Sequence: Synthetic oligonucleotide
aauucacaagcuccgaucc

SEQ ID NO: 2400164 - RNA, 19 nt, Artificial Sequence
  Description of Artificial Sequence: Synthetic oligonucleotide
aaagauuucauguaagccu

SEQ ID NO: 2400165 - RNA, 19 nt, Artificial Sequence
  Description of Artificial Sequence: Synthetic oligonucleotide
aaaagaguugccauggucc

SEQ ID NO: 2400166 - RNA, 19 nt, Artificial Sequence
  Description of Artificial Sequence: Synthetic oligonucleotide
aaagcuuaaaaucugcgcu

SEQ ID NO: 2400167 - RNA, 19 nt, Artificial Sequence
  Description of Artificial Sequence: Synthetic oligonucleotide
cagacauugauuuauaagc

SEQ ID NO: 2400168 - RNA, 19 nt, Artificial Sequence
  Description of Artificial Sequence: Synthetic oligonucleotide
aaguauuucaauuuccugu

SEQ ID NO: 2400169 - RNA, 19 nt, Artificial Sequence
  Description of Artificial Sequence: Synthetic oligonucleotide
aaauaugucgacuuuauua

SEQ ID NO: 2400170 - RNA, 19 nt, Artificial Sequence
  Description of Artificial Sequence: Synthetic oligonucleotide
ugcucaacaaucaugcugg

SEQ ID NO: 2400171 - RNA, 19 nt, Artificial Sequence
  Description of Artificial Sequence: Synthetic oligonucleotide
uaagugaaaacauaucugc

SEQ ID NO: 2400172 - RNA, 19 nt, Artificial Sequence
  Description of Artificial Sequence: Synthetic oligonucleotide
uuuauaagugaaaacauau

SEQ ID NO: 2400173 - RNA, 19 nt, Artificial Sequence
  Description of Artificial Sequence: Synthetic oligonucleotide
ugagaaaaguccuuguagg

SEQ ID NO: 2400174 - RNA, 19 nt, Artificial Sequence
  Description of Artificial Sequence: Synthetic oligonucleotide
uuaaaaucugcgcugacug

SEQ ID NO: 2400175 - RNA, 19 nt, Artificial Sequence
  Description of Artificial Sequence: Synthetic oligonucleotide
aauaugucgacuuuauuau

SEQ ID NO: 2400176 - RNA, 19 nt, Artificial Sequence
  Description of Artificial Sequence: Synthetic oligonucleotide
uuagcuuucucuuaaauau

SEQ ID NO: 2400177 - RNA, 19 nt, Artificial Sequence
  Description of Artificial Sequence: Synthetic oligonucleotide
aaagaguugccaugguccc

SEQ ID NO: 2400178 - RNA, 19 nt, Artificial Sequence
  Description of Artificial Sequence: Synthetic oligonucleotide
aaucuuguuaagauucucc

SEQ ID NO: 2400179 - RNA, 19 nt, Artificial Sequence
  Description of Artificial Sequence: Synthetic oligonucleotide
aucuuguuaagauucuccc

SEQ ID NO: 2400180 - RNA, 19 nt, Artificial Sequence
  Description of Artificial Sequence: Synthetic oligonucleotide
aguauuucaauuuccuguc

SEQ ID NO: 2400181 - RNA, 19 nt, Artificial Sequence
  Description of Artificial Sequence: Synthetic oligonucleotide
aggaccaaaacccagcagg

SEQ ID NO: 2400182 - RNA, 19 nt, Artificial Sequence
  Description of Artificial Sequence: Synthetic oligonucleotide
uaaaaguauuucaauuucc

SEQ ID NO: 2400183 - RNA, 19 nt, Artificial Sequence
  Description of Artificial Sequence: Synthetic oligonucleotide
ugguaaauucacaagcucc

SEQ ID NO: 2400184 - RNA, 19 nt, Artificial Sequence
  Description of Artificial Sequence: Synthetic oligonucleotide
gaaaaguccuuguaggugc

SEQ ID NO: 2400185 - RNA, 19 nt, Artificial Sequence
  Description of Artificial Sequence: Synthetic oligonucleotide
ucacacaaacagaaggugg

SEQ ID NO: 2400186 - RNA, 19 nt, Artificial Sequence
  Description of Artificial Sequence: Synthetic oligonucleotide
aagguggcaucacacaaac

SEQ ID NO: 2400187 - RNA, 19 nt, Artificial Sequence
  Description of Artificial Sequence: Synthetic oligonucleotide
aaacagaagguggaaaagg

SEQ ID NO: 2400188 - RNA, 19 nt, Artificial Sequence
  Description of Artificial Sequence: Synthetic oligonucleotide
agauucucccucuagacag

SEQ ID NO: 2400189 - RNA, 19 nt, Artificial Sequence
  Description of Artificial Sequence: Synthetic oligonucleotide
aaaguauuucaauuuccug

SEQ ID NO: 2400190 - RNA, 19 nt, Artificial Sequence
  Description of Artificial Sequence: Synthetic oligonucleotide
aacauaucugcuaaauagg

SEQ ID NO: 2400191 - RNA, 19 nt, Artificial Sequence
  Description of Artificial Sequence: Synthetic oligonucleotide
aacugaguuacagacauug

SEQ ID NO: 2400192 - RNA, 19 nt, Artificial Sequence
  Description of Artificial Sequence: Synthetic oligonucleotide
aauugaaaagaguugccau

SEQ ID NO: 2400193 - RNA, 19 nt, Artificial Sequence
  Description of Artificial Sequence: Synthetic oligonucleotide
cucaguucaaauaaucuug

SEQ ID NO: 2400194 - RNA, 19 nt, Artificial Sequence
  Description of Artificial Sequence: Synthetic oligonucleotide
uaugucgacuuuauuauac

SEQ ID NO: 2400195 - RNA, 19 nt, Artificial Sequence
  Description of Artificial Sequence: Synthetic oligonucleotide
uucagagucagugagguug

SEQ ID NO: 2400196 - RNA, 19 nt, Artificial Sequence
  Description of Artificial Sequence: Synthetic oligonucleotide
uuugcccuuacccaaaacu

SEQ ID NO: 2400197 - RNA, 19 nt, Artificial Sequence
  Description of Artificial Sequence: Synthetic oligonucleotide
uuaagauucucccucuaga

SEQ ID NO: 2400198 - RNA, 19 nt, Artificial Sequence
  Description of Artificial Sequence: Synthetic oligonucleotide
ucaaauaaucuuguuaaga

SEQ ID NO: 2400199 - RNA, 19 nt, Artificial Sequence
  Description of Artificial Sequence: Synthetic oligonucleotide
uguuauucuggugacuugg

SEQ ID NO: 2400200 - RNA, 19 nt, Artificial Sequence
  Description of Artificial Sequence: Synthetic oligonucleotide
gguggcaucacacaaacag

SEQ ID NO: 2400201 - RNA, 19 nt, Artificial Sequence
  Description of Artificial Sequence: Synthetic oligonucleotide
aacgcaaguccucuucugg

SEQ ID NO: 2400202 - RNA, 19 nt, Artificial Sequence
  Description of Artificial Sequence: Synthetic oligonucleotide
uucgaugcggucaaggcug

SEQ ID NO: 2400203 - RNA, 19 nt, Artificial Sequence
  Description of Artificial Sequence: Synthetic oligonucleotide
aacagaagguggaaaaggg

SEQ ID NO: 2400204 - RNA, 19 nt, Artificial Sequence
  Description of Artificial Sequence: Synthetic oligonucleotide
uaagugguaaauucacaag

SEQ ID NO: 2400205 - RNA, 19 nt, Artificial Sequence
  Description of Artificial Sequence: Synthetic oligonucleotide
aaaaguauuucaauuuccu

SEQ ID NO: 2400206 - RNA, 19 nt, Artificial Sequence
  Description of Artificial Sequence: Synthetic oligonucleotide
ucgacuuuauuauacaaau

SEQ ID NO: 2400207 - RNA, 19 nt, Artificial Sequence
  Description of Artificial Sequence: Synthetic oligonucleotide
acauaucugcuaaauaggc

SEQ ID NO: 2400208 - RNA, 19 nt, Artificial Sequence
  Description of Artificial Sequence: Synthetic oligonucleotide
aacccauuccuugucaugg

SEQ ID NO: 2400209 - RNA, 19 nt, Artificial Sequence
  Description of Artificial Sequence: Synthetic oligonucleotide
aaauaaucuuguuaagauu

SEQ ID NO: 2400210 - RNA, 19 nt, Artificial Sequence
  Description of Artificial Sequence: Synthetic oligonucleotide
uuacccaaaacugaguuac

SEQ ID NO: 2400211 - RNA, 19 nt, Artificial Sequence
  Description of Artificial Sequence: Synthetic oligonucleotide
uacaaagcuuaaaaucugc

SEQ ID NO: 2400212 - RNA, 19 nt, Artificial Sequence
  Description of Artificial Sequence: Synthetic oligonucleotide
ugcaaagauuucauguaag

SEQ ID NO: 2400213 - RNA, 19 nt, Artificial Sequence
  Description of Artificial Sequence: Synthetic oligonucleotide
aaaagguggcaucacacaa

SEQ ID NO: 2400214 - RNA, 19 nt, Artificial Sequence
  Description of Artificial Sequence: Synthetic oligonucleotide
uuauaagugaaaacauauc

SEQ ID NO: 2400215 - RNA, 19 nt, Artificial Sequence
  Description of Artificial Sequence: Synthetic oligonucleotide
cuuguuaagauucucccuc

SEQ ID NO: 2400216 - RNA, 19 nt, Artificial Sequence
  Description of Artificial Sequence: Synthetic oligonucleotide
ugcuaaauaggcuagcuuu

SEQ ID NO: 2400217 - RNA, 19 nt, Artificial Sequence
  Description of Artificial Sequence: Synthetic oligonucleotide
uuaaauaugucgacuuuau

SEQ ID NO: 2400218 - RNA, 19 nt, Artificial Sequence
  Description of Artificial Sequence: Synthetic oligonucleotide
uuguauccgaagauaacgc

SEQ ID NO: 2400219 - RNA, 19 nt, Artificial Sequence
  Description of Artificial Sequence: Synthetic oligonucleotide
aaauaggcuagcuuugcaa

SEQ ID NO: 2400220 - RNA, 19 nt, Artificial Sequence
  Description of Artificial Sequence: Synthetic oligonucleotide
auagucauucucuugcgug

SEQ ID NO: 2400221 - RNA, 19 nt, Artificial Sequence
  Description of Artificial Sequence: Synthetic oligonucleotide
uggaaaagggcaguaagag

SEQ ID NO: 2400222 - RNA, 19 nt, Artificial Sequence
  Description of Artificial Sequence: Synthetic oligonucleotide
uuauaagcugaccgaaggc

SEQ ID NO: 2400223 - RNA, 19 nt, Artificial Sequence
  Description of Artificial Sequence: Synthetic oligonucleotide
gagguuguuauucugguga

SEQ ID NO: 2400224 - RNA, 19 nt, Artificial Sequence
  Description of Artificial Sequence: Synthetic oligonucleotide
aggugcucaacaaucaugc

SEQ ID NO: 2400225 - RNA, 19 nt, Artificial Sequence
  Description of Artificial Sequence: Synthetic oligonucleotide
aguucaaauaaucuuguua

SEQ ID NO: 2400226 - RNA, 19 nt, Artificial Sequence
  Description of Artificial Sequence: Synthetic oligonucleotide
aaucagaaugcuuuugauu

SEQ ID NO: 2400227 - RNA, 19 nt, Artificial Sequence
  Description of Artificial Sequence: Synthetic oligonucleotide
uggaaaaucugagaaaagu

SEQ ID NO: 2400228 - RNA, 19 nt, Artificial Sequence
  Description of Artificial Sequence: Synthetic oligonucleotide
aaaacauaucugcuaaaua

SEQ ID NO: 2400229 - RNA, 19 nt, Artificial Sequence
  Description of Artificial Sequence: Synthetic oligonucleotide
ugguggguaacagucaugg

SEQ ID NO: 2400230 - RNA, 19 nt, Artificial Sequence
  Description of Artificial Sequence: Synthetic oligonucleotide
ucauggaaauaccuggcca

SEQ ID NO: 2400231 - RNA, 19 nt, Artificial Sequence
  Description of Artificial Sequence: Synthetic oligonucleotide
cugagaaaaguccuuguag

SEQ ID NO: 2400232 - RNA, 19 nt, Artificial Sequence
  Description of Artificial Sequence: Synthetic oligonucleotide
uuuagcuuucucuuaaaua

SEQ ID NO: 2400233 - RNA, 19 nt, Artificial Sequence
  Description of Artificial Sequence: Synthetic oligonucleotide
uucaaauaaucuuguuaag

SEQ ID NO: 2400234 - RNA, 19 nt, Artificial Sequence
  Description of Artificial Sequence: Synthetic oligonucleotide
uuagggcaggaccaaaacc

SEQ ID NO: 2400235 - RNA, 19 nt, Artificial Sequence
  Description of Artificial Sequence: Synthetic oligonucleotide
caaagauuucauguaagcc

SEQ ID NO: 2400236 - RNA, 19 nt, Artificial Sequence
  Description of Artificial Sequence: Synthetic oligonucleotide
ucaguucaaauaaucuugu

SEQ ID NO: 2400237 - RNA, 19 nt, Artificial Sequence
  Description of Artificial Sequence: Synthetic oligonucleotide
uaacagucauggaaaaucu

SEQ ID NO: 2400238 - RNA, 19 nt, Artificial Sequence
  Description of Artificial Sequence: Synthetic oligonucleotide
ugaccgaaggcuuguaucc

SEQ ID NO: 2400239 - RNA, 19 nt, Artificial Sequence
  Description of Artificial Sequence: Synthetic oligonucleotide
gaaauaccuggccaaauca

SEQ ID NO: 2400240 - RNA, 19 nt, Artificial Sequence
  Description of Artificial Sequence: Synthetic oligonucleotide
uaagauucucccucuagac

SEQ ID NO: 2400241 - RNA, 19 nt, Artificial Sequence
  Description of Artificial Sequence: Synthetic oligonucleotide
aagauucucccucuagaca

SEQ ID NO: 2400242 - RNA, 19 nt, Artificial Sequence
  Description of Artificial Sequence: Synthetic oligonucleotide
aaucugagaaaaguccuug

SEQ ID NO: 2400243 - RNA, 19 nt, Artificial Sequence
  Description of Artificial Sequence: Synthetic oligonucleotide
uugcccuuacccaaaacug

SEQ ID NO: 2400244 - RNA, 19 nt, Artificial Sequence
  Description of Artificial Sequence: Synthetic oligonucleotide
aaaucagaaugcuuuugau

SEQ ID NO: 2400245 - RNA, 19 nt, Artificial Sequence
  Description of Artificial Sequence: Synthetic oligonucleotide
uggguaacagucauggaaa

SEQ ID NO: 2400246 - RNA, 19 nt, Artificial Sequence
  Description of Artificial Sequence: Synthetic oligonucleotide
ucuugcgugcgcuucaacc

SEQ ID NO: 2400247 - RNA, 19 nt, Artificial Sequence
  Description of Artificial Sequence: Synthetic oligonucleotide
uauuucaauuuccugucuc

SEQ ID NO: 2400248 - RNA, 19 nt, Artificial Sequence
  Description of Artificial Sequence: Synthetic oligonucleotide
aaaaucugcgcugacugca

SEQ ID NO: 2400249 - RNA, 19 nt, Artificial Sequence
  Description of Artificial Sequence: Synthetic oligonucleotide
uauaagcugaccgaaggcu

SEQ ID NO: 2400250 - RNA, 19 nt, Artificial Sequence
  Description of Artificial Sequence: Synthetic oligonucleotide
guaacagucauggaaaauc

SEQ ID NO: 2400251 - RNA, 19 nt, Artificial Sequence
  Description of Artificial Sequence: Synthetic oligonucleotide
aaauaccuggccaaaucag

SEQ ID NO: 2400252 - RNA, 19 nt, Artificial Sequence
  Description of Artificial Sequence: Synthetic oligonucleotide
ucucaguucaaauaaucuu

SEQ ID NO: 2400253 - RNA, 19 nt, Artificial Sequence
  Description of Artificial Sequence: Synthetic oligonucleotide
ugucucaguucaaauaauc

SEQ ID NO: 2400254 - RNA, 19 nt, Artificial Sequence
  Description of Artificial Sequence: Synthetic oligonucleotide
uuucgaugcggucaaggcu

SEQ ID NO: 2400255 - RNA, 19 nt, Artificial Sequence
  Description of Artificial Sequence: Synthetic oligonucleotide
aacccagcagguuucuuug

SEQ ID NO: 2400256 - RNA, 19 nt, Artificial Sequence
  Description of Artificial Sequence: Synthetic oligonucleotide
agcuuugcaacccauuccu

SEQ ID NO: 2400257 - RNA, 19 nt, Artificial Sequence
  Description of Artificial Sequence: Synthetic oligonucleotide
uuugcaacccauuccuugu

SEQ ID NO: 2400258 - RNA, 19 nt, Artificial Sequence
  Description of Artificial Sequence: Synthetic oligonucleotide
uggcaucacacaaacagaa

SEQ ID NO: 2400259 - RNA, 19 nt, Artificial Sequence
  Description of Artificial Sequence: Synthetic oligonucleotide
gguaaauucacaagcuccg

SEQ ID NO: 2400260 - RNA, 19 nt, Artificial Sequence
  Description of Artificial Sequence: Synthetic oligonucleotide
caaugagccacagauuucc

SEQ ID NO: 2400261 - RNA, 19 nt, Artificial Sequence
  Description of Artificial Sequence: Synthetic oligonucleotide
gaaaagaguugccaugguc

SEQ ID NO: 2400262 - RNA, 19 nt, Artificial Sequence
  Description of Artificial Sequence: Synthetic oligonucleotide
uuuguuucgaugcggucaa

SEQ ID NO: 2400263 - RNA, 19 nt, Artificial Sequence
  Description of Artificial Sequence: Synthetic oligonucleotide
cacuaagugguaaauucac

SEQ ID NO: 2400264 - RNA, 19 nt, Artificial Sequence
  Description of Artificial Sequence: Synthetic oligonucleotide
uguauccgaagauaacgcu

SEQ ID NO: 2400265 - RNA, 19 nt, Artificial Sequence
  Description of Artificial Sequence: Synthetic oligonucleotide
ucuuguuaagauucucccu

SEQ ID NO: 2400266 - RNA, 19 nt, Artificial Sequence
  Description of Artificial Sequence: Synthetic oligonucleotide
agugagguuguuauucugg

SEQ ID NO: 2400267 - RNA, 19 nt, Artificial Sequence
  Description of Artificial Sequence: Synthetic oligonucleotide
cuaagugguaaauucacaa

SEQ ID NO: 2400268 - RNA, 19 nt, Artificial Sequence
  Description of Artificial Sequence: Synthetic oligonucleotide
uaaauucacaagcuccgau

SEQ ID NO: 2400269 - RNA, 19 nt, Artificial Sequence
  Description of Artificial Sequence: Synthetic oligonucleotide
cuuugcaacccauuccuug

SEQ ID NO: 2400270 - RNA, 19 nt, Artificial Sequence
  Description of Artificial Sequence: Synthetic oligonucleotide
acaaagcuuaaaaucugcg

SEQ ID NO: 2400271 - RNA, 19 nt, Artificial Sequence
  Description of Artificial Sequence: Synthetic oligonucleotide
aagauaacgcugcuaguuu

SEQ ID NO: 2400272 - RNA, 19 nt, Artificial Sequence
  Description of Artificial Sequence: Synthetic oligonucleotide
ucccuugaagaccagaguu

SEQ ID NO: 2400273 - RNA, 19 nt, Artificial Sequence
  Description of Artificial Sequence: Synthetic oligonucleotide
gugcucaacaaucaugcug

SEQ ID NO: 2400274 - RNA, 19 nt, Artificial Sequence
  Description of Artificial Sequence: Synthetic oligonucleotide
aaggcuuguauccgaagau

SEQ ID NO: 2400275 - RNA, 19 nt, Artificial Sequence
  Description of Artificial Sequence: Synthetic oligonucleotide
ucugagaaaaguccuugua

SEQ ID NO: 2400276 - RNA, 19 nt, Artificial Sequence
  Description of Artificial Sequence: Synthetic oligonucleotide
cuaagaacucagagaacag

SEQ ID NO: 2400277 - RNA, 19 nt, Artificial Sequence
  Description of Artificial Sequence: Synthetic oligonucleotide
ucucccucuagacagccac

SEQ ID NO: 2400278 - RNA, 19 nt, Artificial Sequence
  Description of Artificial Sequence: Synthetic oligonucleotide
gaaggcuuguauccgaaga

SEQ ID NO: 2400279 - RNA, 19 nt, Artificial Sequence
  Description of Artificial Sequence: Synthetic oligonucleotide
uccuuguaggugcucaaca

SEQ ID NO: 2400280 - RNA, 19 nt, Artificial Sequence
  Description of Artificial Sequence: Synthetic oligonucleotide
agguuguuauucuggugac

SEQ ID NO: 2400281 - RNA, 19 nt, Artificial Sequence
  Description of Artificial Sequence: Synthetic oligonucleotide
gacugcaaagauuucaugu

SEQ ID NO: 2400282 - RNA, 19 nt, Artificial Sequence
  Description of Artificial Sequence: Synthetic oligonucleotide
gaaaagguggcaucacaca

SEQ ID NO: 2400283 - RNA, 19 nt, Artificial Sequence
  Description of Artificial Sequence: Synthetic oligonucleotide
uguucuuuacaaagcuuaa

SEQ ID NO: 2400284 - RNA, 19 nt, Artificial Sequence
  Description of Artificial Sequence: Synthetic oligonucleotide
aaacgcaaguccucuucug

SEQ ID NO: 2400285 - RNA, 19 nt, Artificial Sequence
  Description of Artificial Sequence: Synthetic oligonucleotide
cuagcuuugcaacccauuc

SEQ ID NO: 2400286 - RNA, 19 nt, Artificial Sequence
  Description of Artificial Sequence: Synthetic oligonucleotide
aauaccuggccaaaucaga

SEQ ID NO: 2400287 - RNA, 19 nt, Artificial Sequence
  Description of Artificial Sequence: Synthetic oligonucleotide
guuucgaugcggucaaggc

SEQ ID NO: 2400288 - RNA, 19 nt, Artificial Sequence
  Description of Artificial Sequence: Synthetic oligonucleotide
acugcaaagauuucaugua

SEQ ID NO: 2400289 - RNA, 19 nt, Artificial Sequence
  Description of Artificial Sequence: Synthetic oligonucleotide
agucauggaaaaucugaga

SEQ ID NO: 2400290 - RNA, 19 nt, Artificial Sequence
  Description of Artificial Sequence: Synthetic oligonucleotide
ugcccuuacccaaaacuga

SEQ ID NO: 2400291 - RNA, 19 nt, Artificial Sequence
  Description of Artificial Sequence: Synthetic oligonucleotide
aguuucacugccuuuucau

SEQ ID NO: 2400292 - RNA, 19 nt, Artificial Sequence
  Description of Artificial Sequence: Synthetic oligonucleotide
ugagucugaagcacuguuc

SEQ ID NO: 2400293 - RNA, 19 nt, Artificial Sequence
  Description of Artificial Sequence: Synthetic oligonucleotide
ugucgacuuuauuauacaa

SEQ ID NO: 2400294 - RNA, 19 nt, Artificial Sequence
  Description of Artificial Sequence: Synthetic oligonucleotide
caguaagaguuucacugcc

SEQ ID NO: 2400295 - RNA, 19 nt, Artificial Sequence
  Description of Artificial Sequence: Synthetic oligonucleotide
agauuucccaaacgcaagu

SEQ ID NO: 2400296 - RNA, 19 nt, Artificial Sequence
  Description of Artificial Sequence: Synthetic oligonucleotide
gcaaagauuucauguaagc

SEQ ID NO: 2400297 - RNA, 19 nt, Artificial Sequence
  Description of Artificial Sequence: Synthetic oligonucleotide
uucacaagcuccgauccca

SEQ ID NO: 2400298 - RNA, 19 nt, Artificial Sequence
  Description of Artificial Sequence: Synthetic oligonucleotide
cuaaauaggcuagcuuugc

SEQ ID NO: 2400299 - RNA, 19 nt, Artificial Sequence
  Description of Artificial Sequence: Synthetic oligonucleotide
cagauuucccaaacgcaag

SEQ ID NO: 2400300 - RNA, 19 nt, Artificial Sequence
  Description of Artificial Sequence: Synthetic oligonucleotide
caaauaaucuuguuaagau

SEQ ID NO: 2400301 - RNA, 19 nt, Artificial Sequence
  Description of Artificial Sequence: Synthetic oligonucleotide
gacgagucuaagaacucag

SEQ ID NO: 2400302 - RNA, 19 nt, Artificial Sequence
  Description of Artificial Sequence: Synthetic oligonucleotide
gucauggaaauaccuggcc

SEQ ID NO: 2400303 - RNA, 19 nt, Artificial Sequence
  Description of Artificial Sequence: Synthetic oligonucleotide
ugucuuugcccuuacccaa

SEQ ID NO: 2400304 - RNA, 19 nt, Artificial Sequence
  Description of Artificial Sequence: Synthetic oligonucleotide
ucuuagggcaggaccaaaa

SEQ ID NO: 2400305 - RNA, 19 nt, Artificial Sequence
  Description of Artificial Sequence: Synthetic oligonucleotide
aucacacaaacagaaggug

SEQ ID NO: 2400306 - RNA, 19 nt, Artificial Sequence
  Description of Artificial Sequence: Synthetic oligonucleotide
uuguuaagauucucccucu

SEQ ID NO: 2400307 - RNA, 19 nt, Artificial Sequence
  Description of Artificial Sequence: Synthetic oligonucleotide
auuuauaagcugaccgaag

SEQ ID NO: 2400308 - RNA, 19 nt, Artificial Sequence
  Description of Artificial Sequence: Synthetic oligonucleotide
ucugguggguaacagucau

SEQ ID NO: 2400309 - RNA, 19 nt, Artificial Sequence
  Description of Artificial Sequence: Synthetic oligonucleotide
agaacucagagaacagagg

SEQ ID NO: 2400310 - RNA, 19 nt, Artificial Sequence
  Description of Artificial Sequence: Synthetic oligonucleotide
ucugcuaaauaggcuagcu

SEQ ID NO: 2400311 - RNA, 19 nt, Artificial Sequence
  Description of Artificial Sequence: Synthetic oligonucleotide
uacagacauugauuuauaa

SEQ ID NO: 2400312 - RNA, 19 nt, Artificial Sequence
  Description of Artificial Sequence: Synthetic oligonucleotide
uugaagaccagaguuuaau

SEQ ID NO: 2400313 - RNA, 19 nt, Artificial Sequence
  Description of Artificial Sequence: Synthetic oligonucleotide
guauccgaagauaacgcug

SEQ ID NO: 2400314 - RNA, 19 nt, Artificial Sequence
  Description of Artificial Sequence: Synthetic oligonucleotide
accggacgagucuaagaac

SEQ ID NO: 2400315 - RNA, 19 nt, Artificial Sequence
  Description of Artificial Sequence: Synthetic oligonucleotide
ucuggugacuuggcaaagg

SEQ ID NO: 2400316 - RNA, 19 nt, Artificial Sequence
  Description of Artificial Sequence: Synthetic oligonucleotide
cucuagacagccaccgcag

SEQ ID NO: 2400317 - RNA, 19 nt, Artificial Sequence
  Description of Artificial Sequence: Synthetic oligonucleotide
cacacaaacagaaggugga

SEQ ID NO: 2400318 - RNA, 19 nt, Artificial Sequence
  Description of Artificial Sequence: Synthetic oligonucleotide
ucccucuagacagccaccg

SEQ ID NO: 2400319 - RNA, 19 nt, Artificial Sequence
  Description of Artificial Sequence: Synthetic oligonucleotide
ucuucugguggguaacagu

SEQ ID NO: 2400320 - RNA, 19 nt, Artificial Sequence
  Description of Artificial Sequence: Synthetic oligonucleotide
ugaagaccagaguuuaauu

SEQ ID NO: 2400321 - RNA, 19 nt, Artificial Sequence
  Description of Artificial Sequence: Synthetic oligonucleotide
cuuagggcaggaccaaaac

SEQ ID NO: 2400322 - RNA, 19 nt, Artificial Sequence
  Description of Artificial Sequence: Synthetic oligonucleotide
ccgaagauaacgcugcuag

SEQ ID NO: 2400323 - RNA, 19 nt, Artificial Sequence
  Description of Artificial Sequence: Synthetic oligonucleotide
gaucccaucucuucacaca

SEQ ID NO: 2400324 - RNA, 19 nt, Artificial Sequence
  Description of Artificial Sequence: Synthetic oligonucleotide
uaggcuagcuuugcaaccc

SEQ ID NO: 2400325 - RNA, 19 nt, Artificial Sequence
  Description of Artificial Sequence: Synthetic oligonucleotide
uugcgugcgcuucaaccag

SEQ ID NO: 2400326 - RNA, 19 nt, Artificial Sequence
  Description of Artificial Sequence: Synthetic oligonucleotide
uugagucugaagcacuguu

SEQ ID NO: 2400327 - RNA, 19 nt, Artificial Sequence
  Description of Artificial Sequence: Synthetic oligonucleotide
gaguuacagacauugauuu

SEQ ID NO: 2400328 - RNA, 19 nt, Artificial Sequence
  Description of Artificial Sequence: Synthetic oligonucleotide
ugcaacccauuccuuguca

SEQ ID NO: 2400329 - RNA, 19 nt, Artificial Sequence
  Description of Artificial Sequence: Synthetic oligonucleotide
ggaaaaucugagaaaaguc

SEQ ID NO: 2400330 - RNA, 19 nt, Artificial Sequence
  Description of Artificial Sequence: Synthetic oligonucleotide
cugaccgaaggcuuguauc

SEQ ID NO: 2400331 - RNA, 19 nt, Artificial Sequence
  Description of Artificial Sequence: Synthetic oligonucleotide
acagauuucccaaacgcaa

SEQ ID NO: 2400332 - RNA, 19 nt, Artificial Sequence
  Description of Artificial Sequence: Synthetic oligonucleotide
uuacagacauugauuuaua

SEQ ID NO: 2400333 - RNA, 19 nt, Artificial Sequence
  Description of Artificial Sequence: Synthetic oligonucleotide
gcaguucagcacuaagugg

SEQ ID NO: 2400334 - RNA, 19 nt, Artificial Sequence
  Description of Artificial Sequence: Synthetic oligonucleotide
aucugcuaaauaggcuagc

SEQ ID NO: 2400335 - RNA, 19 nt, Artificial Sequence
  Description of Artificial Sequence: Synthetic oligonucleotide
uccugucucaguucaaaua

SEQ ID NO: 2400336 - RNA, 19 nt, Artificial Sequence
  Description of Artificial Sequence: Synthetic oligonucleotide
aaucaugcuggugaugcuu

SEQ ID NO: 2400337 - RNA, 19 nt, Artificial Sequence
  Description of Artificial Sequence: Synthetic oligonucleotide
caaaacugaguuacagaca

SEQ ID NO: 2400338 - RNA, 19 nt, Artificial Sequence
  Description of Artificial Sequence: Synthetic oligonucleotide
uucugguggguaacaguca

SEQ ID NO: 2400339 - RNA, 19 nt, Artificial Sequence
  Description of Artificial Sequence: Synthetic oligonucleotide
aaaggggaucaaugagcca

SEQ ID NO: 2400340 - RNA, 19 nt, Artificial Sequence
  Description of Artificial Sequence: Synthetic oligonucleotide
gagucugaagcacuguucu

SEQ ID NO: 2400341 - RNA, 19 nt, Artificial Sequence
  Description of Artificial Sequence: Synthetic oligonucleotide
acugccuuuucauggaguu

SEQ ID NO: 2400342 - RNA, 19 nt, Artificial Sequence
  Description of Artificial Sequence: Synthetic oligonucleotide
ugcggucaaggcugaaaag

SEQ ID NO: 2400343 - RNA, 19 nt, Artificial Sequence
  Description of Artificial Sequence: Synthetic oligonucleotide
ucugcgcugacugcaaaga

SEQ ID NO: 2400344 - RNA, 19 nt, Artificial Sequence
  Description of Artificial Sequence: Synthetic oligonucleotide
agucauucucuugcgugcg

SEQ ID NO: 2400345 - RNA, 19 nt, Artificial Sequence
  Description of Artificial Sequence: Synthetic oligonucleotide
agguuucuuuguuucgaug

SEQ ID NO: 2400346 - RNA, 19 nt, Artificial Sequence
  Description of Artificial Sequence: Synthetic oligonucleotide
cacagauuucccaaacgca

SEQ ID NO: 2400347 - RNA, 19 nt, Artificial Sequence
  Description of Artificial Sequence: Synthetic oligonucleotide
ccacagauuucccaaacgc

SEQ ID NO: 2400348 - RNA, 19 nt, Artificial Sequence
  Description of Artificial Sequence: Synthetic oligonucleotide
cuugcgugcgcuucaacca

SEQ ID NO: 2400349 - RNA, 19 nt, Artificial Sequence
  Description of Artificial Sequence: Synthetic oligonucleotide
agaacagagggaacauguc

SEQ ID NO: 2400350 - RNA, 19 nt, Artificial Sequence
  Description of Artificial Sequence: Synthetic oligonucleotide
cauggaaauaccuggccaa

SEQ ID NO: 2400351 - RNA, 19 nt, Artificial Sequence
  Description of Artificial Sequence: Synthetic oligonucleotide
aucugcgcugacugcaaag

SEQ ID NO: 2400352 - RNA, 19 nt, Artificial Sequence
  Description of Artificial Sequence: Synthetic oligonucleotide
aaaucugagaaaaguccuu

SEQ ID NO: 2400353 - RNA, 19 nt, Artificial Sequence
  Description of Artificial Sequence: Synthetic oligonucleotide
cauggucccuugaagacca

SEQ ID NO: 2400354 - RNA, 19 nt, Artificial Sequence
  Description of Artificial Sequence: Synthetic oligonucleotide
agauaacgcugcuaguuuu

SEQ ID NO: 2400355 - RNA, 19 nt, Artificial Sequence
  Description of Artificial Sequence: Synthetic oligonucleotide
ggugaugcuuuccacacuc

SEQ ID NO: 2400356 - RNA, 19 nt, Artificial Sequence
  Description of Artificial Sequence: Synthetic oligonucleotide
gcggucaaggcugaaaagg

SEQ ID NO: 2400357 - RNA, 19 nt, Artificial Sequence
  Description of Artificial Sequence: Synthetic oligonucleotide
augcggucaaggcugaaaa

SEQ ID NO: 2400358 - RNA, 19 nt, Artificial Sequence
  Description of Artificial Sequence: Synthetic oligonucleotide
cagagggaacaugucauag

SEQ ID NO: 2400359 - RNA, 19 nt, Artificial Sequence
  Description of Artificial Sequence: Synthetic oligonucleotide
auaaucuuguuaagauucu

SEQ ID NO: 2400360 - RNA, 19 nt, Artificial Sequence
  Description of Artificial Sequence: Synthetic oligonucleotide
ucagaaugcuuuugauuua

SEQ ID NO: 2400361 - RNA, 19 nt, Artificial Sequence
  Description of Artificial Sequence: Synthetic oligonucleotide
gcaaaggggaucaaugagc

SEQ ID NO: 2400362 - RNA, 19 nt, Artificial Sequence
  Description of Artificial Sequence: Synthetic oligonucleotide
aaagguggcaucacacaaa

SEQ ID NO: 2400363 - RNA, 19 nt, Artificial Sequence
  Description of Artificial Sequence: Synthetic oligonucleotide
gcaguaagaguuucacugc

SEQ ID NO: 2400364 - RNA, 19 nt, Artificial Sequence
  Description of Artificial Sequence: Synthetic oligonucleotide
ugcgcugacugcaaagauu

SEQ ID NO: 2400365 - RNA, 19 nt, Artificial Sequence
  Description of Artificial Sequence: Synthetic oligonucleotide
caguucagcacuaaguggu

SEQ ID NO: 2400366 - RNA, 19 nt, Artificial Sequence
  Description of Artificial Sequence: Synthetic oligonucleotide
ugcgugcgcuucaaccagg

SEQ ID NO: 2400367 - RNA, 19 nt, Artificial Sequence
  Description of Artificial Sequence: Synthetic oligonucleotide
uucucuugcgugcgcuuca

SEQ ID NO: 2400368 - RNA, 19 nt, Artificial Sequence
  Description of Artificial Sequence: Synthetic oligonucleotide
uguuaagauucucccucua

SEQ ID NO: 2400369 - RNA, 19 nt, Artificial Sequence
  Description of Artificial Sequence: Synthetic oligonucleotide
ggaaauaccuggccaaauc

SEQ ID NO: 2400370 - RNA, 19 nt, Artificial Sequence
  Description of Artificial Sequence: Synthetic oligonucleotide
uggaguuccgggugacuug

SEQ ID NO: 2400371 - RNA, 19 nt, Artificial Sequence
  Description of Artificial Sequence: Synthetic oligonucleotide
cagcagguuucuuuguuuc

SEQ ID NO: 2400372 - RNA, 19 nt, Artificial Sequence
  Description of Artificial Sequence: Synthetic oligonucleotide
accgcaguucagcacuaag

SEQ ID NO: 2400373 - RNA, 19 nt, Artificial Sequence
  Description of Artificial Sequence: Synthetic oligonucleotide
uccgaucccaucucuucac

SEQ ID NO: 2400374 - RNA, 19 nt, Artificial Sequence
  Description of Artificial Sequence: Synthetic oligonucleotide
gauuucccaaacgcaaguc

SEQ ID NO: 2400375 - RNA, 19 nt, Artificial Sequence
  Description of Artificial Sequence: Synthetic oligonucleotide
acuaagugguaaauucaca

SEQ ID NO: 2400376 - RNA, 19 nt, Artificial Sequence
  Description of Artificial Sequence: Synthetic oligonucleotide
acucacaccggacgagucu

SEQ ID NO: 2400377 - RNA, 19 nt, Artificial Sequence
  Description of Artificial Sequence: Synthetic oligonucleotide
auggaaaaucugagaaaag

SEQ ID NO: 2400378 - RNA, 19 nt, Artificial Sequence
  Description of Artificial Sequence: Synthetic oligonucleotide
aguuacagacauugauuua

SEQ ID NO: 2400379 - RNA, 19 nt, Artificial Sequence
  Description of Artificial Sequence: Synthetic oligonucleotide
gaccgaaggcuuguauccg

SEQ ID NO: 2400380 - RNA, 19 nt, Artificial Sequence
  Description of Artificial Sequence: Synthetic oligonucleotide
agcuuaaaaucugcgcuga

SEQ ID NO: 2400381 - RNA, 19 nt, Artificial Sequence
  Description of Artificial Sequence: Synthetic oligonucleotide
ucagcacuaagugguaaau

SEQ ID NO: 2400382 - RNA, 19 nt, Artificial Sequence
  Description of Artificial Sequence: Synthetic oligonucleotide
gaagauaacgcugcuaguu

SEQ ID NO: 2400383 - RNA, 19 nt, Artificial Sequence
  Description of Artificial Sequence: Synthetic oligonucleotide
uuugagucugaagcacugu

SEQ ID NO: 2400384 - RNA, 19 nt, Artificial Sequence
  Description of Artificial Sequence: Synthetic oligonucleotide
auaugucgacuuuauuaua

SEQ ID NO: 2400385 - RNA, 19 nt, Artificial Sequence
  Description of Artificial Sequence: Synthetic oligonucleotide
uaagaguuucacugccuuu

SEQ ID NO: 2400386 - RNA, 19 nt, Artificial Sequence
  Description of Artificial Sequence: Synthetic oligonucleotide
agaguuuaauuuauuuaua

SEQ ID NO: 2400387 - RNA, 19 nt, Artificial Sequence
  Description of Artificial Sequence: Synthetic oligonucleotide
ucuuugcccuuacccaaaa

SEQ ID NO: 2400388 - RNA, 19 nt, Artificial Sequence
  Description of Artificial Sequence: Synthetic oligonucleotide
aagcuccgaucccaucucu

SEQ ID NO: 2400389 - RNA, 19 nt, Artificial Sequence
  Description of Artificial Sequence: Synthetic oligonucleotide
gucgacuuuauuauacaaa

SEQ ID NO: 2400390 - RNA, 19 nt, Artificial Sequence
  Description of Artificial Sequence: Synthetic oligonucleotide
uuccacacucacaccggac

SEQ ID NO: 2400391 - RNA, 19 nt, Artificial Sequence
  Description of Artificial Sequence: Synthetic oligonucleotide
caacccauuccuugucaug

SEQ ID NO: 2400392 - RNA, 19 nt, Artificial Sequence
  Description of Artificial Sequence: Synthetic oligonucleotide
caugcuggugaugcuuucc

SEQ ID NO: 2400393 - RNA, 19 nt, Artificial Sequence
  Description of Artificial Sequence: Synthetic oligonucleotide
agauuucauguaagccugg

SEQ ID NO: 2400394 - RNA, 19 nt, Artificial Sequence
  Description of Artificial Sequence: Synthetic oligonucleotide
cugcaaagauuucauguaa

SEQ ID NO: 2400395 - RNA, 19 nt, Artificial Sequence
  Description of Artificial Sequence: Synthetic oligonucleotide
aaucugcgcugacugcaaa

SEQ ID NO: 2400396 - RNA, 19 nt, Artificial Sequence
  Description of Artificial Sequence: Synthetic oligonucleotide
guugccauggucccuugaa

SEQ ID NO: 2400397 - RNA, 19 nt, Artificial Sequence
  Description of Artificial Sequence: Synthetic oligonucleotide
acaccggacgagucuaaga

SEQ ID NO: 2400398 - RNA, 19 nt, Artificial Sequence
  Description of Artificial Sequence: Synthetic oligonucleotide
ggucccuugaagaccagag

SEQ ID NO: 2400399 - RNA, 19 nt, Artificial Sequence
  Description of Artificial Sequence: Synthetic oligonucleotide
gauucucccucuagacagc

SEQ ID NO: 2400400 - RNA, 19 nt, Artificial Sequence
  Description of Artificial Sequence: Synthetic oligonucleotide
uucuggugacuuggcaaag

SEQ ID NO: 2400401 - RNA, 19 nt, Artificial Sequence
  Description of Artificial Sequence: Synthetic oligonucleotide
accgaaggcuuguauccga

SEQ ID NO: 2400402 - RNA, 19 nt, Artificial Sequence
  Description of Artificial Sequence: Synthetic oligonucleotide
cgagucuaagaacucagag

SEQ ID NO: 2400403 - RNA, 19 nt, Artificial Sequence
  Description of Artificial Sequence: Synthetic oligonucleotide
uugcaacccauuccuuguc

SEQ ID NO: 2400404 - RNA, 19 nt, Artificial Sequence
  Description of Artificial Sequence: Synthetic oligonucleotide
ucccaaacgcaaguccucu

SEQ ID NO: 2400405 - RNA, 19 nt, Artificial Sequence
  Description of Artificial Sequence: Synthetic oligonucleotide
cugaguuacagacauugau

SEQ ID NO: 2400406 - RNA, 19 nt, Artificial Sequence
  Description of Artificial Sequence: Synthetic oligonucleotide
auaccuggccaaaucagaa

SEQ ID NO: 2400407 - RNA, 19 nt, Artificial Sequence
  Description of Artificial Sequence: Synthetic oligonucleotide
agaccagaguuuaauuuau

SEQ ID NO: 2400408 - RNA, 19 nt, Artificial Sequence
  Description of Artificial Sequence: Synthetic oligonucleotide
caccggacgagucuaagaa

SEQ ID NO: 2400409 - RNA, 19 nt, Artificial Sequence
  Description of Artificial Sequence: Synthetic oligonucleotide
cuuacccaaaacugaguua

SEQ ID NO: 2400410 - RNA, 19 nt, Artificial Sequence
  Description of Artificial Sequence: Synthetic oligonucleotide
aagggcaguaagaguuuca

SEQ ID NO: 2400411 - RNA, 19 nt, Artificial Sequence
  Description of Artificial Sequence: Synthetic oligonucleotide
ucauguaagccuggagaua

SEQ ID NO: 2400412 - RNA, 19 nt, Artificial Sequence
  Description of Artificial Sequence: Synthetic oligonucleotide
acagagggaacaugucaua

SEQ ID NO: 2400413 - RNA, 19 nt, Artificial Sequence
  Description of Artificial Sequence: Synthetic oligonucleotide
caggaccaaaacccagcag

SEQ ID NO: 2400414 - RNA, 19 nt, Artificial Sequence
  Description of Artificial Sequence: Synthetic oligonucleotide
cuuaaaaucugcgcugacu

SEQ ID NO: 2400415 - RNA, 19 nt, Artificial Sequence
  Description of Artificial Sequence: Synthetic oligonucleotide
auaagcugaccgaaggcuu

SEQ ID NO: 2400416 - RNA, 19 nt, Artificial Sequence
  Description of Artificial Sequence: Synthetic oligonucleotide
guuguuauucuggugacuu

SEQ ID NO: 2400417 - RNA, 19 nt, Artificial Sequence
  Description of Artificial Sequence: Synthetic oligonucleotide
uuccgggugacuugucuuu

SEQ ID NO: 2400418 - RNA, 19 nt, Artificial Sequence
  Description of Artificial Sequence: Synthetic oligonucleotide
gucucaguucaaauaaucu

SEQ ID NO: 2400419 - RNA, 19 nt, Artificial Sequence
  Description of Artificial Sequence: Synthetic oligonucleotide
aaaucugcgcugacugcaa

SEQ ID NO: 2400420 - RNA, 19 nt, Artificial Sequence
  Description of Artificial Sequence: Synthetic oligonucleotide
gggaacaugucauagucau

SEQ ID NO: 2400421 - RNA, 19 nt, Artificial Sequence
  Description of Artificial Sequence: Synthetic oligonucleotide
caagcuccgaucccaucuc

SEQ ID NO: 2400422 - RNA, 19 nt, Artificial Sequence
  Description of Artificial Sequence: Synthetic oligonucleotide
cccaucucuucacacaaac

SEQ ID NO: 2400423 - RNA, 19 nt, Artificial Sequence
  Description of Artificial Sequence: Synthetic oligonucleotide
cgcaguucagcacuaagug

SEQ ID NO: 2400424 - RNA, 19 nt, Artificial Sequence
  Description of Artificial Sequence: Synthetic oligonucleotide
cucccucuagacagccacc

SEQ ID NO: 2400425 - RNA, 19 nt, Artificial Sequence
  Description of Artificial Sequence: Synthetic oligonucleotide
uucucccucuagacagcca

SEQ ID NO: 2400426 - RNA, 19 nt, Artificial Sequence
  Description of Artificial Sequence: Synthetic oligonucleotide
aagcugaccgaaggcuugu

SEQ ID NO: 2400427 - RNA, 19 nt, Artificial Sequence
  Description of Artificial Sequence: Synthetic oligonucleotide
gucauucucuugcgugcgc

SEQ ID NO: 2400428 - RNA, 19 nt, Artificial Sequence
  Description of Artificial Sequence: Synthetic oligonucleotide
gaugcggucaaggcugaaa

SEQ ID NO: 2400429 - RNA, 19 nt, Artificial Sequence
  Description of Artificial Sequence: Synthetic oligonucleotide
uccgggugacuugucuuug

SEQ ID NO: 2400430 - RNA, 19 nt, Artificial Sequence
  Description of Artificial Sequence: Synthetic oligonucleotide
uccgaagauaacgcugcua

SEQ ID NO: 2400431 - RNA, 19 nt, Artificial Sequence
  Description of Artificial Sequence: Synthetic oligonucleotide
ugacuugucuuugcccuua

SEQ ID NO: 2400432 - RNA, 19 nt, Artificial Sequence
  Description of Artificial Sequence: Synthetic oligonucleotide
cagaaugcuuuugauuuaa

SEQ ID NO: 2400433 - RNA, 19 nt, Artificial Sequence
  Description of Artificial Sequence: Synthetic oligonucleotide
ggcaucacacaaacagaag

SEQ ID NO: 2400434 - RNA, 19 nt, Artificial Sequence
  Description of Artificial Sequence: Synthetic oligonucleotide
ucccaucucuucacacaaa

SEQ ID NO: 2400435 - RNA, 19 nt, Artificial Sequence
  Description of Artificial Sequence: Synthetic oligonucleotide
acacucacaccggacgagu

SEQ ID NO: 2400436 - RNA, 19 nt, Artificial Sequence
  Description of Artificial Sequence: Synthetic oligonucleotide
auccgaagauaacgcugcu

SEQ ID NO: 2400437 - RNA, 19 nt, Artificial Sequence
  Description of Artificial Sequence: Synthetic oligonucleotide
cuugaagaccagaguuuaa

SEQ ID NO: 2400438 - RNA, 19 nt, Artificial Sequence
  Description of Artificial Sequence: Synthetic oligonucleotide
gcccuuacccaaaacugag

SEQ ID NO: 2400439 - RNA, 19 nt, Artificial Sequence
  Description of Artificial Sequence: Synthetic oligonucleotide
gcacuaagugguaaauuca

SEQ ID NO: 2400440 - RNA, 19 nt, Artificial Sequence
  Description of Artificial Sequence: Synthetic oligonucleotide
agagucagugagguuguua

SEQ ID NO: 2400441 - RNA, 19 nt, Artificial Sequence
  Description of Artificial Sequence: Synthetic oligonucleotide
acgagucuaagaacucaga

SEQ ID NO: 2400442 - RNA, 19 nt, Artificial Sequence
  Description of Artificial Sequence: Synthetic oligonucleotide
ccaaacgcaaguccucuuc

SEQ ID NO: 2400443 - RNA, 19 nt, Artificial Sequence
  Description of Artificial Sequence: Synthetic oligonucleotide
cuccgaucccaucucuuca

SEQ ID NO: 2400444 - RNA, 19 nt, Artificial Sequence
  Description of Artificial Sequence: Synthetic oligonucleotide
aggcuagcuuugcaaccca

SEQ ID NO: 2400445 - RNA, 19 nt, Artificial Sequence
  Description of Artificial Sequence: Synthetic oligonucleotide
cacucacaccggacgaguc

SEQ ID NO: 2400446 - RNA, 19 nt, Artificial Sequence
  Description of Artificial Sequence: Synthetic oligonucleotide
cuuguaggugcucaacaau

SEQ ID NO: 2400447 - RNA, 19 nt, Artificial Sequence
  Description of Artificial Sequence: Synthetic oligonucleotide
aaaacccagcagguuucuu

SEQ ID NO: 2400448 - RNA, 19 nt, Artificial Sequence
  Description of Artificial Sequence: Synthetic oligonucleotide
ucacaccggacgagucuaa

SEQ ID NO: 2400449 - RNA, 19 nt, Artificial Sequence
  Description of Artificial Sequence: Synthetic oligonucleotide
aucaugcuggugaugcuuu

SEQ ID NO: 2400450 - RNA, 19 nt, Artificial Sequence
  Description of Artificial Sequence: Synthetic oligonucleotide
cauagucauucucuugcgu

SEQ ID NO: 2400451 - RNA, 19 nt, Artificial Sequence
  Description of Artificial Sequence: Synthetic oligonucleotide
caaacgcaaguccucuucu

SEQ ID NO: 2400452 - RNA, 19 nt, Artificial Sequence
  Description of Artificial Sequence: Synthetic oligonucleotide
acccagcagguuucuuugu

SEQ ID NO: 2400453 - RNA, 19 nt, Artificial Sequence
  Description of Artificial Sequence: Synthetic oligonucleotide
cacaagcuccgaucccauc

SEQ ID NO: 2400454 - RNA, 19 nt, Artificial Sequence
  Description of Artificial Sequence: Synthetic oligonucleotide
gcuuguauccgaagauaac

SEQ ID NO: 2400455 - RNA, 19 nt, Artificial Sequence
  Description of Artificial Sequence: Synthetic oligonucleotide
aaacugaguuacagacauu

SEQ ID NO: 2400456 - RNA, 19 nt, Artificial Sequence
  Description of Artificial Sequence: Synthetic oligonucleotide
agucuuagggcaggaccaa

SEQ ID NO: 2400457 - RNA, 19 nt, Artificial Sequence
  Description of Artificial Sequence: Synthetic oligonucleotide
cacaccggacgagucuaag

SEQ ID NO: 2400458 - RNA, 19 nt, Artificial Sequence
  Description of Artificial Sequence: Synthetic oligonucleotide
guaggugcucaacaaucau

SEQ ID NO: 2400459 - RNA, 19 nt, Artificial Sequence
  Description of Artificial Sequence: Synthetic oligonucleotide
ccucuagacagccaccgca

SEQ ID NO: 2400460 - RNA, 19 nt, Artificial Sequence
  Description of Artificial Sequence: Synthetic oligonucleotide
ggacgagucuaagaacuca

SEQ ID NO: 2400461 - RNA, 19 nt, Artificial Sequence
  Description of Artificial Sequence: Synthetic oligonucleotide
uuguuucgaugcggucaag

SEQ ID NO: 2400462 - RNA, 19 nt, Artificial Sequence
  Description of Artificial Sequence: Synthetic oligonucleotide
ucucuugcgugcgcuucaa

SEQ ID NO: 2400463 - RNA, 19 nt, Artificial Sequence
  Description of Artificial Sequence: Synthetic oligonucleotide
gaucaaugagccacagauu

SEQ ID NO: 2400464 - RNA, 19 nt, Artificial Sequence
  Description of Artificial Sequence: Synthetic oligonucleotide
guccucuucugguggguaa

SEQ ID NO: 2400465 - RNA, 19 nt, Artificial Sequence
  Description of Artificial Sequence: Synthetic oligonucleotide
gucccuugaagaccagagu

SEQ ID NO: 2400466 - RNA, 19 nt, Artificial Sequence
  Description of Artificial Sequence: Synthetic oligonucleotide
aguucagcacuaaguggua

SEQ ID NO: 2400467 - RNA, 19 nt, Artificial Sequence
  Description of Artificial Sequence: Synthetic oligonucleotide
cucuugcgugcgcuucaac

SEQ ID NO: 2400468 - RNA, 19 nt, Artificial Sequence
  Description of Artificial Sequence: Synthetic oligonucleotide
ccggacgagucuaagaacu

SEQ ID NO: 2400469 - RNA, 19 nt, Artificial Sequence
  Description of Artificial Sequence: Synthetic oligonucleotide
cagccaccgcaguucagca

SEQ ID NO: 2400470 - RNA, 19 nt, Artificial Sequence
  Description of Artificial Sequence: Synthetic oligonucleotide
gccaccgcaguucagcacu

SEQ ID NO: 2400471 - RNA, 19 nt, Artificial Sequence
  Description of Artificial Sequence: Synthetic oligonucleotide
cucacaccggacgagucua

SEQ ID NO: 2400472 - RNA, 19 nt, Artificial Sequence
  Description of Artificial Sequence: Synthetic oligonucleotide
gugaugcuuuccacacuca

SEQ ID NO: 2400473 - RNA, 19 nt, Artificial Sequence
  Description of Artificial Sequence: Synthetic oligonucleotide
auuuccugucucaguucaa

SEQ ID NO: 2400474 - RNA, 19 nt, Artificial Sequence
  Description of Artificial Sequence: Synthetic oligonucleotide
ggggaucaaugagccacag

SEQ ID NO: 2400475 - RNA, 19 nt, Artificial Sequence
  Description of Artificial Sequence: Synthetic oligonucleotide
gucuuugcccuuacccaaa

SEQ ID NO: 2400476 - RNA, 19 nt, Artificial Sequence
  Description of Artificial Sequence: Synthetic oligonucleotide
aguccucuucuggugggua

SEQ ID NO: 2400477 - RNA, 19 nt, Artificial Sequence
  Description of Artificial Sequence: Synthetic oligonucleotide
guuccgggugacuugucuu

SEQ ID NO: 2400478 - RNA, 19 nt, Artificial Sequence
  Description of Artificial Sequence: Synthetic oligonucleotide
cugcuaaauaggcuagcuu

SEQ ID NO: 2400479 - RNA, 19 nt, Artificial Sequence
  Description of Artificial Sequence: Synthetic oligonucleotide
ccgggugacuugucuuugc

SEQ ID NO: 2400480 - RNA, 19 nt, Artificial Sequence
  Description of Artificial Sequence: Synthetic oligonucleotide
cgaaggcuuguauccgaag

SEQ ID NO: 2400481 - RNA, 19 nt, Artificial Sequence
  Description of Artificial Sequence: Synthetic oligonucleotide
ggaccaaaacccagcaggu

SEQ ID NO: 2400482 - RNA, 19 nt, Artificial Sequence
  Description of Artificial Sequence: Synthetic oligonucleotide
ccuuacccaaaacugaguu

SEQ ID NO: 2400483 - RNA, 19 nt, Artificial Sequence
  Description of Artificial Sequence: Synthetic oligonucleotide
caguucaaauaaucuuguu

SEQ ID NO: 2400484 - RNA, 19 nt, Artificial Sequence
  Description of Artificial Sequence: Synthetic oligonucleotide
gucuuagggcaggaccaaa

SEQ ID NO: 2400485 - RNA, 19 nt, Artificial Sequence
  Description of Artificial Sequence: Synthetic oligonucleotide
gguaacagucauggaaaau

SEQ ID NO: 2400486 - RNA, 19 nt, Artificial Sequence
  Description of Artificial Sequence: Synthetic oligonucleotide
gggcaguaagaguuucacu

SEQ ID NO: 2400487 - RNA, 19 nt, Artificial Sequence
  Description of Artificial Sequence: Synthetic oligonucleotide
ggugcucaacaaucaugcu

SEQ ID NO: 2400488 - RNA, 19 nt, Artificial Sequence
  Description of Artificial Sequence: Synthetic oligonucleotide
agcuccgaucccaucucuu

SEQ ID NO: 2400489 - RNA, 19 nt, Artificial Sequence
  Description of Artificial Sequence: Synthetic oligonucleotide
gcgcugacugcaaagauuu

SEQ ID NO: 2400490 - RNA, 19 nt, Artificial Sequence
  Description of Artificial Sequence: Synthetic oligonucleotide
gaccagaguuuaauuuauu

SEQ ID NO: 2400491 - RNA, 19 nt, Artificial Sequence
  Description of Artificial Sequence: Synthetic oligonucleotide
ggaguuccgggugacuugu

SEQ ID NO: 2400492 - RNA, 19 nt, Artificial Sequence
  Description of Artificial Sequence: Synthetic oligonucleotide
ccgcaguucagcacuaagu

SEQ ID NO: 2400493 - RNA, 19 nt, Artificial Sequence
  Description of Artificial Sequence: Synthetic oligonucleotide
gguuguuauucuggugacu

SEQ ID NO: 2400494 - RNA, 19 nt, Artificial Sequence
  Description of Artificial Sequence: Synthetic oligonucleotide
gcgugcgcuucaaccaggc

SEQ ID NO: 2400495 - RNA, 19 nt, Artificial Sequence
  Description of Artificial Sequence: Synthetic oligonucleotide
gcaacccauuccuugucau

SEQ ID NO: 2400496 - RNA, 19 nt, Artificial Sequence
  Description of Artificial Sequence: Synthetic oligonucleotide
gaguuccgggugacuuguc

SEQ ID NO: 2400497 - RNA, 19 nt, Artificial Sequence
  Description of Artificial Sequence: Synthetic oligonucleotide
cggacgagucuaagaacuc

SEQ ID NO: 2400498 - RNA, 19 nt, Artificial Sequence
  Description of Artificial Sequence: Synthetic oligonucleotide
cugcgcugacugcaaagau

SEQ ID NO: 2400499 - RNA, 19 nt, Artificial Sequence
  Description of Artificial Sequence: Synthetic oligonucleotide
gcugaccgaaggcuuguau

SEQ ID NO: 2400500 - RNA, 19 nt, Artificial Sequence
  Description of Artificial Sequence: Synthetic oligonucleotide
agcugaccgaaggcuugua

SEQ ID NO: 2400501 - RNA, 19 nt, Artificial Sequence
  Description of Artificial Sequence: Synthetic oligonucleotide
ccgaaggcuuguauccgaa

SEQ ID NO: 2400502 - RNA, 19 nt, Artificial Sequence
  Description of Artificial Sequence: Synthetic oligonucleotide
cggucaaggcugaaaaggu

SEQ ID NO: 2400503 - RNA, 19 nt, Artificial Sequence
  Description of Artificial Sequence: Synthetic oligonucleotide
cccuugaagaccagaguuu

SEQ ID NO: 2400504 - RNA, 19 nt, Artificial Sequence
  Description of Artificial Sequence: Synthetic oligonucleotide
ccgaucccaucucuucaca

SEQ ID NO: 2400505 - RNA, 19 nt, Artificial Sequence
  Description of Artificial Sequence: Synthetic oligonucleotide
gcucaacaaucaugcuggu

SEQ ID NO: 2400506 - RNA, 19 nt, Artificial Sequence
  Description of Artificial Sequence: Synthetic oligonucleotide
gcuagcuuugcaacccauu

SEQ ID NO: 2400507 - RNA, 19 nt, Artificial Sequence
  Description of Artificial Sequence: Synthetic oligonucleotide
cccuuacccaaaacugagu

SEQ ID NO: 2400508 - RNA, 19 nt, Artificial Sequence
  Description of Artificial Sequence: Synthetic oligonucleotide
ccucuucugguggguaaca

SEQ ID NO: 2400509 - RNA, 19 nt, Artificial Sequence
  Description of Artificial Sequence: Synthetic oligonucleotide
cgacuuuauuauacaaauu

SEQ ID NO: 2400510 - RNA, 19 nt, Artificial Sequence
  Description of Artificial Sequence: Synthetic oligonucleotide
cgaagauaacgcugcuagu

SEQ ID NO: 2400511 - RNA, 19 nt, Artificial Sequence
  Description of Artificial Sequence: Synthetic oligonucleotide
cgcugacugcaaagauuuc

SEQ ID NO: 2400512 - RNA, 19 nt, Artificial Sequence
  Description of Artificial Sequence: Synthetic oligonucleotide
ggcuagcuuugcaacccau

SEQ ID NO: 2400513 - RNA, 19 nt, Artificial Sequence
  Description of Artificial Sequence: Synthetic oligonucleotide
gcuuugcaacccauuccuu

SEQ ID NO: 2400514 - RNA, 19 nt, Artificial Sequence
  Description of Artificial Sequence: Synthetic oligonucleotide
cccaaacgcaaguccucuu

SEQ ID NO: 2400515 - RNA, 19 nt, Artificial Sequence
  Description of Artificial Sequence: Synthetic oligonucleotide
cgaugcggucaaggcugaa

SEQ ID NO: 2400516 - RNA, 19 nt, Artificial Sequence
  Description of Artificial Sequence: Synthetic oligonucleotide
gcgcuucaaccaggcuuuu

SEQ ID NO: 2400517 - RNA, 19 nt, Artificial Sequence
  Description of Artificial Sequence: Synthetic oligonucleotide
uauauuuucacuacuagag

SEQ ID NO: 2400518 - RNA, 19 nt, Artificial Sequence
  Description of Artificial Sequence: Synthetic oligonucleotide
aaguuuguuaauuaaacuc

SEQ ID NO: 2400519 - RNA, 19 nt, Artificial Sequence
  Description of Artificial Sequence: Synthetic oligonucleotide
uuucuagucguccuaagcg

SEQ ID NO: 2400520 - RNA, 19 nt, Artificial Sequence
  Description of Artificial Sequence: Synthetic oligonucleotide
uuguuaauuaaacucaggu

SEQ ID NO: 2400521 - RNA, 19 nt, Artificial Sequence
  Description of Artificial Sequence: Synthetic oligonucleotide
uuugaugaagggcugaagc

SEQ ID NO: 2400522 - RNA, 19 nt, Artificial Sequence
  Description of Artificial Sequence: Synthetic oligonucleotide
aauucgacaggcuucaggu

SEQ ID NO: 2400523 - RNA, 19 nt, Artificial Sequence
  Description of Artificial Sequence: Synthetic oligonucleotide
aagcaauuuaagaugaggg

SEQ ID NO: 2400524 - RNA, 19 nt, Artificial Sequence
  Description of Artificial Sequence: Synthetic oligonucleotide
acugagagaacuugugugc

SEQ ID NO: 2400525 - RNA, 19 nt, Artificial Sequence
  Description of Artificial Sequence: Synthetic oligonucleotide
aacuagucaauucugcucu

SEQ ID NO: 2400526 - RNA, 19 nt, Artificial Sequence
  Description of Artificial Sequence: Synthetic oligonucleotide
aaauucuuuggcauacugc

SEQ ID NO: 2400527 - RNA, 19 nt, Artificial Sequence
  Description of Artificial Sequence: Synthetic oligonucleotide
aacugagagaacuugugug

SEQ ID NO: 2400528 - RNA, 19 nt, Artificial Sequence
  Description of Artificial Sequence: Synthetic oligonucleotide
uucuaggugaaccacagac

SEQ ID NO: 2400529 - RNA, 19 nt, Artificial Sequence
  Description of Artificial Sequence: Synthetic oligonucleotide
acucaauuucuuuagcgcg

SEQ ID NO: 2400530 - RNA, 19 nt, Artificial Sequence
  Description of Artificial Sequence: Synthetic oligonucleotide
agcaauuuaagaugagggg

SEQ ID NO: 2400531 - RNA, 19 nt, Artificial Sequence
  Description of Artificial Sequence: Synthetic oligonucleotide
uuugucucuuuucuagucg

SEQ ID NO: 2400532 - RNA, 19 nt, Artificial Sequence
  Description of Artificial Sequence: Synthetic oligonucleotide
uucagaacuagucaauucu

SEQ ID NO: 2400533 - RNA, 19 nt, Artificial Sequence
  Description of Artificial Sequence: Synthetic oligonucleotide
uuuguuaauuaaacucagg

SEQ ID NO: 2400534 - RNA, 19 nt, Artificial Sequence
  Description of Artificial Sequence: Synthetic oligonucleotide
  modified_base (6)..(6): a, c, u, g, unknown or other
uuuucnguaacaccccacc

SEQ ID NO: 2400535 - RNA, 19 nt, Artificial Sequence
  Description of Artificial Sequence: Synthetic oligonucleotide
cacuacuagagcuaugugg

SEQ ID NO: 2400536 - RNA, 19 nt, Artificial Sequence
  Description of Artificial Sequence: Synthetic oligonucleotide
ucuaggugaaccacagacg

SEQ ID NO: 2400537 - RNA, 19 nt, Artificial Sequence
  Description of Artificial Sequence: Synthetic oligonucleotide
uguuaauuaaacucagguc

SEQ ID NO: 2400538 - RNA, 19 nt, Artificial Sequence
  Description of Artificial Sequence: Synthetic oligonucleotide
uaaccugcucuguugaugg

SEQ ID NO: 2400539 - RNA, 19 nt, Artificial Sequence
  Description of Artificial Sequence: Synthetic oligonucleotide
uuaacugagagaacuugug

SEQ ID NO: 2400540 - RNA, 19 nt, Artificial Sequence
  Description of Artificial Sequence: Synthetic oligonucleotide
auuugugauguuuugguga

SEQ ID NO: 2400541 - RNA, 19 nt, Artificial Sequence
  Description of Artificial Sequence: Synthetic oligonucleotide
aaacucaggucuucauuac

SEQ ID NO: 2400542 - RNA, 19 nt, Artificial Sequence
  Description of Artificial Sequence: Synthetic oligonucleotide
cuuauauuuucacuacuag

SEQ ID NO: 2400543 - RNA, 19 nt, Artificial Sequence
  Description of Artificial Sequence: Synthetic oligonucleotide
cauuccacugccaaggaag

SEQ ID NO: 2400544 - RNA, 19 nt, Artificial Sequence
  Description of Artificial Sequence: Synthetic oligonucleotide
  modified_base (5)..(5): a, c, u, g, unknown or other
uuucnguaacaccccaccg

SEQ ID NO: 2400545 - RNA, 19 nt, Artificial Sequence
  Description of Artificial Sequence: Synthetic oligonucleotide
gacucaauuucuuuagcgc

SEQ ID NO: 2400546 - RNA, 19 nt, Artificial Sequence
  Description of Artificial Sequence: Synthetic oligonucleotide
uucuagucguccuaagcgg

SEQ ID NO: 2400547 - RNA, 19 nt, Artificial Sequence
  Description of Artificial Sequence: Synthetic oligonucleotide
aggaagaccaacuucagaa

SEQ ID NO: 2400548 - RNA, 19 nt, Artificial Sequence
  Description of Artificial Sequence: Synthetic oligonucleotide
uuuucuagucguccuaagc

SEQ ID NO: 2400549 - RNA, 19 nt, Artificial Sequence
  Description of Artificial Sequence: Synthetic oligonucleotide
ugugcagccuucuagguga

SEQ ID NO: 2400550 - RNA, 19 nt, Artificial Sequence
  Description of Artificial Sequence: Synthetic oligonucleotide
agucaauucugcucuugcc

SEQ ID NO: 2400551 - RNA, 19 nt, Artificial Sequence
  Description of Artificial Sequence: Synthetic oligonucleotide
aaguagucuuuacaaaggu

SEQ ID NO: 2400552 - RNA, 19 nt, Artificial Sequence
  Description of Artificial Sequence: Synthetic oligonucleotide
ucuuauauuuucacuacua

SEQ ID NO: 2400553 - RNA, 19 nt, Artificial Sequence
  Description of Artificial Sequence: Synthetic oligonucleotide
uuucuuauauuuucacuac

SEQ ID NO: 2400554 - RNA, 19 nt, Artificial Sequence
  Description of Artificial Sequence: Synthetic oligonucleotide
ucuagucguccuaagcggg

SEQ ID NO: 2400555 - RNA, 19 nt, Artificial Sequence
  Description of Artificial Sequence: Synthetic oligonucleotide
ugcuaaguagucuuuacaa

SEQ ID NO: 2400556 - RNA, 19 nt, Artificial Sequence
  Description of Artificial Sequence: Synthetic oligonucleotide
uuggcauacugcacaaggg

SEQ ID NO: 2400557 - RNA, 19 nt, Artificial Sequence
  Description of Artificial Sequence: Synthetic oligonucleotide
  modified_base (4)..(4): a, c, u, g, unknown or other
uucnguaacaccccaccgu

SEQ ID NO: 2400558 - RNA, 19 nt, Artificial Sequence
  Description of Artificial Sequence: Synthetic oligonucleotide
gaauucgacaggcuucagg

SEQ ID NO: 2400559 - RNA, 19 nt, Artificial Sequence
  Description of Artificial Sequence: Synthetic oligonucleotide
uucgacaggcuucagguga

SEQ ID NO: 2400560 - RNA, 19 nt, Artificial Sequence
  Description of Artificial Sequence: Synthetic oligonucleotide
cauuacuuaacugagagaa

SEQ ID NO: 2400561 - RNA, 19 nt, Artificial Sequence
  Description of Artificial Sequence: Synthetic oligonucleotide
cuugcucugcacaauacac

SEQ ID NO: 2400562 - RNA, 19 nt, Artificial Sequence
  Description of Artificial Sequence: Synthetic oligonucleotide
uuaauuaaacucaggucuu

SEQ ID NO: 2400563 - RNA, 19 nt, Artificial Sequence
  Description of Artificial Sequence: Synthetic oligonucleotide
agacgugggaugcagguag

SEQ ID NO: 2400564 - RNA, 19 nt, Artificial Sequence
  Description of Artificial Sequence: Synthetic oligonucleotide
uucacuacuagagcuaugu

SEQ ID NO: 2400565 - RNA, 19 nt, Artificial Sequence
  Description of Artificial Sequence: Synthetic oligonucleotide
uauguggaauucgacaggc

SEQ ID NO: 2400566 - RNA, 19 nt, Artificial Sequence
  Description of Artificial Sequence: Synthetic oligonucleotide
accguugucaccaaguuug

SEQ ID NO: 2400567 - RNA, 19 nt, Artificial Sequence
  Description of Artificial Sequence: Synthetic oligonucleotide
uucuuauauuuucacuacu

SEQ ID NO: 2400568 - RNA, 19 nt, Artificial Sequence
  Description of Artificial Sequence: Synthetic oligonucleotide
gaugaggggauucugggga

SEQ ID NO: 2400569 - RNA, 19 nt, Artificial Sequence
  Description of Artificial Sequence: Synthetic oligonucleotide
aaccacagacgugggaugc

SEQ ID NO: 2400570 - RNA, 19 nt, Artificial Sequence
  Description of Artificial Sequence: Synthetic oligonucleotide
acuacuagagcuaugugga

SEQ ID NO: 2400571 - RNA, 19 nt, Artificial Sequence
  Description of Artificial Sequence: Synthetic oligonucleotide
uaacugagagaacuugugu

SEQ ID NO: 2400572 - RNA, 19 nt, Artificial Sequence
  Description of Artificial Sequence: Synthetic oligonucleotide
gcuauguggaauucgacag

SEQ ID NO: 2400573 - RNA, 19 nt, Artificial Sequence
  Description of Artificial Sequence: Synthetic oligonucleotide
agaacuagucaauucugcu

SEQ ID NO: 2400574 - RNA, 19 nt, Artificial Sequence
  Description of Artificial Sequence: Synthetic oligonucleotide
uuuagcgcguuccuucacc

SEQ ID NO: 2400575 - RNA, 19 nt, Artificial Sequence
  Description of Artificial Sequence: Synthetic oligonucleotide
accaacuucagaacuaguc

SEQ ID NO: 2400576 - RNA, 19 nt, Artificial Sequence
  Description of Artificial Sequence: Synthetic oligonucleotide
uugaguugcucuacaaagu

SEQ ID NO: 2400577 - RNA, 19 nt, Artificial Sequence
  Description of Artificial Sequence: Synthetic oligonucleotide
gaacuagucaauucugcuc

SEQ ID NO: 2400578 - RNA, 19 nt, Artificial Sequence
  Description of Artificial Sequence: Synthetic oligonucleotide
uuaaacucaggucuucauu

SEQ ID NO: 2400579 - RNA, 19 nt, Artificial Sequence
  Description of Artificial Sequence: Synthetic oligonucleotide
ggacucaauuucuuuagcg

SEQ ID NO: 2400580 - RNA, 19 nt, Artificial Sequence
  Description of Artificial Sequence: Synthetic oligonucleotide
aggcaugcaugccugaguc

SEQ ID NO: 2400581 - RNA, 19 nt, Artificial Sequence
  Description of Artificial Sequence: Synthetic oligonucleotide
uccugggucaucaaggcau

SEQ ID NO: 2400582 - RNA, 19 nt, Artificial Sequence
  Description of Artificial Sequence: Synthetic oligonucleotide
uugugugccauuccacugc

SEQ ID NO: 2400583 - RNA, 19 nt, Artificial Sequence
  Description of Artificial Sequence: Synthetic oligonucleotide
auuuaagaugaggggauuc

SEQ ID NO: 2400584 - RNA, 19 nt, Artificial Sequence
  Description of Artificial Sequence: Synthetic oligonucleotide
ugaguugcucuacaaagua

SEQ ID NO: 2400585 - RNA, 19 nt, Artificial Sequence
  Description of Artificial Sequence: Synthetic oligonucleotide
uuggggagcaaacacugcu

SEQ ID NO: 2400586 - RNA, 19 nt, Artificial Sequence
  Description of Artificial Sequence: Synthetic oligonucleotide
guuccuucaccacaccagg

SEQ ID NO: 2400587 - RNA, 19 nt, Artificial Sequence
  Description of Artificial Sequence: Synthetic oligonucleotide
cagaacuagucaauucugc

SEQ ID NO: 2400588 - RNA, 19 nt, Artificial Sequence
  Description of Artificial Sequence: Synthetic oligonucleotide
uguagucuguaagcaaagg

SEQ ID NO: 2400589 - RNA, 19 nt, Artificial Sequence
  Description of Artificial Sequence: Synthetic oligonucleotide
uuugugauguuuuggugau

SEQ ID NO: 2400590 - RNA, 19 nt, Artificial Sequence
  Description of Artificial Sequence: Synthetic oligonucleotide
aggucuucauuacuuaacu

SEQ ID NO: 2400591 - RNA, 19 nt, Artificial Sequence
  Description of Artificial Sequence: Synthetic oligonucleotide
cucugugcagccuucuagg

SEQ ID NO: 2400592 - RNA, 19 nt, Artificial Sequence
  Description of Artificial Sequence: Synthetic oligonucleotide
uucccagcuaaccugcucu

SEQ ID NO: 2400593 - RNA, 19 nt, Artificial Sequence
  Description of Artificial Sequence: Synthetic oligonucleotide
agaugaggggauucugggg

SEQ ID NO: 2400594 - RNA, 19 nt, Artificial Sequence
  Description of Artificial Sequence: Synthetic oligonucleotide
  modified_base (2)..(2): a, c, u, g, unknown or other
uncugcucugcucugugca

SEQ ID NO: 2400595 - RNA, 19 nt, Artificial Sequence
  Description of Artificial Sequence: Synthetic oligonucleotide
ugugccauuccacugccaa

SEQ ID NO: 2400596 - RNA, 19 nt, Artificial Sequence
  Description of Artificial Sequence: Synthetic oligonucleotide
ugcucugcacaauacacuc

SEQ ID NO: 2400597 - RNA, 19 nt, Artificial Sequence
  Description of Artificial Sequence: Synthetic oligonucleotide
uucuuuagcgcguuccuuc

SEQ ID NO: 2400598 - RNA, 19 nt, Artificial Sequence
  Description of Artificial Sequence: Synthetic oligonucleotide
  modified_base (3)..(3): a, c, u, g, unknown or other
ucnguaacaccccaccguu

SEQ ID NO: 2400599 - RNA, 19 nt, Artificial Sequence
  Description of Artificial Sequence: Synthetic oligonucleotide
caaggaagccccuucuggc

SEQ ID NO: 2400600 - RNA, 19 nt, Artificial Sequence
  Description of Artificial Sequence: Synthetic oligonucleotide
cuauguggaauucgacagg

SEQ ID NO: 2400601 - RNA, 19 nt, Artificial Sequence
  Description of Artificial Sequence: Synthetic oligonucleotide
ucuuuacaaagguccaggu

SEQ ID NO: 2400602 - RNA, 19 nt, Artificial Sequence
  Description of Artificial Sequence: Synthetic oligonucleotide
ucugcuaaguagucuuuac

SEQ ID NO: 2400603 - RNA, 19 nt, Artificial Sequence
  Description of Artificial Sequence: Synthetic oligonucleotide
aguagucuuuacaaagguc

SEQ ID NO: 2400604 - RNA, 19 nt, Artificial Sequence
  Description of Artificial Sequence: Synthetic oligonucleotide
ucacucgggacucaauuuc

SEQ ID NO: 2400605 - RNA, 19 nt, Artificial Sequence
  Description of Artificial Sequence: Synthetic oligonucleotide
acuuaacugagagaacuug

SEQ ID NO: 2400606 - RNA, 19 nt, Artificial Sequence
  Description of Artificial Sequence: Synthetic oligonucleotide
gauuucuuauauuuucacu

SEQ ID NO: 2400607 - RNA, 19 nt, Artificial Sequence
  Description of Artificial Sequence: Synthetic oligonucleotide
acaggcuucaggugauagg

SEQ ID NO: 2400608 - RNA, 19 nt, Artificial Sequence
  Description of Artificial Sequence: Synthetic oligonucleotide
ucuacuggcuugcucugca

SEQ ID NO: 2400609 - RNA, 19 nt, Artificial Sequence
  Description of Artificial Sequence: Synthetic oligonucleotide
auuacuuaacugagagaac

SEQ ID NO: 2400610 - RNA, 19 nt, Artificial Sequence
  Description of Artificial Sequence: Synthetic oligonucleotide
aguugcucuacaaaguacu

SEQ ID NO: 2400611 - RNA, 19 nt, Artificial Sequence
  Description of Artificial Sequence: Synthetic oligonucleotide
cuguugauggcucacuguc

SEQ ID NO: 2400612 - RNA, 19 nt, Artificial Sequence
  Description of Artificial Sequence: Synthetic oligonucleotide
uugucucuuuucuagucgu

SEQ ID NO: 2400613 - RNA, 19 nt, Artificial Sequence
  Description of Artificial Sequence: Synthetic oligonucleotide
uacccaaauucuuuggcau

SEQ ID NO: 2400614 - RNA, 19 nt, Artificial Sequence
  Description of Artificial Sequence: Synthetic oligonucleotide
gauggcucacuguccgugg

SEQ ID NO: 2400615 - RNA, 19 nt, Artificial Sequence
  Description of Artificial Sequence: Synthetic oligonucleotide
cuguaagcaaaggaagacc

SEQ ID NO: 2400616 - RNA, 19 nt, Artificial Sequence
  Description of Artificial Sequence: Synthetic oligonucleotide
cuucagaacuagucaauuc

SEQ ID NO: 2400617 - RNA, 19 nt, Artificial Sequence
  Description of Artificial Sequence: Synthetic oligonucleotide
gaacuugugugccauucca

SEQ ID NO: 2400618 - RNA, 19 nt, Artificial Sequence
  Description of Artificial Sequence: Synthetic oligonucleotide
ucucuuuucuagucguccu

SEQ ID NO: 2400619 - RNA, 19 nt, Artificial Sequence
  Description of Artificial Sequence: Synthetic oligonucleotide
gucuguuuugaugaagggc

SEQ ID NO: 2400620 - RNA, 19 nt, Artificial Sequence
  Description of Artificial Sequence: Synthetic oligonucleotide
acuagagcuauguggaauu

SEQ ID NO: 2400621 - RNA, 19 nt, Artificial Sequence
  Description of Artificial Sequence: Synthetic oligonucleotide
uguggcugagauuucuuau

SEQ ID NO: 2400622 - RNA, 19 nt, Artificial Sequence
  Description of Artificial Sequence: Synthetic oligonucleotide
auuaaacucaggucuucau

SEQ ID NO: 2400623 - RNA, 19 nt, Artificial Sequence
  Description of Artificial Sequence: Synthetic oligonucleotide
aaacucucucucugcuaag

SEQ ID NO: 2400624 - RNA, 19 nt, Artificial Sequence
  Description of Artificial Sequence: Synthetic oligonucleotide
ugagucuguuuugaugaag

SEQ ID NO: 2400625 - RNA, 19 nt, Artificial Sequence
  Description of Artificial Sequence: Synthetic oligonucleotide
ugugugccauuccacugcc

SEQ ID NO: 2400626 - RNA, 19 nt, Artificial Sequence
  Description of Artificial Sequence: Synthetic oligonucleotide
ucaccaaguuuguuaauua

SEQ ID NO: 2400627 - RNA, 19 nt, Artificial Sequence
  Description of Artificial Sequence: Synthetic oligonucleotide
aagccgagcgccucauuug

SEQ ID NO: 2400628 - RNA, 19 nt, Artificial Sequence
  Description of Artificial Sequence: Synthetic oligonucleotide
ucuuuagcgcguuccuuca

SEQ ID NO: 2400629 - RNA, 19 nt, Artificial Sequence
  Description of Artificial Sequence: Synthetic oligonucleotide
uccuaagcgggugaguucu

SEQ ID NO: 2400630 - RNA, 19 nt, Artificial Sequence
  Description of Artificial Sequence: Synthetic oligonucleotide
uggaauucgacaggcuuca

SEQ ID NO: 2400631 - RNA, 19 nt, Artificial Sequence
  Description of Artificial Sequence: Synthetic oligonucleotide
agguaacccaacuuggcaa

SEQ ID NO: 2400632 - RNA, 19 nt, Artificial Sequence
  Description of Artificial Sequence: Synthetic oligonucleotide
uggcugagauuucuuauau

SEQ ID NO: 2400633 - RNA, 19 nt, Artificial Sequence
  Description of Artificial Sequence: Synthetic oligonucleotide
aagcgggugaguucugcca

SEQ ID NO: 2400634 - RNA, 19 nt, Artificial Sequence
  Description of Artificial Sequence: Synthetic oligonucleotide
acagacgugggaugcaggu

SEQ ID NO: 2400635 - RNA, 19 nt, Artificial Sequence
  Description of Artificial Sequence: Synthetic oligonucleotide
ugccuuggggagcaaacac

SEQ ID NO: 2400636 - RNA, 19 nt, Artificial Sequence
  Description of Artificial Sequence: Synthetic oligonucleotide
caaagguccagguaaccca

SEQ ID NO: 2400637 - RNA, 19 nt, Artificial Sequence
  Description of Artificial Sequence: Synthetic oligonucleotide
ucacuacuagagcuaugug

SEQ ID NO: 2400638 - RNA, 19 nt, Artificial Sequence
  Description of Artificial Sequence: Synthetic oligonucleotide
cuugccuuggggagcaaac

SEQ ID NO: 2400639 - RNA, 19 nt, Artificial Sequence
  Description of Artificial Sequence: Synthetic oligonucleotide
caaaguacuuggugggcug

SEQ ID NO: 2400640 - RNA, 19 nt, Artificial Sequence
  Description of Artificial Sequence: Synthetic oligonucleotide
ugagagaacuugugugcca

SEQ ID NO: 2400641 - RNA, 19 nt, Artificial Sequence
  Description of Artificial Sequence: Synthetic oligonucleotide
aggugauagguccaguuuu

SEQ ID NO: 2400642 - RNA, 19 nt, Artificial Sequence
  Description of Artificial Sequence: Synthetic oligonucleotide
agaccaacuucagaacuag

SEQ ID NO: 2400643 - RNA, 19 nt, Artificial Sequence
  Description of Artificial Sequence: Synthetic oligonucleotide
guacccaaauucuuuggca

SEQ ID NO: 2400644 - RNA, 19 nt, Artificial Sequence
  Description of Artificial Sequence: Synthetic oligonucleotide
uuagcgcguuccuucacca

SEQ ID NO: 2400645 - RNA, 19 nt, Artificial Sequence
  Description of Artificial Sequence: Synthetic oligonucleotide
ugcugcgggugccacagcc

SEQ ID NO: 2400646 - RNA, 19 nt, Artificial Sequence
  Description of Artificial Sequence: Synthetic oligonucleotide
uggggagacaaacucucuc

SEQ ID NO: 2400647 - RNA, 19 nt, Artificial Sequence
  Description of Artificial Sequence: Synthetic oligonucleotide
cucuguuguuuugaguugc

SEQ ID NO: 2400648 - RNA, 19 nt, Artificial Sequence
  Description of Artificial Sequence: Synthetic oligonucleotide
ggcuucaggugauaggucc

SEQ ID NO: 2400649 - RNA, 19 nt, Artificial Sequence
  Description of Artificial Sequence: Synthetic oligonucleotide
aagagaagccgagcgccuc

SEQ ID NO: 2400650 - RNA, 19 nt, Artificial Sequence
  Description of Artificial Sequence: Synthetic oligonucleotide
uaagcgggugaguucugcc

SEQ ID NO: 2400651 - RNA, 19 nt, Artificial Sequence
  Description of Artificial Sequence: Synthetic oligonucleotide
cuucaccacaccaggguug

SEQ ID NO: 2400652 - RNA, 19 nt, Artificial Sequence
  Description of Artificial Sequence: Synthetic oligonucleotide
gcaauuuaagaugagggga

SEQ ID NO: 2400653 - RNA, 19 nt, Artificial Sequence
  Description of Artificial Sequence: Synthetic oligonucleotide
gguaacccaacuuggcaag

SEQ ID NO: 2400654 - RNA, 19 nt, Artificial Sequence
  Description of Artificial Sequence: Synthetic oligonucleotide
uguuuugaugaagggcuga

SEQ ID NO: 2400655 - RNA, 19 nt, Artificial Sequence
  Description of Artificial Sequence: Synthetic oligonucleotide
cuuuucuagucguccuaag

SEQ ID NO: 2400656 - RNA, 19 nt, Artificial Sequence
  Description of Artificial Sequence: Synthetic oligonucleotide
cugagagaacuugugugcc

SEQ ID NO: 2400657 - RNA, 19 nt, Artificial Sequence
  Description of Artificial Sequence: Synthetic oligonucleotide
agagcuauguggaauucga

SEQ ID NO: 2400658 - RNA, 19 nt, Artificial Sequence
  Description of Artificial Sequence: Synthetic oligonucleotide
ucgggacucaauuucuuua

SEQ ID NO: 2400659 - RNA, 19 nt, Artificial Sequence
  Description of Artificial Sequence: Synthetic oligonucleotide
aggcccuguagucuguaag

SEQ ID NO: 2400660 - RNA, 19 nt, Artificial Sequence
  Description of Artificial Sequence: Synthetic oligonucleotide
uacuuaacugagagaacuu

SEQ ID NO: 2400661 - RNA, 19 nt, Artificial Sequence
  Description of Artificial Sequence: Synthetic oligonucleotide
agucuuuacaaagguccag

SEQ ID NO: 2400662 - RNA, 19 nt, Artificial Sequence
  Description of Artificial Sequence: Synthetic oligonucleotide
gacuggaaggucacucggg

SEQ ID NO: 2400663 - RNA, 19 nt, Artificial Sequence
  Description of Artificial Sequence: Synthetic oligonucleotide
acaaggggccucucuacug

SEQ ID NO: 2400664 - RNA, 19 nt, Artificial Sequence
  Description of Artificial Sequence: Synthetic oligonucleotide
uuucacuacuagagcuaug

SEQ ID NO: 2400665 - RNA, 19 nt, Artificial Sequence
  Description of Artificial Sequence: Synthetic oligonucleotide
gugggaugcagguagucca

SEQ ID NO: 2400666 - RNA, 19 nt, Artificial Sequence
  Description of Artificial Sequence: Synthetic oligonucleotide
gagaacuugugugccauuc

SEQ ID NO: 2400667 - RNA, 19 nt, Artificial Sequence
  Description of Artificial Sequence: Synthetic oligonucleotide
uaggugaaccacagacgug

SEQ ID NO: 2400668 - RNA, 19 nt, Artificial Sequence
  Description of Artificial Sequence: Synthetic oligonucleotide
caaacucucucucugcuaa

SEQ ID NO: 2400669 - RNA, 19 nt, Artificial Sequence
  Description of Artificial Sequence: Synthetic oligonucleotide
agcgccucauuugugaugu

SEQ ID NO: 2400670 - RNA, 19 nt, Artificial Sequence
  Description of Artificial Sequence: Synthetic oligonucleotide
ggggagcaaacacugcugg

SEQ ID NO: 2400671 - RNA, 19 nt, Artificial Sequence
  Description of Artificial Sequence: Synthetic oligonucleotide
uacuagagcuauguggaau

SEQ ID NO: 2400672 - RNA, 19 nt, Artificial Sequence
  Description of Artificial Sequence: Synthetic oligonucleotide
cuaaccugcucuguugaug

SEQ ID NO: 2400673 - RNA, 19 nt, Artificial Sequence
  Description of Artificial Sequence: Synthetic oligonucleotide
cuaggugaaccacagacgu

SEQ ID NO: 2400674 - RNA, 19 nt, Artificial Sequence
  Description of Artificial Sequence: Synthetic oligonucleotide
ucaucaaggcaugcaugcc

SEQ ID NO: 2400675 - RNA, 19 nt, Artificial Sequence
  Description of Artificial Sequence: Synthetic oligonucleotide
gcuggcuguacccaaauuc

SEQ ID NO: 2400676 - RNA, 19 nt, Artificial Sequence
  Description of Artificial Sequence: Synthetic oligonucleotide
uacaaagguccagguaacc

SEQ ID NO: 2400677 - RNA, 19 nt, Artificial Sequence
  Description of Artificial Sequence: Synthetic oligonucleotide
guugcugcgggugccacag

SEQ ID NO: 2400678 - RNA, 19 nt, Artificial Sequence
  Description of Artificial Sequence: Synthetic oligonucleotide
cuucauuacuuaacugaga

SEQ ID NO: 2400679 - RNA, 19 nt, Artificial Sequence
  Description of Artificial Sequence: Synthetic oligonucleotide
gucaauucugcucuugccu

SEQ ID NO: 2400680 - RNA, 19 nt, Artificial Sequence
  Description of Artificial Sequence: Synthetic oligonucleotide
caugccugagucuguuuug

SEQ ID NO: 2400681 - RNA, 19 nt, Artificial Sequence
  Description of Artificial Sequence: Synthetic oligonucleotide
augaggggauucuggggag

SEQ ID NO: 2400682 - RNA, 19 nt, Artificial Sequence
  Description of Artificial Sequence: Synthetic oligonucleotide
auucgacaggcuucaggug

SEQ ID NO: 2400683 - RNA, 19 nt, Artificial Sequence
  Description of Artificial Sequence: Synthetic oligonucleotide
accaaguuuguuaauuaaa

SEQ ID NO: 2400684 - RNA, 19 nt, Artificial Sequence
  Description of Artificial Sequence: Synthetic oligonucleotide
cuuaacugagagaacuugu

SEQ ID NO: 2400685 - RNA, 19 nt, Artificial Sequence
  Description of Artificial Sequence: Synthetic oligonucleotide
ucucuacuggcuugcucug

SEQ ID NO: 2400686 - RNA, 19 nt, Artificial Sequence
  Description of Artificial Sequence: Synthetic oligonucleotide
cuguuuugaugaagggcug

SEQ ID NO: 2400687 - RNA, 19 nt, Artificial Sequence
  Description of Artificial Sequence: Synthetic oligonucleotide
cucuguugauggcucacug

SEQ ID NO: 2400688 - RNA, 19 nt, Artificial Sequence
  Description of Artificial Sequence: Synthetic oligonucleotide
cuuggggagcaaacacugc

SEQ ID NO: 2400689 - RNA, 19 nt, Artificial Sequence
  Description of Artificial Sequence: Synthetic oligonucleotide
gaguugcucuacaaaguac

SEQ ID NO: 2400690 - RNA, 19 nt, Artificial Sequence
  Description of Artificial Sequence: Synthetic oligonucleotide
uuguuuugaguugcucuac

SEQ ID NO: 2400691 - RNA, 19 nt, Artificial Sequence
  Description of Artificial Sequence: Synthetic oligonucleotide
uuguggcugagauuucuua

SEQ ID NO: 2400692 - RNA, 19 nt, Artificial Sequence
  Description of Artificial Sequence: Synthetic oligonucleotide
ugccaaggaagccccuucu

SEQ ID NO: 2400693 - RNA, 19 nt, Artificial Sequence
  Description of Artificial Sequence: Synthetic oligonucleotide
ucugggcuugcagagggcu

SEQ ID NO: 2400694 - RNA, 19 nt, Artificial Sequence
  Description of Artificial Sequence: Synthetic oligonucleotide
auguuuuggugaucccuga

SEQ ID NO: 2400695 - RNA, 19 nt, Artificial Sequence
  Description of Artificial Sequence: Synthetic oligonucleotide
agccuucuaggugaaccac

SEQ ID NO: 2400696 - RNA, 19 nt, Artificial Sequence
  Description of Artificial Sequence: Synthetic oligonucleotide
ggggccuguacacugcagg

SEQ ID NO: 2400697 - RNA, 19 nt, Artificial Sequence
  Description of Artificial Sequence: Synthetic oligonucleotide
ggaagaccaacuucagaac

SEQ ID NO: 2400698 - RNA, 19 nt, Artificial Sequence
  Description of Artificial Sequence: Synthetic oligonucleotide
auacacucuguuguuuuga

SEQ ID NO: 2400699 - RNA, 19 nt, Artificial Sequence
  Description of Artificial Sequence: Synthetic oligonucleotide
gcaagagaagccgagcgcc

SEQ ID NO: 2400700 - RNA, 19 nt, Artificial Sequence
  Description of Artificial Sequence: Synthetic oligonucleotide
cucucuacuggcuugcucu

SEQ ID NO: 2400701 - RNA, 19 nt, Artificial Sequence
  Description of Artificial Sequence: Synthetic oligonucleotide
ugucucuuuucuagucguc

SEQ ID NO: 2400702 - RNA, 19 nt, Artificial Sequence
  Description of Artificial Sequence: Synthetic oligonucleotide
acacucuguuguuuugagu

SEQ ID NO: 2400703 - RNA, 19 nt, Artificial Sequence
  Description of Artificial Sequence: Synthetic oligonucleotide
ccaaggaagccccuucugg

SEQ ID NO: 2400704 - RNA, 19 nt, Artificial Sequence
  Description of Artificial Sequence: Synthetic oligonucleotide
  modified_base (15)..(15): a, c, u, g, unknown or other
ucacuguccgugguncugc

SEQ ID NO: 2400705 - RNA, 19 nt, Artificial Sequence
  Description of Artificial Sequence: Synthetic oligonucleotide
ugggucaucaaggcaugca

SEQ ID NO: 2400706 - RNA, 19 nt, Artificial Sequence
  Description of Artificial Sequence: Synthetic oligonucleotide
  modified_base (16)..(16): a, c, u, g, unknown or other
cucacuguccgugguncug

SEQ ID NO: 2400707 - RNA, 19 nt, Artificial Sequence
  Description of Artificial Sequence: Synthetic oligonucleotide
  modified_base (9)..(9): a, c, u, g, unknown or other
uccgugguncugcucugcu

SEQ ID NO: 2400708 - RNA, 19 nt, Artificial Sequence
  Description of Artificial Sequence: Synthetic oligonucleotide
cagcuaaccugcucuguug

SEQ ID NO: 2400709 - RNA, 19 nt, Artificial Sequence
  Description of Artificial Sequence: Synthetic oligonucleotide
cugcuaaguagucuuuaca

SEQ ID NO: 2400710 - RNA, 19 nt, Artificial Sequence
  Description of Artificial Sequence: Synthetic oligonucleotide
guuuuggugaucccugacu

SEQ ID NO: 2400711 - RNA, 19 nt, Artificial Sequence
  Description of Artificial Sequence: Synthetic oligonucleotide
gcugagauuucuuauauuu

SEQ ID NO: 2400712 - RNA, 19 nt, Artificial Sequence
  Description of Artificial Sequence: Synthetic oligonucleotide
guggaauucgacaggcuuc

SEQ ID NO: 2400713 - RNA, 19 nt, Artificial Sequence
  Description of Artificial Sequence: Synthetic oligonucleotide
cacagacgugggaugcagg

SEQ ID NO: 2400714 - RNA, 19 nt, Artificial Sequence
  Description of Artificial Sequence: Synthetic oligonucleotide
cugugcagccuucuaggug

SEQ ID NO: 2400715 - RNA, 19 nt, Artificial Sequence
  Description of Artificial Sequence: Synthetic oligonucleotide
agcaaacacugcuggcugu

SEQ ID NO: 2400716 - RNA, 19 nt, Artificial Sequence
  Description of Artificial Sequence: Synthetic oligonucleotide
acuucagaacuagucaauu

SEQ ID NO: 2400717 - RNA, 19 nt, Artificial Sequence
  Description of Artificial Sequence: Synthetic oligonucleotide
agagaagccgagcgccuca

SEQ ID NO: 2400718 - RNA, 19 nt, Artificial Sequence
  Description of Artificial Sequence: Synthetic oligonucleotide
cagguaacccaacuuggca

SEQ ID NO: 2400719 - RNA, 19 nt, Artificial Sequence
  Description of Artificial Sequence: Synthetic oligonucleotide
cuagucaauucugcucuug

SEQ ID NO: 2400720 - RNA, 19 nt, Artificial Sequence
  Description of Artificial Sequence: Synthetic oligonucleotide
cuuuacaaagguccaggua

SEQ ID NO: 2400721 - RNA, 19 nt, Artificial Sequence
  Description of Artificial Sequence: Synthetic oligonucleotide
ucaauuucuuuagcgcguu

SEQ ID NO: 2400722 - RNA, 19 nt, Artificial Sequence
  Description of Artificial Sequence: Synthetic oligonucleotide
cuucaggugauagguccag

SEQ ID NO: 2400723 - RNA, 19 nt, Artificial Sequence
  Description of Artificial Sequence: Synthetic oligonucleotide
ggcauacugcacaaggggc

SEQ ID NO: 2400724 - RNA, 19 nt, Artificial Sequence
  Description of Artificial Sequence: Synthetic oligonucleotide
ccuuggggagcaaacacug

SEQ ID NO: 2400725 - RNA, 19 nt, Artificial Sequence
  Description of Artificial Sequence: Synthetic oligonucleotide
gccuguacacugcaggccc

SEQ ID NO: 2400726 - RNA, 19 nt, Artificial Sequence
  Description of Artificial Sequence: Synthetic oligonucleotide
ucaaggcaugcaugccuga

SEQ ID NO: 2400727 - RNA, 19 nt, Artificial Sequence
  Description of Artificial Sequence: Synthetic oligonucleotide
ucuggccaucuucccagcu

SEQ ID NO: 2400728 - RNA, 19 nt, Artificial Sequence
  Description of Artificial Sequence: Synthetic oligonucleotide
ggcaagagaagccgagcgc

SEQ ID NO: 2400729 - RNA, 19 nt, Artificial Sequence
  Description of Artificial Sequence: Synthetic oligonucleotide
cuaagcgggugaguucugc

SEQ ID NO: 2400730 - RNA, 19 nt, Artificial Sequence
  Description of Artificial Sequence: Synthetic oligonucleotide
  modified_base (3)..(3): a, c, u, g, unknown or other
guncugcucugcucugugc

SEQ ID NO: 2400731 - RNA, 19 nt, Artificial Sequence
  Description of Artificial Sequence: Synthetic oligonucleotide
uugccuuggggagcaaaca

SEQ ID NO: 2400732 - RNA, 19 nt, Artificial Sequence
  Description of Artificial Sequence: Synthetic oligonucleotide
agccgagcgccucauuugu

SEQ ID NO: 2400733 - RNA, 19 nt, Artificial Sequence
  Description of Artificial Sequence: Synthetic oligonucleotide
gagcggggccuguacacug

SEQ ID NO: 2400734 - RNA, 19 nt, Artificial Sequence
  Description of Artificial Sequence: Synthetic oligonucleotide
cuggcuguacccaaauucu

SEQ ID NO: 2400735 - RNA, 19 nt, Artificial Sequence
  Description of Artificial Sequence: Synthetic oligonucleotide
ugcucuugccuuggggagc

SEQ ID NO: 2400736 - RNA, 19 nt, Artificial Sequence
  Description of Artificial Sequence: Synthetic oligonucleotide
caccaaguuuguuaauuaa

SEQ ID NO: 2400737 - RNA, 19 nt, Artificial Sequence
  Description of Artificial Sequence: Synthetic oligonucleotide
gugauguuuuggugauccc

SEQ ID NO: 2400738 - RNA, 19 nt, Artificial Sequence
  Description of Artificial Sequence: Synthetic oligonucleotide
ucccagcuaaccugcucug

SEQ ID NO: 2400739 - RNA, 19 nt, Artificial Sequence
  Description of Artificial Sequence: Synthetic oligonucleotide
  modified_base (4)..(4): a, c, u, g, unknown or other
gguncugcucugcucugug

SEQ ID NO: 2400740 - RNA, 19 nt, Artificial Sequence
  Description of Artificial Sequence: Synthetic oligonucleotide
gaugcagguaguccaaguu

SEQ ID NO: 2400741 - RNA, 19 nt, Artificial Sequence
  Description of Artificial Sequence: Synthetic oligonucleotide
ggauucuggggagacaaac

SEQ ID NO: 2400742 - RNA, 19 nt, Artificial Sequence
  Description of Artificial Sequence: Synthetic oligonucleotide
gugccauuccacugccaag

SEQ ID NO: 2400743 - RNA, 19 nt, Artificial Sequence
  Description of Artificial Sequence: Synthetic oligonucleotide
caaggcaugcaugccugag

SEQ ID NO: 2400744 - RNA, 19 nt, Artificial Sequence
  Description of Artificial Sequence: Synthetic oligonucleotide
cucaauuucuuuagcgcgu

SEQ ID NO: 2400745 - RNA, 19 nt, Artificial Sequence
  Description of Artificial Sequence: Synthetic oligonucleotide
agcgggugaguucugccau

SEQ ID NO: 2400746 - RNA, 19 nt, Artificial Sequence
  Description of Artificial Sequence: Synthetic oligonucleotide
uagucguccuaagcgggug

SEQ ID NO: 2400747 - RNA, 19 nt, Artificial Sequence
  Description of Artificial Sequence: Synthetic oligonucleotide
  modified_base (2)..(2): a, c, u, g, unknown or other
cnguaacaccccaccguug

SEQ ID NO: 2400748 - RNA, 19 nt, Artificial Sequence
  Description of Artificial Sequence: Synthetic oligonucleotide
  modified_base (11)..(11): a, c, u, g, unknown or other
uguccgugguncugcucug

SEQ ID NO: 2400749 - RNA, 19 nt, Artificial Sequence
  Description of Artificial Sequence: Synthetic oligonucleotide
ucggagcggggccuguaca

SEQ ID NO: 2400750 - RNA, 19 nt, Artificial Sequence
  Description of Artificial Sequence: Synthetic oligonucleotide
ugaagggcugaagcaauuu

SEQ ID NO: 2400751 - RNA, 19 nt, Artificial Sequence
  Description of Artificial Sequence: Synthetic oligonucleotide
acccaaauucuuuggcaua

SEQ ID NO: 2400752 - RNA, 19 nt, Artificial Sequence
  Description of Artificial Sequence: Synthetic oligonucleotide
uggcuguacccaaauucuu

SEQ ID NO: 2400753 - RNA, 19 nt, Artificial Sequence
  Description of Artificial Sequence: Synthetic oligonucleotide
gccugagucuguuuugaug

SEQ ID NO: 2400754 - RNA, 19 nt, Artificial Sequence
  Description of Artificial Sequence: Synthetic oligonucleotide
agucguccuaagcggguga

SEQ ID NO: 2400755 - RNA, 19 nt, Artificial Sequence
  Description of Artificial Sequence: Synthetic oligonucleotide
gauucuggggagacaaacu

SEQ ID NO: 2400756 - RNA, 19 nt, Artificial Sequence
  Description of Artificial Sequence: Synthetic oligonucleotide
gagcuauguggaauucgac

SEQ ID NO: 2400757 - RNA, 19 nt, Artificial Sequence
  Description of Artificial Sequence: Synthetic oligonucleotide
uugauggcucacuguccgu

SEQ ID NO: 2400758 - RNA, 19 nt, Artificial Sequence
  Description of Artificial Sequence: Synthetic oligonucleotide
cuuuagcgcguuccuucac

SEQ ID NO: 2400759 - RNA, 19 nt, Artificial Sequence
  Description of Artificial Sequence: Synthetic oligonucleotide
cuagagcuauguggaauuc

SEQ ID NO: 2400760 - RNA, 19 nt, Artificial Sequence
  Description of Artificial Sequence: Synthetic oligonucleotide
augccugagucuguuuuga

SEQ ID NO: 2400761 - RNA, 19 nt, Artificial Sequence
  Description of Artificial Sequence: Synthetic oligonucleotide
uggugaucccugacuggaa

SEQ ID NO: 2400762 - RNA, 19 nt, Artificial Sequence
  Description of Artificial Sequence: Synthetic oligonucleotide
cuuuggcauacugcacaag

SEQ ID NO: 2400763 - RNA, 19 nt, Artificial Sequence
  Description of Artificial Sequence: Synthetic oligonucleotide
ggucaucaaggcaugcaug

SEQ ID NO: 2400764 - RNA, 19 nt, Artificial Sequence
  Description of Artificial Sequence: Synthetic oligonucleotide
gguaguccaaguugacaga

SEQ ID NO: 2400765 - RNA, 19 nt, Artificial Sequence
  Description of Artificial Sequence: Synthetic oligonucleotide
ugucaccaaguuuguuaau

SEQ ID NO: 2400766 - RNA, 19 nt, Artificial Sequence
  Description of Artificial Sequence: Synthetic oligonucleotide
cagccuucuaggugaacca

SEQ ID NO: 2400767 - RNA, 19 nt, Artificial Sequence
  Description of Artificial Sequence: Synthetic oligonucleotide
ccuguagucuguaagcaaa

SEQ ID NO: 2400768 - RNA, 19 nt, Artificial Sequence
  Description of Artificial Sequence: Synthetic oligonucleotide
cugcucugcucugugcagc

SEQ ID NO: 2400769 - RNA, 19 nt, Artificial Sequence
  Description of Artificial Sequence: Synthetic oligonucleotide
gggagacaaacucucucuc

SEQ ID NO: 2400770 - RNA, 19 nt, Artificial Sequence
  Description of Artificial Sequence: Synthetic oligonucleotide
gggccuguacacugcaggc

SEQ ID NO: 2400771 - RNA, 19 nt, Artificial Sequence
  Description of Artificial Sequence: Synthetic oligonucleotide
cuacuggcuugcucugcac

SEQ ID NO: 2400772 - RNA, 19 nt, Artificial Sequence
  Description of Artificial Sequence: Synthetic oligonucleotide
ccucauuugugauguuuug

SEQ ID NO: 2400773 - RNA, 19 nt, Artificial Sequence
  Description of Artificial Sequence: Synthetic oligonucleotide
acuagucaauucugcucuu

SEQ ID NO: 2400774 - RNA, 19 nt, Artificial Sequence
  Description of Artificial Sequence: Synthetic oligonucleotide
uucaggugauagguccagu

SEQ ID NO: 2400775 - RNA, 19 nt, Artificial Sequence
  Description of Artificial Sequence: Synthetic oligonucleotide
acuuggcaagagaagccga

SEQ ID NO: 2400776 - RNA, 19 nt, Artificial Sequence
  Description of Artificial Sequence: Synthetic oligonucleotide
cucaggucuucauuacuua

SEQ ID NO: 2400777 - RNA, 19 nt, Artificial Sequence
  Description of Artificial Sequence: Synthetic oligonucleotide
guaagcaaaggaagaccaa

SEQ ID NO: 2400778 - RNA, 19 nt, Artificial Sequence
  Description of Artificial Sequence: Synthetic oligonucleotide
agcggggccuguacacugc

SEQ ID NO: 2400779 - RNA, 19 nt, Artificial Sequence
  Description of Artificial Sequence: Synthetic oligonucleotide
  modified_base (12)..(12): a, c, u, g, unknown or other
cuguccgugguncugcucu

SEQ ID NO: 2400780 - RNA, 19 nt, Artificial Sequence
  Description of Artificial Sequence: Synthetic oligonucleotide
acgugggaugcagguaguc

SEQ ID NO: 2400781 - RNA, 19 nt, Artificial Sequence
  Description of Artificial Sequence: Synthetic oligonucleotide
gggagcaaacacugcuggc

SEQ ID NO: 2400782 - RNA, 19 nt, Artificial Sequence
  Description of Artificial Sequence: Synthetic oligonucleotide
cucucugcuaaguagucuu

SEQ ID NO: 2400783 - RNA, 19 nt, Artificial Sequence
  Description of Artificial Sequence: Synthetic oligonucleotide
  modified_base (5)..(5): a, c, u, g, unknown or other
ugguncugcucugcucugu

SEQ ID NO: 2400784 - RNA, 19 nt, Artificial Sequence
  Description of Artificial Sequence: Synthetic oligonucleotide
gucguccuaagcgggugag

SEQ ID NO: 2400785 - RNA, 19 nt, Artificial Sequence
  Description of Artificial Sequence: Synthetic oligonucleotide
gugaaccacagacguggga

SEQ ID NO: 2400786 - RNA, 19 nt, Artificial Sequence
  Description of Artificial Sequence: Synthetic oligonucleotide
caccccaccguugucacca

SEQ ID NO: 2400787 - RNA, 19 nt, Artificial Sequence
  Description of Artificial Sequence: Synthetic oligonucleotide
cucuacuggcuugcucugc

SEQ ID NO: 2400788 - RNA, 19 nt, Artificial Sequence
  Description of Artificial Sequence: Synthetic oligonucleotide
guccuaagcgggugaguuc

SEQ ID NO: 2400789 - RNA, 19 nt, Artificial Sequence
  Description of Artificial Sequence: Synthetic oligonucleotide
  modified_base (19)..(19): a, c, u, g, unknown or other
uggcucacuguccguggun

SEQ ID NO: 2400790 - RNA, 19 nt, Artificial Sequence
  Description of Artificial Sequence: Synthetic oligonucleotide
  modified_base (6)..(6): a, c, u, g, unknown or other
gugguncugcucugcucug

SEQ ID NO: 2400791 - RNA, 19 nt, Artificial Sequence
  Description of Artificial Sequence: Synthetic oligonucleotide
cgggacucaauuucuuuag

SEQ ID NO: 2400792 - RNA, 19 nt, Artificial Sequence
  Description of Artificial Sequence: Synthetic oligonucleotide
  modified_base (10)..(10): a, c, u, g, unknown or other
guccgugguncugcucugc

SEQ ID NO: 2400793 - RNA, 19 nt, Artificial Sequence
  Description of Artificial Sequence: Synthetic oligonucleotide
ugccugagucuguuuugau

SEQ ID NO: 2400794 - RNA, 19 nt, Artificial Sequence
  Description of Artificial Sequence: Synthetic oligonucleotide
uagcgcguuccuucaccac

SEQ ID NO: 2400795 - RNA, 19 nt, Artificial Sequence
  Description of Artificial Sequence: Synthetic oligonucleotide
gucaccaaguuuguuaauu

SEQ ID NO: 2400796 - RNA, 19 nt, Artificial Sequence
  Description of Artificial Sequence: Synthetic oligonucleotide
agagaacuugugugccauu

SEQ ID NO: 2400797 - RNA, 19 nt, Artificial Sequence
  Description of Artificial Sequence: Synthetic oligonucleotide
cugggcuugcagagggcuc

SEQ ID NO: 2400798 - RNA, 19 nt, Artificial Sequence
  Description of Artificial Sequence: Synthetic oligonucleotide
cuacuagagcuauguggaa

SEQ ID NO: 2400799 - RNA, 19 nt, Artificial Sequence
  Description of Artificial Sequence: Synthetic oligonucleotide
uggugggcaucugggcuug

SEQ ID NO: 2400800 - RNA, 19 nt, Artificial Sequence
  Description of Artificial Sequence: Synthetic oligonucleotide
gccauguugcugcgggugc

SEQ ID NO: 2400801 - RNA, 19 nt, Artificial Sequence
  Description of Artificial Sequence: Synthetic oligonucleotide
ggagcaaacacugcuggcu

SEQ ID NO: 2400802 - RNA, 19 nt, Artificial Sequence
  Description of Artificial Sequence: Synthetic oligonucleotide
ggugaaccacagacguggg

SEQ ID NO: 2400803 - RNA, 19 nt, Artificial Sequence
  Description of Artificial Sequence: Synthetic oligonucleotide
cucggagcggggccuguac

SEQ ID NO: 2400804 - RNA, 19 nt, Artificial Sequence
  Description of Artificial Sequence: Synthetic oligonucleotide
guaguccaaguugacagau

SEQ ID NO: 2400805 - RNA, 19 nt, Artificial Sequence
  Description of Artificial Sequence: Synthetic oligonucleotide
  modified_base (13)..(13): a, c, u, g, unknown or other
acuguccgugguncugcuc

SEQ ID NO: 2400806 - RNA, 19 nt, Artificial Sequence
  Description of Artificial Sequence: Synthetic oligonucleotide
  modified_base (18)..(18): a, c, u, g, unknown or other
ggcucacuguccguggunc

SEQ ID NO: 2400807 - RNA, 19 nt, Artificial Sequence
  Description of Artificial Sequence: Synthetic oligonucleotide
cugggucaucaaggcaugc

SEQ ID NO: 2400808 - RNA, 19 nt, Artificial Sequence
  Description of Artificial Sequence: Synthetic oligonucleotide
cugagucuguuuugaugaa

SEQ ID NO: 2400809 - RNA, 19 nt, Artificial Sequence
  Description of Artificial Sequence: Synthetic oligonucleotide
cuguacacugcaggcccug

SEQ ID NO: 2400810 - RNA, 19 nt, Artificial Sequence
  Description of Artificial Sequence: Synthetic oligonucleotide
gggcuccugggucaucaag

SEQ ID NO: 2400811 - RNA, 19 nt, Artificial Sequence
  Description of Artificial Sequence: Synthetic oligonucleotide
auguggaauucgacaggcu

SEQ ID NO: 2400812 - RNA, 19 nt, Artificial Sequence
  Description of Artificial Sequence: Synthetic oligonucleotide
ggaaggucacucgggacuc

SEQ ID NO: 2400813 - RNA, 19 nt, Artificial Sequence
  Description of Artificial Sequence: Synthetic oligonucleotide
acugcacaaggggccucuc

SEQ ID NO: 2400814 - RNA, 19 nt, Artificial Sequence
  Description of Artificial Sequence: Synthetic oligonucleotide
gcgggugccacagccagcc

SEQ ID NO: 2400815 - RNA, 19 nt, Artificial Sequence
  Description of Artificial Sequence: Synthetic oligonucleotide
ggccuguacacugcaggcc

SEQ ID NO: 2400816 - RNA, 19 nt, Artificial Sequence
  Description of Artificial Sequence: Synthetic oligonucleotide
ugcaugccugagucuguuu

SEQ ID NO: 2400817 - RNA, 19 nt, Artificial Sequence
  Description of Artificial Sequence: Synthetic oligonucleotide
ucguccuaagcgggugagu

SEQ ID NO: 2400818 - RNA, 19 nt, Artificial Sequence
  Description of Artificial Sequence: Synthetic oligonucleotide
gucacucgggacucaauuu

SEQ ID NO: 2400819 - RNA, 19 nt, Artificial Sequence
  Description of Artificial Sequence: Synthetic oligonucleotide
cuagucguccuaagcgggu

SEQ ID NO: 2400820 - RNA, 19 nt, Artificial Sequence
  Description of Artificial Sequence: Synthetic oligonucleotide
augaagggcugaagcaauu

SEQ ID NO: 2400821 - RNA, 19 nt, Artificial Sequence
  Description of Artificial Sequence: Synthetic oligonucleotide
caagagaagccgagcgccu

SEQ ID NO: 2400822 - RNA, 19 nt, Artificial Sequence
  Description of Artificial Sequence: Synthetic oligonucleotide
cgugggaugcagguagucc

SEQ ID NO: 2400823 - RNA, 19 nt, Artificial Sequence
  Description of Artificial Sequence: Synthetic oligonucleotide
gggaugcagguaguccaag

SEQ ID NO: 2400824 - RNA, 19 nt, Artificial Sequence
  Description of Artificial Sequence: Synthetic oligonucleotide
cauguugcugcgggugcca

SEQ ID NO: 2400825 - RNA, 19 nt, Artificial Sequence
  Description of Artificial Sequence: Synthetic oligonucleotide
accaggguuguggcugaga

SEQ ID NO: 2400826 - RNA, 19 nt, Artificial Sequence
  Description of Artificial Sequence: Synthetic oligonucleotide
ggucacucgggacucaauu

SEQ ID NO: 2400827 - RNA, 19 nt, Artificial Sequence
  Description of Artificial Sequence: Synthetic oligonucleotide
  modified_base (7)..(7): a, c, u, g, unknown or other
cgugguncugcucugcucu

SEQ ID NO: 2400828 - RNA, 19 nt, Artificial Sequence
  Description of Artificial Sequence: Synthetic oligonucleotide
cacaaggggccucucuacu

SEQ ID NO: 2400829 - RNA, 19 nt, Artificial Sequence
  Description of Artificial Sequence: Synthetic oligonucleotide
ggaugcagguaguccaagu

SEQ ID NO: 2400830 - RNA, 19 nt, Artificial Sequence
  Description of Artificial Sequence: Synthetic oligonucleotide
caggugauagguccaguuu

SEQ ID NO: 2400831 - RNA, 19 nt, Artificial Sequence
  Description of Artificial Sequence: Synthetic oligonucleotide
acucgggacucaauuucuu

SEQ ID NO: 2400832 - RNA, 19 nt, Artificial Sequence
  Description of Artificial Sequence: Synthetic oligonucleotide
cacugcuggcuguacccaa

SEQ ID NO: 2400833 - RNA, 19 nt, Artificial Sequence
  Description of Artificial Sequence: Synthetic oligonucleotide
gcccuguagucuguaagca

SEQ ID NO: 2400834 - RNA, 19 nt, Artificial Sequence
  Description of Artificial Sequence: Synthetic oligonucleotide
ccacagacgugggaugcag

SEQ ID NO: 2400835 - RNA, 19 nt, Artificial Sequence
  Description of Artificial Sequence: Synthetic oligonucleotide
gcuucaggugauaggucca

SEQ ID NO: 2400836 - RNA, 19 nt, Artificial Sequence
  Description of Artificial Sequence: Synthetic oligonucleotide
ccgagcgccucauuuguga

SEQ ID NO: 2400837 - RNA, 19 nt, Artificial Sequence
  Description of Artificial Sequence: Synthetic oligonucleotide
ggccucucuacuggcuugc

SEQ ID NO: 2400838 - RNA, 19 nt, Artificial Sequence
  Description of Artificial Sequence: Synthetic oligonucleotide
cagccagcccucggagcgg

SEQ ID NO: 2400839 - RNA, 19 nt, Artificial Sequence
  Description of Artificial Sequence: Synthetic oligonucleotide
cucgggacucaauuucuuu

SEQ ID NO: 2400840 - RNA, 19 nt, Artificial Sequence
  Description of Artificial Sequence: Synthetic oligonucleotide
ggaauucgacaggcuucag

SEQ ID NO: 2400841 - RNA, 19 nt, Artificial Sequence
  Description of Artificial Sequence: Synthetic oligonucleotide
gaccaacuucagaacuagu

SEQ ID NO: 2400842 - RNA, 19 nt, Artificial Sequence
  Description of Artificial Sequence: Synthetic oligonucleotide
gcgggugaguucugccaug

SEQ ID NO: 2400843 - RNA, 19 nt, Artificial Sequence
  Description of Artificial Sequence: Synthetic oligonucleotide
cuggggagacaaacucucu

SEQ ID NO: 2400844 - RNA, 19 nt, Artificial Sequence
  Description of Artificial Sequence: Synthetic oligonucleotide
gcaugccugagucuguuuu

SEQ ID NO: 2400845 - RNA, 19 nt, Artificial Sequence
  Description of Artificial Sequence: Synthetic oligonucleotide
ccucucuacuggcuugcuc

SEQ ID NO: 2400846 - RNA, 19 nt, Artificial Sequence
  Description of Artificial Sequence: Synthetic oligonucleotide
gcucuugccuuggggagca

SEQ ID NO: 2400847 - RNA, 19 nt, Artificial Sequence
  Description of Artificial Sequence: Synthetic oligonucleotide
cccuguagucuguaagcaa

SEQ ID NO: 2400848 - RNA, 19 nt, Artificial Sequence
  Description of Artificial Sequence: Synthetic oligonucleotide
gaagccccuucuggccauc

SEQ ID NO: 2400849 - RNA, 19 nt, Artificial Sequence
  Description of Artificial Sequence: Synthetic oligonucleotide
gacgugggaugcagguagu

SEQ ID NO: 2400850 - RNA, 19 nt, Artificial Sequence
  Description of Artificial Sequence: Synthetic oligonucleotide
  modified_base (8)..(8): a, c, u, g, unknown or other
ccgugguncugcucugcuc

SEQ ID NO: 2400851 - RNA, 19 nt, Artificial Sequence
  Description of Artificial Sequence: Synthetic oligonucleotide
ccuaagcgggugaguucug

SEQ ID NO: 2400852 - RNA, 19 nt, Artificial Sequence
  Description of Artificial Sequence: Synthetic oligonucleotide
cagacgugggaugcaggua

SEQ ID NO: 2400853 - RNA, 19 nt, Artificial Sequence
  Description of Artificial Sequence: Synthetic oligonucleotide
cggagcggggccuguacac

SEQ ID NO: 2400854 - RNA, 19 nt, Artificial Sequence
  Description of Artificial Sequence: Synthetic oligonucleotide
aggucacucgggacucaau

SEQ ID NO: 2400855 - RNA, 19 nt, Artificial Sequence
  Description of Artificial Sequence: Synthetic oligonucleotide
ggcuguacccaaauucuuu

SEQ ID NO: 2400856 - RNA, 19 nt, Artificial Sequence
  Description of Artificial Sequence: Synthetic oligonucleotide
ggcaugcaugccugagucu

SEQ ID NO: 2400857 - RNA, 19 nt, Artificial Sequence
  Description of Artificial Sequence: Synthetic oligonucleotide
cccaccguugucaccaagu

SEQ ID NO: 2400858 - RNA, 19 nt, Artificial Sequence
  Description of Artificial Sequence: Synthetic oligonucleotide
ccagcccucggagcggggc

SEQ ID NO: 2400859 - RNA, 19 nt, Artificial Sequence
  Description of Artificial Sequence: Synthetic oligonucleotide
gccuuggggagcaaacacu

SEQ ID NO: 2400860 - RNA, 19 nt, Artificial Sequence
  Description of Artificial Sequence: Synthetic oligonucleotide
caccaggguuguggcugag

SEQ ID NO: 2400861 - RNA, 19 nt, Artificial Sequence
  Description of Artificial Sequence: Synthetic oligonucleotide
gugugccauuccacugcca

SEQ ID NO: 2400862 - RNA, 19 nt, Artificial Sequence
  Description of Artificial Sequence: Synthetic oligonucleotide
gagaagccgagcgccucau

SEQ ID NO: 2400863 - RNA, 19 nt, Artificial Sequence
  Description of Artificial Sequence: Synthetic oligonucleotide
accccaccguugucaccaa

SEQ ID NO: 2400864 - RNA, 19 nt, Artificial Sequence
  Description of Artificial Sequence: Synthetic oligonucleotide
gcugcgggugccacagcca

SEQ ID NO: 2400865 - RNA, 19 nt, Artificial Sequence
  Description of Artificial Sequence: Synthetic oligonucleotide
gcuaaccugcucuguugau

SEQ ID NO: 2400866 - RNA, 19 nt, Artificial Sequence
  Description of Artificial Sequence: Synthetic oligonucleotide
gccgagcgccucauuugug

SEQ ID NO: 2400867 - RNA, 19 nt, Artificial Sequence
  Description of Artificial Sequence: Synthetic oligonucleotide
gcggggccuguacacugca

SEQ ID NO: 2400868 - RNA, 19 nt, Artificial Sequence
  Description of Artificial Sequence: Synthetic oligonucleotide
gcucuguugauggcucacu

SEQ ID NO: 2400869 - RNA, 19 nt, Artificial Sequence
  Description of Artificial Sequence: Synthetic oligonucleotide
gggauucuggggagacaaa

SEQ ID NO: 2400870 - RNA, 19 nt, Artificial Sequence
  Description of Artificial Sequence: Synthetic oligonucleotide
ccccaccguugucaccaag

SEQ ID NO: 2400871 - RNA, 19 nt, Artificial Sequence
  Description of Artificial Sequence: Synthetic oligonucleotide
  modified_base (17)..(17): a, c, u, g, unknown or other
gcucacuguccgugguncu

SEQ ID NO: 2400872 - RNA, 19 nt, Artificial Sequence
  Description of Artificial Sequence: Synthetic oligonucleotide
ccagcuaaccugcucuguu

SEQ ID NO: 2400873 - RNA, 19 nt, Artificial Sequence
  Description of Artificial Sequence: Synthetic oligonucleotide
ccuucaccacaccaggguu

SEQ ID NO: 2400874 - RNA, 19 nt, Artificial Sequence
  Description of Artificial Sequence: Synthetic oligonucleotide
ggaagccccuucuggccau

SEQ ID NO: 2400875 - RNA, 19 nt, Artificial Sequence
  Description of Artificial Sequence: Synthetic oligonucleotide
gugcagccuucuaggugaa

SEQ ID NO: 2400876 - RNA, 19 nt, Artificial Sequence
  Description of Artificial Sequence: Synthetic oligonucleotide
ggagcggggccuguacacu

SEQ ID NO: 2400877 - RNA, 19 nt, Artificial Sequence
  Description of Artificial Sequence: Synthetic oligonucleotide
cgcguuccuucaccacacc

SEQ ID NO: 2400878 - RNA, 19 nt, Artificial Sequence
  Description of Artificial Sequence: Synthetic oligonucleotide
ccuguacacugcaggcccu

SEQ ID NO: 2400879 - RNA, 19 nt, Artificial Sequence
  Description of Artificial Sequence: Synthetic oligonucleotide
ccguugucaccaaguuugu

SEQ ID NO: 2400880 - RNA, 19 nt, Artificial Sequence
  Description of Artificial Sequence: Synthetic oligonucleotide
cguccuaagcgggugaguu

SEQ ID NO: 2400881 - RNA, 19 nt, Artificial Sequence
  Description of Artificial Sequence: Synthetic oligonucleotide
ccacaccaggguuguggcu

SEQ ID NO: 2400882 - RNA, 19 nt, Artificial Sequence
  Description of Artificial Sequence: Synthetic oligonucleotide
gggugaguucugccauguu

SEQ ID NO: 2400883 - RNA, 19 nt, Artificial Sequence
  Description of Artificial Sequence: Synthetic oligonucleotide
gcccucggagcggggccug

SEQ ID NO: 2400884 - RNA, 19 nt, Artificial Sequence
  Description of Artificial Sequence: Synthetic oligonucleotide
cccagcuaaccugcucugu

SEQ ID NO: 2400885 - RNA, 19 nt, Artificial Sequence
  Description of Artificial Sequence: Synthetic oligonucleotide
cgagcgccucauuugugau

SEQ ID NO: 2400886 - RNA, 19 nt, Artificial Sequence
  Description of Artificial Sequence: Synthetic oligonucleotide
cgggugccacagccagccc

SEQ ID NO: 2400887 - RNA, 19 nt, Artificial Sequence
  Description of Artificial Sequence: Synthetic oligonucleotide
cucuugccuuggggagcaa

SEQ ID NO: 2400888 - RNA, 19 nt, Artificial Sequence
  Description of Artificial Sequence: Synthetic oligonucleotide
gggcuugcagagggcuccu

SEQ ID NO: 2400889 - RNA, 19 nt, Artificial Sequence
  Description of Artificial Sequence: Synthetic oligonucleotide
gccucucuacuggcuugcu

SEQ ID NO: 2400890 - RNA, 19 nt, Artificial Sequence
  Description of Artificial Sequence: Synthetic oligonucleotide
cgggugaguucugccaugu

SEQ ID NO: 2400891 - RNA, 19 nt, Artificial Sequence
  Description of Artificial Sequence: Synthetic oligonucleotide
cguugucaccaaguuuguu

SEQ ID NO: 2400892 - RNA, 19 nt, Artificial Sequence
  Description of Artificial Sequence: Synthetic oligonucleotide
ccucggagcggggccugua

SEQ ID NO: 2400893 - RNA, 19 nt, Artificial Sequence
  Description of Artificial Sequence: Synthetic oligonucleotide
gcgccucauuugugauguu

SEQ ID NO: 2400894 - RNA, 19 nt, Artificial Sequence
  Description of Artificial Sequence: Synthetic oligonucleotide
cccucggagcggggccugu

SEQ ID NO: 2400895 - RNA, 19 nt, Artificial Sequence
  Description of Artificial Sequence: Synthetic oligonucleotide
  modified_base (1)..(1): a, c, u, g, unknown or other
nguaacaccccaccguugu

SEQ ID NO: 2400896 - RNA, 19 nt, Artificial Sequence
  Description of Artificial Sequence: Synthetic oligonucleotide
auuguauuaacccuuauac

SEQ ID NO: 2400897 - RNA, 19 nt, Artificial Sequence
  Description of Artificial Sequence: Synthetic oligonucleotide
aaaaguuagagauaucccg

SEQ ID NO: 2400898 - RNA, 19 nt, Artificial Sequence
  Description of Artificial Sequence: Synthetic oligonucleotide
auauuaaacauuuauguag

SEQ ID NO: 2400899 - RNA, 19 nt, Artificial Sequence
  Description of Artificial Sequence: Synthetic oligonucleotide
uuuacauaaaaucuuucgg

SEQ ID NO: 2400900 - RNA, 19 nt, Artificial Sequence
  Description of Artificial Sequence: Synthetic oligonucleotide
aaaacuggagcaucuagcc

SEQ ID NO: 2400901 - RNA, 19 nt, Artificial Sequence
  Description of Artificial Sequence: Synthetic oligonucleotide
aacucauuuacacaaguac

SEQ ID NO: 2400902 - RNA, 19 nt, Artificial Sequence
  Description of Artificial Sequence: Synthetic oligonucleotide
uuacauaaaaucuuucggg

SEQ ID NO: 2400903 - RNA, 19 nt, Artificial Sequence
  Description of Artificial Sequence: Synthetic oligonucleotide
uuaacccuuauacacaugg

SEQ ID NO: 2400904 - RNA, 19 nt, Artificial Sequence
  Description of Artificial Sequence: Synthetic oligonucleotide
uguauuaacccuuauacac

SEQ ID NO: 2400905 - RNA, 19 nt, Artificial Sequence
  Description of Artificial Sequence: Synthetic oligonucleotide
uacaugauaaaacuggagc

SEQ ID NO: 2400906 - RNA, 19 nt, Artificial Sequence
  Description of Artificial Sequence: Synthetic oligonucleotide
ucuaacaucaacaacacuu

SEQ ID NO: 2400907 - RNA, 19 nt, Artificial Sequence
  Description of Artificial Sequence: Synthetic oligonucleotide
aaccauauaacauuauugu

SEQ ID NO: 2400908 - RNA, 19 nt, Artificial Sequence
  Description of Artificial Sequence: Synthetic oligonucleotide
guaccuauuauuuugcagg

SEQ ID NO: 2400909 - RNA, 19 nt, Artificial Sequence
  Description of Artificial Sequence: Synthetic oligonucleotide
gauaagugaacauaaguac

SEQ ID NO: 2400910 - RNA, 19 nt, Artificial Sequence
  Description of Artificial Sequence: Synthetic oligonucleotide
aaaugauccuaucaucuuc

SEQ ID NO: 2400911 - RNA, 19 nt, Artificial Sequence
  Description of Artificial Sequence: Synthetic oligonucleotide
auaaguacuaugaauuucc

SEQ ID NO: 2400912 - RNA, 19 nt, Artificial Sequence
  Description of Artificial Sequence: Synthetic oligonucleotide
aaaauaacuuuccaacuca

SEQ ID NO: 2400913 - RNA, 19 nt, Artificial Sequence
  Description of Artificial Sequence: Synthetic oligonucleotide
auaacauuauuguauuaac

SEQ ID NO: 2400914 - RNA, 19 nt, Artificial Sequence
  Description of Artificial Sequence: Synthetic oligonucleotide
auuucaaaguucugguucc

SEQ ID NO: 2400915 - RNA, 19 nt, Artificial Sequence
  Description of Artificial Sequence: Synthetic oligonucleotide
aaacccaugauguugaaaa

SEQ ID NO: 2400916 - RNA, 19 nt, Artificial Sequence
  Description of Artificial Sequence: Synthetic oligonucleotide
ucauuuuacaugauaaaac

SEQ ID NO: 2400917 - RNA, 19 nt, Artificial Sequence
  Description of Artificial Sequence: Synthetic oligonucleotide
aauguuugcguauugcugu

SEQ ID NO: 2400918 - RNA, 19 nt, Artificial Sequence
  Description of Artificial Sequence: Synthetic oligonucleotide
uguaguaccuauuauuuug

SEQ ID NO: 2400919 - RNA, 19 nt, Artificial Sequence
  Description of Artificial Sequence: Synthetic oligonucleotide
auaguuauaaccaaaauau

SEQ ID NO: 2400920 - RNA, 19 nt, Artificial Sequence
  Description of Artificial Sequence: Synthetic oligonucleotide
guuagagauaucccgagcg

SEQ ID NO: 2400921 - RNA, 19 nt, Artificial Sequence
  Description of Artificial Sequence: Synthetic oligonucleotide
uaacauuauuguauuaacc

SEQ ID NO: 2400922 - RNA, 19 nt, Artificial Sequence
  Description of Artificial Sequence: Synthetic oligonucleotide
cuuaauacugcaaaugauc

SEQ ID NO: 2400923 - RNA, 19 nt, Artificial Sequence
  Description of Artificial Sequence: Synthetic oligonucleotide
aagcacagcaauaaaauag

SEQ ID NO: 2400924 - RNA, 19 nt, Artificial Sequence
  Description of Artificial Sequence: Synthetic oligonucleotide
guacuguuggcuuauaucc

SEQ ID NO: 2400925 - RNA, 19 nt, Artificial Sequence
  Description of Artificial Sequence: Synthetic oligonucleotide
ucuuaccacgcccugaucc

SEQ ID NO: 2400926 - RNA, 19 nt, Artificial Sequence
  Description of Artificial Sequence: Synthetic oligonucleotide
uacauaaaaucuuucggga

SEQ ID NO: 2400927 - RNA, 19 nt, Artificial Sequence
  Description of Artificial Sequence: Synthetic oligonucleotide
ucuguuauuuuagaaacug

SEQ ID NO: 2400928 - RNA, 19 nt, Artificial Sequence
  Description of Artificial Sequence: Synthetic oligonucleotide
uuacacaaguacaaguucu

SEQ ID NO: 2400929 - RNA, 19 nt, Artificial Sequence
  Description of Artificial Sequence: Synthetic oligonucleotide
uuauauccacuacagacac

SEQ ID NO: 2400930 - RNA, 19 nt, Artificial Sequence
  Description of Artificial Sequence: Synthetic oligonucleotide
aacaucaacaacacuugac

SEQ ID NO: 2400931 - RNA, 19 nt, Artificial Sequence
  Description of Artificial Sequence: Synthetic oligonucleotide
uauaacauuauuguauuaa

SEQ ID NO: 2400932 - RNA, 19 nt, Artificial Sequence
  Description of Artificial Sequence: Synthetic oligonucleotide
acaugauaaaacuggagca

SEQ ID NO: 2400933 - RNA, 19 nt, Artificial Sequence
  Description of Artificial Sequence: Synthetic oligonucleotide
aaguacuaugaauuuccuc

SEQ ID NO: 2400934 - RNA, 19 nt, Artificial Sequence
  Description of Artificial Sequence: Synthetic oligonucleotide
uuuccaacucauuagacau

SEQ ID NO: 2400935 - RNA, 19 nt, Artificial Sequence
  Description of Artificial Sequence: Synthetic oligonucleotide
ugaauuuccucauuuuaca

SEQ ID NO: 2400936 - RNA, 19 nt, Artificial Sequence
  Description of Artificial Sequence: Synthetic oligonucleotide
aacacuugacaaaaguuag

SEQ ID NO: 2400937 - RNA, 19 nt, Artificial Sequence
  Description of Artificial Sequence: Synthetic oligonucleotide
cugcuaaucacuuccaaag

SEQ ID NO: 2400938 - RNA, 19 nt, Artificial Sequence
  Description of Artificial Sequence: Synthetic oligonucleotide
acaucaacaacacuugaca

SEQ ID NO: 2400939 - RNA, 19 nt, Artificial Sequence
  Description of Artificial Sequence: Synthetic oligonucleotide
uuucuuucaaauaaccaua

SEQ ID NO: 2400940 - RNA, 19 nt, Artificial Sequence
  Description of Artificial Sequence: Synthetic oligonucleotide
aaaaucuuucgggagguag

SEQ ID NO: 2400941 - RNA, 19 nt, Artificial Sequence
  Description of Artificial Sequence: Synthetic oligonucleotide
aauacagggauaagugaac

SEQ ID NO: 2400942 - RNA, 19 nt, Artificial Sequence
  Description of Artificial Sequence: Synthetic oligonucleotide
ugacacaugaaguuuccag

SEQ ID NO: 2400943 - RNA, 19 nt, Artificial Sequence
  Description of Artificial Sequence: Synthetic oligonucleotide
aacccuuauacacauggga

SEQ ID NO: 2400944 - RNA, 19 nt, Artificial Sequence
  Description of Artificial Sequence: Synthetic oligonucleotide
gauaccuuaauacugcaaa

SEQ ID NO: 2400945 - RNA, 19 nt, Artificial Sequence
  Description of Artificial Sequence: Synthetic oligonucleotide
ucuuucgggagguagagac

SEQ ID NO: 2400946 - RNA, 19 nt, Artificial Sequence
  Description of Artificial Sequence: Synthetic oligonucleotide
caaaaguuagagauauccc

SEQ ID NO: 2400947 - RNA, 19 nt, Artificial Sequence
  Description of Artificial Sequence: Synthetic oligonucleotide
uuggcuuauauccacuaca

SEQ ID NO: 2400948 - RNA, 19 nt, Artificial Sequence
  Description of Artificial Sequence: Synthetic oligonucleotide
auaaaacuggagcaucuag

SEQ ID NO: 2400949 - RNA, 19 nt, Artificial Sequence
  Description of Artificial Sequence: Synthetic oligonucleotide
aaguuagagauaucccgag

SEQ ID NO: 2400950 - RNA, 19 nt, Artificial Sequence
  Description of Artificial Sequence: Synthetic oligonucleotide
aacuuuccaacucauuaga

SEQ ID NO: 2400951 - RNA, 19 nt, Artificial Sequence
  Description of Artificial Sequence: Synthetic oligonucleotide
auacacaugggacuaagca

SEQ ID NO: 2400952 - RNA, 19 nt, Artificial Sequence
  Description of Artificial Sequence: Synthetic oligonucleotide
uguccugugaauguuugcg

SEQ ID NO: 2400953 - RNA, 19 nt, Artificial Sequence
  Description of Artificial Sequence: Synthetic oligonucleotide
aacuggagcaucuagccaa

SEQ ID NO: 2400954 - RNA, 19 nt, Artificial Sequence
  Description of Artificial Sequence: Synthetic oligonucleotide
acauaaaaucuuucgggag

SEQ ID NO: 2400955 - RNA, 19 nt, Artificial Sequence
  Description of Artificial Sequence: Synthetic oligonucleotide
uaugaauuuccucauuuua

SEQ ID NO: 2400956 - RNA, 19 nt, Artificial Sequence
  Description of Artificial Sequence: Synthetic oligonucleotide
cagaauacagggauaagug

SEQ ID NO: 2400957 - RNA, 19 nt, Artificial Sequence
  Description of Artificial Sequence: Synthetic oligonucleotide
uuauguaguaccuauuauu

SEQ ID NO: 2400958 - RNA, 19 nt, Artificial Sequence
  Description of Artificial Sequence: Synthetic oligonucleotide
aaugguguagauguccuug

SEQ ID NO: 2400959 - RNA, 19 nt, Artificial Sequence
  Description of Artificial Sequence: Synthetic oligonucleotide
cuaacaucaacaacacuug

SEQ ID NO: 2400960 - RNA, 19 nt, Artificial Sequence
  Description of Artificial Sequence: Synthetic oligonucleotide
acauuauuguauuaacccu

SEQ ID NO: 2400961 - RNA, 19 nt, Artificial Sequence
  Description of Artificial Sequence: Synthetic oligonucleotide
augaauuuccucauuuuac

SEQ ID NO: 2400962 - RNA, 19 nt, Artificial Sequence
  Description of Artificial Sequence: Synthetic oligonucleotide
aguaccuauuauuuugcag

SEQ ID NO: 2400963 - RNA, 19 nt, Artificial Sequence
  Description of Artificial Sequence: Synthetic oligonucleotide
ucuucaagcauugaaggcu

SEQ ID NO: 2400964 - RNA, 19 nt, Artificial Sequence
  Description of Artificial Sequence: Synthetic oligonucleotide
gcuuauauccacuacagac

SEQ ID NO: 2400965 - RNA, 19 nt, Artificial Sequence
  Description of Artificial Sequence: Synthetic oligonucleotide
aguuagagauaucccgagc

SEQ ID NO: 2400966 - RNA, 19 nt, Artificial Sequence
  Description of Artificial Sequence: Synthetic oligonucleotide
uggcuuauauccacuacag

SEQ ID NO: 2400967 - RNA, 19 nt, Artificial Sequence
  Description of Artificial Sequence: Synthetic oligonucleotide
acuguuggcuuauauccac

SEQ ID NO: 2400968 - RNA, 19 nt, Artificial Sequence
  Description of Artificial Sequence: Synthetic oligonucleotide
aauacugcaaaugauccua

SEQ ID NO: 2400969 - RNA, 19 nt, Artificial Sequence
  Description of Artificial Sequence: Synthetic oligonucleotide
ugaauguuugcguauugcu

SEQ ID NO: 2400970 - RNA, 19 nt, Artificial Sequence
  Description of Artificial Sequence: Synthetic oligonucleotide
cugaaugugguacacacuc

SEQ ID NO: 2400971 - RNA, 19 nt, Artificial Sequence
  Description of Artificial Sequence: Synthetic oligonucleotide
uaagugaacauaaguacua

SEQ ID NO: 2400972 - RNA, 19 nt, Artificial Sequence
  Description of Artificial Sequence: Synthetic oligonucleotide
ggauguuuuauuuacauaa

SEQ ID NO: 2400973 - RNA, 19 nt, Artificial Sequence
  Description of Artificial Sequence: Synthetic oligonucleotide
aaaguuagagauaucccga

SEQ ID NO: 2400974 - RNA, 19 nt, Artificial Sequence
  Description of Artificial Sequence: Synthetic oligonucleotide
uauuguauuaacccuuaua

SEQ ID NO: 2400975 - RNA, 19 nt, Artificial Sequence
  Description of Artificial Sequence: Synthetic oligonucleotide
uuguauuaacccuuauaca

SEQ ID NO: 2400976 - RNA, 19 nt, Artificial Sequence
  Description of Artificial Sequence: Synthetic oligonucleotide
ugauaaaacuggagcaucu

SEQ ID NO: 2400977 - RNA, 19 nt, Artificial Sequence
  Description of Artificial Sequence: Synthetic oligonucleotide
ucuucucuaacaucaacaa

SEQ ID NO: 2400978 - RNA, 19 nt, Artificial Sequence
  Description of Artificial Sequence: Synthetic oligonucleotide
uuuauguaguaccuauuau

SEQ ID NO: 2400979 - RNA, 19 nt, Artificial Sequence
  Description of Artificial Sequence: Synthetic oligonucleotide
uauuauuuugcaggcacug

SEQ ID NO: 2400980 - RNA, 19 nt, Artificial Sequence
  Description of Artificial Sequence: Synthetic oligonucleotide
ucaacucauuuacacaagu

SEQ ID NO: 2400981 - RNA, 19 nt, Artificial Sequence
  Description of Artificial Sequence: Synthetic oligonucleotide
uacacaugggacuaagcac

SEQ ID NO: 2400982 - RNA, 19 nt, Artificial Sequence
  Description of Artificial Sequence: Synthetic oligonucleotide
gauccuaucaucuucucua

SEQ ID NO: 2400983 - RNA, 19 nt, Artificial Sequence
  Description of Artificial Sequence: Synthetic oligonucleotide
uguacuguuggcuuauauc

SEQ ID NO: 2400984 - RNA, 19 nt, Artificial Sequence
  Description of Artificial Sequence: Synthetic oligonucleotide
cucccagauaccuuaauac

SEQ ID NO: 2400985 - RNA, 19 nt, Artificial Sequence
  Description of Artificial Sequence: Synthetic oligonucleotide
agcauugaaggcuuaaaau

SEQ ID NO: 2400986 - RNA, 19 nt, Artificial Sequence
  Description of Artificial Sequence: Synthetic oligonucleotide
cacgcccugauccaaaugg

SEQ ID NO: 2400987 - RNA, 19 nt, Artificial Sequence
  Description of Artificial Sequence: Synthetic oligonucleotide
agaauacagggauaaguga

SEQ ID NO: 2400988 - RNA, 19 nt, Artificial Sequence
  Description of Artificial Sequence: Synthetic oligonucleotide
aguugaauuucagaaaagu

SEQ ID NO: 2400989 - RNA, 19 nt, Artificial Sequence
  Description of Artificial Sequence: Synthetic oligonucleotide
uacaaguucuguccaaggu

SEQ ID NO: 2400990 - RNA, 19 nt, Artificial Sequence
  Description of Artificial Sequence: Synthetic oligonucleotide
aaccaaauaucuguuauuu

SEQ ID NO: 2400991 - RNA, 19 nt, Artificial Sequence
  Description of Artificial Sequence: Synthetic oligonucleotide
uacacaaguacaaguucug

SEQ ID NO: 2400992 - RNA, 19 nt, Artificial Sequence
  Description of Artificial Sequence: Synthetic oligonucleotide
cuaaucacuuccaaaguca

SEQ ID NO: 2400993 - RNA, 19 nt, Artificial Sequence
  Description of Artificial Sequence: Synthetic oligonucleotide
aaauuucaaaguucugguu

SEQ ID NO: 2400994 - RNA, 19 nt, Artificial Sequence
  Description of Artificial Sequence: Synthetic oligonucleotide
uaacccuuauacacauggg

SEQ ID NO: 2400995 - RNA, 19 nt, Artificial Sequence
  Description of Artificial Sequence: Synthetic oligonucleotide
acuaugaauuuccucauuu

SEQ ID NO: 2400996 - RNA, 19 nt, Artificial Sequence
  Description of Artificial Sequence: Synthetic oligonucleotide
cacuugacaaaaguuagag

SEQ ID NO: 2400997 - RNA, 19 nt, Artificial Sequence
  Description of Artificial Sequence: Synthetic oligonucleotide
uaccuauuauuuugcaggc

SEQ ID NO: 2400998 - RNA, 19 nt, Artificial Sequence
  Description of Artificial Sequence: Synthetic oligonucleotide
aguuaagaaaaguaaucuu

SEQ ID NO: 2400999 - RNA, 19 nt, Artificial Sequence
  Description of Artificial Sequence: Synthetic oligonucleotide
uucaacucauuuacacaag

SEQ ID NO: 2401000 - RNA, 19 nt, Artificial Sequence
  Description of Artificial Sequence: Synthetic oligonucleotide
gugaacauaaguacuauga

SEQ ID NO: 2401001 - RNA, 19 nt, Artificial Sequence
  Description of Artificial Sequence: Synthetic oligonucleotide
auugaaggcuuaaaauaac

SEQ ID NO: 2401002 - RNA, 19 nt, Artificial Sequence
  Description of Artificial Sequence: Synthetic oligonucleotide
aaucuuucgggagguagag

SEQ ID NO: 2401003 - RNA, 19 nt, Artificial Sequence
  Description of Artificial Sequence: Synthetic oligonucleotide
gaauguuugcguauugcug

SEQ ID NO: 2401004 - RNA, 19 nt, Artificial Sequence
  Description of Artificial Sequence: Synthetic oligonucleotide
agugaacauaaguacuaug

SEQ ID NO: 2401005 - RNA, 19 nt, Artificial Sequence
  Description of Artificial Sequence: Synthetic oligonucleotide
uuagagauaucccgagcgu

SEQ ID NO: 2401006 - RNA, 19 nt, Artificial Sequence
  Description of Artificial Sequence: Synthetic oligonucleotide
augauaaaacuggagcauc

SEQ ID NO: 2401007 - RNA, 19 nt, Artificial Sequence
  Description of Artificial Sequence: Synthetic oligonucleotide
cauugaaggcuuaaaauaa

SEQ ID NO: 2401008 - RNA, 19 nt, Artificial Sequence
  Description of Artificial Sequence: Synthetic oligonucleotide
aaaccaaauaucuguuauu

SEQ ID NO: 2401009 - RNA, 19 nt, Artificial Sequence
  Description of Artificial Sequence: Synthetic oligonucleotide
uguagauguccuuggagaa

SEQ ID NO: 2401010 - RNA, 19 nt, Artificial Sequence
  Description of Artificial Sequence: Synthetic oligonucleotide
ucugcuaaucacuuccaaa

SEQ ID NO: 2401011 - RNA, 19 nt, Artificial Sequence
  Description of Artificial Sequence: Synthetic oligonucleotide
ugaaugugguacacacucc

SEQ ID NO: 2401012 - RNA, 19 nt, Artificial Sequence
  Description of Artificial Sequence: Synthetic oligonucleotide
ucccagauaccuuaauacu

SEQ ID NO: 2401013 - RNA, 19 nt, Artificial Sequence
  Description of Artificial Sequence: Synthetic oligonucleotide
augguguagauguccuugg

SEQ ID NO: 2401014 - RNA, 19 nt, Artificial Sequence
  Description of Artificial Sequence: Synthetic oligonucleotide
gaauacagggauaagugaa

SEQ ID NO: 2401015 - RNA, 19 nt, Artificial Sequence
  Description of Artificial Sequence: Synthetic oligonucleotide
uaacaucaacaacacuuga

SEQ ID NO: 2401016 - RNA, 19 nt, Artificial Sequence
  Description of Artificial Sequence: Synthetic oligonucleotide
aaacuggagcaucuagcca

SEQ ID NO: 2401017 - RNA, 19 nt, Artificial Sequence
  Description of Artificial Sequence: Synthetic oligonucleotide
ugcuaaucacuuccaaagu

SEQ ID NO: 2401018 - RNA, 19 nt, Artificial Sequence
  Description of Artificial Sequence: Synthetic oligonucleotide
uaaguacuaugaauuuccu

SEQ ID NO: 2401019 - RNA, 19 nt, Artificial Sequence
  Description of Artificial Sequence: Synthetic oligonucleotide
uuugcguauugcuguacug

SEQ ID NO: 2401020 - RNA, 19 nt, Artificial Sequence
  Description of Artificial Sequence: Synthetic oligonucleotide
acucauuuacacaaguaca

SEQ ID NO: 2401021 - RNA, 19 nt, Artificial Sequence
  Description of Artificial Sequence: Synthetic oligonucleotide
uaagcacagcaauaaaaua

SEQ ID NO: 2401022 - RNA, 19 nt, Artificial Sequence
  Description of Artificial Sequence: Synthetic oligonucleotide
cuuuccaacucauuagaca

SEQ ID NO: 2401023 - RNA, 19 nt, Artificial Sequence
  Description of Artificial Sequence: Synthetic oligonucleotide
ugggacuaagcacagcaau

SEQ ID NO: 2401024 - RNA, 19 nt, Artificial Sequence
  Description of Artificial Sequence: Synthetic oligonucleotide
guguuccugacacaugaag

SEQ ID NO: 2401025 - RNA, 19 nt, Artificial Sequence
  Description of Artificial Sequence: Synthetic oligonucleotide
gauccaaaugguguagaug

SEQ ID NO: 2401026 - RNA, 19 nt, Artificial Sequence
  Description of Artificial Sequence: Synthetic oligonucleotide
uacuguuggcuuauaucca

SEQ ID NO: 2401027 - RNA, 19 nt, Artificial Sequence
  Description of Artificial Sequence: Synthetic oligonucleotide
cauaaguacuaugaauuuc

SEQ ID NO: 2401028 - RNA, 19 nt, Artificial Sequence
  Description of Artificial Sequence: Synthetic oligonucleotide
aaaucuuucgggagguaga

SEQ ID NO: 2401029 - RNA, 19 nt, Artificial Sequence
  Description of Artificial Sequence: Synthetic oligonucleotide
auaaaaucuuucgggaggu

SEQ ID NO: 2401030 - RNA, 19 nt, Artificial Sequence
  Description of Artificial Sequence: Synthetic oligonucleotide
uccaacucauuagacauuc

SEQ ID NO: 2401031 - RNA, 19 nt, Artificial Sequence
  Description of Artificial Sequence: Synthetic oligonucleotide
auuuacacaaguacaaguu

SEQ ID NO: 2401032 - RNA, 19 nt, Artificial Sequence
  Description of Artificial Sequence: Synthetic oligonucleotide
caugggacuaagcacagca

SEQ ID NO: 2401033 - RNA, 19 nt, Artificial Sequence
  Description of Artificial Sequence: Synthetic oligonucleotide
aguacaaguucuguccaag

SEQ ID NO: 2401034 - RNA, 19 nt, Artificial Sequence
  Description of Artificial Sequence: Synthetic oligonucleotide
auugcuguacuguuggcuu

SEQ ID NO: 2401035 - RNA, 19 nt, Artificial Sequence
  Description of Artificial Sequence: Synthetic oligonucleotide
gaacauaaguacuaugaau

SEQ ID NO: 2401036 - RNA, 19 nt, Artificial Sequence
  Description of Artificial Sequence: Synthetic oligonucleotide
aauggauguuuuauuuaca

SEQ ID NO: 2401037 - RNA, 19 nt, Artificial Sequence
  Description of Artificial Sequence: Synthetic oligonucleotide
acauaaguacuaugaauuu

SEQ ID NO: 2401038 - RNA, 19 nt, Artificial Sequence
  Description of Artificial Sequence: Synthetic oligonucleotide
acacaugggacuaagcaca

SEQ ID NO: 2401039 - RNA, 19 nt, Artificial Sequence
  Description of Artificial Sequence: Synthetic oligonucleotide
ugugguacacacucccaga

SEQ ID NO: 2401040 - RNA, 19 nt, Artificial Sequence
  Description of Artificial Sequence: Synthetic oligonucleotide
accauauaacauuauugua

SEQ ID NO: 2401041 - RNA, 19 nt, Artificial Sequence
  Description of Artificial Sequence: Synthetic oligonucleotide
agauaucccgagcgucugc

SEQ ID NO: 2401042 - RNA, 19 nt, Artificial Sequence
  Description of Artificial Sequence: Synthetic oligonucleotide
ucuaggccagcccaagggu

SEQ ID NO: 2401043 - RNA, 19 nt, Artificial Sequence
  Description of Artificial Sequence: Synthetic oligonucleotide
guaguaccuauuauuuugc

SEQ ID NO: 2401044 - RNA, 19 nt, Artificial Sequence
  Description of Artificial Sequence: Synthetic oligonucleotide
ccuauuauuuugcaggcac

SEQ ID NO: 2401045 - RNA, 19 nt, Artificial Sequence
  Description of Artificial Sequence: Synthetic oligonucleotide
acuuuccaacucauuagac

SEQ ID NO: 2401046 - RNA, 19 nt, Artificial Sequence
  Description of Artificial Sequence: Synthetic oligonucleotide
aaucacuuccaaagucauc

SEQ ID NO: 2401047 - RNA, 19 nt, Artificial Sequence
  Description of Artificial Sequence: Synthetic oligonucleotide
auaccuuaauacugcaaau

SEQ ID NO: 2401048 - RNA, 19 nt, Artificial Sequence
  Description of Artificial Sequence: Synthetic oligonucleotide
uccacuacagacacugguu

SEQ ID NO: 2401049 - RNA, 19 nt, Artificial Sequence
  Description of Artificial Sequence: Synthetic oligonucleotide
gacacaugaaguuuccagu

SEQ ID NO: 2401050 - RNA, 19 nt, Artificial Sequence
  Description of Artificial Sequence: Synthetic oligonucleotide
agcacagcaauaaaauagu

SEQ ID NO: 2401051 - RNA, 19 nt, Artificial Sequence
  Description of Artificial Sequence: Synthetic oligonucleotide
uacagacacugguucuagg

SEQ ID NO: 2401052 - RNA, 19 nt, Artificial Sequence
  Description of Artificial Sequence: Synthetic oligonucleotide
caguugaauuucagaaaag

SEQ ID NO: 2401053 - RNA, 19 nt, Artificial Sequence
  Description of Artificial Sequence: Synthetic oligonucleotide
ucucuuaccacgcccugau

SEQ ID NO: 2401054 - RNA, 19 nt, Artificial Sequence
  Description of Artificial Sequence: Synthetic oligonucleotide
acacaugaaguuuccaguu

SEQ ID NO: 2401055 - RNA, 19 nt, Artificial Sequence
  Description of Artificial Sequence: Synthetic oligonucleotide
gguuuucugaaugugguac

SEQ ID NO: 2401056 - RNA, 19 nt, Artificial Sequence
  Description of Artificial Sequence: Synthetic oligonucleotide
uuuagaaacugugguuuuc

SEQ ID NO: 2401057 - RNA, 19 nt, Artificial Sequence
  Description of Artificial Sequence: Synthetic oligonucleotide
guauuaacccuuauacaca

SEQ ID NO: 2401058 - RNA, 19 nt, Artificial Sequence
  Description of Artificial Sequence: Synthetic oligonucleotide
uaguaccuauuauuuugca

SEQ ID NO: 2401059 - RNA, 19 nt, Artificial Sequence
  Description of Artificial Sequence: Synthetic oligonucleotide
uugcguauugcuguacugu

SEQ ID NO: 2401060 - RNA, 19 nt, Artificial Sequence
  Description of Artificial Sequence: Synthetic oligonucleotide
ucuuucaaauaaccauaua

SEQ ID NO: 2401061 - RNA, 19 nt, Artificial Sequence
  Description of Artificial Sequence: Synthetic oligonucleotide
aagugaacauaaguacuau

SEQ ID NO: 2401062 - RNA, 19 nt, Artificial Sequence
  Description of Artificial Sequence: Synthetic oligonucleotide
aaacugugguuuucugaau

SEQ ID NO: 2401063 - RNA, 19 nt, Artificial Sequence
  Description of Artificial Sequence: Synthetic oligonucleotide
gcauugaaggcuuaaaaua

SEQ ID NO: 2401064 - RNA, 19 nt, Artificial Sequence
  Description of Artificial Sequence: Synthetic oligonucleotide
uaucccgagcgucugcuaa

SEQ ID NO: 2401065 - RNA, 19 nt, Artificial Sequence
  Description of Artificial Sequence: Synthetic oligonucleotide
ggauaagugaacauaagua

SEQ ID NO: 2401066 - RNA, 19 nt, Artificial Sequence
  Description of Artificial Sequence: Synthetic oligonucleotide
guagccgaacugaugcugg

SEQ ID NO: 2401067 - RNA, 19 nt, Artificial Sequence
  Description of Artificial Sequence: Synthetic oligonucleotide
uuauuguauuaacccuuau

SEQ ID NO: 2401068 - RNA, 19 nt, Artificial Sequence
  Description of Artificial Sequence: Synthetic oligonucleotide
gugaauguuugcguauugc

SEQ ID NO: 2401069 - RNA, 19 nt, Artificial Sequence
  Description of Artificial Sequence: Synthetic oligonucleotide
cacagcaauaaaauaguua

SEQ ID NO: 2401070 - RNA, 19 nt, Artificial Sequence
  Description of Artificial Sequence: Synthetic oligonucleotide
auauaacauuauuguauua

SEQ ID NO: 2401071 - RNA, 19 nt, Artificial Sequence
  Description of Artificial Sequence: Synthetic oligonucleotide
uguuggcuuauauccacua

SEQ ID NO: 2401072 - RNA, 19 nt, Artificial Sequence
  Description of Artificial Sequence: Synthetic oligonucleotide
gcuaaucacuuccaaaguc

SEQ ID NO: 2401073 - RNA, 19 nt, Artificial Sequence
  Description of Artificial Sequence: Synthetic oligonucleotide
uggggaguagccgaacuga

SEQ ID NO: 2401074 - RNA, 19 nt, Artificial Sequence
  Description of Artificial Sequence: Synthetic oligonucleotide
aguagccgaacugaugcug

SEQ ID NO: 2401075 - RNA, 19 nt, Artificial Sequence
  Description of Artificial Sequence: Synthetic oligonucleotide
cagggauaagugaacauaa

SEQ ID NO: 2401076 - RNA, 19 nt, Artificial Sequence
  Description of Artificial Sequence: Synthetic oligonucleotide
uccugugaauguuugcgua

SEQ ID NO: 2401077 - RNA, 19 nt, Artificial Sequence
  Description of Artificial Sequence: Synthetic oligonucleotide
acaacacuugacaaaaguu

SEQ ID NO: 2401078 - RNA, 19 nt, Artificial Sequence
  Description of Artificial Sequence: Synthetic oligonucleotide
auuauuuugcaggcacugu

SEQ ID NO: 2401079 - RNA, 19 nt, Artificial Sequence
  Description of Artificial Sequence: Synthetic oligonucleotide
auacagggauaagugaaca

SEQ ID NO: 2401080 - RNA, 19 nt, Artificial Sequence
  Description of Artificial Sequence: Synthetic oligonucleotide
acagggauaagugaacaua

SEQ ID NO: 2401081 - RNA, 19 nt, Artificial Sequence
  Description of Artificial Sequence: Synthetic oligonucleotide
aaaugguguagauguccuu

SEQ ID NO: 2401082 - RNA, 19 nt, Artificial Sequence
  Description of Artificial Sequence: Synthetic oligonucleotide
cccagauaccuuaauacug

SEQ ID NO: 2401083 - RNA, 19 nt, Artificial Sequence
  Description of Artificial Sequence: Synthetic oligonucleotide
uauauccacuacagacacu

SEQ ID NO: 2401084 - RNA, 19 nt, Artificial Sequence
  Description of Artificial Sequence: Synthetic oligonucleotide
aaugugguacacacuccca

SEQ ID NO: 2401085 - RNA, 19 nt, Artificial Sequence
  Description of Artificial Sequence: Synthetic oligonucleotide
uagagauaucccgagcguc

SEQ ID NO: 2401086 - RNA, 19 nt, Artificial Sequence
  Description of Artificial Sequence: Synthetic oligonucleotide
uuccaauggauguuuuauu

SEQ ID NO: 2401087 - RNA, 19 nt, Artificial Sequence
  Description of Artificial Sequence: Synthetic oligonucleotide
gcgucugcuaaucacuucc

SEQ ID NO: 2401088 - RNA, 19 nt, Artificial Sequence
  Description of Artificial Sequence: Synthetic oligonucleotide
acucccagauaccuuaaua

SEQ ID NO: 2401089 - RNA, 19 nt, Artificial Sequence
  Description of Artificial Sequence: Synthetic oligonucleotide
caucaacaacacuugacaa

SEQ ID NO: 2401090 - RNA, 19 nt, Artificial Sequence
  Description of Artificial Sequence: Synthetic oligonucleotide
uguccaagguguuccugac

SEQ ID NO: 2401091 - RNA, 19 nt, Artificial Sequence
  Description of Artificial Sequence: Synthetic oligonucleotide
agcgucugcuaaucacuuc

SEQ ID NO: 2401092 - RNA, 19 nt, Artificial Sequence
  Description of Artificial Sequence: Synthetic oligonucleotide
uagccgaacugaugcuggg

SEQ ID NO: 2401093 - RNA, 19 nt, Artificial Sequence
  Description of Artificial Sequence: Synthetic oligonucleotide
uccuaucaucuucucuaac

SEQ ID NO: 2401094 - RNA, 19 nt, Artificial Sequence
  Description of Artificial Sequence: Synthetic oligonucleotide
cauuauuguauuaacccuu

SEQ ID NO: 2401095 - RNA, 19 nt, Artificial Sequence
  Description of Artificial Sequence: Synthetic oligonucleotide
uacuaugaauuuccucauu

SEQ ID NO: 2401096 - RNA, 19 nt, Artificial Sequence
  Description of Artificial Sequence: Synthetic oligonucleotide
cacaugggacuaagcacag

SEQ ID NO: 2401097 - RNA, 19 nt, Artificial Sequence
  Description of Artificial Sequence: Synthetic oligonucleotide
uuucaaaguucugguucca

SEQ ID NO: 2401098 - RNA, 19 nt, Artificial Sequence
  Description of Artificial Sequence: Synthetic oligonucleotide
agggauaagugaacauaag

SEQ ID NO: 2401099 - RNA, 19 nt, Artificial Sequence
  Description of Artificial Sequence: Synthetic oligonucleotide
aucuguuauuuuagaaacu

SEQ ID NO: 2401100 - RNA, 19 nt, Artificial Sequence
  Description of Artificial Sequence: Synthetic oligonucleotide
acacaaguacaaguucugu

SEQ ID NO: 2401101 - RNA, 19 nt, Artificial Sequence
  Description of Artificial Sequence: Synthetic oligonucleotide
cuuaccacgcccugaucca

SEQ ID NO: 2401102 - RNA, 19 nt, Artificial Sequence
  Description of Artificial Sequence: Synthetic oligonucleotide
ccauauaacauuauuguau

SEQ ID NO: 2401103 - RNA, 19 nt, Artificial Sequence
  Description of Artificial Sequence: Synthetic oligonucleotide
gggauaagugaacauaagu

SEQ ID NO: 2401104 - RNA, 19 nt, Artificial Sequence
  Description of Artificial Sequence: Synthetic oligonucleotide
uacugcaaaugauccuauc

SEQ ID NO: 2401105 - RNA, 19 nt, Artificial Sequence
  Description of Artificial Sequence: Synthetic oligonucleotide
cuacagacacugguucuag

SEQ ID NO: 2401106 - RNA, 19 nt, Artificial Sequence
  Description of Artificial Sequence: Synthetic oligonucleotide
gagauaucccgagcgucug

SEQ ID NO: 2401107 - RNA, 19 nt, Artificial Sequence
  Description of Artificial Sequence: Synthetic oligonucleotide
cuguccaagguguuccuga

SEQ ID NO: 2401108 - RNA, 19 nt, Artificial Sequence
  Description of Artificial Sequence: Synthetic oligonucleotide
acaugggacuaagcacagc

SEQ ID NO: 2401109 - RNA, 19 nt, Artificial Sequence
  Description of Artificial Sequence: Synthetic oligonucleotide
uuccaacucauuagacauu

SEQ ID NO: 2401110 - RNA, 19 nt, Artificial Sequence
  Description of Artificial Sequence: Synthetic oligonucleotide
ggcuuaaaauaacuuucca

SEQ ID NO: 2401111 - RNA, 19 nt, Artificial Sequence
  Description of Artificial Sequence: Synthetic oligonucleotide
cuggggaguagccgaacug

SEQ ID NO: 2401112 - RNA, 19 nt, Artificial Sequence
  Description of Artificial Sequence: Synthetic oligonucleotide
cugguucuaggccagccca

SEQ ID NO: 2401113 - RNA, 19 nt, Artificial Sequence
  Description of Artificial Sequence: Synthetic oligonucleotide
augaaguuuccaguugaau

SEQ ID NO: 2401114 - RNA, 19 nt, Artificial Sequence
  Description of Artificial Sequence: Synthetic oligonucleotide
uuuugcaggcacuguucua

SEQ ID NO: 2401115 - RNA, 19 nt, Artificial Sequence
  Description of Artificial Sequence: Synthetic oligonucleotide
ugguacacacucccagaua

SEQ ID NO: 2401116 - RNA, 19 nt, Artificial Sequence
  Description of Artificial Sequence: Synthetic oligonucleotide
cacacucccagauaccuua

SEQ ID NO: 2401117 - RNA, 19 nt, Artificial Sequence
  Description of Artificial Sequence: Synthetic oligonucleotide
caaaugguguagauguccu

SEQ ID NO: 2401118 - RNA, 19 nt, Artificial Sequence
  Description of Artificial Sequence: Synthetic oligonucleotide
acacuugacaaaaguuaga

SEQ ID NO: 2401119 - RNA, 19 nt, Artificial Sequence
  Description of Artificial Sequence: Synthetic oligonucleotide
aacucagaauacagggaua

SEQ ID NO: 2401120 - RNA, 19 nt, Artificial Sequence
  Description of Artificial Sequence: Synthetic oligonucleotide
guuccugacacaugaaguu

SEQ ID NO: 2401121 - RNA, 19 nt, Artificial Sequence
  Description of Artificial Sequence: Synthetic oligonucleotide
uguuugcguauugcuguac

SEQ ID NO: 2401122 - RNA, 19 nt, Artificial Sequence
  Description of Artificial Sequence: Synthetic oligonucleotide
acuacagacacugguucua

SEQ ID NO: 2401123 - RNA, 19 nt, Artificial Sequence
  Description of Artificial Sequence: Synthetic oligonucleotide
uucuguccaagguguuccu

SEQ ID NO: 2401124 - RNA, 19 nt, Artificial Sequence
  Description of Artificial Sequence: Synthetic oligonucleotide
ugguucuaggccagcccaa

SEQ ID NO: 2401125 - RNA, 19 nt, Artificial Sequence
  Description of Artificial Sequence: Synthetic oligonucleotide
cagauaccuuaauacugca

SEQ ID NO: 2401126 - RNA, 19 nt, Artificial Sequence
  Description of Artificial Sequence: Synthetic oligonucleotide
caugaaguuuccaguugaa

SEQ ID NO: 2401127 - RNA, 19 nt, Artificial Sequence
  Description of Artificial Sequence: Synthetic oligonucleotide
guuccaauggauguuuuau

SEQ ID NO: 2401128 - RNA, 19 nt, Artificial Sequence
  Description of Artificial Sequence: Synthetic oligonucleotide
uugcuguacuguuggcuua

SEQ ID NO: 2401129 - RNA, 19 nt, Artificial Sequence
  Description of Artificial Sequence: Synthetic oligonucleotide
guuugcguauugcuguacu

SEQ ID NO: 2401130 - RNA, 19 nt, Artificial Sequence
  Description of Artificial Sequence: Synthetic oligonucleotide
uucaagcauugaaggcuua

SEQ ID NO: 2401131 - RNA, 19 nt, Artificial Sequence
  Description of Artificial Sequence: Synthetic oligonucleotide
cuuucgggagguagagaca

SEQ ID NO: 2401132 - RNA, 19 nt, Artificial Sequence
  Description of Artificial Sequence: Synthetic oligonucleotide
guagucugcugcugcccug

SEQ ID NO: 2401133 - RNA, 19 nt, Artificial Sequence
  Description of Artificial Sequence: Synthetic oligonucleotide
caugauaaaacuggagcau

SEQ ID NO: 2401134 - RNA, 19 nt, Artificial Sequence
  Description of Artificial Sequence: Synthetic oligonucleotide
auuaacccuuauacacaug

SEQ ID NO: 2401135 - RNA, 19 nt, Artificial Sequence
  Description of Artificial Sequence: Synthetic oligonucleotide
auguuugcguauugcugua

SEQ ID NO: 2401136 - RNA, 19 nt, Artificial Sequence
  Description of Artificial Sequence: Synthetic oligonucleotide
guacacacucccagauacc

SEQ ID NO: 2401137 - RNA, 19 nt, Artificial Sequence
  Description of Artificial Sequence: Synthetic oligonucleotide
ggacuaagcacagcaauaa

SEQ ID NO: 2401138 - RNA, 19 nt, Artificial Sequence
  Description of Artificial Sequence: Synthetic oligonucleotide
uugcaggcacuguucuaaa

SEQ ID NO: 2401139 - RNA, 19 nt, Artificial Sequence
  Description of Artificial Sequence: Synthetic oligonucleotide
ccacuacagacacugguuc

SEQ ID NO: 2401140 - RNA, 19 nt, Artificial Sequence
  Description of Artificial Sequence: Synthetic oligonucleotide
ugcuguacuguuggcuuau

SEQ ID NO: 2401141 - RNA, 19 nt, Artificial Sequence
  Description of Artificial Sequence: Synthetic oligonucleotide
cagcaauaaaauaguuaua

SEQ ID NO: 2401142 - RNA, 19 nt, Artificial Sequence
  Description of Artificial Sequence: Synthetic oligonucleotide
ucuuuggguucaacucauu

SEQ ID NO: 2401143 - RNA, 19 nt, Artificial Sequence
  Description of Artificial Sequence: Synthetic oligonucleotide
gauaucccgagcgucugcu

SEQ ID NO: 2401144 - RNA, 19 nt, Artificial Sequence
  Description of Artificial Sequence: Synthetic oligonucleotide
uaaaaucuuucgggaggua

SEQ ID NO: 2401145 - RNA, 19 nt, Artificial Sequence
  Description of Artificial Sequence: Synthetic oligonucleotide
caacucauuagacauucuu

SEQ ID NO: 2401146 - RNA, 19 nt, Artificial Sequence
  Description of Artificial Sequence: Synthetic oligonucleotide
gucugcuaaucacuuccaa

SEQ ID NO: 2401147 - RNA, 19 nt, Artificial Sequence
  Description of Artificial Sequence: Synthetic oligonucleotide
caagcauugaaggcuuaaa

SEQ ID NO: 2401148 - RNA, 19 nt, Artificial Sequence
  Description of Artificial Sequence: Synthetic oligonucleotide
cugcccuggggaguagccg

SEQ ID NO: 2401149 - RNA, 19 nt, Artificial Sequence
  Description of Artificial Sequence: Synthetic oligonucleotide
ggcuuauauccacuacaga

SEQ ID NO: 2401150 - RNA, 19 nt, Artificial Sequence
  Description of Artificial Sequence: Synthetic oligonucleotide
uuaccacgcccugauccaa

SEQ ID NO: 2401151 - RNA, 19 nt, Artificial Sequence
  Description of Artificial Sequence: Synthetic oligonucleotide
gguucuaggccagcccaag

SEQ ID NO: 2401152 - RNA, 19 nt, Artificial Sequence
  Description of Artificial Sequence: Synthetic oligonucleotide
aucccgagcgucugcuaau

SEQ ID NO: 2401153 - RNA, 19 nt, Artificial Sequence
  Description of Artificial Sequence: Synthetic oligonucleotide
accacgcccugauccaaau

SEQ ID NO: 2401154 - RNA, 19 nt, Artificial Sequence
  Description of Artificial Sequence: Synthetic oligonucleotide
guccugugaauguuugcgu

SEQ ID NO: 2401155 - RNA, 19 nt, Artificial Sequence
  Description of Artificial Sequence: Synthetic oligonucleotide
ccgagcgucugcuaaucac

SEQ ID NO: 2401156 - RNA, 19 nt, Artificial Sequence
  Description of Artificial Sequence: Synthetic oligonucleotide
gugguacacacucccagau

SEQ ID NO: 2401157 - RNA, 19 nt, Artificial Sequence
  Description of Artificial Sequence: Synthetic oligonucleotide
guccaagguguuccugaca

SEQ ID NO: 2401158 - RNA, 19 nt, Artificial Sequence
  Description of Artificial Sequence: Synthetic oligonucleotide
aucuuucgggagguagaga

SEQ ID NO: 2401159 - RNA, 19 nt, Artificial Sequence
  Description of Artificial Sequence: Synthetic oligonucleotide
caucaucuuuggguucaac

SEQ ID NO: 2401160 - RNA, 19 nt, Artificial Sequence
  Description of Artificial Sequence: Synthetic oligonucleotide
ccucauuuuacaugauaaa

SEQ ID NO: 2401161 - RNA, 19 nt, Artificial Sequence
  Description of Artificial Sequence: Synthetic oligonucleotide
gaguagccgaacugaugcu

SEQ ID NO: 2401162 - RNA, 19 nt, Artificial Sequence
  Description of Artificial Sequence: Synthetic oligonucleotide
cuuauacacaugggacuaa

SEQ ID NO: 2401163 - RNA, 19 nt, Artificial Sequence
  Description of Artificial Sequence: Synthetic oligonucleotide
augggacuaagcacagcaa

SEQ ID NO: 2401164 - RNA, 19 nt, Artificial Sequence
  Description of Artificial Sequence: Synthetic oligonucleotide
agccgaacugaugcuggga

SEQ ID NO: 2401165 - RNA, 19 nt, Artificial Sequence
  Description of Artificial Sequence: Synthetic oligonucleotide
gguuccaauggauguuuua

SEQ ID NO: 2401166 - RNA, 19 nt, Artificial Sequence
  Description of Artificial Sequence: Synthetic oligonucleotide
aaguucuguccaagguguu

SEQ ID NO: 2401167 - RNA, 19 nt, Artificial Sequence
  Description of Artificial Sequence: Synthetic oligonucleotide
ucccgagcgucugcuaauc

SEQ ID NO: 2401168 - RNA, 19 nt, Artificial Sequence
  Description of Artificial Sequence: Synthetic oligonucleotide
auaucccgagcgucugcua

SEQ ID NO: 2401169 - RNA, 19 nt, Artificial Sequence
  Description of Artificial Sequence: Synthetic oligonucleotide
gcguauugcuguacuguug

SEQ ID NO: 2401170 - RNA, 19 nt, Artificial Sequence
  Description of Artificial Sequence: Synthetic oligonucleotide
cugacacaugaaguuucca

SEQ ID NO: 2401171 - RNA, 19 nt, Artificial Sequence
  Description of Artificial Sequence: Synthetic oligonucleotide
acgcccugauccaaauggu

SEQ ID NO: 2401172 - RNA, 19 nt, Artificial Sequence
  Description of Artificial Sequence: Synthetic oligonucleotide
cucuuaccacgcccugauc

SEQ ID NO: 2401173 - RNA, 19 nt, Artificial Sequence
  Description of Artificial Sequence: Synthetic oligonucleotide
gggacuaagcacagcaaua

SEQ ID NO: 2401174 - RNA, 19 nt, Artificial Sequence
  Description of Artificial Sequence: Synthetic oligonucleotide
cuguuggcuuauauccacu

SEQ ID NO: 2401175 - RNA, 19 nt, Artificial Sequence
  Description of Artificial Sequence: Synthetic oligonucleotide
ccuuaauacugcaaaugau

SEQ ID NO: 2401176 - RNA, 19 nt, Artificial Sequence
  Description of Artificial Sequence: Synthetic oligonucleotide
ccuuauacacaugggacua

SEQ ID NO: 2401177 - RNA, 19 nt, Artificial Sequence
  Description of Artificial Sequence: Synthetic oligonucleotide
gguagucugcugcugcccu

SEQ ID NO: 2401178 - RNA, 19 nt, Artificial Sequence
  Description of Artificial Sequence: Synthetic oligonucleotide
ggguagucugcugcugccc

SEQ ID NO: 2401179 - RNA, 19 nt, Artificial Sequence
  Description of Artificial Sequence: Synthetic oligonucleotide
acacacucccagauaccuu

SEQ ID NO: 2401180 - RNA, 19 nt, Artificial Sequence
  Description of Artificial Sequence: Synthetic oligonucleotide
cgcccugauccaaauggug

SEQ ID NO: 2401181 - RNA, 19 nt, Artificial Sequence
  Description of Artificial Sequence: Synthetic oligonucleotide
acacucccagauaccuuaa

SEQ ID NO: 2401182 - RNA, 19 nt, Artificial Sequence
  Description of Artificial Sequence: Synthetic oligonucleotide
gcccugauccaaauggugu

SEQ ID NO: 2401183 - RNA, 19 nt, Artificial Sequence
  Description of Artificial Sequence: Synthetic oligonucleotide
gagcgucugcuaaucacuu

SEQ ID NO: 2401184 - RNA, 19 nt, Artificial Sequence
  Description of Artificial Sequence: Synthetic oligonucleotide
gguguuccugacacaugaa

SEQ ID NO: 2401185 - RNA, 19 nt, Artificial Sequence
  Description of Artificial Sequence: Synthetic oligonucleotide
ccugugaauguuugcguau

SEQ ID NO: 2401186 - RNA, 19 nt, Artificial Sequence
  Description of Artificial Sequence: Synthetic oligonucleotide
ccacgcccugauccaaaug

SEQ ID NO: 2401187 - RNA, 19 nt, Artificial Sequence
  Description of Artificial Sequence: Synthetic oligonucleotide
cgagcgucugcuaaucacu

SEQ ID NO: 2401188 - RNA, 19 nt, Artificial Sequence
  Description of Artificial Sequence: Synthetic oligonucleotide
cuggagcaucuagccaaaa

SEQ ID NO: 2401189 - RNA, 19 nt, Artificial Sequence
  Description of Artificial Sequence: Synthetic oligonucleotide
cacucccagauaccuuaau

SEQ ID NO: 2401190 - RNA, 19 nt, Artificial Sequence
  Description of Artificial Sequence: Synthetic oligonucleotide
ccaacucauuagacauucu

SEQ ID NO: 2401191 - RNA, 19 nt, Artificial Sequence
  Description of Artificial Sequence: Synthetic oligonucleotide
ggggaguagccgaacugau

SEQ ID NO: 2401192 - RNA, 19 nt, Artificial Sequence
  Description of Artificial Sequence: Synthetic oligonucleotide
cccgagcgucugcuaauca

SEQ ID NO: 2401193 - RNA, 19 nt, Artificial Sequence
  Description of Artificial Sequence: Synthetic oligonucleotide
cccaagggucuucaagcau

SEQ ID NO: 2401194 - RNA, 19 nt, Artificial Sequence
  Description of Artificial Sequence: Synthetic oligonucleotide
cccuggggaguagccgaac

SEQ ID NO: 2401195 - RNA, 19 nt, Artificial Sequence
  Description of Artificial Sequence: Synthetic oligonucleotide
gcccuggggaguagccgaa

SEQ ID NO: 2401196 - RNA, 19 nt, Artificial Sequence
  Description of Artificial Sequence: Synthetic oligonucleotide
aguaaaaggaaccacaaac

SEQ ID NO: 2401197 - RNA, 19 nt, Artificial Sequence
  Description of Artificial Sequence: Synthetic oligonucleotide
agaacaucuagacaaaucc

SEQ ID NO: 2401198 - RNA, 19 nt, Artificial Sequence
  Description of Artificial Sequence: Synthetic oligonucleotide
uuauauuuaaauucugagg

SEQ ID NO: 2401199 - RNA, 19 nt, Artificial Sequence
  Description of Artificial Sequence: Synthetic oligonucleotide
aaacaaaguauccuuaaag

SEQ ID NO: 2401200 - RNA, 19 nt, Artificial Sequence
  Description of Artificial Sequence: Synthetic oligonucleotide
uacaagauaaauaaaacaa

SEQ ID NO: 2401201 - RNA, 19 nt, Artificial Sequence
  Description of Artificial Sequence: Synthetic oligonucleotide
aaaagcaagcaaaagagac

SEQ ID NO: 2401202 - RNA, 19 nt, Artificial Sequence
  Description of Artificial Sequence: Synthetic oligonucleotide
auuauauuuaaauucugag

SEQ ID NO: 2401203 - RNA, 19 nt, Artificial Sequence
  Description of Artificial Sequence: Synthetic oligonucleotide
aaaguauccuuaaagaauc

SEQ ID NO: 2401204 - RNA, 19 nt, Artificial Sequence
  Description of Artificial Sequence: Synthetic oligonucleotide
acuccauuaacuaagaggg

SEQ ID NO: 2401205 - RNA, 19 nt, Artificial Sequence
  Description of Artificial Sequence: Synthetic oligonucleotide
gacuccauuaacuaagagg

SEQ ID NO: 2401206 - RNA, 19 nt, Artificial Sequence
  Description of Artificial Sequence: Synthetic oligonucleotide
aacauuaugucaucaaaca

SEQ ID NO: 2401207 - RNA, 19 nt, Artificial Sequence
  Description of Artificial Sequence: Synthetic oligonucleotide
agaguagcgauguugaggg

SEQ ID NO: 2401208 - RNA, 19 nt, Artificial Sequence
  Description of Artificial Sequence: Synthetic oligonucleotide
uauaaggauacaaacauua

SEQ ID NO: 2401209 - RNA, 19 nt, Artificial Sequence
  Description of Artificial Sequence: Synthetic oligonucleotide
aacgauaacuuccagugug

SEQ ID NO: 2401210 - RNA, 19 nt, Artificial Sequence
  Description of Artificial Sequence: Synthetic oligonucleotide
aaacauuaugucaucaaac

SEQ ID NO: 2401211 - RNA, 19 nt, Artificial Sequence
  Description of Artificial Sequence: Synthetic oligonucleotide
aaggauacaaacauuaugu

SEQ ID NO: 2401212 - RNA, 19 nt, Artificial Sequence
  Description of Artificial Sequence: Synthetic oligonucleotide
uuuucuaugccuccuagug

SEQ ID NO: 2401213 - RNA, 19 nt, Artificial Sequence
  Description of Artificial Sequence: Synthetic oligonucleotide
ucauaaacauacauggucu

SEQ ID NO: 2401214 - RNA, 19 nt, Artificial Sequence
  Description of Artificial Sequence: Synthetic oligonucleotide
ucuauagcuaacaugugca

SEQ ID NO: 2401215 - RNA, 19 nt, Artificial Sequence
  Description of Artificial Sequence: Synthetic oligonucleotide
ucgcaaaucauccacucgg

SEQ ID NO: 2401216 - RNA, 19 nt, Artificial Sequence
  Description of Artificial Sequence: Synthetic oligonucleotide
uuaacuaagagggaccagg

SEQ ID NO: 2401217 - RNA, 19 nt, Artificial Sequence
  Description of Artificial Sequence: Synthetic oligonucleotide
uaaggauacaaacauuaug

SEQ ID NO: 2401218 - RNA, 19 nt, Artificial Sequence
  Description of Artificial Sequence: Synthetic oligonucleotide
aaagcaagcaaaagagacc

SEQ ID NO: 2401219 - RNA, 19 nt, Artificial Sequence
  Description of Artificial Sequence: Synthetic oligonucleotide
uuaaagaaucacugcauag

SEQ ID NO: 2401220 - RNA, 19 nt, Artificial Sequence
  Description of Artificial Sequence: Synthetic oligonucleotide
aguuuaaaaguuuucaaaa

SEQ ID NO: 2401221 - RNA, 19 nt, Artificial Sequence
  Description of Artificial Sequence: Synthetic oligonucleotide
uucuauagcuaacaugugc

SEQ ID NO: 2401222 - RNA, 19 nt, Artificial Sequence
  Description of Artificial Sequence: Synthetic oligonucleotide
uauuugagcucgcaaauca

SEQ ID NO: 2401223 - RNA, 19 nt, Artificial Sequence
  Description of Artificial Sequence: Synthetic oligonucleotide
aauauuugagcucgcaaau

SEQ ID NO: 2401224 - RNA, 19 nt, Artificial Sequence
  Description of Artificial Sequence: Synthetic oligonucleotide
ugugaaaacucccuucuca

SEQ ID NO: 2401225 - RNA, 19 nt, Artificial Sequence
  Description of Artificial Sequence: Synthetic oligonucleotide
aaaagagaccaccuuguca

SEQ ID NO: 2401226 - RNA, 19 nt, Artificial Sequence
  Description of Artificial Sequence: Synthetic oligonucleotide
uggucuuuuauaaggauac

SEQ ID NO: 2401227 - RNA, 19 nt, Artificial Sequence
  Description of Artificial Sequence: Synthetic oligonucleotide
aaaggaaccacaaacaguu

SEQ ID NO: 2401228 - RNA, 19 nt, Artificial Sequence
  Description of Artificial Sequence: Synthetic oligonucleotide
agaaucaauguuuggauga

SEQ ID NO: 2401229 - RNA, 19 nt, Artificial Sequence
  Description of Artificial Sequence: Synthetic oligonucleotide
aaacucucugaacaucggg

SEQ ID NO: 2401230 - RNA, 19 nt, Artificial Sequence
  Description of Artificial Sequence: Synthetic oligonucleotide
uaauauuugagcucgcaaa

SEQ ID NO: 2401231 - RNA, 19 nt, Artificial Sequence
  Description of Artificial Sequence: Synthetic oligonucleotide
caaaucauccacucggucc

SEQ ID NO: 2401232 - RNA, 19 nt, Artificial Sequence
  Description of Artificial Sequence: Synthetic oligonucleotide
aaagcuaucuuauuauauu

SEQ ID NO: 2401233 - RNA, 19 nt, Artificial Sequence
  Description of Artificial Sequence: Synthetic oligonucleotide
cacacuaauggcuuguggg

SEQ ID NO: 2401234 - RNA, 19 nt, Artificial Sequence
  Description of Artificial Sequence: Synthetic oligonucleotide
ugagcagcugaauagaggu

SEQ ID NO: 2401235 - RNA, 19 nt, Artificial Sequence
  Description of Artificial Sequence: Synthetic oligonucleotide
gaaaugucagccauuagug

SEQ ID NO: 2401236 - RNA, 19 nt, Artificial Sequence
  Description of Artificial Sequence: Synthetic oligonucleotide
auguuuggaugauagauug

SEQ ID NO: 2401237 - RNA, 19 nt, Artificial Sequence
  Description of Artificial Sequence: Synthetic oligonucleotide
uccuuuuccugccagcacg

SEQ ID NO: 2401238 - RNA, 19 nt, Artificial Sequence
  Description of Artificial Sequence: Synthetic oligonucleotide
auccuuaaagaaucacugc

SEQ ID NO: 2401239 - RNA, 19 nt, Artificial Sequence
  Description of Artificial Sequence: Synthetic oligonucleotide
aucucaaguaaaaggaacc

SEQ ID NO: 2401240 - RNA, 19 nt, Artificial Sequence
  Description of Artificial Sequence: Synthetic oligonucleotide
gaaaucugaucuguggugg

SEQ ID NO: 2401241 - RNA, 19 nt, Artificial Sequence
  Description of Artificial Sequence: Synthetic oligonucleotide
auagauuggaguaagaaau

SEQ ID NO: 2401242 - RNA, 19 nt, Artificial Sequence
  Description of Artificial Sequence: Synthetic oligonucleotide
cauuaugucaucaaacaca

SEQ ID NO: 2401243 - RNA, 19 nt, Artificial Sequence
  Description of Artificial Sequence: Synthetic oligonucleotide
aagcaagcaaaagagacca

SEQ ID NO: 2401244 - RNA, 19 nt, Artificial Sequence
  Description of Artificial Sequence: Synthetic oligonucleotide
guacaagauaaauaaaaca

SEQ ID NO: 2401245 - RNA, 19 nt, Artificial Sequence
  Description of Artificial Sequence: Synthetic oligonucleotide
ggaacgauaacuuccagug

SEQ ID NO: 2401246 - RNA, 19 nt, Artificial Sequence
  Description of Artificial Sequence: Synthetic oligonucleotide
uucucauaagguguguugg

SEQ ID NO: 2401247 - RNA, 19 nt, Artificial Sequence
  Description of Artificial Sequence: Synthetic oligonucleotide
aacucucugaacaucgggg

SEQ ID NO: 2401248 - RNA, 19 nt, Artificial Sequence
  Description of Artificial Sequence: Synthetic oligonucleotide
acacuaauggcuugugggg

SEQ ID NO: 2401249 - RNA, 19 nt, Artificial Sequence
  Description of Artificial Sequence: Synthetic oligonucleotide
agaaaagcuaucuuauuau

SEQ ID NO: 2401250 - RNA, 19 nt, Artificial Sequence
  Description of Artificial Sequence: Synthetic oligonucleotide
aaaacaaaguauccuuaaa

SEQ ID NO: 2401251 - RNA, 19 nt, Artificial Sequence
  Description of Artificial Sequence: Synthetic oligonucleotide
aauccuuccaccagaauca

SEQ ID NO: 2401252 - RNA, 19 nt, Artificial Sequence
  Description of Artificial Sequence: Synthetic oligonucleotide
aaaguuuucaaaauacaua

SEQ ID NO: 2401253 - RNA, 19 nt, Artificial Sequence
  Description of Artificial Sequence: Synthetic oligonucleotide
gauagauuggaguaagaaa

SEQ ID NO: 2401254 - RNA, 19 nt, Artificial Sequence
  Description of Artificial Sequence: Synthetic oligonucleotide
aaccacaaacaguucacug

SEQ ID NO: 2401255 - RNA, 19 nt, Artificial Sequence
  Description of Artificial Sequence: Synthetic oligonucleotide
ucuugcaugagucucuguc

SEQ ID NO: 2401256 - RNA, 19 nt, Artificial Sequence
  Description of Artificial Sequence: Synthetic oligonucleotide
uggcaauuugagaacaucu

SEQ ID NO: 2401257 - RNA, 19 nt, Artificial Sequence
  Description of Artificial Sequence: Synthetic oligonucleotide
aagcuaucuuauuauauuu

SEQ ID NO: 2401258 - RNA, 19 nt, Artificial Sequence
  Description of Artificial Sequence: Synthetic oligonucleotide
cuuuugguggcaauuugag

SEQ ID NO: 2401259 - RNA, 19 nt, Artificial Sequence
  Description of Artificial Sequence: Synthetic oligonucleotide
uccauuaacuaagagggac

SEQ ID NO: 2401260 - RNA, 19 nt, Artificial Sequence
  Description of Artificial Sequence: Synthetic oligonucleotide
ucuuuucuaugccuccuag

SEQ ID NO: 2401261 - RNA, 19 nt, Artificial Sequence
  Description of Artificial Sequence: Synthetic oligonucleotide
ucugcaugaucucaaguaa

SEQ ID NO: 2401262 - RNA, 19 nt, Artificial Sequence
  Description of Artificial Sequence: Synthetic oligonucleotide
uguuuggaugauagauugg

SEQ ID NO: 2401263 - RNA, 19 nt, Artificial Sequence
  Description of Artificial Sequence: Synthetic oligonucleotide
uccaccagaaucaauguuu

SEQ ID NO: 2401264 - RNA, 19 nt, Artificial Sequence
  Description of Artificial Sequence: Synthetic oligonucleotide
agugugaaaacucccuucu

SEQ ID NO: 2401265 - RNA, 19 nt, Artificial Sequence
  Description of Artificial Sequence: Synthetic oligonucleotide
augaucucaaguaaaagga

SEQ ID NO: 2401266 - RNA, 19 nt, Artificial Sequence
  Description of Artificial Sequence: Synthetic oligonucleotide
ucuagacaaauccuuccac

SEQ ID NO: 2401267 - RNA, 19 nt, Artificial Sequence
  Description of Artificial Sequence: Synthetic oligonucleotide
cauaagguguguuggcucc

SEQ ID NO: 2401268 - RNA, 19 nt, Artificial Sequence
  Description of Artificial Sequence: Synthetic oligonucleotide
cuugcaugagucucugucc

SEQ ID NO: 2401269 - RNA, 19 nt, Artificial Sequence
  Description of Artificial Sequence: Synthetic oligonucleotide
gauacaaacauuaugucau

SEQ ID NO: 2401270 - RNA, 19 nt, Artificial Sequence
  Description of Artificial Sequence: Synthetic oligonucleotide
caccuaauauuugagcucg

SEQ ID NO: 2401271 - RNA, 19 nt, Artificial Sequence
  Description of Artificial Sequence: Synthetic oligonucleotide
caucuagacaaauccuucc

SEQ ID NO: 2401272 - RNA, 19 nt, Artificial Sequence
  Description of Artificial Sequence: Synthetic oligonucleotide
aguauccuuaaagaaucac

SEQ ID NO: 2401273 - RNA, 19 nt, Artificial Sequence
  Description of Artificial Sequence: Synthetic oligonucleotide
uggaguaagaaaucugauc

SEQ ID NO: 2401274 - RNA, 19 nt, Artificial Sequence
  Description of Artificial Sequence: Synthetic oligonucleotide
auagcuaacaugugcaguu

SEQ ID NO: 2401275 - RNA, 19 nt, Artificial Sequence
  Description of Artificial Sequence: Synthetic oligonucleotide
ucaccaacucuucaucagc

SEQ ID NO: 2401276 - RNA, 19 nt, Artificial Sequence
  Description of Artificial Sequence: Synthetic oligonucleotide
aagagggaccaggacaaac

SEQ ID NO: 2401277 - RNA, 19 nt, Artificial Sequence
  Description of Artificial Sequence: Synthetic oligonucleotide
ucuccaugcaccuuuuggu

SEQ ID NO: 2401278 - RNA, 19 nt, Artificial Sequence
  Description of Artificial Sequence: Synthetic oligonucleotide
ugauagauuggaguaagaa

SEQ ID NO: 2401279 - RNA, 19 nt, Artificial Sequence
  Description of Artificial Sequence: Synthetic oligonucleotide
aacagaguagcgauguuga

SEQ ID NO: 2401280 - RNA, 19 nt, Artificial Sequence
  Description of Artificial Sequence: Synthetic oligonucleotide
gaucucaaguaaaaggaac

SEQ ID NO: 2401281 - RNA, 19 nt, Artificial Sequence
  Description of Artificial Sequence: Synthetic oligonucleotide
auacaaacauuaugucauc

SEQ ID NO: 2401282 - RNA, 19 nt, Artificial Sequence
  Description of Artificial Sequence: Synthetic oligonucleotide
ugaucucaaguaaaaggaa

SEQ ID NO: 2401283 - RNA, 19 nt, Artificial Sequence
  Description of Artificial Sequence: Synthetic oligonucleotide
ugcaugaucucaaguaaaa

SEQ ID NO: 2401284 - RNA, 19 nt, Artificial Sequence
  Description of Artificial Sequence: Synthetic oligonucleotide
uuugagcucgcaaaucauc

SEQ ID NO: 2401285 - RNA, 19 nt, Artificial Sequence
  Description of Artificial Sequence: Synthetic oligonucleotide
acucccuucucauaaggug

SEQ ID NO: 2401286 - RNA, 19 nt, Artificial Sequence
  Description of Artificial Sequence: Synthetic oligonucleotide
agguucuauagcuaacaug

SEQ ID NO: 2401287 - RNA, 19 nt, Artificial Sequence
  Description of Artificial Sequence: Synthetic oligonucleotide
ucucaaguaaaaggaacca

SEQ ID NO: 2401288 - RNA, 19 nt, Artificial Sequence
  Description of Artificial Sequence: Synthetic oligonucleotide
gcaauuugagaacaucuag

SEQ ID NO: 2401289 - RNA, 19 nt, Artificial Sequence
  Description of Artificial Sequence: Synthetic oligonucleotide
uccagugugaaaacucccu

SEQ ID NO: 2401290 - RNA, 19 nt, Artificial Sequence
  Description of Artificial Sequence: Synthetic oligonucleotide
guaaaaggaaccacaaaca

SEQ ID NO: 2401291 - RNA, 19 nt, Artificial Sequence
  Description of Artificial Sequence: Synthetic oligonucleotide
uugcaugagucucugucca

SEQ ID NO: 2401292 - RNA, 19 nt, Artificial Sequence
  Description of Artificial Sequence: Synthetic oligonucleotide
uuuuccugccagcacguga

SEQ ID NO: 2401293 - RNA, 19 nt, Artificial Sequence
  Description of Artificial Sequence: Synthetic oligonucleotide
uuauaaggauacaaacauu

SEQ ID NO: 2401294 - RNA, 19 nt, Artificial Sequence
  Description of Artificial Sequence: Synthetic oligonucleotide
uucuugagaaaagcuaucu

SEQ ID NO: 2401295 - RNA, 19 nt, Artificial Sequence
  Description of Artificial Sequence: Synthetic oligonucleotide
accagaaucaauguuugga

SEQ ID NO: 2401296 - RNA, 19 nt, Artificial Sequence
  Description of Artificial Sequence: Synthetic oligonucleotide
gauuggaguaagaaaucug

SEQ ID NO: 2401297 - RNA, 19 nt, Artificial Sequence
  Description of Artificial Sequence: Synthetic oligonucleotide
cuucucauaagguguguug

SEQ ID NO: 2401298 - RNA, 19 nt, Artificial Sequence
  Description of Artificial Sequence: Synthetic oligonucleotide
aagguguguuggcuccacc

SEQ ID NO: 2401299 - RNA, 19 nt, Artificial Sequence
  Description of Artificial Sequence: Synthetic oligonucleotide
agacaaauccuuccaccag

SEQ ID NO: 2401300 - RNA, 19 nt, Artificial Sequence
  Description of Artificial Sequence: Synthetic oligonucleotide
auagaggucaacagaguag

SEQ ID NO: 2401301 - RNA, 19 nt, Artificial Sequence
  Description of Artificial Sequence: Synthetic oligonucleotide
cuauagcuaacaugugcag

SEQ ID NO: 2401302 - RNA, 19 nt, Artificial Sequence
  Description of Artificial Sequence: Synthetic oligonucleotide
aacaucuagacaaauccuu

SEQ ID NO: 2401303 - RNA, 19 nt, Artificial Sequence
  Description of Artificial Sequence: Synthetic oligonucleotide
uagauuggaguaagaaauc

SEQ ID NO: 2401304 - RNA, 19 nt, Artificial Sequence
  Description of Artificial Sequence: Synthetic oligonucleotide
aucacugcauagcagaauu

SEQ ID NO: 2401305 - RNA, 19 nt, Artificial Sequence
  Description of Artificial Sequence: Synthetic oligonucleotide
ucucauaagguguguuggc

SEQ ID NO: 2401306 - RNA, 19 nt, Artificial Sequence
  Description of Artificial Sequence: Synthetic oligonucleotide
ugucacagacuccauuaac

SEQ ID NO: 2401307 - RNA, 19 nt, Artificial Sequence
  Description of Artificial Sequence: Synthetic oligonucleotide
cagaaucaauguuuggaug

SEQ ID NO: 2401308 - RNA, 19 nt, Artificial Sequence
  Description of Artificial Sequence: Synthetic oligonucleotide
auagcagaauucauaaaca

SEQ ID NO: 2401309 - RNA, 19 nt, Artificial Sequence
  Description of Artificial Sequence: Synthetic oligonucleotide
uggaguugcauuccucaga

SEQ ID NO: 2401310 - RNA, 19 nt, Artificial Sequence
  Description of Artificial Sequence: Synthetic oligonucleotide
cagaguagcgauguugagg

SEQ ID NO: 2401311 - RNA, 19 nt, Artificial Sequence
  Description of Artificial Sequence: Synthetic oligonucleotide
auauuugagcucgcaaauc

SEQ ID NO: 2401312 - RNA, 19 nt, Artificial Sequence
  Description of Artificial Sequence: Synthetic oligonucleotide
aggaacgauaacuuccagu

SEQ ID NO: 2401313 - RNA, 19 nt, Artificial Sequence
  Description of Artificial Sequence: Synthetic oligonucleotide
acaucuagacaaauccuuc

SEQ ID NO: 2401314 - RNA, 19 nt, Artificial Sequence
  Description of Artificial Sequence: Synthetic oligonucleotide
uauagcuaacaugugcagu

SEQ ID NO: 2401315 - RNA, 19 nt, Artificial Sequence
  Description of Artificial Sequence: Synthetic oligonucleotide
gguucuauagcuaacaugu

SEQ ID NO: 2401316 - RNA, 19 nt, Artificial Sequence
  Description of Artificial Sequence: Synthetic oligonucleotide
ucaauguuuggaugauaga

SEQ ID NO: 2401317 - RNA, 19 nt, Artificial Sequence
  Description of Artificial Sequence: Synthetic oligonucleotide
aacaucgggguggaauuuc

SEQ ID NO: 2401318 - RNA, 19 nt, Artificial Sequence
  Description of Artificial Sequence: Synthetic oligonucleotide
uuuccugccagcacgugau

SEQ ID NO: 2401319 - RNA, 19 nt, Artificial Sequence
  Description of Artificial Sequence: Synthetic oligonucleotide
guuuggaugauagauugga

SEQ ID NO: 2401320 - RNA, 19 nt, Artificial Sequence
  Description of Artificial Sequence: Synthetic oligonucleotide
ucauaagguguguuggcuc

SEQ ID NO: 2401321 - RNA, 19 nt, Artificial Sequence
  Description of Artificial Sequence: Synthetic oligonucleotide
gcugaauagaggucaacag

SEQ ID NO: 2401322 - RNA, 19 nt, Artificial Sequence
  Description of Artificial Sequence: Synthetic oligonucleotide
aaacauccaagaaaagcaa

SEQ ID NO: 2401323 - RNA, 19 nt, Artificial Sequence
  Description of Artificial Sequence: Synthetic oligonucleotide
aaacauacauggucuuuua

SEQ ID NO: 2401324 - RNA, 19 nt, Artificial Sequence
  Description of Artificial Sequence: Synthetic oligonucleotide
gaaaagcuaucuuauuaua

SEQ ID NO: 2401325 - RNA, 19 nt, Artificial Sequence
  Description of Artificial Sequence: Synthetic oligonucleotide
ugaacaucgggguggaauu

SEQ ID NO: 2401326 - RNA, 19 nt, Artificial Sequence
  Description of Artificial Sequence: Synthetic oligonucleotide
agcagcugaauagagguca

SEQ ID NO: 2401327 - RNA, 19 nt, Artificial Sequence
  Description of Artificial Sequence: Synthetic oligonucleotide
gauguugagggauggucuc

SEQ ID NO: 2401328 - RNA, 19 nt, Artificial Sequence
  Description of Artificial Sequence: Synthetic oligonucleotide
uuggcuccaccuaauauuu

SEQ ID NO: 2401329 - RNA, 19 nt, Artificial Sequence
  Description of Artificial Sequence: Synthetic oligonucleotide
ccuuccaccagaaucaaug

SEQ ID NO: 2401330 - RNA, 19 nt, Artificial Sequence
  Description of Artificial Sequence: Synthetic oligonucleotide
caaacucucugaacaucgg

SEQ ID NO: 2401331 - RNA, 19 nt, Artificial Sequence
  Description of Artificial Sequence: Synthetic oligonucleotide
agagucaccaacucuucau

SEQ ID NO: 2401332 - RNA, 19 nt, Artificial Sequence
  Description of Artificial Sequence: Synthetic oligonucleotide
acucucugaacaucggggu

SEQ ID NO: 2401333 - RNA, 19 nt, Artificial Sequence
  Description of Artificial Sequence: Synthetic oligonucleotide
auuagugggucaucagggu

SEQ ID NO: 2401334 - RNA, 19 nt, Artificial Sequence
  Description of Artificial Sequence: Synthetic oligonucleotide
uguuggcuccaccuaauau

SEQ ID NO: 2401335 - RNA, 19 nt, Artificial Sequence
  Description of Artificial Sequence: Synthetic oligonucleotide
cuaagagggaccaggacaa

SEQ ID NO: 2401336 - RNA, 19 nt, Artificial Sequence
  Description of Artificial Sequence: Synthetic oligonucleotide
caaaguauccuuaaagaau

SEQ ID NO: 2401337 - RNA, 19 nt, Artificial Sequence
  Description of Artificial Sequence: Synthetic oligonucleotide
uugagaacaucuagacaaa

SEQ ID NO: 2401338 - RNA, 19 nt, Artificial Sequence
  Description of Artificial Sequence: Synthetic oligonucleotide
agcugaauagaggucaaca

SEQ ID NO: 2401339 - RNA, 19 nt, Artificial Sequence
  Description of Artificial Sequence: Synthetic oligonucleotide
uucacugcuccacacuaau

SEQ ID NO: 2401340 - RNA, 19 nt, Artificial Sequence
  Description of Artificial Sequence: Synthetic oligonucleotide
gaccaggacaaacucucug

SEQ ID NO: 2401341 - RNA, 19 nt, Artificial Sequence
  Description of Artificial Sequence: Synthetic oligonucleotide
cucgcaaaucauccacucg

SEQ ID NO: 2401342 - RNA, 19 nt, Artificial Sequence
  Description of Artificial Sequence: Synthetic oligonucleotide
cacucgguccuuuuccugc

SEQ ID NO: 2401343 - RNA, 19 nt, Artificial Sequence
  Description of Artificial Sequence: Synthetic oligonucleotide
gagaacaucuagacaaauc

SEQ ID NO: 2401344 - RNA, 19 nt, Artificial Sequence
  Description of Artificial Sequence: Synthetic oligonucleotide
uuagugggucaucaggguu

SEQ ID NO: 2401345 - RNA, 19 nt, Artificial Sequence
  Description of Artificial Sequence: Synthetic oligonucleotide
gagcucgcaaaucauccac

SEQ ID NO: 2401346 - RNA, 19 nt, Artificial Sequence
  Description of Artificial Sequence: Synthetic oligonucleotide
caacagaguagcgauguug

SEQ ID NO: 2401347 - RNA, 19 nt, Artificial Sequence
  Description of Artificial Sequence: Synthetic oligonucleotide
cuugucacagacuccauua

SEQ ID NO: 2401348 - RNA, 19 nt, Artificial Sequence
  Description of Artificial Sequence: Synthetic oligonucleotide
ggaaaugucagccauuagu

SEQ ID NO: 2401349 - RNA, 19 nt, Artificial Sequence
  Description of Artificial Sequence: Synthetic oligonucleotide
aucugaucuguggugguuc

SEQ ID NO: 2401350 - RNA, 19 nt, Artificial Sequence
  Description of Artificial Sequence: Synthetic oligonucleotide
cuccaugcaccuuuuggug

SEQ ID NO: 2401351 - RNA, 19 nt, Artificial Sequence
  Description of Artificial Sequence: Synthetic oligonucleotide
uuucuucaggcgugaagcu

SEQ ID NO: 2401352 - RNA, 19 nt, Artificial Sequence
  Description of Artificial Sequence: Synthetic oligonucleotide
cuuaaagaaucacugcaua

SEQ ID NO: 2401353 - RNA, 19 nt, Artificial Sequence
  Description of Artificial Sequence: Synthetic oligonucleotide
aguucacugcuccacacua

SEQ ID NO: 2401354 - RNA, 19 nt, Artificial Sequence
  Description of Artificial Sequence: Synthetic oligonucleotide
ugagcucgcaaaucaucca

SEQ ID NO: 2401355 - RNA, 19 nt, Artificial Sequence
  Description of Artificial Sequence: Synthetic oligonucleotide
guaagaaaucugaucugug

SEQ ID NO: 2401356 - RNA, 19 nt, Artificial Sequence
  Description of Artificial Sequence: Synthetic oligonucleotide
gauaacuuccagugugaaa

SEQ ID NO: 2401357 - RNA, 19 nt, Artificial Sequence
  Description of Artificial Sequence: Synthetic oligonucleotide
cuaauauuugagcucgcaa

SEQ ID NO: 2401358 - RNA, 19 nt, Artificial Sequence
  Description of Artificial Sequence: Synthetic oligonucleotide
ucugaucuguggugguuca

SEQ ID NO: 2401359 - RNA, 19 nt, Artificial Sequence
  Description of Artificial Sequence: Synthetic oligonucleotide
aguucuuucuucaggcgug

SEQ ID NO: 2401360 - RNA, 19 nt, Artificial Sequence
  Description of Artificial Sequence: Synthetic oligonucleotide
agguguguuggcuccaccu

SEQ ID NO: 2401361 - RNA, 19 nt, Artificial Sequence
  Description of Artificial Sequence: Synthetic oligonucleotide
agcuaacaugugcaguucu

SEQ ID NO: 2401362 - RNA, 19 nt, Artificial Sequence
  Description of Artificial Sequence: Synthetic oligonucleotide
ccauuaacuaagagggacc

SEQ ID NO: 2401363 - RNA, 19 nt, Artificial Sequence
  Description of Artificial Sequence: Synthetic oligonucleotide
gucuuuuauaaggauacaa

SEQ ID NO: 2401364 - RNA, 19 nt, Artificial Sequence
  Description of Artificial Sequence: Synthetic oligonucleotide
cagugugaaaacucccuuc

SEQ ID NO: 2401365 - RNA, 19 nt, Artificial Sequence
  Description of Artificial Sequence: Synthetic oligonucleotide
ucagagucaccaacucuuc

SEQ ID NO: 2401366 - RNA, 19 nt, Artificial Sequence
  Description of Artificial Sequence: Synthetic oligonucleotide
aguagcgauguugagggau

SEQ ID NO: 2401367 - RNA, 19 nt, Artificial Sequence
  Description of Artificial Sequence: Synthetic oligonucleotide
acagaguagcgauguugag

SEQ ID NO: 2401368 - RNA, 19 nt, Artificial Sequence
  Description of Artificial Sequence: Synthetic oligonucleotide
uaacuuccagugugaaaac

SEQ ID NO: 2401369 - RNA, 19 nt, Artificial Sequence
  Description of Artificial Sequence: Synthetic oligonucleotide
auuaacuaagagggaccag

SEQ ID NO: 2401370 - RNA, 19 nt, Artificial Sequence
  Description of Artificial Sequence: Synthetic oligonucleotide
ucuaugccuccuaguggcc

SEQ ID NO: 2401371 - RNA, 19 nt, Artificial Sequence
  Description of Artificial Sequence: Synthetic oligonucleotide
cauuaacuaagagggacca

SEQ ID NO: 2401372 - RNA, 19 nt, Artificial Sequence
  Description of Artificial Sequence: Synthetic oligonucleotide
caugagucucuguccacug

SEQ ID NO: 2401373 - RNA, 19 nt, Artificial Sequence
  Description of Artificial Sequence: Synthetic oligonucleotide
aaggaaccacaaacaguuc

SEQ ID NO: 2401374 - RNA, 19 nt, Artificial Sequence
  Description of Artificial Sequence: Synthetic oligonucleotide
caggacaaacucucugaac

SEQ ID NO: 2401375 - RNA, 19 nt, Artificial Sequence
  Description of Artificial Sequence: Synthetic oligonucleotide
guggaguugcauuccucag

SEQ ID NO: 2401376 - RNA, 19 nt, Artificial Sequence
  Description of Artificial Sequence: Synthetic oligonucleotide
ucgguccuuuuccugccag

SEQ ID NO: 2401377 - RNA, 19 nt, Artificial Sequence
  Description of Artificial Sequence: Synthetic oligonucleotide
guugggcucugccaugagc

SEQ ID NO: 2401378 - RNA, 19 nt, Artificial Sequence
  Description of Artificial Sequence: Synthetic oligonucleotide
ucacugcauagcagaauuc

SEQ ID NO: 2401379 - RNA, 19 nt, Artificial Sequence
  Description of Artificial Sequence: Synthetic oligonucleotide
aacucccuucucauaaggu

SEQ ID NO: 2401380 - RNA, 19 nt, Artificial Sequence
  Description of Artificial Sequence: Synthetic oligonucleotide
aaguauccuuaaagaauca

SEQ ID NO: 2401381 - RNA, 19 nt, Artificial Sequence
  Description of Artificial Sequence: Synthetic oligonucleotide
agagaccaccuugucacag

SEQ ID NO: 2401382 - RNA, 19 nt, Artificial Sequence
  Description of Artificial Sequence: Synthetic oligonucleotide
uguguuggcuccaccuaau

SEQ ID NO: 2401383 - RNA, 19 nt, Artificial Sequence
  Description of Artificial Sequence: Synthetic oligonucleotide
ugagaacaucuagacaaau

SEQ ID NO: 2401384 - RNA, 19 nt, Artificial Sequence
  Description of Artificial Sequence: Synthetic oligonucleotide
ucgggguggaauuucuuuu

SEQ ID NO: 2401385 - RNA, 19 nt, Artificial Sequence
  Description of Artificial Sequence: Synthetic oligonucleotide
auaaggauacaaacauuau

SEQ ID NO: 2401386 - RNA, 19 nt, Artificial Sequence
  Description of Artificial Sequence: Synthetic oligonucleotide
uuccaccagaaucaauguu

SEQ ID NO: 2401387 - RNA, 19 nt, Artificial Sequence
  Description of Artificial Sequence: Synthetic oligonucleotide
agucucuguccacugccug

SEQ ID NO: 2401388 - RNA, 19 nt, Artificial Sequence
  Description of Artificial Sequence: Synthetic oligonucleotide
aggaaaugucagccauuag

SEQ ID NO: 2401389 - RNA, 19 nt, Artificial Sequence
  Description of Artificial Sequence: Synthetic oligonucleotide
guauccuuaaagaaucacu

SEQ ID NO: 2401390 - RNA, 19 nt, Artificial Sequence
  Description of Artificial Sequence: Synthetic oligonucleotide
aguggcccggcuuuccucu

SEQ ID NO: 2401391 - RNA, 19 nt, Artificial Sequence
  Description of Artificial Sequence: Synthetic oligonucleotide
guucaaauggguaccucuc

SEQ ID NO: 2401392 - RNA, 19 nt, Artificial Sequence
  Description of Artificial Sequence: Synthetic oligonucleotide
auaaacauacauggucuuu

SEQ ID NO: 2401393 - RNA, 19 nt, Artificial Sequence
  Description of Artificial Sequence: Synthetic oligonucleotide
gaggaaaugucagccauua

SEQ ID NO: 2401394 - RNA, 19 nt, Artificial Sequence
  Description of Artificial Sequence: Synthetic oligonucleotide
caugugcaguucuuucuuc

SEQ ID NO: 2401395 - RNA, 19 nt, Artificial Sequence
  Description of Artificial Sequence: Synthetic oligonucleotide
aggcgugaagcucucugca

SEQ ID NO: 2401396 - RNA, 19 nt, Artificial Sequence
  Description of Artificial Sequence: Synthetic oligonucleotide
aucgggguggaauuucuuu

SEQ ID NO: 2401397 - RNA, 19 nt, Artificial Sequence
  Description of Artificial Sequence: Synthetic oligonucleotide
accucucaggaacgauaac

SEQ ID NO: 2401398 - RNA, 19 nt, Artificial Sequence
  Description of Artificial Sequence: Synthetic oligonucleotide
guugcauuccucagaguca

SEQ ID NO: 2401399 - RNA, 19 nt, Artificial Sequence
  Description of Artificial Sequence: Synthetic oligonucleotide
guagcgauguugagggaug

SEQ ID NO: 2401400 - RNA, 19 nt, Artificial Sequence
  Description of Artificial Sequence: Synthetic oligonucleotide
cacugcauagcagaauuca

SEQ ID NO: 2401401 - RNA, 19 nt, Artificial Sequence
  Description of Artificial Sequence: Synthetic oligonucleotide
gaacaucuagacaaauccu

SEQ ID NO: 2401402 - RNA, 19 nt, Artificial Sequence
  Description of Artificial Sequence: Synthetic oligonucleotide
guuggcuccaccuaauauu

SEQ ID NO: 2401403 - RNA, 19 nt, Artificial Sequence
  Description of Artificial Sequence: Synthetic oligonucleotide
cagcacgugaugccugggg

SEQ ID NO: 2401404 - RNA, 19 nt, Artificial Sequence
  Description of Artificial Sequence: Synthetic oligonucleotide
cugcauagcagaauucaua

SEQ ID NO: 2401405 - RNA, 19 nt, Artificial Sequence
  Description of Artificial Sequence: Synthetic oligonucleotide
aaucugaucuguggugguu

SEQ ID NO: 2401406 - RNA, 19 nt, Artificial Sequence
  Description of Artificial Sequence: Synthetic oligonucleotide
gucacagacuccauuaacu

SEQ ID NO: 2401407 - RNA, 19 nt, Artificial Sequence
  Description of Artificial Sequence: Synthetic oligonucleotide
agaggucaacagaguagcg

SEQ ID NO: 2401408 - RNA, 19 nt, Artificial Sequence
  Description of Artificial Sequence: Synthetic oligonucleotide
cacagacuccauuaacuaa

SEQ ID NO: 2401409 - RNA, 19 nt, Artificial Sequence
  Description of Artificial Sequence: Synthetic oligonucleotide
ggcuccaccuaauauuuga

SEQ ID NO: 2401410 - RNA, 19 nt, Artificial Sequence
  Description of Artificial Sequence: Synthetic oligonucleotide
gagaccaccuugucacaga

SEQ ID NO: 2401411 - RNA, 19 nt, Artificial Sequence
  Description of Artificial Sequence: Synthetic oligonucleotide
accuaauauuugagcucgc

SEQ ID NO: 2401412 - RNA, 19 nt, Artificial Sequence
  Description of Artificial Sequence: Synthetic oligonucleotide
guucuauagcuaacaugug

SEQ ID NO: 2401413 - RNA, 19 nt, Artificial Sequence
  Description of Artificial Sequence: Synthetic oligonucleotide
ugcaugagucucuguccac

SEQ ID NO: 2401414 - RNA, 19 nt, Artificial Sequence
  Description of Artificial Sequence: Synthetic oligonucleotide
uggcuccaccuaauauuug

SEQ ID NO: 2401415 - RNA, 19 nt, Artificial Sequence
  Description of Artificial Sequence: Synthetic oligonucleotide
cugcaugaucucaaguaaa

SEQ ID NO: 2401416 - RNA, 19 nt, Artificial Sequence
  Description of Artificial Sequence: Synthetic oligonucleotide
gucaacagaguagcgaugu

SEQ ID NO: 2401417 - RNA, 19 nt, Artificial Sequence
  Description of Artificial Sequence: Synthetic oligonucleotide
acgauaacuuccaguguga

SEQ ID NO: 2401418 - RNA, 19 nt, Artificial Sequence
  Description of Artificial Sequence: Synthetic oligonucleotide
ucaacagaguagcgauguu

SEQ ID NO: 2401419 - RNA, 19 nt, Artificial Sequence
  Description of Artificial Sequence: Synthetic oligonucleotide
guggcaauuugagaacauc

SEQ ID NO: 2401420 - RNA, 19 nt, Artificial Sequence
  Description of Artificial Sequence: Synthetic oligonucleotide
cacaaacaguucacugcuc

SEQ ID NO: 2401421 - RNA, 19 nt, Artificial Sequence
  Description of Artificial Sequence: Synthetic oligonucleotide
cuuuccucuucugugugga

SEQ ID NO: 2401422 - RNA, 19 nt, Artificial Sequence
  Description of Artificial Sequence: Synthetic oligonucleotide
cucccuucucauaaggugu

SEQ ID NO: 2401423 - RNA, 19 nt, Artificial Sequence
  Description of Artificial Sequence: Synthetic oligonucleotide
gaacgauaacuuccagugu

SEQ ID NO: 2401424 - RNA, 19 nt, Artificial Sequence
  Description of Artificial Sequence: Synthetic oligonucleotide
ggagguucuauagcuaaca

SEQ ID NO: 2401425 - RNA, 19 nt, Artificial Sequence
  Description of Artificial Sequence: Synthetic oligonucleotide
agcaagcaaaagagaccac

SEQ ID NO: 2401426 - RNA, 19 nt, Artificial Sequence
  Description of Artificial Sequence: Synthetic oligonucleotide
gguggaauuucuuuucuau

SEQ ID NO: 2401427 - RNA, 19 nt, Artificial Sequence
  Description of Artificial Sequence: Synthetic oligonucleotide
ccaccuaauauuugagcuc

SEQ ID NO: 2401428 - RNA, 19 nt, Artificial Sequence
  Description of Artificial Sequence: Synthetic oligonucleotide
auuugagcucgcaaaucau

SEQ ID NO: 2401429 - RNA, 19 nt, Artificial Sequence
  Description of Artificial Sequence: Synthetic oligonucleotide
ugcauuccucagagucacc

SEQ ID NO: 2401430 - RNA, 19 nt, Artificial Sequence
  Description of Artificial Sequence: Synthetic oligonucleotide
gcgugaagcucucugcaug

SEQ ID NO: 2401431 - RNA, 19 nt, Artificial Sequence
  Description of Artificial Sequence: Synthetic oligonucleotide
uagcuaacaugugcaguuc

SEQ ID NO: 2401432 - RNA, 19 nt, Artificial Sequence
  Description of Artificial Sequence: Synthetic oligonucleotide
caggaacgauaacuuccag

SEQ ID NO: 2401433 - RNA, 19 nt, Artificial Sequence
  Description of Artificial Sequence: Synthetic oligonucleotide
guguguuggcuccaccuaa

SEQ ID NO: 2401434 - RNA, 19 nt, Artificial Sequence
  Description of Artificial Sequence: Synthetic oligonucleotide
cuccauuaacuaagaggga

SEQ ID NO: 2401435 - RNA, 19 nt, Artificial Sequence
  Description of Artificial Sequence: Synthetic oligonucleotide
gaucuguggugguucaaau

SEQ ID NO: 2401436 - RNA, 19 nt, Artificial Sequence
  Description of Artificial Sequence: Synthetic oligonucleotide
gaauagaggucaacagagu

SEQ ID NO: 2401437 - RNA, 19 nt, Artificial Sequence
  Description of Artificial Sequence: Synthetic oligonucleotide
augauagauuggaguaaga

SEQ ID NO: 2401438 - RNA, 19 nt, Artificial Sequence
  Description of Artificial Sequence: Synthetic oligonucleotide
gagguucuauagcuaacau

SEQ ID NO: 2401439 - RNA, 19 nt, Artificial Sequence
  Description of Artificial Sequence: Synthetic oligonucleotide
ugucagccauuaguggguc

SEQ ID NO: 2401440 - RNA, 19 nt, Artificial Sequence
  Description of Artificial Sequence: Synthetic oligonucleotide
cuuuucuaugccuccuagu

SEQ ID NO: 2401441 - RNA, 19 nt, Artificial Sequence
  Description of Artificial Sequence: Synthetic oligonucleotide
ccuuuugguggcaauuuga

SEQ ID NO: 2401442 - RNA, 19 nt, Artificial Sequence
  Description of Artificial Sequence: Synthetic oligonucleotide
agcucgcaaaucauccacu

SEQ ID NO: 2401443 - RNA, 19 nt, Artificial Sequence
  Description of Artificial Sequence: Synthetic oligonucleotide
cacugccuggcauucuuga

SEQ ID NO: 2401444 - RNA, 19 nt, Artificial Sequence
  Description of Artificial Sequence: Synthetic oligonucleotide
ccggcuuuccucuucugug

SEQ ID NO: 2401445 - RNA, 19 nt, Artificial Sequence
  Description of Artificial Sequence: Synthetic oligonucleotide
ucauccacucgguccuuuu

SEQ ID NO: 2401446 - RNA, 19 nt, Artificial Sequence
  Description of Artificial Sequence: Synthetic oligonucleotide
ggggagguucuauagcuaa

SEQ ID NO: 2401447 - RNA, 19 nt, Artificial Sequence
  Description of Artificial Sequence: Synthetic oligonucleotide
gaaucaauguuuggaugau

SEQ ID NO: 2401448 - RNA, 19 nt, Artificial Sequence
  Description of Artificial Sequence: Synthetic oligonucleotide
cucucaggaacgauaacuu

SEQ ID NO: 2401449 - RNA, 19 nt, Artificial Sequence
  Description of Artificial Sequence: Synthetic oligonucleotide
cagagucaccaacucuuca

SEQ ID NO: 2401450 - RNA, 19 nt, Artificial Sequence
  Description of Artificial Sequence: Synthetic oligonucleotide
gaaccacaaacaguucacu

SEQ ID NO: 2401451 - RNA, 19 nt, Artificial Sequence
  Description of Artificial Sequence: Synthetic oligonucleotide
cuuccaccagaaucaaugu

SEQ ID NO: 2401452 - RNA, 19 nt, Artificial Sequence
  Description of Artificial Sequence: Synthetic oligonucleotide
guaccucucaggaacgaua

SEQ ID NO: 2401453 - RNA, 19 nt, Artificial Sequence
  Description of Artificial Sequence: Synthetic oligonucleotide
gcuccaccuaauauuugag

SEQ ID NO: 2401454 - RNA, 19 nt, Artificial Sequence
  Description of Artificial Sequence: Synthetic oligonucleotide
gcucgcaaaucauccacuc

SEQ ID NO: 2401455 - RNA, 19 nt, Artificial Sequence
  Description of Artificial Sequence: Synthetic oligonucleotide
cauaaacauacauggucuu

SEQ ID NO: 2401456 - RNA, 19 nt, Artificial Sequence
  Description of Artificial Sequence: Synthetic oligonucleotide
cauggucuuuuauaaggau

SEQ ID NO: 2401457 - RNA, 19 nt, Artificial Sequence
  Description of Artificial Sequence: Synthetic oligonucleotide
ggcaauuugagaacaucua

SEQ ID NO: 2401458 - RNA, 19 nt, Artificial Sequence
  Description of Artificial Sequence: Synthetic oligonucleotide
gggguguacuggcugggug

SEQ ID NO: 2401459 - RNA, 19 nt, Artificial Sequence
  Description of Artificial Sequence: Synthetic oligonucleotide
cucauaagguguguuggcu

SEQ ID NO: 2401460 - RNA, 19 nt, Artificial Sequence
  Description of Artificial Sequence: Synthetic oligonucleotide
cuucaggcgugaagcucuc

SEQ ID NO: 2401461 - RNA, 19 nt, Artificial Sequence
  Description of Artificial Sequence: Synthetic oligonucleotide
gcgauguugagggaugguc

SEQ ID NO: 2401462 - RNA, 19 nt, Artificial Sequence
  Description of Artificial Sequence: Synthetic oligonucleotide
ggucaucaggguugggcuc

SEQ ID NO: 2401463 - RNA, 19 nt, Artificial Sequence
  Description of Artificial Sequence: Synthetic oligonucleotide
ggucaacagaguagcgaug

SEQ ID NO: 2401464 - RNA, 19 nt, Artificial Sequence
  Description of Artificial Sequence: Synthetic oligonucleotide
cugucuugcaugagucucu

SEQ ID NO: 2401465 - RNA, 19 nt, Artificial Sequence
  Description of Artificial Sequence: Synthetic oligonucleotide
uggucuccaugcaccuuuu

SEQ ID NO: 2401466 - RNA, 19 nt, Artificial Sequence
  Description of Artificial Sequence: Synthetic oligonucleotide
gaguagcgauguugaggga

SEQ ID NO: 2401467 - RNA, 19 nt, Artificial Sequence
  Description of Artificial Sequence: Synthetic oligonucleotide
cuuuuccugccagcacgug

SEQ ID NO: 2401468 - RNA, 19 nt, Artificial Sequence
  Description of Artificial Sequence: Synthetic oligonucleotide
gggucaucaggguugggcu

SEQ ID NO: 2401469 - RNA, 19 nt, Artificial Sequence
  Description of Artificial Sequence: Synthetic oligonucleotide
agcgauguugagggauggu

SEQ ID NO: 2401470 - RNA, 19 nt, Artificial Sequence
  Description of Artificial Sequence: Synthetic oligonucleotide
ccagaaucaauguuuggau

SEQ ID NO: 2401471 - RNA, 19 nt, Artificial Sequence
  Description of Artificial Sequence: Synthetic oligonucleotide
augccuccuaguggcccgg

SEQ ID NO: 2401472 - RNA, 19 nt, Artificial Sequence
  Description of Artificial Sequence: Synthetic oligonucleotide
ccuaauauuugagcucgca

SEQ ID NO: 2401473 - RNA, 19 nt, Artificial Sequence
  Description of Artificial Sequence: Synthetic oligonucleotide
guucacugcuccacacuaa

SEQ ID NO: 2401474 - RNA, 19 nt, Artificial Sequence
  Description of Artificial Sequence: Synthetic oligonucleotide
ccaccuugucacagacucc

SEQ ID NO: 2401475 - RNA, 19 nt, Artificial Sequence
  Description of Artificial Sequence: Synthetic oligonucleotide
uggcccggcuuuccucuuc

SEQ ID NO: 2401476 - RNA, 19 nt, Artificial Sequence
  Description of Artificial Sequence: Synthetic oligonucleotide
uucaggcgugaagcucucu

SEQ ID NO: 2401477 - RNA, 19 nt, Artificial Sequence
  Description of Artificial Sequence: Synthetic oligonucleotide
gggagguucuauagcuaac

SEQ ID NO: 2401478 - RNA, 19 nt, Artificial Sequence
  Description of Artificial Sequence: Synthetic oligonucleotide
ggucuccaugcaccuuuug

SEQ ID NO: 2401479 - RNA, 19 nt, Artificial Sequence
  Description of Artificial Sequence: Synthetic oligonucleotide
ccucucaggaacgauaacu

SEQ ID NO: 2401480 - RNA, 19 nt, Artificial Sequence
  Description of Artificial Sequence: Synthetic oligonucleotide
uccuaguggcccggcuuuc

SEQ ID NO: 2401481 - RNA, 19 nt, Artificial Sequence
  Description of Artificial Sequence: Synthetic oligonucleotide
gguugggcucugccaugag

SEQ ID NO: 2401482 - RNA, 19 nt, Artificial Sequence
  Description of Artificial Sequence: Synthetic oligonucleotide
gaguugcauuccucagagu

SEQ ID NO: 2401483 - RNA, 19 nt, Artificial Sequence
  Description of Artificial Sequence: Synthetic oligonucleotide
caguucacugcuccacacu

SEQ ID NO: 2401484 - RNA, 19 nt, Artificial Sequence
  Description of Artificial Sequence: Synthetic oligonucleotide
ucugaacaucgggguggaa

SEQ ID NO: 2401485 - RNA, 19 nt, Artificial Sequence
  Description of Artificial Sequence: Synthetic oligonucleotide
cgugaagcucucugcauga

SEQ ID NO: 2401486 - RNA, 19 nt, Artificial Sequence
  Description of Artificial Sequence: Synthetic oligonucleotide
cagccauuagugggucauc

SEQ ID NO: 2401487 - RNA, 19 nt, Artificial Sequence
  Description of Artificial Sequence: Synthetic oligonucleotide
gugguucaaauggguaccu

SEQ ID NO: 2401488 - RNA, 19 nt, Artificial Sequence
  Description of Artificial Sequence: Synthetic oligonucleotide
cucgguccuuuuccugcca

SEQ ID NO: 2401489 - RNA, 19 nt, Artificial Sequence
  Description of Artificial Sequence: Synthetic oligonucleotide
augcaccuuuugguggcaa

SEQ ID NO: 2401490 - RNA, 19 nt, Artificial Sequence
  Description of Artificial Sequence: Synthetic oligonucleotide
cuaguggcccggcuuuccu

SEQ ID NO: 2401491 - RNA, 19 nt, Artificial Sequence
  Description of Artificial Sequence: Synthetic oligonucleotide
gaacaucgggguggaauuu

SEQ ID NO: 2401492 - RNA, 19 nt, Artificial Sequence
  Description of Artificial Sequence: Synthetic oligonucleotide
ugccuccuaguggcccggc

SEQ ID NO: 2401493 - RNA, 19 nt, Artificial Sequence
  Description of Artificial Sequence: Synthetic oligonucleotide
gcucucugcaugaucucaa

SEQ ID NO: 2401494 - RNA, 19 nt, Artificial Sequence
  Description of Artificial Sequence: Synthetic oligonucleotide
gcaugagucucuguccacu

SEQ ID NO: 2401495 - RNA, 19 nt, Artificial Sequence
  Description of Artificial Sequence: Synthetic oligonucleotide
caaauccuuccaccagaau

SEQ ID NO: 2401496 - RNA, 19 nt, Artificial Sequence
  Description of Artificial Sequence: Synthetic oligonucleotide
guugagggauggucuccau

SEQ ID NO: 2401497 - RNA, 19 nt, Artificial Sequence
  Description of Artificial Sequence: Synthetic oligonucleotide
caccuuuugguggcaauuu

SEQ ID NO: 2401498 - RNA, 19 nt, Artificial Sequence
  Description of Artificial Sequence: Synthetic oligonucleotide
cuccuaguggcccggcuuu

SEQ ID NO: 2401499 - RNA, 19 nt, Artificial Sequence
  Description of Artificial Sequence: Synthetic oligonucleotide
ggcgugaagcucucugcau

SEQ ID NO: 2401500 - RNA, 19 nt, Artificial Sequence
  Description of Artificial Sequence: Synthetic oligonucleotide
cugccagcacgugaugccu

SEQ ID NO: 2401501 - RNA, 19 nt, Artificial Sequence
  Description of Artificial Sequence: Synthetic oligonucleotide
ccucagagucaccaacucu

SEQ ID NO: 2401502 - RNA, 19 nt, Artificial Sequence
  Description of Artificial Sequence: Synthetic oligonucleotide
ggguaccucucaggaacga

SEQ ID NO: 2401503 - RNA, 19 nt, Artificial Sequence
  Description of Artificial Sequence: Synthetic oligonucleotide
gcuaacaugugcaguucuu

SEQ ID NO: 2401504 - RNA, 19 nt, Artificial Sequence
  Description of Artificial Sequence: Synthetic oligonucleotide
ccuuuuccugccagcacgu

SEQ ID NO: 2401505 - RNA, 19 nt, Artificial Sequence
  Description of Artificial Sequence: Synthetic oligonucleotide
caucgggguggaauuucuu

SEQ ID NO: 2401506 - RNA, 19 nt, Artificial Sequence
  Description of Artificial Sequence: Synthetic oligonucleotide
gguaccucucaggaacgau

SEQ ID NO: 2401507 - RNA, 19 nt, Artificial Sequence
  Description of Artificial Sequence: Synthetic oligonucleotide
gugaagcucucugcaugau

SEQ ID NO: 2401508 - RNA, 19 nt, Artificial Sequence
  Description of Artificial Sequence: Synthetic oligonucleotide
cgauaacuuccagugugaa

SEQ ID NO: 2401509 - RNA, 19 nt, Artificial Sequence
  Description of Artificial Sequence: Synthetic oligonucleotide
ggcccggcuuuccucuucu

SEQ ID NO: 2401510 - RNA, 19 nt, Artificial Sequence
  Description of Artificial Sequence: Synthetic oligonucleotide
ccuucucauaagguguguu

SEQ ID NO: 2401511 - RNA, 19 nt, Artificial Sequence
  Description of Artificial Sequence: Synthetic oligonucleotide
gccuccuaguggcccggcu

SEQ ID NO: 2401512 - RNA, 19 nt, Artificial Sequence
  Description of Artificial Sequence: Synthetic oligonucleotide
cccuucucauaaggugugu

SEQ ID NO: 2401513 - RNA, 19 nt, Artificial Sequence
  Description of Artificial Sequence: Synthetic oligonucleotide
aaugauagcucuuacuucc

SEQ ID NO: 2401514 - RNA, 19 nt, Artificial Sequence
  Description of Artificial Sequence: Synthetic oligonucleotide
acaaacuagaacuaggagc

SEQ ID NO: 2401515 - RNA, 19 nt, Artificial Sequence
  Description of Artificial Sequence: Synthetic oligonucleotide
aauugauuuaaauuugucu

SEQ ID NO: 2401516 - RNA, 19 nt, Artificial Sequence
  Description of Artificial Sequence: Synthetic oligonucleotide
uguaauauaaaguguaugu

SEQ ID NO: 2401517 - RNA, 19 nt, Artificial Sequence
  Description of Artificial Sequence: Synthetic oligonucleotide
cuagcauacauuuuaagcc

SEQ ID NO: 2401518 - RNA, 19 nt, Artificial Sequence
  Description of Artificial Sequence: Synthetic oligonucleotide
uucauuaacgccaaugacc

SEQ ID NO: 2401519 - RNA, 19 nt, Artificial Sequence
  Description of Artificial Sequence: Synthetic oligonucleotide
ugucuuuacaaccagaggu

SEQ ID NO: 2401520 - RNA, 19 nt, Artificial Sequence
  Description of Artificial Sequence: Synthetic oligonucleotide
cauuuuaagccaaugacag

SEQ ID NO: 2401521 - RNA, 19 nt, Artificial Sequence
  Description of Artificial Sequence: Synthetic oligonucleotide
ucugcuuauacucagcuga

SEQ ID NO: 2401522 - RNA, 19 nt, Artificial Sequence
  Description of Artificial Sequence: Synthetic oligonucleotide
uagucuuccuaauagaucc

SEQ ID NO: 2401523 - RNA, 19 nt, Artificial Sequence
  Description of Artificial Sequence: Synthetic oligonucleotide
aauagauccccucuuaggu

SEQ ID NO: 2401524 - RNA, 19 nt, Artificial Sequence
  Description of Artificial Sequence: Synthetic oligonucleotide
uccaaaaucucuuuguccc

SEQ ID NO: 2401525 - RNA, 19 nt, Artificial Sequence
  Description of Artificial Sequence: Synthetic oligonucleotide
aaauuugucuucaaguguc

SEQ ID NO: 2401526 - RNA, 19 nt, Artificial Sequence
  Description of Artificial Sequence: Synthetic oligonucleotide
ucauuaacgccaaugacca

SEQ ID NO: 2401527 - RNA, 19 nt, Artificial Sequence
  Description of Artificial Sequence: Synthetic oligonucleotide
aaggucaucaaaugaagug

SEQ ID NO: 2401528 - RNA, 19 nt, Artificial Sequence
  Description of Artificial Sequence: Synthetic oligonucleotide
auggaguucuuucuaaagc

SEQ ID NO: 2401529 - RNA, 19 nt, Artificial Sequence
  Description of Artificial Sequence: Synthetic oligonucleotide
ucaagugucuguaauauaa

SEQ ID NO: 2401530 - RNA, 19 nt, Artificial Sequence
  Description of Artificial Sequence: Synthetic oligonucleotide
uuuuaagccaaugacagga

SEQ ID NO: 2401531 - RNA, 19 nt, Artificial Sequence
  Description of Artificial Sequence: Synthetic oligonucleotide
acuaggagcaguucauucc

SEQ ID NO: 2401532 - RNA, 19 nt, Artificial Sequence
  Description of Artificial Sequence: Synthetic oligonucleotide
guuuccuuaucuuaugagg

SEQ ID NO: 2401533 - RNA, 19 nt, Artificial Sequence
  Description of Artificial Sequence: Synthetic oligonucleotide
uguaguauuguaguggaag

SEQ ID NO: 2401534 - RNA, 19 nt, Artificial Sequence
  Description of Artificial Sequence: Synthetic oligonucleotide
cuuacaaacuagaacuagg

SEQ ID NO: 2401535 - RNA, 19 nt, Artificial Sequence
  Description of Artificial Sequence: Synthetic oligonucleotide
auuaacgccaaugaccagc

SEQ ID NO: 2401536 - RNA, 19 nt, Artificial Sequence
  Description of Artificial Sequence: Synthetic oligonucleotide
uccaggaaaugacauacgg

SEQ ID NO: 2401537 - RNA, 19 nt, Artificial Sequence
  Description of Artificial Sequence: Synthetic oligonucleotide
aaucucaacaucugggcug

SEQ ID NO: 2401538 - RNA, 19 nt, Artificial Sequence
  Description of Artificial Sequence: Synthetic oligonucleotide
uuacaaacuagaacuagga

SEQ ID NO: 2401539 - RNA, 19 nt, Artificial Sequence
  Description of Artificial Sequence: Synthetic oligonucleotide
aguucauuccucuccaggg

SEQ ID NO: 2401540 - RNA, 19 nt, Artificial Sequence
  Description of Artificial Sequence: Synthetic oligonucleotide
uaucuuaugaggguugggg

SEQ ID NO: 2401541 - RNA, 19 nt, Artificial Sequence
  Description of Artificial Sequence: Synthetic oligonucleotide
ucuuucuaaagcccaaggc

SEQ ID NO: 2401542 - RNA, 19 nt, Artificial Sequence
  Description of Artificial Sequence: Synthetic oligonucleotide
uaaauuugucuucaagugu

SEQ ID NO: 2401543 - RNA, 19 nt, Artificial Sequence
  Description of Artificial Sequence: Synthetic oligonucleotide
aacuaggagcaguucauuc

SEQ ID NO: 2401544 - RNA, 19 nt, Artificial Sequence
  Description of Artificial Sequence: Synthetic oligonucleotide
aaaguguauguccucucuc

SEQ ID NO: 2401545 - RNA, 19 nt, Artificial Sequence
  Description of Artificial Sequence: Synthetic oligonucleotide
uaauagauccccucuuagg

SEQ ID NO: 2401546 - RNA, 19 nt, Artificial Sequence
  Description of Artificial Sequence: Synthetic oligonucleotide
ucucuaaacugucuuuagg

SEQ ID NO: 2401547 - RNA, 19 nt, Artificial Sequence
  Description of Artificial Sequence: Synthetic oligonucleotide
uccaauugauuuaaauuug

SEQ ID NO: 2401548 - RNA, 19 nt, Artificial Sequence
  Description of Artificial Sequence: Synthetic oligonucleotide
caaacuagaacuaggagca

SEQ ID NO: 2401549 - RNA, 19 nt, Artificial Sequence
  Description of Artificial Sequence: Synthetic oligonucleotide
uggaguucuuucuaaagcc

SEQ ID NO: 2401550 - RNA, 19 nt, Artificial Sequence
  Description of Artificial Sequence: Synthetic oligonucleotide
ugaaguguccaaaaucucu

SEQ ID NO: 2401551 - RNA, 19 nt, Artificial Sequence
  Description of Artificial Sequence: Synthetic oligonucleotide
uuuguaaggucaucaaaug

SEQ ID NO: 2401552 - RNA, 19 nt, Artificial Sequence
  Description of Artificial Sequence: Synthetic oligonucleotide
agcucuuacuuccucagcg

SEQ ID NO: 2401553 - RNA, 19 nt, Artificial Sequence
  Description of Artificial Sequence: Synthetic oligonucleotide
cauggcacauguaagcugg

SEQ ID NO: 2401554 - RNA, 19 nt, Artificial Sequence
  Description of Artificial Sequence: Synthetic oligonucleotide
uucuuucuaaagcccaagg

SEQ ID NO: 2401555 - RNA, 19 nt, Artificial Sequence
  Description of Artificial Sequence: Synthetic oligonucleotide
ucuuuaguccaauugauuu

SEQ ID NO: 2401556 - RNA, 19 nt, Artificial Sequence
  Description of Artificial Sequence: Synthetic oligonucleotide
uguaguggaagccugccca

SEQ ID NO: 2401557 - RNA, 19 nt, Artificial Sequence
  Description of Artificial Sequence: Synthetic oligonucleotide
cuaaucucaacaucugggc

SEQ ID NO: 2401558 - RNA, 19 nt, Artificial Sequence
  Description of Artificial Sequence: Synthetic oligonucleotide
aaugacauacggguuguuc

SEQ ID NO: 2401559 - RNA, 19 nt, Artificial Sequence
  Description of Artificial Sequence: Synthetic oligonucleotide
gacaggagcaauucucugg

SEQ ID NO: 2401560 - RNA, 19 nt, Artificial Sequence
  Description of Artificial Sequence: Synthetic oligonucleotide
acuucauuaacgccaauga

SEQ ID NO: 2401561 - RNA, 19 nt, Artificial Sequence
  Description of Artificial Sequence: Synthetic oligonucleotide
aaggcuagcauacauuuua

SEQ ID NO: 2401562 - RNA, 19 nt, Artificial Sequence
  Description of Artificial Sequence: Synthetic oligonucleotide
uagaacuaggagcaguuca

SEQ ID NO: 2401563 - RNA, 19 nt, Artificial Sequence
  Description of Artificial Sequence: Synthetic oligonucleotide
uuucuaaagcccaaggcua

SEQ ID NO: 2401564 - RNA, 19 nt, Artificial Sequence
  Description of Artificial Sequence: Synthetic oligonucleotide
uuuacaaccagaggucuag

SEQ ID NO: 2401565 - RNA, 19 nt, Artificial Sequence
  Description of Artificial Sequence: Synthetic oligonucleotide
ugaggaaccuggcaagcgg

SEQ ID NO: 2401566 - RNA, 19 nt, Artificial Sequence
  Description of Artificial Sequence: Synthetic oligonucleotide
uuguaaggucaucaaauga

SEQ ID NO: 2401567 - RNA, 19 nt, Artificial Sequence
  Description of Artificial Sequence: Synthetic oligonucleotide
ugaguuucuuuauuuuaag

SEQ ID NO: 2401568 - RNA, 19 nt, Artificial Sequence
  Description of Artificial Sequence: Synthetic oligonucleotide
ugucuugaagccauggcac

SEQ ID NO: 2401569 - RNA, 19 nt, Artificial Sequence
  Description of Artificial Sequence: Synthetic oligonucleotide
uagcauacauuuuaagcca

SEQ ID NO: 2401570 - RNA, 19 nt, Artificial Sequence
  Description of Artificial Sequence: Synthetic oligonucleotide
uuauuuuaagggguuguag

SEQ ID NO: 2401571 - RNA, 19 nt, Artificial Sequence
  Description of Artificial Sequence: Synthetic oligonucleotide
aaguguauguccucucucu

SEQ ID NO: 2401572 - RNA, 19 nt, Artificial Sequence
  Description of Artificial Sequence: Synthetic oligonucleotide
ucuagucuuccuaauagau

SEQ ID NO: 2401573 - RNA, 19 nt, Artificial Sequence
  Description of Artificial Sequence: Synthetic oligonucleotide
uugauuuaaauuugucuuc

SEQ ID NO: 2401574 - RNA, 19 nt, Artificial Sequence
  Description of Artificial Sequence: Synthetic oligonucleotide
cacaguucugcuuauacuc

SEQ ID NO: 2401575 - RNA, 19 nt, Artificial Sequence
  Description of Artificial Sequence: Synthetic oligonucleotide
aacuuuuguaaggucauca

SEQ ID NO: 2401576 - RNA, 19 nt, Artificial Sequence
  Description of Artificial Sequence: Synthetic oligonucleotide
agcugaaucaugugugagg

SEQ ID NO: 2401577 - RNA, 19 nt, Artificial Sequence
  Description of Artificial Sequence: Synthetic oligonucleotide
ugauuuaaauuugucuuca

SEQ ID NO: 2401578 - RNA, 19 nt, Artificial Sequence
  Description of Artificial Sequence: Synthetic oligonucleotide
auuuuaagccaaugacagg

SEQ ID NO: 2401579 - RNA, 19 nt, Artificial Sequence
  Description of Artificial Sequence: Synthetic oligonucleotide
uauaaaguguauguccucu

SEQ ID NO: 2401580 - RNA, 19 nt, Artificial Sequence
  Description of Artificial Sequence: Synthetic oligonucleotide
guaguauuguaguggaagc

SEQ ID NO: 2401581 - RNA, 19 nt, Artificial Sequence
  Description of Artificial Sequence: Synthetic oligonucleotide
gcuagcauacauuuuaagc

SEQ ID NO: 2401582 - RNA, 19 nt, Artificial Sequence
  Description of Artificial Sequence: Synthetic oligonucleotide
uguauguccucucucucca

SEQ ID NO: 2401583 - RNA, 19 nt, Artificial Sequence
  Description of Artificial Sequence: Synthetic oligonucleotide
ucaaaugaaguguccaaaa

SEQ ID NO: 2401584 - RNA, 19 nt, Artificial Sequence
  Description of Artificial Sequence: Synthetic oligonucleotide
uuuaagccaaugacaggag

SEQ ID NO: 2401585 - RNA, 19 nt, Artificial Sequence
  Description of Artificial Sequence: Synthetic oligonucleotide
auauaaaguguauguccuc

SEQ ID NO: 2401586 - RNA, 19 nt, Artificial Sequence
  Description of Artificial Sequence: Synthetic oligonucleotide
uucuaaagcccaaggcuag

SEQ ID NO: 2401587 - RNA, 19 nt, Artificial Sequence
  Description of Artificial Sequence: Synthetic oligonucleotide
gaagccauggcacauguaa

SEQ ID NO: 2401588 - RNA, 19 nt, Artificial Sequence
  Description of Artificial Sequence: Synthetic oligonucleotide
agauucugucucuaaacug

SEQ ID NO: 2401589 - RNA, 19 nt, Artificial Sequence
  Description of Artificial Sequence: Synthetic oligonucleotide
ugaccgacuuacaaacuag

SEQ ID NO: 2401590 - RNA, 19 nt, Artificial Sequence
  Description of Artificial Sequence: Synthetic oligonucleotide
ucucuuacuaacuuuugua

SEQ ID NO: 2401591 - RNA, 19 nt, Artificial Sequence
  Description of Artificial Sequence: Synthetic oligonucleotide
acuaacuuuuguaagguca

SEQ ID NO: 2401592 - RNA, 19 nt, Artificial Sequence
  Description of Artificial Sequence: Synthetic oligonucleotide
uaaggucaucaaaugaagu

SEQ ID NO: 2401593 - RNA, 19 nt, Artificial Sequence
  Description of Artificial Sequence: Synthetic oligonucleotide
cuuauacucagcugaauca

SEQ ID NO: 2401594 - RNA, 19 nt, Artificial Sequence
  Description of Artificial Sequence: Synthetic oligonucleotide
uagauccccucuuaggugc

SEQ ID NO: 2401595 - RNA, 19 nt, Artificial Sequence
  Description of Artificial Sequence: Synthetic oligonucleotide
auaaaguguauguccucuc

SEQ ID NO: 2401596 - RNA, 19 nt, Artificial Sequence
  Description of Artificial Sequence: Synthetic oligonucleotide
ucuuacuuccucagcgaag

SEQ ID NO: 2401597 - RNA, 19 nt, Artificial Sequence
  Description of Artificial Sequence: Synthetic oligonucleotide
ucuaaacugucuuuaggau

SEQ ID NO: 2401598 - RNA, 19 nt, Artificial Sequence
  Description of Artificial Sequence: Synthetic oligonucleotide
ucuuaggugcuugaggggc

SEQ ID NO: 2401599 - RNA, 19 nt, Artificial Sequence
  Description of Artificial Sequence: Synthetic oligonucleotide
uuuaguccaauugauuuaa

SEQ ID NO: 2401600 - RNA, 19 nt, Artificial Sequence
  Description of Artificial Sequence: Synthetic oligonucleotide
cucuaaacugucuuuagga

SEQ ID NO: 2401601 - RNA, 19 nt, Artificial Sequence
  Description of Artificial Sequence: Synthetic oligonucleotide
uggggaaugaguuucuuua

SEQ ID NO: 2401602 - RNA, 19 nt, Artificial Sequence
  Description of Artificial Sequence: Synthetic oligonucleotide
cuggugacuucauuaacgc

SEQ ID NO: 2401603 - RNA, 19 nt, Artificial Sequence
  Description of Artificial Sequence: Synthetic oligonucleotide
ugaggugaugacagcaggc

SEQ ID NO: 2401604 - RNA, 19 nt, Artificial Sequence
  Description of Artificial Sequence: Synthetic oligonucleotide
cuaauagauccccucuuag

SEQ ID NO: 2401605 - RNA, 19 nt, Artificial Sequence
  Description of Artificial Sequence: Synthetic oligonucleotide
acauuuuaagccaaugaca

SEQ ID NO: 2401606 - RNA, 19 nt, Artificial Sequence
  Description of Artificial Sequence: Synthetic oligonucleotide
auuguaguggaagccugcc

SEQ ID NO: 2401607 - RNA, 19 nt, Artificial Sequence
  Description of Artificial Sequence: Synthetic oligonucleotide
uauuguaguggaagccugc

SEQ ID NO: 2401608 - RNA, 19 nt, Artificial Sequence
  Description of Artificial Sequence: Synthetic oligonucleotide
cauggaguucuuucuaaag

SEQ ID NO: 2401609 - RNA, 19 nt, Artificial Sequence
  Description of Artificial Sequence: Synthetic oligonucleotide
uguccaaaaucucuuuguc

SEQ ID NO: 2401610 - RNA, 19 nt, Artificial Sequence
  Description of Artificial Sequence: Synthetic oligonucleotide
gaaugauagcucuuacuuc

SEQ ID NO: 2401611 - RNA, 19 nt, Artificial Sequence
  Description of Artificial Sequence: Synthetic oligonucleotide
cugucuuuaggaucuuggg

SEQ ID NO: 2401612 - RNA, 19 nt, Artificial Sequence
  Description of Artificial Sequence: Synthetic oligonucleotide
uuuucugacaugugcgggu

SEQ ID NO: 2401613 - RNA, 19 nt, Artificial Sequence
  Description of Artificial Sequence: Synthetic oligonucleotide
uuacuaacuuuuguaaggu

SEQ ID NO: 2401614 - RNA, 19 nt, Artificial Sequence
  Description of Artificial Sequence: Synthetic oligonucleotide
uuccuaauagauccccucu

SEQ ID NO: 2401615 - RNA, 19 nt, Artificial Sequence
  Description of Artificial Sequence: Synthetic oligonucleotide
acuuacaaacuagaacuag

SEQ ID NO: 2401616 - RNA, 19 nt, Artificial Sequence
  Description of Artificial Sequence: Synthetic oligonucleotide
guuguaguauuguagugga

SEQ ID NO: 2401617 - RNA, 19 nt, Artificial Sequence
  Description of Artificial Sequence: Synthetic oligonucleotide
ucuuaugaggguuggggaa

SEQ ID NO: 2401618 - RNA, 19 nt, Artificial Sequence
  Description of Artificial Sequence: Synthetic oligonucleotide
gacuucauuaacgccaaug

SEQ ID NO: 2401619 - RNA, 19 nt, Artificial Sequence
  Description of Artificial Sequence: Synthetic oligonucleotide
uuaacgccaaugaccagcu

SEQ ID NO: 2401620 - RNA, 19 nt, Artificial Sequence
  Description of Artificial Sequence: Synthetic oligonucleotide
auuuuaagggguuguagua

SEQ ID NO: 2401621 - RNA, 19 nt, Artificial Sequence
  Description of Artificial Sequence: Synthetic oligonucleotide
cacuaaucucaacaucugg

SEQ ID NO: 2401622 - RNA, 19 nt, Artificial Sequence
  Description of Artificial Sequence: Synthetic oligonucleotide
aguauuguaguggaagccu

SEQ ID NO: 2401623 - RNA, 19 nt, Artificial Sequence
  Description of Artificial Sequence: Synthetic oligonucleotide
acucagcugaaucaugugu

SEQ ID NO: 2401624 - RNA, 19 nt, Artificial Sequence
  Description of Artificial Sequence: Synthetic oligonucleotide
uuaagggguuguaguauug

SEQ ID NO: 2401625 - RNA, 19 nt, Artificial Sequence
  Description of Artificial Sequence: Synthetic oligonucleotide
uuucagacccucacuaauc

SEQ ID NO: 2401626 - RNA, 19 nt, Artificial Sequence
  Description of Artificial Sequence: Synthetic oligonucleotide
caauugauuuaaauuuguc

SEQ ID NO: 2401627 - RNA, 19 nt, Artificial Sequence
  Description of Artificial Sequence: Synthetic oligonucleotide
uucauuccucuccagggcu

SEQ ID NO: 2401628 - RNA, 19 nt, Artificial Sequence
  Description of Artificial Sequence: Synthetic oligonucleotide
gauagcucuuacuuccuca

SEQ ID NO: 2401629 - RNA, 19 nt, Artificial Sequence
  Description of Artificial Sequence: Synthetic oligonucleotide
ugaggguuggggaaugagu

SEQ ID NO: 2401630 - RNA, 19 nt, Artificial Sequence
  Description of Artificial Sequence: Synthetic oligonucleotide
aucucaacaucugggcugc

SEQ ID NO: 2401631 - RNA, 19 nt, Artificial Sequence
  Description of Artificial Sequence: Synthetic oligonucleotide
uugaccgacuuacaaacua

SEQ ID NO: 2401632 - RNA, 19 nt, Artificial Sequence
  Description of Artificial Sequence: Synthetic oligonucleotide
auagauccccucuuaggug

SEQ ID NO: 2401633 - RNA, 19 nt, Artificial Sequence
  Description of Artificial Sequence: Synthetic oligonucleotide
cuagucuuccuaauagauc

SEQ ID NO: 2401634 - RNA, 19 nt, Artificial Sequence
  Description of Artificial Sequence: Synthetic oligonucleotide
aggagcaauucucuggcug

SEQ ID NO: 2401635 - RNA, 19 nt, Artificial Sequence
  Description of Artificial Sequence: Synthetic oligonucleotide
cuuaucuuaugaggguugg

SEQ ID NO: 2401636 - RNA, 19 nt, Artificial Sequence
  Description of Artificial Sequence: Synthetic oligonucleotide
ucuuuauuuuaagggguug

SEQ ID NO: 2401637 - RNA, 19 nt, Artificial Sequence
  Description of Artificial Sequence: Synthetic oligonucleotide
ccucuuaggugcuugaggg

SEQ ID NO: 2401638 - RNA, 19 nt, Artificial Sequence
  Description of Artificial Sequence: Synthetic oligonucleotide
aucuuaugaggguugggga

SEQ ID NO: 2401639 - RNA, 19 nt, Artificial Sequence
  Description of Artificial Sequence: Synthetic oligonucleotide
aacuagaacuaggagcagu

SEQ ID NO: 2401640 - RNA, 19 nt, Artificial Sequence
  Description of Artificial Sequence: Synthetic oligonucleotide
aaagcccaaggcuagcaua

SEQ ID NO: 2401641 - RNA, 19 nt, Artificial Sequence
  Description of Artificial Sequence: Synthetic oligonucleotide
uaguccaauugauuuaaau

SEQ ID NO: 2401642 - RNA, 19 nt, Artificial Sequence
  Description of Artificial Sequence: Synthetic oligonucleotide
auucccaucgugcuccucu

SEQ ID NO: 2401643 - RNA, 19 nt, Artificial Sequence
  Description of Artificial Sequence: Synthetic oligonucleotide
caaaaucucuuugucccgg

SEQ ID NO: 2401644 - RNA, 19 nt, Artificial Sequence
  Description of Artificial Sequence: Synthetic oligonucleotide
uuuaagggguuguaguauu

SEQ ID NO: 2401645 - RNA, 19 nt, Artificial Sequence
  Description of Artificial Sequence: Synthetic oligonucleotide
caggaaaugacauacgggu

SEQ ID NO: 2401646 - RNA, 19 nt, Artificial Sequence
  Description of Artificial Sequence: Synthetic oligonucleotide
uuuuaagggguuguaguau

SEQ ID NO: 2401647 - RNA, 19 nt, Artificial Sequence
  Description of Artificial Sequence: Synthetic oligonucleotide
aaaucucuuugucccggcu

SEQ ID NO: 2401648 - RNA, 19 nt, Artificial Sequence
  Description of Artificial Sequence: Synthetic oligonucleotide
uuuggguugguuuccuuau

SEQ ID NO: 2401649 - RNA, 19 nt, Artificial Sequence
  Description of Artificial Sequence: Synthetic oligonucleotide
cuuucuaaagcccaaggcu

SEQ ID NO: 2401650 - RNA, 19 nt, Artificial Sequence
  Description of Artificial Sequence: Synthetic oligonucleotide
acauguaagcugggcaccc

SEQ ID NO: 2401651 - RNA, 19 nt, Artificial Sequence
  Description of Artificial Sequence: Synthetic oligonucleotide
uuuuggguugguuuccuua

SEQ ID NO: 2401652 - RNA, 19 nt, Artificial Sequence
  Description of Artificial Sequence: Synthetic oligonucleotide
acauacggguuguucagug

SEQ ID NO: 2401653 - RNA, 19 nt, Artificial Sequence
  Description of Artificial Sequence: Synthetic oligonucleotide
ucuuuacaaccagaggucu

SEQ ID NO: 2401654 - RNA, 19 nt, Artificial Sequence
  Description of Artificial Sequence: Synthetic oligonucleotide
ucaacaucugggcugcuuu

SEQ ID NO: 2401655 - RNA, 19 nt, Artificial Sequence
  Description of Artificial Sequence: Synthetic oligonucleotide
aaucucuuugucccggcuu

SEQ ID NO: 2401656 - RNA, 19 nt, Artificial Sequence
  Description of Artificial Sequence: Synthetic oligonucleotide
guuuucugacaugugcggg

SEQ ID NO: 2401657 - RNA, 19 nt, Artificial Sequence
  Description of Artificial Sequence: Synthetic oligonucleotide
ucuuccuaauagauccccu

SEQ ID NO: 2401658 - RNA, 19 nt, Artificial Sequence
  Description of Artificial Sequence: Synthetic oligonucleotide
uuaucuuaugaggguuggg

SEQ ID NO: 2401659 - RNA, 19 nt, Artificial Sequence
  Description of Artificial Sequence: Synthetic oligonucleotide
uucuuuaguccaauugauu

SEQ ID NO: 2401660 - RNA, 19 nt, Artificial Sequence
  Description of Artificial Sequence: Synthetic oligonucleotide
uucugcuuauacucagcug

SEQ ID NO: 2401661 - RNA, 19 nt, Artificial Sequence
  Description of Artificial Sequence: Synthetic oligonucleotide
gcuugaccgacuuacaaac

SEQ ID NO: 2401662 - RNA, 19 nt, Artificial Sequence
  Description of Artificial Sequence: Synthetic oligonucleotide
guguauguccucucucucc

SEQ ID NO: 2401663 - RNA, 19 nt, Artificial Sequence
  Description of Artificial Sequence: Synthetic oligonucleotide
guucauuccucuccagggc

SEQ ID NO: 2401664 - RNA, 19 nt, Artificial Sequence
  Description of Artificial Sequence: Synthetic oligonucleotide
gucucuaaacugucuuuag

SEQ ID NO: 2401665 - RNA, 19 nt, Artificial Sequence
  Description of Artificial Sequence: Synthetic oligonucleotide
uguccucucucuccaaggu

SEQ ID NO: 2401666 - RNA, 19 nt, Artificial Sequence
  Description of Artificial Sequence: Synthetic oligonucleotide
agcaguucauuccucucca

SEQ ID NO: 2401667 - RNA, 19 nt, Artificial Sequence
  Description of Artificial Sequence: Synthetic oligonucleotide
cugucuugaagccauggca

SEQ ID NO: 2401668 - RNA, 19 nt, Artificial Sequence
  Description of Artificial Sequence: Synthetic oligonucleotide
auacggguuguucagugau

SEQ ID NO: 2401669 - RNA, 19 nt, Artificial Sequence
  Description of Artificial Sequence: Synthetic oligonucleotide
agaggucuagucuuccuaa

SEQ ID NO: 2401670 - RNA, 19 nt, Artificial Sequence
  Description of Artificial Sequence: Synthetic oligonucleotide
uggugacuucauuaacgcc

SEQ ID NO: 2401671 - RNA, 19 nt, Artificial Sequence
  Description of Artificial Sequence: Synthetic oligonucleotide
ugagaccugcacauuccca

SEQ ID NO: 2401672 - RNA, 19 nt, Artificial Sequence
  Description of Artificial Sequence: Synthetic oligonucleotide
ugugcggguguccacccug

SEQ ID NO: 2401673 - RNA, 19 nt, Artificial Sequence
  Description of Artificial Sequence: Synthetic oligonucleotide
aagggguuguaguauugua

SEQ ID NO: 2401674 - RNA, 19 nt, Artificial Sequence
  Description of Artificial Sequence: Synthetic oligonucleotide
aagccauggcacauguaag

SEQ ID NO: 2401675 - RNA, 19 nt, Artificial Sequence
  Description of Artificial Sequence: Synthetic oligonucleotide
uccauggaguucuuucuaa

SEQ ID NO: 2401676 - RNA, 19 nt, Artificial Sequence
  Description of Artificial Sequence: Synthetic oligonucleotide
ucuuucagacccucacuaa

SEQ ID NO: 2401677 - RNA, 19 nt, Artificial Sequence
  Description of Artificial Sequence: Synthetic oligonucleotide
cucuuaggugcuugagggg

SEQ ID NO: 2401678 - RNA, 19 nt, Artificial Sequence
  Description of Artificial Sequence: Synthetic oligonucleotide
ugucucuaaacugucuuua

SEQ ID NO: 2401679 - RNA, 19 nt, Artificial Sequence
  Description of Artificial Sequence: Synthetic oligonucleotide
ugggaaugauagcucuuac

SEQ ID NO: 2401680 - RNA, 19 nt, Artificial Sequence
  Description of Artificial Sequence: Synthetic oligonucleotide
aucaaaugaaguguccaaa

SEQ ID NO: 2401681 - RNA, 19 nt, Artificial Sequence
  Description of Artificial Sequence: Synthetic oligonucleotide
ccaggaaaugacauacggg

SEQ ID NO: 2401682 - RNA, 19 nt, Artificial Sequence
  Description of Artificial Sequence: Synthetic oligonucleotide
agaccugcacauucccauc

SEQ ID NO: 2401683 - RNA, 19 nt, Artificial Sequence
  Description of Artificial Sequence: Synthetic oligonucleotide
uuugucccggcuuuccaaa

SEQ ID NO: 2401684 - RNA, 19 nt, Artificial Sequence
  Description of Artificial Sequence: Synthetic oligonucleotide
uuucugacaugugcgggug

SEQ ID NO: 2401685 - RNA, 19 nt, Artificial Sequence
  Description of Artificial Sequence: Synthetic oligonucleotide
uacuaacuuuuguaagguc

SEQ ID NO: 2401686 - RNA, 19 nt, Artificial Sequence
  Description of Artificial Sequence: Synthetic oligonucleotide
gaagccugcccaccuucgg

SEQ ID NO: 2401687 - RNA, 19 nt, Artificial Sequence
  Description of Artificial Sequence: Synthetic oligonucleotide
gaucuuggguucugucuug

SEQ ID NO: 2401688 - RNA, 19 nt, Artificial Sequence
  Description of Artificial Sequence: Synthetic oligonucleotide
ugugugaggugaugacagc

SEQ ID NO: 2401689 - RNA, 19 nt, Artificial Sequence
  Description of Artificial Sequence: Synthetic oligonucleotide
uccuaauagauccccucuu

SEQ ID NO: 2401690 - RNA, 19 nt, Artificial Sequence
  Description of Artificial Sequence: Synthetic oligonucleotide
uuccaaagauucugucucu

SEQ ID NO: 2401691 - RNA, 19 nt, Artificial Sequence
  Description of Artificial Sequence: Synthetic oligonucleotide
aggagcaguucauuccucu

SEQ ID NO: 2401692 - RNA, 19 nt, Artificial Sequence
  Description of Artificial Sequence: Synthetic oligonucleotide
augaaguguccaaaaucuc

SEQ ID NO: 2401693 - RNA, 19 nt, Artificial Sequence
  Description of Artificial Sequence: Synthetic oligonucleotide
aaacuagaacuaggagcag

SEQ ID NO: 2401694 - RNA, 19 nt, Artificial Sequence
  Description of Artificial Sequence: Synthetic oligonucleotide
gucuuuaggaucuuggguu

SEQ ID NO: 2401695 - RNA, 19 nt, Artificial Sequence
  Description of Artificial Sequence: Synthetic oligonucleotide
uacggguuguucagugaug

SEQ ID NO: 2401696 - RNA, 19 nt, Artificial Sequence
  Description of Artificial Sequence: Synthetic oligonucleotide
aggugcuccaggaaaugac

SEQ ID NO: 2401697 - RNA, 19 nt, Artificial Sequence
  Description of Artificial Sequence: Synthetic oligonucleotide
uacuuuuggguugguuucc

SEQ ID NO: 2401698 - RNA, 19 nt, Artificial Sequence
  Description of Artificial Sequence: Synthetic oligonucleotide
gagcugaggaaccuggcaa

SEQ ID NO: 2401699 - RNA, 19 nt, Artificial Sequence
  Description of Artificial Sequence: Synthetic oligonucleotide
guauuguaguggaagccug

SEQ ID NO: 2401700 - RNA, 19 nt, Artificial Sequence
  Description of Artificial Sequence: Synthetic oligonucleotide
gucuuuacaaccagagguc

SEQ ID NO: 2401701 - RNA, 19 nt, Artificial Sequence
  Description of Artificial Sequence: Synthetic oligonucleotide
agcaauucucuggcugagc

SEQ ID NO: 2401702 - RNA, 19 nt, Artificial Sequence
  Description of Artificial Sequence: Synthetic oligonucleotide
caaagauucugucucuaaa

SEQ ID NO: 2401703 - RNA, 19 nt, Artificial Sequence
  Description of Artificial Sequence: Synthetic oligonucleotide
caagcgggcacaguucugc

SEQ ID NO: 2401704 - RNA, 19 nt, Artificial Sequence
  Description of Artificial Sequence: Synthetic oligonucleotide
aaggugcuccaggaaauga

SEQ ID NO: 2401705 - RNA, 19 nt, Artificial Sequence
  Description of Artificial Sequence: Synthetic oligonucleotide
ucggcaggcuuucucuuac

SEQ ID NO: 2401706 - RNA, 19 nt, Artificial Sequence
  Description of Artificial Sequence: Synthetic oligonucleotide
aguggaagccugcccaccu

SEQ ID NO: 2401707 - RNA, 19 nt, Artificial Sequence
  Description of Artificial Sequence: Synthetic oligonucleotide
cugagaccugcacauuccc

SEQ ID NO: 2401708 - RNA, 19 nt, Artificial Sequence
  Description of Artificial Sequence: Synthetic oligonucleotide
accagaggucuagucuucc

SEQ ID NO: 2401709 - RNA, 19 nt, Artificial Sequence
  Description of Artificial Sequence: Synthetic oligonucleotide
ccgacuuacaaacuagaac

SEQ ID NO: 2401710 - RNA, 19 nt, Artificial Sequence
  Description of Artificial Sequence: Synthetic oligonucleotide
accuucggcaggcuuucuc

SEQ ID NO: 2401711 - RNA, 19 nt, Artificial Sequence
  Description of Artificial Sequence: Synthetic oligonucleotide
ggaaugauagcucuuacuu

SEQ ID NO: 2401712 - RNA, 19 nt, Artificial Sequence
  Description of Artificial Sequence: Synthetic oligonucleotide
ucuaaagcccaaggcuagc

SEQ ID NO: 2401713 - RNA, 19 nt, Artificial Sequence
  Description of Artificial Sequence: Synthetic oligonucleotide
uucaagugucuguaauaua

SEQ ID NO: 2401714 - RNA, 19 nt, Artificial Sequence
  Description of Artificial Sequence: Synthetic oligonucleotide
uuaguccaauugauuuaaa

SEQ ID NO: 2401715 - RNA, 19 nt, Artificial Sequence
  Description of Artificial Sequence: Synthetic oligonucleotide
caauucucuggcugagcug

SEQ ID NO: 2401716 - RNA, 19 nt, Artificial Sequence
  Description of Artificial Sequence: Synthetic oligonucleotide
caucgugcuccucuuucag

SEQ ID NO: 2401717 - RNA, 19 nt, Artificial Sequence
  Description of Artificial Sequence: Synthetic oligonucleotide
gcacauguaagcugggcac

SEQ ID NO: 2401718 - RNA, 19 nt, Artificial Sequence
  Description of Artificial Sequence: Synthetic oligonucleotide
ugacaugugcgggugucca

SEQ ID NO: 2401719 - RNA, 19 nt, Artificial Sequence
  Description of Artificial Sequence: Synthetic oligonucleotide
agaacuaggagcaguucau

SEQ ID NO: 2401720 - RNA, 19 nt, Artificial Sequence
  Description of Artificial Sequence: Synthetic oligonucleotide
uuguaguauuguaguggaa

SEQ ID NO: 2401721 - RNA, 19 nt, Artificial Sequence
  Description of Artificial Sequence: Synthetic oligonucleotide
acggguuguucagugaugu

SEQ ID NO: 2401722 - RNA, 19 nt, Artificial Sequence
  Description of Artificial Sequence: Synthetic oligonucleotide
uggaagccugcccaccuuc

SEQ ID NO: 2401723 - RNA, 19 nt, Artificial Sequence
  Description of Artificial Sequence: Synthetic oligonucleotide
ggaguucuuucuaaagccc

SEQ ID NO: 2401724 - RNA, 19 nt, Artificial Sequence
  Description of Artificial Sequence: Synthetic oligonucleotide
uugucccggcuuuccaaag

SEQ ID NO: 2401725 - RNA, 19 nt, Artificial Sequence
  Description of Artificial Sequence: Synthetic oligonucleotide
cucuggugacuucauuaac

SEQ ID NO: 2401726 - RNA, 19 nt, Artificial Sequence
  Description of Artificial Sequence: Synthetic oligonucleotide
uucucuggcugagcugagg

SEQ ID NO: 2401727 - RNA, 19 nt, Artificial Sequence
  Description of Artificial Sequence: Synthetic oligonucleotide
acaguucugcuuauacuca

SEQ ID NO: 2401728 - RNA, 19 nt, Artificial Sequence
  Description of Artificial Sequence: Synthetic oligonucleotide
ucugacaugugcggguguc

SEQ ID NO: 2401729 - RNA, 19 nt, Artificial Sequence
  Description of Artificial Sequence: Synthetic oligonucleotide
ggcuagcauacauuuuaag

SEQ ID NO: 2401730 - RNA, 19 nt, Artificial Sequence
  Description of Artificial Sequence: Synthetic oligonucleotide
uuuuacuuuuggguugguu

SEQ ID NO: 2401731 - RNA, 19 nt, Artificial Sequence
  Description of Artificial Sequence: Synthetic oligonucleotide
uacuuuugaaauggauuuu

SEQ ID NO: 2401732 - RNA, 19 nt, Artificial Sequence
  Description of Artificial Sequence: Synthetic oligonucleotide
acuagaacuaggagcaguu

SEQ ID NO: 2401733 - RNA, 19 nt, Artificial Sequence
  Description of Artificial Sequence: Synthetic oligonucleotide
aggcuugaccgacuuacaa

SEQ ID NO: 2401734 - RNA, 19 nt, Artificial Sequence
  Description of Artificial Sequence: Synthetic oligonucleotide
ucagacccucacuaaucuc

SEQ ID NO: 2401735 - RNA, 19 nt, Artificial Sequence
  Description of Artificial Sequence: Synthetic oligonucleotide
guucugcuuauacucagcu

SEQ ID NO: 2401736 - RNA, 19 nt, Artificial Sequence
  Description of Artificial Sequence: Synthetic oligonucleotide
ggagcaauucucuggcuga

SEQ ID NO: 2401737 - RNA, 19 nt, Artificial Sequence
  Description of Artificial Sequence: Synthetic oligonucleotide
aggucuagucuuccuaaua

SEQ ID NO: 2401738 - RNA, 19 nt, Artificial Sequence
  Description of Artificial Sequence: Synthetic oligonucleotide
caagugucuguaauauaaa

SEQ ID NO: 2401739 - RNA, 19 nt, Artificial Sequence
  Description of Artificial Sequence: Synthetic oligonucleotide
cuaacuuuuguaaggucau

SEQ ID NO: 2401740 - RNA, 19 nt, Artificial Sequence
  Description of Artificial Sequence: Synthetic oligonucleotide
guaguggaagccugcccac

SEQ ID NO: 2401741 - RNA, 19 nt, Artificial Sequence
  Description of Artificial Sequence: Synthetic oligonucleotide
cauuaacgccaaugaccag

SEQ ID NO: 2401742 - RNA, 19 nt, Artificial Sequence
  Description of Artificial Sequence: Synthetic oligonucleotide
cccggcuuuccaaagauuc

SEQ ID NO: 2401743 - RNA, 19 nt, Artificial Sequence
  Description of Artificial Sequence: Synthetic oligonucleotide
aagcgggcacaguucugcu

SEQ ID NO: 2401744 - RNA, 19 nt, Artificial Sequence
  Description of Artificial Sequence: Synthetic oligonucleotide
ccuuaucuuaugaggguug

SEQ ID NO: 2401745 - RNA, 19 nt, Artificial Sequence
  Description of Artificial Sequence: Synthetic oligonucleotide
uaacuuuuguaaggucauc

SEQ ID NO: 2401746 - RNA, 19 nt, Artificial Sequence
  Description of Artificial Sequence: Synthetic oligonucleotide
cugaaucaugugugaggug

SEQ ID NO: 2401747 - RNA, 19 nt, Artificial Sequence
  Description of Artificial Sequence: Synthetic oligonucleotide
gaaaugacauacggguugu

SEQ ID NO: 2401748 - RNA, 19 nt, Artificial Sequence
  Description of Artificial Sequence: Synthetic oligonucleotide
gaccgacuuacaaacuaga

SEQ ID NO: 2401749 - RNA, 19 nt, Artificial Sequence
  Description of Artificial Sequence: Synthetic oligonucleotide
gcaggcuugaccgacuuac

SEQ ID NO: 2401750 - RNA, 19 nt, Artificial Sequence
  Description of Artificial Sequence: Synthetic oligonucleotide
gugugaggugaugacagca

SEQ ID NO: 2401751 - RNA, 19 nt, Artificial Sequence
  Description of Artificial Sequence: Synthetic oligonucleotide
uggcacauguaagcugggc

SEQ ID NO: 2401752 - RNA, 19 nt, Artificial Sequence
  Description of Artificial Sequence: Synthetic oligonucleotide
uggcaagcgggcacaguuc

SEQ ID NO: 2401753 - RNA, 19 nt, Artificial Sequence
  Description of Artificial Sequence: Synthetic oligonucleotide
cuuuauuuuaagggguugu

SEQ ID NO: 2401754 - RNA, 19 nt, Artificial Sequence
  Description of Artificial Sequence: Synthetic oligonucleotide
uucugacaugugcgggugu

SEQ ID NO: 2401755 - RNA, 19 nt, Artificial Sequence
  Description of Artificial Sequence: Synthetic oligonucleotide
cagcugaaucaugugugag

SEQ ID NO: 2401756 - RNA, 19 nt, Artificial Sequence
  Description of Artificial Sequence: Synthetic oligonucleotide
uaggagcaguucauuccuc

SEQ ID NO: 2401757 - RNA, 19 nt, Artificial Sequence
  Description of Artificial Sequence: Synthetic oligonucleotide
ccugagaccugcacauucc

SEQ ID NO: 2401758 - RNA, 19 nt, Artificial Sequence
  Description of Artificial Sequence: Synthetic oligonucleotide
aaccuggcaagcgggcaca

SEQ ID NO: 2401759 - RNA, 19 nt, Artificial Sequence
  Description of Artificial Sequence: Synthetic oligonucleotide
aguucuuucuaaagcccaa

SEQ ID NO: 2401760 - RNA, 19 nt, Artificial Sequence
  Description of Artificial Sequence: Synthetic oligonucleotide
cccucuuaggugcuugagg

SEQ ID NO: 2401761 - RNA, 19 nt, Artificial Sequence
  Description of Artificial Sequence: Synthetic oligonucleotide
ggaaugaguuucuuuauuu

SEQ ID NO: 2401762 - RNA, 19 nt, Artificial Sequence
  Description of Artificial Sequence: Synthetic oligonucleotide
uaguggaagccugcccacc

SEQ ID NO: 2401763 - RNA, 19 nt, Artificial Sequence
  Description of Artificial Sequence: Synthetic oligonucleotide
uucggcaggcuuucucuua

SEQ ID NO: 2401764 - RNA, 19 nt, Artificial Sequence
  Description of Artificial Sequence: Synthetic oligonucleotide
agcauacauuuuaagccaa

SEQ ID NO: 2401765 - RNA, 19 nt, Artificial Sequence
  Description of Artificial Sequence: Synthetic oligonucleotide
gaggugaugacagcaggcu

SEQ ID NO: 2401766 - RNA, 19 nt, Artificial Sequence
  Description of Artificial Sequence: Synthetic oligonucleotide
ugcuuauacucagcugaau

SEQ ID NO: 2401767 - RNA, 19 nt, Artificial Sequence
  Description of Artificial Sequence: Synthetic oligonucleotide
cuuuacaaccagaggucua

SEQ ID NO: 2401768 - RNA, 19 nt, Artificial Sequence
  Description of Artificial Sequence: Synthetic oligonucleotide
cucuuacuuccucagcgaa

SEQ ID NO: 2401769 - RNA, 19 nt, Artificial Sequence
  Description of Artificial Sequence: Synthetic oligonucleotide
acccugggaaugauagcuc

SEQ ID NO: 2401770 - RNA, 19 nt, Artificial Sequence
  Description of Artificial Sequence: Synthetic oligonucleotide
cugacaugugcgggugucc

SEQ ID NO: 2401771 - RNA, 19 nt, Artificial Sequence
  Description of Artificial Sequence: Synthetic oligonucleotide
uaacgccaaugaccagcug

SEQ ID NO: 2401772 - RNA, 19 nt, Artificial Sequence
  Description of Artificial Sequence: Synthetic oligonucleotide
accugcacauucccaucgu

SEQ ID NO: 2401773 - RNA, 19 nt, Artificial Sequence
  Description of Artificial Sequence: Synthetic oligonucleotide
uccccucuuaggugcuuga

SEQ ID NO: 2401774 - RNA, 19 nt, Artificial Sequence
  Description of Artificial Sequence: Synthetic oligonucleotide
cuuucagacccucacuaau

SEQ ID NO: 2401775 - RNA, 19 nt, Artificial Sequence
  Description of Artificial Sequence: Synthetic oligonucleotide
ugaagccauggcacaugua

SEQ ID NO: 2401776 - RNA, 19 nt, Artificial Sequence
  Description of Artificial Sequence: Synthetic oligonucleotide
ugcggguguccacccugag

SEQ ID NO: 2401777 - RNA, 19 nt, Artificial Sequence
  Description of Artificial Sequence: Synthetic oligonucleotide
cugggcugcuuucuuuguc

SEQ ID NO: 2401778 - RNA, 19 nt, Artificial Sequence
  Description of Artificial Sequence: Synthetic oligonucleotide
gacccucacuaaucucaac

SEQ ID NO: 2401779 - RNA, 19 nt, Artificial Sequence
  Description of Artificial Sequence: Synthetic oligonucleotide
gcaauucucuggcugagcu

SEQ ID NO: 2401780 - RNA, 19 nt, Artificial Sequence
  Description of Artificial Sequence: Synthetic oligonucleotide
gugacuucauuaacgccaa

SEQ ID NO: 2401781 - RNA, 19 nt, Artificial Sequence
  Description of Artificial Sequence: Synthetic oligonucleotide
ggguuggggaaugaguuuc

SEQ ID NO: 2401782 - RNA, 19 nt, Artificial Sequence
  Description of Artificial Sequence: Synthetic oligonucleotide
cugcuuauacucagcugaa

SEQ ID NO: 2401783 - RNA, 19 nt, Artificial Sequence
  Description of Artificial Sequence: Synthetic oligonucleotide
gcugaaucaugugugaggu

SEQ ID NO: 2401784 - RNA, 19 nt, Artificial Sequence
  Description of Artificial Sequence: Synthetic oligonucleotide
ccauggcacauguaagcug

SEQ ID NO: 2401785 - RNA, 19 nt, Artificial Sequence
  Description of Artificial Sequence: Synthetic oligonucleotide
ggugcuccaggaaaugaca

SEQ ID NO: 2401786 - RNA, 19 nt, Artificial Sequence
  Description of Artificial Sequence: Synthetic oligonucleotide
gcucuggugacuucauuaa

SEQ ID NO: 2401787 - RNA, 19 nt, Artificial Sequence
  Description of Artificial Sequence: Synthetic oligonucleotide
aaaugacauacggguuguu

SEQ ID NO: 2401788 - RNA, 19 nt, Artificial Sequence
  Description of Artificial Sequence: Synthetic oligonucleotide
guccauggaguucuuucua

SEQ ID NO: 2401789 - RNA, 19 nt, Artificial Sequence
  Description of Artificial Sequence: Synthetic oligonucleotide
cacccugggaaugauagcu

SEQ ID NO: 2401790 - RNA, 19 nt, Artificial Sequence
  Description of Artificial Sequence: Synthetic oligonucleotide
gggaaugauagcucuuacu

SEQ ID NO: 2401791 - RNA, 19 nt, Artificial Sequence
  Description of Artificial Sequence: Synthetic oligonucleotide
gcucuuacuuccucagcga

SEQ ID NO: 2401792 - RNA, 19 nt, Artificial Sequence
  Description of Artificial Sequence: Synthetic oligonucleotide
cagaggucuagucuuccua

SEQ ID NO: 2401793 - RNA, 19 nt, Artificial Sequence
  Description of Artificial Sequence: Synthetic oligonucleotide
cugggaaugauagcucuua

SEQ ID NO: 2401794 - RNA, 19 nt, Artificial Sequence
  Description of Artificial Sequence: Synthetic oligonucleotide
ggaagccugcccaccuucg

SEQ ID NO: 2401795 - RNA, 19 nt, Artificial Sequence
  Description of Artificial Sequence: Synthetic oligonucleotide
ugacuucauuaacgccaau

SEQ ID NO: 2401796 - RNA, 19 nt, Artificial Sequence
  Description of Artificial Sequence: Synthetic oligonucleotide
ucccggcuuuccaaagauu

SEQ ID NO: 2401797 - RNA, 19 nt, Artificial Sequence
  Description of Artificial Sequence: Synthetic oligonucleotide
uucccaucgugcuccucuu

SEQ ID NO: 2401798 - RNA, 19 nt, Artificial Sequence
  Description of Artificial Sequence: Synthetic oligonucleotide
aggcuagcauacauuuuaa

SEQ ID NO: 2401799 - RNA, 19 nt, Artificial Sequence
  Description of Artificial Sequence: Synthetic oligonucleotide
cuugaccgacuuacaaacu

SEQ ID NO: 2401800 - RNA, 19 nt, Artificial Sequence
  Description of Artificial Sequence: Synthetic oligonucleotide
ccagcuguuuucugacaug

SEQ ID NO: 2401801 - RNA, 19 nt, Artificial Sequence
  Description of Artificial Sequence: Synthetic oligonucleotide
acauucccaucgugcuccu

SEQ ID NO: 2401802 - RNA, 19 nt, Artificial Sequence
  Description of Artificial Sequence: Synthetic oligonucleotide
agacccucacuaaucucaa

SEQ ID NO: 2401803 - RNA, 19 nt, Artificial Sequence
  Description of Artificial Sequence: Synthetic oligonucleotide
gaggucuagucuuccuaau

SEQ ID NO: 2401804 - RNA, 19 nt, Artificial Sequence
  Description of Artificial Sequence: Synthetic oligonucleotide
cccugagaccugcacauuc

SEQ ID NO: 2401805 - RNA, 19 nt, Artificial Sequence
  Description of Artificial Sequence: Synthetic oligonucleotide
agcgggcacaguucugcuu

SEQ ID NO: 2401806 - RNA, 19 nt, Artificial Sequence
  Description of Artificial Sequence: Synthetic oligonucleotide
cuuaugaggguuggggaau

SEQ ID NO: 2401807 - RNA, 19 nt, Artificial Sequence
  Description of Artificial Sequence: Synthetic oligonucleotide
cacccugagaccugcacau

SEQ ID NO: 2401808 - RNA, 19 nt, Artificial Sequence
  Description of Artificial Sequence: Synthetic oligonucleotide
caggcuugaccgacuuaca

SEQ ID NO: 2401809 - RNA, 19 nt, Artificial Sequence
  Description of Artificial Sequence: Synthetic oligonucleotide
augugcggguguccacccu

SEQ ID NO: 2401810 - RNA, 19 nt, Artificial Sequence
  Description of Artificial Sequence: Synthetic oligonucleotide
ccuaauagauccccucuua

SEQ ID NO: 2401811 - RNA, 19 nt, Artificial Sequence
  Description of Artificial Sequence: Synthetic oligonucleotide
ucccaucgugcuccucuuu

SEQ ID NO: 2401812 - RNA, 19 nt, Artificial Sequence
  Description of Artificial Sequence: Synthetic oligonucleotide
cccaucgugcuccucuuuc

SEQ ID NO: 2401813 - RNA, 19 nt, Artificial Sequence
  Description of Artificial Sequence: Synthetic oligonucleotide
aggugcuugaggggcugca

SEQ ID NO: 2401814 - RNA, 19 nt, Artificial Sequence
  Description of Artificial Sequence: Synthetic oligonucleotide
gcgggcacaguucugcuua

SEQ ID NO: 2401815 - RNA, 19 nt, Artificial Sequence
  Description of Artificial Sequence: Synthetic oligonucleotide
gcacccugggaaugauagc

SEQ ID NO: 2401816 - RNA, 19 nt, Artificial Sequence
  Description of Artificial Sequence: Synthetic oligonucleotide
ggcaagcgggcacaguucu

SEQ ID NO: 2401817 - RNA, 19 nt, Artificial Sequence
  Description of Artificial Sequence: Synthetic oligonucleotide
ccaaggcuagcauacauuu

SEQ ID NO: 2401818 - RNA, 19 nt, Artificial Sequence
  Description of Artificial Sequence: Synthetic oligonucleotide
gcuuucucuuacuaacuuu

SEQ ID NO: 2401819 - RNA, 19 nt, Artificial Sequence
  Description of Artificial Sequence: Synthetic oligonucleotide
gaacuaggagcaguucauu

SEQ ID NO: 2401820 - RNA, 19 nt, Artificial Sequence
  Description of Artificial Sequence: Synthetic oligonucleotide
ggguguccacccugagacc

SEQ ID NO: 2401821 - RNA, 19 nt, Artificial Sequence
  Description of Artificial Sequence: Synthetic oligonucleotide
agauccccucuuaggugcu

SEQ ID NO: 2401822 - RNA, 19 nt, Artificial Sequence
  Description of Artificial Sequence: Synthetic oligonucleotide
ggaaccuggcaagcgggca

SEQ ID NO: 2401823 - RNA, 19 nt, Artificial Sequence
  Description of Artificial Sequence: Synthetic oligonucleotide
ccauggaguucuuucuaaa

SEQ ID NO: 2401824 - RNA, 19 nt, Artificial Sequence
  Description of Artificial Sequence: Synthetic oligonucleotide
caaggcuagcauacauuuu

SEQ ID NO: 2401825 - RNA, 19 nt, Artificial Sequence
  Description of Artificial Sequence: Synthetic oligonucleotide
ccaucgugcuccucuuuca

SEQ ID NO: 2401826 - RNA, 19 nt, Artificial Sequence
  Description of Artificial Sequence: Synthetic oligonucleotide
cugggcacccugggaauga

SEQ ID NO: 2401827 - RNA, 19 nt, Artificial Sequence
  Description of Artificial Sequence: Synthetic oligonucleotide
ucucaacaucugggcugcu

SEQ ID NO: 2401828 - RNA, 19 nt, Artificial Sequence
  Description of Artificial Sequence: Synthetic oligonucleotide
ggcuuuccaaagauucugu

SEQ ID NO: 2401829 - RNA, 19 nt, Artificial Sequence
  Description of Artificial Sequence: Synthetic oligonucleotide
gccauggcacauguaagcu

SEQ ID NO: 2401830 - RNA, 19 nt, Artificial Sequence
  Description of Artificial Sequence: Synthetic oligonucleotide
gcggguguccacccugaga

SEQ ID NO: 2401831 - RNA, 19 nt, Artificial Sequence
  Description of Artificial Sequence: Synthetic oligonucleotide
caggagcaauucucuggcu

SEQ ID NO: 2401832 - RNA, 19 nt, Artificial Sequence
  Description of Artificial Sequence: Synthetic oligonucleotide
cauucccaucgugcuccuc

SEQ ID NO: 2401833 - RNA, 19 nt, Artificial Sequence
  Description of Artificial Sequence: Synthetic oligonucleotide
cccugggaaugauagcucu

SEQ ID NO: 2401834 - RNA, 19 nt, Artificial Sequence
  Description of Artificial Sequence: Synthetic oligonucleotide
ccccucuuaggugcuugag

SEQ ID NO: 2401835 - RNA, 19 nt, Artificial Sequence
  Description of Artificial Sequence: Synthetic oligonucleotide
cauguaagcugggcacccu

SEQ ID NO: 2401836 - RNA, 19 nt, Artificial Sequence
  Description of Artificial Sequence: Synthetic oligonucleotide
guuggggaaugaguuucuu

SEQ ID NO: 2401837 - RNA, 19 nt, Artificial Sequence
  Description of Artificial Sequence: Synthetic oligonucleotide
ccaccuucggcaggcuuuc

SEQ ID NO: 2401838 - RNA, 19 nt, Artificial Sequence
  Description of Artificial Sequence: Synthetic oligonucleotide
acccugagaccugcacauu

SEQ ID NO: 2401839 - RNA, 19 nt, Artificial Sequence
  Description of Artificial Sequence: Synthetic oligonucleotide
cucaacaucugggcugcuu

SEQ ID NO: 2401840 - RNA, 19 nt, Artificial Sequence
  Description of Artificial Sequence: Synthetic oligonucleotide
ugcccaccuucggcaggcu

SEQ ID NO: 2401841 - RNA, 19 nt, Artificial Sequence
  Description of Artificial Sequence: Synthetic oligonucleotide
ccggcuuuccaaagauucu

SEQ ID NO: 2401842 - RNA, 19 nt, Artificial Sequence
  Description of Artificial Sequence: Synthetic oligonucleotide
cccaaggcuagcauacauu

SEQ ID NO: 2401843 - RNA, 19 nt, Artificial Sequence
  Description of Artificial Sequence: Synthetic oligonucleotide
ccagaggucuagucuuccu

SEQ ID NO: 2401844 - RNA, 19 nt, Artificial Sequence
  Description of Artificial Sequence: Synthetic oligonucleotide
cccaccuucggcaggcuuu

SEQ ID NO: 2401845 - RNA, 19 nt, Artificial Sequence
  Description of Artificial Sequence: Synthetic oligonucleotide
gauccccucuuaggugcuu

SEQ ID NO: 2401846 - RNA, 19 nt, Artificial Sequence
  Description of Artificial Sequence: Synthetic oligonucleotide
cgggcacaguucugcuuau

SEQ ID NO: 2401847 - RNA, 19 nt, Artificial Sequence
  Description of Artificial Sequence: Synthetic oligonucleotide
cgccaaugaccagcuguuu

SEQ ID NO: 2401848 - RNA, 19 nt, Artificial Sequence
  Description of Artificial Sequence: Synthetic oligonucleotide
ugcagaacagccaugaucg

SEQ ID NO: 2401849 - RNA, 19 nt, Artificial Sequence
  Description of Artificial Sequence: Synthetic oligonucleotide
uuuaauuagggaccuaugg

SEQ ID NO: 2401850 - RNA, 19 nt, Artificial Sequence
  Description of Artificial Sequence: Synthetic oligonucleotide
uuuauuaacuaauuguaag

SEQ ID NO: 2401851 - RNA, 19 nt, Artificial Sequence
  Description of Artificial Sequence: Synthetic oligonucleotide
aaccucuuuaauuagggac

SEQ ID NO: 2401852 - RNA, 19 nt, Artificial Sequence
  Description of Artificial Sequence: Synthetic oligonucleotide
aaaucaugaagcaaggugg

SEQ ID NO: 2401853 - RNA, 19 nt, Artificial Sequence
  Description of Artificial Sequence: Synthetic oligonucleotide
aaagagcugaaccugacag

SEQ ID NO: 2401854 - RNA, 19 nt, Artificial Sequence
  Description of Artificial Sequence: Synthetic oligonucleotide
uuaauuagggaccuauggg

SEQ ID NO: 2401855 - RNA, 19 nt, Artificial Sequence
  Description of Artificial Sequence: Synthetic oligonucleotide
uuuugaauacaacaaaugu

SEQ ID NO: 2401856 - RNA, 19 nt, Artificial Sequence
  Description of Artificial Sequence: Synthetic oligonucleotide
aaucuuuggaggcaggagg

SEQ ID NO: 2401857 - RNA, 19 nt, Artificial Sequence
  Description of Artificial Sequence: Synthetic oligonucleotide
aauucaagacuccugaaga

SEQ ID NO: 2401858 - RNA, 19 nt, Artificial Sequence
  Description of Artificial Sequence: Synthetic oligonucleotide
aacuaauuguaaguaauac

SEQ ID NO: 2401859 - RNA, 19 nt, Artificial Sequence
  Description of Artificial Sequence: Synthetic oligonucleotide
uaaguaauacaaauauucc

SEQ ID NO: 2401860 - RNA, 19 nt, Artificial Sequence
  Description of Artificial Sequence: Synthetic oligonucleotide
ucuaauucaagacuccuga

SEQ ID NO: 2401861 - RNA, 19 nt, Artificial Sequence
  Description of Artificial Sequence: Synthetic oligonucleotide
aacguaaggccucuugagc

SEQ ID NO: 2401862 - RNA, 19 nt, Artificial Sequence
  Description of Artificial Sequence: Synthetic oligonucleotide
uuaaguagcccaaagggga

SEQ ID NO: 2401863 - RNA, 19 nt, Artificial Sequence
  Description of Artificial Sequence: Synthetic oligonucleotide
uauaagagggacacgaaca

SEQ ID NO: 2401864 - RNA, 19 nt, Artificial Sequence
  Description of Artificial Sequence: Synthetic oligonucleotide
ucaaccucuuuaauuaggg

SEQ ID NO: 2401865 - RNA, 19 nt, Artificial Sequence
  Description of Artificial Sequence: Synthetic oligonucleotide
uaauuagggaccuaugggc

SEQ ID NO: 2401866 - RNA, 19 nt, Artificial Sequence
  Description of Artificial Sequence: Synthetic oligonucleotide
uuugaauacaacaaaugua

SEQ ID NO: 2401867 - RNA, 19 nt, Artificial Sequence
  Description of Artificial Sequence: Synthetic oligonucleotide
uaauucaagacuccugaag

SEQ ID NO: 2401868 - RNA, 19 nt, Artificial Sequence
  Description of Artificial Sequence: Synthetic oligonucleotide
aguggaaacccuuaccugg

SEQ ID NO: 2401869 - RNA, 19 nt, Artificial Sequence
  Description of Artificial Sequence: Synthetic oligonucleotide
aauuagggaccuaugggcc

SEQ ID NO: 2401870 - RNA, 19 nt, Artificial Sequence
  Description of Artificial Sequence: Synthetic oligonucleotide
gguuaaguagcccaaaggg

SEQ ID NO: 2401871 - RNA, 19 nt, Artificial Sequence
  Description of Artificial Sequence: Synthetic oligonucleotide
aagaguaagucugcaaugg

SEQ ID NO: 2401872 - RNA, 19 nt, Artificial Sequence
  Description of Artificial Sequence: Synthetic oligonucleotide
gagggagugaaacaggucc

SEQ ID NO: 2401873 - RNA, 19 nt, Artificial Sequence
  Description of Artificial Sequence: Synthetic oligonucleotide
aacaucaggcuuuugauuu

SEQ ID NO: 2401874 - RNA, 19 nt, Artificial Sequence
  Description of Artificial Sequence: Synthetic oligonucleotide
agcccaaucagagagacac

SEQ ID NO: 2401875 - RNA, 19 nt, Artificial Sequence
  Description of Artificial Sequence: Synthetic oligonucleotide
caaaucaugaagcaaggug

SEQ ID NO: 2401876 - RNA, 19 nt, Artificial Sequence
  Description of Artificial Sequence: Synthetic oligonucleotide
ugaagaguaagucugcaau

SEQ ID NO: 2401877 - RNA, 19 nt, Artificial Sequence
  Description of Artificial Sequence: Synthetic oligonucleotide
acuaauuguaaguaauaca

SEQ ID NO: 2401878 - RNA, 19 nt, Artificial Sequence
  Description of Artificial Sequence: Synthetic oligonucleotide
ugguuaaguagcccaaagg

SEQ ID NO: 2401879 - RNA, 19 nt, Artificial Sequence
  Description of Artificial Sequence: Synthetic oligonucleotide
ucucaggaacucaucaacg

SEQ ID NO: 2401880 - RNA, 19 nt, Artificial Sequence
  Description of Artificial Sequence: Synthetic oligonucleotide
uuaaaaccagccuuuauua

SEQ ID NO: 2401881 - RNA, 19 nt, Artificial Sequence
  Description of Artificial Sequence: Synthetic oligonucleotide
agugugaagcuuucugagc

SEQ ID NO: 2401882 - RNA, 19 nt, Artificial Sequence
  Description of Artificial Sequence: Synthetic oligonucleotide
uggcccuuuaucaaacugg

SEQ ID NO: 2401883 - RNA, 19 nt, Artificial Sequence
  Description of Artificial Sequence: Synthetic oligonucleotide
agagagacacacugugucc

SEQ ID NO: 2401884 - RNA, 19 nt, Artificial Sequence
  Description of Artificial Sequence: Synthetic oligonucleotide
acacagagaaucuuuggag

SEQ ID NO: 2401885 - RNA, 19 nt, Artificial Sequence
  Description of Artificial Sequence: Synthetic oligonucleotide
ugaagcaagguggucaagg

SEQ ID NO: 2401886 - RNA, 19 nt, Artificial Sequence
  Description of Artificial Sequence: Synthetic oligonucleotide
caacaaauguaucaaauca

SEQ ID NO: 2401887 - RNA, 19 nt, Artificial Sequence
  Description of Artificial Sequence: Synthetic oligonucleotide
gaucccauagcccagucac

SEQ ID NO: 2401888 - RNA, 19 nt, Artificial Sequence
  Description of Artificial Sequence: Synthetic oligonucleotide
guuaaguagcccaaagggg

SEQ ID NO: 2401889 - RNA, 19 nt, Artificial Sequence
  Description of Artificial Sequence: Synthetic oligonucleotide
aauucacucaaccucuuua

SEQ ID NO: 2401890 - RNA, 19 nt, Artificial Sequence
  Description of Artificial Sequence: Synthetic oligonucleotide
aucaaacugguccuguguc

SEQ ID NO: 2401891 - RNA, 19 nt, Artificial Sequence
  Description of Artificial Sequence: Synthetic oligonucleotide
agaacagccaugaucgggc

SEQ ID NO: 2401892 - RNA, 19 nt, Artificial Sequence
  Description of Artificial Sequence: Synthetic oligonucleotide
gaagaguaagucugcaaug

SEQ ID NO: 2401893 - RNA, 19 nt, Artificial Sequence
  Description of Artificial Sequence: Synthetic oligonucleotide
agcacauacaccuggugag

SEQ ID NO: 2401894 - RNA, 19 nt, Artificial Sequence
  Description of Artificial Sequence: Synthetic oligonucleotide
aguaauacaaauauuccaa

SEQ ID NO: 2401895 - RNA, 19 nt, Artificial Sequence
  Description of Artificial Sequence: Synthetic oligonucleotide
cugaggauccauuuccugg

SEQ ID NO: 2401896 - RNA, 19 nt, Artificial Sequence
  Description of Artificial Sequence: Synthetic oligonucleotide
caccuuaaagagcugaacc

SEQ ID NO: 2401897 - RNA, 19 nt, Artificial Sequence
  Description of Artificial Sequence: Synthetic oligonucleotide
guagccaugguuaaguagc

SEQ ID NO: 2401898 - RNA, 19 nt, Artificial Sequence
  Description of Artificial Sequence: Synthetic oligonucleotide
aucagagagacacacugug

SEQ ID NO: 2401899 - RNA, 19 nt, Artificial Sequence
  Description of Artificial Sequence: Synthetic oligonucleotide
aagagggacacgaacauca

SEQ ID NO: 2401900 - RNA, 19 nt, Artificial Sequence
  Description of Artificial Sequence: Synthetic oligonucleotide
gaggggauuacacauuuac

SEQ ID NO: 2401901 - RNA, 19 nt, Artificial Sequence
  Description of Artificial Sequence: Synthetic oligonucleotide
agguggucuaauucaagac

SEQ ID NO: 2401902 - RNA, 19 nt, Artificial Sequence
  Description of Artificial Sequence: Synthetic oligonucleotide
uauuaacuaauuguaagua

SEQ ID NO: 2401903 - RNA, 19 nt, Artificial Sequence
  Description of Artificial Sequence: Synthetic oligonucleotide
ucucauacacuuagccagg

SEQ ID NO: 2401904 - RNA, 19 nt, Artificial Sequence
  Description of Artificial Sequence: Synthetic oligonucleotide
ucaacguaaggccucuuga

SEQ ID NO: 2401905 - RNA, 19 nt, Artificial Sequence
  Description of Artificial Sequence: Synthetic oligonucleotide
gaccuaugggccuacagug

SEQ ID NO: 2401906 - RNA, 19 nt, Artificial Sequence
  Description of Artificial Sequence: Synthetic oligonucleotide
gagugaaacaggucccugg

SEQ ID NO: 2401907 - RNA, 19 nt, Artificial Sequence
  Description of Artificial Sequence: Synthetic oligonucleotide
auucaagacuccugaagag

SEQ ID NO: 2401908 - RNA, 19 nt, Artificial Sequence
  Description of Artificial Sequence: Synthetic oligonucleotide
ggggaaaacaggcuaaccg

SEQ ID NO: 2401909 - RNA, 19 nt, Artificial Sequence
  Description of Artificial Sequence: Synthetic oligonucleotide
gaaccugacagcugggcag

SEQ ID NO: 2401910 - RNA, 19 nt, Artificial Sequence
  Description of Artificial Sequence: Synthetic oligonucleotide
cccuuuaucaaacuggucc

SEQ ID NO: 2401911 - RNA, 19 nt, Artificial Sequence
  Description of Artificial Sequence: Synthetic oligonucleotide
accguucucauacacuuag

SEQ ID NO: 2401912 - RNA, 19 nt, Artificial Sequence
  Description of Artificial Sequence: Synthetic oligonucleotide
accuuaaagagcugaaccu

SEQ ID NO: 2401913 - RNA, 19 nt, Artificial Sequence
  Description of Artificial Sequence: Synthetic oligonucleotide
cuccugaagaguaagucug

SEQ ID NO: 2401914 - RNA, 19 nt, Artificial Sequence
  Description of Artificial Sequence: Synthetic oligonucleotide
aguagccaugguuaaguag

SEQ ID NO: 2401915 - RNA, 19 nt, Artificial Sequence
  Description of Artificial Sequence: Synthetic oligonucleotide
ugccuugaaagccccaugc

SEQ ID NO: 2401916 - RNA, 19 nt, Artificial Sequence
  Description of Artificial Sequence: Synthetic oligonucleotide
agaguaagucugcaauggg

SEQ ID NO: 2401917 - RNA, 19 nt, Artificial Sequence
  Description of Artificial Sequence: Synthetic oligonucleotide
uaacuaauuguaaguaaua

SEQ ID NO: 2401918 - RNA, 19 nt, Artificial Sequence
  Description of Artificial Sequence: Synthetic oligonucleotide
acgaacaucaggcuuuuga

SEQ ID NO: 2401919 - RNA, 19 nt, Artificial Sequence
  Description of Artificial Sequence: Synthetic oligonucleotide
cuauaagagggacacgaac

SEQ ID NO: 2401920 - RNA, 19 nt, Artificial Sequence
  Description of Artificial Sequence: Synthetic oligonucleotide
agcaagguggucaaggauc

SEQ ID NO: 2401921 - RNA, 19 nt, Artificial Sequence
  Description of Artificial Sequence: Synthetic oligonucleotide
ucaagacuccugaagagua

SEQ ID NO: 2401922 - RNA, 19 nt, Artificial Sequence
  Description of Artificial Sequence: Synthetic oligonucleotide
aaacaggcuaaccguucuc

SEQ ID NO: 2401923 - RNA, 19 nt, Artificial Sequence
  Description of Artificial Sequence: Synthetic oligonucleotide
ggaacggcugccuugaaag

SEQ ID NO: 2401924 - RNA, 19 nt, Artificial Sequence
  Description of Artificial Sequence: Synthetic oligonucleotide
agguuuuaaaaccagccuu

SEQ ID NO: 2401925 - RNA, 19 nt, Artificial Sequence
  Description of Artificial Sequence: Synthetic oligonucleotide
aaaccagccuuuauuaacu

SEQ ID NO: 2401926 - RNA, 19 nt, Artificial Sequence
  Description of Artificial Sequence: Synthetic oligonucleotide
aagaggcaccuuaaagagc

SEQ ID NO: 2401927 - RNA, 19 nt, Artificial Sequence
  Description of Artificial Sequence: Synthetic oligonucleotide
cuuaccuggcccuuuauca

SEQ ID NO: 2401928 - RNA, 19 nt, Artificial Sequence
  Description of Artificial Sequence: Synthetic oligonucleotide
ugaauacaacaaauguauc

SEQ ID NO: 2401929 - RNA, 19 nt, Artificial Sequence
  Description of Artificial Sequence: Synthetic oligonucleotide
agccuuuauuaacuaauug

SEQ ID NO: 2401930 - RNA, 19 nt, Artificial Sequence
  Description of Artificial Sequence: Synthetic oligonucleotide
ucaaacugguccugugucc

SEQ ID NO: 2401931 - RNA, 19 nt, Artificial Sequence
  Description of Artificial Sequence: Synthetic oligonucleotide
ugagugguccccucaaucu

SEQ ID NO: 2401932 - RNA, 19 nt, Artificial Sequence
  Description of Artificial Sequence: Synthetic oligonucleotide
uaaccguucucauacacuu

SEQ ID NO: 2401933 - RNA, 19 nt, Artificial Sequence
  Description of Artificial Sequence: Synthetic oligonucleotide
augguuaaguagcccaaag

SEQ ID NO: 2401934 - RNA, 19 nt, Artificial Sequence
  Description of Artificial Sequence: Synthetic oligonucleotide
augaaggcaaauucacuca

SEQ ID NO: 2401935 - RNA, 19 nt, Artificial Sequence
  Description of Artificial Sequence: Synthetic oligonucleotide
uaaagagcugaaccugaca

SEQ ID NO: 2401936 - RNA, 19 nt, Artificial Sequence
  Description of Artificial Sequence: Synthetic oligonucleotide
gaguaagucugcaaugggc

SEQ ID NO: 2401937 - RNA, 19 nt, Artificial Sequence
  Description of Artificial Sequence: Synthetic oligonucleotide
ugaaggcaaauucacucaa

SEQ ID NO: 2401938 - RNA, 19 nt, Artificial Sequence
  Description of Artificial Sequence: Synthetic oligonucleotide
acacgcuggaugcagaaca

SEQ ID NO: 2401939 - RNA, 19 nt, Artificial Sequence
  Description of Artificial Sequence: Synthetic oligonucleotide
ggcaaauucacucaaccuc

SEQ ID NO: 2401940 - RNA, 19 nt, Artificial Sequence
  Description of Artificial Sequence: Synthetic oligonucleotide
aaggggaaaacaggcuaac

SEQ ID NO: 2401941 - RNA, 19 nt, Artificial Sequence
  Description of Artificial Sequence: Synthetic oligonucleotide
uggucaaggaucccauagc

SEQ ID NO: 2401942 - RNA, 19 nt, Artificial Sequence
  Description of Artificial Sequence: Synthetic oligonucleotide
uuaucaaacugguccugug

SEQ ID NO: 2401943 - RNA, 19 nt, Artificial Sequence
  Description of Artificial Sequence: Synthetic oligonucleotide
uccugguguggcuugagug

SEQ ID NO: 2401944 - RNA, 19 nt, Artificial Sequence
  Description of Artificial Sequence: Synthetic oligonucleotide
uacaguguccccucuacaa

SEQ ID NO: 2401945 - RNA, 19 nt, Artificial Sequence
  Description of Artificial Sequence: Synthetic oligonucleotide
aagccccaugcuuuuagug

SEQ ID NO: 2401946 - RNA, 19 nt, Artificial Sequence
  Description of Artificial Sequence: Synthetic oligonucleotide
uguccccucuacaaugugc

SEQ ID NO: 2401947 - RNA, 19 nt, Artificial Sequence
  Description of Artificial Sequence: Synthetic oligonucleotide
aucaaaucaugaagcaagg

SEQ ID NO: 2401948 - RNA, 19 nt, Artificial Sequence
  Description of Artificial Sequence: Synthetic oligonucleotide
aggccucuugagcacauac

SEQ ID NO: 2401949 - RNA, 19 nt, Artificial Sequence
  Description of Artificial Sequence: Synthetic oligonucleotide
auaagagggacacgaacau

SEQ ID NO: 2401950 - RNA, 19 nt, Artificial Sequence
  Description of Artificial Sequence: Synthetic oligonucleotide
uuagaagcccaaucagaga

SEQ ID NO: 2401951 - RNA, 19 nt, Artificial Sequence
  Description of Artificial Sequence: Synthetic oligonucleotide
uggucuaauucaagacucc

SEQ ID NO: 2401952 - RNA, 19 nt, Artificial Sequence
  Description of Artificial Sequence: Synthetic oligonucleotide
augaucgggcugcacugcc

SEQ ID NO: 2401953 - RNA, 19 nt, Artificial Sequence
  Description of Artificial Sequence: Synthetic oligonucleotide
caacguaaggccucuugag

SEQ ID NO: 2401954 - RNA, 19 nt, Artificial Sequence
  Description of Artificial Sequence: Synthetic oligonucleotide
aagcagaguagccaugguu

SEQ ID NO: 2401955 - RNA, 19 nt, Artificial Sequence
  Description of Artificial Sequence: Synthetic oligonucleotide
ucccugguuaaaugaaggc

SEQ ID NO: 2401956 - RNA, 19 nt, Artificial Sequence
  Description of Artificial Sequence: Synthetic oligonucleotide
cuuaaagagcugaaccuga

SEQ ID NO: 2401957 - RNA, 19 nt, Artificial Sequence
  Description of Artificial Sequence: Synthetic oligonucleotide
aucaacguaaggccucuug

SEQ ID NO: 2401958 - RNA, 19 nt, Artificial Sequence
  Description of Artificial Sequence: Synthetic oligonucleotide
gucucaggaacucaucaac

SEQ ID NO: 2401959 - RNA, 19 nt, Artificial Sequence
  Description of Artificial Sequence: Synthetic oligonucleotide
uucaagacuccugaagagu

SEQ ID NO: 2401960 - RNA, 19 nt, Artificial Sequence
  Description of Artificial Sequence: Synthetic oligonucleotide
acucaaccucuuuaauuag

SEQ ID NO: 2401961 - RNA, 19 nt, Artificial Sequence
  Description of Artificial Sequence: Synthetic oligonucleotide
gagggacacgaacaucagg

SEQ ID NO: 2401962 - RNA, 19 nt, Artificial Sequence
  Description of Artificial Sequence: Synthetic oligonucleotide
cuugaguggguguggacac

SEQ ID NO: 2401963 - RNA, 19 nt, Artificial Sequence
  Description of Artificial Sequence: Synthetic oligonucleotide
agaguagccaugguuaagu

SEQ ID NO: 2401964 - RNA, 19 nt, Artificial Sequence
  Description of Artificial Sequence: Synthetic oligonucleotide
gaguggaaacccuuaccug

SEQ ID NO: 2401965 - RNA, 19 nt, Artificial Sequence
  Description of Artificial Sequence: Synthetic oligonucleotide
cuuagccaggcugacacgc

SEQ ID NO: 2401966 - RNA, 19 nt, Artificial Sequence
  Description of Artificial Sequence: Synthetic oligonucleotide
uccugaagaguaagucugc

SEQ ID NO: 2401967 - RNA, 19 nt, Artificial Sequence
  Description of Artificial Sequence: Synthetic oligonucleotide
aggcaaauucacucaaccu

SEQ ID NO: 2401968 - RNA, 19 nt, Artificial Sequence
  Description of Artificial Sequence: Synthetic oligonucleotide
ugagcacauacaccuggug

SEQ ID NO: 2401969 - RNA, 19 nt, Artificial Sequence
  Description of Artificial Sequence: Synthetic oligonucleotide
uggcauccuacauuucaag

SEQ ID NO: 2401970 - RNA, 19 nt, Artificial Sequence
  Description of Artificial Sequence: Synthetic oligonucleotide
uaagucugcaaugggcccc

SEQ ID NO: 2401971 - RNA, 19 nt, Artificial Sequence
  Description of Artificial Sequence: Synthetic oligonucleotide
uuugauuuagaagcccaau

SEQ ID NO: 2401972 - RNA, 19 nt, Artificial Sequence
  Description of Artificial Sequence: Synthetic oligonucleotide
uaaguagcccaaaggggaa

SEQ ID NO: 2401973 - RNA, 19 nt, Artificial Sequence
  Description of Artificial Sequence: Synthetic oligonucleotide
cacucaaccucuuuaauua

SEQ ID NO: 2401974 - RNA, 19 nt, Artificial Sequence
  Description of Artificial Sequence: Synthetic oligonucleotide
gaagcaagguggucaagga

SEQ ID NO: 2401975 - RNA, 19 nt, Artificial Sequence
  Description of Artificial Sequence: Synthetic oligonucleotide
cauagcccagucacagugg

SEQ ID NO: 2401976 - RNA, 19 nt, Artificial Sequence
  Description of Artificial Sequence: Synthetic oligonucleotide
aagcaagguggucaaggau

SEQ ID NO: 2401977 - RNA, 19 nt, Artificial Sequence
  Description of Artificial Sequence: Synthetic oligonucleotide
auuagggaccuaugggccu

SEQ ID NO: 2401978 - RNA, 19 nt, Artificial Sequence
  Description of Artificial Sequence: Synthetic oligonucleotide
agggagugaaacagguccc

SEQ ID NO: 2401979 - RNA, 19 nt, Artificial Sequence
  Description of Artificial Sequence: Synthetic oligonucleotide
aaauucacucaaccucuuu

SEQ ID NO: 2401980 - RNA, 19 nt, Artificial Sequence
  Description of Artificial Sequence: Synthetic oligonucleotide
auccauuuccuggggaacg

SEQ ID NO: 2401981 - RNA, 19 nt, Artificial Sequence
  Description of Artificial Sequence: Synthetic oligonucleotide
agccccaugcuuuuagugu

SEQ ID NO: 2401982 - RNA, 19 nt, Artificial Sequence
  Description of Artificial Sequence: Synthetic oligonucleotide
gucccugguuaaaugaagg

SEQ ID NO: 2401983 - RNA, 19 nt, Artificial Sequence
  Description of Artificial Sequence: Synthetic oligonucleotide
uggguguggacaccaggcc

SEQ ID NO: 2401984 - RNA, 19 nt, Artificial Sequence
  Description of Artificial Sequence: Synthetic oligonucleotide
uagccaugguuaaguagcc

SEQ ID NO: 2401985 - RNA, 19 nt, Artificial Sequence
  Description of Artificial Sequence: Synthetic oligonucleotide
cagaacagccaugaucggg

SEQ ID NO: 2401986 - RNA, 19 nt, Artificial Sequence
  Description of Artificial Sequence: Synthetic oligonucleotide
ucaaaucaugaagcaaggu

SEQ ID NO: 2401987 - RNA, 19 nt, Artificial Sequence
  Description of Artificial Sequence: Synthetic oligonucleotide
guggucuaauucaagacuc

SEQ ID NO: 2401988 - RNA, 19 nt, Artificial Sequence
  Description of Artificial Sequence: Synthetic oligonucleotide
cucaucaacguaaggccuc

SEQ ID NO: 2401989 - RNA, 19 nt, Artificial Sequence
  Description of Artificial Sequence: Synthetic oligonucleotide
uucacucaaccucuuuaau

SEQ ID NO: 2401990 - RNA, 19 nt, Artificial Sequence
  Description of Artificial Sequence: Synthetic oligonucleotide
ucauacacuuagccaggcu

SEQ ID NO: 2401991 - RNA, 19 nt, Artificial Sequence
  Description of Artificial Sequence: Synthetic oligonucleotide
aacagccaugaucgggcug

SEQ ID NO: 2401992 - RNA, 19 nt, Artificial Sequence
  Description of Artificial Sequence: Synthetic oligonucleotide
caguguccccucuacaaug

SEQ ID NO: 2401993 - RNA, 19 nt, Artificial Sequence
  Description of Artificial Sequence: Synthetic oligonucleotide
cuaugggccuacagugucc

SEQ ID NO: 2401994 - RNA, 19 nt, Artificial Sequence
  Description of Artificial Sequence: Synthetic oligonucleotide
gucuaauucaagacuccug

SEQ ID NO: 2401995 - RNA, 19 nt, Artificial Sequence
  Description of Artificial Sequence: Synthetic oligonucleotide
gggauuacacauuuacaca

SEQ ID NO: 2401996 - RNA, 19 nt, Artificial Sequence
  Description of Artificial Sequence: Synthetic oligonucleotide
acggcugccuugaaagccc

SEQ ID NO: 2401997 - RNA, 19 nt, Artificial Sequence
  Description of Artificial Sequence: Synthetic oligonucleotide
acuuagccaggcugacacg

SEQ ID NO: 2401998 - RNA, 19 nt, Artificial Sequence
  Description of Artificial Sequence: Synthetic oligonucleotide
cacagugggaagcagagua

SEQ ID NO: 2401999 - RNA, 19 nt, Artificial Sequence
  Description of Artificial Sequence: Synthetic oligonucleotide
uggaaacccuuaccuggcc

SEQ ID NO: 2402000 - RNA, 19 nt, Artificial Sequence
  Description of Artificial Sequence: Synthetic oligonucleotide
acuguuaacagaggggauu

SEQ ID NO: 2402001 - RNA, 19 nt, Artificial Sequence
  Description of Artificial Sequence: Synthetic oligonucleotide
ucccugaagaggcaccuua

SEQ ID NO: 2402002 - RNA, 19 nt, Artificial Sequence
  Description of Artificial Sequence: Synthetic oligonucleotide
gaacggcugccuugaaagc

SEQ ID NO: 2402003 - RNA, 19 nt, Artificial Sequence
  Description of Artificial Sequence: Synthetic oligonucleotide
uuucugagccacuguuaac

SEQ ID NO: 2402004 - RNA, 19 nt, Artificial Sequence
  Description of Artificial Sequence: Synthetic oligonucleotide
ugaguggguguggacacca

SEQ ID NO: 2402005 - RNA, 19 nt, Artificial Sequence
  Description of Artificial Sequence: Synthetic oligonucleotide
gccucuugagcacauacac

SEQ ID NO: 2402006 - RNA, 19 nt, Artificial Sequence
  Description of Artificial Sequence: Synthetic oligonucleotide
agccaugguuaaguagccc

SEQ ID NO: 2402007 - RNA, 19 nt, Artificial Sequence
  Description of Artificial Sequence: Synthetic oligonucleotide
cuggcccuuuaucaaacug

SEQ ID NO: 2402008 - RNA, 19 nt, Artificial Sequence
  Description of Artificial Sequence: Synthetic oligonucleotide
gaaggcaaauucacucaac

SEQ ID NO: 2402009 - RNA, 19 nt, Artificial Sequence
  Description of Artificial Sequence: Synthetic oligonucleotide
agauuccugguguggcuug

SEQ ID NO: 2402010 - RNA, 19 nt, Artificial Sequence
  Description of Artificial Sequence: Synthetic oligonucleotide
cccucuacaaugugcagag

SEQ ID NO: 2402011 - RNA, 19 nt, Artificial Sequence
  Description of Artificial Sequence: Synthetic oligonucleotide
cagggcagggcauggaauc

SEQ ID NO: 2402012 - RNA, 19 nt, Artificial Sequence
  Description of Artificial Sequence: Synthetic oligonucleotide
cguucucauacacuuagcc

SEQ ID NO: 2402013 - RNA, 19 nt, Artificial Sequence
  Description of Artificial Sequence: Synthetic oligonucleotide
cagugggaagcagaguagc

SEQ ID NO: 2402014 - RNA, 19 nt, Artificial Sequence
  Description of Artificial Sequence: Synthetic oligonucleotide
cacgcuggaugcagaacag

SEQ ID NO: 2402015 - RNA, 19 nt, Artificial Sequence
  Description of Artificial Sequence: Synthetic oligonucleotide
cauggaaucaccugaggau

SEQ ID NO: 2402016 - RNA, 19 nt, Artificial Sequence
  Description of Artificial Sequence: Synthetic oligonucleotide
gagugguccccucaaucuc

SEQ ID NO: 2402017 - RNA, 19 nt, Artificial Sequence
  Description of Artificial Sequence: Synthetic oligonucleotide
ucaucaacguaaggccucu

SEQ ID NO: 2402018 - RNA, 19 nt, Artificial Sequence
  Description of Artificial Sequence: Synthetic oligonucleotide
aaccagccuuuauuaacua

SEQ ID NO: 2402019 - RNA, 19 nt, Artificial Sequence
  Description of Artificial Sequence: Synthetic oligonucleotide
gcaaagguuuuaaaaccag

SEQ ID NO: 2402020 - RNA, 19 nt, Artificial Sequence
  Description of Artificial Sequence: Synthetic oligonucleotide
acucaucaacguaaggccu

SEQ ID NO: 2402021 - RNA, 19 nt, Artificial Sequence
  Description of Artificial Sequence: Synthetic oligonucleotide
cagggcauggaaucaccug

SEQ ID NO: 2402022 - RNA, 19 nt, Artificial Sequence
  Description of Artificial Sequence: Synthetic oligonucleotide
gaaacccuuaccuggcccu

SEQ ID NO: 2402023 - RNA, 19 nt, Artificial Sequence
  Description of Artificial Sequence: Synthetic oligonucleotide
ugcuuuuagugugaagcuu

SEQ ID NO: 2402024 - RNA, 19 nt, Artificial Sequence
  Description of Artificial Sequence: Synthetic oligonucleotide
gcauggaaucaccugagga

SEQ ID NO: 2402025 - RNA, 19 nt, Artificial Sequence
  Description of Artificial Sequence: Synthetic oligonucleotide
gacuuuuaauggcauccua

SEQ ID NO: 2402026 - RNA, 19 nt, Artificial Sequence
  Description of Artificial Sequence: Synthetic oligonucleotide
uaccuggcccuuuaucaaa

SEQ ID NO: 2402027 - RNA, 19 nt, Artificial Sequence
  Description of Artificial Sequence: Synthetic oligonucleotide
aaccugacagcugggcaga

SEQ ID NO: 2402028 - RNA, 19 nt, Artificial Sequence
  Description of Artificial Sequence: Synthetic oligonucleotide
agcccagucacagugggaa

SEQ ID NO: 2402029 - RNA, 19 nt, Artificial Sequence
  Description of Artificial Sequence: Synthetic oligonucleotide
ugacacgcuggaugcagaa

SEQ ID NO: 2402030 - RNA, 19 nt, Artificial Sequence
  Description of Artificial Sequence: Synthetic oligonucleotide
cuaauucaagacuccugaa

SEQ ID NO: 2402031 - RNA, 19 nt, Artificial Sequence
  Description of Artificial Sequence: Synthetic oligonucleotide
aggauccauuuccugggga

SEQ ID NO: 2402032 - RNA, 19 nt, Artificial Sequence
  Description of Artificial Sequence: Synthetic oligonucleotide
gaucgggcugcacugccuc

SEQ ID NO: 2402033 - RNA, 19 nt, Artificial Sequence
  Description of Artificial Sequence: Synthetic oligonucleotide
ugggccuacaguguccccu

SEQ ID NO: 2402034 - RNA, 19 nt, Artificial Sequence
  Description of Artificial Sequence: Synthetic oligonucleotide
accagccuuuauuaacuaa

SEQ ID NO: 2402035 - RNA, 19 nt, Artificial Sequence
  Description of Artificial Sequence: Synthetic oligonucleotide
ggaaacccuuaccuggccc

SEQ ID NO: 2402036 - RNA, 19 nt, Artificial Sequence
  Description of Artificial Sequence: Synthetic oligonucleotide
uaagagggacacgaacauc

SEQ ID NO: 2402037 - RNA, 19 nt, Artificial Sequence
  Description of Artificial Sequence: Synthetic oligonucleotide
gguggucuaauucaagacu

SEQ ID NO: 2402038 - RNA, 19 nt, Artificial Sequence
  Description of Artificial Sequence: Synthetic oligonucleotide
caugaagcaagguggucaa

SEQ ID NO: 2402039 - RNA, 19 nt, Artificial Sequence
  Description of Artificial Sequence: Synthetic oligonucleotide
caggucccugguuaaauga

SEQ ID NO: 2402040 - RNA, 19 nt, Artificial Sequence
  Description of Artificial Sequence: Synthetic oligonucleotide
aggaucccauagcccaguc

SEQ ID NO: 2402041 - RNA, 19 nt, Artificial Sequence
  Description of Artificial Sequence: Synthetic oligonucleotide
accuggcccuuuaucaaac

SEQ ID NO: 2402042 - RNA, 19 nt, Artificial Sequence
  Description of Artificial Sequence: Synthetic oligonucleotide
ugaucgggcugcacugccu

SEQ ID NO: 2402043 - RNA, 19 nt, Artificial Sequence
  Description of Artificial Sequence: Synthetic oligonucleotide
aaacugguccuguguccaa

SEQ ID NO: 2402044 - RNA, 19 nt, Artificial Sequence
  Description of Artificial Sequence: Synthetic oligonucleotide
uggugagugguccccucaa

SEQ ID NO: 2402045 - RNA, 19 nt, Artificial Sequence
  Description of Artificial Sequence: Synthetic oligonucleotide
gcuaaccguucucauacac

SEQ ID NO: 2402046 - RNA, 19 nt, Artificial Sequence
  Description of Artificial Sequence: Synthetic oligonucleotide
gggaaaacaggcuaaccgu

SEQ ID NO: 2402047 - RNA, 19 nt, Artificial Sequence
  Description of Artificial Sequence: Synthetic oligonucleotide
uguuaacagaggggauuac

SEQ ID NO: 2402048 - RNA, 19 nt, Artificial Sequence
  Description of Artificial Sequence: Synthetic oligonucleotide
uacacuuagccaggcugac

SEQ ID NO: 2402049 - RNA, 19 nt, Artificial Sequence
  Description of Artificial Sequence: Synthetic oligonucleotide
uggggaacggcugccuuga

SEQ ID NO: 2402050 - RNA, 19 nt, Artificial Sequence
  Description of Artificial Sequence: Synthetic oligonucleotide
acaggcuaaccguucucau

SEQ ID NO: 2402051 - RNA, 19 nt, Artificial Sequence
  Description of Artificial Sequence: Synthetic oligonucleotide
caaccucuuuaauuaggga

SEQ ID NO: 2402052 - RNA, 19 nt, Artificial Sequence
  Description of Artificial Sequence: Synthetic oligonucleotide
uccgucucaggaacucauc

SEQ ID NO: 2402053 - RNA, 19 nt, Artificial Sequence
  Description of Artificial Sequence: Synthetic oligonucleotide
cuggggaacggcugccuug

SEQ ID NO: 2402054 - RNA, 19 nt, Artificial Sequence
  Description of Artificial Sequence: Synthetic oligonucleotide
cugaagaguaagucugcaa

SEQ ID NO: 2402055 - RNA, 19 nt, Artificial Sequence
  Description of Artificial Sequence: Synthetic oligonucleotide
caaacugguccugugucca

SEQ ID NO: 2402056 - RNA, 19 nt, Artificial Sequence
  Description of Artificial Sequence: Synthetic oligonucleotide
ccucuugagcacauacacc

SEQ ID NO: 2402057 - RNA, 19 nt, Artificial Sequence
  Description of Artificial Sequence: Synthetic oligonucleotide
aggcaccuuaaagagcuga

SEQ ID NO: 2402058 - RNA, 19 nt, Artificial Sequence
  Description of Artificial Sequence: Synthetic oligonucleotide
caugaucgggcugcacugc

SEQ ID NO: 2402059 - RNA, 19 nt, Artificial Sequence
  Description of Artificial Sequence: Synthetic oligonucleotide
guccccucuacaaugugca

SEQ ID NO: 2402060 - RNA, 19 nt, Artificial Sequence
  Description of Artificial Sequence: Synthetic oligonucleotide
aaguagcccaaaggggaaa

SEQ ID NO: 2402061 - RNA, 19 nt, Artificial Sequence
  Description of Artificial Sequence: Synthetic oligonucleotide
cuaaccguucucauacacu

SEQ ID NO: 2402062 - RNA, 19 nt, Artificial Sequence
  Description of Artificial Sequence: Synthetic oligonucleotide
acaucaggcuuuugauuua

SEQ ID NO: 2402063 - RNA, 19 nt, Artificial Sequence
  Description of Artificial Sequence: Synthetic oligonucleotide
ggaugcagaacagccauga

SEQ ID NO: 2402064 - RNA, 19 nt, Artificial Sequence
  Description of Artificial Sequence: Synthetic oligonucleotide
gccccaugcuuuuagugug

SEQ ID NO: 2402065 - RNA, 19 nt, Artificial Sequence
  Description of Artificial Sequence: Synthetic oligonucleotide
aguguccccucuacaaugu

SEQ ID NO: 2402066 - RNA, 19 nt, Artificial Sequence
  Description of Artificial Sequence: Synthetic oligonucleotide
cagaguagccaugguuaag

SEQ ID NO: 2402067 - RNA, 19 nt, Artificial Sequence
  Description of Artificial Sequence: Synthetic oligonucleotide
guggcuugagugggugugg

SEQ ID NO: 2402068 - RNA, 19 nt, Artificial Sequence
  Description of Artificial Sequence: Synthetic oligonucleotide
gacacgaacaucaggcuuu

SEQ ID NO: 2402069 - RNA, 19 nt, Artificial Sequence
  Description of Artificial Sequence: Synthetic oligonucleotide
agagggacacgaacaucag

SEQ ID NO: 2402070 - RNA, 19 nt, Artificial Sequence
  Description of Artificial Sequence: Synthetic oligonucleotide
aguagcccaaaggggaaaa

SEQ ID NO: 2402071 - RNA, 19 nt, Artificial Sequence
  Description of Artificial Sequence: Synthetic oligonucleotide
ggauccauuuccuggggaa

SEQ ID NO: 2402072 - RNA, 19 nt, Artificial Sequence
  Description of Artificial Sequence: Synthetic oligonucleotide
ggucccugguuaaaugaag

SEQ ID NO: 2402073 - RNA, 19 nt, Artificial Sequence
  Description of Artificial Sequence: Synthetic oligonucleotide
uuagggaccuaugggccua

SEQ ID NO: 2402074 - RNA, 19 nt, Artificial Sequence
  Description of Artificial Sequence: Synthetic oligonucleotide
uugaguggguguggacacc

SEQ ID NO: 2402075 - RNA, 19 nt, Artificial Sequence
  Description of Artificial Sequence: Synthetic oligonucleotide
cugccuugaaagccccaug

SEQ ID NO: 2402076 - RNA, 19 nt, Artificial Sequence
  Description of Artificial Sequence: Synthetic oligonucleotide
auggcauccuacauuucaa

SEQ ID NO: 2402077 - RNA, 19 nt, Artificial Sequence
  Description of Artificial Sequence: Synthetic oligonucleotide
gggaccuaugggccuacag

SEQ ID NO: 2402078 - RNA, 19 nt, Artificial Sequence
  Description of Artificial Sequence: Synthetic oligonucleotide
ccaugaucgggcugcacug

SEQ ID NO: 2402079 - RNA, 19 nt, Artificial Sequence
  Description of Artificial Sequence: Synthetic oligonucleotide
gcaaauucacucaaccucu

SEQ ID NO: 2402080 - RNA, 19 nt, Artificial Sequence
  Description of Artificial Sequence: Synthetic oligonucleotide
ccuacaguguccccucuac

SEQ ID NO: 2402081 - RNA, 19 nt, Artificial Sequence
  Description of Artificial Sequence: Synthetic oligonucleotide
gaguagccaugguuaagua

SEQ ID NO: 2402082 - RNA, 19 nt, Artificial Sequence
  Description of Artificial Sequence: Synthetic oligonucleotide
gacacgcuggaugcagaac

SEQ ID NO: 2402083 - RNA, 19 nt, Artificial Sequence
  Description of Artificial Sequence: Synthetic oligonucleotide
cccuauaagagggacacga

SEQ ID NO: 2402084 - RNA, 19 nt, Artificial Sequence
  Description of Artificial Sequence: Synthetic oligonucleotide
ugguguggcuugagugggu

SEQ ID NO: 2402085 - RNA, 19 nt, Artificial Sequence
  Description of Artificial Sequence: Synthetic oligonucleotide
uggcuugagugggugugga

SEQ ID NO: 2402086 - RNA, 19 nt, Artificial Sequence
  Description of Artificial Sequence: Synthetic oligonucleotide
ccuaugggccuacaguguc

SEQ ID NO: 2402087 - RNA, 19 nt, Artificial Sequence
  Description of Artificial Sequence: Synthetic oligonucleotide
cuacaguguccccucuaca

SEQ ID NO: 2402088 - RNA, 19 nt, Artificial Sequence
  Description of Artificial Sequence: Synthetic oligonucleotide
ggaccuaugggccuacagu

SEQ ID NO: 2402089 - RNA, 19 nt, Artificial Sequence
  Description of Artificial Sequence: Synthetic oligonucleotide
gacacacugugucccugaa

SEQ ID NO: 2402090 - RNA, 19 nt, Artificial Sequence
  Description of Artificial Sequence: Synthetic oligonucleotide
gcagaacagccaugaucgg

SEQ ID NO: 2402091 - RNA, 19 nt, Artificial Sequence
  Description of Artificial Sequence: Synthetic oligonucleotide
accuaugggccuacagugu

SEQ ID NO: 2402092 - RNA, 19 nt, Artificial Sequence
  Description of Artificial Sequence: Synthetic oligonucleotide
auuccugguguggcuugag

SEQ ID NO: 2402093 - RNA, 19 nt, Artificial Sequence
  Description of Artificial Sequence: Synthetic oligonucleotide
aaacccuuaccuggcccuu

SEQ ID NO: 2402094 - RNA, 19 nt, Artificial Sequence
  Description of Artificial Sequence: Synthetic oligonucleotide
ccugaggauccauuuccug

SEQ ID NO: 2402095 - RNA, 19 nt, Artificial Sequence
  Description of Artificial Sequence: Synthetic oligonucleotide
guagcccaaaggggaaaac

SEQ ID NO: 2402096 - RNA, 19 nt, Artificial Sequence
  Description of Artificial Sequence: Synthetic oligonucleotide
ggcauccuacauuucaagu

SEQ ID NO: 2402097 - RNA, 19 nt, Artificial Sequence
  Description of Artificial Sequence: Synthetic oligonucleotide
gcauccuacauuucaaguu

SEQ ID NO: 2402098 - RNA, 19 nt, Artificial Sequence
  Description of Artificial Sequence: Synthetic oligonucleotide
gauuccugguguggcuuga

SEQ ID NO: 2402099 - RNA, 19 nt, Artificial Sequence
  Description of Artificial Sequence: Synthetic oligonucleotide
caccuggugaguggucccc

SEQ ID NO: 2402100 - RNA, 19 nt, Artificial Sequence
  Description of Artificial Sequence: Synthetic oligonucleotide
aaccguucucauacacuua

SEQ ID NO: 2402101 - RNA, 19 nt, Artificial Sequence
  Description of Artificial Sequence: Synthetic oligonucleotide
gaagcagaguagccauggu

SEQ ID NO: 2402102 - RNA, 19 nt, Artificial Sequence
  Description of Artificial Sequence: Synthetic oligonucleotide
gccucuggaacagggcagg

SEQ ID NO: 2402103 - RNA, 19 nt, Artificial Sequence
  Description of Artificial Sequence: Synthetic oligonucleotide
ugaaagccccaugcuuuua

SEQ ID NO: 2402104 - RNA, 19 nt, Artificial Sequence
  Description of Artificial Sequence: Synthetic oligonucleotide
gguguggcuugagugggug

SEQ ID NO: 2402105 - RNA, 19 nt, Artificial Sequence
  Description of Artificial Sequence: Synthetic oligonucleotide
cugggcagauuccuggugu

SEQ ID NO: 2402106 - RNA, 19 nt, Artificial Sequence
  Description of Artificial Sequence: Synthetic oligonucleotide
caggcuaaccguucucaua

SEQ ID NO: 2402107 - RNA, 19 nt, Artificial Sequence
  Description of Artificial Sequence: Synthetic oligonucleotide
gaguggguguggacaccag

SEQ ID NO: 2402108 - RNA, 19 nt, Artificial Sequence
  Description of Artificial Sequence: Synthetic oligonucleotide
caugguuaaguagcccaaa

SEQ ID NO: 2402109 - RNA, 19 nt, Artificial Sequence
  Description of Artificial Sequence: Synthetic oligonucleotide
cugacacgcuggaugcaga

SEQ ID NO: 2402110 - RNA, 19 nt, Artificial Sequence
  Description of Artificial Sequence: Synthetic oligonucleotide
auccgucucaggaacucau

SEQ ID NO: 2402111 - RNA, 19 nt, Artificial Sequence
  Description of Artificial Sequence: Synthetic oligonucleotide
gaacagccaugaucgggcu

SEQ ID NO: 2402112 - RNA, 19 nt, Artificial Sequence
  Description of Artificial Sequence: Synthetic oligonucleotide
cauacaccuggugaguggu

SEQ ID NO: 2402113 - RNA, 19 nt, Artificial Sequence
  Description of Artificial Sequence: Synthetic oligonucleotide
gggcagauuccuggugugg

SEQ ID NO: 2402114 - RNA, 19 nt, Artificial Sequence
  Description of Artificial Sequence: Synthetic oligonucleotide
cccugguuaaaugaaggca

SEQ ID NO: 2402115 - RNA, 19 nt, Artificial Sequence
  Description of Artificial Sequence: Synthetic oligonucleotide
cuggugagugguccccuca

SEQ ID NO: 2402116 - RNA, 19 nt, Artificial Sequence
  Description of Artificial Sequence: Synthetic oligonucleotide
ccuuaccuggcccuuuauc

SEQ ID NO: 2402117 - RNA, 19 nt, Artificial Sequence
  Description of Artificial Sequence: Synthetic oligonucleotide
ggaucccauagcccaguca

SEQ ID NO: 2402118 - RNA, 19 nt, Artificial Sequence
  Description of Artificial Sequence: Synthetic oligonucleotide
gccaugaucgggcugcacu

SEQ ID NO: 2402119 - RNA, 19 nt, Artificial Sequence
  Description of Artificial Sequence: Synthetic oligonucleotide
ccguucucauacacuuagc

SEQ ID NO: 2402120 - RNA, 19 nt, Artificial Sequence
  Description of Artificial Sequence: Synthetic oligonucleotide
acccuuaccuggcccuuua

SEQ ID NO: 2402121 - RNA, 19 nt, Artificial Sequence
  Description of Artificial Sequence: Synthetic oligonucleotide
aacccuuaccuggcccuuu

SEQ ID NO: 2402122 - RNA, 19 nt, Artificial Sequence
  Description of Artificial Sequence: Synthetic oligonucleotide
gaggcaccuuaaagagcug

SEQ ID NO: 2402123 - RNA, 19 nt, Artificial Sequence
  Description of Artificial Sequence: Synthetic oligonucleotide
ggucuaauucaagacuccu

SEQ ID NO: 2402124 - RNA, 19 nt, Artificial Sequence
  Description of Artificial Sequence: Synthetic oligonucleotide
aucccauagcccagucaca

SEQ ID NO: 2402125 - RNA, 19 nt, Artificial Sequence
  Description of Artificial Sequence: Synthetic oligonucleotide
ccccauccgucucaggaac

SEQ ID NO: 2402126 - RNA, 19 nt, Artificial Sequence
  Description of Artificial Sequence: Synthetic oligonucleotide
ccgucucaggaacucauca

SEQ ID NO: 2402127 - RNA, 19 nt, Artificial Sequence
  Description of Artificial Sequence: Synthetic oligonucleotide
cagaggggauuacacauuu

SEQ ID NO: 2402128 - RNA, 19 nt, Artificial Sequence
  Description of Artificial Sequence: Synthetic oligonucleotide
acacgaacaucaggcuuuu

SEQ ID NO: 2402129 - RNA, 19 nt, Artificial Sequence
  Description of Artificial Sequence: Synthetic oligonucleotide
cauccgucucaggaacuca

SEQ ID NO: 2402130 - RNA, 19 nt, Artificial Sequence
  Description of Artificial Sequence: Synthetic oligonucleotide
ccuauaagagggacacgaa

SEQ ID NO: 2402131 - RNA, 19 nt, Artificial Sequence
  Description of Artificial Sequence: Synthetic oligonucleotide
cauuuacacagagaaucuu

SEQ ID NO: 2402132 - RNA, 19 nt, Artificial Sequence
  Description of Artificial Sequence: Synthetic oligonucleotide
ggaaucaccugaggaucca

SEQ ID NO: 2402133 - RNA, 19 nt, Artificial Sequence
  Description of Artificial Sequence: Synthetic oligonucleotide
ggcugcacugccucuggaa

SEQ ID NO: 2402134 - RNA, 19 nt, Artificial Sequence
  Description of Artificial Sequence: Synthetic oligonucleotide
gggaacggcugccuugaaa

SEQ ID NO: 2402135 - RNA, 19 nt, Artificial Sequence
  Description of Artificial Sequence: Synthetic oligonucleotide
uagggaccuaugggccuac

SEQ ID NO: 2402136 - RNA, 19 nt, Artificial Sequence
  Description of Artificial Sequence: Synthetic oligonucleotide
aaggccucuugagcacaua

SEQ ID NO: 2402137 - RNA, 19 nt, Artificial Sequence
  Description of Artificial Sequence: Synthetic oligonucleotide
ccaugguuaaguagcccaa

SEQ ID NO: 2402138 - RNA, 19 nt, Artificial Sequence
  Description of Artificial Sequence: Synthetic oligonucleotide
ggaaaacaggcuaaccguu

SEQ ID NO: 2402139 - RNA, 19 nt, Artificial Sequence
  Description of Artificial Sequence: Synthetic oligonucleotide
ggccucuugagcacauaca

SEQ ID NO: 2402140 - RNA, 19 nt, Artificial Sequence
  Description of Artificial Sequence: Synthetic oligonucleotide
ggacacgaacaucaggcuu

SEQ ID NO: 2402141 - RNA, 19 nt, Artificial Sequence
  Description of Artificial Sequence: Synthetic oligonucleotide
ggcccuuuaucaaacuggu

SEQ ID NO: 2402142 - RNA, 19 nt, Artificial Sequence
  Description of Artificial Sequence: Synthetic oligonucleotide
caaauucacucaaccucuu

SEQ ID NO: 2402143 - RNA, 19 nt, Artificial Sequence
  Description of Artificial Sequence: Synthetic oligonucleotide
gggccuacaguguccccuc

SEQ ID NO: 2402144 - RNA, 19 nt, Artificial Sequence
  Description of Artificial Sequence: Synthetic oligonucleotide
ggcuaaccguucucauaca

SEQ ID NO: 2402145 - RNA, 19 nt, Artificial Sequence
  Description of Artificial Sequence: Synthetic oligonucleotide
gaaucaccugaggauccau

SEQ ID NO: 2402146 - RNA, 19 nt, Artificial Sequence
  Description of Artificial Sequence: Synthetic oligonucleotide
cacuguuaacagaggggau

SEQ ID NO: 2402147 - RNA, 19 nt, Artificial Sequence
  Description of Artificial Sequence: Synthetic oligonucleotide
ccugaagaguaagucugca

SEQ ID NO: 2402148 - RNA, 19 nt, Artificial Sequence
  Description of Artificial Sequence: Synthetic oligonucleotide
gcuuucugagccacuguua

SEQ ID NO: 2402149 - RNA, 19 nt, Artificial Sequence
  Description of Artificial Sequence: Synthetic oligonucleotide
ccugaagaggcaccuuaaa

SEQ ID NO: 2402150 - RNA, 19 nt, Artificial Sequence
  Description of Artificial Sequence: Synthetic oligonucleotide
ccauccgucucaggaacuc

SEQ ID NO: 2402151 - RNA, 19 nt, Artificial Sequence
  Description of Artificial Sequence: Synthetic oligonucleotide
cacgaacaucaggcuuuug

SEQ ID NO: 2402152 - RNA, 19 nt, Artificial Sequence
  Description of Artificial Sequence: Synthetic oligonucleotide
gggcagggcauggaaucac

SEQ ID NO: 2402153 - RNA, 19 nt, Artificial Sequence
  Description of Artificial Sequence: Synthetic oligonucleotide
caccaggccagguggucua

SEQ ID NO: 2402154 - RNA, 19 nt, Artificial Sequence
  Description of Artificial Sequence: Synthetic oligonucleotide
gccagguggucuaauucaa

SEQ ID NO: 2402155 - RNA, 19 nt, Artificial Sequence
  Description of Artificial Sequence: Synthetic oligonucleotide
cgucucaggaacucaucaa

SEQ ID NO: 2402156 - RNA, 19 nt, Artificial Sequence
  Description of Artificial Sequence: Synthetic oligonucleotide
agggaccuaugggccuaca

SEQ ID NO: 2402157 - RNA, 19 nt, Artificial Sequence
  Description of Artificial Sequence: Synthetic oligonucleotide
ccucuuuaauuagggaccu

SEQ ID NO: 2402158 - RNA, 19 nt, Artificial Sequence
  Description of Artificial Sequence: Synthetic oligonucleotide
gugcagaguggaaacccuu

SEQ ID NO: 2402159 - RNA, 19 nt, Artificial Sequence
  Description of Artificial Sequence: Synthetic oligonucleotide
caggccagguggucuaauu

SEQ ID NO: 2402160 - RNA, 19 nt, Artificial Sequence
  Description of Artificial Sequence: Synthetic oligonucleotide
ggugagugguccccucaau

SEQ ID NO: 2402161 - RNA, 19 nt, Artificial Sequence
  Description of Artificial Sequence: Synthetic oligonucleotide
accugacagcugggcagau

SEQ ID NO: 2402162 - RNA, 19 nt, Artificial Sequence
  Description of Artificial Sequence: Synthetic oligonucleotide
cgggcugcacugccucugg

SEQ ID NO: 2402163 - RNA, 19 nt, Artificial Sequence
  Description of Artificial Sequence: Synthetic oligonucleotide
ggcugacacgcuggaugca

SEQ ID NO: 2402164 - RNA, 19 nt, Artificial Sequence
  Description of Artificial Sequence: Synthetic oligonucleotide
ccuggcccuuuaucaaacu

SEQ ID NO: 2402165 - RNA, 19 nt, Artificial Sequence
  Description of Artificial Sequence: Synthetic oligonucleotide
cccauagcccagucacagu

SEQ ID NO: 2402166 - RNA, 19 nt, Artificial Sequence
  Description of Artificial Sequence: Synthetic oligonucleotide
cccauccgucucaggaacu

SEQ ID NO: 2402167 - RNA, 19 nt, Artificial Sequence
  Description of Artificial Sequence: Synthetic oligonucleotide
ggggaacggcugccuugaa

SEQ ID NO: 2402168 - RNA, 19 nt, Artificial Sequence
  Description of Artificial Sequence: Synthetic oligonucleotide
caucaacguaaggccucuu

SEQ ID NO: 2402169 - RNA, 19 nt, Artificial Sequence
  Description of Artificial Sequence: Synthetic oligonucleotide
ccucuacaaugugcagagu

SEQ ID NO: 2402170 - RNA, 19 nt, Artificial Sequence
  Description of Artificial Sequence: Synthetic oligonucleotide
cccuuaccuggcccuuuau

SEQ ID NO: 2402171 - RNA, 19 nt, Artificial Sequence
  Description of Artificial Sequence: Synthetic oligonucleotide
uuaaauaugguuaagacuc

SEQ ID NO: 2402172 - RNA, 19 nt, Artificial Sequence
  Description of Artificial Sequence: Synthetic oligonucleotide
ugggauaugaccuuuauug

SEQ ID NO: 2402173 - RNA, 19 nt, Artificial Sequence
  Description of Artificial Sequence: Synthetic oligonucleotide
guuaagaauauuuagaguc

SEQ ID NO: 2402174 - RNA, 19 nt, Artificial Sequence
  Description of Artificial Sequence: Synthetic oligonucleotide
agucaacucaaucaaaacc

SEQ ID NO: 2402175 - RNA, 19 nt, Artificial Sequence
  Description of Artificial Sequence: Synthetic oligonucleotide
gauaauaaggaauccaggc

SEQ ID NO: 2402176 - RNA, 19 nt, Artificial Sequence
  Description of Artificial Sequence: Synthetic oligonucleotide
aauucuaguaccucugcgg

SEQ ID NO: 2402177 - RNA, 19 nt, Artificial Sequence
  Description of Artificial Sequence: Synthetic oligonucleotide
augaauacggcccacaggg

SEQ ID NO: 2402178 - RNA, 19 nt, Artificial Sequence
  Description of Artificial Sequence: Synthetic oligonucleotide
aauccaggcauccuuagac

SEQ ID NO: 2402179 - RNA, 19 nt, Artificial Sequence
  Description of Artificial Sequence: Synthetic oligonucleotide
acuuaaauaugguuaagac

SEQ ID NO: 2402180 - RNA, 19 nt, Artificial Sequence
  Description of Artificial Sequence: Synthetic oligonucleotide
aaauguuuguuacuauaac

SEQ ID NO: 2402181 - RNA, 19 nt, Artificial Sequence
  Description of Artificial Sequence: Synthetic oligonucleotide
aauuugguuggcuggaagg

SEQ ID NO: 2402182 - RNA, 19 nt, Artificial Sequence
  Description of Artificial Sequence: Synthetic oligonucleotide
aauuaagccuccaacuugc

SEQ ID NO: 2402183 - RNA, 19 nt, Artificial Sequence
  Description of Artificial Sequence: Synthetic oligonucleotide
aaucaaaacccacuacuuc

SEQ ID NO: 2402184 - RNA, 19 nt, Artificial Sequence
  Description of Artificial Sequence: Synthetic oligonucleotide
ucaaucaaaacccacuacu

SEQ ID NO: 2402185 - RNA, 19 nt, Artificial Sequence
  Description of Artificial Sequence: Synthetic oligonucleotide
uuaagaauauuuagagucc

SEQ ID NO: 2402186 - RNA, 19 nt, Artificial Sequence
  Description of Artificial Sequence: Synthetic oligonucleotide
uacuucagaaucaauagcu

SEQ ID NO: 2402187 - RNA, 19 nt, Artificial Sequence
  Description of Artificial Sequence: Synthetic oligonucleotide
cuguuaagaauauuuagag

SEQ ID NO: 2402188 - RNA, 19 nt, Artificial Sequence
  Description of Artificial Sequence: Synthetic oligonucleotide
uuaccuuuaagucuuuuga

SEQ ID NO: 2402189 - RNA, 19 nt, Artificial Sequence
  Description of Artificial Sequence: Synthetic oligonucleotide
uaacacuuaaauaugguua

SEQ ID NO: 2402190 - RNA, 19 nt, Artificial Sequence
  Description of Artificial Sequence: Synthetic oligonucleotide
uccaaucagagauuugugg

SEQ ID NO: 2402191 - RNA, 19 nt, Artificial Sequence
  Description of Artificial Sequence: Synthetic oligonucleotide
ugaagaucgcacaagcgag

SEQ ID NO: 2402192 - RNA, 19 nt, Artificial Sequence
  Description of Artificial Sequence: Synthetic oligonucleotide
aauagcaaguugcaaguga

SEQ ID NO: 2402193 - RNA, 19 nt, Artificial Sequence
  Description of Artificial Sequence: Synthetic oligonucleotide
aacacuuaaauaugguuaa

SEQ ID NO: 2402194 - RNA, 19 nt, Artificial Sequence
  Description of Artificial Sequence: Synthetic oligonucleotide
uuuguuacuauaacuucug

SEQ ID NO: 2402195 - RNA, 19 nt, Artificial Sequence
  Description of Artificial Sequence: Synthetic oligonucleotide
cucgaaugcagaaauuugg

SEQ ID NO: 2402196 - RNA, 19 nt, Artificial Sequence
  Description of Artificial Sequence: Synthetic oligonucleotide
cuuuugaugcauuuccugc

SEQ ID NO: 2402197 - RNA, 19 nt, Artificial Sequence
  Description of Artificial Sequence: Synthetic oligonucleotide
auaauaaggaauccaggca

SEQ ID NO: 2402198 - RNA, 19 nt, Artificial Sequence
  Description of Artificial Sequence: Synthetic oligonucleotide
uaaauaugguuaagacucg

SEQ ID NO: 2402199 - RNA, 19 nt, Artificial Sequence
  Description of Artificial Sequence: Synthetic oligonucleotide
gucaacucaaucaaaaccc

SEQ ID NO: 2402200 - RNA, 19 nt, Artificial Sequence
  Description of Artificial Sequence: Synthetic oligonucleotide
cuuaccgccagccaucucg

SEQ ID NO: 2402201 - RNA, 19 nt, Artificial Sequence
  Description of Artificial Sequence: Synthetic oligonucleotide
uguccuagauuucaggugu

SEQ ID NO: 2402202 - RNA, 19 nt, Artificial Sequence
  Description of Artificial Sequence: Synthetic oligonucleotide
aaacagucaacucaaucaa

SEQ ID NO: 2402203 - RNA, 19 nt, Artificial Sequence
  Description of Artificial Sequence: Synthetic oligonucleotide
agggguaauacgcuuuacc

SEQ ID NO: 2402204 - RNA, 19 nt, Artificial Sequence
  Description of Artificial Sequence: Synthetic oligonucleotide
uacuauaacuucugcauca

SEQ ID NO: 2402205 - RNA, 19 nt, Artificial Sequence
  Description of Artificial Sequence: Synthetic oligonucleotide
agcaauuguagccuugauc

SEQ ID NO: 2402206 - RNA, 19 nt, Artificial Sequence
  Description of Artificial Sequence: Synthetic oligonucleotide
aauuaaaauccaaacaguu

SEQ ID NO: 2402207 - RNA, 19 nt, Artificial Sequence
  Description of Artificial Sequence: Synthetic oligonucleotide
agcuguuaagaauauuuag

SEQ ID NO: 2402208 - RNA, 19 nt, Artificial Sequence
  Description of Artificial Sequence: Synthetic oligonucleotide
auacgcuuuaccuuuaagu

SEQ ID NO: 2402209 - RNA, 19 nt, Artificial Sequence
  Description of Artificial Sequence: Synthetic oligonucleotide
uacaaaaccaaauguuugu

SEQ ID NO: 2402210 - RNA, 19 nt, Artificial Sequence
  Description of Artificial Sequence: Synthetic oligonucleotide
gaaucaauagcuucuuuga

SEQ ID NO: 2402211 - RNA, 19 nt, Artificial Sequence
  Description of Artificial Sequence: Synthetic oligonucleotide
gauaugaccuuuauugagc

SEQ ID NO: 2402212 - RNA, 19 nt, Artificial Sequence
  Description of Artificial Sequence: Synthetic oligonucleotide
guccuuuccagccuuaccg

SEQ ID NO: 2402213 - RNA, 19 nt, Artificial Sequence
  Description of Artificial Sequence: Synthetic oligonucleotide
uguccuuucuuuccaauca

SEQ ID NO: 2402214 - RNA, 19 nt, Artificial Sequence
  Description of Artificial Sequence: Synthetic oligonucleotide
uacgcuuuaccuuuaaguc

SEQ ID NO: 2402215 - RNA, 19 nt, Artificial Sequence
  Description of Artificial Sequence: Synthetic oligonucleotide
ucaggugucgaugaauacg

SEQ ID NO: 2402216 - RNA, 19 nt, Artificial Sequence
  Description of Artificial Sequence: Synthetic oligonucleotide
agagauacaguccacugga

SEQ ID NO: 2402217 - RNA, 19 nt, Artificial Sequence
  Description of Artificial Sequence: Synthetic oligonucleotide
gcaauuguagccuugauca

SEQ ID NO: 2402218 - RNA, 19 nt, Artificial Sequence
  Description of Artificial Sequence: Synthetic oligonucleotide
uguuaagaauauuuagagu

SEQ ID NO: 2402219 - RNA, 19 nt, Artificial Sequence
  Description of Artificial Sequence: Synthetic oligonucleotide
aagagacgaggccaggcgg

SEQ ID NO: 2402220 - RNA, 19 nt, Artificial Sequence
  Description of Artificial Sequence: Synthetic oligonucleotide
uugagcuuauccaccagag

SEQ ID NO: 2402221 - RNA, 19 nt, Artificial Sequence
  Description of Artificial Sequence: Synthetic oligonucleotide
aauacgcuuuaccuuuaag

SEQ ID NO: 2402222 - RNA, 19 nt, Artificial Sequence
  Description of Artificial Sequence: Synthetic oligonucleotide
ugaucagagaguccaauuc

SEQ ID NO: 2402223 - RNA, 19 nt, Artificial Sequence
  Description of Artificial Sequence: Synthetic oligonucleotide
cagaaauuugguuggcugg

SEQ ID NO: 2402224 - RNA, 19 nt, Artificial Sequence
  Description of Artificial Sequence: Synthetic oligonucleotide
ucuuuugaugcauuuccug

SEQ ID NO: 2402225 - RNA, 19 nt, Artificial Sequence
  Description of Artificial Sequence: Synthetic oligonucleotide
uggacagcuguuaagaaua

SEQ ID NO: 2402226 - RNA, 19 nt, Artificial Sequence
  Description of Artificial Sequence: Synthetic oligonucleotide
ugagauaauaaggaaucca

SEQ ID NO: 2402227 - RNA, 19 nt, Artificial Sequence
  Description of Artificial Sequence: Synthetic oligonucleotide
ugggaugacaccaccacca

SEQ ID NO: 2402228 - RNA, 19 nt, Artificial Sequence
  Description of Artificial Sequence: Synthetic oligonucleotide
uuagacagucuucuguugu

SEQ ID NO: 2402229 - RNA, 19 nt, Artificial Sequence
  Description of Artificial Sequence: Synthetic oligonucleotide
aaaacccacuacuucagaa

SEQ ID NO: 2402230 - RNA, 19 nt, Artificial Sequence
  Description of Artificial Sequence: Synthetic oligonucleotide
auuugguuggcuggaaggc

SEQ ID NO: 2402231 - RNA, 19 nt, Artificial Sequence
  Description of Artificial Sequence: Synthetic oligonucleotide
ucuguuguccuuucuuucc

SEQ ID NO: 2402232 - RNA, 19 nt, Artificial Sequence
  Description of Artificial Sequence: Synthetic oligonucleotide
uguuuguuacuauaacuuc

SEQ ID NO: 2402233 - RNA, 19 nt, Artificial Sequence
  Description of Artificial Sequence: Synthetic oligonucleotide
agugacgagggguaauacg

SEQ ID NO: 2402234 - RNA, 19 nt, Artificial Sequence
  Description of Artificial Sequence: Synthetic oligonucleotide
ugcgcuauacacagcggcg

SEQ ID NO: 2402235 - RNA, 19 nt, Artificial Sequence
  Description of Artificial Sequence: Synthetic oligonucleotide
auaaggaauccaggcaucc

SEQ ID NO: 2402236 - RNA, 19 nt, Artificial Sequence
  Description of Artificial Sequence: Synthetic oligonucleotide
uccugagauaauaaggaau

SEQ ID NO: 2402237 - RNA, 19 nt, Artificial Sequence
  Description of Artificial Sequence: Synthetic oligonucleotide
uccaacuugcucaaauaga

SEQ ID NO: 2402238 - RNA, 19 nt, Artificial Sequence
  Description of Artificial Sequence: Synthetic oligonucleotide
ugcugaagaucgcacaagc

SEQ ID NO: 2402239 - RNA, 19 nt, Artificial Sequence
  Description of Artificial Sequence: Synthetic oligonucleotide
auggcugcgcuauacacag

SEQ ID NO: 2402240 - RNA, 19 nt, Artificial Sequence
  Description of Artificial Sequence: Synthetic oligonucleotide
ucaacucaaucaaaaccca

SEQ ID NO: 2402241 - RNA, 19 nt, Artificial Sequence
  Description of Artificial Sequence: Synthetic oligonucleotide
aaucagagauuuguggaug

SEQ ID NO: 2402242 - RNA, 19 nt, Artificial Sequence
  Description of Artificial Sequence: Synthetic oligonucleotide
aauucuucauccccgcgaa

SEQ ID NO: 2402243 - RNA, 19 nt, Artificial Sequence
  Description of Artificial Sequence: Synthetic oligonucleotide
uuugaugcauuuccugcca

SEQ ID NO: 2402244 - RNA, 19 nt, Artificial Sequence
  Description of Artificial Sequence: Synthetic oligonucleotide
agauaauaaggaauccagg

SEQ ID NO: 2402245 - RNA, 19 nt, Artificial Sequence
  Description of Artificial Sequence: Synthetic oligonucleotide
aauuguagccuugaucaga

SEQ ID NO: 2402246 - RNA, 19 nt, Artificial Sequence
  Description of Artificial Sequence: Synthetic oligonucleotide
ucgaaugcagaaauuuggu

SEQ ID NO: 2402247 - RNA, 19 nt, Artificial Sequence
  Description of Artificial Sequence: Synthetic oligonucleotide
uccuuagacagucuucugu

SEQ ID NO: 2402248 - RNA, 19 nt, Artificial Sequence
  Description of Artificial Sequence: Synthetic oligonucleotide
ucucggaccgugcugaaga

SEQ ID NO: 2402249 - RNA, 19 nt, Artificial Sequence
  Description of Artificial Sequence: Synthetic oligonucleotide
gaucgcacaagcgagcaag

SEQ ID NO: 2402250 - RNA, 19 nt, Artificial Sequence
  Description of Artificial Sequence: Synthetic oligonucleotide
cuacuucagaaucaauagc

SEQ ID NO: 2402251 - RNA, 19 nt, Artificial Sequence
  Description of Artificial Sequence: Synthetic oligonucleotide
agaauauuuagaguccuga

SEQ ID NO: 2402252 - RNA, 19 nt, Artificial Sequence
  Description of Artificial Sequence: Synthetic oligonucleotide
auaugguuaagacucgaau

SEQ ID NO: 2402253 - RNA, 19 nt, Artificial Sequence
  Description of Artificial Sequence: Synthetic oligonucleotide
uuucaggugucgaugaaua

SEQ ID NO: 2402254 - RNA, 19 nt, Artificial Sequence
  Description of Artificial Sequence: Synthetic oligonucleotide
auuuagaguccugagauaa

SEQ ID NO: 2402255 - RNA, 19 nt, Artificial Sequence
  Description of Artificial Sequence: Synthetic oligonucleotide
aauacggcccacagggaac

SEQ ID NO: 2402256 - RNA, 19 nt, Artificial Sequence
  Description of Artificial Sequence: Synthetic oligonucleotide
ucuaguaccucugcgguga

SEQ ID NO: 2402257 - RNA, 19 nt, Artificial Sequence
  Description of Artificial Sequence: Synthetic oligonucleotide
auaugaccuuuauugagcu

SEQ ID NO: 2402258 - RNA, 19 nt, Artificial Sequence
  Description of Artificial Sequence: Synthetic oligonucleotide
ucugcggugagguacucca

SEQ ID NO: 2402259 - RNA, 19 nt, Artificial Sequence
  Description of Artificial Sequence: Synthetic oligonucleotide
gaaucaccgacacuggaca

SEQ ID NO: 2402260 - RNA, 19 nt, Artificial Sequence
  Description of Artificial Sequence: Synthetic oligonucleotide
auucuaguaccucugcggu

SEQ ID NO: 2402261 - RNA, 19 nt, Artificial Sequence
  Description of Artificial Sequence: Synthetic oligonucleotide
ggauaugaccuuuauugag

SEQ ID NO: 2402262 - RNA, 19 nt, Artificial Sequence
  Description of Artificial Sequence: Synthetic oligonucleotide
aagcgagcaagagacgagg

SEQ ID NO: 2402263 - RNA, 19 nt, Artificial Sequence
  Description of Artificial Sequence: Synthetic oligonucleotide
caauucuaguaccucugcg

SEQ ID NO: 2402264 - RNA, 19 nt, Artificial Sequence
  Description of Artificial Sequence: Synthetic oligonucleotide
uagcaaguugcaagugacg

SEQ ID NO: 2402265 - RNA, 19 nt, Artificial Sequence
  Description of Artificial Sequence: Synthetic oligonucleotide
uuaagacucgaaugcagaa

SEQ ID NO: 2402266 - RNA, 19 nt, Artificial Sequence
  Description of Artificial Sequence: Synthetic oligonucleotide
uuguuacuauaacuucugc

SEQ ID NO: 2402267 - RNA, 19 nt, Artificial Sequence
  Description of Artificial Sequence: Synthetic oligonucleotide
uagauuucaggugucgaug

SEQ ID NO: 2402268 - RNA, 19 nt, Artificial Sequence
  Description of Artificial Sequence: Synthetic oligonucleotide
gaaaccgccuuugucuugg

SEQ ID NO: 2402269 - RNA, 19 nt, Artificial Sequence
  Description of Artificial Sequence: Synthetic oligonucleotide
aaucaccgacacuggacag

SEQ ID NO: 2402270 - RNA, 19 nt, Artificial Sequence
  Description of Artificial Sequence: Synthetic oligonucleotide
gcgaauagcaaguugcaag

SEQ ID NO: 2402271 - RNA, 19 nt, Artificial Sequence
  Description of Artificial Sequence: Synthetic oligonucleotide
uuccaaucagagauuugug

SEQ ID NO: 2402272 - RNA, 19 nt, Artificial Sequence
  Description of Artificial Sequence: Synthetic oligonucleotide
aaugucuguacaaaaccaa

SEQ ID NO: 2402273 - RNA, 19 nt, Artificial Sequence
  Description of Artificial Sequence: Synthetic oligonucleotide
agauuucaggugucgauga

SEQ ID NO: 2402274 - RNA, 19 nt, Artificial Sequence
  Description of Artificial Sequence: Synthetic oligonucleotide
uuggcuggaaggcuaauua

SEQ ID NO: 2402275 - RNA, 19 nt, Artificial Sequence
  Description of Artificial Sequence: Synthetic oligonucleotide
ugcaagccggcucucugcg

SEQ ID NO: 2402276 - RNA, 19 nt, Artificial Sequence
  Description of Artificial Sequence: Synthetic oligonucleotide
gugacgagggguaauacgc

SEQ ID NO: 2402277 - RNA, 19 nt, Artificial Sequence
  Description of Artificial Sequence: Synthetic oligonucleotide
ucugcgagcgggaaaccgc

SEQ ID NO: 2402278 - RNA, 19 nt, Artificial Sequence
  Description of Artificial Sequence: Synthetic oligonucleotide
aaccgccuuugucuuggcc

SEQ ID NO: 2402279 - RNA, 19 nt, Artificial Sequence
  Description of Artificial Sequence: Synthetic oligonucleotide
acuauaacuucugcaucac

SEQ ID NO: 2402280 - RNA, 19 nt, Artificial Sequence
  Description of Artificial Sequence: Synthetic oligonucleotide
acagcgagaucccggcgcc

SEQ ID NO: 2402281 - RNA, 19 nt, Artificial Sequence
  Description of Artificial Sequence: Synthetic oligonucleotide
acgcuuuaccuuuaagucu

SEQ ID NO: 2402282 - RNA, 19 nt, Artificial Sequence
  Description of Artificial Sequence: Synthetic oligonucleotide
cugaagaucgcacaagcga

SEQ ID NO: 2402283 - RNA, 19 nt, Artificial Sequence
  Description of Artificial Sequence: Synthetic oligonucleotide
cuauacacagcggcggucg

SEQ ID NO: 2402284 - RNA, 19 nt, Artificial Sequence
  Description of Artificial Sequence: Synthetic oligonucleotide
acaguaacacuuaaauaug

SEQ ID NO: 2402285 - RNA, 19 nt, Artificial Sequence
  Description of Artificial Sequence: Synthetic oligonucleotide
caagagacgaggccaggcg

SEQ ID NO: 2402286 - RNA, 19 nt, Artificial Sequence
  Description of Artificial Sequence: Synthetic oligonucleotide
aaauaugguuaagacucga

SEQ ID NO: 2402287 - RNA, 19 nt, Artificial Sequence
  Description of Artificial Sequence: Synthetic oligonucleotide
ccugagauaauaaggaauc

SEQ ID NO: 2402288 - RNA, 19 nt, Artificial Sequence
  Description of Artificial Sequence: Synthetic oligonucleotide
cuugcucaaauagaauuac

SEQ ID NO: 2402289 - RNA, 19 nt, Artificial Sequence
  Description of Artificial Sequence: Synthetic oligonucleotide
uccggaguccuuuccagcc

SEQ ID NO: 2402290 - RNA, 19 nt, Artificial Sequence
  Description of Artificial Sequence: Synthetic oligonucleotide
ugccaauucuaguaccucu

SEQ ID NO: 2402291 - RNA, 19 nt, Artificial Sequence
  Description of Artificial Sequence: Synthetic oligonucleotide
ugugugggaugacaccacc

SEQ ID NO: 2402292 - RNA, 19 nt, Artificial Sequence
  Description of Artificial Sequence: Synthetic oligonucleotide
accagaguggaaauaaugu

SEQ ID NO: 2402293 - RNA, 19 nt, Artificial Sequence
  Description of Artificial Sequence: Synthetic oligonucleotide
agcuuauccaccagagugg

SEQ ID NO: 2402294 - RNA, 19 nt, Artificial Sequence
  Description of Artificial Sequence: Synthetic oligonucleotide
ucagagaguccaauucuuc

SEQ ID NO: 2402295 - RNA, 19 nt, Artificial Sequence
  Description of Artificial Sequence: Synthetic oligonucleotide
ugucgaugaauacggccca

SEQ ID NO: 2402296 - RNA, 19 nt, Artificial Sequence
  Description of Artificial Sequence: Synthetic oligonucleotide
uuaccgccagccaucucgg

SEQ ID NO: 2402297 - RNA, 19 nt, Artificial Sequence
  Description of Artificial Sequence: Synthetic oligonucleotide
uaccuuuaagucuuuugau

SEQ ID NO: 2402298 - RNA, 19 nt, Artificial Sequence
  Description of Artificial Sequence: Synthetic oligonucleotide
agcaaguugcaagugacga

SEQ ID NO: 2402299 - RNA, 19 nt, Artificial Sequence
  Description of Artificial Sequence: Synthetic oligonucleotide
aagugacgagggguaauac

SEQ ID NO: 2402300 - RNA, 19 nt, Artificial Sequence
  Description of Artificial Sequence: Synthetic oligonucleotide
aguugcaagugacgagggg

SEQ ID NO: 2402301 - RNA, 19 nt, Artificial Sequence
  Description of Artificial Sequence: Synthetic oligonucleotide
uuugggauaugaccuuuau

SEQ ID NO: 2402302 - RNA, 19 nt, Artificial Sequence
  Description of Artificial Sequence: Synthetic oligonucleotide
uccaauucuucauccccgc

SEQ ID NO: 2402303 - RNA, 19 nt, Artificial Sequence
  Description of Artificial Sequence: Synthetic oligonucleotide
aagaauauuuagaguccug

SEQ ID NO: 2402304 - RNA, 19 nt, Artificial Sequence
  Description of Artificial Sequence: Synthetic oligonucleotide
uuagaguccugagauaaua

SEQ ID NO: 2402305 - RNA, 19 nt, Artificial Sequence
  Description of Artificial Sequence: Synthetic oligonucleotide
ggcugcgcuauacacagcg

SEQ ID NO: 2402306 - RNA, 19 nt, Artificial Sequence
  Description of Artificial Sequence: Synthetic oligonucleotide
cacuacuucagaaucaaua

SEQ ID NO: 2402307 - RNA, 19 nt, Artificial Sequence
  Description of Artificial Sequence: Synthetic oligonucleotide
augaccuuuauugagcuua

SEQ ID NO: 2402308 - RNA, 19 nt, Artificial Sequence
  Description of Artificial Sequence: Synthetic oligonucleotide
agauacaguccacuggaau

SEQ ID NO: 2402309 - RNA, 19 nt, Artificial Sequence
  Description of Artificial Sequence: Synthetic oligonucleotide
aucagagauuuguggaugu

SEQ ID NO: 2402310 - RNA, 19 nt, Artificial Sequence
  Description of Artificial Sequence: Synthetic oligonucleotide
aucaccgacacuggacagc

SEQ ID NO: 2402311 - RNA, 19 nt, Artificial Sequence
  Description of Artificial Sequence: Synthetic oligonucleotide
aaguugcaagugacgaggg

SEQ ID NO: 2402312 - RNA, 19 nt, Artificial Sequence
  Description of Artificial Sequence: Synthetic oligonucleotide
uccuagauuucaggugucg

SEQ ID NO: 2402313 - RNA, 19 nt, Artificial Sequence
  Description of Artificial Sequence: Synthetic oligonucleotide
cuuagacagucuucuguug

SEQ ID NO: 2402314 - RNA, 19 nt, Artificial Sequence
  Description of Artificial Sequence: Synthetic oligonucleotide
aguaccucugcggugaggu

SEQ ID NO: 2402315 - RNA, 19 nt, Artificial Sequence
  Description of Artificial Sequence: Synthetic oligonucleotide
cuuucuuuccaaucagaga

SEQ ID NO: 2402316 - RNA, 19 nt, Artificial Sequence
  Description of Artificial Sequence: Synthetic oligonucleotide
cugcgcuauacacagcggc

SEQ ID NO: 2402317 - RNA, 19 nt, Artificial Sequence
  Description of Artificial Sequence: Synthetic oligonucleotide
aauaugguuaagacucgaa

SEQ ID NO: 2402318 - RNA, 19 nt, Artificial Sequence
  Description of Artificial Sequence: Synthetic oligonucleotide
gaguccaauucuucauccc

SEQ ID NO: 2402319 - RNA, 19 nt, Artificial Sequence
  Description of Artificial Sequence: Synthetic oligonucleotide
accgccagccaucucggac

SEQ ID NO: 2402320 - RNA, 19 nt, Artificial Sequence
  Description of Artificial Sequence: Synthetic oligonucleotide
uuccugccaauucuaguac

SEQ ID NO: 2402321 - RNA, 19 nt, Artificial Sequence
  Description of Artificial Sequence: Synthetic oligonucleotide
ugagcuuauccaccagagu

SEQ ID NO: 2402322 - RNA, 19 nt, Artificial Sequence
  Description of Artificial Sequence: Synthetic oligonucleotide
uccuuuccagccuuaccgc

SEQ ID NO: 2402323 - RNA, 19 nt, Artificial Sequence
  Description of Artificial Sequence: Synthetic oligonucleotide
agaaauuugguuggcugga

SEQ ID NO: 2402324 - RNA, 19 nt, Artificial Sequence
  Description of Artificial Sequence: Synthetic oligonucleotide
uuaagccuccaacuugcuc

SEQ ID NO: 2402325 - RNA, 19 nt, Artificial Sequence
  Description of Artificial Sequence: Synthetic oligonucleotide
ugucuuggccuuuccggag

SEQ ID NO: 2402326 - RNA, 19 nt, Artificial Sequence
  Description of Artificial Sequence: Synthetic oligonucleotide
gaucagagaguccaauucu

SEQ ID NO: 2402327 - RNA, 19 nt, Artificial Sequence
  Description of Artificial Sequence: Synthetic oligonucleotide
ggugucgaugaauacggcc

SEQ ID NO: 2402328 - RNA, 19 nt, Artificial Sequence
  Description of Artificial Sequence: Synthetic oligonucleotide
acaagcgagcaagagacga

SEQ ID NO: 2402329 - RNA, 19 nt, Artificial Sequence
  Description of Artificial Sequence: Synthetic oligonucleotide
gaauacggcccacagggaa

SEQ ID NO: 2402330 - RNA, 19 nt, Artificial Sequence
  Description of Artificial Sequence: Synthetic oligonucleotide
ggcuaauuaagccuccaac

SEQ ID NO: 2402331 - RNA, 19 nt, Artificial Sequence
  Description of Artificial Sequence: Synthetic oligonucleotide
uaagacucgaaugcagaaa

SEQ ID NO: 2402332 - RNA, 19 nt, Artificial Sequence
  Description of Artificial Sequence: Synthetic oligonucleotide
uccugccaauucuaguacc

SEQ ID NO: 2402333 - RNA, 19 nt, Artificial Sequence
  Description of Artificial Sequence: Synthetic oligonucleotide
gacgaggccaggcggacgc

SEQ ID NO: 2402334 - RNA, 19 nt, Artificial Sequence
  Description of Artificial Sequence: Synthetic oligonucleotide
uugaucagagaguccaauu

SEQ ID NO: 2402335 - RNA, 19 nt, Artificial Sequence
  Description of Artificial Sequence: Synthetic oligonucleotide
caauuguagccuugaucag

SEQ ID NO: 2402336 - RNA, 19 nt, Artificial Sequence
  Description of Artificial Sequence: Synthetic oligonucleotide
gcuguuaagaauauuuaga

SEQ ID NO: 2402337 - RNA, 19 nt, Artificial Sequence
  Description of Artificial Sequence: Synthetic oligonucleotide
uucuaguaccucugcggug

SEQ ID NO: 2402338 - RNA, 19 nt, Artificial Sequence
  Description of Artificial Sequence: Synthetic oligonucleotide
cagaguggaaauaaugucu

SEQ ID NO: 2402339 - RNA, 19 nt, Artificial Sequence
  Description of Artificial Sequence: Synthetic oligonucleotide
uuuagaguccugagauaau

SEQ ID NO: 2402340 - RNA, 19 nt, Artificial Sequence
  Description of Artificial Sequence: Synthetic oligonucleotide
gaauagcaaguugcaagug

SEQ ID NO: 2402341 - RNA, 19 nt, Artificial Sequence
  Description of Artificial Sequence: Synthetic oligonucleotide
guuaagacucgaaugcaga

SEQ ID NO: 2402342 - RNA, 19 nt, Artificial Sequence
  Description of Artificial Sequence: Synthetic oligonucleotide
ugguuaagacucgaaugca

SEQ ID NO: 2402343 - RNA, 19 nt, Artificial Sequence
  Description of Artificial Sequence: Synthetic oligonucleotide
gaagaucgcacaagcgagc

SEQ ID NO: 2402344 - RNA, 19 nt, Artificial Sequence
  Description of Artificial Sequence: Synthetic oligonucleotide
aaaccgccuuugucuuggc

SEQ ID NO: 2402345 - RNA, 19 nt, Artificial Sequence
  Description of Artificial Sequence: Synthetic oligonucleotide
cccgcgaauagcaaguugc

SEQ ID NO: 2402346 - RNA, 19 nt, Artificial Sequence
  Description of Artificial Sequence: Synthetic oligonucleotide
acacuggacagcuguuaag

SEQ ID NO: 2402347 - RNA, 19 nt, Artificial Sequence
  Description of Artificial Sequence: Synthetic oligonucleotide
ugacgagggguaauacgcu

SEQ ID NO: 2402348 - RNA, 19 nt, Artificial Sequence
  Description of Artificial Sequence: Synthetic oligonucleotide
cacagcgagaucccggcgc

SEQ ID NO: 2402349 - RNA, 19 nt, Artificial Sequence
  Description of Artificial Sequence: Synthetic oligonucleotide
caagcgagcaagagacgag

SEQ ID NO: 2402350 - RNA, 19 nt, Artificial Sequence
  Description of Artificial Sequence: Synthetic oligonucleotide
aagccggcucucugcgagc

SEQ ID NO: 2402351 - RNA, 19 nt, Artificial Sequence
  Description of Artificial Sequence: Synthetic oligonucleotide
cuggaaucaccgacacugg

SEQ ID NO: 2402352 - RNA, 19 nt, Artificial Sequence
  Description of Artificial Sequence: Synthetic oligonucleotide
uugcaagugacgaggggua

SEQ ID NO: 2402353 - RNA, 19 nt, Artificial Sequence
  Description of Artificial Sequence: Synthetic oligonucleotide
caauucuucauccccgcga

SEQ ID NO: 2402354 - RNA, 19 nt, Artificial Sequence
  Description of Artificial Sequence: Synthetic oligonucleotide
uucaggugucgaugaauac

SEQ ID NO: 2402355 - RNA, 19 nt, Artificial Sequence
  Description of Artificial Sequence: Synthetic oligonucleotide
uugguuggcuggaaggcua

SEQ ID NO: 2402356 - RNA, 19 nt, Artificial Sequence
  Description of Artificial Sequence: Synthetic oligonucleotide
uugggauaugaccuuuauu

SEQ ID NO: 2402357 - RNA, 19 nt, Artificial Sequence
  Description of Artificial Sequence: Synthetic oligonucleotide
uaauacgcuuuaccuuuaa

SEQ ID NO: 2402358 - RNA, 19 nt, Artificial Sequence
  Description of Artificial Sequence: Synthetic oligonucleotide
caagccggcucucugcgag

SEQ ID NO: 2402359 - RNA, 19 nt, Artificial Sequence
  Description of Artificial Sequence: Synthetic oligonucleotide
caggcggacgcacagcgag

SEQ ID NO: 2402360 - RNA, 19 nt, Artificial Sequence
  Description of Artificial Sequence: Synthetic oligonucleotide
guccacuggaaucaccgac

SEQ ID NO: 2402361 - RNA, 19 nt, Artificial Sequence
  Description of Artificial Sequence: Synthetic oligonucleotide
gguuaagacucgaaugcag

SEQ ID NO: 2402362 - RNA, 19 nt, Artificial Sequence
  Description of Artificial Sequence: Synthetic oligonucleotide
agucuucuguuguccuuuc

SEQ ID NO: 2402363 - RNA, 19 nt, Artificial Sequence
  Description of Artificial Sequence: Synthetic oligonucleotide
gcuaauuaagccuccaacu

SEQ ID NO: 2402364 - RNA, 19 nt, Artificial Sequence
  Description of Artificial Sequence: Synthetic oligonucleotide
ugaauacggcccacaggga

SEQ ID NO: 2402365 - RNA, 19 nt, Artificial Sequence
  Description of Artificial Sequence: Synthetic oligonucleotide
cauccccgcgaauagcaag

SEQ ID NO: 2402366 - RNA, 19 nt, Artificial Sequence
  Description of Artificial Sequence: Synthetic oligonucleotide
guuuguuacuauaacuucu

SEQ ID NO: 2402367 - RNA, 19 nt, Artificial Sequence
  Description of Artificial Sequence: Synthetic oligonucleotide
ucaccgacacuggacagcu

SEQ ID NO: 2402368 - RNA, 19 nt, Artificial Sequence
  Description of Artificial Sequence: Synthetic oligonucleotide
uauacacagcggcggucgc

SEQ ID NO: 2402369 - RNA, 19 nt, Artificial Sequence
  Description of Artificial Sequence: Synthetic oligonucleotide
cuuuccaaucagagauuug

SEQ ID NO: 2402370 - RNA, 19 nt, Artificial Sequence
  Description of Artificial Sequence: Synthetic oligonucleotide
uggcuggaaggcuaauuaa

SEQ ID NO: 2402371 - RNA, 19 nt, Artificial Sequence
  Description of Artificial Sequence: Synthetic oligonucleotide
ugcagaaauuugguuggcu

SEQ ID NO: 2402372 - RNA, 19 nt, Artificial Sequence
  Description of Artificial Sequence: Synthetic oligonucleotide
agcgagcaagagacgaggc

SEQ ID NO: 2402373 - RNA, 19 nt, Artificial Sequence
  Description of Artificial Sequence: Synthetic oligonucleotide
uuccggaguccuuuccagc

SEQ ID NO: 2402374 - RNA, 19 nt, Artificial Sequence
  Description of Artificial Sequence: Synthetic oligonucleotide
acuugcucaaauagaauua

SEQ ID NO: 2402375 - RNA, 19 nt, Artificial Sequence
  Description of Artificial Sequence: Synthetic oligonucleotide
gugggaugacaccaccacc

SEQ ID NO: 2402376 - RNA, 19 nt, Artificial Sequence
  Description of Artificial Sequence: Synthetic oligonucleotide
uucuuuccaaucagagauu

SEQ ID NO: 2402377 - RNA, 19 nt, Artificial Sequence
  Description of Artificial Sequence: Synthetic oligonucleotide
gcucaaauagaauuacaaa

SEQ ID NO: 2402378 - RNA, 19 nt, Artificial Sequence
  Description of Artificial Sequence: Synthetic oligonucleotide
uacacagcggcggucgcgc

SEQ ID NO: 2402379 - RNA, 19 nt, Artificial Sequence
  Description of Artificial Sequence: Synthetic oligonucleotide
aaggcuaauuaagccucca

SEQ ID NO: 2402380 - RNA, 19 nt, Artificial Sequence
  Description of Artificial Sequence: Synthetic oligonucleotide
gcuggaaggcuaauuaagc

SEQ ID NO: 2402381 - RNA, 19 nt, Artificial Sequence
  Description of Artificial Sequence: Synthetic oligonucleotide
cugcgagcgggaaaccgcc

SEQ ID NO: 2402382 - RNA, 19 nt, Artificial Sequence
  Description of Artificial Sequence: Synthetic oligonucleotide
gaauccaggcauccuuaga

SEQ ID NO: 2402383 - RNA, 19 nt, Artificial Sequence
  Description of Artificial Sequence: Synthetic oligonucleotide
cggaccgugcugaagaucg

SEQ ID NO: 2402384 - RNA, 19 nt, Artificial Sequence
  Description of Artificial Sequence: Synthetic oligonucleotide
ccagaguggaaauaauguc

SEQ ID NO: 2402385 - RNA, 19 nt, Artificial Sequence
  Description of Artificial Sequence: Synthetic oligonucleotide
ccaaucagagauuugugga

SEQ ID NO: 2402386 - RNA, 19 nt, Artificial Sequence
  Description of Artificial Sequence: Synthetic oligonucleotide
gguaauacgcuuuaccuuu

SEQ ID NO: 2402387 - RNA, 19 nt, Artificial Sequence
  Description of Artificial Sequence: Synthetic oligonucleotide
cacaagcgagcaagagacg

SEQ ID NO: 2402388 - RNA, 19 nt, Artificial Sequence
  Description of Artificial Sequence: Synthetic oligonucleotide
ggcuggaaggcuaauuaag

SEQ ID NO: 2402389 - RNA, 19 nt, Artificial Sequence
  Description of Artificial Sequence: Synthetic oligonucleotide
uaaggaauccaggcauccu

SEQ ID NO: 2402390 - RNA, 19 nt, Artificial Sequence
  Description of Artificial Sequence: Synthetic oligonucleotide
cuguacaaaaccaaauguu

SEQ ID NO: 2402391 - RNA, 19 nt, Artificial Sequence
  Description of Artificial Sequence: Synthetic oligonucleotide
cuaauuaagccuccaacuu

SEQ ID NO: 2402392 - RNA, 19 nt, Artificial Sequence
  Description of Artificial Sequence: Synthetic oligonucleotide
ucgaugaauacggcccaca

SEQ ID NO: 2402393 - RNA, 19 nt, Artificial Sequence
  Description of Artificial Sequence: Synthetic oligonucleotide
cagggaacugcaagccggc

SEQ ID NO: 2402394 - RNA, 19 nt, Artificial Sequence
  Description of Artificial Sequence: Synthetic oligonucleotide
auccuuagacagucuucug

SEQ ID NO: 2402395 - RNA, 19 nt, Artificial Sequence
  Description of Artificial Sequence: Synthetic oligonucleotide
accgugcugaagaucgcac

SEQ ID NO: 2402396 - RNA, 19 nt, Artificial Sequence
  Description of Artificial Sequence: Synthetic oligonucleotide
uaguuugggauaugaccuu

SEQ ID NO: 2402397 - RNA, 19 nt, Artificial Sequence
  Description of Artificial Sequence: Synthetic oligonucleotide
guugcaagugacgaggggu

SEQ ID NO: 2402398 - RNA, 19 nt, Artificial Sequence
  Description of Artificial Sequence: Synthetic oligonucleotide
cacuggacagcuguuaaga

SEQ ID NO: 2402399 - RNA, 19 nt, Artificial Sequence
  Description of Artificial Sequence: Synthetic oligonucleotide
gcugaagaucgcacaagcg

SEQ ID NO: 2402400 - RNA, 19 nt, Artificial Sequence
  Description of Artificial Sequence: Synthetic oligonucleotide
ucgcacaagcgagcaagag

SEQ ID NO: 2402401 - RNA, 19 nt, Artificial Sequence
  Description of Artificial Sequence: Synthetic oligonucleotide
aggauggcugcgcuauaca

SEQ ID NO: 2402402 - RNA, 19 nt, Artificial Sequence
  Description of Artificial Sequence: Synthetic oligonucleotide
gggguaauacgcuuuaccu

SEQ ID NO: 2402403 - RNA, 19 nt, Artificial Sequence
  Description of Artificial Sequence: Synthetic oligonucleotide
auacacagcggcggucgcg

SEQ ID NO: 2402404 - RNA, 19 nt, Artificial Sequence
  Description of Artificial Sequence: Synthetic oligonucleotide
agaucccggcgcccacucc

SEQ ID NO: 2402405 - RNA, 19 nt, Artificial Sequence
  Description of Artificial Sequence: Synthetic oligonucleotide
cucugcgagcgggaaaccg

SEQ ID NO: 2402406 - RNA, 19 nt, Artificial Sequence
  Description of Artificial Sequence: Synthetic oligonucleotide
ggcggucgcgcccacacgg

SEQ ID NO: 2402407 - RNA, 19 nt, Artificial Sequence
  Description of Artificial Sequence: Synthetic oligonucleotide
cuuuccggaguccuuucca

SEQ ID NO: 2402408 - RNA, 19 nt, Artificial Sequence
  Description of Artificial Sequence: Synthetic oligonucleotide
ggaaucaccgacacuggac

SEQ ID NO: 2402409 - RNA, 19 nt, Artificial Sequence
  Description of Artificial Sequence: Synthetic oligonucleotide
gacgcacagcgagaucccg

SEQ ID NO: 2402410 - RNA, 19 nt, Artificial Sequence
  Description of Artificial Sequence: Synthetic oligonucleotide
aguccacuggaaucaccga

SEQ ID NO: 2402411 - RNA, 19 nt, Artificial Sequence
  Description of Artificial Sequence: Synthetic oligonucleotide
ucuuggccuuuccggaguc

SEQ ID NO: 2402412 - RNA, 19 nt, Artificial Sequence
  Description of Artificial Sequence: Synthetic oligonucleotide
cuucauccccgcgaauagc

SEQ ID NO: 2402413 - RNA, 19 nt, Artificial Sequence
  Description of Artificial Sequence: Synthetic oligonucleotide
gacucgaaugcagaaauuu

SEQ ID NO: 2402414 - RNA, 19 nt, Artificial Sequence
  Description of Artificial Sequence: Synthetic oligonucleotide
acuccaggauggcugcgcu

SEQ ID NO: 2402415 - RNA, 19 nt, Artificial Sequence
  Description of Artificial Sequence: Synthetic oligonucleotide
ccaauucuaguaccucugc

SEQ ID NO: 2402416 - RNA, 19 nt, Artificial Sequence
  Description of Artificial Sequence: Synthetic oligonucleotide
ucauccccgcgaauagcaa

SEQ ID NO: 2402417 - RNA, 19 nt, Artificial Sequence
  Description of Artificial Sequence: Synthetic oligonucleotide
uaugaccuuuauugagcuu

SEQ ID NO: 2402418 - RNA, 19 nt, Artificial Sequence
  Description of Artificial Sequence: Synthetic oligonucleotide
gccaggcggacgcacagcg

SEQ ID NO: 2402419 - RNA, 19 nt, Artificial Sequence
  Description of Artificial Sequence: Synthetic oligonucleotide
agccuuaccgccagccauc

SEQ ID NO: 2402420 - RNA, 19 nt, Artificial Sequence
  Description of Artificial Sequence: Synthetic oligonucleotide
aggugucgaugaauacggc

SEQ ID NO: 2402421 - RNA, 19 nt, Artificial Sequence
  Description of Artificial Sequence: Synthetic oligonucleotide
cuagauuucaggugucgau

SEQ ID NO: 2402422 - RNA, 19 nt, Artificial Sequence
  Description of Artificial Sequence: Synthetic oligonucleotide
uggcugguuguccuagauu

SEQ ID NO: 2402423 - RNA, 19 nt, Artificial Sequence
  Description of Artificial Sequence: Synthetic oligonucleotide
ugguuggcuggaaggcuaa

SEQ ID NO: 2402424 - RNA, 19 nt, Artificial Sequence
  Description of Artificial Sequence: Synthetic oligonucleotide
agccaucucggaccgugcu

SEQ ID NO: 2402425 - RNA, 19 nt, Artificial Sequence
  Description of Artificial Sequence: Synthetic oligonucleotide
agccuugaucagagagucc

SEQ ID NO: 2402426 - RNA, 19 nt, Artificial Sequence
  Description of Artificial Sequence: Synthetic oligonucleotide
cauccuuagacagucuucu

SEQ ID NO: 2402427 - RNA, 19 nt, Artificial Sequence
  Description of Artificial Sequence: Synthetic oligonucleotide
gaaauuugguuggcuggaa

SEQ ID NO: 2402428 - RNA, 19 nt, Artificial Sequence
  Description of Artificial Sequence: Synthetic oligonucleotide
caaucagagauuuguggau

SEQ ID NO: 2402429 - RNA, 19 nt, Artificial Sequence
  Description of Artificial Sequence: Synthetic oligonucleotide
uaguaccucugcggugagg

SEQ ID NO: 2402430 - RNA, 19 nt, Artificial Sequence
  Description of Artificial Sequence: Synthetic oligonucleotide
ggaugacaccaccaccagc

SEQ ID NO: 2402431 - RNA, 19 nt, Artificial Sequence
  Description of Artificial Sequence: Synthetic oligonucleotide
agcaagagacgaggccagg

SEQ ID NO: 2402432 - RNA, 19 nt, Artificial Sequence
  Description of Artificial Sequence: Synthetic oligonucleotide
caggauggcugcgcuauac

SEQ ID NO: 2402433 - RNA, 19 nt, Artificial Sequence
  Description of Artificial Sequence: Synthetic oligonucleotide
auacggcccacagggaacu

SEQ ID NO: 2402434 - RNA, 19 nt, Artificial Sequence
  Description of Artificial Sequence: Synthetic oligonucleotide
aguuugggauaugaccuuu

SEQ ID NO: 2402435 - RNA, 19 nt, Artificial Sequence
  Description of Artificial Sequence: Synthetic oligonucleotide
gcgagcaagagacgaggcc

SEQ ID NO: 2402436 - RNA, 19 nt, Artificial Sequence
  Description of Artificial Sequence: Synthetic oligonucleotide
agagacgaggccaggcgga

SEQ ID NO: 2402437 - RNA, 19 nt, Artificial Sequence
  Description of Artificial Sequence: Synthetic oligonucleotide
ccuuuccagccuuaccgcc

SEQ ID NO: 2402438 - RNA, 19 nt, Artificial Sequence
  Description of Artificial Sequence: Synthetic oligonucleotide
auccccgcgaauagcaagu

SEQ ID NO: 2402439 - RNA, 19 nt, Artificial Sequence
  Description of Artificial Sequence: Synthetic oligonucleotide
acgcacagcgagaucccgg

SEQ ID NO: 2402440 - RNA, 19 nt, Artificial Sequence
  Description of Artificial Sequence: Synthetic oligonucleotide
agccggcucucugcgagcg

SEQ ID NO: 2402441 - RNA, 19 nt, Artificial Sequence
  Description of Artificial Sequence: Synthetic oligonucleotide
gcgcuauacacagcggcgg

SEQ ID NO: 2402442 - RNA, 19 nt, Artificial Sequence
  Description of Artificial Sequence: Synthetic oligonucleotide
agcgggaaaccgccuuugu

SEQ ID NO: 2402443 - RNA, 19 nt, Artificial Sequence
  Description of Artificial Sequence: Synthetic oligonucleotide
ccaauucuucauccccgcg

SEQ ID NO: 2402444 - RNA, 19 nt, Artificial Sequence
  Description of Artificial Sequence: Synthetic oligonucleotide
gaccgugcugaagaucgca

SEQ ID NO: 2402445 - RNA, 19 nt, Artificial Sequence
  Description of Artificial Sequence: Synthetic oligonucleotide
gaugcauuuccugccaauu

SEQ ID NO: 2402446 - RNA, 19 nt, Artificial Sequence
  Description of Artificial Sequence: Synthetic oligonucleotide
gaucccggcgcccacuccu

SEQ ID NO: 2402447 - RNA, 19 nt, Artificial Sequence
  Description of Artificial Sequence: Synthetic oligonucleotide
gagcgggaaaccgccuuug

SEQ ID NO: 2402448 - RNA, 19 nt, Artificial Sequence
  Description of Artificial Sequence: Synthetic oligonucleotide
cugccaauucuaguaccuc

SEQ ID NO: 2402449 - RNA, 19 nt, Artificial Sequence
  Description of Artificial Sequence: Synthetic oligonucleotide
gagaucccggcgcccacuc

SEQ ID NO: 2402450 - RNA, 19 nt, Artificial Sequence
  Description of Artificial Sequence: Synthetic oligonucleotide
cuaguaccucugcggugag

SEQ ID NO: 2402451 - RNA, 19 nt, Artificial Sequence
  Description of Artificial Sequence: Synthetic oligonucleotide
cuggacagcuguuaagaau

SEQ ID NO: 2402452 - RNA, 19 nt, Artificial Sequence
  Description of Artificial Sequence: Synthetic oligonucleotide
gagggguaauacgcuuuac

SEQ ID NO: 2402453 - RNA, 19 nt, Artificial Sequence
  Description of Artificial Sequence: Synthetic oligonucleotide
agaucgcacaagcgagcaa

SEQ ID NO: 2402454 - RNA, 19 nt, Artificial Sequence
  Description of Artificial Sequence: Synthetic oligonucleotide
ccgccagccaucucggacc

SEQ ID NO: 2402455 - RNA, 19 nt, Artificial Sequence
  Description of Artificial Sequence: Synthetic oligonucleotide
cggacgcacagcgagaucc

SEQ ID NO: 2402456 - RNA, 19 nt, Artificial Sequence
  Description of Artificial Sequence: Synthetic oligonucleotide
gggaacugcaagccggcuc

SEQ ID NO: 2402457 - RNA, 19 nt, Artificial Sequence
  Description of Artificial Sequence: Synthetic oligonucleotide
auuaagccuccaacuugcu

SEQ ID NO: 2402458 - RNA, 19 nt, Artificial Sequence
  Description of Artificial Sequence: Synthetic oligonucleotide
cugcggugagguacuccag

SEQ ID NO: 2402459 - RNA, 19 nt, Artificial Sequence
  Description of Artificial Sequence: Synthetic oligonucleotide
gcaagagacgaggccaggc

SEQ ID NO: 2402460 - RNA, 19 nt, Artificial Sequence
  Description of Artificial Sequence: Synthetic oligonucleotide
ugcgagcgggaaaccgccu

SEQ ID NO: 2402461 - RNA, 19 nt, Artificial Sequence
  Description of Artificial Sequence: Synthetic oligonucleotide
agacgaggccaggcggacg

SEQ ID NO: 2402462 - RNA, 19 nt, Artificial Sequence
  Description of Artificial Sequence: Synthetic oligonucleotide
aucucggaccgugcugaag

SEQ ID NO: 2402463 - RNA, 19 nt, Artificial Sequence
  Description of Artificial Sequence: Synthetic oligonucleotide
acacggccguggcugguug

SEQ ID NO: 2402464 - RNA, 19 nt, Artificial Sequence
  Description of Artificial Sequence: Synthetic oligonucleotide
acggccguggcugguuguc

SEQ ID NO: 2402465 - RNA, 19 nt, Artificial Sequence
  Description of Artificial Sequence: Synthetic oligonucleotide
ggaaaccgccuuugucuug

SEQ ID NO: 2402466 - RNA, 19 nt, Artificial Sequence
  Description of Artificial Sequence: Synthetic oligonucleotide
gagauacaguccacuggaa

SEQ ID NO: 2402467 - RNA, 19 nt, Artificial Sequence
  Description of Artificial Sequence: Synthetic oligonucleotide
gagacgaggccaggcggac

SEQ ID NO: 2402468 - RNA, 19 nt, Artificial Sequence
  Description of Artificial Sequence: Synthetic oligonucleotide
ucucugcgagcgggaaacc

SEQ ID NO: 2402469 - RNA, 19 nt, Artificial Sequence
  Description of Artificial Sequence: Synthetic oligonucleotide
guacuccaggauggcugcg

SEQ ID NO: 2402470 - RNA, 19 nt, Artificial Sequence
  Description of Artificial Sequence: Synthetic oligonucleotide
caagugacgagggguaaua

SEQ ID NO: 2402471 - RNA, 19 nt, Artificial Sequence
  Description of Artificial Sequence: Synthetic oligonucleotide
gacgagggguaauacgcuu

SEQ ID NO: 2402472 - RNA, 19 nt, Artificial Sequence
  Description of Artificial Sequence: Synthetic oligonucleotide
ccacuggaaucaccgacac

SEQ ID NO: 2402473 - RNA, 19 nt, Artificial Sequence
  Description of Artificial Sequence: Synthetic oligonucleotide
aucgcacaagcgagcaaga

SEQ ID NO: 2402474 - RNA, 19 nt, Artificial Sequence
  Description of Artificial Sequence: Synthetic oligonucleotide
ucggaccgugcugaagauc

SEQ ID NO: 2402475 - RNA, 19 nt, Artificial Sequence
  Description of Artificial Sequence: Synthetic oligonucleotide
gcuuauccaccagagugga

SEQ ID NO: 2402476 - RNA, 19 nt, Artificial Sequence
  Description of Artificial Sequence: Synthetic oligonucleotide
ggcgcccacuccuccgucg

SEQ ID NO: 2402477 - RNA, 19 nt, Artificial Sequence
  Description of Artificial Sequence: Synthetic oligonucleotide
agccacaguaacacuuaaa

SEQ ID NO: 2402478 - RNA, 19 nt, Artificial Sequence
  Description of Artificial Sequence: Synthetic oligonucleotide
uggcugcgcuauacacagc

SEQ ID NO: 2402479 - RNA, 19 nt, Artificial Sequence
  Description of Artificial Sequence: Synthetic oligonucleotide
gucgaugaauacggcccac

SEQ ID NO: 2402480 - RNA, 19 nt, Artificial Sequence
  Description of Artificial Sequence: Synthetic oligonucleotide
ggguaauacgcuuuaccuu

SEQ ID NO: 2402481 - RNA, 19 nt, Artificial Sequence
  Description of Artificial Sequence: Synthetic oligonucleotide
gcauccuuagacagucuuc

SEQ ID NO: 2402482 - RNA, 19 nt, Artificial Sequence
  Description of Artificial Sequence: Synthetic oligonucleotide
acgagggguaauacgcuuu

SEQ ID NO: 2402483 - RNA, 19 nt, Artificial Sequence
  Description of Artificial Sequence: Synthetic oligonucleotide
guuugggauaugaccuuua

SEQ ID NO: 2402484 - RNA, 19 nt, Artificial Sequence
  Description of Artificial Sequence: Synthetic oligonucleotide
cuuauccaccagaguggaa

SEQ ID NO: 2402485 - RNA, 19 nt, Artificial Sequence
  Description of Artificial Sequence: Synthetic oligonucleotide
gcugcgcuauacacagcgg

SEQ ID NO: 2402486 - RNA, 19 nt, Artificial Sequence
  Description of Artificial Sequence: Synthetic oligonucleotide
cgcacagcgagaucccggc

SEQ ID NO: 2402487 - RNA, 19 nt, Artificial Sequence
  Description of Artificial Sequence: Synthetic oligonucleotide
guaauacgcuuuaccuuua

SEQ ID NO: 2402488 - RNA, 19 nt, Artificial Sequence
  Description of Artificial Sequence: Synthetic oligonucleotide
cgaauagcaaguugcaagu

SEQ ID NO: 2402489 - RNA, 19 nt, Artificial Sequence
  Description of Artificial Sequence: Synthetic oligonucleotide
ggucgcgcccacacggccg

SEQ ID NO: 2402490 - RNA, 19 nt, Artificial Sequence
  Description of Artificial Sequence: Synthetic oligonucleotide
cuugaucagagaguccaau

SEQ ID NO: 2402491 - RNA, 19 nt, Artificial Sequence
  Description of Artificial Sequence: Synthetic oligonucleotide
gcgggaaaccgccuuuguc

SEQ ID NO: 2402492 - RNA, 19 nt, Artificial Sequence
  Description of Artificial Sequence: Synthetic oligonucleotide
gcacagcgagaucccggcg

SEQ ID NO: 2402493 - RNA, 19 nt, Artificial Sequence
  Description of Artificial Sequence: Synthetic oligonucleotide
uggccuuuccggaguccuu

SEQ ID NO: 2402494 - RNA, 19 nt, Artificial Sequence
  Description of Artificial Sequence: Synthetic oligonucleotide
ccagccaucucggaccgug

SEQ ID NO: 2402495 - RNA, 19 nt, Artificial Sequence
  Description of Artificial Sequence: Synthetic oligonucleotide
cgagcaagagacgaggcca

SEQ ID NO: 2402496 - RNA, 19 nt, Artificial Sequence
  Description of Artificial Sequence: Synthetic oligonucleotide
guccuagauuucagguguc

SEQ ID NO: 2402497 - RNA, 19 nt, Artificial Sequence
  Description of Artificial Sequence: Synthetic oligonucleotide
uaccgccagccaucucgga

SEQ ID NO: 2402498 - RNA, 19 nt, Artificial Sequence
  Description of Artificial Sequence: Synthetic oligonucleotide
auccaccagaguggaaaua

SEQ ID NO: 2402499 - RNA, 19 nt, Artificial Sequence
  Description of Artificial Sequence: Synthetic oligonucleotide
gcuauacacagcggcgguc

SEQ ID NO: 2402500 - RNA, 19 nt, Artificial Sequence
  Description of Artificial Sequence: Synthetic oligonucleotide
ccggcucucugcgagcggg

SEQ ID NO: 2402501 - RNA, 19 nt, Artificial Sequence
  Description of Artificial Sequence: Synthetic oligonucleotide
ggcauccuuagacagucuu

SEQ ID NO: 2402502 - RNA, 19 nt, Artificial Sequence
  Description of Artificial Sequence: Synthetic oligonucleotide
cgcacaagcgagcaagaga

SEQ ID NO: 2402503 - RNA, 19 nt, Artificial Sequence
  Description of Artificial Sequence: Synthetic oligonucleotide
aucccggcgcccacuccuc

SEQ ID NO: 2402504 - RNA, 19 nt, Artificial Sequence
  Description of Artificial Sequence: Synthetic oligonucleotide
cgggaaaccgccuuugucu

SEQ ID NO: 2402505 - RNA, 19 nt, Artificial Sequence
  Description of Artificial Sequence: Synthetic oligonucleotide
uacggcccacagggaacug

SEQ ID NO: 2402506 - RNA, 19 nt, Artificial Sequence
  Description of Artificial Sequence: Synthetic oligonucleotide
ccuuagacagucuucuguu

SEQ ID NO: 2402507 - RNA, 19 nt, Artificial Sequence
  Description of Artificial Sequence: Synthetic oligonucleotide
ccaucucggaccgugcuga

SEQ ID NO: 2402508 - RNA, 19 nt, Artificial Sequence
  Description of Artificial Sequence: Synthetic oligonucleotide
cagccuuaccgccagccau

SEQ ID NO: 2402509 - RNA, 19 nt, Artificial Sequence
  Description of Artificial Sequence: Synthetic oligonucleotide
guggcugguuguccuagau

SEQ ID NO: 2402510 - RNA, 19 nt, Artificial Sequence
  Description of Artificial Sequence: Synthetic oligonucleotide
ccugccaauucuaguaccu

SEQ ID NO: 2402511 - RNA, 19 nt, Artificial Sequence
  Description of Artificial Sequence: Synthetic oligonucleotide
uccccgcgaauagcaaguu

SEQ ID NO: 2402512 - RNA, 19 nt, Artificial Sequence
  Description of Artificial Sequence: Synthetic oligonucleotide
gcauuuccugccaauucua

SEQ ID NO: 2402513 - RNA, 19 nt, Artificial Sequence
  Description of Artificial Sequence: Synthetic oligonucleotide
gcggcggucgcgcccacac

SEQ ID NO: 2402514 - RNA, 19 nt, Artificial Sequence
  Description of Artificial Sequence: Synthetic oligonucleotide
gcugguuguccuagauuuc

SEQ ID NO: 2402515 - RNA, 19 nt, Artificial Sequence
  Description of Artificial Sequence: Synthetic oligonucleotide
ccgcgaauagcaaguugca

SEQ ID NO: 2402516 - RNA, 19 nt, Artificial Sequence
  Description of Artificial Sequence: Synthetic oligonucleotide
cgugcugaagaucgcacaa

SEQ ID NO: 2402517 - RNA, 19 nt, Artificial Sequence
  Description of Artificial Sequence: Synthetic oligonucleotide
cagaaucaauagcuucuuu

SEQ ID NO: 2402518 - RNA, 19 nt, Artificial Sequence
  Description of Artificial Sequence: Synthetic oligonucleotide
gggaaaccgccuuugucuu

SEQ ID NO: 2402519 - RNA, 19 nt, Artificial Sequence
  Description of Artificial Sequence: Synthetic oligonucleotide
guaccucugcggugaggua

SEQ ID NO: 2402520 - RNA, 19 nt, Artificial Sequence
  Description of Artificial Sequence: Synthetic oligonucleotide
gcccacuccuccgucguac

SEQ ID NO: 2402521 - RNA, 19 nt, Artificial Sequence
  Description of Artificial Sequence: Synthetic oligonucleotide
cagcgagaucccggcgccc

SEQ ID NO: 2402522 - RNA, 19 nt, Artificial Sequence
  Description of Artificial Sequence: Synthetic oligonucleotide
ccccgcgaauagcaaguug

SEQ ID NO: 2402523 - RNA, 19 nt, Artificial Sequence
  Description of Artificial Sequence: Synthetic oligonucleotide
aggcggacgcacagcgaga

SEQ ID NO: 2402524 - RNA, 19 nt, Artificial Sequence
  Description of Artificial Sequence: Synthetic oligonucleotide
cgcuuuaccuuuaagucuu

SEQ ID NO: 2402525 - RNA, 19 nt, Artificial Sequence
  Description of Artificial Sequence: Synthetic oligonucleotide
ggaccgugcugaagaucgc

SEQ ID NO: 2402526 - RNA, 19 nt, Artificial Sequence
  Description of Artificial Sequence: Synthetic oligonucleotide
caucucggaccgugcugaa

SEQ ID NO: 2402527 - RNA, 19 nt, Artificial Sequence
  Description of Artificial Sequence: Synthetic oligonucleotide
cccggcgcccacuccuccg

SEQ ID NO: 2402528 - RNA, 19 nt, Artificial Sequence
  Description of Artificial Sequence: Synthetic oligonucleotide
gucgcgcccacacggccgu

SEQ ID NO: 2402529 - RNA, 19 nt, Artificial Sequence
  Description of Artificial Sequence: Synthetic oligonucleotide
ccguggcugguuguccuag

SEQ ID NO: 2402530 - RNA, 19 nt, Artificial Sequence
  Description of Artificial Sequence: Synthetic oligonucleotide
cgccagccaucucggaccg

SEQ ID NO: 2402531 - RNA, 19 nt, Artificial Sequence
  Description of Artificial Sequence: Synthetic oligonucleotide
gccggcucucugcgagcgg

SEQ ID NO: 2402532 - RNA, 19 nt, Artificial Sequence
  Description of Artificial Sequence: Synthetic oligonucleotide
cagcaauuguagccuugau

SEQ ID NO: 2402533 - RNA, 19 nt, Artificial Sequence
  Description of Artificial Sequence: Synthetic oligonucleotide
cucggaccgugcugaagau

SEQ ID NO: 2402534 - RNA, 19 nt, Artificial Sequence
  Description of Artificial Sequence: Synthetic oligonucleotide
caccagcaauuguagccuu

SEQ ID NO: 2402535 - RNA, 19 nt, Artificial Sequence
  Description of Artificial Sequence: Synthetic oligonucleotide
ggccguggcugguuguccu

SEQ ID NO: 2402536 - RNA, 19 nt, Artificial Sequence
  Description of Artificial Sequence: Synthetic oligonucleotide
ggacagcuguuaagaauau

SEQ ID NO: 2402537 - RNA, 19 nt, Artificial Sequence
  Description of Artificial Sequence: Synthetic oligonucleotide
cgagggguaauacgcuuua

SEQ ID NO: 2402538 - RNA, 19 nt, Artificial Sequence
  Description of Artificial Sequence: Synthetic oligonucleotide
gcggucgcgcccacacggc

SEQ ID NO: 2402539 - RNA, 19 nt, Artificial Sequence
  Description of Artificial Sequence: Synthetic oligonucleotide
cuccuccgucguaccgcga

SEQ ID NO: 2402540 - RNA, 19 nt, Artificial Sequence
  Description of Artificial Sequence: Synthetic oligonucleotide
gcaagugacgagggguaau

SEQ ID NO: 2402541 - RNA, 19 nt, Artificial Sequence
  Description of Artificial Sequence: Synthetic oligonucleotide
ggcucucugcgagcgggaa

SEQ ID NO: 2402542 - RNA, 19 nt, Artificial Sequence
  Description of Artificial Sequence: Synthetic oligonucleotide
agcggcggucgcgcccaca

SEQ ID NO: 2402543 - RNA, 19 nt, Artificial Sequence
  Description of Artificial Sequence: Synthetic oligonucleotide
ccaggcggacgcacagcga

SEQ ID NO: 2402544 - RNA, 19 nt, Artificial Sequence
  Description of Artificial Sequence: Synthetic oligonucleotide
cacggccguggcugguugu

SEQ ID NO: 2402545 - RNA, 19 nt, Artificial Sequence
  Description of Artificial Sequence: Synthetic oligonucleotide
cgcgaauagcaaguugcaa

SEQ ID NO: 2402546 - RNA, 19 nt, Artificial Sequence
  Description of Artificial Sequence: Synthetic oligonucleotide
gccguggcugguuguccua

SEQ ID NO: 2402547 - RNA, 19 nt, Artificial Sequence
  Description of Artificial Sequence: Synthetic oligonucleotide
gcgagcgggaaaccgccuu

SEQ ID NO: 2402548 - RNA, 19 nt, Artificial Sequence
  Description of Artificial Sequence: Synthetic oligonucleotide
ccuuaccgccagccaucuc

SEQ ID NO: 2402549 - RNA, 19 nt, Artificial Sequence
  Description of Artificial Sequence: Synthetic oligonucleotide
cgcgcccacacggccgugg

SEQ ID NO: 2402550 - RNA, 19 nt, Artificial Sequence
  Description of Artificial Sequence: Synthetic oligonucleotide
gccuuaccgccagccaucu

SEQ ID NO: 2402551 - RNA, 19 nt, Artificial Sequence
  Description of Artificial Sequence: Synthetic oligonucleotide
ccacuacuucagaaucaau

SEQ ID NO: 2402552 - RNA, 19 nt, Artificial Sequence
  Description of Artificial Sequence: Synthetic oligonucleotide
gcgcccacuccuccgucgu

SEQ ID NO: 2402553 - RNA, 19 nt, Artificial Sequence
  Description of Artificial Sequence: Synthetic oligonucleotide
ccggaguccuuuccagccu

SEQ ID NO: 2402554 - RNA, 19 nt, Artificial Sequence
  Description of Artificial Sequence: Synthetic oligonucleotide
cggccguggcugguugucc

SEQ ID NO: 2402555 - RNA, 19 nt, Artificial Sequence
  Description of Artificial Sequence: Synthetic oligonucleotide
cggcggucgcgcccacacg

SEQ ID NO: 2402556 - RNA, 19 nt, Artificial Sequence
  Description of Artificial Sequence: Synthetic oligonucleotide
cgcuauacacagcggcggu

SEQ ID NO: 2402557 - RNA, 19 nt, Artificial Sequence
  Description of Artificial Sequence: Synthetic oligonucleotide
gguuggcuggaaggcuaau

SEQ ID NO: 2402558 - RNA, 19 nt, Artificial Sequence
  Description of Artificial Sequence: Synthetic oligonucleotide
gcuuuaccuuuaagucuuu

SEQ ID NO: 2402559 - RNA, 19 nt, Artificial Sequence
  Description of Artificial Sequence: Synthetic oligonucleotide
ccgacacuggacagcuguu

SEQ ID NO: 2402560 - RNA, 19 nt, Artificial Sequence
  Description of Artificial Sequence: Synthetic oligonucleotide
cggugagguacuccaggau

SEQ ID NO: 2402561 - RNA, 19 nt, Artificial Sequence
  Description of Artificial Sequence: Synthetic oligonucleotide
cggcucucugcgagcggga

SEQ ID NO: 2402562 - RNA, 19 nt, Artificial Sequence
  Description of Artificial Sequence: Synthetic oligonucleotide
cgagcgggaaaccgccuuu

SEQ ID NO: 2402563 - RNA, 19 nt, Artificial Sequence
  Description of Artificial Sequence: Synthetic oligonucleotide
cgagaucccggcgcccacu

SEQ ID NO: 2402564 - RNA, 19 nt, Artificial Sequence
  Description of Artificial Sequence: Synthetic oligonucleotide
cgcccacuccuccgucgua

SEQ ID NO: 2402565 - RNA, 19 nt, Artificial Sequence
  Description of Artificial Sequence: Synthetic oligonucleotide
uaagacuugauuuaaaucu

SEQ ID NO: 2402566 - RNA, 19 nt, Artificial Sequence
  Description of Artificial Sequence: Synthetic oligonucleotide
ugugaaauaagucaagaga

SEQ ID NO: 2402567 - RNA, 19 nt, Artificial Sequence
  Description of Artificial Sequence: Synthetic oligonucleotide
aauaaucuggauuauaaau

SEQ ID NO: 2402568 - RNA, 19 nt, Artificial Sequence
  Description of Artificial Sequence: Synthetic oligonucleotide
aauuuacaaaacucagacc

SEQ ID NO: 2402569 - RNA, 19 nt, Artificial Sequence
  Description of Artificial Sequence: Synthetic oligonucleotide
uuauaaaugguuucugagg

SEQ ID NO: 2402570 - RNA, 19 nt, Artificial Sequence
  Description of Artificial Sequence: Synthetic oligonucleotide
agcaaauuucacuugggcc

SEQ ID NO: 2402571 - RNA, 19 nt, Artificial Sequence
  Description of Artificial Sequence: Synthetic oligonucleotide
uauaaaugguuucugaggu

SEQ ID NO: 2402572 - RNA, 19 nt, Artificial Sequence
  Description of Artificial Sequence: Synthetic oligonucleotide
agaucaaagguacacuccc

SEQ ID NO: 2402573 - RNA, 19 nt, Artificial Sequence
  Description of Artificial Sequence: Synthetic oligonucleotide
ugauuuaaaucuuugggca

SEQ ID NO: 2402574 - RNA, 19 nt, Artificial Sequence
  Description of Artificial Sequence: Synthetic oligonucleotide
caaacuguuauaaucuugg

SEQ ID NO: 2402575 - RNA, 19 nt, Artificial Sequence
  Description of Artificial Sequence: Synthetic oligonucleotide
acuguuauaaucuuggaaa

SEQ ID NO: 2402576 - RNA, 19 nt, Artificial Sequence
  Description of Artificial Sequence: Synthetic oligonucleotide
auuauaaaugguuucugag

SEQ ID NO: 2402577 - RNA, 19 nt, Artificial Sequence
  Description of Artificial Sequence: Synthetic oligonucleotide
uuccaagcaacccugaucc

SEQ ID NO: 2402578 - RNA, 19 nt, Artificial Sequence
  Description of Artificial Sequence: Synthetic oligonucleotide
aacuauguuuucuccaggg

SEQ ID NO: 2402579 - RNA, 19 nt, Artificial Sequence
  Description of Artificial Sequence: Synthetic oligonucleotide
aaucuuugggcauagcaug

SEQ ID NO: 2402580 - RNA, 19 nt, Artificial Sequence
  Description of Artificial Sequence: Synthetic oligonucleotide
ucaucgaucaccaaacugu

SEQ ID NO: 2402581 - RNA, 19 nt, Artificial Sequence
  Description of Artificial Sequence: Synthetic oligonucleotide
aacaagaugguuuucacua

SEQ ID NO: 2402582 - RNA, 19 nt, Artificial Sequence
  Description of Artificial Sequence: Synthetic oligonucleotide
aaccacauuagguaagguc

SEQ ID NO: 2402583 - RNA, 19 nt, Artificial Sequence
  Description of Artificial Sequence: Synthetic oligonucleotide
ugcuacguuaacaugcugg

SEQ ID NO: 2402584 - RNA, 19 nt, Artificial Sequence
  Description of Artificial Sequence: Synthetic oligonucleotide
cucauuuacaucauugccc

SEQ ID NO: 2402585 - RNA, 19 nt, Artificial Sequence
  Description of Artificial Sequence: Synthetic oligonucleotide
gacuguuucaugcaaagug

SEQ ID NO: 2402586 - RNA, 19 nt, Artificial Sequence
  Description of Artificial Sequence: Synthetic oligonucleotide
aacaccuggaaucaaguca

SEQ ID NO: 2402587 - RNA, 19 nt, Artificial Sequence
  Description of Artificial Sequence: Synthetic oligonucleotide
uacugcuacguuaacaugc

SEQ ID NO: 2402588 - RNA, 19 nt, Artificial Sequence
  Description of Artificial Sequence: Synthetic oligonucleotide
cuggaaucaagucagaaug

SEQ ID NO: 2402589 - RNA, 19 nt, Artificial Sequence
  Description of Artificial Sequence: Synthetic oligonucleotide
acuugauuuaaaucuuugg

SEQ ID NO: 2402590 - RNA, 19 nt, Artificial Sequence
  Description of Artificial Sequence: Synthetic oligonucleotide
uacguuaacaugcugggga

SEQ ID NO: 2402591 - RNA, 19 nt, Artificial Sequence
  Description of Artificial Sequence: Synthetic oligonucleotide
ucuuuagcagcucucaaga

SEQ ID NO: 2402592 - RNA, 19 nt, Artificial Sequence
  Description of Artificial Sequence: Synthetic oligonucleotide
uguuguaauaaucuggauu

SEQ ID NO: 2402593 - RNA, 19 nt, Artificial Sequence
  Description of Artificial Sequence: Synthetic oligonucleotide
aauuagcaaccacauuagg

SEQ ID NO: 2402594 - RNA, 19 nt, Artificial Sequence
  Description of Artificial Sequence: Synthetic oligonucleotide
uucguaaacaccuggaauc

SEQ ID NO: 2402595 - RNA, 19 nt, Artificial Sequence
  Description of Artificial Sequence: Synthetic oligonucleotide
aaccuuauuugcuaagacu

SEQ ID NO: 2402596 - RNA, 19 nt, Artificial Sequence
  Description of Artificial Sequence: Synthetic oligonucleotide
uuagcaaccacauuaggua

SEQ ID NO: 2402597 - RNA, 19 nt, Artificial Sequence
  Description of Artificial Sequence: Synthetic oligonucleotide
ucauuuacaucauugcccu

SEQ ID NO: 2402598 - RNA, 19 nt, Artificial Sequence
  Description of Artificial Sequence: Synthetic oligonucleotide
aaaacucagaccacucccc

SEQ ID NO: 2402599 - RNA, 19 nt, Artificial Sequence
  Description of Artificial Sequence: Synthetic oligonucleotide
auaaucuuggaaaugaacu

SEQ ID NO: 2402600 - RNA, 19 nt, Artificial Sequence
  Description of Artificial Sequence: Synthetic oligonucleotide
uugugaaauaagucaagag

SEQ ID NO: 2402601 - RNA, 19 nt, Artificial Sequence
  Description of Artificial Sequence: Synthetic oligonucleotide
gaaauaagucaagagauca

SEQ ID NO: 2402602 - RNA, 19 nt, Artificial Sequence
  Description of Artificial Sequence: Synthetic oligonucleotide
ucuuucaacaagaugguuu

SEQ ID NO: 2402603 - RNA, 19 nt, Artificial Sequence
  Description of Artificial Sequence: Synthetic oligonucleotide
aaacuauguuuucuccagg

SEQ ID NO: 2402604 - RNA, 19 nt, Artificial Sequence
  Description of Artificial Sequence: Synthetic oligonucleotide
auuugcuaagacuugauuu

SEQ ID NO: 2402605 - RNA, 19 nt, Artificial Sequence
  Description of Artificial Sequence: Synthetic oligonucleotide
uuucugggucaccugaacg

SEQ ID NO: 2402606 - RNA, 19 nt, Artificial Sequence
  Description of Artificial Sequence: Synthetic oligonucleotide
aaacaccuggaaucaaguc

SEQ ID NO: 2402607 - RNA, 19 nt, Artificial Sequence
  Description of Artificial Sequence: Synthetic oligonucleotide
aaauuagcaaccacauuag

SEQ ID NO: 2402608 - RNA, 19 nt, Artificial Sequence
  Description of Artificial Sequence: Synthetic oligonucleotide
uucugggucaccugaacgg

SEQ ID NO: 2402609 - RNA, 19 nt, Artificial Sequence
  Description of Artificial Sequence: Synthetic oligonucleotide
agaugguuuucacuacugc

SEQ ID NO: 2402610 - RNA, 19 nt, Artificial Sequence
  Description of Artificial Sequence: Synthetic oligonucleotide
aagaagggcuguuucucac

SEQ ID NO: 2402611 - RNA, 19 nt, Artificial Sequence
  Description of Artificial Sequence: Synthetic oligonucleotide
aaggucacuucaucgauca

SEQ ID NO: 2402612 - RNA, 19 nt, Artificial Sequence
  Description of Artificial Sequence: Synthetic oligonucleotide
caaagggaaauuagcaacc

SEQ ID NO: 2402613 - RNA, 19 nt, Artificial Sequence
  Description of Artificial Sequence: Synthetic oligonucleotide
ucaagucagaaugaguaag

SEQ ID NO: 2402614 - RNA, 19 nt, Artificial Sequence
  Description of Artificial Sequence: Synthetic oligonucleotide
ucaccaaacuguuauaauc

SEQ ID NO: 2402615 - RNA, 19 nt, Artificial Sequence
  Description of Artificial Sequence: Synthetic oligonucleotide
aguucugcagaacucuuuc

SEQ ID NO: 2402616 - RNA, 19 nt, Artificial Sequence
  Description of Artificial Sequence: Synthetic oligonucleotide
uuugcuaagacuugauuua

SEQ ID NO: 2402617 - RNA, 19 nt, Artificial Sequence
  Description of Artificial Sequence: Synthetic oligonucleotide
auuagguaaggucacuuca

SEQ ID NO: 2402618 - RNA, 19 nt, Artificial Sequence
  Description of Artificial Sequence: Synthetic oligonucleotide
aauaagucaagagaucaaa

SEQ ID NO: 2402619 - RNA, 19 nt, Artificial Sequence
  Description of Artificial Sequence: Synthetic oligonucleotide
ucgaucaccaaacuguuau

SEQ ID NO: 2402620 - RNA, 19 nt, Artificial Sequence
  Description of Artificial Sequence: Synthetic oligonucleotide
ggucauauuucacaaacag

SEQ ID NO: 2402621 - RNA, 19 nt, Artificial Sequence
  Description of Artificial Sequence: Synthetic oligonucleotide
cuacuuuugacuuccuuug

SEQ ID NO: 2402622 - RNA, 19 nt, Artificial Sequence
  Description of Artificial Sequence: Synthetic oligonucleotide
uaaaugguuucugagguga

SEQ ID NO: 2402623 - RNA, 19 nt, Artificial Sequence
  Description of Artificial Sequence: Synthetic oligonucleotide
uucaucgaucaccaaacug

SEQ ID NO: 2402624 - RNA, 19 nt, Artificial Sequence
  Description of Artificial Sequence: Synthetic oligonucleotide
cauagcauguucuuuagca

SEQ ID NO: 2402625 - RNA, 19 nt, Artificial Sequence
  Description of Artificial Sequence: Synthetic oligonucleotide
acuacugcuacguuaacau

SEQ ID NO: 2402626 - RNA, 19 nt, Artificial Sequence
  Description of Artificial Sequence: Synthetic oligonucleotide
uuuuaagccuccuucguaa

SEQ ID NO: 2402627 - RNA, 19 nt, Artificial Sequence
  Description of Artificial Sequence: Synthetic oligonucleotide
agguaaggucacuucaucg

SEQ ID NO: 2402628 - RNA, 19 nt, Artificial Sequence
  Description of Artificial Sequence: Synthetic oligonucleotide
acuucaucgaucaccaaac

SEQ ID NO: 2402629 - RNA, 19 nt, Artificial Sequence
  Description of Artificial Sequence: Synthetic oligonucleotide
uucacuacugcuacguuaa

SEQ ID NO: 2402630 - RNA, 19 nt, Artificial Sequence
  Description of Artificial Sequence: Synthetic oligonucleotide
auuccaagcaacccugauc

SEQ ID NO: 2402631 - RNA, 19 nt, Artificial Sequence
  Description of Artificial Sequence: Synthetic oligonucleotide
uucaaagggaaauuagcaa

SEQ ID NO: 2402632 - RNA, 19 nt, Artificial Sequence
  Description of Artificial Sequence: Synthetic oligonucleotide
uuugugaaauaagucaaga

SEQ ID NO: 2402633 - RNA, 19 nt, Artificial Sequence
  Description of Artificial Sequence: Synthetic oligonucleotide
ugaaauaagucaagagauc

SEQ ID NO: 2402634 - RNA, 19 nt, Artificial Sequence
  Description of Artificial Sequence: Synthetic oligonucleotide
cuaagacuugauuuaaauc

SEQ ID NO: 2402635 - RNA, 19 nt, Artificial Sequence
  Description of Artificial Sequence: Synthetic oligonucleotide
ugcaguuauuccaagcaac

SEQ ID NO: 2402636 - RNA, 19 nt, Artificial Sequence
  Description of Artificial Sequence: Synthetic oligonucleotide
uuuguaaacuauguuuucu

SEQ ID NO: 2402637 - RNA, 19 nt, Artificial Sequence
  Description of Artificial Sequence: Synthetic oligonucleotide
uggcucauuuacaucauug

SEQ ID NO: 2402638 - RNA, 19 nt, Artificial Sequence
  Description of Artificial Sequence: Synthetic oligonucleotide
acagccaagauccaacacu

SEQ ID NO: 2402639 - RNA, 19 nt, Artificial Sequence
  Description of Artificial Sequence: Synthetic oligonucleotide
cuacucaacagucugagga

SEQ ID NO: 2402640 - RNA, 19 nt, Artificial Sequence
  Description of Artificial Sequence: Synthetic oligonucleotide
auuccuacucaacagucug

SEQ ID NO: 2402641 - RNA, 19 nt, Artificial Sequence
  Description of Artificial Sequence: Synthetic oligonucleotide
uagcauguucuuuagcagc

SEQ ID NO: 2402642 - RNA, 19 nt, Artificial Sequence
  Description of Artificial Sequence: Synthetic oligonucleotide
uaaacaccuggaaucaagu

SEQ ID NO: 2402643 - RNA, 19 nt, Artificial Sequence
  Description of Artificial Sequence: Synthetic oligonucleotide
uuccauaaccuuauuugcu

SEQ ID NO: 2402644 - RNA, 19 nt, Artificial Sequence
  Description of Artificial Sequence: Synthetic oligonucleotide
cuucaaagggaaauuagca

SEQ ID NO: 2402645 - RNA, 19 nt, Artificial Sequence
  Description of Artificial Sequence: Synthetic oligonucleotide
aaaucuuugggcauagcau

SEQ ID NO: 2402646 - RNA, 19 nt, Artificial Sequence
  Description of Artificial Sequence: Synthetic oligonucleotide
uggauuauaaaugguuucu

SEQ ID NO: 2402647 - RNA, 19 nt, Artificial Sequence
  Description of Artificial Sequence: Synthetic oligonucleotide
uucaacaagaugguuuuca

SEQ ID NO: 2402648 - RNA, 19 nt, Artificial Sequence
  Description of Artificial Sequence: Synthetic oligonucleotide
accacauuagguaagguca

SEQ ID NO: 2402649 - RNA, 19 nt, Artificial Sequence
  Description of Artificial Sequence: Synthetic oligonucleotide
ucuugggcuacuuuugacu

SEQ ID NO: 2402650 - RNA, 19 nt, Artificial Sequence
  Description of Artificial Sequence: Synthetic oligonucleotide
uaaccuuauuugcuaagac

SEQ ID NO: 2402651 - RNA, 19 nt, Artificial Sequence
  Description of Artificial Sequence: Synthetic oligonucleotide
uuuaaaucuuugggcauag

SEQ ID NO: 2402652 - RNA, 19 nt, Artificial Sequence
  Description of Artificial Sequence: Synthetic oligonucleotide
auuagcaaccacauuaggu

SEQ ID NO: 2402653 - RNA, 19 nt, Artificial Sequence
  Description of Artificial Sequence: Synthetic oligonucleotide
ugguuuucacuacugcuac

SEQ ID NO: 2402654 - RNA, 19 nt, Artificial Sequence
  Description of Artificial Sequence: Synthetic oligonucleotide
uuauaaucuuggaaaugaa

SEQ ID NO: 2402655 - RNA, 19 nt, Artificial Sequence
  Description of Artificial Sequence: Synthetic oligonucleotide
aaugaguaagaaaacuuuu

SEQ ID NO: 2402656 - RNA, 19 nt, Artificial Sequence
  Description of Artificial Sequence: Synthetic oligonucleotide
acguuaacaugcuggggac

SEQ ID NO: 2402657 - RNA, 19 nt, Artificial Sequence
  Description of Artificial Sequence: Synthetic oligonucleotide
aaacuguuauaaucuugga

SEQ ID NO: 2402658 - RNA, 19 nt, Artificial Sequence
  Description of Artificial Sequence: Synthetic oligonucleotide
uugcccucauccuucaaag

SEQ ID NO: 2402659 - RNA, 19 nt, Artificial Sequence
  Description of Artificial Sequence: Synthetic oligonucleotide
aguguuguaauaaucugga

SEQ ID NO: 2402660 - RNA, 19 nt, Artificial Sequence
  Description of Artificial Sequence: Synthetic oligonucleotide
guaaacuauguuuucucca

SEQ ID NO: 2402661 - RNA, 19 nt, Artificial Sequence
  Description of Artificial Sequence: Synthetic oligonucleotide
agaagcaccggccauuccu

SEQ ID NO: 2402662 - RNA, 19 nt, Artificial Sequence
  Description of Artificial Sequence: Synthetic oligonucleotide
uuagguaaggucacuucau

SEQ ID NO: 2402663 - RNA, 19 nt, Artificial Sequence
  Description of Artificial Sequence: Synthetic oligonucleotide
uuacaaaacucagaccacu

SEQ ID NO: 2402664 - RNA, 19 nt, Artificial Sequence
  Description of Artificial Sequence: Synthetic oligonucleotide
auaagucaagagaucaaag

SEQ ID NO: 2402665 - RNA, 19 nt, Artificial Sequence
  Description of Artificial Sequence: Synthetic oligonucleotide
ccucaagccauccagaagc

SEQ ID NO: 2402666 - RNA, 19 nt, Artificial Sequence
  Description of Artificial Sequence: Synthetic oligonucleotide
gucaagagaucaaagguac

SEQ ID NO: 2402667 - RNA, 19 nt, Artificial Sequence
  Description of Artificial Sequence: Synthetic oligonucleotide
uuucacuacugcuacguua

SEQ ID NO: 2402668 - RNA, 19 nt, Artificial Sequence
  Description of Artificial Sequence: Synthetic oligonucleotide
ucaugcaaaguguuguaau

SEQ ID NO: 2402669 - RNA, 19 nt, Artificial Sequence
  Description of Artificial Sequence: Synthetic oligonucleotide
caaaguguuguaauaaucu

SEQ ID NO: 2402670 - RNA, 19 nt, Artificial Sequence
  Description of Artificial Sequence: Synthetic oligonucleotide
guuauuccaagcaacccug

SEQ ID NO: 2402671 - RNA, 19 nt, Artificial Sequence
  Description of Artificial Sequence: Synthetic oligonucleotide
auaaaugguuucugaggug

SEQ ID NO: 2402672 - RNA, 19 nt, Artificial Sequence
  Description of Artificial Sequence: Synthetic oligonucleotide
uguucuuuagcagcucuca

SEQ ID NO: 2402673 - RNA, 19 nt, Artificial Sequence
  Description of Artificial Sequence: Synthetic oligonucleotide
aaagggaaauuagcaacca

SEQ ID NO: 2402674 - RNA, 19 nt, Artificial Sequence
  Description of Artificial Sequence: Synthetic oligonucleotide
gcuacguuaacaugcuggg

SEQ ID NO: 2402675 - RNA, 19 nt, Artificial Sequence
  Description of Artificial Sequence: Synthetic oligonucleotide
guaaacaccuggaaucaag

SEQ ID NO: 2402676 - RNA, 19 nt, Artificial Sequence
  Description of Artificial Sequence: Synthetic oligonucleotide
uauuugcuaagacuugauu

SEQ ID NO: 2402677 - RNA, 19 nt, Artificial Sequence
  Description of Artificial Sequence: Synthetic oligonucleotide
uaagccuccuucguaaaca

SEQ ID NO: 2402678 - RNA, 19 nt, Artificial Sequence
  Description of Artificial Sequence: Synthetic oligonucleotide
uccuacucaacagucugag

SEQ ID NO: 2402679 - RNA, 19 nt, Artificial Sequence
  Description of Artificial Sequence: Synthetic oligonucleotide
ucucaagaagggcuguuuc

SEQ ID NO: 2402680 - RNA, 19 nt, Artificial Sequence
  Description of Artificial Sequence: Synthetic oligonucleotide
aaagguacacucccagauu

SEQ ID NO: 2402681 - RNA, 19 nt, Artificial Sequence
  Description of Artificial Sequence: Synthetic oligonucleotide
cugucagugucuucagagg

SEQ ID NO: 2402682 - RNA, 19 nt, Artificial Sequence
  Description of Artificial Sequence: Synthetic oligonucleotide
uacucaacagucugaggac

SEQ ID NO: 2402683 - RNA, 19 nt, Artificial Sequence
  Description of Artificial Sequence: Synthetic oligonucleotide
uuauuugcuaagacuugau

SEQ ID NO: 2402684 - RNA, 19 nt, Artificial Sequence
  Description of Artificial Sequence: Synthetic oligonucleotide
gcaacccugauccacagcc

SEQ ID NO: 2402685 - RNA, 19 nt, Artificial Sequence
  Description of Artificial Sequence: Synthetic oligonucleotide
ugcaaaguguuguaauaau

SEQ ID NO: 2402686 - RNA, 19 nt, Artificial Sequence
  Description of Artificial Sequence: Synthetic oligonucleotide
cagcaaauuucacuugggc

SEQ ID NO: 2402687 - RNA, 19 nt, Artificial Sequence
  Description of Artificial Sequence: Synthetic oligonucleotide
uccuucguaaacaccugga

SEQ ID NO: 2402688 - RNA, 19 nt, Artificial Sequence
  Description of Artificial Sequence: Synthetic oligonucleotide
ucccaucuggcucauuuac

SEQ ID NO: 2402689 - RNA, 19 nt, Artificial Sequence
  Description of Artificial Sequence: Synthetic oligonucleotide
ucaagagaucaaagguaca

SEQ ID NO: 2402690 - RNA, 19 nt, Artificial Sequence
  Description of Artificial Sequence: Synthetic oligonucleotide
ggaaaugaacuucucuggc

SEQ ID NO: 2402691 - RNA, 19 nt, Artificial Sequence
  Description of Artificial Sequence: Synthetic oligonucleotide
gaugguuuucacuacugcu

SEQ ID NO: 2402692 - RNA, 19 nt, Artificial Sequence
  Description of Artificial Sequence: Synthetic oligonucleotide
accuuauuugcuaagacuu

SEQ ID NO: 2402693 - RNA, 19 nt, Artificial Sequence
  Description of Artificial Sequence: Synthetic oligonucleotide
uaacaugcuggggaccugg

SEQ ID NO: 2402694 - RNA, 19 nt, Artificial Sequence
  Description of Artificial Sequence: Synthetic oligonucleotide
ugggcugucagugucuuca

SEQ ID NO: 2402695 - RNA, 19 nt, Artificial Sequence
  Description of Artificial Sequence: Synthetic oligonucleotide
uuaagccuccuucguaaac

SEQ ID NO: 2402696 - RNA, 19 nt, Artificial Sequence
  Description of Artificial Sequence: Synthetic oligonucleotide
ugggcuacuuuugacuucc

SEQ ID NO: 2402697 - RNA, 19 nt, Artificial Sequence
  Description of Artificial Sequence: Synthetic oligonucleotide
gcugucagugucuucagag

SEQ ID NO: 2402698 - RNA, 19 nt, Artificial Sequence
  Description of Artificial Sequence: Synthetic oligonucleotide
ccuucaaagggaaauuagc

SEQ ID NO: 2402699 - RNA, 19 nt, Artificial Sequence
  Description of Artificial Sequence: Synthetic oligonucleotide
aaauaagucaagagaucaa

SEQ ID NO: 2402700 - RNA, 19 nt, Artificial Sequence
  Description of Artificial Sequence: Synthetic oligonucleotide
gcucauuuacaucauugcc

SEQ ID NO: 2402701 - RNA, 19 nt, Artificial Sequence
  Description of Artificial Sequence: Synthetic oligonucleotide
cauuagguaaggucacuuc

SEQ ID NO: 2402702 - RNA, 19 nt, Artificial Sequence
  Description of Artificial Sequence: Synthetic oligonucleotide
ugaggacuguuucaugcaa

SEQ ID NO: 2402703 - RNA, 19 nt, Artificial Sequence
  Description of Artificial Sequence: Synthetic oligonucleotide
ucguaaacaccuggaauca

SEQ ID NO: 2402704 - RNA, 19 nt, Artificial Sequence
  Description of Artificial Sequence: Synthetic oligonucleotide
uuucugaggugagaaugag

SEQ ID NO: 2402705 - RNA, 19 nt, Artificial Sequence
  Description of Artificial Sequence: Synthetic oligonucleotide
gggaauugcucuuucaaca

SEQ ID NO: 2402706 - RNA, 19 nt, Artificial Sequence
  Description of Artificial Sequence: Synthetic oligonucleotide
aagcaacccugauccacag

SEQ ID NO: 2402707 - RNA, 19 nt, Artificial Sequence
  Description of Artificial Sequence: Synthetic oligonucleotide
ugggucaccugaacgguca

SEQ ID NO: 2402708 - RNA, 19 nt, Artificial Sequence
  Description of Artificial Sequence: Synthetic oligonucleotide
gcccucauccuucaaaggg

SEQ ID NO: 2402709 - RNA, 19 nt, Artificial Sequence
  Description of Artificial Sequence: Synthetic oligonucleotide
aaugguuucugaggugaga

SEQ ID NO: 2402710 - RNA, 19 nt, Artificial Sequence
  Description of Artificial Sequence: Synthetic oligonucleotide
uaaggucacuucaucgauc

SEQ ID NO: 2402711 - RNA, 19 nt, Artificial Sequence
  Description of Artificial Sequence: Synthetic oligonucleotide
uuauuccaagcaacccuga

SEQ ID NO: 2402712 - RNA, 19 nt, Artificial Sequence
  Description of Artificial Sequence: Synthetic oligonucleotide
gguuucugaggugagaaug

SEQ ID NO: 2402713 - RNA, 19 nt, Artificial Sequence
  Description of Artificial Sequence: Synthetic oligonucleotide
aagcaccggccauuccuac

SEQ ID NO: 2402714 - RNA, 19 nt, Artificial Sequence
  Description of Artificial Sequence: Synthetic oligonucleotide
uuugacuuccuuugucuuu

SEQ ID NO: 2402715 - RNA, 19 nt, Artificial Sequence
  Description of Artificial Sequence: Synthetic oligonucleotide
uuuugacuuccuuugucuu

SEQ ID NO: 2402716 - RNA, 19 nt, Artificial Sequence
  Description of Artificial Sequence: Synthetic oligonucleotide
aucaagucagaaugaguaa

SEQ ID NO: 2402717 - RNA, 19 nt, Artificial Sequence
  Description of Artificial Sequence: Synthetic oligonucleotide
ggcucauuuacaucauugc

SEQ ID NO: 2402718 - RNA, 19 nt, Artificial Sequence
  Description of Artificial Sequence: Synthetic oligonucleotide
auugaggagccuucccuca

SEQ ID NO: 2402719 - RNA, 19 nt, Artificial Sequence
  Description of Artificial Sequence: Synthetic oligonucleotide
gaucaccaaacuguuauaa

SEQ ID NO: 2402720 - RNA, 19 nt, Artificial Sequence
  Description of Artificial Sequence: Synthetic oligonucleotide
cuuauuugcuaagacuuga

SEQ ID NO: 2402721 - RNA, 19 nt, Artificial Sequence
  Description of Artificial Sequence: Synthetic oligonucleotide
caagucagaaugaguaaga

SEQ ID NO: 2402722 - RNA, 19 nt, Artificial Sequence
  Description of Artificial Sequence: Synthetic oligonucleotide
uuccuacucaacagucuga

SEQ ID NO: 2402723 - RNA, 19 nt, Artificial Sequence
  Description of Artificial Sequence: Synthetic oligonucleotide
ugaggagccuucccucaag

SEQ ID NO: 2402724 - RNA, 19 nt, Artificial Sequence
  Description of Artificial Sequence: Synthetic oligonucleotide
caacauuuccauaaccuua

SEQ ID NO: 2402725 - RNA, 19 nt, Artificial Sequence
  Description of Artificial Sequence: Synthetic oligonucleotide
cuccuucguaaacaccugg

SEQ ID NO: 2402726 - RNA, 19 nt, Artificial Sequence
  Description of Artificial Sequence: Synthetic oligonucleotide
ggaaucaagucagaaugag

SEQ ID NO: 2402727 - RNA, 19 nt, Artificial Sequence
  Description of Artificial Sequence: Synthetic oligonucleotide
ccauccagaagcaagucug

SEQ ID NO: 2402728 - RNA, 19 nt, Artificial Sequence
  Description of Artificial Sequence: Synthetic oligonucleotide
aaaccgacauuuacauucu

SEQ ID NO: 2402729 - RNA, 19 nt, Artificial Sequence
  Description of Artificial Sequence: Synthetic oligonucleotide
aucaccaaacuguuauaau

SEQ ID NO: 2402730 - RNA, 19 nt, Artificial Sequence
  Description of Artificial Sequence: Synthetic oligonucleotide
ugcccucauccuucaaagg

SEQ ID NO: 2402731 - RNA, 19 nt, Artificial Sequence
  Description of Artificial Sequence: Synthetic oligonucleotide
ugcuaagacuugauuuaaa

SEQ ID NO: 2402732 - RNA, 19 nt, Artificial Sequence
  Description of Artificial Sequence: Synthetic oligonucleotide
uucaugcaaaguguuguaa

SEQ ID NO: 2402733 - RNA, 19 nt, Artificial Sequence
  Description of Artificial Sequence: Synthetic oligonucleotide
caguuauuccaagcaaccc

SEQ ID NO: 2402734 - RNA, 19 nt, Artificial Sequence
  Description of Artificial Sequence: Synthetic oligonucleotide
agucaagagaucaaaggua

SEQ ID NO: 2402735 - RNA, 19 nt, Artificial Sequence
  Description of Artificial Sequence: Synthetic oligonucleotide
uucuugggcuacuuuugac

SEQ ID NO: 2402736 - RNA, 19 nt, Artificial Sequence
  Description of Artificial Sequence: Synthetic oligonucleotide
agcaacccugauccacagc

SEQ ID NO: 2402737 - RNA, 19 nt, Artificial Sequence
  Description of Artificial Sequence: Synthetic oligonucleotide
uuuaagccuccuucguaaa

SEQ ID NO: 2402738 - RNA, 19 nt, Artificial Sequence
  Description of Artificial Sequence: Synthetic oligonucleotide
cugauccacagccaagauc

SEQ ID NO: 2402739 - RNA, 19 nt, Artificial Sequence
  Description of Artificial Sequence: Synthetic oligonucleotide
uucccucaagccauccaga

SEQ ID NO: 2402740 - RNA, 19 nt, Artificial Sequence
  Description of Artificial Sequence: Synthetic oligonucleotide
caccaaacuguuauaaucu

SEQ ID NO: 2402741 - RNA, 19 nt, Artificial Sequence
  Description of Artificial Sequence: Synthetic oligonucleotide
augcaaaguguuguaauaa

SEQ ID NO: 2402742 - RNA, 19 nt, Artificial Sequence
  Description of Artificial Sequence: Synthetic oligonucleotide
gaaugaguaagaaaacuuu

SEQ ID NO: 2402743 - RNA, 19 nt, Artificial Sequence
  Description of Artificial Sequence: Synthetic oligonucleotide
uccuuugucuuuucccauc

SEQ ID NO: 2402744 - RNA, 19 nt, Artificial Sequence
  Description of Artificial Sequence: Synthetic oligonucleotide
cagaccacuccccagagaa

SEQ ID NO: 2402745 - RNA, 19 nt, Artificial Sequence
  Description of Artificial Sequence: Synthetic oligonucleotide
uguuuucuccagggaauug

SEQ ID NO: 2402746 - RNA, 19 nt, Artificial Sequence
  Description of Artificial Sequence: Synthetic oligonucleotide
gaggagccuucccucaagc

SEQ ID NO: 2402747 - RNA, 19 nt, Artificial Sequence
  Description of Artificial Sequence: Synthetic oligonucleotide
augguuucugaggugagaa

SEQ ID NO: 2402748 - RNA, 19 nt, Artificial Sequence
  Description of Artificial Sequence: Synthetic oligonucleotide
guuucaugcaaaguguugu

SEQ ID NO: 2402749 - RNA, 19 nt, Artificial Sequence
  Description of Artificial Sequence: Synthetic oligonucleotide
cuacugcuacguuaacaug

SEQ ID NO: 2402750 - RNA, 19 nt, Artificial Sequence
  Description of Artificial Sequence: Synthetic oligonucleotide
cacuucaucgaucaccaaa

SEQ ID NO: 2402751 - RNA, 19 nt, Artificial Sequence
  Description of Artificial Sequence: Synthetic oligonucleotide
uugacuuccuuugucuuuu

SEQ ID NO: 2402752 - RNA, 19 nt, Artificial Sequence
  Description of Artificial Sequence: Synthetic oligonucleotide
cccagcaaauuucacuugg

SEQ ID NO: 2402753 - RNA, 19 nt, Artificial Sequence
  Description of Artificial Sequence: Synthetic oligonucleotide
uucccauugaggagccuuc

SEQ ID NO: 2402754 - RNA, 19 nt, Artificial Sequence
  Description of Artificial Sequence: Synthetic oligonucleotide
accaaacuguuauaaucuu

SEQ ID NO: 2402755 - RNA, 19 nt, Artificial Sequence
  Description of Artificial Sequence: Synthetic oligonucleotide
uugcuaagacuugauuuaa

SEQ ID NO: 2402756 - RNA, 19 nt, Artificial Sequence
  Description of Artificial Sequence: Synthetic oligonucleotide
cuacguuaacaugcugggg

SEQ ID NO: 2402757 - RNA, 19 nt, Artificial Sequence
  Description of Artificial Sequence: Synthetic oligonucleotide
augguuuucacuacugcua

SEQ ID NO: 2402758 - RNA, 19 nt, Artificial Sequence
  Description of Artificial Sequence: Synthetic oligonucleotide
uuuucacuacugcuacguu

SEQ ID NO: 2402759 - RNA, 19 nt, Artificial Sequence
  Description of Artificial Sequence: Synthetic oligonucleotide
guuucugaggugagaauga

SEQ ID NO: 2402760 - RNA, 19 nt, Artificial Sequence
  Description of Artificial Sequence: Synthetic oligonucleotide
gcaguuauuccaagcaacc

SEQ ID NO: 2402761 - RNA, 19 nt, Artificial Sequence
  Description of Artificial Sequence: Synthetic oligonucleotide
uuucccauugaggagccuu

SEQ ID NO: 2402762 - RNA, 19 nt, Artificial Sequence
  Description of Artificial Sequence: Synthetic oligonucleotide
auguucuuuagcagcucuc

SEQ ID NO: 2402763 - RNA, 19 nt, Artificial Sequence
  Description of Artificial Sequence: Synthetic oligonucleotide
ggccauuccuacucaacag

SEQ ID NO: 2402764 - RNA, 19 nt, Artificial Sequence
  Description of Artificial Sequence: Synthetic oligonucleotide
cuggcaacauuuccauaac

SEQ ID NO: 2402765 - RNA, 19 nt, Artificial Sequence
  Description of Artificial Sequence: Synthetic oligonucleotide
uuaaaucuuugggcauagc

SEQ ID NO: 2402766 - RNA, 19 nt, Artificial Sequence
  Description of Artificial Sequence: Synthetic oligonucleotide
ucugggucaccugaacggu

SEQ ID NO: 2402767 - RNA, 19 nt, Artificial Sequence
  Description of Artificial Sequence: Synthetic oligonucleotide
ucccucaagccauccagaa

SEQ ID NO: 2402768 - RNA, 19 nt, Artificial Sequence
  Description of Artificial Sequence: Synthetic oligonucleotide
acucaacagucugaggacu

SEQ ID NO: 2402769 - RNA, 19 nt, Artificial Sequence
  Description of Artificial Sequence: Synthetic oligonucleotide
uggggaccuggcaacauuu

SEQ ID NO: 2402770 - RNA, 19 nt, Artificial Sequence
  Description of Artificial Sequence: Synthetic oligonucleotide
ggcauagcauguucuuuag

SEQ ID NO: 2402771 - RNA, 19 nt, Artificial Sequence
  Description of Artificial Sequence: Synthetic oligonucleotide
agucugaggacuguuucau

SEQ ID NO: 2402772 - RNA, 19 nt, Artificial Sequence
  Description of Artificial Sequence: Synthetic oligonucleotide
gcaaccacauuagguaagg

SEQ ID NO: 2402773 - RNA, 19 nt, Artificial Sequence
  Description of Artificial Sequence: Synthetic oligonucleotide
gcaagucugacaguucugc

SEQ ID NO: 2402774 - RNA, 19 nt, Artificial Sequence
  Description of Artificial Sequence: Synthetic oligonucleotide
ucugacaguucugcagaac

SEQ ID NO: 2402775 - RNA, 19 nt, Artificial Sequence
  Description of Artificial Sequence: Synthetic oligonucleotide
cagcucucaagaagggcug

SEQ ID NO: 2402776 - RNA, 19 nt, Artificial Sequence
  Description of Artificial Sequence: Synthetic oligonucleotide
ucacauguuucugggucac

SEQ ID NO: 2402777 - RNA, 19 nt, Artificial Sequence
  Description of Artificial Sequence: Synthetic oligonucleotide
caugcuggggaccuggcaa

SEQ ID NO: 2402778 - RNA, 19 nt, Artificial Sequence
  Description of Artificial Sequence: Synthetic oligonucleotide
uugaggagccuucccucaa

SEQ ID NO: 2402779 - RNA, 19 nt, Artificial Sequence
  Description of Artificial Sequence: Synthetic oligonucleotide
acauuagguaaggucacuu

SEQ ID NO: 2402780 - RNA, 19 nt, Artificial Sequence
  Description of Artificial Sequence: Synthetic oligonucleotide
agcugcacugagugggcug

SEQ ID NO: 2402781 - RNA, 19 nt, Artificial Sequence
  Description of Artificial Sequence: Synthetic oligonucleotide
gcaaaguguuguaauaauc

SEQ ID NO: 2402782 - RNA, 19 nt, Artificial Sequence
  Description of Artificial Sequence: Synthetic oligonucleotide
aacagucugaggacuguuu

SEQ ID NO: 2402783 - RNA, 19 nt, Artificial Sequence
  Description of Artificial Sequence: Synthetic oligonucleotide
uacauucuucuugggcuac

SEQ ID NO: 2402784 - RNA, 19 nt, Artificial Sequence
  Description of Artificial Sequence: Synthetic oligonucleotide
cagggaauugcucuuucaa

SEQ ID NO: 2402785 - RNA, 19 nt, Artificial Sequence
  Description of Artificial Sequence: Synthetic oligonucleotide
cugaggacuguuucaugca

SEQ ID NO: 2402786 - RNA, 19 nt, Artificial Sequence
  Description of Artificial Sequence: Synthetic oligonucleotide
gggaccuggcaacauuucc

SEQ ID NO: 2402787 - RNA, 19 nt, Artificial Sequence
  Description of Artificial Sequence: Synthetic oligonucleotide
cugaggugagaaugagguc

SEQ ID NO: 2402788 - RNA, 19 nt, Artificial Sequence
  Description of Artificial Sequence: Synthetic oligonucleotide
guuaacaugcuggggaccu

SEQ ID NO: 2402789 - RNA, 19 nt, Artificial Sequence
  Description of Artificial Sequence: Synthetic oligonucleotide
ugguuucugaggugagaau

SEQ ID NO: 2402790 - RNA, 19 nt, Artificial Sequence
  Description of Artificial Sequence: Synthetic oligonucleotide
cagaacucuuucuguccug

SEQ ID NO: 2402791 - RNA, 19 nt, Artificial Sequence
  Description of Artificial Sequence: Synthetic oligonucleotide
uuaacaugcuggggaccug

SEQ ID NO: 2402792 - RNA, 19 nt, Artificial Sequence
  Description of Artificial Sequence: Synthetic oligonucleotide
ucccauugaggagccuucc

SEQ ID NO: 2402793 - RNA, 19 nt, Artificial Sequence
  Description of Artificial Sequence: Synthetic oligonucleotide
cuucguaaacaccuggaau

SEQ ID NO: 2402794 - RNA, 19 nt, Artificial Sequence
  Description of Artificial Sequence: Synthetic oligonucleotide
cauccagaagcaagucuga

SEQ ID NO: 2402795 - RNA, 19 nt, Artificial Sequence
  Description of Artificial Sequence: Synthetic oligonucleotide
cagucugaggacuguuuca

SEQ ID NO: 2402796 - RNA, 19 nt, Artificial Sequence
  Description of Artificial Sequence: Synthetic oligonucleotide
ucacuacugcuacguuaac

SEQ ID NO: 2402797 - RNA, 19 nt, Artificial Sequence
  Description of Artificial Sequence: Synthetic oligonucleotide
uccaagcaacccugaucca

SEQ ID NO: 2402798 - RNA, 19 nt, Artificial Sequence
  Description of Artificial Sequence: Synthetic oligonucleotide
guucuuuagcagcucucaa

SEQ ID NO: 2402799 - RNA, 19 nt, Artificial Sequence
  Description of Artificial Sequence: Synthetic oligonucleotide
gcuaagacuugauuuaaau

SEQ ID NO: 2402800 - RNA, 19 nt, Artificial Sequence
  Description of Artificial Sequence: Synthetic oligonucleotide
guaaggucacuucaucgau

SEQ ID NO: 2402801 - RNA, 19 nt, Artificial Sequence
  Description of Artificial Sequence: Synthetic oligonucleotide
agacuugauuuaaaucuuu

SEQ ID NO: 2402802 - RNA, 19 nt, Artificial Sequence
  Description of Artificial Sequence: Synthetic oligonucleotide
cacuacugcuacguuaaca

SEQ ID NO: 2402803 - RNA, 19 nt, Artificial Sequence
  Description of Artificial Sequence: Synthetic oligonucleotide
cugcaguuauuccaagcaa

SEQ ID NO: 2402804 - RNA, 19 nt, Artificial Sequence
  Description of Artificial Sequence: Synthetic oligonucleotide
ugcacugagugggcuguca

SEQ ID NO: 2402805 - RNA, 19 nt, Artificial Sequence
  Description of Artificial Sequence: Synthetic oligonucleotide
caacaagaugguuuucacu

SEQ ID NO: 2402806 - RNA, 19 nt, Artificial Sequence
  Description of Artificial Sequence: Synthetic oligonucleotide
cucaagccauccagaagca

SEQ ID NO: 2402807 - RNA, 19 nt, Artificial Sequence
  Description of Artificial Sequence: Synthetic oligonucleotide
agcaccggccauuccuacu

SEQ ID NO: 2402808 - RNA, 19 nt, Artificial Sequence
  Description of Artificial Sequence: Synthetic oligonucleotide
ccacauuagguaaggucac

SEQ ID NO: 2402809 - RNA, 19 nt, Artificial Sequence
  Description of Artificial Sequence: Synthetic oligonucleotide
gcuacuuuugacuuccuuu

SEQ ID NO: 2402810 - RNA, 19 nt, Artificial Sequence
  Description of Artificial Sequence: Synthetic oligonucleotide
cauuuacaucauugcccuc

SEQ ID NO: 2402811 - RNA, 19 nt, Artificial Sequence
  Description of Artificial Sequence: Synthetic oligonucleotide
gcauagcauguucuuuagc

SEQ ID NO: 2402812 - RNA, 19 nt, Artificial Sequence
  Description of Artificial Sequence: Synthetic oligonucleotide
ugggcauagcauguucuuu

SEQ ID NO: 2402813 - RNA, 19 nt, Artificial Sequence
  Description of Artificial Sequence: Synthetic oligonucleotide
gucaccugaacggucagcu

SEQ ID NO: 2402814 - RNA, 19 nt, Artificial Sequence
  Description of Artificial Sequence: Synthetic oligonucleotide
uugccccagcaaauuucac

SEQ ID NO: 2402815 - RNA, 19 nt, Artificial Sequence
  Description of Artificial Sequence: Synthetic oligonucleotide
cugggucaccugaacgguc

SEQ ID NO: 2402816 - RNA, 19 nt, Artificial Sequence
  Description of Artificial Sequence: Synthetic oligonucleotide
ccuacucaacagucugagg

SEQ ID NO: 2402817 - RNA, 19 nt, Artificial Sequence
  Description of Artificial Sequence: Synthetic oligonucleotide
gaccuggcaacauuuccau

SEQ ID NO: 2402818 - RNA, 19 nt, Artificial Sequence
  Description of Artificial Sequence: Synthetic oligonucleotide
gggcauagcauguucuuua

SEQ ID NO: 2402819 - RNA, 19 nt, Artificial Sequence
  Description of Artificial Sequence: Synthetic oligonucleotide
ggaccuggcaacauuucca

SEQ ID NO: 2402820 - RNA, 19 nt, Artificial Sequence
  Description of Artificial Sequence: Synthetic oligonucleotide
ggccuuugugaaauaaguc

SEQ ID NO: 2402821 - RNA, 19 nt, Artificial Sequence
  Description of Artificial Sequence: Synthetic oligonucleotide
gaacggucagcugcacuga

SEQ ID NO: 2402822 - RNA, 19 nt, Artificial Sequence
  Description of Artificial Sequence: Synthetic oligonucleotide
acauuuccauaaccuuauu

SEQ ID NO: 2402823 - RNA, 19 nt, Artificial Sequence
  Description of Artificial Sequence: Synthetic oligonucleotide
ccaagcaacccugauccac

SEQ ID NO: 2402824 - RNA, 19 nt, Artificial Sequence
  Description of Artificial Sequence: Synthetic oligonucleotide
gcacugagugggcugucag

SEQ ID NO: 2402825 - RNA, 19 nt, Artificial Sequence
  Description of Artificial Sequence: Synthetic oligonucleotide
cugcuacguuaacaugcug

SEQ ID NO: 2402826 - RNA, 19 nt, Artificial Sequence
  Description of Artificial Sequence: Synthetic oligonucleotide
gaagcaccggccauuccua

SEQ ID NO: 2402827 - RNA, 19 nt, Artificial Sequence
  Description of Artificial Sequence: Synthetic oligonucleotide
aaauuucacuugggccuuu

SEQ ID NO: 2402828 - RNA, 19 nt, Artificial Sequence
  Description of Artificial Sequence: Synthetic oligonucleotide
caacccugauccacagcca

SEQ ID NO: 2402829 - RNA, 19 nt, Artificial Sequence
  Description of Artificial Sequence: Synthetic oligonucleotide
gcaccggccauuccuacuc

SEQ ID NO: 2402830 - RNA, 19 nt, Artificial Sequence
  Description of Artificial Sequence: Synthetic oligonucleotide
cagccaagauccaacacuu

SEQ ID NO: 2402831 - RNA, 19 nt, Artificial Sequence
  Description of Artificial Sequence: Synthetic oligonucleotide
cggucagcugcacugagug

SEQ ID NO: 2402832 - RNA, 19 nt, Artificial Sequence
  Description of Artificial Sequence: Synthetic oligonucleotide
gaacucuuucuguccugcu

SEQ ID NO: 2402833 - RNA, 19 nt, Artificial Sequence
  Description of Artificial Sequence: Synthetic oligonucleotide
agcucucaagaagggcugu

SEQ ID NO: 2402834 - RNA, 19 nt, Artificial Sequence
  Description of Artificial Sequence: Synthetic oligonucleotide
gcagcucucaagaagggcu

SEQ ID NO: 2402835 - RNA, 19 nt, Artificial Sequence
  Description of Artificial Sequence: Synthetic oligonucleotide
cccucauccuucaaaggga

SEQ ID NO: 2402836 - RNA, 19 nt, Artificial Sequence
  Description of Artificial Sequence: Synthetic oligonucleotide
augugcuuugcuggccaga

SEQ ID NO: 2402837 - RNA, 19 nt, Artificial Sequence
  Description of Artificial Sequence: Synthetic oligonucleotide
accggccauuccuacucaa

SEQ ID NO: 2402838 - RNA, 19 nt, Artificial Sequence
  Description of Artificial Sequence: Synthetic oligonucleotide
uuuucccauugaggagccu

SEQ ID NO: 2402839 - RNA, 19 nt, Artificial Sequence
  Description of Artificial Sequence: Synthetic oligonucleotide
cccauugaggagccuuccc

SEQ ID NO: 2402840 - RNA, 19 nt, Artificial Sequence
  Description of Artificial Sequence: Synthetic oligonucleotide
cucauccuucaaagggaaa

SEQ ID NO: 2402841 - RNA, 19 nt, Artificial Sequence
  Description of Artificial Sequence: Synthetic oligonucleotide
caucgaucaccaaacuguu

SEQ ID NO: 2402842 - RNA, 19 nt, Artificial Sequence
  Description of Artificial Sequence: Synthetic oligonucleotide
gggccuuugugaaauaagu

SEQ ID NO: 2402843 - RNA, 19 nt, Artificial Sequence
  Description of Artificial Sequence: Synthetic oligonucleotide
caucauugcccucauccuu

SEQ ID NO: 2402844 - RNA, 19 nt, Artificial Sequence
  Description of Artificial Sequence: Synthetic oligonucleotide
cccucaagccauccagaag

SEQ ID NO: 2402845 - RNA, 19 nt, Artificial Sequence
  Description of Artificial Sequence: Synthetic oligonucleotide
guguuguaauaaucuggau

SEQ ID NO: 2402846 - RNA, 19 nt, Artificial Sequence
  Description of Artificial Sequence: Synthetic oligonucleotide
gccaagauccaacacuuuu

SEQ ID NO: 2402847 - RNA, 19 nt, Artificial Sequence
  Description of Artificial Sequence: Synthetic oligonucleotide
ccuucguaaacaccuggaa

SEQ ID NO: 2402848 - RNA, 19 nt, Artificial Sequence
  Description of Artificial Sequence: Synthetic oligonucleotide
aucgaucaccaaacuguua

SEQ ID NO: 2402849 - RNA, 19 nt, Artificial Sequence
  Description of Artificial Sequence: Synthetic oligonucleotide
gggucaccugaacggucag

SEQ ID NO: 2402850 - RNA, 19 nt, Artificial Sequence
  Description of Artificial Sequence: Synthetic oligonucleotide
ccucauccuucaaagggaa

SEQ ID NO: 2402851 - RNA, 19 nt, Artificial Sequence
  Description of Artificial Sequence: Synthetic oligonucleotide
ccggccauuccuacucaac

SEQ ID NO: 2402852 - RNA, 19 nt, Artificial Sequence
  Description of Artificial Sequence: Synthetic oligonucleotide
ggucaccugaacggucagc

SEQ ID NO: 2402853 - RNA, 19 nt, Artificial Sequence
  Description of Artificial Sequence: Synthetic oligonucleotide
agguacacucccagauuuu

SEQ ID NO: 2402854 - RNA, 19 nt, Artificial Sequence
  Description of Artificial Sequence: Synthetic oligonucleotide
agccuucccucaagccauc

SEQ ID NO: 2402855 - RNA, 19 nt, Artificial Sequence
  Description of Artificial Sequence: Synthetic oligonucleotide
cacugagugggcugucagu

SEQ ID NO: 2402856 - RNA, 19 nt, Artificial Sequence
  Description of Artificial Sequence: Synthetic oligonucleotide
cguuaacaugcuggggacc

SEQ ID NO: 2402857 - RNA, 19 nt, Artificial Sequence
  Description of Artificial Sequence: Synthetic oligonucleotide
cugaacggucagcugcacu

SEQ ID NO: 2402858 - RNA, 19 nt, Artificial Sequence
  Description of Artificial Sequence: Synthetic oligonucleotide
agaccacuccccagagaaa

SEQ ID NO: 2402859 - RNA, 19 nt, Artificial Sequence
  Description of Artificial Sequence: Synthetic oligonucleotide
gcucuuucaacaagauggu

SEQ ID NO: 2402860 - RNA, 19 nt, Artificial Sequence
  Description of Artificial Sequence: Synthetic oligonucleotide
ccauugaggagccuucccu

SEQ ID NO: 2402861 - RNA, 19 nt, Artificial Sequence
  Description of Artificial Sequence: Synthetic oligonucleotide
caguucugcagaacucuuu

SEQ ID NO: 2402862 - RNA, 19 nt, Artificial Sequence
  Description of Artificial Sequence: Synthetic oligonucleotide
cccugauccacagccaaga

SEQ ID NO: 2402863 - RNA, 19 nt, Artificial Sequence
  Description of Artificial Sequence: Synthetic oligonucleotide
agccaagauccaacacuuu

SEQ ID NO: 2402864 - RNA, 19 nt, Artificial Sequence
  Description of Artificial Sequence: Synthetic oligonucleotide
caccggccauuccuacuca

SEQ ID NO: 2402865 - RNA, 19 nt, Artificial Sequence
  Description of Artificial Sequence: Synthetic oligonucleotide
ggacuguuucaugcaaagu

SEQ ID NO: 2402866 - RNA, 19 nt, Artificial Sequence
  Description of Artificial Sequence: Synthetic oligonucleotide
caaccacauuagguaaggu

SEQ ID NO: 2402867 - RNA, 19 nt, Artificial Sequence
  Description of Artificial Sequence: Synthetic oligonucleotide
aggugagaaugaggucaua

SEQ ID NO: 2402868 - RNA, 19 nt, Artificial Sequence
  Description of Artificial Sequence: Synthetic oligonucleotide
ccuucccucaagccaucca

SEQ ID NO: 2402869 - RNA, 19 nt, Artificial Sequence
  Description of Artificial Sequence: Synthetic oligonucleotide
cuggggaccuggcaacauu

SEQ ID NO: 2402870 - RNA, 19 nt, Artificial Sequence
  Description of Artificial Sequence: Synthetic oligonucleotide
cgaucaccaaacuguuaua

SEQ ID NO: 2402871 - RNA, 19 nt, Artificial Sequence
  Description of Artificial Sequence: Synthetic oligonucleotide
cguaaacaccuggaaucaa

SEQ ID NO: 2402872 - RNA, 19 nt, Artificial Sequence
  Description of Artificial Sequence: Synthetic oligonucleotide
cagcugcacugagugggcu

SEQ ID NO: 2402873 - RNA, 19 nt, Artificial Sequence
  Description of Artificial Sequence: Synthetic oligonucleotide
aauacaaggacugagggcc

SEQ ID NO: 2402874 - RNA, 19 nt, Artificial Sequence
  Description of Artificial Sequence: Synthetic oligonucleotide
aacagaauaccuaagaggc

SEQ ID NO: 2402875 - RNA, 19 nt, Artificial Sequence
  Description of Artificial Sequence: Synthetic oligonucleotide
aaacagaauaccuaagagg

SEQ ID NO: 2402876 - RNA, 19 nt, Artificial Sequence
  Description of Artificial Sequence: Synthetic oligonucleotide
uuuuccaagaauaggaggg

SEQ ID NO: 2402877 - RNA, 19 nt, Artificial Sequence
  Description of Artificial Sequence: Synthetic oligonucleotide
aagaagacagcagacaucc

SEQ ID NO: 2402878 - RNA, 19 nt, Artificial Sequence
  Description of Artificial Sequence: Synthetic oligonucleotide
aauugaacugucccaaccc

SEQ ID NO: 2402879 - RNA, 19 nt, Artificial Sequence
  Description of Artificial Sequence: Synthetic oligonucleotide
caaaauuccaucuuggggc

SEQ ID NO: 2402880 - RNA, 19 nt, Artificial Sequence
  Description of Artificial Sequence: Synthetic oligonucleotide
aaauacaaggacugagggc

SEQ ID NO: 2402881 - RNA, 19 nt, Artificial Sequence
  Description of Artificial Sequence: Synthetic oligonucleotide
aaaaggugagacuuggaag

SEQ ID NO: 2402882 - RNA, 19 nt, Artificial Sequence
  Description of Artificial Sequence: Synthetic oligonucleotide
uaauagagaaaucagaauu

SEQ ID NO: 2402883 - RNA, 19 nt, Artificial Sequence
  Description of Artificial Sequence: Synthetic oligonucleotide
uagauaauaaggaagugac

SEQ ID NO: 2402884 - RNA, 19 nt, Artificial Sequence
  Description of Artificial Sequence: Synthetic oligonucleotide
gaaauacaaggacugaggg

SEQ ID NO: 2402885 - RNA, 19 nt, Artificial Sequence
  Description of Artificial Sequence: Synthetic oligonucleotide
aaaggugagacuuggaaga

SEQ ID NO: 2402886 - RNA, 19 nt, Artificial Sequence
  Description of Artificial Sequence: Synthetic oligonucleotide
agauuuacuuucuuaauag

SEQ ID NO: 2402887 - RNA, 19 nt, Artificial Sequence
  Description of Artificial Sequence: Synthetic oligonucleotide
aacacaagaagacagcaga

SEQ ID NO: 2402888 - RNA, 19 nt, Artificial Sequence
  Description of Artificial Sequence: Synthetic oligonucleotide
aguaugguggggucgaacc

SEQ ID NO: 2402889 - RNA, 19 nt, Artificial Sequence
  Description of Artificial Sequence: Synthetic oligonucleotide
uucuuaauagagaaaucag

SEQ ID NO: 2402890 - RNA, 19 nt, Artificial Sequence
  Description of Artificial Sequence: Synthetic oligonucleotide
aaaucagaauuucccugcc

SEQ ID NO: 2402891 - RNA, 19 nt, Artificial Sequence
  Description of Artificial Sequence: Synthetic oligonucleotide
ucaauauacacagagggac

SEQ ID NO: 2402892 - RNA, 19 nt, Artificial Sequence
  Description of Artificial Sequence: Synthetic oligonucleotide
caagaaauggggcaaacag

SEQ ID NO: 2402893 - RNA, 19 nt, Artificial Sequence
  Description of Artificial Sequence: Synthetic oligonucleotide
uccuagauaauaaggaagu

SEQ ID NO: 2402894 - RNA, 19 nt, Artificial Sequence
  Description of Artificial Sequence: Synthetic oligonucleotide
aaauggggcaaacagaaua

SEQ ID NO: 2402895 - RNA, 19 nt, Artificial Sequence
  Description of Artificial Sequence: Synthetic oligonucleotide
aaagagaaauacaaggacu

SEQ ID NO: 2402896 - RNA, 19 nt, Artificial Sequence
  Description of Artificial Sequence: Synthetic oligonucleotide
auuagagcugaacagugag

SEQ ID NO: 2402897 - RNA, 19 nt, Artificial Sequence
  Description of Artificial Sequence: Synthetic oligonucleotide
uaauuagagcugaacagug

SEQ ID NO: 2402898 - RNA, 19 nt, Artificial Sequence
  Description of Artificial Sequence: Synthetic oligonucleotide
aauggggcaaacagaauac

SEQ ID NO: 2402899 - RNA, 19 nt, Artificial Sequence
  Description of Artificial Sequence: Synthetic oligonucleotide
aagagaaauacaaggacug

SEQ ID NO: 2402900 - RNA, 19 nt, Artificial Sequence
  Description of Artificial Sequence: Synthetic oligonucleotide
aauaggagggcggaucuac

SEQ ID NO: 2402901 - RNA, 19 nt, Artificial Sequence
  Description of Artificial Sequence: Synthetic oligonucleotide
cugaccucaagaaaugggg

SEQ ID NO: 2402902 - RNA, 19 nt, Artificial Sequence
  Description of Artificial Sequence: Synthetic oligonucleotide
gaauuggagauuuacuuuc

SEQ ID NO: 2402903 - RNA, 19 nt, Artificial Sequence
  Description of Artificial Sequence: Synthetic oligonucleotide
gagauccuagauaauaagg

SEQ ID NO: 2402904 - RNA, 19 nt, Artificial Sequence
  Description of Artificial Sequence: Synthetic oligonucleotide
cuuuuccaagaauaggagg

SEQ ID NO: 2402905 - RNA, 19 nt, Artificial Sequence
  Description of Artificial Sequence: Synthetic oligonucleotide
gauagacucugagagaucc

SEQ ID NO: 2402906 - RNA, 19 nt, Artificial Sequence
  Description of Artificial Sequence: Synthetic oligonucleotide
uaaggccugagccagauuc

SEQ ID NO: 2402907 - RNA, 19 nt, Artificial Sequence
  Description of Artificial Sequence: Synthetic oligonucleotide
aaaacacaagaagacagca

SEQ ID NO: 2402908 - RNA, 19 nt, Artificial Sequence
  Description of Artificial Sequence: Synthetic oligonucleotide
ucagacuugggccagugga

SEQ ID NO: 2402909 - RNA, 19 nt, Artificial Sequence
  Description of Artificial Sequence: Synthetic oligonucleotide
cuauaauuagagcugaaca

SEQ ID NO: 2402910 - RNA, 19 nt, Artificial Sequence
  Description of Artificial Sequence: Synthetic oligonucleotide
ugagcgugagagcaggagg

SEQ ID NO: 2402911 - RNA, 19 nt, Artificial Sequence
  Description of Artificial Sequence: Synthetic oligonucleotide
gggagauagacucugagag

SEQ ID NO: 2402912 - RNA, 19 nt, Artificial Sequence
  Description of Artificial Sequence: Synthetic oligonucleotide
uagagaaaucagaauuucc

SEQ ID NO: 2402913 - RNA, 19 nt, Artificial Sequence
  Description of Artificial Sequence: Synthetic oligonucleotide
aaaauuccaucuuggggcu

SEQ ID NO: 2402914 - RNA, 19 nt, Artificial Sequence
  Description of Artificial Sequence: Synthetic oligonucleotide
uuaccaacccucuccaucc

SEQ ID NO: 2402915 - RNA, 19 nt, Artificial Sequence
  Description of Artificial Sequence: Synthetic oligonucleotide
ucaccagucauggagaggc

SEQ ID NO: 2402916 - RNA, 19 nt, Artificial Sequence
  Description of Artificial Sequence: Synthetic oligonucleotide
guaguuaccaacccucucc

SEQ ID NO: 2402917 - RNA, 19 nt, Artificial Sequence
  Description of Artificial Sequence: Synthetic oligonucleotide
ugauuguuauugcugguga

SEQ ID NO: 2402918 - RNA, 19 nt, Artificial Sequence
  Description of Artificial Sequence: Synthetic oligonucleotide
uaccuaagaggcaggauag

SEQ ID NO: 2402919 - RNA, 19 nt, Artificial Sequence
  Description of Artificial Sequence: Synthetic oligonucleotide
aagaauaggagggcggauc

SEQ ID NO: 2402920 - RNA, 19 nt, Artificial Sequence
  Description of Artificial Sequence: Synthetic oligonucleotide
uccaagaauaggagggcgg

SEQ ID NO: 2402921 - RNA, 19 nt, Artificial Sequence
  Description of Artificial Sequence: Synthetic oligonucleotide
agaaauacaaggacugagg

SEQ ID NO: 2402922 - RNA, 19 nt, Artificial Sequence
  Description of Artificial Sequence: Synthetic oligonucleotide
aauaaggaagugacaauug

SEQ ID NO: 2402923 - RNA, 19 nt, Artificial Sequence
  Description of Artificial Sequence: Synthetic oligonucleotide
ugaccuuuuccaagaauag

SEQ ID NO: 2402924 - RNA, 19 nt, Artificial Sequence
  Description of Artificial Sequence: Synthetic oligonucleotide
acuuggaagaaaggcagcc

SEQ ID NO: 2402925 - RNA, 19 nt, Artificial Sequence
  Description of Artificial Sequence: Synthetic oligonucleotide
auauagccuuguaugaucc

SEQ ID NO: 2402926 - RNA, 19 nt, Artificial Sequence
  Description of Artificial Sequence: Synthetic oligonucleotide
ugagugacccugaguaugg

SEQ ID NO: 2402927 - RNA, 19 nt, Artificial Sequence
  Description of Artificial Sequence: Synthetic oligonucleotide
agagauccuagauaauaag

SEQ ID NO: 2402928 - RNA, 19 nt, Artificial Sequence
  Description of Artificial Sequence: Synthetic oligonucleotide
ccucaauauacacagaggg

SEQ ID NO: 2402929 - RNA, 19 nt, Artificial Sequence
  Description of Artificial Sequence: Synthetic oligonucleotide
auagagaaaucagaauuuc

SEQ ID NO: 2402930 - RNA, 19 nt, Artificial Sequence
  Description of Artificial Sequence: Synthetic oligonucleotide
uccaucuuggggcuggaag

SEQ ID NO: 2402931 - RNA, 19 nt, Artificial Sequence
  Description of Artificial Sequence: Synthetic oligonucleotide
aauagagaaaucagaauuu

SEQ ID NO: 2402932 - RNA, 19 nt, Artificial Sequence
  Description of Artificial Sequence: Synthetic oligonucleotide
aacccauacucucucucuc

SEQ ID NO: 2402933 - RNA, 19 nt, Artificial Sequence
  Description of Artificial Sequence: Synthetic oligonucleotide
acagcagacauccaucuga

SEQ ID NO: 2402934 - RNA, 19 nt, Artificial Sequence
  Description of Artificial Sequence: Synthetic oligonucleotide
cucaccucccucaauauac

SEQ ID NO: 2402935 - RNA, 19 nt, Artificial Sequence
  Description of Artificial Sequence: Synthetic oligonucleotide
auaaggaagugacaauuga

SEQ ID NO: 2402936 - RNA, 19 nt, Artificial Sequence
  Description of Artificial Sequence: Synthetic oligonucleotide
auagcuauaauuagagcug

SEQ ID NO: 2402937 - RNA, 19 nt, Artificial Sequence
  Description of Artificial Sequence: Synthetic oligonucleotide
acuagcccaagcucuaagg

SEQ ID NO: 2402938 - RNA, 19 nt, Artificial Sequence
  Description of Artificial Sequence: Synthetic oligonucleotide
agaaaggcagccuggaaga

SEQ ID NO: 2402939 - RNA, 19 nt, Artificial Sequence
  Description of Artificial Sequence: Synthetic oligonucleotide
aggauagcuauaauuagag

SEQ ID NO: 2402940 - RNA, 19 nt, Artificial Sequence
  Description of Artificial Sequence: Synthetic oligonucleotide
uagccuuguaugauccugg

SEQ ID NO: 2402941 - RNA, 19 nt, Artificial Sequence
  Description of Artificial Sequence: Synthetic oligonucleotide
acaguaguuaccaacccuc

SEQ ID NO: 2402942 - RNA, 19 nt, Artificial Sequence
  Description of Artificial Sequence: Synthetic oligonucleotide
uaauaaggaagugacaauu

SEQ ID NO: 2402943 - RNA, 19 nt, Artificial Sequence
  Description of Artificial Sequence: Synthetic oligonucleotide
uauugcuggugaauuggag

SEQ ID NO: 2402944 - RNA, 19 nt, Artificial Sequence
  Description of Artificial Sequence: Synthetic oligonucleotide
uaagaggcaggauagcuau

SEQ ID NO: 2402945 - RNA, 19 nt, Artificial Sequence
  Description of Artificial Sequence: Synthetic oligonucleotide
cagaauaccuaagaggcag

SEQ ID NO: 2402946 - RNA, 19 nt, Artificial Sequence
  Description of Artificial Sequence: Synthetic oligonucleotide
auaccuaagaggcaggaua

SEQ ID NO: 2402947 - RNA, 19 nt, Artificial Sequence
  Description of Artificial Sequence: Synthetic oligonucleotide
ugaccucaagaaauggggc

SEQ ID NO: 2402948 - RNA, 19 nt, Artificial Sequence
  Description of Artificial Sequence: Synthetic oligonucleotide
ugaauuggagauuuacuuu

SEQ ID NO: 2402949 - RNA, 19 nt, Artificial Sequence
  Description of Artificial Sequence: Synthetic oligonucleotide
ggggauauagccuuguaug

SEQ ID NO: 2402950 - RNA, 19 nt, Artificial Sequence
  Description of Artificial Sequence: Synthetic oligonucleotide
caauugaacugucccaacc

SEQ ID NO: 2402951 - RNA, 19 nt, Artificial Sequence
  Description of Artificial Sequence: Synthetic oligonucleotide
ggaagugacaauugaacug

SEQ ID NO: 2402952 - RNA, 19 nt, Artificial Sequence
  Description of Artificial Sequence: Synthetic oligonucleotide
agauccuagauaauaagga

SEQ ID NO: 2402953 - RNA, 19 nt, Artificial Sequence
  Description of Artificial Sequence: Synthetic oligonucleotide
auccuagauaauaaggaag

SEQ ID NO: 2402954 - RNA, 19 nt, Artificial Sequence
  Description of Artificial Sequence: Synthetic oligonucleotide
gauuuacuuucuuaauaga

SEQ ID NO: 2402955 - RNA, 19 nt, Artificial Sequence
  Description of Artificial Sequence: Synthetic oligonucleotide
uguaugauccuggccagag

SEQ ID NO: 2402956 - RNA, 19 nt, Artificial Sequence
  Description of Artificial Sequence: Synthetic oligonucleotide
ggucgaaccaagcagcagg

SEQ ID NO: 2402957 - RNA, 19 nt, Artificial Sequence
  Description of Artificial Sequence: Synthetic oligonucleotide
acaauugaacugucccaac

SEQ ID NO: 2402958 - RNA, 19 nt, Artificial Sequence
  Description of Artificial Sequence: Synthetic oligonucleotide
aguaguuaccaacccucuc

SEQ ID NO: 2402959 - RNA, 19 nt, Artificial Sequence
  Description of Artificial Sequence: Synthetic oligonucleotide
gauccuagauaauaaggaa

SEQ ID NO: 2402960 - RNA, 19 nt, Artificial Sequence
  Description of Artificial Sequence: Synthetic oligonucleotide
ugagagauccuagauaaua

SEQ ID NO: 2402961 - RNA, 19 nt, Artificial Sequence
  Description of Artificial Sequence: Synthetic oligonucleotide
acgaggugagaugugagcg

SEQ ID NO: 2402962 - RNA, 19 nt, Artificial Sequence
  Description of Artificial Sequence: Synthetic oligonucleotide
aacccucuccauccagccc

SEQ ID NO: 2402963 - RNA, 19 nt, Artificial Sequence
  Description of Artificial Sequence: Synthetic oligonucleotide
gugacccugaguauggugg

SEQ ID NO: 2402964 - RNA, 19 nt, Artificial Sequence
  Description of Artificial Sequence: Synthetic oligonucleotide
agugacaauugaacugucc

SEQ ID NO: 2402965 - RNA, 19 nt, Artificial Sequence
  Description of Artificial Sequence: Synthetic oligonucleotide
acacgcucaggacuagccc

SEQ ID NO: 2402966 - RNA, 19 nt, Artificial Sequence
  Description of Artificial Sequence: Synthetic oligonucleotide
uucccugccugucuugggg

SEQ ID NO: 2402967 - RNA, 19 nt, Artificial Sequence
  Description of Artificial Sequence: Synthetic oligonucleotide
uggggucgaaccaagcagc

SEQ ID NO: 2402968 - RNA, 19 nt, Artificial Sequence
  Description of Artificial Sequence: Synthetic oligonucleotide
uuauugcuggugaauugga

SEQ ID NO: 2402969 - RNA, 19 nt, Artificial Sequence
  Description of Artificial Sequence: Synthetic oligonucleotide
gucuuggggagauagacuc

SEQ ID NO: 2402970 - RNA, 19 nt, Artificial Sequence
  Description of Artificial Sequence: Synthetic oligonucleotide
ucacaguaguuaccaaccc

SEQ ID NO: 2402971 - RNA, 19 nt, Artificial Sequence
  Description of Artificial Sequence: Synthetic oligonucleotide
cauccagccccaaaauucc

SEQ ID NO: 2402972 - RNA, 19 nt, Artificial Sequence
  Description of Artificial Sequence: Synthetic oligonucleotide
accuuuuccaagaauagga

SEQ ID NO: 2402973 - RNA, 19 nt, Artificial Sequence
  Description of Artificial Sequence: Synthetic oligonucleotide
cuagcccaagcucuaaggc

SEQ ID NO: 2402974 - RNA, 19 nt, Artificial Sequence
  Description of Artificial Sequence: Synthetic oligonucleotide
aacagugagugacccugag

SEQ ID NO: 2402975 - RNA, 19 nt, Artificial Sequence
  Description of Artificial Sequence: Synthetic oligonucleotide
agaauaggagggcggaucu

SEQ ID NO: 2402976 - RNA, 19 nt, Artificial Sequence
  Description of Artificial Sequence: Synthetic oligonucleotide
ccaaaauuccaucuugggg

SEQ ID NO: 2402977 - RNA, 19 nt, Artificial Sequence
  Description of Artificial Sequence: Synthetic oligonucleotide
uggggagauagacucugag

SEQ ID NO: 2402978 - RNA, 19 nt, Artificial Sequence
  Description of Artificial Sequence: Synthetic oligonucleotide
uagcccaagcucuaaggcc

SEQ ID NO: 2402979 - RNA, 19 nt, Artificial Sequence
  Description of Artificial Sequence: Synthetic oligonucleotide
uuagagcugaacagugagu

SEQ ID NO: 2402980 - RNA, 19 nt, Artificial Sequence
  Description of Artificial Sequence: Synthetic oligonucleotide
agaugugagcgugagagca

SEQ ID NO: 2402981 - RNA, 19 nt, Artificial Sequence
  Description of Artificial Sequence: Synthetic oligonucleotide
uugcuggugaauuggagau

SEQ ID NO: 2402982 - RNA, 19 nt, Artificial Sequence
  Description of Artificial Sequence: Synthetic oligonucleotide
gacgaggugagaugugagc

SEQ ID NO: 2402983 - RNA, 19 nt, Artificial Sequence
  Description of Artificial Sequence: Synthetic oligonucleotide
cuugcucacaguaguuacc

SEQ ID NO: 2402984 - RNA, 19 nt, Artificial Sequence
  Description of Artificial Sequence: Synthetic oligonucleotide
cuuguaugauccuggccag

SEQ ID NO: 2402985 - RNA, 19 nt, Artificial Sequence
  Description of Artificial Sequence: Synthetic oligonucleotide
agccuuguaugauccuggc

SEQ ID NO: 2402986 - RNA, 19 nt, Artificial Sequence
  Description of Artificial Sequence: Synthetic oligonucleotide
guggggucgaaccaagcag

SEQ ID NO: 2402987 - RNA, 19 nt, Artificial Sequence
  Description of Artificial Sequence: Synthetic oligonucleotide
aauuagagcugaacaguga

SEQ ID NO: 2402988 - RNA, 19 nt, Artificial Sequence
  Description of Artificial Sequence: Synthetic oligonucleotide
guuaccaacccucuccauc

SEQ ID NO: 2402989 - RNA, 19 nt, Artificial Sequence
  Description of Artificial Sequence: Synthetic oligonucleotide
ucaagaaauggggcaaaca

SEQ ID NO: 2402990 - RNA, 19 nt, Artificial Sequence
  Description of Artificial Sequence: Synthetic oligonucleotide
aauuucccugccugucuug

SEQ ID NO: 2402991 - RNA, 19 nt, Artificial Sequence
  Description of Artificial Sequence: Synthetic oligonucleotide
ucagaauuucccugccugu

SEQ ID NO: 2402992 - RNA, 19 nt, Artificial Sequence
  Description of Artificial Sequence: Synthetic oligonucleotide
ugucuuggggagauagacu

SEQ ID NO: 2402993 - RNA, 19 nt, Artificial Sequence
  Description of Artificial Sequence: Synthetic oligonucleotide
acacaagaagacagcagac

SEQ ID NO: 2402994 - RNA, 19 nt, Artificial Sequence
  Description of Artificial Sequence: Synthetic oligonucleotide
agacuugggccaguggagc

SEQ ID NO: 2402995 - RNA, 19 nt, Artificial Sequence
  Description of Artificial Sequence: Synthetic oligonucleotide
gaccucaagaaauggggca

SEQ ID NO: 2402996 - RNA, 19 nt, Artificial Sequence
  Description of Artificial Sequence: Synthetic oligonucleotide
ucuacccugggugaugagc

SEQ ID NO: 2402997 - RNA, 19 nt, Artificial Sequence
  Description of Artificial Sequence: Synthetic oligonucleotide
gagaaaucagaauuucccu

SEQ ID NO: 2402998 - RNA, 19 nt, Artificial Sequence
  Description of Artificial Sequence: Synthetic oligonucleotide
gaagugacaauugaacugu

SEQ ID NO: 2402999 - RNA, 19 nt, Artificial Sequence
  Description of Artificial Sequence: Synthetic oligonucleotide
cucaauauacacagaggga

SEQ ID NO: 2403000 - RNA, 19 nt, Artificial Sequence
  Description of Artificial Sequence: Synthetic oligonucleotide
acauccaucugaccucaag

SEQ ID NO: 2403001 - RNA, 19 nt, Artificial Sequence
  Description of Artificial Sequence: Synthetic oligonucleotide
uggugaauuggagauuuac

SEQ ID NO: 2403002 - RNA, 19 nt, Artificial Sequence
  Description of Artificial Sequence: Synthetic oligonucleotide
aaggcagccuggaagacga

SEQ ID NO: 2403003 - RNA, 19 nt, Artificial Sequence
  Description of Artificial Sequence: Synthetic oligonucleotide
ugucccaacccauacucuc

SEQ ID NO: 2403004 - RNA, 19 nt, Artificial Sequence
  Description of Artificial Sequence: Synthetic oligonucleotide
agggacacacgcucaggac

SEQ ID NO: 2403005 - RNA, 19 nt, Artificial Sequence
  Description of Artificial Sequence: Synthetic oligonucleotide
aacugucccaacccauacu

SEQ ID NO: 2403006 - RNA, 19 nt, Artificial Sequence
  Description of Artificial Sequence: Synthetic oligonucleotide
uagcuauaauuagagcuga

SEQ ID NO: 2403007 - RNA, 19 nt, Artificial Sequence
  Description of Artificial Sequence: Synthetic oligonucleotide
caucugaccucaagaaaug

SEQ ID NO: 2403008 - RNA, 19 nt, Artificial Sequence
  Description of Artificial Sequence: Synthetic oligonucleotide
auagccuuguaugauccug

SEQ ID NO: 2403009 - RNA, 19 nt, Artificial Sequence
  Description of Artificial Sequence: Synthetic oligonucleotide
gacaauugaacugucccaa

SEQ ID NO: 2403010 - RNA, 19 nt, Artificial Sequence
  Description of Artificial Sequence: Synthetic oligonucleotide
caggauagcuauaauuaga

SEQ ID NO: 2403011 - RNA, 19 nt, Artificial Sequence
  Description of Artificial Sequence: Synthetic oligonucleotide
uaggagggcggaucuaccc

SEQ ID NO: 2403012 - RNA, 19 nt, Artificial Sequence
  Description of Artificial Sequence: Synthetic oligonucleotide
cauacucucucucucucuc

SEQ ID NO: 2403013 - RNA, 19 nt, Artificial Sequence
  Description of Artificial Sequence: Synthetic oligonucleotide
gaacugucccaacccauac

SEQ ID NO: 2403014 - RNA, 19 nt, Artificial Sequence
  Description of Artificial Sequence: Synthetic oligonucleotide
gcaggauagcuauaauuag

SEQ ID NO: 2403015 - RNA, 19 nt, Artificial Sequence
  Description of Artificial Sequence: Synthetic oligonucleotide
aggggauauagccuuguau

SEQ ID NO: 2403016 - RNA, 19 nt, Artificial Sequence
  Description of Artificial Sequence: Synthetic oligonucleotide
ugagggccaagucuccucu

SEQ ID NO: 2403017 - RNA, 19 nt, Artificial Sequence
  Description of Artificial Sequence: Synthetic oligonucleotide
cugucuuggggagauagac

SEQ ID NO: 2403018 - RNA, 19 nt, Artificial Sequence
  Description of Artificial Sequence: Synthetic oligonucleotide
ccuuguaugauccuggcca

SEQ ID NO: 2403019 - RNA, 19 nt, Artificial Sequence
  Description of Artificial Sequence: Synthetic oligonucleotide
auuguuauugcuggugaau

SEQ ID NO: 2403020 - RNA, 19 nt, Artificial Sequence
  Description of Artificial Sequence: Synthetic oligonucleotide
cagugagugacccugagua

SEQ ID NO: 2403021 - RNA, 19 nt, Artificial Sequence
  Description of Artificial Sequence: Synthetic oligonucleotide
aggcaggauagcuauaauu

SEQ ID NO: 2403022 - RNA, 19 nt, Artificial Sequence
  Description of Artificial Sequence: Synthetic oligonucleotide
gacucugagagauccuaga

SEQ ID NO: 2403023 - RNA, 19 nt, Artificial Sequence
  Description of Artificial Sequence: Synthetic oligonucleotide
gugaauuggagauuuacuu

SEQ ID NO: 2403024 - RNA, 19 nt, Artificial Sequence
  Description of Artificial Sequence: Synthetic oligonucleotide
aucugaccucaagaaaugg

SEQ ID NO: 2403025 - RNA, 19 nt, Artificial Sequence
  Description of Artificial Sequence: Synthetic oligonucleotide
uuguuauugcuggugaauu

SEQ ID NO: 2403026 - RNA, 19 nt, Artificial Sequence
  Description of Artificial Sequence: Synthetic oligonucleotide
agagaagccuccaggugac

SEQ ID NO: 2403027 - RNA, 19 nt, Artificial Sequence
  Description of Artificial Sequence: Synthetic oligonucleotide
cagagaagccuccagguga

SEQ ID NO: 2403028 - RNA, 19 nt, Artificial Sequence
  Description of Artificial Sequence: Synthetic oligonucleotide
acucucaccucccucaaua

SEQ ID NO: 2403029 - RNA, 19 nt, Artificial Sequence
  Description of Artificial Sequence: Synthetic oligonucleotide
acucugagagauccuagau

SEQ ID NO: 2403030 - RNA, 19 nt, Artificial Sequence
  Description of Artificial Sequence: Synthetic oligonucleotide
aauaccuaagaggcaggau

SEQ ID NO: 2403031 - RNA, 19 nt, Artificial Sequence
  Description of Artificial Sequence: Synthetic oligonucleotide
caagcucuaaggccugagc

SEQ ID NO: 2403032 - RNA, 19 nt, Artificial Sequence
  Description of Artificial Sequence: Synthetic oligonucleotide
guaugauccuggccagagg

SEQ ID NO: 2403033 - RNA, 19 nt, Artificial Sequence
  Description of Artificial Sequence: Synthetic oligonucleotide
agcugaacagugagugacc

SEQ ID NO: 2403034 - RNA, 19 nt, Artificial Sequence
  Description of Artificial Sequence: Synthetic oligonucleotide
gugagugacccugaguaug

SEQ ID NO: 2403035 - RNA, 19 nt, Artificial Sequence
  Description of Artificial Sequence: Synthetic oligonucleotide
ucaccucccucaauauaca

SEQ ID NO: 2403036 - RNA, 19 nt, Artificial Sequence
  Description of Artificial Sequence: Synthetic oligonucleotide
uacucucucucucucucuc

SEQ ID NO: 2403037 - RNA, 19 nt, Artificial Sequence
  Description of Artificial Sequence: Synthetic oligonucleotide
caacccucuccauccagcc

SEQ ID NO: 2403038 - RNA, 19 nt, Artificial Sequence
  Description of Artificial Sequence: Synthetic oligonucleotide
gaggugagaugugagcgug

SEQ ID NO: 2403039 - RNA, 19 nt, Artificial Sequence
  Description of Artificial Sequence: Synthetic oligonucleotide
ucuuggggagauagacucu

SEQ ID NO: 2403040 - RNA, 19 nt, Artificial Sequence
  Description of Artificial Sequence: Synthetic oligonucleotide
gucgaaccaagcagcaggg

SEQ ID NO: 2403041 - RNA, 19 nt, Artificial Sequence
  Description of Artificial Sequence: Synthetic oligonucleotide
agaauaccuaagaggcagg

SEQ ID NO: 2403042 - RNA, 19 nt, Artificial Sequence
  Description of Artificial Sequence: Synthetic oligonucleotide
aagugacaauugaacuguc

SEQ ID NO: 2403043 - RNA, 19 nt, Artificial Sequence
  Description of Artificial Sequence: Synthetic oligonucleotide
gugaccuuuuccaagaaua

SEQ ID NO: 2403044 - RNA, 19 nt, Artificial Sequence
  Description of Artificial Sequence: Synthetic oligonucleotide
ggauagcuauaauuagagc

SEQ ID NO: 2403045 - RNA, 19 nt, Artificial Sequence
  Description of Artificial Sequence: Synthetic oligonucleotide
ugggagugagcagugcacc

SEQ ID NO: 2403046 - RNA, 19 nt, Artificial Sequence
  Description of Artificial Sequence: Synthetic oligonucleotide
gaugugagcgugagagcag

SEQ ID NO: 2403047 - RNA, 19 nt, Artificial Sequence
  Description of Artificial Sequence: Synthetic oligonucleotide
ccuuuuccaagaauaggag

SEQ ID NO: 2403048 - RNA, 19 nt, Artificial Sequence
  Description of Artificial Sequence: Synthetic oligonucleotide
agauaauaaggaagugaca

SEQ ID NO: 2403049 - RNA, 19 nt, Artificial Sequence
  Description of Artificial Sequence: Synthetic oligonucleotide
uauagccuuguaugauccu

SEQ ID NO: 2403050 - RNA, 19 nt, Artificial Sequence
  Description of Artificial Sequence: Synthetic oligonucleotide
ggcggaucuacccugggug

SEQ ID NO: 2403051 - RNA, 19 nt, Artificial Sequence
  Description of Artificial Sequence: Synthetic oligonucleotide
ucucucucucucucuaaaa

SEQ ID NO: 2403052 - RNA, 19 nt, Artificial Sequence
  Description of Artificial Sequence: Synthetic oligonucleotide
cugggagugagcagugcac

SEQ ID NO: 2403053 - RNA, 19 nt, Artificial Sequence
  Description of Artificial Sequence: Synthetic oligonucleotide
uaugguggggucgaaccaa

SEQ ID NO: 2403054 - RNA, 19 nt, Artificial Sequence
  Description of Artificial Sequence: Synthetic oligonucleotide
agagcuucugcugggaaaa

SEQ ID NO: 2403055 - RNA, 19 nt, Artificial Sequence
  Description of Artificial Sequence: Synthetic oligonucleotide
cccaaaauuccaucuuggg

SEQ ID NO: 2403056 - RNA, 19 nt, Artificial Sequence
  Description of Artificial Sequence: Synthetic oligonucleotide
gaauaccuaagaggcagga

SEQ ID NO: 2403057 - RNA, 19 nt, Artificial Sequence
  Description of Artificial Sequence: Synthetic oligonucleotide
cagcagacauccaucugac

SEQ ID NO: 2403058 - RNA, 19 nt, Artificial Sequence
  Description of Artificial Sequence: Synthetic oligonucleotide
ucaggguuggggacuugcu

SEQ ID NO: 2403059 - RNA, 19 nt, Artificial Sequence
  Description of Artificial Sequence: Synthetic oligonucleotide
gcuauaauuagagcugaac

SEQ ID NO: 2403060 - RNA, 19 nt, Artificial Sequence
  Description of Artificial Sequence: Synthetic oligonucleotide
gcucacaguaguuaccaac

SEQ ID NO: 2403061 - RNA, 19 nt, Artificial Sequence
  Description of Artificial Sequence: Synthetic oligonucleotide
agacaggaggaaaacacaa

SEQ ID NO: 2403062 - RNA, 19 nt, Artificial Sequence
  Description of Artificial Sequence: Synthetic oligonucleotide
augagcuuccggccccaac

SEQ ID NO: 2403063 - RNA, 19 nt, Artificial Sequence
  Description of Artificial Sequence: Synthetic oligonucleotide
uccaggugaccuuuuccaa

SEQ ID NO: 2403064 - RNA, 19 nt, Artificial Sequence
  Description of Artificial Sequence: Synthetic oligonucleotide
ucucaccucccucaauaua

SEQ ID NO: 2403065 - RNA, 19 nt, Artificial Sequence
  Description of Artificial Sequence: Synthetic oligonucleotide
gacuuggaagaaaggcagc

SEQ ID NO: 2403066 - RNA, 19 nt, Artificial Sequence
  Description of Artificial Sequence: Synthetic oligonucleotide
agucuccucugauuguuau

SEQ ID NO: 2403067 - RNA, 19 nt, Artificial Sequence
  Description of Artificial Sequence: Synthetic oligonucleotide
gggauauagccuuguauga

SEQ ID NO: 2403068 - RNA, 19 nt, Artificial Sequence
  Description of Artificial Sequence: Synthetic oligonucleotide
cccucaauauacacagagg

SEQ ID NO: 2403069 - RNA, 19 nt, Artificial Sequence
  Description of Artificial Sequence: Synthetic oligonucleotide
uccagccccaaaauuccau

SEQ ID NO: 2403070 - RNA, 19 nt, Artificial Sequence
  Description of Artificial Sequence: Synthetic oligonucleotide
agugagugacccugaguau

SEQ ID NO: 2403071 - RNA, 19 nt, Artificial Sequence
  Description of Artificial Sequence: Synthetic oligonucleotide
agccuggaagacgacgagg

SEQ ID NO: 2403072 - RNA, 19 nt, Artificial Sequence
  Description of Artificial Sequence: Synthetic oligonucleotide
ggcaggauagcuauaauua

SEQ ID NO: 2403073 - RNA, 19 nt, Artificial Sequence
  Description of Artificial Sequence: Synthetic oligonucleotide
acccauacucucucucucu

SEQ ID NO: 2403074 - RNA, 19 nt, Artificial Sequence
  Description of Artificial Sequence: Synthetic oligonucleotide
auacucucucucucucucu

SEQ ID NO: 2403075 - RNA, 19 nt, Artificial Sequence
  Description of Artificial Sequence: Synthetic oligonucleotide
cuaagaggcaggauagcua

SEQ ID NO: 2403076 - RNA, 19 nt, Artificial Sequence
  Description of Artificial Sequence: Synthetic oligonucleotide
aggagggcggaucuacccu

SEQ ID NO: 2403077 - RNA, 19 nt, Artificial Sequence
  Description of Artificial Sequence: Synthetic oligonucleotide
ucucucucucucucucucu

SEQ ID NO: 2403078 - RNA, 19 nt, Artificial Sequence
  Description of Artificial Sequence: Synthetic oligonucleotide
ucgaaccaagcagcagggg

SEQ ID NO: 2403079 - RNA, 19 nt, Artificial Sequence
  Description of Artificial Sequence: Synthetic oligonucleotide
cacaagaagacagcagaca

SEQ ID NO: 2403080 - RNA, 19 nt, Artificial Sequence
  Description of Artificial Sequence: Synthetic oligonucleotide
accaacccucuccauccag

SEQ ID NO: 2403081 - RNA, 19 nt, Artificial Sequence
  Description of Artificial Sequence: Synthetic oligonucleotide
cacgcucaggacuagccca

SEQ ID NO: 2403082 - RNA, 19 nt, Artificial Sequence
  Description of Artificial Sequence: Synthetic oligonucleotide
ugugagcgugagagcagga

SEQ ID NO: 2403083 - RNA, 19 nt, Artificial Sequence
  Description of Artificial Sequence: Synthetic oligonucleotide
cucagacuugggccagugg

SEQ ID NO: 2403084 - RNA, 19 nt, Artificial Sequence
  Description of Artificial Sequence: Synthetic oligonucleotide
aggcuggucaggguugggg

SEQ ID NO: 2403085 - RNA, 19 nt, Artificial Sequence
  Description of Artificial Sequence: Synthetic oligonucleotide
cagagggacacacgcucag

SEQ ID NO: 2403086 - RNA, 19 nt, Artificial Sequence
  Description of Artificial Sequence: Synthetic oligonucleotide
guaugguggggucgaacca

SEQ ID NO: 2403087 - RNA, 19 nt, Artificial Sequence
  Description of Artificial Sequence: Synthetic oligonucleotide
gaucuacccugggugauga

SEQ ID NO: 2403088 - RNA, 19 nt, Artificial Sequence
  Description of Artificial Sequence: Synthetic oligonucleotide
agagggacacacgcucagg

SEQ ID NO: 2403089 - RNA, 19 nt, Artificial Sequence
  Description of Artificial Sequence: Synthetic oligonucleotide
cucaagaaauggggcaaac

SEQ ID NO: 2403090 - RNA, 19 nt, Artificial Sequence
  Description of Artificial Sequence: Synthetic oligonucleotide
acagaauaccuaagaggca

SEQ ID NO: 2403091 - RNA, 19 nt, Artificial Sequence
  Description of Artificial Sequence: Synthetic oligonucleotide
gugagcgugagagcaggag

SEQ ID NO: 2403092 - RNA, 19 nt, Artificial Sequence
  Description of Artificial Sequence: Synthetic oligonucleotide
cucucucucucucucucuc

SEQ ID NO: 2403093 - RNA, 19 nt, Artificial Sequence
  Description of Artificial Sequence: Synthetic oligonucleotide
agacauccaucugaccuca

SEQ ID NO: 2403094 - RNA, 19 nt, Artificial Sequence
  Description of Artificial Sequence: Synthetic oligonucleotide
accagucauggagaggcug

SEQ ID NO: 2403095 - RNA, 19 nt, Artificial Sequence
  Description of Artificial Sequence: Synthetic oligonucleotide
accucaagaaauggggcaa

SEQ ID NO: 2403096 - RNA, 19 nt, Artificial Sequence
  Description of Artificial Sequence: Synthetic oligonucleotide
gccugagccagauuccuug

SEQ ID NO: 2403097 - RNA, 19 nt, Artificial Sequence
  Description of Artificial Sequence: Synthetic oligonucleotide
ggugagaugugagcgugag

SEQ ID NO: 2403098 - RNA, 19 nt, Artificial Sequence
  Description of Artificial Sequence: Synthetic oligonucleotide
acgacgaggugagauguga

SEQ ID NO: 2403099 - RNA, 19 nt, Artificial Sequence
  Description of Artificial Sequence: Synthetic oligonucleotide
acucucucucucucucucu

SEQ ID NO: 2403100 - RNA, 19 nt, Artificial Sequence
  Description of Artificial Sequence: Synthetic oligonucleotide
ggagauagacucugagaga

SEQ ID NO: 2403101 - RNA, 19 nt, Artificial Sequence
  Description of Artificial Sequence: Synthetic oligonucleotide
ucucucucucucucucuaa

SEQ ID NO: 2403102 - RNA, 19 nt, Artificial Sequence
  Description of Artificial Sequence: Synthetic oligonucleotide
gacccugaguauggugggg

SEQ ID NO: 2403103 - RNA, 19 nt, Artificial Sequence
  Description of Artificial Sequence: Synthetic oligonucleotide
gccccaaaauuccaucuug

SEQ ID NO: 2403104 - RNA, 19 nt, Artificial Sequence
  Description of Artificial Sequence: Synthetic oligonucleotide
acccugggugaugagcuuc

SEQ ID NO: 2403105 - RNA, 19 nt, Artificial Sequence
  Description of Artificial Sequence: Synthetic oligonucleotide
caccucccucaauauacac

SEQ ID NO: 2403106 - RNA, 19 nt, Artificial Sequence
  Description of Artificial Sequence: Synthetic oligonucleotide
ccaggugaccuuuuccaag

SEQ ID NO: 2403107 - RNA, 19 nt, Artificial Sequence
  Description of Artificial Sequence: Synthetic oligonucleotide
ggggagauagacucugaga

SEQ ID NO: 2403108 - RNA, 19 nt, Artificial Sequence
  Description of Artificial Sequence: Synthetic oligonucleotide
ggcaaacagaauaccuaag

SEQ ID NO: 2403109 - RNA, 19 nt, Artificial Sequence
  Description of Artificial Sequence: Synthetic oligonucleotide
uuggggacuugcucacagu

SEQ ID NO: 2403110 - RNA, 19 nt, Artificial Sequence
  Description of Artificial Sequence: Synthetic oligonucleotide
gguggggucgaaccaagca

SEQ ID NO: 2403111 - RNA, 19 nt, Artificial Sequence
  Description of Artificial Sequence: Synthetic oligonucleotide
gucaggguuggggacuugc

SEQ ID NO: 2403112 - RNA, 19 nt, Artificial Sequence
  Description of Artificial Sequence: Synthetic oligonucleotide
gucaccagucauggagagg

SEQ ID NO: 2403113 - RNA, 19 nt, Artificial Sequence
  Description of Artificial Sequence: Synthetic oligonucleotide
gagggcggaucuacccugg

SEQ ID NO: 2403114 - RNA, 19 nt, Artificial Sequence
  Description of Artificial Sequence: Synthetic oligonucleotide
gcagagaagccuccaggug

SEQ ID NO: 2403115 - RNA, 19 nt, Artificial Sequence
  Description of Artificial Sequence: Synthetic oligonucleotide
uuguaugauccuggccaga

SEQ ID NO: 2403116 - RNA, 19 nt, Artificial Sequence
  Description of Artificial Sequence: Synthetic oligonucleotide
gaguaugguggggucgaac

SEQ ID NO: 2403117 - RNA, 19 nt, Artificial Sequence
  Description of Artificial Sequence: Synthetic oligonucleotide
gagcuuccggccccaacuc

SEQ ID NO: 2403118 - RNA, 19 nt, Artificial Sequence
  Description of Artificial Sequence: Synthetic oligonucleotide
aguuaccaacccucuccau

SEQ ID NO: 2403119 - RNA, 19 nt, Artificial Sequence
  Description of Artificial Sequence: Synthetic oligonucleotide
agggcggaucuacccuggg

SEQ ID NO: 2403120 - RNA, 19 nt, Artificial Sequence
  Description of Artificial Sequence: Synthetic oligonucleotide
gaaccaagcagcaggggau

SEQ ID NO: 2403121 - RNA, 19 nt, Artificial Sequence
  Description of Artificial Sequence: Synthetic oligonucleotide
ggcagccuggaagacgacg

SEQ ID NO: 2403122 - RNA, 19 nt, Artificial Sequence
  Description of Artificial Sequence: Synthetic oligonucleotide
acaaggacugagggccaag

SEQ ID NO: 2403123 - RNA, 19 nt, Artificial Sequence
  Description of Artificial Sequence: Synthetic oligonucleotide
acccugaguaugguggggu

SEQ ID NO: 2403124 - RNA, 19 nt, Artificial Sequence
  Description of Artificial Sequence: Synthetic oligonucleotide
ccaacccucuccauccagc

SEQ ID NO: 2403125 - RNA, 19 nt, Artificial Sequence
  Description of Artificial Sequence: Synthetic oligonucleotide
ggacugagggccaagucuc

SEQ ID NO: 2403126 - RNA, 19 nt, Artificial Sequence
  Description of Artificial Sequence: Synthetic oligonucleotide
agcuuccggccccaacucu

SEQ ID NO: 2403127 - RNA, 19 nt, Artificial Sequence
  Description of Artificial Sequence: Synthetic oligonucleotide
cagccuggaagacgacgag

SEQ ID NO: 2403128 - RNA, 19 nt, Artificial Sequence
  Description of Artificial Sequence: Synthetic oligonucleotide
cacaguaguuaccaacccu

SEQ ID NO: 2403129 - RNA, 19 nt, Artificial Sequence
  Description of Artificial Sequence: Synthetic oligonucleotide
cagagcuucugcugggaaa

SEQ ID NO: 2403130 - RNA, 19 nt, Artificial Sequence
  Description of Artificial Sequence: Synthetic oligonucleotide
ccuagauaauaaggaagug

SEQ ID NO: 2403131 - RNA, 19 nt, Artificial Sequence
  Description of Artificial Sequence: Synthetic oligonucleotide
gccagauuccuugcugggg

SEQ ID NO: 2403132 - RNA, 19 nt, Artificial Sequence
  Description of Artificial Sequence: Synthetic oligonucleotide
ccugaguaugguggggucg

SEQ ID NO: 2403133 - RNA, 19 nt, Artificial Sequence
  Description of Artificial Sequence: Synthetic oligonucleotide
cugaguaugguggggucga

SEQ ID NO: 2403134 - RNA, 19 nt, Artificial Sequence
  Description of Artificial Sequence: Synthetic oligonucleotide
auagacucugagagauccu

SEQ ID NO: 2403135 - RNA, 19 nt, Artificial Sequence
  Description of Artificial Sequence: Synthetic oligonucleotide
ggugaauuggagauuuacu

SEQ ID NO: 2403136 - RNA, 19 nt, Artificial Sequence
  Description of Artificial Sequence: Synthetic oligonucleotide
gaauuucccugccugucuu

SEQ ID NO: 2403137 - RNA, 19 nt, Artificial Sequence
  Description of Artificial Sequence: Synthetic oligonucleotide
gaacagugagugacccuga

SEQ ID NO: 2403138 - RNA, 19 nt, Artificial Sequence
  Description of Artificial Sequence: Synthetic oligonucleotide
cucucucucucucucuaaa

SEQ ID NO: 2403139 - RNA, 19 nt, Artificial Sequence
  Description of Artificial Sequence: Synthetic oligonucleotide
aucuacccugggugaugag

SEQ ID NO: 2403140 - RNA, 19 nt, Artificial Sequence
  Description of Artificial Sequence: Synthetic oligonucleotide
ccuccaggugaccuuuucc

SEQ ID NO: 2403141 - RNA, 19 nt, Artificial Sequence
  Description of Artificial Sequence: Synthetic oligonucleotide
gccuuguaugauccuggcc

SEQ ID NO: 2403142 - RNA, 19 nt, Artificial Sequence
  Description of Artificial Sequence: Synthetic oligonucleotide
ggggacuugcucacaguag

SEQ ID NO: 2403143 - RNA, 19 nt, Artificial Sequence
  Description of Artificial Sequence: Synthetic oligonucleotide
ggaagaaaggcagccugga

SEQ ID NO: 2403144 - RNA, 19 nt, Artificial Sequence
  Description of Artificial Sequence: Synthetic oligonucleotide
gacacacgcucaggacuag

SEQ ID NO: 2403145 - RNA, 19 nt, Artificial Sequence
  Description of Artificial Sequence: Synthetic oligonucleotide
caacccauacucucucucu

SEQ ID NO: 2403146 - RNA, 19 nt, Artificial Sequence
  Description of Artificial Sequence: Synthetic oligonucleotide
gacuugggccaguggagcu

SEQ ID NO: 2403147 - RNA, 19 nt, Artificial Sequence
  Description of Artificial Sequence: Synthetic oligonucleotide
auacaaggacugagggcca

SEQ ID NO: 2403148 - RNA, 19 nt, Artificial Sequence
  Description of Artificial Sequence: Synthetic oligonucleotide
ggcuggucaggguugggga

SEQ ID NO: 2403149 - RNA, 19 nt, Artificial Sequence
  Description of Artificial Sequence: Synthetic oligonucleotide
cuuccggccccaacucuca

SEQ ID NO: 2403150 - RNA, 19 nt, Artificial Sequence
  Description of Artificial Sequence: Synthetic oligonucleotide
agcagagcuucugcuggga

SEQ ID NO: 2403151 - RNA, 19 nt, Artificial Sequence
  Description of Artificial Sequence: Synthetic oligonucleotide
ugcuggugaauuggagauu

SEQ ID NO: 2403152 - RNA, 19 nt, Artificial Sequence
  Description of Artificial Sequence: Synthetic oligonucleotide
agcuauaauuagagcugaa

SEQ ID NO: 2403153 - RNA, 19 nt, Artificial Sequence
  Description of Artificial Sequence: Synthetic oligonucleotide
uuccggccccaacucucac

SEQ ID NO: 2403154 - RNA, 19 nt, Artificial Sequence
  Description of Artificial Sequence: Synthetic oligonucleotide
agugagcagugcaccaaaa

SEQ ID NO: 2403155 - RNA, 19 nt, Artificial Sequence
  Description of Artificial Sequence: Synthetic oligonucleotide
caguaguuaccaacccucu

SEQ ID NO: 2403156 - RNA, 19 nt, Artificial Sequence
  Description of Artificial Sequence: Synthetic oligonucleotide
cucucucucucucucucua

SEQ ID NO: 2403157 - RNA, 19 nt, Artificial Sequence
  Description of Artificial Sequence: Synthetic oligonucleotide
gggagugagcagugcacca

SEQ ID NO: 2403158 - RNA, 19 nt, Artificial Sequence
  Description of Artificial Sequence: Synthetic oligonucleotide
ggaucuacccugggugaug

SEQ ID NO: 2403159 - RNA, 19 nt, Artificial Sequence
  Description of Artificial Sequence: Synthetic oligonucleotide
gagaagccuccaggugacc

SEQ ID NO: 2403160 - RNA, 19 nt, Artificial Sequence
  Description of Artificial Sequence: Synthetic oligonucleotide
cagccccaaaauuccaucu

SEQ ID NO: 2403161 - RNA, 19 nt, Artificial Sequence
  Description of Artificial Sequence: Synthetic oligonucleotide
aggcucagacuugggccag

SEQ ID NO: 2403162 - RNA, 19 nt, Artificial Sequence
  Description of Artificial Sequence: Synthetic oligonucleotide
accaaggggcccaggcuca

SEQ ID NO: 2403163 - RNA, 19 nt, Artificial Sequence
  Description of Artificial Sequence: Synthetic oligonucleotide
cgaaccaagcagcagggga

SEQ ID NO: 2403164 - RNA, 19 nt, Artificial Sequence
  Description of Artificial Sequence: Synthetic oligonucleotide
ugaguaugguggggucgaa

SEQ ID NO: 2403165 - RNA, 19 nt, Artificial Sequence
  Description of Artificial Sequence: Synthetic oligonucleotide
aagaggcaggauagcuaua

SEQ ID NO: 2403166 - RNA, 19 nt, Artificial Sequence
  Description of Artificial Sequence: Synthetic oligonucleotide
agaagacagcagacaucca

SEQ ID NO: 2403167 - RNA, 19 nt, Artificial Sequence
  Description of Artificial Sequence: Synthetic oligonucleotide
gaauaggagggcggaucua

SEQ ID NO: 2403168 - RNA, 19 nt, Artificial Sequence
  Description of Artificial Sequence: Synthetic oligonucleotide
auccagccccaaaauucca

SEQ ID NO: 2403169 - RNA, 19 nt, Artificial Sequence
  Description of Artificial Sequence: Synthetic oligonucleotide
gaaauggggcaaacagaau

SEQ ID NO: 2403170 - RNA, 19 nt, Artificial Sequence
  Description of Artificial Sequence: Synthetic oligonucleotide
gcggaucuacccuggguga

SEQ ID NO: 2403171 - RNA, 19 nt, Artificial Sequence
  Description of Artificial Sequence: Synthetic oligonucleotide
cccauacucucucucucuc

SEQ ID NO: 2403172 - RNA, 19 nt, Artificial Sequence
  Description of Artificial Sequence: Synthetic oligonucleotide
ccaagaauaggagggcgga

SEQ ID NO: 2403173 - RNA, 19 nt, Artificial Sequence
  Description of Artificial Sequence: Synthetic oligonucleotide
cucuccauccagccccaaa

SEQ ID NO: 2403174 - RNA, 19 nt, Artificial Sequence
  Description of Artificial Sequence: Synthetic oligonucleotide
caacucucaccucccucaa

SEQ ID NO: 2403175 - RNA, 19 nt, Artificial Sequence
  Description of Artificial Sequence: Synthetic oligonucleotide
cucuaaggccugagccaga

SEQ ID NO: 2403176 - RNA, 19 nt, Artificial Sequence
  Description of Artificial Sequence: Synthetic oligonucleotide
cgacgaggugagaugugag

SEQ ID NO: 2403177 - RNA, 19 nt, Artificial Sequence
  Description of Artificial Sequence: Synthetic oligonucleotide
gcuggugaauuggagauuu

SEQ ID NO: 2403178 - RNA, 19 nt, Artificial Sequence
  Description of Artificial Sequence: Synthetic oligonucleotide
acgcucaggacuagcccaa

SEQ ID NO: 2403179 - RNA, 19 nt, Artificial Sequence
  Description of Artificial Sequence: Synthetic oligonucleotide
ccaagcucuaaggccugag

SEQ ID NO: 2403180 - RNA, 19 nt, Artificial Sequence
  Description of Artificial Sequence: Synthetic oligonucleotide
cugucccaacccauacucu

SEQ ID NO: 2403181 - RNA, 19 nt, Artificial Sequence
  Description of Artificial Sequence: Synthetic oligonucleotide
gucccaacccauacucucu

SEQ ID NO: 2403182 - RNA, 19 nt, Artificial Sequence
  Description of Artificial Sequence: Synthetic oligonucleotide
gccuggaagacgacgaggu

SEQ ID NO: 2403183 - RNA, 19 nt, Artificial Sequence
  Description of Artificial Sequence: Synthetic oligonucleotide
caagucuccucugauuguu

SEQ ID NO: 2403184 - RNA, 19 nt, Artificial Sequence
  Description of Artificial Sequence: Synthetic oligonucleotide
cuggugaauuggagauuua

SEQ ID NO: 2403185 - RNA, 19 nt, Artificial Sequence
  Description of Artificial Sequence: Synthetic oligonucleotide
cugagccagauuccuugcu

SEQ ID NO: 2403186 - RNA, 19 nt, Artificial Sequence
  Description of Artificial Sequence: Synthetic oligonucleotide
gcuuccggccccaacucuc

SEQ ID NO: 2403187 - RNA, 19 nt, Artificial Sequence
  Description of Artificial Sequence: Synthetic oligonucleotide
cccugccugucuuggggag

SEQ ID NO: 2403188 - RNA, 19 nt, Artificial Sequence
  Description of Artificial Sequence: Synthetic oligonucleotide
gcagcaggggauauagccu

SEQ ID NO: 2403189 - RNA, 19 nt, Artificial Sequence
  Description of Artificial Sequence: Synthetic oligonucleotide
cugagagauccuagauaau

SEQ ID NO: 2403190 - RNA, 19 nt, Artificial Sequence
  Description of Artificial Sequence: Synthetic oligonucleotide
ggggucgaaccaagcagca

SEQ ID NO: 2403191 - RNA, 19 nt, Artificial Sequence
  Description of Artificial Sequence: Synthetic oligonucleotide
caagaauaggagggcggau

SEQ ID NO: 2403192 - RNA, 19 nt, Artificial Sequence
  Description of Artificial Sequence: Synthetic oligonucleotide
ccugggugaugagcuuccg

SEQ ID NO: 2403193 - RNA, 19 nt, Artificial Sequence
  Description of Artificial Sequence: Synthetic oligonucleotide
gagugacccugaguauggu

SEQ ID NO: 2403194 - RNA, 19 nt, Artificial Sequence
  Description of Artificial Sequence: Synthetic oligonucleotide
gacauccaucugaccucaa

SEQ ID NO: 2403195 - RNA, 19 nt, Artificial Sequence
  Description of Artificial Sequence: Synthetic oligonucleotide
ccauacucucucucucucu

SEQ ID NO: 2403196 - RNA, 19 nt, Artificial Sequence
  Description of Artificial Sequence: Synthetic oligonucleotide
ccaagucuccucugauugu

SEQ ID NO: 2403197 - RNA, 19 nt, Artificial Sequence
  Description of Artificial Sequence: Synthetic oligonucleotide
ggacuagcccaagcucuaa

SEQ ID NO: 2403198 - RNA, 19 nt, Artificial Sequence
  Description of Artificial Sequence: Synthetic oligonucleotide
caccagucauggagaggcu

SEQ ID NO: 2403199 - RNA, 19 nt, Artificial Sequence
  Description of Artificial Sequence: Synthetic oligonucleotide
gggcggaucuacccugggu

SEQ ID NO: 2403200 - RNA, 19 nt, Artificial Sequence
  Description of Artificial Sequence: Synthetic oligonucleotide
ccucaagaaauggggcaaa

SEQ ID NO: 2403201 - RNA, 19 nt, Artificial Sequence
  Description of Artificial Sequence: Synthetic oligonucleotide
ccggccccaacucucaccu

SEQ ID NO: 2403202 - RNA, 19 nt, Artificial Sequence
  Description of Artificial Sequence: Synthetic oligonucleotide
ugccugucuuggggagaua

SEQ ID NO: 2403203 - RNA, 19 nt, Artificial Sequence
  Description of Artificial Sequence: Synthetic oligonucleotide
ggugaggguggggcagaga

SEQ ID NO: 2403204 - RNA, 19 nt, Artificial Sequence
  Description of Artificial Sequence: Synthetic oligonucleotide
ggaagacgacgaggugaga

SEQ ID NO: 2403205 - RNA, 19 nt, Artificial Sequence
  Description of Artificial Sequence: Synthetic oligonucleotide
gcaggggauauagccuugu

SEQ ID NO: 2403206 - RNA, 19 nt, Artificial Sequence
  Description of Artificial Sequence: Synthetic oligonucleotide
ggacuugcucacaguaguu

SEQ ID NO: 2403207 - RNA, 19 nt, Artificial Sequence
  Description of Artificial Sequence: Synthetic oligonucleotide
ccaaggggcccaggcucag

SEQ ID NO: 2403208 - RNA, 19 nt, Artificial Sequence
  Description of Artificial Sequence: Synthetic oligonucleotide
cgaggugagaugugagcgu

SEQ ID NO: 2403209 - RNA, 19 nt, Artificial Sequence
  Description of Artificial Sequence: Synthetic oligonucleotide
ccaagcagcaggggauaua

SEQ ID NO: 2403210 - RNA, 19 nt, Artificial Sequence
  Description of Artificial Sequence: Synthetic oligonucleotide
cccaacccauacucucucu

SEQ ID NO: 2403211 - RNA, 19 nt, Artificial Sequence
  Description of Artificial Sequence: Synthetic oligonucleotide
cccaagcucuaaggccuga

SEQ ID NO: 2403212 - RNA, 19 nt, Artificial Sequence
  Description of Artificial Sequence: Synthetic oligonucleotide
ggcucagacuugggccagu

SEQ ID NO: 2403213 - RNA, 19 nt, Artificial Sequence
  Description of Artificial Sequence: Synthetic oligonucleotide
ggccugagccagauuccuu

SEQ ID NO: 2403214 - RNA, 19 nt, Artificial Sequence
  Description of Artificial Sequence: Synthetic oligonucleotide
cggccccaacucucaccuc

SEQ ID NO: 2403215 - RNA, 19 nt, Artificial Sequence
  Description of Artificial Sequence: Synthetic oligonucleotide
gaugaugacagucacgugg

SEQ ID NO: 2403216 - RNA, 19 nt, Artificial Sequence
  Description of Artificial Sequence: Synthetic oligonucleotide
uugugaacuuccaacaugg

SEQ ID NO: 2403217 - RNA, 19 nt, Artificial Sequence
  Description of Artificial Sequence: Synthetic oligonucleotide
ugaacuuccaacauggaau

SEQ ID NO: 2403218 - RNA, 19 nt, Artificial Sequence
  Description of Artificial Sequence: Synthetic oligonucleotide
acucacaucccucacgugc

SEQ ID NO: 2403219 - RNA, 19 nt, Artificial Sequence
  Description of Artificial Sequence: Synthetic oligonucleotide
cuuguugugaacuuccaac

SEQ ID NO: 2403220 - RNA, 19 nt, Artificial Sequence
  Description of Artificial Sequence: Synthetic oligonucleotide
caugaugacauccgaaugc

SEQ ID NO: 2403221 - RNA, 19 nt, Artificial Sequence
  Description of Artificial Sequence: Synthetic oligonucleotide
ugucagucaaucugggagg

SEQ ID NO: 2403222 - RNA, 19 nt, Artificial Sequence
  Description of Artificial Sequence: Synthetic oligonucleotide
ucgguugucacccagggaa

SEQ ID NO: 2403223 - RNA, 19 nt, Artificial Sequence
  Description of Artificial Sequence: Synthetic oligonucleotide
auccgaaugcgccacgucc

SEQ ID NO: 2403224 - RNA, 19 nt, Artificial Sequence
  Description of Artificial Sequence: Synthetic oligonucleotide
uuguauagccagcugagcu

SEQ ID NO: 2403225 - RNA, 19 nt, Artificial Sequence
  Description of Artificial Sequence: Synthetic oligonucleotide
uuaaugagcugucagucaa

SEQ ID NO: 2403226 - RNA, 19 nt, Artificial Sequence
  Description of Artificial Sequence: Synthetic oligonucleotide
gacgucaggaugcaagacg

SEQ ID NO: 2403227 - RNA, 19 nt, Artificial Sequence
  Description of Artificial Sequence: Synthetic oligonucleotide
uccaacauggaauccagga

SEQ ID NO: 2403228 - RNA, 19 nt, Artificial Sequence
  Description of Artificial Sequence: Synthetic oligonucleotide
uguuuaaugagcugucagu

SEQ ID NO: 2403229 - RNA, 19 nt, Artificial Sequence
  Description of Artificial Sequence: Synthetic oligonucleotide
accgguuucuggcagcucc

SEQ ID NO: 2403230 - RNA, 19 nt, Artificial Sequence
  Description of Artificial Sequence: Synthetic oligonucleotide
cuugacgucaggaugcaag

SEQ ID NO: 2403231 - RNA, 19 nt, Artificial Sequence
  Description of Artificial Sequence: Synthetic oligonucleotide
augcaagacgcacacgcgc

SEQ ID NO: 2403232 - RNA, 19 nt, Artificial Sequence
  Description of Artificial Sequence: Synthetic oligonucleotide
aagacgagccugcugucgg

SEQ ID NO: 2403233 - RNA, 19 nt, Artificial Sequence
  Description of Artificial Sequence: Synthetic oligonucleotide
uccuuguauagccagcuga

SEQ ID NO: 2403234 - RNA, 19 nt, Artificial Sequence
  Description of Artificial Sequence: Synthetic oligonucleotide
uuguugugaacuuccaaca

SEQ ID NO: 2403235 - RNA, 19 nt, Artificial Sequence
  Description of Artificial Sequence: Synthetic oligonucleotide
uaucgguugucacccaggg

SEQ ID NO: 2403236 - RNA, 19 nt, Artificial Sequence
  Description of Artificial Sequence: Synthetic oligonucleotide
uguauagccagcugagcug

SEQ ID NO: 2403237 - RNA, 19 nt, Artificial Sequence
  Description of Artificial Sequence: Synthetic oligonucleotide
uuuaaugagcugucaguca

SEQ ID NO: 2403238 - RNA, 19 nt, Artificial Sequence
  Description of Artificial Sequence: Synthetic oligonucleotide
augacagucacgugggcag

SEQ ID NO: 2403239 - RNA, 19 nt, Artificial Sequence
  Description of Artificial Sequence: Synthetic oligonucleotide
aaauccuguuuaaugagcu

SEQ ID NO: 2403240 - RNA, 19 nt, Artificial Sequence
  Description of Artificial Sequence: Synthetic oligonucleotide
aagcucguccagcccaugc

SEQ ID NO: 2403241 - RNA, 19 nt, Artificial Sequence
  Description of Artificial Sequence: Synthetic oligonucleotide
ugucggggacuuuuggugg

SEQ ID NO: 2403242 - RNA, 19 nt, Artificial Sequence
  Description of Artificial Sequence: Synthetic oligonucleotide
aacauggaauccaggagag

SEQ ID NO: 2403243 - RNA, 19 nt, Artificial Sequence
  Description of Artificial Sequence: Synthetic oligonucleotide
ucccucacgugcaugauga

SEQ ID NO: 2403244 - RNA, 19 nt, Artificial Sequence
  Description of Artificial Sequence: Synthetic oligonucleotide
ucugucaggucuuggaagu

SEQ ID NO: 2403245 - RNA, 19 nt, Artificial Sequence
  Description of Artificial Sequence: Synthetic oligonucleotide
ugacucacaucccucacgu

SEQ ID NO: 2403246 - RNA, 19 nt, Artificial Sequence
  Description of Artificial Sequence: Synthetic oligonucleotide
ugcaacucuguguuccgcg

SEQ ID NO: 2403247 - RNA, 19 nt, Artificial Sequence
  Description of Artificial Sequence: Synthetic oligonucleotide
gcuggggugacucacaucc

SEQ ID NO: 2403248 - RNA, 19 nt, Artificial Sequence
  Description of Artificial Sequence: Synthetic oligonucleotide
uggaaguugcccuugccga

SEQ ID NO: 2403249 - RNA, 19 nt, Artificial Sequence
  Description of Artificial Sequence: Synthetic oligonucleotide
ugcaugaugacauccgaau

SEQ ID NO: 2403250 - RNA, 19 nt, Artificial Sequence
  Description of Artificial Sequence: Synthetic oligonucleotide
augaugacauccgaaugcg

SEQ ID NO: 2403251 - RNA, 19 nt, Artificial Sequence
  Description of Artificial Sequence: Synthetic oligonucleotide
augguguccauguacagaa

SEQ ID NO: 2403252 - RNA, 19 nt, Artificial Sequence
  Description of Artificial Sequence: Synthetic oligonucleotide
gaacuuccaacauggaauc

SEQ ID NO: 2403253 - RNA, 19 nt, Artificial Sequence
  Description of Artificial Sequence: Synthetic oligonucleotide
uugcccuugccgaagacga

SEQ ID NO: 2403254 - RNA, 19 nt, Artificial Sequence
  Description of Artificial Sequence: Synthetic oligonucleotide
ugcgccacguccuccagcg

SEQ ID NO: 2403255 - RNA, 19 nt, Artificial Sequence
  Description of Artificial Sequence: Synthetic oligonucleotide
acgucaggaugcaagacgc

SEQ ID NO: 2403256 - RNA, 19 nt, Artificial Sequence
  Description of Artificial Sequence: Synthetic oligonucleotide
gagaaggacuguaucaggc

SEQ ID NO: 2403257 - RNA, 19 nt, Artificial Sequence
  Description of Artificial Sequence: Synthetic oligonucleotide
ugcaccaccgaccagccau

SEQ ID NO: 2403258 - RNA, 19 nt, Artificial Sequence
  Description of Artificial Sequence: Synthetic oligonucleotide
guuuaaugagcugucaguc

SEQ ID NO: 2403259 - RNA, 19 nt, Artificial Sequence
  Description of Artificial Sequence: Synthetic oligonucleotide
agagucugcaccaccgacc

SEQ ID NO: 2403260 - RNA, 19 nt, Artificial Sequence
  Description of Artificial Sequence: Synthetic oligonucleotide
guccauguacagaagacag

SEQ ID NO: 2403261 - RNA, 19 nt, Artificial Sequence
  Description of Artificial Sequence: Synthetic oligonucleotide
aaucugggagggacuaucg

SEQ ID NO: 2403262 - RNA, 19 nt, Artificial Sequence
  Description of Artificial Sequence: Synthetic oligonucleotide
guauagccagcugagcugg

SEQ ID NO: 2403263 - RNA, 19 nt, Artificial Sequence
  Description of Artificial Sequence: Synthetic oligonucleotide
uugacgucaggaugcaaga

SEQ ID NO: 2403264 - RNA, 19 nt, Artificial Sequence
  Description of Artificial Sequence: Synthetic oligonucleotide
augaugacagucacguggg

SEQ ID NO: 2403265 - RNA, 19 nt, Artificial Sequence
  Description of Artificial Sequence: Synthetic oligonucleotide
caccuuguugugaacuucc

SEQ ID NO: 2403266 - RNA, 19 nt, Artificial Sequence
  Description of Artificial Sequence: Synthetic oligonucleotide
uccauguacagaagacaga

SEQ ID NO: 2403267 - RNA, 19 nt, Artificial Sequence
  Description of Artificial Sequence: Synthetic oligonucleotide
gaugcaagacgcacacgcg

SEQ ID NO: 2403268 - RNA, 19 nt, Artificial Sequence
  Description of Artificial Sequence: Synthetic oligonucleotide
cagcccaugccccaggagg

SEQ ID NO: 2403269 - RNA, 19 nt, Artificial Sequence
  Description of Artificial Sequence: Synthetic oligonucleotide
uucugcugcucugugcugg

SEQ ID NO: 2403270 - RNA, 19 nt, Artificial Sequence
  Description of Artificial Sequence: Synthetic oligonucleotide
acuaucgguugucacccag

SEQ ID NO: 2403271 - RNA, 19 nt, Artificial Sequence
  Description of Artificial Sequence: Synthetic oligonucleotide
cuaucgguugucacccagg

SEQ ID NO: 2403272 - RNA, 19 nt, Artificial Sequence
  Description of Artificial Sequence: Synthetic oligonucleotide
ugcacaguggccuccuugu

SEQ ID NO: 2403273 - RNA, 19 nt, Artificial Sequence
  Description of Artificial Sequence: Synthetic oligonucleotide
ugcaagacgcacacgcgcu

SEQ ID NO: 2403274 - RNA, 19 nt, Artificial Sequence
  Description of Artificial Sequence: Synthetic oligonucleotide
gugacucacaucccucacg

SEQ ID NO: 2403275 - RNA, 19 nt, Artificial Sequence
  Description of Artificial Sequence: Synthetic oligonucleotide
cuuaagcucguccagccca

SEQ ID NO: 2403276 - RNA, 19 nt, Artificial Sequence
  Description of Artificial Sequence: Synthetic oligonucleotide
agggacuaucgguugucac

SEQ ID NO: 2403277 - RNA, 19 nt, Artificial Sequence
  Description of Artificial Sequence: Synthetic oligonucleotide
aagacgcacacgcgcuggg

SEQ ID NO: 2403278 - RNA, 19 nt, Artificial Sequence
  Description of Artificial Sequence: Synthetic oligonucleotide
uccgccaccugcaacucug

SEQ ID NO: 2403279 - RNA, 19 nt, Artificial Sequence
  Description of Artificial Sequence: Synthetic oligonucleotide
cugucggggacuuuuggug

SEQ ID NO: 2403280 - RNA, 19 nt, Artificial Sequence
  Description of Artificial Sequence: Synthetic oligonucleotide
gaagacgagccugcugucg

SEQ ID NO: 2403281 - RNA, 19 nt, Artificial Sequence
  Description of Artificial Sequence: Synthetic oligonucleotide
ccaagucgcacgcagaggg

SEQ ID NO: 2403282 - RNA, 19 nt, Artificial Sequence
  Description of Artificial Sequence: Synthetic oligonucleotide
ugcugucggggacuuuugg

SEQ ID NO: 2403283 - RNA, 19 nt, Artificial Sequence
  Description of Artificial Sequence: Synthetic oligonucleotide
ugaugacauccgaaugcgc

SEQ ID NO: 2403284 - RNA, 19 nt, Artificial Sequence
  Description of Artificial Sequence: Synthetic oligonucleotide
uccgaaugcgccacguccu

SEQ ID NO: 2403285 - RNA, 19 nt, Artificial Sequence
  Description of Artificial Sequence: Synthetic oligonucleotide
augacauccgaaugcgcca

SEQ ID NO: 2403286 - RNA, 19 nt, Artificial Sequence
  Description of Artificial Sequence: Synthetic oligonucleotide
uguaucaggcuguguggca

SEQ ID NO: 2403287 - RNA, 19 nt, Artificial Sequence
  Description of Artificial Sequence: Synthetic oligonucleotide
acaucccucacgugcauga

SEQ ID NO: 2403288 - RNA, 19 nt, Artificial Sequence
  Description of Artificial Sequence: Synthetic oligonucleotide
agcacggacuccuccagug

SEQ ID NO: 2403289 - RNA, 19 nt, Artificial Sequence
  Description of Artificial Sequence: Synthetic oligonucleotide
uguuccgcggcguaccuuc

SEQ ID NO: 2403290 - RNA, 19 nt, Artificial Sequence
  Description of Artificial Sequence: Synthetic oligonucleotide
uggggugacucacaucccu

SEQ ID NO: 2403291 - RNA, 19 nt, Artificial Sequence
  Description of Artificial Sequence: Synthetic oligonucleotide
caggaugcaagacgcacac

SEQ ID NO: 2403292 - RNA, 19 nt, Artificial Sequence
  Description of Artificial Sequence: Synthetic oligonucleotide
gacgcacacgcgcugggag

SEQ ID NO: 2403293 - RNA, 19 nt, Artificial Sequence
  Description of Artificial Sequence: Synthetic oligonucleotide
gggacuaucgguugucacc

SEQ ID NO: 2403294 - RNA, 19 nt, Artificial Sequence
  Description of Artificial Sequence: Synthetic oligonucleotide
cacgcagagggugaggacc

SEQ ID NO: 2403295 - RNA, 19 nt, Artificial Sequence
  Description of Artificial Sequence: Synthetic oligonucleotide
ucggcugaugaugacaguc

SEQ ID NO: 2403296 - RNA, 19 nt, Artificial Sequence
  Description of Artificial Sequence: Synthetic oligonucleotide
aagucgcacgcagagggug

SEQ ID NO: 2403297 - RNA, 19 nt, Artificial Sequence
  Description of Artificial Sequence: Synthetic oligonucleotide
guugcccuugccgaagacg

SEQ ID NO: 2403298 - RNA, 19 nt, Artificial Sequence
  Description of Artificial Sequence: Synthetic oligonucleotide
ugugaacuuccaacaugga

SEQ ID NO: 2403299 - RNA, 19 nt, Artificial Sequence
  Description of Artificial Sequence: Synthetic oligonucleotide
gagucugcaccaccgacca

SEQ ID NO: 2403300 - RNA, 19 nt, Artificial Sequence
  Description of Artificial Sequence: Synthetic oligonucleotide
gaugacagucacgugggca

SEQ ID NO: 2403301 - RNA, 19 nt, Artificial Sequence
  Description of Artificial Sequence: Synthetic oligonucleotide
guaccuuccggcccggccc

SEQ ID NO: 2403302 - RNA, 19 nt, Artificial Sequence
  Description of Artificial Sequence: Synthetic oligonucleotide
guaucaggcuguguggcag

SEQ ID NO: 2403303 - RNA, 19 nt, Artificial Sequence
  Description of Artificial Sequence: Synthetic oligonucleotide
uccgcggcguaccuuccgg

SEQ ID NO: 2403304 - RNA, 19 nt, Artificial Sequence
  Description of Artificial Sequence: Synthetic oligonucleotide
cagucaaucugggagggac

SEQ ID NO: 2403305 - RNA, 19 nt, Artificial Sequence
  Description of Artificial Sequence: Synthetic oligonucleotide
cuccagugcugccuuaagc

SEQ ID NO: 2403306 - RNA, 19 nt, Artificial Sequence
  Description of Artificial Sequence: Synthetic oligonucleotide
gaaguugcccuugccgaag

SEQ ID NO: 2403307 - RNA, 19 nt, Artificial Sequence
  Description of Artificial Sequence: Synthetic oligonucleotide
agucacgugggcagcaccg

SEQ ID NO: 2403308 - RNA, 19 nt, Artificial Sequence
  Description of Artificial Sequence: Synthetic oligonucleotide
caaugguguccauguacag

SEQ ID NO: 2403309 - RNA, 19 nt, Artificial Sequence
  Description of Artificial Sequence: Synthetic oligonucleotide
gucagucaaucugggaggg

SEQ ID NO: 2403310 - RNA, 19 nt, Artificial Sequence
  Description of Artificial Sequence: Synthetic oligonucleotide
gagacaggaagccaauggu

SEQ ID NO: 2403311 - RNA, 19 nt, Artificial Sequence
  Description of Artificial Sequence: Synthetic oligonucleotide
guagacaggacgcuggccu

SEQ ID NO: 2403312 - RNA, 19 nt, Artificial Sequence
  Description of Artificial Sequence: Synthetic oligonucleotide
cuguaucaggcuguguggc

SEQ ID NO: 2403313 - RNA, 19 nt, Artificial Sequence
  Description of Artificial Sequence: Synthetic oligonucleotide
cuuguauagccagcugagc

SEQ ID NO: 2403314 - RNA, 19 nt, Artificial Sequence
  Description of Artificial Sequence: Synthetic oligonucleotide
cuuggaaguugcccuugcc

SEQ ID NO: 2403315 - RNA, 19 nt, Artificial Sequence
  Description of Artificial Sequence: Synthetic oligonucleotide
aaugcgccacguccuccag

SEQ ID NO: 2403316 - RNA, 19 nt, Artificial Sequence
  Description of Artificial Sequence: Synthetic oligonucleotide
auggaauccaggagagcgg

SEQ ID NO: 2403317 - RNA, 19 nt, Artificial Sequence
  Description of Artificial Sequence: Synthetic oligonucleotide
uauagccagcugagcuggg

SEQ ID NO: 2403318 - RNA, 19 nt, Artificial Sequence
  Description of Artificial Sequence: Synthetic oligonucleotide
ugaugaugacagucacgug

SEQ ID NO: 2403319 - RNA, 19 nt, Artificial Sequence
  Description of Artificial Sequence: Synthetic oligonucleotide
cacgugcaugaugacaucc

SEQ ID NO: 2403320 - RNA, 19 nt, Artificial Sequence
  Description of Artificial Sequence: Synthetic oligonucleotide
uccggcccggcccuugacg

SEQ ID NO: 2403321 - RNA, 19 nt, Artificial Sequence
  Description of Artificial Sequence: Synthetic oligonucleotide
ggacuaucgguugucaccc

SEQ ID NO: 2403322 - RNA, 19 nt, Artificial Sequence
  Description of Artificial Sequence: Synthetic oligonucleotide
ugggagggacuaucgguug

SEQ ID NO: 2403323 - RNA, 19 nt, Artificial Sequence
  Description of Artificial Sequence: Synthetic oligonucleotide
acgugcaugaugacauccg

SEQ ID NO: 2403324 - RNA, 19 nt, Artificial Sequence
  Description of Artificial Sequence: Synthetic oligonucleotide
uuaagcucguccagcccau

SEQ ID NO: 2403325 - RNA, 19 nt, Artificial Sequence
  Description of Artificial Sequence: Synthetic oligonucleotide
uaaugagcugucagucaau

SEQ ID NO: 2403326 - RNA, 19 nt, Artificial Sequence
  Description of Artificial Sequence: Synthetic oligonucleotide
uuccggaaccugccauagg

SEQ ID NO: 2403327 - RNA, 19 nt, Artificial Sequence
  Description of Artificial Sequence: Synthetic oligonucleotide
aggacgcuggccuucugcu

SEQ ID NO: 2403328 - RNA, 19 nt, Artificial Sequence
  Description of Artificial Sequence: Synthetic oligonucleotide
ccaacauggaauccaggag

SEQ ID NO: 2403329 - RNA, 19 nt, Artificial Sequence
  Description of Artificial Sequence: Synthetic oligonucleotide
gucggggacuuuugguggg

SEQ ID NO: 2403330 - RNA, 19 nt, Artificial Sequence
  Description of Artificial Sequence: Synthetic oligonucleotide
gaaugcgccacguccucca

SEQ ID NO: 2403331 - RNA, 19 nt, Artificial Sequence
  Description of Artificial Sequence: Synthetic oligonucleotide
gucaggaugcaagacgcac

SEQ ID NO: 2403332 - RNA, 19 nt, Artificial Sequence
  Description of Artificial Sequence: Synthetic oligonucleotide
acgcacacgcgcugggagg

SEQ ID NO: 2403333 - RNA, 19 nt, Artificial Sequence
  Description of Artificial Sequence: Synthetic oligonucleotide
cagaagugaugucuggaca

SEQ ID NO: 2403334 - RNA, 19 nt, Artificial Sequence
  Description of Artificial Sequence: Synthetic oligonucleotide
accgaccagccaugcagcg

SEQ ID NO: 2403335 - RNA, 19 nt, Artificial Sequence
  Description of Artificial Sequence: Synthetic oligonucleotide
gacauccgaaugcgccacg

SEQ ID NO: 2403336 - RNA, 19 nt, Artificial Sequence
  Description of Artificial Sequence: Synthetic oligonucleotide
gcaugaugacauccgaaug

SEQ ID NO: 2403337 - RNA, 19 nt, Artificial Sequence
  Description of Artificial Sequence: Synthetic oligonucleotide
gcuauacccaggaaccagg

SEQ ID NO: 2403338 - RNA, 19 nt, Artificial Sequence
  Description of Artificial Sequence: Synthetic oligonucleotide
aucccucacgugcaugaug

SEQ ID NO: 2403339 - RNA, 19 nt, Artificial Sequence
  Description of Artificial Sequence: Synthetic oligonucleotide
cagcgcgugcaccagcgcg

SEQ ID NO: 2403340 - RNA, 19 nt, Artificial Sequence
  Description of Artificial Sequence: Synthetic oligonucleotide
agacgagccugcugucggg

SEQ ID NO: 2403341 - RNA, 19 nt, Artificial Sequence
  Description of Artificial Sequence: Synthetic oligonucleotide
caacucuguguuccgcggc

SEQ ID NO: 2403342 - RNA, 19 nt, Artificial Sequence
  Description of Artificial Sequence: Synthetic oligonucleotide
caagacgcacacgcgcugg

SEQ ID NO: 2403343 - RNA, 19 nt, Artificial Sequence
  Description of Artificial Sequence: Synthetic oligonucleotide
cuuccggaaccugccauag

SEQ ID NO: 2403344 - RNA, 19 nt, Artificial Sequence
  Description of Artificial Sequence: Synthetic oligonucleotide
uccaccuuguugugaacuu

SEQ ID NO: 2403345 - RNA, 19 nt, Artificial Sequence
  Description of Artificial Sequence: Synthetic oligonucleotide
ugacauccgaaugcgccac

SEQ ID NO: 2403346 - RNA, 19 nt, Artificial Sequence
  Description of Artificial Sequence: Synthetic oligonucleotide
agggcugauacagccagga

SEQ ID NO: 2403347 - RNA, 19 nt, Artificial Sequence
  Description of Artificial Sequence: Synthetic oligonucleotide
uuccgcggcguaccuuccg

SEQ ID NO: 2403348 - RNA, 19 nt, Artificial Sequence
  Description of Artificial Sequence: Synthetic oligonucleotide
caccgaccagccaugcagc

SEQ ID NO: 2403349 - RNA, 19 nt, Artificial Sequence
  Description of Artificial Sequence: Synthetic oligonucleotide
cugccuuaagcucguccag

SEQ ID NO: 2403350 - RNA, 19 nt, Artificial Sequence
  Description of Artificial Sequence: Synthetic oligonucleotide
gacgagccugcugucgggg

SEQ ID NO: 2403351 - RNA, 19 nt, Artificial Sequence
  Description of Artificial Sequence: Synthetic oligonucleotide
uguguuccgcggcguaccu

SEQ ID NO: 2403352 - RNA, 19 nt, Artificial Sequence
  Description of Artificial Sequence: Synthetic oligonucleotide
ccaccgaccagccaugcag

SEQ ID NO: 2403353 - RNA, 19 nt, Artificial Sequence
  Description of Artificial Sequence: Synthetic oligonucleotide
agcccaugccccaggaggg

SEQ ID NO: 2403354 - RNA, 19 nt, Artificial Sequence
  Description of Artificial Sequence: Synthetic oligonucleotide
cucggcgcucagcagcucc

SEQ ID NO: 2403355 - RNA, 19 nt, Artificial Sequence
  Description of Artificial Sequence: Synthetic oligonucleotide
ucacgugggcagcaccggu

SEQ ID NO: 2403356 - RNA, 19 nt, Artificial Sequence
  Description of Artificial Sequence: Synthetic oligonucleotide
ugacgucaggaugcaagac

SEQ ID NO: 2403357 - RNA, 19 nt, Artificial Sequence
  Description of Artificial Sequence: Synthetic oligonucleotide
gccuuaagcucguccagcc

SEQ ID NO: 2403358 - RNA, 19 nt, Artificial Sequence
  Description of Artificial Sequence: Synthetic oligonucleotide
acagucacgugggcagcac

SEQ ID NO: 2403359 - RNA, 19 nt, Artificial Sequence
  Description of Artificial Sequence: Synthetic oligonucleotide
uggccuccuuguauagcca

SEQ ID NO: 2403360 - RNA, 19 nt, Artificial Sequence
  Description of Artificial Sequence: Synthetic oligonucleotide
caggcuguguggcagcuga

SEQ ID NO: 2403361 - RNA, 19 nt, Artificial Sequence
  Description of Artificial Sequence: Synthetic oligonucleotide
ggcccuugacgucaggaug

SEQ ID NO: 2403362 - RNA, 19 nt, Artificial Sequence
  Description of Artificial Sequence: Synthetic oligonucleotide
gcggagaaggacuguauca

SEQ ID NO: 2403363 - RNA, 19 nt, Artificial Sequence
  Description of Artificial Sequence: Synthetic oligonucleotide
agacaggacgcuggccuuc

SEQ ID NO: 2403364 - RNA, 19 nt, Artificial Sequence
  Description of Artificial Sequence: Synthetic oligonucleotide
cuguguuccgcggcguacc

SEQ ID NO: 2403365 - RNA, 19 nt, Artificial Sequence
  Description of Artificial Sequence: Synthetic oligonucleotide
gacucacaucccucacgug

SEQ ID NO: 2403366 - RNA, 19 nt, Artificial Sequence
  Description of Artificial Sequence: Synthetic oligonucleotide
agcguggcggagaaggacu

SEQ ID NO: 2403367 - RNA, 19 nt, Artificial Sequence
  Description of Artificial Sequence: Synthetic oligonucleotide
ggagggcagcugcagaccc

SEQ ID NO: 2403368 - RNA, 19 nt, Artificial Sequence
  Description of Artificial Sequence: Synthetic oligonucleotide
aucgguugucacccaggga

SEQ ID NO: 2403369 - RNA, 19 nt, Artificial Sequence
  Description of Artificial Sequence: Synthetic oligonucleotide
agcgcgugcaccagcgcgg

SEQ ID NO: 2403370 - RNA, 19 nt, Artificial Sequence
  Description of Artificial Sequence: Synthetic oligonucleotide
cagggaacagcuuccggaa

SEQ ID NO: 2403371 - RNA, 19 nt, Artificial Sequence
  Description of Artificial Sequence: Synthetic oligonucleotide
agcuccuccuccuccuccu

SEQ ID NO: 2403372 - RNA, 19 nt, Artificial Sequence
  Description of Artificial Sequence: Synthetic oligonucleotide
ugacagucacgugggcagc

SEQ ID NO: 2403373 - RNA, 19 nt, Artificial Sequence
  Description of Artificial Sequence: Synthetic oligonucleotide
accugccauaggcggcucg

SEQ ID NO: 2403374 - RNA, 19 nt, Artificial Sequence
  Description of Artificial Sequence: Synthetic oligonucleotide
caguguagacaggacgcug

SEQ ID NO: 2403375 - RNA, 19 nt, Artificial Sequence
  Description of Artificial Sequence: Synthetic oligonucleotide
uggcggagaaggacuguau

SEQ ID NO: 2403376 - RNA, 19 nt, Artificial Sequence
  Description of Artificial Sequence: Synthetic oligonucleotide
cagucacgugggcagcacc

SEQ ID NO: 2403377 - RNA, 19 nt, Artificial Sequence
  Description of Artificial Sequence: Synthetic oligonucleotide
cuccuuguauagccagcug

SEQ ID NO: 2403378 - RNA, 19 nt, Artificial Sequence
  Description of Artificial Sequence: Synthetic oligonucleotide
cgaccagccaugcagcgcg

SEQ ID NO: 2403379 - RNA, 19 nt, Artificial Sequence
  Description of Artificial Sequence: Synthetic oligonucleotide
ucacgugcaugaugacauc

SEQ ID NO: 2403380 - RNA, 19 nt, Artificial Sequence
  Description of Artificial Sequence: Synthetic oligonucleotide
aggaugcaagacgcacacg

SEQ ID NO: 2403381 - RNA, 19 nt, Artificial Sequence
  Description of Artificial Sequence: Synthetic oligonucleotide
agucaaucugggagggacu

SEQ ID NO: 2403382 - RNA, 19 nt, Artificial Sequence
  Description of Artificial Sequence: Synthetic oligonucleotide
gucacgugggcagcaccgg

SEQ ID NO: 2403383 - RNA, 19 nt, Artificial Sequence
  Description of Artificial Sequence: Synthetic oligonucleotide
gggacuuuuggugggcacc

SEQ ID NO: 2403384 - RNA, 19 nt, Artificial Sequence
  Description of Artificial Sequence: Synthetic oligonucleotide
uaccuuccggcccggcccu

SEQ ID NO: 2403385 - RNA, 19 nt, Artificial Sequence
  Description of Artificial Sequence: Synthetic oligonucleotide
cggaaccugccauaggcgg

SEQ ID NO: 2403386 - RNA, 19 nt, Artificial Sequence
  Description of Artificial Sequence: Synthetic oligonucleotide
ucagucaaucugggaggga

SEQ ID NO: 2403387 - RNA, 19 nt, Artificial Sequence
  Description of Artificial Sequence: Synthetic oligonucleotide
acccagggaacagcuuccg

SEQ ID NO: 2403388 - RNA, 19 nt, Artificial Sequence
  Description of Artificial Sequence: Synthetic oligonucleotide
ccauguacagaagacagaa

SEQ ID NO: 2403389 - RNA, 19 nt, Artificial Sequence
  Description of Artificial Sequence: Synthetic oligonucleotide
acauccgaaugcgccacgu

SEQ ID NO: 2403390 - RNA, 19 nt, Artificial Sequence
  Description of Artificial Sequence: Synthetic oligonucleotide
ccagggaacagcuuccgga

SEQ ID NO: 2403391 - RNA, 19 nt, Artificial Sequence
  Description of Artificial Sequence: Synthetic oligonucleotide
gcccuugacgucaggaugc

SEQ ID NO: 2403392 - RNA, 19 nt, Artificial Sequence
  Description of Artificial Sequence: Synthetic oligonucleotide
gccauaggcggcucggcug

SEQ ID NO: 2403393 - RNA, 19 nt, Artificial Sequence
  Description of Artificial Sequence: Synthetic oligonucleotide
ggcggagaaggacuguauc

SEQ ID NO: 2403394 - RNA, 19 nt, Artificial Sequence
  Description of Artificial Sequence: Synthetic oligonucleotide
ccggaaccugccauaggcg

SEQ ID NO: 2403395 - RNA, 19 nt, Artificial Sequence
  Description of Artificial Sequence: Synthetic oligonucleotide
ucaaucugggagggacuau

SEQ ID NO: 2403396 - RNA, 19 nt, Artificial Sequence
  Description of Artificial Sequence: Synthetic oligonucleotide
cccugaucuucucugucag

SEQ ID NO: 2403397 - RNA, 19 nt, Artificial Sequence
  Description of Artificial Sequence: Synthetic oligonucleotide
cugcaacucuguguuccgc

SEQ ID NO: 2403398 - RNA, 19 nt, Artificial Sequence
  Description of Artificial Sequence: Synthetic oligonucleotide
cauccgaaugcgccacguc

SEQ ID NO: 2403399 - RNA, 19 nt, Artificial Sequence
  Description of Artificial Sequence: Synthetic oligonucleotide
gaccugccugccuguggcc

SEQ ID NO: 2403400 - RNA, 19 nt, Artificial Sequence
  Description of Artificial Sequence: Synthetic oligonucleotide
agugcugccuuaagcucgu

SEQ ID NO: 2403401 - RNA, 19 nt, Artificial Sequence
  Description of Artificial Sequence: Synthetic oligonucleotide
gagggacuaucgguuguca

SEQ ID NO: 2403402 - RNA, 19 nt, Artificial Sequence
  Description of Artificial Sequence: Synthetic oligonucleotide
ggaaccugccauaggcggc

SEQ ID NO: 2403403 - RNA, 19 nt, Artificial Sequence
  Description of Artificial Sequence: Synthetic oligonucleotide
cugcugucggggacuuuug

SEQ ID NO: 2403404 - RNA, 19 nt, Artificial Sequence
  Description of Artificial Sequence: Synthetic oligonucleotide
ucggggacuuuuggugggc

SEQ ID NO: 2403405 - RNA, 19 nt, Artificial Sequence
  Description of Artificial Sequence: Synthetic oligonucleotide
acgugggcagcaccgguuu

SEQ ID NO: 2403406 - RNA, 19 nt, Artificial Sequence
  Description of Artificial Sequence: Synthetic oligonucleotide
aaccugccauaggcggcuc

SEQ ID NO: 2403407 - RNA, 19 nt, Artificial Sequence
  Description of Artificial Sequence: Synthetic oligonucleotide
agucugcaccaccgaccag

SEQ ID NO: 2403408 - RNA, 19 nt, Artificial Sequence
  Description of Artificial Sequence: Synthetic oligonucleotide
aggagagcggagggcagcu

SEQ ID NO: 2403409 - RNA, 19 nt, Artificial Sequence
  Description of Artificial Sequence: Synthetic oligonucleotide
gacuaucgguugucaccca

SEQ ID NO: 2403410 - RNA, 19 nt, Artificial Sequence
  Description of Artificial Sequence: Synthetic oligonucleotide
gagcggagggcagcugcag

SEQ ID NO: 2403411 - RNA, 19 nt, Artificial Sequence
  Description of Artificial Sequence: Synthetic oligonucleotide
ccuguggcccgcagcacgg

SEQ ID NO: 2403412 - RNA, 19 nt, Artificial Sequence
  Description of Artificial Sequence: Synthetic oligonucleotide
accaccgaccagccaugca

SEQ ID NO: 2403413 - RNA, 19 nt, Artificial Sequence
  Description of Artificial Sequence: Synthetic oligonucleotide
ccuuaagcucguccagccc

SEQ ID NO: 2403414 - RNA, 19 nt, Artificial Sequence
  Description of Artificial Sequence: Synthetic oligonucleotide
ucgcacgcagagggugagg

SEQ ID NO: 2403415 - RNA, 19 nt, Artificial Sequence
  Description of Artificial Sequence: Synthetic oligonucleotide
cagcguggcggagaaggac

SEQ ID NO: 2403416 - RNA, 19 nt, Artificial Sequence
  Description of Artificial Sequence: Synthetic oligonucleotide
ugcuggggugacucacauc

SEQ ID NO: 2403417 - RNA, 19 nt, Artificial Sequence
  Description of Artificial Sequence: Synthetic oligonucleotide
ccccaagucgcacgcagag

SEQ ID NO: 2403418 - RNA, 19 nt, Artificial Sequence
  Description of Artificial Sequence: Synthetic oligonucleotide
gaaccugccauaggcggcu

SEQ ID NO: 2403419 - RNA, 19 nt, Artificial Sequence
  Description of Artificial Sequence: Synthetic oligonucleotide
ggcggcucggcugaugaug

SEQ ID NO: 2403420 - RNA, 19 nt, Artificial Sequence
  Description of Artificial Sequence: Synthetic oligonucleotide
gcgugcaccagcgcggcgg

SEQ ID NO: 2403421 - RNA, 19 nt, Artificial Sequence
  Description of Artificial Sequence: Synthetic oligonucleotide
cugauacagccaggacacc

SEQ ID NO: 2403422 - RNA, 19 nt, Artificial Sequence
  Description of Artificial Sequence: Synthetic oligonucleotide
agucgcacgcagaggguga

SEQ ID NO: 2403423 - RNA, 19 nt, Artificial Sequence
  Description of Artificial Sequence: Synthetic oligonucleotide
ggcggugggcagcagcggc

SEQ ID NO: 2403424 - RNA, 19 nt, Artificial Sequence
  Description of Artificial Sequence: Synthetic oligonucleotide
gcggagggcagcugcagac

SEQ ID NO: 2403425 - RNA, 19 nt, Artificial Sequence
  Description of Artificial Sequence: Synthetic oligonucleotide
cacguccuccagcguggcg

SEQ ID NO: 2403426 - RNA, 19 nt, Artificial Sequence
  Description of Artificial Sequence: Synthetic oligonucleotide
gucgcacgcagagggugag

SEQ ID NO: 2403427 - RNA, 19 nt, Artificial Sequence
  Description of Artificial Sequence: Synthetic oligonucleotide
cacaucccucacgugcaug

SEQ ID NO: 2403428 - RNA, 19 nt, Artificial Sequence
  Description of Artificial Sequence: Synthetic oligonucleotide
gccacguccuccagcgugg

SEQ ID NO: 2403429 - RNA, 19 nt, Artificial Sequence
  Description of Artificial Sequence: Synthetic oligonucleotide
acggacuccuccagugcug

SEQ ID NO: 2403430 - RNA, 19 nt, Artificial Sequence
  Description of Artificial Sequence: Synthetic oligonucleotide
gcacggacuccuccagugc

SEQ ID NO: 2403431 - RNA, 19 nt, Artificial Sequence
  Description of Artificial Sequence: Synthetic oligonucleotide
agagcggagggcagcugca

SEQ ID NO: 2403432 - RNA, 19 nt, Artificial Sequence
  Description of Artificial Sequence: Synthetic oligonucleotide
ccugccauaggcggcucgg

SEQ ID NO: 2403433 - RNA, 19 nt, Artificial Sequence
  Description of Artificial Sequence: Synthetic oligonucleotide
ggggacuuuuggugggcac

SEQ ID NO: 2403434 - RNA, 19 nt, Artificial Sequence
  Description of Artificial Sequence: Synthetic oligonucleotide
ccgaagacgagccugcugu

SEQ ID NO: 2403435 - RNA, 19 nt, Artificial Sequence
  Description of Artificial Sequence: Synthetic oligonucleotide
acgcgcugggaggcggugg

SEQ ID NO: 2403436 - RNA, 19 nt, Artificial Sequence
  Description of Artificial Sequence: Synthetic oligonucleotide
auaggcggcucggcugaug

SEQ ID NO: 2403437 - RNA, 19 nt, Artificial Sequence
  Description of Artificial Sequence: Synthetic oligonucleotide
gguugucacccagggaaca

SEQ ID NO: 2403438 - RNA, 19 nt, Artificial Sequence
  Description of Artificial Sequence: Synthetic oligonucleotide
agacgcacacgcgcuggga

SEQ ID NO: 2403439 - RNA, 19 nt, Artificial Sequence
  Description of Artificial Sequence: Synthetic oligonucleotide
cacggacuccuccagugcu

SEQ ID NO: 2403440 - RNA, 19 nt, Artificial Sequence
  Description of Artificial Sequence: Synthetic oligonucleotide
uuccggcccggcccuugac

SEQ ID NO: 2403441 - RNA, 19 nt, Artificial Sequence
  Description of Artificial Sequence: Synthetic oligonucleotide
caccugcaacucuguguuc

SEQ ID NO: 2403442 - RNA, 19 nt, Artificial Sequence
  Description of Artificial Sequence: Synthetic oligonucleotide
ggcucggcugaugaugaca

SEQ ID NO: 2403443 - RNA, 19 nt, Artificial Sequence
  Description of Artificial Sequence: Synthetic oligonucleotide
cagccaugcagcgcgugca

SEQ ID NO: 2403444 - RNA, 19 nt, Artificial Sequence
  Description of Artificial Sequence: Synthetic oligonucleotide
guggcggagaaggacugua

SEQ ID NO: 2403445 - RNA, 19 nt, Artificial Sequence
  Description of Artificial Sequence: Synthetic oligonucleotide
gggcugauacagccaggac

SEQ ID NO: 2403446 - RNA, 19 nt, Artificial Sequence
  Description of Artificial Sequence: Synthetic oligonucleotide
accagccaugcagcgcgug

SEQ ID NO: 2403447 - RNA, 19 nt, Artificial Sequence
  Description of Artificial Sequence: Synthetic oligonucleotide
caccaccgaccagccaugc

SEQ ID NO: 2403448 - RNA, 19 nt, Artificial Sequence
  Description of Artificial Sequence: Synthetic oligonucleotide
gcugucggggacuuuuggu

SEQ ID NO: 2403449 - RNA, 19 nt, Artificial Sequence
  Description of Artificial Sequence: Synthetic oligonucleotide
ccaugcagcgcgugcacca

SEQ ID NO: 2403450 - RNA, 19 nt, Artificial Sequence
  Description of Artificial Sequence: Synthetic oligonucleotide
ccuuguugugaacuuccaa

SEQ ID NO: 2403451 - RNA, 19 nt, Artificial Sequence
  Description of Artificial Sequence: Synthetic oligonucleotide
gguccaccuuguugugaac

SEQ ID NO: 2403452 - RNA, 19 nt, Artificial Sequence
  Description of Artificial Sequence: Synthetic oligonucleotide
guuccgcggcguaccuucc

SEQ ID NO: 2403453 - RNA, 19 nt, Artificial Sequence
  Description of Artificial Sequence: Synthetic oligonucleotide
ccauaggcggcucggcuga

SEQ ID NO: 2403454 - RNA, 19 nt, Artificial Sequence
  Description of Artificial Sequence: Synthetic oligonucleotide
ccaccuuguugugaacuuc

SEQ ID NO: 2403455 - RNA, 19 nt, Artificial Sequence
  Description of Artificial Sequence: Synthetic oligonucleotide
ccuccagugcugccuuaag

SEQ ID NO: 2403456 - RNA, 19 nt, Artificial Sequence
  Description of Artificial Sequence: Synthetic oligonucleotide
ccucacgugcaugaugaca

SEQ ID NO: 2403457 - RNA, 19 nt, Artificial Sequence
  Description of Artificial Sequence: Synthetic oligonucleotide
caagucgcacgcagagggu

SEQ ID NO: 2403458 - RNA, 19 nt, Artificial Sequence
  Description of Artificial Sequence: Synthetic oligonucleotide
cugccugccuguggcccgc

SEQ ID NO: 2403459 - RNA, 19 nt, Artificial Sequence
  Description of Artificial Sequence: Synthetic oligonucleotide
cucuguguuccgcggcgua

SEQ ID NO: 2403460 - RNA, 19 nt, Artificial Sequence
  Description of Artificial Sequence: Synthetic oligonucleotide
cgcggcguaccuuccggcc

SEQ ID NO: 2403461 - RNA, 19 nt, Artificial Sequence
  Description of Artificial Sequence: Synthetic oligonucleotide
cgguugucacccagggaac

SEQ ID NO: 2403462 - RNA, 19 nt, Artificial Sequence
  Description of Artificial Sequence: Synthetic oligonucleotide
gccaugcagcgcgugcacc

SEQ ID NO: 2403463 - RNA, 19 nt, Artificial Sequence
  Description of Artificial Sequence: Synthetic oligonucleotide
ccaccugcaacucuguguu

SEQ ID NO: 2403464 - RNA, 19 nt, Artificial Sequence
  Description of Artificial Sequence: Synthetic oligonucleotide
gugcuggggugacucacau

SEQ ID NO: 2403465 - RNA, 19 nt, Artificial Sequence
  Description of Artificial Sequence: Synthetic oligonucleotide
gcggcucggcugaugauga

SEQ ID NO: 2403466 - RNA, 19 nt, Artificial Sequence
  Description of Artificial Sequence: Synthetic oligonucleotide
cggcguaccuuccggcccg

SEQ ID NO: 2403467 - RNA, 19 nt, Artificial Sequence
  Description of Artificial Sequence: Synthetic oligonucleotide
gggagggacuaucgguugu

SEQ ID NO: 2403468 - RNA, 19 nt, Artificial Sequence
  Description of Artificial Sequence: Synthetic oligonucleotide
ccgaccagccaugcagcgc

SEQ ID NO: 2403469 - RNA, 19 nt, Artificial Sequence
  Description of Artificial Sequence: Synthetic oligonucleotide
gcguggcggagaaggacug

SEQ ID NO: 2403470 - RNA, 19 nt, Artificial Sequence
  Description of Artificial Sequence: Synthetic oligonucleotide
gcaccaccgaccagccaug

SEQ ID NO: 2403471 - RNA, 19 nt, Artificial Sequence
  Description of Artificial Sequence: Synthetic oligonucleotide
ccgcagcacggacuccucc

SEQ ID NO: 2403472 - RNA, 19 nt, Artificial Sequence
  Description of Artificial Sequence: Synthetic oligonucleotide
ccgaaugcgccacguccuc

SEQ ID NO: 2403473 - RNA, 19 nt, Artificial Sequence
  Description of Artificial Sequence: Synthetic oligonucleotide
gcagcgcgugcaccagcgc

SEQ ID NO: 2403474 - RNA, 19 nt, Artificial Sequence
  Description of Artificial Sequence: Synthetic oligonucleotide
cacgcgcugggaggcggug

SEQ ID NO: 2403475 - RNA, 19 nt, Artificial Sequence
  Description of Artificial Sequence: Synthetic oligonucleotide
cgcacacgcgcugggaggc

SEQ ID NO: 2403476 - RNA, 19 nt, Artificial Sequence
  Description of Artificial Sequence: Synthetic oligonucleotide
ggcccggcccuugacguca

SEQ ID NO: 2403477 - RNA, 19 nt, Artificial Sequence
  Description of Artificial Sequence: Synthetic oligonucleotide
ggccuccgccaccugcaac

SEQ ID NO: 2403478 - RNA, 19 nt, Artificial Sequence
  Description of Artificial Sequence: Synthetic oligonucleotide
ccgcggcguaccuuccggc

SEQ ID NO: 2403479 - RNA, 19 nt, Artificial Sequence
  Description of Artificial Sequence: Synthetic oligonucleotide
cgaagacgagccugcuguc

SEQ ID NO: 2403480 - RNA, 19 nt, Artificial Sequence
  Description of Artificial Sequence: Synthetic oligonucleotide
cacgugggcagcaccgguu

SEQ ID NO: 2403481 - RNA, 19 nt, Artificial Sequence
  Description of Artificial Sequence: Synthetic oligonucleotide
cgaaugcgccacguccucc

SEQ ID NO: 2403482 - RNA, 19 nt, Artificial Sequence
  Description of Artificial Sequence: Synthetic oligonucleotide
gcacacgcgcugggaggcg

SEQ ID NO: 2403483 - RNA, 19 nt, Artificial Sequence
  Description of Artificial Sequence: Synthetic oligonucleotide
cccucacgugcaugaugac

SEQ ID NO: 2403484 - RNA, 19 nt, Artificial Sequence
  Description of Artificial Sequence: Synthetic oligonucleotide
cugcaccaccgaccagcca

SEQ ID NO: 2403485 - RNA, 19 nt, Artificial Sequence
  Description of Artificial Sequence: Synthetic oligonucleotide
caccgguuucuggcagcuc

SEQ ID NO: 2403486 - RNA, 19 nt, Artificial Sequence
  Description of Artificial Sequence: Synthetic oligonucleotide
ccuccuuguauagccagcu

SEQ ID NO: 2403487 - RNA, 19 nt, Artificial Sequence
  Description of Artificial Sequence: Synthetic oligonucleotide
cgugcaccagcgcggcggc

SEQ ID NO: 2403488 - RNA, 19 nt, Artificial Sequence
  Description of Artificial Sequence: Synthetic oligonucleotide
cagcacggacuccuccagu

SEQ ID NO: 2403489 - RNA, 19 nt, Artificial Sequence
  Description of Artificial Sequence: Synthetic oligonucleotide
ggcguaccuuccggcccgg

SEQ ID NO: 2403490 - RNA, 19 nt, Artificial Sequence
  Description of Artificial Sequence: Synthetic oligonucleotide
gcagcggcucggcgcucag

SEQ ID NO: 2403491 - RNA, 19 nt, Artificial Sequence
  Description of Artificial Sequence: Synthetic oligonucleotide
gcuccuccuccuccuccuc

SEQ ID NO: 2403492 - RNA, 19 nt, Artificial Sequence
  Description of Artificial Sequence: Synthetic oligonucleotide
cgcacgcagagggugagga

SEQ ID NO: 2403493 - RNA, 19 nt, Artificial Sequence
  Description of Artificial Sequence: Synthetic oligonucleotide
gcgcgugcaccagcgcggc

SEQ ID NO: 2403494 - RNA, 19 nt, Artificial Sequence
  Description of Artificial Sequence: Synthetic oligonucleotide
ccggcccuugacgucagga

SEQ ID NO: 2403495 - RNA, 19 nt, Artificial Sequence
  Description of Artificial Sequence: Synthetic oligonucleotide
cuguggcccgcagcacgga

SEQ ID NO: 2403496 - RNA, 19 nt, Artificial Sequence
  Description of Artificial Sequence: Synthetic oligonucleotide
ccacguccuccagcguggc

SEQ ID NO: 2403497 - RNA, 19 nt, Artificial Sequence
  Description of Artificial Sequence: Synthetic oligonucleotide
gcaccgguuucuggcagcu

SEQ ID NO: 2403498 - RNA, 19 nt, Artificial Sequence
  Description of Artificial Sequence: Synthetic oligonucleotide
cugucaggucuuggaaguu

SEQ ID NO: 2403499 - RNA, 19 nt, Artificial Sequence
  Description of Artificial Sequence: Synthetic oligonucleotide
gaccagccaugcagcgcgu

SEQ ID NO: 2403500 - RNA, 19 nt, Artificial Sequence
  Description of Artificial Sequence: Synthetic oligonucleotide
cccuugacgucaggaugca

SEQ ID NO: 2403501 - RNA, 19 nt, Artificial Sequence
  Description of Artificial Sequence: Synthetic oligonucleotide
cgugggcagcaccgguuuc

SEQ ID NO: 2403502 - RNA, 19 nt, Artificial Sequence
  Description of Artificial Sequence: Synthetic oligonucleotide
augccccaggagggcugau

SEQ ID NO: 2403503 - RNA, 19 nt, Artificial Sequence
  Description of Artificial Sequence: Synthetic oligonucleotide
ccggcccggcccuugacgu

SEQ ID NO: 2403504 - RNA, 19 nt, Artificial Sequence
  Description of Artificial Sequence: Synthetic oligonucleotide
cccggcccuugacgucagg

SEQ ID NO: 2403505 - RNA, 19 nt, Artificial Sequence
  Description of Artificial Sequence: Synthetic oligonucleotide
gcggugggcagcagcggcu

SEQ ID NO: 2403506 - RNA, 19 nt, Artificial Sequence
  Description of Artificial Sequence: Synthetic oligonucleotide
gcguaccuuccggcccggc

SEQ ID NO: 2403507 - RNA, 19 nt, Artificial Sequence
  Description of Artificial Sequence: Synthetic oligonucleotide
guguuccgcggcguaccuu

SEQ ID NO: 2403508 - RNA, 19 nt, Artificial Sequence
  Description of Artificial Sequence: Synthetic oligonucleotide
cgcgugcaccagcgcggcg

SEQ ID NO: 2403509 - RNA, 19 nt, Artificial Sequence
  Description of Artificial Sequence: Synthetic oligonucleotide
cggcucggcugaugaugac

SEQ ID NO: 2403510 - RNA, 19 nt, Artificial Sequence
  Description of Artificial Sequence: Synthetic oligonucleotide
ccuugacgucaggaugcaa

SEQ ID NO: 2403511 - RNA, 19 nt, Artificial Sequence
  Description of Artificial Sequence: Synthetic oligonucleotide
gcccggcccuugacgucag

SEQ ID NO: 2403512 - RNA, 19 nt, Artificial Sequence
  Description of Artificial Sequence: Synthetic oligonucleotide
cgcagagggugaggaccug

SEQ ID NO: 2403513 - RNA, 19 nt, Artificial Sequence
  Description of Artificial Sequence: Synthetic oligonucleotide
cauaggcggcucggcugau

SEQ ID NO: 2403514 - RNA, 19 nt, Artificial Sequence
  Description of Artificial Sequence: Synthetic oligonucleotide
ccgccaccugcaacucugu

SEQ ID NO: 2403515 - RNA, 19 nt, Artificial Sequence
  Description of Artificial Sequence: Synthetic oligonucleotide
cguggcggagaaggacugu

SEQ ID NO: 2403516 - RNA, 19 nt, Artificial Sequence
  Description of Artificial Sequence: Synthetic oligonucleotide
cggccuccgccaccugcaa

SEQ ID NO: 2403517 - RNA, 19 nt, Artificial Sequence
  Description of Artificial Sequence: Synthetic oligonucleotide
uuuaauuuuaccaggaugu

SEQ ID NO: 2403518 - RNA, 19 nt, Artificial Sequence
  Description of Artificial Sequence: Synthetic oligonucleotide
uaauuauaaagcaugagca

SEQ ID NO: 2403519 - RNA, 19 nt, Artificial Sequence
  Description of Artificial Sequence: Synthetic oligonucleotide
augauuaugagaaaggugc

SEQ ID NO: 2403520 - RNA, 19 nt, Artificial Sequence
  Description of Artificial Sequence: Synthetic oligonucleotide
aauuagcuaauuauaaagc

SEQ ID NO: 2403521 - RNA, 19 nt, Artificial Sequence
  Description of Artificial Sequence: Synthetic oligonucleotide
ucuuacaugaugcauacgc

SEQ ID NO: 2403522 - RNA, 19 nt, Artificial Sequence
  Description of Artificial Sequence: Synthetic oligonucleotide
uauaagggaucuuaggagg

SEQ ID NO: 2403523 - RNA, 19 nt, Artificial Sequence
  Description of Artificial Sequence: Synthetic oligonucleotide
uuuggaaaagcauucauac

SEQ ID NO: 2403524 - RNA, 19 nt, Artificial Sequence
  Description of Artificial Sequence: Synthetic oligonucleotide
aguaauaagaaacuagaca

SEQ ID NO: 2403525 - RNA, 19 nt, Artificial Sequence
  Description of Artificial Sequence: Synthetic oligonucleotide
ugagggauaagauagauau

SEQ ID NO: 2403526 - RNA, 19 nt, Artificial Sequence
  Description of Artificial Sequence: Synthetic oligonucleotide
acgaaaacauaacaugucc

SEQ ID NO: 2403527 - RNA, 19 nt, Artificial Sequence
  Description of Artificial Sequence: Synthetic oligonucleotide
aaagccuugaauauuuuac

SEQ ID NO: 2403528 - RNA, 19 nt, Artificial Sequence
  Description of Artificial Sequence: Synthetic oligonucleotide
cuuaguaauaagaaacuag

SEQ ID NO: 2403529 - RNA, 19 nt, Artificial Sequence
  Description of Artificial Sequence: Synthetic oligonucleotide
aagacagacacuuuaauuu

SEQ ID NO: 2403530 - RNA, 19 nt, Artificial Sequence
  Description of Artificial Sequence: Synthetic oligonucleotide
uccacuauagaauagccug

SEQ ID NO: 2403531 - RNA, 19 nt, Artificial Sequence
  Description of Artificial Sequence: Synthetic oligonucleotide
cauaacauguccuaauuag

SEQ ID NO: 2403532 - RNA, 19 nt, Artificial Sequence
  Description of Artificial Sequence: Synthetic oligonucleotide
uuauaagggaucuuaggag

SEQ ID NO: 2403533 - RNA, 19 nt, Artificial Sequence
  Description of Artificial Sequence: Synthetic oligonucleotide
uguuuugcuaaacaucugc

SEQ ID NO: 2403534 - RNA, 19 nt, Artificial Sequence
  Description of Artificial Sequence: Synthetic oligonucleotide
uagcuaauuauaaagcaug

SEQ ID NO: 2403535 - RNA, 19 nt, Artificial Sequence
  Description of Artificial Sequence: Synthetic oligonucleotide
ugcaauggccuuauaaggg

SEQ ID NO: 2403536 - RNA, 19 nt, Artificial Sequence
  Description of Artificial Sequence: Synthetic oligonucleotide
uaagauagauauuuuaaaa

SEQ ID NO: 2403537 - RNA, 19 nt, Artificial Sequence
  Description of Artificial Sequence: Synthetic oligonucleotide
uaugauuaugagaaaggug

SEQ ID NO: 2403538 - RNA, 19 nt, Artificial Sequence
  Description of Artificial Sequence: Synthetic oligonucleotide
auuagcuaauuauaaagca

SEQ ID NO: 2403539 - RNA, 19 nt, Artificial Sequence
  Description of Artificial Sequence: Synthetic oligonucleotide
caucauaggaguaaccccg

SEQ ID NO: 2403540 - RNA, 19 nt, Artificial Sequence
  Description of Artificial Sequence: Synthetic oligonucleotide
acugcuagucaucaaaguc

SEQ ID NO: 2403541 - RNA, 19 nt, Artificial Sequence
  Description of Artificial Sequence: Synthetic oligonucleotide
acuacuggggaucccagcc

SEQ ID NO: 2403542 - RNA, 19 nt, Artificial Sequence
  Description of Artificial Sequence: Synthetic oligonucleotide
uuaaaguuggugcacugug

SEQ ID NO: 2403543 - RNA, 19 nt, Artificial Sequence
  Description of Artificial Sequence: Synthetic oligonucleotide
aaauuacuuaguaauaaga

SEQ ID NO: 2403544 - RNA, 19 nt, Artificial Sequence
  Description of Artificial Sequence: Synthetic oligonucleotide
gauuuccucagacuuagcc

SEQ ID NO: 2403545 - RNA, 19 nt, Artificial Sequence
  Description of Artificial Sequence: Synthetic oligonucleotide
auaggaguaaccccgguag

SEQ ID NO: 2403546 - RNA, 19 nt, Artificial Sequence
  Description of Artificial Sequence: Synthetic oligonucleotide
agugugagggauaagauag

SEQ ID NO: 2403547 - RNA, 19 nt, Artificial Sequence
  Description of Artificial Sequence: Synthetic oligonucleotide
uaacauguccuaauuagcu

SEQ ID NO: 2403548 - RNA, 19 nt, Artificial Sequence
  Description of Artificial Sequence: Synthetic oligonucleotide
auugguacgagauggcauc

SEQ ID NO: 2403549 - RNA, 19 nt, Artificial Sequence
  Description of Artificial Sequence: Synthetic oligonucleotide
uuugcuaaacaucugcaaa

SEQ ID NO: 2403550 - RNA, 19 nt, Artificial Sequence
  Description of Artificial Sequence: Synthetic oligonucleotide
cuuuaauuuuaccaggaug

SEQ ID NO: 2403551 - RNA, 19 nt, Artificial Sequence
  Description of Artificial Sequence: Synthetic oligonucleotide
aauuacuuaguaauaagaa

SEQ ID NO: 2403552 - RNA, 19 nt, Artificial Sequence
  Description of Artificial Sequence: Synthetic oligonucleotide
aaagcaugagcauuuugga

SEQ ID NO: 2403553 - RNA, 19 nt, Artificial Sequence
  Description of Artificial Sequence: Synthetic oligonucleotide
agacaauuagccucacagc

SEQ ID NO: 2403554 - RNA, 19 nt, Artificial Sequence
  Description of Artificial Sequence: Synthetic oligonucleotide
uuuuaccaggaugugaagg

SEQ ID NO: 2403555 - RNA, 19 nt, Artificial Sequence
  Description of Artificial Sequence: Synthetic oligonucleotide
ugaauauuuuacuuuacua

SEQ ID NO: 2403556 - RNA, 19 nt, Artificial Sequence
  Description of Artificial Sequence: Synthetic oligonucleotide
aaacuguagauuuccucag

SEQ ID NO: 2403557 - RNA, 19 nt, Artificial Sequence
  Description of Artificial Sequence: Synthetic oligonucleotide
uuaaacugaaggucaaugu

SEQ ID NO: 2403558 - RNA, 19 nt, Artificial Sequence
  Description of Artificial Sequence: Synthetic oligonucleotide
ugagcauuuuggaaaagca

SEQ ID NO: 2403559 - RNA, 19 nt, Artificial Sequence
  Description of Artificial Sequence: Synthetic oligonucleotide
uuagcuaauuauaaagcau

SEQ ID NO: 2403560 - RNA, 19 nt, Artificial Sequence
  Description of Artificial Sequence: Synthetic oligonucleotide
auuacuuaguaauaagaaa

SEQ ID NO: 2403561 - RNA, 19 nt, Artificial Sequence
  Description of Artificial Sequence: Synthetic oligonucleotide
gaugaaggcaaaaggaaag

SEQ ID NO: 2403562 - RNA, 19 nt, Artificial Sequence
  Description of Artificial Sequence: Synthetic oligonucleotide
agacgaugaaggcaaaagg

SEQ ID NO: 2403563 - RNA, 19 nt, Artificial Sequence
  Description of Artificial Sequence: Synthetic oligonucleotide
uacuuaguaauaagaaacu

SEQ ID NO: 2403564 - RNA, 19 nt, Artificial Sequence
  Description of Artificial Sequence: Synthetic oligonucleotide
guagaggagagugugaggg

SEQ ID NO: 2403565 - RNA, 19 nt, Artificial Sequence
  Description of Artificial Sequence: Synthetic oligonucleotide
aauuuuaccaggaugugaa

SEQ ID NO: 2403566 - RNA, 19 nt, Artificial Sequence
  Description of Artificial Sequence: Synthetic oligonucleotide
auuguuuugcuaaacaucu

SEQ ID NO: 2403567 - RNA, 19 nt, Artificial Sequence
  Description of Artificial Sequence: Synthetic oligonucleotide
auaagauagauauuuuaaa

SEQ ID NO: 2403568 - RNA, 19 nt, Artificial Sequence
  Description of Artificial Sequence: Synthetic oligonucleotide
aaagaggguaacacuuucc

SEQ ID NO: 2403569 - RNA, 19 nt, Artificial Sequence
  Description of Artificial Sequence: Synthetic oligonucleotide
auaacauguccuaauuagc

SEQ ID NO: 2403570 - RNA, 19 nt, Artificial Sequence
  Description of Artificial Sequence: Synthetic oligonucleotide
cuuauaagggaucuuagga

SEQ ID NO: 2403571 - RNA, 19 nt, Artificial Sequence
  Description of Artificial Sequence: Synthetic oligonucleotide
aaaacuugucaagcuuugc

SEQ ID NO: 2403572 - RNA, 19 nt, Artificial Sequence
  Description of Artificial Sequence: Synthetic oligonucleotide
cagacgaaaacauaacaug

SEQ ID NO: 2403573 - RNA, 19 nt, Artificial Sequence
  Description of Artificial Sequence: Synthetic oligonucleotide
uuuaccaggaugugaaggu

SEQ ID NO: 2403574 - RNA, 19 nt, Artificial Sequence
  Description of Artificial Sequence: Synthetic oligonucleotide
uaguaauaagaaacuagac

SEQ ID NO: 2403575 - RNA, 19 nt, Artificial Sequence
  Description of Artificial Sequence: Synthetic oligonucleotide
aggaugugaagguagagga

SEQ ID NO: 2403576 - RNA, 19 nt, Artificial Sequence
  Description of Artificial Sequence: Synthetic oligonucleotide
ggaaagcucacccugaaag

SEQ ID NO: 2403577 - RNA, 19 nt, Artificial Sequence
  Description of Artificial Sequence: Synthetic oligonucleotide
gauaagauagauauuuuaa

SEQ ID NO: 2403578 - RNA, 19 nt, Artificial Sequence
  Description of Artificial Sequence: Synthetic oligonucleotide
aaacauaacauguccuaau

SEQ ID NO: 2403579 - RNA, 19 nt, Artificial Sequence
  Description of Artificial Sequence: Synthetic oligonucleotide
gagauggcaucauaacacg

SEQ ID NO: 2403580 - RNA, 19 nt, Artificial Sequence
  Description of Artificial Sequence: Synthetic oligonucleotide
aagccuugaauauuuuacu

SEQ ID NO: 2403581 - RNA, 19 nt, Artificial Sequence
  Description of Artificial Sequence: Synthetic oligonucleotide
caaaugguaaaauccuggc

SEQ ID NO: 2403582 - RNA, 19 nt, Artificial Sequence
  Description of Artificial Sequence: Synthetic oligonucleotide
aaacaagcagacgaugaag

SEQ ID NO: 2403583 - RNA, 19 nt, Artificial Sequence
  Description of Artificial Sequence: Synthetic oligonucleotide
aaaacaagcagacgaugaa

SEQ ID NO: 2403584 - RNA, 19 nt, Artificial Sequence
  Description of Artificial Sequence: Synthetic oligonucleotide
uaaaauccuggcaggaaca

SEQ ID NO: 2403585 - RNA, 19 nt, Artificial Sequence
  Description of Artificial Sequence: Synthetic oligonucleotide
ugaugcauacgcaugugga

SEQ ID NO: 2403586 - RNA, 19 nt, Artificial Sequence
  Description of Artificial Sequence: Synthetic oligonucleotide
uaaacaucugcaaacugua

SEQ ID NO: 2403587 - RNA, 19 nt, Artificial Sequence
  Description of Artificial Sequence: Synthetic oligonucleotide
agcaugagcauuuuggaaa

SEQ ID NO: 2403588 - RNA, 19 nt, Artificial Sequence
  Description of Artificial Sequence: Synthetic oligonucleotide
gagggcuuuucuuaaacug

SEQ ID NO: 2403589 - RNA, 19 nt, Artificial Sequence
  Description of Artificial Sequence: Synthetic oligonucleotide
gugcaauggccuuauaagg

SEQ ID NO: 2403590 - RNA, 19 nt, Artificial Sequence
  Description of Artificial Sequence: Synthetic oligonucleotide
cacagcucuuacaugaugc

SEQ ID NO: 2403591 - RNA, 19 nt, Artificial Sequence
  Description of Artificial Sequence: Synthetic oligonucleotide
ugauuaugagaaaggugcc

SEQ ID NO: 2403592 - RNA, 19 nt, Artificial Sequence
  Description of Artificial Sequence: Synthetic oligonucleotide
uacaugaugcauacgcaug

SEQ ID NO: 2403593 - RNA, 19 nt, Artificial Sequence
  Description of Artificial Sequence: Synthetic oligonucleotide
uugcuaaacaucugcaaac

SEQ ID NO: 2403594 - RNA, 19 nt, Artificial Sequence
  Description of Artificial Sequence: Synthetic oligonucleotide
aagugcaauggccuuauaa

SEQ ID NO: 2403595 - RNA, 19 nt, Artificial Sequence
  Description of Artificial Sequence: Synthetic oligonucleotide
aaaauccuggcaggaacac

SEQ ID NO: 2403596 - RNA, 19 nt, Artificial Sequence
  Description of Artificial Sequence: Synthetic oligonucleotide
aacauaacauguccuaauu

SEQ ID NO: 2403597 - RNA, 19 nt, Artificial Sequence
  Description of Artificial Sequence: Synthetic oligonucleotide
ugacugcuagucaucaaag

SEQ ID NO: 2403598 - RNA, 19 nt, Artificial Sequence
  Description of Artificial Sequence: Synthetic oligonucleotide
augguaaaauccuggcagg

SEQ ID NO: 2403599 - RNA, 19 nt, Artificial Sequence
  Description of Artificial Sequence: Synthetic oligonucleotide
ugauguagcccgauagcag

SEQ ID NO: 2403600 - RNA, 19 nt, Artificial Sequence
  Description of Artificial Sequence: Synthetic oligonucleotide
guaggcgaugcgcaaaugg

SEQ ID NO: 2403601 - RNA, 19 nt, Artificial Sequence
  Description of Artificial Sequence: Synthetic oligonucleotide
uagaauagccugcuuuccc

SEQ ID NO: 2403602 - RNA, 19 nt, Artificial Sequence
  Description of Artificial Sequence: Synthetic oligonucleotide
guaaaauccuggcaggaac

SEQ ID NO: 2403603 - RNA, 19 nt, Artificial Sequence
  Description of Artificial Sequence: Synthetic oligonucleotide
aagcauucauacaauccgg

SEQ ID NO: 2403604 - RNA, 19 nt, Artificial Sequence
  Description of Artificial Sequence: Synthetic oligonucleotide
augaugcauacgcaugugg

SEQ ID NO: 2403605 - RNA, 19 nt, Artificial Sequence
  Description of Artificial Sequence: Synthetic oligonucleotide
gacaauuagccucacagcu

SEQ ID NO: 2403606 - RNA, 19 nt, Artificial Sequence
  Description of Artificial Sequence: Synthetic oligonucleotide
gaaaacauaacauguccua

SEQ ID NO: 2403607 - RNA, 19 nt, Artificial Sequence
  Description of Artificial Sequence: Synthetic oligonucleotide
aauccuggcaggaacacca

SEQ ID NO: 2403608 - RNA, 19 nt, Artificial Sequence
  Description of Artificial Sequence: Synthetic oligonucleotide
auagccugcuuucccagac

SEQ ID NO: 2403609 - RNA, 19 nt, Artificial Sequence
  Description of Artificial Sequence: Synthetic oligonucleotide
ucaucugugcuggaaagcc

SEQ ID NO: 2403610 - RNA, 19 nt, Artificial Sequence
  Description of Artificial Sequence: Synthetic oligonucleotide
cuuuccacuauagaauagc

SEQ ID NO: 2403611 - RNA, 19 nt, Artificial Sequence
  Description of Artificial Sequence: Synthetic oligonucleotide
uuuugcuaaacaucugcaa

SEQ ID NO: 2403612 - RNA, 19 nt, Artificial Sequence
  Description of Artificial Sequence: Synthetic oligonucleotide
agagccuaugauuaugaga

SEQ ID NO: 2403613 - RNA, 19 nt, Artificial Sequence
  Description of Artificial Sequence: Synthetic oligonucleotide
aaaacauaacauguccuaa

SEQ ID NO: 2403614 - RNA, 19 nt, Artificial Sequence
  Description of Artificial Sequence: Synthetic oligonucleotide
uggcaucauaacacggugg

SEQ ID NO: 2403615 - RNA, 19 nt, Artificial Sequence
  Description of Artificial Sequence: Synthetic oligonucleotide
agggauaagauagauauuu

SEQ ID NO: 2403616 - RNA, 19 nt, Artificial Sequence
  Description of Artificial Sequence: Synthetic oligonucleotide
uaccaggaugugaagguag

SEQ ID NO: 2403617 - RNA, 19 nt, Artificial Sequence
  Description of Artificial Sequence: Synthetic oligonucleotide
uuacaugaugcauacgcau

SEQ ID NO: 2403618 - RNA, 19 nt, Artificial Sequence
  Description of Artificial Sequence: Synthetic oligonucleotide
uuuacuacuggggauccca

SEQ ID NO: 2403619 - RNA, 19 nt, Artificial Sequence
  Description of Artificial Sequence: Synthetic oligonucleotide
agcagacgaaaacauaaca

SEQ ID NO: 2403620 - RNA, 19 nt, Artificial Sequence
  Description of Artificial Sequence: Synthetic oligonucleotide
uaauuuuaccaggauguga

SEQ ID NO: 2403621 - RNA, 19 nt, Artificial Sequence
  Description of Artificial Sequence: Synthetic oligonucleotide
guagccuuuggaugcauag

SEQ ID NO: 2403622 - RNA, 19 nt, Artificial Sequence
  Description of Artificial Sequence: Synthetic oligonucleotide
aggagggcuuuucuuaaac

SEQ ID NO: 2403623 - RNA, 19 nt, Artificial Sequence
  Description of Artificial Sequence: Synthetic oligonucleotide
caucauaacacgguggcac

SEQ ID NO: 2403624 - RNA, 19 nt, Artificial Sequence
  Description of Artificial Sequence: Synthetic oligonucleotide
caaugaugaggacaggaac

SEQ ID NO: 2403625 - RNA, 19 nt, Artificial Sequence
  Description of Artificial Sequence: Synthetic oligonucleotide
augcgcaaaugguaaaauc

SEQ ID NO: 2403626 - RNA, 19 nt, Artificial Sequence
  Description of Artificial Sequence: Synthetic oligonucleotide
uguccuaauuagcuaauua

SEQ ID NO: 2403627 - RNA, 19 nt, Artificial Sequence
  Description of Artificial Sequence: Synthetic oligonucleotide
gaugugaagguagaggaga

SEQ ID NO: 2403628 - RNA, 19 nt, Artificial Sequence
  Description of Artificial Sequence: Synthetic oligonucleotide
ugagaaaggugccaaucaa

SEQ ID NO: 2403629 - RNA, 19 nt, Artificial Sequence
  Description of Artificial Sequence: Synthetic oligonucleotide
acauguccuaauuagcuaa

SEQ ID NO: 2403630 - RNA, 19 nt, Artificial Sequence
  Description of Artificial Sequence: Synthetic oligonucleotide
caccaaaaugccaaugaug

SEQ ID NO: 2403631 - RNA, 19 nt, Artificial Sequence
  Description of Artificial Sequence: Synthetic oligonucleotide
aggaguaaccccgguagcc

SEQ ID NO: 2403632 - RNA, 19 nt, Artificial Sequence
  Description of Artificial Sequence: Synthetic oligonucleotide
uaaaguuggugcacugugu

SEQ ID NO: 2403633 - RNA, 19 nt, Artificial Sequence
  Description of Artificial Sequence: Synthetic oligonucleotide
acaugaugcauacgcaugu

SEQ ID NO: 2403634 - RNA, 19 nt, Artificial Sequence
  Description of Artificial Sequence: Synthetic oligonucleotide
uggaaagccuugaauauuu

SEQ ID NO: 2403635 - RNA, 19 nt, Artificial Sequence
  Description of Artificial Sequence: Synthetic oligonucleotide
ccuaugauuaugagaaagg

SEQ ID NO: 2403636 - RNA, 19 nt, Artificial Sequence
  Description of Artificial Sequence: Synthetic oligonucleotide
ugcauaguaggcgaugcgc

SEQ ID NO: 2403637 - RNA, 19 nt, Artificial Sequence
  Description of Artificial Sequence: Synthetic oligonucleotide
uuaauuuuaccaggaugug

SEQ ID NO: 2403638 - RNA, 19 nt, Artificial Sequence
  Description of Artificial Sequence: Synthetic oligonucleotide
uuccacuauagaauagccu

SEQ ID NO: 2403639 - RNA, 19 nt, Artificial Sequence
  Description of Artificial Sequence: Synthetic oligonucleotide
agacgaaaacauaacaugu

SEQ ID NO: 2403640 - RNA, 19 nt, Artificial Sequence
  Description of Artificial Sequence: Synthetic oligonucleotide
acgagauggcaucauaaca

SEQ ID NO: 2403641 - RNA, 19 nt, Artificial Sequence
  Description of Artificial Sequence: Synthetic oligonucleotide
agggccagcagacgaaaac

SEQ ID NO: 2403642 - RNA, 19 nt, Artificial Sequence
  Description of Artificial Sequence: Synthetic oligonucleotide
aguuggugcacugugucuc

SEQ ID NO: 2403643 - RNA, 19 nt, Artificial Sequence
  Description of Artificial Sequence: Synthetic oligonucleotide
gaugcauaguaggcgaugc

SEQ ID NO: 2403644 - RNA, 19 nt, Artificial Sequence
  Description of Artificial Sequence: Synthetic oligonucleotide
uugucaagcuuugccaggg

SEQ ID NO: 2403645 - RNA, 19 nt, Artificial Sequence
  Description of Artificial Sequence: Synthetic oligonucleotide
uagccauaguuccugcuug

SEQ ID NO: 2403646 - RNA, 19 nt, Artificial Sequence
  Description of Artificial Sequence: Synthetic oligonucleotide
uaacacuuuccacuauaga

SEQ ID NO: 2403647 - RNA, 19 nt, Artificial Sequence
  Description of Artificial Sequence: Synthetic oligonucleotide
agaauagccugcuuuccca

SEQ ID NO: 2403648 - RNA, 19 nt, Artificial Sequence
  Description of Artificial Sequence: Synthetic oligonucleotide
aagcaugagcauuuuggaa

SEQ ID NO: 2403649 - RNA, 19 nt, Artificial Sequence
  Description of Artificial Sequence: Synthetic oligonucleotide
gagagugugagggauaaga

SEQ ID NO: 2403650 - RNA, 19 nt, Artificial Sequence
  Description of Artificial Sequence: Synthetic oligonucleotide
ucuuaaaguuggugcacug

SEQ ID NO: 2403651 - RNA, 19 nt, Artificial Sequence
  Description of Artificial Sequence: Synthetic oligonucleotide
gugaagguagaggagagug

SEQ ID NO: 2403652 - RNA, 19 nt, Artificial Sequence
  Description of Artificial Sequence: Synthetic oligonucleotide
gaaagaggguaacacuuuc

SEQ ID NO: 2403653 - RNA, 19 nt, Artificial Sequence
  Description of Artificial Sequence: Synthetic oligonucleotide
cuugucaagcuuugccagg

SEQ ID NO: 2403654 - RNA, 19 nt, Artificial Sequence
  Description of Artificial Sequence: Synthetic oligonucleotide
ugucaucauaggaguaacc

SEQ ID NO: 2403655 - RNA, 19 nt, Artificial Sequence
  Description of Artificial Sequence: Synthetic oligonucleotide
auaaagcaugagcauuuug

SEQ ID NO: 2403656 - RNA, 19 nt, Artificial Sequence
  Description of Artificial Sequence: Synthetic oligonucleotide
uacgagauggcaucauaac

SEQ ID NO: 2403657 - RNA, 19 nt, Artificial Sequence
  Description of Artificial Sequence: Synthetic oligonucleotide
acuuuacuacuggggaucc

SEQ ID NO: 2403658 - RNA, 19 nt, Artificial Sequence
  Description of Artificial Sequence: Synthetic oligonucleotide
cuaauuagcuaauuauaaa

SEQ ID NO: 2403659 - RNA, 19 nt, Artificial Sequence
  Description of Artificial Sequence: Synthetic oligonucleotide
gaauagccugcuuucccag

SEQ ID NO: 2403660 - RNA, 19 nt, Artificial Sequence
  Description of Artificial Sequence: Synthetic oligonucleotide
uagcccgauagcaggagag

SEQ ID NO: 2403661 - RNA, 19 nt, Artificial Sequence
  Description of Artificial Sequence: Synthetic oligonucleotide
auaagacagacacuuuaau

SEQ ID NO: 2403662 - RNA, 19 nt, Artificial Sequence
  Description of Artificial Sequence: Synthetic oligonucleotide
uuucccagacaauuagccu

SEQ ID NO: 2403663 - RNA, 19 nt, Artificial Sequence
  Description of Artificial Sequence: Synthetic oligonucleotide
uuagccauaguuccugcuu

SEQ ID NO: 2403664 - RNA, 19 nt, Artificial Sequence
  Description of Artificial Sequence: Synthetic oligonucleotide
uaggcgaugcgcaaauggu

SEQ ID NO: 2403665 - RNA, 19 nt, Artificial Sequence
  Description of Artificial Sequence: Synthetic oligonucleotide
ucugcaaacuguagauuuc

SEQ ID NO: 2403666 - RNA, 19 nt, Artificial Sequence
  Description of Artificial Sequence: Synthetic oligonucleotide
ugaaggcaaaaggaaagcu

SEQ ID NO: 2403667 - RNA, 19 nt, Artificial Sequence
  Description of Artificial Sequence: Synthetic oligonucleotide
auaagggaucuuaggaggg

SEQ ID NO: 2403668 - RNA, 19 nt, Artificial Sequence
  Description of Artificial Sequence: Synthetic oligonucleotide
caggaugugaagguagagg

SEQ ID NO: 2403669 - RNA, 19 nt, Artificial Sequence
  Description of Artificial Sequence: Synthetic oligonucleotide
gaaagcucacccugaaaga

SEQ ID NO: 2403670 - RNA, 19 nt, Artificial Sequence
  Description of Artificial Sequence: Synthetic oligonucleotide
uuacuuuacuacuggggau

SEQ ID NO: 2403671 - RNA, 19 nt, Artificial Sequence
  Description of Artificial Sequence: Synthetic oligonucleotide
auuaugagaaaggugccaa

SEQ ID NO: 2403672 - RNA, 19 nt, Artificial Sequence
  Description of Artificial Sequence: Synthetic oligonucleotide
ucccagacaauuagccuca

SEQ ID NO: 2403673 - RNA, 19 nt, Artificial Sequence
  Description of Artificial Sequence: Synthetic oligonucleotide
uacaauccggccauuguuu

SEQ ID NO: 2403674 - RNA, 19 nt, Artificial Sequence
  Description of Artificial Sequence: Synthetic oligonucleotide
auuuuaccaggaugugaag

SEQ ID NO: 2403675 - RNA, 19 nt, Artificial Sequence
  Description of Artificial Sequence: Synthetic oligonucleotide
aagcucacccugaaagagg

SEQ ID NO: 2403676 - RNA, 19 nt, Artificial Sequence
  Description of Artificial Sequence: Synthetic oligonucleotide
ucacagcucuuacaugaug

SEQ ID NO: 2403677 - RNA, 19 nt, Artificial Sequence
  Description of Artificial Sequence: Synthetic oligonucleotide
aagcagacgaugaaggcaa

SEQ ID NO: 2403678 - RNA, 19 nt, Artificial Sequence
  Description of Artificial Sequence: Synthetic oligonucleotide
gacgaaaacauaacauguc

SEQ ID NO: 2403679 - RNA, 19 nt, Artificial Sequence
  Description of Artificial Sequence: Synthetic oligonucleotide
uacuuuacuacuggggauc

SEQ ID NO: 2403680 - RNA, 19 nt, Artificial Sequence
  Description of Artificial Sequence: Synthetic oligonucleotide
uuagccucacagcucuuac

SEQ ID NO: 2403681 - RNA, 19 nt, Artificial Sequence
  Description of Artificial Sequence: Synthetic oligonucleotide
ccagauugguacgagaugg

SEQ ID NO: 2403682 - RNA, 19 nt, Artificial Sequence
  Description of Artificial Sequence: Synthetic oligonucleotide
gacaggaacagcucggucu

SEQ ID NO: 2403683 - RNA, 19 nt, Artificial Sequence
  Description of Artificial Sequence: Synthetic oligonucleotide
ggcaucauaacacgguggc

SEQ ID NO: 2403684 - RNA, 19 nt, Artificial Sequence
  Description of Artificial Sequence: Synthetic oligonucleotide
cagacgaugaaggcaaaag

SEQ ID NO: 2403685 - RNA, 19 nt, Artificial Sequence
  Description of Artificial Sequence: Synthetic oligonucleotide
acaauuagccucacagcuc

SEQ ID NO: 2403686 - RNA, 19 nt, Artificial Sequence
  Description of Artificial Sequence: Synthetic oligonucleotide
uuaggagggcuuuucuuaa

SEQ ID NO: 2403687 - RNA, 19 nt, Artificial Sequence
  Description of Artificial Sequence: Synthetic oligonucleotide
aaacaucugcaaacuguag

SEQ ID NO: 2403688 - RNA, 19 nt, Artificial Sequence
  Description of Artificial Sequence: Synthetic oligonucleotide
auaacacgguggcacagcu

SEQ ID NO: 2403689 - RNA, 19 nt, Artificial Sequence
  Description of Artificial Sequence: Synthetic oligonucleotide
cuuacaugaugcauacgca

SEQ ID NO: 2403690 - RNA, 19 nt, Artificial Sequence
  Description of Artificial Sequence: Synthetic oligonucleotide
agguagaggagagugugag

SEQ ID NO: 2403691 - RNA, 19 nt, Artificial Sequence
  Description of Artificial Sequence: Synthetic oligonucleotide
cagacacuuuaauuuuacc

SEQ ID NO: 2403692 - RNA, 19 nt, Artificial Sequence
  Description of Artificial Sequence: Synthetic oligonucleotide
aaaggaaagcucacccuga

SEQ ID NO: 2403693 - RNA, 19 nt, Artificial Sequence
  Description of Artificial Sequence: Synthetic oligonucleotide
gaugcauacgcauguggaa

SEQ ID NO: 2403694 - RNA, 19 nt, Artificial Sequence
  Description of Artificial Sequence: Synthetic oligonucleotide
cugcaaacuguagauuucc

SEQ ID NO: 2403695 - RNA, 19 nt, Artificial Sequence
  Description of Artificial Sequence: Synthetic oligonucleotide
gacuuagccauaguuccug

SEQ ID NO: 2403696 - RNA, 19 nt, Artificial Sequence
  Description of Artificial Sequence: Synthetic oligonucleotide
agaaaggugccaaucaaaa

SEQ ID NO: 2403697 - RNA, 19 nt, Artificial Sequence
  Description of Artificial Sequence: Synthetic oligonucleotide
auacaauccggccauuguu

SEQ ID NO: 2403698 - RNA, 19 nt, Artificial Sequence
  Description of Artificial Sequence: Synthetic oligonucleotide
uacuggggaucccagccgc

SEQ ID NO: 2403699 - RNA, 19 nt, Artificial Sequence
  Description of Artificial Sequence: Synthetic oligonucleotide
gagagccuaugauuaugag

SEQ ID NO: 2403700 - RNA, 19 nt, Artificial Sequence
  Description of Artificial Sequence: Synthetic oligonucleotide
cacaguggcaagugcaaug

SEQ ID NO: 2403701 - RNA, 19 nt, Artificial Sequence
  Description of Artificial Sequence: Synthetic oligonucleotide
augcauaguaggcgaugcg

SEQ ID NO: 2403702 - RNA, 19 nt, Artificial Sequence
  Description of Artificial Sequence: Synthetic oligonucleotide
ugcaaacuguagauuuccu

SEQ ID NO: 2403703 - RNA, 19 nt, Artificial Sequence
  Description of Artificial Sequence: Synthetic oligonucleotide
uaggaguaaccccgguagc

SEQ ID NO: 2403704 - RNA, 19 nt, Artificial Sequence
  Description of Artificial Sequence: Synthetic oligonucleotide
ucauacaauccggccauug

SEQ ID NO: 2403705 - RNA, 19 nt, Artificial Sequence
  Description of Artificial Sequence: Synthetic oligonucleotide
gauagcaggagagagccua

SEQ ID NO: 2403706 - RNA, 19 nt, Artificial Sequence
  Description of Artificial Sequence: Synthetic oligonucleotide
aggaacagcucggucugcc

SEQ ID NO: 2403707 - RNA, 19 nt, Artificial Sequence
  Description of Artificial Sequence: Synthetic oligonucleotide
aucauaacacgguggcaca

SEQ ID NO: 2403708 - RNA, 19 nt, Artificial Sequence
  Description of Artificial Sequence: Synthetic oligonucleotide
ugcauacgcauguggaaaa

SEQ ID NO: 2403709 - RNA, 19 nt, Artificial Sequence
  Description of Artificial Sequence: Synthetic oligonucleotide
ugucuuaaaguuggugcac

SEQ ID NO: 2403710 - RNA, 19 nt, Artificial Sequence
  Description of Artificial Sequence: Synthetic oligonucleotide
cuuaggagggcuuuucuua

SEQ ID NO: 2403711 - RNA, 19 nt, Artificial Sequence
  Description of Artificial Sequence: Synthetic oligonucleotide
acagcucuuacaugaugca

SEQ ID NO: 2403712 - RNA, 19 nt, Artificial Sequence
  Description of Artificial Sequence: Synthetic oligonucleotide
agauggcaucauaacacgg

SEQ ID NO: 2403713 - RNA, 19 nt, Artificial Sequence
  Description of Artificial Sequence: Synthetic oligonucleotide
ucauaacacgguggcacag

SEQ ID NO: 2403714 - RNA, 19 nt, Artificial Sequence
  Description of Artificial Sequence: Synthetic oligonucleotide
ucuuaggagggcuuuucuu

SEQ ID NO: 2403715 - RNA, 19 nt, Artificial Sequence
  Description of Artificial Sequence: Synthetic oligonucleotide
gagagagccuaugauuaug

SEQ ID NO: 2403716 - RNA, 19 nt, Artificial Sequence
  Description of Artificial Sequence: Synthetic oligonucleotide
cacugugucucuucucaag

SEQ ID NO: 2403717 - RNA, 19 nt, Artificial Sequence
  Description of Artificial Sequence: Synthetic oligonucleotide
ccuuugcugauguagcccg

SEQ ID NO: 2403718 - RNA, 19 nt, Artificial Sequence
  Description of Artificial Sequence: Synthetic oligonucleotide
uccucagacuuagccauag

SEQ ID NO: 2403719 - RNA, 19 nt, Artificial Sequence
  Description of Artificial Sequence: Synthetic oligonucleotide
ccuaauuagcuaauuauaa

SEQ ID NO: 2403720 - RNA, 19 nt, Artificial Sequence
  Description of Artificial Sequence: Synthetic oligonucleotide
uuaugagaaaggugccaau

SEQ ID NO: 2403721 - RNA, 19 nt, Artificial Sequence
  Description of Artificial Sequence: Synthetic oligonucleotide
ucacccugaaagaggguaa

SEQ ID NO: 2403722 - RNA, 19 nt, Artificial Sequence
  Description of Artificial Sequence: Synthetic oligonucleotide
ggauaagauagauauuuua

SEQ ID NO: 2403723 - RNA, 19 nt, Artificial Sequence
  Description of Artificial Sequence: Synthetic oligonucleotide
gcuaauuauaaagcaugag

SEQ ID NO: 2403724 - RNA, 19 nt, Artificial Sequence
  Description of Artificial Sequence: Synthetic oligonucleotide
cgagauggcaucauaacac

SEQ ID NO: 2403725 - RNA, 19 nt, Artificial Sequence
  Description of Artificial Sequence: Synthetic oligonucleotide
guuuugcuaaacaucugca

SEQ ID NO: 2403726 - RNA, 19 nt, Artificial Sequence
  Description of Artificial Sequence: Synthetic oligonucleotide
cagauugguacgagauggc

SEQ ID NO: 2403727 - RNA, 19 nt, Artificial Sequence
  Description of Artificial Sequence: Synthetic oligonucleotide
cuacuggggaucccagccg

SEQ ID NO: 2403728 - RNA, 19 nt, Artificial Sequence
  Description of Artificial Sequence: Synthetic oligonucleotide
guccuaauuagcuaauuau

SEQ ID NO: 2403729 - RNA, 19 nt, Artificial Sequence
  Description of Artificial Sequence: Synthetic oligonucleotide
gagugugagggauaagaua

SEQ ID NO: 2403730 - RNA, 19 nt, Artificial Sequence
  Description of Artificial Sequence: Synthetic oligonucleotide
aaccccgguagccuuugga

SEQ ID NO: 2403731 - RNA, 19 nt, Artificial Sequence
  Description of Artificial Sequence: Synthetic oligonucleotide
aggguaacacuuuccacua

SEQ ID NO: 2403732 - RNA, 19 nt, Artificial Sequence
  Description of Artificial Sequence: Synthetic oligonucleotide
ccugcuugaugucuuaaag

SEQ ID NO: 2403733 - RNA, 19 nt, Artificial Sequence
  Description of Artificial Sequence: Synthetic oligonucleotide
cagcagacgaaaacauaac

SEQ ID NO: 2403734 - RNA, 19 nt, Artificial Sequence
  Description of Artificial Sequence: Synthetic oligonucleotide
acgaugaaggcaaaaggaa

SEQ ID NO: 2403735 - RNA, 19 nt, Artificial Sequence
  Description of Artificial Sequence: Synthetic oligonucleotide
uucucaaggcugaggugac

SEQ ID NO: 2403736 - RNA, 19 nt, Artificial Sequence
  Description of Artificial Sequence: Synthetic oligonucleotide
uaguaggcgaugcgcaaau

SEQ ID NO: 2403737 - RNA, 19 nt, Artificial Sequence
  Description of Artificial Sequence: Synthetic oligonucleotide
agauugguacgagauggca

SEQ ID NO: 2403738 - RNA, 19 nt, Artificial Sequence
  Description of Artificial Sequence: Synthetic oligonucleotide
cucaaggcugaggugacug

SEQ ID NO: 2403739 - RNA, 19 nt, Artificial Sequence
  Description of Artificial Sequence: Synthetic oligonucleotide
aggagagagccuaugauua

SEQ ID NO: 2403740 - RNA, 19 nt, Artificial Sequence
  Description of Artificial Sequence: Synthetic oligonucleotide
agggcuuuucuuaaacuga

SEQ ID NO: 2403741 - RNA, 19 nt, Artificial Sequence
  Description of Artificial Sequence: Synthetic oligonucleotide
ggauaagacagacacuuua

SEQ ID NO: 2403742 - RNA, 19 nt, Artificial Sequence
  Description of Artificial Sequence: Synthetic oligonucleotide
agagagccuaugauuauga

SEQ ID NO: 2403743 - RNA, 19 nt, Artificial Sequence
  Description of Artificial Sequence: Synthetic oligonucleotide
auggccuuauaagggaucu

SEQ ID NO: 2403744 - RNA, 19 nt, Artificial Sequence
  Description of Artificial Sequence: Synthetic oligonucleotide
uguagcccgauagcaggag

SEQ ID NO: 2403745 - RNA, 19 nt, Artificial Sequence
  Description of Artificial Sequence: Synthetic oligonucleotide
ugucaagcuuugccagggc

SEQ ID NO: 2403746 - RNA, 19 nt, Artificial Sequence
  Description of Artificial Sequence: Synthetic oligonucleotide
gguagaggagagugugagg

SEQ ID NO: 2403747 - RNA, 19 nt, Artificial Sequence
  Description of Artificial Sequence: Synthetic oligonucleotide
caagcagacgaugaaggca

SEQ ID NO: 2403748 - RNA, 19 nt, Artificial Sequence
  Description of Artificial Sequence: Synthetic oligonucleotide
cugauguagcccgauagca

SEQ ID NO: 2403749 - RNA, 19 nt, Artificial Sequence
  Description of Artificial Sequence: Synthetic oligonucleotide
ccagccgccagauugguac

SEQ ID NO: 2403750 - RNA, 19 nt, Artificial Sequence
  Description of Artificial Sequence: Synthetic oligonucleotide
gagaaaggugccaaucaaa

SEQ ID NO: 2403751 - RNA, 19 nt, Artificial Sequence
  Description of Artificial Sequence: Synthetic oligonucleotide
gauggcaucauaacacggu

SEQ ID NO: 2403752 - RNA, 19 nt, Artificial Sequence
  Description of Artificial Sequence: Synthetic oligonucleotide
gcuaaacaucugcaaacug

SEQ ID NO: 2403753 - RNA, 19 nt, Artificial Sequence
  Description of Artificial Sequence: Synthetic oligonucleotide
gcucuuacaugaugcauac

SEQ ID NO: 2403754 - RNA, 19 nt, Artificial Sequence
  Description of Artificial Sequence: Synthetic oligonucleotide
cuauagaauagccugcuuu

SEQ ID NO: 2403755 - RNA, 19 nt, Artificial Sequence
  Description of Artificial Sequence: Synthetic oligonucleotide
ccgauagcaggagagagcc

SEQ ID NO: 2403756 - RNA, 19 nt, Artificial Sequence
  Description of Artificial Sequence: Synthetic oligonucleotide
cuaugauuaugagaaaggu

SEQ ID NO: 2403757 - RNA, 19 nt, Artificial Sequence
  Description of Artificial Sequence: Synthetic oligonucleotide
gaucuuaggagggcuuuuc

SEQ ID NO: 2403758 - RNA, 19 nt, Artificial Sequence
  Description of Artificial Sequence: Synthetic oligonucleotide
caauuagccucacagcucu

SEQ ID NO: 2403759 - RNA, 19 nt, Artificial Sequence
  Description of Artificial Sequence: Synthetic oligonucleotide
augcauacgcauguggaaa

SEQ ID NO: 2403760 - RNA, 19 nt, Artificial Sequence
  Description of Artificial Sequence: Synthetic oligonucleotide
gcaaacuguagauuuccuc

SEQ ID NO: 2403761 - RNA, 19 nt, Artificial Sequence
  Description of Artificial Sequence: Synthetic oligonucleotide
ccacuauagaauagccugc

SEQ ID NO: 2403762 - RNA, 19 nt, Artificial Sequence
  Description of Artificial Sequence: Synthetic oligonucleotide
agcucuuacaugaugcaua

SEQ ID NO: 2403763 - RNA, 19 nt, Artificial Sequence
  Description of Artificial Sequence: Synthetic oligonucleotide
ccucacagcucuuacauga

SEQ ID NO: 2403764 - RNA, 19 nt, Artificial Sequence
  Description of Artificial Sequence: Synthetic oligonucleotide
acaauccggccauuguuuu

SEQ ID NO: 2403765 - RNA, 19 nt, Artificial Sequence
  Description of Artificial Sequence: Synthetic oligonucleotide
acuauagaauagccugcuu

SEQ ID NO: 2403766 - RNA, 19 nt, Artificial Sequence
  Description of Artificial Sequence: Synthetic oligonucleotide
cccgguagccuuuggaugc

SEQ ID NO: 2403767 - RNA, 19 nt, Artificial Sequence
  Description of Artificial Sequence: Synthetic oligonucleotide
gcaauggccuuauaaggga

SEQ ID NO: 2403768 - RNA, 19 nt, Artificial Sequence
  Description of Artificial Sequence: Synthetic oligonucleotide
agccugcuuucccagacaa

SEQ ID NO: 2403769 - RNA, 19 nt, Artificial Sequence
  Description of Artificial Sequence: Synthetic oligonucleotide
agagugugagggauaagau

SEQ ID NO: 2403770 - RNA, 19 nt, Artificial Sequence
  Description of Artificial Sequence: Synthetic oligonucleotide
ccagcagacgaaaacauaa

SEQ ID NO: 2403771 - RNA, 19 nt, Artificial Sequence
  Description of Artificial Sequence: Synthetic oligonucleotide
uggaugcauaguaggcgau

SEQ ID NO: 2403772 - RNA, 19 nt, Artificial Sequence
  Description of Artificial Sequence: Synthetic oligonucleotide
uugguacgagauggcauca

SEQ ID NO: 2403773 - RNA, 19 nt, Artificial Sequence
  Description of Artificial Sequence: Synthetic oligonucleotide
caauccggccauuguuuug

SEQ ID NO: 2403774 - RNA, 19 nt, Artificial Sequence
  Description of Artificial Sequence: Synthetic oligonucleotide
agucuggaaugucaucaua

SEQ ID NO: 2403775 - RNA, 19 nt, Artificial Sequence
  Description of Artificial Sequence: Synthetic oligonucleotide
accccgguagccuuuggau

SEQ ID NO: 2403776 - RNA, 19 nt, Artificial Sequence
  Description of Artificial Sequence: Synthetic oligonucleotide
uuaccaggaugugaaggua

SEQ ID NO: 2403777 - RNA, 19 nt, Artificial Sequence
  Description of Artificial Sequence: Synthetic oligonucleotide
agauuuccucagacuuagc

SEQ ID NO: 2403778 - RNA, 19 nt, Artificial Sequence
  Description of Artificial Sequence: Synthetic oligonucleotide
aggugacugcuagucauca

SEQ ID NO: 2403779 - RNA, 19 nt, Artificial Sequence
  Description of Artificial Sequence: Synthetic oligonucleotide
gauugguacgagauggcau

SEQ ID NO: 2403780 - RNA, 19 nt, Artificial Sequence
  Description of Artificial Sequence: Synthetic oligonucleotide
aggaaagcucacccugaaa

SEQ ID NO: 2403781 - RNA, 19 nt, Artificial Sequence
  Description of Artificial Sequence: Synthetic oligonucleotide
uaggagggcuuuucuuaaa

SEQ ID NO: 2403782 - RNA, 19 nt, Artificial Sequence
  Description of Artificial Sequence: Synthetic oligonucleotide
cucuuacaugaugcauacg

SEQ ID NO: 2403783 - RNA, 19 nt, Artificial Sequence
  Description of Artificial Sequence: Synthetic oligonucleotide
caugagcauuuuggaaaag

SEQ ID NO: 2403784 - RNA, 19 nt, Artificial Sequence
  Description of Artificial Sequence: Synthetic oligonucleotide
guagauuuccucagacuua

SEQ ID NO: 2403785 - RNA, 19 nt, Artificial Sequence
  Description of Artificial Sequence: Synthetic oligonucleotide
uggugcacugugucucuuc

SEQ ID NO: 2403786 - RNA, 19 nt, Artificial Sequence
  Description of Artificial Sequence: Synthetic oligonucleotide
caguggcaagugcaauggc

SEQ ID NO: 2403787 - RNA, 19 nt, Artificial Sequence
  Description of Artificial Sequence: Synthetic oligonucleotide
uaacacgguggcacagcua

SEQ ID NO: 2403788 - RNA, 19 nt, Artificial Sequence
  Description of Artificial Sequence: Synthetic oligonucleotide
gccagauugguacgagaug

SEQ ID NO: 2403789 - RNA, 19 nt, Artificial Sequence
  Description of Artificial Sequence: Synthetic oligonucleotide
acuagacauaauacauuuu

SEQ ID NO: 2403790 - RNA, 19 nt, Artificial Sequence
  Description of Artificial Sequence: Synthetic oligonucleotide
cucagacuuagccauaguu

SEQ ID NO: 2403791 - RNA, 19 nt, Artificial Sequence
  Description of Artificial Sequence: Synthetic oligonucleotide
cagccgccagauugguacg

SEQ ID NO: 2403792 - RNA, 19 nt, Artificial Sequence
  Description of Artificial Sequence: Synthetic oligonucleotide
cauacaauccggccauugu

SEQ ID NO: 2403793 - RNA, 19 nt, Artificial Sequence
  Description of Artificial Sequence: Synthetic oligonucleotide
uagcaggagagagccuaug

SEQ ID NO: 2403794 - RNA, 19 nt, Artificial Sequence
  Description of Artificial Sequence: Synthetic oligonucleotide
cccgauagcaggagagagc

SEQ ID NO: 2403795 - RNA, 19 nt, Artificial Sequence
  Description of Artificial Sequence: Synthetic oligonucleotide
aucugugcuggaaagccuu

SEQ ID NO: 2403796 - RNA, 19 nt, Artificial Sequence
  Description of Artificial Sequence: Synthetic oligonucleotide
cucacccugaaagagggua

SEQ ID NO: 2403797 - RNA, 19 nt, Artificial Sequence
  Description of Artificial Sequence: Synthetic oligonucleotide
uugccagggccagcagacg

SEQ ID NO: 2403798 - RNA, 19 nt, Artificial Sequence
  Description of Artificial Sequence: Synthetic oligonucleotide
guagcccgauagcaggaga

SEQ ID NO: 2403799 - RNA, 19 nt, Artificial Sequence
  Description of Artificial Sequence: Synthetic oligonucleotide
ccauaguuccugcuugaug

SEQ ID NO: 2403800 - RNA, 19 nt, Artificial Sequence
  Description of Artificial Sequence: Synthetic oligonucleotide
cacccugaaagaggguaac

SEQ ID NO: 2403801 - RNA, 19 nt, Artificial Sequence
  Description of Artificial Sequence: Synthetic oligonucleotide
guggcaagugcaauggccu

SEQ ID NO: 2403802 - RNA, 19 nt, Artificial Sequence
  Description of Artificial Sequence: Synthetic oligonucleotide
gaugcgcaaaugguaaaau

SEQ ID NO: 2403803 - RNA, 19 nt, Artificial Sequence
  Description of Artificial Sequence: Synthetic oligonucleotide
agcacaguggcaagugcaa

SEQ ID NO: 2403804 - RNA, 19 nt, Artificial Sequence
  Description of Artificial Sequence: Synthetic oligonucleotide
uuccucagacuuagccaua

SEQ ID NO: 2403805 - RNA, 19 nt, Artificial Sequence
  Description of Artificial Sequence: Synthetic oligonucleotide
agccuaugauuaugagaaa

SEQ ID NO: 2403806 - RNA, 19 nt, Artificial Sequence
  Description of Artificial Sequence: Synthetic oligonucleotide
aguaggcgaugcgcaaaug

SEQ ID NO: 2403807 - RNA, 19 nt, Artificial Sequence
  Description of Artificial Sequence: Synthetic oligonucleotide
aaggcugaggugacugcua

SEQ ID NO: 2403808 - RNA, 19 nt, Artificial Sequence
  Description of Artificial Sequence: Synthetic oligonucleotide
caggagagagccuaugauu

SEQ ID NO: 2403809 - RNA, 19 nt, Artificial Sequence
  Description of Artificial Sequence: Synthetic oligonucleotide
acccugaaagaggguaaca

SEQ ID NO: 2403810 - RNA, 19 nt, Artificial Sequence
  Description of Artificial Sequence: Synthetic oligonucleotide
gcagacgaaaacauaacau

SEQ ID NO: 2403811 - RNA, 19 nt, Artificial Sequence
  Description of Artificial Sequence: Synthetic oligonucleotide
cuuugcugauguagcccga

SEQ ID NO: 2403812 - RNA, 19 nt, Artificial Sequence
  Description of Artificial Sequence: Synthetic oligonucleotide
gcccgauagcaggagagag

SEQ ID NO: 2403813 - RNA, 19 nt, Artificial Sequence
  Description of Artificial Sequence: Synthetic oligonucleotide
gcuggaaagccuugaauau

SEQ ID NO: 2403814 - RNA, 19 nt, Artificial Sequence
  Description of Artificial Sequence: Synthetic oligonucleotide
ggccuuauaagggaucuua

SEQ ID NO: 2403815 - RNA, 19 nt, Artificial Sequence
  Description of Artificial Sequence: Synthetic oligonucleotide
agcccgauagcaggagaga

SEQ ID NO: 2403816 - RNA, 19 nt, Artificial Sequence
  Description of Artificial Sequence: Synthetic oligonucleotide
gguacgagauggcaucaua

SEQ ID NO: 2403817 - RNA, 19 nt, Artificial Sequence
  Description of Artificial Sequence: Synthetic oligonucleotide
gugagggauaagauagaua

SEQ ID NO: 2403818 - RNA, 19 nt, Artificial Sequence
  Description of Artificial Sequence: Synthetic oligonucleotide
ccggccauuguuuugcuaa

SEQ ID NO: 2403819 - RNA, 19 nt, Artificial Sequence
  Description of Artificial Sequence: Synthetic oligonucleotide
ggcgaugcgcaaaugguaa

SEQ ID NO: 2403820 - RNA, 19 nt, Artificial Sequence
  Description of Artificial Sequence: Synthetic oligonucleotide
cacuauagaauagccugcu

SEQ ID NO: 2403821 - RNA, 19 nt, Artificial Sequence
  Description of Artificial Sequence: Synthetic oligonucleotide
gcuagucaucaaagucugg

SEQ ID NO: 2403822 - RNA, 19 nt, Artificial Sequence
  Description of Artificial Sequence: Synthetic oligonucleotide
gggccagcagacgaaaaca

SEQ ID NO: 2403823 - RNA, 19 nt, Artificial Sequence
  Description of Artificial Sequence: Synthetic oligonucleotide
ugguacgagauggcaucau

SEQ ID NO: 2403824 - RNA, 19 nt, Artificial Sequence
  Description of Artificial Sequence: Synthetic oligonucleotide
gugugagggauaagauaga

SEQ ID NO: 2403825 - RNA, 19 nt, Artificial Sequence
  Description of Artificial Sequence: Synthetic oligonucleotide
aggcgaugcgcaaauggua

SEQ ID NO: 2403826 - RNA, 19 nt, Artificial Sequence
  Description of Artificial Sequence: Synthetic oligonucleotide
uccggccauuguuuugcua

SEQ ID NO: 2403827 - RNA, 19 nt, Artificial Sequence
  Description of Artificial Sequence: Synthetic oligonucleotide
auagcaggagagagccuau

SEQ ID NO: 2403828 - RNA, 19 nt, Artificial Sequence
  Description of Artificial Sequence: Synthetic oligonucleotide
ggagggcuuuucuuaaacu

SEQ ID NO: 2403829 - RNA, 19 nt, Artificial Sequence
  Description of Artificial Sequence: Synthetic oligonucleotide
auccggccauuguuuugcu

SEQ ID NO: 2403830 - RNA, 19 nt, Artificial Sequence
  Description of Artificial Sequence: Synthetic oligonucleotide
guuggugcacugugucucu

SEQ ID NO: 2403831 - RNA, 19 nt, Artificial Sequence
  Description of Artificial Sequence: Synthetic oligonucleotide
cauguccuaauuagcuaau

SEQ ID NO: 2403832 - RNA, 19 nt, Artificial Sequence
  Description of Artificial Sequence: Synthetic oligonucleotide
aggauaagacagacacuuu

SEQ ID NO: 2403833 - RNA, 19 nt, Artificial Sequence
  Description of Artificial Sequence: Synthetic oligonucleotide
ccugaaagaggguaacacu

SEQ ID NO: 2403834 - RNA, 19 nt, Artificial Sequence
  Description of Artificial Sequence: Synthetic oligonucleotide
gugcuggaaagccuugaau

SEQ ID NO: 2403835 - RNA, 19 nt, Artificial Sequence
  Description of Artificial Sequence: Synthetic oligonucleotide
ccccgguagccuuuggaug

SEQ ID NO: 2403836 - RNA, 19 nt, Artificial Sequence
  Description of Artificial Sequence: Synthetic oligonucleotide
gccucacagcucuuacaug

SEQ ID NO: 2403837 - RNA, 19 nt, Artificial Sequence
  Description of Artificial Sequence: Synthetic oligonucleotide
aauuagccucacagcucuu

SEQ ID NO: 2403838 - RNA, 19 nt, Artificial Sequence
  Description of Artificial Sequence: Synthetic oligonucleotide
ggugcacugugucucuucu

SEQ ID NO: 2403839 - RNA, 19 nt, Artificial Sequence
  Description of Artificial Sequence: Synthetic oligonucleotide
uucauacaauccggccauu

SEQ ID NO: 2403840 - RNA, 19 nt, Artificial Sequence
  Description of Artificial Sequence: Synthetic oligonucleotide
gcgcaaaugguaaaauccu

SEQ ID NO: 2403841 - RNA, 19 nt, Artificial Sequence
  Description of Artificial Sequence: Synthetic oligonucleotide
ggccauuguuuugcuaaac

SEQ ID NO: 2403842 - RNA, 19 nt, Artificial Sequence
  Description of Artificial Sequence: Synthetic oligonucleotide
cugugcuggaaagccuuga

SEQ ID NO: 2403843 - RNA, 19 nt, Artificial Sequence
  Description of Artificial Sequence: Synthetic oligonucleotide
gcaggagagagccuaugau

SEQ ID NO: 2403844 - RNA, 19 nt, Artificial Sequence
  Description of Artificial Sequence: Synthetic oligonucleotide
agccgccagauugguacga

SEQ ID NO: 2403845 - RNA, 19 nt, Artificial Sequence
  Description of Artificial Sequence: Synthetic oligonucleotide
uggccuuauaagggaucuu

SEQ ID NO: 2403846 - RNA, 19 nt, Artificial Sequence
  Description of Artificial Sequence: Synthetic oligonucleotide
agccaucaucugugcugga

SEQ ID NO: 2403847 - RNA, 19 nt, Artificial Sequence
  Description of Artificial Sequence: Synthetic oligonucleotide
ggagagugugagggauaag

SEQ ID NO: 2403848 - RNA, 19 nt, Artificial Sequence
  Description of Artificial Sequence: Synthetic oligonucleotide
uuggugcacugugucucuu

SEQ ID NO: 2403849 - RNA, 19 nt, Artificial Sequence
  Description of Artificial Sequence: Synthetic oligonucleotide
gcaucauaacacgguggca

SEQ ID NO: 2403850 - RNA, 19 nt, Artificial Sequence
  Description of Artificial Sequence: Synthetic oligonucleotide
ggaguaaccccgguagccu

SEQ ID NO: 2403851 - RNA, 19 nt, Artificial Sequence
  Description of Artificial Sequence: Synthetic oligonucleotide
cucacagcucuuacaugau

SEQ ID NO: 2403852 - RNA, 19 nt, Artificial Sequence
  Description of Artificial Sequence: Synthetic oligonucleotide
cuggaaagccuugaauauu

SEQ ID NO: 2403853 - RNA, 19 nt, Artificial Sequence
  Description of Artificial Sequence: Synthetic oligonucleotide
ggagagagccuaugauuau

SEQ ID NO: 2403854 - RNA, 19 nt, Artificial Sequence
  Description of Artificial Sequence: Synthetic oligonucleotide
gccgccagauugguacgag

SEQ ID NO: 2403855 - RNA, 19 nt, Artificial Sequence
  Description of Artificial Sequence: Synthetic oligonucleotide
ggcaagugcaauggccuua

SEQ ID NO: 2403856 - RNA, 19 nt, Artificial Sequence
  Description of Artificial Sequence: Synthetic oligonucleotide
gcgaugcgcaaaugguaaa

SEQ ID NO: 2403857 - RNA, 19 nt, Artificial Sequence
  Description of Artificial Sequence: Synthetic oligonucleotide
gcagacgaugaaggcaaaa

SEQ ID NO: 2403858 - RNA, 19 nt, Artificial Sequence
  Description of Artificial Sequence: Synthetic oligonucleotide
caucugcaaacuguagauu

SEQ ID NO: 2403859 - RNA, 19 nt, Artificial Sequence
  Description of Artificial Sequence: Synthetic oligonucleotide
gggauaagauagauauuuu

SEQ ID NO: 2403860 - RNA, 19 nt, Artificial Sequence
  Description of Artificial Sequence: Synthetic oligonucleotide
cagcucuuacaugaugcau

SEQ ID NO: 2403861 - RNA, 19 nt, Artificial Sequence
  Description of Artificial Sequence: Synthetic oligonucleotide
agcagacgaugaaggcaaa

SEQ ID NO: 2403862 - RNA, 19 nt, Artificial Sequence
  Description of Artificial Sequence: Synthetic oligonucleotide
acacgguggcacagcuagu

SEQ ID NO: 2403863 - RNA, 19 nt, Artificial Sequence
  Description of Artificial Sequence: Synthetic oligonucleotide
ccagacaauuagccucaca

SEQ ID NO: 2403864 - RNA, 19 nt, Artificial Sequence
  Description of Artificial Sequence: Synthetic oligonucleotide
gccagcagacgaaaacaua

SEQ ID NO: 2403865 - RNA, 19 nt, Artificial Sequence
  Description of Artificial Sequence: Synthetic oligonucleotide
gguagccuuuggaugcaua

SEQ ID NO: 2403866 - RNA, 19 nt, Artificial Sequence
  Description of Artificial Sequence: Synthetic oligonucleotide
ggccagcagacgaaaacau

SEQ ID NO: 2403867 - RNA, 19 nt, Artificial Sequence
  Description of Artificial Sequence: Synthetic oligonucleotide
caagugcaauggccuuaua

SEQ ID NO: 2403868 - RNA, 19 nt, Artificial Sequence
  Description of Artificial Sequence: Synthetic oligonucleotide
ccgccagauugguacgaga

SEQ ID NO: 2403869 - RNA, 19 nt, Artificial Sequence
  Description of Artificial Sequence: Synthetic oligonucleotide
cgaugcgcaaaugguaaaa

SEQ ID NO: 2403870 - RNA, 19 nt, Artificial Sequence
  Description of Artificial Sequence: Synthetic oligonucleotide
cgccagauugguacgagau

SEQ ID NO: 2403871 - RNA, 19 nt, Artificial Sequence
  Description of Artificial Sequence: Synthetic oligonucleotide
gggaucuuaggagggcuuu

SEQ ID NO: 2403872 - RNA, 19 nt, Artificial Sequence
  Description of Artificial Sequence: Synthetic oligonucleotide
cccagacaauuagccucac

SEQ ID NO: 2403873 - RNA, 19 nt, Artificial Sequence
  Description of Artificial Sequence: Synthetic oligonucleotide
gccauaguuccugcuugau

SEQ ID NO: 2403874 - RNA, 19 nt, Artificial Sequence
  Description of Artificial Sequence: Synthetic oligonucleotide
gcacaguggcaagugcaau

SEQ ID NO: 2403875 - RNA, 19 nt, Artificial Sequence
  Description of Artificial Sequence: Synthetic oligonucleotide
cggccauuguuuugcuaaa

SEQ ID NO: 2403876 - RNA, 19 nt, Artificial Sequence
  Description of Artificial Sequence: Synthetic oligonucleotide
gggaucccagccgccagau

SEQ ID NO: 2403877 - RNA, 19 nt, Artificial Sequence
  Description of Artificial Sequence: Synthetic oligonucleotide
ccgguagccuuuggaugca

SEQ ID NO: 2403878 - RNA, 19 nt, Artificial Sequence
  Description of Artificial Sequence: Synthetic oligonucleotide
cccagccgccagauuggua

SEQ ID NO: 2403879 - RNA, 19 nt, Artificial Sequence
  Description of Artificial Sequence: Synthetic oligonucleotide
ggaucccagccgccagauu

SEQ ID NO: 2403880 - RNA, 19 nt, Artificial Sequence
  Description of Artificial Sequence: Synthetic oligonucleotide
cgguagccuuuggaugcau

SEQ ID NO: 2403881 - RNA, 19 nt, Artificial Sequence
  Description of Artificial Sequence: Synthetic oligonucleotide
aaaaccaggaaauugauag

SEQ ID NO: 2403882 - RNA, 19 nt, Artificial Sequence
  Description of Artificial Sequence: Synthetic oligonucleotide
aaaguaguaaaguauggcc

SEQ ID NO: 2403883 - RNA, 19 nt, Artificial Sequence
  Description of Artificial Sequence: Synthetic oligonucleotide
aauaacaugauuuauuacu

SEQ ID NO: 2403884 - RNA, 19 nt, Artificial Sequence
  Description of Artificial Sequence: Synthetic oligonucleotide
uuaaaauagacaauuauac

SEQ ID NO: 2403885 - RNA, 19 nt, Artificial Sequence
  Description of Artificial Sequence: Synthetic oligonucleotide
uuuauuacuauuuuaaaac

SEQ ID NO: 2403886 - RNA, 19 nt, Artificial Sequence
  Description of Artificial Sequence: Synthetic oligonucleotide
aauuauacaaacauuaucu

SEQ ID NO: 2403887 - RNA, 19 nt, Artificial Sequence
  Description of Artificial Sequence: Synthetic oligonucleotide
uaauuuaacacacaauaag

SEQ ID NO: 2403888 - RNA, 19 nt, Artificial Sequence
  Description of Artificial Sequence: Synthetic oligonucleotide
uuaacugauguuaaaaugc

SEQ ID NO: 2403889 - RNA, 19 nt, Artificial Sequence
  Description of Artificial Sequence: Synthetic oligonucleotide
aauaaauuaacaaaguagu

SEQ ID NO: 2403890 - RNA, 19 nt, Artificial Sequence
  Description of Artificial Sequence: Synthetic oligonucleotide
aauagacaauuauacaaac

SEQ ID NO: 2403891 - RNA, 19 nt, Artificial Sequence
  Description of Artificial Sequence: Synthetic oligonucleotide
aaauugauaguuuccaaag

SEQ ID NO: 2403892 - RNA, 19 nt, Artificial Sequence
  Description of Artificial Sequence: Synthetic oligonucleotide
aauauuacuaaauaauuua

SEQ ID NO: 2403893 - RNA, 19 nt, Artificial Sequence
  Description of Artificial Sequence: Synthetic oligonucleotide
aauuuuaggagacaaguga

SEQ ID NO: 2403894 - RNA, 19 nt, Artificial Sequence
  Description of Artificial Sequence: Synthetic oligonucleotide
aaauuaacaaaguaguaaa

SEQ ID NO: 2403895 - RNA, 19 nt, Artificial Sequence
  Description of Artificial Sequence: Synthetic oligonucleotide
uacuaaauaauuuaacaca

SEQ ID NO: 2403896 - RNA, 19 nt, Artificial Sequence
  Description of Artificial Sequence: Synthetic oligonucleotide
auuacuaaauaauuuaaca

SEQ ID NO: 2403897 - RNA, 19 nt, Artificial Sequence
  Description of Artificial Sequence: Synthetic oligonucleotide
ugauaguuuccaaaggugg

SEQ ID NO: 2403898 - RNA, 19 nt, Artificial Sequence
  Description of Artificial Sequence: Synthetic oligonucleotide
aauuacuggaguaccaucc

SEQ ID NO: 2403899 - RNA, 19 nt, Artificial Sequence
  Description of Artificial Sequence: Synthetic oligonucleotide
uuaucuauuguucucauaa

SEQ ID NO: 2403900 - RNA, 19 nt, Artificial Sequence
  Description of Artificial Sequence: Synthetic oligonucleotide
uuuaaaauagacaauuaua

SEQ ID NO: 2403901 - RNA, 19 nt, Artificial Sequence
  Description of Artificial Sequence: Synthetic oligonucleotide
aaaauacuaaaacaacuga

SEQ ID NO: 2403902 - RNA, 19 nt, Artificial Sequence
  Description of Artificial Sequence: Synthetic oligonucleotide
aauugauaguuuccaaagg

SEQ ID NO: 2403903 - RNA, 19 nt, Artificial Sequence
  Description of Artificial Sequence: Synthetic oligonucleotide
aaggcuuuggggaugaugc

SEQ ID NO: 2403904 - RNA, 19 nt, Artificial Sequence
  Description of Artificial Sequence: Synthetic oligonucleotide
uuuaacugauguuaaaaug

SEQ ID NO: 2403905 - RNA, 19 nt, Artificial Sequence
  Description of Artificial Sequence: Synthetic oligonucleotide
aaaagacuguuaccaaagc

SEQ ID NO: 2403906 - RNA, 19 nt, Artificial Sequence
  Description of Artificial Sequence: Synthetic oligonucleotide
uagacaauuauacaaacau

SEQ ID NO: 2403907 - RNA, 19 nt, Artificial Sequence
  Description of Artificial Sequence: Synthetic oligonucleotide
uaaguuuuaucauaaaguc

SEQ ID NO: 2403908 - RNA, 19 nt, Artificial Sequence
  Description of Artificial Sequence: Synthetic oligonucleotide
uaaaguauggccuuagccu

SEQ ID NO: 2403909 - RNA, 19 nt, Artificial Sequence
  Description of Artificial Sequence: Synthetic oligonucleotide
aacauuaucuauuguucuc

SEQ ID NO: 2403910 - RNA, 19 nt, Artificial Sequence
  Description of Artificial Sequence: Synthetic oligonucleotide
uaaaggauggaagugagag

SEQ ID NO: 2403911 - RNA, 19 nt, Artificial Sequence
  Description of Artificial Sequence: Synthetic oligonucleotide
uaucuuaagaacuguaccc

SEQ ID NO: 2403912 - RNA, 19 nt, Artificial Sequence
  Description of Artificial Sequence: Synthetic oligonucleotide
uaucauaaagucaugcuac

SEQ ID NO: 2403913 - RNA, 19 nt, Artificial Sequence
  Description of Artificial Sequence: Synthetic oligonucleotide
uuuugagagagagagagag

SEQ ID NO: 2403914 - RNA, 19 nt, Artificial Sequence
  Description of Artificial Sequence: Synthetic oligonucleotide
guuaccaaagcuuuaacug

SEQ ID NO: 2403915 - RNA, 19 nt, Artificial Sequence
  Description of Artificial Sequence: Synthetic oligonucleotide
aacaacugaguacagauaa

SEQ ID NO: 2403916 - RNA, 19 nt, Artificial Sequence
  Description of Artificial Sequence: Synthetic oligonucleotide
acaaguuucacaaaauaac

SEQ ID NO: 2403917 - RNA, 19 nt, Artificial Sequence
  Description of Artificial Sequence: Synthetic oligonucleotide
uugagagagagagagaggg

SEQ ID NO: 2403918 - RNA, 19 nt, Artificial Sequence
  Description of Artificial Sequence: Synthetic oligonucleotide
cacacaauaaguuuuauca

SEQ ID NO: 2403919 - RNA, 19 nt, Artificial Sequence
  Description of Artificial Sequence: Synthetic oligonucleotide
aauuuaacacacaauaagu

SEQ ID NO: 2403920 - RNA, 19 nt, Artificial Sequence
  Description of Artificial Sequence: Synthetic oligonucleotide
uuuaucuuaagaacuguac

SEQ ID NO: 2403921 - RNA, 19 nt, Artificial Sequence
  Description of Artificial Sequence: Synthetic oligonucleotide
uguuaaaaugccuucagaa

SEQ ID NO: 2403922 - RNA, 19 nt, Artificial Sequence
  Description of Artificial Sequence: Synthetic oligonucleotide
uguguuuuaucuuaagaac

SEQ ID NO: 2403923 - RNA, 19 nt, Artificial Sequence
  Description of Artificial Sequence: Synthetic oligonucleotide
uaaauuuuaggagacaagu

SEQ ID NO: 2403924 - RNA, 19 nt, Artificial Sequence
  Description of Artificial Sequence: Synthetic oligonucleotide
ugagagauguguuuuaucu

SEQ ID NO: 2403925 - RNA, 19 nt, Artificial Sequence
  Description of Artificial Sequence: Synthetic oligonucleotide
uucacaaaauaacauucag

SEQ ID NO: 2403926 - RNA, 19 nt, Artificial Sequence
  Description of Artificial Sequence: Synthetic oligonucleotide
ugguguguaaauuuuagga

SEQ ID NO: 2403927 - RNA, 19 nt, Artificial Sequence
  Description of Artificial Sequence: Synthetic oligonucleotide
aaacauuaucuauuguucu

SEQ ID NO: 2403928 - RNA, 19 nt, Artificial Sequence
  Description of Artificial Sequence: Synthetic oligonucleotide
ucaauauuacuaaauaauu

SEQ ID NO: 2403929 - RNA, 19 nt, Artificial Sequence
  Description of Artificial Sequence: Synthetic oligonucleotide
ucuuccuuaauuacuggag

SEQ ID NO: 2403930 - RNA, 19 nt, Artificial Sequence
  Description of Artificial Sequence: Synthetic oligonucleotide
uccuguguauaaaagacug

SEQ ID NO: 2403931 - RNA, 19 nt, Artificial Sequence
  Description of Artificial Sequence: Synthetic oligonucleotide
aacaaaguaguaaaguaug

SEQ ID NO: 2403932 - RNA, 19 nt, Artificial Sequence
  Description of Artificial Sequence: Synthetic oligonucleotide
aaagcuuuaacugauguua

SEQ ID NO: 2403933 - RNA, 19 nt, Artificial Sequence
  Description of Artificial Sequence: Synthetic oligonucleotide
uuaacaaaguaguaaagua

SEQ ID NO: 2403934 - RNA, 19 nt, Artificial Sequence
  Description of Artificial Sequence: Synthetic oligonucleotide
ucugcuguuagaaaugacu

SEQ ID NO: 2403935 - RNA, 19 nt, Artificial Sequence
  Description of Artificial Sequence: Synthetic oligonucleotide
auugauaguuuccaaaggu

SEQ ID NO: 2403936 - RNA, 19 nt, Artificial Sequence
  Description of Artificial Sequence: Synthetic oligonucleotide
aaagacuguuaccaaagcu

SEQ ID NO: 2403937 - RNA, 19 nt, Artificial Sequence
  Description of Artificial Sequence: Synthetic oligonucleotide
agucaugcuacaaaagucc

SEQ ID NO: 2403938 - RNA, 19 nt, Artificial Sequence
  Description of Artificial Sequence: Synthetic oligonucleotide
uccaugacuggauaaaacc

SEQ ID NO: 2403939 - RNA, 19 nt, Artificial Sequence
  Description of Artificial Sequence: Synthetic oligonucleotide
auaaguuuuaucauaaagu

SEQ ID NO: 2403940 - RNA, 19 nt, Artificial Sequence
  Description of Artificial Sequence: Synthetic oligonucleotide
uuuaucauaaagucaugcu

SEQ ID NO: 2403941 - RNA, 19 nt, Artificial Sequence
  Description of Artificial Sequence: Synthetic oligonucleotide
cacaaaauaacauucagaa

SEQ ID NO: 2403942 - RNA, 19 nt, Artificial Sequence
  Description of Artificial Sequence: Synthetic oligonucleotide
uuaucauaaagucaugcua

SEQ ID NO: 2403943 - RNA, 19 nt, Artificial Sequence
  Description of Artificial Sequence: Synthetic oligonucleotide
uuuuaucauaaagucaugc

SEQ ID NO: 2403944 - RNA, 19 nt, Artificial Sequence
  Description of Artificial Sequence: Synthetic oligonucleotide
uaacaaaguaguaaaguau

SEQ ID NO: 2403945 - RNA, 19 nt, Artificial Sequence
  Description of Artificial Sequence: Synthetic oligonucleotide
uaggagacaagugaugugg

SEQ ID NO: 2403946 - RNA, 19 nt, Artificial Sequence
  Description of Artificial Sequence: Synthetic oligonucleotide
aaagguggacugcacagag

SEQ ID NO: 2403947 - RNA, 19 nt, Artificial Sequence
  Description of Artificial Sequence: Synthetic oligonucleotide
ucacaaaauaacauucaga

SEQ ID NO: 2403948 - RNA, 19 nt, Artificial Sequence
  Description of Artificial Sequence: Synthetic oligonucleotide
uaacugauguuaaaaugcc

SEQ ID NO: 2403949 - RNA, 19 nt, Artificial Sequence
  Description of Artificial Sequence: Synthetic oligonucleotide
aacucaauauuacuaaaua

SEQ ID NO: 2403950 - RNA, 19 nt, Artificial Sequence
  Description of Artificial Sequence: Synthetic oligonucleotide
gauguuaaaaugccuucag

SEQ ID NO: 2403951 - RNA, 19 nt, Artificial Sequence
  Description of Artificial Sequence: Synthetic oligonucleotide
uuucacaaaauaacauuca

SEQ ID NO: 2403952 - RNA, 19 nt, Artificial Sequence
  Description of Artificial Sequence: Synthetic oligonucleotide
uugauaguuuccaaaggug

SEQ ID NO: 2403953 - RNA, 19 nt, Artificial Sequence
  Description of Artificial Sequence: Synthetic oligonucleotide
auuacuauuuuaaaacaag

SEQ ID NO: 2403954 - RNA, 19 nt, Artificial Sequence
  Description of Artificial Sequence: Synthetic oligonucleotide
caaacauuaucuauuguuc

SEQ ID NO: 2403955 - RNA, 19 nt, Artificial Sequence
  Description of Artificial Sequence: Synthetic oligonucleotide
ucuauuguucucauaacau

SEQ ID NO: 2403956 - RNA, 19 nt, Artificial Sequence
  Description of Artificial Sequence: Synthetic oligonucleotide
acaaacauuaucuauuguu

SEQ ID NO: 2403957 - RNA, 19 nt, Artificial Sequence
  Description of Artificial Sequence: Synthetic oligonucleotide
guaaaguauggccuuagcc

SEQ ID NO: 2403958 - RNA, 19 nt, Artificial Sequence
  Description of Artificial Sequence: Synthetic oligonucleotide
aguuuuaucauaaagucau

SEQ ID NO: 2403959 - RNA, 19 nt, Artificial Sequence
  Description of Artificial Sequence: Synthetic oligonucleotide
uggaugugguucuagaagc

SEQ ID NO: 2403960 - RNA, 19 nt, Artificial Sequence
  Description of Artificial Sequence: Synthetic oligonucleotide
uaaagucaugcuacaaaag

SEQ ID NO: 2403961 - RNA, 19 nt, Artificial Sequence
  Description of Artificial Sequence: Synthetic oligonucleotide
aauuaacaaaguaguaaag

SEQ ID NO: 2403962 - RNA, 19 nt, Artificial Sequence
  Description of Artificial Sequence: Synthetic oligonucleotide
auguguuuuaucuuaagaa

SEQ ID NO: 2403963 - RNA, 19 nt, Artificial Sequence
  Description of Artificial Sequence: Synthetic oligonucleotide
agugcugcugguuuguggg

SEQ ID NO: 2403964 - RNA, 19 nt, Artificial Sequence
  Description of Artificial Sequence: Synthetic oligonucleotide
guuugugggauacacacug

SEQ ID NO: 2403965 - RNA, 19 nt, Artificial Sequence
  Description of Artificial Sequence: Synthetic oligonucleotide
uucagaaacucaauauuac

SEQ ID NO: 2403966 - RNA, 19 nt, Artificial Sequence
  Description of Artificial Sequence: Synthetic oligonucleotide
aagucaugcuacaaaaguc

SEQ ID NO: 2403967 - RNA, 19 nt, Artificial Sequence
  Description of Artificial Sequence: Synthetic oligonucleotide
aauaacauucagaaacuca

SEQ ID NO: 2403968 - RNA, 19 nt, Artificial Sequence
  Description of Artificial Sequence: Synthetic oligonucleotide
uauuguucucauaacauuu

SEQ ID NO: 2403969 - RNA, 19 nt, Artificial Sequence
  Description of Artificial Sequence: Synthetic oligonucleotide
agauaacagguccuucugc

SEQ ID NO: 2403970 - RNA, 19 nt, Artificial Sequence
  Description of Artificial Sequence: Synthetic oligonucleotide
gaguacagauaacaggucc

SEQ ID NO: 2403971 - RNA, 19 nt, Artificial Sequence
  Description of Artificial Sequence: Synthetic oligonucleotide
agugaugugguccaugacu

SEQ ID NO: 2403972 - RNA, 19 nt, Artificial Sequence
  Description of Artificial Sequence: Synthetic oligonucleotide
acuggauaaaaccaggaaa

SEQ ID NO: 2403973 - RNA, 19 nt, Artificial Sequence
  Description of Artificial Sequence: Synthetic oligonucleotide
uguuaccaaagcuuuaacu

SEQ ID NO: 2403974 - RNA, 19 nt, Artificial Sequence
  Description of Artificial Sequence: Synthetic oligonucleotide
aguccuguguauaaaagac

SEQ ID NO: 2403975 - RNA, 19 nt, Artificial Sequence
  Description of Artificial Sequence: Synthetic oligonucleotide
agaaacucaauauuacuaa

SEQ ID NO: 2403976 - RNA, 19 nt, Artificial Sequence
  Description of Artificial Sequence: Synthetic oligonucleotide
aaaaguccuguguauaaaa

SEQ ID NO: 2403977 - RNA, 19 nt, Artificial Sequence
  Description of Artificial Sequence: Synthetic oligonucleotide
aaggauggaagugagagau

SEQ ID NO: 2403978 - RNA, 19 nt, Artificial Sequence
  Description of Artificial Sequence: Synthetic oligonucleotide
agguggacugcacagaguc

SEQ ID NO: 2403979 - RNA, 19 nt, Artificial Sequence
  Description of Artificial Sequence: Synthetic oligonucleotide
uuagaaaugacuggugugu

SEQ ID NO: 2403980 - RNA, 19 nt, Artificial Sequence
  Description of Artificial Sequence: Synthetic oligonucleotide
ugguuugugggauacacac

SEQ ID NO: 2403981 - RNA, 19 nt, Artificial Sequence
  Description of Artificial Sequence: Synthetic oligonucleotide
aacaugauuuauuacuauu

SEQ ID NO: 2403982 - RNA, 19 nt, Artificial Sequence
  Description of Artificial Sequence: Synthetic oligonucleotide
uuuuaggagacaagugaug

SEQ ID NO: 2403983 - RNA, 19 nt, Artificial Sequence
  Description of Artificial Sequence: Synthetic oligonucleotide
aguaaaguauggccuuagc

SEQ ID NO: 2403984 - RNA, 19 nt, Artificial Sequence
  Description of Artificial Sequence: Synthetic oligonucleotide
auggaugugguucuagaag

SEQ ID NO: 2403985 - RNA, 19 nt, Artificial Sequence
  Description of Artificial Sequence: Synthetic oligonucleotide
caauuauacaaacauuauc

SEQ ID NO: 2403986 - RNA, 19 nt, Artificial Sequence
  Description of Artificial Sequence: Synthetic oligonucleotide
aaguaguaaaguauggccu

SEQ ID NO: 2403987 - RNA, 19 nt, Artificial Sequence
  Description of Artificial Sequence: Synthetic oligonucleotide
uuuaggagacaagugaugu

SEQ ID NO: 2403988 - RNA, 19 nt, Artificial Sequence
  Description of Artificial Sequence: Synthetic oligonucleotide
caugacuggauaaaaccag

SEQ ID NO: 2403989 - RNA, 19 nt, Artificial Sequence
  Description of Artificial Sequence: Synthetic oligonucleotide
auggccuuagccuucaucu

SEQ ID NO: 2403990 - RNA, 19 nt, Artificial Sequence
  Description of Artificial Sequence: Synthetic oligonucleotide
aaauuuuaggagacaagug

SEQ ID NO: 2403991 - RNA, 19 nt, Artificial Sequence
  Description of Artificial Sequence: Synthetic oligonucleotide
aucuauuguucucauaaca

SEQ ID NO: 2403992 - RNA, 19 nt, Artificial Sequence
  Description of Artificial Sequence: Synthetic oligonucleotide
uuugagagagagagagagg

SEQ ID NO: 2403993 - RNA, 19 nt, Artificial Sequence
  Description of Artificial Sequence: Synthetic oligonucleotide
uggaguaccauccagucuu

SEQ ID NO: 2403994 - RNA, 19 nt, Artificial Sequence
  Description of Artificial Sequence: Synthetic oligonucleotide
gaaauugauaguuuccaaa

SEQ ID NO: 2403995 - RNA, 19 nt, Artificial Sequence
  Description of Artificial Sequence: Synthetic oligonucleotide
aacaaguuucacaaaauaa

SEQ ID NO: 2403996 - RNA, 19 nt, Artificial Sequence
  Description of Artificial Sequence: Synthetic oligonucleotide
uucagaauggaugugguuc

SEQ ID NO: 2403997 - RNA, 19 nt, Artificial Sequence
  Description of Artificial Sequence: Synthetic oligonucleotide
gauguguuuuaucuuaaga

SEQ ID NO: 2403998 - RNA, 19 nt, Artificial Sequence
  Description of Artificial Sequence: Synthetic oligonucleotide
acacacaauaaguuuuauc

SEQ ID NO: 2403999 - RNA, 19 nt, Artificial Sequence
  Description of Artificial Sequence: Synthetic oligonucleotide
aguuucacaaaauaacauu

SEQ ID NO: 2404000 - RNA, 19 nt, Artificial Sequence
  Description of Artificial Sequence: Synthetic oligonucleotide
acucaauauuacuaaauaa

SEQ ID NO: 2404001 - RNA, 19 nt, Artificial Sequence
  Description of Artificial Sequence: Synthetic oligonucleotide
acuguacccucacaaaauc

SEQ ID NO: 2404002 - RNA, 19 nt, Artificial Sequence
  Description of Artificial Sequence: Synthetic oligonucleotide
gguguguaaauuuuaggag

SEQ ID NO: 2404003 - RNA, 19 nt, Artificial Sequence
  Description of Artificial Sequence: Synthetic oligonucleotide
acauucagaaacucaauau

SEQ ID NO: 2404004 - RNA, 19 nt, Artificial Sequence
  Description of Artificial Sequence: Synthetic oligonucleotide
caaguuucacaaaauaaca

SEQ ID NO: 2404005 - RNA, 19 nt, Artificial Sequence
  Description of Artificial Sequence: Synthetic oligonucleotide
gagagagagagagagggag

SEQ ID NO: 2404006 - RNA, 19 nt, Artificial Sequence
  Description of Artificial Sequence: Synthetic oligonucleotide
acuggaguaccauccaguc

SEQ ID NO: 2404007 - RNA, 19 nt, Artificial Sequence
  Description of Artificial Sequence: Synthetic oligonucleotide
gagacaagugauguggucc

SEQ ID NO: 2404008 - RNA, 19 nt, Artificial Sequence
  Description of Artificial Sequence: Synthetic oligonucleotide
guuucacaaaauaacauuc

SEQ ID NO: 2404009 - RNA, 19 nt, Artificial Sequence
  Description of Artificial Sequence: Synthetic oligonucleotide
acagauaacagguccuucu

SEQ ID NO: 2404010 - RNA, 19 nt, Artificial Sequence
  Description of Artificial Sequence: Synthetic oligonucleotide
aaaguccuguguauaaaag

SEQ ID NO: 2404011 - RNA, 19 nt, Artificial Sequence
  Description of Artificial Sequence: Synthetic oligonucleotide
caaaguaguaaaguauggc

SEQ ID NO: 2404012 - RNA, 19 nt, Artificial Sequence
  Description of Artificial Sequence: Synthetic oligonucleotide
uucucauaacauuuaaaua

SEQ ID NO: 2404013 - RNA, 19 nt, Artificial Sequence
  Description of Artificial Sequence: Synthetic oligonucleotide
auaguuuccaaagguggac

SEQ ID NO: 2404014 - RNA, 19 nt, Artificial Sequence
  Description of Artificial Sequence: Synthetic oligonucleotide
auaacauucagaaacucaa

SEQ ID NO: 2404015 - RNA, 19 nt, Artificial Sequence
  Description of Artificial Sequence: Synthetic oligonucleotide
cugcuguuagaaaugacug

SEQ ID NO: 2404016 - RNA, 19 nt, Artificial Sequence
  Description of Artificial Sequence: Synthetic oligonucleotide
ugcuacaaaaguccugugu

SEQ ID NO: 2404017 - RNA, 19 nt, Artificial Sequence
  Description of Artificial Sequence: Synthetic oligonucleotide
guguguaaauuuuaggaga

SEQ ID NO: 2404018 - RNA, 19 nt, Artificial Sequence
  Description of Artificial Sequence: Synthetic oligonucleotide
agagauguguuuuaucuua

SEQ ID NO: 2404019 - RNA, 19 nt, Artificial Sequence
  Description of Artificial Sequence: Synthetic oligonucleotide
auuauacaaacauuaucua

SEQ ID NO: 2404020 - RNA, 19 nt, Artificial Sequence
  Description of Artificial Sequence: Synthetic oligonucleotide
gagagagagagagggaggg

SEQ ID NO: 2404021 - RNA, 19 nt, Artificial Sequence
  Description of Artificial Sequence: Synthetic oligonucleotide
uuaagaacuguacccucac

SEQ ID NO: 2404022 - RNA, 19 nt, Artificial Sequence
  Description of Artificial Sequence: Synthetic oligonucleotide
uguguauaaaagacuguua

SEQ ID NO: 2404023 - RNA, 19 nt, Artificial Sequence
  Description of Artificial Sequence: Synthetic oligonucleotide
aacugaguacagauaacag

SEQ ID NO: 2404024 - RNA, 19 nt, Artificial Sequence
  Description of Artificial Sequence: Synthetic oligonucleotide
acaaaguaguaaaguaugg

SEQ ID NO: 2404025 - RNA, 19 nt, Artificial Sequence
  Description of Artificial Sequence: Synthetic oligonucleotide
ucagaauggaugugguucu

SEQ ID NO: 2404026 - RNA, 19 nt, Artificial Sequence
  Description of Artificial Sequence: Synthetic oligonucleotide
aaacucaauauuacuaaau

SEQ ID NO: 2404027 - RNA, 19 nt, Artificial Sequence
  Description of Artificial Sequence: Synthetic oligonucleotide
aagugaugugguccaugac

SEQ ID NO: 2404028 - RNA, 19 nt, Artificial Sequence
  Description of Artificial Sequence: Synthetic oligonucleotide
uguucucauaacauuuaaa

SEQ ID NO: 2404029 - RNA, 19 nt, Artificial Sequence
  Description of Artificial Sequence: Synthetic oligonucleotide
uuacuggaguaccauccag

SEQ ID NO: 2404030 - RNA, 19 nt, Artificial Sequence
  Description of Artificial Sequence: Synthetic oligonucleotide
ugguucuagaagccaaggc

SEQ ID NO: 2404031 - RNA, 19 nt, Artificial Sequence
  Description of Artificial Sequence: Synthetic oligonucleotide
ugauguuaaaaugccuuca

SEQ ID NO: 2404032 - RNA, 19 nt, Artificial Sequence
  Description of Artificial Sequence: Synthetic oligonucleotide
guucucauaacauuuaaau

SEQ ID NO: 2404033 - RNA, 19 nt, Artificial Sequence
  Description of Artificial Sequence: Synthetic oligonucleotide
cucaauauuacuaaauaau

SEQ ID NO: 2404034 - RNA, 19 nt, Artificial Sequence
  Description of Artificial Sequence: Synthetic oligonucleotide
ugacuggauaaaaccagga

SEQ ID NO: 2404035 - RNA, 19 nt, Artificial Sequence
  Description of Artificial Sequence: Synthetic oligonucleotide
aaguuucacaaaauaacau

SEQ ID NO: 2404036 - RNA, 19 nt, Artificial Sequence
  Description of Artificial Sequence: Synthetic oligonucleotide
uaaaacaacugaguacaga

SEQ ID NO: 2404037 - RNA, 19 nt, Artificial Sequence
  Description of Artificial Sequence: Synthetic oligonucleotide
guaaauuuuaggagacaag

SEQ ID NO: 2404038 - RNA, 19 nt, Artificial Sequence
  Description of Artificial Sequence: Synthetic oligonucleotide
uuaaaggauggaagugaga

SEQ ID NO: 2404039 - RNA, 19 nt, Artificial Sequence
  Description of Artificial Sequence: Synthetic oligonucleotide
auauuacuaaauaauuuaa

SEQ ID NO: 2404040 - RNA, 19 nt, Artificial Sequence
  Description of Artificial Sequence: Synthetic oligonucleotide
ucaugcuacaaaaguccug

SEQ ID NO: 2404041 - RNA, 19 nt, Artificial Sequence
  Description of Artificial Sequence: Synthetic oligonucleotide
ucagucuuaggcacucucu

SEQ ID NO: 2404042 - RNA, 19 nt, Artificial Sequence
  Description of Artificial Sequence: Synthetic oligonucleotide
uuaggagacaagugaugug

SEQ ID NO: 2404043 - RNA, 19 nt, Artificial Sequence
  Description of Artificial Sequence: Synthetic oligonucleotide
auacacacugauuaugguu

SEQ ID NO: 2404044 - RNA, 19 nt, Artificial Sequence
  Description of Artificial Sequence: Synthetic oligonucleotide
acaauaaguuuuaucauaa

SEQ ID NO: 2404045 - RNA, 19 nt, Artificial Sequence
  Description of Artificial Sequence: Synthetic oligonucleotide
gugggauacacacugauua

SEQ ID NO: 2404046 - RNA, 19 nt, Artificial Sequence
  Description of Artificial Sequence: Synthetic oligonucleotide
gaaacucaauauuacuaaa

SEQ ID NO: 2404047 - RNA, 19 nt, Artificial Sequence
  Description of Artificial Sequence: Synthetic oligonucleotide
uaucuauuguucucauaac

SEQ ID NO: 2404048 - RNA, 19 nt, Artificial Sequence
  Description of Artificial Sequence: Synthetic oligonucleotide
caucaucuuccuuaauuac

SEQ ID NO: 2404049 - RNA, 19 nt, Artificial Sequence
  Description of Artificial Sequence: Synthetic oligonucleotide
ggauacacacugauuaugg

SEQ ID NO: 2404050 - RNA, 19 nt, Artificial Sequence
  Description of Artificial Sequence: Synthetic oligonucleotide
uacuggaguaccauccagu

SEQ ID NO: 2404051 - RNA, 19 nt, Artificial Sequence
  Description of Artificial Sequence: Synthetic oligonucleotide
uaaaaccaggaaauugaua

SEQ ID NO: 2404052 - RNA, 19 nt, Artificial Sequence
  Description of Artificial Sequence: Synthetic oligonucleotide
acacaauaaguuuuaucau

SEQ ID NO: 2404053 - RNA, 19 nt, Artificial Sequence
  Description of Artificial Sequence: Synthetic oligonucleotide
agauguguuuuaucuuaag

SEQ ID NO: 2404054 - RNA, 19 nt, Artificial Sequence
  Description of Artificial Sequence: Synthetic oligonucleotide
uccuuaauuacuggaguac

SEQ ID NO: 2404055 - RNA, 19 nt, Artificial Sequence
  Description of Artificial Sequence: Synthetic oligonucleotide
aaaugacugguguguaaau

SEQ ID NO: 2404056 - RNA, 19 nt, Artificial Sequence
  Description of Artificial Sequence: Synthetic oligonucleotide
cugauguuaaaaugccuuc

SEQ ID NO: 2404057 - RNA, 19 nt, Artificial Sequence
  Description of Artificial Sequence: Synthetic oligonucleotide
aucauaaagucaugcuaca

SEQ ID NO: 2404058 - RNA, 19 nt, Artificial Sequence
  Description of Artificial Sequence: Synthetic oligonucleotide
auuuaacacacaauaaguu

SEQ ID NO: 2404059 - RNA, 19 nt, Artificial Sequence
  Description of Artificial Sequence: Synthetic oligonucleotide
augacugguguguaaauuu

SEQ ID NO: 2404060 - RNA, 19 nt, Artificial Sequence
  Description of Artificial Sequence: Synthetic oligonucleotide
cuuaauuacuggaguacca

SEQ ID NO: 2404061 - RNA, 19 nt, Artificial Sequence
  Description of Artificial Sequence: Synthetic oligonucleotide
aguuuccaaagguggacug

SEQ ID NO: 2404062 - RNA, 19 nt, Artificial Sequence
  Description of Artificial Sequence: Synthetic oligonucleotide
ucuuaagaacuguacccuc

SEQ ID NO: 2404063 - RNA, 19 nt, Artificial Sequence
  Description of Artificial Sequence: Synthetic oligonucleotide
agaggagagggagaguuag

SEQ ID NO: 2404064 - RNA, 19 nt, Artificial Sequence
  Description of Artificial Sequence: Synthetic oligonucleotide
aucuuaagaacuguacccu

SEQ ID NO: 2404065 - RNA, 19 nt, Artificial Sequence
  Description of Artificial Sequence: Synthetic oligonucleotide
auuacuggaguaccaucca

SEQ ID NO: 2404066 - RNA, 19 nt, Artificial Sequence
  Description of Artificial Sequence: Synthetic oligonucleotide
cucauaacauuuaaauaaa

SEQ ID NO: 2404067 - RNA, 19 nt, Artificial Sequence
  Description of Artificial Sequence: Synthetic oligonucleotide
gauaacagguccuucugcu

SEQ ID NO: 2404068 - RNA, 19 nt, Artificial Sequence
  Description of Artificial Sequence: Synthetic oligonucleotide
cauaaagucaugcuacaaa

SEQ ID NO: 2404069 - RNA, 19 nt, Artificial Sequence
  Description of Artificial Sequence: Synthetic oligonucleotide
uuccuuaauuacuggagua

SEQ ID NO: 2404070 - RNA, 19 nt, Artificial Sequence
  Description of Artificial Sequence: Synthetic oligonucleotide
acugguguguaaauuuuag

SEQ ID NO: 2404071 - RNA, 19 nt, Artificial Sequence
  Description of Artificial Sequence: Synthetic oligonucleotide
cuaaaacaacugaguacag

SEQ ID NO: 2404072 - RNA, 19 nt, Artificial Sequence
  Description of Artificial Sequence: Synthetic oligonucleotide
uaacauucagaaacucaau

SEQ ID NO: 2404073 - RNA, 19 nt, Artificial Sequence
  Description of Artificial Sequence: Synthetic oligonucleotide
augacuggauaaaaccagg

SEQ ID NO: 2404074 - RNA, 19 nt, Artificial Sequence
  Description of Artificial Sequence: Synthetic oligonucleotide
cuuaagaacuguacccuca

SEQ ID NO: 2404075 - RNA, 19 nt, Artificial Sequence
  Description of Artificial Sequence: Synthetic oligonucleotide
auaacagguccuucugcug

SEQ ID NO: 2404076 - RNA, 19 nt, Artificial Sequence
  Description of Artificial Sequence: Synthetic oligonucleotide
auagacaauuauacaaaca

SEQ ID NO: 2404077 - RNA, 19 nt, Artificial Sequence
  Description of Artificial Sequence: Synthetic oligonucleotide
aaugacugguguguaaauu

SEQ ID NO: 2404078 - RNA, 19 nt, Artificial Sequence
  Description of Artificial Sequence: Synthetic oligonucleotide
auuuuaggagacaagugau

SEQ ID NO: 2404079 - RNA, 19 nt, Artificial Sequence
  Description of Artificial Sequence: Synthetic oligonucleotide
acaaaaucuuuaaaauaga

SEQ ID NO: 2404080 - RNA, 19 nt, Artificial Sequence
  Description of Artificial Sequence: Synthetic oligonucleotide
gaauggaugugguucuaga

SEQ ID NO: 2404081 - RNA, 19 nt, Artificial Sequence
  Description of Artificial Sequence: Synthetic oligonucleotide
ugaguacagauaacagguc

SEQ ID NO: 2404082 - RNA, 19 nt, Artificial Sequence
  Description of Artificial Sequence: Synthetic oligonucleotide
uucagucuuaggcacucuc

SEQ ID NO: 2404083 - RNA, 19 nt, Artificial Sequence
  Description of Artificial Sequence: Synthetic oligonucleotide
acugauguuaaaaugccuu

SEQ ID NO: 2404084 - RNA, 19 nt, Artificial Sequence
  Description of Artificial Sequence: Synthetic oligonucleotide
gugaugugguccaugacug

SEQ ID NO: 2404085 - RNA, 19 nt, Artificial Sequence
  Description of Artificial Sequence: Synthetic oligonucleotide
acaugauuuauuacuauuu

SEQ ID NO: 2404086 - RNA, 19 nt, Artificial Sequence
  Description of Artificial Sequence: Synthetic oligonucleotide
aucaucuuccuuaauuacu

SEQ ID NO: 2404087 - RNA, 19 nt, Artificial Sequence
  Description of Artificial Sequence: Synthetic oligonucleotide
uaagaacuguacccucaca

SEQ ID NO: 2404088 - RNA, 19 nt, Artificial Sequence
  Description of Artificial Sequence: Synthetic oligonucleotide
agaacuguacccucacaaa

SEQ ID NO: 2404089 - RNA, 19 nt, Artificial Sequence
  Description of Artificial Sequence: Synthetic oligonucleotide
ugagagagagagagaggga

SEQ ID NO: 2404090 - RNA, 19 nt, Artificial Sequence
  Description of Artificial Sequence: Synthetic oligonucleotide
guggacugcacagagucag

SEQ ID NO: 2404091 - RNA, 19 nt, Artificial Sequence
  Description of Artificial Sequence: Synthetic oligonucleotide
gaaaugacugguguguaaa

SEQ ID NO: 2404092 - RNA, 19 nt, Artificial Sequence
  Description of Artificial Sequence: Synthetic oligonucleotide
uaguaaaguauggccuuag

SEQ ID NO: 2404093 - RNA, 19 nt, Artificial Sequence
  Description of Artificial Sequence: Synthetic oligonucleotide
auaaauuaacaaaguagua

SEQ ID NO: 2404094 - RNA, 19 nt, Artificial Sequence
  Description of Artificial Sequence: Synthetic oligonucleotide
aggcuuuggggaugaugcc

SEQ ID NO: 2404095 - RNA, 19 nt, Artificial Sequence
  Description of Artificial Sequence: Synthetic oligonucleotide
cuggauaaaaccaggaaau

SEQ ID NO: 2404096 - RNA, 19 nt, Artificial Sequence
  Description of Artificial Sequence: Synthetic oligonucleotide
aacuguacccucacaaaau

SEQ ID NO: 2404097 - RNA, 19 nt, Artificial Sequence
  Description of Artificial Sequence: Synthetic oligonucleotide
acaacugaguacagauaac

SEQ ID NO: 2404098 - RNA, 19 nt, Artificial Sequence
  Description of Artificial Sequence: Synthetic oligonucleotide
ugacugguguguaaauuuu

SEQ ID NO: 2404099 - RNA, 19 nt, Artificial Sequence
  Description of Artificial Sequence: Synthetic oligonucleotide
caauauuacuaaauaauuu

SEQ ID NO: 2404100 - RNA, 19 nt, Artificial Sequence
  Description of Artificial Sequence: Synthetic oligonucleotide
uacaaaaguccuguguaua

SEQ ID NO: 2404101 - RNA, 19 nt, Artificial Sequence
  Description of Artificial Sequence: Synthetic oligonucleotide
cagauaacagguccuucug

SEQ ID NO: 2404102 - RNA, 19 nt, Artificial Sequence
  Description of Artificial Sequence: Synthetic oligonucleotide
ucauaaagucaugcuacaa

SEQ ID NO: 2404103 - RNA, 19 nt, Artificial Sequence
  Description of Artificial Sequence: Synthetic oligonucleotide
agagagagagagagggagg

SEQ ID NO: 2404104 - RNA, 19 nt, Artificial Sequence
  Description of Artificial Sequence: Synthetic oligonucleotide
aaaaugccuucagaaugga

SEQ ID NO: 2404105 - RNA, 19 nt, Artificial Sequence
  Description of Artificial Sequence: Synthetic oligonucleotide
caagugaugugguccauga

SEQ ID NO: 2404106 - RNA, 19 nt, Artificial Sequence
  Description of Artificial Sequence: Synthetic oligonucleotide
aagugagagauguguuuua

SEQ ID NO: 2404107 - RNA, 19 nt, Artificial Sequence
  Description of Artificial Sequence: Synthetic oligonucleotide
uaguuuccaaagguggacu

SEQ ID NO: 2404108 - RNA, 19 nt, Artificial Sequence
  Description of Artificial Sequence: Synthetic oligonucleotide
uacccucacaaaaucuuua

SEQ ID NO: 2404109 - RNA, 19 nt, Artificial Sequence
  Description of Artificial Sequence: Synthetic oligonucleotide
agaauggaugugguucuag

SEQ ID NO: 2404110 - RNA, 19 nt, Artificial Sequence
  Description of Artificial Sequence: Synthetic oligonucleotide
gguucuagaagccaaggcu

SEQ ID NO: 2404111 - RNA, 19 nt, Artificial Sequence
  Description of Artificial Sequence: Synthetic oligonucleotide
ugggauacacacugauuau

SEQ ID NO: 2404112 - RNA, 19 nt, Artificial Sequence
  Description of Artificial Sequence: Synthetic oligonucleotide
ucuagaagccaaggcuuug

SEQ ID NO: 2404113 - RNA, 19 nt, Artificial Sequence
  Description of Artificial Sequence: Synthetic oligonucleotide
gaugugguccaugacugga

SEQ ID NO: 2404114 - RNA, 19 nt, Artificial Sequence
  Description of Artificial Sequence: Synthetic oligonucleotide
auaaaaccaggaaauugau

SEQ ID NO: 2404115 - RNA, 19 nt, Artificial Sequence
  Description of Artificial Sequence: Synthetic oligonucleotide
auuaucuauuguucucaua

SEQ ID NO: 2404116 - RNA, 19 nt, Artificial Sequence
  Description of Artificial Sequence: Synthetic oligonucleotide
uucugcuguuagaaaugac

SEQ ID NO: 2404117 - RNA, 19 nt, Artificial Sequence
  Description of Artificial Sequence: Synthetic oligonucleotide
gcuacaaaaguccugugua

SEQ ID NO: 2404118 - RNA, 19 nt, Artificial Sequence
  Description of Artificial Sequence: Synthetic oligonucleotide
guuuccaaagguggacugc

SEQ ID NO: 2404119 - RNA, 19 nt, Artificial Sequence
  Description of Artificial Sequence: Synthetic oligonucleotide
guuuuaucauaaagucaug

SEQ ID NO: 2404120 - RNA, 19 nt, Artificial Sequence
  Description of Artificial Sequence: Synthetic oligonucleotide
gauacacacugauuauggu

SEQ ID NO: 2404121 - RNA, 19 nt, Artificial Sequence
  Description of Artificial Sequence: Synthetic oligonucleotide
ccuuaauuacuggaguacc

SEQ ID NO: 2404122 - RNA, 19 nt, Artificial Sequence
  Description of Artificial Sequence: Synthetic oligonucleotide
cuguuaccaaagcuuuaac

SEQ ID NO: 2404123 - RNA, 19 nt, Artificial Sequence
  Description of Artificial Sequence: Synthetic oligonucleotide
gaugaugccccuggccacc

SEQ ID NO: 2404124 - RNA, 19 nt, Artificial Sequence
  Description of Artificial Sequence: Synthetic oligonucleotide
gccuucagaauggaugugg

SEQ ID NO: 2404125 - RNA, 19 nt, Artificial Sequence
  Description of Artificial Sequence: Synthetic oligonucleotide
caugcuacaaaaguccugu

SEQ ID NO: 2404126 - RNA, 19 nt, Artificial Sequence
  Description of Artificial Sequence: Synthetic oligonucleotide
agugagagauguguuuuau

SEQ ID NO: 2404127 - RNA, 19 nt, Artificial Sequence
  Description of Artificial Sequence: Synthetic oligonucleotide
acaagugaugugguccaug

SEQ ID NO: 2404128 - RNA, 19 nt, Artificial Sequence
  Description of Artificial Sequence: Synthetic oligonucleotide
gugagagauguguuuuauc

SEQ ID NO: 2404129 - RNA, 19 nt, Artificial Sequence
  Description of Artificial Sequence: Synthetic oligonucleotide
cauucagaaacucaauauu

SEQ ID NO: 2404130 - RNA, 19 nt, Artificial Sequence
  Description of Artificial Sequence: Synthetic oligonucleotide
cuuagccuucaucuucauc

SEQ ID NO: 2404131 - RNA, 19 nt, Artificial Sequence
  Description of Artificial Sequence: Synthetic oligonucleotide
uacagauaacagguccuuc

SEQ ID NO: 2404132 - RNA, 19 nt, Artificial Sequence
  Description of Artificial Sequence: Synthetic oligonucleotide
cuuccuuaauuacuggagu

SEQ ID NO: 2404133 - RNA, 19 nt, Artificial Sequence
  Description of Artificial Sequence: Synthetic oligonucleotide
uagaaaugacuggugugua

SEQ ID NO: 2404134 - RNA, 19 nt, Artificial Sequence
  Description of Artificial Sequence: Synthetic oligonucleotide
gaugccccuggccaccuuc

SEQ ID NO: 2404135 - RNA, 19 nt, Artificial Sequence
  Description of Artificial Sequence: Synthetic oligonucleotide
caauaaguuuuaucauaaa

SEQ ID NO: 2404136 - RNA, 19 nt, Artificial Sequence
  Description of Artificial Sequence: Synthetic oligonucleotide
gggauacacacugauuaug

SEQ ID NO: 2404137 - RNA, 19 nt, Artificial Sequence
  Description of Artificial Sequence: Synthetic oligonucleotide
ccaugacuggauaaaacca

SEQ ID NO: 2404138 - RNA, 19 nt, Artificial Sequence
  Description of Artificial Sequence: Synthetic oligonucleotide
augcuacaaaaguccugug

SEQ ID NO: 2404139 - RNA, 19 nt, Artificial Sequence
  Description of Artificial Sequence: Synthetic oligonucleotide
aaaugccuucagaauggau

SEQ ID NO: 2404140 - RNA, 19 nt, Artificial Sequence
  Description of Artificial Sequence: Synthetic oligonucleotide
gaagugagagauguguuuu

SEQ ID NO: 2404141 - RNA, 19 nt, Artificial Sequence
  Description of Artificial Sequence: Synthetic oligonucleotide
cuauuguucucauaacauu

SEQ ID NO: 2404142 - RNA, 19 nt, Artificial Sequence
  Description of Artificial Sequence: Synthetic oligonucleotide
cugcacagagucagugcug

SEQ ID NO: 2404143 - RNA, 19 nt, Artificial Sequence
  Description of Artificial Sequence: Synthetic oligonucleotide
gagauguguuuuaucuuaa

SEQ ID NO: 2404144 - RNA, 19 nt, Artificial Sequence
  Description of Artificial Sequence: Synthetic oligonucleotide
cuucugcuguuagaaauga

SEQ ID NO: 2404145 - RNA, 19 nt, Artificial Sequence
  Description of Artificial Sequence: Synthetic oligonucleotide
agguccuucugcuguuaga

SEQ ID NO: 2404146 - RNA, 19 nt, Artificial Sequence
  Description of Artificial Sequence: Synthetic oligonucleotide
gcugguuugugggauacac

SEQ ID NO: 2404147 - RNA, 19 nt, Artificial Sequence
  Description of Artificial Sequence: Synthetic oligonucleotide
guuuuaucuuaagaacugu

SEQ ID NO: 2404148 - RNA, 19 nt, Artificial Sequence
  Description of Artificial Sequence: Synthetic oligonucleotide
aguauggccuuagccuuca

SEQ ID NO: 2404149 - RNA, 19 nt, Artificial Sequence
  Description of Artificial Sequence: Synthetic oligonucleotide
ggcuuuggggaugaugccc

SEQ ID NO: 2404150 - RNA, 19 nt, Artificial Sequence
  Description of Artificial Sequence: Synthetic oligonucleotide
accaaagcuuuaacugaug

SEQ ID NO: 2404151 - RNA, 19 nt, Artificial Sequence
  Description of Artificial Sequence: Synthetic oligonucleotide
cugguuugugggauacaca

SEQ ID NO: 2404152 - RNA, 19 nt, Artificial Sequence
  Description of Artificial Sequence: Synthetic oligonucleotide
gagagauguguuuuaucuu

SEQ ID NO: 2404153 - RNA, 19 nt, Artificial Sequence
  Description of Artificial Sequence: Synthetic oligonucleotide
ggaugugguucuagaagcc

SEQ ID NO: 2404154 - RNA, 19 nt, Artificial Sequence
  Description of Artificial Sequence: Synthetic oligonucleotide
augugguucuagaagccaa

SEQ ID NO: 2404155 - RNA, 19 nt, Artificial Sequence
  Description of Artificial Sequence: Synthetic oligonucleotide
guguaaauuuuaggagaca

SEQ ID NO: 2404156 - RNA, 19 nt, Artificial Sequence
  Description of Artificial Sequence: Synthetic oligonucleotide
ggauggaagugagagaugu

SEQ ID NO: 2404157 - RNA, 19 nt, Artificial Sequence
  Description of Artificial Sequence: Synthetic oligonucleotide
cagguccuucugcuguuag

SEQ ID NO: 2404158 - RNA, 19 nt, Artificial Sequence
  Description of Artificial Sequence: Synthetic oligonucleotide
caaaaguccuguguauaaa

SEQ ID NO: 2404159 - RNA, 19 nt, Artificial Sequence
  Description of Artificial Sequence: Synthetic oligonucleotide
augccccuggccaccuucc

SEQ ID NO: 2404160 - RNA, 19 nt, Artificial Sequence
  Description of Artificial Sequence: Synthetic oligonucleotide
cuguguauaaaagacuguu

SEQ ID NO: 2404161 - RNA, 19 nt, Artificial Sequence
  Description of Artificial Sequence: Synthetic oligonucleotide
ugcugcugguuugugggau

SEQ ID NO: 2404162 - RNA, 19 nt, Artificial Sequence
  Description of Artificial Sequence: Synthetic oligonucleotide
cuacaaaaguccuguguau

SEQ ID NO: 2404163 - RNA, 19 nt, Artificial Sequence
  Description of Artificial Sequence: Synthetic oligonucleotide
uccuucccuuccuuccuuc

SEQ ID NO: 2404164 - RNA, 19 nt, Artificial Sequence
  Description of Artificial Sequence: Synthetic oligonucleotide
ugccuucagaauggaugug

SEQ ID NO: 2404165 - RNA, 19 nt, Artificial Sequence
  Description of Artificial Sequence: Synthetic oligonucleotide
uuucagucuuaggcacucu

SEQ ID NO: 2404166 - RNA, 19 nt, Artificial Sequence
  Description of Artificial Sequence: Synthetic oligonucleotide
accaggaaauugauaguuu

SEQ ID NO: 2404167 - RNA, 19 nt, Artificial Sequence
  Description of Artificial Sequence: Synthetic oligonucleotide
agagagagagagggaggga

SEQ ID NO: 2404168 - RNA, 19 nt, Artificial Sequence
  Description of Artificial Sequence: Synthetic oligonucleotide
cuguacccucacaaaaucu

SEQ ID NO: 2404169 - RNA, 19 nt, Artificial Sequence
  Description of Artificial Sequence: Synthetic oligonucleotide
caaagcuuuaacugauguu

SEQ ID NO: 2404170 - RNA, 19 nt, Artificial Sequence
  Description of Artificial Sequence: Synthetic oligonucleotide
ggaugaugccccuggccac

SEQ ID NO: 2404171 - RNA, 19 nt, Artificial Sequence
  Description of Artificial Sequence: Synthetic oligonucleotide
guaguaaaguauggccuua

SEQ ID NO: 2404172 - RNA, 19 nt, Artificial Sequence
  Description of Artificial Sequence: Synthetic oligonucleotide
aggauggaagugagagaug

SEQ ID NO: 2404173 - RNA, 19 nt, Artificial Sequence
  Description of Artificial Sequence: Synthetic oligonucleotide
cauuaucuauuguucucau

SEQ ID NO: 2404174 - RNA, 19 nt, Artificial Sequence
  Description of Artificial Sequence: Synthetic oligonucleotide
gucaugcuacaaaaguccu

SEQ ID NO: 2404175 - RNA, 19 nt, Artificial Sequence
  Description of Artificial Sequence: Synthetic oligonucleotide
guccuguguauaaaagacu

SEQ ID NO: 2404176 - RNA, 19 nt, Artificial Sequence
  Description of Artificial Sequence: Synthetic oligonucleotide
agccaaggcuuuggggaug

SEQ ID NO: 2404177 - RNA, 19 nt, Artificial Sequence
  Description of Artificial Sequence: Synthetic oligonucleotide
ugccccuggccaccuuccu

SEQ ID NO: 2404178 - RNA, 19 nt, Artificial Sequence
  Description of Artificial Sequence: Synthetic oligonucleotide
ccaaagcuuuaacugaugu

SEQ ID NO: 2404179 - RNA, 19 nt, Artificial Sequence
  Description of Artificial Sequence: Synthetic oligonucleotide
gguccaugacuggauaaaa

SEQ ID NO: 2404180 - RNA, 19 nt, Artificial Sequence
  Description of Artificial Sequence: Synthetic oligonucleotide
ccccuggccaccuuccuuc

SEQ ID NO: 2404181 - RNA, 19 nt, Artificial Sequence
  Description of Artificial Sequence: Synthetic oligonucleotide
cuggaguaccauccagucu

SEQ ID NO: 2404182 - RNA, 19 nt, Artificial Sequence
  Description of Artificial Sequence: Synthetic oligonucleotide
cuuccuucccuuccuuccu

SEQ ID NO: 2404183 - RNA, 19 nt, Artificial Sequence
  Description of Artificial Sequence: Synthetic oligonucleotide
gugcugcugguuuguggga

SEQ ID NO: 2404184 - RNA, 19 nt, Artificial Sequence
  Description of Artificial Sequence: Synthetic oligonucleotide
guacagauaacagguccuu

SEQ ID NO: 2404185 - RNA, 19 nt, Artificial Sequence
  Description of Artificial Sequence: Synthetic oligonucleotide
cuucagaauggaugugguu

SEQ ID NO: 2404186 - RNA, 19 nt, Artificial Sequence
  Description of Artificial Sequence: Synthetic oligonucleotide
cagucuuaggcacucucuu

SEQ ID NO: 2404187 - RNA, 19 nt, Artificial Sequence
  Description of Artificial Sequence: Synthetic oligonucleotide
augaugccccuggccaccu

SEQ ID NO: 2404188 - RNA, 19 nt, Artificial Sequence
  Description of Artificial Sequence: Synthetic oligonucleotide
guacccucacaaaaucuuu

SEQ ID NO: 2404189 - RNA, 19 nt, Artificial Sequence
  Description of Artificial Sequence: Synthetic oligonucleotide
gucagugcugcugguuugu

SEQ ID NO: 2404190 - RNA, 19 nt, Artificial Sequence
  Description of Artificial Sequence: Synthetic oligonucleotide
ccuguguauaaaagacugu

SEQ ID NO: 2404191 - RNA, 19 nt, Artificial Sequence
  Description of Artificial Sequence: Synthetic oligonucleotide
cucacucccuuuccuuccu

SEQ ID NO: 2404192 - RNA, 19 nt, Artificial Sequence
  Description of Artificial Sequence: Synthetic oligonucleotide
gguuugugggauacacacu

SEQ ID NO: 2404193 - RNA, 19 nt, Artificial Sequence
  Description of Artificial Sequence: Synthetic oligonucleotide
cuggccaccuuccuuccuu

SEQ ID NO: 2404194 - RNA, 19 nt, Artificial Sequence
  Description of Artificial Sequence: Synthetic oligonucleotide
gacaagugaugugguccau

SEQ ID NO: 2404195 - RNA, 19 nt, Artificial Sequence
  Description of Artificial Sequence: Synthetic oligonucleotide
gccaaggcuuuggggauga

SEQ ID NO: 2404196 - RNA, 19 nt, Artificial Sequence
  Description of Artificial Sequence: Synthetic oligonucleotide
gcugcugguuugugggaua

SEQ ID NO: 2404197 - RNA, 19 nt, Artificial Sequence
  Description of Artificial Sequence: Synthetic oligonucleotide
cagaauggaugugguucua

SEQ ID NO: 2404198 - RNA, 19 nt, Artificial Sequence
  Description of Artificial Sequence: Synthetic oligonucleotide
gaguaccauccagucuuuu

SEQ ID NO: 2404199 - RNA, 19 nt, Artificial Sequence
  Description of Artificial Sequence: Synthetic oligonucleotide
cuccccucccucccuuccu

SEQ ID NO: 2404200 - RNA, 19 nt, Artificial Sequence
  Description of Artificial Sequence: Synthetic oligonucleotide
guauggccuuagccuucau

SEQ ID NO: 2404201 - RNA, 19 nt, Artificial Sequence
  Description of Artificial Sequence: Synthetic oligonucleotide
ggaguaccauccagucuuu

SEQ ID NO: 2404202 - RNA, 19 nt, Artificial Sequence
  Description of Artificial Sequence: Synthetic oligonucleotide
ccuuagccuucaucuucau

SEQ ID NO: 2404203 - RNA, 19 nt, Artificial Sequence
  Description of Artificial Sequence: Synthetic oligonucleotide
gccccuggccaccuuccuu

SEQ ID NO: 2404204 - RNA, 19 nt, Artificial Sequence
  Description of Artificial Sequence: Synthetic oligonucleotide
ccuggccaccuuccuuccu

SEQ ID NO: 2404205 - RNA, 19 nt, Artificial Sequence
  Description of Artificial Sequence: Synthetic oligonucleotide
aacaucguugacugcaacc

SEQ ID NO: 2404206 - RNA, 19 nt, Artificial Sequence
  Description of Artificial Sequence: Synthetic oligonucleotide
agaaauuuccaucugguug

SEQ ID NO: 2404207 - RNA, 19 nt, Artificial Sequence
  Description of Artificial Sequence: Synthetic oligonucleotide
cuggauuagaucauggugg

SEQ ID NO: 2404208 - RNA, 19 nt, Artificial Sequence
  Description of Artificial Sequence: Synthetic oligonucleotide
aaaaccgucugccauuuuc

SEQ ID NO: 2404209 - RNA, 19 nt, Artificial Sequence
  Description of Artificial Sequence: Synthetic oligonucleotide
aggacuuguauuuugaaug

SEQ ID NO: 2404210 - RNA, 19 nt, Artificial Sequence
  Description of Artificial Sequence: Synthetic oligonucleotide
aagugaacaucguugacug

SEQ ID NO: 2404211 - RNA, 19 nt, Artificial Sequence
  Description of Artificial Sequence: Synthetic oligonucleotide
ucuggauuagaucauggug

SEQ ID NO: 2404212 - RNA, 19 nt, Artificial Sequence
  Description of Artificial Sequence: Synthetic oligonucleotide
uugacugcaaccuugaaau

SEQ ID NO: 2404213 - RNA, 19 nt, Artificial Sequence
  Description of Artificial Sequence: Synthetic oligonucleotide
uuguaaucagcauucgagg

SEQ ID NO: 2404214 - RNA, 19 nt, Artificial Sequence
  Description of Artificial Sequence: Synthetic oligonucleotide
aaauuuagaauaauccugu

SEQ ID NO: 2404215 - RNA, 19 nt, Artificial Sequence
  Description of Artificial Sequence: Synthetic oligonucleotide
auuagaucauggugggugc

SEQ ID NO: 2404216 - RNA, 19 nt, Artificial Sequence
  Description of Artificial Sequence: Synthetic oligonucleotide
auuguaaucagcauucgag

SEQ ID NO: 2404217 - RNA, 19 nt, Artificial Sequence
  Description of Artificial Sequence: Synthetic oligonucleotide
aaugggaaagcugacuguc

SEQ ID NO: 2404218 - RNA, 19 nt, Artificial Sequence
  Description of Artificial Sequence: Synthetic oligonucleotide
gauuagaucauggugggug

SEQ ID NO: 2404219 - RNA, 19 nt, Artificial Sequence
  Description of Artificial Sequence: Synthetic oligonucleotide
uguaaucagcauucgaggc

SEQ ID NO: 2404220 - RNA, 19 nt, Artificial Sequence
  Description of Artificial Sequence: Synthetic oligonucleotide
agcuaaggcaucauuaagc

SEQ ID NO: 2404221 - RNA, 19 nt, Artificial Sequence
  Description of Artificial Sequence: Synthetic oligonucleotide
ugccuuacaagaaggaccc

SEQ ID NO: 2404222 - RNA, 19 nt, Artificial Sequence
  Description of Artificial Sequence: Synthetic oligonucleotide
uuguuuucauugaagcgag

SEQ ID NO: 2404223 - RNA, 19 nt, Artificial Sequence
  Description of Artificial Sequence: Synthetic oligonucleotide
uaaauggaugccuuacaag

SEQ ID NO: 2404224 - RNA, 19 nt, Artificial Sequence
  Description of Artificial Sequence: Synthetic oligonucleotide
augauuguaaucagcauuc

SEQ ID NO: 2404225 - RNA, 19 nt, Artificial Sequence
  Description of Artificial Sequence: Synthetic oligonucleotide
augccuuacaagaaggacc

SEQ ID NO: 2404226 - RNA, 19 nt, Artificial Sequence
  Description of Artificial Sequence: Synthetic oligonucleotide
uuuauuaaauggaugccuu

SEQ ID NO: 2404227 - RNA, 19 nt, Artificial Sequence
  Description of Artificial Sequence: Synthetic oligonucleotide
aaaccgucugccauuuucc

SEQ ID NO: 2404228 - RNA, 19 nt, Artificial Sequence
  Description of Artificial Sequence: Synthetic oligonucleotide
uuauagggcacugucaaug

SEQ ID NO: 2404229 - RNA, 19 nt, Artificial Sequence
  Description of Artificial Sequence: Synthetic oligonucleotide
gacugcaaccuugaaaugg

SEQ ID NO: 2404230 - RNA, 19 nt, Artificial Sequence
  Description of Artificial Sequence: Synthetic oligonucleotide
uggauuagaucaugguggg

SEQ ID NO: 2404231 - RNA, 19 nt, Artificial Sequence
  Description of Artificial Sequence: Synthetic oligonucleotide
uuagaauaauccuguuugc

SEQ ID NO: 2404232 - RNA, 19 nt, Artificial Sequence
  Description of Artificial Sequence: Synthetic oligonucleotide
augucauucccucucauga

SEQ ID NO: 2404233 - RNA, 19 nt, Artificial Sequence
  Description of Artificial Sequence: Synthetic oligonucleotide
cuggguaggcacuaggagg

SEQ ID NO: 2404234 - RNA, 19 nt, Artificial Sequence
  Description of Artificial Sequence: Synthetic oligonucleotide
acuggugaggguuauguca

SEQ ID NO: 2404235 - RNA, 19 nt, Artificial Sequence
  Description of Artificial Sequence: Synthetic oligonucleotide
ucaaccaggacuuguauuu

SEQ ID NO: 2404236 - RNA, 19 nt, Artificial Sequence
  Description of Artificial Sequence: Synthetic oligonucleotide
guugguaugcaccaggcca

SEQ ID NO: 2404237 - RNA, 19 nt, Artificial Sequence
  Description of Artificial Sequence: Synthetic oligonucleotide
uauuaaauggaugccuuac

SEQ ID NO: 2404238 - RNA, 19 nt, Artificial Sequence
  Description of Artificial Sequence: Synthetic oligonucleotide
uuuugaauggucugccacu

SEQ ID NO: 2404239 - RNA, 19 nt, Artificial Sequence
  Description of Artificial Sequence: Synthetic oligonucleotide
agaauaauccuguuugcau

SEQ ID NO: 2404240 - RNA, 19 nt, Artificial Sequence
  Description of Artificial Sequence: Synthetic oligonucleotide
gcuaaggcaucauuaagcg

SEQ ID NO: 2404241 - RNA, 19 nt, Artificial Sequence
  Description of Artificial Sequence: Synthetic oligonucleotide
agcugacugucuuucuucc

SEQ ID NO: 2404242 - RNA, 19 nt, Artificial Sequence
  Description of Artificial Sequence: Synthetic oligonucleotide
aggcaugacuccuccagcc

SEQ ID NO: 2404243 - RNA, 19 nt, Artificial Sequence
  Description of Artificial Sequence: Synthetic oligonucleotide
ugggguaggccccaggugc

SEQ ID NO: 2404244 - RNA, 19 nt, Artificial Sequence
  Description of Artificial Sequence: Synthetic oligonucleotide
ugcaaccuugaaaugguca

SEQ ID NO: 2404245 - RNA, 19 nt, Artificial Sequence
  Description of Artificial Sequence: Synthetic oligonucleotide
acaaugacuuuccuguugu

SEQ ID NO: 2404246 - RNA, 19 nt, Artificial Sequence
  Description of Artificial Sequence: Synthetic oligonucleotide
uaauccuguuugcauuggg

SEQ ID NO: 2404247 - RNA, 19 nt, Artificial Sequence
  Description of Artificial Sequence: Synthetic oligonucleotide
auaggaagccccuggguag

SEQ ID NO: 2404248 - RNA, 19 nt, Artificial Sequence
  Description of Artificial Sequence: Synthetic oligonucleotide
uguacugcagcaagugaac

SEQ ID NO: 2404249 - RNA, 19 nt, Artificial Sequence
  Description of Artificial Sequence: Synthetic oligonucleotide
uguuugguguugcacacaa

SEQ ID NO: 2404250 - RNA, 19 nt, Artificial Sequence
  Description of Artificial Sequence: Synthetic oligonucleotide
uuaaaguggaaggcaaugu

SEQ ID NO: 2404251 - RNA, 19 nt, Artificial Sequence
  Description of Artificial Sequence: Synthetic oligonucleotide
ugaggguuaugucaccaga

SEQ ID NO: 2404252 - RNA, 19 nt, Artificial Sequence
  Description of Artificial Sequence: Synthetic oligonucleotide
uagaauaauccuguuugca

SEQ ID NO: 2404253 - RNA, 19 nt, Artificial Sequence
  Description of Artificial Sequence: Synthetic oligonucleotide
ggacuuguauuuugaaugg

SEQ ID NO: 2404254 - RNA, 19 nt, Artificial Sequence
  Description of Artificial Sequence: Synthetic oligonucleotide
acugcagcaagugaacauc

SEQ ID NO: 2404255 - RNA, 19 nt, Artificial Sequence
  Description of Artificial Sequence: Synthetic oligonucleotide
uuucauugaagcgaggguu

SEQ ID NO: 2404256 - RNA, 19 nt, Artificial Sequence
  Description of Artificial Sequence: Synthetic oligonucleotide
uuggucagugcuccgcccg

SEQ ID NO: 2404257 - RNA, 19 nt, Artificial Sequence
  Description of Artificial Sequence: Synthetic oligonucleotide
cuuacaagaaggacccuuc

SEQ ID NO: 2404258 - RNA, 19 nt, Artificial Sequence
  Description of Artificial Sequence: Synthetic oligonucleotide
aaccuugaaauggucaggu

SEQ ID NO: 2404259 - RNA, 19 nt, Artificial Sequence
  Description of Artificial Sequence: Synthetic oligonucleotide
ccaagggcagcuuauaggg

SEQ ID NO: 2404260 - RNA, 19 nt, Artificial Sequence
  Description of Artificial Sequence: Synthetic oligonucleotide
aggauaagccccuggagga

SEQ ID NO: 2404261 - RNA, 19 nt, Artificial Sequence
  Description of Artificial Sequence: Synthetic oligonucleotide
guuaaaguggaaggcaaug

SEQ ID NO: 2404262 - RNA, 19 nt, Artificial Sequence
  Description of Artificial Sequence: Synthetic oligonucleotide
aauuuagaauaauccuguu

SEQ ID NO: 2404263 - RNA, 19 nt, Artificial Sequence
  Description of Artificial Sequence: Synthetic oligonucleotide
gucaccagaaauuuccauc

SEQ ID NO: 2404264 - RNA, 19 nt, Artificial Sequence
  Description of Artificial Sequence: Synthetic oligonucleotide
gauuguaaucagcauucga

SEQ ID NO: 2404265 - RNA, 19 nt, Artificial Sequence
  Description of Artificial Sequence: Synthetic oligonucleotide
auccuguuugcauugggcu

SEQ ID NO: 2404266 - RNA, 19 nt, Artificial Sequence
  Description of Artificial Sequence: Synthetic oligonucleotide
ucugguugauuucccugag

SEQ ID NO: 2404267 - RNA, 19 nt, Artificial Sequence
  Description of Artificial Sequence: Synthetic oligonucleotide
cugggaaggcuccaggugc

SEQ ID NO: 2404268 - RNA, 19 nt, Artificial Sequence
  Description of Artificial Sequence: Synthetic oligonucleotide
uugggcuucacugugccca

SEQ ID NO: 2404269 - RNA, 19 nt, Artificial Sequence
  Description of Artificial Sequence: Synthetic oligonucleotide
ugauuguaaucagcauucg

SEQ ID NO: 2404270 - RNA, 19 nt, Artificial Sequence
  Description of Artificial Sequence: Synthetic oligonucleotide
ucccucucaugaaauuuag

SEQ ID NO: 2404271 - RNA, 19 nt, Artificial Sequence
  Description of Artificial Sequence: Synthetic oligonucleotide
agugaacaucguugacugc

SEQ ID NO: 2404272 - RNA, 19 nt, Artificial Sequence
  Description of Artificial Sequence: Synthetic oligonucleotide
ugaggguuuggguuuccag

SEQ ID NO: 2404273 - RNA, 19 nt, Artificial Sequence
  Description of Artificial Sequence: Synthetic oligonucleotide
guaaucagcauucgaggca

SEQ ID NO: 2404274 - RNA, 19 nt, Artificial Sequence
  Description of Artificial Sequence: Synthetic oligonucleotide
aucugguugauuucccuga

SEQ ID NO: 2404275 - RNA, 19 nt, Artificial Sequence
  Description of Artificial Sequence: Synthetic oligonucleotide
uucauugaagcgaggguua

SEQ ID NO: 2404276 - RNA, 19 nt, Artificial Sequence
  Description of Artificial Sequence: Synthetic oligonucleotide
gaugccuuacaagaaggac

SEQ ID NO: 2404277 - RNA, 19 nt, Artificial Sequence
  Description of Artificial Sequence: Synthetic oligonucleotide
cugcagcaagugaacaucg

SEQ ID NO: 2404278 - RNA, 19 nt, Artificial Sequence
  Description of Artificial Sequence: Synthetic oligonucleotide
ucauccgaugguuguacug

SEQ ID NO: 2404279 - RNA, 19 nt, Artificial Sequence
  Description of Artificial Sequence: Synthetic oligonucleotide
acaucguugacugcaaccu

SEQ ID NO: 2404280 - RNA, 19 nt, Artificial Sequence
  Description of Artificial Sequence: Synthetic oligonucleotide
gcaaccuugaaauggucag

SEQ ID NO: 2404281 - RNA, 19 nt, Artificial Sequence
  Description of Artificial Sequence: Synthetic oligonucleotide
uaggccccaggauaggaag

SEQ ID NO: 2404282 - RNA, 19 nt, Artificial Sequence
  Description of Artificial Sequence: Synthetic oligonucleotide
uucgaggcaugacuccucc

SEQ ID NO: 2404283 - RNA, 19 nt, Artificial Sequence
  Description of Artificial Sequence: Synthetic oligonucleotide
caguuguuauccuguuugg

SEQ ID NO: 2404284 - RNA, 19 nt, Artificial Sequence
  Description of Artificial Sequence: Synthetic oligonucleotide
cauccgaugguuguacugc

SEQ ID NO: 2404285 - RNA, 19 nt, Artificial Sequence
  Description of Artificial Sequence: Synthetic oligonucleotide
ugcaguugggccaggguaa

SEQ ID NO: 2404286 - RNA, 19 nt, Artificial Sequence
  Description of Artificial Sequence: Synthetic oligonucleotide
gugcccaugauuguaauca

SEQ ID NO: 2404287 - RNA, 19 nt, Artificial Sequence
  Description of Artificial Sequence: Synthetic oligonucleotide
aguugagccaggguaagcu

SEQ ID NO: 2404288 - RNA, 19 nt, Artificial Sequence
  Description of Artificial Sequence: Synthetic oligonucleotide
uugguaugcaccaggccau

SEQ ID NO: 2404289 - RNA, 19 nt, Artificial Sequence
  Description of Artificial Sequence: Synthetic oligonucleotide
cacaaugacuuuccuguug

SEQ ID NO: 2404290 - RNA, 19 nt, Artificial Sequence
  Description of Artificial Sequence: Synthetic oligonucleotide
aauggaugccuuacaagaa

SEQ ID NO: 2404291 - RNA, 19 nt, Artificial Sequence
  Description of Artificial Sequence: Synthetic oligonucleotide
cagguugguaugcaccagg

SEQ ID NO: 2404292 - RNA, 19 nt, Artificial Sequence
  Description of Artificial Sequence: Synthetic oligonucleotide
uucccucucaugaaauuua

SEQ ID NO: 2404293 - RNA, 19 nt, Artificial Sequence
  Description of Artificial Sequence: Synthetic oligonucleotide
uccaggguaagcuccgggu

SEQ ID NO: 2404294 - RNA, 19 nt, Artificial Sequence
  Description of Artificial Sequence: Synthetic oligonucleotide
ugaacaucguugacugcaa

SEQ ID NO: 2404295 - RNA, 19 nt, Artificial Sequence
  Description of Artificial Sequence: Synthetic oligonucleotide
gccaggguaagcuccaggg

SEQ ID NO: 2404296 - RNA, 19 nt, Artificial Sequence
  Description of Artificial Sequence: Synthetic oligonucleotide
aaccgucugccauuuuccu

SEQ ID NO: 2404297 - RNA, 19 nt, Artificial Sequence
  Description of Artificial Sequence: Synthetic oligonucleotide
ucguugacugcaaccuuga

SEQ ID NO: 2404298 - RNA, 19 nt, Artificial Sequence
  Description of Artificial Sequence: Synthetic oligonucleotide
ugcccaugauuguaaucag

SEQ ID NO: 2404299 - RNA, 19 nt, Artificial Sequence
  Description of Artificial Sequence: Synthetic oligonucleotide
uuauccuguuugguguugc

SEQ ID NO: 2404300 - RNA, 19 nt, Artificial Sequence
  Description of Artificial Sequence: Synthetic oligonucleotide
gaauaauccuguuugcauu

SEQ ID NO: 2404301 - RNA, 19 nt, Artificial Sequence
  Description of Artificial Sequence: Synthetic oligonucleotide
ucaugaaauuuagaauaau

SEQ ID NO: 2404302 - RNA, 19 nt, Artificial Sequence
  Description of Artificial Sequence: Synthetic oligonucleotide
uucaaccaggacuuguauu

SEQ ID NO: 2404303 - RNA, 19 nt, Artificial Sequence
  Description of Artificial Sequence: Synthetic oligonucleotide
ugacuccuccagccaaggg

SEQ ID NO: 2404304 - RNA, 19 nt, Artificial Sequence
  Description of Artificial Sequence: Synthetic oligonucleotide
uacugcagcaagugaacau

SEQ ID NO: 2404305 - RNA, 19 nt, Artificial Sequence
  Description of Artificial Sequence: Synthetic oligonucleotide
auggucagguucaaccagg

SEQ ID NO: 2404306 - RNA, 19 nt, Artificial Sequence
  Description of Artificial Sequence: Synthetic oligonucleotide
cagcuaaggcaucauuaag

SEQ ID NO: 2404307 - RNA, 19 nt, Artificial Sequence
  Description of Artificial Sequence: Synthetic oligonucleotide
uccgaugguuguacugcag

SEQ ID NO: 2404308 - RNA, 19 nt, Artificial Sequence
  Description of Artificial Sequence: Synthetic oligonucleotide
gaggcaugacuccuccagc

SEQ ID NO: 2404309 - RNA, 19 nt, Artificial Sequence
  Description of Artificial Sequence: Synthetic oligonucleotide
aucauggugggugcagcac

SEQ ID NO: 2404310 - RNA, 19 nt, Artificial Sequence
  Description of Artificial Sequence: Synthetic oligonucleotide
ugucauucccucucaugaa

SEQ ID NO: 2404311 - RNA, 19 nt, Artificial Sequence
  Description of Artificial Sequence: Synthetic oligonucleotide
uagaucauggugggugcag

SEQ ID NO: 2404312 - RNA, 19 nt, Artificial Sequence
  Description of Artificial Sequence: Synthetic oligonucleotide
guugcacacaaugacuuuc

SEQ ID NO: 2404313 - RNA, 19 nt, Artificial Sequence
  Description of Artificial Sequence: Synthetic oligonucleotide
gccaagggcagcuuauagg

SEQ ID NO: 2404314 - RNA, 19 nt, Artificial Sequence
  Description of Artificial Sequence: Synthetic oligonucleotide
acugggguaggccccaggu

SEQ ID NO: 2404315 - RNA, 19 nt, Artificial Sequence
  Description of Artificial Sequence: Synthetic oligonucleotide
caaccuugaaauggucagg

SEQ ID NO: 2404316 - RNA, 19 nt, Artificial Sequence
  Description of Artificial Sequence: Synthetic oligonucleotide
aucguugacugcaaccuug

SEQ ID NO: 2404317 - RNA, 19 nt, Artificial Sequence
  Description of Artificial Sequence: Synthetic oligonucleotide
auaagccccuggaggagcc

SEQ ID NO: 2404318 - RNA, 19 nt, Artificial Sequence
  Description of Artificial Sequence: Synthetic oligonucleotide
auccaggguaagcuccggg

SEQ ID NO: 2404319 - RNA, 19 nt, Artificial Sequence
  Description of Artificial Sequence: Synthetic oligonucleotide
aguugggccaggguaagcu

SEQ ID NO: 2404320 - RNA, 19 nt, Artificial Sequence
  Description of Artificial Sequence: Synthetic oligonucleotide
agaaccagcuaaggcauca

SEQ ID NO: 2404321 - RNA, 19 nt, Artificial Sequence
  Description of Artificial Sequence: Synthetic oligonucleotide
ugcacacaaugacuuuccu

SEQ ID NO: 2404322 - RNA, 19 nt, Artificial Sequence
  Description of Artificial Sequence: Synthetic oligonucleotide
uuugaauggucugccacuu

SEQ ID NO: 2404323 - RNA, 19 nt, Artificial Sequence
  Description of Artificial Sequence: Synthetic oligonucleotide
aguuguuauccuguuuggu

SEQ ID NO: 2404324 - RNA, 19 nt, Artificial Sequence
  Description of Artificial Sequence: Synthetic oligonucleotide
ggcaguugggccuggguag

SEQ ID NO: 2404325 - RNA, 19 nt, Artificial Sequence
  Description of Artificial Sequence: Synthetic oligonucleotide
guuguacugcagcaaguga

SEQ ID NO: 2404326 - RNA, 19 nt, Artificial Sequence
  Description of Artificial Sequence: Synthetic oligonucleotide
gugaggguuaugucaccag

SEQ ID NO: 2404327 - RNA, 19 nt, Artificial Sequence
  Description of Artificial Sequence: Synthetic oligonucleotide
ccucucaugaaauuuagaa

SEQ ID NO: 2404328 - RNA, 19 nt, Artificial Sequence
  Description of Artificial Sequence: Synthetic oligonucleotide
ugacugcaaccuugaaaug

SEQ ID NO: 2404329 - RNA, 19 nt, Artificial Sequence
  Description of Artificial Sequence: Synthetic oligonucleotide
ugcagcaagugaacaucgu

SEQ ID NO: 2404330 - RNA, 19 nt, Artificial Sequence
  Description of Artificial Sequence: Synthetic oligonucleotide
caugauuguaaucagcauu

SEQ ID NO: 2404331 - RNA, 19 nt, Artificial Sequence
  Description of Artificial Sequence: Synthetic oligonucleotide
ugggaaggcuccaggugca

SEQ ID NO: 2404332 - RNA, 19 nt, Artificial Sequence
  Description of Artificial Sequence: Synthetic oligonucleotide
uccuguuugcauugggcuu

SEQ ID NO: 2404333 - RNA, 19 nt, Artificial Sequence
  Description of Artificial Sequence: Synthetic oligonucleotide
cuucauccgaugguuguac

SEQ ID NO: 2404334 - RNA, 19 nt, Artificial Sequence
  Description of Artificial Sequence: Synthetic oligonucleotide
uuagaucauggugggugca

SEQ ID NO: 2404335 - RNA, 19 nt, Artificial Sequence
  Description of Artificial Sequence: Synthetic oligonucleotide
ggcaaugucauucccucuc

SEQ ID NO: 2404336 - RNA, 19 nt, Artificial Sequence
  Description of Artificial Sequence: Synthetic oligonucleotide
gaacaucguugacugcaac

SEQ ID NO: 2404337 - RNA, 19 nt, Artificial Sequence
  Description of Artificial Sequence: Synthetic oligonucleotide
cuuggucagugcuccgccc

SEQ ID NO: 2404338 - RNA, 19 nt, Artificial Sequence
  Description of Artificial Sequence: Synthetic oligonucleotide
ugaaauggucagguucaac

SEQ ID NO: 2404339 - RNA, 19 nt, Artificial Sequence
  Description of Artificial Sequence: Synthetic oligonucleotide
uucauccgaugguuguacu

SEQ ID NO: 2404340 - RNA, 19 nt, Artificial Sequence
  Description of Artificial Sequence: Synthetic oligonucleotide
ucagcauucgaggcaugac

SEQ ID NO: 2404341 - RNA, 19 nt, Artificial Sequence
  Description of Artificial Sequence: Synthetic oligonucleotide
cuaaggcaucauuaagcga

SEQ ID NO: 2404342 - RNA, 19 nt, Artificial Sequence
  Description of Artificial Sequence: Synthetic oligonucleotide
uguugcacacaaugacuuu

SEQ ID NO: 2404343 - RNA, 19 nt, Artificial Sequence
  Description of Artificial Sequence: Synthetic oligonucleotide
gaugguuguacugcagcaa

SEQ ID NO: 2404344 - RNA, 19 nt, Artificial Sequence
  Description of Artificial Sequence: Synthetic oligonucleotide
uaagcuccgggugcaguug

SEQ ID NO: 2404345 - RNA, 19 nt, Artificial Sequence
  Description of Artificial Sequence: Synthetic oligonucleotide
aggguaggccccaggauag

SEQ ID NO: 2404346 - RNA, 19 nt, Artificial Sequence
  Description of Artificial Sequence: Synthetic oligonucleotide
auccgaugguuguacugca

SEQ ID NO: 2404347 - RNA, 19 nt, Artificial Sequence
  Description of Artificial Sequence: Synthetic oligonucleotide
ccgucugccauuuuccuug

SEQ ID NO: 2404348 - RNA, 19 nt, Artificial Sequence
  Description of Artificial Sequence: Synthetic oligonucleotide
ggcacugucaaugcuccag

SEQ ID NO: 2404349 - RNA, 19 nt, Artificial Sequence
  Description of Artificial Sequence: Synthetic oligonucleotide
aucagcauucgaggcauga

SEQ ID NO: 2404350 - RNA, 19 nt, Artificial Sequence
  Description of Artificial Sequence: Synthetic oligonucleotide
auaggggccagcagcagga

SEQ ID NO: 2404351 - RNA, 19 nt, Artificial Sequence
  Description of Artificial Sequence: Synthetic oligonucleotide
ucauugaagcgaggguuaa

SEQ ID NO: 2404352 - RNA, 19 nt, Artificial Sequence
  Description of Artificial Sequence: Synthetic oligonucleotide
agcuuauagggcacuguca

SEQ ID NO: 2404353 - RNA, 19 nt, Artificial Sequence
  Description of Artificial Sequence: Synthetic oligonucleotide
uggucagugcuccgcccgc

SEQ ID NO: 2404354 - RNA, 19 nt, Artificial Sequence
  Description of Artificial Sequence: Synthetic oligonucleotide
gacugucuuucuucccuuc

SEQ ID NO: 2404355 - RNA, 19 nt, Artificial Sequence
  Description of Artificial Sequence: Synthetic oligonucleotide
aggauaggccccaggagca

SEQ ID NO: 2404356 - RNA, 19 nt, Artificial Sequence
  Description of Artificial Sequence: Synthetic oligonucleotide
auucgaggcaugacuccuc

SEQ ID NO: 2404357 - RNA, 19 nt, Artificial Sequence
  Description of Artificial Sequence: Synthetic oligonucleotide
gacuuuccuguuguuuuca

SEQ ID NO: 2404358 - RNA, 19 nt, Artificial Sequence
  Description of Artificial Sequence: Synthetic oligonucleotide
agguucaaccaggacuugu

SEQ ID NO: 2404359 - RNA, 19 nt, Artificial Sequence
  Description of Artificial Sequence: Synthetic oligonucleotide
aguggaaggcaaugucauu

SEQ ID NO: 2404360 - RNA, 19 nt, Artificial Sequence
  Description of Artificial Sequence: Synthetic oligonucleotide
aaggcaucauuaagcgaaa

SEQ ID NO: 2404361 - RNA, 19 nt, Artificial Sequence
  Description of Artificial Sequence: Synthetic oligonucleotide
aggcaaugucauucccucu

SEQ ID NO: 2404362 - RNA, 19 nt, Artificial Sequence
  Description of Artificial Sequence: Synthetic oligonucleotide
ccuguuugguguugcacac

SEQ ID NO: 2404363 - RNA, 19 nt, Artificial Sequence
  Description of Artificial Sequence: Synthetic oligonucleotide
acacaaugacuuuccuguu

SEQ ID NO: 2404364 - RNA, 19 nt, Artificial Sequence
  Description of Artificial Sequence: Synthetic oligonucleotide
ccuggguaggcacuaggag

SEQ ID NO: 2404365 - RNA, 19 nt, Artificial Sequence
  Description of Artificial Sequence: Synthetic oligonucleotide
uugaaauggucagguucaa

SEQ ID NO: 2404366 - RNA, 19 nt, Artificial Sequence
  Description of Artificial Sequence: Synthetic oligonucleotide
uugaggguuuggguuucca

SEQ ID NO: 2404367 - RNA, 19 nt, Artificial Sequence
  Description of Artificial Sequence: Synthetic oligonucleotide
cacuggugaggguuauguc

SEQ ID NO: 2404368 - RNA, 19 nt, Artificial Sequence
  Description of Artificial Sequence: Synthetic oligonucleotide
gaggagccugcccaggaua

SEQ ID NO: 2404369 - RNA, 19 nt, Artificial Sequence
  Description of Artificial Sequence: Synthetic oligonucleotide
acugugcccaugauuguaa

SEQ ID NO: 2404370 - RNA, 19 nt, Artificial Sequence
  Description of Artificial Sequence: Synthetic oligonucleotide
ucccuuccccaguuguuau

SEQ ID NO: 2404371 - RNA, 19 nt, Artificial Sequence
  Description of Artificial Sequence: Synthetic oligonucleotide
gggcaguugagccagggua

SEQ ID NO: 2404372 - RNA, 19 nt, Artificial Sequence
  Description of Artificial Sequence: Synthetic oligonucleotide
gaggagccugcccagggua

SEQ ID NO: 2404373 - RNA, 19 nt, Artificial Sequence
  Description of Artificial Sequence: Synthetic oligonucleotide
gguuaugucaccagaaauu

SEQ ID NO: 2404374 - RNA, 19 nt, Artificial Sequence
  Description of Artificial Sequence: Synthetic oligonucleotide
accgucugccauuuuccuu

SEQ ID NO: 2404375 - RNA, 19 nt, Artificial Sequence
  Description of Artificial Sequence: Synthetic oligonucleotide
cugccacuuucaaauggga

SEQ ID NO: 2404376 - RNA, 19 nt, Artificial Sequence
  Description of Artificial Sequence: Synthetic oligonucleotide
ucgaggcaugacuccucca

SEQ ID NO: 2404377 - RNA, 19 nt, Artificial Sequence
  Description of Artificial Sequence: Synthetic oligonucleotide
gagcacugggguaggcccc

SEQ ID NO: 2404378 - RNA, 19 nt, Artificial Sequence
  Description of Artificial Sequence: Synthetic oligonucleotide
caggacuuguauuuugaau

SEQ ID NO: 2404379 - RNA, 19 nt, Artificial Sequence
  Description of Artificial Sequence: Synthetic oligonucleotide
cagcauucgaggcaugacu

SEQ ID NO: 2404380 - RNA, 19 nt, Artificial Sequence
  Description of Artificial Sequence: Synthetic oligonucleotide
ccagguugcccugggaagg

SEQ ID NO: 2404381 - RNA, 19 nt, Artificial Sequence
  Description of Artificial Sequence: Synthetic oligonucleotide
caguugagccaggguaagc

SEQ ID NO: 2404382 - RNA, 19 nt, Artificial Sequence
  Description of Artificial Sequence: Synthetic oligonucleotide
aggguaagcuccgggugca

SEQ ID NO: 2404383 - RNA, 19 nt, Artificial Sequence
  Description of Artificial Sequence: Synthetic oligonucleotide
ggauaagccccuggaggag

SEQ ID NO: 2404384 - RNA, 19 nt, Artificial Sequence
  Description of Artificial Sequence: Synthetic oligonucleotide
guaugcaccaggccauccu

SEQ ID NO: 2404385 - RNA, 19 nt, Artificial Sequence
  Description of Artificial Sequence: Synthetic oligonucleotide
ccuguuugcauugggcuuc

SEQ ID NO: 2404386 - RNA, 19 nt, Artificial Sequence
  Description of Artificial Sequence: Synthetic oligonucleotide
ggugggugcagcacuggug

SEQ ID NO: 2404387 - RNA, 19 nt, Artificial Sequence
  Description of Artificial Sequence: Synthetic oligonucleotide
ccagcuaaggcaucauuaa

SEQ ID NO: 2404388 - RNA, 19 nt, Artificial Sequence
  Description of Artificial Sequence: Synthetic oligonucleotide
cagaaccagcuaaggcauc

SEQ ID NO: 2404389 - RNA, 19 nt, Artificial Sequence
  Description of Artificial Sequence: Synthetic oligonucleotide
gguguugcacacaaugacu

SEQ ID NO: 2404390 - RNA, 19 nt, Artificial Sequence
  Description of Artificial Sequence: Synthetic oligonucleotide
ccuuggucagugcuccgcc

SEQ ID NO: 2404391 - RNA, 19 nt, Artificial Sequence
  Description of Artificial Sequence: Synthetic oligonucleotide
ggguuaaaguggaaggcaa

SEQ ID NO: 2404392 - RNA, 19 nt, Artificial Sequence
  Description of Artificial Sequence: Synthetic oligonucleotide
cgccauaggggccagcagc

SEQ ID NO: 2404393 - RNA, 19 nt, Artificial Sequence
  Description of Artificial Sequence: Synthetic oligonucleotide
guguugcacacaaugacuu

SEQ ID NO: 2404394 - RNA, 19 nt, Artificial Sequence
  Description of Artificial Sequence: Synthetic oligonucleotide
cacugggguaggccccagg

SEQ ID NO: 2404395 - RNA, 19 nt, Artificial Sequence
  Description of Artificial Sequence: Synthetic oligonucleotide
ggaugccuuacaagaagga

SEQ ID NO: 2404396 - RNA, 19 nt, Artificial Sequence
  Description of Artificial Sequence: Synthetic oligonucleotide
gguaugcaccaggccaucc

SEQ ID NO: 2404397 - RNA, 19 nt, Artificial Sequence
  Description of Artificial Sequence: Synthetic oligonucleotide
ggcaugacuccuccagcca

SEQ ID NO: 2404398 - RNA, 19 nt, Artificial Sequence
  Description of Artificial Sequence: Synthetic oligonucleotide
ugccccagguugguaugca

SEQ ID NO: 2404399 - RNA, 19 nt, Artificial Sequence
  Description of Artificial Sequence: Synthetic oligonucleotide
gcaguugggccuggguagg

SEQ ID NO: 2404400 - RNA, 19 nt, Artificial Sequence
  Description of Artificial Sequence: Synthetic oligonucleotide
ggucagguucaaccaggac

SEQ ID NO: 2404401 - RNA, 19 nt, Artificial Sequence
  Description of Artificial Sequence: Synthetic oligonucleotide
gccugcccaggauaagccc

SEQ ID NO: 2404402 - RNA, 19 nt, Artificial Sequence
  Description of Artificial Sequence: Synthetic oligonucleotide
guaagcuccgggugcaguu

SEQ ID NO: 2404403 - RNA, 19 nt, Artificial Sequence
  Description of Artificial Sequence: Synthetic oligonucleotide
ugguaugcaccaggccauc

SEQ ID NO: 2404404 - RNA, 19 nt, Artificial Sequence
  Description of Artificial Sequence: Synthetic oligonucleotide
gcaugacuccuccagccaa

SEQ ID NO: 2404405 - RNA, 19 nt, Artificial Sequence
  Description of Artificial Sequence: Synthetic oligonucleotide
ggcaguugagccaggguaa

SEQ ID NO: 2404406 - RNA, 19 nt, Artificial Sequence
  Description of Artificial Sequence: Synthetic oligonucleotide
cauucgaggcaugacuccu

SEQ ID NO: 2404407 - RNA, 19 nt, Artificial Sequence
  Description of Artificial Sequence: Synthetic oligonucleotide
cuuauagggcacugucaau

SEQ ID NO: 2404408 - RNA, 19 nt, Artificial Sequence
  Description of Artificial Sequence: Synthetic oligonucleotide
agcacugggguaggcccca

SEQ ID NO: 2404409 - RNA, 19 nt, Artificial Sequence
  Description of Artificial Sequence: Synthetic oligonucleotide
ggagccugcccaggguagg

SEQ ID NO: 2404410 - RNA, 19 nt, Artificial Sequence
  Description of Artificial Sequence: Synthetic oligonucleotide
gauaggccccaggagcacu

SEQ ID NO: 2404411 - RNA, 19 nt, Artificial Sequence
  Description of Artificial Sequence: Synthetic oligonucleotide
aggcaucauuaagcgaaaa

SEQ ID NO: 2404412 - RNA, 19 nt, Artificial Sequence
  Description of Artificial Sequence: Synthetic oligonucleotide
uaggccccaggugcuccag

SEQ ID NO: 2404413 - RNA, 19 nt, Artificial Sequence
  Description of Artificial Sequence: Synthetic oligonucleotide
ccugagguucuucauccga

SEQ ID NO: 2404414 - RNA, 19 nt, Artificial Sequence
  Description of Artificial Sequence: Synthetic oligonucleotide
ggcagcuuauagggcacug

SEQ ID NO: 2404415 - RNA, 19 nt, Artificial Sequence
  Description of Artificial Sequence: Synthetic oligonucleotide
gccugcccaggguaggccc

SEQ ID NO: 2404416 - RNA, 19 nt, Artificial Sequence
  Description of Artificial Sequence: Synthetic oligonucleotide
caguugggccaggguaagc

SEQ ID NO: 2404417 - RNA, 19 nt, Artificial Sequence
  Description of Artificial Sequence: Synthetic oligonucleotide
cccugagguucuucauccg

SEQ ID NO: 2404418 - RNA, 19 nt, Artificial Sequence
  Description of Artificial Sequence: Synthetic oligonucleotide
aggacccuucuggauuaga

SEQ ID NO: 2404419 - RNA, 19 nt, Artificial Sequence
  Description of Artificial Sequence: Synthetic oligonucleotide
ggauaggaagccccugggu

SEQ ID NO: 2404420 - RNA, 19 nt, Artificial Sequence
  Description of Artificial Sequence: Synthetic oligonucleotide
uaagccccuggaggagccu

SEQ ID NO: 2404421 - RNA, 19 nt, Artificial Sequence
  Description of Artificial Sequence: Synthetic oligonucleotide
caguugggccuggguaggc

SEQ ID NO: 2404422 - RNA, 19 nt, Artificial Sequence
  Description of Artificial Sequence: Synthetic oligonucleotide
aggggccagcagcaggaua

SEQ ID NO: 2404423 - RNA, 19 nt, Artificial Sequence
  Description of Artificial Sequence: Synthetic oligonucleotide
gguaggccccaggauagga

SEQ ID NO: 2404424 - RNA, 19 nt, Artificial Sequence
  Description of Artificial Sequence: Synthetic oligonucleotide
gccauaggggccagcagca

SEQ ID NO: 2404425 - RNA, 19 nt, Artificial Sequence
  Description of Artificial Sequence: Synthetic oligonucleotide
gguucuucauccgaugguu

SEQ ID NO: 2404426 - RNA, 19 nt, Artificial Sequence
  Description of Artificial Sequence: Synthetic oligonucleotide
cauugaagcgaggguuaaa

SEQ ID NO: 2404427 - RNA, 19 nt, Artificial Sequence
  Description of Artificial Sequence: Synthetic oligonucleotide
ugcccaggauaagccccug

SEQ ID NO: 2404428 - RNA, 19 nt, Artificial Sequence
  Description of Artificial Sequence: Synthetic oligonucleotide
cgaugguuguacugcagca

SEQ ID NO: 2404429 - RNA, 19 nt, Artificial Sequence
  Description of Artificial Sequence: Synthetic oligonucleotide
cagguucaaccaggacuug

SEQ ID NO: 2404430 - RNA, 19 nt, Artificial Sequence
  Description of Artificial Sequence: Synthetic oligonucleotide
gcagcaagugaacaucguu

SEQ ID NO: 2404431 - RNA, 19 nt, Artificial Sequence
  Description of Artificial Sequence: Synthetic oligonucleotide
ugauuucccugagguucuu

SEQ ID NO: 2404432 - RNA, 19 nt, Artificial Sequence
  Description of Artificial Sequence: Synthetic oligonucleotide
ggcgccauaggggccagca

SEQ ID NO: 2404433 - RNA, 19 nt, Artificial Sequence
  Description of Artificial Sequence: Synthetic oligonucleotide
agguugcccugggaaggcu

SEQ ID NO: 2404434 - RNA, 19 nt, Artificial Sequence
  Description of Artificial Sequence: Synthetic oligonucleotide
gggugcaguugggccaggg

SEQ ID NO: 2404435 - RNA, 19 nt, Artificial Sequence
  Description of Artificial Sequence: Synthetic oligonucleotide
gguugauuucccugagguu

SEQ ID NO: 2404436 - RNA, 19 nt, Artificial Sequence
  Description of Artificial Sequence: Synthetic oligonucleotide
gguuaaaguggaaggcaau

SEQ ID NO: 2404437 - RNA, 19 nt, Artificial Sequence
  Description of Artificial Sequence: Synthetic oligonucleotide
gccuggguaggcacuagga

SEQ ID NO: 2404438 - RNA, 19 nt, Artificial Sequence
  Description of Artificial Sequence: Synthetic oligonucleotide
ggagccugcccaggauaag

SEQ ID NO: 2404439 - RNA, 19 nt, Artificial Sequence
  Description of Artificial Sequence: Synthetic oligonucleotide
gguugcccugggaaggcuc

SEQ ID NO: 2404440 - RNA, 19 nt, Artificial Sequence
  Description of Artificial Sequence: Synthetic oligonucleotide
ggauaggccccaggagcac

SEQ ID NO: 2404441 - RNA, 19 nt, Artificial Sequence
  Description of Artificial Sequence: Synthetic oligonucleotide
ccaggauaggaagccccug

SEQ ID NO: 2404442 - RNA, 19 nt, Artificial Sequence
  Description of Artificial Sequence: Synthetic oligonucleotide
gaaccagcuaaggcaucau

SEQ ID NO: 2404443 - RNA, 19 nt, Artificial Sequence
  Description of Artificial Sequence: Synthetic oligonucleotide
ggugcaguugggccagggu

SEQ ID NO: 2404444 - RNA, 19 nt, Artificial Sequence
  Description of Artificial Sequence: Synthetic oligonucleotide
gccccagguugguaugcac

SEQ ID NO: 2404445 - RNA, 19 nt, Artificial Sequence
  Description of Artificial Sequence: Synthetic oligonucleotide
ggacccuucuggauuagau

SEQ ID NO: 2404446 - RNA, 19 nt, Artificial Sequence
  Description of Artificial Sequence: Synthetic oligonucleotide
cuucccuuccccaguuguu

SEQ ID NO: 2404447 - RNA, 19 nt, Artificial Sequence
  Description of Artificial Sequence: Synthetic oligonucleotide
gccauccuugaggguuugg

SEQ ID NO: 2404448 - RNA, 19 nt, Artificial Sequence
  Description of Artificial Sequence: Synthetic oligonucleotide
caucguugacugcaaccuu

SEQ ID NO: 2404449 - RNA, 19 nt, Artificial Sequence
  Description of Artificial Sequence: Synthetic oligonucleotide
gggaaagcugacugucuuu

SEQ ID NO: 2404450 - RNA, 19 nt, Artificial Sequence
  Description of Artificial Sequence: Synthetic oligonucleotide
ccauaggggccagcagcag

SEQ ID NO: 2404451 - RNA, 19 nt, Artificial Sequence
  Description of Artificial Sequence: Synthetic oligonucleotide
gcagcuuauagggcacugu

SEQ ID NO: 2404452 - RNA, 19 nt, Artificial Sequence
  Description of Artificial Sequence: Synthetic oligonucleotide
gguaagcuccgggugcagu

SEQ ID NO: 2404453 - RNA, 19 nt, Artificial Sequence
  Description of Artificial Sequence: Synthetic oligonucleotide
ggauuagaucauggugggu

SEQ ID NO: 2404454 - RNA, 19 nt, Artificial Sequence
  Description of Artificial Sequence: Synthetic oligonucleotide
gcuccagguugcccuggga

SEQ ID NO: 2404455 - RNA, 19 nt, Artificial Sequence
  Description of Artificial Sequence: Synthetic oligonucleotide
cagccaagggcagcuuaua

SEQ ID NO: 2404456 - RNA, 19 nt, Artificial Sequence
  Description of Artificial Sequence: Synthetic oligonucleotide
caaccaggacuuguauuuu

SEQ ID NO: 2404457 - RNA, 19 nt, Artificial Sequence
  Description of Artificial Sequence: Synthetic oligonucleotide
gggcacugucaaugcucca

SEQ ID NO: 2404458 - RNA, 19 nt, Artificial Sequence
  Description of Artificial Sequence: Synthetic oligonucleotide
gucugccauuuuccuuggu

SEQ ID NO: 2404459 - RNA, 19 nt, Artificial Sequence
  Description of Artificial Sequence: Synthetic oligonucleotide
cccaggauaggaagccccu

SEQ ID NO: 2404460 - RNA, 19 nt, Artificial Sequence
  Description of Artificial Sequence: Synthetic oligonucleotide
ccagccaagggcagcuuau

SEQ ID NO: 2404461 - RNA, 19 nt, Artificial Sequence
  Description of Artificial Sequence: Synthetic oligonucleotide
gcacugggguaggccccag

SEQ ID NO: 2404462 - RNA, 19 nt, Artificial Sequence
  Description of Artificial Sequence: Synthetic oligonucleotide
cguugacugcaaccuugaa

SEQ ID NO: 2404463 - RNA, 19 nt, Artificial Sequence
  Description of Artificial Sequence: Synthetic oligonucleotide
cccaguuguuauccuguuu

SEQ ID NO: 2404464 - RNA, 19 nt, Artificial Sequence
  Description of Artificial Sequence: Synthetic oligonucleotide
cagcacuggugaggguuau

SEQ ID NO: 2404465 - RNA, 19 nt, Artificial Sequence
  Description of Artificial Sequence: Synthetic oligonucleotide
cuccgcccgcugcuccgcu

SEQ ID NO: 2404466 - RNA, 19 nt, Artificial Sequence
  Description of Artificial Sequence: Synthetic oligonucleotide
gggcgccauaggggccagc

SEQ ID NO: 2404467 - RNA, 19 nt, Artificial Sequence
  Description of Artificial Sequence: Synthetic oligonucleotide
cuccagccaagggcagcuu

SEQ ID NO: 2404468 - RNA, 19 nt, Artificial Sequence
  Description of Artificial Sequence: Synthetic oligonucleotide
cgggugcaguugggccagg

SEQ ID NO: 2404469 - RNA, 19 nt, Artificial Sequence
  Description of Artificial Sequence: Synthetic oligonucleotide
aauuuucugguucucaggg

SEQ ID NO: 2404470 - RNA, 19 nt, Artificial Sequence
  Description of Artificial Sequence: Synthetic oligonucleotide
ucuccaauggcaaagaugu

SEQ ID NO: 2404471 - RNA, 19 nt, Artificial Sequence
  Description of Artificial Sequence: Synthetic oligonucleotide
augguaaaccuccacaugc

SEQ ID NO: 2404472 - RNA, 19 nt, Artificial Sequence
  Description of Artificial Sequence: Synthetic oligonucleotide
auugcuguaauucauuaag

SEQ ID NO: 2404473 - RNA, 19 nt, Artificial Sequence
  Description of Artificial Sequence: Synthetic oligonucleotide
aaccucagcauccagucac

SEQ ID NO: 2404474 - RNA, 19 nt, Artificial Sequence
  Description of Artificial Sequence: Synthetic oligonucleotide
cuugacagaggcauggucc

SEQ ID NO: 2404475 - RNA, 19 nt, Artificial Sequence
  Description of Artificial Sequence: Synthetic oligonucleotide
ucaccugugcauaugacgc

SEQ ID NO: 2404476 - RNA, 19 nt, Artificial Sequence
  Description of Artificial Sequence: Synthetic oligonucleotide
uggcuuauaguaugcaugg

SEQ ID NO: 2404477 - RNA, 19 nt, Artificial Sequence
  Description of Artificial Sequence: Synthetic oligonucleotide
ucaggguugacauucacac

SEQ ID NO: 2404478 - RNA, 19 nt, Artificial Sequence
  Description of Artificial Sequence: Synthetic oligonucleotide
aguuucaccaccucuucgg

SEQ ID NO: 2404479 - RNA, 19 nt, Artificial Sequence
  Description of Artificial Sequence: Synthetic oligonucleotide
ugggugucagcucaggccg

SEQ ID NO: 2404480 - RNA, 19 nt, Artificial Sequence
  Description of Artificial Sequence: Synthetic oligonucleotide
uugcuguaauucauuaagg

SEQ ID NO: 2404481 - RNA, 19 nt, Artificial Sequence
  Description of Artificial Sequence: Synthetic oligonucleotide
gucacugugaauuccagug

SEQ ID NO: 2404482 - RNA, 19 nt, Artificial Sequence
  Description of Artificial Sequence: Synthetic oligonucleotide
ugggaguuuuggaugaggg

SEQ ID NO: 2404483 - RNA, 19 nt, Artificial Sequence
  Description of Artificial Sequence: Synthetic oligonucleotide
ucuggaacucgcccuaugg

SEQ ID NO: 2404484 - RNA, 19 nt, Artificial Sequence
  Description of Artificial Sequence: Synthetic oligonucleotide
aaaggugccuguguccucc

SEQ ID NO: 2404485 - RNA, 19 nt, Artificial Sequence
  Description of Artificial Sequence: Synthetic oligonucleotide
auccacgacaauuuucugg

SEQ ID NO: 2404486 - RNA, 19 nt, Artificial Sequence
  Description of Artificial Sequence: Synthetic oligonucleotide
aucaaaggugccugugucc

SEQ ID NO: 2404487 - RNA, 19 nt, Artificial Sequence
  Description of Artificial Sequence: Synthetic oligonucleotide
cagagcaaauccuugagug

SEQ ID NO: 2404488 - RNA, 19 nt, Artificial Sequence
  Description of Artificial Sequence: Synthetic oligonucleotide
aacaucuccaauggcaaag

SEQ ID NO: 2404489 - RNA, 19 nt, Artificial Sequence
  Description of Artificial Sequence: Synthetic oligonucleotide
gagaugugcaguuucacca

SEQ ID NO: 2404490 - RNA, 19 nt, Artificial Sequence
  Description of Artificial Sequence: Synthetic oligonucleotide
ugugcccucagcuuggcag

SEQ ID NO: 2404491 - RNA, 19 nt, Artificial Sequence
  Description of Artificial Sequence: Synthetic oligonucleotide
auuaaggcugaggauuucc

SEQ ID NO: 2404492 - RNA, 19 nt, Artificial Sequence
  Description of Artificial Sequence: Synthetic oligonucleotide
auuccaguggcuuauagua

SEQ ID NO: 2404493 - RNA, 19 nt, Artificial Sequence
  Description of Artificial Sequence: Synthetic oligonucleotide
uccacgacaauuuucuggu

SEQ ID NO: 2404494 - RNA, 19 nt, Artificial Sequence
  Description of Artificial Sequence: Synthetic oligonucleotide
ugcaugguaaaccuccaca

SEQ ID NO: 2404495 - RNA, 19 nt, Artificial Sequence
  Description of Artificial Sequence: Synthetic oligonucleotide
uaauucauuaaggcugagg

SEQ ID NO: 2404496 - RNA, 19 nt, Artificial Sequence
  Description of Artificial Sequence: Synthetic oligonucleotide
cagacagucccacacagcc

SEQ ID NO: 2404497 - RNA, 19 nt, Artificial Sequence
  Description of Artificial Sequence: Synthetic oligonucleotide
uagauuucugguuucugga

SEQ ID NO: 2404498 - RNA, 19 nt, Artificial Sequence
  Description of Artificial Sequence: Synthetic oligonucleotide
aucccugcaggacacacgg

SEQ ID NO: 2404499 - RNA, 19 nt, Artificial Sequence
  Description of Artificial Sequence: Synthetic oligonucleotide
ucuggggucucugaggagg

SEQ ID NO: 2404500 - RNA, 19 nt, Artificial Sequence
  Description of Artificial Sequence: Synthetic oligonucleotide
agauuuagauuucugguuu

SEQ ID NO: 2404501 - RNA, 19 nt, Artificial Sequence
  Description of Artificial Sequence: Synthetic oligonucleotide
uuaaggcugaggauuuccc

SEQ ID NO: 2404502 - RNA, 19 nt, Artificial Sequence
  Description of Artificial Sequence: Synthetic oligonucleotide
uaugacgccccacauuuga

SEQ ID NO: 2404503 - RNA, 19 nt, Artificial Sequence
  Description of Artificial Sequence: Synthetic oligonucleotide
uaguaugcaugguaaaccu

SEQ ID NO: 2404504 - RNA, 19 nt, Artificial Sequence
  Description of Artificial Sequence: Synthetic oligonucleotide
uggaacucgcccuauggcc

SEQ ID NO: 2404505 - RNA, 19 nt, Artificial Sequence
  Description of Artificial Sequence: Synthetic oligonucleotide
agaugugcaguuucaccac

SEQ ID NO: 2404506 - RNA, 19 nt, Artificial Sequence
  Description of Artificial Sequence: Synthetic oligonucleotide
uggugacuuaaccucagca

SEQ ID NO: 2404507 - RNA, 19 nt, Artificial Sequence
  Description of Artificial Sequence: Synthetic oligonucleotide
gauggaucccuacugucug

SEQ ID NO: 2404508 - RNA, 19 nt, Artificial Sequence
  Description of Artificial Sequence: Synthetic oligonucleotide
uugagugacuucuccagca

SEQ ID NO: 2404509 - RNA, 19 nt, Artificial Sequence
  Description of Artificial Sequence: Synthetic oligonucleotide
ucccacacagccauacucc

SEQ ID NO: 2404510 - RNA, 19 nt, Artificial Sequence
  Description of Artificial Sequence: Synthetic oligonucleotide
uaucaaaggugccuguguc

SEQ ID NO: 2404511 - RNA, 19 nt, Artificial Sequence
  Description of Artificial Sequence: Synthetic oligonucleotide
cuggucacauggcauagcg

SEQ ID NO: 2404512 - RNA, 19 nt, Artificial Sequence
  Description of Artificial Sequence: Synthetic oligonucleotide
gacgccccacauuugaucc

SEQ ID NO: 2404513 - RNA, 19 nt, Artificial Sequence
  Description of Artificial Sequence: Synthetic oligonucleotide
ggucacauggcauagcgug

SEQ ID NO: 2404514 - RNA, 19 nt, Artificial Sequence
  Description of Artificial Sequence: Synthetic oligonucleotide
agucugggaacauugcugu

SEQ ID NO: 2404515 - RNA, 19 nt, Artificial Sequence
  Description of Artificial Sequence: Synthetic oligonucleotide
auagcgugugcccucagcu

SEQ ID NO: 2404516 - RNA, 19 nt, Artificial Sequence
  Description of Artificial Sequence: Synthetic oligonucleotide
agggauggugacuuaaccu

SEQ ID NO: 2404517 - RNA, 19 nt, Artificial Sequence
  Description of Artificial Sequence: Synthetic oligonucleotide
gugacuuaaccucagcauc

SEQ ID NO: 2404518 - RNA, 19 nt, Artificial Sequence
  Description of Artificial Sequence: Synthetic oligonucleotide
acgacaauuuucugguucu

SEQ ID NO: 2404519 - RNA, 19 nt, Artificial Sequence
  Description of Artificial Sequence: Synthetic oligonucleotide
cacugugaauuccaguggc

SEQ ID NO: 2404520 - RNA, 19 nt, Artificial Sequence
  Description of Artificial Sequence: Synthetic oligonucleotide
gauuuagauuucugguuuc

SEQ ID NO: 2404521 - RNA, 19 nt, Artificial Sequence
  Description of Artificial Sequence: Synthetic oligonucleotide
gagcaaauccuugagugac

SEQ ID NO: 2404522 - RNA, 19 nt, Artificial Sequence
  Description of Artificial Sequence: Synthetic oligonucleotide
ucccucaagcacaccaucc

SEQ ID NO: 2404523 - RNA, 19 nt, Artificial Sequence
  Description of Artificial Sequence: Synthetic oligonucleotide
ugacauucacaccagccuu

SEQ ID NO: 2404524 - RNA, 19 nt, Artificial Sequence
  Description of Artificial Sequence: Synthetic oligonucleotide
ugcaguuucaccaccucuu

SEQ ID NO: 2404525 - RNA, 19 nt, Artificial Sequence
  Description of Artificial Sequence: Synthetic oligonucleotide
agagcaaauccuugaguga

SEQ ID NO: 2404526 - RNA, 19 nt, Artificial Sequence
  Description of Artificial Sequence: Synthetic oligonucleotide
uacuccaguggugugaaga

SEQ ID NO: 2404527 - RNA, 19 nt, Artificial Sequence
  Description of Artificial Sequence: Synthetic oligonucleotide
cugaggaggcagcaaagcc

SEQ ID NO: 2404528 - RNA, 19 nt, Artificial Sequence
  Description of Artificial Sequence: Synthetic oligonucleotide
uuggagaugugcaguuuca

SEQ ID NO: 2404529 - RNA, 19 nt, Artificial Sequence
  Description of Artificial Sequence: Synthetic oligonucleotide
aucccuacugucugcauca

SEQ ID NO: 2404530 - RNA, 19 nt, Artificial Sequence
  Description of Artificial Sequence: Synthetic oligonucleotide
gaugugcaguuucaccacc

SEQ ID NO: 2404531 - RNA, 19 nt, Artificial Sequence
  Description of Artificial Sequence: Synthetic oligonucleotide
accugugcauaugacgccc

SEQ ID NO: 2404532 - RNA, 19 nt, Artificial Sequence
  Description of Artificial Sequence: Synthetic oligonucleotide
auggugacuuaaccucagc

SEQ ID NO: 2404533 - RNA, 19 nt, Artificial Sequence
  Description of Artificial Sequence: Synthetic oligonucleotide
uaugcaugguaaaccucca

SEQ ID NO: 2404534 - RNA, 19 nt, Artificial Sequence
  Description of Artificial Sequence: Synthetic oligonucleotide
cuugagugacuucuccagc

SEQ ID NO: 2404535 - RNA, 19 nt, Artificial Sequence
  Description of Artificial Sequence: Synthetic oligonucleotide
ugguaaaccuccacaugcu

SEQ ID NO: 2404536 - RNA, 19 nt, Artificial Sequence
  Description of Artificial Sequence: Synthetic oligonucleotide
cucagacagucccacacag

SEQ ID NO: 2404537 - RNA, 19 nt, Artificial Sequence
  Description of Artificial Sequence: Synthetic oligonucleotide
uccgucacugugaauucca

SEQ ID NO: 2404538 - RNA, 19 nt, Artificial Sequence
  Description of Artificial Sequence: Synthetic oligonucleotide
cuuggagaugugcaguuuc

SEQ ID NO: 2404539 - RNA, 19 nt, Artificial Sequence
  Description of Artificial Sequence: Synthetic oligonucleotide
auggaucccuacugucugc

SEQ ID NO: 2404540 - RNA, 19 nt, Artificial Sequence
  Description of Artificial Sequence: Synthetic oligonucleotide
cacgacaauuuucugguuc

SEQ ID NO: 2404541 - RNA, 19 nt, Artificial Sequence
  Description of Artificial Sequence: Synthetic oligonucleotide
ucccaaagagccucugagc

SEQ ID NO: 2404542 - RNA, 19 nt, Artificial Sequence
  Description of Artificial Sequence: Synthetic oligonucleotide
agugacuucuccagcauug

SEQ ID NO: 2404543 - RNA, 19 nt, Artificial Sequence
  Description of Artificial Sequence: Synthetic oligonucleotide
aguggcuuauaguaugcau

SEQ ID NO: 2404544 - RNA, 19 nt, Artificial Sequence
  Description of Artificial Sequence: Synthetic oligonucleotide
acauggcauagcgugugcc

SEQ ID NO: 2404545 - RNA, 19 nt, Artificial Sequence
  Description of Artificial Sequence: Synthetic oligonucleotide
caguugggaguuuuggaug

SEQ ID NO: 2404546 - RNA, 19 nt, Artificial Sequence
  Description of Artificial Sequence: Synthetic oligonucleotide
ugugaauuccaguggcuua

SEQ ID NO: 2404547 - RNA, 19 nt, Artificial Sequence
  Description of Artificial Sequence: Synthetic oligonucleotide
ugcuccuggccauggagag

SEQ ID NO: 2404548 - RNA, 19 nt, Artificial Sequence
  Description of Artificial Sequence: Synthetic oligonucleotide
uucugguuucuggaacucg

SEQ ID NO: 2404549 - RNA, 19 nt, Artificial Sequence
  Description of Artificial Sequence: Synthetic oligonucleotide
ggaacauugcuguaauuca

SEQ ID NO: 2404550 - RNA, 19 nt, Artificial Sequence
  Description of Artificial Sequence: Synthetic oligonucleotide
agcgcuuggagaugugcag

SEQ ID NO: 2404551 - RNA, 19 nt, Artificial Sequence
  Description of Artificial Sequence: Synthetic oligonucleotide
ucugggaacauugcuguaa

SEQ ID NO: 2404552 - RNA, 19 nt, Artificial Sequence
  Description of Artificial Sequence: Synthetic oligonucleotide
uugggaguuuuggaugagg

SEQ ID NO: 2404553 - RNA, 19 nt, Artificial Sequence
  Description of Artificial Sequence: Synthetic oligonucleotide
agcgugugcccucagcuug

SEQ ID NO: 2404554 - RNA, 19 nt, Artificial Sequence
  Description of Artificial Sequence: Synthetic oligonucleotide
gagagccacagccuccucc

SEQ ID NO: 2404555 - RNA, 19 nt, Artificial Sequence
  Description of Artificial Sequence: Synthetic oligonucleotide
ugggauggaucccuacugu

SEQ ID NO: 2404556 - RNA, 19 nt, Artificial Sequence
  Description of Artificial Sequence: Synthetic oligonucleotide
aaggaagugcaggcccagc

SEQ ID NO: 2404557 - RNA, 19 nt, Artificial Sequence
  Description of Artificial Sequence: Synthetic oligonucleotide
cacauuugauccccagagc

SEQ ID NO: 2404558 - RNA, 19 nt, Artificial Sequence
  Description of Artificial Sequence: Synthetic oligonucleotide
aucccgauccgucacugug

SEQ ID NO: 2404559 - RNA, 19 nt, Artificial Sequence
  Description of Artificial Sequence: Synthetic oligonucleotide
ccacauuugauccccagag

SEQ ID NO: 2404560 - RNA, 19 nt, Artificial Sequence
  Description of Artificial Sequence: Synthetic oligonucleotide
auuuucugguucucagggu

SEQ ID NO: 2404561 - RNA, 19 nt, Artificial Sequence
  Description of Artificial Sequence: Synthetic oligonucleotide
ugaggagccuuguacuggu

SEQ ID NO: 2404562 - RNA, 19 nt, Artificial Sequence
  Description of Artificial Sequence: Synthetic oligonucleotide
gaucccuacugucugcauc

SEQ ID NO: 2404563 - RNA, 19 nt, Artificial Sequence
  Description of Artificial Sequence: Synthetic oligonucleotide
acagaggcaugguccuccc

SEQ ID NO: 2404564 - RNA, 19 nt, Artificial Sequence
  Description of Artificial Sequence: Synthetic oligonucleotide
gugggauggaucccuacug

SEQ ID NO: 2404565 - RNA, 19 nt, Artificial Sequence
  Description of Artificial Sequence: Synthetic oligonucleotide
caauggcaaagaugugggg

SEQ ID NO: 2404566 - RNA, 19 nt, Artificial Sequence
  Description of Artificial Sequence: Synthetic oligonucleotide
aguaucaaaggugccugug

SEQ ID NO: 2404567 - RNA, 19 nt, Artificial Sequence
  Description of Artificial Sequence: Synthetic oligonucleotide
uuggggccaaggaagugca

SEQ ID NO: 2404568 - RNA, 19 nt, Artificial Sequence
  Description of Artificial Sequence: Synthetic oligonucleotide
caugcuccuggccauggag

SEQ ID NO: 2404569 - RNA, 19 nt, Artificial Sequence
  Description of Artificial Sequence: Synthetic oligonucleotide
cuggaacucgcccuauggc

SEQ ID NO: 2404570 - RNA, 19 nt, Artificial Sequence
  Description of Artificial Sequence: Synthetic oligonucleotide
ucacauggcauagcgugug

SEQ ID NO: 2404571 - RNA, 19 nt, Artificial Sequence
  Description of Artificial Sequence: Synthetic oligonucleotide
aguaugcaugguaaaccuc

SEQ ID NO: 2404572 - RNA, 19 nt, Artificial Sequence
  Description of Artificial Sequence: Synthetic oligonucleotide
auuuagauuucugguuucu

SEQ ID NO: 2404573 - RNA, 19 nt, Artificial Sequence
  Description of Artificial Sequence: Synthetic oligonucleotide
accaguugggaguuuugga

SEQ ID NO: 2404574 - RNA, 19 nt, Artificial Sequence
  Description of Artificial Sequence: Synthetic oligonucleotide
gggaacauugcuguaauuc

SEQ ID NO: 2404575 - RNA, 19 nt, Artificial Sequence
  Description of Artificial Sequence: Synthetic oligonucleotide
auuugauccccagagcaaa

SEQ ID NO: 2404576 - RNA, 19 nt, Artificial Sequence
  Description of Artificial Sequence: Synthetic oligonucleotide
gcaguugaccaguugggag

SEQ ID NO: 2404577 - RNA, 19 nt, Artificial Sequence
  Description of Artificial Sequence: Synthetic oligonucleotide
ugcauaugacgccccacau

SEQ ID NO: 2404578 - RNA, 19 nt, Artificial Sequence
  Description of Artificial Sequence: Synthetic oligonucleotide
ugagugacuucuccagcau

SEQ ID NO: 2404579 - RNA, 19 nt, Artificial Sequence
  Description of Artificial Sequence: Synthetic oligonucleotide
uuccaguggcuuauaguau

SEQ ID NO: 2404580 - RNA, 19 nt, Artificial Sequence
  Description of Artificial Sequence: Synthetic oligonucleotide
auccgucacugugaauucc

SEQ ID NO: 2404581 - RNA, 19 nt, Artificial Sequence
  Description of Artificial Sequence: Synthetic oligonucleotide
cucugaggaggcagcaaag

SEQ ID NO: 2404582 - RNA, 19 nt, Artificial Sequence
  Description of Artificial Sequence: Synthetic oligonucleotide
uuugauccccagagcaaau

SEQ ID NO: 2404583 - RNA, 19 nt, Artificial Sequence
  Description of Artificial Sequence: Synthetic oligonucleotide
gauagcugugggugucagc

SEQ ID NO: 2404584 - RNA, 19 nt, Artificial Sequence
  Description of Artificial Sequence: Synthetic oligonucleotide
cacaccaucccgauccguc

SEQ ID NO: 2404585 - RNA, 19 nt, Artificial Sequence
  Description of Artificial Sequence: Synthetic oligonucleotide
cuucggagcaggugggaug

SEQ ID NO: 2404586 - RNA, 19 nt, Artificial Sequence
  Description of Artificial Sequence: Synthetic oligonucleotide
uccauccacaucugggguc

SEQ ID NO: 2404587 - RNA, 19 nt, Artificial Sequence
  Description of Artificial Sequence: Synthetic oligonucleotide
ugaccaguugggaguuuug

SEQ ID NO: 2404588 - RNA, 19 nt, Artificial Sequence
  Description of Artificial Sequence: Synthetic oligonucleotide
ugcaguugaccaguuggga

SEQ ID NO: 2404589 - RNA, 19 nt, Artificial Sequence
  Description of Artificial Sequence: Synthetic oligonucleotide
caucccugcaggacacacg

SEQ ID NO: 2404590 - RNA, 19 nt, Artificial Sequence
  Description of Artificial Sequence: Synthetic oligonucleotide
ugugcaguuucaccaccuc

SEQ ID NO: 2404591 - RNA, 19 nt, Artificial Sequence
  Description of Artificial Sequence: Synthetic oligonucleotide
ucccgauccgucacuguga

SEQ ID NO: 2404592 - RNA, 19 nt, Artificial Sequence
  Description of Artificial Sequence: Synthetic oligonucleotide
acuggucacauggcauagc

SEQ ID NO: 2404593 - RNA, 19 nt, Artificial Sequence
  Description of Artificial Sequence: Synthetic oligonucleotide
agucaucccugcaggacac

SEQ ID NO: 2404594 - RNA, 19 nt, Artificial Sequence
  Description of Artificial Sequence: Synthetic oligonucleotide
gauccgucacugugaauuc

SEQ ID NO: 2404595 - RNA, 19 nt, Artificial Sequence
  Description of Artificial Sequence: Synthetic oligonucleotide
cuucuccagauuuagauuu

SEQ ID NO: 2404596 - RNA, 19 nt, Artificial Sequence
  Description of Artificial Sequence: Synthetic oligonucleotide
gucccacacagccauacuc

SEQ ID NO: 2404597 - RNA, 19 nt, Artificial Sequence
  Description of Artificial Sequence: Synthetic oligonucleotide
cauagcgugugcccucagc

SEQ ID NO: 2404598 - RNA, 19 nt, Artificial Sequence
  Description of Artificial Sequence: Synthetic oligonucleotide
cacacggugcuccauccac

SEQ ID NO: 2404599 - RNA, 19 nt, Artificial Sequence
  Description of Artificial Sequence: Synthetic oligonucleotide
acgccccacauuugauccc

SEQ ID NO: 2404600 - RNA, 19 nt, Artificial Sequence
  Description of Artificial Sequence: Synthetic oligonucleotide
cauaugacgccccacauuu

SEQ ID NO: 2404601 - RNA, 19 nt, Artificial Sequence
  Description of Artificial Sequence: Synthetic oligonucleotide
caggguugacauucacacc

SEQ ID NO: 2404602 - RNA, 19 nt, Artificial Sequence
  Description of Artificial Sequence: Synthetic oligonucleotide
uuggcagggauggugacuu

SEQ ID NO: 2404603 - RNA, 19 nt, Artificial Sequence
  Description of Artificial Sequence: Synthetic oligonucleotide
ucccaggugaccugcaguu

SEQ ID NO: 2404604 - RNA, 19 nt, Artificial Sequence
  Description of Artificial Sequence: Synthetic oligonucleotide
aguacgcuuuccugccuug

SEQ ID NO: 2404605 - RNA, 19 nt, Artificial Sequence
  Description of Artificial Sequence: Synthetic oligonucleotide
agcccaguacgcuuuccug

SEQ ID NO: 2404606 - RNA, 19 nt, Artificial Sequence
  Description of Artificial Sequence: Synthetic oligonucleotide
gugcauaugacgccccaca

SEQ ID NO: 2404607 - RNA, 19 nt, Artificial Sequence
  Description of Artificial Sequence: Synthetic oligonucleotide
ugauagcugugggugucag

SEQ ID NO: 2404608 - RNA, 19 nt, Artificial Sequence
  Description of Artificial Sequence: Synthetic oligonucleotide
uggucacauggcauagcgu

SEQ ID NO: 2404609 - RNA, 19 nt, Artificial Sequence
  Description of Artificial Sequence: Synthetic oligonucleotide
cucaagcacaccaucccga

SEQ ID NO: 2404610 - RNA, 19 nt, Artificial Sequence
  Description of Artificial Sequence: Synthetic oligonucleotide
gacauucacaccagccuuc

SEQ ID NO: 2404611 - RNA, 19 nt, Artificial Sequence
  Description of Artificial Sequence: Synthetic oligonucleotide
gccaaggaagugcaggccc

SEQ ID NO: 2404612 - RNA, 19 nt, Artificial Sequence
  Description of Artificial Sequence: Synthetic oligonucleotide
gcuuauaguaugcauggua

SEQ ID NO: 2404613 - RNA, 19 nt, Artificial Sequence
  Description of Artificial Sequence: Synthetic oligonucleotide
caucaccugugcauaugac

SEQ ID NO: 2404614 - RNA, 19 nt, Artificial Sequence
  Description of Artificial Sequence: Synthetic oligonucleotide
caccugugcauaugacgcc

SEQ ID NO: 2404615 - RNA, 19 nt, Artificial Sequence
  Description of Artificial Sequence: Synthetic oligonucleotide
acaccagccuucuccagau

SEQ ID NO: 2404616 - RNA, 19 nt, Artificial Sequence
  Description of Artificial Sequence: Synthetic oligonucleotide
agcacaccaucccgauccg

SEQ ID NO: 2404617 - RNA, 19 nt, Artificial Sequence
  Description of Artificial Sequence: Synthetic oligonucleotide
uucugguucucaggguuga

SEQ ID NO: 2404618 - RNA, 19 nt, Artificial Sequence
  Description of Artificial Sequence: Synthetic oligonucleotide
cauugcuguaauucauuaa

SEQ ID NO: 2404619 - RNA, 19 nt, Artificial Sequence
  Description of Artificial Sequence: Synthetic oligonucleotide
cuacugucugcaucaccug

SEQ ID NO: 2404620 - RNA, 19 nt, Artificial Sequence
  Description of Artificial Sequence: Synthetic oligonucleotide
uacgcuuuccugccuugau

SEQ ID NO: 2404621 - RNA, 19 nt, Artificial Sequence
  Description of Artificial Sequence: Synthetic oligonucleotide
gccuugauagcugugggug

SEQ ID NO: 2404622 - RNA, 19 nt, Artificial Sequence
  Description of Artificial Sequence: Synthetic oligonucleotide
uggaucccuacugucugca

SEQ ID NO: 2404623 - RNA, 19 nt, Artificial Sequence
  Description of Artificial Sequence: Synthetic oligonucleotide
ucgcccuauggcccacagg

SEQ ID NO: 2404624 - RNA, 19 nt, Artificial Sequence
  Description of Artificial Sequence: Synthetic oligonucleotide
ggugaccugcaguugacca

SEQ ID NO: 2404625 - RNA, 19 nt, Artificial Sequence
  Description of Artificial Sequence: Synthetic oligonucleotide
guuucaccaccucuucgga

SEQ ID NO: 2404626 - RNA, 19 nt, Artificial Sequence
  Description of Artificial Sequence: Synthetic oligonucleotide
uugauccccagagcaaauc

SEQ ID NO: 2404627 - RNA, 19 nt, Artificial Sequence
  Description of Artificial Sequence: Synthetic oligonucleotide
ggaacucgcccuauggccc

SEQ ID NO: 2404628 - RNA, 19 nt, Artificial Sequence
  Description of Artificial Sequence: Synthetic oligonucleotide
cauccacgacaauuuucug

SEQ ID NO: 2404629 - RNA, 19 nt, Artificial Sequence
  Description of Artificial Sequence: Synthetic oligonucleotide
cgcuuuccugccuugauag

SEQ ID NO: 2404630 - RNA, 19 nt, Artificial Sequence
  Description of Artificial Sequence: Synthetic oligonucleotide
ggauuucccaaagagccuc

SEQ ID NO: 2404631 - RNA, 19 nt, Artificial Sequence
  Description of Artificial Sequence: Synthetic oligonucleotide
cagauuuagauuucugguu

SEQ ID NO: 2404632 - RNA, 19 nt, Artificial Sequence
  Description of Artificial Sequence: Synthetic oligonucleotide
ccucaagcacaccaucccg

SEQ ID NO: 2404633 - RNA, 19 nt, Artificial Sequence
  Description of Artificial Sequence: Synthetic oligonucleotide
aggcugaggauuucccaaa

SEQ ID NO: 2404634 - RNA, 19 nt, Artificial Sequence
  Description of Artificial Sequence: Synthetic oligonucleotide
ggugccuguguccuccuug

SEQ ID NO: 2404635 - RNA, 19 nt, Artificial Sequence
  Description of Artificial Sequence: Synthetic oligonucleotide
guuucuggaacucgcccua

SEQ ID NO: 2404636 - RNA, 19 nt, Artificial Sequence
  Description of Artificial Sequence: Synthetic oligonucleotide
gcccaguacgcuuuccugc

SEQ ID NO: 2404637 - RNA, 19 nt, Artificial Sequence
  Description of Artificial Sequence: Synthetic oligonucleotide
gucugaggagccuuguacu

SEQ ID NO: 2404638 - RNA, 19 nt, Artificial Sequence
  Description of Artificial Sequence: Synthetic oligonucleotide
cacauggcauagcgugugc

SEQ ID NO: 2404639 - RNA, 19 nt, Artificial Sequence
  Description of Artificial Sequence: Synthetic oligonucleotide
ccaaagagccucugagccc

SEQ ID NO: 2404640 - RNA, 19 nt, Artificial Sequence
  Description of Artificial Sequence: Synthetic oligonucleotide
acugugaauuccaguggcu

SEQ ID NO: 2404641 - RNA, 19 nt, Artificial Sequence
  Description of Artificial Sequence: Synthetic oligonucleotide
uugaccaguugggaguuuu

SEQ ID NO: 2404642 - RNA, 19 nt, Artificial Sequence
  Description of Artificial Sequence: Synthetic oligonucleotide
guaauucauuaaggcugag

SEQ ID NO: 2404643 - RNA, 19 nt, Artificial Sequence
  Description of Artificial Sequence: Synthetic oligonucleotide
gagcgcuuggagaugugca

SEQ ID NO: 2404644 - RNA, 19 nt, Artificial Sequence
  Description of Artificial Sequence: Synthetic oligonucleotide
gaacucgcccuauggccca

SEQ ID NO: 2404645 - RNA, 19 nt, Artificial Sequence
  Description of Artificial Sequence: Synthetic oligonucleotide
aguccuggacccagguguc

SEQ ID NO: 2404646 - RNA, 19 nt, Artificial Sequence
  Description of Artificial Sequence: Synthetic oligonucleotide
ucuucggagcaggugggau

SEQ ID NO: 2404647 - RNA, 19 nt, Artificial Sequence
  Description of Artificial Sequence: Synthetic oligonucleotide
cuccugggcauccacgaca

SEQ ID NO: 2404648 - RNA, 19 nt, Artificial Sequence
  Description of Artificial Sequence: Synthetic oligonucleotide
cagccauacuccaguggug

SEQ ID NO: 2404649 - RNA, 19 nt, Artificial Sequence
  Description of Artificial Sequence: Synthetic oligonucleotide
caguugaccaguugggagu

SEQ ID NO: 2404650 - RNA, 19 nt, Artificial Sequence
  Description of Artificial Sequence: Synthetic oligonucleotide
aggccggagcgcuuggaga

SEQ ID NO: 2404651 - RNA, 19 nt, Artificial Sequence
  Description of Artificial Sequence: Synthetic oligonucleotide
ggugacuuaaccucagcau

SEQ ID NO: 2404652 - RNA, 19 nt, Artificial Sequence
  Description of Artificial Sequence: Synthetic oligonucleotide
uccaggccggagcgcuugg

SEQ ID NO: 2404653 - RNA, 19 nt, Artificial Sequence
  Description of Artificial Sequence: Synthetic oligonucleotide
caggugaccugcaguugac

SEQ ID NO: 2404654 - RNA, 19 nt, Artificial Sequence
  Description of Artificial Sequence: Synthetic oligonucleotide
cucccucaagcacaccauc

SEQ ID NO: 2404655 - RNA, 19 nt, Artificial Sequence
  Description of Artificial Sequence: Synthetic oligonucleotide
cuuuccugccuugauagcu

SEQ ID NO: 2404656 - RNA, 19 nt, Artificial Sequence
  Description of Artificial Sequence: Synthetic oligonucleotide
cuccaauggcaaagaugug

SEQ ID NO: 2404657 - RNA, 19 nt, Artificial Sequence
  Description of Artificial Sequence: Synthetic oligonucleotide
agcaaauccuugagugacu

SEQ ID NO: 2404658 - RNA, 19 nt, Artificial Sequence
  Description of Artificial Sequence: Synthetic oligonucleotide
caaggaagugcaggcccag

SEQ ID NO: 2404659 - RNA, 19 nt, Artificial Sequence
  Description of Artificial Sequence: Synthetic oligonucleotide
acagugggcuccaggccgg

SEQ ID NO: 2404660 - RNA, 19 nt, Artificial Sequence
  Description of Artificial Sequence: Synthetic oligonucleotide
gcaucaccugugcauauga

SEQ ID NO: 2404661 - RNA, 19 nt, Artificial Sequence
  Description of Artificial Sequence: Synthetic oligonucleotide
ugcccucagcuuggcaggg

SEQ ID NO: 2404662 - RNA, 19 nt, Artificial Sequence
  Description of Artificial Sequence: Synthetic oligonucleotide
accaucccgauccgucacu

SEQ ID NO: 2404663 - RNA, 19 nt, Artificial Sequence
  Description of Artificial Sequence: Synthetic oligonucleotide
cccucaagcacaccauccc

SEQ ID NO: 2404664 - RNA, 19 nt, Artificial Sequence
  Description of Artificial Sequence: Synthetic oligonucleotide
aacucgcccuauggcccac

SEQ ID NO: 2404665 - RNA, 19 nt, Artificial Sequence
  Description of Artificial Sequence: Synthetic oligonucleotide
gggaguuuuggaugaggga

SEQ ID NO: 2404666 - RNA, 19 nt, Artificial Sequence
  Description of Artificial Sequence: Synthetic oligonucleotide
gugccuguguccuccuuga

SEQ ID NO: 2404667 - RNA, 19 nt, Artificial Sequence
  Description of Artificial Sequence: Synthetic oligonucleotide
guugggaguuuuggaugag

SEQ ID NO: 2404668 - RNA, 19 nt, Artificial Sequence
  Description of Artificial Sequence: Synthetic oligonucleotide
aguugaccaguugggaguu

SEQ ID NO: 2404669 - RNA, 19 nt, Artificial Sequence
  Description of Artificial Sequence: Synthetic oligonucleotide
gugugaagacagucuggga

SEQ ID NO: 2404670 - RNA, 19 nt, Artificial Sequence
  Description of Artificial Sequence: Synthetic oligonucleotide
uauggcccacaggacagua

SEQ ID NO: 2404671 - RNA, 19 nt, Artificial Sequence
  Description of Artificial Sequence: Synthetic oligonucleotide
caccaucccgauccgucac

SEQ ID NO: 2404672 - RNA, 19 nt, Artificial Sequence
  Description of Artificial Sequence: Synthetic oligonucleotide
gggauggaucccuacuguc

SEQ ID NO: 2404673 - RNA, 19 nt, Artificial Sequence
  Description of Artificial Sequence: Synthetic oligonucleotide
ugggaacauugcuguaauu

SEQ ID NO: 2404674 - RNA, 19 nt, Artificial Sequence
  Description of Artificial Sequence: Synthetic oligonucleotide
uagcgugugcccucagcuu

SEQ ID NO: 2404675 - RNA, 19 nt, Artificial Sequence
  Description of Artificial Sequence: Synthetic oligonucleotide
gcauccacgacaauuuucu

SEQ ID NO: 2404676 - RNA, 19 nt, Artificial Sequence
  Description of Artificial Sequence: Synthetic oligonucleotide
cauacuccaguggugugaa

SEQ ID NO: 2404677 - RNA, 19 nt, Artificial Sequence
  Description of Artificial Sequence: Synthetic oligonucleotide
caaaggugccuguguccuc

SEQ ID NO: 2404678 - RNA, 19 nt, Artificial Sequence
  Description of Artificial Sequence: Synthetic oligonucleotide
gcaggacacacggugcucc

SEQ ID NO: 2404679 - RNA, 19 nt, Artificial Sequence
  Description of Artificial Sequence: Synthetic oligonucleotide
ggauggugacuuaaccuca

SEQ ID NO: 2404680 - RNA, 19 nt, Artificial Sequence
  Description of Artificial Sequence: Synthetic oligonucleotide
ugaauuccaguggcuuaua

SEQ ID NO: 2404681 - RNA, 19 nt, Artificial Sequence
  Description of Artificial Sequence: Synthetic oligonucleotide
ggagcgcuuggagaugugc

SEQ ID NO: 2404682 - RNA, 19 nt, Artificial Sequence
  Description of Artificial Sequence: Synthetic oligonucleotide
cauuggggccaaggaagug

SEQ ID NO: 2404683 - RNA, 19 nt, Artificial Sequence
  Description of Artificial Sequence: Synthetic oligonucleotide
gcaguuucaccaccucuuc

SEQ ID NO: 2404684 - RNA, 19 nt, Artificial Sequence
  Description of Artificial Sequence: Synthetic oligonucleotide
auaugacgccccacauuug

SEQ ID NO: 2404685 - RNA, 19 nt, Artificial Sequence
  Description of Artificial Sequence: Synthetic oligonucleotide
agacagucccacacagcca

SEQ ID NO: 2404686 - RNA, 19 nt, Artificial Sequence
  Description of Artificial Sequence: Synthetic oligonucleotide
cucgcccuauggcccacag

SEQ ID NO: 2404687 - RNA, 19 nt, Artificial Sequence
  Description of Artificial Sequence: Synthetic oligonucleotide
gugaauuccaguggcuuau

SEQ ID NO: 2404688 - RNA, 19 nt, Artificial Sequence
  Description of Artificial Sequence: Synthetic oligonucleotide
cgcccuauggcccacagga

SEQ ID NO: 2404689 - RNA, 19 nt, Artificial Sequence
  Description of Artificial Sequence: Synthetic oligonucleotide
ccuugacagaggcaugguc

SEQ ID NO: 2404690 - RNA, 19 nt, Artificial Sequence
  Description of Artificial Sequence: Synthetic oligonucleotide
gcuuuccugccuugauagc

SEQ ID NO: 2404691 - RNA, 19 nt, Artificial Sequence
  Description of Artificial Sequence: Synthetic oligonucleotide
ggguugacauucacaccag

SEQ ID NO: 2404692 - RNA, 19 nt, Artificial Sequence
  Description of Artificial Sequence: Synthetic oligonucleotide
ccugugcauaugacgcccc

SEQ ID NO: 2404693 - RNA, 19 nt, Artificial Sequence
  Description of Artificial Sequence: Synthetic oligonucleotide
ggugggauggaucccuacu

SEQ ID NO: 2404694 - RNA, 19 nt, Artificial Sequence
  Description of Artificial Sequence: Synthetic oligonucleotide
aggugucugaggagccuug

SEQ ID NO: 2404695 - RNA, 19 nt, Artificial Sequence
  Description of Artificial Sequence: Synthetic oligonucleotide
ugacagaggcaugguccuc

SEQ ID NO: 2404696 - RNA, 19 nt, Artificial Sequence
  Description of Artificial Sequence: Synthetic oligonucleotide
gauuucccaaagagccucu

SEQ ID NO: 2404697 - RNA, 19 nt, Artificial Sequence
  Description of Artificial Sequence: Synthetic oligonucleotide
ccaggugaccugcaguuga

SEQ ID NO: 2404698 - RNA, 19 nt, Artificial Sequence
  Description of Artificial Sequence: Synthetic oligonucleotide
gccucugagcccaguacgc

SEQ ID NO: 2404699 - RNA, 19 nt, Artificial Sequence
  Description of Artificial Sequence: Synthetic oligonucleotide
ccagcauuggggccaagga

SEQ ID NO: 2404700 - RNA, 19 nt, Artificial Sequence
  Description of Artificial Sequence: Synthetic oligonucleotide
ggauggaucccuacugucu

SEQ ID NO: 2404701 - RNA, 19 nt, Artificial Sequence
  Description of Artificial Sequence: Synthetic oligonucleotide
accucagcauccagucaca

SEQ ID NO: 2404702 - RNA, 19 nt, Artificial Sequence
  Description of Artificial Sequence: Synthetic oligonucleotide
cugagcccaguacgcuuuc

SEQ ID NO: 2404703 - RNA, 19 nt, Artificial Sequence
  Description of Artificial Sequence: Synthetic oligonucleotide
cugggaacauugcuguaau

SEQ ID NO: 2404704 - RNA, 19 nt, Artificial Sequence
  Description of Artificial Sequence: Synthetic oligonucleotide
ccgucacugugaauuccag

SEQ ID NO: 2404705 - RNA, 19 nt, Artificial Sequence
  Description of Artificial Sequence: Synthetic oligonucleotide
guacgcuuuccugccuuga

SEQ ID NO: 2404706 - RNA, 19 nt, Artificial Sequence
  Description of Artificial Sequence: Synthetic oligonucleotide
gcagggauggugacuuaac

SEQ ID NO: 2404707 - RNA, 19 nt, Artificial Sequence
  Description of Artificial Sequence: Synthetic oligonucleotide
ucccuacugucugcaucac

SEQ ID NO: 2404708 - RNA, 19 nt, Artificial Sequence
  Description of Artificial Sequence: Synthetic oligonucleotide
gcucaggccgccccucagc

SEQ ID NO: 2404709 - RNA, 19 nt, Artificial Sequence
  Description of Artificial Sequence: Synthetic oligonucleotide
ggugucagcucaggccgcc

SEQ ID NO: 2404710 - RNA, 19 nt, Artificial Sequence
  Description of Artificial Sequence: Synthetic oligonucleotide
gggucucugaggaggcagc

SEQ ID NO: 2404711 - RNA, 19 nt, Artificial Sequence
  Description of Artificial Sequence: Synthetic oligonucleotide
ccaguugggaguuuuggau

SEQ ID NO: 2404712 - RNA, 19 nt, Artificial Sequence
  Description of Artificial Sequence: Synthetic oligonucleotide
caguaucaaaggugccugu

SEQ ID NO: 2404713 - RNA, 19 nt, Artificial Sequence
  Description of Artificial Sequence: Synthetic oligonucleotide
cugugaauuccaguggcuu

SEQ ID NO: 2404714 - RNA, 19 nt, Artificial Sequence
  Description of Artificial Sequence: Synthetic oligonucleotide
cccacauuugauccccaga

SEQ ID NO: 2404715 - RNA, 19 nt, Artificial Sequence
  Description of Artificial Sequence: Synthetic oligonucleotide
gcgugugcccucagcuugg

SEQ ID NO: 2404716 - RNA, 19 nt, Artificial Sequence
  Description of Artificial Sequence: Synthetic oligonucleotide
ccuccuugacagaggcaug

SEQ ID NO: 2404717 - RNA, 19 nt, Artificial Sequence
  Description of Artificial Sequence: Synthetic oligonucleotide
gaggagccuuguacugguc

SEQ ID NO: 2404718 - RNA, 19 nt, Artificial Sequence
  Description of Artificial Sequence: Synthetic oligonucleotide
auggcccacaggacaguau

SEQ ID NO: 2404719 - RNA, 19 nt, Artificial Sequence
  Description of Artificial Sequence: Synthetic oligonucleotide
aggacacacggugcuccau

SEQ ID NO: 2404720 - RNA, 19 nt, Artificial Sequence
  Description of Artificial Sequence: Synthetic oligonucleotide
cucccaggugaccugcagu

SEQ ID NO: 2404721 - RNA, 19 nt, Artificial Sequence
  Description of Artificial Sequence: Synthetic oligonucleotide
ggcagggauggugacuuaa

SEQ ID NO: 2404722 - RNA, 19 nt, Artificial Sequence
  Description of Artificial Sequence: Synthetic oligonucleotide
caccaccucuucggagcag

SEQ ID NO: 2404723 - RNA, 19 nt, Artificial Sequence
  Description of Artificial Sequence: Synthetic oligonucleotide
gugugcccucagcuuggca

SEQ ID NO: 2404724 - RNA, 19 nt, Artificial Sequence
  Description of Artificial Sequence: Synthetic oligonucleotide
cucuucggagcagguggga

SEQ ID NO: 2404725 - RNA, 19 nt, Artificial Sequence
  Description of Artificial Sequence: Synthetic oligonucleotide
ggcauagcgugugcccuca

SEQ ID NO: 2404726 - RNA, 19 nt, Artificial Sequence
  Description of Artificial Sequence: Synthetic oligonucleotide
ucggagcaggugggaugga

SEQ ID NO: 2404727 - RNA, 19 nt, Artificial Sequence
  Description of Artificial Sequence: Synthetic oligonucleotide
ggccggagcgcuuggagau

SEQ ID NO: 2404728 - RNA, 19 nt, Artificial Sequence
  Description of Artificial Sequence: Synthetic oligonucleotide
ccaucccgauccgucacug

SEQ ID NO: 2404729 - RNA, 19 nt, Artificial Sequence
  Description of Artificial Sequence: Synthetic oligonucleotide
gcauaugacgccccacauu

SEQ ID NO: 2404730 - RNA, 19 nt, Artificial Sequence
  Description of Artificial Sequence: Synthetic oligonucleotide
cagaggcaugguccuccca

SEQ ID NO: 2404731 - RNA, 19 nt, Artificial Sequence
  Description of Artificial Sequence: Synthetic oligonucleotide
cccacaggacaguaucaaa

SEQ ID NO: 2404732 - RNA, 19 nt, Artificial Sequence
  Description of Artificial Sequence: Synthetic oligonucleotide
gcaaauccuugagugacuu

SEQ ID NO: 2404733 - RNA, 19 nt, Artificial Sequence
  Description of Artificial Sequence: Synthetic oligonucleotide
gcauagcgugugcccucag

SEQ ID NO: 2404734 - RNA, 19 nt, Artificial Sequence
  Description of Artificial Sequence: Synthetic oligonucleotide
cgauccgucacugugaauu

SEQ ID NO: 2404735 - RNA, 19 nt, Artificial Sequence
  Description of Artificial Sequence: Synthetic oligonucleotide
cgccccacauuugaucccc

SEQ ID NO: 2404736 - RNA, 19 nt, Artificial Sequence
  Description of Artificial Sequence: Synthetic oligonucleotide
gggugucagcucaggccgc

SEQ ID NO: 2404737 - RNA, 19 nt, Artificial Sequence
  Description of Artificial Sequence: Synthetic oligonucleotide
cugcaucaccugugcauau

SEQ ID NO: 2404738 - RNA, 19 nt, Artificial Sequence
  Description of Artificial Sequence: Synthetic oligonucleotide
caucccgauccgucacugu

SEQ ID NO: 2404739 - RNA, 19 nt, Artificial Sequence
  Description of Artificial Sequence: Synthetic oligonucleotide
acucgcccuauggcccaca

SEQ ID NO: 2404740 - RNA, 19 nt, Artificial Sequence
  Description of Artificial Sequence: Synthetic oligonucleotide
ggcuuauaguaugcauggu

SEQ ID NO: 2404741 - RNA, 19 nt, Artificial Sequence
  Description of Artificial Sequence: Synthetic oligonucleotide
cccgauccgucacugugaa

SEQ ID NO: 2404742 - RNA, 19 nt, Artificial Sequence
  Description of Artificial Sequence: Synthetic oligonucleotide
gcccuauggcccacaggac

SEQ ID NO: 2404743 - RNA, 19 nt, Artificial Sequence
  Description of Artificial Sequence: Synthetic oligonucleotide
ggugucugaggagccuugu

SEQ ID NO: 2404744 - RNA, 19 nt, Artificial Sequence
  Description of Artificial Sequence: Synthetic oligonucleotide
acagucccacacagccaua

SEQ ID NO: 2404745 - RNA, 19 nt, Artificial Sequence
  Description of Artificial Sequence: Synthetic oligonucleotide
ccacaugcuccuggccaug

SEQ ID NO: 2404746 - RNA, 19 nt, Artificial Sequence
  Description of Artificial Sequence: Synthetic oligonucleotide
gcgcuuggagaugugcagu

SEQ ID NO: 2404747 - RNA, 19 nt, Artificial Sequence
  Description of Artificial Sequence: Synthetic oligonucleotide
caggugucugaggagccuu

SEQ ID NO: 2404748 - RNA, 19 nt, Artificial Sequence
  Description of Artificial Sequence: Synthetic oligonucleotide
ggaucccuacugucugcau

SEQ ID NO: 2404749 - RNA, 19 nt, Artificial Sequence
  Description of Artificial Sequence: Synthetic oligonucleotide
gccgccccucagcaacauc

SEQ ID NO: 2404750 - RNA, 19 nt, Artificial Sequence
  Description of Artificial Sequence: Synthetic oligonucleotide
ccuuccaguccuggaccca

SEQ ID NO: 2404751 - RNA, 19 nt, Artificial Sequence
  Description of Artificial Sequence: Synthetic oligonucleotide
gaccugcaguugaccaguu

SEQ ID NO: 2404752 - RNA, 19 nt, Artificial Sequence
  Description of Artificial Sequence: Synthetic oligonucleotide
cgugugcccucagcuuggc

SEQ ID NO: 2404753 - RNA, 19 nt, Artificial Sequence
  Description of Artificial Sequence: Synthetic oligonucleotide
ccucugagcccaguacgcu

SEQ ID NO: 2404754 - RNA, 19 nt, Artificial Sequence
  Description of Artificial Sequence: Synthetic oligonucleotide
ccaguacgcuuuccugccu

SEQ ID NO: 2404755 - RNA, 19 nt, Artificial Sequence
  Description of Artificial Sequence: Synthetic oligonucleotide
ccaggugucugaggagccu

SEQ ID NO: 2404756 - RNA, 19 nt, Artificial Sequence
  Description of Artificial Sequence: Synthetic oligonucleotide
gcacaccaucccgauccgu

SEQ ID NO: 2404757 - RNA, 19 nt, Artificial Sequence
  Description of Artificial Sequence: Synthetic oligonucleotide
ccggagcgcuuggagaugu

SEQ ID NO: 2404758 - RNA, 19 nt, Artificial Sequence
  Description of Artificial Sequence: Synthetic oligonucleotide
caccagccuucuccagauu

SEQ ID NO: 2404759 - RNA, 19 nt, Artificial Sequence
  Description of Artificial Sequence: Synthetic oligonucleotide
ccacgacaauuuucugguu

SEQ ID NO: 2404760 - RNA, 19 nt, Artificial Sequence
  Description of Artificial Sequence: Synthetic oligonucleotide
ccaggccggagcgcuugga

SEQ ID NO: 2404761 - RNA, 19 nt, Artificial Sequence
  Description of Artificial Sequence: Synthetic oligonucleotide
ccgauccgucacugugaau

SEQ ID NO: 2404762 - RNA, 19 nt, Artificial Sequence
  Description of Artificial Sequence: Synthetic oligonucleotide
ggccgccccucagcaacau

SEQ ID NO: 2404763 - RNA, 19 nt, Artificial Sequence
  Description of Artificial Sequence: Synthetic oligonucleotide
gcuccaggccggagcgcuu

SEQ ID NO: 2404764 - RNA, 19 nt, Artificial Sequence
  Description of Artificial Sequence: Synthetic oligonucleotide
ucuugaaacccacauaucg

SEQ ID NO: 2404765 - RNA, 19 nt, Artificial Sequence
  Description of Artificial Sequence: Synthetic oligonucleotide
auugccaguacccugagcc

SEQ ID NO: 2404766 - RNA, 19 nt, Artificial Sequence
  Description of Artificial Sequence: Synthetic oligonucleotide
uuaacaggccaauagagcg

SEQ ID NO: 2404767 - RNA, 19 nt, Artificial Sequence
  Description of Artificial Sequence: Synthetic oligonucleotide
aaaugaauccauccuguuc

SEQ ID NO: 2404768 - RNA, 19 nt, Artificial Sequence
  Description of Artificial Sequence: Synthetic oligonucleotide
aacaccuuuugauuaacag

SEQ ID NO: 2404769 - RNA, 19 nt, Artificial Sequence
  Description of Artificial Sequence: Synthetic oligonucleotide
aaugucgccagguaaggag

SEQ ID NO: 2404770 - RNA, 19 nt, Artificial Sequence
  Description of Artificial Sequence: Synthetic oligonucleotide
augguuaagacgccaauac

SEQ ID NO: 2404771 - RNA, 19 nt, Artificial Sequence
  Description of Artificial Sequence: Synthetic oligonucleotide
uaaacaauuucuugaucgg

SEQ ID NO: 2404772 - RNA, 19 nt, Artificial Sequence
  Description of Artificial Sequence: Synthetic oligonucleotide
ugaagaaguagacuuggcc

SEQ ID NO: 2404773 - RNA, 19 nt, Artificial Sequence
  Description of Artificial Sequence: Synthetic oligonucleotide
acccuguugaguuucaugg

SEQ ID NO: 2404774 - RNA, 19 nt, Artificial Sequence
  Description of Artificial Sequence: Synthetic oligonucleotide
aucgguuugggguagcggc

SEQ ID NO: 2404775 - RNA, 19 nt, Artificial Sequence
  Description of Artificial Sequence: Synthetic oligonucleotide
ugccacucgaagcugaugg

SEQ ID NO: 2404776 - RNA, 19 nt, Artificial Sequence
  Description of Artificial Sequence: Synthetic oligonucleotide
aagagugugacugugcuug

SEQ ID NO: 2404777 - RNA, 19 nt, Artificial Sequence
  Description of Artificial Sequence: Synthetic oligonucleotide
acaccuuuugauuaacagg

SEQ ID NO: 2404778 - RNA, 19 nt, Artificial Sequence
  Description of Artificial Sequence: Synthetic oligonucleotide
agcaucuaaguuuccaugg

SEQ ID NO: 2404779 - RNA, 19 nt, Artificial Sequence
  Description of Artificial Sequence: Synthetic oligonucleotide
ugauuaacaggccaauaga

SEQ ID NO: 2404780 - RNA, 19 nt, Artificial Sequence
  Description of Artificial Sequence: Synthetic oligonucleotide
gauuaacaggccaauagag

SEQ ID NO: 2404781 - RNA, 19 nt, Artificial Sequence
  Description of Artificial Sequence: Synthetic oligonucleotide
aagacgccaauacucauug

SEQ ID NO: 2404782 - RNA, 19 nt, Artificial Sequence
  Description of Artificial Sequence: Synthetic oligonucleotide
uucuugaucgguuuggggu

SEQ ID NO: 2404783 - RNA, 19 nt, Artificial Sequence
  Description of Artificial Sequence: Synthetic oligonucleotide
auuaacaggccaauagagc

SEQ ID NO: 2404784 - RNA, 19 nt, Artificial Sequence
  Description of Artificial Sequence: Synthetic oligonucleotide
ucugggauagcccuuugcc

SEQ ID NO: 2404785 - RNA, 19 nt, Artificial Sequence
  Description of Artificial Sequence: Synthetic oligonucleotide
gaauccauccuguucuagg

SEQ ID NO: 2404786 - RNA, 19 nt, Artificial Sequence
  Description of Artificial Sequence: Synthetic oligonucleotide
acuaucgaaguguacacug

SEQ ID NO: 2404787 - RNA, 19 nt, Artificial Sequence
  Description of Artificial Sequence: Synthetic oligonucleotide
cagugugugacauuucugg

SEQ ID NO: 2404788 - RNA, 19 nt, Artificial Sequence
  Description of Artificial Sequence: Synthetic oligonucleotide
gacgccaauacucauugcc

SEQ ID NO: 2404789 - RNA, 19 nt, Artificial Sequence
  Description of Artificial Sequence: Synthetic oligonucleotide
aauagagcgcugcauccag

SEQ ID NO: 2404790 - RNA, 19 nt, Artificial Sequence
  Description of Artificial Sequence: Synthetic oligonucleotide
uuggguucuacccuguuga

SEQ ID NO: 2404791 - RNA, 19 nt, Artificial Sequence
  Description of Artificial Sequence: Synthetic oligonucleotide
cuugaaacccacauaucgc

SEQ ID NO: 2404792 - RNA, 19 nt, Artificial Sequence
  Description of Artificial Sequence: Synthetic oligonucleotide
agugcauccagugugugac

SEQ ID NO: 2404793 - RNA, 19 nt, Artificial Sequence
  Description of Artificial Sequence: Synthetic oligonucleotide
aaaggaacaccuuuugauu

SEQ ID NO: 2404794 - RNA, 19 nt, Artificial Sequence
  Description of Artificial Sequence: Synthetic oligonucleotide
guauccaagagugugacug

SEQ ID NO: 2404795 - RNA, 19 nt, Artificial Sequence
  Description of Artificial Sequence: Synthetic oligonucleotide
ugagugccugaguauaucg

SEQ ID NO: 2404796 - RNA, 19 nt, Artificial Sequence
  Description of Artificial Sequence: Synthetic oligonucleotide
agugccugaguauaucggg

SEQ ID NO: 2404797 - RNA, 19 nt, Artificial Sequence
  Description of Artificial Sequence: Synthetic oligonucleotide
agcccaaccagccuucacc

SEQ ID NO: 2404798 - RNA, 19 nt, Artificial Sequence
  Description of Artificial Sequence: Synthetic oligonucleotide
aauccauccuguucuagga

SEQ ID NO: 2404799 - RNA, 19 nt, Artificial Sequence
  Description of Artificial Sequence: Synthetic oligonucleotide
uguagguccccucagucca

SEQ ID NO: 2404800 - RNA, 19 nt, Artificial Sequence
  Description of Artificial Sequence: Synthetic oligonucleotide
agagcagacacucggaaca

SEQ ID NO: 2404801 - RNA, 19 nt, Artificial Sequence
  Description of Artificial Sequence: Synthetic oligonucleotide
ucuaggagaguagacagca

SEQ ID NO: 2404802 - RNA, 19 nt, Artificial Sequence
  Description of Artificial Sequence: Synthetic oligonucleotide
aucgggaguggccaagucc

SEQ ID NO: 2404803 - RNA, 19 nt, Artificial Sequence
  Description of Artificial Sequence: Synthetic oligonucleotide
ucuaaguuuccauggaguc

SEQ ID NO: 2404804 - RNA, 19 nt, Artificial Sequence
  Description of Artificial Sequence: Synthetic oligonucleotide
augauucgcagguucacuc

SEQ ID NO: 2404805 - RNA, 19 nt, Artificial Sequence
  Description of Artificial Sequence: Synthetic oligonucleotide
aguuucaugggaaagccag

SEQ ID NO: 2404806 - RNA, 19 nt, Artificial Sequence
  Description of Artificial Sequence: Synthetic oligonucleotide
aaggaguuagugucuggag

SEQ ID NO: 2404807 - RNA, 19 nt, Artificial Sequence
  Description of Artificial Sequence: Synthetic oligonucleotide
aaggaacaccuuuugauua

SEQ ID NO: 2404808 - RNA, 19 nt, Artificial Sequence
  Description of Artificial Sequence: Synthetic oligonucleotide
uguucuaggagaguagaca

SEQ ID NO: 2404809 - RNA, 19 nt, Artificial Sequence
  Description of Artificial Sequence: Synthetic oligonucleotide
ucgggaguggccaaguccc

SEQ ID NO: 2404810 - RNA, 19 nt, Artificial Sequence
  Description of Artificial Sequence: Synthetic oligonucleotide
ugacauuucugggauagcc

SEQ ID NO: 2404811 - RNA, 19 nt, Artificial Sequence
  Description of Artificial Sequence: Synthetic oligonucleotide
ugugugacauuucugggau

SEQ ID NO: 2404812 - RNA, 19 nt, Artificial Sequence
  Description of Artificial Sequence: Synthetic oligonucleotide
agguucacuccuuuguagg

SEQ ID NO: 2404813 - RNA, 19 nt, Artificial Sequence
  Description of Artificial Sequence: Synthetic oligonucleotide
agugugugacauuucuggg

SEQ ID NO: 2404814 - RNA, 19 nt, Artificial Sequence
  Description of Artificial Sequence: Synthetic oligonucleotide
agugugacugugcuugagg

SEQ ID NO: 2404815 - RNA, 19 nt, Artificial Sequence
  Description of Artificial Sequence: Synthetic oligonucleotide
aucacuaucgaaguguaca

SEQ ID NO: 2404816 - RNA, 19 nt, Artificial Sequence
  Description of Artificial Sequence: Synthetic oligonucleotide
uggagucccucccaaagag

SEQ ID NO: 2404817 - RNA, 19 nt, Artificial Sequence
  Description of Artificial Sequence: Synthetic oligonucleotide
cuugagggaguaaugucgc

SEQ ID NO: 2404818 - RNA, 19 nt, Artificial Sequence
  Description of Artificial Sequence: Synthetic oligonucleotide
agugguauccaagagugug

SEQ ID NO: 2404819 - RNA, 19 nt, Artificial Sequence
  Description of Artificial Sequence: Synthetic oligonucleotide
uucacuccuuuguaggucc

SEQ ID NO: 2404820 - RNA, 19 nt, Artificial Sequence
  Description of Artificial Sequence: Synthetic oligonucleotide
caucaaaggaguuggagca

SEQ ID NO: 2404821 - RNA, 19 nt, Artificial Sequence
  Description of Artificial Sequence: Synthetic oligonucleotide
aguaaugucgccagguaag

SEQ ID NO: 2404822 - RNA, 19 nt, Artificial Sequence
  Description of Artificial Sequence: Synthetic oligonucleotide
uccagugugugacauuucu

SEQ ID NO: 2404823 - RNA, 19 nt, Artificial Sequence
  Description of Artificial Sequence: Synthetic oligonucleotide
acccacauaucgccaaacc

SEQ ID NO: 2404824 - RNA, 19 nt, Artificial Sequence
  Description of Artificial Sequence: Synthetic oligonucleotide
accuuguuucccuugaaga

SEQ ID NO: 2404825 - RNA, 19 nt, Artificial Sequence
  Description of Artificial Sequence: Synthetic oligonucleotide
uuuguagguccccucaguc

SEQ ID NO: 2404826 - RNA, 19 nt, Artificial Sequence
  Description of Artificial Sequence: Synthetic oligonucleotide
caucccauugccaguaccc

SEQ ID NO: 2404827 - RNA, 19 nt, Artificial Sequence
  Description of Artificial Sequence: Synthetic oligonucleotide
ugggauagcccuuugccac

SEQ ID NO: 2404828 - RNA, 19 nt, Artificial Sequence
  Description of Artificial Sequence: Synthetic oligonucleotide
ggaacaagggaccuggccc

SEQ ID NO: 2404829 - RNA, 19 nt, Artificial Sequence
  Description of Artificial Sequence: Synthetic oligonucleotide
aagucccaaggcauggccc

SEQ ID NO: 2404830 - RNA, 19 nt, Artificial Sequence
  Description of Artificial Sequence: Synthetic oligonucleotide
uuuccauggagucccuccc

SEQ ID NO: 2404831 - RNA, 19 nt, Artificial Sequence
  Description of Artificial Sequence: Synthetic oligonucleotide
guagacuuggccaucuugc

SEQ ID NO: 2404832 - RNA, 19 nt, Artificial Sequence
  Description of Artificial Sequence: Synthetic oligonucleotide
cacauaucgccaaaccuug

SEQ ID NO: 2404833 - RNA, 19 nt, Artificial Sequence
  Description of Artificial Sequence: Synthetic oligonucleotide
gcaguaugggcuuuggcgg

SEQ ID NO: 2404834 - RNA, 19 nt, Artificial Sequence
  Description of Artificial Sequence: Synthetic oligonucleotide
aguggccaagucccaaggc

SEQ ID NO: 2404835 - RNA, 19 nt, Artificial Sequence
  Description of Artificial Sequence: Synthetic oligonucleotide
ucacuaucgaaguguacac

SEQ ID NO: 2404836 - RNA, 19 nt, Artificial Sequence
  Description of Artificial Sequence: Synthetic oligonucleotide
cugagccagcauuagacag

SEQ ID NO: 2404837 - RNA, 19 nt, Artificial Sequence
  Description of Artificial Sequence: Synthetic oligonucleotide
gagggaguaaugucgccag

SEQ ID NO: 2404838 - RNA, 19 nt, Artificial Sequence
  Description of Artificial Sequence: Synthetic oligonucleotide
aaucugagccagcauuaga

SEQ ID NO: 2404839 - RNA, 19 nt, Artificial Sequence
  Description of Artificial Sequence: Synthetic oligonucleotide
ucgaaguguacacugccaa

SEQ ID NO: 2404840 - RNA, 19 nt, Artificial Sequence
  Description of Artificial Sequence: Synthetic oligonucleotide
gagcgcugcauccagguug

SEQ ID NO: 2404841 - RNA, 19 nt, Artificial Sequence
  Description of Artificial Sequence: Synthetic oligonucleotide
caucuaaguuuccauggag

SEQ ID NO: 2404842 - RNA, 19 nt, Artificial Sequence
  Description of Artificial Sequence: Synthetic oligonucleotide
aguguacacugccaagcuc

SEQ ID NO: 2404843 - RNA, 19 nt, Artificial Sequence
  Description of Artificial Sequence: Synthetic oligonucleotide
uccauccuguucuaggaga

SEQ ID NO: 2404844 - RNA, 19 nt, Artificial Sequence
  Description of Artificial Sequence: Synthetic oligonucleotide
aggaguuagugucuggagu

SEQ ID NO: 2404845 - RNA, 19 nt, Artificial Sequence
  Description of Artificial Sequence: Synthetic oligonucleotide
aguauaucgggaguggcca

SEQ ID NO: 2404846 - RNA, 19 nt, Artificial Sequence
  Description of Artificial Sequence: Synthetic oligonucleotide
uaaggaguuagugucugga

SEQ ID NO: 2404847 - RNA, 19 nt, Artificial Sequence
  Description of Artificial Sequence: Synthetic oligonucleotide
gacacucggaacaagggac

SEQ ID NO: 2404848 - RNA, 19 nt, Artificial Sequence
  Description of Artificial Sequence: Synthetic oligonucleotide
cuugccagcucaucgcugc

SEQ ID NO: 2404849 - RNA, 19 nt, Artificial Sequence
  Description of Artificial Sequence: Synthetic oligonucleotide
cuaucgaaguguacacugc

SEQ ID NO: 2404850 - RNA, 19 nt, Artificial Sequence
  Description of Artificial Sequence: Synthetic oligonucleotide
ugaaacccacauaucgcca

SEQ ID NO: 2404851 - RNA, 19 nt, Artificial Sequence
  Description of Artificial Sequence: Synthetic oligonucleotide
uucaugggaaagccaggag

SEQ ID NO: 2404852 - RNA, 19 nt, Artificial Sequence
  Description of Artificial Sequence: Synthetic oligonucleotide
uucuaggagaguagacagc

SEQ ID NO: 2404853 - RNA, 19 nt, Artificial Sequence
  Description of Artificial Sequence: Synthetic oligonucleotide
cagacacucggaacaaggg

SEQ ID NO: 2404854 - RNA, 19 nt, Artificial Sequence
  Description of Artificial Sequence: Synthetic oligonucleotide
ugauucgcagguucacucc

SEQ ID NO: 2404855 - RNA, 19 nt, Artificial Sequence
  Description of Artificial Sequence: Synthetic oligonucleotide
ugguuaagacgccaauacu

SEQ ID NO: 2404856 - RNA, 19 nt, Artificial Sequence
  Description of Artificial Sequence: Synthetic oligonucleotide
uaucgccaaaccuuguuuc

SEQ ID NO: 2404857 - RNA, 19 nt, Artificial Sequence
  Description of Artificial Sequence: Synthetic oligonucleotide
uuguagguccccucagucc

SEQ ID NO: 2404858 - RNA, 19 nt, Artificial Sequence
  Description of Artificial Sequence: Synthetic oligonucleotide
aaugauucgcagguucacu

SEQ ID NO: 2404859 - RNA, 19 nt, Artificial Sequence
  Description of Artificial Sequence: Synthetic oligonucleotide
cauggagucccucccaaag

SEQ ID NO: 2404860 - RNA, 19 nt, Artificial Sequence
  Description of Artificial Sequence: Synthetic oligonucleotide
uucccuggcccaucaaagg

SEQ ID NO: 2404861 - RNA, 19 nt, Artificial Sequence
  Description of Artificial Sequence: Synthetic oligonucleotide
aggagacaucuugaaaccc

SEQ ID NO: 2404862 - RNA, 19 nt, Artificial Sequence
  Description of Artificial Sequence: Synthetic oligonucleotide
acgccaauacucauugccc

SEQ ID NO: 2404863 - RNA, 19 nt, Artificial Sequence
  Description of Artificial Sequence: Synthetic oligonucleotide
ugaggaugacagugcaucc

SEQ ID NO: 2404864 - RNA, 19 nt, Artificial Sequence
  Description of Artificial Sequence: Synthetic oligonucleotide
ucugagccagcauuagaca

SEQ ID NO: 2404865 - RNA, 19 nt, Artificial Sequence
  Description of Artificial Sequence: Synthetic oligonucleotide
gacauuucugggauagccc

SEQ ID NO: 2404866 - RNA, 19 nt, Artificial Sequence
  Description of Artificial Sequence: Synthetic oligonucleotide
caucuugccagcucaucgc

SEQ ID NO: 2404867 - RNA, 19 nt, Artificial Sequence
  Description of Artificial Sequence: Synthetic oligonucleotide
guugaguuucaugggaaag

SEQ ID NO: 2404868 - RNA, 19 nt, Artificial Sequence
  Description of Artificial Sequence: Synthetic oligonucleotide
agcucaucgcugccgaggg

SEQ ID NO: 2404869 - RNA, 19 nt, Artificial Sequence
  Description of Artificial Sequence: Synthetic oligonucleotide
gagaguagacagcagcauc

SEQ ID NO: 2404870 - RNA, 19 nt, Artificial Sequence
  Description of Artificial Sequence: Synthetic oligonucleotide
agacacucggaacaaggga

SEQ ID NO: 2404871 - RNA, 19 nt, Artificial Sequence
  Description of Artificial Sequence: Synthetic oligonucleotide
ccaaagagcagacacucgg

SEQ ID NO: 2404872 - RNA, 19 nt, Artificial Sequence
  Description of Artificial Sequence: Synthetic oligonucleotide
cucggaacaagggaccugg

SEQ ID NO: 2404873 - RNA, 19 nt, Artificial Sequence
  Description of Artificial Sequence: Synthetic oligonucleotide
ucaucccauugccaguacc

SEQ ID NO: 2404874 - RNA, 19 nt, Artificial Sequence
  Description of Artificial Sequence: Synthetic oligonucleotide
aacaggccaauagagcgcu

SEQ ID NO: 2404875 - RNA, 19 nt, Artificial Sequence
  Description of Artificial Sequence: Synthetic oligonucleotide
ccaucaaaggaguuggagc

SEQ ID NO: 2404876 - RNA, 19 nt, Artificial Sequence
  Description of Artificial Sequence: Synthetic oligonucleotide
aacccacauaucgccaaac

SEQ ID NO: 2404877 - RNA, 19 nt, Artificial Sequence
  Description of Artificial Sequence: Synthetic oligonucleotide
gaguauaucgggaguggcc

SEQ ID NO: 2404878 - RNA, 19 nt, Artificial Sequence
  Description of Artificial Sequence: Synthetic oligonucleotide
ugagggaguaaugucgcca

SEQ ID NO: 2404879 - RNA, 19 nt, Artificial Sequence
  Description of Artificial Sequence: Synthetic oligonucleotide
guuaagacgccaauacuca

SEQ ID NO: 2404880 - RNA, 19 nt, Artificial Sequence
  Description of Artificial Sequence: Synthetic oligonucleotide
ucuugaucgguuuggggua

SEQ ID NO: 2404881 - RNA, 19 nt, Artificial Sequence
  Description of Artificial Sequence: Synthetic oligonucleotide
ucaucacuaucgaagugua

SEQ ID NO: 2404882 - RNA, 19 nt, Artificial Sequence
  Description of Artificial Sequence: Synthetic oligonucleotide
agcccuuugccacucgaag

SEQ ID NO: 2404883 - RNA, 19 nt, Artificial Sequence
  Description of Artificial Sequence: Synthetic oligonucleotide
gguuaagacgccaauacuc

SEQ ID NO: 2404884 - RNA, 19 nt, Artificial Sequence
  Description of Artificial Sequence: Synthetic oligonucleotide
gaguggccaagucccaagg

SEQ ID NO: 2404885 - RNA, 19 nt, Artificial Sequence
  Description of Artificial Sequence: Synthetic oligonucleotide
uuagugucuggagucugag

SEQ ID NO: 2404886 - RNA, 19 nt, Artificial Sequence
  Description of Artificial Sequence: Synthetic oligonucleotide
ugaguauaucgggaguggc

SEQ ID NO: 2404887 - RNA, 19 nt, Artificial Sequence
  Description of Artificial Sequence: Synthetic oligonucleotide
guaaugucgccagguaagg

SEQ ID NO: 2404888 - RNA, 19 nt, Artificial Sequence
  Description of Artificial Sequence: Synthetic oligonucleotide
ucugggaugucagcauggg

SEQ ID NO: 2404889 - RNA, 19 nt, Artificial Sequence
  Description of Artificial Sequence: Synthetic oligonucleotide
ucaucgcugccgagggucg

SEQ ID NO: 2404890 - RNA, 19 nt, Artificial Sequence
  Description of Artificial Sequence: Synthetic oligonucleotide
uucugggauagcccuuugc

SEQ ID NO: 2404891 - RNA, 19 nt, Artificial Sequence
  Description of Artificial Sequence: Synthetic oligonucleotide
cagguucacuccuuuguag

SEQ ID NO: 2404892 - RNA, 19 nt, Artificial Sequence
  Description of Artificial Sequence: Synthetic oligonucleotide
auugcccuugaagaaguag

SEQ ID NO: 2404893 - RNA, 19 nt, Artificial Sequence
  Description of Artificial Sequence: Synthetic oligonucleotide
gagugccugaguauaucgg

SEQ ID NO: 2404894 - RNA, 19 nt, Artificial Sequence
  Description of Artificial Sequence: Synthetic oligonucleotide
acacucggaacaagggacc

SEQ ID NO: 2404895 - RNA, 19 nt, Artificial Sequence
  Description of Artificial Sequence: Synthetic oligonucleotide
ucgaagcugaugguuaaga

SEQ ID NO: 2404896 - RNA, 19 nt, Artificial Sequence
  Description of Artificial Sequence: Synthetic oligonucleotide
gacagcagcaucuaaguuu

SEQ ID NO: 2404897 - RNA, 19 nt, Artificial Sequence
  Description of Artificial Sequence: Synthetic oligonucleotide
cacgccaguaaacaauuuc

SEQ ID NO: 2404898 - RNA, 19 nt, Artificial Sequence
  Description of Artificial Sequence: Synthetic oligonucleotide
aucuaaguuuccauggagu

SEQ ID NO: 2404899 - RNA, 19 nt, Artificial Sequence
  Description of Artificial Sequence: Synthetic oligonucleotide
uauaucgggaguggccaag

SEQ ID NO: 2404900 - RNA, 19 nt, Artificial Sequence
  Description of Artificial Sequence: Synthetic oligonucleotide
cugaaguccguucuggcca

SEQ ID NO: 2404901 - RNA, 19 nt, Artificial Sequence
  Description of Artificial Sequence: Synthetic oligonucleotide
gaguaaugucgccagguaa

SEQ ID NO: 2404902 - RNA, 19 nt, Artificial Sequence
  Description of Artificial Sequence: Synthetic oligonucleotide
ugaugguuaagacgccaau

SEQ ID NO: 2404903 - RNA, 19 nt, Artificial Sequence
  Description of Artificial Sequence: Synthetic oligonucleotide
ggaguuagugucuggaguc

SEQ ID NO: 2404904 - RNA, 19 nt, Artificial Sequence
  Description of Artificial Sequence: Synthetic oligonucleotide
cugaguauaucgggagugg

SEQ ID NO: 2404905 - RNA, 19 nt, Artificial Sequence
  Description of Artificial Sequence: Synthetic oligonucleotide
gaaucugagccagcauuag

SEQ ID NO: 2404906 - RNA, 19 nt, Artificial Sequence
  Description of Artificial Sequence: Synthetic oligonucleotide
auaucgccaaaccuuguuu

SEQ ID NO: 2404907 - RNA, 19 nt, Artificial Sequence
  Description of Artificial Sequence: Synthetic oligonucleotide
auccauccuguucuaggag

SEQ ID NO: 2404908 - RNA, 19 nt, Artificial Sequence
  Description of Artificial Sequence: Synthetic oligonucleotide
uuaagacgccaauacucau

SEQ ID NO: 2404909 - RNA, 19 nt, Artificial Sequence
  Description of Artificial Sequence: Synthetic oligonucleotide
gaaacccacauaucgccaa

SEQ ID NO: 2404910 - RNA, 19 nt, Artificial Sequence
  Description of Artificial Sequence: Synthetic oligonucleotide
uagagcgcugcauccaggu

SEQ ID NO: 2404911 - RNA, 19 nt, Artificial Sequence
  Description of Artificial Sequence: Synthetic oligonucleotide
acgccaguaaacaauuucu

SEQ ID NO: 2404912 - RNA, 19 nt, Artificial Sequence
  Description of Artificial Sequence: Synthetic oligonucleotide
uuugauuaacaggccaaua

SEQ ID NO: 2404913 - RNA, 19 nt, Artificial Sequence
  Description of Artificial Sequence: Synthetic oligonucleotide
aguaugggcuuuggcggcc

SEQ ID NO: 2404914 - RNA, 19 nt, Artificial Sequence
  Description of Artificial Sequence: Synthetic oligonucleotide
cuuuggcggccauggaagg

SEQ ID NO: 2404915 - RNA, 19 nt, Artificial Sequence
  Description of Artificial Sequence: Synthetic oligonucleotide
ugggaaagccaggagacau

SEQ ID NO: 2404916 - RNA, 19 nt, Artificial Sequence
  Description of Artificial Sequence: Synthetic oligonucleotide
uggcacgccaguaaacaau

SEQ ID NO: 2404917 - RNA, 19 nt, Artificial Sequence
  Description of Artificial Sequence: Synthetic oligonucleotide
gugugugacauuucuggga

SEQ ID NO: 2404918 - RNA, 19 nt, Artificial Sequence
  Description of Artificial Sequence: Synthetic oligonucleotide
agucccaaggcauggccca

SEQ ID NO: 2404919 - RNA, 19 nt, Artificial Sequence
  Description of Artificial Sequence: Synthetic oligonucleotide
agacgccaauacucauugc

SEQ ID NO: 2404920 - RNA, 19 nt, Artificial Sequence
  Description of Artificial Sequence: Synthetic oligonucleotide
ugggguagcggcugaaguc

SEQ ID NO: 2404921 - RNA, 19 nt, Artificial Sequence
  Description of Artificial Sequence: Synthetic oligonucleotide
agaaguagacuuggccauc

SEQ ID NO: 2404922 - RNA, 19 nt, Artificial Sequence
  Description of Artificial Sequence: Synthetic oligonucleotide
gaucgguuugggguagcgg

SEQ ID NO: 2404923 - RNA, 19 nt, Artificial Sequence
  Description of Artificial Sequence: Synthetic oligonucleotide
cuguucuaggagaguagac

SEQ ID NO: 2404924 - RNA, 19 nt, Artificial Sequence
  Description of Artificial Sequence: Synthetic oligonucleotide
ccagcauuagacaggggcc

SEQ ID NO: 2404925 - RNA, 19 nt, Artificial Sequence
  Description of Artificial Sequence: Synthetic oligonucleotide
gagucccucccaaagagca

SEQ ID NO: 2404926 - RNA, 19 nt, Artificial Sequence
  Description of Artificial Sequence: Synthetic oligonucleotide
aaaccuuguuucccuugaa

SEQ ID NO: 2404927 - RNA, 19 nt, Artificial Sequence
  Description of Artificial Sequence: Synthetic oligonucleotide
aaaggaguuggagcaguau

SEQ ID NO: 2404928 - RNA, 19 nt, Artificial Sequence
  Description of Artificial Sequence: Synthetic oligonucleotide
aggaacaccuuuugauuaa

SEQ ID NO: 2404929 - RNA, 19 nt, Artificial Sequence
  Description of Artificial Sequence: Synthetic oligonucleotide
ccaucuugccagcucaucg

SEQ ID NO: 2404930 - RNA, 19 nt, Artificial Sequence
  Description of Artificial Sequence: Synthetic oligonucleotide
cagaauucaucacuaucga

SEQ ID NO: 2404931 - RNA, 19 nt, Artificial Sequence
  Description of Artificial Sequence: Synthetic oligonucleotide
auuagacaggggccaugag

SEQ ID NO: 2404932 - RNA, 19 nt, Artificial Sequence
  Description of Artificial Sequence: Synthetic oligonucleotide
ucgccagguaaggaguuag

SEQ ID NO: 2404933 - RNA, 19 nt, Artificial Sequence
  Description of Artificial Sequence: Synthetic oligonucleotide
ugaucgguuugggguagcg

SEQ ID NO: 2404934 - RNA, 19 nt, Artificial Sequence
  Description of Artificial Sequence: Synthetic oligonucleotide
ucccauugccaguacccug

SEQ ID NO: 2404935 - RNA, 19 nt, Artificial Sequence
  Description of Artificial Sequence: Synthetic oligonucleotide
agaggcggaugucagccca

SEQ ID NO: 2404936 - RNA, 19 nt, Artificial Sequence
  Description of Artificial Sequence: Synthetic oligonucleotide
ggcugcaaugauucgcagg

SEQ ID NO: 2404937 - RNA, 19 nt, Artificial Sequence
  Description of Artificial Sequence: Synthetic oligonucleotide
auggagucccucccaaaga

SEQ ID NO: 2404938 - RNA, 19 nt, Artificial Sequence
  Description of Artificial Sequence: Synthetic oligonucleotide
uugagggaguaaugucgcc

SEQ ID NO: 2404939 - RNA, 19 nt, Artificial Sequence
  Description of Artificial Sequence: Synthetic oligonucleotide
gacaggggccaugagugcc

SEQ ID NO: 2404940 - RNA, 19 nt, Artificial Sequence
  Description of Artificial Sequence: Synthetic oligonucleotide
agcggcugaaguccguucu

SEQ ID NO: 2404941 - RNA, 19 nt, Artificial Sequence
  Description of Artificial Sequence: Synthetic oligonucleotide
cagguuggguucuacccug

SEQ ID NO: 2404942 - RNA, 19 nt, Artificial Sequence
  Description of Artificial Sequence: Synthetic oligonucleotide
ccaauagagcgcugcaucc

SEQ ID NO: 2404943 - RNA, 19 nt, Artificial Sequence
  Description of Artificial Sequence: Synthetic oligonucleotide
caguaugggcuuuggcggc

SEQ ID NO: 2404944 - RNA, 19 nt, Artificial Sequence
  Description of Artificial Sequence: Synthetic oligonucleotide
ucgguuugggguagcggcu

SEQ ID NO: 2404945 - RNA, 19 nt, Artificial Sequence
  Description of Artificial Sequence: Synthetic oligonucleotide
aucuugaaacccacauauc

SEQ ID NO: 2404946 - RNA, 19 nt, Artificial Sequence
  Description of Artificial Sequence: Synthetic oligonucleotide
aucaaaggaguuggagcag

SEQ ID NO: 2404947 - RNA, 19 nt, Artificial Sequence
  Description of Artificial Sequence: Synthetic oligonucleotide
uggccagcucaucccauug

SEQ ID NO: 2404948 - RNA, 19 nt, Artificial Sequence
  Description of Artificial Sequence: Synthetic oligonucleotide
aggagaguagacagcagca

SEQ ID NO: 2404949 - RNA, 19 nt, Artificial Sequence
  Description of Artificial Sequence: Synthetic oligonucleotide
guacccugagcccuuaaaa

SEQ ID NO: 2404950 - RNA, 19 nt, Artificial Sequence
  Description of Artificial Sequence: Synthetic oligonucleotide
ucgccaaaccuuguuuccc

SEQ ID NO: 2404951 - RNA, 19 nt, Artificial Sequence
  Description of Artificial Sequence: Synthetic oligonucleotide
caugggcugcaaugauucg

SEQ ID NO: 2404952 - RNA, 19 nt, Artificial Sequence
  Description of Artificial Sequence: Synthetic oligonucleotide
ccucccaaagagcagacac

SEQ ID NO: 2404953 - RNA, 19 nt, Artificial Sequence
  Description of Artificial Sequence: Synthetic oligonucleotide
ccaaccagccuucaccucc

SEQ ID NO: 2404954 - RNA, 19 nt, Artificial Sequence
  Description of Artificial Sequence: Synthetic oligonucleotide
aguacccugagcccuuaaa

SEQ ID NO: 2404955 - RNA, 19 nt, Artificial Sequence
  Description of Artificial Sequence: Synthetic oligonucleotide
caaagagcagacacucgga

SEQ ID NO: 2404956 - RNA, 19 nt, Artificial Sequence
  Description of Artificial Sequence: Synthetic oligonucleotide
gcugaaguccguucuggcc

SEQ ID NO: 2404957 - RNA, 19 nt, Artificial Sequence
  Description of Artificial Sequence: Synthetic oligonucleotide
aguccguucuggccagcuc

SEQ ID NO: 2404958 - RNA, 19 nt, Artificial Sequence
  Description of Artificial Sequence: Synthetic oligonucleotide
uaaugucgccagguaagga

SEQ ID NO: 2404959 - RNA, 19 nt, Artificial Sequence
  Description of Artificial Sequence: Synthetic oligonucleotide
caggccaauagagcgcugc

SEQ ID NO: 2404960 - RNA, 19 nt, Artificial Sequence
  Description of Artificial Sequence: Synthetic oligonucleotide
cucaucgcugccgaggguc

SEQ ID NO: 2404961 - RNA, 19 nt, Artificial Sequence
  Description of Artificial Sequence: Synthetic oligonucleotide
caaccagccuucaccuccc

SEQ ID NO: 2404962 - RNA, 19 nt, Artificial Sequence
  Description of Artificial Sequence: Synthetic oligonucleotide
uuucugggauagcccuuug

SEQ ID NO: 2404963 - RNA, 19 nt, Artificial Sequence
  Description of Artificial Sequence: Synthetic oligonucleotide
agcgcugcauccagguugg

SEQ ID NO: 2404964 - RNA, 19 nt, Artificial Sequence
  Description of Artificial Sequence: Synthetic oligonucleotide
gaacaagggaccuggcccu

SEQ ID NO: 2404965 - RNA, 19 nt, Artificial Sequence
  Description of Artificial Sequence: Synthetic oligonucleotide
caucacuaucgaaguguac

SEQ ID NO: 2404966 - RNA, 19 nt, Artificial Sequence
  Description of Artificial Sequence: Synthetic oligonucleotide
caaugauucgcagguucac

SEQ ID NO: 2404967 - RNA, 19 nt, Artificial Sequence
  Description of Artificial Sequence: Synthetic oligonucleotide
cugggauagcccuuugcca

SEQ ID NO: 2404968 - RNA, 19 nt, Artificial Sequence
  Description of Artificial Sequence: Synthetic oligonucleotide
gcugcaaugauucgcaggu

SEQ ID NO: 2404969 - RNA, 19 nt, Artificial Sequence
  Description of Artificial Sequence: Synthetic oligonucleotide
ucacuccuuuguagguccc

SEQ ID NO: 2404970 - RNA, 19 nt, Artificial Sequence
  Description of Artificial Sequence: Synthetic oligonucleotide
gcuuuggcggccauggaag

SEQ ID NO: 2404971 - RNA, 19 nt, Artificial Sequence
  Description of Artificial Sequence: Synthetic oligonucleotide
aaccagccuucaccucccg

SEQ ID NO: 2404972 - RNA, 19 nt, Artificial Sequence
  Description of Artificial Sequence: Synthetic oligonucleotide
ugccaguacccugagcccu

SEQ ID NO: 2404973 - RNA, 19 nt, Artificial Sequence
  Description of Artificial Sequence: Synthetic oligonucleotide
gguaaggaguuagugucug

SEQ ID NO: 2404974 - RNA, 19 nt, Artificial Sequence
  Description of Artificial Sequence: Synthetic oligonucleotide
cuugaucgguuugggguag

SEQ ID NO: 2404975 - RNA, 19 nt, Artificial Sequence
  Description of Artificial Sequence: Synthetic oligonucleotide
accagccuucaccucccgg

SEQ ID NO: 2404976 - RNA, 19 nt, Artificial Sequence
  Description of Artificial Sequence: Synthetic oligonucleotide
gccaauagagcgcugcauc

SEQ ID NO: 2404977 - RNA, 19 nt, Artificial Sequence
  Description of Artificial Sequence: Synthetic oligonucleotide
cagcucaucgcugccgagg

SEQ ID NO: 2404978 - RNA, 19 nt, Artificial Sequence
  Description of Artificial Sequence: Synthetic oligonucleotide
cuuugccacucgaagcuga

SEQ ID NO: 2404979 - RNA, 19 nt, Artificial Sequence
  Description of Artificial Sequence: Synthetic oligonucleotide
guguacacugccaagcucu

SEQ ID NO: 2404980 - RNA, 19 nt, Artificial Sequence
  Description of Artificial Sequence: Synthetic oligonucleotide
agcugaugguuaagacgcc

SEQ ID NO: 2404981 - RNA, 19 nt, Artificial Sequence
  Description of Artificial Sequence: Synthetic oligonucleotide
auccaagagugugacugug

SEQ ID NO: 2404982 - RNA, 19 nt, Artificial Sequence
  Description of Artificial Sequence: Synthetic oligonucleotide
gauucgcagguucacuccu

SEQ ID NO: 2404983 - RNA, 19 nt, Artificial Sequence
  Description of Artificial Sequence: Synthetic oligonucleotide
uuuggcggccauggaagga

SEQ ID NO: 2404984 - RNA, 19 nt, Artificial Sequence
  Description of Artificial Sequence: Synthetic oligonucleotide
cauuagacaggggccauga

SEQ ID NO: 2404985 - RNA, 19 nt, Artificial Sequence
  Description of Artificial Sequence: Synthetic oligonucleotide
aguccagaauucaucacua

SEQ ID NO: 2404986 - RNA, 19 nt, Artificial Sequence
  Description of Artificial Sequence: Synthetic oligonucleotide
uucgcagguucacuccuuu

SEQ ID NO: 2404987 - RNA, 19 nt, Artificial Sequence
  Description of Artificial Sequence: Synthetic oligonucleotide
agacagcagcaucuaaguu

SEQ ID NO: 2404988 - RNA, 19 nt, Artificial Sequence
  Description of Artificial Sequence: Synthetic oligonucleotide
aucgaaguguacacugcca

SEQ ID NO: 2404989 - RNA, 19 nt, Artificial Sequence
  Description of Artificial Sequence: Synthetic oligonucleotide
auagagcgcugcauccagg

SEQ ID NO: 2404990 - RNA, 19 nt, Artificial Sequence
  Description of Artificial Sequence: Synthetic oligonucleotide
ucgcagguucacuccuuug

SEQ ID NO: 2404991 - RNA, 19 nt, Artificial Sequence
  Description of Artificial Sequence: Synthetic oligonucleotide
ggaguggccaagucccaag

SEQ ID NO: 2404992 - RNA, 19 nt, Artificial Sequence
  Description of Artificial Sequence: Synthetic oligonucleotide
uaucgggaguggccaaguc

SEQ ID NO: 2404993 - RNA, 19 nt, Artificial Sequence
  Description of Artificial Sequence: Synthetic oligonucleotide
gggguagcggcugaagucc

SEQ ID NO: 2404994 - RNA, 19 nt, Artificial Sequence
  Description of Artificial Sequence: Synthetic oligonucleotide
ggagacaucuugaaaccca

SEQ ID NO: 2404995 - RNA, 19 nt, Artificial Sequence
  Description of Artificial Sequence: Synthetic oligonucleotide
auuucugggauagcccuuu

SEQ ID NO: 2404996 - RNA, 19 nt, Artificial Sequence
  Description of Artificial Sequence: Synthetic oligonucleotide
aggccaauagagcgcugca

SEQ ID NO: 2404997 - RNA, 19 nt, Artificial Sequence
  Description of Artificial Sequence: Synthetic oligonucleotide
guucacuccuuuguagguc

SEQ ID NO: 2404998 - RNA, 19 nt, Artificial Sequence
  Description of Artificial Sequence: Synthetic oligonucleotide
uccccucaguccagaauuc

SEQ ID NO: 2404999 - RNA, 19 nt, Artificial Sequence
  Description of Artificial Sequence: Synthetic oligonucleotide
ccauccuguucuaggagag

SEQ ID NO: 2405000 - RNA, 19 nt, Artificial Sequence
  Description of Artificial Sequence: Synthetic oligonucleotide
cugaugguuaagacgccaa

SEQ ID NO: 2405001 - RNA, 19 nt, Artificial Sequence
  Description of Artificial Sequence: Synthetic oligonucleotide
agccuucaccucccggaag

SEQ ID NO: 2405002 - RNA, 19 nt, Artificial Sequence
  Description of Artificial Sequence: Synthetic oligonucleotide
cugcauccagguuggguuc

SEQ ID NO: 2405003 - RNA, 19 nt, Artificial Sequence
  Description of Artificial Sequence: Synthetic oligonucleotide
aaguccguucuggccagcu

SEQ ID NO: 2405004 - RNA, 19 nt, Artificial Sequence
  Description of Artificial Sequence: Synthetic oligonucleotide
aacaagggaccuggcccug

SEQ ID NO: 2405005 - RNA, 19 nt, Artificial Sequence
  Description of Artificial Sequence: Synthetic oligonucleotide
ugucgccagguaaggaguu

SEQ ID NO: 2405006 - RNA, 19 nt, Artificial Sequence
  Description of Artificial Sequence: Synthetic oligonucleotide
acuccuuuguagguccccu

SEQ ID NO: 2405007 - RNA, 19 nt, Artificial Sequence
  Description of Artificial Sequence: Synthetic oligonucleotide
ccuuuugauuaacaggcca

SEQ ID NO: 2405008 - RNA, 19 nt, Artificial Sequence
  Description of Artificial Sequence: Synthetic oligonucleotide
gaguuucaugggaaagcca

SEQ ID NO: 2405009 - RNA, 19 nt, Artificial Sequence
  Description of Artificial Sequence: Synthetic oligonucleotide
augucgccagguaaggagu

SEQ ID NO: 2405010 - RNA, 19 nt, Artificial Sequence
  Description of Artificial Sequence: Synthetic oligonucleotide
cugaaucugagccagcauu

SEQ ID NO: 2405011 - RNA, 19 nt, Artificial Sequence
  Description of Artificial Sequence: Synthetic oligonucleotide
ccugaguauaucgggagug

SEQ ID NO: 2405012 - RNA, 19 nt, Artificial Sequence
  Description of Artificial Sequence: Synthetic oligonucleotide
agguaaggaguuagugucu

SEQ ID NO: 2405013 - RNA, 19 nt, Artificial Sequence
  Description of Artificial Sequence: Synthetic oligonucleotide
cauugccaguacccugagc

SEQ ID NO: 2405014 - RNA, 19 nt, Artificial Sequence
  Description of Artificial Sequence: Synthetic oligonucleotide
guuagugucuggagucuga

SEQ ID NO: 2405015 - RNA, 19 nt, Artificial Sequence
  Description of Artificial Sequence: Synthetic oligonucleotide
aucccauugccaguacccu

SEQ ID NO: 2405016 - RNA, 19 nt, Artificial Sequence
  Description of Artificial Sequence: Synthetic oligonucleotide
gcaucuaaguuuccaugga

SEQ ID NO: 2405017 - RNA, 19 nt, Artificial Sequence
  Description of Artificial Sequence: Synthetic oligonucleotide
uccguucuggccagcucau

SEQ ID NO: 2405018 - RNA, 19 nt, Artificial Sequence
  Description of Artificial Sequence: Synthetic oligonucleotide
cccuguugaguuucauggg

SEQ ID NO: 2405019 - RNA, 19 nt, Artificial Sequence
  Description of Artificial Sequence: Synthetic oligonucleotide
gaaguagacuuggccaucu

SEQ ID NO: 2405020 - RNA, 19 nt, Artificial Sequence
  Description of Artificial Sequence: Synthetic oligonucleotide
auaucgggaguggccaagu

SEQ ID NO: 2405021 - RNA, 19 nt, Artificial Sequence
  Description of Artificial Sequence: Synthetic oligonucleotide
gccagguaaggaguuagug

SEQ ID NO: 2405022 - RNA, 19 nt, Artificial Sequence
  Description of Artificial Sequence: Synthetic oligonucleotide
cucgaagcugaugguuaag

SEQ ID NO: 2405023 - RNA, 19 nt, Artificial Sequence
  Description of Artificial Sequence: Synthetic oligonucleotide
cguucuggccagcucaucc

SEQ ID NO: 2405024 - RNA, 19 nt, Artificial Sequence
  Description of Artificial Sequence: Synthetic oligonucleotide
caauagagcgcugcaucca

SEQ ID NO: 2405025 - RNA, 19 nt, Artificial Sequence
  Description of Artificial Sequence: Synthetic oligonucleotide
cccaucaaaggaguuggag

SEQ ID NO: 2405026 - RNA, 19 nt, Artificial Sequence
  Description of Artificial Sequence: Synthetic oligonucleotide
ggcugaaguccguucuggc

SEQ ID NO: 2405027 - RNA, 19 nt, Artificial Sequence
  Description of Artificial Sequence: Synthetic oligonucleotide
guccccucaguccagaauu

SEQ ID NO: 2405028 - RNA, 19 nt, Artificial Sequence
  Description of Artificial Sequence: Synthetic oligonucleotide
gccaagucccaaggcaugg

SEQ ID NO: 2405029 - RNA, 19 nt, Artificial Sequence
  Description of Artificial Sequence: Synthetic oligonucleotide
uugccacucgaagcugaug

SEQ ID NO: 2405030 - RNA, 19 nt, Artificial Sequence
  Description of Artificial Sequence: Synthetic oligonucleotide
ccagugugugacauuucug

SEQ ID NO: 2405031 - RNA, 19 nt, Artificial Sequence
  Description of Artificial Sequence: Synthetic oligonucleotide
aggcggaugucagcccaac

SEQ ID NO: 2405032 - RNA, 19 nt, Artificial Sequence
  Description of Artificial Sequence: Synthetic oligonucleotide
cacuccuuuguaggucccc

SEQ ID NO: 2405033 - RNA, 19 nt, Artificial Sequence
  Description of Artificial Sequence: Synthetic oligonucleotide
acucggaacaagggaccug

SEQ ID NO: 2405034 - RNA, 19 nt, Artificial Sequence
  Description of Artificial Sequence: Synthetic oligonucleotide
cgaagcugaugguuaagac

SEQ ID NO: 2405035 - RNA, 19 nt, Artificial Sequence
  Description of Artificial Sequence: Synthetic oligonucleotide
uagcggcugaaguccguuc

SEQ ID NO: 2405036 - RNA, 19 nt, Artificial Sequence
  Description of Artificial Sequence: Synthetic oligonucleotide
agacaucuugaaacccaca

SEQ ID NO: 2405037 - RNA, 19 nt, Artificial Sequence
  Description of Artificial Sequence: Synthetic oligonucleotide
gugacauuucugggauagc

SEQ ID NO: 2405038 - RNA, 19 nt, Artificial Sequence
  Description of Artificial Sequence: Synthetic oligonucleotide
agucccucccaaagagcag

SEQ ID NO: 2405039 - RNA, 19 nt, Artificial Sequence
  Description of Artificial Sequence: Synthetic oligonucleotide
ccaauacucauugcccuug

SEQ ID NO: 2405040 - RNA, 19 nt, Artificial Sequence
  Description of Artificial Sequence: Synthetic oligonucleotide
ugucagcaugggccaggac

SEQ ID NO: 2405041 - RNA, 19 nt, Artificial Sequence
  Description of Artificial Sequence: Synthetic oligonucleotide
uugaucgguuugggguagc

SEQ ID NO: 2405042 - RNA, 19 nt, Artificial Sequence
  Description of Artificial Sequence: Synthetic oligonucleotide
ggaacaccuuuugauuaac

SEQ ID NO: 2405043 - RNA, 19 nt, Artificial Sequence
  Description of Artificial Sequence: Synthetic oligonucleotide
ccgagggucggucuggcac

SEQ ID NO: 2405044 - RNA, 19 nt, Artificial Sequence
  Description of Artificial Sequence: Synthetic oligonucleotide
ccuuuguagguccccucag

SEQ ID NO: 2405045 - RNA, 19 nt, Artificial Sequence
  Description of Artificial Sequence: Synthetic oligonucleotide
cgaaguguacacugccaag

SEQ ID NO: 2405046 - RNA, 19 nt, Artificial Sequence
  Description of Artificial Sequence: Synthetic oligonucleotide
auccagugugugacauuuc

SEQ ID NO: 2405047 - RNA, 19 nt, Artificial Sequence
  Description of Artificial Sequence: Synthetic oligonucleotide
gaguuagugucuggagucu

SEQ ID NO: 2405048 - RNA, 19 nt, Artificial Sequence
  Description of Artificial Sequence: Synthetic oligonucleotide
ggaguaaugucgccaggua

SEQ ID NO: 2405049 - RNA, 19 nt, Artificial Sequence
  Description of Artificial Sequence: Synthetic oligonucleotide
cuggcacgccaguaaacaa

SEQ ID NO: 2405050 - RNA, 19 nt, Artificial Sequence
  Description of Artificial Sequence: Synthetic oligonucleotide
acauaucgccaaaccuugu

SEQ ID NO: 2405051 - RNA, 19 nt, Artificial Sequence
  Description of Artificial Sequence: Synthetic oligonucleotide
agcauuagacaggggccau

SEQ ID NO: 2405052 - RNA, 19 nt, Artificial Sequence
  Description of Artificial Sequence: Synthetic oligonucleotide
gcugcauccagguuggguu

SEQ ID NO: 2405053 - RNA, 19 nt, Artificial Sequence
  Description of Artificial Sequence: Synthetic oligonucleotide
cccauugccaguacccuga

SEQ ID NO: 2405054 - RNA, 19 nt, Artificial Sequence
  Description of Artificial Sequence: Synthetic oligonucleotide
gguucacuccuuuguaggu

SEQ ID NO: 2405055 - RNA, 19 nt, Artificial Sequence
  Description of Artificial Sequence: Synthetic oligonucleotide
guagguccccucaguccag

SEQ ID NO: 2405056 - RNA, 19 nt, Artificial Sequence
  Description of Artificial Sequence: Synthetic oligonucleotide
gagggucggucuggcacgc

SEQ ID NO: 2405057 - RNA, 19 nt, Artificial Sequence
  Description of Artificial Sequence: Synthetic oligonucleotide
agagcgcugcauccagguu

SEQ ID NO: 2405058 - RNA, 19 nt, Artificial Sequence
  Description of Artificial Sequence: Synthetic oligonucleotide
ccagguaaggaguuagugu

SEQ ID NO: 2405059 - RNA, 19 nt, Artificial Sequence
  Description of Artificial Sequence: Synthetic oligonucleotide
ggagucccucccaaagagc

SEQ ID NO: 2405060 - RNA, 19 nt, Artificial Sequence
  Description of Artificial Sequence: Synthetic oligonucleotide
cauaucgccaaaccuuguu

SEQ ID NO: 2405061 - RNA, 19 nt, Artificial Sequence
  Description of Artificial Sequence: Synthetic oligonucleotide
gucuggcacgccaguaaac

SEQ ID NO: 2405062 - RNA, 19 nt, Artificial Sequence
  Description of Artificial Sequence: Synthetic oligonucleotide
cgagggucggucuggcacg

SEQ ID NO: 2405063 - RNA, 19 nt, Artificial Sequence
  Description of Artificial Sequence: Synthetic oligonucleotide
cggaacaagggaccuggcc

SEQ ID NO: 2405064 - RNA, 19 nt, Artificial Sequence
  Description of Artificial Sequence: Synthetic oligonucleotide
gcugaugguuaagacgcca

SEQ ID NO: 2405065 - RNA, 19 nt, Artificial Sequence
  Description of Artificial Sequence: Synthetic oligonucleotide
ucccaaggcauggcccacu

SEQ ID NO: 2405066 - RNA, 19 nt, Artificial Sequence
  Description of Artificial Sequence: Synthetic oligonucleotide
gcggccauggaaggagagg

SEQ ID NO: 2405067 - RNA, 19 nt, Artificial Sequence
  Description of Artificial Sequence: Synthetic oligonucleotide
ggucuggcacgccaguaaa

SEQ ID NO: 2405068 - RNA, 19 nt, Artificial Sequence
  Description of Artificial Sequence: Synthetic oligonucleotide
gcugccgagggucggucug

SEQ ID NO: 2405069 - RNA, 19 nt, Artificial Sequence
  Description of Artificial Sequence: Synthetic oligonucleotide
ggcggaugucagcccaacc

SEQ ID NO: 2405070 - RNA, 19 nt, Artificial Sequence
  Description of Artificial Sequence: Synthetic oligonucleotide
ccacauaucgccaaaccuu

SEQ ID NO: 2405071 - RNA, 19 nt, Artificial Sequence
  Description of Artificial Sequence: Synthetic oligonucleotide
gcagguucacuccuuugua

SEQ ID NO: 2405072 - RNA, 19 nt, Artificial Sequence
  Description of Artificial Sequence: Synthetic oligonucleotide
ccuguucuaggagaguaga

SEQ ID NO: 2405073 - RNA, 19 nt, Artificial Sequence
  Description of Artificial Sequence: Synthetic oligonucleotide
gugcauccagugugugaca

SEQ ID NO: 2405074 - RNA, 19 nt, Artificial Sequence
  Description of Artificial Sequence: Synthetic oligonucleotide
ucggucuggcacgccagua

SEQ ID NO: 2405075 - RNA, 19 nt, Artificial Sequence
  Description of Artificial Sequence: Synthetic oligonucleotide
gggcugcaaugauucgcag

SEQ ID NO: 2405076 - RNA, 19 nt, Artificial Sequence
  Description of Artificial Sequence: Synthetic oligonucleotide
gaaguccguucuggccagc

SEQ ID NO: 2405077 - RNA, 19 nt, Artificial Sequence
  Description of Artificial Sequence: Synthetic oligonucleotide
acaagggaccuggcccuga

SEQ ID NO: 2405078 - RNA, 19 nt, Artificial Sequence
  Description of Artificial Sequence: Synthetic oligonucleotide
cagcccaaccagccuucac

SEQ ID NO: 2405079 - RNA, 19 nt, Artificial Sequence
  Description of Artificial Sequence: Synthetic oligonucleotide
ugccgagggucggucuggc

SEQ ID NO: 2405080 - RNA, 19 nt, Artificial Sequence
  Description of Artificial Sequence: Synthetic oligonucleotide
gcaugggccaggaccuucc

SEQ ID NO: 2405081 - RNA, 19 nt, Artificial Sequence
  Description of Artificial Sequence: Synthetic oligonucleotide
agggucggucuggcacgcc

SEQ ID NO: 2405082 - RNA, 19 nt, Artificial Sequence
  Description of Artificial Sequence: Synthetic oligonucleotide
gcauuagacaggggccaug

SEQ ID NO: 2405083 - RNA, 19 nt, Artificial Sequence
  Description of Artificial Sequence: Synthetic oligonucleotide
aggaccuucccuggcccau

SEQ ID NO: 2405084 - RNA, 19 nt, Artificial Sequence
  Description of Artificial Sequence: Synthetic oligonucleotide
ggucggucuggcacgccag

SEQ ID NO: 2405085 - RNA, 19 nt, Artificial Sequence
  Description of Artificial Sequence: Synthetic oligonucleotide
aucgcugccgagggucggu

SEQ ID NO: 2405086 - RNA, 19 nt, Artificial Sequence
  Description of Artificial Sequence: Synthetic oligonucleotide
guccagaauucaucacuau

SEQ ID NO: 2405087 - RNA, 19 nt, Artificial Sequence
  Description of Artificial Sequence: Synthetic oligonucleotide
gggucggucuggcacgcca

SEQ ID NO: 2405088 - RNA, 19 nt, Artificial Sequence
  Description of Artificial Sequence: Synthetic oligonucleotide
cacuaucgaaguguacacu

SEQ ID NO: 2405089 - RNA, 19 nt, Artificial Sequence
  Description of Artificial Sequence: Synthetic oligonucleotide
cccacauaucgccaaaccu

SEQ ID NO: 2405090 - RNA, 19 nt, Artificial Sequence
  Description of Artificial Sequence: Synthetic oligonucleotide
agguuggguucuacccugu

SEQ ID NO: 2405091 - RNA, 19 nt, Artificial Sequence
  Description of Artificial Sequence: Synthetic oligonucleotide
ccaagucccaaggcauggc

SEQ ID NO: 2405092 - RNA, 19 nt, Artificial Sequence
  Description of Artificial Sequence: Synthetic oligonucleotide
auucgcagguucacuccuu

SEQ ID NO: 2405093 - RNA, 19 nt, Artificial Sequence
  Description of Artificial Sequence: Synthetic oligonucleotide
cauugcccuugaagaagua

SEQ ID NO: 2405094 - RNA, 19 nt, Artificial Sequence
  Description of Artificial Sequence: Synthetic oligonucleotide
guaugggcuuuggcggcca

SEQ ID NO: 2405095 - RNA, 19 nt, Artificial Sequence
  Description of Artificial Sequence: Synthetic oligonucleotide
ggcggccauggaaggagag

SEQ ID NO: 2405096 - RNA, 19 nt, Artificial Sequence
  Description of Artificial Sequence: Synthetic oligonucleotide
caagggaccuggcccugaa

SEQ ID NO: 2405097 - RNA, 19 nt, Artificial Sequence
  Description of Artificial Sequence: Synthetic oligonucleotide
gcccaaccagccuucaccu

SEQ ID NO: 2405098 - RNA, 19 nt, Artificial Sequence
  Description of Artificial Sequence: Synthetic oligonucleotide
agccagcauuagacagggg

SEQ ID NO: 2405099 - RNA, 19 nt, Artificial Sequence
  Description of Artificial Sequence: Synthetic oligonucleotide
cauggaaggagaggcggau

SEQ ID NO: 2405100 - RNA, 19 nt, Artificial Sequence
  Description of Artificial Sequence: Synthetic oligonucleotide
guuugggguagcggcugaa

SEQ ID NO: 2405101 - RNA, 19 nt, Artificial Sequence
  Description of Artificial Sequence: Synthetic oligonucleotide
ccaugagugccugaguaua

SEQ ID NO: 2405102 - RNA, 19 nt, Artificial Sequence
  Description of Artificial Sequence: Synthetic oligonucleotide
ggagaguagacagcagcau

SEQ ID NO: 2405103 - RNA, 19 nt, Artificial Sequence
  Description of Artificial Sequence: Synthetic oligonucleotide
caggggccaugagugccug

SEQ ID NO: 2405104 - RNA, 19 nt, Artificial Sequence
  Description of Artificial Sequence: Synthetic oligonucleotide
gaggcggaugucagcccaa

SEQ ID NO: 2405105 - RNA, 19 nt, Artificial Sequence
  Description of Artificial Sequence: Synthetic oligonucleotide
cccugaaucugagccagca

SEQ ID NO: 2405106 - RNA, 19 nt, Artificial Sequence
  Description of Artificial Sequence: Synthetic oligonucleotide
ucgcugccgagggucgguc

SEQ ID NO: 2405107 - RNA, 19 nt, Artificial Sequence
  Description of Artificial Sequence: Synthetic oligonucleotide
ccuucccuggcccaucaaa

SEQ ID NO: 2405108 - RNA, 19 nt, Artificial Sequence
  Description of Artificial Sequence: Synthetic oligonucleotide
gggauagcccuuugccacu

SEQ ID NO: 2405109 - RNA, 19 nt, Artificial Sequence
  Description of Artificial Sequence: Synthetic oligonucleotide
acaggccaauagagcgcug

SEQ ID NO: 2405110 - RNA, 19 nt, Artificial Sequence
  Description of Artificial Sequence: Synthetic oligonucleotide
gccugaguauaucgggagu

SEQ ID NO: 2405111 - RNA, 19 nt, Artificial Sequence
  Description of Artificial Sequence: Synthetic oligonucleotide
gccaagcucugggauguca

SEQ ID NO: 2405112 - RNA, 19 nt, Artificial Sequence
  Description of Artificial Sequence: Synthetic oligonucleotide
cacucggaacaagggaccu

SEQ ID NO: 2405113 - RNA, 19 nt, Artificial Sequence
  Description of Artificial Sequence: Synthetic oligonucleotide
gucggucuggcacgccagu

SEQ ID NO: 2405114 - RNA, 19 nt, Artificial Sequence
  Description of Artificial Sequence: Synthetic oligonucleotide
gccaucuugccagcucauc

SEQ ID NO: 2405115 - RNA, 19 nt, Artificial Sequence
  Description of Artificial Sequence: Synthetic oligonucleotide
ggguucuacccuguugagu

SEQ ID NO: 2405116 - RNA, 19 nt, Artificial Sequence
  Description of Artificial Sequence: Synthetic oligonucleotide
ggcacgccaguaaacaauu

SEQ ID NO: 2405117 - RNA, 19 nt, Artificial Sequence
  Description of Artificial Sequence: Synthetic oligonucleotide
gccaauacucauugcccuu

SEQ ID NO: 2405118 - RNA, 19 nt, Artificial Sequence
  Description of Artificial Sequence: Synthetic oligonucleotide
ccuggcccaucaaaggagu

SEQ ID NO: 2405119 - RNA, 19 nt, Artificial Sequence
  Description of Artificial Sequence: Synthetic oligonucleotide
gaaagccaggagacaucuu

SEQ ID NO: 2405120 - RNA, 19 nt, Artificial Sequence
  Description of Artificial Sequence: Synthetic oligonucleotide
gccacucgaagcugauggu

SEQ ID NO: 2405121 - RNA, 19 nt, Artificial Sequence
  Description of Artificial Sequence: Synthetic oligonucleotide
ccaaggcauggcccacuuc

SEQ ID NO: 2405122 - RNA, 19 nt, Artificial Sequence
  Description of Artificial Sequence: Synthetic oligonucleotide
gggaguggccaagucccaa

SEQ ID NO: 2405123 - RNA, 19 nt, Artificial Sequence
  Description of Artificial Sequence: Synthetic oligonucleotide
cgccaauacucauugcccu

SEQ ID NO: 2405124 - RNA, 19 nt, Artificial Sequence
  Description of Artificial Sequence: Synthetic oligonucleotide
caguacccugagcccuuaa

SEQ ID NO: 2405125 - RNA, 19 nt, Artificial Sequence
  Description of Artificial Sequence: Synthetic oligonucleotide
ggaccuucccuggcccauc

SEQ ID NO: 2405126 - RNA, 19 nt, Artificial Sequence
  Description of Artificial Sequence: Synthetic oligonucleotide
ggccaauagagcgcugcau

SEQ ID NO: 2405127 - RNA, 19 nt, Artificial Sequence
  Description of Artificial Sequence: Synthetic oligonucleotide
ccccucaguccagaauuca

SEQ ID NO: 2405128 - RNA, 19 nt, Artificial Sequence
  Description of Artificial Sequence: Synthetic oligonucleotide
gcccugaaucugagccagc

SEQ ID NO: 2405129 - RNA, 19 nt, Artificial Sequence
  Description of Artificial Sequence: Synthetic oligonucleotide
gcccaucaaaggaguugga

SEQ ID NO: 2405130 - RNA, 19 nt, Artificial Sequence
  Description of Artificial Sequence: Synthetic oligonucleotide
gguuggguucuacccuguu

SEQ ID NO: 2405131 - RNA, 19 nt, Artificial Sequence
  Description of Artificial Sequence: Synthetic oligonucleotide
ccugaaucugagccagcau

SEQ ID NO: 2405132 - RNA, 19 nt, Artificial Sequence
  Description of Artificial Sequence: Synthetic oligonucleotide
gccgagggucggucuggca

SEQ ID NO: 2405133 - RNA, 19 nt, Artificial Sequence
  Description of Artificial Sequence: Synthetic oligonucleotide
cggucuggcacgccaguaa

SEQ ID NO: 2405134 - RNA, 19 nt, Artificial Sequence
  Description of Artificial Sequence: Synthetic oligonucleotide
gcauccagugugugacauu

SEQ ID NO: 2405135 - RNA, 19 nt, Artificial Sequence
  Description of Artificial Sequence: Synthetic oligonucleotide
cgccaaaccuuguuucccu

SEQ ID NO: 2405136 - RNA, 19 nt, Artificial Sequence
  Description of Artificial Sequence: Synthetic oligonucleotide
cugcaaugauucgcagguu

SEQ ID NO: 2405137 - RNA, 19 nt, Artificial Sequence
  Description of Artificial Sequence: Synthetic oligonucleotide
gcucaucgcugccgagggu

SEQ ID NO: 2405138 - RNA, 19 nt, Artificial Sequence
  Description of Artificial Sequence: Synthetic oligonucleotide
ccguucuggccagcucauc

SEQ ID NO: 2405139 - RNA, 19 nt, Artificial Sequence
  Description of Artificial Sequence: Synthetic oligonucleotide
gcgcugcauccagguuggg

SEQ ID NO: 2405140 - RNA, 19 nt, Artificial Sequence
  Description of Artificial Sequence: Synthetic oligonucleotide
ccacuucaugggcugcaau

SEQ ID NO: 2405141 - RNA, 19 nt, Artificial Sequence
  Description of Artificial Sequence: Synthetic oligonucleotide
cgggaguggccaaguccca

SEQ ID NO: 2405142 - RNA, 19 nt, Artificial Sequence
  Description of Artificial Sequence: Synthetic oligonucleotide
gcacgccaguaaacaauuu

SEQ ID NO: 2405143 - RNA, 19 nt, Artificial Sequence
  Description of Artificial Sequence: Synthetic oligonucleotide
gccaguacccugagcccuu

SEQ ID NO: 2405144 - RNA, 19 nt, Artificial Sequence
  Description of Artificial Sequence: Synthetic oligonucleotide
cgccagguaaggaguuagu

SEQ ID NO: 2405145 - RNA, 19 nt, Artificial Sequence
  Description of Artificial Sequence: Synthetic oligonucleotide
uuaaaauugaugauuacuc

SEQ ID NO: 2405146 - RNA, 19 nt, Artificial Sequence
  Description of Artificial Sequence: Synthetic oligonucleotide
uuuacaaugugaauuagac

SEQ ID NO: 2405147 - RNA, 19 nt, Artificial Sequence
  Description of Artificial Sequence: Synthetic oligonucleotide
gaagcaauggucaacaagg

SEQ ID NO: 2405148 - RNA, 19 nt, Artificial Sequence
  Description of Artificial Sequence: Synthetic oligonucleotide
uaaaacuguauuuagcugc

SEQ ID NO: 2405149 - RNA, 19 nt, Artificial Sequence
  Description of Artificial Sequence: Synthetic oligonucleotide
aaaauugaugauuacucug

SEQ ID NO: 2405150 - RNA, 19 nt, Artificial Sequence
  Description of Artificial Sequence: Synthetic oligonucleotide
aaagguuguauauaucaag

SEQ ID NO: 2405151 - RNA, 19 nt, Artificial Sequence
  Description of Artificial Sequence: Synthetic oligonucleotide
aauggguugugccaaugcc

SEQ ID NO: 2405152 - RNA, 19 nt, Artificial Sequence
  Description of Artificial Sequence: Synthetic oligonucleotide
agacagaaauaccugauac

SEQ ID NO: 2405153 - RNA, 19 nt, Artificial Sequence
  Description of Artificial Sequence: Synthetic oligonucleotide
gagugauuaaaauugauga

SEQ ID NO: 2405154 - RNA, 19 nt, Artificial Sequence
  Description of Artificial Sequence: Synthetic oligonucleotide
gauacaguaacagggaagg

SEQ ID NO: 2405155 - RNA, 19 nt, Artificial Sequence
  Description of Artificial Sequence: Synthetic oligonucleotide
uauaucaaggauuuuacaa

SEQ ID NO: 2405156 - RNA, 19 nt, Artificial Sequence
  Description of Artificial Sequence: Synthetic oligonucleotide
gaaacacugguucagcagg

SEQ ID NO: 2405157 - RNA, 19 nt, Artificial Sequence
  Description of Artificial Sequence: Synthetic oligonucleotide
uauauaucaaggauuuuac

SEQ ID NO: 2405158 - RNA, 19 nt, Artificial Sequence
  Description of Artificial Sequence: Synthetic oligonucleotide
aagccagaauccuugcugc

SEQ ID NO: 2405159 - RNA, 19 nt, Artificial Sequence
  Description of Artificial Sequence: Synthetic oligonucleotide
uaugaucaaaaugugagug

SEQ ID NO: 2405160 - RNA, 19 nt, Artificial Sequence
  Description of Artificial Sequence: Synthetic oligonucleotide
uguucagauguccaagggg

SEQ ID NO: 2405161 - RNA, 19 nt, Artificial Sequence
  Description of Artificial Sequence: Synthetic oligonucleotide
ugaauuagacagaaauacc

SEQ ID NO: 2405162 - RNA, 19 nt, Artificial Sequence
  Description of Artificial Sequence: Synthetic oligonucleotide
augugaauuagacagaaau

SEQ ID NO: 2405163 - RNA, 19 nt, Artificial Sequence
  Description of Artificial Sequence: Synthetic oligonucleotide
ucuucuuuggaaaccagga

SEQ ID NO: 2405164 - RNA, 19 nt, Artificial Sequence
  Description of Artificial Sequence: Synthetic oligonucleotide
agaaauaccugauacagua

SEQ ID NO: 2405165 - RNA, 19 nt, Artificial Sequence
  Description of Artificial Sequence: Synthetic oligonucleotide
augaagucaucugaggucc

SEQ ID NO: 2405166 - RNA, 19 nt, Artificial Sequence
  Description of Artificial Sequence: Synthetic oligonucleotide
ucugagaacagcagcgggg

SEQ ID NO: 2405167 - RNA, 19 nt, Artificial Sequence
  Description of Artificial Sequence: Synthetic oligonucleotide
uaucaaggauuuuacaaug

SEQ ID NO: 2405168 - RNA, 19 nt, Artificial Sequence
  Description of Artificial Sequence: Synthetic oligonucleotide
aaaugugagugauuaaaau

SEQ ID NO: 2405169 - RNA, 19 nt, Artificial Sequence
  Description of Artificial Sequence: Synthetic oligonucleotide
ugauacaguaacagggaag

SEQ ID NO: 2405170 - RNA, 19 nt, Artificial Sequence
  Description of Artificial Sequence: Synthetic oligonucleotide
gugaauuagacagaaauac

SEQ ID NO: 2405171 - RNA, 19 nt, Artificial Sequence
  Description of Artificial Sequence: Synthetic oligonucleotide
uaaaauugaugauuacucu

SEQ ID NO: 2405172 - RNA, 19 nt, Artificial Sequence
  Description of Artificial Sequence: Synthetic oligonucleotide
uguuuuaacccugccaagg

SEQ ID NO: 2405173 - RNA, 19 nt, Artificial Sequence
  Description of Artificial Sequence: Synthetic oligonucleotide
auugaugauuacucugugg

SEQ ID NO: 2405174 - RNA, 19 nt, Artificial Sequence
  Description of Artificial Sequence: Synthetic oligonucleotide
uuguauauaucaaggauuu

SEQ ID NO: 2405175 - RNA, 19 nt, Artificial Sequence
  Description of Artificial Sequence: Synthetic oligonucleotide
agcacugcgacccucaucu

SEQ ID NO: 2405176 - RNA, 19 nt, Artificial Sequence
  Description of Artificial Sequence: Synthetic oligonucleotide
auuagacagaaauaccuga

SEQ ID NO: 2405177 - RNA, 19 nt, Artificial Sequence
  Description of Artificial Sequence: Synthetic oligonucleotide
aaauugaugauuacucugu

SEQ ID NO: 2405178 - RNA, 19 nt, Artificial Sequence
  Description of Artificial Sequence: Synthetic oligonucleotide
auaaaacuguauuuagcug

SEQ ID NO: 2405179 - RNA, 19 nt, Artificial Sequence
  Description of Artificial Sequence: Synthetic oligonucleotide
accugauacaguaacaggg

SEQ ID NO: 2405180 - RNA, 19 nt, Artificial Sequence
  Description of Artificial Sequence: Synthetic oligonucleotide
aauuagacagaaauaccug

SEQ ID NO: 2405181 - RNA, 19 nt, Artificial Sequence
  Description of Artificial Sequence: Synthetic oligonucleotide
aaaggguuccaauggguug

SEQ ID NO: 2405182 - RNA, 19 nt, Artificial Sequence
  Description of Artificial Sequence: Synthetic oligonucleotide
auaucaaggauuuuacaau

SEQ ID NO: 2405183 - RNA, 19 nt, Artificial Sequence
  Description of Artificial Sequence: Synthetic oligonucleotide
gauuuuacaaugugaauua

SEQ ID NO: 2405184 - RNA, 19 nt, Artificial Sequence
  Description of Artificial Sequence: Synthetic oligonucleotide
uuugaucuguuuuaacccu

SEQ ID NO: 2405185 - RNA, 19 nt, Artificial Sequence
  Description of Artificial Sequence: Synthetic oligonucleotide
ugagaaggccccuuuagca

SEQ ID NO: 2405186 - RNA, 19 nt, Artificial Sequence
  Description of Artificial Sequence: Synthetic oligonucleotide
gaugaagucaucugagguc

SEQ ID NO: 2405187 - RNA, 19 nt, Artificial Sequence
  Description of Artificial Sequence: Synthetic oligonucleotide
agaaacacugguucagcag

SEQ ID NO: 2405188 - RNA, 19 nt, Artificial Sequence
  Description of Artificial Sequence: Synthetic oligonucleotide
uuacaaugugaauuagaca

SEQ ID NO: 2405189 - RNA, 19 nt, Artificial Sequence
  Description of Artificial Sequence: Synthetic oligonucleotide
aagaaacacugguucagca

SEQ ID NO: 2405190 - RNA, 19 nt, Artificial Sequence
  Description of Artificial Sequence: Synthetic oligonucleotide
cuggcaucguugaagaggc

SEQ ID NO: 2405191 - RNA, 19 nt, Artificial Sequence
  Description of Artificial Sequence: Synthetic oligonucleotide
auuacucugugguuaaaga

SEQ ID NO: 2405192 - RNA, 19 nt, Artificial Sequence
  Description of Artificial Sequence: Synthetic oligonucleotide
ugcuaugaucaaaauguga

SEQ ID NO: 2405193 - RNA, 19 nt, Artificial Sequence
  Description of Artificial Sequence: Synthetic oligonucleotide
ugaggguggagaaggggcg

SEQ ID NO: 2405194 - RNA, 19 nt, Artificial Sequence
  Description of Artificial Sequence: Synthetic oligonucleotide
agugauuaaaauugaugau

SEQ ID NO: 2405195 - RNA, 19 nt, Artificial Sequence
  Description of Artificial Sequence: Synthetic oligonucleotide
auaccugauacaguaacag

SEQ ID NO: 2405196 - RNA, 19 nt, Artificial Sequence
  Description of Artificial Sequence: Synthetic oligonucleotide
uuagacagaaauaccugau

SEQ ID NO: 2405197 - RNA, 19 nt, Artificial Sequence
  Description of Artificial Sequence: Synthetic oligonucleotide
guucagauguccaaggggc

SEQ ID NO: 2405198 - RNA, 19 nt, Artificial Sequence
  Description of Artificial Sequence: Synthetic oligonucleotide
gauuaaaauugaugauuac

SEQ ID NO: 2405199 - RNA, 19 nt, Artificial Sequence
  Description of Artificial Sequence: Synthetic oligonucleotide
gaauuagacagaaauaccu

SEQ ID NO: 2405200 - RNA, 19 nt, Artificial Sequence
  Description of Artificial Sequence: Synthetic oligonucleotide
aacagaaagggaagcaaug

SEQ ID NO: 2405201 - RNA, 19 nt, Artificial Sequence
  Description of Artificial Sequence: Synthetic oligonucleotide
auauaucaaggauuuuaca

SEQ ID NO: 2405202 - RNA, 19 nt, Artificial Sequence
  Description of Artificial Sequence: Synthetic oligonucleotide
gcaauggucaacaaggaag

SEQ ID NO: 2405203 - RNA, 19 nt, Artificial Sequence
  Description of Artificial Sequence: Synthetic oligonucleotide
ugccgggaaagaaacacug

SEQ ID NO: 2405204 - RNA, 19 nt, Artificial Sequence
  Description of Artificial Sequence: Synthetic oligonucleotide
ugcaugccgggaaagaaac

SEQ ID NO: 2405205 - RNA, 19 nt, Artificial Sequence
  Description of Artificial Sequence: Synthetic oligonucleotide
augguaaucugcucguucu

SEQ ID NO: 2405206 - RNA, 19 nt, Artificial Sequence
  Description of Artificial Sequence: Synthetic oligonucleotide
uuaacccugccaaggaaac

SEQ ID NO: 2405207 - RNA, 19 nt, Artificial Sequence
  Description of Artificial Sequence: Synthetic oligonucleotide
cuccgcaccaucaauggag

SEQ ID NO: 2405208 - RNA, 19 nt, Artificial Sequence
  Description of Artificial Sequence: Synthetic oligonucleotide
gacagaaauaccugauaca

SEQ ID NO: 2405209 - RNA, 19 nt, Artificial Sequence
  Description of Artificial Sequence: Synthetic oligonucleotide
aaaacuguauuuagcugcu

SEQ ID NO: 2405210 - RNA, 19 nt, Artificial Sequence
  Description of Artificial Sequence: Synthetic oligonucleotide
aggaaaccaggauuugauc

SEQ ID NO: 2405211 - RNA, 19 nt, Artificial Sequence
  Description of Artificial Sequence: Synthetic oligonucleotide
uccgcaccaucaauggagg

SEQ ID NO: 2405212 - RNA, 19 nt, Artificial Sequence
  Description of Artificial Sequence: Synthetic oligonucleotide
ggcgaugguaaucugcucg

SEQ ID NO: 2405213 - RNA, 19 nt, Artificial Sequence
  Description of Artificial Sequence: Synthetic oligonucleotide
aauaccugauacaguaaca

SEQ ID NO: 2405214 - RNA, 19 nt, Artificial Sequence
  Description of Artificial Sequence: Synthetic oligonucleotide
aacccugccaaggaaacca

SEQ ID NO: 2405215 - RNA, 19 nt, Artificial Sequence
  Description of Artificial Sequence: Synthetic oligonucleotide
ugaucaaaaugugagugau

SEQ ID NO: 2405216 - RNA, 19 nt, Artificial Sequence
  Description of Artificial Sequence: Synthetic oligonucleotide
caggaugaagucaucugag

SEQ ID NO: 2405217 - RNA, 19 nt, Artificial Sequence
  Description of Artificial Sequence: Synthetic oligonucleotide
guauauaucaaggauuuua

SEQ ID NO: 2405218 - RNA, 19 nt, Artificial Sequence
  Description of Artificial Sequence: Synthetic oligonucleotide
aucuguuuuaacccugcca

SEQ ID NO: 2405219 - RNA, 19 nt, Artificial Sequence
  Description of Artificial Sequence: Synthetic oligonucleotide
ucggcgaugguaaucugcu

SEQ ID NO: 2405220 - RNA, 19 nt, Artificial Sequence
  Description of Artificial Sequence: Synthetic oligonucleotide
gaugauuacucugugguua

SEQ ID NO: 2405221 - RNA, 19 nt, Artificial Sequence
  Description of Artificial Sequence: Synthetic oligonucleotide
gaugguaaucugcucguuc

SEQ ID NO: 2405222 - RNA, 19 nt, Artificial Sequence
  Description of Artificial Sequence: Synthetic oligonucleotide
gggaaagaaacacugguuc

SEQ ID NO: 2405223 - RNA, 19 nt, Artificial Sequence
  Description of Artificial Sequence: Synthetic oligonucleotide
caauggucaacaaggaaga

SEQ ID NO: 2405224 - RNA, 19 nt, Artificial Sequence
  Description of Artificial Sequence: Synthetic oligonucleotide
ucuacuaguggagucccug

SEQ ID NO: 2405225 - RNA, 19 nt, Artificial Sequence
  Description of Artificial Sequence: Synthetic oligonucleotide
caaugccaaaugcaugccg

SEQ ID NO: 2405226 - RNA, 19 nt, Artificial Sequence
  Description of Artificial Sequence: Synthetic oligonucleotide
aaggaaaccaggauuugau

SEQ ID NO: 2405227 - RNA, 19 nt, Artificial Sequence
  Description of Artificial Sequence: Synthetic oligonucleotide
caaaaugugagugauuaaa

SEQ ID NO: 2405228 - RNA, 19 nt, Artificial Sequence
  Description of Artificial Sequence: Synthetic oligonucleotide
uagacagaaauaccugaua

SEQ ID NO: 2405229 - RNA, 19 nt, Artificial Sequence
  Description of Artificial Sequence: Synthetic oligonucleotide
ggaagcaauggucaacaag

SEQ ID NO: 2405230 - RNA, 19 nt, Artificial Sequence
  Description of Artificial Sequence: Synthetic oligonucleotide
guguucagauguccaaggg

SEQ ID NO: 2405231 - RNA, 19 nt, Artificial Sequence
  Description of Artificial Sequence: Synthetic oligonucleotide
aucaacgggucugagaaca

SEQ ID NO: 2405232 - RNA, 19 nt, Artificial Sequence
  Description of Artificial Sequence: Synthetic oligonucleotide
gaggcaacagaaagggaag

SEQ ID NO: 2405233 - RNA, 19 nt, Artificial Sequence
  Description of Artificial Sequence: Synthetic oligonucleotide
gcugcuaugaucaaaaugu

SEQ ID NO: 2405234 - RNA, 19 nt, Artificial Sequence
  Description of Artificial Sequence: Synthetic oligonucleotide
caugccgggaaagaaacac

SEQ ID NO: 2405235 - RNA, 19 nt, Artificial Sequence
  Description of Artificial Sequence: Synthetic oligonucleotide
agcgcagggaaccuuucag

SEQ ID NO: 2405236 - RNA, 19 nt, Artificial Sequence
  Description of Artificial Sequence: Synthetic oligonucleotide
aucaauggaggcaacagaa

SEQ ID NO: 2405237 - RNA, 19 nt, Artificial Sequence
  Description of Artificial Sequence: Synthetic oligonucleotide
ugaggcugggcccaucaac

SEQ ID NO: 2405238 - RNA, 19 nt, Artificial Sequence
  Description of Artificial Sequence: Synthetic oligonucleotide
gucugagaacagcagcggg

SEQ ID NO: 2405239 - RNA, 19 nt, Artificial Sequence
  Description of Artificial Sequence: Synthetic oligonucleotide
cacuccgcaccaucaaugg

SEQ ID NO: 2405240 - RNA, 19 nt, Artificial Sequence
  Description of Artificial Sequence: Synthetic oligonucleotide
acuaguggagucccugugu

SEQ ID NO: 2405241 - RNA, 19 nt, Artificial Sequence
  Description of Artificial Sequence: Synthetic oligonucleotide
cugagaaggccccuuuagc

SEQ ID NO: 2405242 - RNA, 19 nt, Artificial Sequence
  Description of Artificial Sequence: Synthetic oligonucleotide
aaaaggguuccaauggguu

SEQ ID NO: 2405243 - RNA, 19 nt, Artificial Sequence
  Description of Artificial Sequence: Synthetic oligonucleotide
aaugcacuccgcaccauca

SEQ ID NO: 2405244 - RNA, 19 nt, Artificial Sequence
  Description of Artificial Sequence: Synthetic oligonucleotide
augccaaaugcaugccggg

SEQ ID NO: 2405245 - RNA, 19 nt, Artificial Sequence
  Description of Artificial Sequence: Synthetic oligonucleotide
aaaugcaugccgggaaaga

SEQ ID NO: 2405246 - RNA, 19 nt, Artificial Sequence
  Description of Artificial Sequence: Synthetic oligonucleotide
agaaggccccuuuagcacu

SEQ ID NO: 2405247 - RNA, 19 nt, Artificial Sequence
  Description of Artificial Sequence: Synthetic oligonucleotide
ucaaaaugugagugauuaa

SEQ ID NO: 2405248 - RNA, 19 nt, Artificial Sequence
  Description of Artificial Sequence: Synthetic oligonucleotide
aggcaacagaaagggaagc

SEQ ID NO: 2405249 - RNA, 19 nt, Artificial Sequence
  Description of Artificial Sequence: Synthetic oligonucleotide
caauggguugugccaaugc

SEQ ID NO: 2405250 - RNA, 19 nt, Artificial Sequence
  Description of Artificial Sequence: Synthetic oligonucleotide
guuuuaacccugccaagga

SEQ ID NO: 2405251 - RNA, 19 nt, Artificial Sequence
  Description of Artificial Sequence: Synthetic oligonucleotide
uucagauguccaaggggcu

SEQ ID NO: 2405252 - RNA, 19 nt, Artificial Sequence
  Description of Artificial Sequence: Synthetic oligonucleotide
uggucgucggcgaugguaa

SEQ ID NO: 2405253 - RNA, 19 nt, Artificial Sequence
  Description of Artificial Sequence: Synthetic oligonucleotide
ucagaaugucuuugaucug

SEQ ID NO: 2405254 - RNA, 19 nt, Artificial Sequence
  Description of Artificial Sequence: Synthetic oligonucleotide
aggauuuuacaaugugaau

SEQ ID NO: 2405255 - RNA, 19 nt, Artificial Sequence
  Description of Artificial Sequence: Synthetic oligonucleotide
cuguauuuagcugcuauga

SEQ ID NO: 2405256 - RNA, 19 nt, Artificial Sequence
  Description of Artificial Sequence: Synthetic oligonucleotide
ucucuacuaguggaguccc

SEQ ID NO: 2405257 - RNA, 19 nt, Artificial Sequence
  Description of Artificial Sequence: Synthetic oligonucleotide
ucaacgggucugagaacag

SEQ ID NO: 2405258 - RNA, 19 nt, Artificial Sequence
  Description of Artificial Sequence: Synthetic oligonucleotide
aggggucucuacuagugga

SEQ ID NO: 2405259 - RNA, 19 nt, Artificial Sequence
  Description of Artificial Sequence: Synthetic oligonucleotide
guugcugggaggaagcuga

SEQ ID NO: 2405260 - RNA, 19 nt, Artificial Sequence
  Description of Artificial Sequence: Synthetic oligonucleotide
gagaaggggcgugugacug

SEQ ID NO: 2405261 - RNA, 19 nt, Artificial Sequence
  Description of Artificial Sequence: Synthetic oligonucleotide
agcagcggggagcagguug

SEQ ID NO: 2405262 - RNA, 19 nt, Artificial Sequence
  Description of Artificial Sequence: Synthetic oligonucleotide
cugcuaugaucaaaaugug

SEQ ID NO: 2405263 - RNA, 19 nt, Artificial Sequence
  Description of Artificial Sequence: Synthetic oligonucleotide
cuguuuuaacccugccaag

SEQ ID NO: 2405264 - RNA, 19 nt, Artificial Sequence
  Description of Artificial Sequence: Synthetic oligonucleotide
agggaagcaauggucaaca

SEQ ID NO: 2405265 - RNA, 19 nt, Artificial Sequence
  Description of Artificial Sequence: Synthetic oligonucleotide
aaggggcucacgaugguga

SEQ ID NO: 2405266 - RNA, 19 nt, Artificial Sequence
  Description of Artificial Sequence: Synthetic oligonucleotide
uaguggucgucggcgaugg

SEQ ID NO: 2405267 - RNA, 19 nt, Artificial Sequence
  Description of Artificial Sequence: Synthetic oligonucleotide
gucucuacuaguggagucc

SEQ ID NO: 2405268 - RNA, 19 nt, Artificial Sequence
  Description of Artificial Sequence: Synthetic oligonucleotide
agcaauggucaacaaggaa

SEQ ID NO: 2405269 - RNA, 19 nt, Artificial Sequence
  Description of Artificial Sequence: Synthetic oligonucleotide
augauuacucugugguuaa

SEQ ID NO: 2405270 - RNA, 19 nt, Artificial Sequence
  Description of Artificial Sequence: Synthetic oligonucleotide
ggaaagaaacacugguuca

SEQ ID NO: 2405271 - RNA, 19 nt, Artificial Sequence
  Description of Artificial Sequence: Synthetic oligonucleotide
caucugaggucccuccacc

SEQ ID NO: 2405272 - RNA, 19 nt, Artificial Sequence
  Description of Artificial Sequence: Synthetic oligonucleotide
ugcacccuggcaucguuga

SEQ ID NO: 2405273 - RNA, 19 nt, Artificial Sequence
  Description of Artificial Sequence: Synthetic oligonucleotide
uggagaaggggcgugugac

SEQ ID NO: 2405274 - RNA, 19 nt, Artificial Sequence
  Description of Artificial Sequence: Synthetic oligonucleotide
ugaagcgcagggaaccuuu

SEQ ID NO: 2405275 - RNA, 19 nt, Artificial Sequence
  Description of Artificial Sequence: Synthetic oligonucleotide
guuguauauaucaaggauu

SEQ ID NO: 2405276 - RNA, 19 nt, Artificial Sequence
  Description of Artificial Sequence: Synthetic oligonucleotide
ugaugauuacucugugguu

SEQ ID NO: 2405277 - RNA, 19 nt, Artificial Sequence
  Description of Artificial Sequence: Synthetic oligonucleotide
ugagaacagcagcggggag

SEQ ID NO: 2405278 - RNA, 19 nt, Artificial Sequence
  Description of Artificial Sequence: Synthetic oligonucleotide
gagcuuggguugcugggag

SEQ ID NO: 2405279 - RNA, 19 nt, Artificial Sequence
  Description of Artificial Sequence: Synthetic oligonucleotide
caguaacagggaaggaaug

SEQ ID NO: 2405280 - RNA, 19 nt, Artificial Sequence
  Description of Artificial Sequence: Synthetic oligonucleotide
ugguugaagcgcagggaac

SEQ ID NO: 2405281 - RNA, 19 nt, Artificial Sequence
  Description of Artificial Sequence: Synthetic oligonucleotide
ggagcuuggcuuucucugg

SEQ ID NO: 2405282 - RNA, 19 nt, Artificial Sequence
  Description of Artificial Sequence: Synthetic oligonucleotide
cugcucguucuccucagcc

SEQ ID NO: 2405283 - RNA, 19 nt, Artificial Sequence
  Description of Artificial Sequence: Synthetic oligonucleotide
cccgcugugcuucugaggg

SEQ ID NO: 2405284 - RNA, 19 nt, Artificial Sequence
  Description of Artificial Sequence: Synthetic oligonucleotide
ucgucggcgaugguaaucu

SEQ ID NO: 2405285 - RNA, 19 nt, Artificial Sequence
  Description of Artificial Sequence: Synthetic oligonucleotide
ugcucguucuccucagccu

SEQ ID NO: 2405286 - RNA, 19 nt, Artificial Sequence
  Description of Artificial Sequence: Synthetic oligonucleotide
ggagcaguaguggucgucg

SEQ ID NO: 2405287 - RNA, 19 nt, Artificial Sequence
  Description of Artificial Sequence: Synthetic oligonucleotide
aagcaauggucaacaagga

SEQ ID NO: 2405288 - RNA, 19 nt, Artificial Sequence
  Description of Artificial Sequence: Synthetic oligonucleotide
auggucaacaaggaagaaa

SEQ ID NO: 2405289 - RNA, 19 nt, Artificial Sequence
  Description of Artificial Sequence: Synthetic oligonucleotide
gaaugcacuccgcaccauc

SEQ ID NO: 2405290 - RNA, 19 nt, Artificial Sequence
  Description of Artificial Sequence: Synthetic oligonucleotide
ggcacucugcuuuuccccg

SEQ ID NO: 2405291 - RNA, 19 nt, Artificial Sequence
  Description of Artificial Sequence: Synthetic oligonucleotide
aagcgcagggaaccuuuca

SEQ ID NO: 2405292 - RNA, 19 nt, Artificial Sequence
  Description of Artificial Sequence: Synthetic oligonucleotide
gagcaguaguggucgucgg

SEQ ID NO: 2405293 - RNA, 19 nt, Artificial Sequence
  Description of Artificial Sequence: Synthetic oligonucleotide
aucaaggauuuuacaaugu

SEQ ID NO: 2405294 - RNA, 19 nt, Artificial Sequence
  Description of Artificial Sequence: Synthetic oligonucleotide
acccuggcaucguugaaga

SEQ ID NO: 2405295 - RNA, 19 nt, Artificial Sequence
  Description of Artificial Sequence: Synthetic oligonucleotide
gaaccuuucagaaugucuu

SEQ ID NO: 2405296 - RNA, 19 nt, Artificial Sequence
  Description of Artificial Sequence: Synthetic oligonucleotide
cagggaaggaaugcacucc

SEQ ID NO: 2405297 - RNA, 19 nt, Artificial Sequence
  Description of Artificial Sequence: Synthetic oligonucleotide
aaugugaauuagacagaaa

SEQ ID NO: 2405298 - RNA, 19 nt, Artificial Sequence
  Description of Artificial Sequence: Synthetic oligonucleotide
cccuuuagcacugcgaccc

SEQ ID NO: 2405299 - RNA, 19 nt, Artificial Sequence
  Description of Artificial Sequence: Synthetic oligonucleotide
ugguaaucugcucguucuc

SEQ ID NO: 2405300 - RNA, 19 nt, Artificial Sequence
  Description of Artificial Sequence: Synthetic oligonucleotide
gcaguaguggucgucggcg

SEQ ID NO: 2405301 - RNA, 19 nt, Artificial Sequence
  Description of Artificial Sequence: Synthetic oligonucleotide
gguuguauauaucaaggau

SEQ ID NO: 2405302 - RNA, 19 nt, Artificial Sequence
  Description of Artificial Sequence: Synthetic oligonucleotide
uccaccugugcacccuggc

SEQ ID NO: 2405303 - RNA, 19 nt, Artificial Sequence
  Description of Artificial Sequence: Synthetic oligonucleotide
ucagauguccaaggggcuc

SEQ ID NO: 2405304 - RNA, 19 nt, Artificial Sequence
  Description of Artificial Sequence: Synthetic oligonucleotide
caaugugaauuagacagaa

SEQ ID NO: 2405305 - RNA, 19 nt, Artificial Sequence
  Description of Artificial Sequence: Synthetic oligonucleotide
uuccaauggguugugccaa

SEQ ID NO: 2405306 - RNA, 19 nt, Artificial Sequence
  Description of Artificial Sequence: Synthetic oligonucleotide
acugcgacccucaucuucu

SEQ ID NO: 2405307 - RNA, 19 nt, Artificial Sequence
  Description of Artificial Sequence: Synthetic oligonucleotide
ggauuuuacaaugugaauu

SEQ ID NO: 2405308 - RNA, 19 nt, Artificial Sequence
  Description of Artificial Sequence: Synthetic oligonucleotide
ugacuggccugagaaggcc

SEQ ID NO: 2405309 - RNA, 19 nt, Artificial Sequence
  Description of Artificial Sequence: Synthetic oligonucleotide
gguaaucugcucguucucc

SEQ ID NO: 2405310 - RNA, 19 nt, Artificial Sequence
  Description of Artificial Sequence: Synthetic oligonucleotide
auggguugugccaaugcca

SEQ ID NO: 2405311 - RNA, 19 nt, Artificial Sequence
  Description of Artificial Sequence: Synthetic oligonucleotide
ugcacuccgcaccaucaau

SEQ ID NO: 2405312 - RNA, 19 nt, Artificial Sequence
  Description of Artificial Sequence: Synthetic oligonucleotide
aauggucaacaaggaagaa

SEQ ID NO: 2405313 - RNA, 19 nt, Artificial Sequence
  Description of Artificial Sequence: Synthetic oligonucleotide
uggaggcaacagaaaggga

SEQ ID NO: 2405314 - RNA, 19 nt, Artificial Sequence
  Description of Artificial Sequence: Synthetic oligonucleotide
agcuuggguugcugggagg

SEQ ID NO: 2405315 - RNA, 19 nt, Artificial Sequence
  Description of Artificial Sequence: Synthetic oligonucleotide
gaaggggcgugugacuggc

SEQ ID NO: 2405316 - RNA, 19 nt, Artificial Sequence
  Description of Artificial Sequence: Synthetic oligonucleotide
ucugcucguucuccucagc

SEQ ID NO: 2405317 - RNA, 19 nt, Artificial Sequence
  Description of Artificial Sequence: Synthetic oligonucleotide
cugguugaagcgcagggaa

SEQ ID NO: 2405318 - RNA, 19 nt, Artificial Sequence
  Description of Artificial Sequence: Synthetic oligonucleotide
gaaauaccugauacaguaa

SEQ ID NO: 2405319 - RNA, 19 nt, Artificial Sequence
  Description of Artificial Sequence: Synthetic oligonucleotide
acgauggugaagccagaau

SEQ ID NO: 2405320 - RNA, 19 nt, Artificial Sequence
  Description of Artificial Sequence: Synthetic oligonucleotide
ugccaaaugcaugccggga

SEQ ID NO: 2405321 - RNA, 19 nt, Artificial Sequence
  Description of Artificial Sequence: Synthetic oligonucleotide
cacccuggcaucguugaag

SEQ ID NO: 2405322 - RNA, 19 nt, Artificial Sequence
  Description of Artificial Sequence: Synthetic oligonucleotide
uaacccugccaaggaaacc

SEQ ID NO: 2405323 - RNA, 19 nt, Artificial Sequence
  Description of Artificial Sequence: Synthetic oligonucleotide
cuuuuccccgcugugcuuc

SEQ ID NO: 2405324 - RNA, 19 nt, Artificial Sequence
  Description of Artificial Sequence: Synthetic oligonucleotide
ggaugaagucaucugaggu

SEQ ID NO: 2405325 - RNA, 19 nt, Artificial Sequence
  Description of Artificial Sequence: Synthetic oligonucleotide
ccaucaacgggucugagaa

SEQ ID NO: 2405326 - RNA, 19 nt, Artificial Sequence
  Description of Artificial Sequence: Synthetic oligonucleotide
gcgacccucaucuucuuug

SEQ ID NO: 2405327 - RNA, 19 nt, Artificial Sequence
  Description of Artificial Sequence: Synthetic oligonucleotide
agcaggggucucuacuagu

SEQ ID NO: 2405328 - RNA, 19 nt, Artificial Sequence
  Description of Artificial Sequence: Synthetic oligonucleotide
caucguugaagaggccugc

SEQ ID NO: 2405329 - RNA, 19 nt, Artificial Sequence
  Description of Artificial Sequence: Synthetic oligonucleotide
ucguugaagaggccugcuu

SEQ ID NO: 2405330 - RNA, 19 nt, Artificial Sequence
  Description of Artificial Sequence: Synthetic oligonucleotide
accaucaauggaggcaaca

SEQ ID NO: 2405331 - RNA, 19 nt, Artificial Sequence
  Description of Artificial Sequence: Synthetic oligonucleotide
agaauccuugcugcuguca

SEQ ID NO: 2405332 - RNA, 19 nt, Artificial Sequence
  Description of Artificial Sequence: Synthetic oligonucleotide
caaggaaaccaggauuuga

SEQ ID NO: 2405333 - RNA, 19 nt, Artificial Sequence
  Description of Artificial Sequence: Synthetic oligonucleotide
gagucccuguguucagaug

SEQ ID NO: 2405334 - RNA, 19 nt, Artificial Sequence
  Description of Artificial Sequence: Synthetic oligonucleotide
uguauauaucaaggauuuu

SEQ ID NO: 2405335 - RNA, 19 nt, Artificial Sequence
  Description of Artificial Sequence: Synthetic oligonucleotide
gccacuggagcaguagugg

SEQ ID NO: 2405336 - RNA, 19 nt, Artificial Sequence
  Description of Artificial Sequence: Synthetic oligonucleotide
cacugcgacccucaucuuc

SEQ ID NO: 2405337 - RNA, 19 nt, Artificial Sequence
  Description of Artificial Sequence: Synthetic oligonucleotide
gccccuuuagcacugcgac

SEQ ID NO: 2405338 - RNA, 19 nt, Artificial Sequence
  Description of Artificial Sequence: Synthetic oligonucleotide
acuccgcaccaucaaugga

SEQ ID NO: 2405339 - RNA, 19 nt, Artificial Sequence
  Description of Artificial Sequence: Synthetic oligonucleotide
caucaacgggucugagaac

SEQ ID NO: 2405340 - RNA, 19 nt, Artificial Sequence
  Description of Artificial Sequence: Synthetic oligonucleotide
ucacgauggugaagccaga

SEQ ID NO: 2405341 - RNA, 19 nt, Artificial Sequence
  Description of Artificial Sequence: Synthetic oligonucleotide
guaaucugcucguucuccu

SEQ ID NO: 2405342 - RNA, 19 nt, Artificial Sequence
  Description of Artificial Sequence: Synthetic oligonucleotide
uccccgcugugcuucugag

SEQ ID NO: 2405343 - RNA, 19 nt, Artificial Sequence
  Description of Artificial Sequence: Synthetic oligonucleotide
cagcaggggucucuacuag

SEQ ID NO: 2405344 - RNA, 19 nt, Artificial Sequence
  Description of Artificial Sequence: Synthetic oligonucleotide
guaguggucgucggcgaug

SEQ ID NO: 2405345 - RNA, 19 nt, Artificial Sequence
  Description of Artificial Sequence: Synthetic oligonucleotide
agauguccaaggggcucac

SEQ ID NO: 2405346 - RNA, 19 nt, Artificial Sequence
  Description of Artificial Sequence: Synthetic oligonucleotide
caucagggcuggagcuugg

SEQ ID NO: 2405347 - RNA, 19 nt, Artificial Sequence
  Description of Artificial Sequence: Synthetic oligonucleotide
auacaguaacagggaagga

SEQ ID NO: 2405348 - RNA, 19 nt, Artificial Sequence
  Description of Artificial Sequence: Synthetic oligonucleotide
ggucccuccaccugugcac

SEQ ID NO: 2405349 - RNA, 19 nt, Artificial Sequence
  Description of Artificial Sequence: Synthetic oligonucleotide
ggucucuacuaguggaguc

SEQ ID NO: 2405350 - RNA, 19 nt, Artificial Sequence
  Description of Artificial Sequence: Synthetic oligonucleotide
uagcacugcgacccucauc

SEQ ID NO: 2405351 - RNA, 19 nt, Artificial Sequence
  Description of Artificial Sequence: Synthetic oligonucleotide
acgggucugagaacagcag

SEQ ID NO: 2405352 - RNA, 19 nt, Artificial Sequence
  Description of Artificial Sequence: Synthetic oligonucleotide
aaggggcgugugacuggcc

SEQ ID NO: 2405353 - RNA, 19 nt, Artificial Sequence
  Description of Artificial Sequence: Synthetic oligonucleotide
uuuuccccgcugugcuucu

SEQ ID NO: 2405354 - RNA, 19 nt, Artificial Sequence
  Description of Artificial Sequence: Synthetic oligonucleotide
uccaauggguugugccaau

SEQ ID NO: 2405355 - RNA, 19 nt, Artificial Sequence
  Description of Artificial Sequence: Synthetic oligonucleotide
cuccaccugugcacccugg

SEQ ID NO: 2405356 - RNA, 19 nt, Artificial Sequence
  Description of Artificial Sequence: Synthetic oligonucleotide
uggagucccuguguucaga

SEQ ID NO: 2405357 - RNA, 19 nt, Artificial Sequence
  Description of Artificial Sequence: Synthetic oligonucleotide
cagaaauaccugauacagu

SEQ ID NO: 2405358 - RNA, 19 nt, Artificial Sequence
  Description of Artificial Sequence: Synthetic oligonucleotide
aaacuguauuuagcugcua

SEQ ID NO: 2405359 - RNA, 19 nt, Artificial Sequence
  Description of Artificial Sequence: Synthetic oligonucleotide
ugguucagcaggggucucu

SEQ ID NO: 2405360 - RNA, 19 nt, Artificial Sequence
  Description of Artificial Sequence: Synthetic oligonucleotide
augcaugccgggaaagaaa

SEQ ID NO: 2405361 - RNA, 19 nt, Artificial Sequence
  Description of Artificial Sequence: Synthetic oligonucleotide
gacccucaucuucuuugga

SEQ ID NO: 2405362 - RNA, 19 nt, Artificial Sequence
  Description of Artificial Sequence: Synthetic oligonucleotide
ugauuacucugugguuaaa

SEQ ID NO: 2405363 - RNA, 19 nt, Artificial Sequence
  Description of Artificial Sequence: Synthetic oligonucleotide
guggagaaggggcguguga

SEQ ID NO: 2405364 - RNA, 19 nt, Artificial Sequence
  Description of Artificial Sequence: Synthetic oligonucleotide
aggcccgaggagcuuggcu

SEQ ID NO: 2405365 - RNA, 19 nt, Artificial Sequence
  Description of Artificial Sequence: Synthetic oligonucleotide
ggcaacagaaagggaagca

SEQ ID NO: 2405366 - RNA, 19 nt, Artificial Sequence
  Description of Artificial Sequence: Synthetic oligonucleotide
augccgggaaagaaacacu

SEQ ID NO: 2405367 - RNA, 19 nt, Artificial Sequence
  Description of Artificial Sequence: Synthetic oligonucleotide
gcaucguugaagaggccug

SEQ ID NO: 2405368 - RNA, 19 nt, Artificial Sequence
  Description of Artificial Sequence: Synthetic oligonucleotide
gcggggagcagguuggcac

SEQ ID NO: 2405369 - RNA, 19 nt, Artificial Sequence
  Description of Artificial Sequence: Synthetic oligonucleotide
uggagcaguaguggucguc

SEQ ID NO: 2405370 - RNA, 19 nt, Artificial Sequence
  Description of Artificial Sequence: Synthetic oligonucleotide
gccgggaaagaaacacugg

SEQ ID NO: 2405371 - RNA, 19 nt, Artificial Sequence
  Description of Artificial Sequence: Synthetic oligonucleotide
gcagcggggagcagguugg

SEQ ID NO: 2405372 - RNA, 19 nt, Artificial Sequence
  Description of Artificial Sequence: Synthetic oligonucleotide
cagguuggcacucugcuuu

SEQ ID NO: 2405373 - RNA, 19 nt, Artificial Sequence
  Description of Artificial Sequence: Synthetic oligonucleotide
gcacuccgcaccaucaaug

SEQ ID NO: 2405374 - RNA, 19 nt, Artificial Sequence
  Description of Artificial Sequence: Synthetic oligonucleotide
ugggcccaucaacgggucu

SEQ ID NO: 2405375 - RNA, 19 nt, Artificial Sequence
  Description of Artificial Sequence: Synthetic oligonucleotide
gcuucugaggguggagaag

SEQ ID NO: 2405376 - RNA, 19 nt, Artificial Sequence
  Description of Artificial Sequence: Synthetic oligonucleotide
gagcuuggcuuucucuggu

SEQ ID NO: 2405377 - RNA, 19 nt, Artificial Sequence
  Description of Artificial Sequence: Synthetic oligonucleotide
gguugcugggaggaagcug

SEQ ID NO: 2405378 - RNA, 19 nt, Artificial Sequence
  Description of Artificial Sequence: Synthetic oligonucleotide
ggagcagguuggcacucug

SEQ ID NO: 2405379 - RNA, 19 nt, Artificial Sequence
  Description of Artificial Sequence: Synthetic oligonucleotide
cuacuaguggagucccugu

SEQ ID NO: 2405380 - RNA, 19 nt, Artificial Sequence
  Description of Artificial Sequence: Synthetic oligonucleotide
cuuggaggcccgaggagcu

SEQ ID NO: 2405381 - RNA, 19 nt, Artificial Sequence
  Description of Artificial Sequence: Synthetic oligonucleotide
caguaguggucgucggcga

SEQ ID NO: 2405382 - RNA, 19 nt, Artificial Sequence
  Description of Artificial Sequence: Synthetic oligonucleotide
gcaccaucaauggaggcaa

SEQ ID NO: 2405383 - RNA, 19 nt, Artificial Sequence
  Description of Artificial Sequence: Synthetic oligonucleotide
aggggcucacgauggugaa

SEQ ID NO: 2405384 - RNA, 19 nt, Artificial Sequence
  Description of Artificial Sequence: Synthetic oligonucleotide
agggaaccuuucagaaugu

SEQ ID NO: 2405385 - RNA, 19 nt, Artificial Sequence
  Description of Artificial Sequence: Synthetic oligonucleotide
ggccacuggagcaguagug

SEQ ID NO: 2405386 - RNA, 19 nt, Artificial Sequence
  Description of Artificial Sequence: Synthetic oligonucleotide
caccaucaauggaggcaac

SEQ ID NO: 2405387 - RNA, 19 nt, Artificial Sequence
  Description of Artificial Sequence: Synthetic oligonucleotide
gugagugauuaaaauugau

SEQ ID NO: 2405388 - RNA, 19 nt, Artificial Sequence
  Description of Artificial Sequence: Synthetic oligonucleotide
cgugugacuggccugagaa

SEQ ID NO: 2405389 - RNA, 19 nt, Artificial Sequence
  Description of Artificial Sequence: Synthetic oligonucleotide
gggcccaucaacgggucug

SEQ ID NO: 2405390 - RNA, 19 nt, Artificial Sequence
  Description of Artificial Sequence: Synthetic oligonucleotide
gaucaaaaugugagugauu

SEQ ID NO: 2405391 - RNA, 19 nt, Artificial Sequence
  Description of Artificial Sequence: Synthetic oligonucleotide
guggucgucggcgauggua

SEQ ID NO: 2405392 - RNA, 19 nt, Artificial Sequence
  Description of Artificial Sequence: Synthetic oligonucleotide
cugggcccaucaacggguc

SEQ ID NO: 2405393 - RNA, 19 nt, Artificial Sequence
  Description of Artificial Sequence: Synthetic oligonucleotide
gguugugccaaugccaaau

SEQ ID NO: 2405394 - RNA, 19 nt, Artificial Sequence
  Description of Artificial Sequence: Synthetic oligonucleotide
cuaguggagucccuguguu

SEQ ID NO: 2405395 - RNA, 19 nt, Artificial Sequence
  Description of Artificial Sequence: Synthetic oligonucleotide
ggcaucguugaagaggccu

SEQ ID NO: 2405396 - RNA, 19 nt, Artificial Sequence
  Description of Artificial Sequence: Synthetic oligonucleotide
ccccuuuagcacugcgacc

SEQ ID NO: 2405397 - RNA, 19 nt, Artificial Sequence
  Description of Artificial Sequence: Synthetic oligonucleotide
gcgcagggaaccuuucaga

SEQ ID NO: 2405398 - RNA, 19 nt, Artificial Sequence
  Description of Artificial Sequence: Synthetic oligonucleotide
gugcacccuggcaucguug

SEQ ID NO: 2405399 - RNA, 19 nt, Artificial Sequence
  Description of Artificial Sequence: Synthetic oligonucleotide
ggagcuuggguugcuggga

SEQ ID NO: 2405400 - RNA, 19 nt, Artificial Sequence
  Description of Artificial Sequence: Synthetic oligonucleotide
cacgauggugaagccagaa

SEQ ID NO: 2405401 - RNA, 19 nt, Artificial Sequence
  Description of Artificial Sequence: Synthetic oligonucleotide
ggcucacgauggugaagcc

SEQ ID NO: 2405402 - RNA, 19 nt, Artificial Sequence
  Description of Artificial Sequence: Synthetic oligonucleotide
ggggcgugugacuggccug

SEQ ID NO: 2405403 - RNA, 19 nt, Artificial Sequence
  Description of Artificial Sequence: Synthetic oligonucleotide
uuuccccgcugugcuucug

SEQ ID NO: 2405404 - RNA, 19 nt, Artificial Sequence
  Description of Artificial Sequence: Synthetic oligonucleotide
guugaagcgcagggaaccu

SEQ ID NO: 2405405 - RNA, 19 nt, Artificial Sequence
  Description of Artificial Sequence: Synthetic oligonucleotide
gccaaggaaaccaggauuu

SEQ ID NO: 2405406 - RNA, 19 nt, Artificial Sequence
  Description of Artificial Sequence: Synthetic oligonucleotide
ugucaucaucagggcugga

SEQ ID NO: 2405407 - RNA, 19 nt, Artificial Sequence
  Description of Artificial Sequence: Synthetic oligonucleotide
ccgggaaagaaacacuggu

SEQ ID NO: 2405408 - RNA, 19 nt, Artificial Sequence
  Description of Artificial Sequence: Synthetic oligonucleotide
cugccaaggaaaccaggau

SEQ ID NO: 2405409 - RNA, 19 nt, Artificial Sequence
  Description of Artificial Sequence: Synthetic oligonucleotide
gcgaugguaaucugcucgu

SEQ ID NO: 2405410 - RNA, 19 nt, Artificial Sequence
  Description of Artificial Sequence: Synthetic oligonucleotide
aguggucgucggcgauggu

SEQ ID NO: 2405411 - RNA, 19 nt, Artificial Sequence
  Description of Artificial Sequence: Synthetic oligonucleotide
ccaauggguugugccaaug

SEQ ID NO: 2405412 - RNA, 19 nt, Artificial Sequence
  Description of Artificial Sequence: Synthetic oligonucleotide
ggagaaggggcgugugacu

SEQ ID NO: 2405413 - RNA, 19 nt, Artificial Sequence
  Description of Artificial Sequence: Synthetic oligonucleotide
gaggcccgaggagcuuggc

SEQ ID NO: 2405414 - RNA, 19 nt, Artificial Sequence
  Description of Artificial Sequence: Synthetic oligonucleotide
ggcccgaggagcuuggcuu

SEQ ID NO: 2405415 - RNA, 19 nt, Artificial Sequence
  Description of Artificial Sequence: Synthetic oligonucleotide
ccgcaccaucaauggaggc

SEQ ID NO: 2405416 - RNA, 19 nt, Artificial Sequence
  Description of Artificial Sequence: Synthetic oligonucleotide
ggccccuuuagcacugcga

SEQ ID NO: 2405417 - RNA, 19 nt, Artificial Sequence
  Description of Artificial Sequence: Synthetic oligonucleotide
ggagucccuguguucagau

SEQ ID NO: 2405418 - RNA, 19 nt, Artificial Sequence
  Description of Artificial Sequence: Synthetic oligonucleotide
cgcugugcuucugagggug

SEQ ID NO: 2405419 - RNA, 19 nt, Artificial Sequence
  Description of Artificial Sequence: Synthetic oligonucleotide
gcagggaaccuuucagaau

SEQ ID NO: 2405420 - RNA, 19 nt, Artificial Sequence
  Description of Artificial Sequence: Synthetic oligonucleotide
cuuggguugcugggaggaa

SEQ ID NO: 2405421 - RNA, 19 nt, Artificial Sequence
  Description of Artificial Sequence: Synthetic oligonucleotide
gggcgugugacuggccuga

SEQ ID NO: 2405422 - RNA, 19 nt, Artificial Sequence
  Description of Artificial Sequence: Synthetic oligonucleotide
cgcaccaucaauggaggca

SEQ ID NO: 2405423 - RNA, 19 nt, Artificial Sequence
  Description of Artificial Sequence: Synthetic oligonucleotide
ggguuccaauggguugugc

SEQ ID NO: 2405424 - RNA, 19 nt, Artificial Sequence
  Description of Artificial Sequence: Synthetic oligonucleotide
cugaggcugggcccaucaa

SEQ ID NO: 2405425 - RNA, 19 nt, Artificial Sequence
  Description of Artificial Sequence: Synthetic oligonucleotide
cacucugcuuuuccccgcu

SEQ ID NO: 2405426 - RNA, 19 nt, Artificial Sequence
  Description of Artificial Sequence: Synthetic oligonucleotide
cccuggcaucguugaagag

SEQ ID NO: 2405427 - RNA, 19 nt, Artificial Sequence
  Description of Artificial Sequence: Synthetic oligonucleotide
ccaccugugcacccuggca

SEQ ID NO: 2405428 - RNA, 19 nt, Artificial Sequence
  Description of Artificial Sequence: Synthetic oligonucleotide
cagcggggagcagguuggc

SEQ ID NO: 2405429 - RNA, 19 nt, Artificial Sequence
  Description of Artificial Sequence: Synthetic oligonucleotide
cugguucagcaggggucuc

SEQ ID NO: 2405430 - RNA, 19 nt, Artificial Sequence
  Description of Artificial Sequence: Synthetic oligonucleotide
ggcccaucaacgggucuga

SEQ ID NO: 2405431 - RNA, 19 nt, Artificial Sequence
  Description of Artificial Sequence: Synthetic oligonucleotide
gcaugccgggaaagaaaca

SEQ ID NO: 2405432 - RNA, 19 nt, Artificial Sequence
  Description of Artificial Sequence: Synthetic oligonucleotide
gccugagaaggccccuuua

SEQ ID NO: 2405433 - RNA, 19 nt, Artificial Sequence
  Description of Artificial Sequence: Synthetic oligonucleotide
gcgugugacuggccugaga

SEQ ID NO: 2405434 - RNA, 19 nt, Artificial Sequence
  Description of Artificial Sequence: Synthetic oligonucleotide
ggggagcagguuggcacuc

SEQ ID NO: 2405435 - RNA, 19 nt, Artificial Sequence
  Description of Artificial Sequence: Synthetic oligonucleotide
ggcgugugacuggccugag

SEQ ID NO: 2405436 - RNA, 19 nt, Artificial Sequence
  Description of Artificial Sequence: Synthetic oligonucleotide
gcccaucaacgggucugag

SEQ ID NO: 2405437 - RNA, 19 nt, Artificial Sequence
  Description of Artificial Sequence: Synthetic oligonucleotide
cuggagcaguaguggucgu

SEQ ID NO: 2405438 - RNA, 19 nt, Artificial Sequence
  Description of Artificial Sequence: Synthetic oligonucleotide
cgaggagcuuggcuuucuc

SEQ ID NO: 2405439 - RNA, 19 nt, Artificial Sequence
  Description of Artificial Sequence: Synthetic oligonucleotide
cgggaaagaaacacugguu

SEQ ID NO: 2405440 - RNA, 19 nt, Artificial Sequence
  Description of Artificial Sequence: Synthetic oligonucleotide
cggcgaugguaaucugcuc

SEQ ID NO: 2405441 - RNA, 19 nt, Artificial Sequence
  Description of Artificial Sequence: Synthetic oligonucleotide
cgucggcgaugguaaucug

SEQ ID NO: 2405442 - RNA, 19 nt, Artificial Sequence
  Description of Artificial Sequence: Synthetic oligonucleotide
cccgaggagcuuggcuuuc

SEQ ID NO: 2405443 - RNA, 19 nt, Artificial Sequence
  Description of Artificial Sequence: Synthetic oligonucleotide
ggccugagaaggccccuuu

SEQ ID NO: 2405444 - RNA, 19 nt, Artificial Sequence
  Description of Artificial Sequence: Synthetic oligonucleotide
gcccgaggagcuuggcuuu

SEQ ID NO: 2405445 - RNA, 19 nt, Artificial Sequence
  Description of Artificial Sequence: Synthetic oligonucleotide
ggucgucggcgaugguaau

SEQ ID NO: 2405446 - RNA, 19 nt, Artificial Sequence
  Description of Artificial Sequence: Synthetic oligonucleotide
ccuuuagcacugcgacccu

SEQ ID NO: 2405447 - RNA, 19 nt, Artificial Sequence
  Description of Artificial Sequence: Synthetic oligonucleotide
ggaaugcacuccgcaccau

SEQ ID NO: 2405448 - RNA, 19 nt, Artificial Sequence
  Description of Artificial Sequence: Synthetic oligonucleotide
cugcgacccucaucuucuu

SEQ ID NO: 2405449 - RNA, 19 nt, Artificial Sequence
  Description of Artificial Sequence: Synthetic oligonucleotide
ccgcugugcuucugagggu

SEQ ID NO: 2405450 - RNA, 19 nt, Artificial Sequence
  Description of Artificial Sequence: Synthetic oligonucleotide
ccgaggagcuuggcuuucu

SEQ ID NO: 2405451 - RNA, 19 nt, Artificial Sequence
  Description of Artificial Sequence: Synthetic oligonucleotide
gcacugcgacccucaucuu

SEQ ID NO: 2405452 - RNA, 19 nt, Artificial Sequence
  Description of Artificial Sequence: Synthetic oligonucleotide
ucagcauugacaaagaaca

SEQ ID NO: 2405453 - RNA, 19 nt, Artificial Sequence
  Description of Artificial Sequence: Synthetic oligonucleotide
gaagucaugcuccagaggg

SEQ ID NO: 2405454 - RNA, 19 nt, Artificial Sequence
  Description of Artificial Sequence: Synthetic oligonucleotide
aguacaaugcccugaagcc

SEQ ID NO: 2405455 - RNA, 19 nt, Artificial Sequence
  Description of Artificial Sequence: Synthetic oligonucleotide
ugacaaagaacacagggcc

SEQ ID NO: 2405456 - RNA, 19 nt, Artificial Sequence
  Description of Artificial Sequence: Synthetic oligonucleotide
aagguuaccagguccaauc

SEQ ID NO: 2405457 - RNA, 19 nt, Artificial Sequence
  Description of Artificial Sequence: Synthetic oligonucleotide
aaagacauugaggacgggc

SEQ ID NO: 2405458 - RNA, 19 nt, Artificial Sequence
  Description of Artificial Sequence: Synthetic oligonucleotide
cacacuuugucucugaugc

SEQ ID NO: 2405459 - RNA, 19 nt, Artificial Sequence
  Description of Artificial Sequence: Synthetic oligonucleotide
cuuguuauacugcagguag

SEQ ID NO: 2405460 - RNA, 19 nt, Artificial Sequence
  Description of Artificial Sequence: Synthetic oligonucleotide
agaaguagguggucgaagc

SEQ ID NO: 2405461 - RNA, 19 nt, Artificial Sequence
  Description of Artificial Sequence: Synthetic oligonucleotide
uuauacugcagguagucag

SEQ ID NO: 2405462 - RNA, 19 nt, Artificial Sequence
  Description of Artificial Sequence: Synthetic oligonucleotide
caggcaagcgacaagaucc

SEQ ID NO: 2405463 - RNA, 19 nt, Artificial Sequence
  Description of Artificial Sequence: Synthetic oligonucleotide
aagcaguacucauagcggg

SEQ ID NO: 2405464 - RNA, 19 nt, Artificial Sequence
  Description of Artificial Sequence: Synthetic oligonucleotide
gaguacaaugcccugaagc

SEQ ID NO: 2405465 - RNA, 19 nt, Artificial Sequence
  Description of Artificial Sequence: Synthetic oligonucleotide
ucaagggguauccagauuc

SEQ ID NO: 2405466 - RNA, 19 nt, Artificial Sequence
  Description of Artificial Sequence: Synthetic oligonucleotide
agcacaccgaaacuggacc

SEQ ID NO: 2405467 - RNA, 19 nt, Artificial Sequence
  Description of Artificial Sequence: Synthetic oligonucleotide
ucuuaaaggggccauucca

SEQ ID NO: 2405468 - RNA, 19 nt, Artificial Sequence
  Description of Artificial Sequence: Synthetic oligonucleotide
auuccuaacguggaauucc

SEQ ID NO: 2405469 - RNA, 19 nt, Artificial Sequence
  Description of Artificial Sequence: Synthetic oligonucleotide
agcaagaacggcuguagcg

SEQ ID NO: 2405470 - RNA, 19 nt, Artificial Sequence
  Description of Artificial Sequence: Synthetic oligonucleotide
agauccgauacccagguug

SEQ ID NO: 2405471 - RNA, 19 nt, Artificial Sequence
  Description of Artificial Sequence: Synthetic oligonucleotide
cuugauucgacggaagggg

SEQ ID NO: 2405472 - RNA, 19 nt, Artificial Sequence
  Description of Artificial Sequence: Synthetic oligonucleotide
aagcgacaagauccgauac

SEQ ID NO: 2405473 - RNA, 19 nt, Artificial Sequence
  Description of Artificial Sequence: Synthetic oligonucleotide
uugaacagcgacccaaccc

SEQ ID NO: 2405474 - RNA, 19 nt, Artificial Sequence
  Description of Artificial Sequence: Synthetic oligonucleotide
ugcuugcagaaguaggugg

SEQ ID NO: 2405475 - RNA, 19 nt, Artificial Sequence
  Description of Artificial Sequence: Synthetic oligonucleotide
uuccuuugucuuaaagggg

SEQ ID NO: 2405476 - RNA, 19 nt, Artificial Sequence
  Description of Artificial Sequence: Synthetic oligonucleotide
ugcuccagagggaacaucc

SEQ ID NO: 2405477 - RNA, 19 nt, Artificial Sequence
  Description of Artificial Sequence: Synthetic oligonucleotide
cuuaaaggggccauuccag

SEQ ID NO: 2405478 - RNA, 19 nt, Artificial Sequence
  Description of Artificial Sequence: Synthetic oligonucleotide
aagaugaucaagggguauc

SEQ ID NO: 2405479 - RNA, 19 nt, Artificial Sequence
  Description of Artificial Sequence: Synthetic oligonucleotide
cugggccaaagcaagaacg

SEQ ID NO: 2405480 - RNA, 19 nt, Artificial Sequence
  Description of Artificial Sequence: Synthetic oligonucleotide
uagcggggaauccacaggg

SEQ ID NO: 2405481 - RNA, 19 nt, Artificial Sequence
  Description of Artificial Sequence: Synthetic oligonucleotide
agcgacaagauccgauacc

SEQ ID NO: 2405482 - RNA, 19 nt, Artificial Sequence
  Description of Artificial Sequence: Synthetic oligonucleotide
ucugcuugcagaaguaggu

SEQ ID NO: 2405483 - RNA, 19 nt, Artificial Sequence
  Description of Artificial Sequence: Synthetic oligonucleotide
uccuugauucgacggaagg

SEQ ID NO: 2405484 - RNA, 19 nt, Artificial Sequence
  Description of Artificial Sequence: Synthetic oligonucleotide
uguagcgccuccaaacgag

SEQ ID NO: 2405485 - RNA, 19 nt, Artificial Sequence
  Description of Artificial Sequence: Synthetic oligonucleotide
caagcaguacucauagcgg

SEQ ID NO: 2405486 - RNA, 19 nt, Artificial Sequence
  Description of Artificial Sequence: Synthetic oligonucleotide
ugggccaaagcaagaacgg

SEQ ID NO: 2405487 - RNA, 19 nt, Artificial Sequence
  Description of Artificial Sequence: Synthetic oligonucleotide
uauacugcagguagucagc

SEQ ID NO: 2405488 - RNA, 19 nt, Artificial Sequence
  Description of Artificial Sequence: Synthetic oligonucleotide
ugaucaagggguauccaga

SEQ ID NO: 2405489 - RNA, 19 nt, Artificial Sequence
  Description of Artificial Sequence: Synthetic oligonucleotide
auugaggacgggcuucccc

SEQ ID NO: 2405490 - RNA, 19 nt, Artificial Sequence
  Description of Artificial Sequence: Synthetic oligonucleotide
agaugaucaagggguaucc

SEQ ID NO: 2405491 - RNA, 19 nt, Artificial Sequence
  Description of Artificial Sequence: Synthetic oligonucleotide
aaacgagugucccaucaca

SEQ ID NO: 2405492 - RNA, 19 nt, Artificial Sequence
  Description of Artificial Sequence: Synthetic oligonucleotide
cuggggauuccuaacgugg

SEQ ID NO: 2405493 - RNA, 19 nt, Artificial Sequence
  Description of Artificial Sequence: Synthetic oligonucleotide
ccaagcaguacucauagcg

SEQ ID NO: 2405494 - RNA, 19 nt, Artificial Sequence
  Description of Artificial Sequence: Synthetic oligonucleotide
gacaagaugaucaaggggu

SEQ ID NO: 2405495 - RNA, 19 nt, Artificial Sequence
  Description of Artificial Sequence: Synthetic oligonucleotide
aacccagcgcuuguuauac

SEQ ID NO: 2405496 - RNA, 19 nt, Artificial Sequence
  Description of Artificial Sequence: Synthetic oligonucleotide
agagggaacauccaagcau

SEQ ID NO: 2405497 - RNA, 19 nt, Artificial Sequence
  Description of Artificial Sequence: Synthetic oligonucleotide
agguuaccagguccaaucc

SEQ ID NO: 2405498 - RNA, 19 nt, Artificial Sequence
  Description of Artificial Sequence: Synthetic oligonucleotide
uuaaaggggccauuccagc

SEQ ID NO: 2405499 - RNA, 19 nt, Artificial Sequence
  Description of Artificial Sequence: Synthetic oligonucleotide
acguggaauuccuucuccc

SEQ ID NO: 2405500 - RNA, 19 nt, Artificial Sequence
  Description of Artificial Sequence: Synthetic oligonucleotide
ugucccaucacagccaccc

SEQ ID NO: 2405501 - RNA, 19 nt, Artificial Sequence
  Description of Artificial Sequence: Synthetic oligonucleotide
ugucucugaugcuuggcag

SEQ ID NO: 2405502 - RNA, 19 nt, Artificial Sequence
  Description of Artificial Sequence: Synthetic oligonucleotide
ucgaugccguccuucaagg

SEQ ID NO: 2405503 - RNA, 19 nt, Artificial Sequence
  Description of Artificial Sequence: Synthetic oligonucleotide
ucugaugcuuggcaggggu

SEQ ID NO: 2405504 - RNA, 19 nt, Artificial Sequence
  Description of Artificial Sequence: Synthetic oligonucleotide
gaacauccaagcauccagg

SEQ ID NO: 2405505 - RNA, 19 nt, Artificial Sequence
  Description of Artificial Sequence: Synthetic oligonucleotide
uacaaugcccugaagccuc

SEQ ID NO: 2405506 - RNA, 19 nt, Artificial Sequence
  Description of Artificial Sequence: Synthetic oligonucleotide
agguggucgaagcugacug

SEQ ID NO: 2405507 - RNA, 19 nt, Artificial Sequence
  Description of Artificial Sequence: Synthetic oligonucleotide
aaguagguggucgaagcug

SEQ ID NO: 2405508 - RNA, 19 nt, Artificial Sequence
  Description of Artificial Sequence: Synthetic oligonucleotide
cugaaggcugaguacaaug

SEQ ID NO: 2405509 - RNA, 19 nt, Artificial Sequence
  Description of Artificial Sequence: Synthetic oligonucleotide
agugucccaucacagccac

SEQ ID NO: 2405510 - RNA, 19 nt, Artificial Sequence
  Description of Artificial Sequence: Synthetic oligonucleotide
agaggcguccugcaggauc

SEQ ID NO: 2405511 - RNA, 19 nt, Artificial Sequence
  Description of Artificial Sequence: Synthetic oligonucleotide
aagagucggaagaggcucc

SEQ ID NO: 2405512 - RNA, 19 nt, Artificial Sequence
  Description of Artificial Sequence: Synthetic oligonucleotide
ugacccaccaucacaucug

SEQ ID NO: 2405513 - RNA, 19 nt, Artificial Sequence
  Description of Artificial Sequence: Synthetic oligonucleotide
aaagccacgggaggccagc

SEQ ID NO: 2405514 - RNA, 19 nt, Artificial Sequence
  Description of Artificial Sequence: Synthetic oligonucleotide
auagcggggaauccacagg

SEQ ID NO: 2405515 - RNA, 19 nt, Artificial Sequence
  Description of Artificial Sequence: Synthetic oligonucleotide
agggauucagugugcuggc

SEQ ID NO: 2405516 - RNA, 19 nt, Artificial Sequence
  Description of Artificial Sequence: Synthetic oligonucleotide
acccggcucaugucgaugc

SEQ ID NO: 2405517 - RNA, 19 nt, Artificial Sequence
  Description of Artificial Sequence: Synthetic oligonucleotide
uugauggucuccacagucu

SEQ ID NO: 2405518 - RNA, 19 nt, Artificial Sequence
  Description of Artificial Sequence: Synthetic oligonucleotide
guccaauccaccaggaaag

SEQ ID NO: 2405519 - RNA, 19 nt, Artificial Sequence
  Description of Artificial Sequence: Synthetic oligonucleotide
caauccaccaggaaagaca

SEQ ID NO: 2405520 - RNA, 19 nt, Artificial Sequence
  Description of Artificial Sequence: Synthetic oligonucleotide
ucucugaugcuuggcaggg

SEQ ID NO: 2405521 - RNA, 19 nt, Artificial Sequence
  Description of Artificial Sequence: Synthetic oligonucleotide
cagcuaacaggcaagcgac

SEQ ID NO: 2405522 - RNA, 19 nt, Artificial Sequence
  Description of Artificial Sequence: Synthetic oligonucleotide
uguuauacugcagguaguc

SEQ ID NO: 2405523 - RNA, 19 nt, Artificial Sequence
  Description of Artificial Sequence: Synthetic oligonucleotide
ggacaagaugaucaagggg

SEQ ID NO: 2405524 - RNA, 19 nt, Artificial Sequence
  Description of Artificial Sequence: Synthetic oligonucleotide
uguggggucugcuugcaga

SEQ ID NO: 2405525 - RNA, 19 nt, Artificial Sequence
  Description of Artificial Sequence: Synthetic oligonucleotide
aacgagugucccaucacag

SEQ ID NO: 2405526 - RNA, 19 nt, Artificial Sequence
  Description of Artificial Sequence: Synthetic oligonucleotide
auacccagguugaacagcg

SEQ ID NO: 2405527 - RNA, 19 nt, Artificial Sequence
  Description of Artificial Sequence: Synthetic oligonucleotide
guagaagucaugcuccaga

SEQ ID NO: 2405528 - RNA, 19 nt, Artificial Sequence
  Description of Artificial Sequence: Synthetic oligonucleotide
ucacacuuugucucugaug

SEQ ID NO: 2405529 - RNA, 19 nt, Artificial Sequence
  Description of Artificial Sequence: Synthetic oligonucleotide
gaaggggauccauuccucc

SEQ ID NO: 2405530 - RNA, 19 nt, Artificial Sequence
  Description of Artificial Sequence: Synthetic oligonucleotide
cauagcggggaauccacag

SEQ ID NO: 2405531 - RNA, 19 nt, Artificial Sequence
  Description of Artificial Sequence: Synthetic oligonucleotide
aauccacaggggcugcuca

SEQ ID NO: 2405532 - RNA, 19 nt, Artificial Sequence
  Description of Artificial Sequence: Synthetic oligonucleotide
guagaagagucggaagagg

SEQ ID NO: 2405533 - RNA, 19 nt, Artificial Sequence
  Description of Artificial Sequence: Synthetic oligonucleotide
gaagagucggaagaggcuc

SEQ ID NO: 2405534 - RNA, 19 nt, Artificial Sequence
  Description of Artificial Sequence: Synthetic oligonucleotide
ugaugcuuggcagggguag

SEQ ID NO: 2405535 - RNA, 19 nt, Artificial Sequence
  Description of Artificial Sequence: Synthetic oligonucleotide
caugcugaaggcugaguac

SEQ ID NO: 2405536 - RNA, 19 nt, Artificial Sequence
  Description of Artificial Sequence: Synthetic oligonucleotide
uugauucgacggaagggga

SEQ ID NO: 2405537 - RNA, 19 nt, Artificial Sequence
  Description of Artificial Sequence: Synthetic oligonucleotide
gggacaagaugaucaaggg

SEQ ID NO: 2405538 - RNA, 19 nt, Artificial Sequence
  Description of Artificial Sequence: Synthetic oligonucleotide
gucgaugccguccuucaag

SEQ ID NO: 2405539 - RNA, 19 nt, Artificial Sequence
  Description of Artificial Sequence: Synthetic oligonucleotide
gacggaaggggauccauuc

SEQ ID NO: 2405540 - RNA, 19 nt, Artificial Sequence
  Description of Artificial Sequence: Synthetic oligonucleotide
uuguuauacugcagguagu

SEQ ID NO: 2405541 - RNA, 19 nt, Artificial Sequence
  Description of Artificial Sequence: Synthetic oligonucleotide
uuccuaacguggaauuccu

SEQ ID NO: 2405542 - RNA, 19 nt, Artificial Sequence
  Description of Artificial Sequence: Synthetic oligonucleotide
cacacacucuccaacccgc

SEQ ID NO: 2405543 - RNA, 19 nt, Artificial Sequence
  Description of Artificial Sequence: Synthetic oligonucleotide
auucgacggaaggggaucc

SEQ ID NO: 2405544 - RNA, 19 nt, Artificial Sequence
  Description of Artificial Sequence: Synthetic oligonucleotide
ggaaagacauugaggacgg

SEQ ID NO: 2405545 - RNA, 19 nt, Artificial Sequence
  Description of Artificial Sequence: Synthetic oligonucleotide
gauacccagguugaacagc

SEQ ID NO: 2405546 - RNA, 19 nt, Artificial Sequence
  Description of Artificial Sequence: Synthetic oligonucleotide
aaaggggccauuccagcua

SEQ ID NO: 2405547 - RNA, 19 nt, Artificial Sequence
  Description of Artificial Sequence: Synthetic oligonucleotide
uggaauuucucagcauuga

SEQ ID NO: 2405548 - RNA, 19 nt, Artificial Sequence
  Description of Artificial Sequence: Synthetic oligonucleotide
ugcccugaagccuccuagg

SEQ ID NO: 2405549 - RNA, 19 nt, Artificial Sequence
  Description of Artificial Sequence: Synthetic oligonucleotide
gagggaacauccaagcauc

SEQ ID NO: 2405550 - RNA, 19 nt, Artificial Sequence
  Description of Artificial Sequence: Synthetic oligonucleotide
caucugugcagccaacgug

SEQ ID NO: 2405551 - RNA, 19 nt, Artificial Sequence
  Description of Artificial Sequence: Synthetic oligonucleotide
ugcagaaguagguggucga

SEQ ID NO: 2405552 - RNA, 19 nt, Artificial Sequence
  Description of Artificial Sequence: Synthetic oligonucleotide
cucauagcggggaauccac

SEQ ID NO: 2405553 - RNA, 19 nt, Artificial Sequence
  Description of Artificial Sequence: Synthetic oligonucleotide
ucagaggcguccugcagga

SEQ ID NO: 2405554 - RNA, 19 nt, Artificial Sequence
  Description of Artificial Sequence: Synthetic oligonucleotide
ugaguacaaugcccugaag

SEQ ID NO: 2405555 - RNA, 19 nt, Artificial Sequence
  Description of Artificial Sequence: Synthetic oligonucleotide
uggggauuccuaacgugga

SEQ ID NO: 2405556 - RNA, 19 nt, Artificial Sequence
  Description of Artificial Sequence: Synthetic oligonucleotide
caagaacggcuguagcgcc

SEQ ID NO: 2405557 - RNA, 19 nt, Artificial Sequence
  Description of Artificial Sequence: Synthetic oligonucleotide
acucugacccaccaucaca

SEQ ID NO: 2405558 - RNA, 19 nt, Artificial Sequence
  Description of Artificial Sequence: Synthetic oligonucleotide
agccacccggcucaugucg

SEQ ID NO: 2405559 - RNA, 19 nt, Artificial Sequence
  Description of Artificial Sequence: Synthetic oligonucleotide
cuaacaggcaagcgacaag

SEQ ID NO: 2405560 - RNA, 19 nt, Artificial Sequence
  Description of Artificial Sequence: Synthetic oligonucleotide
ucuccaacccgcuggugca

SEQ ID NO: 2405561 - RNA, 19 nt, Artificial Sequence
  Description of Artificial Sequence: Synthetic oligonucleotide
caagggguauccagauucc

SEQ ID NO: 2405562 - RNA, 19 nt, Artificial Sequence
  Description of Artificial Sequence: Synthetic oligonucleotide
agcaaccacaaagccacgg

SEQ ID NO: 2405563 - RNA, 19 nt, Artificial Sequence
  Description of Artificial Sequence: Synthetic oligonucleotide
aggccaugggacaagauga

SEQ ID NO: 2405564 - RNA, 19 nt, Artificial Sequence
  Description of Artificial Sequence: Synthetic oligonucleotide
caccuggggauuccuaacg

SEQ ID NO: 2405565 - RNA, 19 nt, Artificial Sequence
  Description of Artificial Sequence: Synthetic oligonucleotide
uaccagguccaauccacca

SEQ ID NO: 2405566 - RNA, 19 nt, Artificial Sequence
  Description of Artificial Sequence: Synthetic oligonucleotide
gaggcuccccuccagacuc

SEQ ID NO: 2405567 - RNA, 19 nt, Artificial Sequence
  Description of Artificial Sequence: Synthetic oligonucleotide
gucuuaaaggggccauucc

SEQ ID NO: 2405568 - RNA, 19 nt, Artificial Sequence
  Description of Artificial Sequence: Synthetic oligonucleotide
gcgcuuguuauacugcagg

SEQ ID NO: 2405569 - RNA, 19 nt, Artificial Sequence
  Description of Artificial Sequence: Synthetic oligonucleotide
ugauucgacggaaggggau

SEQ ID NO: 2405570 - RNA, 19 nt, Artificial Sequence
  Description of Artificial Sequence: Synthetic oligonucleotide
uccagcuaacaggcaagcg

SEQ ID NO: 2405571 - RNA, 19 nt, Artificial Sequence
  Description of Artificial Sequence: Synthetic oligonucleotide
guauccagauuccuuuguc

SEQ ID NO: 2405572 - RNA, 19 nt, Artificial Sequence
  Description of Artificial Sequence: Synthetic oligonucleotide
ugcaccuggggauuccuaa

SEQ ID NO: 2405573 - RNA, 19 nt, Artificial Sequence
  Description of Artificial Sequence: Synthetic oligonucleotide
gguagaagagucggaagag

SEQ ID NO: 2405574 - RNA, 19 nt, Artificial Sequence
  Description of Artificial Sequence: Synthetic oligonucleotide
gcaaccacaaagccacggg

SEQ ID NO: 2405575 - RNA, 19 nt, Artificial Sequence
  Description of Artificial Sequence: Synthetic oligonucleotide
gcuguagcgccuccaaacg

SEQ ID NO: 2405576 - RNA, 19 nt, Artificial Sequence
  Description of Artificial Sequence: Synthetic oligonucleotide
agucggaagaggcuccccu

SEQ ID NO: 2405577 - RNA, 19 nt, Artificial Sequence
  Description of Artificial Sequence: Synthetic oligonucleotide
acgggcuuccccucagagg

SEQ ID NO: 2405578 - RNA, 19 nt, Artificial Sequence
  Description of Artificial Sequence: Synthetic oligonucleotide
ucauagcggggaauccaca

SEQ ID NO: 2405579 - RNA, 19 nt, Artificial Sequence
  Description of Artificial Sequence: Synthetic oligonucleotide
auuccagcuaacaggcaag

SEQ ID NO: 2405580 - RNA, 19 nt, Artificial Sequence
  Description of Artificial Sequence: Synthetic oligonucleotide
gacgggcuuccccucagag

SEQ ID NO: 2405581 - RNA, 19 nt, Artificial Sequence
  Description of Artificial Sequence: Synthetic oligonucleotide
gaggcguccugcaggaucc

SEQ ID NO: 2405582 - RNA, 19 nt, Artificial Sequence
  Description of Artificial Sequence: Synthetic oligonucleotide
cauuccagcuaacaggcaa

SEQ ID NO: 2405583 - RNA, 19 nt, Artificial Sequence
  Description of Artificial Sequence: Synthetic oligonucleotide
ggaauuucucagcauugac

SEQ ID NO: 2405584 - RNA, 19 nt, Artificial Sequence
  Description of Artificial Sequence: Synthetic oligonucleotide
gauuccuaacguggaauuc

SEQ ID NO: 2405585 - RNA, 19 nt, Artificial Sequence
  Description of Artificial Sequence: Synthetic oligonucleotide
cacaucugugcagccaacg

SEQ ID NO: 2405586 - RNA, 19 nt, Artificial Sequence
  Description of Artificial Sequence: Synthetic oligonucleotide
gguccaauccaccaggaaa

SEQ ID NO: 2405587 - RNA, 19 nt, Artificial Sequence
  Description of Artificial Sequence: Synthetic oligonucleotide
agcaguacucauagcgggg

SEQ ID NO: 2405588 - RNA, 19 nt, Artificial Sequence
  Description of Artificial Sequence: Synthetic oligonucleotide
agagucggaagaggcuccc

SEQ ID NO: 2405589 - RNA, 19 nt, Artificial Sequence
  Description of Artificial Sequence: Synthetic oligonucleotide
ccuaacguggaauuccuuc

SEQ ID NO: 2405590 - RNA, 19 nt, Artificial Sequence
  Description of Artificial Sequence: Synthetic oligonucleotide
gcugcucacacuuugucuc

SEQ ID NO: 2405591 - RNA, 19 nt, Artificial Sequence
  Description of Artificial Sequence: Synthetic oligonucleotide
ccagagggaacauccaagc

SEQ ID NO: 2405592 - RNA, 19 nt, Artificial Sequence
  Description of Artificial Sequence: Synthetic oligonucleotide
aguagguggucgaagcuga

SEQ ID NO: 2405593 - RNA, 19 nt, Artificial Sequence
  Description of Artificial Sequence: Synthetic oligonucleotide
aaagaacacagggccccug

SEQ ID NO: 2405594 - RNA, 19 nt, Artificial Sequence
  Description of Artificial Sequence: Synthetic oligonucleotide
gauccgauacccagguuga

SEQ ID NO: 2405595 - RNA, 19 nt, Artificial Sequence
  Description of Artificial Sequence: Synthetic oligonucleotide
gauucgacggaaggggauc

SEQ ID NO: 2405596 - RNA, 19 nt, Artificial Sequence
  Description of Artificial Sequence: Synthetic oligonucleotide
uccgauacccagguugaac

SEQ ID NO: 2405597 - RNA, 19 nt, Artificial Sequence
  Description of Artificial Sequence: Synthetic oligonucleotide
agggaacauccaagcaucc

SEQ ID NO: 2405598 - RNA, 19 nt, Artificial Sequence
  Description of Artificial Sequence: Synthetic oligonucleotide
gcaagaacggcuguagcgc

SEQ ID NO: 2405599 - RNA, 19 nt, Artificial Sequence
  Description of Artificial Sequence: Synthetic oligonucleotide
uuccagcuaacaggcaagc

SEQ ID NO: 2405600 - RNA, 19 nt, Artificial Sequence
  Description of Artificial Sequence: Synthetic oligonucleotide
uacucauagcggggaaucc

SEQ ID NO: 2405601 - RNA, 19 nt, Artificial Sequence
  Description of Artificial Sequence: Synthetic oligonucleotide
agcgccuccaaacgagugu

SEQ ID NO: 2405602 - RNA, 19 nt, Artificial Sequence
  Description of Artificial Sequence: Synthetic oligonucleotide
gcgacaagauccgauaccc

SEQ ID NO: 2405603 - RNA, 19 nt, Artificial Sequence
  Description of Artificial Sequence: Synthetic oligonucleotide
gccauuccagcuaacaggc

SEQ ID NO: 2405604 - RNA, 19 nt, Artificial Sequence
  Description of Artificial Sequence: Synthetic oligonucleotide
accgaaacuggaccuccug

SEQ ID NO: 2405605 - RNA, 19 nt, Artificial Sequence
  Description of Artificial Sequence: Synthetic oligonucleotide
gacauugaggacgggcuuc

SEQ ID NO: 2405606 - RNA, 19 nt, Artificial Sequence
  Description of Artificial Sequence: Synthetic oligonucleotide
uagcgccuccaaacgagug

SEQ ID NO: 2405607 - RNA, 19 nt, Artificial Sequence
  Description of Artificial Sequence: Synthetic oligonucleotide
aaugcccugaagccuccua

SEQ ID NO: 2405608 - RNA, 19 nt, Artificial Sequence
  Description of Artificial Sequence: Synthetic oligonucleotide
acucauagcggggaaucca

SEQ ID NO: 2405609 - RNA, 19 nt, Artificial Sequence
  Description of Artificial Sequence: Synthetic oligonucleotide
agaagagucggaagaggcu

SEQ ID NO: 2405610 - RNA, 19 nt, Artificial Sequence
  Description of Artificial Sequence: Synthetic oligonucleotide
ggcuguagcgccuccaaac

SEQ ID NO: 2405611 - RNA, 19 nt, Artificial Sequence
  Description of Artificial Sequence: Synthetic oligonucleotide
gcacacacucuccaacccg

SEQ ID NO: 2405612 - RNA, 19 nt, Artificial Sequence
  Description of Artificial Sequence: Synthetic oligonucleotide
cagcacaccgaaacuggac

SEQ ID NO: 2405613 - RNA, 19 nt, Artificial Sequence
  Description of Artificial Sequence: Synthetic oligonucleotide
ugcugaaggcugaguacaa

SEQ ID NO: 2405614 - RNA, 19 nt, Artificial Sequence
  Description of Artificial Sequence: Synthetic oligonucleotide
guacucauagcggggaauc

SEQ ID NO: 2405615 - RNA, 19 nt, Artificial Sequence
  Description of Artificial Sequence: Synthetic oligonucleotide
gcagggguagaagagucgg

SEQ ID NO: 2405616 - RNA, 19 nt, Artificial Sequence
  Description of Artificial Sequence: Synthetic oligonucleotide
agguugaacagcgacccaa

SEQ ID NO: 2405617 - RNA, 19 nt, Artificial Sequence
  Description of Artificial Sequence: Synthetic oligonucleotide
accuggggauuccuaacgu

SEQ ID NO: 2405618 - RNA, 19 nt, Artificial Sequence
  Description of Artificial Sequence: Synthetic oligonucleotide
agaacggcuguagcgccuc

SEQ ID NO: 2405619 - RNA, 19 nt, Artificial Sequence
  Description of Artificial Sequence: Synthetic oligonucleotide
gguggucgaagcugacugg

SEQ ID NO: 2405620 - RNA, 19 nt, Artificial Sequence
  Description of Artificial Sequence: Synthetic oligonucleotide
ucugugcagccaacguggu

SEQ ID NO: 2405621 - RNA, 19 nt, Artificial Sequence
  Description of Artificial Sequence: Synthetic oligonucleotide
caaccacaaagccacggga

SEQ ID NO: 2405622 - RNA, 19 nt, Artificial Sequence
  Description of Artificial Sequence: Synthetic oligonucleotide
ccuugauucgacggaaggg

SEQ ID NO: 2405623 - RNA, 19 nt, Artificial Sequence
  Description of Artificial Sequence: Synthetic oligonucleotide
gaaguagguggucgaagcu

SEQ ID NO: 2405624 - RNA, 19 nt, Artificial Sequence
  Description of Artificial Sequence: Synthetic oligonucleotide
guuauacugcagguaguca

SEQ ID NO: 2405625 - RNA, 19 nt, Artificial Sequence
  Description of Artificial Sequence: Synthetic oligonucleotide
gggccauuccagcuaacag

SEQ ID NO: 2405626 - RNA, 19 nt, Artificial Sequence
  Description of Artificial Sequence: Synthetic oligonucleotide
uacugcagguagucagcca

SEQ ID NO: 2405627 - RNA, 19 nt, Artificial Sequence
  Description of Artificial Sequence: Synthetic oligonucleotide
caagcgacaagauccgaua

SEQ ID NO: 2405628 - RNA, 19 nt, Artificial Sequence
  Description of Artificial Sequence: Synthetic oligonucleotide
gaucaagggguauccagau

SEQ ID NO: 2405629 - RNA, 19 nt, Artificial Sequence
  Description of Artificial Sequence: Synthetic oligonucleotide
aggcaagcgacaagauccg

SEQ ID NO: 2405630 - RNA, 19 nt, Artificial Sequence
  Description of Artificial Sequence: Synthetic oligonucleotide
cgagugucccaucacagcc

SEQ ID NO: 2405631 - RNA, 19 nt, Artificial Sequence
  Description of Artificial Sequence: Synthetic oligonucleotide
gaugaucaagggguaucca

SEQ ID NO: 2405632 - RNA, 19 nt, Artificial Sequence
  Description of Artificial Sequence: Synthetic oligonucleotide
ucucuuguggggucugcuu

SEQ ID NO: 2405633 - RNA, 19 nt, Artificial Sequence
  Description of Artificial Sequence: Synthetic oligonucleotide
caugggacaagaugaucaa

SEQ ID NO: 2405634 - RNA, 19 nt, Artificial Sequence
  Description of Artificial Sequence: Synthetic oligonucleotide
uccaauccaccaggaaaga

SEQ ID NO: 2405635 - RNA, 19 nt, Artificial Sequence
  Description of Artificial Sequence: Synthetic oligonucleotide
acaaugcccugaagccucc

SEQ ID NO: 2405636 - RNA, 19 nt, Artificial Sequence
  Description of Artificial Sequence: Synthetic oligonucleotide
gaaagacauugaggacggg

SEQ ID NO: 2405637 - RNA, 19 nt, Artificial Sequence
  Description of Artificial Sequence: Synthetic oligonucleotide
cgggcuuccccucagaggc

SEQ ID NO: 2405638 - RNA, 19 nt, Artificial Sequence
  Description of Artificial Sequence: Synthetic oligonucleotide
uggucccugugcuccagga

SEQ ID NO: 2405639 - RNA, 19 nt, Artificial Sequence
  Description of Artificial Sequence: Synthetic oligonucleotide
aguacucauagcggggaau

SEQ ID NO: 2405640 - RNA, 19 nt, Artificial Sequence
  Description of Artificial Sequence: Synthetic oligonucleotide
cugaguacaaugcccugaa

SEQ ID NO: 2405641 - RNA, 19 nt, Artificial Sequence
  Description of Artificial Sequence: Synthetic oligonucleotide
ccgaaacuggaccuccugg

SEQ ID NO: 2405642 - RNA, 19 nt, Artificial Sequence
  Description of Artificial Sequence: Synthetic oligonucleotide
agccuccuaggccauggga

SEQ ID NO: 2405643 - RNA, 19 nt, Artificial Sequence
  Description of Artificial Sequence: Synthetic oligonucleotide
uggucgaagcugacugguc

SEQ ID NO: 2405644 - RNA, 19 nt, Artificial Sequence
  Description of Artificial Sequence: Synthetic oligonucleotide
aagaacggcuguagcgccu

SEQ ID NO: 2405645 - RNA, 19 nt, Artificial Sequence
  Description of Artificial Sequence: Synthetic oligonucleotide
cuuugucuuaaaggggcca

SEQ ID NO: 2405646 - RNA, 19 nt, Artificial Sequence
  Description of Artificial Sequence: Synthetic oligonucleotide
gccacgggaggccagcucc

SEQ ID NO: 2405647 - RNA, 19 nt, Artificial Sequence
  Description of Artificial Sequence: Synthetic oligonucleotide
ucaagguuaccagguccaa

SEQ ID NO: 2405648 - RNA, 19 nt, Artificial Sequence
  Description of Artificial Sequence: Synthetic oligonucleotide
caaagccacgggaggccag

SEQ ID NO: 2405649 - RNA, 19 nt, Artificial Sequence
  Description of Artificial Sequence: Synthetic oligonucleotide
ucgaagcugacuggucccu

SEQ ID NO: 2405650 - RNA, 19 nt, Artificial Sequence
  Description of Artificial Sequence: Synthetic oligonucleotide
agcgcuuguuauacugcag

SEQ ID NO: 2405651 - RNA, 19 nt, Artificial Sequence
  Description of Artificial Sequence: Synthetic oligonucleotide
caagauccgauacccaggu

SEQ ID NO: 2405652 - RNA, 19 nt, Artificial Sequence
  Description of Artificial Sequence: Synthetic oligonucleotide
cagagggaacauccaagca

SEQ ID NO: 2405653 - RNA, 19 nt, Artificial Sequence
  Description of Artificial Sequence: Synthetic oligonucleotide
gguuaccagguccaaucca

SEQ ID NO: 2405654 - RNA, 19 nt, Artificial Sequence
  Description of Artificial Sequence: Synthetic oligonucleotide
gcggggaauccacaggggc

SEQ ID NO: 2405655 - RNA, 19 nt, Artificial Sequence
  Description of Artificial Sequence: Synthetic oligonucleotide
cuuccccucagaggcgucc

SEQ ID NO: 2405656 - RNA, 19 nt, Artificial Sequence
  Description of Artificial Sequence: Synthetic oligonucleotide
ucugacccaccaucacauc

SEQ ID NO: 2405657 - RNA, 19 nt, Artificial Sequence
  Description of Artificial Sequence: Synthetic oligonucleotide
cugacuggucccugugcuc

SEQ ID NO: 2405658 - RNA, 19 nt, Artificial Sequence
  Description of Artificial Sequence: Synthetic oligonucleotide
aacggcuguagcgccucca

SEQ ID NO: 2405659 - RNA, 19 nt, Artificial Sequence
  Description of Artificial Sequence: Synthetic oligonucleotide
aggacgggcuuccccucag

SEQ ID NO: 2405660 - RNA, 19 nt, Artificial Sequence
  Description of Artificial Sequence: Synthetic oligonucleotide
gucccaucacagccacccg

SEQ ID NO: 2405661 - RNA, 19 nt, Artificial Sequence
  Description of Artificial Sequence: Synthetic oligonucleotide
aggcccaagcaguacucau

SEQ ID NO: 2405662 - RNA, 19 nt, Artificial Sequence
  Description of Artificial Sequence: Synthetic oligonucleotide
ccgauacccagguugaaca

SEQ ID NO: 2405663 - RNA, 19 nt, Artificial Sequence
  Description of Artificial Sequence: Synthetic oligonucleotide
gucggaagaggcuccccuc

SEQ ID NO: 2405664 - RNA, 19 nt, Artificial Sequence
  Description of Artificial Sequence: Synthetic oligonucleotide
acaagaugaucaaggggua

SEQ ID NO: 2405665 - RNA, 19 nt, Artificial Sequence
  Description of Artificial Sequence: Synthetic oligonucleotide
agccacgggaggccagcuc

SEQ ID NO: 2405666 - RNA, 19 nt, Artificial Sequence
  Description of Artificial Sequence: Synthetic oligonucleotide
gaagcugacuggucccugu

SEQ ID NO: 2405667 - RNA, 19 nt, Artificial Sequence
  Description of Artificial Sequence: Synthetic oligonucleotide
agguccaauccaccaggaa

SEQ ID NO: 2405668 - RNA, 19 nt, Artificial Sequence
  Description of Artificial Sequence: Synthetic oligonucleotide
gguagaagucaugcuccag

SEQ ID NO: 2405669 - RNA, 19 nt, Artificial Sequence
  Description of Artificial Sequence: Synthetic oligonucleotide
uccuaacguggaauuccuu

SEQ ID NO: 2405670 - RNA, 19 nt, Artificial Sequence
  Description of Artificial Sequence: Synthetic oligonucleotide
ggggauccauuccuccucc

SEQ ID NO: 2405671 - RNA, 19 nt, Artificial Sequence
  Description of Artificial Sequence: Synthetic oligonucleotide
uccaaacgagugucccauc

SEQ ID NO: 2405672 - RNA, 19 nt, Artificial Sequence
  Description of Artificial Sequence: Synthetic oligonucleotide
cucugacccaccaucacau

SEQ ID NO: 2405673 - RNA, 19 nt, Artificial Sequence
  Description of Artificial Sequence: Synthetic oligonucleotide
cugacccaccaucacaucu

SEQ ID NO: 2405674 - RNA, 19 nt, Artificial Sequence
  Description of Artificial Sequence: Synthetic oligonucleotide
uccaacccgcuggugcacc

SEQ ID NO: 2405675 - RNA, 19 nt, Artificial Sequence
  Description of Artificial Sequence: Synthetic oligonucleotide
augccguccuucaagguua

SEQ ID NO: 2405676 - RNA, 19 nt, Artificial Sequence
  Description of Artificial Sequence: Synthetic oligonucleotide
agcggggaauccacagggg

SEQ ID NO: 2405677 - RNA, 19 nt, Artificial Sequence
  Description of Artificial Sequence: Synthetic oligonucleotide
cuggcucucuugugggguc

SEQ ID NO: 2405678 - RNA, 19 nt, Artificial Sequence
  Description of Artificial Sequence: Synthetic oligonucleotide
guggggucugcuugcagaa

SEQ ID NO: 2405679 - RNA, 19 nt, Artificial Sequence
  Description of Artificial Sequence: Synthetic oligonucleotide
cuguagcgccuccaaacga

SEQ ID NO: 2405680 - RNA, 19 nt, Artificial Sequence
  Description of Artificial Sequence: Synthetic oligonucleotide
caucacaucugugcagcca

SEQ ID NO: 2405681 - RNA, 19 nt, Artificial Sequence
  Description of Artificial Sequence: Synthetic oligonucleotide
cacaccgaaacuggaccuc

SEQ ID NO: 2405682 - RNA, 19 nt, Artificial Sequence
  Description of Artificial Sequence: Synthetic oligonucleotide
cuccagagggaacauccaa

SEQ ID NO: 2405683 - RNA, 19 nt, Artificial Sequence
  Description of Artificial Sequence: Synthetic oligonucleotide
cccgagauggcuggaaagc

SEQ ID NO: 2405684 - RNA, 19 nt, Artificial Sequence
  Description of Artificial Sequence: Synthetic oligonucleotide
cagcaaccacaaagccacg

SEQ ID NO: 2405685 - RNA, 19 nt, Artificial Sequence
  Description of Artificial Sequence: Synthetic oligonucleotide
gcccgagauggcuggaaag

SEQ ID NO: 2405686 - RNA, 19 nt, Artificial Sequence
  Description of Artificial Sequence: Synthetic oligonucleotide
ugccguccuucaagguuac

SEQ ID NO: 2405687 - RNA, 19 nt, Artificial Sequence
  Description of Artificial Sequence: Synthetic oligonucleotide
guacaaugcccugaagccu

SEQ ID NO: 2405688 - RNA, 19 nt, Artificial Sequence
  Description of Artificial Sequence: Synthetic oligonucleotide
cugugcagccaacguggug

SEQ ID NO: 2405689 - RNA, 19 nt, Artificial Sequence
  Description of Artificial Sequence: Synthetic oligonucleotide
ccuggggauuccuaacgug

SEQ ID NO: 2405690 - RNA, 19 nt, Artificial Sequence
  Description of Artificial Sequence: Synthetic oligonucleotide
gguugaacagcgacccaac

SEQ ID NO: 2405691 - RNA, 19 nt, Artificial Sequence
  Description of Artificial Sequence: Synthetic oligonucleotide
ucgacggaaggggauccau

SEQ ID NO: 2405692 - RNA, 19 nt, Artificial Sequence
  Description of Artificial Sequence: Synthetic oligonucleotide
caaagcaagaacggcugua

SEQ ID NO: 2405693 - RNA, 19 nt, Artificial Sequence
  Description of Artificial Sequence: Synthetic oligonucleotide
uucgacggaaggggaucca

SEQ ID NO: 2405694 - RNA, 19 nt, Artificial Sequence
  Description of Artificial Sequence: Synthetic oligonucleotide
ccccuccuugauucgacgg

SEQ ID NO: 2405695 - RNA, 19 nt, Artificial Sequence
  Description of Artificial Sequence: Synthetic oligonucleotide
gccuccuaggccaugggac

SEQ ID NO: 2405696 - RNA, 19 nt, Artificial Sequence
  Description of Artificial Sequence: Synthetic oligonucleotide
gaggacgggcuuccccuca

SEQ ID NO: 2405697 - RNA, 19 nt, Artificial Sequence
  Description of Artificial Sequence: Synthetic oligonucleotide
ugaagccuccuaggccaug

SEQ ID NO: 2405698 - RNA, 19 nt, Artificial Sequence
  Description of Artificial Sequence: Synthetic oligonucleotide
gaacggcuguagcgccucc

SEQ ID NO: 2405699 - RNA, 19 nt, Artificial Sequence
  Description of Artificial Sequence: Synthetic oligonucleotide
gagucggaagaggcucccc

SEQ ID NO: 2405700 - RNA, 19 nt, Artificial Sequence
  Description of Artificial Sequence: Synthetic oligonucleotide
gggccaaagcaagaacggc

SEQ ID NO: 2405701 - RNA, 19 nt, Artificial Sequence
  Description of Artificial Sequence: Synthetic oligonucleotide
gcuaacaggcaagcgacaa

SEQ ID NO: 2405702 - RNA, 19 nt, Artificial Sequence
  Description of Artificial Sequence: Synthetic oligonucleotide
cagguccaauccaccagga

SEQ ID NO: 2405703 - RNA, 19 nt, Artificial Sequence
  Description of Artificial Sequence: Synthetic oligonucleotide
uggugcaccuggggauucc

SEQ ID NO: 2405704 - RNA, 19 nt, Artificial Sequence
  Description of Artificial Sequence: Synthetic oligonucleotide
agcuaacaggcaagcgaca

SEQ ID NO: 2405705 - RNA, 19 nt, Artificial Sequence
  Description of Artificial Sequence: Synthetic oligonucleotide
gacccaccaucacaucugu

SEQ ID NO: 2405706 - RNA, 19 nt, Artificial Sequence
  Description of Artificial Sequence: Synthetic oligonucleotide
caacccagcgcuuguuaua

SEQ ID NO: 2405707 - RNA, 19 nt, Artificial Sequence
  Description of Artificial Sequence: Synthetic oligonucleotide
gcaguacucauagcgggga

SEQ ID NO: 2405708 - RNA, 19 nt, Artificial Sequence
  Description of Artificial Sequence: Synthetic oligonucleotide
aagccacgggaggccagcu

SEQ ID NO: 2405709 - RNA, 19 nt, Artificial Sequence
  Description of Artificial Sequence: Synthetic oligonucleotide
gcaccuggggauuccuaac

SEQ ID NO: 2405710 - RNA, 19 nt, Artificial Sequence
  Description of Artificial Sequence: Synthetic oligonucleotide
ggauuccuaacguggaauu

SEQ ID NO: 2405711 - RNA, 19 nt, Artificial Sequence
  Description of Artificial Sequence: Synthetic oligonucleotide
ccaugcugaaggcugagua

SEQ ID NO: 2405712 - RNA, 19 nt, Artificial Sequence
  Description of Artificial Sequence: Synthetic oligonucleotide
gcuuguuauacugcaggua

SEQ ID NO: 2405713 - RNA, 19 nt, Artificial Sequence
  Description of Artificial Sequence: Synthetic oligonucleotide
ggcugcucacacuuugucu

SEQ ID NO: 2405714 - RNA, 19 nt, Artificial Sequence
  Description of Artificial Sequence: Synthetic oligonucleotide
acccagcgcuuguuauacu

SEQ ID NO: 2405715 - RNA, 19 nt, Artificial Sequence
  Description of Artificial Sequence: Synthetic oligonucleotide
guggucgaagcugacuggu

SEQ ID NO: 2405716 - RNA, 19 nt, Artificial Sequence
  Description of Artificial Sequence: Synthetic oligonucleotide
guagguggucgaagcugac

SEQ ID NO: 2405717 - RNA, 19 nt, Artificial Sequence
  Description of Artificial Sequence: Synthetic oligonucleotide
cugaugcuuggcaggggua

SEQ ID NO: 2405718 - RNA, 19 nt, Artificial Sequence
  Description of Artificial Sequence: Synthetic oligonucleotide
ggauccgcagugcccgcac

SEQ ID NO: 2405719 - RNA, 19 nt, Artificial Sequence
  Description of Artificial Sequence: Synthetic oligonucleotide
cuccaaacgagugucccau

SEQ ID NO: 2405720 - RNA, 19 nt, Artificial Sequence
  Description of Artificial Sequence: Synthetic oligonucleotide
caguacucauagcggggaa

SEQ ID NO: 2405721 - RNA, 19 nt, Artificial Sequence
  Description of Artificial Sequence: Synthetic oligonucleotide
cuuguggggucugcuugca

SEQ ID NO: 2405722 - RNA, 19 nt, Artificial Sequence
  Description of Artificial Sequence: Synthetic oligonucleotide
ggggauuccuaacguggaa

SEQ ID NO: 2405723 - RNA, 19 nt, Artificial Sequence
  Description of Artificial Sequence: Synthetic oligonucleotide
ggucuccacagucuggaau

SEQ ID NO: 2405724 - RNA, 19 nt, Artificial Sequence
  Description of Artificial Sequence: Synthetic oligonucleotide
gugcccgcacacacucucc

SEQ ID NO: 2405725 - RNA, 19 nt, Artificial Sequence
  Description of Artificial Sequence: Synthetic oligonucleotide
gcucacacuuugucucuga

SEQ ID NO: 2405726 - RNA, 19 nt, Artificial Sequence
  Description of Artificial Sequence: Synthetic oligonucleotide
ccggcucaugucgaugccg

SEQ ID NO: 2405727 - RNA, 19 nt, Artificial Sequence
  Description of Artificial Sequence: Synthetic oligonucleotide
ccucagaggcguccugcag

SEQ ID NO: 2405728 - RNA, 19 nt, Artificial Sequence
  Description of Artificial Sequence: Synthetic oligonucleotide
cacccggcucaugucgaug

SEQ ID NO: 2405729 - RNA, 19 nt, Artificial Sequence
  Description of Artificial Sequence: Synthetic oligonucleotide
cagguugaacagcgaccca

SEQ ID NO: 2405730 - RNA, 19 nt, Artificial Sequence
  Description of Artificial Sequence: Synthetic oligonucleotide
gcacaccgaaacuggaccu

SEQ ID NO: 2405731 - RNA, 19 nt, Artificial Sequence
  Description of Artificial Sequence: Synthetic oligonucleotide
cuggugcaccuggggauuc

SEQ ID NO: 2405732 - RNA, 19 nt, Artificial Sequence
  Description of Artificial Sequence: Synthetic oligonucleotide
cucacacuuugucucugau

SEQ ID NO: 2405733 - RNA, 19 nt, Artificial Sequence
  Description of Artificial Sequence: Synthetic oligonucleotide
caagaugaucaagggguau

SEQ ID NO: 2405734 - RNA, 19 nt, Artificial Sequence
  Description of Artificial Sequence: Synthetic oligonucleotide
caggcccaagcaguacuca

SEQ ID NO: 2405735 - RNA, 19 nt, Artificial Sequence
  Description of Artificial Sequence: Synthetic oligonucleotide
aggcguccugcaggauccg

SEQ ID NO: 2405736 - RNA, 19 nt, Artificial Sequence
  Description of Artificial Sequence: Synthetic oligonucleotide
aggggccauuccagcuaac

SEQ ID NO: 2405737 - RNA, 19 nt, Artificial Sequence
  Description of Artificial Sequence: Synthetic oligonucleotide
gcgccuccaaacgaguguc

SEQ ID NO: 2405738 - RNA, 19 nt, Artificial Sequence
  Description of Artificial Sequence: Synthetic oligonucleotide
ccaccaggaaagacauuga

SEQ ID NO: 2405739 - RNA, 19 nt, Artificial Sequence
  Description of Artificial Sequence: Synthetic oligonucleotide
ccgcagugcccgcacacac

SEQ ID NO: 2405740 - RNA, 19 nt, Artificial Sequence
  Description of Artificial Sequence: Synthetic oligonucleotide
gggauuccuaacguggaau

SEQ ID NO: 2405741 - RNA, 19 nt, Artificial Sequence
  Description of Artificial Sequence: Synthetic oligonucleotide
cuccuaggccaugggacaa

SEQ ID NO: 2405742 - RNA, 19 nt, Artificial Sequence
  Description of Artificial Sequence: Synthetic oligonucleotide
guagcgccuccaaacgagu

SEQ ID NO: 2405743 - RNA, 19 nt, Artificial Sequence
  Description of Artificial Sequence: Synthetic oligonucleotide
ccgagauggcuggaaagca

SEQ ID NO: 2405744 - RNA, 19 nt, Artificial Sequence
  Description of Artificial Sequence: Synthetic oligonucleotide
caaagaacacagggccccu

SEQ ID NO: 2405745 - RNA, 19 nt, Artificial Sequence
  Description of Artificial Sequence: Synthetic oligonucleotide
gggauccauuccuccucca

SEQ ID NO: 2405746 - RNA, 19 nt, Artificial Sequence
  Description of Artificial Sequence: Synthetic oligonucleotide
gggcuuccccucagaggcg

SEQ ID NO: 2405747 - RNA, 19 nt, Artificial Sequence
  Description of Artificial Sequence: Synthetic oligonucleotide
ggcucaugucgaugccguc

SEQ ID NO: 2405748 - RNA, 19 nt, Artificial Sequence
  Description of Artificial Sequence: Synthetic oligonucleotide
gcaagcgacaagauccgau

SEQ ID NO: 2405749 - RNA, 19 nt, Artificial Sequence
  Description of Artificial Sequence: Synthetic oligonucleotide
cccggcucaugucgaugcc

SEQ ID NO: 2405750 - RNA, 19 nt, Artificial Sequence
  Description of Artificial Sequence: Synthetic oligonucleotide
gccccuggccuugggguag

SEQ ID NO: 2405751 - RNA, 19 nt, Artificial Sequence
  Description of Artificial Sequence: Synthetic oligonucleotide
ggcguccugcaggauccgc

SEQ ID NO: 2405752 - RNA, 19 nt, Artificial Sequence
  Description of Artificial Sequence: Synthetic oligonucleotide
acccaacccagcgcuuguu

SEQ ID NO: 2405753 - RNA, 19 nt, Artificial Sequence
  Description of Artificial Sequence: Synthetic oligonucleotide
ggcaagcgacaagauccga

SEQ ID NO: 2405754 - RNA, 19 nt, Artificial Sequence
  Description of Artificial Sequence: Synthetic oligonucleotide
ccgcuggugcaccugggga

SEQ ID NO: 2405755 - RNA, 19 nt, Artificial Sequence
  Description of Artificial Sequence: Synthetic oligonucleotide
gggucugcuugcagaagua

SEQ ID NO: 2405756 - RNA, 19 nt, Artificial Sequence
  Description of Artificial Sequence: Synthetic oligonucleotide
cgacaagauccgauaccca

SEQ ID NO: 2405757 - RNA, 19 nt, Artificial Sequence
  Description of Artificial Sequence: Synthetic oligonucleotide
ccuaggccaugggacaaga

SEQ ID NO: 2405758 - RNA, 19 nt, Artificial Sequence
  Description of Artificial Sequence: Synthetic oligonucleotide
ggacgggcuuccccucaga

SEQ ID NO: 2405759 - RNA, 19 nt, Artificial Sequence
  Description of Artificial Sequence: Synthetic oligonucleotide
ggcuccccuccagacucug

SEQ ID NO: 2405760 - RNA, 19 nt, Artificial Sequence
  Description of Artificial Sequence: Synthetic oligonucleotide
cgacccaacccagcgcuug

SEQ ID NO: 2405761 - RNA, 19 nt, Artificial Sequence
  Description of Artificial Sequence: Synthetic oligonucleotide
aggcuccccuccagacucu

SEQ ID NO: 2405762 - RNA, 19 nt, Artificial Sequence
  Description of Artificial Sequence: Synthetic oligonucleotide
ccaacccagcgcuuguuau

SEQ ID NO: 2405763 - RNA, 19 nt, Artificial Sequence
  Description of Artificial Sequence: Synthetic oligonucleotide
cgcuuguuauacugcaggu

SEQ ID NO: 2405764 - RNA, 19 nt, Artificial Sequence
  Description of Artificial Sequence: Synthetic oligonucleotide
gccacccggcucaugucga

SEQ ID NO: 2405765 - RNA, 19 nt, Artificial Sequence
  Description of Artificial Sequence: Synthetic oligonucleotide
cgaagcugacuggucccug

SEQ ID NO: 2405766 - RNA, 19 nt, Artificial Sequence
  Description of Artificial Sequence: Synthetic oligonucleotide
cccaacccagcgcuuguua

SEQ ID NO: 2405767 - RNA, 19 nt, Artificial Sequence
  Description of Artificial Sequence: Synthetic oligonucleotide
ggugcaccuggggauuccu

SEQ ID NO: 2405768 - RNA, 19 nt, Artificial Sequence
  Description of Artificial Sequence: Synthetic oligonucleotide
ccacgggaggccagcucca

SEQ ID NO: 2405769 - RNA, 19 nt, Artificial Sequence
  Description of Artificial Sequence: Synthetic oligonucleotide
ggccaugggacaagaugau

SEQ ID NO: 2405770 - RNA, 19 nt, Artificial Sequence
  Description of Artificial Sequence: Synthetic oligonucleotide
ggaauccacaggggcugcu

SEQ ID NO: 2405771 - RNA, 19 nt, Artificial Sequence
  Description of Artificial Sequence: Synthetic oligonucleotide
caaugcccugaagccuccu

SEQ ID NO: 2405772 - RNA, 19 nt, Artificial Sequence
  Description of Artificial Sequence: Synthetic oligonucleotide
cggcucaugucgaugccgu

SEQ ID NO: 2405773 - RNA, 19 nt, Artificial Sequence
  Description of Artificial Sequence: Synthetic oligonucleotide
gggcccgagauggcuggaa

SEQ ID NO: 2405774 - RNA, 19 nt, Artificial Sequence
  Description of Artificial Sequence: Synthetic oligonucleotide
gcuuccccucagaggcguc

SEQ ID NO: 2405775 - RNA, 19 nt, Artificial Sequence
  Description of Artificial Sequence: Synthetic oligonucleotide
ccaacccgcuggugcaccu

SEQ ID NO: 2405776 - RNA, 19 nt, Artificial Sequence
  Description of Artificial Sequence: Synthetic oligonucleotide
ggggcccgagauggcugga

SEQ ID NO: 2405777 - RNA, 19 nt, Artificial Sequence
  Description of Artificial Sequence: Synthetic oligonucleotide
cgcagugcccgcacacacu

SEQ ID NO: 2405778 - RNA, 19 nt, Artificial Sequence
  Description of Artificial Sequence: Synthetic oligonucleotide
cggcuguagcgccuccaaa

SEQ ID NO: 2405779 - RNA, 19 nt, Artificial Sequence
  Description of Artificial Sequence: Synthetic oligonucleotide
cgacggaaggggauccauu

SEQ ID NO: 2405780 - RNA, 19 nt, Artificial Sequence
  Description of Artificial Sequence: Synthetic oligonucleotide
cagaggcguccugcaggau

SEQ ID NO: 2405781 - RNA, 19 nt, Artificial Sequence
  Description of Artificial Sequence: Synthetic oligonucleotide
ccacccggcucaugucgau

SEQ ID NO: 2405782 - RNA, 19 nt, Artificial Sequence
  Description of Artificial Sequence: Synthetic oligonucleotide
aauuaauaaauacaggggc

SEQ ID NO: 2405783 - RNA, 19 nt, Artificial Sequence
  Description of Artificial Sequence: Synthetic oligonucleotide
uaaauuaauaaauacaggg

SEQ ID NO: 2405784 - RNA, 19 nt, Artificial Sequence
  Description of Artificial Sequence: Synthetic oligonucleotide
aagacauagacucaagacc

SEQ ID NO: 2405785 - RNA, 19 nt, Artificial Sequence
  Description of Artificial Sequence: Synthetic oligonucleotide
aaugaggaagcccaaaggg

SEQ ID NO: 2405786 - RNA, 19 nt, Artificial Sequence
  Description of Artificial Sequence: Synthetic oligonucleotide
aauacuggggcucucuugc

SEQ ID NO: 2405787 - RNA, 19 nt, Artificial Sequence
  Description of Artificial Sequence: Synthetic oligonucleotide
aaauuaauaaauacagggg

SEQ ID NO: 2405788 - RNA, 19 nt, Artificial Sequence
  Description of Artificial Sequence: Synthetic oligonucleotide
aguaaauucaaauggcuuc

SEQ ID NO: 2405789 - RNA, 19 nt, Artificial Sequence
  Description of Artificial Sequence: Synthetic oligonucleotide
aagucugcgcuccauacgc

SEQ ID NO: 2405790 - RNA, 19 nt, Artificial Sequence
  Description of Artificial Sequence: Synthetic oligonucleotide
aaggauucgguagaaauac

SEQ ID NO: 2405791 - RNA, 19 nt, Artificial Sequence
  Description of Artificial Sequence: Synthetic oligonucleotide
auuaauaaauacaggggcc

SEQ ID NO: 2405792 - RNA, 19 nt, Artificial Sequence
  Description of Artificial Sequence: Synthetic oligonucleotide
aaaaggauucgguagaaau

SEQ ID NO: 2405793 - RNA, 19 nt, Artificial Sequence
  Description of Artificial Sequence: Synthetic oligonucleotide
uagagaaugaggaagccca

SEQ ID NO: 2405794 - RNA, 19 nt, Artificial Sequence
  Description of Artificial Sequence: Synthetic oligonucleotide
gaaguaauagcucugagua

SEQ ID NO: 2405795 - RNA, 19 nt, Artificial Sequence
  Description of Artificial Sequence: Synthetic oligonucleotide
ucaaauggcuucuaagaag

SEQ ID NO: 2405796 - RNA, 19 nt, Artificial Sequence
  Description of Artificial Sequence: Synthetic oligonucleotide
ugcccuguaaaccaugagg

SEQ ID NO: 2405797 - RNA, 19 nt, Artificial Sequence
  Description of Artificial Sequence: Synthetic oligonucleotide
uucgguagaaauacugggg

SEQ ID NO: 2405798 - RNA, 19 nt, Artificial Sequence
  Description of Artificial Sequence: Synthetic oligonucleotide
gaagacauagacucaagac

SEQ ID NO: 2405799 - RNA, 19 nt, Artificial Sequence
  Description of Artificial Sequence: Synthetic oligonucleotide
auucaaauggcuucuaaga

SEQ ID NO: 2405800 - RNA, 19 nt, Artificial Sequence
  Description of Artificial Sequence: Synthetic oligonucleotide
auucgguagaaauacuggg

SEQ ID NO: 2405801 - RNA, 19 nt, Artificial Sequence
  Description of Artificial Sequence: Synthetic oligonucleotide
aaguaauagcucugaguac

SEQ ID NO: 2405802 - RNA, 19 nt, Artificial Sequence
  Description of Artificial Sequence: Synthetic oligonucleotide
uuaauaaauacaggggccc

SEQ ID NO: 2405803 - RNA, 19 nt, Artificial Sequence
  Description of Artificial Sequence: Synthetic oligonucleotide
acuccagacauucucacag

SEQ ID NO: 2405804 - RNA, 19 nt, Artificial Sequence
  Description of Artificial Sequence: Synthetic oligonucleotide
ucgguagaaauacuggggc

SEQ ID NO: 2405805 - RNA, 19 nt, Artificial Sequence
  Description of Artificial Sequence: Synthetic oligonucleotide
agucccaaggaagugaggc

SEQ ID NO: 2405806 - RNA, 19 nt, Artificial Sequence
  Description of Artificial Sequence: Synthetic oligonucleotide
uucuaagaagagaaggcca

SEQ ID NO: 2405807 - RNA, 19 nt, Artificial Sequence
  Description of Artificial Sequence: Synthetic oligonucleotide
ugcuaugagccacuggagg

SEQ ID NO: 2405808 - RNA, 19 nt, Artificial Sequence
  Description of Artificial Sequence: Synthetic oligonucleotide
ucugauugcgcauugccca

SEQ ID NO: 2405809 - RNA, 19 nt, Artificial Sequence
  Description of Artificial Sequence: Synthetic oligonucleotide
aaagucugcgcuccauacg

SEQ ID NO: 2405810 - RNA, 19 nt, Artificial Sequence
  Description of Artificial Sequence: Synthetic oligonucleotide
uugcccaggauauagggag

SEQ ID NO: 2405811 - RNA, 19 nt, Artificial Sequence
  Description of Artificial Sequence: Synthetic oligonucleotide
aauagcucugaguacugcu

SEQ ID NO: 2405812 - RNA, 19 nt, Artificial Sequence
  Description of Artificial Sequence: Synthetic oligonucleotide
uuucugauugcgcauugcc

SEQ ID NO: 2405813 - RNA, 19 nt, Artificial Sequence
  Description of Artificial Sequence: Synthetic oligonucleotide
gauucgguagaaauacugg

SEQ ID NO: 2405814 - RNA, 19 nt, Artificial Sequence
  Description of Artificial Sequence: Synthetic oligonucleotide
aggauauagggagaaagcg

SEQ ID NO: 2405815 - RNA, 19 nt, Artificial Sequence
  Description of Artificial Sequence: Synthetic oligonucleotide
ugaggaagcccaaagggcu

SEQ ID NO: 2405816 - RNA, 19 nt, Artificial Sequence
  Description of Artificial Sequence: Synthetic oligonucleotide
uucaaauggcuucuaagaa

SEQ ID NO: 2405817 - RNA, 19 nt, Artificial Sequence
  Description of Artificial Sequence: Synthetic oligonucleotide
cuggaaaucaaagucugcg

SEQ ID NO: 2405818 - RNA, 19 nt, Artificial Sequence
  Description of Artificial Sequence: Synthetic oligonucleotide
uggccaaaguccuaggaag

SEQ ID NO: 2405819 - RNA, 19 nt, Artificial Sequence
  Description of Artificial Sequence: Synthetic oligonucleotide
aguaauagcucugaguacu

SEQ ID NO: 2405820 - RNA, 19 nt, Artificial Sequence
  Description of Artificial Sequence: Synthetic oligonucleotide
acaguuuucugauugcgca

SEQ ID NO: 2405821 - RNA, 19 nt, Artificial Sequence
  Description of Artificial Sequence: Synthetic oligonucleotide
aggguuacagguucagugg

SEQ ID NO: 2405822 - RNA, 19 nt, Artificial Sequence
  Description of Artificial Sequence: Synthetic oligonucleotide
auagggagaaagcgguccc

SEQ ID NO: 2405823 - RNA, 19 nt, Artificial Sequence
  Description of Artificial Sequence: Synthetic oligonucleotide
ugaucccugaaguaaauuc

SEQ ID NO: 2405824 - RNA, 19 nt, Artificial Sequence
  Description of Artificial Sequence: Synthetic oligonucleotide
aaauacaggggccccugag

SEQ ID NO: 2405825 - RNA, 19 nt, Artificial Sequence
  Description of Artificial Sequence: Synthetic oligonucleotide
aaauacuggggcucucuug

SEQ ID NO: 2405826 - RNA, 19 nt, Artificial Sequence
  Description of Artificial Sequence: Synthetic oligonucleotide
uguaugcuccaccccaggg

SEQ ID NO: 2405827 - RNA, 19 nt, Artificial Sequence
  Description of Artificial Sequence: Synthetic oligonucleotide
aaguaggcaggcuuugugu

SEQ ID NO: 2405828 - RNA, 19 nt, Artificial Sequence
  Description of Artificial Sequence: Synthetic oligonucleotide
cuucuaagaagagaaggcc

SEQ ID NO: 2405829 - RNA, 19 nt, Artificial Sequence
  Description of Artificial Sequence: Synthetic oligonucleotide
uucugauugcgcauugccc

SEQ ID NO: 2405830 - RNA, 19 nt, Artificial Sequence
  Description of Artificial Sequence: Synthetic oligonucleotide
agaaagcggucccuggggc

SEQ ID NO: 2405831 - RNA, 19 nt, Artificial Sequence
  Description of Artificial Sequence: Synthetic oligonucleotide
uacaguuuucugauugcgc

SEQ ID NO: 2405832 - RNA, 19 nt, Artificial Sequence
  Description of Artificial Sequence: Synthetic oligonucleotide
cauugcccaggauauaggg

SEQ ID NO: 2405833 - RNA, 19 nt, Artificial Sequence
  Description of Artificial Sequence: Synthetic oligonucleotide
ugagggaacucccaauaca

SEQ ID NO: 2405834 - RNA, 19 nt, Artificial Sequence
  Description of Artificial Sequence: Synthetic oligonucleotide
cuucaguaguccucuaggg

SEQ ID NO: 2405835 - RNA, 19 nt, Artificial Sequence
  Description of Artificial Sequence: Synthetic oligonucleotide
gaagaaggguuacagguuc

SEQ ID NO: 2405836 - RNA, 19 nt, Artificial Sequence
  Description of Artificial Sequence: Synthetic oligonucleotide
uauagggagaaagcggucc

SEQ ID NO: 2405837 - RNA, 19 nt, Artificial Sequence
  Description of Artificial Sequence: Synthetic oligonucleotide
uucaguaguccucuaggga

SEQ ID NO: 2405838 - RNA, 19 nt, Artificial Sequence
  Description of Artificial Sequence: Synthetic oligonucleotide
cagacauucucacagguuc

SEQ ID NO: 2405839 - RNA, 19 nt, Artificial Sequence
  Description of Artificial Sequence: Synthetic oligonucleotide
guguuugcucagcagaggg

SEQ ID NO: 2405840 - RNA, 19 nt, Artificial Sequence
  Description of Artificial Sequence: Synthetic oligonucleotide
acuggagggucuuuugagg

SEQ ID NO: 2405841 - RNA, 19 nt, Artificial Sequence
  Description of Artificial Sequence: Synthetic oligonucleotide
caggauauagggagaaagc

SEQ ID NO: 2405842 - RNA, 19 nt, Artificial Sequence
  Description of Artificial Sequence: Synthetic oligonucleotide
augaggaagcccaaagggc

SEQ ID NO: 2405843 - RNA, 19 nt, Artificial Sequence
  Description of Artificial Sequence: Synthetic oligonucleotide
acauagacucaagaccugc

SEQ ID NO: 2405844 - RNA, 19 nt, Artificial Sequence
  Description of Artificial Sequence: Synthetic oligonucleotide
uuagagaaugaggaagccc

SEQ ID NO: 2405845 - RNA, 19 nt, Artificial Sequence
  Description of Artificial Sequence: Synthetic oligonucleotide
agacauagacucaagaccu

SEQ ID NO: 2405846 - RNA, 19 nt, Artificial Sequence
  Description of Artificial Sequence: Synthetic oligonucleotide
aguggaagaaggguuacag

SEQ ID NO: 2405847 - RNA, 19 nt, Artificial Sequence
  Description of Artificial Sequence: Synthetic oligonucleotide
aguacccuguguaugcucc

SEQ ID NO: 2405848 - RNA, 19 nt, Artificial Sequence
  Description of Artificial Sequence: Synthetic oligonucleotide
cugaguacugcuccaacag

SEQ ID NO: 2405849 - RNA, 19 nt, Artificial Sequence
  Description of Artificial Sequence: Synthetic oligonucleotide
ucugaguacugcuccaaca

SEQ ID NO: 2405850 - RNA, 19 nt, Artificial Sequence
  Description of Artificial Sequence: Synthetic oligonucleotide
cacagcucgaaguaauagc

SEQ ID NO: 2405851 - RNA, 19 nt, Artificial Sequence
  Description of Artificial Sequence: Synthetic oligonucleotide
gaauuggaguggaaugugg

SEQ ID NO: 2405852 - RNA, 19 nt, Artificial Sequence
  Description of Artificial Sequence: Synthetic oligonucleotide
gagaaagcggucccugggg

SEQ ID NO: 2405853 - RNA, 19 nt, Artificial Sequence
  Description of Artificial Sequence: Synthetic oligonucleotide
augagggaacucccaauac

SEQ ID NO: 2405854 - RNA, 19 nt, Artificial Sequence
  Description of Artificial Sequence: Synthetic oligonucleotide
auacaguuuucugauugcg

SEQ ID NO: 2405855 - RNA, 19 nt, Artificial Sequence
  Description of Artificial Sequence: Synthetic oligonucleotide
caacuggcuaccacaaggg

SEQ ID NO: 2405856 - RNA, 19 nt, Artificial Sequence
  Description of Artificial Sequence: Synthetic oligonucleotide
uggaguacccuguguaugc

SEQ ID NO: 2405857 - RNA, 19 nt, Artificial Sequence
  Description of Artificial Sequence: Synthetic oligonucleotide
aagcccaaagggcugagaa

SEQ ID NO: 2405858 - RNA, 19 nt, Artificial Sequence
  Description of Artificial Sequence: Synthetic oligonucleotide
cuguaaaccaugagggaac

SEQ ID NO: 2405859 - RNA, 19 nt, Artificial Sequence
  Description of Artificial Sequence: Synthetic oligonucleotide
aauaaauacaggggccccu

SEQ ID NO: 2405860 - RNA, 19 nt, Artificial Sequence
  Description of Artificial Sequence: Synthetic oligonucleotide
aauguggaguacccugugu

SEQ ID NO: 2405861 - RNA, 19 nt, Artificial Sequence
  Description of Artificial Sequence: Synthetic oligonucleotide
ucgaaguaauagcucugag

SEQ ID NO: 2405862 - RNA, 19 nt, Artificial Sequence
  Description of Artificial Sequence: Synthetic oligonucleotide
acuguccugcagcaaaauc

SEQ ID NO: 2405863 - RNA, 19 nt, Artificial Sequence
  Description of Artificial Sequence: Synthetic oligonucleotide
ugcagcaaaaucccacaac

SEQ ID NO: 2405864 - RNA, 19 nt, Artificial Sequence
  Description of Artificial Sequence: Synthetic oligonucleotide
ucucuugcagggagaauug

SEQ ID NO: 2405865 - RNA, 19 nt, Artificial Sequence
  Description of Artificial Sequence: Synthetic oligonucleotide
ggagaauuggaguggaaug

SEQ ID NO: 2405866 - RNA, 19 nt, Artificial Sequence
  Description of Artificial Sequence: Synthetic oligonucleotide
ggauauagggagaaagcgg

SEQ ID NO: 2405867 - RNA, 19 nt, Artificial Sequence
  Description of Artificial Sequence: Synthetic oligonucleotide
uguguaugcuccaccccag

SEQ ID NO: 2405868 - RNA, 19 nt, Artificial Sequence
  Description of Artificial Sequence: Synthetic oligonucleotide
cauagacucaagaccugcc

SEQ ID NO: 2405869 - RNA, 19 nt, Artificial Sequence
  Description of Artificial Sequence: Synthetic oligonucleotide
uguuugcucagcagagggc

SEQ ID NO: 2405870 - RNA, 19 nt, Artificial Sequence
  Description of Artificial Sequence: Synthetic oligonucleotide
cuagggaccaggguuagag

SEQ ID NO: 2405871 - RNA, 19 nt, Artificial Sequence
  Description of Artificial Sequence: Synthetic oligonucleotide
gcuaugagccacuggaggg

SEQ ID NO: 2405872 - RNA, 19 nt, Artificial Sequence
  Description of Artificial Sequence: Synthetic oligonucleotide
uccagacauucucacaggu

SEQ ID NO: 2405873 - RNA, 19 nt, Artificial Sequence
  Description of Artificial Sequence: Synthetic oligonucleotide
ugaugaguggaagaagggu

SEQ ID NO: 2405874 - RNA, 19 nt, Artificial Sequence
  Description of Artificial Sequence: Synthetic oligonucleotide
auuugugugugugugugug

SEQ ID NO: 2405875 - RNA, 19 nt, Artificial Sequence
  Description of Artificial Sequence: Synthetic oligonucleotide
aaguccuaggaaggugggc

SEQ ID NO: 2405876 - RNA, 19 nt, Artificial Sequence
  Description of Artificial Sequence: Synthetic oligonucleotide
uccugcagcaaaaucccac

SEQ ID NO: 2405877 - RNA, 19 nt, Artificial Sequence
  Description of Artificial Sequence: Synthetic oligonucleotide
gauauagggagaaagcggu

SEQ ID NO: 2405878 - RNA, 19 nt, Artificial Sequence
  Description of Artificial Sequence: Synthetic oligonucleotide
cagucauggaaauaaauua

SEQ ID NO: 2405879 - RNA, 19 nt, Artificial Sequence
  Description of Artificial Sequence: Synthetic oligonucleotide
uguggccaaaguccuagga

SEQ ID NO: 2405880 - RNA, 19 nt, Artificial Sequence
  Description of Artificial Sequence: Synthetic oligonucleotide
ugugugugugugugugugg

SEQ ID NO: 2405881 - RNA, 19 nt, Artificial Sequence
  Description of Artificial Sequence: Synthetic oligonucleotide
aaaaucccacaacuggcua

SEQ ID NO: 2405882 - RNA, 19 nt, Artificial Sequence
  Description of Artificial Sequence: Synthetic oligonucleotide
aaaggauucgguagaaaua

SEQ ID NO: 2405883 - RNA, 19 nt, Artificial Sequence
  Description of Artificial Sequence: Synthetic oligonucleotide
cuuuguguuugcucagcag

SEQ ID NO: 2405884 - RNA, 19 nt, Artificial Sequence
  Description of Artificial Sequence: Synthetic oligonucleotide
ugggaaagcugcuuugccu

SEQ ID NO: 2405885 - RNA, 19 nt, Artificial Sequence
  Description of Artificial Sequence: Synthetic oligonucleotide
uguguuugcucagcagagg

SEQ ID NO: 2405886 - RNA, 19 nt, Artificial Sequence
  Description of Artificial Sequence: Synthetic oligonucleotide
ugggcuagugcccuguaaa

SEQ ID NO: 2405887 - RNA, 19 nt, Artificial Sequence
  Description of Artificial Sequence: Synthetic oligonucleotide
auacaggggccccugagca

SEQ ID NO: 2405888 - RNA, 19 nt, Artificial Sequence
  Description of Artificial Sequence: Synthetic oligonucleotide
uugcgcauugcccaggaua

SEQ ID NO: 2405889 - RNA, 19 nt, Artificial Sequence
  Description of Artificial Sequence: Synthetic oligonucleotide
ucuuuugaggcaggagucc

SEQ ID NO: 2405890 - RNA, 19 nt, Artificial Sequence
  Description of Artificial Sequence: Synthetic oligonucleotide
gcaccaagaagacauagac

SEQ ID NO: 2405891 - RNA, 19 nt, Artificial Sequence
  Description of Artificial Sequence: Synthetic oligonucleotide
agucauggaaauaaauuaa

SEQ ID NO: 2405892 - RNA, 19 nt, Artificial Sequence
  Description of Artificial Sequence: Synthetic oligonucleotide
acagucauggaaauaaauu

SEQ ID NO: 2405893 - RNA, 19 nt, Artificial Sequence
  Description of Artificial Sequence: Synthetic oligonucleotide
uucugaugaguggaagaag

SEQ ID NO: 2405894 - RNA, 19 nt, Artificial Sequence
  Description of Artificial Sequence: Synthetic oligonucleotide
ucaagaccugcccugcuau

SEQ ID NO: 2405895 - RNA, 19 nt, Artificial Sequence
  Description of Artificial Sequence: Synthetic oligonucleotide
caggcuuuguguuugcuca

SEQ ID NO: 2405896 - RNA, 19 nt, Artificial Sequence
  Description of Artificial Sequence: Synthetic oligonucleotide
uugugugugugugugugug

SEQ ID NO: 2405897 - RNA, 19 nt, Artificial Sequence
  Description of Artificial Sequence: Synthetic oligonucleotide
gaaaaguaggcaggcuuug

SEQ ID NO: 2405898 - RNA, 19 nt, Artificial Sequence
  Description of Artificial Sequence: Synthetic oligonucleotide
aguccuaggaaggugggcu

SEQ ID NO: 2405899 - RNA, 19 nt, Artificial Sequence
  Description of Artificial Sequence: Synthetic oligonucleotide
ggguuagagaaugaggaag

SEQ ID NO: 2405900 - RNA, 19 nt, Artificial Sequence
  Description of Artificial Sequence: Synthetic oligonucleotide
gguuagagaaugaggaagc

SEQ ID NO: 2405901 - RNA, 19 nt, Artificial Sequence
  Description of Artificial Sequence: Synthetic oligonucleotide
gcccuguaaaccaugaggg

SEQ ID NO: 2405902 - RNA, 19 nt, Artificial Sequence
  Description of Artificial Sequence: Synthetic oligonucleotide
uuuugaggcaggaguccca

SEQ ID NO: 2405903 - RNA, 19 nt, Artificial Sequence
  Description of Artificial Sequence: Synthetic oligonucleotide
uuacagguucaguggggag

SEQ ID NO: 2405904 - RNA, 19 nt, Artificial Sequence
  Description of Artificial Sequence: Synthetic oligonucleotide
cacuggagggucuuuugag

SEQ ID NO: 2405905 - RNA, 19 nt, Artificial Sequence
  Description of Artificial Sequence: Synthetic oligonucleotide
accugcccugcuaugagcc

SEQ ID NO: 2405906 - RNA, 19 nt, Artificial Sequence
  Description of Artificial Sequence: Synthetic oligonucleotide
cuuuugaggcaggaguccc

SEQ ID NO: 2405907 - RNA, 19 nt, Artificial Sequence
  Description of Artificial Sequence: Synthetic oligonucleotide
caguaguccucuagggacc

SEQ ID NO: 2405908 - RNA, 19 nt, Artificial Sequence
  Description of Artificial Sequence: Synthetic oligonucleotide
ucucacagguucugaugag

SEQ ID NO: 2405909 - RNA, 19 nt, Artificial Sequence
  Description of Artificial Sequence: Synthetic oligonucleotide
uaguccucuagggaccagg

SEQ ID NO: 2405910 - RNA, 19 nt, Artificial Sequence
  Description of Artificial Sequence: Synthetic oligonucleotide
agcacugaccccugcuguc

SEQ ID NO: 2405911 - RNA, 19 nt, Artificial Sequence
  Description of Artificial Sequence: Synthetic oligonucleotide
uucaguggggagcauucau

SEQ ID NO: 2405912 - RNA, 19 nt, Artificial Sequence
  Description of Artificial Sequence: Synthetic oligonucleotide
guuagagaaugaggaagcc

SEQ ID NO: 2405913 - RNA, 19 nt, Artificial Sequence
  Description of Artificial Sequence: Synthetic oligonucleotide
aagaccugcccugcuauga

SEQ ID NO: 2405914 - RNA, 19 nt, Artificial Sequence
  Description of Artificial Sequence: Synthetic oligonucleotide
cucccaauacaguuuucug

SEQ ID NO: 2405915 - RNA, 19 nt, Artificial Sequence
  Description of Artificial Sequence: Synthetic oligonucleotide
acucccaauacaguuuucu

SEQ ID NO: 2405916 - RNA, 19 nt, Artificial Sequence
  Description of Artificial Sequence: Synthetic oligonucleotide
uguggaguacccuguguau

SEQ ID NO: 2405917 - RNA, 19 nt, Artificial Sequence
  Description of Artificial Sequence: Synthetic oligonucleotide
cagcaaaaucccacaacug

SEQ ID NO: 2405918 - RNA, 19 nt, Artificial Sequence
  Description of Artificial Sequence: Synthetic oligonucleotide
uuuucugauugcgcauugc

SEQ ID NO: 2405919 - RNA, 19 nt, Artificial Sequence
  Description of Artificial Sequence: Synthetic oligonucleotide
agcccuucccagucgcccc

SEQ ID NO: 2405920 - RNA, 19 nt, Artificial Sequence
  Description of Artificial Sequence: Synthetic oligonucleotide
uaauagcucugaguacugc

SEQ ID NO: 2405921 - RNA, 19 nt, Artificial Sequence
  Description of Artificial Sequence: Synthetic oligonucleotide
gucugcgcuccauacgccg

SEQ ID NO: 2405922 - RNA, 19 nt, Artificial Sequence
  Description of Artificial Sequence: Synthetic oligonucleotide
ggguuacagguucaguggg

SEQ ID NO: 2405923 - RNA, 19 nt, Artificial Sequence
  Description of Artificial Sequence: Synthetic oligonucleotide
ggauucgguagaaauacug

SEQ ID NO: 2405924 - RNA, 19 nt, Artificial Sequence
  Description of Artificial Sequence: Synthetic oligonucleotide
uuugugugugugugugugu

SEQ ID NO: 2405925 - RNA, 19 nt, Artificial Sequence
  Description of Artificial Sequence: Synthetic oligonucleotide
auguggaguacccugugua

SEQ ID NO: 2405926 - RNA, 19 nt, Artificial Sequence
  Description of Artificial Sequence: Synthetic oligonucleotide
ucaguggggagcauucauu

SEQ ID NO: 2405927 - RNA, 19 nt, Artificial Sequence
  Description of Artificial Sequence: Synthetic oligonucleotide
gagaaaaguaggcaggcuu

SEQ ID NO: 2405928 - RNA, 19 nt, Artificial Sequence
  Description of Artificial Sequence: Synthetic oligonucleotide
accccagggagcugauccc

SEQ ID NO: 2405929 - RNA, 19 nt, Artificial Sequence
  Description of Artificial Sequence: Synthetic oligonucleotide
cuaagaagagaaggccagc

SEQ ID NO: 2405930 - RNA, 19 nt, Artificial Sequence
  Description of Artificial Sequence: Synthetic oligonucleotide
aaggccagcccuucccagu

SEQ ID NO: 2405931 - RNA, 19 nt, Artificial Sequence
  Description of Artificial Sequence: Synthetic oligonucleotide
cuggcuaccacaagggaaa

SEQ ID NO: 2405932 - RNA, 19 nt, Artificial Sequence
  Description of Artificial Sequence: Synthetic oligonucleotide
ucugcgcuccauacgccgc

SEQ ID NO: 2405933 - RNA, 19 nt, Artificial Sequence
  Description of Artificial Sequence: Synthetic oligonucleotide
cugggaaagcugcuuugcc

SEQ ID NO: 2405934 - RNA, 19 nt, Artificial Sequence
  Description of Artificial Sequence: Synthetic oligonucleotide
uguguguguguguguggcc

SEQ ID NO: 2405935 - RNA, 19 nt, Artificial Sequence
  Description of Artificial Sequence: Synthetic oligonucleotide
gcaaaaucccacaacuggc

SEQ ID NO: 2405936 - RNA, 19 nt, Artificial Sequence
  Description of Artificial Sequence: Synthetic oligonucleotide
aggcaggcugcccuccuac

SEQ ID NO: 2405937 - RNA, 19 nt, Artificial Sequence
  Description of Artificial Sequence: Synthetic oligonucleotide
uccauacgccgcuccacag

SEQ ID NO: 2405938 - RNA, 19 nt, Artificial Sequence
  Description of Artificial Sequence: Synthetic oligonucleotide
gacauucucacagguucug

SEQ ID NO: 2405939 - RNA, 19 nt, Artificial Sequence
  Description of Artificial Sequence: Synthetic oligonucleotide
ugagaaaaguaggcaggcu

SEQ ID NO: 2405940 - RNA, 19 nt, Artificial Sequence
  Description of Artificial Sequence: Synthetic oligonucleotide
agggagcugaucccugaag

SEQ ID NO: 2405941 - RNA, 19 nt, Artificial Sequence
  Description of Artificial Sequence: Synthetic oligonucleotide
agaaggguuacagguucag

SEQ ID NO: 2405942 - RNA, 19 nt, Artificial Sequence
  Description of Artificial Sequence: Synthetic oligonucleotide
agaaauacuggggcucucu

SEQ ID NO: 2405943 - RNA, 19 nt, Artificial Sequence
  Description of Artificial Sequence: Synthetic oligonucleotide
agaccugcccugcuaugag

SEQ ID NO: 2405944 - RNA, 19 nt, Artificial Sequence
  Description of Artificial Sequence: Synthetic oligonucleotide
gagaauuggaguggaaugu

SEQ ID NO: 2405945 - RNA, 19 nt, Artificial Sequence
  Description of Artificial Sequence: Synthetic oligonucleotide
cugauugcgcauugcccag

SEQ ID NO: 2405946 - RNA, 19 nt, Artificial Sequence
  Description of Artificial Sequence: Synthetic oligonucleotide
gcuagugcccuguaaacca

SEQ ID NO: 2405947 - RNA, 19 nt, Artificial Sequence
  Description of Artificial Sequence: Synthetic oligonucleotide
uguguguguguggccaaag

SEQ ID NO: 2405948 - RNA, 19 nt, Artificial Sequence
  Description of Artificial Sequence: Synthetic oligonucleotide
guaugcuccaccccaggga

SEQ ID NO: 2405949 - RNA, 19 nt, Artificial Sequence
  Description of Artificial Sequence: Synthetic oligonucleotide
gggagcauucauuuuggac

SEQ ID NO: 2405950 - RNA, 19 nt, Artificial Sequence
  Description of Artificial Sequence: Synthetic oligonucleotide
agcugggaaagcugcuuug

SEQ ID NO: 2405951 - RNA, 19 nt, Artificial Sequence
  Description of Artificial Sequence: Synthetic oligonucleotide
auauagggagaaagcgguc

SEQ ID NO: 2405952 - RNA, 19 nt, Artificial Sequence
  Description of Artificial Sequence: Synthetic oligonucleotide
agaaaaguaggcaggcuuu

SEQ ID NO: 2405953 - RNA, 19 nt, Artificial Sequence
  Description of Artificial Sequence: Synthetic oligonucleotide
ccugcuaugagccacugga

SEQ ID NO: 2405954 - RNA, 19 nt, Artificial Sequence
  Description of Artificial Sequence: Synthetic oligonucleotide
ugugugugugugugugugu

SEQ ID NO: 2405955 - RNA, 19 nt, Artificial Sequence
  Description of Artificial Sequence: Synthetic oligonucleotide
uagugcccuguaaaccaug

SEQ ID NO: 2405956 - RNA, 19 nt, Artificial Sequence
  Description of Artificial Sequence: Synthetic oligonucleotide
guccacuccagacauucuc

SEQ ID NO: 2405957 - RNA, 19 nt, Artificial Sequence
  Description of Artificial Sequence: Synthetic oligonucleotide
ugauugcgcauugcccagg

SEQ ID NO: 2405958 - RNA, 19 nt, Artificial Sequence
  Description of Artificial Sequence: Synthetic oligonucleotide
ggaaaucaaagucugcgcu

SEQ ID NO: 2405959 - RNA, 19 nt, Artificial Sequence
  Description of Artificial Sequence: Synthetic oligonucleotide
guguguguguguguguggc

SEQ ID NO: 2405960 - RNA, 19 nt, Artificial Sequence
  Description of Artificial Sequence: Synthetic oligonucleotide
guucugaugaguggaagaa

SEQ ID NO: 2405961 - RNA, 19 nt, Artificial Sequence
  Description of Artificial Sequence: Synthetic oligonucleotide
gguagaaauacuggggcuc

SEQ ID NO: 2405962 - RNA, 19 nt, Artificial Sequence
  Description of Artificial Sequence: Synthetic oligonucleotide
ugaguggaagaaggguuac

SEQ ID NO: 2405963 - RNA, 19 nt, Artificial Sequence
  Description of Artificial Sequence: Synthetic oligonucleotide
gucuuuugaggcaggaguc

SEQ ID NO: 2405964 - RNA, 19 nt, Artificial Sequence
  Description of Artificial Sequence: Synthetic oligonucleotide
gggaaagcugcuuugccuc

SEQ ID NO: 2405965 - RNA, 19 nt, Artificial Sequence
  Description of Artificial Sequence: Synthetic oligonucleotide
ggucuuuugaggcaggagu

SEQ ID NO: 2405966 - RNA, 19 nt, Artificial Sequence
  Description of Artificial Sequence: Synthetic oligonucleotide
gacauagacucaagaccug

SEQ ID NO: 2405967 - RNA, 19 nt, Artificial Sequence
  Description of Artificial Sequence: Synthetic oligonucleotide
guaauagcucugaguacug

SEQ ID NO: 2405968 - RNA, 19 nt, Artificial Sequence
  Description of Artificial Sequence: Synthetic oligonucleotide
guuacagguucagugggga

SEQ ID NO: 2405969 - RNA, 19 nt, Artificial Sequence
  Description of Artificial Sequence: Synthetic oligonucleotide
gcagcaaaaucccacaacu

SEQ ID NO: 2405970 - RNA, 19 nt, Artificial Sequence
  Description of Artificial Sequence: Synthetic oligonucleotide
uccuaggaaggugggcuag

SEQ ID NO: 2405971 - RNA, 19 nt, Artificial Sequence
  Description of Artificial Sequence: Synthetic oligonucleotide
gguucugaugaguggaaga

SEQ ID NO: 2405972 - RNA, 19 nt, Artificial Sequence
  Description of Artificial Sequence: Synthetic oligonucleotide
gaugaguggaagaaggguu

SEQ ID NO: 2405973 - RNA, 19 nt, Artificial Sequence
  Description of Artificial Sequence: Synthetic oligonucleotide
acuggcuaccacaagggaa

SEQ ID NO: 2405974 - RNA, 19 nt, Artificial Sequence
  Description of Artificial Sequence: Synthetic oligonucleotide
gugugugugugugugugug

SEQ ID NO: 2405975 - RNA, 19 nt, Artificial Sequence
  Description of Artificial Sequence: Synthetic oligonucleotide
caaaaucccacaacuggcu

SEQ ID NO: 2405976 - RNA, 19 nt, Artificial Sequence
  Description of Artificial Sequence: Synthetic oligonucleotide
gauugcgcauugcccagga

SEQ ID NO: 2405977 - RNA, 19 nt, Artificial Sequence
  Description of Artificial Sequence: Synthetic oligonucleotide
agguucugaugaguggaag

SEQ ID NO: 2405978 - RNA, 19 nt, Artificial Sequence
  Description of Artificial Sequence: Synthetic oligonucleotide
guggaguacccuguguaug

SEQ ID NO: 2405979 - RNA, 19 nt, Artificial Sequence
  Description of Artificial Sequence: Synthetic oligonucleotide
uccacagcucgaaguaaua

SEQ ID NO: 2405980 - RNA, 19 nt, Artificial Sequence
  Description of Artificial Sequence: Synthetic oligonucleotide
ugcccaggauauagggaga

SEQ ID NO: 2405981 - RNA, 19 nt, Artificial Sequence
  Description of Artificial Sequence: Synthetic oligonucleotide
caugagggaacucccaaua

SEQ ID NO: 2405982 - RNA, 19 nt, Artificial Sequence
  Description of Artificial Sequence: Synthetic oligonucleotide
aguuuucugauugcgcauu

SEQ ID NO: 2405983 - RNA, 19 nt, Artificial Sequence
  Description of Artificial Sequence: Synthetic oligonucleotide
uagggaccaggguuagaga

SEQ ID NO: 2405984 - RNA, 19 nt, Artificial Sequence
  Description of Artificial Sequence: Synthetic oligonucleotide
acugaccccugcuguccac

SEQ ID NO: 2405985 - RNA, 19 nt, Artificial Sequence
  Description of Artificial Sequence: Synthetic oligonucleotide
auugcccaggauauaggga

SEQ ID NO: 2405986 - RNA, 19 nt, Artificial Sequence
  Description of Artificial Sequence: Synthetic oligonucleotide
cucugaguacugcuccaac

SEQ ID NO: 2405987 - RNA, 19 nt, Artificial Sequence
  Description of Artificial Sequence: Synthetic oligonucleotide
ggcuucaguaguccucuag

SEQ ID NO: 2405988 - RNA, 19 nt, Artificial Sequence
  Description of Artificial Sequence: Synthetic oligonucleotide
aacucccaauacaguuuuc

SEQ ID NO: 2405989 - RNA, 19 nt, Artificial Sequence
  Description of Artificial Sequence: Synthetic oligonucleotide
gguuacagguucagugggg

SEQ ID NO: 2405990 - RNA, 19 nt, Artificial Sequence
  Description of Artificial Sequence: Synthetic oligonucleotide
ggccaaaguccuaggaagg

SEQ ID NO: 2405991 - RNA, 19 nt, Artificial Sequence
  Description of Artificial Sequence: Synthetic oligonucleotide
cagcucgaaguaauagcuc

SEQ ID NO: 2405992 - RNA, 19 nt, Artificial Sequence
  Description of Artificial Sequence: Synthetic oligonucleotide
gaguacccuguguaugcuc

SEQ ID NO: 2405993 - RNA, 19 nt, Artificial Sequence
  Description of Artificial Sequence: Synthetic oligonucleotide
uguguguguguguggccaa

SEQ ID NO: 2405994 - RNA, 19 nt, Artificial Sequence
  Description of Artificial Sequence: Synthetic oligonucleotide
agucugcgcuccauacgcc

SEQ ID NO: 2405995 - RNA, 19 nt, Artificial Sequence
  Description of Artificial Sequence: Synthetic oligonucleotide
aggcaggcuuuguguuugc

SEQ ID NO: 2405996 - RNA, 19 nt, Artificial Sequence
  Description of Artificial Sequence: Synthetic oligonucleotide
cucgaaguaauagcucuga

SEQ ID NO: 2405997 - RNA, 19 nt, Artificial Sequence
  Description of Artificial Sequence: Synthetic oligonucleotide
agacauucucacagguucu

SEQ ID NO: 2405998 - RNA, 19 nt, Artificial Sequence
  Description of Artificial Sequence: Synthetic oligonucleotide
cacaacuggcuaccacaag

SEQ ID NO: 2405999 - RNA, 19 nt, Artificial Sequence
  Description of Artificial Sequence: Synthetic oligonucleotide
ggagucccaaggaagugag

SEQ ID NO: 2406000 - RNA, 19 nt, Artificial Sequence
  Description of Artificial Sequence: Synthetic oligonucleotide
gcagggagaauuggagugg

SEQ ID NO: 2406001 - RNA, 19 nt, Artificial Sequence
  Description of Artificial Sequence: Synthetic oligonucleotide
cuaggaaggugggcuagug

SEQ ID NO: 2406002 - RNA, 19 nt, Artificial Sequence
  Description of Artificial Sequence: Synthetic oligonucleotide
ccuccuaccccucacagca

SEQ ID NO: 2406003 - RNA, 19 nt, Artificial Sequence
  Description of Artificial Sequence: Synthetic oligonucleotide
guguguguguguguggcca

SEQ ID NO: 2406004 - RNA, 19 nt, Artificial Sequence
  Description of Artificial Sequence: Synthetic oligonucleotide
augaguggaagaaggguua

SEQ ID NO: 2406005 - RNA, 19 nt, Artificial Sequence
  Description of Artificial Sequence: Synthetic oligonucleotide
agggagaaagcggucccug

SEQ ID NO: 2406006 - RNA, 19 nt, Artificial Sequence
  Description of Artificial Sequence: Synthetic oligonucleotide
aguaguccucuagggacca

SEQ ID NO: 2406007 - RNA, 19 nt, Artificial Sequence
  Description of Artificial Sequence: Synthetic oligonucleotide
ggcuagugcccuguaaacc

SEQ ID NO: 2406008 - RNA, 19 nt, Artificial Sequence
  Description of Artificial Sequence: Synthetic oligonucleotide
gucauggaaauaaauuaau

SEQ ID NO: 2406009 - RNA, 19 nt, Artificial Sequence
  Description of Artificial Sequence: Synthetic oligonucleotide
agugcccuguaaaccauga

SEQ ID NO: 2406010 - RNA, 19 nt, Artificial Sequence
  Description of Artificial Sequence: Synthetic oligonucleotide
ugcccuccuaccccucaca

SEQ ID NO: 2406011 - RNA, 19 nt, Artificial Sequence
  Description of Artificial Sequence: Synthetic oligonucleotide
aggcaacagucauggaaau

SEQ ID NO: 2406012 - RNA, 19 nt, Artificial Sequence
  Description of Artificial Sequence: Synthetic oligonucleotide
gugcccuguaaaccaugag

SEQ ID NO: 2406013 - RNA, 19 nt, Artificial Sequence
  Description of Artificial Sequence: Synthetic oligonucleotide
aguggggagcauucauuuu

SEQ ID NO: 2406014 - RNA, 19 nt, Artificial Sequence
  Description of Artificial Sequence: Synthetic oligonucleotide
caagaccugcccugcuaug

SEQ ID NO: 2406015 - RNA, 19 nt, Artificial Sequence
  Description of Artificial Sequence: Synthetic oligonucleotide
gaccccugcuguccacucc

SEQ ID NO: 2406016 - RNA, 19 nt, Artificial Sequence
  Description of Artificial Sequence: Synthetic oligonucleotide
acucaagaccugcccugcu

SEQ ID NO: 2406017 - RNA, 19 nt, Artificial Sequence
  Description of Artificial Sequence: Synthetic oligonucleotide
caccaagaagacauagacu

SEQ ID NO: 2406018 - RNA, 19 nt, Artificial Sequence
  Description of Artificial Sequence: Synthetic oligonucleotide
guagaaauacuggggcucu

SEQ ID NO: 2406019 - RNA, 19 nt, Artificial Sequence
  Description of Artificial Sequence: Synthetic oligonucleotide
gaaagcggucccuggggcu

SEQ ID NO: 2406020 - RNA, 19 nt, Artificial Sequence
  Description of Artificial Sequence: Synthetic oligonucleotide
gaguggaagaaggguuaca

SEQ ID NO: 2406021 - RNA, 19 nt, Artificial Sequence
  Description of Artificial Sequence: Synthetic oligonucleotide
cacuccagacauucucaca

SEQ ID NO: 2406022 - RNA, 19 nt, Artificial Sequence
  Description of Artificial Sequence: Synthetic oligonucleotide
guacugcuccaacagggcu

SEQ ID NO: 2406023 - RNA, 19 nt, Artificial Sequence
  Description of Artificial Sequence: Synthetic oligonucleotide
gcccaaagggcugagaaaa

SEQ ID NO: 2406024 - RNA, 19 nt, Artificial Sequence
  Description of Artificial Sequence: Synthetic oligonucleotide
gguucaguggggagcauuc

SEQ ID NO: 2406025 - RNA, 19 nt, Artificial Sequence
  Description of Artificial Sequence: Synthetic oligonucleotide
cauacgccgcuccacagcu

SEQ ID NO: 2406026 - RNA, 19 nt, Artificial Sequence
  Description of Artificial Sequence: Synthetic oligonucleotide
gagcacugaccccugcugu

SEQ ID NO: 2406027 - RNA, 19 nt, Artificial Sequence
  Description of Artificial Sequence: Synthetic oligonucleotide
aggauucgguagaaauacu

SEQ ID NO: 2406028 - RNA, 19 nt, Artificial Sequence
  Description of Artificial Sequence: Synthetic oligonucleotide
ccuguaaaccaugagggaa

SEQ ID NO: 2406029 - RNA, 19 nt, Artificial Sequence
  Description of Artificial Sequence: Synthetic oligonucleotide
cucucuugcagggagaauu

SEQ ID NO: 2406030 - RNA, 19 nt, Artificial Sequence
  Description of Artificial Sequence: Synthetic oligonucleotide
cucuagggaccaggguuag

SEQ ID NO: 2406031 - RNA, 19 nt, Artificial Sequence
  Description of Artificial Sequence: Synthetic oligonucleotide
augcuccaccccagggagc

SEQ ID NO: 2406032 - RNA, 19 nt, Artificial Sequence
  Description of Artificial Sequence: Synthetic oligonucleotide
ucuagggaccaggguuaga

SEQ ID NO: 2406033 - RNA, 19 nt, Artificial Sequence
  Description of Artificial Sequence: Synthetic oligonucleotide
ggucccuggggcuucagua

SEQ ID NO: 2406034 - RNA, 19 nt, Artificial Sequence
  Description of Artificial Sequence: Synthetic oligonucleotide
guaaaccaugagggaacuc

SEQ ID NO: 2406035 - RNA, 19 nt, Artificial Sequence
  Description of Artificial Sequence: Synthetic oligonucleotide
guacccuguguaugcucca

SEQ ID NO: 2406036 - RNA, 19 nt, Artificial Sequence
  Description of Artificial Sequence: Synthetic oligonucleotide
ccauacgccgcuccacagc

SEQ ID NO: 2406037 - RNA, 19 nt, Artificial Sequence
  Description of Artificial Sequence: Synthetic oligonucleotide
auugcgcauugcccaggau

SEQ ID NO: 2406038 - RNA, 19 nt, Artificial Sequence
  Description of Artificial Sequence: Synthetic oligonucleotide
cugcagcaaaaucccacaa

SEQ ID NO: 2406039 - RNA, 19 nt, Artificial Sequence
  Description of Artificial Sequence: Synthetic oligonucleotide
gaaggguuacagguucagu

SEQ ID NO: 2406040 - RNA, 19 nt, Artificial Sequence
  Description of Artificial Sequence: Synthetic oligonucleotide
cucaagaccugcccugcua

SEQ ID NO: 2406041 - RNA, 19 nt, Artificial Sequence
  Description of Artificial Sequence: Synthetic oligonucleotide
gcucgaaguaauagcucug

SEQ ID NO: 2406042 - RNA, 19 nt, Artificial Sequence
  Description of Artificial Sequence: Synthetic oligonucleotide
gaagcccaaagggcugaga

SEQ ID NO: 2406043 - RNA, 19 nt, Artificial Sequence
  Description of Artificial Sequence: Synthetic oligonucleotide
cuccaacagggcuugaguu

SEQ ID NO: 2406044 - RNA, 19 nt, Artificial Sequence
  Description of Artificial Sequence: Synthetic oligonucleotide
gggcugagaaaaguaggca

SEQ ID NO: 2406045 - RNA, 19 nt, Artificial Sequence
  Description of Artificial Sequence: Synthetic oligonucleotide
cagggagaauuggagugga

SEQ ID NO: 2406046 - RNA, 19 nt, Artificial Sequence
  Description of Artificial Sequence: Synthetic oligonucleotide
gcccuccuaccccucacag

SEQ ID NO: 2406047 - RNA, 19 nt, Artificial Sequence
  Description of Artificial Sequence: Synthetic oligonucleotide
cuaugagccacuggagggu

SEQ ID NO: 2406048 - RNA, 19 nt, Artificial Sequence
  Description of Artificial Sequence: Synthetic oligonucleotide
guccuaggaaggugggcua

SEQ ID NO: 2406049 - RNA, 19 nt, Artificial Sequence
  Description of Artificial Sequence: Synthetic oligonucleotide
uggcuaccacaagggaaaa

SEQ ID NO: 2406050 - RNA, 19 nt, Artificial Sequence
  Description of Artificial Sequence: Synthetic oligonucleotide
uggggcucucuugcaggga

SEQ ID NO: 2406051 - RNA, 19 nt, Artificial Sequence
  Description of Artificial Sequence: Synthetic oligonucleotide
cccaaggaagugaggcaac

SEQ ID NO: 2406052 - RNA, 19 nt, Artificial Sequence
  Description of Artificial Sequence: Synthetic oligonucleotide
gcacugaccccugcugucc

SEQ ID NO: 2406053 - RNA, 19 nt, Artificial Sequence
  Description of Artificial Sequence: Synthetic oligonucleotide
gggagaauuggaguggaau

SEQ ID NO: 2406054 - RNA, 19 nt, Artificial Sequence
  Description of Artificial Sequence: Synthetic oligonucleotide
caguuuucugauugcgcau

SEQ ID NO: 2406055 - RNA, 19 nt, Artificial Sequence
  Description of Artificial Sequence: Synthetic oligonucleotide
cucacagguucugaugagu

SEQ ID NO: 2406056 - RNA, 19 nt, Artificial Sequence
  Description of Artificial Sequence: Synthetic oligonucleotide
cgaaguaauagcucugagu

SEQ ID NO: 2406057 - RNA, 19 nt, Artificial Sequence
  Description of Artificial Sequence: Synthetic oligonucleotide
aggugggcuagugcccugu

SEQ ID NO: 2406058 - RNA, 19 nt, Artificial Sequence
  Description of Artificial Sequence: Synthetic oligonucleotide
gugggcuagugcccuguaa

SEQ ID NO: 2406059 - RNA, 19 nt, Artificial Sequence
  Description of Artificial Sequence: Synthetic oligonucleotide
guaguccucuagggaccag

SEQ ID NO: 2406060 - RNA, 19 nt, Artificial Sequence
  Description of Artificial Sequence: Synthetic oligonucleotide
auacgccgcuccacagcuc

SEQ ID NO: 2406061 - RNA, 19 nt, Artificial Sequence
  Description of Artificial Sequence: Synthetic oligonucleotide
cccuccuaccccucacagc

SEQ ID NO: 2406062 - RNA, 19 nt, Artificial Sequence
  Description of Artificial Sequence: Synthetic oligonucleotide
cuagugcccuguaaaccau

SEQ ID NO: 2406063 - RNA, 19 nt, Artificial Sequence
  Description of Artificial Sequence: Synthetic oligonucleotide
agccacuggagggucuuuu

SEQ ID NO: 2406064 - RNA, 19 nt, Artificial Sequence
  Description of Artificial Sequence: Synthetic oligonucleotide
cacugaccccugcugucca

SEQ ID NO: 2406065 - RNA, 19 nt, Artificial Sequence
  Description of Artificial Sequence: Synthetic oligonucleotide
cccuguaaaccaugaggga

SEQ ID NO: 2406066 - RNA, 19 nt, Artificial Sequence
  Description of Artificial Sequence: Synthetic oligonucleotide
ggggagcauucauuuugga

SEQ ID NO: 2406067 - RNA, 19 nt, Artificial Sequence
  Description of Artificial Sequence: Synthetic oligonucleotide
gccgcuccacagcucgaag

SEQ ID NO: 2406068 - RNA, 19 nt, Artificial Sequence
  Description of Artificial Sequence: Synthetic oligonucleotide
guggaauguggaguacccu

SEQ ID NO: 2406069 - RNA, 19 nt, Artificial Sequence
  Description of Artificial Sequence: Synthetic oligonucleotide
ggaacucccaauacaguuu

SEQ ID NO: 2406070 - RNA, 19 nt, Artificial Sequence
  Description of Artificial Sequence: Synthetic oligonucleotide
ggaagcccaaagggcugag

SEQ ID NO: 2406071 - RNA, 19 nt, Artificial Sequence
  Description of Artificial Sequence: Synthetic oligonucleotide
aucccacaacuggcuacca

SEQ ID NO: 2406072 - RNA, 19 nt, Artificial Sequence
  Description of Artificial Sequence: Synthetic oligonucleotide
cccugcuaugagccacugg

SEQ ID NO: 2406073 - RNA, 19 nt, Artificial Sequence
  Description of Artificial Sequence: Synthetic oligonucleotide
ugcgcuccauacgccgcuc

SEQ ID NO: 2406074 - RNA, 19 nt, Artificial Sequence
  Description of Artificial Sequence: Synthetic oligonucleotide
guccugcagcaaaauccca

SEQ ID NO: 2406075 - RNA, 19 nt, Artificial Sequence
  Description of Artificial Sequence: Synthetic oligonucleotide
agggagaauuggaguggaa

SEQ ID NO: 2406076 - RNA, 19 nt, Artificial Sequence
  Description of Artificial Sequence: Synthetic oligonucleotide
cuuugccucugagcacuga

SEQ ID NO: 2406077 - RNA, 19 nt, Artificial Sequence
  Description of Artificial Sequence: Synthetic oligonucleotide
gcuccauacgccgcuccac

SEQ ID NO: 2406078 - RNA, 19 nt, Artificial Sequence
  Description of Artificial Sequence: Synthetic oligonucleotide
ggggcuucaguaguccucu

SEQ ID NO: 2406079 - RNA, 19 nt, Artificial Sequence
  Description of Artificial Sequence: Synthetic oligonucleotide
ggcaacagucauggaaaua

SEQ ID NO: 2406080 - RNA, 19 nt, Artificial Sequence
  Description of Artificial Sequence: Synthetic oligonucleotide
guguguguguguggccaaa

SEQ ID NO: 2406081 - RNA, 19 nt, Artificial Sequence
  Description of Artificial Sequence: Synthetic oligonucleotide
gcccaggauauagggagaa

SEQ ID NO: 2406082 - RNA, 19 nt, Artificial Sequence
  Description of Artificial Sequence: Synthetic oligonucleotide
gcugcccuccuaccccuca

SEQ ID NO: 2406083 - RNA, 19 nt, Artificial Sequence
  Description of Artificial Sequence: Synthetic oligonucleotide
cccuggggcuucaguaguc

SEQ ID NO: 2406084 - RNA, 19 nt, Artificial Sequence
  Description of Artificial Sequence: Synthetic oligonucleotide
ccccucacagcaccaagaa

SEQ ID NO: 2406085 - RNA, 19 nt, Artificial Sequence
  Description of Artificial Sequence: Synthetic oligonucleotide
gcuccacagcucgaaguaa

SEQ ID NO: 2406086 - RNA, 19 nt, Artificial Sequence
  Description of Artificial Sequence: Synthetic oligonucleotide
ggaguacccuguguaugcu

SEQ ID NO: 2406087 - RNA, 19 nt, Artificial Sequence
  Description of Artificial Sequence: Synthetic oligonucleotide
cugaccccugcuguccacu

SEQ ID NO: 2406088 - RNA, 19 nt, Artificial Sequence
  Description of Artificial Sequence: Synthetic oligonucleotide
ccaugagggaacucccaau

SEQ ID NO: 2406089 - RNA, 19 nt, Artificial Sequence
  Description of Artificial Sequence: Synthetic oligonucleotide
agcggucccuggggcuuca

SEQ ID NO: 2406090 - RNA, 19 nt, Artificial Sequence
  Description of Artificial Sequence: Synthetic oligonucleotide
ccccugcuguccacuccag

SEQ ID NO: 2406091 - RNA, 19 nt, Artificial Sequence
  Description of Artificial Sequence: Synthetic oligonucleotide
cgcuccacagcucgaagua

SEQ ID NO: 2406092 - RNA, 19 nt, Artificial Sequence
  Description of Artificial Sequence: Synthetic oligonucleotide
ggugggcuagugcccugua

SEQ ID NO: 2406093 - RNA, 19 nt, Artificial Sequence
  Description of Artificial Sequence: Synthetic oligonucleotide
ccaauacaguuuucugauu

SEQ ID NO: 2406094 - RNA, 19 nt, Artificial Sequence
  Description of Artificial Sequence: Synthetic oligonucleotide
ccuaggaaggugggcuagu

SEQ ID NO: 2406095 - RNA, 19 nt, Artificial Sequence
  Description of Artificial Sequence: Synthetic oligonucleotide
gagccacuggagggucuuu

SEQ ID NO: 2406096 - RNA, 19 nt, Artificial Sequence
  Description of Artificial Sequence: Synthetic oligonucleotide
gcgcauugcccaggauaua

SEQ ID NO: 2406097 - RNA, 19 nt, Artificial Sequence
  Description of Artificial Sequence: Synthetic oligonucleotide
gcggucccuggggcuucag

SEQ ID NO: 2406098 - RNA, 19 nt, Artificial Sequence
  Description of Artificial Sequence: Synthetic oligonucleotide
uuugagauaagucuucugg

SEQ ID NO: 2406099 - RNA, 19 nt, Artificial Sequence
  Description of Artificial Sequence: Synthetic oligonucleotide
gaucccaucauacaaaacg

SEQ ID NO: 2406100 - RNA, 19 nt, Artificial Sequence
  Description of Artificial Sequence: Synthetic oligonucleotide
uucauuaacccauuuaagg

SEQ ID NO: 2406101 - RNA, 19 nt, Artificial Sequence
  Description of Artificial Sequence: Synthetic oligonucleotide
auuauuacgagcaagauca

SEQ ID NO: 2406102 - RNA, 19 nt, Artificial Sequence
  Description of Artificial Sequence: Synthetic oligonucleotide
aguagcauaaucugguccc

SEQ ID NO: 2406103 - RNA, 19 nt, Artificial Sequence
  Description of Artificial Sequence: Synthetic oligonucleotide
aacaucagccuuuaaacag

SEQ ID NO: 2406104 - RNA, 19 nt, Artificial Sequence
  Description of Artificial Sequence: Synthetic oligonucleotide
gaaagcauccacuacaaug

SEQ ID NO: 2406105 - RNA, 19 nt, Artificial Sequence
  Description of Artificial Sequence: Synthetic oligonucleotide
aagccugaaaacuucaaag

SEQ ID NO: 2406106 - RNA, 19 nt, Artificial Sequence
  Description of Artificial Sequence: Synthetic oligonucleotide
uucagcauuauuacgagca

SEQ ID NO: 2406107 - RNA, 19 nt, Artificial Sequence
  Description of Artificial Sequence: Synthetic oligonucleotide
aagaguaggaaaucuccac

SEQ ID NO: 2406108 - RNA, 19 nt, Artificial Sequence
  Description of Artificial Sequence: Synthetic oligonucleotide
acaaugucacauuugaaag

SEQ ID NO: 2406109 - RNA, 19 nt, Artificial Sequence
  Description of Artificial Sequence: Synthetic oligonucleotide
uuuacucuucuugagaagg

SEQ ID NO: 2406110 - RNA, 19 nt, Artificial Sequence
  Description of Artificial Sequence: Synthetic oligonucleotide
aaaacuucaaagccaucag

SEQ ID NO: 2406111 - RNA, 19 nt, Artificial Sequence
  Description of Artificial Sequence: Synthetic oligonucleotide
aaaaccagcccucuuuauc

SEQ ID NO: 2406112 - RNA, 19 nt, Artificial Sequence
  Description of Artificial Sequence: Synthetic oligonucleotide
aguaacugaaaaccagccc

SEQ ID NO: 2406113 - RNA, 19 nt, Artificial Sequence
  Description of Artificial Sequence: Synthetic oligonucleotide
auaucaauggcaaucacuc

SEQ ID NO: 2406114 - RNA, 19 nt, Artificial Sequence
  Description of Artificial Sequence: Synthetic oligonucleotide
uaaacucuaucuuaucugc

SEQ ID NO: 2406115 - RNA, 19 nt, Artificial Sequence
  Description of Artificial Sequence: Synthetic oligonucleotide
aacugaaugguguuuccuc

SEQ ID NO: 2406116 - RNA, 19 nt, Artificial Sequence
  Description of Artificial Sequence: Synthetic oligonucleotide
uacaaugucacauuugaaa

SEQ ID NO: 2406117 - RNA, 19 nt, Artificial Sequence
  Description of Artificial Sequence: Synthetic oligonucleotide
aaacuucagcauuauuacg

SEQ ID NO: 2406118 - RNA, 19 nt, Artificial Sequence
  Description of Artificial Sequence: Synthetic oligonucleotide
uuugcuugcgcauauccag

SEQ ID NO: 2406119 - RNA, 19 nt, Artificial Sequence
  Description of Artificial Sequence: Synthetic oligonucleotide
uugagauaagucuucuggg

SEQ ID NO: 2406120 - RNA, 19 nt, Artificial Sequence
  Description of Artificial Sequence: Synthetic oligonucleotide
aacaucauuguucgaaugu

SEQ ID NO: 2406121 - RNA, 19 nt, Artificial Sequence
  Description of Artificial Sequence: Synthetic oligonucleotide
aaugucacauuugaaagcu

SEQ ID NO: 2406122 - RNA, 19 nt, Artificial Sequence
  Description of Artificial Sequence: Synthetic oligonucleotide
uucucuagauaccugaccu

SEQ ID NO: 2406123 - RNA, 19 nt, Artificial Sequence
  Description of Artificial Sequence: Synthetic oligonucleotide
uuaaacagggagccaagag

SEQ ID NO: 2406124 - RNA, 19 nt, Artificial Sequence
  Description of Artificial Sequence: Synthetic oligonucleotide
uaggaacacaacaucagcc

SEQ ID NO: 2406125 - RNA, 19 nt, Artificial Sequence
  Description of Artificial Sequence: Synthetic oligonucleotide
uaucuuaucugcuauccca

SEQ ID NO: 2406126 - RNA, 19 nt, Artificial Sequence
  Description of Artificial Sequence: Synthetic oligonucleotide
ucugcuaucccauaaacuu

SEQ ID NO: 2406127 - RNA, 19 nt, Artificial Sequence
  Description of Artificial Sequence: Synthetic oligonucleotide
auuacgagcaagaucaauc

SEQ ID NO: 2406128 - RNA, 19 nt, Artificial Sequence
  Description of Artificial Sequence: Synthetic oligonucleotide
aaugguguuuccuccaacu

SEQ ID NO: 2406129 - RNA, 19 nt, Artificial Sequence
  Description of Artificial Sequence: Synthetic oligonucleotide
acagggucgauaucaaugg

SEQ ID NO: 2406130 - RNA, 19 nt, Artificial Sequence
  Description of Artificial Sequence: Synthetic oligonucleotide
uuaggaacacaacaucagc

SEQ ID NO: 2406131 - RNA, 19 nt, Artificial Sequence
  Description of Artificial Sequence: Synthetic oligonucleotide
ucauacaaaacgagagaag

SEQ ID NO: 2406132 - RNA, 19 nt, Artificial Sequence
  Description of Artificial Sequence: Synthetic oligonucleotide
acagaaagcauccacuaca

SEQ ID NO: 2406133 - RNA, 19 nt, Artificial Sequence
  Description of Artificial Sequence: Synthetic oligonucleotide
gcaagaucaaucuuaacag

SEQ ID NO: 2406134 - RNA, 19 nt, Artificial Sequence
  Description of Artificial Sequence: Synthetic oligonucleotide
cacauuugaaagcugacug

SEQ ID NO: 2406135 - RNA, 19 nt, Artificial Sequence
  Description of Artificial Sequence: Synthetic oligonucleotide
cauuguucgaaugucaaag

SEQ ID NO: 2406136 - RNA, 19 nt, Artificial Sequence
  Description of Artificial Sequence: Synthetic oligonucleotide
uucuccaaaaggcaugucu

SEQ ID NO: 2406137 - RNA, 19 nt, Artificial Sequence
  Description of Artificial Sequence: Synthetic oligonucleotide
auuguucgaaugucaaagg

SEQ ID NO: 2406138 - RNA, 19 nt, Artificial Sequence
  Description of Artificial Sequence: Synthetic oligonucleotide
uacaaaacgagagaagacu

SEQ ID NO: 2406139 - RNA, 19 nt, Artificial Sequence
  Description of Artificial Sequence: Synthetic oligonucleotide
ucuaucuuaucugcuaucc

SEQ ID NO: 2406140 - RNA, 19 nt, Artificial Sequence
  Description of Artificial Sequence: Synthetic oligonucleotide
gacacggccagcaauaugc

SEQ ID NO: 2406141 - RNA, 19 nt, Artificial Sequence
  Description of Artificial Sequence: Synthetic oligonucleotide
aaaacgagagaagacuuca

SEQ ID NO: 2406142 - RNA, 19 nt, Artificial Sequence
  Description of Artificial Sequence: Synthetic oligonucleotide
cuuaggaacacaacaucag

SEQ ID NO: 2406143 - RNA, 19 nt, Artificial Sequence
  Description of Artificial Sequence: Synthetic oligonucleotide
aacgagagaagacuucacu

SEQ ID NO: 2406144 - RNA, 19 nt, Artificial Sequence
  Description of Artificial Sequence: Synthetic oligonucleotide
ucuugcauuuuguugugag

SEQ ID NO: 2406145 - RNA, 19 nt, Artificial Sequence
  Description of Artificial Sequence: Synthetic oligonucleotide
ugagauaagucuucuggga

SEQ ID NO: 2406146 - RNA, 19 nt, Artificial Sequence
  Description of Artificial Sequence: Synthetic oligonucleotide
aacagggucgauaucaaug

SEQ ID NO: 2406147 - RNA, 19 nt, Artificial Sequence
  Description of Artificial Sequence: Synthetic oligonucleotide
caagaucaaucuuaacagg

SEQ ID NO: 2406148 - RNA, 19 nt, Artificial Sequence
  Description of Artificial Sequence: Synthetic oligonucleotide
uguucgaaugucaaagguc

SEQ ID NO: 2406149 - RNA, 19 nt, Artificial Sequence
  Description of Artificial Sequence: Synthetic oligonucleotide
agagucuugcauuuuguug

SEQ ID NO: 2406150 - RNA, 19 nt, Artificial Sequence
  Description of Artificial Sequence: Synthetic oligonucleotide
uuacucuucuugagaaggg

SEQ ID NO: 2406151 - RNA, 19 nt, Artificial Sequence
  Description of Artificial Sequence: Synthetic oligonucleotide
ugcuaucccauaaacuuca

SEQ ID NO: 2406152 - RNA, 19 nt, Artificial Sequence
  Description of Artificial Sequence: Synthetic oligonucleotide
aaagcgacuccugugaggu

SEQ ID NO: 2406153 - RNA, 19 nt, Artificial Sequence
  Description of Artificial Sequence: Synthetic oligonucleotide
aaagccugaaaacuucaaa

SEQ ID NO: 2406154 - RNA, 19 nt, Artificial Sequence
  Description of Artificial Sequence: Synthetic oligonucleotide
uuacgagcaagaucaaucu

SEQ ID NO: 2406155 - RNA, 19 nt, Artificial Sequence
  Description of Artificial Sequence: Synthetic oligonucleotide
caugucuugcuccucagag

SEQ ID NO: 2406156 - RNA, 19 nt, Artificial Sequence
  Description of Artificial Sequence: Synthetic oligonucleotide
ucuaacuugaucccaucau

SEQ ID NO: 2406157 - RNA, 19 nt, Artificial Sequence
  Description of Artificial Sequence: Synthetic oligonucleotide
cucuuuuccccguuaaggc

SEQ ID NO: 2406158 - RNA, 19 nt, Artificial Sequence
  Description of Artificial Sequence: Synthetic oligonucleotide
cauuuuguugugagaaagc

SEQ ID NO: 2406159 - RNA, 19 nt, Artificial Sequence
  Description of Artificial Sequence: Synthetic oligonucleotide
acagauaaacucuaucuua

SEQ ID NO: 2406160 - RNA, 19 nt, Artificial Sequence
  Description of Artificial Sequence: Synthetic oligonucleotide
uaagucuucugggaaagcc

SEQ ID NO: 2406161 - RNA, 19 nt, Artificial Sequence
  Description of Artificial Sequence: Synthetic oligonucleotide
ugucaaaggucucugcagu

SEQ ID NO: 2406162 - RNA, 19 nt, Artificial Sequence
  Description of Artificial Sequence: Synthetic oligonucleotide
gauaagucuucugggaaag

SEQ ID NO: 2406163 - RNA, 19 nt, Artificial Sequence
  Description of Artificial Sequence: Synthetic oligonucleotide
uuguucgaaugucaaaggu

SEQ ID NO: 2406164 - RNA, 19 nt, Artificial Sequence
  Description of Artificial Sequence: Synthetic oligonucleotide
uccccguuaaggcaaacug

SEQ ID NO: 2406165 - RNA, 19 nt, Artificial Sequence
  Description of Artificial Sequence: Synthetic oligonucleotide
agauaaacucuaucuuauc

SEQ ID NO: 2406166 - RNA, 19 nt, Artificial Sequence
  Description of Artificial Sequence: Synthetic oligonucleotide
aucaaucuuaacagggucg

SEQ ID NO: 2406167 - RNA, 19 nt, Artificial Sequence
  Description of Artificial Sequence: Synthetic oligonucleotide
cauuauuacgagcaagauc

SEQ ID NO: 2406168 - RNA, 19 nt, Artificial Sequence
  Description of Artificial Sequence: Synthetic oligonucleotide
aaaggcaugucuugcuccu

SEQ ID NO: 2406169 - RNA, 19 nt, Artificial Sequence
  Description of Artificial Sequence: Synthetic oligonucleotide
uuuaucuaacuugauccca

SEQ ID NO: 2406170 - RNA, 19 nt, Artificial Sequence
  Description of Artificial Sequence: Synthetic oligonucleotide
uaucugcuaucccauaaac

SEQ ID NO: 2406171 - RNA, 19 nt, Artificial Sequence
  Description of Artificial Sequence: Synthetic oligonucleotide
aacuugaucccaucauaca

SEQ ID NO: 2406172 - RNA, 19 nt, Artificial Sequence
  Description of Artificial Sequence: Synthetic oligonucleotide
gaucaaucuuaacaggguc

SEQ ID NO: 2406173 - RNA, 19 nt, Artificial Sequence
  Description of Artificial Sequence: Synthetic oligonucleotide
ugagguuucaucugcuggu

SEQ ID NO: 2406174 - RNA, 19 nt, Artificial Sequence
  Description of Artificial Sequence: Synthetic oligonucleotide
cauuugcuugcgcauaucc

SEQ ID NO: 2406175 - RNA, 19 nt, Artificial Sequence
  Description of Artificial Sequence: Synthetic oligonucleotide
cuuaacagggucgauauca

SEQ ID NO: 2406176 - RNA, 19 nt, Artificial Sequence
  Description of Artificial Sequence: Synthetic oligonucleotide
auacaaaacgagagaagac

SEQ ID NO: 2406177 - RNA, 19 nt, Artificial Sequence
  Description of Artificial Sequence: Synthetic oligonucleotide
gugagguuucaucugcugg

SEQ ID NO: 2406178 - RNA, 19 nt, Artificial Sequence
  Description of Artificial Sequence: Synthetic oligonucleotide
guaacugaaaaccagcccu

SEQ ID NO: 2406179 - RNA, 19 nt, Artificial Sequence
  Description of Artificial Sequence: Synthetic oligonucleotide
uuaucuaacuugaucccau

SEQ ID NO: 2406180 - RNA, 19 nt, Artificial Sequence
  Description of Artificial Sequence: Synthetic oligonucleotide
aagccaucaggaaacauca

SEQ ID NO: 2406181 - RNA, 19 nt, Artificial Sequence
  Description of Artificial Sequence: Synthetic oligonucleotide
agaguaggaaaucuccaca

SEQ ID NO: 2406182 - RNA, 19 nt, Artificial Sequence
  Description of Artificial Sequence: Synthetic oligonucleotide
gaaagcgacuccugugagg

SEQ ID NO: 2406183 - RNA, 19 nt, Artificial Sequence
  Description of Artificial Sequence: Synthetic oligonucleotide
ucccaucauacaaaacgag

SEQ ID NO: 2406184 - RNA, 19 nt, Artificial Sequence
  Description of Artificial Sequence: Synthetic oligonucleotide
ugugcaagagucuugcauu

SEQ ID NO: 2406185 - RNA, 19 nt, Artificial Sequence
  Description of Artificial Sequence: Synthetic oligonucleotide
aucuuaacagggucgauau

SEQ ID NO: 2406186 - RNA, 19 nt, Artificial Sequence
  Description of Artificial Sequence: Synthetic oligonucleotide
ucaaucuuaacagggucga

SEQ ID NO: 2406187 - RNA, 19 nt, Artificial Sequence
  Description of Artificial Sequence: Synthetic oligonucleotide
acaucauuguucgaauguc

SEQ ID NO: 2406188 - RNA, 19 nt, Artificial Sequence
  Description of Artificial Sequence: Synthetic oligonucleotide
uguauuucacauucuucuc

SEQ ID NO: 2406189 - RNA, 19 nt, Artificial Sequence
  Description of Artificial Sequence: Synthetic oligonucleotide
gaguaacugaaaaccagcc

SEQ ID NO: 2406190 - RNA, 19 nt, Artificial Sequence
  Description of Artificial Sequence: Synthetic oligonucleotide
cuuacuccgcacuuuacuc

SEQ ID NO: 2406191 - RNA, 19 nt, Artificial Sequence
  Description of Artificial Sequence: Synthetic oligonucleotide
cuugcgcauauccagguac

SEQ ID NO: 2406192 - RNA, 19 nt, Artificial Sequence
  Description of Artificial Sequence: Synthetic oligonucleotide
ugagaaggggcuuucccga

SEQ ID NO: 2406193 - RNA, 19 nt, Artificial Sequence
  Description of Artificial Sequence: Synthetic oligonucleotide
uguugugagaaagcgacuc

SEQ ID NO: 2406194 - RNA, 19 nt, Artificial Sequence
  Description of Artificial Sequence: Synthetic oligonucleotide
gagaaagcgacuccuguga

SEQ ID NO: 2406195 - RNA, 19 nt, Artificial Sequence
  Description of Artificial Sequence: Synthetic oligonucleotide
ugugagaaagcgacuccug

SEQ ID NO: 2406196 - RNA, 19 nt, Artificial Sequence
  Description of Artificial Sequence: Synthetic oligonucleotide
ucgauaucaauggcaauca

SEQ ID NO: 2406197 - RNA, 19 nt, Artificial Sequence
  Description of Artificial Sequence: Synthetic oligonucleotide
uacucuucuugagaagggg

SEQ ID NO: 2406198 - RNA, 19 nt, Artificial Sequence
  Description of Artificial Sequence: Synthetic oligonucleotide
cauuugaaagcugacugac

SEQ ID NO: 2406199 - RNA, 19 nt, Artificial Sequence
  Description of Artificial Sequence: Synthetic oligonucleotide
gguucauuaacccauuuaa

SEQ ID NO: 2406200 - RNA, 19 nt, Artificial Sequence
  Description of Artificial Sequence: Synthetic oligonucleotide
acucuucuugagaaggggc

SEQ ID NO: 2406201 - RNA, 19 nt, Artificial Sequence
  Description of Artificial Sequence: Synthetic oligonucleotide
guucauuaacccauuuaag

SEQ ID NO: 2406202 - RNA, 19 nt, Artificial Sequence
  Description of Artificial Sequence: Synthetic oligonucleotide
aaacgagagaagacuucac

SEQ ID NO: 2406203 - RNA, 19 nt, Artificial Sequence
  Description of Artificial Sequence: Synthetic oligonucleotide
caucagccuuuaaacaggg

SEQ ID NO: 2406204 - RNA, 19 nt, Artificial Sequence
  Description of Artificial Sequence: Synthetic oligonucleotide
uuaaggcaaacugaauggu

SEQ ID NO: 2406205 - RNA, 19 nt, Artificial Sequence
  Description of Artificial Sequence: Synthetic oligonucleotide
uccaaaaggcaugucuugc

SEQ ID NO: 2406206 - RNA, 19 nt, Artificial Sequence
  Description of Artificial Sequence: Synthetic oligonucleotide
ugaaaaccagcccucuuua

SEQ ID NO: 2406207 - RNA, 19 nt, Artificial Sequence
  Description of Artificial Sequence: Synthetic oligonucleotide
ucccauaaacuucagcauu

SEQ ID NO: 2406208 - RNA, 19 nt, Artificial Sequence
  Description of Artificial Sequence: Synthetic oligonucleotide
gaagagauggucugaccuc

SEQ ID NO: 2406209 - RNA, 19 nt, Artificial Sequence
  Description of Artificial Sequence: Synthetic oligonucleotide
acaucagccuuuaaacagg

SEQ ID NO: 2406210 - RNA, 19 nt, Artificial Sequence
  Description of Artificial Sequence: Synthetic oligonucleotide
uugaucccaucauacaaaa

SEQ ID NO: 2406211 - RNA, 19 nt, Artificial Sequence
  Description of Artificial Sequence: Synthetic oligonucleotide
cauuaacccauuuaaggaa

SEQ ID NO: 2406212 - RNA, 19 nt, Artificial Sequence
  Description of Artificial Sequence: Synthetic oligonucleotide
acauucuucucuagauacc

SEQ ID NO: 2406213 - RNA, 19 nt, Artificial Sequence
  Description of Artificial Sequence: Synthetic oligonucleotide
ucugaccucugucaggcuc

SEQ ID NO: 2406214 - RNA, 19 nt, Artificial Sequence
  Description of Artificial Sequence: Synthetic oligonucleotide
ccaagaguaggaaaucucc

SEQ ID NO: 2406215 - RNA, 19 nt, Artificial Sequence
  Description of Artificial Sequence: Synthetic oligonucleotide
cuuuacucuucuugagaag

SEQ ID NO: 2406216 - RNA, 19 nt, Artificial Sequence
  Description of Artificial Sequence: Synthetic oligonucleotide
agauaagucuucugggaaa

SEQ ID NO: 2406217 - RNA, 19 nt, Artificial Sequence
  Description of Artificial Sequence: Synthetic oligonucleotide
cuaucuuaucugcuauccc

SEQ ID NO: 2406218 - RNA, 19 nt, Artificial Sequence
  Description of Artificial Sequence: Synthetic oligonucleotide
uuacuccgcacuuuacucu

SEQ ID NO: 2406219 - RNA, 19 nt, Artificial Sequence
  Description of Artificial Sequence: Synthetic oligonucleotide
uuaacagggucgauaucaa

SEQ ID NO: 2406220 - RNA, 19 nt, Artificial Sequence
  Description of Artificial Sequence: Synthetic oligonucleotide
caaacugaaugguguuucc

SEQ ID NO: 2406221 - RNA, 19 nt, Artificial Sequence
  Description of Artificial Sequence: Synthetic oligonucleotide
gagauaagucuucugggaa

SEQ ID NO: 2406222 - RNA, 19 nt, Artificial Sequence
  Description of Artificial Sequence: Synthetic oligonucleotide
ucaauggcaaucacucuuu

SEQ ID NO: 2406223 - RNA, 19 nt, Artificial Sequence
  Description of Artificial Sequence: Synthetic oligonucleotide
uuuaaacagggagccaaga

SEQ ID NO: 2406224 - RNA, 19 nt, Artificial Sequence
  Description of Artificial Sequence: Synthetic oligonucleotide
ugugagguuucaucugcug

SEQ ID NO: 2406225 - RNA, 19 nt, Artificial Sequence
  Description of Artificial Sequence: Synthetic oligonucleotide
gccugaaaacuucaaagcc

SEQ ID NO: 2406226 - RNA, 19 nt, Artificial Sequence
  Description of Artificial Sequence: Synthetic oligonucleotide
auuucacauucuucucuag

SEQ ID NO: 2406227 - RNA, 19 nt, Artificial Sequence
  Description of Artificial Sequence: Synthetic oligonucleotide
aaucuucucaggaguaacu

SEQ ID NO: 2406228 - RNA, 19 nt, Artificial Sequence
  Description of Artificial Sequence: Synthetic oligonucleotide
aggaguaacugaaaaccag

SEQ ID NO: 2406229 - RNA, 19 nt, Artificial Sequence
  Description of Artificial Sequence: Synthetic oligonucleotide
caaaacgagagaagacuuc

SEQ ID NO: 2406230 - RNA, 19 nt, Artificial Sequence
  Description of Artificial Sequence: Synthetic oligonucleotide
agaaagcgacuccugugag

SEQ ID NO: 2406231 - RNA, 19 nt, Artificial Sequence
  Description of Artificial Sequence: Synthetic oligonucleotide
guugugagaaagcgacucc

SEQ ID NO: 2406232 - RNA, 19 nt, Artificial Sequence
  Description of Artificial Sequence: Synthetic oligonucleotide
aguaggaaaucuccacaga

SEQ ID NO: 2406233 - RNA, 19 nt, Artificial Sequence
  Description of Artificial Sequence: Synthetic oligonucleotide
auggucugaccucugucag

SEQ ID NO: 2406234 - RNA, 19 nt, Artificial Sequence
  Description of Artificial Sequence: Synthetic oligonucleotide
ugguucauuaacccauuua

SEQ ID NO: 2406235 - RNA, 19 nt, Artificial Sequence
  Description of Artificial Sequence: Synthetic oligonucleotide
ucuggucuccaucggguca

SEQ ID NO: 2406236 - RNA, 19 nt, Artificial Sequence
  Description of Artificial Sequence: Synthetic oligonucleotide
gcaaucacucuuuuccccg

SEQ ID NO: 2406237 - RNA, 19 nt, Artificial Sequence
  Description of Artificial Sequence: Synthetic oligonucleotide
ucgaaugucaaaggucucu

SEQ ID NO: 2406238 - RNA, 19 nt, Artificial Sequence
  Description of Artificial Sequence: Synthetic oligonucleotide
uucaucugcugguucauua

SEQ ID NO: 2406239 - RNA, 19 nt, Artificial Sequence
  Description of Artificial Sequence: Synthetic oligonucleotide
aucuccacagauaaacucu

SEQ ID NO: 2406240 - RNA, 19 nt, Artificial Sequence
  Description of Artificial Sequence: Synthetic oligonucleotide
gauaucaauggcaaucacu

SEQ ID NO: 2406241 - RNA, 19 nt, Artificial Sequence
  Description of Artificial Sequence: Synthetic oligonucleotide
auaagucuucugggaaagc

SEQ ID NO: 2406242 - RNA, 19 nt, Artificial Sequence
  Description of Artificial Sequence: Synthetic oligonucleotide
uaucaauggcaaucacucu

SEQ ID NO: 2406243 - RNA, 19 nt, Artificial Sequence
  Description of Artificial Sequence: Synthetic oligonucleotide
uugacuuguauuucacauu

SEQ ID NO: 2406244 - RNA, 19 nt, Artificial Sequence
  Description of Artificial Sequence: Synthetic oligonucleotide
uguuuccuccaacuccaca

SEQ ID NO: 2406245 - RNA, 19 nt, Artificial Sequence
  Description of Artificial Sequence: Synthetic oligonucleotide
aucccauaaacuucagcau

SEQ ID NO: 2406246 - RNA, 19 nt, Artificial Sequence
  Description of Artificial Sequence: Synthetic oligonucleotide
uuucccgacucuuccguga

SEQ ID NO: 2406247 - RNA, 19 nt, Artificial Sequence
  Description of Artificial Sequence: Synthetic oligonucleotide
ucaucugcugguucauuaa

SEQ ID NO: 2406248 - RNA, 19 nt, Artificial Sequence
  Description of Artificial Sequence: Synthetic oligonucleotide
cacuacaaugucacauuug

SEQ ID NO: 2406249 - RNA, 19 nt, Artificial Sequence
  Description of Artificial Sequence: Synthetic oligonucleotide
caagaguaggaaaucucca

SEQ ID NO: 2406250 - RNA, 19 nt, Artificial Sequence
  Description of Artificial Sequence: Synthetic oligonucleotide
uggucugaccucugucagg

SEQ ID NO: 2406251 - RNA, 19 nt, Artificial Sequence
  Description of Artificial Sequence: Synthetic oligonucleotide
aaacucuaucuuaucugcu

SEQ ID NO: 2406252 - RNA, 19 nt, Artificial Sequence
  Description of Artificial Sequence: Synthetic oligonucleotide
ugcauuuuguugugagaaa

SEQ ID NO: 2406253 - RNA, 19 nt, Artificial Sequence
  Description of Artificial Sequence: Synthetic oligonucleotide
caacaucagccuuuaaaca

SEQ ID NO: 2406254 - RNA, 19 nt, Artificial Sequence
  Description of Artificial Sequence: Synthetic oligonucleotide
ggaguaacugaaaaccagc

SEQ ID NO: 2406255 - RNA, 19 nt, Artificial Sequence
  Description of Artificial Sequence: Synthetic oligonucleotide
guucgaaugucaaaggucu

SEQ ID NO: 2406256 - RNA, 19 nt, Artificial Sequence
  Description of Artificial Sequence: Synthetic oligonucleotide
agguuucaucugcugguuc

SEQ ID NO: 2406257 - RNA, 19 nt, Artificial Sequence
  Description of Artificial Sequence: Synthetic oligonucleotide
auuaacccauuuaaggaau

SEQ ID NO: 2406258 - RNA, 19 nt, Artificial Sequence
  Description of Artificial Sequence: Synthetic oligonucleotide
cugcuaucccauaaacuuc

SEQ ID NO: 2406259 - RNA, 19 nt, Artificial Sequence
  Description of Artificial Sequence: Synthetic oligonucleotide
agaucaaucuuaacagggu

SEQ ID NO: 2406260 - RNA, 19 nt, Artificial Sequence
  Description of Artificial Sequence: Synthetic oligonucleotide
cugaagagauggucugacc

SEQ ID NO: 2406261 - RNA, 19 nt, Artificial Sequence
  Description of Artificial Sequence: Synthetic oligonucleotide
ucacucuuuuccccguuaa

SEQ ID NO: 2406262 - RNA, 19 nt, Artificial Sequence
  Description of Artificial Sequence: Synthetic oligonucleotide
acggccagcaauaugcuca

SEQ ID NO: 2406263 - RNA, 19 nt, Artificial Sequence
  Description of Artificial Sequence: Synthetic oligonucleotide
uugcgcauauccagguacu

SEQ ID NO: 2406264 - RNA, 19 nt, Artificial Sequence
  Description of Artificial Sequence: Synthetic oligonucleotide
uuaacccauuuaaggaauu

SEQ ID NO: 2406265 - RNA, 19 nt, Artificial Sequence
  Description of Artificial Sequence: Synthetic oligonucleotide
cacagaaagcauccacuac

SEQ ID NO: 2406266 - RNA, 19 nt, Artificial Sequence
  Description of Artificial Sequence: Synthetic oligonucleotide
ucaaguucacuggcugaag

SEQ ID NO: 2406267 - RNA, 19 nt, Artificial Sequence
  Description of Artificial Sequence: Synthetic oligonucleotide
aucccaucauacaaaacga

SEQ ID NO: 2406268 - RNA, 19 nt, Artificial Sequence
  Description of Artificial Sequence: Synthetic oligonucleotide
ugaucccaucauacaaaac

SEQ ID NO: 2406269 - RNA, 19 nt, Artificial Sequence
  Description of Artificial Sequence: Synthetic oligonucleotide
cuuaucugcuaucccauaa

SEQ ID NO: 2406270 - RNA, 19 nt, Artificial Sequence
  Description of Artificial Sequence: Synthetic oligonucleotide
caucugcugguucauuaac

SEQ ID NO: 2406271 - RNA, 19 nt, Artificial Sequence
  Description of Artificial Sequence: Synthetic oligonucleotide
cuuuuccccguuaaggcaa

SEQ ID NO: 2406272 - RNA, 19 nt, Artificial Sequence
  Description of Artificial Sequence: Synthetic oligonucleotide
guaggaaaucuccacagau

SEQ ID NO: 2406273 - RNA, 19 nt, Artificial Sequence
  Description of Artificial Sequence: Synthetic oligonucleotide
cuaacuugaucccaucaua

SEQ ID NO: 2406274 - RNA, 19 nt, Artificial Sequence
  Description of Artificial Sequence: Synthetic oligonucleotide
uauuacgagcaagaucaau

SEQ ID NO: 2406275 - RNA, 19 nt, Artificial Sequence
  Description of Artificial Sequence: Synthetic oligonucleotide
acaaaacgagagaagacuu

SEQ ID NO: 2406276 - RNA, 19 nt, Artificial Sequence
  Description of Artificial Sequence: Synthetic oligonucleotide
ugacacggccagcaauaug

SEQ ID NO: 2406277 - RNA, 19 nt, Artificial Sequence
  Description of Artificial Sequence: Synthetic oligonucleotide
cuugcauuuuguugugaga

SEQ ID NO: 2406278 - RNA, 19 nt, Artificial Sequence
  Description of Artificial Sequence: Synthetic oligonucleotide
aacacaacaucagccuuua

SEQ ID NO: 2406279 - RNA, 19 nt, Artificial Sequence
  Description of Artificial Sequence: Synthetic oligonucleotide
acgagcaagaucaaucuua

SEQ ID NO: 2406280 - RNA, 19 nt, Artificial Sequence
  Description of Artificial Sequence: Synthetic oligonucleotide
aaggcgggcuuaggaacac

SEQ ID NO: 2406281 - RNA, 19 nt, Artificial Sequence
  Description of Artificial Sequence: Synthetic oligonucleotide
ugcuugcgcauauccaggu

SEQ ID NO: 2406282 - RNA, 19 nt, Artificial Sequence
  Description of Artificial Sequence: Synthetic oligonucleotide
ccugaaaacuucaaagcca

SEQ ID NO: 2406283 - RNA, 19 nt, Artificial Sequence
  Description of Artificial Sequence: Synthetic oligonucleotide
cacuuuacucuucuugaga

SEQ ID NO: 2406284 - RNA, 19 nt, Artificial Sequence
  Description of Artificial Sequence: Synthetic oligonucleotide
gguuucaucugcugguuca

SEQ ID NO: 2406285 - RNA, 19 nt, Artificial Sequence
  Description of Artificial Sequence: Synthetic oligonucleotide
uuauuacgagcaagaucaa

SEQ ID NO: 2406286 - RNA, 19 nt, Artificial Sequence
  Description of Artificial Sequence: Synthetic oligonucleotide
gaaggggcuuucccgacuc

SEQ ID NO: 2406287 - RNA, 19 nt, Artificial Sequence
  Description of Artificial Sequence: Synthetic oligonucleotide
caucagcuuucuccaaaag

SEQ ID NO: 2406288 - RNA, 19 nt, Artificial Sequence
  Description of Artificial Sequence: Synthetic oligonucleotide
uucgaaugucaaaggucuc

SEQ ID NO: 2406289 - RNA, 19 nt, Artificial Sequence
  Description of Artificial Sequence: Synthetic oligonucleotide
ucuuaacagggucgauauc

SEQ ID NO: 2406290 - RNA, 19 nt, Artificial Sequence
  Description of Artificial Sequence: Synthetic oligonucleotide
uccaccuuacuccgcacuu

SEQ ID NO: 2406291 - RNA, 19 nt, Artificial Sequence
  Description of Artificial Sequence: Synthetic oligonucleotide
caucgggucaucagcuuuc

SEQ ID NO: 2406292 - RNA, 19 nt, Artificial Sequence
  Description of Artificial Sequence: Synthetic oligonucleotide
aucauuguucgaaugucaa

SEQ ID NO: 2406293 - RNA, 19 nt, Artificial Sequence
  Description of Artificial Sequence: Synthetic oligonucleotide
uuccgugaacaggaugugc

SEQ ID NO: 2406294 - RNA, 19 nt, Artificial Sequence
  Description of Artificial Sequence: Synthetic oligonucleotide
aucugcuaucccauaaacu

SEQ ID NO: 2406295 - RNA, 19 nt, Artificial Sequence
  Description of Artificial Sequence: Synthetic oligonucleotide
uacgagcaagaucaaucuu

SEQ ID NO: 2406296 - RNA, 19 nt, Artificial Sequence
  Description of Artificial Sequence: Synthetic oligonucleotide
cugaaaacuucaaagccau

SEQ ID NO: 2406297 - RNA, 19 nt, Artificial Sequence
  Description of Artificial Sequence: Synthetic oligonucleotide
aaucacucuuuuccccguu

SEQ ID NO: 2406298 - RNA, 19 nt, Artificial Sequence
  Description of Artificial Sequence: Synthetic oligonucleotide
aagcugacugacacggcca

SEQ ID NO: 2406299 - RNA, 19 nt, Artificial Sequence
  Description of Artificial Sequence: Synthetic oligonucleotide
ucuuaucugcuaucccaua

SEQ ID NO: 2406300 - RNA, 19 nt, Artificial Sequence
  Description of Artificial Sequence: Synthetic oligonucleotide
auuugaaagcugacugaca

SEQ ID NO: 2406301 - RNA, 19 nt, Artificial Sequence
  Description of Artificial Sequence: Synthetic oligonucleotide
gcuuaggaacacaacauca

SEQ ID NO: 2406302 - RNA, 19 nt, Artificial Sequence
  Description of Artificial Sequence: Synthetic oligonucleotide
ggucugaccucugucaggc

SEQ ID NO: 2406303 - RNA, 19 nt, Artificial Sequence
  Description of Artificial Sequence: Synthetic oligonucleotide
gcacuuuacucuucuugag

SEQ ID NO: 2406304 - RNA, 19 nt, Artificial Sequence
  Description of Artificial Sequence: Synthetic oligonucleotide
uacuccgcacuuuacucuu

SEQ ID NO: 2406305 - RNA, 19 nt, Artificial Sequence
  Description of Artificial Sequence: Synthetic oligonucleotide
aaggcaugucuugcuccuc

SEQ ID NO: 2406306 - RNA, 19 nt, Artificial Sequence
  Description of Artificial Sequence: Synthetic oligonucleotide
uaacagggucgauaucaau

SEQ ID NO: 2406307 - RNA, 19 nt, Artificial Sequence
  Description of Artificial Sequence: Synthetic oligonucleotide
guagcauaaucuggucccc

SEQ ID NO: 2406308 - RNA, 19 nt, Artificial Sequence
  Description of Artificial Sequence: Synthetic oligonucleotide
gucacauuugaaagcugac

SEQ ID NO: 2406309 - RNA, 19 nt, Artificial Sequence
  Description of Artificial Sequence: Synthetic oligonucleotide
gagaaggggcuuucccgac

SEQ ID NO: 2406310 - RNA, 19 nt, Artificial Sequence
  Description of Artificial Sequence: Synthetic oligonucleotide
uuuuccccguuaaggcaaa

SEQ ID NO: 2406311 - RNA, 19 nt, Artificial Sequence
  Description of Artificial Sequence: Synthetic oligonucleotide
aucuuaucugcuaucccau

SEQ ID NO: 2406312 - RNA, 19 nt, Artificial Sequence
  Description of Artificial Sequence: Synthetic oligonucleotide
cgcauauccagguacuuug

SEQ ID NO: 2406313 - RNA, 19 nt, Artificial Sequence
  Description of Artificial Sequence: Synthetic oligonucleotide
uuccccguuaaggcaaacu

SEQ ID NO: 2406314 - RNA, 19 nt, Artificial Sequence
  Description of Artificial Sequence: Synthetic oligonucleotide
cacagucauuugcuugcgc

SEQ ID NO: 2406315 - RNA, 19 nt, Artificial Sequence
  Description of Artificial Sequence: Synthetic oligonucleotide
cugacugacacggccagca

SEQ ID NO: 2406316 - RNA, 19 nt, Artificial Sequence
  Description of Artificial Sequence: Synthetic oligonucleotide
uucccgacucuuccgugaa

SEQ ID NO: 2406317 - RNA, 19 nt, Artificial Sequence
  Description of Artificial Sequence: Synthetic oligonucleotide
acugacacggccagcaaua

SEQ ID NO: 2406318 - RNA, 19 nt, Artificial Sequence
  Description of Artificial Sequence: Synthetic oligonucleotide
aaccagcccucuuuaucua

SEQ ID NO: 2406319 - RNA, 19 nt, Artificial Sequence
  Description of Artificial Sequence: Synthetic oligonucleotide
cauucuucucuagauaccu

SEQ ID NO: 2406320 - RNA, 19 nt, Artificial Sequence
  Description of Artificial Sequence: Synthetic oligonucleotide
cuacaaugucacauuugaa

SEQ ID NO: 2406321 - RNA, 19 nt, Artificial Sequence
  Description of Artificial Sequence: Synthetic oligonucleotide
cccucuuuaucuaacuuga

SEQ ID NO: 2406322 - RNA, 19 nt, Artificial Sequence
  Description of Artificial Sequence: Synthetic oligonucleotide
cccaucauacaaaacgaga

SEQ ID NO: 2406323 - RNA, 19 nt, Artificial Sequence
  Description of Artificial Sequence: Synthetic oligonucleotide
caaggcgggcuuaggaaca

SEQ ID NO: 2406324 - RNA, 19 nt, Artificial Sequence
  Description of Artificial Sequence: Synthetic oligonucleotide
agcccucuuuaucuaacuu

SEQ ID NO: 2406325 - RNA, 19 nt, Artificial Sequence
  Description of Artificial Sequence: Synthetic oligonucleotide
agcgacuccugugagguuu

SEQ ID NO: 2406326 - RNA, 19 nt, Artificial Sequence
  Description of Artificial Sequence: Synthetic oligonucleotide
ggcuuucccgacucuuccg

SEQ ID NO: 2406327 - RNA, 19 nt, Artificial Sequence
  Description of Artificial Sequence: Synthetic oligonucleotide
accuuacuccgcacuuuac

SEQ ID NO: 2406328 - RNA, 19 nt, Artificial Sequence
  Description of Artificial Sequence: Synthetic oligonucleotide
accagcccucuuuaucuaa

SEQ ID NO: 2406329 - RNA, 19 nt, Artificial Sequence
  Description of Artificial Sequence: Synthetic oligonucleotide
ccgcacuuuacucuucuug

SEQ ID NO: 2406330 - RNA, 19 nt, Artificial Sequence
  Description of Artificial Sequence: Synthetic oligonucleotide
cuuccgugaacaggaugug

SEQ ID NO: 2406331 - RNA, 19 nt, Artificial Sequence
  Description of Artificial Sequence: Synthetic oligonucleotide
gucaaaggucucugcagua

SEQ ID NO: 2406332 - RNA, 19 nt, Artificial Sequence
  Description of Artificial Sequence: Synthetic oligonucleotide
ucauuugcuugcgcauauc

SEQ ID NO: 2406333 - RNA, 19 nt, Artificial Sequence
  Description of Artificial Sequence: Synthetic oligonucleotide
gggaaagccugaaaacuuc

SEQ ID NO: 2406334 - RNA, 19 nt, Artificial Sequence
  Description of Artificial Sequence: Synthetic oligonucleotide
agcaaucuucucaggagua

SEQ ID NO: 2406335 - RNA, 19 nt, Artificial Sequence
  Description of Artificial Sequence: Synthetic oligonucleotide
ggaaagccugaaaacuuca

SEQ ID NO: 2406336 - RNA, 19 nt, Artificial Sequence
  Description of Artificial Sequence: Synthetic oligonucleotide
cugaaaaccagcccucuuu

SEQ ID NO: 2406337 - RNA, 19 nt, Artificial Sequence
  Description of Artificial Sequence: Synthetic oligonucleotide
agagaagacuucacucuuu

SEQ ID NO: 2406338 - RNA, 19 nt, Artificial Sequence
  Description of Artificial Sequence: Synthetic oligonucleotide
cacggccagcaauaugcuc

SEQ ID NO: 2406339 - RNA, 19 nt, Artificial Sequence
  Description of Artificial Sequence: Synthetic oligonucleotide
cccguuaaggcaaacugaa

SEQ ID NO: 2406340 - RNA, 19 nt, Artificial Sequence
  Description of Artificial Sequence: Synthetic oligonucleotide
gggucgauaucaauggcaa

SEQ ID NO: 2406341 - RNA, 19 nt, Artificial Sequence
  Description of Artificial Sequence: Synthetic oligonucleotide
gcaguagcauaaucugguc

SEQ ID NO: 2406342 - RNA, 19 nt, Artificial Sequence
  Description of Artificial Sequence: Synthetic oligonucleotide
gacugacacggccagcaau

SEQ ID NO: 2406343 - RNA, 19 nt, Artificial Sequence
  Description of Artificial Sequence: Synthetic oligonucleotide
ggagccaagaguaggaaau

SEQ ID NO: 2406344 - RNA, 19 nt, Artificial Sequence
  Description of Artificial Sequence: Synthetic oligonucleotide
cagcaauaugcucagcaau

SEQ ID NO: 2406345 - RNA, 19 nt, Artificial Sequence
  Description of Artificial Sequence: Synthetic oligonucleotide
ugcaagagucuugcauuuu

SEQ ID NO: 2406346 - RNA, 19 nt, Artificial Sequence
  Description of Artificial Sequence: Synthetic oligonucleotide
ucccgacucuuccgugaac

SEQ ID NO: 2406347 - RNA, 19 nt, Artificial Sequence
  Description of Artificial Sequence: Synthetic oligonucleotide
cuccaucgggucaucagcu

SEQ ID NO: 2406348 - RNA, 19 nt, Artificial Sequence
  Description of Artificial Sequence: Synthetic oligonucleotide
cauccacuacaaugucaca

SEQ ID NO: 2406349 - RNA, 19 nt, Artificial Sequence
  Description of Artificial Sequence: Synthetic oligonucleotide
acuccgcacuuuacucuuc

SEQ ID NO: 2406350 - RNA, 19 nt, Artificial Sequence
  Description of Artificial Sequence: Synthetic oligonucleotide
aucgggucaucagcuuucu

SEQ ID NO: 2406351 - RNA, 19 nt, Artificial Sequence
  Description of Artificial Sequence: Synthetic oligonucleotide
cgggcuuaggaacacaaca

SEQ ID NO: 2406352 - RNA, 19 nt, Artificial Sequence
  Description of Artificial Sequence: Synthetic oligonucleotide
cccauaaacuucagcauua

SEQ ID NO: 2406353 - RNA, 19 nt, Artificial Sequence
  Description of Artificial Sequence: Synthetic oligonucleotide
ucgggucaucagcuuucuc

SEQ ID NO: 2406354 - RNA, 19 nt, Artificial Sequence
  Description of Artificial Sequence: Synthetic oligonucleotide
agagauggucugaccucug

SEQ ID NO: 2406355 - RNA, 19 nt, Artificial Sequence
  Description of Artificial Sequence: Synthetic oligonucleotide
ccagcccucuuuaucuaac

SEQ ID NO: 2406356 - RNA, 19 nt, Artificial Sequence
  Description of Artificial Sequence: Synthetic oligonucleotide
cuucugggaaagccugaaa

SEQ ID NO: 2406357 - RNA, 19 nt, Artificial Sequence
  Description of Artificial Sequence: Synthetic oligonucleotide
caccuuacuccgcacuuua

SEQ ID NO: 2406358 - RNA, 19 nt, Artificial Sequence
  Description of Artificial Sequence: Synthetic oligonucleotide
uccgcacuuuacucuucuu

SEQ ID NO: 2406359 - RNA, 19 nt, Artificial Sequence
  Description of Artificial Sequence: Synthetic oligonucleotide
aagcgacuccugugagguu

SEQ ID NO: 2406360 - RNA, 19 nt, Artificial Sequence
  Description of Artificial Sequence: Synthetic oligonucleotide
aucagccuuuaaacaggga

SEQ ID NO: 2406361 - RNA, 19 nt, Artificial Sequence
  Description of Artificial Sequence: Synthetic oligonucleotide
uuuccccguuaaggcaaac

SEQ ID NO: 2406362 - RNA, 19 nt, Artificial Sequence
  Description of Artificial Sequence: Synthetic oligonucleotide
gugcaagagucuugcauuu

SEQ ID NO: 2406363 - RNA, 19 nt, Artificial Sequence
  Description of Artificial Sequence: Synthetic oligonucleotide
ccccguuaaggcaaacuga

SEQ ID NO: 2406364 - RNA, 19 nt, Artificial Sequence
  Description of Artificial Sequence: Synthetic oligonucleotide
acacggccagcaauaugcu

SEQ ID NO: 2406365 - RNA, 19 nt, Artificial Sequence
  Description of Artificial Sequence: Synthetic oligonucleotide
caaucacucuuuuccccgu

SEQ ID NO: 2406366 - RNA, 19 nt, Artificial Sequence
  Description of Artificial Sequence: Synthetic oligonucleotide
ccgacucuuccgugaacag

SEQ ID NO: 2406367 - RNA, 19 nt, Artificial Sequence
  Description of Artificial Sequence: Synthetic oligonucleotide
gcuaucccauaaacuucag

SEQ ID NO: 2406368 - RNA, 19 nt, Artificial Sequence
  Description of Artificial Sequence: Synthetic oligonucleotide
cgacucuuccgugaacagg

SEQ ID NO: 2406369 - RNA, 19 nt, Artificial Sequence
  Description of Artificial Sequence: Synthetic oligonucleotide
cgagcaagaucaaucuuaa

SEQ ID NO: 2406370 - RNA, 19 nt, Artificial Sequence
  Description of Artificial Sequence: Synthetic oligonucleotide
ggaaaucuccacagauaaa

SEQ ID NO: 2406371 - RNA, 19 nt, Artificial Sequence
  Description of Artificial Sequence: Synthetic oligonucleotide
cugugagguuucaucugcu

SEQ ID NO: 2406372 - RNA, 19 nt, Artificial Sequence
  Description of Artificial Sequence: Synthetic oligonucleotide
gagguuucaucugcugguu

SEQ ID NO: 2406373 - RNA, 19 nt, Artificial Sequence
  Description of Artificial Sequence: Synthetic oligonucleotide
gcuuucccgacucuuccgu

SEQ ID NO: 2406374 - RNA, 19 nt, Artificial Sequence
  Description of Artificial Sequence: Synthetic oligonucleotide
ccuuacuccgcacuuuacu

SEQ ID NO: 2406375 - RNA, 19 nt, Artificial Sequence
  Description of Artificial Sequence: Synthetic oligonucleotide
cagcccucuuuaucuaacu

SEQ ID NO: 2406376 - RNA, 19 nt, Artificial Sequence
  Description of Artificial Sequence: Synthetic oligonucleotide
cccgacucuuccgugaaca

SEQ ID NO: 2406377 - RNA, 19 nt, Artificial Sequence
  Description of Artificial Sequence: Synthetic oligonucleotide
ggggcuuucccgacucuuc

SEQ ID NO: 2406378 - RNA, 19 nt, Artificial Sequence
  Description of Artificial Sequence: Synthetic oligonucleotide
ggcgggcuuaggaacacaa

SEQ ID NO: 2406379 - RNA, 19 nt, Artificial Sequence
  Description of Artificial Sequence: Synthetic oligonucleotide
agccaucaggaaacaucau

SEQ ID NO: 2406380 - RNA, 19 nt, Artificial Sequence
  Description of Artificial Sequence: Synthetic oligonucleotide
gcauuauuacgagcaagau

SEQ ID NO: 2406381 - RNA, 19 nt, Artificial Sequence
  Description of Artificial Sequence: Synthetic oligonucleotide
cuccacagauaaacucuau

SEQ ID NO: 2406382 - RNA, 19 nt, Artificial Sequence
  Description of Artificial Sequence: Synthetic oligonucleotide
gcugacugacacggccagc

SEQ ID NO: 2406383 - RNA, 19 nt, Artificial Sequence
  Description of Artificial Sequence: Synthetic oligonucleotide
aggcgggcuuaggaacaca

SEQ ID NO: 2406384 - RNA, 19 nt, Artificial Sequence
  Description of Artificial Sequence: Synthetic oligonucleotide
gcgggcuuaggaacacaac

SEQ ID NO: 2406385 - RNA, 19 nt, Artificial Sequence
  Description of Artificial Sequence: Synthetic oligonucleotide
gccuuuaaacagggagcca

SEQ ID NO: 2406386 - RNA, 19 nt, Artificial Sequence
  Description of Artificial Sequence: Synthetic oligonucleotide
gcuugcgcauauccaggua

SEQ ID NO: 2406387 - RNA, 19 nt, Artificial Sequence
  Description of Artificial Sequence: Synthetic oligonucleotide
ggucgauaucaauggcaau

SEQ ID NO: 2406388 - RNA, 19 nt, Artificial Sequence
  Description of Artificial Sequence: Synthetic oligonucleotide
caaagccaucaggaaacau

SEQ ID NO: 2406389 - RNA, 19 nt, Artificial Sequence
  Description of Artificial Sequence: Synthetic oligonucleotide
uggucuccaucgggucauc

SEQ ID NO: 2406390 - RNA, 19 nt, Artificial Sequence
  Description of Artificial Sequence: Synthetic oligonucleotide
ccccaaggcgggcuuagga

SEQ ID NO: 2406391 - RNA, 19 nt, Artificial Sequence
  Description of Artificial Sequence: Synthetic oligonucleotide
cuugcuccucagagucacu

SEQ ID NO: 2406392 - RNA, 19 nt, Artificial Sequence
  Description of Artificial Sequence: Synthetic oligonucleotide
caaucuuaacagggucgau

SEQ ID NO: 2406393 - RNA, 19 nt, Artificial Sequence
  Description of Artificial Sequence: Synthetic oligonucleotide
gucugaccucugucaggcu

SEQ ID NO: 2406394 - RNA, 19 nt, Artificial Sequence
  Description of Artificial Sequence: Synthetic oligonucleotide
ccacuacaaugucacauuu

SEQ ID NO: 2406395 - RNA, 19 nt, Artificial Sequence
  Description of Artificial Sequence: Synthetic oligonucleotide
gcgacuccugugagguuuc

SEQ ID NO: 2406396 - RNA, 19 nt, Artificial Sequence
  Description of Artificial Sequence: Synthetic oligonucleotide
cugacacggccagcaauau

SEQ ID NO: 2406397 - RNA, 19 nt, Artificial Sequence
  Description of Artificial Sequence: Synthetic oligonucleotide
ccauaaacuucagcauuau

SEQ ID NO: 2406398 - RNA, 19 nt, Artificial Sequence
  Description of Artificial Sequence: Synthetic oligonucleotide
ccaucgggucaucagcuuu

SEQ ID NO: 2406399 - RNA, 19 nt, Artificial Sequence
  Description of Artificial Sequence: Synthetic oligonucleotide
ccguuaaggcaaacugaau

SEQ ID NO: 2406400 - RNA, 19 nt, Artificial Sequence
  Description of Artificial Sequence: Synthetic oligonucleotide
gcgcauauccagguacuuu

SEQ ID NO: 2406401 - RNA, 19 nt, Artificial Sequence
  Description of Artificial Sequence: Synthetic oligonucleotide
ccgugaacaggaugugcuu

SEQ ID NO: 2406402 - RNA, 19 nt, Artificial Sequence
  Description of Artificial Sequence: Synthetic oligonucleotide
ccaccuuacuccgcacuuu

SEQ ID NO: 2406403 - RNA, 19 nt, Artificial Sequence
  Description of Artificial Sequence: Synthetic oligonucleotide
aaugcuuuggcucuguacg

SEQ ID NO: 2406404 - RNA, 19 nt, Artificial Sequence
  Description of Artificial Sequence: Synthetic oligonucleotide
ugaaguuaaacucagcaaa

SEQ ID NO: 2406405 - RNA, 19 nt, Artificial Sequence
  Description of Artificial Sequence: Synthetic oligonucleotide
uuuaaucucuucgugaagg

SEQ ID NO: 2406406 - RNA, 19 nt, Artificial Sequence
  Description of Artificial Sequence: Synthetic oligonucleotide
cucuacucaacucugaucc

SEQ ID NO: 2406407 - RNA, 19 nt, Artificial Sequence
  Description of Artificial Sequence: Synthetic oligonucleotide
uggaguaucagccuugagc

SEQ ID NO: 2406408 - RNA, 19 nt, Artificial Sequence
  Description of Artificial Sequence: Synthetic oligonucleotide
ucuuugaccacaaaaccug

SEQ ID NO: 2406409 - RNA, 19 nt, Artificial Sequence
  Description of Artificial Sequence: Synthetic oligonucleotide
acugacuaaggcuuccugc

SEQ ID NO: 2406410 - RNA, 19 nt, Artificial Sequence
  Description of Artificial Sequence: Synthetic oligonucleotide
agaagcuggaguaucagcc

SEQ ID NO: 2406411 - RNA, 19 nt, Artificial Sequence
  Description of Artificial Sequence: Synthetic oligonucleotide
uugaccacaaaaccugggg

SEQ ID NO: 2406412 - RNA, 19 nt, Artificial Sequence
  Description of Artificial Sequence: Synthetic oligonucleotide
aggggcaugguucuggacc

SEQ ID NO: 2406413 - RNA, 19 nt, Artificial Sequence
  Description of Artificial Sequence: Synthetic oligonucleotide
ucaacucugauccaaugcu

SEQ ID NO: 2406414 - RNA, 19 nt, Artificial Sequence
  Description of Artificial Sequence: Synthetic oligonucleotide
uugaugaaguuaaacucag

SEQ ID NO: 2406415 - RNA, 19 nt, Artificial Sequence
  Description of Artificial Sequence: Synthetic oligonucleotide
agccuugucgaagagaagc

SEQ ID NO: 2406416 - RNA, 19 nt, Artificial Sequence
  Description of Artificial Sequence: Synthetic oligonucleotide
augguucuggaccacaagg

SEQ ID NO: 2406417 - RNA, 19 nt, Artificial Sequence
  Description of Artificial Sequence: Synthetic oligonucleotide
cuugucgaagagaagcugg

SEQ ID NO: 2406418 - RNA, 19 nt, Artificial Sequence
  Description of Artificial Sequence: Synthetic oligonucleotide
aggguaguccucuuugacc

SEQ ID NO: 2406419 - RNA, 19 nt, Artificial Sequence
  Description of Artificial Sequence: Synthetic oligonucleotide
aaggccucuacucaacucu

SEQ ID NO: 2406420 - RNA, 19 nt, Artificial Sequence
  Description of Artificial Sequence: Synthetic oligonucleotide
ugagccuugucgaagagaa

SEQ ID NO: 2406421 - RNA, 19 nt, Artificial Sequence
  Description of Artificial Sequence: Synthetic oligonucleotide
ucaaugguacucaggaaga

SEQ ID NO: 2406422 - RNA, 19 nt, Artificial Sequence
  Description of Artificial Sequence: Synthetic oligonucleotide
gaaguuaaacucagcaaag

SEQ ID NO: 2406423 - RNA, 19 nt, Artificial Sequence
  Description of Artificial Sequence: Synthetic oligonucleotide
ugcugcaacacucugcacu

SEQ ID NO: 2406424 - RNA, 19 nt, Artificial Sequence
  Description of Artificial Sequence: Synthetic oligonucleotide
gucacacugagccuugucg

SEQ ID NO: 2406425 - RNA, 19 nt, Artificial Sequence
  Description of Artificial Sequence: Synthetic oligonucleotide
ucucuuuaaucucuucgug

SEQ ID NO: 2406426 - RNA, 19 nt, Artificial Sequence
  Description of Artificial Sequence: Synthetic oligonucleotide
aacucagcaaaguugcgau

SEQ ID NO: 2406427 - RNA, 19 nt, Artificial Sequence
  Description of Artificial Sequence: Synthetic oligonucleotide
aaagccaagcucgggcugc

SEQ ID NO: 2406428 - RNA, 19 nt, Artificial Sequence
  Description of Artificial Sequence: Synthetic oligonucleotide
gagcugguauguuugaagc

SEQ ID NO: 2406429 - RNA, 19 nt, Artificial Sequence
  Description of Artificial Sequence: Synthetic oligonucleotide
gucccuaucccucauguag

SEQ ID NO: 2406430 - RNA, 19 nt, Artificial Sequence
  Description of Artificial Sequence: Synthetic oligonucleotide
ucugauccaaugcuuuggc

SEQ ID NO: 2406431 - RNA, 19 nt, Artificial Sequence
  Description of Artificial Sequence: Synthetic oligonucleotide
aguggucuucuuuggaggg

SEQ ID NO: 2406432 - RNA, 19 nt, Artificial Sequence
  Description of Artificial Sequence: Synthetic oligonucleotide
ugaggaguugcaccagccg

SEQ ID NO: 2406433 - RNA, 19 nt, Artificial Sequence
  Description of Artificial Sequence: Synthetic oligonucleotide
uuugaagcucccacggccc

SEQ ID NO: 2406434 - RNA, 19 nt, Artificial Sequence
  Description of Artificial Sequence: Synthetic oligonucleotide
aucucuuuaaucucuucgu

SEQ ID NO: 2406435 - RNA, 19 nt, Artificial Sequence
  Description of Artificial Sequence: Synthetic oligonucleotide
ucccuaucccucauguagg

SEQ ID NO: 2406436 - RNA, 19 nt, Artificial Sequence
  Description of Artificial Sequence: Synthetic oligonucleotide
ugaccacaaaaccugggga

SEQ ID NO: 2406437 - RNA, 19 nt, Artificial Sequence
  Description of Artificial Sequence: Synthetic oligonucleotide
uaaacucagcaaaguugcg

SEQ ID NO: 2406438 - RNA, 19 nt, Artificial Sequence
  Description of Artificial Sequence: Synthetic oligonucleotide
uggagggucaucuuggcuc

SEQ ID NO: 2406439 - RNA, 19 nt, Artificial Sequence
  Description of Artificial Sequence: Synthetic oligonucleotide
cucaacucugauccaaugc

SEQ ID NO: 2406440 - RNA, 19 nt, Artificial Sequence
  Description of Artificial Sequence: Synthetic oligonucleotide
ucgaagagaagcuggagua

SEQ ID NO: 2406441 - RNA, 19 nt, Artificial Sequence
  Description of Artificial Sequence: Synthetic oligonucleotide
guauguuugaagcucccac

SEQ ID NO: 2406442 - RNA, 19 nt, Artificial Sequence
  Description of Artificial Sequence: Synthetic oligonucleotide
aaacucagcaaaguugcga

SEQ ID NO: 2406443 - RNA, 19 nt, Artificial Sequence
  Description of Artificial Sequence: Synthetic oligonucleotide
gaggaguugcaccagccgc

SEQ ID NO: 2406444 - RNA, 19 nt, Artificial Sequence
  Description of Artificial Sequence: Synthetic oligonucleotide
cuuugaccacaaaaccugg

SEQ ID NO: 2406445 - RNA, 19 nt, Artificial Sequence
  Description of Artificial Sequence: Synthetic oligonucleotide
uucuugaccuccaucgccu

SEQ ID NO: 2406446 - RNA, 19 nt, Artificial Sequence
  Description of Artificial Sequence: Synthetic oligonucleotide
ugcucacugacuaaggcuu

SEQ ID NO: 2406447 - RNA, 19 nt, Artificial Sequence
  Description of Artificial Sequence: Synthetic oligonucleotide
agcucggagagccagcaag

SEQ ID NO: 2406448 - RNA, 19 nt, Artificial Sequence
  Description of Artificial Sequence: Synthetic oligonucleotide
aaguuaaacucagcaaagu

SEQ ID NO: 2406449 - RNA, 19 nt, Artificial Sequence
  Description of Artificial Sequence: Synthetic oligonucleotide
cauaggguaguccucuuug

SEQ ID NO: 2406450 - RNA, 19 nt, Artificial Sequence
  Description of Artificial Sequence: Synthetic oligonucleotide
ucagagcgcaccuugucca

SEQ ID NO: 2406451 - RNA, 19 nt, Artificial Sequence
  Description of Artificial Sequence: Synthetic oligonucleotide
cugacuggcaugcucacug

SEQ ID NO: 2406452 - RNA, 19 nt, Artificial Sequence
  Description of Artificial Sequence: Synthetic oligonucleotide
uguuugaagcucccacggc

SEQ ID NO: 2406453 - RNA, 19 nt, Artificial Sequence
  Description of Artificial Sequence: Synthetic oligonucleotide
cugguauguuugaagcucc

SEQ ID NO: 2406454 - RNA, 19 nt, Artificial Sequence
  Description of Artificial Sequence: Synthetic oligonucleotide
  modified_base (7)..(7): a, c, u, g, unknown or other
gcagggngaaacuggaugc

SEQ ID NO: 2406455 - RNA, 19 nt, Artificial Sequence
  Description of Artificial Sequence: Synthetic oligonucleotide
agaaagccaagcucgggcu

SEQ ID NO: 2406456 - RNA, 19 nt, Artificial Sequence
  Description of Artificial Sequence: Synthetic oligonucleotide
guucuugaccuccaucgcc

SEQ ID NO: 2406457 - RNA, 19 nt, Artificial Sequence
  Description of Artificial Sequence: Synthetic oligonucleotide
augcucacugacuaaggcu

SEQ ID NO: 2406458 - RNA, 19 nt, Artificial Sequence
  Description of Artificial Sequence: Synthetic oligonucleotide
ugaaggugguguagcucgg

SEQ ID NO: 2406459 - RNA, 19 nt, Artificial Sequence
  Description of Artificial Sequence: Synthetic oligonucleotide
cuuuaaucucuucgugaag

SEQ ID NO: 2406460 - RNA, 19 nt, Artificial Sequence
  Description of Artificial Sequence: Synthetic oligonucleotide
cucagagcgcaccuugucc

SEQ ID NO: 2406461 - RNA, 19 nt, Artificial Sequence
  Description of Artificial Sequence: Synthetic oligonucleotide
ugagacucagagcgcaccu

SEQ ID NO: 2406462 - RNA, 19 nt, Artificial Sequence
  Description of Artificial Sequence: Synthetic oligonucleotide
  modified_base (3)..(3): a, c, u, g, unknown or other
ggngaaacuggaugccugg

SEQ ID NO: 2406463 - RNA, 19 nt, Artificial Sequence
  Description of Artificial Sequence: Synthetic oligonucleotide
uaggguaguccucuuugac

SEQ ID NO: 2406464 - RNA, 19 nt, Artificial Sequence
  Description of Artificial Sequence: Synthetic oligonucleotide
caaugcuuuggcucuguac

SEQ ID NO: 2406465 - RNA, 19 nt, Artificial Sequence
  Description of Artificial Sequence: Synthetic oligonucleotide
uucgugaaggugguguagc

SEQ ID NO: 2406466 - RNA, 19 nt, Artificial Sequence
  Description of Artificial Sequence: Synthetic oligonucleotide
aaaggggcaugguucugga

SEQ ID NO: 2406467 - RNA, 19 nt, Artificial Sequence
  Description of Artificial Sequence: Synthetic oligonucleotide
cacuugacucagcagcucc

SEQ ID NO: 2406468 - RNA, 19 nt, Artificial Sequence
  Description of Artificial Sequence: Synthetic oligonucleotide
cucugauccaaugcuuugg

SEQ ID NO: 2406469 - RNA, 19 nt, Artificial Sequence
  Description of Artificial Sequence: Synthetic oligonucleotide
ggaguaucagccuugagcu

SEQ ID NO: 2406470 - RNA, 19 nt, Artificial Sequence
  Description of Artificial Sequence: Synthetic oligonucleotide
acuuccuuggggucuccuc

SEQ ID NO: 2406471 - RNA, 19 nt, Artificial Sequence
  Description of Artificial Sequence: Synthetic oligonucleotide
aaggggcaugguucuggac

SEQ ID NO: 2406472 - RNA, 19 nt, Artificial Sequence
  Description of Artificial Sequence: Synthetic oligonucleotide
cugacuaaggcuuccugca

SEQ ID NO: 2406473 - RNA, 19 nt, Artificial Sequence
  Description of Artificial Sequence: Synthetic oligonucleotide
uauccugacuggcaugcuc

SEQ ID NO: 2406474 - RNA, 19 nt, Artificial Sequence
  Description of Artificial Sequence: Synthetic oligonucleotide
acucugauccaaugcuuug

SEQ ID NO: 2406475 - RNA, 19 nt, Artificial Sequence
  Description of Artificial Sequence: Synthetic oligonucleotide
gcagcaucagccaaagggg

SEQ ID NO: 2406476 - RNA, 19 nt, Artificial Sequence
  Description of Artificial Sequence: Synthetic oligonucleotide
acucaacucugauccaaug

SEQ ID NO: 2406477 - RNA, 19 nt, Artificial Sequence
  Description of Artificial Sequence: Synthetic oligonucleotide
uuuggcucuguacgccacc

SEQ ID NO: 2406478 - RNA, 19 nt, Artificial Sequence
  Description of Artificial Sequence: Synthetic oligonucleotide
uuuccaccugagcucggag

SEQ ID NO: 2406479 - RNA, 19 nt, Artificial Sequence
  Description of Artificial Sequence: Synthetic oligonucleotide
ucggagagccagcaagcgc

SEQ ID NO: 2406480 - RNA, 19 nt, Artificial Sequence
  Description of Artificial Sequence: Synthetic oligonucleotide
gaaagccaagcucgggcug

SEQ ID NO: 2406481 - RNA, 19 nt, Artificial Sequence
  Description of Artificial Sequence: Synthetic oligonucleotide
uccaucgccuucaucacuu

SEQ ID NO: 2406482 - RNA, 19 nt, Artificial Sequence
  Description of Artificial Sequence: Synthetic oligonucleotide
uugauggcacugcugucac

SEQ ID NO: 2406483 - RNA, 19 nt, Artificial Sequence
  Description of Artificial Sequence: Synthetic oligonucleotide
ucgccuucaucacuugacu

SEQ ID NO: 2406484 - RNA, 19 nt, Artificial Sequence
  Description of Artificial Sequence: Synthetic oligonucleotide
caaaggggcaugguucugg

SEQ ID NO: 2406485 - RNA, 19 nt, Artificial Sequence
  Description of Artificial Sequence: Synthetic oligonucleotide
uaucccucauguaggccug

SEQ ID NO: 2406486 - RNA, 19 nt, Artificial Sequence
  Description of Artificial Sequence: Synthetic oligonucleotide
gacuaaggcuuccugcauc

SEQ ID NO: 2406487 - RNA, 19 nt, Artificial Sequence
  Description of Artificial Sequence: Synthetic oligonucleotide
  modified_base (8)..(8): a, c, u, g, unknown or other
ggcagggngaaacuggaug

SEQ ID NO: 2406488 - RNA, 19 nt, Artificial Sequence
  Description of Artificial Sequence: Synthetic oligonucleotide
aguaucagccuugagcuuu

SEQ ID NO: 2406489 - RNA, 19 nt, Artificial Sequence
  Description of Artificial Sequence: Synthetic oligonucleotide
cuugcucauaggguagucc

SEQ ID NO: 2406490 - RNA, 19 nt, Artificial Sequence
  Description of Artificial Sequence: Synthetic oligonucleotide
ucuacucaacucugaucca

SEQ ID NO: 2406491 - RNA, 19 nt, Artificial Sequence
  Description of Artificial Sequence: Synthetic oligonucleotide
aaccuggggaguccuccag

SEQ ID NO: 2406492 - RNA, 19 nt, Artificial Sequence
  Description of Artificial Sequence: Synthetic oligonucleotide
aaaccuggggaguccucca

SEQ ID NO: 2406493 - RNA, 19 nt, Artificial Sequence
  Description of Artificial Sequence: Synthetic oligonucleotide
uugaccuccaucgccuuca

SEQ ID NO: 2406494 - RNA, 19 nt, Artificial Sequence
  Description of Artificial Sequence: Synthetic oligonucleotide
cuccacauagccaguggac

SEQ ID NO: 2406495 - RNA, 19 nt, Artificial Sequence
  Description of Artificial Sequence: Synthetic oligonucleotide
guggaccccagguagcugc

SEQ ID NO: 2406496 - RNA, 19 nt, Artificial Sequence
  Description of Artificial Sequence: Synthetic oligonucleotide
ccucuuugaccacaaaacc

SEQ ID NO: 2406497 - RNA, 19 nt, Artificial Sequence
  Description of Artificial Sequence: Synthetic oligonucleotide
ccucauguaggccuggacc

SEQ ID NO: 2406498 - RNA, 19 nt, Artificial Sequence
  Description of Artificial Sequence: Synthetic oligonucleotide
ucggaguucugcucauuga

SEQ ID NO: 2406499 - RNA, 19 nt, Artificial Sequence
  Description of Artificial Sequence: Synthetic oligonucleotide
caagcgcaccuccagcugc

SEQ ID NO: 2406500 - RNA, 19 nt, Artificial Sequence
  Description of Artificial Sequence: Synthetic oligonucleotide
cucggaguucugcucauug

SEQ ID NO: 2406501 - RNA, 19 nt, Artificial Sequence
  Description of Artificial Sequence: Synthetic oligonucleotide
gucuccacauagccagugg

SEQ ID NO: 2406502 - RNA, 19 nt, Artificial Sequence
  Description of Artificial Sequence: Synthetic oligonucleotide
aagccugcacugugaggag

SEQ ID NO: 2406503 - RNA, 19 nt, Artificial Sequence
  Description of Artificial Sequence: Synthetic oligonucleotide
gguacucaggaagaggccc

SEQ ID NO: 2406504 - RNA, 19 nt, Artificial Sequence
  Description of Artificial Sequence: Synthetic oligonucleotide
uacucaacucugauccaau

SEQ ID NO: 2406505 - RNA, 19 nt, Artificial Sequence
  Description of Artificial Sequence: Synthetic oligonucleotide
caugguucuggaccacaag

SEQ ID NO: 2406506 - RNA, 19 nt, Artificial Sequence
  Description of Artificial Sequence: Synthetic oligonucleotide
caaggagauccuugauggc

SEQ ID NO: 2406507 - RNA, 19 nt, Artificial Sequence
  Description of Artificial Sequence: Synthetic oligonucleotide
ucuguacgccaccuccugu

SEQ ID NO: 2406508 - RNA, 19 nt, Artificial Sequence
  Description of Artificial Sequence: Synthetic oligonucleotide
acgucccuaucccucaugu

SEQ ID NO: 2406509 - RNA, 19 nt, Artificial Sequence
  Description of Artificial Sequence: Synthetic oligonucleotide
  modified_base (2)..(2): a, c, u, g, unknown or other
gngaaacuggaugccuggc

SEQ ID NO: 2406510 - RNA, 19 nt, Artificial Sequence
  Description of Artificial Sequence: Synthetic oligonucleotide
uggcuauccugacuggcau

SEQ ID NO: 2406511 - RNA, 19 nt, Artificial Sequence
  Description of Artificial Sequence: Synthetic oligonucleotide
  modified_base (10)..(10): a, c, u, g, unknown or other
gaggcagggngaaacugga

SEQ ID NO: 2406512 - RNA, 19 nt, Artificial Sequence
  Description of Artificial Sequence: Synthetic oligonucleotide
  modified_base (12)..(12): a, c, u, g, unknown or other
uggaggcagggngaaacug

SEQ ID NO: 2406513 - RNA, 19 nt, Artificial Sequence
  Description of Artificial Sequence: Synthetic oligonucleotide
  modified_base (11)..(11): a, c, u, g, unknown or other
ggaggcagggngaaacugg

SEQ ID NO: 2406514 - RNA, 19 nt, Artificial Sequence
  Description of Artificial Sequence: Synthetic oligonucleotide
ucuucgugaagguggugua

SEQ ID NO: 2406515 - RNA, 19 nt, Artificial Sequence
  Description of Artificial Sequence: Synthetic oligonucleotide
gccaguggaccccagguag

SEQ ID NO: 2406516 - RNA, 19 nt, Artificial Sequence
  Description of Artificial Sequence: Synthetic oligonucleotide
ugacuaaggcuuccugcau

SEQ ID NO: 2406517 - RNA, 19 nt, Artificial Sequence
  Description of Artificial Sequence: Synthetic oligonucleotide
ucauaggguaguccucuuu

SEQ ID NO: 2406518 - RNA, 19 nt, Artificial Sequence
  Description of Artificial Sequence: Synthetic oligonucleotide
cucgcauggccucggcugg

SEQ ID NO: 2406519 - RNA, 19 nt, Artificial Sequence
  Description of Artificial Sequence: Synthetic oligonucleotide
ggagccaaggccucuacuc

SEQ ID NO: 2406520 - RNA, 19 nt, Artificial Sequence
  Description of Artificial Sequence: Synthetic oligonucleotide
gcugcaacacucugcacug

SEQ ID NO: 2406521 - RNA, 19 nt, Artificial Sequence
  Description of Artificial Sequence: Synthetic oligonucleotide
cuaucccucauguaggccu

SEQ ID NO: 2406522 - RNA, 19 nt, Artificial Sequence
  Description of Artificial Sequence: Synthetic oligonucleotide
auggccucggcuggucucc

SEQ ID NO: 2406523 - RNA, 19 nt, Artificial Sequence
  Description of Artificial Sequence: Synthetic oligonucleotide
ugcuggcuauccugacugg

SEQ ID NO: 2406524 - RNA, 19 nt, Artificial Sequence
  Description of Artificial Sequence: Synthetic oligonucleotide
caaugguacucaggaagag

SEQ ID NO: 2406525 - RNA, 19 nt, Artificial Sequence
  Description of Artificial Sequence: Synthetic oligonucleotide
ugcucauaggguaguccuc

SEQ ID NO: 2406526 - RNA, 19 nt, Artificial Sequence
  Description of Artificial Sequence: Synthetic oligonucleotide
ucgugaaggugguguagcu

SEQ ID NO: 2406527 - RNA, 19 nt, Artificial Sequence
  Description of Artificial Sequence: Synthetic oligonucleotide
gucgaagagaagcuggagu

SEQ ID NO: 2406528 - RNA, 19 nt, Artificial Sequence
  Description of Artificial Sequence: Synthetic oligonucleotide
cugagacucagagcgcacc

SEQ ID NO: 2406529 - RNA, 19 nt, Artificial Sequence
  Description of Artificial Sequence: Synthetic oligonucleotide
uugaagcucccacggcccu

SEQ ID NO: 2406530 - RNA, 19 nt, Artificial Sequence
  Description of Artificial Sequence: Synthetic oligonucleotide
aucagccaaaggggcaugg

SEQ ID NO: 2406531 - RNA, 19 nt, Artificial Sequence
  Description of Artificial Sequence: Synthetic oligonucleotide
accacaaaaccuggggagu

SEQ ID NO: 2406532 - RNA, 19 nt, Artificial Sequence
  Description of Artificial Sequence: Synthetic oligonucleotide
cacauagccaguggacccc

SEQ ID NO: 2406533 - RNA, 19 nt, Artificial Sequence
  Description of Artificial Sequence: Synthetic oligonucleotide
ggcuggucuccacauagcc

SEQ ID NO: 2406534 - RNA, 19 nt, Artificial Sequence
  Description of Artificial Sequence: Synthetic oligonucleotide
cacaaaaccuggggagucc

SEQ ID NO: 2406535 - RNA, 19 nt, Artificial Sequence
  Description of Artificial Sequence: Synthetic oligonucleotide
caaggccucuacucaacuc

SEQ ID NO: 2406536 - RNA, 19 nt, Artificial Sequence
  Description of Artificial Sequence: Synthetic oligonucleotide
gacuggcaugcucacugac

SEQ ID NO: 2406537 - RNA, 19 nt, Artificial Sequence
  Description of Artificial Sequence: Synthetic oligonucleotide
uggucuucuuuggaggguc

SEQ ID NO: 2406538 - RNA, 19 nt, Artificial Sequence
  Description of Artificial Sequence: Synthetic oligonucleotide
ugcugucacacugagccuu

SEQ ID NO: 2406539 - RNA, 19 nt, Artificial Sequence
  Description of Artificial Sequence: Synthetic oligonucleotide
guagcucggaguucugcuc

SEQ ID NO: 2406540 - RNA, 19 nt, Artificial Sequence
  Description of Artificial Sequence: Synthetic oligonucleotide
ggcaugcucacugacuaag

SEQ ID NO: 2406541 - RNA, 19 nt, Artificial Sequence
  Description of Artificial Sequence: Synthetic oligonucleotide
cuucgugaaggugguguag

SEQ ID NO: 2406542 - RNA, 19 nt, Artificial Sequence
  Description of Artificial Sequence: Synthetic oligonucleotide
  modified_base (6)..(6): a, c, u, g, unknown or other
cagggngaaacuggaugcc

SEQ ID NO: 2406543 - RNA, 19 nt, Artificial Sequence
  Description of Artificial Sequence: Synthetic oligonucleotide
gccuucaucacuugacuca

SEQ ID NO: 2406544 - RNA, 19 nt, Artificial Sequence
  Description of Artificial Sequence: Synthetic oligonucleotide
uggagccaaggccucuacu

SEQ ID NO: 2406545 - RNA, 19 nt, Artificial Sequence
  Description of Artificial Sequence: Synthetic oligonucleotide
uaguccucuuugaccacaa

SEQ ID NO: 2406546 - RNA, 19 nt, Artificial Sequence
  Description of Artificial Sequence: Synthetic oligonucleotide
ugugcucgcauggccucgg

SEQ ID NO: 2406547 - RNA, 19 nt, Artificial Sequence
  Description of Artificial Sequence: Synthetic oligonucleotide
auccugacuggcaugcuca

SEQ ID NO: 2406548 - RNA, 19 nt, Artificial Sequence
  Description of Artificial Sequence: Synthetic oligonucleotide
acaaaaccuggggaguccu

SEQ ID NO: 2406549 - RNA, 19 nt, Artificial Sequence
  Description of Artificial Sequence: Synthetic oligonucleotide
gcuauccugacuggcaugc

SEQ ID NO: 2406550 - RNA, 19 nt, Artificial Sequence
  Description of Artificial Sequence: Synthetic oligonucleotide
uacgccaccuccugugcuc

SEQ ID NO: 2406551 - RNA, 19 nt, Artificial Sequence
  Description of Artificial Sequence: Synthetic oligonucleotide
cacaaggaaagccugcacu

SEQ ID NO: 2406552 - RNA, 19 nt, Artificial Sequence
  Description of Artificial Sequence: Synthetic oligonucleotide
cacugacuaaggcuuccug

SEQ ID NO: 2406553 - RNA, 19 nt, Artificial Sequence
  Description of Artificial Sequence: Synthetic oligonucleotide
uggaguggaguggucuucu

SEQ ID NO: 2406554 - RNA, 19 nt, Artificial Sequence
  Description of Artificial Sequence: Synthetic oligonucleotide
  modified_base (5)..(5): a, c, u, g, unknown or other
agggngaaacuggaugccu

SEQ ID NO: 2406555 - RNA, 19 nt, Artificial Sequence
  Description of Artificial Sequence: Synthetic oligonucleotide
cuggcuauccugacuggca

SEQ ID NO: 2406556 - RNA, 19 nt, Artificial Sequence
  Description of Artificial Sequence: Synthetic oligonucleotide
gugaggaguugcaccagcc

SEQ ID NO: 2406557 - RNA, 19 nt, Artificial Sequence
  Description of Artificial Sequence: Synthetic oligonucleotide
cucuguacgccaccuccug

SEQ ID NO: 2406558 - RNA, 19 nt, Artificial Sequence
  Description of Artificial Sequence: Synthetic oligonucleotide
gcucgcauggccucggcug

SEQ ID NO: 2406559 - RNA, 19 nt, Artificial Sequence
  Description of Artificial Sequence: Synthetic oligonucleotide
uccagugugucaggaggcu

SEQ ID NO: 2406560 - RNA, 19 nt, Artificial Sequence
  Description of Artificial Sequence: Synthetic oligonucleotide
  modified_base (14)..(14): a, c, u, g, unknown or other
ccuggaggcagggngaaac

SEQ ID NO: 2406561 - RNA, 19 nt, Artificial Sequence
  Description of Artificial Sequence: Synthetic oligonucleotide
cagcaagcgcaccuccagc

SEQ ID NO: 2406562 - RNA, 19 nt, Artificial Sequence
  Description of Artificial Sequence: Synthetic oligonucleotide
cugagcucggagagccagc

SEQ ID NO: 2406563 - RNA, 19 nt, Artificial Sequence
  Description of Artificial Sequence: Synthetic oligonucleotide
ucacugacuaaggcuuccu

SEQ ID NO: 2406564 - RNA, 19 nt, Artificial Sequence
  Description of Artificial Sequence: Synthetic oligonucleotide
aggaguugcaccagccgcu

SEQ ID NO: 2406565 - RNA, 19 nt, Artificial Sequence
  Description of Artificial Sequence: Synthetic oligonucleotide
  modified_base (4)..(4): a, c, u, g, unknown or other
gggngaaacuggaugccug

SEQ ID NO: 2406566 - RNA, 19 nt, Artificial Sequence
  Description of Artificial Sequence: Synthetic oligonucleotide
ugcucgcauggccucggcu

SEQ ID NO: 2406567 - RNA, 19 nt, Artificial Sequence
  Description of Artificial Sequence: Synthetic oligonucleotide
ggaguucugcucauugaug

SEQ ID NO: 2406568 - RNA, 19 nt, Artificial Sequence
  Description of Artificial Sequence: Synthetic oligonucleotide
caagcucgggcugcugucc

SEQ ID NO: 2406569 - RNA, 19 nt, Artificial Sequence
  Description of Artificial Sequence: Synthetic oligonucleotide
cuugacucagcagcuccuc

SEQ ID NO: 2406570 - RNA, 19 nt, Artificial Sequence
  Description of Artificial Sequence: Synthetic oligonucleotide
uccugacuggcaugcucac

SEQ ID NO: 2406571 - RNA, 19 nt, Artificial Sequence
  Description of Artificial Sequence: Synthetic oligonucleotide
aggaaagccugcacuguga

SEQ ID NO: 2406572 - RNA, 19 nt, Artificial Sequence
  Description of Artificial Sequence: Synthetic oligonucleotide
cacugcugucacacugagc

SEQ ID NO: 2406573 - RNA, 19 nt, Artificial Sequence
  Description of Artificial Sequence: Synthetic oligonucleotide
guguagcucggaguucugc

SEQ ID NO: 2406574 - RNA, 19 nt, Artificial Sequence
  Description of Artificial Sequence: Synthetic oligonucleotide
uccuugcucauaggguagu

SEQ ID NO: 2406575 - RNA, 19 nt, Artificial Sequence
  Description of Artificial Sequence: Synthetic oligonucleotide
uggagcugguauguuugaa

SEQ ID NO: 2406576 - RNA, 19 nt, Artificial Sequence
  Description of Artificial Sequence: Synthetic oligonucleotide
aucucuucgugaagguggu

SEQ ID NO: 2406577 - RNA, 19 nt, Artificial Sequence
  Description of Artificial Sequence: Synthetic oligonucleotide
cuacucaacucugauccaa

SEQ ID NO: 2406578 - RNA, 19 nt, Artificial Sequence
  Description of Artificial Sequence: Synthetic oligonucleotide
caaaaccuggggaguccuc

SEQ ID NO: 2406579 - RNA, 19 nt, Artificial Sequence
  Description of Artificial Sequence: Synthetic oligonucleotide
ccugcugcaacacucugca

SEQ ID NO: 2406580 - RNA, 19 nt, Artificial Sequence
  Description of Artificial Sequence: Synthetic oligonucleotide
gcucccacggcccuggaga

SEQ ID NO: 2406581 - RNA, 19 nt, Artificial Sequence
  Description of Artificial Sequence: Synthetic oligonucleotide
uggaccccaaggagauccu

SEQ ID NO: 2406582 - RNA, 19 nt, Artificial Sequence
  Description of Artificial Sequence: Synthetic oligonucleotide
agaggcccacgucccuauc

SEQ ID NO: 2406583 - RNA, 19 nt, Artificial Sequence
  Description of Artificial Sequence: Synthetic oligonucleotide
cugcaggugcuggcuaucc

SEQ ID NO: 2406584 - RNA, 19 nt, Artificial Sequence
  Description of Artificial Sequence: Synthetic oligonucleotide
cucugcacugcugcucuug

SEQ ID NO: 2406585 - RNA, 19 nt, Artificial Sequence
  Description of Artificial Sequence: Synthetic oligonucleotide
cagagcgcaccuuguccac

SEQ ID NO: 2406586 - RNA, 19 nt, Artificial Sequence
  Description of Artificial Sequence: Synthetic oligonucleotide
uggcaugcucacugacuaa

SEQ ID NO: 2406587 - RNA, 19 nt, Artificial Sequence
  Description of Artificial Sequence: Synthetic oligonucleotide
cugcucauugaugaaguua

SEQ ID NO: 2406588 - RNA, 19 nt, Artificial Sequence
  Description of Artificial Sequence: Synthetic oligonucleotide
ggggcaugguucuggacca

SEQ ID NO: 2406589 - RNA, 19 nt, Artificial Sequence
  Description of Artificial Sequence: Synthetic oligonucleotide
agcgcaccuuguccacauc

SEQ ID NO: 2406590 - RNA, 19 nt, Artificial Sequence
  Description of Artificial Sequence: Synthetic oligonucleotide
cauagccaguggaccccag

SEQ ID NO: 2406591 - RNA, 19 nt, Artificial Sequence
  Description of Artificial Sequence: Synthetic oligonucleotide
cucuucgugaagguggugu

SEQ ID NO: 2406592 - RNA, 19 nt, Artificial Sequence
  Description of Artificial Sequence: Synthetic oligonucleotide
ccucuacucaacucugauc

SEQ ID NO: 2406593 - RNA, 19 nt, Artificial Sequence
  Description of Artificial Sequence: Synthetic oligonucleotide
cacacugagccuugucgaa

SEQ ID NO: 2406594 - RNA, 19 nt, Artificial Sequence
  Description of Artificial Sequence: Synthetic oligonucleotide
acgccaccuccugugcucg

SEQ ID NO: 2406595 - RNA, 19 nt, Artificial Sequence
  Description of Artificial Sequence: Synthetic oligonucleotide
agugugucaggaggcugga

SEQ ID NO: 2406596 - RNA, 19 nt, Artificial Sequence
  Description of Artificial Sequence: Synthetic oligonucleotide
aagcgcaccuccagcugcu

SEQ ID NO: 2406597 - RNA, 19 nt, Artificial Sequence
  Description of Artificial Sequence: Synthetic oligonucleotide
acauagccaguggacccca

SEQ ID NO: 2406598 - RNA, 19 nt, Artificial Sequence
  Description of Artificial Sequence: Synthetic oligonucleotide
cccuaucccucauguaggc

SEQ ID NO: 2406599 - RNA, 19 nt, Artificial Sequence
  Description of Artificial Sequence: Synthetic oligonucleotide
cugugaggaguugcaccag

SEQ ID NO: 2406600 - RNA, 19 nt, Artificial Sequence
  Description of Artificial Sequence: Synthetic oligonucleotide
gguauguuugaagcuccca

SEQ ID NO: 2406601 - RNA, 19 nt, Artificial Sequence
  Description of Artificial Sequence: Synthetic oligonucleotide
ggcuauccugacuggcaug

SEQ ID NO: 2406602 - RNA, 19 nt, Artificial Sequence
  Description of Artificial Sequence: Synthetic oligonucleotide
gcuaguggaggaagugggc

SEQ ID NO: 2406603 - RNA, 19 nt, Artificial Sequence
  Description of Artificial Sequence: Synthetic oligonucleotide
ucucuucgugaagguggug

SEQ ID NO: 2406604 - RNA, 19 nt, Artificial Sequence
  Description of Artificial Sequence: Synthetic oligonucleotide
cuggaguggaguggucuuc

SEQ ID NO: 2406605 - RNA, 19 nt, Artificial Sequence
  Description of Artificial Sequence: Synthetic oligonucleotide
ccuggggaguccuccagug

SEQ ID NO: 2406606 - RNA, 19 nt, Artificial Sequence
  Description of Artificial Sequence: Synthetic oligonucleotide
gcuguccaacuuccuuggg

SEQ ID NO: 2406607 - RNA, 19 nt, Artificial Sequence
  Description of Artificial Sequence: Synthetic oligonucleotide
uggcucuguacgccaccuc

SEQ ID NO: 2406608 - RNA, 19 nt, Artificial Sequence
  Description of Artificial Sequence: Synthetic oligonucleotide
gcuggcuauccugacuggc

SEQ ID NO: 2406609 - RNA, 19 nt, Artificial Sequence
  Description of Artificial Sequence: Synthetic oligonucleotide
aguggaccccagguagcug

SEQ ID NO: 2406610 - RNA, 19 nt, Artificial Sequence
  Description of Artificial Sequence: Synthetic oligonucleotide
cacgucccuaucccucaug

SEQ ID NO: 2406611 - RNA, 19 nt, Artificial Sequence
  Description of Artificial Sequence: Synthetic oligonucleotide
gagagccagcaagcgcacc

SEQ ID NO: 2406612 - RNA, 19 nt, Artificial Sequence
  Description of Artificial Sequence: Synthetic oligonucleotide
ggucuccacauagccagug

SEQ ID NO: 2406613 - RNA, 19 nt, Artificial Sequence
  Description of Artificial Sequence: Synthetic oligonucleotide
cggagagccagcaagcgca

SEQ ID NO: 2406614 - RNA, 19 nt, Artificial Sequence
  Description of Artificial Sequence: Synthetic oligonucleotide
gcucggagagccagcaagc

SEQ ID NO: 2406615 - RNA, 19 nt, Artificial Sequence
  Description of Artificial Sequence: Synthetic oligonucleotide
gcaagcgcaccuccagcug

SEQ ID NO: 2406616 - RNA, 19 nt, Artificial Sequence
  Description of Artificial Sequence: Synthetic oligonucleotide
gaagaggcccacgucccua

SEQ ID NO: 2406617 - RNA, 19 nt, Artificial Sequence
  Description of Artificial Sequence: Synthetic oligonucleotide
cugagccuugucgaagaga

SEQ ID NO: 2406618 - RNA, 19 nt, Artificial Sequence
  Description of Artificial Sequence: Synthetic oligonucleotide
ucccucauguaggccugga

SEQ ID NO: 2406619 - RNA, 19 nt, Artificial Sequence
  Description of Artificial Sequence: Synthetic oligonucleotide
cugauccaaugcuuuggcu

SEQ ID NO: 2406620 - RNA, 19 nt, Artificial Sequence
  Description of Artificial Sequence: Synthetic oligonucleotide
ccuccaucgccuucaucac

SEQ ID NO: 2406621 - RNA, 19 nt, Artificial Sequence
  Description of Artificial Sequence: Synthetic oligonucleotide
caacucugauccaaugcuu

SEQ ID NO: 2406622 - RNA, 19 nt, Artificial Sequence
  Description of Artificial Sequence: Synthetic oligonucleotide
cuaaggcuuccugcaucuc

SEQ ID NO: 2406623 - RNA, 19 nt, Artificial Sequence
  Description of Artificial Sequence: Synthetic oligonucleotide
ggagggucaucuuggcucu

SEQ ID NO: 2406624 - RNA, 19 nt, Artificial Sequence
  Description of Artificial Sequence: Synthetic oligonucleotide
gugugucaggaggcuggag

SEQ ID NO: 2406625 - RNA, 19 nt, Artificial Sequence
  Description of Artificial Sequence: Synthetic oligonucleotide
  modified_base (13)..(13): a, c, u, g, unknown or other
cuggaggcagggngaaacu

SEQ ID NO: 2406626 - RNA, 19 nt, Artificial Sequence
  Description of Artificial Sequence: Synthetic oligonucleotide
ccuaucccucauguaggcc

SEQ ID NO: 2406627 - RNA, 19 nt, Artificial Sequence
  Description of Artificial Sequence: Synthetic oligonucleotide
uggccacugcuggagccaa

SEQ ID NO: 2406628 - RNA, 19 nt, Artificial Sequence
  Description of Artificial Sequence: Synthetic oligonucleotide
caaggaaagccugcacugu

SEQ ID NO: 2406629 - RNA, 19 nt, Artificial Sequence
  Description of Artificial Sequence: Synthetic oligonucleotide
ccacaaaaccuggggaguc

SEQ ID NO: 2406630 - RNA, 19 nt, Artificial Sequence
  Description of Artificial Sequence: Synthetic oligonucleotide
ccaagcucgggcugcuguc

SEQ ID NO: 2406631 - RNA, 19 nt, Artificial Sequence
  Description of Artificial Sequence: Synthetic oligonucleotide
ccagguagcugcuggagcu

SEQ ID NO: 2406632 - RNA, 19 nt, Artificial Sequence
  Description of Artificial Sequence: Synthetic oligonucleotide
gaguaucagccuugagcuu

SEQ ID NO: 2406633 - RNA, 19 nt, Artificial Sequence
  Description of Artificial Sequence: Synthetic oligonucleotide
gcucauaggguaguccucu

SEQ ID NO: 2406634 - RNA, 19 nt, Artificial Sequence
  Description of Artificial Sequence: Synthetic oligonucleotide
aagcucccacggcccugga

SEQ ID NO: 2406635 - RNA, 19 nt, Artificial Sequence
  Description of Artificial Sequence: Synthetic oligonucleotide
guacgccaccuccugugcu

SEQ ID NO: 2406636 - RNA, 19 nt, Artificial Sequence
  Description of Artificial Sequence: Synthetic oligonucleotide
gcuggaguaucagccuuga

SEQ ID NO: 2406637 - RNA, 19 nt, Artificial Sequence
  Description of Artificial Sequence: Synthetic oligonucleotide
cgccuucaucacuugacuc

SEQ ID NO: 2406638 - RNA, 19 nt, Artificial Sequence
  Description of Artificial Sequence: Synthetic oligonucleotide
cucccacggcccuggagaa

SEQ ID NO: 2406639 - RNA, 19 nt, Artificial Sequence
  Description of Artificial Sequence: Synthetic oligonucleotide
gugcucgcauggccucggc

SEQ ID NO: 2406640 - RNA, 19 nt, Artificial Sequence
  Description of Artificial Sequence: Synthetic oligonucleotide
caacuuccuuggggucucc

SEQ ID NO: 2406641 - RNA, 19 nt, Artificial Sequence
  Description of Artificial Sequence: Synthetic oligonucleotide
gagcucggagagccagcaa

SEQ ID NO: 2406642 - RNA, 19 nt, Artificial Sequence
  Description of Artificial Sequence: Synthetic oligonucleotide
cccucauguaggccuggac

SEQ ID NO: 2406643 - RNA, 19 nt, Artificial Sequence
  Description of Artificial Sequence: Synthetic oligonucleotide
  modified_base (9)..(9): a, c, u, g, unknown or other
aggcagggngaaacuggau

SEQ ID NO: 2406644 - RNA, 19 nt, Artificial Sequence
  Description of Artificial Sequence: Synthetic oligonucleotide
ggcaugguucuggaccaca

SEQ ID NO: 2406645 - RNA, 19 nt, Artificial Sequence
  Description of Artificial Sequence: Synthetic oligonucleotide
cuccaucgccuucaucacu

SEQ ID NO: 2406646 - RNA, 19 nt, Artificial Sequence
  Description of Artificial Sequence: Synthetic oligonucleotide
ccaacuuccuuggggucuc

SEQ ID NO: 2406647 - RNA, 19 nt, Artificial Sequence
  Description of Artificial Sequence: Synthetic oligonucleotide
gccucggcuggucuccaca

SEQ ID NO: 2406648 - RNA, 19 nt, Artificial Sequence
  Description of Artificial Sequence: Synthetic oligonucleotide
gcugagacucagagcgcac

SEQ ID NO: 2406649 - RNA, 19 nt, Artificial Sequence
  Description of Artificial Sequence: Synthetic oligonucleotide
ucccacggcccuggagaaa

SEQ ID NO: 2406650 - RNA, 19 nt, Artificial Sequence
  Description of Artificial Sequence: Synthetic oligonucleotide
cccacgucccuaucccuca

SEQ ID NO: 2406651 - RNA, 19 nt, Artificial Sequence
  Description of Artificial Sequence: Synthetic oligonucleotide
ggccucuacucaacucuga

SEQ ID NO: 2406652 - RNA, 19 nt, Artificial Sequence
  Description of Artificial Sequence: Synthetic oligonucleotide
gccgcuucucaaugguacu

SEQ ID NO: 2406653 - RNA, 19 nt, Artificial Sequence
  Description of Artificial Sequence: Synthetic oligonucleotide
caguggaccccagguagcu

SEQ ID NO: 2406654 - RNA, 19 nt, Artificial Sequence
  Description of Artificial Sequence: Synthetic oligonucleotide
cucggcuggucuccacaua

SEQ ID NO: 2406655 - RNA, 19 nt, Artificial Sequence
  Description of Artificial Sequence: Synthetic oligonucleotide
cucgggcugcuguccaacu

SEQ ID NO: 2406656 - RNA, 19 nt, Artificial Sequence
  Description of Artificial Sequence: Synthetic oligonucleotide
gcccacgucccuaucccuc

SEQ ID NO: 2406657 - RNA, 19 nt, Artificial Sequence
  Description of Artificial Sequence: Synthetic oligonucleotide
gcaucagccaaaggggcau

SEQ ID NO: 2406658 - RNA, 19 nt, Artificial Sequence
  Description of Artificial Sequence: Synthetic oligonucleotide
cggcuggucuccacauagc

SEQ ID NO: 2406659 - RNA, 19 nt, Artificial Sequence
  Description of Artificial Sequence: Synthetic oligonucleotide
guaucagccuugagcuuuu

SEQ ID NO: 2406660 - RNA, 19 nt, Artificial Sequence
  Description of Artificial Sequence: Synthetic oligonucleotide
gcucugucccagugccaga

SEQ ID NO: 2406661 - RNA, 19 nt, Artificial Sequence
  Description of Artificial Sequence: Synthetic oligonucleotide
cuauccugacuggcaugcu

SEQ ID NO: 2406662 - RNA, 19 nt, Artificial Sequence
  Description of Artificial Sequence: Synthetic oligonucleotide
gcucuguacgccaccuccu

SEQ ID NO: 2406663 - RNA, 19 nt, Artificial Sequence
  Description of Artificial Sequence: Synthetic oligonucleotide
gccuggaccccaaggagau

SEQ ID NO: 2406664 - RNA, 19 nt, Artificial Sequence
  Description of Artificial Sequence: Synthetic oligonucleotide
ggccacugcuggagccaag

SEQ ID NO: 2406665 - RNA, 19 nt, Artificial Sequence
  Description of Artificial Sequence: Synthetic oligonucleotide
ggccucggcuggucuccac

SEQ ID NO: 2406666 - RNA, 19 nt, Artificial Sequence
  Description of Artificial Sequence: Synthetic oligonucleotide
ggcccacgucccuaucccu

SEQ ID NO: 2406667 - RNA, 19 nt, Artificial Sequence
  Description of Artificial Sequence: Synthetic oligonucleotide
ccucggcuggucuccacau

SEQ ID NO: 2406668 - RNA, 19 nt, Artificial Sequence
  Description of Artificial Sequence: Synthetic oligonucleotide
cgucccuaucccucaugua

SEQ ID NO: 2406669 - RNA, 19 nt, Artificial Sequence
  Description of Artificial Sequence: Synthetic oligonucleotide
ccugacuggcaugcucacu

SEQ ID NO: 2406670 - RNA, 19 nt, Artificial Sequence
  Description of Artificial Sequence: Synthetic oligonucleotide
  modified_base (15)..(15): a, c, u, g, unknown or other
gccuggaggcagggngaaa

SEQ ID NO: 2406671 - RNA, 19 nt, Artificial Sequence
  Description of Artificial Sequence: Synthetic oligonucleotide
ccccaaggagauccuugau

SEQ ID NO: 2406672 - RNA, 19 nt, Artificial Sequence
  Description of Artificial Sequence: Synthetic oligonucleotide
gcucggaguucugcucauu

SEQ ID NO: 2406673 - RNA, 19 nt, Artificial Sequence
  Description of Artificial Sequence: Synthetic oligonucleotide
ccacgucccuaucccucau

SEQ ID NO: 2406674 - RNA, 19 nt, Artificial Sequence
  Description of Artificial Sequence: Synthetic oligonucleotide
aacucugcuauuuaaaugg

SEQ ID NO: 2406675 - RNA, 19 nt, Artificial Sequence
  Description of Artificial Sequence: Synthetic oligonucleotide
auagauuugauuucuaccg

SEQ ID NO: 2406676 - RNA, 19 nt, Artificial Sequence
  Description of Artificial Sequence: Synthetic oligonucleotide
auuugcaucaaucauggac

SEQ ID NO: 2406677 - RNA, 19 nt, Artificial Sequence
  Description of Artificial Sequence: Synthetic oligonucleotide
aaaagcauacuucuugacg

SEQ ID NO: 2406678 - RNA, 19 nt, Artificial Sequence
  Description of Artificial Sequence: Synthetic oligonucleotide
ucuaauauguguuucaugu

SEQ ID NO: 2406679 - RNA, 19 nt, Artificial Sequence
  Description of Artificial Sequence: Synthetic oligonucleotide
agcacaauuuccuugaggg

SEQ ID NO: 2406680 - RNA, 19 nt, Artificial Sequence
  Description of Artificial Sequence: Synthetic oligonucleotide
ugugacuucauuaucaacu

SEQ ID NO: 2406681 - RNA, 19 nt, Artificial Sequence
  Description of Artificial Sequence: Synthetic oligonucleotide
ucuaaaagcauacuucuug

SEQ ID NO: 2406682 - RNA, 19 nt, Artificial Sequence
  Description of Artificial Sequence: Synthetic oligonucleotide
aaagcauacuucuugacgu

SEQ ID NO: 2406683 - RNA, 19 nt, Artificial Sequence
  Description of Artificial Sequence: Synthetic oligonucleotide
uuauguagcucuaauaugu

SEQ ID NO: 2406684 - RNA, 19 nt, Artificial Sequence
  Description of Artificial Sequence: Synthetic oligonucleotide
acuguaguaaucuuuaucu

SEQ ID NO: 2406685 - RNA, 19 nt, Artificial Sequence
  Description of Artificial Sequence: Synthetic oligonucleotide
auuuaaauggcagaguggg

SEQ ID NO: 2406686 - RNA, 19 nt, Artificial Sequence
  Description of Artificial Sequence: Synthetic oligonucleotide
ucugcuauuuaaauggcag

SEQ ID NO: 2406687 - RNA, 19 nt, Artificial Sequence
  Description of Artificial Sequence: Synthetic oligonucleotide
uuagauuguguugagaucc

SEQ ID NO: 2406688 - RNA, 19 nt, Artificial Sequence
  Description of Artificial Sequence: Synthetic oligonucleotide
uaauauguguuucauguca

SEQ ID NO: 2406689 - RNA, 19 nt, Artificial Sequence
  Description of Artificial Sequence: Synthetic oligonucleotide
ucaauuuuaacuucaauuu

SEQ ID NO: 2406690 - RNA, 19 nt, Artificial Sequence
  Description of Artificial Sequence: Synthetic oligonucleotide
uguaguaaucuuuaucucc

SEQ ID NO: 2406691 - RNA, 19 nt, Artificial Sequence
  Description of Artificial Sequence: Synthetic oligonucleotide
uggacuuguauucuaagag

SEQ ID NO: 2406692 - RNA, 19 nt, Artificial Sequence
  Description of Artificial Sequence: Synthetic oligonucleotide
uuugauuucuaccggaaca

SEQ ID NO: 2406693 - RNA, 19 nt, Artificial Sequence
  Description of Artificial Sequence: Synthetic oligonucleotide
aaggcccuggaacacaugc

SEQ ID NO: 2406694 - RNA, 19 nt, Artificial Sequence
  Description of Artificial Sequence: Synthetic oligonucleotide
ucuaaugucaagcaguuuu

SEQ ID NO: 2406695 - RNA, 19 nt, Artificial Sequence
  Description of Artificial Sequence: Synthetic oligonucleotide
uauuuaaauggcagagugg

SEQ ID NO: 2406696 - RNA, 19 nt, Artificial Sequence
  Description of Artificial Sequence: Synthetic oligonucleotide
uguguugagauccuucucc

SEQ ID NO: 2406697 - RNA, 19 nt, Artificial Sequence
  Description of Artificial Sequence: Synthetic oligonucleotide
uucauuaucaacuuaugua

SEQ ID NO: 2406698 - RNA, 19 nt, Artificial Sequence
  Description of Artificial Sequence: Synthetic oligonucleotide
uauuagauuguguugagau

SEQ ID NO: 2406699 - RNA, 19 nt, Artificial Sequence
  Description of Artificial Sequence: Synthetic oligonucleotide
auuucuaaaagcauacuuc

SEQ ID NO: 2406700 - RNA, 19 nt, Artificial Sequence
  Description of Artificial Sequence: Synthetic oligonucleotide
acaaacucguuccaaugcc

SEQ ID NO: 2406701 - RNA, 19 nt, Artificial Sequence
  Description of Artificial Sequence: Synthetic oligonucleotide
ucuuauuagauuguguuga

SEQ ID NO: 2406702 - RNA, 19 nt, Artificial Sequence
  Description of Artificial Sequence: Synthetic oligonucleotide
uuacuucccaaaauaaggc

SEQ ID NO: 2406703 - RNA, 19 nt, Artificial Sequence
  Description of Artificial Sequence: Synthetic oligonucleotide
cauagauuugauuucuacc

SEQ ID NO: 2406704 - RNA, 19 nt, Artificial Sequence
  Description of Artificial Sequence: Synthetic oligonucleotide
gaauccucugcccaguugg

SEQ ID NO: 2406705 - RNA, 19 nt, Artificial Sequence
  Description of Artificial Sequence: Synthetic oligonucleotide
acuuauguagcucuaauau

SEQ ID NO: 2406706 - RNA, 19 nt, Artificial Sequence
  Description of Artificial Sequence: Synthetic oligonucleotide
aaaguuucauccuguuuag

SEQ ID NO: 2406707 - RNA, 19 nt, Artificial Sequence
  Description of Artificial Sequence: Synthetic oligonucleotide
aaacucugcuauuuaaaug

SEQ ID NO: 2406708 - RNA, 19 nt, Artificial Sequence
  Description of Artificial Sequence: Synthetic oligonucleotide
uuauuugaaguucucuucu

SEQ ID NO: 2406709 - RNA, 19 nt, Artificial Sequence
  Description of Artificial Sequence: Synthetic oligonucleotide
uuauuuguaagugcagccg

SEQ ID NO: 2406710 - RNA, 19 nt, Artificial Sequence
  Description of Artificial Sequence: Synthetic oligonucleotide
caggauucuuauuagauug

SEQ ID NO: 2406711 - RNA, 19 nt, Artificial Sequence
  Description of Artificial Sequence: Synthetic oligonucleotide
aacagccgagcauuuauuc

SEQ ID NO: 2406712 - RNA, 19 nt, Artificial Sequence
  Description of Artificial Sequence: Synthetic oligonucleotide
ugaauaacuguaguaaucu

SEQ ID NO: 2406713 - RNA, 19 nt, Artificial Sequence
  Description of Artificial Sequence: Synthetic oligonucleotide
uuuauuugaaguucucuuc

SEQ ID NO: 2406714 - RNA, 19 nt, Artificial Sequence
  Description of Artificial Sequence: Synthetic oligonucleotide
ucuuucuaaugucaagcag

SEQ ID NO: 2406715 - RNA, 19 nt, Artificial Sequence
  Description of Artificial Sequence: Synthetic oligonucleotide
uuaaauggcagagugggca

SEQ ID NO: 2406716 - RNA, 19 nt, Artificial Sequence
  Description of Artificial Sequence: Synthetic oligonucleotide
aguuucauccuguuuagug

SEQ ID NO: 2406717 - RNA, 19 nt, Artificial Sequence
  Description of Artificial Sequence: Synthetic oligonucleotide
aagaguugcuguuuugucu

SEQ ID NO: 2406718 - RNA, 19 nt, Artificial Sequence
  Description of Artificial Sequence: Synthetic oligonucleotide
uuuuauuugaaguucucuu

SEQ ID NO: 2406719 - RNA, 19 nt, Artificial Sequence
  Description of Artificial Sequence: Synthetic oligonucleotide
uuccucuuaauuccgaaga

SEQ ID NO: 2406720 - RNA, 19 nt, Artificial Sequence
  Description of Artificial Sequence: Synthetic oligonucleotide
uguagcacaauuuccuuga

SEQ ID NO: 2406721 - RNA, 19 nt, Artificial Sequence
  Description of Artificial Sequence: Synthetic oligonucleotide
aaucuuuaucuccaucugu

SEQ ID NO: 2406722 - RNA, 19 nt, Artificial Sequence
  Description of Artificial Sequence: Synthetic oligonucleotide
auucuuauuagauuguguu

SEQ ID NO: 2406723 - RNA, 19 nt, Artificial Sequence
  Description of Artificial Sequence: Synthetic oligonucleotide
auuagauuguguugagauc

SEQ ID NO: 2406724 - RNA, 19 nt, Artificial Sequence
  Description of Artificial Sequence: Synthetic oligonucleotide
auuaucaacuuauguagcu

SEQ ID NO: 2406725 - RNA, 19 nt, Artificial Sequence
  Description of Artificial Sequence: Synthetic oligonucleotide
ugcuauuuaaauggcagag

SEQ ID NO: 2406726 - RNA, 19 nt, Artificial Sequence
  Description of Artificial Sequence: Synthetic oligonucleotide
auuugauuucuaccggaac

SEQ ID NO: 2406727 - RNA, 19 nt, Artificial Sequence
  Description of Artificial Sequence: Synthetic oligonucleotide
uacacuacucucagcaucc

SEQ ID NO: 2406728 - RNA, 19 nt, Artificial Sequence
  Description of Artificial Sequence: Synthetic oligonucleotide
uucauggucuuuaucacgu

SEQ ID NO: 2406729 - RNA, 19 nt, Artificial Sequence
  Description of Artificial Sequence: Synthetic oligonucleotide
ucaaucauggacuuguauu

SEQ ID NO: 2406730 - RNA, 19 nt, Artificial Sequence
  Description of Artificial Sequence: Synthetic oligonucleotide
cuuguauucuaagaguugc

SEQ ID NO: 2406731 - RNA, 19 nt, Artificial Sequence
  Description of Artificial Sequence: Synthetic oligonucleotide
uauuuguaagugcagccga

SEQ ID NO: 2406732 - RNA, 19 nt, Artificial Sequence
  Description of Artificial Sequence: Synthetic oligonucleotide
uugacguuuguuuuauuug

SEQ ID NO: 2406733 - RNA, 19 nt, Artificial Sequence
  Description of Artificial Sequence: Synthetic oligonucleotide
uuuguuuuauuugaaguuc

SEQ ID NO: 2406734 - RNA, 19 nt, Artificial Sequence
  Description of Artificial Sequence: Synthetic oligonucleotide
uaucacgucggaauuuucc

SEQ ID NO: 2406735 - RNA, 19 nt, Artificial Sequence
  Description of Artificial Sequence: Synthetic oligonucleotide
guuuguauuucuaaaagca

SEQ ID NO: 2406736 - RNA, 19 nt, Artificial Sequence
  Description of Artificial Sequence: Synthetic oligonucleotide
gaguacacuacucucagca

SEQ ID NO: 2406737 - RNA, 19 nt, Artificial Sequence
  Description of Artificial Sequence: Synthetic oligonucleotide
ucuugcaugaucuguucag

SEQ ID NO: 2406738 - RNA, 19 nt, Artificial Sequence
  Description of Artificial Sequence: Synthetic oligonucleotide
uucuuauuagauuguguug

SEQ ID NO: 2406739 - RNA, 19 nt, Artificial Sequence
  Description of Artificial Sequence: Synthetic oligonucleotide
acagccgagcauuuauucc

SEQ ID NO: 2406740 - RNA, 19 nt, Artificial Sequence
  Description of Artificial Sequence: Synthetic oligonucleotide
agugcaagaguuuucauuu

SEQ ID NO: 2406741 - RNA, 19 nt, Artificial Sequence
  Description of Artificial Sequence: Synthetic oligonucleotide
uuuagugcaagaguuuuca

SEQ ID NO: 2406742 - RNA, 19 nt, Artificial Sequence
  Description of Artificial Sequence: Synthetic oligonucleotide
uaucaacuuauguagcucu

SEQ ID NO: 2406743 - RNA, 19 nt, Artificial Sequence
  Description of Artificial Sequence: Synthetic oligonucleotide
uuucaugucaucagugagu

SEQ ID NO: 2406744 - RNA, 19 nt, Artificial Sequence
  Description of Artificial Sequence: Synthetic oligonucleotide
ugacguuuguuuuauuuga

SEQ ID NO: 2406745 - RNA, 19 nt, Artificial Sequence
  Description of Artificial Sequence: Synthetic oligonucleotide
uaaucuuuaucuccaucug

SEQ ID NO: 2406746 - RNA, 19 nt, Artificial Sequence
  Description of Artificial Sequence: Synthetic oligonucleotide
cauguuauuuguaagugca

SEQ ID NO: 2406747 - RNA, 19 nt, Artificial Sequence
  Description of Artificial Sequence: Synthetic oligonucleotide
gucggaauuuuccauauug

SEQ ID NO: 2406748 - RNA, 19 nt, Artificial Sequence
  Description of Artificial Sequence: Synthetic oligonucleotide
uuuauucccgccacgaaau

SEQ ID NO: 2406749 - RNA, 19 nt, Artificial Sequence
  Description of Artificial Sequence: Synthetic oligonucleotide
guuucauccuguuuagugc

SEQ ID NO: 2406750 - RNA, 19 nt, Artificial Sequence
  Description of Artificial Sequence: Synthetic oligonucleotide
uuuaucuccaucuguaguu

SEQ ID NO: 2406751 - RNA, 19 nt, Artificial Sequence
  Description of Artificial Sequence: Synthetic oligonucleotide
uguaagugcagccgaaagu

SEQ ID NO: 2406752 - RNA, 19 nt, Artificial Sequence
  Description of Artificial Sequence: Synthetic oligonucleotide
uccugugacuucauuauca

SEQ ID NO: 2406753 - RNA, 19 nt, Artificial Sequence
  Description of Artificial Sequence: Synthetic oligonucleotide
aguaaucuuuaucuccauc

SEQ ID NO: 2406754 - RNA, 19 nt, Artificial Sequence
  Description of Artificial Sequence: Synthetic oligonucleotide
uuguuuuauuugaaguucu

SEQ ID NO: 2406755 - RNA, 19 nt, Artificial Sequence
  Description of Artificial Sequence: Synthetic oligonucleotide
ucagugaguacacuacucu

SEQ ID NO: 2406756 - RNA, 19 nt, Artificial Sequence
  Description of Artificial Sequence: Synthetic oligonucleotide
cuuauguagcucuaauaug

SEQ ID NO: 2406757 - RNA, 19 nt, Artificial Sequence
  Description of Artificial Sequence: Synthetic oligonucleotide
agaguugcuguuuugucug

SEQ ID NO: 2406758 - RNA, 19 nt, Artificial Sequence
  Description of Artificial Sequence: Synthetic oligonucleotide
caguuuguauuucuaaaag

SEQ ID NO: 2406759 - RNA, 19 nt, Artificial Sequence
  Description of Artificial Sequence: Synthetic oligonucleotide
ucaucagugaguacacuac

SEQ ID NO: 2406760 - RNA, 19 nt, Artificial Sequence
  Description of Artificial Sequence: Synthetic oligonucleotide
caaucauggacuuguauuc

SEQ ID NO: 2406761 - RNA, 19 nt, Artificial Sequence
  Description of Artificial Sequence: Synthetic oligonucleotide
aaauaaggcccuggaacac

SEQ ID NO: 2406762 - RNA, 19 nt, Artificial Sequence
  Description of Artificial Sequence: Synthetic oligonucleotide
uuguaagugcagccgaaag

SEQ ID NO: 2406763 - RNA, 19 nt, Artificial Sequence
  Description of Artificial Sequence: Synthetic oligonucleotide
uguuucaugucaucaguga

SEQ ID NO: 2406764 - RNA, 19 nt, Artificial Sequence
  Description of Artificial Sequence: Synthetic oligonucleotide
ucuuaauuccgaagacucc

SEQ ID NO: 2406765 - RNA, 19 nt, Artificial Sequence
  Description of Artificial Sequence: Synthetic oligonucleotide
cauuaucaacuuauguagc

SEQ ID NO: 2406766 - RNA, 19 nt, Artificial Sequence
  Description of Artificial Sequence: Synthetic oligonucleotide
uauguguuucaugucauca

SEQ ID NO: 2406767 - RNA, 19 nt, Artificial Sequence
  Description of Artificial Sequence: Synthetic oligonucleotide
ucuucuuucuaaugucaag

SEQ ID NO: 2406768 - RNA, 19 nt, Artificial Sequence
  Description of Artificial Sequence: Synthetic oligonucleotide
uguauucuaagaguugcug

SEQ ID NO: 2406769 - RNA, 19 nt, Artificial Sequence
  Description of Artificial Sequence: Synthetic oligonucleotide
uugauuucuaccggaacag

SEQ ID NO: 2406770 - RNA, 19 nt, Artificial Sequence
  Description of Artificial Sequence: Synthetic oligonucleotide
aauaacuguaguaaucuuu

SEQ ID NO: 2406771 - RNA, 19 nt, Artificial Sequence
  Description of Artificial Sequence: Synthetic oligonucleotide
aggucuucaauuuuaacuu

SEQ ID NO: 2406772 - RNA, 19 nt, Artificial Sequence
  Description of Artificial Sequence: Synthetic oligonucleotide
uucuuucuaaugucaagca

SEQ ID NO: 2406773 - RNA, 19 nt, Artificial Sequence
  Description of Artificial Sequence: Synthetic oligonucleotide
uuuccucuuaauuccgaag

SEQ ID NO: 2406774 - RNA, 19 nt, Artificial Sequence
  Description of Artificial Sequence: Synthetic oligonucleotide
ugcaugaucuguucaggag

SEQ ID NO: 2406775 - RNA, 19 nt, Artificial Sequence
  Description of Artificial Sequence: Synthetic oligonucleotide
ugcugaauaacuguaguaa

SEQ ID NO: 2406776 - RNA, 19 nt, Artificial Sequence
  Description of Artificial Sequence: Synthetic oligonucleotide
gauuucuaccggaacagcc

SEQ ID NO: 2406777 - RNA, 19 nt, Artificial Sequence
  Description of Artificial Sequence: Synthetic oligonucleotide
uagcacaauuuccuugagg

SEQ ID NO: 2406778 - RNA, 19 nt, Artificial Sequence
  Description of Artificial Sequence: Synthetic oligonucleotide
uccauguuauuuguaagug

SEQ ID NO: 2406779 - RNA, 19 nt, Artificial Sequence
  Description of Artificial Sequence: Synthetic oligonucleotide
aacuuauguagcucuaaua

SEQ ID NO: 2406780 - RNA, 19 nt, Artificial Sequence
  Description of Artificial Sequence: Synthetic oligonucleotide
uauguagcucuaauaugug

SEQ ID NO: 2406781 - RNA, 19 nt, Artificial Sequence
  Description of Artificial Sequence: Synthetic oligonucleotide
cauggucuuuaucacgucg

SEQ ID NO: 2406782 - RNA, 19 nt, Artificial Sequence
  Description of Artificial Sequence: Synthetic oligonucleotide
cugaauaacuguaguaauc

SEQ ID NO: 2406783 - RNA, 19 nt, Artificial Sequence
  Description of Artificial Sequence: Synthetic oligonucleotide
guuccaaugccagagcagg

SEQ ID NO: 2406784 - RNA, 19 nt, Artificial Sequence
  Description of Artificial Sequence: Synthetic oligonucleotide
aauuccgaagacuccuccu

SEQ ID NO: 2406785 - RNA, 19 nt, Artificial Sequence
  Description of Artificial Sequence: Synthetic oligonucleotide
auuucuaccggaacagccg

SEQ ID NO: 2406786 - RNA, 19 nt, Artificial Sequence
  Description of Artificial Sequence: Synthetic oligonucleotide
uccuguuuagugcaagagu

SEQ ID NO: 2406787 - RNA, 19 nt, Artificial Sequence
  Description of Artificial Sequence: Synthetic oligonucleotide
auuuauucccgccacgaaa

SEQ ID NO: 2406788 - RNA, 19 nt, Artificial Sequence
  Description of Artificial Sequence: Synthetic oligonucleotide
guaaucuuuaucuccaucu

SEQ ID NO: 2406789 - RNA, 19 nt, Artificial Sequence
  Description of Artificial Sequence: Synthetic oligonucleotide
agagcaggauucuuauuag

SEQ ID NO: 2406790 - RNA, 19 nt, Artificial Sequence
  Description of Artificial Sequence: Synthetic oligonucleotide
uaauuccgaagacuccucc

SEQ ID NO: 2406791 - RNA, 19 nt, Artificial Sequence
  Description of Artificial Sequence: Synthetic oligonucleotide
ucggaauuuuccauauugu

SEQ ID NO: 2406792 - RNA, 19 nt, Artificial Sequence
  Description of Artificial Sequence: Synthetic oligonucleotide
uuucuaaugucaagcaguu

SEQ ID NO: 2406793 - RNA, 19 nt, Artificial Sequence
  Description of Artificial Sequence: Synthetic oligonucleotide
cacaaacucguuccaaugc

SEQ ID NO: 2406794 - RNA, 19 nt, Artificial Sequence
  Description of Artificial Sequence: Synthetic oligonucleotide
acguuuguuuuauuugaag

SEQ ID NO: 2406795 - RNA, 19 nt, Artificial Sequence
  Description of Artificial Sequence: Synthetic oligonucleotide
cuuauuagauuguguugag

SEQ ID NO: 2406796 - RNA, 19 nt, Artificial Sequence
  Description of Artificial Sequence: Synthetic oligonucleotide
uccaucuuuuccauguuau

SEQ ID NO: 2406797 - RNA, 19 nt, Artificial Sequence
  Description of Artificial Sequence: Synthetic oligonucleotide
aagugcagccgaaaguuuc

SEQ ID NO: 2406798 - RNA, 19 nt, Artificial Sequence
  Description of Artificial Sequence: Synthetic oligonucleotide
gcagccgaaaguuucaucc

SEQ ID NO: 2406799 - RNA, 19 nt, Artificial Sequence
  Description of Artificial Sequence: Synthetic oligonucleotide
acuacucucagcauccauc

SEQ ID NO: 2406800 - RNA, 19 nt, Artificial Sequence
  Description of Artificial Sequence: Synthetic oligonucleotide
uugagauccuucuccagcu

SEQ ID NO: 2406801 - RNA, 19 nt, Artificial Sequence
  Description of Artificial Sequence: Synthetic oligonucleotide
uaaaagcauacuucuugac

SEQ ID NO: 2406802 - RNA, 19 nt, Artificial Sequence
  Description of Artificial Sequence: Synthetic oligonucleotide
auauguguuucaugucauc

SEQ ID NO: 2406803 - RNA, 19 nt, Artificial Sequence
  Description of Artificial Sequence: Synthetic oligonucleotide
gacgccauagauuugauuu

SEQ ID NO: 2406804 - RNA, 19 nt, Artificial Sequence
  Description of Artificial Sequence: Synthetic oligonucleotide
ugucugugcucucagccug

SEQ ID NO: 2406805 - RNA, 19 nt, Artificial Sequence
  Description of Artificial Sequence: Synthetic oligonucleotide
cuaaaagcauacuucuuga

SEQ ID NO: 2406806 - RNA, 19 nt, Artificial Sequence
  Description of Artificial Sequence: Synthetic oligonucleotide
uccauugcagacgccauag

SEQ ID NO: 2406807 - RNA, 19 nt, Artificial Sequence
  Description of Artificial Sequence: Synthetic oligonucleotide
cagagugggcacaaacucg

SEQ ID NO: 2406808 - RNA, 19 nt, Artificial Sequence
  Description of Artificial Sequence: Synthetic oligonucleotide
cagccgagcauuuauuccc

SEQ ID NO: 2406809 - RNA, 19 nt, Artificial Sequence
  Description of Artificial Sequence: Synthetic oligonucleotide
uuucuaccggaacagccga

SEQ ID NO: 2406810 - RNA, 19 nt, Artificial Sequence
  Description of Artificial Sequence: Synthetic oligonucleotide
ucucaguuuguauuucuaa

SEQ ID NO: 2406811 - RNA, 19 nt, Artificial Sequence
  Description of Artificial Sequence: Synthetic oligonucleotide
gagggcagaauccucugcc

SEQ ID NO: 2406812 - RNA, 19 nt, Artificial Sequence
  Description of Artificial Sequence: Synthetic oligonucleotide
uguuuuauuugaaguucuc

SEQ ID NO: 2406813 - RNA, 19 nt, Artificial Sequence
  Description of Artificial Sequence: Synthetic oligonucleotide
auuccgaagacuccuccug

SEQ ID NO: 2406814 - RNA, 19 nt, Artificial Sequence
  Description of Artificial Sequence: Synthetic oligonucleotide
agggcagaauccucugccc

SEQ ID NO: 2406815 - RNA, 19 nt, Artificial Sequence
  Description of Artificial Sequence: Synthetic oligonucleotide
ucuaagaguugcuguuuug

SEQ ID NO: 2406816 - RNA, 19 nt, Artificial Sequence
  Description of Artificial Sequence: Synthetic oligonucleotide
ucuuuaucacgucggaauu

SEQ ID NO: 2406817 - RNA, 19 nt, Artificial Sequence
  Description of Artificial Sequence: Synthetic oligonucleotide
cuuucuaaugucaagcagu

SEQ ID NO: 2406818 - RNA, 19 nt, Artificial Sequence
  Description of Artificial Sequence: Synthetic oligonucleotide
guuuucauuucaaaaucac

SEQ ID NO: 2406819 - RNA, 19 nt, Artificial Sequence
  Description of Artificial Sequence: Synthetic oligonucleotide
uggaacacaugcugaauaa

SEQ ID NO: 2406820 - RNA, 19 nt, Artificial Sequence
  Description of Artificial Sequence: Synthetic oligonucleotide
uccucuuaauuccgaagac

SEQ ID NO: 2406821 - RNA, 19 nt, Artificial Sequence
  Description of Artificial Sequence: Synthetic oligonucleotide
aaacucguuccaaugccag

SEQ ID NO: 2406822 - RNA, 19 nt, Artificial Sequence
  Description of Artificial Sequence: Synthetic oligonucleotide
ucguuccaaugccagagca

SEQ ID NO: 2406823 - RNA, 19 nt, Artificial Sequence
  Description of Artificial Sequence: Synthetic oligonucleotide
uuguauucuaagaguugcu

SEQ ID NO: 2406824 - RNA, 19 nt, Artificial Sequence
  Description of Artificial Sequence: Synthetic oligonucleotide
aaucauggacuuguauucu

SEQ ID NO: 2406825 - RNA, 19 nt, Artificial Sequence
  Description of Artificial Sequence: Synthetic oligonucleotide
aucacgucggaauuuucca

SEQ ID NO: 2406826 - RNA, 19 nt, Artificial Sequence
  Description of Artificial Sequence: Synthetic oligonucleotide
cuaauauguguuucauguc

SEQ ID NO: 2406827 - RNA, 19 nt, Artificial Sequence
  Description of Artificial Sequence: Synthetic oligonucleotide
acgccauagauuugauuuc

SEQ ID NO: 2406828 - RNA, 19 nt, Artificial Sequence
  Description of Artificial Sequence: Synthetic oligonucleotide
uaagaguugcuguuuuguc

SEQ ID NO: 2406829 - RNA, 19 nt, Artificial Sequence
  Description of Artificial Sequence: Synthetic oligonucleotide
aauauguguuucaugucau

SEQ ID NO: 2406830 - RNA, 19 nt, Artificial Sequence
  Description of Artificial Sequence: Synthetic oligonucleotide
guaguaaucuuuaucucca

SEQ ID NO: 2406831 - RNA, 19 nt, Artificial Sequence
  Description of Artificial Sequence: Synthetic oligonucleotide
agcauuuauucccgccacg

SEQ ID NO: 2406832 - RNA, 19 nt, Artificial Sequence
  Description of Artificial Sequence: Synthetic oligonucleotide
acucguuccaaugccagag

SEQ ID NO: 2406833 - RNA, 19 nt, Artificial Sequence
  Description of Artificial Sequence: Synthetic oligonucleotide
acuucuugacguuuguuuu

SEQ ID NO: 2406834 - RNA, 19 nt, Artificial Sequence
  Description of Artificial Sequence: Synthetic oligonucleotide
aaguucucuucuuucuaau

SEQ ID NO: 2406835 - RNA, 19 nt, Artificial Sequence
  Description of Artificial Sequence: Synthetic oligonucleotide
ucauggacuuguauucuaa

SEQ ID NO: 2406836 - RNA, 19 nt, Artificial Sequence
  Description of Artificial Sequence: Synthetic oligonucleotide
uuaucaacuuauguagcuc

SEQ ID NO: 2406837 - RNA, 19 nt, Artificial Sequence
  Description of Artificial Sequence: Synthetic oligonucleotide
uaaauggcagagugggcac

SEQ ID NO: 2406838 - RNA, 19 nt, Artificial Sequence
  Description of Artificial Sequence: Synthetic oligonucleotide
aauaaggcccuggaacaca

SEQ ID NO: 2406839 - RNA, 19 nt, Artificial Sequence
  Description of Artificial Sequence: Synthetic oligonucleotide
uuuuccucuuaauuccgaa

SEQ ID NO: 2406840 - RNA, 19 nt, Artificial Sequence
  Description of Artificial Sequence: Synthetic oligonucleotide
cauggacuuguauucuaag

SEQ ID NO: 2406841 - RNA, 19 nt, Artificial Sequence
  Description of Artificial Sequence: Synthetic oligonucleotide
auauuguccaaauccuuuu

SEQ ID NO: 2406842 - RNA, 19 nt, Artificial Sequence
  Description of Artificial Sequence: Synthetic oligonucleotide
cuugcaugaucuguucagg

SEQ ID NO: 2406843 - RNA, 19 nt, Artificial Sequence
  Description of Artificial Sequence: Synthetic oligonucleotide
cucuaauauguguuucaug

SEQ ID NO: 2406844 - RNA, 19 nt, Artificial Sequence
  Description of Artificial Sequence: Synthetic oligonucleotide
auggucuuuaucacgucgg

SEQ ID NO: 2406845 - RNA, 19 nt, Artificial Sequence
  Description of Artificial Sequence: Synthetic oligonucleotide
uuauuagauuguguugaga

SEQ ID NO: 2406846 - RNA, 19 nt, Artificial Sequence
  Description of Artificial Sequence: Synthetic oligonucleotide
ugguuuuacuucccaaaau

SEQ ID NO: 2406847 - RNA, 19 nt, Artificial Sequence
  Description of Artificial Sequence: Synthetic oligonucleotide
auaacuguaguaaucuuua

SEQ ID NO: 2406848 - RNA, 19 nt, Artificial Sequence
  Description of Artificial Sequence: Synthetic oligonucleotide
uugcaugaucuguucagga

SEQ ID NO: 2406849 - RNA, 19 nt, Artificial Sequence
  Description of Artificial Sequence: Synthetic oligonucleotide
uuaauuccgaagacuccuc

SEQ ID NO: 2406850 - RNA, 19 nt, Artificial Sequence
  Description of Artificial Sequence: Synthetic oligonucleotide
uguugagauccuucuccag

SEQ ID NO: 2406851 - RNA, 19 nt, Artificial Sequence
  Description of Artificial Sequence: Synthetic oligonucleotide
uagugcaagaguuuucauu

SEQ ID NO: 2406852 - RNA, 19 nt, Artificial Sequence
  Description of Artificial Sequence: Synthetic oligonucleotide
caggucuucaauuuuaacu

SEQ ID NO: 2406853 - RNA, 19 nt, Artificial Sequence
  Description of Artificial Sequence: Synthetic oligonucleotide
uguuuagugcaagaguuuu

SEQ ID NO: 2406854 - RNA, 19 nt, Artificial Sequence
  Description of Artificial Sequence: Synthetic oligonucleotide
guacacuacucucagcauc

SEQ ID NO: 2406855 - RNA, 19 nt, Artificial Sequence
  Description of Artificial Sequence: Synthetic oligonucleotide
aucagugaguacacuacuc

SEQ ID NO: 2406856 - RNA, 19 nt, Artificial Sequence
  Description of Artificial Sequence: Synthetic oligonucleotide
agugaguacacuacucuca

SEQ ID NO: 2406857 - RNA, 19 nt, Artificial Sequence
  Description of Artificial Sequence: Synthetic oligonucleotide
acucugcuauuuaaauggc

SEQ ID NO: 2406858 - RNA, 19 nt, Artificial Sequence
  Description of Artificial Sequence: Synthetic oligonucleotide
cuguaguaaucuuuaucuc

SEQ ID NO: 2406859 - RNA, 19 nt, Artificial Sequence
  Description of Artificial Sequence: Synthetic oligonucleotide
ugcuccauugcagacgcca

SEQ ID NO: 2406860 - RNA, 19 nt, Artificial Sequence
  Description of Artificial Sequence: Synthetic oligonucleotide
guuuugucugugcucucag

SEQ ID NO: 2406861 - RNA, 19 nt, Artificial Sequence
  Description of Artificial Sequence: Synthetic oligonucleotide
uuuaucacgucggaauuuu

SEQ ID NO: 2406862 - RNA, 19 nt, Artificial Sequence
  Description of Artificial Sequence: Synthetic oligonucleotide
gauuguguugagauccuuc

SEQ ID NO: 2406863 - RNA, 19 nt, Artificial Sequence
  Description of Artificial Sequence: Synthetic oligonucleotide
uucuaagaguugcuguuuu

SEQ ID NO: 2406864 - RNA, 19 nt, Artificial Sequence
  Description of Artificial Sequence: Synthetic oligonucleotide
aacucguuccaaugccaga

SEQ ID NO: 2406865 - RNA, 19 nt, Artificial Sequence
  Description of Artificial Sequence: Synthetic oligonucleotide
agccgaaaguuucauccug

SEQ ID NO: 2406866 - RNA, 19 nt, Artificial Sequence
  Description of Artificial Sequence: Synthetic oligonucleotide
aaugccagagcaggauucu

SEQ ID NO: 2406867 - RNA, 19 nt, Artificial Sequence
  Description of Artificial Sequence: Synthetic oligonucleotide
uucuaaaagcauacuucuu

SEQ ID NO: 2406868 - RNA, 19 nt, Artificial Sequence
  Description of Artificial Sequence: Synthetic oligonucleotide
caaugccagagcaggauuc

SEQ ID NO: 2406869 - RNA, 19 nt, Artificial Sequence
  Description of Artificial Sequence: Synthetic oligonucleotide
ucccaaaauaaggcccugg

SEQ ID NO: 2406870 - RNA, 19 nt, Artificial Sequence
  Description of Artificial Sequence: Synthetic oligonucleotide
uugucugugcucucagccu

SEQ ID NO: 2406871 - RNA, 19 nt, Artificial Sequence
  Description of Artificial Sequence: Synthetic oligonucleotide
agcuguagcacaauuuccu

SEQ ID NO: 2406872 - RNA, 19 nt, Artificial Sequence
  Description of Artificial Sequence: Synthetic oligonucleotide
augucaucagugaguacac

SEQ ID NO: 2406873 - RNA, 19 nt, Artificial Sequence
  Description of Artificial Sequence: Synthetic oligonucleotide
auccuguuuagugcaagag

SEQ ID NO: 2406874 - RNA, 19 nt, Artificial Sequence
  Description of Artificial Sequence: Synthetic oligonucleotide
ucuaccggaacagccgagc

SEQ ID NO: 2406875 - RNA, 19 nt, Artificial Sequence
  Description of Artificial Sequence: Synthetic oligonucleotide
cagagcaggauucuuauua

SEQ ID NO: 2406876 - RNA, 19 nt, Artificial Sequence
  Description of Artificial Sequence: Synthetic oligonucleotide
uccagcuguagcacaauuu

SEQ ID NO: 2406877 - RNA, 19 nt, Artificial Sequence
  Description of Artificial Sequence: Synthetic oligonucleotide
acaugcugaauaacuguag

SEQ ID NO: 2406878 - RNA, 19 nt, Artificial Sequence
  Description of Artificial Sequence: Synthetic oligonucleotide
gaacacaugcugaauaacu

SEQ ID NO: 2406879 - RNA, 19 nt, Artificial Sequence
  Description of Artificial Sequence: Synthetic oligonucleotide
ugauuucuaccggaacagc

SEQ ID NO: 2406880 - RNA, 19 nt, Artificial Sequence
  Description of Artificial Sequence: Synthetic oligonucleotide
acuuguauucuaagaguug

SEQ ID NO: 2406881 - RNA, 19 nt, Artificial Sequence
  Description of Artificial Sequence: Synthetic oligonucleotide
ucaacuuauguagcucuaa

SEQ ID NO: 2406882 - RNA, 19 nt, Artificial Sequence
  Description of Artificial Sequence: Synthetic oligonucleotide
ugcccaguugguuuuacuu

SEQ ID NO: 2406883 - RNA, 19 nt, Artificial Sequence
  Description of Artificial Sequence: Synthetic oligonucleotide
ugaguacacuacucucagc

SEQ ID NO: 2406884 - RNA, 19 nt, Artificial Sequence
  Description of Artificial Sequence: Synthetic oligonucleotide
cagugaguacacuacucuc

SEQ ID NO: 2406885 - RNA, 19 nt, Artificial Sequence
  Description of Artificial Sequence: Synthetic oligonucleotide
guauucuaagaguugcugu

SEQ ID NO: 2406886 - RNA, 19 nt, Artificial Sequence
  Description of Artificial Sequence: Synthetic oligonucleotide
gauccucgaugcuuucccc

SEQ ID NO: 2406887 - RNA, 19 nt, Artificial Sequence
  Description of Artificial Sequence: Synthetic oligonucleotide
uuuccaggucuucaauuuu

SEQ ID NO: 2406888 - RNA, 19 nt, Artificial Sequence
  Description of Artificial Sequence: Synthetic oligonucleotide
acuucauuaucaacuuaug

SEQ ID NO: 2406889 - RNA, 19 nt, Artificial Sequence
  Description of Artificial Sequence: Synthetic oligonucleotide
gucuuuaucacgucggaau

SEQ ID NO: 2406890 - RNA, 19 nt, Artificial Sequence
  Description of Artificial Sequence: Synthetic oligonucleotide
uccaaauccuuuucugcuu

SEQ ID NO: 2406891 - RNA, 19 nt, Artificial Sequence
  Description of Artificial Sequence: Synthetic oligonucleotide
caaauccuuuucugcuugc

SEQ ID NO: 2406892 - RNA, 19 nt, Artificial Sequence
  Description of Artificial Sequence: Synthetic oligonucleotide
ccauguuauuuguaagugc

SEQ ID NO: 2406893 - RNA, 19 nt, Artificial Sequence
  Description of Artificial Sequence: Synthetic oligonucleotide
gucaucagugaguacacua

SEQ ID NO: 2406894 - RNA, 19 nt, Artificial Sequence
  Description of Artificial Sequence: Synthetic oligonucleotide
agaauccucugcccaguug

SEQ ID NO: 2406895 - RNA, 19 nt, Artificial Sequence
  Description of Artificial Sequence: Synthetic oligonucleotide
aagcauacuucuugacguu

SEQ ID NO: 2406896 - RNA, 19 nt, Artificial Sequence
  Description of Artificial Sequence: Synthetic oligonucleotide
guguuucaugucaucagug

SEQ ID NO: 2406897 - RNA, 19 nt, Artificial Sequence
  Description of Artificial Sequence: Synthetic oligonucleotide
ugcucuucucaguuuguau

SEQ ID NO: 2406898 - RNA, 19 nt, Artificial Sequence
  Description of Artificial Sequence: Synthetic oligonucleotide
cuucauuaucaacuuaugu

SEQ ID NO: 2406899 - RNA, 19 nt, Artificial Sequence
  Description of Artificial Sequence: Synthetic oligonucleotide
aucuuuaucuccaucugua

SEQ ID NO: 2406900 - RNA, 19 nt, Artificial Sequence
  Description of Artificial Sequence: Synthetic oligonucleotide
acaaacucugcuauuuaaa

SEQ ID NO: 2406901 - RNA, 19 nt, Artificial Sequence
  Description of Artificial Sequence: Synthetic oligonucleotide
aguacacuacucucagcau

SEQ ID NO: 2406902 - RNA, 19 nt, Artificial Sequence
  Description of Artificial Sequence: Synthetic oligonucleotide
uuccaaugccagagcagga

SEQ ID NO: 2406903 - RNA, 19 nt, Artificial Sequence
  Description of Artificial Sequence: Synthetic oligonucleotide
agagugggcacaaacucgu

SEQ ID NO: 2406904 - RNA, 19 nt, Artificial Sequence
  Description of Artificial Sequence: Synthetic oligonucleotide
ugaucuguucaggaguuuu

SEQ ID NO: 2406905 - RNA, 19 nt, Artificial Sequence
  Description of Artificial Sequence: Synthetic oligonucleotide
ccauagauuugauuucuac

SEQ ID NO: 2406906 - RNA, 19 nt, Artificial Sequence
  Description of Artificial Sequence: Synthetic oligonucleotide
uaacuguaguaaucuuuau

SEQ ID NO: 2406907 - RNA, 19 nt, Artificial Sequence
  Description of Artificial Sequence: Synthetic oligonucleotide
uucuugacguuuguuuuau

SEQ ID NO: 2406908 - RNA, 19 nt, Artificial Sequence
  Description of Artificial Sequence: Synthetic oligonucleotide
gcuugcucuucucaguuug

SEQ ID NO: 2406909 - RNA, 19 nt, Artificial Sequence
  Description of Artificial Sequence: Synthetic oligonucleotide
caaacucguuccaaugcca

SEQ ID NO: 2406910 - RNA, 19 nt, Artificial Sequence
  Description of Artificial Sequence: Synthetic oligonucleotide
cuuaauuccgaagacuccu

SEQ ID NO: 2406911 - RNA, 19 nt, Artificial Sequence
  Description of Artificial Sequence: Synthetic oligonucleotide
gagcaggauucuuauuaga

SEQ ID NO: 2406912 - RNA, 19 nt, Artificial Sequence
  Description of Artificial Sequence: Synthetic oligonucleotide
uccuugagggcagaauccu

SEQ ID NO: 2406913 - RNA, 19 nt, Artificial Sequence
  Description of Artificial Sequence: Synthetic oligonucleotide
cugcuauuuaaauggcaga

SEQ ID NO: 2406914 - RNA, 19 nt, Artificial Sequence
  Description of Artificial Sequence: Synthetic oligonucleotide
uuagugcaagaguuuucau

SEQ ID NO: 2406915 - RNA, 19 nt, Artificial Sequence
  Description of Artificial Sequence: Synthetic oligonucleotide
auugcagacgccauagauu

SEQ ID NO: 2406916 - RNA, 19 nt, Artificial Sequence
  Description of Artificial Sequence: Synthetic oligonucleotide
gauucuuauuagauugugu

SEQ ID NO: 2406917 - RNA, 19 nt, Artificial Sequence
  Description of Artificial Sequence: Synthetic oligonucleotide
uuaucacgucggaauuuuc

SEQ ID NO: 2406918 - RNA, 19 nt, Artificial Sequence
  Description of Artificial Sequence: Synthetic oligonucleotide
ugcucucagccugagcagc

SEQ ID NO: 2406919 - RNA, 19 nt, Artificial Sequence
  Description of Artificial Sequence: Synthetic oligonucleotide
guagcacaauuuccuugag

SEQ ID NO: 2406920 - RNA, 19 nt, Artificial Sequence
  Description of Artificial Sequence: Synthetic oligonucleotide
aaauggcagagugggcaca

SEQ ID NO: 2406921 - RNA, 19 nt, Artificial Sequence
  Description of Artificial Sequence: Synthetic oligonucleotide
guguugagauccuucucca

SEQ ID NO: 2406922 - RNA, 19 nt, Artificial Sequence
  Description of Artificial Sequence: Synthetic oligonucleotide
guuuuauuugaaguucucu

SEQ ID NO: 2406923 - RNA, 19 nt, Artificial Sequence
  Description of Artificial Sequence: Synthetic oligonucleotide
aucauggacuuguauucua

SEQ ID NO: 2406924 - RNA, 19 nt, Artificial Sequence
  Description of Artificial Sequence: Synthetic oligonucleotide
cucugcuauuuaaauggca

SEQ ID NO: 2406925 - RNA, 19 nt, Artificial Sequence
  Description of Artificial Sequence: Synthetic oligonucleotide
uccaaugccagagcaggau

SEQ ID NO: 2406926 - RNA, 19 nt, Artificial Sequence
  Description of Artificial Sequence: Synthetic oligonucleotide
ccagcuguagcacaauuuc

SEQ ID NO: 2406927 - RNA, 19 nt, Artificial Sequence
  Description of Artificial Sequence: Synthetic oligonucleotide
gcugcuccauugcagacgc

SEQ ID NO: 2406928 - RNA, 19 nt, Artificial Sequence
  Description of Artificial Sequence: Synthetic oligonucleotide
acgucggaauuuuccauau

SEQ ID NO: 2406929 - RNA, 19 nt, Artificial Sequence
  Description of Artificial Sequence: Synthetic oligonucleotide
guccaaauccuuuucugcu

SEQ ID NO: 2406930 - RNA, 19 nt, Artificial Sequence
  Description of Artificial Sequence: Synthetic oligonucleotide
gcagagugggcacaaacuc

SEQ ID NO: 2406931 - RNA, 19 nt, Artificial Sequence
  Description of Artificial Sequence: Synthetic oligonucleotide
aaguuucauccuguuuagu

SEQ ID NO: 2406932 - RNA, 19 nt, Artificial Sequence
  Description of Artificial Sequence: Synthetic oligonucleotide
cacaugcugaauaacugua

SEQ ID NO: 2406933 - RNA, 19 nt, Artificial Sequence
  Description of Artificial Sequence: Synthetic oligonucleotide
caaacucugcuauuuaaau

SEQ ID NO: 2406934 - RNA, 19 nt, Artificial Sequence
  Description of Artificial Sequence: Synthetic oligonucleotide
cuugacguuuguuuuauuu

SEQ ID NO: 2406935 - RNA, 19 nt, Artificial Sequence
  Description of Artificial Sequence: Synthetic oligonucleotide
cucguuccaaugccagagc

SEQ ID NO: 2406936 - RNA, 19 nt, Artificial Sequence
  Description of Artificial Sequence: Synthetic oligonucleotide
gacuuguauucuaagaguu

SEQ ID NO: 2406937 - RNA, 19 nt, Artificial Sequence
  Description of Artificial Sequence: Synthetic oligonucleotide
gcacaaacucguuccaaug

SEQ ID NO: 2406938 - RNA, 19 nt, Artificial Sequence
  Description of Artificial Sequence: Synthetic oligonucleotide
auccaucuuuuccauguua

SEQ ID NO: 2406939 - RNA, 19 nt, Artificial Sequence
  Description of Artificial Sequence: Synthetic oligonucleotide
cauauuguccaaauccuuu

SEQ ID NO: 2406940 - RNA, 19 nt, Artificial Sequence
  Description of Artificial Sequence: Synthetic oligonucleotide
ggcagaauccucugcccag

SEQ ID NO: 2406941 - RNA, 19 nt, Artificial Sequence
  Description of Artificial Sequence: Synthetic oligonucleotide
cuugagggcagaauccucu

SEQ ID NO: 2406942 - RNA, 19 nt, Artificial Sequence
  Description of Artificial Sequence: Synthetic oligonucleotide
uugcaucaaucauggacuu

SEQ ID NO: 2406943 - RNA, 19 nt, Artificial Sequence
  Description of Artificial Sequence: Synthetic oligonucleotide
uaccggaacagccgagcau

SEQ ID NO: 2406944 - RNA, 19 nt, Artificial Sequence
  Description of Artificial Sequence: Synthetic oligonucleotide
guaagugcagccgaaaguu

SEQ ID NO: 2406945 - RNA, 19 nt, Artificial Sequence
  Description of Artificial Sequence: Synthetic oligonucleotide
gaagacuccuccugugacu

SEQ ID NO: 2406946 - RNA, 19 nt, Artificial Sequence
  Description of Artificial Sequence: Synthetic oligonucleotide
aauuuccuugagggcagaa

SEQ ID NO: 2406947 - RNA, 19 nt, Artificial Sequence
  Description of Artificial Sequence: Synthetic oligonucleotide
ucauggucuuuaucacguc

SEQ ID NO: 2406948 - RNA, 19 nt, Artificial Sequence
  Description of Artificial Sequence: Synthetic oligonucleotide
caugcugaauaacuguagu

SEQ ID NO: 2406949 - RNA, 19 nt, Artificial Sequence
  Description of Artificial Sequence: Synthetic oligonucleotide
cuucauuugcaucaaucau

SEQ ID NO: 2406950 - RNA, 19 nt, Artificial Sequence
  Description of Artificial Sequence: Synthetic oligonucleotide
agccgagcauuuauucccg

SEQ ID NO: 2406951 - RNA, 19 nt, Artificial Sequence
  Description of Artificial Sequence: Synthetic oligonucleotide
ugcagccgaaaguuucauc

SEQ ID NO: 2406952 - RNA, 19 nt, Artificial Sequence
  Description of Artificial Sequence: Synthetic oligonucleotide
ugcggcucaccccgcaccu

SEQ ID NO: 2406953 - RNA, 19 nt, Artificial Sequence
  Description of Artificial Sequence: Synthetic oligonucleotide
gacguuuguuuuauuugaa

SEQ ID NO: 2406954 - RNA, 19 nt, Artificial Sequence
  Description of Artificial Sequence: Synthetic oligonucleotide
cauccuguuuagugcaaga

SEQ ID NO: 2406955 - RNA, 19 nt, Artificial Sequence
  Description of Artificial Sequence: Synthetic oligonucleotide
uuauucccgccacgaaauu

SEQ ID NO: 2406956 - RNA, 19 nt, Artificial Sequence
  Description of Artificial Sequence: Synthetic oligonucleotide
agugcagccgaaaguuuca

SEQ ID NO: 2406957 - RNA, 19 nt, Artificial Sequence
  Description of Artificial Sequence: Synthetic oligonucleotide
ccaaauccuuuucugcuug

SEQ ID NO: 2406958 - RNA, 19 nt, Artificial Sequence
  Description of Artificial Sequence: Synthetic oligonucleotide
accggaacagccgagcauu

SEQ ID NO: 2406959 - RNA, 19 nt, Artificial Sequence
  Description of Artificial Sequence: Synthetic oligonucleotide
cucaccccgcaccucuccg

SEQ ID NO: 2406960 - RNA, 19 nt, Artificial Sequence
  Description of Artificial Sequence: Synthetic oligonucleotide
cuaagaguugcuguuuugu

SEQ ID NO: 2406961 - RNA, 19 nt, Artificial Sequence
  Description of Artificial Sequence: Synthetic oligonucleotide
aauccucugcccaguuggu

SEQ ID NO: 2406962 - RNA, 19 nt, Artificial Sequence
  Description of Artificial Sequence: Synthetic oligonucleotide
gugcaagaguuuucauuuc

SEQ ID NO: 2406963 - RNA, 19 nt, Artificial Sequence
  Description of Artificial Sequence: Synthetic oligonucleotide
uucccaaaauaaggcccug

SEQ ID NO: 2406964 - RNA, 19 nt, Artificial Sequence
  Description of Artificial Sequence: Synthetic oligonucleotide
ggaacacaugcugaauaac

SEQ ID NO: 2406965 - RNA, 19 nt, Artificial Sequence
  Description of Artificial Sequence: Synthetic oligonucleotide
cauugcagacgccauagau

SEQ ID NO: 2406966 - RNA, 19 nt, Artificial Sequence
  Description of Artificial Sequence: Synthetic oligonucleotide
gaugcgauccucgaugcuu

SEQ ID NO: 2406967 - RNA, 19 nt, Artificial Sequence
  Description of Artificial Sequence: Synthetic oligonucleotide
gcaugaucuguucaggagu

SEQ ID NO: 2406968 - RNA, 19 nt, Artificial Sequence
  Description of Artificial Sequence: Synthetic oligonucleotide
gcaucaaucauggacuugu

SEQ ID NO: 2406969 - RNA, 19 nt, Artificial Sequence
  Description of Artificial Sequence: Synthetic oligonucleotide
cugcggcucaccccgcacc

SEQ ID NO: 2406970 - RNA, 19 nt, Artificial Sequence
  Description of Artificial Sequence: Synthetic oligonucleotide
uugcucuucucaguuugua

SEQ ID NO: 2406971 - RNA, 19 nt, Artificial Sequence
  Description of Artificial Sequence: Synthetic oligonucleotide
cauuuauucccgccacgaa

SEQ ID NO: 2406972 - RNA, 19 nt, Artificial Sequence
  Description of Artificial Sequence: Synthetic oligonucleotide
cucagccccggccgcaagc

SEQ ID NO: 2406973 - RNA, 19 nt, Artificial Sequence
  Description of Artificial Sequence: Synthetic oligonucleotide
gcauacuucuugacguuug

SEQ ID NO: 2406974 - RNA, 19 nt, Artificial Sequence
  Description of Artificial Sequence: Synthetic oligonucleotide
gcauuuauucccgccacga

SEQ ID NO: 2406975 - RNA, 19 nt, Artificial Sequence
  Description of Artificial Sequence: Synthetic oligonucleotide
ccgagcauuuauucccgcc

SEQ ID NO: 2406976 - RNA, 19 nt, Artificial Sequence
  Description of Artificial Sequence: Synthetic oligonucleotide
cuucaauuuuaacuucaau

SEQ ID NO: 2406977 - RNA, 19 nt, Artificial Sequence
  Description of Artificial Sequence: Synthetic oligonucleotide
ucagccccggccgcaagcu

SEQ ID NO: 2406978 - RNA, 19 nt, Artificial Sequence
  Description of Artificial Sequence: Synthetic oligonucleotide
cuaccggaacagccgagca

SEQ ID NO: 2406979 - RNA, 19 nt, Artificial Sequence
  Description of Artificial Sequence: Synthetic oligonucleotide
caucagugaguacacuacu

SEQ ID NO: 2406980 - RNA, 19 nt, Artificial Sequence
  Description of Artificial Sequence: Synthetic oligonucleotide
gcuguuuugucugugcucu

SEQ ID NO: 2406981 - RNA, 19 nt, Artificial Sequence
  Description of Artificial Sequence: Synthetic oligonucleotide
auacuucuugacguuuguu

SEQ ID NO: 2406982 - RNA, 19 nt, Artificial Sequence
  Description of Artificial Sequence: Synthetic oligonucleotide
caguugguuuuacuuccca

SEQ ID NO: 2406983 - RNA, 19 nt, Artificial Sequence
  Description of Artificial Sequence: Synthetic oligonucleotide
agccccggccgcaagcuuc

SEQ ID NO: 2406984 - RNA, 19 nt, Artificial Sequence
  Description of Artificial Sequence: Synthetic oligonucleotide
ucugcccaguugguuuuac

SEQ ID NO: 2406985 - RNA, 19 nt, Artificial Sequence
  Description of Artificial Sequence: Synthetic oligonucleotide
ccuguuuagugcaagaguu

SEQ ID NO: 2406986 - RNA, 19 nt, Artificial Sequence
  Description of Artificial Sequence: Synthetic oligonucleotide
ucuugacguuuguuuuauu

SEQ ID NO: 2406987 - RNA, 19 nt, Artificial Sequence
  Description of Artificial Sequence: Synthetic oligonucleotide
cgauccucgaugcuuuccc

SEQ ID NO: 2406988 - RNA, 19 nt, Artificial Sequence
  Description of Artificial Sequence: Synthetic oligonucleotide
uacucucagcauccaucuu

SEQ ID NO: 2406989 - RNA, 19 nt, Artificial Sequence
  Description of Artificial Sequence: Synthetic oligonucleotide
ccggccgcaagcuucuccc

SEQ ID NO: 2406990 - RNA, 19 nt, Artificial Sequence
  Description of Artificial Sequence: Synthetic oligonucleotide
cguuuguuuuauuugaagu

SEQ ID NO: 2406991 - RNA, 19 nt, Artificial Sequence
  Description of Artificial Sequence: Synthetic oligonucleotide
aucaacuuauguagcucua

SEQ ID NO: 2406992 - RNA, 19 nt, Artificial Sequence
  Description of Artificial Sequence: Synthetic oligonucleotide
cucuucucaguuuguauuu

SEQ ID NO: 2406993 - RNA, 19 nt, Artificial Sequence
  Description of Artificial Sequence: Synthetic oligonucleotide
caacuuauguagcucuaau

SEQ ID NO: 2406994 - RNA, 19 nt, Artificial Sequence
  Description of Artificial Sequence: Synthetic oligonucleotide
ggaacagccgagcauuuau

SEQ ID NO: 2406995 - RNA, 19 nt, Artificial Sequence
  Description of Artificial Sequence: Synthetic oligonucleotide
cauacuucuugacguuugu

SEQ ID NO: 2406996 - RNA, 19 nt, Artificial Sequence
  Description of Artificial Sequence: Synthetic oligonucleotide
ccaggucuucaauuuuaac

SEQ ID NO: 2406997 - RNA, 19 nt, Artificial Sequence
  Description of Artificial Sequence: Synthetic oligonucleotide
cccaaaauaaggcccugga

SEQ ID NO: 2406998 - RNA, 19 nt, Artificial Sequence
  Description of Artificial Sequence: Synthetic oligonucleotide
cuguuuugucugugcucuc

SEQ ID NO: 2406999 - RNA, 19 nt, Artificial Sequence
  Description of Artificial Sequence: Synthetic oligonucleotide
gggcagaauccucugccca

SEQ ID NO: 2407000 - RNA, 19 nt, Artificial Sequence
  Description of Artificial Sequence: Synthetic oligonucleotide
ugcgauccucgaugcuuuc

SEQ ID NO: 2407001 - RNA, 19 nt, Artificial Sequence
  Description of Artificial Sequence: Synthetic oligonucleotide
cauuugcaucaaucaugga

SEQ ID NO: 2407002 - RNA, 19 nt, Artificial Sequence
  Description of Artificial Sequence: Synthetic oligonucleotide
gcuauuuaaauggcagagu

SEQ ID NO: 2407003 - RNA, 19 nt, Artificial Sequence
  Description of Artificial Sequence: Synthetic oligonucleotide
gcucuucucaguuuguauu

SEQ ID NO: 2407004 - RNA, 19 nt, Artificial Sequence
  Description of Artificial Sequence: Synthetic oligonucleotide
caucaaucauggacuugua

SEQ ID NO: 2407005 - RNA, 19 nt, Artificial Sequence
  Description of Artificial Sequence: Synthetic oligonucleotide
augcgauccucgaugcuuu

SEQ ID NO: 2407006 - RNA, 19 nt, Artificial Sequence
  Description of Artificial Sequence: Synthetic oligonucleotide
gcaggauucuuauuagauu

SEQ ID NO: 2407007 - RNA, 19 nt, Artificial Sequence
  Description of Artificial Sequence: Synthetic oligonucleotide
cuguuuagugcaagaguuu

SEQ ID NO: 2407008 - RNA, 19 nt, Artificial Sequence
  Description of Artificial Sequence: Synthetic oligonucleotide
cgagcauuuauucccgcca

SEQ ID NO: 2407009 - RNA, 19 nt, Artificial Sequence
  Description of Artificial Sequence: Synthetic oligonucleotide
acacuacucucagcaucca

SEQ ID NO: 2407010 - RNA, 19 nt, Artificial Sequence
  Description of Artificial Sequence: Synthetic oligonucleotide
ccugugacuucauuaucaa

SEQ ID NO: 2407011 - RNA, 19 nt, Artificial Sequence
  Description of Artificial Sequence: Synthetic oligonucleotide
cggaugcgauccucgaugc

SEQ ID NO: 2407012 - RNA, 19 nt, Artificial Sequence
  Description of Artificial Sequence: Synthetic oligonucleotide
cccggcugcuccauugcag

SEQ ID NO: 2407013 - RNA, 19 nt, Artificial Sequence
  Description of Artificial Sequence: Synthetic oligonucleotide
ccuugagggcagaauccuc

SEQ ID NO: 2407014 - RNA, 19 nt, Artificial Sequence
  Description of Artificial Sequence: Synthetic oligonucleotide
accccgcaccucuccgcag

SEQ ID NO: 2407015 - RNA, 19 nt, Artificial Sequence
  Description of Artificial Sequence: Synthetic oligonucleotide
cagccgaaaguuucauccu

SEQ ID NO: 2407016 - RNA, 19 nt, Artificial Sequence
  Description of Artificial Sequence: Synthetic oligonucleotide
ggcagagugggcacaaacu

SEQ ID NO: 2407017 - RNA, 19 nt, Artificial Sequence
  Description of Artificial Sequence: Synthetic oligonucleotide
cuccauugcagacgccaua

SEQ ID NO: 2407018 - RNA, 19 nt, Artificial Sequence
  Description of Artificial Sequence: Synthetic oligonucleotide
cuuuaucacgucggaauuu

SEQ ID NO: 2407019 - RNA, 19 nt, Artificial Sequence
  Description of Artificial Sequence: Synthetic oligonucleotide
cugcuccauugcagacgcc

SEQ ID NO: 2407020 - RNA, 19 nt, Artificial Sequence
  Description of Artificial Sequence: Synthetic oligonucleotide
gccgagcauuuauucccgc

SEQ ID NO: 2407021 - RNA, 19 nt, Artificial Sequence
  Description of Artificial Sequence: Synthetic oligonucleotide
gaacagccgagcauuuauu

SEQ ID NO: 2407022 - RNA, 19 nt, Artificial Sequence
  Description of Artificial Sequence: Synthetic oligonucleotide
gcagcaggcggaugcgauc

SEQ ID NO: 2407023 - RNA, 19 nt, Artificial Sequence
  Description of Artificial Sequence: Synthetic oligonucleotide
gcgauccucgaugcuuucc

SEQ ID NO: 2407024 - RNA, 19 nt, Artificial Sequence
  Description of Artificial Sequence: Synthetic oligonucleotide
gcucaccccgcaccucucc

SEQ ID NO: 2407025 - RNA, 19 nt, Artificial Sequence
  Description of Artificial Sequence: Synthetic oligonucleotide
caccccgcaccucuccgca

SEQ ID NO: 2407026 - RNA, 19 nt, Artificial Sequence
  Description of Artificial Sequence: Synthetic oligonucleotide
ccuccugugacuucauuau

SEQ ID NO: 2407027 - RNA, 19 nt, Artificial Sequence
  Description of Artificial Sequence: Synthetic oligonucleotide
caauuuccuugagggcaga

SEQ ID NO: 2407028 - RNA, 19 nt, Artificial Sequence
  Description of Artificial Sequence: Synthetic oligonucleotide
ccgaagacuccuccuguga

SEQ ID NO: 2407029 - RNA, 19 nt, Artificial Sequence
  Description of Artificial Sequence: Synthetic oligonucleotide
ccggcugcuccauugcaga

SEQ ID NO: 2407030 - RNA, 19 nt, Artificial Sequence
  Description of Artificial Sequence: Synthetic oligonucleotide
gcuguagcacaauuuccuu

SEQ ID NO: 2407031 - RNA, 19 nt, Artificial Sequence
  Description of Artificial Sequence: Synthetic oligonucleotide
gcucuaauauguguuucau

SEQ ID NO: 2407032 - RNA, 19 nt, Artificial Sequence
  Description of Artificial Sequence: Synthetic oligonucleotide
cccuggaacacaugcugaa

SEQ ID NO: 2407033 - RNA, 19 nt, Artificial Sequence
  Description of Artificial Sequence: Synthetic oligonucleotide
ccucuuaauuccgaagacu

SEQ ID NO: 2407034 - RNA, 19 nt, Artificial Sequence
  Description of Artificial Sequence: Synthetic oligonucleotide
gcccuggaacacaugcuga

SEQ ID NO: 2407035 - RNA, 19 nt, Artificial Sequence
  Description of Artificial Sequence: Synthetic oligonucleotide
caccucuccgcagcccuca

SEQ ID NO: 2407036 - RNA, 19 nt, Artificial Sequence
  Description of Artificial Sequence: Synthetic oligonucleotide
cccggccgcaagcuucucc

SEQ ID NO: 2407037 - RNA, 19 nt, Artificial Sequence
  Description of Artificial Sequence: Synthetic oligonucleotide
gccgaaaguuucauccugu

SEQ ID NO: 2407038 - RNA, 19 nt, Artificial Sequence
  Description of Artificial Sequence: Synthetic oligonucleotide
cacuacucucagcauccau

SEQ ID NO: 2407039 - RNA, 19 nt, Artificial Sequence
  Description of Artificial Sequence: Synthetic oligonucleotide
cugcccaguugguuuuacu

SEQ ID NO: 2407040 - RNA, 19 nt, Artificial Sequence
  Description of Artificial Sequence: Synthetic oligonucleotide
cauccaucuuuuccauguu

SEQ ID NO: 2407041 - RNA, 19 nt, Artificial Sequence
  Description of Artificial Sequence: Synthetic oligonucleotide
cuccagcuguagcacaauu

SEQ ID NO: 2407042 - RNA, 19 nt, Artificial Sequence
  Description of Artificial Sequence: Synthetic oligonucleotide
gggcacaaacucguuccaa

SEQ ID NO: 2407043 - RNA, 19 nt, Artificial Sequence
  Description of Artificial Sequence: Synthetic oligonucleotide
gccauagauuugauuucua

SEQ ID NO: 2407044 - RNA, 19 nt, Artificial Sequence
  Description of Artificial Sequence: Synthetic oligonucleotide
cccgcaccucuccgcagcc

SEQ ID NO: 2407045 - RNA, 19 nt, Artificial Sequence
  Description of Artificial Sequence: Synthetic oligonucleotide
ccugcggcucaccccgcac

SEQ ID NO: 2407046 - RNA, 19 nt, Artificial Sequence
  Description of Artificial Sequence: Synthetic oligonucleotide
cagacgccauagauuugau

SEQ ID NO: 2407047 - RNA, 19 nt, Artificial Sequence
  Description of Artificial Sequence: Synthetic oligonucleotide
ccauugcagacgccauaga

SEQ ID NO: 2407048 - RNA, 19 nt, Artificial Sequence
  Description of Artificial Sequence: Synthetic oligonucleotide
cagaauccucugcccaguu

SEQ ID NO: 2407049 - RNA, 19 nt, Artificial Sequence
  Description of Artificial Sequence: Synthetic oligonucleotide
ggcggaugcgauccucgau

SEQ ID NO: 2407050 - RNA, 19 nt, Artificial Sequence
  Description of Artificial Sequence: Synthetic oligonucleotide
gugcagccgaaaguuucau

SEQ ID NO: 2407051 - RNA, 19 nt, Artificial Sequence
  Description of Artificial Sequence: Synthetic oligonucleotide
cggcugcuccauugcagac

SEQ ID NO: 2407052 - RNA, 19 nt, Artificial Sequence
  Description of Artificial Sequence: Synthetic oligonucleotide
ccaaugccagagcaggauu

SEQ ID NO: 2407053 - RNA, 19 nt, Artificial Sequence
  Description of Artificial Sequence: Synthetic oligonucleotide
cgaaaguuucauccuguuu

SEQ ID NO: 2407054 - RNA, 19 nt, Artificial Sequence
  Description of Artificial Sequence: Synthetic oligonucleotide
cgccauagauuugauuucu

SEQ ID NO: 2407055 - RNA, 19 nt, Artificial Sequence
  Description of Artificial Sequence: Synthetic oligonucleotide
cggccgcaagcuucucccc

SEQ ID NO: 2407056 - RNA, 19 nt, Artificial Sequence
  Description of Artificial Sequence: Synthetic oligonucleotide
ccgaaaguuucauccuguu

SEQ ID NO: 2407057 - RNA, 19 nt, Artificial Sequence
  Description of Artificial Sequence: Synthetic oligonucleotide
cucugcccaguugguuuua

SEQ ID NO: 2407058 - RNA, 19 nt, Artificial Sequence
  Description of Artificial Sequence: Synthetic oligonucleotide
ccucagccccggccgcaag

SEQ ID NO: 2407059 - RNA, 19 nt, Artificial Sequence
  Description of Artificial Sequence: Synthetic oligonucleotide
gccugcggcucaccccgca

SEQ ID NO: 2407060 - RNA, 19 nt, Artificial Sequence
  Description of Artificial Sequence: Synthetic oligonucleotide
ccuggaacacaugcugaau

SEQ ID NO: 2407061 - RNA, 19 nt, Artificial Sequence
  Description of Artificial Sequence: Synthetic oligonucleotide
ggcucaccccgcaccucuc

SEQ ID NO: 2407062 - RNA, 19 nt, Artificial Sequence
  Description of Artificial Sequence: Synthetic oligonucleotide
gcaccucuccgcagcccuc

SEQ ID NO: 2407063 - RNA, 19 nt, Artificial Sequence
  Description of Artificial Sequence: Synthetic oligonucleotide
ccgcaccucuccgcagccc

SEQ ID NO: 2407064 - RNA, 19 nt, Artificial Sequence
  Description of Artificial Sequence: Synthetic oligonucleotide
ccccggcugcuccauugca

SEQ ID NO: 2407065 - RNA, 19 nt, Artificial Sequence
  Description of Artificial Sequence: Synthetic oligonucleotide
cgcaccucuccgcagcccu

SEQ ID NO: 2407066 - RNA, 19 nt, Artificial Sequence
  Description of Artificial Sequence: Synthetic oligonucleotide
ccgcagcccucagccccgg

SEQ ID NO: 2407067 - RNA, 19 nt, Artificial Sequence
  Description of Artificial Sequence: Synthetic oligonucleotide
cggcucaccccgcaccucu

SEQ ID NO: 2407068 - RNA, 19 nt, Artificial Sequence
  Description of Artificial Sequence: Synthetic oligonucleotide
gccccggccgcaagcuucu

SEQ ID NO: 2407069 - RNA, 19 nt, Artificial Sequence
  Description of Artificial Sequence: Synthetic oligonucleotide
cggaacagccgagcauuua

SEQ ID NO: 2407070 - RNA, 19 nt, Artificial Sequence
  Description of Artificial Sequence: Synthetic oligonucleotide
ccggaacagccgagcauuu

SEQ ID NO: 2407071 - RNA, 19 nt, Artificial Sequence
  Description of Artificial Sequence: Synthetic oligonucleotide
cagccccggccgcaagcuu

SEQ ID NO: 2407072 - RNA, 19 nt, Artificial Sequence
  Description of Artificial Sequence: Synthetic oligonucleotide
cgucggaauuuuccauauu

SEQ ID NO: 2407073 - RNA, 19 nt, Artificial Sequence
  Description of Artificial Sequence: Synthetic oligonucleotide
ccccggccgcaagcuucuc

SEQ ID NO: 2407074 - RNA, 19 nt, Artificial Sequence
  Description of Artificial Sequence: Synthetic oligonucleotide
uaaaguaaggcuuucugag

SEQ ID NO: 2407075 - RNA, 19 nt, Artificial Sequence
  Description of Artificial Sequence: Synthetic oligonucleotide
aaauuuagaaaacucuccu

SEQ ID NO: 2407076 - RNA, 19 nt, Artificial Sequence
  Description of Artificial Sequence: Synthetic oligonucleotide
auucaaguaauuuuaacca

SEQ ID NO: 2407077 - RNA, 19 nt, Artificial Sequence
  Description of Artificial Sequence: Synthetic oligonucleotide
uuuuaaguggccaucauuc

SEQ ID NO: 2407078 - RNA, 19 nt, Artificial Sequence
  Description of Artificial Sequence: Synthetic oligonucleotide
aaguaugccaucugucugc

SEQ ID NO: 2407079 - RNA, 19 nt, Artificial Sequence
  Description of Artificial Sequence: Synthetic oligonucleotide
ugaaccuugaaugagcccg

SEQ ID NO: 2407080 - RNA, 19 nt, Artificial Sequence
  Description of Artificial Sequence: Synthetic oligonucleotide
aaugagacuaugcuaggag

SEQ ID NO: 2407081 - RNA, 19 nt, Artificial Sequence
  Description of Artificial Sequence: Synthetic oligonucleotide
gacaaugcaauucauuugc

SEQ ID NO: 2407082 - RNA, 19 nt, Artificial Sequence
  Description of Artificial Sequence: Synthetic oligonucleotide
aaaaguaugccaucugucu

SEQ ID NO: 2407083 - RNA, 19 nt, Artificial Sequence
  Description of Artificial Sequence: Synthetic oligonucleotide
uacacaagaaagcccaugg

SEQ ID NO: 2407084 - RNA, 19 nt, Artificial Sequence
  Description of Artificial Sequence: Synthetic oligonucleotide
uuuaauauggaucuuucuu

SEQ ID NO: 2407085 - RNA, 19 nt, Artificial Sequence
  Description of Artificial Sequence: Synthetic oligonucleotide
uuucugagaacacacaccu

SEQ ID NO: 2407086 - RNA, 19 nt, Artificial Sequence
  Description of Artificial Sequence: Synthetic oligonucleotide
caaauuuagaaaacucucc

SEQ ID NO: 2407087 - RNA, 19 nt, Artificial Sequence
  Description of Artificial Sequence: Synthetic oligonucleotide
aaacugucuaggcugcuac

SEQ ID NO: 2407088 - RNA, 19 nt, Artificial Sequence
  Description of Artificial Sequence: Synthetic oligonucleotide
aggacaaguuccuugggcc

SEQ ID NO: 2407089 - RNA, 19 nt, Artificial Sequence
  Description of Artificial Sequence: Synthetic oligonucleotide
ucaaguaauuuuaaccaca

SEQ ID NO: 2407090 - RNA, 19 nt, Artificial Sequence
  Description of Artificial Sequence: Synthetic oligonucleotide
uggcuuacauuuuaagugg

SEQ ID NO: 2407091 - RNA, 19 nt, Artificial Sequence
  Description of Artificial Sequence: Synthetic oligonucleotide
aaauaucuuucucuuccuc

SEQ ID NO: 2407092 - RNA, 19 nt, Artificial Sequence
  Description of Artificial Sequence: Synthetic oligonucleotide
uccuguuuaauauggaucu

SEQ ID NO: 2407093 - RNA, 19 nt, Artificial Sequence
  Description of Artificial Sequence: Synthetic oligonucleotide
uuaaaguaaggcuuucuga

SEQ ID NO: 2407094 - RNA, 19 nt, Artificial Sequence
  Description of Artificial Sequence: Synthetic oligonucleotide
guggcuuacauuuuaagug

SEQ ID NO: 2407095 - RNA, 19 nt, Artificial Sequence
  Description of Artificial Sequence: Synthetic oligonucleotide
aguucaguggcuuuuggag

SEQ ID NO: 2407096 - RNA, 19 nt, Artificial Sequence
  Description of Artificial Sequence: Synthetic oligonucleotide
auguaaacugucuaggcug

SEQ ID NO: 2407097 - RNA, 19 nt, Artificial Sequence
  Description of Artificial Sequence: Synthetic oligonucleotide
aauucauuugccaaugaga

SEQ ID NO: 2407098 - RNA, 19 nt, Artificial Sequence
  Description of Artificial Sequence: Synthetic oligonucleotide
uaaguggccaucauucaag

SEQ ID NO: 2407099 - RNA, 19 nt, Artificial Sequence
  Description of Artificial Sequence: Synthetic oligonucleotide
ucuuucugcauacaaauuu

SEQ ID NO: 2407100 - RNA, 19 nt, Artificial Sequence
  Description of Artificial Sequence: Synthetic oligonucleotide
ugggcagucauguaaacug

SEQ ID NO: 2407101 - RNA, 19 nt, Artificial Sequence
  Description of Artificial Sequence: Synthetic oligonucleotide
uaugccaucugucugcaca

SEQ ID NO: 2407102 - RNA, 19 nt, Artificial Sequence
  Description of Artificial Sequence: Synthetic oligonucleotide
uaauuuuaaccacaucagu

SEQ ID NO: 2407103 - RNA, 19 nt, Artificial Sequence
  Description of Artificial Sequence: Synthetic oligonucleotide
uuaauauggaucuuucuuu

SEQ ID NO: 2407104 - RNA, 19 nt, Artificial Sequence
  Description of Artificial Sequence: Synthetic oligonucleotide
uuugccaaugagacuaugc

SEQ ID NO: 2407105 - RNA, 19 nt, Artificial Sequence
  Description of Artificial Sequence: Synthetic oligonucleotide
guaauuuuaaccacaucag

SEQ ID NO: 2407106 - RNA, 19 nt, Artificial Sequence
  Description of Artificial Sequence: Synthetic oligonucleotide
ucauuugccaaugagacua

SEQ ID NO: 2407107 - RNA, 19 nt, Artificial Sequence
  Description of Artificial Sequence: Synthetic oligonucleotide
agucauguaaacugucuag

SEQ ID NO: 2407108 - RNA, 19 nt, Artificial Sequence
  Description of Artificial Sequence: Synthetic oligonucleotide
augagacuaugcuaggagg

SEQ ID NO: 2407109 - RNA, 19 nt, Artificial Sequence
  Description of Artificial Sequence: Synthetic oligonucleotide
ugugaaccuugaaugagcc

SEQ ID NO: 2407110 - RNA, 19 nt, Artificial Sequence
  Description of Artificial Sequence: Synthetic oligonucleotide
aaguaaggcuuucugagaa

SEQ ID NO: 2407111 - RNA, 19 nt, Artificial Sequence
  Description of Artificial Sequence: Synthetic oligonucleotide
uagaaaacucuccugacua

SEQ ID NO: 2407112 - RNA, 19 nt, Artificial Sequence
  Description of Artificial Sequence: Synthetic oligonucleotide
uuuuaaccacaucagugga

SEQ ID NO: 2407113 - RNA, 19 nt, Artificial Sequence
  Description of Artificial Sequence: Synthetic oligonucleotide
cuaucuggaaauuggggag

SEQ ID NO: 2407114 - RNA, 19 nt, Artificial Sequence
  Description of Artificial Sequence: Synthetic oligonucleotide
uguuuaauauggaucuuuc

SEQ ID NO: 2407115 - RNA, 19 nt, Artificial Sequence
  Description of Artificial Sequence: Synthetic oligonucleotide
ucauguaaacugucuaggc

SEQ ID NO: 2407116 - RNA, 19 nt, Artificial Sequence
  Description of Artificial Sequence: Synthetic oligonucleotide
uucaaguaauuuuaaccac

SEQ ID NO: 2407117 - RNA, 19 nt, Artificial Sequence
  Description of Artificial Sequence: Synthetic oligonucleotide
uguaaacugucuaggcugc

SEQ ID NO: 2407118 - RNA, 19 nt, Artificial Sequence
  Description of Artificial Sequence: Synthetic oligonucleotide
aacugucuaggcugcuacc

SEQ ID NO: 2407119 - RNA, 19 nt, Artificial Sequence
  Description of Artificial Sequence: Synthetic oligonucleotide
ugagacuaugcuaggaggu

SEQ ID NO: 2407120 - RNA, 19 nt, Artificial Sequence
  Description of Artificial Sequence: Synthetic oligonucleotide
caugaguaaggcaagcgug

SEQ ID NO: 2407121 - RNA, 19 nt, Artificial Sequence
  Description of Artificial Sequence: Synthetic oligonucleotide
uugccaaugagacuaugcu

SEQ ID NO: 2407122 - RNA, 19 nt, Artificial Sequence
  Description of Artificial Sequence: Synthetic oligonucleotide
ugacaaugcaauucauuug

SEQ ID NO: 2407123 - RNA, 19 nt, Artificial Sequence
  Description of Artificial Sequence: Synthetic oligonucleotide
uugaaugagcccgagaaaa

SEQ ID NO: 2407124 - RNA, 19 nt, Artificial Sequence
  Description of Artificial Sequence: Synthetic oligonucleotide
agcaucgugggcugcaugg

SEQ ID NO: 2407125 - RNA, 19 nt, Artificial Sequence
  Description of Artificial Sequence: Synthetic oligonucleotide
agaacacacaccugcaugu

SEQ ID NO: 2407126 - RNA, 19 nt, Artificial Sequence
  Description of Artificial Sequence: Synthetic oligonucleotide
acugcugugaaccuugaau

SEQ ID NO: 2407127 - RNA, 19 nt, Artificial Sequence
  Description of Artificial Sequence: Synthetic oligonucleotide
uuuuguuggagcugccgcc

SEQ ID NO: 2407128 - RNA, 19 nt, Artificial Sequence
  Description of Artificial Sequence: Synthetic oligonucleotide
caagaaagcccaugggugc

SEQ ID NO: 2407129 - RNA, 19 nt, Artificial Sequence
  Description of Artificial Sequence: Synthetic oligonucleotide
uucaguggcuuuuggagug

SEQ ID NO: 2407130 - RNA, 19 nt, Artificial Sequence
  Description of Artificial Sequence: Synthetic oligonucleotide
ugugggcaggacaaguucc

SEQ ID NO: 2407131 - RNA, 19 nt, Artificial Sequence
  Description of Artificial Sequence: Synthetic oligonucleotide
acugucuaggcugcuaccc

SEQ ID NO: 2407132 - RNA, 19 nt, Artificial Sequence
  Description of Artificial Sequence: Synthetic oligonucleotide
gcugggacagcacacaugg

SEQ ID NO: 2407133 - RNA, 19 nt, Artificial Sequence
  Description of Artificial Sequence: Synthetic oligonucleotide
cuaccuaggcuacaggagc

SEQ ID NO: 2407134 - RNA, 19 nt, Artificial Sequence
  Description of Artificial Sequence: Synthetic oligonucleotide
caauucauuugccaaugag

SEQ ID NO: 2407135 - RNA, 19 nt, Artificial Sequence
  Description of Artificial Sequence: Synthetic oligonucleotide
uuaaguggccaucauucaa

SEQ ID NO: 2407136 - RNA, 19 nt, Artificial Sequence
  Description of Artificial Sequence: Synthetic oligonucleotide
gucauguaaacugucuagg

SEQ ID NO: 2407137 - RNA, 19 nt, Artificial Sequence
  Description of Artificial Sequence: Synthetic oligonucleotide
augggugcugaccuucacc

SEQ ID NO: 2407138 - RNA, 19 nt, Artificial Sequence
  Description of Artificial Sequence: Synthetic oligonucleotide
uuuaaguggccaucauuca

SEQ ID NO: 2407139 - RNA, 19 nt, Artificial Sequence
  Description of Artificial Sequence: Synthetic oligonucleotide
gaaaccuaucuggaaauug

SEQ ID NO: 2407140 - RNA, 19 nt, Artificial Sequence
  Description of Artificial Sequence: Synthetic oligonucleotide
uacaggagcuccaucaguc

SEQ ID NO: 2407141 - RNA, 19 nt, Artificial Sequence
  Description of Artificial Sequence: Synthetic oligonucleotide
gucagguaccugcagagag

SEQ ID NO: 2407142 - RNA, 19 nt, Artificial Sequence
  Description of Artificial Sequence: Synthetic oligonucleotide
aaccuaucuggaaauuggg

SEQ ID NO: 2407143 - RNA, 19 nt, Artificial Sequence
  Description of Artificial Sequence: Synthetic oligonucleotide
guucugacugcugugaacc

SEQ ID NO: 2407144 - RNA, 19 nt, Artificial Sequence
  Description of Artificial Sequence: Synthetic oligonucleotide
auauggaucuuucuuuuau

SEQ ID NO: 2407145 - RNA, 19 nt, Artificial Sequence
  Description of Artificial Sequence: Synthetic oligonucleotide
uuaaccacaucaguggaaa

SEQ ID NO: 2407146 - RNA, 19 nt, Artificial Sequence
  Description of Artificial Sequence: Synthetic oligonucleotide
cuguacacaagaaagccca

SEQ ID NO: 2407147 - RNA, 19 nt, Artificial Sequence
  Description of Artificial Sequence: Synthetic oligonucleotide
aacuccugucaguucagug

SEQ ID NO: 2407148 - RNA, 19 nt, Artificial Sequence
  Description of Artificial Sequence: Synthetic oligonucleotide
acaagaaagcccaugggug

SEQ ID NO: 2407149 - RNA, 19 nt, Artificial Sequence
  Description of Artificial Sequence: Synthetic oligonucleotide
agcuccaucagucugcaau

SEQ ID NO: 2407150 - RNA, 19 nt, Artificial Sequence
  Description of Artificial Sequence: Synthetic oligonucleotide
uaauauggaucuuucuuuu

SEQ ID NO: 2407151 - RNA, 19 nt, Artificial Sequence
  Description of Artificial Sequence: Synthetic oligonucleotide
uuuaaccacaucaguggaa

SEQ ID NO: 2407152 - RNA, 19 nt, Artificial Sequence
  Description of Artificial Sequence: Synthetic oligonucleotide
cugugaaccuugaaugagc

SEQ ID NO: 2407153 - RNA, 19 nt, Artificial Sequence
  Description of Artificial Sequence: Synthetic oligonucleotide
ugaccuucaccacccauga

SEQ ID NO: 2407154 - RNA, 19 nt, Artificial Sequence
  Description of Artificial Sequence: Synthetic oligonucleotide
aagcccaugggugcugacc

SEQ ID NO: 2407155 - RNA, 19 nt, Artificial Sequence
  Description of Artificial Sequence: Synthetic oligonucleotide
gcacaggaaaccuaucugg

SEQ ID NO: 2407156 - RNA, 19 nt, Artificial Sequence
  Description of Artificial Sequence: Synthetic oligonucleotide
ugaccagcagcacggaugu

SEQ ID NO: 2407157 - RNA, 19 nt, Artificial Sequence
  Description of Artificial Sequence: Synthetic oligonucleotide
ugucucugaccucugggca

SEQ ID NO: 2407158 - RNA, 19 nt, Artificial Sequence
  Description of Artificial Sequence: Synthetic oligonucleotide
ugcaauucauuugccaaug

SEQ ID NO: 2407159 - RNA, 19 nt, Artificial Sequence
  Description of Artificial Sequence: Synthetic oligonucleotide
ucagguaccugcagagagc

SEQ ID NO: 2407160 - RNA, 19 nt, Artificial Sequence
  Description of Artificial Sequence: Synthetic oligonucleotide
augaguaaggcaagcgugg

SEQ ID NO: 2407161 - RNA, 19 nt, Artificial Sequence
  Description of Artificial Sequence: Synthetic oligonucleotide
caucauucaaguaauuuua

SEQ ID NO: 2407162 - RNA, 19 nt, Artificial Sequence
  Description of Artificial Sequence: Synthetic oligonucleotide
uuuuaaaguaaggcuuucu

SEQ ID NO: 2407163 - RNA, 19 nt, Artificial Sequence
  Description of Artificial Sequence: Synthetic oligonucleotide
gaaauggggugcaggaucc

SEQ ID NO: 2407164 - RNA, 19 nt, Artificial Sequence
  Description of Artificial Sequence: Synthetic oligonucleotide
cuacccugaacucagguca

SEQ ID NO: 2407165 - RNA, 19 nt, Artificial Sequence
  Description of Artificial Sequence: Synthetic oligonucleotide
aauauggaucuuucuuuua

SEQ ID NO: 2407166 - RNA, 19 nt, Artificial Sequence
  Description of Artificial Sequence: Synthetic oligonucleotide
ucugucugcacaggaaacc

SEQ ID NO: 2407167 - RNA, 19 nt, Artificial Sequence
  Description of Artificial Sequence: Synthetic oligonucleotide
auuuuaaguggccaucauu

SEQ ID NO: 2407168 - RNA, 19 nt, Artificial Sequence
  Description of Artificial Sequence: Synthetic oligonucleotide
gccaaugagacuaugcuag

SEQ ID NO: 2407169 - RNA, 19 nt, Artificial Sequence
  Description of Artificial Sequence: Synthetic oligonucleotide
uguggcaaggggcagcauc

SEQ ID NO: 2407170 - RNA, 19 nt, Artificial Sequence
  Description of Artificial Sequence: Synthetic oligonucleotide
ugcaugugugggcaggaca

SEQ ID NO: 2407171 - RNA, 19 nt, Artificial Sequence
  Description of Artificial Sequence: Synthetic oligonucleotide
uggcacguggcuuacauuu

SEQ ID NO: 2407172 - RNA, 19 nt, Artificial Sequence
  Description of Artificial Sequence: Synthetic oligonucleotide
cugaccagcagcacggaug

SEQ ID NO: 2407173 - RNA, 19 nt, Artificial Sequence
  Description of Artificial Sequence: Synthetic oligonucleotide
aucagucugcaauuuaaaa

SEQ ID NO: 2407174 - RNA, 19 nt, Artificial Sequence
  Description of Artificial Sequence: Synthetic oligonucleotide
aggucagguaccugcagag

SEQ ID NO: 2407175 - RNA, 19 nt, Artificial Sequence
  Description of Artificial Sequence: Synthetic oligonucleotide
cacggauguggcaaggggc

SEQ ID NO: 2407176 - RNA, 19 nt, Artificial Sequence
  Description of Artificial Sequence: Synthetic oligonucleotide
ucaggcuauccuaccuagg

SEQ ID NO: 2407177 - RNA, 19 nt, Artificial Sequence
  Description of Artificial Sequence: Synthetic oligonucleotide
aaacucuccugacuauuaa

SEQ ID NO: 2407178 - RNA, 19 nt, Artificial Sequence
  Description of Artificial Sequence: Synthetic oligonucleotide
aaguggccaucauucaagu

SEQ ID NO: 2407179 - RNA, 19 nt, Artificial Sequence
  Description of Artificial Sequence: Synthetic oligonucleotide
acaaugcaauucauuugcc

SEQ ID NO: 2407180 - RNA, 19 nt, Artificial Sequence
  Description of Artificial Sequence: Synthetic oligonucleotide
cugaccuucaccacccaug

SEQ ID NO: 2407181 - RNA, 19 nt, Artificial Sequence
  Description of Artificial Sequence: Synthetic oligonucleotide
cuccugucaguucaguggc

SEQ ID NO: 2407182 - RNA, 19 nt, Artificial Sequence
  Description of Artificial Sequence: Synthetic oligonucleotide
uaggaggucaggcuauccu

SEQ ID NO: 2407183 - RNA, 19 nt, Artificial Sequence
  Description of Artificial Sequence: Synthetic oligonucleotide
acaucaguggaaauggggu

SEQ ID NO: 2407184 - RNA, 19 nt, Artificial Sequence
  Description of Artificial Sequence: Synthetic oligonucleotide
uauccuaccuaggcuacag

SEQ ID NO: 2407185 - RNA, 19 nt, Artificial Sequence
  Description of Artificial Sequence: Synthetic oligonucleotide
ugaguucugacugcuguga

SEQ ID NO: 2407186 - RNA, 19 nt, Artificial Sequence
  Description of Artificial Sequence: Synthetic oligonucleotide
caucaguggaaauggggug

SEQ ID NO: 2407187 - RNA, 19 nt, Artificial Sequence
  Description of Artificial Sequence: Synthetic oligonucleotide
ggcaggacaaguuccuugg

SEQ ID NO: 2407188 - RNA, 19 nt, Artificial Sequence
  Description of Artificial Sequence: Synthetic oligonucleotide
ugggcacugacaaugcaau

SEQ ID NO: 2407189 - RNA, 19 nt, Artificial Sequence
  Description of Artificial Sequence: Synthetic oligonucleotide
gaucuuucuuuuauuuaac

SEQ ID NO: 2407190 - RNA, 19 nt, Artificial Sequence
  Description of Artificial Sequence: Synthetic oligonucleotide
ggaucuuucuuuuauuuaa

SEQ ID NO: 2407191 - RNA, 19 nt, Artificial Sequence
  Description of Artificial Sequence: Synthetic oligonucleotide
caggacaaguuccuugggc

SEQ ID NO: 2407192 - RNA, 19 nt, Artificial Sequence
  Description of Artificial Sequence: Synthetic oligonucleotide
cugacugcugugaaccuug

SEQ ID NO: 2407193 - RNA, 19 nt, Artificial Sequence
  Description of Artificial Sequence: Synthetic oligonucleotide
aaguuccuugggccuguac

SEQ ID NO: 2407194 - RNA, 19 nt, Artificial Sequence
  Description of Artificial Sequence: Synthetic oligonucleotide
uacauuuuaaguggccauc

SEQ ID NO: 2407195 - RNA, 19 nt, Artificial Sequence
  Description of Artificial Sequence: Synthetic oligonucleotide
aggaaaccuaucuggaaau

SEQ ID NO: 2407196 - RNA, 19 nt, Artificial Sequence
  Description of Artificial Sequence: Synthetic oligonucleotide
aaggcaagcgugggcaguc

SEQ ID NO: 2407197 - RNA, 19 nt, Artificial Sequence
  Description of Artificial Sequence: Synthetic oligonucleotide
ugggccuguacacaagaaa

SEQ ID NO: 2407198 - RNA, 19 nt, Artificial Sequence
  Description of Artificial Sequence: Synthetic oligonucleotide
ugucuaggcugcuacccug

SEQ ID NO: 2407199 - RNA, 19 nt, Artificial Sequence
  Description of Artificial Sequence: Synthetic oligonucleotide
ugggcaucccgccugggca

SEQ ID NO: 2407200 - RNA, 19 nt, Artificial Sequence
  Description of Artificial Sequence: Synthetic oligonucleotide
cuaugcuaggaggucaggc

SEQ ID NO: 2407201 - RNA, 19 nt, Artificial Sequence
  Description of Artificial Sequence: Synthetic oligonucleotide
gucaggcuauccuaccuag

SEQ ID NO: 2407202 - RNA, 19 nt, Artificial Sequence
  Description of Artificial Sequence: Synthetic oligonucleotide
accuaucuggaaauugggg

SEQ ID NO: 2407203 - RNA, 19 nt, Artificial Sequence
  Description of Artificial Sequence: Synthetic oligonucleotide
acauuuuaaguggccauca

SEQ ID NO: 2407204 - RNA, 19 nt, Artificial Sequence
  Description of Artificial Sequence: Synthetic oligonucleotide
agagagcaacuccugucag

SEQ ID NO: 2407205 - RNA, 19 nt, Artificial Sequence
  Description of Artificial Sequence: Synthetic oligonucleotide
augguccuagcacagccug

SEQ ID NO: 2407206 - RNA, 19 nt, Artificial Sequence
  Description of Artificial Sequence: Synthetic oligonucleotide
ugaccucugggcaucccgc

SEQ ID NO: 2407207 - RNA, 19 nt, Artificial Sequence
  Description of Artificial Sequence: Synthetic oligonucleotide
caggggugaguucugacug

SEQ ID NO: 2407208 - RNA, 19 nt, Artificial Sequence
  Description of Artificial Sequence: Synthetic oligonucleotide
augccaucugucugcacag

SEQ ID NO: 2407209 - RNA, 19 nt, Artificial Sequence
  Description of Artificial Sequence: Synthetic oligonucleotide
augcaauucauuugccaau

SEQ ID NO: 2407210 - RNA, 19 nt, Artificial Sequence
  Description of Artificial Sequence: Synthetic oligonucleotide
uggccaucauucaaguaau

SEQ ID NO: 2407211 - RNA, 19 nt, Artificial Sequence
  Description of Artificial Sequence: Synthetic oligonucleotide
acguggcuuacauuuuaag

SEQ ID NO: 2407212 - RNA, 19 nt, Artificial Sequence
  Description of Artificial Sequence: Synthetic oligonucleotide
ucaggucagguaccugcag

SEQ ID NO: 2407213 - RNA, 19 nt, Artificial Sequence
  Description of Artificial Sequence: Synthetic oligonucleotide
guggcaaggggcagcaucg

SEQ ID NO: 2407214 - RNA, 19 nt, Artificial Sequence
  Description of Artificial Sequence: Synthetic oligonucleotide
ugccaaugagacuaugcua

SEQ ID NO: 2407215 - RNA, 19 nt, Artificial Sequence
  Description of Artificial Sequence: Synthetic oligonucleotide
uaccuaggcuacaggagcu

SEQ ID NO: 2407216 - RNA, 19 nt, Artificial Sequence
  Description of Artificial Sequence: Synthetic oligonucleotide
caaugcaauucauuugcca

SEQ ID NO: 2407217 - RNA, 19 nt, Artificial Sequence
  Description of Artificial Sequence: Synthetic oligonucleotide
cuuucugcauacaaauuua

SEQ ID NO: 2407218 - RNA, 19 nt, Artificial Sequence
  Description of Artificial Sequence: Synthetic oligonucleotide
uacccugaacucaggucag

SEQ ID NO: 2407219 - RNA, 19 nt, Artificial Sequence
  Description of Artificial Sequence: Synthetic oligonucleotide
gaguaaggcaagcgugggc

SEQ ID NO: 2407220 - RNA, 19 nt, Artificial Sequence
  Description of Artificial Sequence: Synthetic oligonucleotide
uucuuucugcauacaaauu

SEQ ID NO: 2407221 - RNA, 19 nt, Artificial Sequence
  Description of Artificial Sequence: Synthetic oligonucleotide
ggagcugccgccuggcugg

SEQ ID NO: 2407222 - RNA, 19 nt, Artificial Sequence
  Description of Artificial Sequence: Synthetic oligonucleotide
agcgugggcagucauguaa

SEQ ID NO: 2407223 - RNA, 19 nt, Artificial Sequence
  Description of Artificial Sequence: Synthetic oligonucleotide
aaaacucuccugacuauua

SEQ ID NO: 2407224 - RNA, 19 nt, Artificial Sequence
  Description of Artificial Sequence: Synthetic oligonucleotide
ggaaauggggugcaggauc

SEQ ID NO: 2407225 - RNA, 19 nt, Artificial Sequence
  Description of Artificial Sequence: Synthetic oligonucleotide
uaaggggcccggcaccaag

SEQ ID NO: 2407226 - RNA, 19 nt, Artificial Sequence
  Description of Artificial Sequence: Synthetic oligonucleotide
guccuguuuaauauggauc

SEQ ID NO: 2407227 - RNA, 19 nt, Artificial Sequence
  Description of Artificial Sequence: Synthetic oligonucleotide
uggagcugccgccuggcug

SEQ ID NO: 2407228 - RNA, 19 nt, Artificial Sequence
  Description of Artificial Sequence: Synthetic oligonucleotide
ggugcugaccuucaccacc

SEQ ID NO: 2407229 - RNA, 19 nt, Artificial Sequence
  Description of Artificial Sequence: Synthetic oligonucleotide
ugcuacccugaacucaggu

SEQ ID NO: 2407230 - RNA, 19 nt, Artificial Sequence
  Description of Artificial Sequence: Synthetic oligonucleotide
uucugagaacacacaccug

SEQ ID NO: 2407231 - RNA, 19 nt, Artificial Sequence
  Description of Artificial Sequence: Synthetic oligonucleotide
agaaaacucuccugacuau

SEQ ID NO: 2407232 - RNA, 19 nt, Artificial Sequence
  Description of Artificial Sequence: Synthetic oligonucleotide
gacuaugcuaggaggucag

SEQ ID NO: 2407233 - RNA, 19 nt, Artificial Sequence
  Description of Artificial Sequence: Synthetic oligonucleotide
acaggaaaccuaucuggaa

SEQ ID NO: 2407234 - RNA, 19 nt, Artificial Sequence
  Description of Artificial Sequence: Synthetic oligonucleotide
gggccuguacacaagaaag

SEQ ID NO: 2407235 - RNA, 19 nt, Artificial Sequence
  Description of Artificial Sequence: Synthetic oligonucleotide
agcccaugggugcugaccu

SEQ ID NO: 2407236 - RNA, 19 nt, Artificial Sequence
  Description of Artificial Sequence: Synthetic oligonucleotide
uuuguuggagcugccgccu

SEQ ID NO: 2407237 - RNA, 19 nt, Artificial Sequence
  Description of Artificial Sequence: Synthetic oligonucleotide
cugacaaugcaauucauuu

SEQ ID NO: 2407238 - RNA, 19 nt, Artificial Sequence
  Description of Artificial Sequence: Synthetic oligonucleotide
cacaccugcaugugugggc

SEQ ID NO: 2407239 - RNA, 19 nt, Artificial Sequence
  Description of Artificial Sequence: Synthetic oligonucleotide
ggcagagggucccugagcc

SEQ ID NO: 2407240 - RNA, 19 nt, Artificial Sequence
  Description of Artificial Sequence: Synthetic oligonucleotide
ccuguacacaagaaagccc

SEQ ID NO: 2407241 - RNA, 19 nt, Artificial Sequence
  Description of Artificial Sequence: Synthetic oligonucleotide
caggaaaccuaucuggaaa

SEQ ID NO: 2407242 - RNA, 19 nt, Artificial Sequence
  Description of Artificial Sequence: Synthetic oligonucleotide
ggucugaccagcagcacgg

SEQ ID NO: 2407243 - RNA, 19 nt, Artificial Sequence
  Description of Artificial Sequence: Synthetic oligonucleotide
acccaugaguaaggcaagc

SEQ ID NO: 2407244 - RNA, 19 nt, Artificial Sequence
  Description of Artificial Sequence: Synthetic oligonucleotide
ccuaucuggaaauugggga

SEQ ID NO: 2407245 - RNA, 19 nt, Artificial Sequence
  Description of Artificial Sequence: Synthetic oligonucleotide
acucuccugacuauuaaaa

SEQ ID NO: 2407246 - RNA, 19 nt, Artificial Sequence
  Description of Artificial Sequence: Synthetic oligonucleotide
gaggucaggcuauccuacc

SEQ ID NO: 2407247 - RNA, 19 nt, Artificial Sequence
  Description of Artificial Sequence: Synthetic oligonucleotide
uccaucagucugcaauuua

SEQ ID NO: 2407248 - RNA, 19 nt, Artificial Sequence
  Description of Artificial Sequence: Synthetic oligonucleotide
agacuaugcuaggagguca

SEQ ID NO: 2407249 - RNA, 19 nt, Artificial Sequence
  Description of Artificial Sequence: Synthetic oligonucleotide
ucuggaaauuggggagggg

SEQ ID NO: 2407250 - RNA, 19 nt, Artificial Sequence
  Description of Artificial Sequence: Synthetic oligonucleotide
gacaaguuccuugggccug

SEQ ID NO: 2407251 - RNA, 19 nt, Artificial Sequence
  Description of Artificial Sequence: Synthetic oligonucleotide
aggcuauccuaccuaggcu

SEQ ID NO: 2407252 - RNA, 19 nt, Artificial Sequence
  Description of Artificial Sequence: Synthetic oligonucleotide
agagcaacuccugucaguu

SEQ ID NO: 2407253 - RNA, 19 nt, Artificial Sequence
  Description of Artificial Sequence: Synthetic oligonucleotide
uguacacaagaaagcccau

SEQ ID NO: 2407254 - RNA, 19 nt, Artificial Sequence
  Description of Artificial Sequence: Synthetic oligonucleotide
gguaccugcagagagcaac

SEQ ID NO: 2407255 - RNA, 19 nt, Artificial Sequence
  Description of Artificial Sequence: Synthetic oligonucleotide
cagagagcaacuccuguca

SEQ ID NO: 2407256 - RNA, 19 nt, Artificial Sequence
  Description of Artificial Sequence: Synthetic oligonucleotide
cacaagaaagcccaugggu

SEQ ID NO: 2407257 - RNA, 19 nt, Artificial Sequence
  Description of Artificial Sequence: Synthetic oligonucleotide
guaaggcaagcgugggcag

SEQ ID NO: 2407258 - RNA, 19 nt, Artificial Sequence
  Description of Artificial Sequence: Synthetic oligonucleotide
uccuugggccuguacacaa

SEQ ID NO: 2407259 - RNA, 19 nt, Artificial Sequence
  Description of Artificial Sequence: Synthetic oligonucleotide
guacacaagaaagcccaug

SEQ ID NO: 2407260 - RNA, 19 nt, Artificial Sequence
  Description of Artificial Sequence: Synthetic oligonucleotide
acagcacacaugguccuag

SEQ ID NO: 2407261 - RNA, 19 nt, Artificial Sequence
  Description of Artificial Sequence: Synthetic oligonucleotide
ugcuaggaggucaggcuau

SEQ ID NO: 2407262 - RNA, 19 nt, Artificial Sequence
  Description of Artificial Sequence: Synthetic oligonucleotide
acaggagcuccaucagucu

SEQ ID NO: 2407263 - RNA, 19 nt, Artificial Sequence
  Description of Artificial Sequence: Synthetic oligonucleotide
aggucaggcuauccuaccu

SEQ ID NO: 2407264 - RNA, 19 nt, Artificial Sequence
  Description of Artificial Sequence: Synthetic oligonucleotide
gccuguacacaagaaagcc

SEQ ID NO: 2407265 - RNA, 19 nt, Artificial Sequence
  Description of Artificial Sequence: Synthetic oligonucleotide
gagacuaugcuaggagguc

SEQ ID NO: 2407266 - RNA, 19 nt, Artificial Sequence
  Description of Artificial Sequence: Synthetic oligonucleotide
gucccugagcccuggcacg

SEQ ID NO: 2407267 - RNA, 19 nt, Artificial Sequence
  Description of Artificial Sequence: Synthetic oligonucleotide
acacaccugcauguguggg

SEQ ID NO: 2407268 - RNA, 19 nt, Artificial Sequence
  Description of Artificial Sequence: Synthetic oligonucleotide
augcuaggaggucaggcua

SEQ ID NO: 2407269 - RNA, 19 nt, Artificial Sequence
  Description of Artificial Sequence: Synthetic oligonucleotide
aggaggucaggcuauccua

SEQ ID NO: 2407270 - RNA, 19 nt, Artificial Sequence
  Description of Artificial Sequence: Synthetic oligonucleotide
ccuaccuaggcuacaggag

SEQ ID NO: 2407271 - RNA, 19 nt, Artificial Sequence
  Description of Artificial Sequence: Synthetic oligonucleotide
caucgugggcugcaugggc

SEQ ID NO: 2407272 - RNA, 19 nt, Artificial Sequence
  Description of Artificial Sequence: Synthetic oligonucleotide
gaacacacaccugcaugug

SEQ ID NO: 2407273 - RNA, 19 nt, Artificial Sequence
  Description of Artificial Sequence: Synthetic oligonucleotide
agcagcacggauguggcaa

SEQ ID NO: 2407274 - RNA, 19 nt, Artificial Sequence
  Description of Artificial Sequence: Synthetic oligonucleotide
ucgugggcugcaugggcag

SEQ ID NO: 2407275 - RNA, 19 nt, Artificial Sequence
  Description of Artificial Sequence: Synthetic oligonucleotide
ggcacugacaaugcaauuc

SEQ ID NO: 2407276 - RNA, 19 nt, Artificial Sequence
  Description of Artificial Sequence: Synthetic oligonucleotide
caggagcuccaucagucug

SEQ ID NO: 2407277 - RNA, 19 nt, Artificial Sequence
  Description of Artificial Sequence: Synthetic oligonucleotide
gguccuagcacagccugcg

SEQ ID NO: 2407278 - RNA, 19 nt, Artificial Sequence
  Description of Artificial Sequence: Synthetic oligonucleotide
ccuugaaugagcccgagaa

SEQ ID NO: 2407279 - RNA, 19 nt, Artificial Sequence
  Description of Artificial Sequence: Synthetic oligonucleotide
cacccaugaguaaggcaag

SEQ ID NO: 2407280 - RNA, 19 nt, Artificial Sequence
  Description of Artificial Sequence: Synthetic oligonucleotide
ugcggggccaucugucucu

SEQ ID NO: 2407281 - RNA, 19 nt, Artificial Sequence
  Description of Artificial Sequence: Synthetic oligonucleotide
acugacaaugcaauucauu

SEQ ID NO: 2407282 - RNA, 19 nt, Artificial Sequence
  Description of Artificial Sequence: Synthetic oligonucleotide
gcugugaaccuugaaugag

SEQ ID NO: 2407283 - RNA, 19 nt, Artificial Sequence
  Description of Artificial Sequence: Synthetic oligonucleotide
aaccuugaaugagcccgag

SEQ ID NO: 2407284 - RNA, 19 nt, Artificial Sequence
  Description of Artificial Sequence: Synthetic oligonucleotide
gcacugacaaugcaauuca

SEQ ID NO: 2407285 - RNA, 19 nt, Artificial Sequence
  Description of Artificial Sequence: Synthetic oligonucleotide
acaccugcaugugugggca

SEQ ID NO: 2407286 - RNA, 19 nt, Artificial Sequence
  Description of Artificial Sequence: Synthetic oligonucleotide
gcgguccuguuuaauaugg

SEQ ID NO: 2407287 - RNA, 19 nt, Artificial Sequence
  Description of Artificial Sequence: Synthetic oligonucleotide
uugggccuguacacaagaa

SEQ ID NO: 2407288 - RNA, 19 nt, Artificial Sequence
  Description of Artificial Sequence: Synthetic oligonucleotide
aaggggcccggcaccaagg

SEQ ID NO: 2407289 - RNA, 19 nt, Artificial Sequence
  Description of Artificial Sequence: Synthetic oligonucleotide
gauguggcaaggggcagca

SEQ ID NO: 2407290 - RNA, 19 nt, Artificial Sequence
  Description of Artificial Sequence: Synthetic oligonucleotide
ugcaugggcagaggguccc

SEQ ID NO: 2407291 - RNA, 19 nt, Artificial Sequence
  Description of Artificial Sequence: Synthetic oligonucleotide
acuaugcuaggaggucagg

SEQ ID NO: 2407292 - RNA, 19 nt, Artificial Sequence
  Description of Artificial Sequence: Synthetic oligonucleotide
gaccucugggcaucccgcc

SEQ ID NO: 2407293 - RNA, 19 nt, Artificial Sequence
  Description of Artificial Sequence: Synthetic oligonucleotide
cuugggccuguacacaaga

SEQ ID NO: 2407294 - RNA, 19 nt, Artificial Sequence
  Description of Artificial Sequence: Synthetic oligonucleotide
aggcugcuacccugaacuc

SEQ ID NO: 2407295 - RNA, 19 nt, Artificial Sequence
  Description of Artificial Sequence: Synthetic oligonucleotide
ugucaguucaguggcuuuu

SEQ ID NO: 2407296 - RNA, 19 nt, Artificial Sequence
  Description of Artificial Sequence: Synthetic oligonucleotide
caucagucugcaauuuaaa

SEQ ID NO: 2407297 - RNA, 19 nt, Artificial Sequence
  Description of Artificial Sequence: Synthetic oligonucleotide
aggauccaggggugaguuc

SEQ ID NO: 2407298 - RNA, 19 nt, Artificial Sequence
  Description of Artificial Sequence: Synthetic oligonucleotide
accugcaugugugggcagg

SEQ ID NO: 2407299 - RNA, 19 nt, Artificial Sequence
  Description of Artificial Sequence: Synthetic oligonucleotide
gcugcuacccugaacucag

SEQ ID NO: 2407300 - RNA, 19 nt, Artificial Sequence
  Description of Artificial Sequence: Synthetic oligonucleotide
cuugaaugagcccgagaaa

SEQ ID NO: 2407301 - RNA, 19 nt, Artificial Sequence
  Description of Artificial Sequence: Synthetic oligonucleotide
uccaggggugaguucugac

SEQ ID NO: 2407302 - RNA, 19 nt, Artificial Sequence
  Description of Artificial Sequence: Synthetic oligonucleotide
cugggcacugacaaugcaa

SEQ ID NO: 2407303 - RNA, 19 nt, Artificial Sequence
  Description of Artificial Sequence: Synthetic oligonucleotide
caguucaguggcuuuugga

SEQ ID NO: 2407304 - RNA, 19 nt, Artificial Sequence
  Description of Artificial Sequence: Synthetic oligonucleotide
uaaggcaagcgugggcagu

SEQ ID NO: 2407305 - RNA, 19 nt, Artificial Sequence
  Description of Artificial Sequence: Synthetic oligonucleotide
aguaugccaucugucugca

SEQ ID NO: 2407306 - RNA, 19 nt, Artificial Sequence
  Description of Artificial Sequence: Synthetic oligonucleotide
ccaaugagacuaugcuagg

SEQ ID NO: 2407307 - RNA, 19 nt, Artificial Sequence
  Description of Artificial Sequence: Synthetic oligonucleotide
ugacugcugugaaccuuga

SEQ ID NO: 2407308 - RNA, 19 nt, Artificial Sequence
  Description of Artificial Sequence: Synthetic oligonucleotide
uaaccacaucaguggaaau

SEQ ID NO: 2407309 - RNA, 19 nt, Artificial Sequence
  Description of Artificial Sequence: Synthetic oligonucleotide
cuaggaggucaggcuaucc

SEQ ID NO: 2407310 - RNA, 19 nt, Artificial Sequence
  Description of Artificial Sequence: Synthetic oligonucleotide
gugcugaccuucaccaccc

SEQ ID NO: 2407311 - RNA, 19 nt, Artificial Sequence
  Description of Artificial Sequence: Synthetic oligonucleotide
ucuaggcugcuacccugaa

SEQ ID NO: 2407312 - RNA, 19 nt, Artificial Sequence
  Description of Artificial Sequence: Synthetic oligonucleotide
auuugccaaugagacuaug

SEQ ID NO: 2407313 - RNA, 19 nt, Artificial Sequence
  Description of Artificial Sequence: Synthetic oligonucleotide
ucugacugcugugaaccuu

SEQ ID NO: 2407314 - RNA, 19 nt, Artificial Sequence
  Description of Artificial Sequence: Synthetic oligonucleotide
gcagagagcaacuccuguc

SEQ ID NO: 2407315 - RNA, 19 nt, Artificial Sequence
  Description of Artificial Sequence: Synthetic oligonucleotide
ggcuauccuaccuaggcua

SEQ ID NO: 2407316 - RNA, 19 nt, Artificial Sequence
  Description of Artificial Sequence: Synthetic oligonucleotide
ugccaucugucugcacagg

SEQ ID NO: 2407317 - RNA, 19 nt, Artificial Sequence
  Description of Artificial Sequence: Synthetic oligonucleotide
cagucauguaaacugucua

SEQ ID NO: 2407318 - RNA, 19 nt, Artificial Sequence
  Description of Artificial Sequence: Synthetic oligonucleotide
aggcuacaggagcuccauc

SEQ ID NO: 2407319 - RNA, 19 nt, Artificial Sequence
  Description of Artificial Sequence: Synthetic oligonucleotide
caaugagacuaugcuagga

SEQ ID NO: 2407320 - RNA, 19 nt, Artificial Sequence
  Description of Artificial Sequence: Synthetic oligonucleotide
ggucccugagcccuggcac

SEQ ID NO: 2407321 - RNA, 19 nt, Artificial Sequence
  Description of Artificial Sequence: Synthetic oligonucleotide
cugggcaucccgccugggc

SEQ ID NO: 2407322 - RNA, 19 nt, Artificial Sequence
  Description of Artificial Sequence: Synthetic oligonucleotide
accuaggcuacaggagcuc

SEQ ID NO: 2407323 - RNA, 19 nt, Artificial Sequence
  Description of Artificial Sequence: Synthetic oligonucleotide
gaguucugacugcugugaa

SEQ ID NO: 2407324 - RNA, 19 nt, Artificial Sequence
  Description of Artificial Sequence: Synthetic oligonucleotide
cuagcacagccugcggggc

SEQ ID NO: 2407325 - RNA, 19 nt, Artificial Sequence
  Description of Artificial Sequence: Synthetic oligonucleotide
gaaccuugaaugagcccga

SEQ ID NO: 2407326 - RNA, 19 nt, Artificial Sequence
  Description of Artificial Sequence: Synthetic oligonucleotide
gggcaggacaaguuccuug

SEQ ID NO: 2407327 - RNA, 19 nt, Artificial Sequence
  Description of Artificial Sequence: Synthetic oligonucleotide
aggggaggggucugaccag

SEQ ID NO: 2407328 - RNA, 19 nt, Artificial Sequence
  Description of Artificial Sequence: Synthetic oligonucleotide
ggugaguucugacugcugu

SEQ ID NO: 2407329 - RNA, 19 nt, Artificial Sequence
  Description of Artificial Sequence: Synthetic oligonucleotide
ggccuguacacaagaaagc

SEQ ID NO: 2407330 - RNA, 19 nt, Artificial Sequence
  Description of Artificial Sequence: Synthetic oligonucleotide
cagguaccugcagagagca

SEQ ID NO: 2407331 - RNA, 19 nt, Artificial Sequence
  Description of Artificial Sequence: Synthetic oligonucleotide
cuaggcuacaggagcucca

SEQ ID NO: 2407332 - RNA, 19 nt, Artificial Sequence
  Description of Artificial Sequence: Synthetic oligonucleotide
aaauggggugcaggaucca

SEQ ID NO: 2407333 - RNA, 19 nt, Artificial Sequence
  Description of Artificial Sequence: Synthetic oligonucleotide
uggcugggacagcacacau

SEQ ID NO: 2407334 - RNA, 19 nt, Artificial Sequence
  Description of Artificial Sequence: Synthetic oligonucleotide
ggcuuacauuuuaaguggc

SEQ ID NO: 2407335 - RNA, 19 nt, Artificial Sequence
  Description of Artificial Sequence: Synthetic oligonucleotide
ggcgguccuguuuaauaug

SEQ ID NO: 2407336 - RNA, 19 nt, Artificial Sequence
  Description of Artificial Sequence: Synthetic oligonucleotide
cagcacacaugguccuagc

SEQ ID NO: 2407337 - RNA, 19 nt, Artificial Sequence
  Description of Artificial Sequence: Synthetic oligonucleotide
uaggcuacaggagcuccau

SEQ ID NO: 2407338 - RNA, 19 nt, Artificial Sequence
  Description of Artificial Sequence: Synthetic oligonucleotide
cucugggcaucccgccugg

SEQ ID NO: 2407339 - RNA, 19 nt, Artificial Sequence
  Description of Artificial Sequence: Synthetic oligonucleotide
aucgugggcugcaugggca

SEQ ID NO: 2407340 - RNA, 19 nt, Artificial Sequence
  Description of Artificial Sequence: Synthetic oligonucleotide
guccuagcacagccugcgg

SEQ ID NO: 2407341 - RNA, 19 nt, Artificial Sequence
  Description of Artificial Sequence: Synthetic oligonucleotide
cugagcccuggcacguggc

SEQ ID NO: 2407342 - RNA, 19 nt, Artificial Sequence
  Description of Artificial Sequence: Synthetic oligonucleotide
aucccgccugggcacugac

SEQ ID NO: 2407343 - RNA, 19 nt, Artificial Sequence
  Description of Artificial Sequence: Synthetic oligonucleotide
caugugugggcaggacaag

SEQ ID NO: 2407344 - RNA, 19 nt, Artificial Sequence
  Description of Artificial Sequence: Synthetic oligonucleotide
aguggccaucauucaagua

SEQ ID NO: 2407345 - RNA, 19 nt, Artificial Sequence
  Description of Artificial Sequence: Synthetic oligonucleotide
agaaagcccaugggugcug

SEQ ID NO: 2407346 - RNA, 19 nt, Artificial Sequence
  Description of Artificial Sequence: Synthetic oligonucleotide
gggcugcaugggcagaggg

SEQ ID NO: 2407347 - RNA, 19 nt, Artificial Sequence
  Description of Artificial Sequence: Synthetic oligonucleotide
gcugcaugggcagaggguc

SEQ ID NO: 2407348 - RNA, 19 nt, Artificial Sequence
  Description of Artificial Sequence: Synthetic oligonucleotide
accucugggcaucccgccu

SEQ ID NO: 2407349 - RNA, 19 nt, Artificial Sequence
  Description of Artificial Sequence: Synthetic oligonucleotide
gagcaacuccugucaguuc

SEQ ID NO: 2407350 - RNA, 19 nt, Artificial Sequence
  Description of Artificial Sequence: Synthetic oligonucleotide
ugccgccuggcugggacag

SEQ ID NO: 2407351 - RNA, 19 nt, Artificial Sequence
  Description of Artificial Sequence: Synthetic oligonucleotide
acaaguuccuugggccugu

SEQ ID NO: 2407352 - RNA, 19 nt, Artificial Sequence
  Description of Artificial Sequence: Synthetic oligonucleotide
caugggugcugaccuucac

SEQ ID NO: 2407353 - RNA, 19 nt, Artificial Sequence
  Description of Artificial Sequence: Synthetic oligonucleotide
ccuuaaggggcccggcacc

SEQ ID NO: 2407354 - RNA, 19 nt, Artificial Sequence
  Description of Artificial Sequence: Synthetic oligonucleotide
ggaggucaggcuauccuac

SEQ ID NO: 2407355 - RNA, 19 nt, Artificial Sequence
  Description of Artificial Sequence: Synthetic oligonucleotide
gaaagcccaugggugcuga

SEQ ID NO: 2407356 - RNA, 19 nt, Artificial Sequence
  Description of Artificial Sequence: Synthetic oligonucleotide
ccacaucaguggaaauggg

SEQ ID NO: 2407357 - RNA, 19 nt, Artificial Sequence
  Description of Artificial Sequence: Synthetic oligonucleotide
cugcuacccugaacucagg

SEQ ID NO: 2407358 - RNA, 19 nt, Artificial Sequence
  Description of Artificial Sequence: Synthetic oligonucleotide
gauccaggggugaguucug

SEQ ID NO: 2407359 - RNA, 19 nt, Artificial Sequence
  Description of Artificial Sequence: Synthetic oligonucleotide
acccugaacucaggucagg

SEQ ID NO: 2407360 - RNA, 19 nt, Artificial Sequence
  Description of Artificial Sequence: Synthetic oligonucleotide
agcccuggcacguggcuua

SEQ ID NO: 2407361 - RNA, 19 nt, Artificial Sequence
  Description of Artificial Sequence: Synthetic oligonucleotide
caccacccaugaguaaggc

SEQ ID NO: 2407362 - RNA, 19 nt, Artificial Sequence
  Description of Artificial Sequence: Synthetic oligonucleotide
caucugucucugaccucug

SEQ ID NO: 2407363 - RNA, 19 nt, Artificial Sequence
  Description of Artificial Sequence: Synthetic oligonucleotide
cuuaaggggcccggcacca

SEQ ID NO: 2407364 - RNA, 19 nt, Artificial Sequence
  Description of Artificial Sequence: Synthetic oligonucleotide
gguccuguuuaauauggau

SEQ ID NO: 2407365 - RNA, 19 nt, Artificial Sequence
  Description of Artificial Sequence: Synthetic oligonucleotide
gcaauucauuugccaauga

SEQ ID NO: 2407366 - RNA, 19 nt, Artificial Sequence
  Description of Artificial Sequence: Synthetic oligonucleotide
cacguggcuuacauuuuaa

SEQ ID NO: 2407367 - RNA, 19 nt, Artificial Sequence
  Description of Artificial Sequence: Synthetic oligonucleotide
caagcgugggcagucaugu

SEQ ID NO: 2407368 - RNA, 19 nt, Artificial Sequence
  Description of Artificial Sequence: Synthetic oligonucleotide
ucccgccugggcacugaca

SEQ ID NO: 2407369 - RNA, 19 nt, Artificial Sequence
  Description of Artificial Sequence: Synthetic oligonucleotide
cuguuuaauauggaucuuu

SEQ ID NO: 2407370 - RNA, 19 nt, Artificial Sequence
  Description of Artificial Sequence: Synthetic oligonucleotide
uaccugcagagagcaacuc

SEQ ID NO: 2407371 - RNA, 19 nt, Artificial Sequence
  Description of Artificial Sequence: Synthetic oligonucleotide
ggauccaggggugaguucu

SEQ ID NO: 2407372 - RNA, 19 nt, Artificial Sequence
  Description of Artificial Sequence: Synthetic oligonucleotide
gcaugugugggcaggacaa

SEQ ID NO: 2407373 - RNA, 19 nt, Artificial Sequence
  Description of Artificial Sequence: Synthetic oligonucleotide
gagggucccugagcccugg

SEQ ID NO: 2407374 - RNA, 19 nt, Artificial Sequence
  Description of Artificial Sequence: Synthetic oligonucleotide
ggauguggcaaggggcagc

SEQ ID NO: 2407375 - RNA, 19 nt, Artificial Sequence
  Description of Artificial Sequence: Synthetic oligonucleotide
agccugcggggccaucugu

SEQ ID NO: 2407376 - RNA, 19 nt, Artificial Sequence
  Description of Artificial Sequence: Synthetic oligonucleotide
ccuaggcuacaggagcucc

SEQ ID NO: 2407377 - RNA, 19 nt, Artificial Sequence
  Description of Artificial Sequence: Synthetic oligonucleotide
gucuaggcugcuacccuga

SEQ ID NO: 2407378 - RNA, 19 nt, Artificial Sequence
  Description of Artificial Sequence: Synthetic oligonucleotide
cccggcaccaaggggaggg

SEQ ID NO: 2407379 - RNA, 19 nt, Artificial Sequence
  Description of Artificial Sequence: Synthetic oligonucleotide
gcaucgugggcugcauggg

SEQ ID NO: 2407380 - RNA, 19 nt, Artificial Sequence
  Description of Artificial Sequence: Synthetic oligonucleotide
gucugcacaggaaaccuau

SEQ ID NO: 2407381 - RNA, 19 nt, Artificial Sequence
  Description of Artificial Sequence: Synthetic oligonucleotide
gcuauccuaccuaggcuac

SEQ ID NO: 2407382 - RNA, 19 nt, Artificial Sequence
  Description of Artificial Sequence: Synthetic oligonucleotide
ccugagcccuggcacgugg

SEQ ID NO: 2407383 - RNA, 19 nt, Artificial Sequence
  Description of Artificial Sequence: Synthetic oligonucleotide
caugggcagagggucccug

SEQ ID NO: 2407384 - RNA, 19 nt, Artificial Sequence
  Description of Artificial Sequence: Synthetic oligonucleotide
cuacaggagcuccaucagu

SEQ ID NO: 2407385 - RNA, 19 nt, Artificial Sequence
  Description of Artificial Sequence: Synthetic oligonucleotide
ggcagucauguaaacuguc

SEQ ID NO: 2407386 - RNA, 19 nt, Artificial Sequence
  Description of Artificial Sequence: Synthetic oligonucleotide
guaugccaucugucugcac

SEQ ID NO: 2407387 - RNA, 19 nt, Artificial Sequence
  Description of Artificial Sequence: Synthetic oligonucleotide
ggucaggcuauccuaccua

SEQ ID NO: 2407388 - RNA, 19 nt, Artificial Sequence
  Description of Artificial Sequence: Synthetic oligonucleotide
cugcggggccaucugucuc

SEQ ID NO: 2407389 - RNA, 19 nt, Artificial Sequence
  Description of Artificial Sequence: Synthetic oligonucleotide
caccugcaugugugggcag

SEQ ID NO: 2407390 - RNA, 19 nt, Artificial Sequence
  Description of Artificial Sequence: Synthetic oligonucleotide
ggacaaguuccuugggccu

SEQ ID NO: 2407391 - RNA, 19 nt, Artificial Sequence
  Description of Artificial Sequence: Synthetic oligonucleotide
cugucugcacaggaaaccu

SEQ ID NO: 2407392 - RNA, 19 nt, Artificial Sequence
  Description of Artificial Sequence: Synthetic oligonucleotide
guaccugcagagagcaacu

SEQ ID NO: 2407393 - RNA, 19 nt, Artificial Sequence
  Description of Artificial Sequence: Synthetic oligonucleotide
cauuuuaaguggccaucau

SEQ ID NO: 2407394 - RNA, 19 nt, Artificial Sequence
  Description of Artificial Sequence: Synthetic oligonucleotide
cuggcugggacagcacaca

SEQ ID NO: 2407395 - RNA, 19 nt, Artificial Sequence
  Description of Artificial Sequence: Synthetic oligonucleotide
cugcaugugugggcaggac

SEQ ID NO: 2407396 - RNA, 19 nt, Artificial Sequence
  Description of Artificial Sequence: Synthetic oligonucleotide
cuauccuaccuaggcuaca

SEQ ID NO: 2407397 - RNA, 19 nt, Artificial Sequence
  Description of Artificial Sequence: Synthetic oligonucleotide
uuaaggggcccggcaccaa

SEQ ID NO: 2407398 - RNA, 19 nt, Artificial Sequence
  Description of Artificial Sequence: Synthetic oligonucleotide
gugggcagucauguaaacu

SEQ ID NO: 2407399 - RNA, 19 nt, Artificial Sequence
  Description of Artificial Sequence: Synthetic oligonucleotide
ggcugcuacccugaacuca

SEQ ID NO: 2407400 - RNA, 19 nt, Artificial Sequence
  Description of Artificial Sequence: Synthetic oligonucleotide
caguggaaauggggugcag

SEQ ID NO: 2407401 - RNA, 19 nt, Artificial Sequence
  Description of Artificial Sequence: Synthetic oligonucleotide
uggcaaggggcagcaucgu

SEQ ID NO: 2407402 - RNA, 19 nt, Artificial Sequence
  Description of Artificial Sequence: Synthetic oligonucleotide
ggggcccggcaccaagggg

SEQ ID NO: 2407403 - RNA, 19 nt, Artificial Sequence
  Description of Artificial Sequence: Synthetic oligonucleotide
ggggcgguccuguuuaaua

SEQ ID NO: 2407404 - RNA, 19 nt, Artificial Sequence
  Description of Artificial Sequence: Synthetic oligonucleotide
gggcccggcaccaagggga

SEQ ID NO: 2407405 - RNA, 19 nt, Artificial Sequence
  Description of Artificial Sequence: Synthetic oligonucleotide
ccuugggccuguacacaag

SEQ ID NO: 2407406 - RNA, 19 nt, Artificial Sequence
  Description of Artificial Sequence: Synthetic oligonucleotide
gcagagggucccugagccc

SEQ ID NO: 2407407 - RNA, 19 nt, Artificial Sequence
  Description of Artificial Sequence: Synthetic oligonucleotide
cguggcuuacauuuuaagu

SEQ ID NO: 2407408 - RNA, 19 nt, Artificial Sequence
  Description of Artificial Sequence: Synthetic oligonucleotide
gcaagcgugggcagucaug

SEQ ID NO: 2407409 - RNA, 19 nt, Artificial Sequence
  Description of Artificial Sequence: Synthetic oligonucleotide
ccaugaguaaggcaagcgu

SEQ ID NO: 2407410 - RNA, 19 nt, Artificial Sequence
  Description of Artificial Sequence: Synthetic oligonucleotide
ugggcaggacaaguuccuu

SEQ ID NO: 2407411 - RNA, 19 nt, Artificial Sequence
  Description of Artificial Sequence: Synthetic oligonucleotide
cugucuaggcugcuacccu

SEQ ID NO: 2407412 - RNA, 19 nt, Artificial Sequence
  Description of Artificial Sequence: Synthetic oligonucleotide
gacagcacacaugguccua

SEQ ID NO: 2407413 - RNA, 19 nt, Artificial Sequence
  Description of Artificial Sequence: Synthetic oligonucleotide
ccucugggcaucccgccug

SEQ ID NO: 2407414 - RNA, 19 nt, Artificial Sequence
  Description of Artificial Sequence: Synthetic oligonucleotide
gggcaucccgccugggcac

SEQ ID NO: 2407415 - RNA, 19 nt, Artificial Sequence
  Description of Artificial Sequence: Synthetic oligonucleotide
cagccugcggggccaucug

SEQ ID NO: 2407416 - RNA, 19 nt, Artificial Sequence
  Description of Artificial Sequence: Synthetic oligonucleotide
gggugcugaccuucaccac

SEQ ID NO: 2407417 - RNA, 19 nt, Artificial Sequence
  Description of Artificial Sequence: Synthetic oligonucleotide
ggagcuccaucagucugca

SEQ ID NO: 2407418 - RNA, 19 nt, Artificial Sequence
  Description of Artificial Sequence: Synthetic oligonucleotide
ggucagguaccugcagaga

SEQ ID NO: 2407419 - RNA, 19 nt, Artificial Sequence
  Description of Artificial Sequence: Synthetic oligonucleotide
cauuugccaaugagacuau

SEQ ID NO: 2407420 - RNA, 19 nt, Artificial Sequence
  Description of Artificial Sequence: Synthetic oligonucleotide
gugggcaggacaaguuccu

SEQ ID NO: 2407421 - RNA, 19 nt, Artificial Sequence
  Description of Artificial Sequence: Synthetic oligonucleotide
cacugacaaugcaauucau

SEQ ID NO: 2407422 - RNA, 19 nt, Artificial Sequence
  Description of Artificial Sequence: Synthetic oligonucleotide
cccgccugggcacugacaa

SEQ ID NO: 2407423 - RNA, 19 nt, Artificial Sequence
  Description of Artificial Sequence: Synthetic oligonucleotide
aggcaagcgugggcaguca

SEQ ID NO: 2407424 - RNA, 19 nt, Artificial Sequence
  Description of Artificial Sequence: Synthetic oligonucleotide
gagcugccgccuggcuggg

SEQ ID NO: 2407425 - RNA, 19 nt, Artificial Sequence
  Description of Artificial Sequence: Synthetic oligonucleotide
ccugaacucaggucaggua

SEQ ID NO: 2407426 - RNA, 19 nt, Artificial Sequence
  Description of Artificial Sequence: Synthetic oligonucleotide
cccaugggugcugaccuuc

SEQ ID NO: 2407427 - RNA, 19 nt, Artificial Sequence
  Description of Artificial Sequence: Synthetic oligonucleotide
ccaggggugaguucugacu

SEQ ID NO: 2407428 - RNA, 19 nt, Artificial Sequence
  Description of Artificial Sequence: Synthetic oligonucleotide
gggugaguucugacugcug

SEQ ID NO: 2407429 - RNA, 19 nt, Artificial Sequence
  Description of Artificial Sequence: Synthetic oligonucleotide
cgugggcagucauguaaac

SEQ ID NO: 2407430 - RNA, 19 nt, Artificial Sequence
  Description of Artificial Sequence: Synthetic oligonucleotide
gucugaccagcagcacgga

SEQ ID NO: 2407431 - RNA, 19 nt, Artificial Sequence
  Description of Artificial Sequence: Synthetic oligonucleotide
ccuccuuaaggggcccggc

SEQ ID NO: 2407432 - RNA, 19 nt, Artificial Sequence
  Description of Artificial Sequence: Synthetic oligonucleotide
gcgugggcagucauguaaa

SEQ ID NO: 2407433 - RNA, 19 nt, Artificial Sequence
  Description of Artificial Sequence: Synthetic oligonucleotide
cugucaguucaguggcuuu

SEQ ID NO: 2407434 - RNA, 19 nt, Artificial Sequence
  Description of Artificial Sequence: Synthetic oligonucleotide
gccaucugucucugaccuc

SEQ ID NO: 2407435 - RNA, 19 nt, Artificial Sequence
  Description of Artificial Sequence: Synthetic oligonucleotide
gggcagucauguaaacugu

SEQ ID NO: 2407436 - RNA, 19 nt, Artificial Sequence
  Description of Artificial Sequence: Synthetic oligonucleotide
gcuaggaggucaggcuauc

SEQ ID NO: 2407437 - RNA, 19 nt, Artificial Sequence
  Description of Artificial Sequence: Synthetic oligonucleotide
ggcccggcaccaaggggag

SEQ ID NO: 2407438 - RNA, 19 nt, Artificial Sequence
  Description of Artificial Sequence: Synthetic oligonucleotide
cugccgccuggcugggaca

SEQ ID NO: 2407439 - RNA, 19 nt, Artificial Sequence
  Description of Artificial Sequence: Synthetic oligonucleotide
ccaugggugcugaccuuca

SEQ ID NO: 2407440 - RNA, 19 nt, Artificial Sequence
  Description of Artificial Sequence: Synthetic oligonucleotide
ggaaaccuaucuggaaauu

SEQ ID NO: 2407441 - RNA, 19 nt, Artificial Sequence
  Description of Artificial Sequence: Synthetic oligonucleotide
ccugggcacugacaaugca

SEQ ID NO: 2407442 - RNA, 19 nt, Artificial Sequence
  Description of Artificial Sequence: Synthetic oligonucleotide
ggggugaguucugacugcu

SEQ ID NO: 2407443 - RNA, 19 nt, Artificial Sequence
  Description of Artificial Sequence: Synthetic oligonucleotide
ggcugcaugggcagagggu

SEQ ID NO: 2407444 - RNA, 19 nt, Artificial Sequence
  Description of Artificial Sequence: Synthetic oligonucleotide
agguaccugcagagagcaa

SEQ ID NO: 2407445 - RNA, 19 nt, Artificial Sequence
  Description of Artificial Sequence: Synthetic oligonucleotide
ggggucugaccagcagcac

SEQ ID NO: 2407446 - RNA, 19 nt, Artificial Sequence
  Description of Artificial Sequence: Synthetic oligonucleotide
cugggacagcacacauggu

SEQ ID NO: 2407447 - RNA, 19 nt, Artificial Sequence
  Description of Artificial Sequence: Synthetic oligonucleotide
gcugaccuucaccacccau

SEQ ID NO: 2407448 - RNA, 19 nt, Artificial Sequence
  Description of Artificial Sequence: Synthetic oligonucleotide
gccugcggggccaucuguc

SEQ ID NO: 2407449 - RNA, 19 nt, Artificial Sequence
  Description of Artificial Sequence: Synthetic oligonucleotide
gagcccuggcacguggcuu

SEQ ID NO: 2407450 - RNA, 19 nt, Artificial Sequence
  Description of Artificial Sequence: Synthetic oligonucleotide
cuccaucagucugcaauuu

SEQ ID NO: 2407451 - RNA, 19 nt, Artificial Sequence
  Description of Artificial Sequence: Synthetic oligonucleotide
gggaggggucugaccagca

SEQ ID NO: 2407452 - RNA, 19 nt, Artificial Sequence
  Description of Artificial Sequence: Synthetic oligonucleotide
caucccgccugggcacuga

SEQ ID NO: 2407453 - RNA, 19 nt, Artificial Sequence
  Description of Artificial Sequence: Synthetic oligonucleotide
cgguccuguuuaauaugga

SEQ ID NO: 2407454 - RNA, 19 nt, Artificial Sequence
  Description of Artificial Sequence: Synthetic oligonucleotide
ggcaagcgugggcagucau

SEQ ID NO: 2407455 - RNA, 19 nt, Artificial Sequence
  Description of Artificial Sequence: Synthetic oligonucleotide
ccggcaccaaggggagggg

SEQ ID NO: 2407456 - RNA, 19 nt, Artificial Sequence
  Description of Artificial Sequence: Synthetic oligonucleotide
gggcacugacaaugcaauu

SEQ ID NO: 2407457 - RNA, 19 nt, Artificial Sequence
  Description of Artificial Sequence: Synthetic oligonucleotide
gcggggccaucugucucug

SEQ ID NO: 2407458 - RNA, 19 nt, Artificial Sequence
  Description of Artificial Sequence: Synthetic oligonucleotide
ccugcggggccaucugucu

SEQ ID NO: 2407459 - RNA, 19 nt, Artificial Sequence
  Description of Artificial Sequence: Synthetic oligonucleotide
cacagccugcggggccauc

SEQ ID NO: 2407460 - RNA, 19 nt, Artificial Sequence
  Description of Artificial Sequence: Synthetic oligonucleotide
caaguuccuugggccugua

SEQ ID NO: 2407461 - RNA, 19 nt, Artificial Sequence
  Description of Artificial Sequence: Synthetic oligonucleotide
ccgccuggcugggacagca

SEQ ID NO: 2407462 - RNA, 19 nt, Artificial Sequence
  Description of Artificial Sequence: Synthetic oligonucleotide
gcaucccgccugggcacug

SEQ ID NO: 2407463 - RNA, 19 nt, Artificial Sequence
  Description of Artificial Sequence: Synthetic oligonucleotide
gggcagcaucgugggcugc

SEQ ID NO: 2407464 - RNA, 19 nt, Artificial Sequence
  Description of Artificial Sequence: Synthetic oligonucleotide
gcccggcaccaaggggagg

SEQ ID NO: 2407465 - RNA, 19 nt, Artificial Sequence
  Description of Artificial Sequence: Synthetic oligonucleotide
ggcacguggcuuacauuuu

SEQ ID NO: 2407466 - RNA, 19 nt, Artificial Sequence
  Description of Artificial Sequence: Synthetic oligonucleotide
ccuguuuaauauggaucuu

SEQ ID NO: 2407467 - RNA, 19 nt, Artificial Sequence
  Description of Artificial Sequence: Synthetic oligonucleotide
ggccaucauucaaguaauu

SEQ ID NO: 2407468 - RNA, 19 nt, Artificial Sequence
  Description of Artificial Sequence: Synthetic oligonucleotide
ggcaucccgccugggcacu

SEQ ID NO: 2407469 - RNA, 19 nt, Artificial Sequence
  Description of Artificial Sequence: Synthetic oligonucleotide
gcaugggcagagggucccu

SEQ ID NO: 2407470 - RNA, 19 nt, Artificial Sequence
  Description of Artificial Sequence: Synthetic oligonucleotide
gcccaugggugcugaccuu

SEQ ID NO: 2407471 - RNA, 19 nt, Artificial Sequence
  Description of Artificial Sequence: Synthetic oligonucleotide
ccgccugggcacugacaau

SEQ ID NO: 2407472 - RNA, 19 nt, Artificial Sequence
  Description of Artificial Sequence: Synthetic oligonucleotide
cggcaccaaggggaggggu

SEQ ID NO: 2407473 - RNA, 19 nt, Artificial Sequence
  Description of Artificial Sequence: Synthetic oligonucleotide
agauaaaucaaauaaauag

SEQ ID NO: 2407474 - RNA, 19 nt, Artificial Sequence
  Description of Artificial Sequence: Synthetic oligonucleotide
aaauagaugcuauacaauc

SEQ ID NO: 2407475 - RNA, 19 nt, Artificial Sequence
  Description of Artificial Sequence: Synthetic oligonucleotide
aaaaguacuagucaaccuc

SEQ ID NO: 2407476 - RNA, 19 nt, Artificial Sequence
  Description of Artificial Sequence: Synthetic oligonucleotide
aaauaaauagaugcuauac

SEQ ID NO: 2407477 - RNA, 19 nt, Artificial Sequence
  Description of Artificial Sequence: Synthetic oligonucleotide
aaugagaucaccaucuuac

SEQ ID NO: 2407478 - RNA, 19 nt, Artificial Sequence
  Description of Artificial Sequence: Synthetic oligonucleotide
gauacauucauguagucug

SEQ ID NO: 2407479 - RNA, 19 nt, Artificial Sequence
  Description of Artificial Sequence: Synthetic oligonucleotide
agaugauaaccacacagcc

SEQ ID NO: 2407480 - RNA, 19 nt, Artificial Sequence
  Description of Artificial Sequence: Synthetic oligonucleotide
auucaaaugggaaagggcc

SEQ ID NO: 2407481 - RNA, 19 nt, Artificial Sequence
  Description of Artificial Sequence: Synthetic oligonucleotide
uauaccaccucacugacac

SEQ ID NO: 2407482 - RNA, 19 nt, Artificial Sequence
  Description of Artificial Sequence: Synthetic oligonucleotide
agaaaaguacuagucaacc

SEQ ID NO: 2407483 - RNA, 19 nt, Artificial Sequence
  Description of Artificial Sequence: Synthetic oligonucleotide
ucuaguacuggccuuguag

SEQ ID NO: 2407484 - RNA, 19 nt, Artificial Sequence
  Description of Artificial Sequence: Synthetic oligonucleotide
ucauguagucugaacaagg

SEQ ID NO: 2407485 - RNA, 19 nt, Artificial Sequence
  Description of Artificial Sequence: Synthetic oligonucleotide
auagaugcuauacaaucuc

SEQ ID NO: 2407486 - RNA, 19 nt, Artificial Sequence
  Description of Artificial Sequence: Synthetic oligonucleotide
augauaaccacacagccca

SEQ ID NO: 2407487 - RNA, 19 nt, Artificial Sequence
  Description of Artificial Sequence: Synthetic oligonucleotide
gauaaaucaaauaaauaga

SEQ ID NO: 2407488 - RNA, 19 nt, Artificial Sequence
  Description of Artificial Sequence: Synthetic oligonucleotide
uuuaucccagcccacagug

SEQ ID NO: 2407489 - RNA, 19 nt, Artificial Sequence
  Description of Artificial Sequence: Synthetic oligonucleotide
ugccuaaucuaccagauaa

SEQ ID NO: 2407490 - RNA, 19 nt, Artificial Sequence
  Description of Artificial Sequence: Synthetic oligonucleotide
uuagcugugucauucaggu

SEQ ID NO: 2407491 - RNA, 19 nt, Artificial Sequence
  Description of Artificial Sequence: Synthetic oligonucleotide
ugagagaaaaguacuaguc

SEQ ID NO: 2407492 - RNA, 19 nt, Artificial Sequence
  Description of Artificial Sequence: Synthetic oligonucleotide
augcuauacaaucucuuac

SEQ ID NO: 2407493 - RNA, 19 nt, Artificial Sequence
  Description of Artificial Sequence: Synthetic oligonucleotide
ucucuuacccaucaguaca

SEQ ID NO: 2407494 - RNA, 19 nt, Artificial Sequence
  Description of Artificial Sequence: Synthetic oligonucleotide
ucccgauacauucauguag

SEQ ID NO: 2407495 - RNA, 19 nt, Artificial Sequence
  Description of Artificial Sequence: Synthetic oligonucleotide
aaaggaagggccaaauguc

SEQ ID NO: 2407496 - RNA, 19 nt, Artificial Sequence
  Description of Artificial Sequence: Synthetic oligonucleotide
aaccccucccgauacauuc

SEQ ID NO: 2407497 - RNA, 19 nt, Artificial Sequence
  Description of Artificial Sequence: Synthetic oligonucleotide
ugcuauacaaucucuuacc

SEQ ID NO: 2407498 - RNA, 19 nt, Artificial Sequence
  Description of Artificial Sequence: Synthetic oligonucleotide
ucugaaagaacaugaacuc

SEQ ID NO: 2407499 - RNA, 19 nt, Artificial Sequence
  Description of Artificial Sequence: Synthetic oligonucleotide
cuagucaaccucuacauuc

SEQ ID NO: 2407500 - RNA, 19 nt, Artificial Sequence
  Description of Artificial Sequence: Synthetic oligonucleotide
ugcccugagaaagagaggg

SEQ ID NO: 2407501 - RNA, 19 nt, Artificial Sequence
  Description of Artificial Sequence: Synthetic oligonucleotide
ucaaccucuacauucaaau

SEQ ID NO: 2407502 - RNA, 19 nt, Artificial Sequence
  Description of Artificial Sequence: Synthetic oligonucleotide
aaucaaauaaauagaugcu

SEQ ID NO: 2407503 - RNA, 19 nt, Artificial Sequence
  Description of Artificial Sequence: Synthetic oligonucleotide
cuaguacuggccuuguagg

SEQ ID NO: 2407504 - RNA, 19 nt, Artificial Sequence
  Description of Artificial Sequence: Synthetic oligonucleotide
cauucaaaugggaaagggc

SEQ ID NO: 2407505 - RNA, 19 nt, Artificial Sequence
  Description of Artificial Sequence: Synthetic oligonucleotide
acaucuuuaucccagccca

SEQ ID NO: 2407506 - RNA, 19 nt, Artificial Sequence
  Description of Artificial Sequence: Synthetic oligonucleotide
aaccuauaccaccucacug

SEQ ID NO: 2407507 - RNA, 19 nt, Artificial Sequence
  Description of Artificial Sequence: Synthetic oligonucleotide
aauagaugcuauacaaucu

SEQ ID NO: 2407508 - RNA, 19 nt, Artificial Sequence
  Description of Artificial Sequence: Synthetic oligonucleotide
aaacgggcucaacuguggc

SEQ ID NO: 2407509 - RNA, 19 nt, Artificial Sequence
  Description of Artificial Sequence: Synthetic oligonucleotide
aucuuaccagaugauaacc

SEQ ID NO: 2407510 - RNA, 19 nt, Artificial Sequence
  Description of Artificial Sequence: Synthetic oligonucleotide
aaggacugcccugagaaag

SEQ ID NO: 2407511 - RNA, 19 nt, Artificial Sequence
  Description of Artificial Sequence: Synthetic oligonucleotide
ugcgauauuggguggaagc

SEQ ID NO: 2407512 - RNA, 19 nt, Artificial Sequence
  Description of Artificial Sequence: Synthetic oligonucleotide
ucuuaccagaugauaacca

SEQ ID NO: 2407513 - RNA, 19 nt, Artificial Sequence
  Description of Artificial Sequence: Synthetic oligonucleotide
acugacacugagcuucccc

SEQ ID NO: 2407514 - RNA, 19 nt, Artificial Sequence
  Description of Artificial Sequence: Synthetic oligonucleotide
uucaaaugggaaagggccc

SEQ ID NO: 2407515 - RNA, 19 nt, Artificial Sequence
  Description of Artificial Sequence: Synthetic oligonucleotide
uaccagaugauaaccacac

SEQ ID NO: 2407516 - RNA, 19 nt, Artificial Sequence
  Description of Artificial Sequence: Synthetic oligonucleotide
uuuugccuaaucuaccaga

SEQ ID NO: 2407517 - RNA, 19 nt, Artificial Sequence
  Description of Artificial Sequence: Synthetic oligonucleotide
ucuggcucgccacuuaaag

SEQ ID NO: 2407518 - RNA, 19 nt, Artificial Sequence
  Description of Artificial Sequence: Synthetic oligonucleotide
ugagaucaccaucuuacca

SEQ ID NO: 2407519 - RNA, 19 nt, Artificial Sequence
  Description of Artificial Sequence: Synthetic oligonucleotide
aguacuagucaaccucuac

SEQ ID NO: 2407520 - RNA, 19 nt, Artificial Sequence
  Description of Artificial Sequence: Synthetic oligonucleotide
aucucuuacccaucaguac

SEQ ID NO: 2407521 - RNA, 19 nt, Artificial Sequence
  Description of Artificial Sequence: Synthetic oligonucleotide
augagaucaccaucuuacc

SEQ ID NO: 2407522 - RNA, 19 nt, Artificial Sequence
  Description of Artificial Sequence: Synthetic oligonucleotide
cauucauguagucugaaca

SEQ ID NO: 2407523 - RNA, 19 nt, Artificial Sequence
  Description of Artificial Sequence: Synthetic oligonucleotide
aaaccuauaccaccucacu

SEQ ID NO: 2407524 - RNA, 19 nt, Artificial Sequence
  Description of Artificial Sequence: Synthetic oligonucleotide
gaaaggaagggccaaaugu

SEQ ID NO: 2407525 - RNA, 19 nt, Artificial Sequence
  Description of Artificial Sequence: Synthetic oligonucleotide
uuaccagaugauaaccaca

SEQ ID NO: 2407526 - RNA, 19 nt, Artificial Sequence
  Description of Artificial Sequence: Synthetic oligonucleotide
acaaggacugcccugagaa

SEQ ID NO: 2407527 - RNA, 19 nt, Artificial Sequence
  Description of Artificial Sequence: Synthetic oligonucleotide
ucgaguguccacaccagag

SEQ ID NO: 2407528 - RNA, 19 nt, Artificial Sequence
  Description of Artificial Sequence: Synthetic oligonucleotide
cuuagcugugucauucagg

SEQ ID NO: 2407529 - RNA, 19 nt, Artificial Sequence
  Description of Artificial Sequence: Synthetic oligonucleotide
acauucaaaugggaaaggg

SEQ ID NO: 2407530 - RNA, 19 nt, Artificial Sequence
  Description of Artificial Sequence: Synthetic oligonucleotide
agugagagaaaaguacuag

SEQ ID NO: 2407531 - RNA, 19 nt, Artificial Sequence
  Description of Artificial Sequence: Synthetic oligonucleotide
acuucgaguguccacacca

SEQ ID NO: 2407532 - RNA, 19 nt, Artificial Sequence
  Description of Artificial Sequence: Synthetic oligonucleotide
gaugauaaccacacagccc

SEQ ID NO: 2407533 - RNA, 19 nt, Artificial Sequence
  Description of Artificial Sequence: Synthetic oligonucleotide
cuuaccagaugauaaccac

SEQ ID NO: 2407534 - RNA, 19 nt, Artificial Sequence
  Description of Artificial Sequence: Synthetic oligonucleotide
accuauaccaccucacuga

SEQ ID NO: 2407535 - RNA, 19 nt, Artificial Sequence
  Description of Artificial Sequence: Synthetic oligonucleotide
gggaaagauaggcaggugg

SEQ ID NO: 2407536 - RNA, 19 nt, Artificial Sequence
  Description of Artificial Sequence: Synthetic oligonucleotide
ucccugacugcccacaccc

SEQ ID NO: 2407537 - RNA, 19 nt, Artificial Sequence
  Description of Artificial Sequence: Synthetic oligonucleotide
uacuagucaaccucuacau

SEQ ID NO: 2407538 - RNA, 19 nt, Artificial Sequence
  Description of Artificial Sequence: Synthetic oligonucleotide
uuugccuaaucuaccagau

SEQ ID NO: 2407539 - RNA, 19 nt, Artificial Sequence
  Description of Artificial Sequence: Synthetic oligonucleotide
uaguacuggccuuguaggg

SEQ ID NO: 2407540 - RNA, 19 nt, Artificial Sequence
  Description of Artificial Sequence: Synthetic oligonucleotide
uucugugcaaaggagcgag

SEQ ID NO: 2407541 - RNA, 19 nt, Artificial Sequence
  Description of Artificial Sequence: Synthetic oligonucleotide
aaugucugcgauauugggu

SEQ ID NO: 2407542 - RNA, 19 nt, Artificial Sequence
  Description of Artificial Sequence: Synthetic oligonucleotide
agcggucuugugcugagac

SEQ ID NO: 2407543 - RNA, 19 nt, Artificial Sequence
  Description of Artificial Sequence: Synthetic oligonucleotide
gaguguccacaccagaggc

SEQ ID NO: 2407544 - RNA, 19 nt, Artificial Sequence
  Description of Artificial Sequence: Synthetic oligonucleotide
uagucaaccucuacauuca

SEQ ID NO: 2407545 - RNA, 19 nt, Artificial Sequence
  Description of Artificial Sequence: Synthetic oligonucleotide
acacucugcaccugcugcc

SEQ ID NO: 2407546 - RNA, 19 nt, Artificial Sequence
  Description of Artificial Sequence: Synthetic oligonucleotide
uucauguagucugaacaag

SEQ ID NO: 2407547 - RNA, 19 nt, Artificial Sequence
  Description of Artificial Sequence: Synthetic oligonucleotide
acugagcuuccccaguggg

SEQ ID NO: 2407548 - RNA, 19 nt, Artificial Sequence
  Description of Artificial Sequence: Synthetic oligonucleotide
uugcauaccugaagccugg

SEQ ID NO: 2407549 - RNA, 19 nt, Artificial Sequence
  Description of Artificial Sequence: Synthetic oligonucleotide
guuagugugugugugugcc

SEQ ID NO: 2407550 - RNA, 19 nt, Artificial Sequence
  Description of Artificial Sequence: Synthetic oligonucleotide
caucuuaccagaugauaac

SEQ ID NO: 2407551 - RNA, 19 nt, Artificial Sequence
  Description of Artificial Sequence: Synthetic oligonucleotide
gucugaacaaggcucgaag

SEQ ID NO: 2407552 - RNA, 19 nt, Artificial Sequence
  Description of Artificial Sequence: Synthetic oligonucleotide
gaagacaaggacugcccug

SEQ ID NO: 2407553 - RNA, 19 nt, Artificial Sequence
  Description of Artificial Sequence: Synthetic oligonucleotide
accucuacauucaaauggg

SEQ ID NO: 2407554 - RNA, 19 nt, Artificial Sequence
  Description of Artificial Sequence: Synthetic oligonucleotide
aagacaaggacugcccuga

SEQ ID NO: 2407555 - RNA, 19 nt, Artificial Sequence
  Description of Artificial Sequence: Synthetic oligonucleotide
caccuugcauaccugaagc

SEQ ID NO: 2407556 - RNA, 19 nt, Artificial Sequence
  Description of Artificial Sequence: Synthetic oligonucleotide
aguacuggccuuguagggg

SEQ ID NO: 2407557 - RNA, 19 nt, Artificial Sequence
  Description of Artificial Sequence: Synthetic oligonucleotide
cugaaagaacaugaacucc

SEQ ID NO: 2407558 - RNA, 19 nt, Artificial Sequence
  Description of Artificial Sequence: Synthetic oligonucleotide
aucaaauaaauagaugcua

SEQ ID NO: 2407559 - RNA, 19 nt, Artificial Sequence
  Description of Artificial Sequence: Synthetic oligonucleotide
aggaacuuggcaaugagau

SEQ ID NO: 2407560 - RNA, 19 nt, Artificial Sequence
  Description of Artificial Sequence: Synthetic oligonucleotide
guacuagucaaccucuaca

SEQ ID NO: 2407561 - RNA, 19 nt, Artificial Sequence
  Description of Artificial Sequence: Synthetic oligonucleotide
aaucucuuacccaucagua

SEQ ID NO: 2407562 - RNA, 19 nt, Artificial Sequence
  Description of Artificial Sequence: Synthetic oligonucleotide
gaugcuauacaaucucuua

SEQ ID NO: 2407563 - RNA, 19 nt, Artificial Sequence
  Description of Artificial Sequence: Synthetic oligonucleotide
ucaaaugggaaagggccca

SEQ ID NO: 2407564 - RNA, 19 nt, Artificial Sequence
  Description of Artificial Sequence: Synthetic oligonucleotide
ugagcuuccccagugggca

SEQ ID NO: 2407565 - RNA, 19 nt, Artificial Sequence
  Description of Artificial Sequence: Synthetic oligonucleotide
gagaaaaguacuagucaac

SEQ ID NO: 2407566 - RNA, 19 nt, Artificial Sequence
  Description of Artificial Sequence: Synthetic oligonucleotide
gaaagauaggcagguggcc

SEQ ID NO: 2407567 - RNA, 19 nt, Artificial Sequence
  Description of Artificial Sequence: Synthetic oligonucleotide
caaacgggcucaacugugg

SEQ ID NO: 2407568 - RNA, 19 nt, Artificial Sequence
  Description of Artificial Sequence: Synthetic oligonucleotide
acgggcucaacuguggcac

SEQ ID NO: 2407569 - RNA, 19 nt, Artificial Sequence
  Description of Artificial Sequence: Synthetic oligonucleotide
aggggaaggccugagcccc

SEQ ID NO: 2407570 - RNA, 19 nt, Artificial Sequence
  Description of Artificial Sequence: Synthetic oligonucleotide
uggaagucaccugagucug

SEQ ID NO: 2407571 - RNA, 19 nt, Artificial Sequence
  Description of Artificial Sequence: Synthetic oligonucleotide
acagugagagaaaaguacu

SEQ ID NO: 2407572 - RNA, 19 nt, Artificial Sequence
  Description of Artificial Sequence: Synthetic oligonucleotide
gcuauacaaucucuuaccc

SEQ ID NO: 2407573 - RNA, 19 nt, Artificial Sequence
  Description of Artificial Sequence: Synthetic oligonucleotide
agaagacaaggacugcccu

SEQ ID NO: 2407574 - RNA, 19 nt, Artificial Sequence
  Description of Artificial Sequence: Synthetic oligonucleotide
ucaccugagucugaaagaa

SEQ ID NO: 2407575 - RNA, 19 nt, Artificial Sequence
  Description of Artificial Sequence: Synthetic oligonucleotide
acuccugugggagaaagga

SEQ ID NO: 2407576 - RNA, 19 nt, Artificial Sequence
  Description of Artificial Sequence: Synthetic oligonucleotide
accugagucugaaagaaca

SEQ ID NO: 2407577 - RNA, 19 nt, Artificial Sequence
  Description of Artificial Sequence: Synthetic oligonucleotide
agaucaccaucuuaccaga

SEQ ID NO: 2407578 - RNA, 19 nt, Artificial Sequence
  Description of Artificial Sequence: Synthetic oligonucleotide
cuauacaaucucuuaccca

SEQ ID NO: 2407579 - RNA, 19 nt, Artificial Sequence
  Description of Artificial Sequence: Synthetic oligonucleotide
uacccagaucagcugagcu

SEQ ID NO: 2407580 - RNA, 19 nt, Artificial Sequence
  Description of Artificial Sequence: Synthetic oligonucleotide
gaaaaguacuagucaaccu

SEQ ID NO: 2407581 - RNA, 19 nt, Artificial Sequence
  Description of Artificial Sequence: Synthetic oligonucleotide
aaagggcccaaggggaaag

SEQ ID NO: 2407582 - RNA, 19 nt, Artificial Sequence
  Description of Artificial Sequence: Synthetic oligonucleotide
ugacacugagcuuccccag

SEQ ID NO: 2407583 - RNA, 19 nt, Artificial Sequence
  Description of Artificial Sequence: Synthetic oligonucleotide
aaaggagcgagcggucuug

SEQ ID NO: 2407584 - RNA, 19 nt, Artificial Sequence
  Description of Artificial Sequence: Synthetic oligonucleotide
auggauacccagaucagcu

SEQ ID NO: 2407585 - RNA, 19 nt, Artificial Sequence
  Description of Artificial Sequence: Synthetic oligonucleotide
cauggauacccagaucagc

SEQ ID NO: 2407586 - RNA, 19 nt, Artificial Sequence
  Description of Artificial Sequence: Synthetic oligonucleotide
uggauacccagaucagcug

SEQ ID NO: 2407587 - RNA, 19 nt, Artificial Sequence
  Description of Artificial Sequence: Synthetic oligonucleotide
cagauaaaucaaauaaaua

SEQ ID NO: 2407588 - RNA, 19 nt, Artificial Sequence
  Description of Artificial Sequence: Synthetic oligonucleotide
caaccucuacauucaaaug

SEQ ID NO: 2407589 - RNA, 19 nt, Artificial Sequence
  Description of Artificial Sequence: Synthetic oligonucleotide
cacccacuggcauccaugg

SEQ ID NO: 2407590 - RNA, 19 nt, Artificial Sequence
  Description of Artificial Sequence: Synthetic oligonucleotide
ugucugcgauauugggugg

SEQ ID NO: 2407591 - RNA, 19 nt, Artificial Sequence
  Description of Artificial Sequence: Synthetic oligonucleotide
cucgaagcucauucugugc

SEQ ID NO: 2407592 - RNA, 19 nt, Artificial Sequence
  Description of Artificial Sequence: Synthetic oligonucleotide
cuggcucgccacuuaaagc

SEQ ID NO: 2407593 - RNA, 19 nt, Artificial Sequence
  Description of Artificial Sequence: Synthetic oligonucleotide
uucgaguguccacaccaga

SEQ ID NO: 2407594 - RNA, 19 nt, Artificial Sequence
  Description of Artificial Sequence: Synthetic oligonucleotide
uccucacucuaguacuggc

SEQ ID NO: 2407595 - RNA, 19 nt, Artificial Sequence
  Description of Artificial Sequence: Synthetic oligonucleotide
aaucuaccagauaaaucaa

SEQ ID NO: 2407596 - RNA, 19 nt, Artificial Sequence
  Description of Artificial Sequence: Synthetic oligonucleotide
aaaugggaaagggcccaag

SEQ ID NO: 2407597 - RNA, 19 nt, Artificial Sequence
  Description of Artificial Sequence: Synthetic oligonucleotide
cugagucugaaagaacaug

SEQ ID NO: 2407598 - RNA, 19 nt, Artificial Sequence
  Description of Artificial Sequence: Synthetic oligonucleotide
gaagcaucugcaccuugca

SEQ ID NO: 2407599 - RNA, 19 nt, Artificial Sequence
  Description of Artificial Sequence: Synthetic oligonucleotide
auacccagaucagcugagc

SEQ ID NO: 2407600 - RNA, 19 nt, Artificial Sequence
  Description of Artificial Sequence: Synthetic oligonucleotide
ugugugugccuuagcugug

SEQ ID NO: 2407601 - RNA, 19 nt, Artificial Sequence
  Description of Artificial Sequence: Synthetic oligonucleotide
ugccuuagcugugucauuc

SEQ ID NO: 2407602 - RNA, 19 nt, Artificial Sequence
  Description of Artificial Sequence: Synthetic oligonucleotide
gaacaaggcucgaagcuca

SEQ ID NO: 2407603 - RNA, 19 nt, Artificial Sequence
  Description of Artificial Sequence: Synthetic oligonucleotide
ggagcgagcggucuugugc

SEQ ID NO: 2407604 - RNA, 19 nt, Artificial Sequence
  Description of Artificial Sequence: Synthetic oligonucleotide
uuaucccagcccacaguga

SEQ ID NO: 2407605 - RNA, 19 nt, Artificial Sequence
  Description of Artificial Sequence: Synthetic oligonucleotide
ucacugacacugagcuucc

SEQ ID NO: 2407606 - RNA, 19 nt, Artificial Sequence
  Description of Artificial Sequence: Synthetic oligonucleotide
agauaggcagguggccacc

SEQ ID NO: 2407607 - RNA, 19 nt, Artificial Sequence
  Description of Artificial Sequence: Synthetic oligonucleotide
ugcaccuugcauaccugaa

SEQ ID NO: 2407608 - RNA, 19 nt, Artificial Sequence
  Description of Artificial Sequence: Synthetic oligonucleotide
cuucgaguguccacaccag

SEQ ID NO: 2407609 - RNA, 19 nt, Artificial Sequence
  Description of Artificial Sequence: Synthetic oligonucleotide
ugugugugugugccuuagc

SEQ ID NO: 2407610 - RNA, 19 nt, Artificial Sequence
  Description of Artificial Sequence: Synthetic oligonucleotide
acacagcccaaacgggcuc

SEQ ID NO: 2407611 - RNA, 19 nt, Artificial Sequence
  Description of Artificial Sequence: Synthetic oligonucleotide
ggaggugggaggaacuugg

SEQ ID NO: 2407612 - RNA, 19 nt, Artificial Sequence
  Description of Artificial Sequence: Synthetic oligonucleotide
agggccaaaugucugcgau

SEQ ID NO: 2407613 - RNA, 19 nt, Artificial Sequence
  Description of Artificial Sequence: Synthetic oligonucleotide
gugagagaaaaguacuagu

SEQ ID NO: 2407614 - RNA, 19 nt, Artificial Sequence
  Description of Artificial Sequence: Synthetic oligonucleotide
uuagugugugugugugccu

SEQ ID NO: 2407615 - RNA, 19 nt, Artificial Sequence
  Description of Artificial Sequence: Synthetic oligonucleotide
cuaccagauaaaucaaaua

SEQ ID NO: 2407616 - RNA, 19 nt, Artificial Sequence
  Description of Artificial Sequence: Synthetic oligonucleotide
aggcacaucuuuaucccag

SEQ ID NO: 2407617 - RNA, 19 nt, Artificial Sequence
  Description of Artificial Sequence: Synthetic oligonucleotide
guguccacaccagaggcug

SEQ ID NO: 2407618 - RNA, 19 nt, Artificial Sequence
  Description of Artificial Sequence: Synthetic oligonucleotide
aagggccaaaugucugcga

SEQ ID NO: 2407619 - RNA, 19 nt, Artificial Sequence
  Description of Artificial Sequence: Synthetic oligonucleotide
caccucacugacacugagc

SEQ ID NO: 2407620 - RNA, 19 nt, Artificial Sequence
  Description of Artificial Sequence: Synthetic oligonucleotide
auacaaucucuuacccauc

SEQ ID NO: 2407621 - RNA, 19 nt, Artificial Sequence
  Description of Artificial Sequence: Synthetic oligonucleotide
acuagucaaccucuacauu

SEQ ID NO: 2407622 - RNA, 19 nt, Artificial Sequence
  Description of Artificial Sequence: Synthetic oligonucleotide
cacaugucccaggggaagg

SEQ ID NO: 2407623 - RNA, 19 nt, Artificial Sequence
  Description of Artificial Sequence: Synthetic oligonucleotide
gacacuccucccugacugc

SEQ ID NO: 2407624 - RNA, 19 nt, Artificial Sequence
  Description of Artificial Sequence: Synthetic oligonucleotide
cuuacccaucaguacaaaa

SEQ ID NO: 2407625 - RNA, 19 nt, Artificial Sequence
  Description of Artificial Sequence: Synthetic oligonucleotide
cacugagcuuccccagugg

SEQ ID NO: 2407626 - RNA, 19 nt, Artificial Sequence
  Description of Artificial Sequence: Synthetic oligonucleotide
cuggaagucaccugagucu

SEQ ID NO: 2407627 - RNA, 19 nt, Artificial Sequence
  Description of Artificial Sequence: Synthetic oligonucleotide
ggauacccagaucagcuga

SEQ ID NO: 2407628 - RNA, 19 nt, Artificial Sequence
  Description of Artificial Sequence: Synthetic oligonucleotide
ggguggaagcaucugcacc

SEQ ID NO: 2407629 - RNA, 19 nt, Artificial Sequence
  Description of Artificial Sequence: Synthetic oligonucleotide
cacucuaguacuggccuug

SEQ ID NO: 2407630 - RNA, 19 nt, Artificial Sequence
  Description of Artificial Sequence: Synthetic oligonucleotide
uacauucauguagucugaa

SEQ ID NO: 2407631 - RNA, 19 nt, Artificial Sequence
  Description of Artificial Sequence: Synthetic oligonucleotide
gacaaggacugcccugaga

SEQ ID NO: 2407632 - RNA, 19 nt, Artificial Sequence
  Description of Artificial Sequence: Synthetic oligonucleotide
uugccuaaucuaccagaua

SEQ ID NO: 2407633 - RNA, 19 nt, Artificial Sequence
  Description of Artificial Sequence: Synthetic oligonucleotide
caaucucuuacccaucagu

SEQ ID NO: 2407634 - RNA, 19 nt, Artificial Sequence
  Description of Artificial Sequence: Synthetic oligonucleotide
cugcccugagaaagagagg

SEQ ID NO: 2407635 - RNA, 19 nt, Artificial Sequence
  Description of Artificial Sequence: Synthetic oligonucleotide
auacauucauguagucuga

SEQ ID NO: 2407636 - RNA, 19 nt, Artificial Sequence
  Description of Artificial Sequence: Synthetic oligonucleotide
ugagccccucccaaccccu

SEQ ID NO: 2407637 - RNA, 19 nt, Artificial Sequence
  Description of Artificial Sequence: Synthetic oligonucleotide
auauuggguggaagcaucu

SEQ ID NO: 2407638 - RNA, 19 nt, Artificial Sequence
  Description of Artificial Sequence: Synthetic oligonucleotide
ccaucuuaccagaugauaa

SEQ ID NO: 2407639 - RNA, 19 nt, Artificial Sequence
  Description of Artificial Sequence: Synthetic oligonucleotide
ggaagcaucugcaccuugc

SEQ ID NO: 2407640 - RNA, 19 nt, Artificial Sequence
  Description of Artificial Sequence: Synthetic oligonucleotide
agaugcuauacaaucucuu

SEQ ID NO: 2407641 - RNA, 19 nt, Artificial Sequence
  Description of Artificial Sequence: Synthetic oligonucleotide
accaucuuaccagaugaua

SEQ ID NO: 2407642 - RNA, 19 nt, Artificial Sequence
  Description of Artificial Sequence: Synthetic oligonucleotide
ugugugccuuagcuguguc

SEQ ID NO: 2407643 - RNA, 19 nt, Artificial Sequence
  Description of Artificial Sequence: Synthetic oligonucleotide
caccugagucugaaagaac

SEQ ID NO: 2407644 - RNA, 19 nt, Artificial Sequence
  Description of Artificial Sequence: Synthetic oligonucleotide
ugauaaccacacagcccaa

SEQ ID NO: 2407645 - RNA, 19 nt, Artificial Sequence
  Description of Artificial Sequence: Synthetic oligonucleotide
aagucaccugagucugaaa

SEQ ID NO: 2407646 - RNA, 19 nt, Artificial Sequence
  Description of Artificial Sequence: Synthetic oligonucleotide
aucuaccagauaaaucaaa

SEQ ID NO: 2407647 - RNA, 19 nt, Artificial Sequence
  Description of Artificial Sequence: Synthetic oligonucleotide
gguuagugugugugugugc

SEQ ID NO: 2407648 - RNA, 19 nt, Artificial Sequence
  Description of Artificial Sequence: Synthetic oligonucleotide
cucacucuaguacuggccu

SEQ ID NO: 2407649 - RNA, 19 nt, Artificial Sequence
  Description of Artificial Sequence: Synthetic oligonucleotide
ugggaggaacuuggcaaug

SEQ ID NO: 2407650 - RNA, 19 nt, Artificial Sequence
  Description of Artificial Sequence: Synthetic oligonucleotide
ccucacucuaguacuggcc

SEQ ID NO: 2407651 - RNA, 19 nt, Artificial Sequence
  Description of Artificial Sequence: Synthetic oligonucleotide
cucuuacccaucaguacaa

SEQ ID NO: 2407652 - RNA, 19 nt, Artificial Sequence
  Description of Artificial Sequence: Synthetic oligonucleotide
uagugugugugugugccuu

SEQ ID NO: 2407653 - RNA, 19 nt, Artificial Sequence
  Description of Artificial Sequence: Synthetic oligonucleotide
agacaaggacugcccugag

SEQ ID NO: 2407654 - RNA, 19 nt, Artificial Sequence
  Description of Artificial Sequence: Synthetic oligonucleotide
gcccaaacgggcucaacug

SEQ ID NO: 2407655 - RNA, 19 nt, Artificial Sequence
  Description of Artificial Sequence: Synthetic oligonucleotide
cagugagagaaaaguacua

SEQ ID NO: 2407656 - RNA, 19 nt, Artificial Sequence
  Description of Artificial Sequence: Synthetic oligonucleotide
agucaaccucuacauucaa

SEQ ID NO: 2407657 - RNA, 19 nt, Artificial Sequence
  Description of Artificial Sequence: Synthetic oligonucleotide
ucugcgauauuggguggaa

SEQ ID NO: 2407658 - RNA, 19 nt, Artificial Sequence
  Description of Artificial Sequence: Synthetic oligonucleotide
auucugugcaaaggagcga

SEQ ID NO: 2407659 - RNA, 19 nt, Artificial Sequence
  Description of Artificial Sequence: Synthetic oligonucleotide
ggaacuuggcaaugagauc

SEQ ID NO: 2407660 - RNA, 19 nt, Artificial Sequence
  Description of Artificial Sequence: Synthetic oligonucleotide
gacugcccacacccacugg

SEQ ID NO: 2407661 - RNA, 19 nt, Artificial Sequence
  Description of Artificial Sequence: Synthetic oligonucleotide
gcacaucuuuaucccagcc

SEQ ID NO: 2407662 - RNA, 19 nt, Artificial Sequence
  Description of Artificial Sequence: Synthetic oligonucleotide
ucacucuaguacuggccuu

SEQ ID NO: 2407663 - RNA, 19 nt, Artificial Sequence
  Description of Artificial Sequence: Synthetic oligonucleotide
gaggcugaggcacaucuuu

SEQ ID NO: 2407664 - RNA, 19 nt, Artificial Sequence
  Description of Artificial Sequence: Synthetic oligonucleotide
gagagggcagagaggggug

SEQ ID NO: 2407665 - RNA, 19 nt, Artificial Sequence
  Description of Artificial Sequence: Synthetic oligonucleotide
ggcauccauggauacccag

SEQ ID NO: 2407666 - RNA, 19 nt, Artificial Sequence
  Description of Artificial Sequence: Synthetic oligonucleotide
acacccacuggcauccaug

SEQ ID NO: 2407667 - RNA, 19 nt, Artificial Sequence
  Description of Artificial Sequence: Synthetic oligonucleotide
gagcgagcggucuugugcu

SEQ ID NO: 2407668 - RNA, 19 nt, Artificial Sequence
  Description of Artificial Sequence: Synthetic oligonucleotide
cacuccucccugacugccc

SEQ ID NO: 2407669 - RNA, 19 nt, Artificial Sequence
  Description of Artificial Sequence: Synthetic oligonucleotide
uggcacuucgaguguccac

SEQ ID NO: 2407670 - RNA, 19 nt, Artificial Sequence
  Description of Artificial Sequence: Synthetic oligonucleotide
gugugugugugugccuuag

SEQ ID NO: 2407671 - RNA, 19 nt, Artificial Sequence
  Description of Artificial Sequence: Synthetic oligonucleotide
ggcacaucuuuaucccagc

SEQ ID NO: 2407672 - RNA, 19 nt, Artificial Sequence
  Description of Artificial Sequence: Synthetic oligonucleotide
caaugagaucaccaucuua

SEQ ID NO: 2407673 - RNA, 19 nt, Artificial Sequence
  Description of Artificial Sequence: Synthetic oligonucleotide
ugagaccuggcggccaggu

SEQ ID NO: 2407674 - RNA, 19 nt, Artificial Sequence
  Description of Artificial Sequence: Synthetic oligonucleotide
uggcauccauggauaccca

SEQ ID NO: 2407675 - RNA, 19 nt, Artificial Sequence
  Description of Artificial Sequence: Synthetic oligonucleotide
ucuuacccaucaguacaaa

SEQ ID NO: 2407676 - RNA, 19 nt, Artificial Sequence
  Description of Artificial Sequence: Synthetic oligonucleotide
ccaaacgggcucaacugug

SEQ ID NO: 2407677 - RNA, 19 nt, Artificial Sequence
  Description of Artificial Sequence: Synthetic oligonucleotide
ccuauaccaccucacugac

SEQ ID NO: 2407678 - RNA, 19 nt, Artificial Sequence
  Description of Artificial Sequence: Synthetic oligonucleotide
ggguuagugugugugugug

SEQ ID NO: 2407679 - RNA, 19 nt, Artificial Sequence
  Description of Artificial Sequence: Synthetic oligonucleotide
gagcuuccccagugggcag

SEQ ID NO: 2407680 - RNA, 19 nt, Artificial Sequence
  Description of Artificial Sequence: Synthetic oligonucleotide
accacuccucacucuagua

SEQ ID NO: 2407681 - RNA, 19 nt, Artificial Sequence
  Description of Artificial Sequence: Synthetic oligonucleotide
cugcaccuugcauaccuga

SEQ ID NO: 2407682 - RNA, 19 nt, Artificial Sequence
  Description of Artificial Sequence: Synthetic oligonucleotide
aaguacuagucaaccucua

SEQ ID NO: 2407683 - RNA, 19 nt, Artificial Sequence
  Description of Artificial Sequence: Synthetic oligonucleotide
cuauaccaccucacugaca

SEQ ID NO: 2407684 - RNA, 19 nt, Artificial Sequence
  Description of Artificial Sequence: Synthetic oligonucleotide
ccauggauacccagaucag

SEQ ID NO: 2407685 - RNA, 19 nt, Artificial Sequence
  Description of Artificial Sequence: Synthetic oligonucleotide
ccuuagcugugucauucag

SEQ ID NO: 2407686 - RNA, 19 nt, Artificial Sequence
  Description of Artificial Sequence: Synthetic oligonucleotide
gaggugggaggaacuuggc

SEQ ID NO: 2407687 - RNA, 19 nt, Artificial Sequence
  Description of Artificial Sequence: Synthetic oligonucleotide
aaggagcgagcggucuugu

SEQ ID NO: 2407688 - RNA, 19 nt, Artificial Sequence
  Description of Artificial Sequence: Synthetic oligonucleotide
gauaggcagguggccacca

SEQ ID NO: 2407689 - RNA, 19 nt, Artificial Sequence
  Description of Artificial Sequence: Synthetic oligonucleotide
cugcgauauuggguggaag

SEQ ID NO: 2407690 - RNA, 19 nt, Artificial Sequence
  Description of Artificial Sequence: Synthetic oligonucleotide
gugugccuuagcuguguca

SEQ ID NO: 2407691 - RNA, 19 nt, Artificial Sequence
  Description of Artificial Sequence: Synthetic oligonucleotide
aggacugcccugagaaaga

SEQ ID NO: 2407692 - RNA, 19 nt, Artificial Sequence
  Description of Artificial Sequence: Synthetic oligonucleotide
aagggcccaaggggaaaga

SEQ ID NO: 2407693 - RNA, 19 nt, Artificial Sequence
  Description of Artificial Sequence: Synthetic oligonucleotide
cauccauggauacccagau

SEQ ID NO: 2407694 - RNA, 19 nt, Artificial Sequence
  Description of Artificial Sequence: Synthetic oligonucleotide
agugugugugugugccuua
